United States Patent Application Publication US 2006/0003322 A1 - sequence listing, part 22

SEQ ID NO: 924349 - RNA, 18 nt, Human
guuuugagacagggucug

SEQ ID NO: 924350 - RNA, 22 nt, Human
uagagacaggauuucaccaugu

SEQ ID NO: 924351 - RNA, 22 nt, Human
ucacagcaaccuccgucuccug

SEQ ID NO: 924352 - RNA, 23 nt, Human
ucacagcaaccuccgucuccugu

SEQ ID NO: 924353 - RNA, 24 nt, Human
ucccaaagugcugggauuacaggc

SEQ ID NO: 924354 - RNA, 18 nt, Human
uccgacaccaccuccaag

SEQ ID NO: 924355 - RNA, 19 nt, Human
uccgacaccaccuccaaga

SEQ ID NO: 924356 - RNA, 24 nt, Human
uccugaguggcuggaaccacaggc

SEQ ID NO: 924357 - RNA, 26 nt, Human
ucuccgacaccaccuccaagagcgcc

SEQ ID NO: 924358 - RNA, 23 nt, Human
ucucgaacuccuggacuugagug

SEQ ID NO: 924359 - RNA, 19 nt, Human
ucugguucugucacccagg

SEQ ID NO: 924360 - RNA, 24 nt, Human
ucugguucugucacccagguugaa

SEQ ID NO: 924361 - RNA, 18 nt, Human
ucugucacccagguugaa

SEQ ID NO: 924362 - RNA, 24 nt, Human
ucugucacccagguugaaaagcag

SEQ ID NO: 924363 - RNA, 22 nt, Human
ugagacagggucugguucuguc

SEQ ID NO: 924364 - RNA, 24 nt, Human
ugagggcugagccaggcuuaagag

SEQ ID NO: 924365 - RNA, 24 nt, Human
ugagugauccacccaccucugccu

SEQ ID NO: 924366 - RNA, 24 nt, Human
ugauccacccaccucugccuccca

SEQ ID NO: 924367 - RNA, 23 nt, Human
ugccaccacccccagcugauuuu

SEQ ID NO: 924368 - RNA, 24 nt, Human
ugcccaggcuggucucgaacuccu

SEQ ID NO: 924369 - RNA, 24 nt, Human
ugcugggauuacaggcgugaguca

SEQ ID NO: 924370 - RNA, 21 nt, Human
uggaaccacaggcaugugcca

SEQ ID NO: 924371 - RNA, 24 nt, Human
uggaaccacaggcaugugccacca

SEQ ID NO: 924372 - RNA, 22 nt, Human
uggacuugagugauccacccac

SEQ ID NO: 924373 - RNA, 18 nt, Human
ugggauuacaggcgugag

SEQ ID NO: 924374 - RNA, 21 nt, Human
ugggauuacaggcgugaguca

SEQ ID NO: 924375 - RNA, 21 nt, Human
ugggauuacaggcgugaguca

SEQ ID NO: 924376 - RNA, 21 nt, Human
ugggauuacaggcgugaguca

SEQ ID NO: 924377 - RNA, 22 nt, Human
ugggauuacaggcgugagucau

SEQ ID NO: 924378 - RNA, 24 nt, Human
ugggauuacaggcgugagucauug

SEQ ID NO: 924379 - RNA, 26 nt, Human
ugggauuacaggcgugagucauugac

SEQ ID NO: 924380 - RNA, 21 nt, Human
ugguagagacaggauuucacc

SEQ ID NO: 924381 - RNA, 24 nt, Human
ugguagagacaggauuucaccaug

SEQ ID NO: 924382 - RNA, 25 nt, Human
uugagacagggucugguucugucac

SEQ ID NO: 924383 - RNA, 24 nt, Human
uugguagagacaggauuucaccau

SEQ ID NO: 924384 - RNA, 23 nt, Human
uuucaccauguugcccaggcugg

SEQ ID NO: 924385 - RNA, 24 nt, Human
uuucaccauguugcccaggcuggu

SEQ ID NO: 924386 - RNA, 22 nt, Human
uuuuuguauuuuuuugguagag

SEQ ID NO: 924387 - RNA, 20 nt, Human
uuuuuuugguagagacaggg

SEQ ID NO: 924388 - RNA, 20 nt, Human
aaaaaauccagaagugagga

SEQ ID NO: 924389 - RNA, 19 nt, Human
aaaaauccagaagugagga

SEQ ID NO: 924390 - RNA, 19 nt, Human
aaaagaaaaaagaaaauga

SEQ ID NO: 924391 - RNA, 20 nt, Human
aaacaaaucccaaacauccc

SEQ ID NO: 924392 - RNA, 21 nt, Human
aaacaaaucccaaacaucccu

SEQ ID NO: 924393 - RNA, 19 nt, Human
aaacagaaggaaaauauga

SEQ ID NO: 924394 - RNA, 21 nt, Human
aaacagaaggaaaauaugacu

SEQ ID NO: 924395 - RNA, 20 nt, Human
aaccugcgguggcacuccuu

SEQ ID NO: 924396 - RNA, 20 nt, Human
aagucaaccuuacauugcaa

SEQ ID NO: 924397 - RNA, 24 nt, Human
aauccugcuucucucucagcuuca

SEQ ID NO: 924398 - RNA, 23 nt, Human
acacgggucacagcaccuuuuau

SEQ ID NO: 924399 - RNA, 20 nt, Human
acccggaggagccccugggg

SEQ ID NO: 924400 - RNA, 23 nt, Human
accgagcucuaaaagaaaaaaga

SEQ ID NO: 924401 - RNA, 22 nt, Human
accgugaugaccucgaagguug

SEQ ID NO: 924402 - RNA, 23 nt, Human
acgccgccucuaguggggaagcc

SEQ ID NO: 924403 - RNA, 22 nt, Human
acgccggacccuccagcgcagu

SEQ ID NO: 924404 - RNA, 23 nt, Human
acucacaccaguggauggcacuc

SEQ ID NO: 924405 - RNA, 19 nt, Human
acuccucacacacagccgc

SEQ ID NO: 924406 - RNA, 18 nt, Human
aggucugccuuccacgcc

SEQ ID NO: 924407 - RNA, 21 nt, Human
aggugcggcucagcacgccuc

SEQ ID NO: 924408 - RNA, 20 nt, Human
aucauacaaccugaugugac

SEQ ID NO: 924409 - RNA, 19 nt, Human
caaaacgaauucuccacug

SEQ ID NO: 924410 - RNA, 22 nt, Human
caaaacgaauucuccacugaga

SEQ ID NO: 924411 - RNA, 24 nt, Human
caauggcuggaucuaaugucuucc

SEQ ID NO: 924412 - RNA, 20 nt, Human
cacacagccgcgcgacccuc

SEQ ID NO: 924413 - RNA, 22 nt, Human
cacggagccacggguccaaaac

SEQ ID NO: 924414 - RNA, 22 nt, Human
cagcugcacggagccacggguc

SEQ ID NO: 924415 - RNA, 26 nt, Human
cauaaaacuaaaacacaauauuggcc

SEQ ID NO: 924416 - RNA, 22 nt, Human
caucccucugcaguucuugccc

SEQ ID NO: 924417 - RNA, 21 nt, Human
cauguuaacauaaaacuaaaa

SEQ ID NO: 924418 - RNA, 24 nt, Human
ccagaauggauacauuuucuacug

SEQ ID NO: 924419 - RNA, 21 nt, Human
ccagcgcagucccaugccgga

SEQ ID NO: 924420 - RNA, 22 nt, Human
ccaugccggacacagcgaggcg

SEQ ID NO: 924421 - RNA, 21 nt, Human
cccaaacaucccucugcaguu

SEQ ID NO: 924422 - RNA, 21 nt, Human
cccaugccggacacagcgagg

SEQ ID NO: 924423 - RNA, 23 nt, Human
ccccggcccaggacuuacugccu

SEQ ID NO: 924424 - RNA, 24 nt, Human
cccugggggcagcagggaggcuca

SEQ ID NO: 924425 - RNA, 18 nt, Human
ccucaugguuucagccca

SEQ ID NO: 924426 - RNA, 22 nt, Human
ccuccccgcaagacucacacca

SEQ ID NO: 924427 - RNA, 22 nt, Human
ccugccagaggucccuucuaga

SEQ ID NO: 924428 - RNA, 23 nt, Human
cgagcucuaaaagaaaaaagaaa

SEQ ID NO: 924429 - RNA, 20 nt, Human
cgaguccacagcugcacgga

SEQ ID NO: 924430 - RNA, 23 nt, Human
cgcgaaccugcgguggcacuccu

SEQ ID NO: 924431 - RNA, 18 nt, Human
cuaaacaaaucccaaaca

SEQ ID NO: 924432 - RNA, 24 nt, Human
cuccuugcacucguacuccuugau

SEQ ID NO: 924433 - RNA, 20 nt, Human
cugccaccugugaauacugu

SEQ ID NO: 924434 - RNA, 23 nt, Human
cugccaccugugaauacugucug

SEQ ID NO: 924435 - RNA, 19 nt, Human
cugcugccugcugccaccu

SEQ ID NO: 924436 - RNA, 21 nt, Human
cugcuucucucucagcuucac

SEQ ID NO: 924437 - RNA, 20 nt, Human
cuuggcacagaacguuuucc

SEQ ID NO: 924438 - RNA, 23 nt, Human
cuuuaugaauacaucugugcacc

SEQ ID NO: 924439 - RNA, 24 nt, Human
gcagaugcggccccggcccaggac

SEQ ID NO: 924440 - RNA, 21 nt, Human
ggaauugaaguuuaaacagaa

SEQ ID NO: 924441 - RNA, 20 nt, Human
ggggaagccaugagccuucc

SEQ ID NO: 924442 - RNA, 22 nt, Human
guacaggaggucugccuuccac

SEQ ID NO: 924443 - RNA, 24 nt, Human
guggauggcacucgaguccacagc

SEQ ID NO: 924444 - RNA, 22 nt, Human
uaaaaaaaaaaaaggaaaaaaa

SEQ ID NO: 924445 - RNA, 19 nt, Human
uaaaacucuggccugccag

SEQ ID NO: 924446 - RNA, 21 nt, Human
uaacauaaaacuaaaacacaa

SEQ ID NO: 924447 - RNA, 22 nt, Human
uaaggggaggcagaugcggccc

SEQ ID NO: 924448 - RNA, 21 nt, Human
uaagucaaccuuacauugcaa

SEQ ID NO: 924449 - RNA, 20 nt, Human
uccacagagccugguggcca

SEQ ID NO: 924450 - RNA, 26 nt, Human
uccagcaaacacaucuaaacaaaucc

SEQ ID NO: 924451 - RNA, 18 nt, Human
ucccugcugccugcugcc

SEQ ID NO: 924452 - RNA, 22 nt, Human
ucugcgcgaaccugcgguggca

SEQ ID NO: 924453 - RNA, 19 nt, Human
ugaccucgaagguugcagg

SEQ ID NO: 924454 - RNA, 24 nt, Human
ugcacggagccacggguccaaaac

SEQ ID NO: 924455 - RNA, 25 nt, Human
ugccccgagucucccggaacgcagc

SEQ ID NO: 924456 - RNA, 18 nt, Human
uggaaaucgauucaugga

SEQ ID NO: 924457 - RNA, 21 nt, Human
uggagauacucugcaaagcua

SEQ ID NO: 924458 - RNA, 22 nt, Human
uggagccccauccaguuuaaaa

SEQ ID NO: 924459 - RNA, 26 nt, Human
uggagccccauccaguuuaaaacucu

SEQ ID NO: 924460 - RNA, 18 nt, Human
uggaugccacaaauggga

SEQ ID NO: 924461 - RNA, 21 nt, Human
uggccauaacagucuugaaca

SEQ ID NO: 924462 - RNA, 19 nt, Human
ugggggcagcagggaggcu

SEQ ID NO: 924463 - RNA, 22 nt, Human
uuggcacagaacguuuuccugu

SEQ ID NO: 924464 - RNA, 27 nt, Human
uuucccgaacccugugucgggcgaaca

SEQ ID NO: 924465 - RNA, 19 nt, Human
uuuggaugccacaaauggg

SEQ ID NO: 924466 - RNA, 19 nt, Human
aagaaagagagccaugacu

SEQ ID NO: 924467 - RNA, 23 nt, Human
agagggauggccaagaaagagag

SEQ ID NO: 924468 - RNA, 19 nt, Human
aguauauuauaaacuucau

SEQ ID NO: 924469 - RNA, 18 nt, Human
cacuuuuggcuacuucug

SEQ ID NO: 924470 - RNA, 24 nt, Human
caguaagucacuuuuggcuacuuc

SEQ ID NO: 924471 - RNA, 23 nt, Human
gagagccaugacuccuuucucca

SEQ ID NO: 924472 - RNA, 18 nt, Human
gcacaucgaaauuugggg

SEQ ID NO: 924473 - RNA, 24 nt, Human
gccaagaaagagagccaugacucc

SEQ ID NO: 924474 - RNA, 22 nt, Human
gccaugacuccuuucuccauuu

SEQ ID NO: 924475 - RNA, 22 nt, Human
uaggagcccuucugaauaguuu

SEQ ID NO: 924476 - RNA, 21 nt, Human
uauaaacuucauuacagaggg

SEQ ID NO: 924477 - RNA, 26 nt, Human
ugacuccuuucuccauuuuuauaaga

SEQ ID NO: 924478 - RNA, 24 nt, Human
ugcaucuacagacucuaaauguag

SEQ ID NO: 924479 - RNA, 25 nt, Human
ugcaucuacagacucuaaauguagg

SEQ ID NO: 924480 - RNA, 22 nt, Human
uuaggagcccuucugaauaguu

SEQ ID NO: 924481 - RNA, 22 nt, Human
uugcaaggcuauggaguuguau

SEQ ID NO: 924482 - RNA, 23 nt, Human
uuuuuuccauuuauaccauuucu

SEQ ID NO: 924483 - RNA, 27 nt, Human
uuuuuugguugcauaugcaucuacaga

SEQ ID NO: 924484 - RNA, 19 nt, Human
uuuuuuuuuuuaaaaaggc

SEQ ID NO: 924485 - RNA, 20 nt, Human
aaaacacaaaaaauggaggg

SEQ ID NO: 924486 - RNA, 21 nt, Human
aacaggaggcaaaacacaaaa

SEQ ID NO: 924487 - RNA, 18 nt, Human
aauacacccuugaaaccc

SEQ ID NO: 924488 - RNA, 20 nt, Human
acacucacacagauacguac

SEQ ID NO: 924489 - RNA, 20 nt, Human
acauuauuuagccccaaucc

SEQ ID NO: 924490 - RNA, 33 nt, Human
acccccacacucacacagauacguacacagaag

SEQ ID NO: 924491 - RNA, 23 nt, Human
acgugagagggucgugaucgauu

SEQ ID NO: 924492 - RNA, 19 nt, Human
agaaagagcguggcacuca

SEQ ID NO: 924493 - RNA, 22 nt, Human
agaaggaagcgguuuauucggc

SEQ ID NO: 924494 - RNA, 26 nt, Human
agcaagcaggggguaggugacagggg

SEQ ID NO: 924495 - RNA, 24 nt, Human
aggagacagggggagccaaggggg

SEQ ID NO: 924496 - RNA, 27 nt, Human
aggcaaaacacaaaaaaagccuuucgg

SEQ ID NO: 924497 - RNA, 24 nt, Human
aggcaaaacacaaaaaauggaggg

SEQ ID NO: 924498 - RNA, 23 nt, Human
agugagggaagcagggauuagga

SEQ ID NO: 924499 - RNA, 22 nt, Human
aguuuugcuucuuuuuccuuuu

SEQ ID NO: 924500 - RNA, 20 nt, Human
auuccugucccuuuuaaggg

SEQ ID NO: 924501 - RNA, 21 nt, Human
caaaacacaaaaaauggaggg

SEQ ID NO: 924502 - RNA, 20 nt, Human
caacucuaaggggguccacg

SEQ ID NO: 924503 - RNA, 21 nt, Human
cacaaucuggaagugagggaa

SEQ ID NO: 924504 - RNA, 23 nt, Human
cacacccaugcaugcaggcuuaa

SEQ ID NO: 924505 - RNA, 21 nt, Human
cacagagggcacauaccccca

SEQ ID NO: 924506 - RNA, 22 nt, Human
cacccuugaaacccccacacuc

SEQ ID NO: 924507 - RNA, 21 nt, Human
caggaggcaaaacacaaaaaa

SEQ ID NO: 924508 - RNA, 23 nt, Human
caguaugagagggucugucucuc

SEQ ID NO: 924509 - RNA, 18 nt, Human
cauauauacacacaugcg

SEQ ID NO: 924510 - RNA, 23 nt, Human
caugcaggcuuaacacacauagc

SEQ ID NO: 924511 - RNA, 19 nt, Human
ccaggcuaccugccuuuag

SEQ ID NO: 924512 - RNA, 19 nt, Human
cccaggagaccagggagcu

SEQ ID NO: 924513 - RNA, 22 nt, Human
ccccaauccuguacuuuaauuc

SEQ ID NO: 924514 - RNA, 23 nt, Human
ccccacacccaugcaugcaggcu

SEQ ID NO: 924515 - RNA, 25 nt, Human
cccccacacccaugcaugcaggcuu

SEQ ID NO: 924516 - RNA, 24 nt, Human
cccuucuggacucuuccuuccuuc

SEQ ID NO: 924517 - RNA, 18 nt, Human
ccuugguuucaggucugg

SEQ ID NO: 924518 - RNA, 19 nt, Human
cggcccaggccugguuucg

SEQ ID NO: 924519 - RNA, 19 nt, Human
cucaagagccgagcucccc

SEQ ID NO: 924520 - RNA, 22 nt, Human
cucaagagccgagcuccccgag

SEQ ID NO: 924521 - RNA, 23 nt, Human
cucacaacucuaaggggguccac

SEQ ID NO: 924522 - RNA, 18 nt, Human
cucagaguauucaauuuc

SEQ ID NO: 924523 - RNA, 22 nt, Human
cuccaauaauuaaaccagaugg

SEQ ID NO: 924524 - RNA, 21 nt, Human
cugaagccaccucagagcugg

SEQ ID NO: 924525 - RNA, 23 nt, Human
cuucccaggagaccagggagcuc

SEQ ID NO: 924526 - RNA, 18 nt, Human
gacucuguaaaacccuac

SEQ ID NO: 924527 - RNA, 24 nt, Human
gagagggucugucucucuucucuc

SEQ ID NO: 924528 - RNA, 21 nt, Human
gagccaagggggaguauggca

SEQ ID NO: 924529 - RNA, 22 nt, Human
gagcuccccgagugagcaauuc

SEQ ID NO: 924530 - RNA, 23 nt, Human
gagcuccccgagugagcaauucc

SEQ ID NO: 924531 - RNA, 19 nt, Human
gaguucucuguggcccuuc

SEQ ID NO: 924532 - RNA, 21 nt, Human
gauauaagagcuucagaaaga

SEQ ID NO: 924533 - RNA, 18 nt, Human
ggaaguuucacaaugucu

SEQ ID NO: 924534 - RNA, 21 nt, Human
gggcacauacccccacaccca

SEQ ID NO: 924535 - RNA, 21 nt, Human
ggggguaggugacaggggcug

SEQ ID NO: 924536 - RNA, 19 nt, Human
gguaggugacaggggcugc

SEQ ID NO: 924537 - RNA, 21 nt, Human
guggcccuucuggacucuucc

SEQ ID NO: 924538 - RNA, 22 nt, Human
guuuaauuaguuauuuccgauc

SEQ ID NO: 924539 - RNA, 23 nt, Human
guuucaggucugguuccuaggcg

SEQ ID NO: 924540 - RNA, 20 nt, Human
uaacacacauagcacacgug

SEQ ID NO: 924541 - RNA, 18 nt, Human
uaacuaccaggcuuaggu

SEQ ID NO: 924542 - RNA, 25 nt, Human
uaagggaagaaugagguacacacuu

SEQ ID NO: 924543 - RNA, 20 nt, Human
uaauucauucgaguaaggga

SEQ ID NO: 924544 - RNA, 18 nt, Human
uacacccuugaaaccccc

SEQ ID NO: 924545 - RNA, 24 nt, Human
uauauacacacaugcguguuccug

SEQ ID NO: 924546 - RNA, 20 nt, Human
uauggcagcagaggagaggg

SEQ ID NO: 924547 - RNA, 18 nt, Human
uaugucuuucugggguug

SEQ ID NO: 924548 - RNA, 23 nt, Human
ucacauuauuuagccccaauccu

SEQ ID NO: 924549 - RNA, 23 nt, Human
ucagaguggaacagaacagaaga

SEQ ID NO: 924550 - RNA, 21 nt, Human
uccccgagugagcaauuccug

SEQ ID NO: 924551 - RNA, 19 nt, Human
uccuaggcgccaggcuacc

SEQ ID NO: 924552 - RNA, 22 nt, Human
ucucuguggcccuucuggacuc

SEQ ID NO: 924553 - RNA, 22 nt, Human
ugagcaauuccugucccuuuua

SEQ ID NO: 924554 - RNA, 18 nt, Human
ugauaagggaagaaugag

SEQ ID NO: 924555 - RNA, 23 nt, Human
uggaacagaacagaccgggaagu

SEQ ID NO: 924556 - RNA, 20 nt, Human
uggaggggaucagugcggga

SEQ ID NO: 924557 - RNA, 21 nt, Human
uggcagcagaggagagggguc

SEQ ID NO: 924558 - RNA, 21 nt, Human
ugggaaucgauucuccaauaa

SEQ ID NO: 924559 - RNA, 21 nt, Human
uggucagaguggaacagaaca

SEQ ID NO: 924560 - RNA, 21 nt, Human
ugguuucgggucugguuccuu

SEQ ID NO: 924561 - RNA, 23 nt, Human
uguuuaauuaguuauuuccgauc

SEQ ID NO: 924562 - RNA, 18 nt, Human
uuccugucccuuuuaagg

SEQ ID NO: 924563 - RNA, 18 nt, Human
uucggccaggagcaucag

SEQ ID NO: 924564 - RNA, 19 nt, Human
uucucuguggcccuucugg

SEQ ID NO: 924565 - RNA, 22 nt, Human
uuucucuuccuggacuugggaa

SEQ ID NO: 924566 - RNA, 19 nt, Human
uuuuuuuuuuuuuuuuuaa

SEQ ID NO: 924567 - RNA, 19 nt, Human
aaagcuuuucacauccagc

SEQ ID NO: 924568 - RNA, 19 nt, Human
aaagggagaggggugcggu

SEQ ID NO: 924569 - RNA, 22 nt, Human
aaccagcgccaccgccggccuc

SEQ ID NO: 924570 - RNA, 18 nt, Human
aacggggcugcaacaccc

SEQ ID NO: 924571 - RNA, 22 nt, Human
aagagguguugguguugccgcc

SEQ ID NO: 924572 - RNA, 24 nt, Human
aagcuucccccaagaugggcuccg

SEQ ID NO: 924573 - RNA, 19 nt, Human
aggagcgccaacacuacca

SEQ ID NO: 924574 - RNA, 19 nt, Human
aggagcgccaacacuacca

SEQ ID NO: 924575 - RNA, 23 nt, Human
cacaccagauccuccuuggaggc

SEQ ID NO: 924576 - RNA, 20 nt, Human
cacauguaggaaacuguagu

SEQ ID NO: 924577 - RNA, 23 nt, Human
caccuccacgaaggcgcugcgcu

SEQ ID NO: 924578 - RNA, 22 nt, Human
cacuuuagcaaggcucuuugga

SEQ ID NO: 924579 - RNA, 26 nt, Human
cagcagcugaugcuaaugacuugagg

SEQ ID NO: 924580 - RNA, 20 nt, Human
cagcgggugguggaggaggg

SEQ ID NO: 924581 - RNA, 18 nt, Human
cccaggaggccaggggag

SEQ ID NO: 924582 - RNA, 25 nt, Human
ccccgugcguauuuccccggagucc

SEQ ID NO: 924583 - RNA, 22 nt, Human
ccccuccuccugcaggcuggcc

SEQ ID NO: 924584 - RNA, 19 nt, Human
ccgccgccgccgccagcgu

SEQ ID NO: 924585 - RNA, 18 nt, Human
ccgccggccuccgccgcc

SEQ ID NO: 924586 - RNA, 19 nt, Human
ccgccggccuccgccgccu

SEQ ID NO: 924587 - RNA, 21 nt, Human
ccggccuccgccgccuccucc

SEQ ID NO: 924588 - RNA, 25 nt, Human
ccuccugcaggcuggccgcgcgggc

SEQ ID NO: 924589 - RNA, 22 nt, Human
cgggagccucguuugugcgcua

SEQ ID NO: 924590 - RNA, 19 nt, Human
cuccuccugcaggcuggcc

SEQ ID NO: 924591 - RNA, 27 nt, Human
cugauuugcgcagcuagucgggcggcc

SEQ ID NO: 924592 - RNA, 21 nt, Human
cugcaaguugacuccuucaac

SEQ ID NO: 924593 - RNA, 24 nt, Human
cuggccgcgcgggcagccuucuuc

SEQ ID NO: 924594 - RNA, 26 nt, Human
cuuuccuuugccgccgcccguggcga

SEQ ID NO: 924595 - RNA, 22 nt, Human
gaauaggcaaggauuguaacau

SEQ ID NO: 924596 - RNA, 19 nt, Human
gaggcggccguucucuucc

SEQ ID NO: 924597 - RNA, 18 nt, Human
gagucugcuccacuucag

SEQ ID NO: 924598 - RNA, 22 nt, Human
gagucugcuccacuucaggacc

SEQ ID NO: 924599 - RNA, 19 nt, Human
gccgccgccccugacgauu

SEQ ID NO: 924600 - RNA, 25 nt, Human
gccgccgcccguggcgaugccgucg

SEQ ID NO: 924601 - RNA, 21 nt, Human
gccuggugacugcagucccag

SEQ ID NO: 924602 - RNA, 18 nt, Human
gcgcagcuaguugccugg

SEQ ID NO: 924603 - RNA, 21 nt, Human
gggaaucucgggcuucuuuuu

SEQ ID NO: 924604 - RNA, 22 nt, Human
gggauggaguugccgaggccgu

SEQ ID NO: 924605 - RNA, 20 nt, Human
gggcguggaggagccgccgc

SEQ ID NO: 924606 - RNA, 18 nt, Human
ggggauggaguugccgag

SEQ ID NO: 924607 - RNA, 25 nt, Human
gggugguggaggaggggauggaguu

SEQ ID NO: 924608 - RNA, 22 nt, Human
ggugguggaggaggggauggag

SEQ ID NO: 924609 - RNA, 25 nt, Human
guauagaaucucccaaauaaggcca

SEQ ID NO: 924610 - RNA, 24 nt, Human
gugguggaggaggggauggaguug

SEQ ID NO: 924611 - RNA, 22 nt, Human
uaaggccaccuggaaccgggaa

SEQ ID NO: 924612 - RNA, 23 nt, Human
uacaacgcggccccuaccaaacc

SEQ ID NO: 924613 - RNA, 23 nt, Human
uagaaucucccaaauaaggccac

SEQ ID NO: 924614 - RNA, 21 nt, Human
uagcaaggcucuuuggagucc

SEQ ID NO: 924615 - RNA, 22 nt, Human
uagcuccagggauucucuagcc

SEQ ID NO: 924616 - RNA, 21 nt, Human
uauagaaucucccaaauaagg

SEQ ID NO: 924617 - RNA, 26 nt, Human
uccaggccgaaguagcugcccgaggc

SEQ ID NO: 924618 - RNA, 24 nt, Human
ucccgcgccgucggcuguccccuc

SEQ ID NO: 924619 - RNA, 25 nt, Human
uccgggaauuuccucuuuccuuugg

SEQ ID NO: 924620 - RNA, 24 nt, Human
uccucaguuucccuucuguccuug

SEQ ID NO: 924621 - RNA, 23 nt, Human
ucgcuggggaaucucgggcuucu

SEQ ID NO: 924622 - RNA, 23 nt, Human
ucucuugaacuugcugagcgaaa

SEQ ID NO: 924623 - RNA, 21 nt, Human
ucuucaggagcgccaacacua

SEQ ID NO: 924624 - RNA, 19 nt, Human
ugacagagagcuggacacc

SEQ ID NO: 924625 - RNA, 22 nt, Human
ugacagagagcuggacacccag

SEQ ID NO: 924626 - RNA, 21 nt, Human
ugacugcagucccaggaggcc

SEQ ID NO: 924627 - RNA, 23 nt, Human
ugacugcagucccaggaggccag

SEQ ID NO: 924628 - RNA, 20 nt, Human
ugacuugaggucuuuaacag

SEQ ID NO: 924629 - RNA, 20 nt, Human
ugacuugccccuuuagugca

SEQ ID NO: 924630 - RNA, 20 nt, Human
ugaguugcgggucucuccuc

SEQ ID NO: 924631 - RNA, 23 nt, Human
ugauaaacgggcgucgucucucu

SEQ ID NO: 924632 - RNA, 24 nt, Human
ugcaaucgaguguuuccuuuugcc

SEQ ID NO: 924633 - RNA, 18 nt, Human
ugcacaccagauccuccu

SEQ ID NO: 924634 - RNA, 22 nt, Human
ugcaggcuggccgcgcgggcag

SEQ ID NO: 924635 - RNA, 21 nt, Human
ugcagucccaggaggccaggg

SEQ ID NO: 924636 - RNA, 21 nt, Human
ugccgaggccgucucgggagc

SEQ ID NO: 924637 - RNA, 21 nt, Human
ugcggugugcacaccagaucc

SEQ ID NO: 924638 - RNA, 21 nt, Human
uggaagagugggcuggagaga

SEQ ID NO: 924639 - RNA, 24 nt, Human
uggaagagugggcuggagagaggu

SEQ ID NO: 924640 - RNA, 23 nt, Human
uggagaagcugugacagagagcu

SEQ ID NO: 924641 - RNA, 21 nt, Human
uggagagggccuuuccccguu

SEQ ID NO: 924642 - RNA, 19 nt, Human
uggaggccgggaggggccg

SEQ ID NO: 924643 - RNA, 21 nt, Human
uggaggccgggaggggccguu

SEQ ID NO: 924644 - RNA, 22 nt, Human
ugggcuccggaaagcuuuucac

SEQ ID NO: 924645 - RNA, 22 nt, Human
ugugacagagagcuggacaccc

SEQ ID NO: 924646 - RNA, 20 nt, Human
uuagugcagcagcugaugcu

SEQ ID NO: 924647 - RNA, 21 nt, Human
uuaguuugauccucucccagc

SEQ ID NO: 924648 - RNA, 21 nt, Human
uucaccuccacgaaggcgcug

SEQ ID NO: 924649 - RNA, 24 nt, Human
uucgcuaaugaguugcgggucucu

SEQ ID NO: 924650 - RNA, 19 nt, Human
uugaggucuuuaacagccu

SEQ ID NO: 924651 - RNA, 25 nt, Human
uuggaagagugggcuggagagaggu

SEQ ID NO: 924652 - RNA, 18 nt, Human
aacacacccuugaaaccc

SEQ ID NO: 924653 - RNA, 21 nt, Human
aacacacccuugaaacccccc

SEQ ID NO: 924654 - RNA, 23 nt, Human
aacaggaggcaaaaaaacaaaca

SEQ ID NO: 924655 - RNA, 26 nt, Human
aacaggaggcaaaaaaacaaacaaaa

SEQ ID NO: 924656 - RNA, 23 nt, Human
agggcacauacccccacacccga

SEQ ID NO: 924657 - RNA, 23 nt, Human
cacauacccccacacccgaacac

SEQ ID NO: 924658 - RNA, 23 nt, Human
cacccuugaaaccccccacacuc

SEQ ID NO: 924659 - RNA, 21 nt, Human
cacggagggcacauaccccca

SEQ ID NO: 924660 - RNA, 27 nt, Human
cagggaacucccuuuccugcugcgacu

SEQ ID NO: 924661 - RNA, 19 nt, Human
cccacacccgaacacauau

SEQ ID NO: 924662 - RNA, 31 nt, Human
cccccacacucacacaguuaccuacacggaa

SEQ ID NO: 924663 - RNA, 23 nt, Human
ccccccacacucacacaguuacc

SEQ ID NO: 924664 - RNA, 25 nt, Human
cuaacacacccuugaaaccccccac

SEQ ID NO: 924665 - RNA, 22 nt, Human
cuccaauaauuaaaccagacgg

SEQ ID NO: 924666 - RNA, 22 nt, Human
cuggggguugaauuccugugga

SEQ ID NO: 924667 - RNA, 23 nt, Human
cuucccaggagaccagggaacuc

SEQ ID NO: 924668 - RNA, 23 nt, Human
cuuccgcugaagccaccucacag

SEQ ID NO: 924669 - RNA, 20 nt, Human
cuugccuucagugauaaggg

SEQ ID NO: 924670 - RNA, 22 nt, Human
gaaaccccccacacucacacag

SEQ ID NO: 924671 - RNA, 23 nt, Human
gaagaagccacacuucccagggg

SEQ ID NO: 924672 - RNA, 21 nt, Human
gacuuccgcugaagccaccuc

SEQ ID NO: 924673 - RNA, 19 nt, Human
gaguucucuguggcccuuc

SEQ ID NO: 924674 - RNA, 22 nt, Human
ggagaagaagccacacuuccca

SEQ ID NO: 924675 - RNA, 20 nt, Human
ggagaggagacuggggagcc

SEQ ID NO: 924676 - RNA, 21 nt, Human
gggaaagaaccacacaugcug

SEQ ID NO: 924677 - RNA, 22 nt, Human
guuuaaucaguuauuuccgauc

SEQ ID NO: 924678 - RNA, 24 nt, Human
uaacacacccuugaaaccccccac

SEQ ID NO: 924679 - RNA, 25 nt, Human
uaagggaagaaugagguacacacuu

SEQ ID NO: 924680 - RNA, 24 nt, Human
uacacacacgcguguucuugucug

SEQ ID NO: 924681 - RNA, 24 nt, Human
uauauacacacacgcguguucuug

SEQ ID NO: 924682 - RNA, 23 nt, Human
uauggcagcagaggagagguguc

SEQ ID NO: 924683 - RNA, 19 nt, Human
uaugucuuucuggggguug

SEQ ID NO: 924684 - RNA, 22 nt, Human
ucccuuguucuuccucaucucu

SEQ ID NO: 924685 - RNA, 18 nt, Human
uccuaacacacccuugaa

SEQ ID NO: 924686 - RNA, 22 nt, Human
uccuuaggauuuugagcguugu

SEQ ID NO: 924687 - RNA, 22 nt, Human
ucucuguggcccuucuggacuc

SEQ ID NO: 924688 - RNA, 24 nt, Human
ucuguggcccuucuggacucuucu

SEQ ID NO: 924689 - RNA, 21 nt, Human
ugagcguuguuccuaacacac

SEQ ID NO: 924690 - RNA, 18 nt, Human
ugauaagggaagaaugag

SEQ ID NO: 924691 - RNA, 20 nt, Human
uggaggggaucagugcggga

SEQ ID NO: 924692 - RNA, 21 nt, Human
ugggaaucgauucuccaauaa

SEQ ID NO: 924693 - RNA, 23 nt, Human
ugggcuacagagauuggaggaga

SEQ ID NO: 924694 - RNA, 23 nt, Human
uguuuaaucaguuauuuccgauc

SEQ ID NO: 924695 - RNA, 22 nt, Human
uuacauuucucuuccuggacuu

SEQ ID NO: 924696 - RNA, 22 nt, Human
uuccuguggagucuugagcuga

SEQ ID NO: 924697 - RNA, 19 nt, Human
uucucuguggcccuucugg

SEQ ID NO: 924698 - RNA, 21 nt, Human
uuggaggagaucaggagagga

SEQ ID NO: 924699 - RNA, 21 nt, Human
uuggaggagaucaggagagga

SEQ ID NO: 924700 - RNA, 22 nt, Human
uuucucuuccuggacuugggaa

SEQ ID NO: 924701 - RNA, 19 nt, Human
uuucuggggguugaauucc

SEQ ID NO: 924702 - RNA, 24 nt, Human
uuuguuuaaucaguuauuuccgau

SEQ ID NO: 924703 - RNA, 20 nt, Human
uuuugagcguuguuccuaac

SEQ ID NO: 924704 - RNA, 20 nt, Human
aagucgcagaaacuaaccac

SEQ ID NO: 924705 - RNA, 19 nt, Human
aaguuuaauacaaacuaca

SEQ ID NO: 924706 - RNA, 22 nt, Human
accgcagccuggcacuaaaaca

SEQ ID NO: 924707 - RNA, 19 nt, Human
aggaaaggccugccuugua

SEQ ID NO: 924708 - RNA, 20 nt, Human
aggcuggucucuccaccccc

SEQ ID NO: 924709 - RNA, 25 nt, Human
caaaccaguagccugcccacaacgc

SEQ ID NO: 924710 - RNA, 24 nt, Human
caagucgcagaaacuaaccaccga

SEQ ID NO: 924711 - RNA, 21 nt, Human
ccaccgcagccuggcacuaaa

SEQ ID NO: 924712 - RNA, 21 nt, Human
cccccuguaggaaaggccugc

SEQ ID NO: 924713 - RNA, 21 nt, Human
ccccuguaggaaaggccugcc

SEQ ID NO: 924714 - RNA, 20 nt, Human
gaaaaaaaaaauacagaaga

SEQ ID NO: 924715 - RNA, 18 nt, Human
gaagaaaggcuggucucu

SEQ ID NO: 924716 - RNA, 18 nt, Human
uaaccaccgacaccaggc

SEQ ID NO: 924717 - RNA, 18 nt, Human
uaagacaccacaauucgg

SEQ ID NO: 924718 - RNA, 23 nt, Human
ucucauggcugcccaccgcagcc

SEQ ID NO: 924719 - RNA, 18 nt, Human
ucuuguguuuuacuaaug

SEQ ID NO: 924720 - RNA, 23 nt, Human
uggaaaaaaaaaauacagaagag

SEQ ID NO: 924721 - RNA, 19 nt, Human
uucaaguuuaauacaaacu

SEQ ID NO: 924722 - RNA, 24 nt, Human
uuccuaucagcagucccaacacaa

SEQ ID NO: 924723 - RNA, 21 nt, Human
uugcucuacuaauacaucaua

SEQ ID NO: 924724 - RNA, 21 nt, Human
agcccugggccgcgaagccuu

SEQ ID NO: 924725 - RNA, 21 nt, Human
aggccugugugcggcugggug

SEQ ID NO: 924726 - RNA, 20 nt, Human
cagcacaggcaccuaggcag

SEQ ID NO: 924727 - RNA, 19 nt, Human
cagcauagggcacccaggu

SEQ ID NO: 924728 - RNA, 23 nt, Human
cgcacggacgaucacacgcgugg

SEQ ID NO: 924729 - RNA, 22 nt, Human
cuccagggucccauacugugga

SEQ ID NO: 924730 - RNA, 18 nt, Human
gcccugggccgcgaagcc

SEQ ID NO: 924731 - RNA, 21 nt, Human
gggcacagguggacacccagc

SEQ ID NO: 924732 - RNA, 23 nt, Human
uagcccuccagggucccauacug

SEQ ID NO: 924733 - RNA, 23 nt, Human
uauucagcuucuagguggaggca

SEQ ID NO: 924734 - RNA, 22 nt, Human
uggacccgcguucucagcgcca

SEQ ID NO: 924735 - RNA, 22 nt, Human
uggaguuuggaggggcaggucu

SEQ ID NO: 924736 - RNA, 24 nt, Human
uggaguuuggaggggcaggucugg

SEQ ID NO: 924737 - RNA, 21 nt, Human
uucuagguggaggcaugagaa

SEQ ID NO: 924738 - RNA, 24 nt, Human
agcgcagaaacacgucccuuggcg

SEQ ID NO: 924739 - RNA, 22 nt, Human
cgagcgcagaaacacgucccuu

SEQ ID NO: 924740 - RNA, 21 nt, Human
aaaacacuuuuaucucaauug

SEQ ID NO: 924741 - RNA, 23 nt, Human
aaacaaagauaagcaagagccua

SEQ ID NO: 924742 - RNA, 26 nt, Human
aacccagcauacaaaaaccuauacua

SEQ ID NO: 924743 - RNA, 19 nt, Human
aagagucaaacuauuuuaa

SEQ ID NO: 924744 - RNA, 25 nt, Human
aagcaacagaaauccauugugagac

SEQ ID NO: 924745 - RNA, 20 nt, Human
aaguagaacaauuuugcaaa

SEQ ID NO: 924746 - RNA, 21 nt, Human
acaaaaaccuauacuaaacaa

SEQ ID NO: 924747 - RNA, 22 nt, Human
acaaugaauuauaacaaagucc

SEQ ID NO: 924748 - RNA, 19 nt, Human
acccagcauacaaaaaccu

SEQ ID NO: 924749 - RNA, 18 nt, Human
acuuuauguagcacagua

SEQ ID NO: 924750 - RNA, 19 nt, Human
agaaaacauuucuaccucu

SEQ ID NO: 924751 - RNA, 24 nt, Human
agaacgguaaauccuuuccaagua

SEQ ID NO: 924752 - RNA, 23 nt, Human
agauggguuugucugaugaggau

SEQ ID NO: 924753 - RNA, 25 nt, Human
agggaaaugagaagggguggacagg

SEQ ID NO: 924754 - RNA, 23 nt, Human
agggaaggugaaaugaguaagaa

SEQ ID NO: 924755 - RNA, 21 nt, Human
auugcaaauaaucucacacgu

SEQ ID NO: 924756 - RNA, 23 nt, Human
caaagccaaaaagacuggcaagc

SEQ ID NO: 924757 - RNA, 28 nt, Human
cacuauacauacacacacucucaguaua

SEQ ID NO: 924758 - RNA, 25 nt, Human
caguauacuacuguuccccuuauua

SEQ ID NO: 924759 - RNA, 21 nt, Human
cauaaacuucgugggagaggg

SEQ ID NO: 924760 - RNA, 30 nt, Human
cauacaaaaaccuauacuaaacaaagaagg

SEQ ID NO: 924761 - RNA, 24 nt, Human
cauacacacacucucaguauacua

SEQ ID NO: 924762 - RNA, 31 nt, Human
cauacacuauacauacacacacucucaguag

SEQ ID NO: 924763 - RNA, 21 nt, Human
ccaaaaagacuggcaagcuug

SEQ ID NO: 924764 - RNA, 22 nt, Human
ccagcauacaaaaaccuauacu

SEQ ID NO: 924765 - RNA, 21 nt, Human
cuugugugaaaccucaagcuc

SEQ ID NO: 924766 - RNA, 20 nt, Human
gcuugugugaaaccucaagc

SEQ ID NO: 924767 - RNA, 21 nt, Human
gggaacaguaaugacuguagc

SEQ ID NO: 924768 - RNA, 19 nt, Human
guauuuagauauacacaua

SEQ ID NO: 924769 - RNA, 24 nt, Human
guccaaaaaaauguaugacuauuc

SEQ ID NO: 924770 - RNA, 18 nt, Human
uaaaaaaguuccucaugu

SEQ ID NO: 924771 - RNA, 27 nt, Human
uaaaaggcaaacccagcauacaaaaac

SEQ ID NO: 924772 - RNA, 24 nt, Human
uaagacaaaacuacguacuacaga

SEQ ID NO: 924773 - RNA, 23 nt, Human
uaagcaagagccuaugcaaauac

SEQ ID NO: 924774 - RNA, 18 nt, Human
uaagccaccacuaacuca

SEQ ID NO: 924775 - RNA, 18 nt, Human
uaagguuaagggaaauga

SEQ ID NO: 924776 - RNA, 19 nt, Human
uaagguuaagggaaaugag

SEQ ID NO: 924777 - RNA, 22 nt, Human
uauacacauaauuauauaugca

SEQ ID NO: 924778 - RNA, 24 nt, Human
uauauaugcauaucaaaaacuaua

SEQ ID NO: 924779 - RNA, 23 nt, Human
uaugaucaguacauuuuuccuau

SEQ ID NO: 924780 - RNA, 19 nt, Human
ucaagcaacagaaauccau

SEQ ID NO: 924781 - RNA, 21 nt, Human
ucaccaaaucucagucacuac

SEQ ID NO: 924782 - RNA, 22 nt, Human
ucagccagaucaccaaaucuca

SEQ ID NO: 924783 - RNA, 19 nt, Human
ucuagagagaacagcuaca

SEQ ID NO: 924784 - RNA, 19 nt, Human
ugaaaagaugguauaaauu

SEQ ID NO: 924785 - RNA, 25 nt, Human
ugaaaugaguaagaaaaaaaaauca

SEQ ID NO: 924786 - RNA, 19 nt, Human
ugacuauucaucaacaccc

SEQ ID NO: 924787 - RNA, 21 nt, Human
ugagaagggguggacagggca

SEQ ID NO: 924788 - RNA, 28 nt, Human
ugagaagggguggacagggcagguuucc

SEQ ID NO: 924789 - RNA, 18 nt, Human
ugagugccacacugguga

SEQ ID NO: 924790 - RNA, 19 nt, Human
ugcaaaacaaagauaagca

SEQ ID NO: 924791 - RNA, 19 nt, Human
ugcaaaacaaagauaagca

SEQ ID NO: 924792 - RNA, 22 nt, Human
ugcaaauaaucucacacgugca

SEQ ID NO: 924793 - RNA, 20 nt, Human
uggauacaugauugaugugg

SEQ ID NO: 924794 - RNA, 28 nt, Human
uguaaaauaaauacuaugguauuucuuc

SEQ ID NO: 924795 - RNA, 21 nt, Human
uuaguaaauggcuugugugaa

SEQ ID NO: 924796 - RNA, 19 nt, Human
uuucuaaguagaacaauuu

SEQ ID NO: 924797 - RNA, 23 nt, Human
aaagugcuggauuaugggcguga

SEQ ID NO: 924798 - RNA, 20 nt, Human
aagacagggucucgcucugu

SEQ ID NO: 924799 - RNA, 18 nt, Human
aagccccucuuggccacc

SEQ ID NO: 924800 - RNA, 18 nt, Human
aagccccucuuggccacc

SEQ ID NO: 924801 - RNA, 19 nt, Human
aaguagcugggauuacagg

SEQ ID NO: 924802 - RNA, 25 nt, Human
aaguagcugggauuacaggcgcccg

SEQ ID NO: 924803 - RNA, 24 nt, Human
aauuuuguauuuuuaguggagacg

SEQ ID NO: 924804 - RNA, 24 nt, Human
accauguuggccaggauggucucg

SEQ ID NO: 924805 - RNA, 19 nt, Human
acccaggcuggagugcagu

SEQ ID NO: 924806 - RNA, 22 nt, Human
accugaacuccacagacaccau

SEQ ID NO: 924807 - RNA, 18 nt, Human
acgggguuucaccauguu

SEQ ID NO: 924808 - RNA, 23 nt, Human
acgggguuucaccauguuggcca

SEQ ID NO: 924809 - RNA, 24 nt, Human
acgggguuucaccauguuggccag

SEQ ID NO: 924810 - RNA, 18 nt, Human
agacaccauccagaguga

SEQ ID NO: 924811 - RNA, 24 nt, Human
agcgauucuccugccucagccucc

SEQ ID NO: 924812 - RNA, 22 nt, Human
agcucacugcagccugcgccuc

SEQ ID NO: 924813 - RNA, 21 nt, Human
agcuugggcugaggucucugu

SEQ ID NO: 924814 - RNA, 19 nt, Human
aggacuggaggcggcagca

SEQ ID NO: 924815 - RNA, 24 nt, Human
aggaggcaggcuggcccaggcagg

SEQ ID NO: 924816 - RNA, 20 nt, Human
aggcaggcuggcccaggcag

SEQ ID NO: 924817 - RNA, 20 nt, Human
aggcgcccgccaccacgccc

SEQ ID NO: 924818 - RNA, 24 nt, Human
aggugaucugcccgccucggcuuc

SEQ ID NO: 924819 - RNA, 22 nt, Human
aguggagacgggguuucaccau

SEQ ID NO: 924820 - RNA, 26 nt, Human
augcugguuuuguuuuguuuuuuuuu

SEQ ID NO: 924821 - RNA, 23 nt, Human
caaagugcuggauuaugggcgug

SEQ ID NO: 924822 - RNA, 22 nt, Human
caagcgauucuccugccucagc

SEQ ID NO: 924823 - RNA, 27 nt, Human
caagcgauucuccugccucagccuccc

SEQ ID NO: 924824 - RNA, 20 nt, Human
cacaggguuuccuuccuggu

SEQ ID NO: 924825 - RNA, 23 nt, Human
cacaggguuuccuuccugguucu

SEQ ID NO: 924826 - RNA, 18 nt, Human
caccauguuggccaggau

SEQ ID NO: 924827 - RNA, 22 nt, Human
caccauguuggccaggaugguc

SEQ ID NO: 924828 - RNA, 24 nt, Human
caccauguuggccaggauggucuc

SEQ ID NO: 924829 - RNA, 20 nt, Human
caccccccaacccccgagcc

SEQ ID NO: 924830 - RNA, 20 nt, Human
caccccccaacccccgagcc

SEQ ID NO: 924831 - RNA, 24 nt, Human
caccccccaacccccgagcccacu

SEQ ID NO: 924832 - RNA, 21 nt, Human
caccuacugugugcccagccg

SEQ ID NO: 924833 - RNA, 21 nt, Human
cacugcgcagcccacaggaag

SEQ ID NO: 924834 - RNA, 19 nt, Human
cagcagccccugaaggaca

SEQ ID NO: 924835 - RNA, 19 nt, Human
cagcagggacagagccgca

SEQ ID NO: 924836 - RNA, 21 nt, Human
caggcgcccgccaccacgccc

SEQ ID NO: 924837 - RNA, 24 nt, Human
caggcggugauggugggagaaagg

SEQ ID NO: 924838 - RNA, 21 nt, Human
ccaaagugcuggauuaugggc

SEQ ID NO: 924839 - RNA, 23 nt, Human
ccaaagugcuggauuaugggcgu

SEQ ID NO: 924840 - RNA, 23 nt, Human
ccaacccccgagcccacugcgca

SEQ ID NO: 924841 - RNA, 22 nt, Human
ccaaguagcugggauuacaggc

SEQ ID NO: 924842 - RNA, 20 nt, Human
ccacaggaagagugcaggcu

SEQ ID NO: 924843 - RNA, 20 nt, Human
ccacaggguuuccuuccugg

SEQ ID NO: 924844 - RNA, 21 nt, Human
ccacaggguuuccuuccuggu

SEQ ID NO: 924845 - RNA, 19 nt, Human
ccaccacgcccggcaggau

SEQ ID NO: 924846 - RNA, 19 nt, Human
ccaguccuggcaccuugca

SEQ ID NO: 924847 - RNA, 23 nt, Human
cccaacccccgagcccacugcgc

SEQ ID NO: 924848 - RNA, 23 nt, Human
cccaaguagcugggauuacaggc

SEQ ID NO: 924849 - RNA, 24 nt, Human
cccaaguagcugggauuacaggcg

SEQ ID NO: 924850 - RNA, 21 nt, Human
ccccagaugcccaggaggagc

SEQ ID NO: 924851 - RNA, 18 nt, Human
cccccaacccccgagccc

SEQ ID NO: 924852 - RNA, 20 nt, Human
cccccaacccccgagcccac

SEQ ID NO: 924853 - RNA, 19 nt, Human
ccccccaacccccgagccc

SEQ ID NO: 924854 - RNA, 19 nt, Human
cccccgagcccacugcgca

SEQ ID NO: 924855 - RNA, 22 nt, Human
cccccgagcccacugcgcagcc

SEQ ID NO: 924856 - RNA, 22 nt, Human
ccccgagcccacugcgcagccc

SEQ ID NO: 924857 - RNA, 22 nt, Human
ccccugaaggacacaggcggug

SEQ ID NO: 924858 - RNA, 21 nt, Human
cccgccaccacgcccagcuaa

SEQ ID NO: 924859 - RNA, 18 nt, Human
cccggcaccccccaaccc

SEQ ID NO: 924860 - RNA, 23 nt, Human
cccggcaccccccaacccccgag

SEQ ID NO: 924861 - RNA, 22 nt, Human
cccuggcuuugggcugcccucc

SEQ ID NO: 924862 - RNA, 23 nt, Human
ccgagcaggcugccccgaacacu

SEQ ID NO: 924863 - RNA, 21 nt, Human
ccuccaaguccacccacuucc

SEQ ID NO: 924864 - RNA, 24 nt, Human
ccuccuggagucaagcgauucucc

SEQ ID NO: 924865 - RNA, 22 nt, Human
ccugaccucaggugaucugccc

SEQ ID NO: 924866 - RNA, 23 nt, Human
ccugccucagccucccaaguagc

SEQ ID NO: 924867 - RNA, 24 nt, Human
ccugccucagccucccaaguagcu

SEQ ID NO: 924868 - RNA, 20 nt, Human
ccuggagucaagcgauucuc

SEQ ID NO: 924869 - RNA, 23 nt, Human
ccuggagucaagcgauucuccug

SEQ ID NO: 924870 - RNA, 20 nt, Human
ccuggcaccuugcaggugga

SEQ ID NO: 924871 - RNA, 22 nt, Human
ccuguccccagaugcccaggag

SEQ ID NO: 924872 - RNA, 29 nt, Human
ccuugcacuggucccaaggaagccccucc

SEQ ID NO: 924873 - RNA, 18 nt, Human
ccuugccguuccuccucc

SEQ ID NO: 924874 - RNA, 19 nt, Human
ccuuguccugagcuugggc

SEQ ID NO: 924875 - RNA, 20 nt, Human
cgcagcccacaggaagagug

SEQ ID NO: 924876 - RNA, 22 nt, Human
cgccccggcaccccccaacccc

SEQ ID NO: 924877 - RNA, 25 nt, Human
cgccccggcaccccccaacccccga

SEQ ID NO: 924878 - RNA, 24 nt, Human
cgccucggcuucccaaagugcugg

SEQ ID NO: 924879 - RNA, 24 nt, Human
cgcucugucacccaggcuggagug

SEQ ID NO: 924880 - RNA, 18 nt, Human
cggcaccccccaaccccc

SEQ ID NO: 924881 - RNA, 23 nt, Human
cuaaagcaccuacugugugccca

SEQ ID NO: 924882 - RNA, 24 nt, Human
cuaauuuuguauuuuuaguggaga

SEQ ID NO: 924883 - RNA, 24 nt, Human
cucacugcagccugcgccuccugg

SEQ ID NO: 924884 - RNA, 25 nt, Human
cucacugcagccugcgccuccugga

SEQ ID NO: 924885 - RNA, 23 nt, Human
cucagccucccaaguagcuggga

SEQ ID NO: 924886 - RNA, 23 nt, Human
cuccaaguccacccacuuccugc

SEQ ID NO: 924887 - RNA, 20 nt, Human
cuccacagacaccauccaga

SEQ ID NO: 924888 - RNA, 26 nt, Human
cuccugaccucaggugaucugcccgc

SEQ ID NO: 924889 - RNA, 24 nt, Human
cucgcucugucacccaggcuggag

SEQ ID NO: 924890 - RNA, 19 nt, Human
cugaaggacacaggcggug

SEQ ID NO: 924891 - RNA, 24 nt, Human
cugauggcggagggugguggggag

SEQ ID NO: 924892 - RNA, 20 nt, Human
cugccccugagcacagcccu

SEQ ID NO: 924893 - RNA, 24 nt, Human
cuggauuaugggcgugagccacca

SEQ ID NO: 924894 - RNA, 19 nt, Human
gacagagccgcacugaagc

SEQ ID NO: 924895 - RNA, 24 nt, Human
gaccucaggugaucugcccgccuc

SEQ ID NO: 924896 - RNA, 24 nt, Human
gagacgggguuucaccauguuggc

SEQ ID NO: 924897 - RNA, 18 nt, Human
gauuacaggcgcccgcca

SEQ ID NO: 924898 - RNA, 18 nt, Human
gauuaugggcgugagcca

SEQ ID NO: 924899 - RNA, 21 nt, Human
gauuaugggcgugagccacca

SEQ ID NO: 924900 - RNA, 22 nt, Human
gauuaugggcgugagccaccac

SEQ ID NO: 924901 - RNA, 20 nt, Human
gcaggcugauggcggagggu

SEQ ID NO: 924902 - RNA, 19 nt, Human
gcccuggacuuucccuccc

SEQ ID NO: 924903 - RNA, 20 nt, Human
gcccuggacuuucccuccca

SEQ ID NO: 924904 - RNA, 24 nt, Human
gcgauucuccugccucagccuccc

SEQ ID NO: 924905 - RNA, 28 nt, Human
gcgcagcccacaggaagaggggaacgcc

SEQ ID NO: 924906 - RNA, 25 nt, Human
gcucugucacccaggcuggagugca

SEQ ID NO: 924907 - RNA, 20 nt, Human
gcuggagugcagugguacca

SEQ ID NO: 924908 - RNA, 21 nt, Human
ggagauccugaggccaggagg

SEQ ID NO: 924909 - RNA, 22 nt, Human
ggauuaugggcgugagccacca

SEQ ID NO: 924910 - RNA, 22 nt, Human
ggccccuggcuuugggcugccc

SEQ ID NO: 924911 - RNA, 18 nt, Human
ggcggcagcagggacaga

SEQ ID NO: 924912 - RNA, 19 nt, Human
ggcgugagccaccacgccc

SEQ ID NO: 924913 - RNA, 22 nt, Human
gggcagccuccacaggguuucc

SEQ ID NO: 924914 - RNA, 20 nt, Human
gggcggggugggccccuggc

SEQ ID NO: 924915 - RNA, 18 nt, Human
ggggcccuggacuuuccc

SEQ ID NO: 924916 - RNA, 22 nt, Human
ggggcggggugggccccuggcc

SEQ ID NO: 924917 - RNA, 18 nt, Human
gggggcccuggacuuucc

SEQ ID NO: 924918 - RNA, 23 nt, Human
gggguuucaccauguuggccagg

SEQ ID NO: 924919 - RNA, 18 nt, Human
gggugggguggggcgggg

SEQ ID NO: 924920 - RNA, 18 nt, Human
gggugggguggggugggg

SEQ ID NO: 924921 - RNA, 22 nt, Human
ggguuucaccauguuggccagg

SEQ ID NO: 924922 - RNA, 20 nt, Human
ggucucgaacuccugaccuc

SEQ ID NO: 924923 - RNA, 18 nt, Human
ggugguggggaggguggg

SEQ ID NO: 924924 - RNA, 22 nt, Human
ggugguggggaggguggggggg

SEQ ID NO: 924925 - RNA, 24 nt, Human
gguuucaccauguuggccaggaug

SEQ ID NO: 924926 - RNA, 21 nt, Human
guagaagguggggcaagcccc

SEQ ID NO: 924927 - RNA, 18 nt, Human
guagcugggauuacaggc

SEQ ID NO: 924928 - RNA, 24 nt, Human
gucucgcucugucacccaggcugg

SEQ ID NO: 924929 - RNA, 24 nt, Human
gugaucugcccgccucggcuuccc

SEQ ID NO: 924930 - RNA, 23 nt, Human
guggagacgggguuucaccaugu

SEQ ID NO: 924931 - RNA, 19 nt, Human
guggggcaagccccucccu

SEQ ID NO: 924932 - RNA, 21 nt, Human
gugguggggaggguggggggg

SEQ ID NO: 924933 - RNA, 22 nt, Human
uaagacagggucucgcucuguc

SEQ ID NO: 924934 - RNA, 24 nt, Human
uacaggcgcccgccaccacgccca

SEQ ID NO: 924935 - RNA, 24 nt, Human
uaguggagacgggguuucaccaug

SEQ ID NO: 924936 - RNA, 24 nt, Human
ucaccauguuggccaggauggucu

SEQ ID NO: 924937 - RNA, 24 nt, Human
ucacccaggcuggagugcaguggu

SEQ ID NO: 924938 - RNA, 23 nt, Human
ucacugcagccugcgccuccugg

SEQ ID NO: 924939 - RNA, 19 nt, Human
ucagagcucacugcagccu

SEQ ID NO: 924940 - RNA, 18 nt, Human
ucagccucccaaguagcu

SEQ ID NO: 924941 - RNA, 20 nt, Human
ucagccucccaaguagcugg

SEQ ID NO: 924942 - RNA, 20 nt, Human
ucaguccaggguggaagcau

SEQ ID NO: 924943 - RNA, 21 nt, Human
uccaaaggucaaagggcagcc

SEQ ID NO: 924944 - RNA, 23 nt, Human
ucccaaagugcuggauuaugggc

SEQ ID NO: 924945 - RNA, 24 nt, Human
ucccaaguagcugggauuacaggc

SEQ ID NO: 924946 - RNA, 21 nt, Human
ucccucccaguccuggcaccu

SEQ ID NO: 924947 - RNA, 19 nt, Human
ucgccccggcaccccccaa

SEQ ID NO: 924948 - RNA, 24 nt, Human
ucgcucugucacccaggcuggagu

SEQ ID NO: 924949 - RNA, 26 nt, Human
ucuccugccucagccucccaaguagc

SEQ ID NO: 924950 - RNA, 19 nt, Human
ucucgaacuccugaccuca

SEQ ID NO: 924951 - RNA, 19 nt, Human
ucucgcucugucacccagg

SEQ ID NO: 924952 - RNA, 23 nt, Human
ucucgcucugucacccaggcugg

SEQ ID NO: 924953 - RNA, 24 nt, Human
ucucgcucugucacccaggcugga

SEQ ID NO: 924954 - RNA, 26 nt, Human
ucucgcucugucacccaggcuggagu

SEQ ID NO: 924955 - RNA, 27 nt, Human
ucucgcucugucacccaggcuggagug

SEQ ID NO: 924956 - RNA, 24 nt, Human
ucugucacccaggcuggagugcag

SEQ ID NO: 924957 - RNA, 18 nt, Human
ucuuggccacccugagag

SEQ ID NO: 924958 - RNA, 18 nt, Human
ugaccucaggugaucugc

SEQ ID NO: 924959 - RNA, 20 nt, Human
ugaccucaggugaucugccc

SEQ ID NO: 924960 - RNA, 24 nt, Human
ugaccucaggugaucugcccgccu

SEQ ID NO: 924961 - RNA, 18 nt, Human
ugcccaggaggagcaaga

SEQ ID NO: 924962 - RNA, 21 nt, Human
ugccccgaacacucaguccag

SEQ ID NO: 924963 - RNA, 25 nt, Human
ugccccugagcacagcccuugucug

SEQ ID NO: 924964 - RNA, 24 nt, Human
ugccucagccucccaaguagcugg

SEQ ID NO: 924965 - RNA, 23 nt, Human
uggagucaagcgauucuccugcc

SEQ ID NO: 924966 - RNA, 19 nt, Human
uggagugcagugguaccau

SEQ ID NO: 924967 - RNA, 20 nt, Human
uggagugcagugguaccauc

SEQ ID NO: 924968 - RNA, 21 nt, Human
uggagugcagugguaccauca

SEQ ID NO: 924969 - RNA, 23 nt, Human
uggauuaugggcgugagccacca

SEQ ID NO: 924970 - RNA, 24 nt, Human
uggccaggauggucucgaacuccu

SEQ ID NO: 924971 - RNA, 18 nt, Human
uggcggaggguggugggg

SEQ ID NO: 924972 - RNA, 21 nt, Human
ugggauuacaggcgcccgcca

SEQ ID NO: 924973 - RNA, 22 nt, Human
ugggauuacaggcgcccgccac

SEQ ID NO: 924974 - RNA, 24 nt, Human
ugggauuacaggcgcccgccacca

SEQ ID NO: 924975 - RNA, 21 nt, Human
ugggcugcccuccagcagccc

SEQ ID NO: 924976 - RNA, 23 nt, Human
uggggagggugggggggcccugg

SEQ ID NO: 924977 - RNA, 21 nt, Human
uggggcaagccccucccucaa

SEQ ID NO: 924978 - RNA, 18 nt, Human
ugggguggggcggggugg

SEQ ID NO: 924979 - RNA, 20 nt, Human
uggggugggguggggcgggg

SEQ ID NO: 924980 - RNA, 21 nt, Human
uggggugggguggggcggggu

SEQ ID NO: 924981 - RNA, 19 nt, Human
ugguaccaucagagcucac

SEQ ID NO: 924982 - RNA, 24 nt, Human
ugguaccaucagagcucacugcag

SEQ ID NO: 924983 - RNA, 21 nt, Human
ugguggggagggugggggggc

SEQ ID NO: 924984 - RNA, 21 nt, Human
uguuccuguccccagaugccc

SEQ ID NO: 924985 - RNA, 18 nt, Human
uuaguggagacgggguuu

SEQ ID NO: 924986 - RNA, 22 nt, Human
uuaguggagacgggguuucacc

SEQ ID NO: 924987 - RNA, 24 nt, Human
uuaguggagacgggguuucaccau

SEQ ID NO: 924988 - RNA, 24 nt, Human
uuccugguucugagacuucccagg

SEQ ID NO: 924989 - RNA, 18 nt, Human
uugcagguggagagggcu

SEQ ID NO: 924990 - RNA, 23 nt, Human
uuguauuuuuaguggagacgggg

SEQ ID NO: 924991 - RNA, 19 nt, Human
uuucaccauguuggccagg

SEQ ID NO: 924992 - RNA, 20 nt, Human
uuucaccauguuggccagga

SEQ ID NO: 924993 - RNA, 20 nt, Human
uuucagaggguggggugggg

SEQ ID NO: 924994 - RNA, 19 nt, Human
uuuccuuccugguucugag

SEQ ID NO: 924995 - RNA, 23 nt, Human
uuugggcugcccuccagcagccc

SEQ ID NO: 924996 - RNA, 19 nt, Human
uuuuguauuuuuaguggag

SEQ ID NO: 924997 - RNA, 20 nt, Human
uuuuguauuuuuaguggaga

SEQ ID NO: 924998 - RNA, 25 nt, Human
uuuuguuuuuuuuuuuaagacaggg

SEQ ID NO: 924999 - RNA, 24 nt, Human
uuuuuaguggagacgggguuucac

SEQ ID NO: 925000 - RNA, 20 nt, Human
uuuuuuuuaagacagggucu

SEQ ID NO: 925001 - RNA, 22 nt, Human
uuuuuuuuuuuaagacaggguc

SEQ ID NO: 925002 - RNA, 24 nt, Human
uuuuuuuuuuuaagacagggucuc

SEQ ID NO: 925003 - RNA, 18 nt, Human
aaaugaccaaccccugga

SEQ ID NO: 925004 - RNA, 18 nt, Human
aaccgaggauccagaagc

SEQ ID NO: 925005 - RNA, 18 nt, Human
aagaagccugaaucauag

SEQ ID NO: 925006 - RNA, 24 nt, Human
accccuggagaguaggaggggcag

SEQ ID NO: 925007 - RNA, 22 nt, Human
agcugaaccagcaaaugggggu

SEQ ID NO: 925008 - RNA, 21 nt, Human
agugaaaccaauaaaaucuaa

SEQ ID NO: 925009 - RNA, 27 nt, Human
auacaaggccauccaucccuccacggg

SEQ ID NO: 925010 - RNA, 22 nt, Human
cagaaaccgaggauccagaagc

SEQ ID NO: 925011 - RNA, 20 nt, Human
cagggaccuccaagcuugac

SEQ ID NO: 925012 - RNA, 20 nt, Human
cauuucagcagccuugaaau

SEQ ID NO: 925013 - RNA, 20 nt, Human
ccaaccccuggagaguagga

SEQ ID NO: 925014 - RNA, 20 nt, Human
ccacugggggccauccgacc

SEQ ID NO: 925015 - RNA, 22 nt, Human
cccugacuaaacccacuggggg

SEQ ID NO: 925016 - RNA, 21 nt, Human
ccugaaucauagcugaaccag

SEQ ID NO: 925017 - RNA, 23 nt, Human
ccuucauuggcuuccagguguga

SEQ ID NO: 925018 - RNA, 24 nt, Human
cgaggauccagaagcccugacuaa

SEQ ID NO: 925019 - RNA, 19 nt, Human
cggcacuugugauuuuuau

SEQ ID NO: 925020 - RNA, 21 nt, Human
cucccaggagcugaaggugaa

SEQ ID NO: 925021 - RNA, 22 nt, Human
cugaaucauagcugaaccagca

SEQ ID NO: 925022 - RNA, 18 nt, Human
gacccagucaggcggcaa

SEQ ID NO: 925023 - RNA, 19 nt, Human
gagaguaggaggggcagug

SEQ ID NO: 925024 - RNA, 19 nt, Human
gaguucuccaguucccuuc

SEQ ID NO: 925025 - RNA, 19 nt, Human
ggacaagaauggagggagg

SEQ ID NO: 925026 - RNA, 18 nt, Human
ggcauggagcacagaugg

SEQ ID NO: 925027 - RNA, 18 nt, Human
gggagggccugaagaagc

SEQ ID NO: 925028 - RNA, 21 nt, Human
gggggugggggaagaugaagg

SEQ ID NO: 925029 - RNA, 24 nt, Human
guucauggauuguuccuuuuguuu

SEQ ID NO: 925030 - RNA, 22 nt, Human
ucagcagccuugaaaugaccaa

SEQ ID NO: 925031 - RNA, 24 nt, Human
uccagaagcccugacuaaacccac

SEQ ID NO: 925032 - RNA, 23 nt, Human
uccaggugugcagguggcuuggg

SEQ ID NO: 925033 - RNA, 22 nt, Human
ucccauggugcacuggcaugcc

SEQ ID NO: 925034 - RNA, 20 nt, Human
ucccuggagacuaagaacau

SEQ ID NO: 925035 - RNA, 18 nt, Human
uccuuaauuucaucaucc

SEQ ID NO: 925036 - RNA, 22 nt, Human
ucucagggguccauauacaagg

SEQ ID NO: 925037 - RNA, 21 nt, Human
ucucuugccacaaguucaggu

SEQ ID NO: 925038 - RNA, 19 nt, Human
ucugguucagggaccucca

SEQ ID NO: 925039 - RNA, 23 nt, Human
ugaaucauagcugaaccagcaaa

SEQ ID NO: 925040 - RNA, 19 nt, Human
ugacuaaacccacuggggg

SEQ ID NO: 925041 - RNA, 19 nt, Human
ugacucagcuguucuccuu

SEQ ID NO: 925042 - RNA, 21 nt, Human
ugauuuuuauccauuucccuu

SEQ ID NO: 925043 - RNA, 20 nt, Human
ugccucugguucagggaccu

SEQ ID NO: 925044 - RNA, 19 nt, Human
ugcugggaacucccaggag

SEQ ID NO: 925045 - RNA, 24 nt, Human
ugggagcucugguagggcaagggc

SEQ ID NO: 925046 - RNA, 23 nt, Human
uguuuuguuuucucaauugcuca

SEQ ID NO: 925047 - RNA, 18 nt, Human
uugaauuuagaaagcaca

SEQ ID NO: 925048 - RNA, 21 nt, Human
aauacaaauauaaaaagggga

SEQ ID NO: 925049 - RNA, 18 nt, Human
agagccaggaucuuugga

SEQ ID NO: 925050 - RNA, 22 nt, Human
agcaaaggacuuggccuucccg

SEQ ID NO: 925051 - RNA, 18 nt, Human
augcccucuaccaccucc

SEQ ID NO: 925052 - RNA, 24 nt, Human
cacaaauuguacauuauuuacacc

SEQ ID NO: 925053 - RNA, 22 nt, Human
caggacaaaccagucccccucu

SEQ ID NO: 925054 - RNA, 21 nt, Human
cgggggcucaggcucaacuga

SEQ ID NO: 925055 - RNA, 23 nt, Human
cugguuccgaugucagucucaga

SEQ ID NO: 925056 - RNA, 23 nt, Human
gaacagucugcagucaaagccga

SEQ ID NO: 925057 - RNA, 18 nt, Human
gagcucacagcaaaggac

SEQ ID NO: 925058 - RNA, 20 nt, Human
gagggcuggggaacuuucuu

SEQ ID NO: 925059 - RNA, 23 nt, Human
gcuccuuauuguuacuguucagu

SEQ ID NO: 925060 - RNA, 23 nt, Human
gggacagagcucacagcaaagga

SEQ ID NO: 925061 - RNA, 19 nt, Human
gggcuggggaacuuucuuu

SEQ ID NO: 925062 - RNA, 18 nt, Human
gugggugaacagucugca

SEQ ID NO: 925063 - RNA, 21 nt, Human
guuucuucuuuuccuggcguc

SEQ ID NO: 925064 - RNA, 21 nt, Human
uaagccagguuucuuuuucuu

SEQ ID NO: 925065 - RNA, 20 nt, Human
uagcagcccccgcgccgggg

SEQ ID NO: 925066 - RNA, 19 nt, Human
uauaaaaaggggaaagucc

SEQ ID NO: 925067 - RNA, 18 nt, Human
ucaguaagccagguuucu

SEQ ID NO: 925068 - RNA, 20 nt, Human
ucccggugacaaacccagca

SEQ ID NO: 925069 - RNA, 20 nt, Human
uccucuucagccaagcucug

SEQ ID NO: 925070 - RNA, 22 nt, Human
ucuccugccuuuguuguuucuu

SEQ ID NO: 925071 - RNA, 23 nt, Human
ucuccugccuuuguuguuucuuc

SEQ ID NO: 925072 - RNA, 24 nt, Human
ucugcagucaaagccgaugcuggg

SEQ ID NO: 925073 - RNA, 28 nt, Human
ucuuuucugggcuguucucucugcagag

SEQ ID NO: 925074 - RNA, 19 nt, Human
ugaaaguggcuguucuccu

SEQ ID NO: 925075 - RNA, 24 nt, Human
ugaaaguggcuguucuccugccuu

SEQ ID NO: 925076 - RNA, 23 nt, Human
ugacaaacccagcaguagaaauc

SEQ ID NO: 925077 - RNA, 19 nt, Human
ugcagagccaggaucuuug

SEQ ID NO: 925078 - RNA, 21 nt, Human
uggaagaauguggagggcugg

SEQ ID NO: 925079 - RNA, 21 nt, Human
uggcgucuggguuuuucuccc

SEQ ID NO: 925080 - RNA, 19 nt, Human
uggggaacuuucuuuucug

SEQ ID NO: 925081 - RNA, 24 nt, Human
uggggaacuuucuuuucugggcug

SEQ ID NO: 925082 - RNA, 19 nt, Human
uggguguccuguaguguag

SEQ ID NO: 925083 - RNA, 20 nt, Human
uguggagggcuggggaacuu

SEQ ID NO: 925084 - RNA, 21 nt, Human
uuccucuucagccaagcucug

SEQ ID NO: 925085 - RNA, 25 nt, Human
uugucauuuucaagucugaaagugg

SEQ ID NO: 925086 - RNA, 24 nt, Human
uuuuuuuuuuuuuuuuuuaauaag

SEQ ID NO: 925087 - RNA, 20 nt, Human
aagcaggugugagugacugc

SEQ ID NO: 925088 - RNA, 24 nt, Human
gcaggcaacaccagccccagucgg

SEQ ID NO: 925089 - RNA, 18 nt, Human
gccuugguggauguagga

SEQ ID NO: 925090 - RNA, 21 nt, Human
ggaggcaggcaacaccagccc

SEQ ID NO: 925091 - RNA, 20 nt, Human
ggccagagcgcccgccuugg

SEQ ID NO: 925092 - RNA, 23 nt, Human
gggcgugagugcuacauucugaa

SEQ ID NO: 925093 - RNA, 18 nt, Human
ugggcuuaaggaagggag

SEQ ID NO: 925094 - RNA, 26 nt, Human
uuuuuuuuuuuuuucgggugaaauua

SEQ ID NO: 925095 - RNA, 19 nt, Human
uuuuuuuuuuuuuuuuucg

SEQ ID NO: 925096 - RNA, 22 nt, Human
uuuuuuuuuuuuuuuuuucggg

SEQ ID NO: 925097 - RNA, 26 nt, Human
aaacaacaacaacaaaaaacucagaa

SEQ ID NO: 925098 - RNA, 19 nt, Human
aacaacaaaaaacucagaa

SEQ ID NO: 925099 - RNA, 21 nt, Human
aacaacaacaaaaaacucaga

SEQ ID NO: 925100 - RNA, 22 nt, Human
acaaugaggagccacuuuugaa

SEQ ID NO: 925101 - RNA, 20 nt, Human
acagagagcaaaugaagggu

SEQ ID NO: 925102 - RNA, 24 nt, Human
caacaacaaaaaacucagaagcua

SEQ ID NO: 925103 - RNA, 25 nt, Human
caacaacaaaaaacucagaagcuau

SEQ ID NO: 925104 - RNA, 22 nt, Human
cauauuuacgcugaaguacaau

SEQ ID NO: 925105 - RNA, 24 nt, Human
gcugaaguacaaugaggagccagu

SEQ ID NO: 925106 - RNA, 23 nt, Human
uaaaaacaacaacaacaaaaaac

SEQ ID NO: 925107 - RNA, 20 nt, Human
uauuagaaugguacuuuuaa

SEQ ID NO: 925108 - RNA, 23 nt, Human
ucaauaaaaacaacaacaacaaa

SEQ ID NO: 925109 - RNA, 21 nt, Human
ugaaggguugcuauuuuuaag

SEQ ID NO: 925110 - RNA, 24 nt, Human
ugaggagccacuuuugaagaagua

SEQ ID NO: 925111 - RNA, 26 nt, Human
uucaauaaaaacaacaacaacaaaaa

SEQ ID NO: 925112 - RNA, 20 nt, Human
uucuugugagucagcuuggu

SEQ ID NO: 925113 - RNA, 20 nt, Human
uugcuauuuuuaagaggucu

SEQ ID NO: 925114 - RNA, 19 nt, Human
uugguggcacagagagcaa

SEQ ID NO: 925115 - RNA, 18 nt, Human
uuucauggccgauguucc

SEQ ID NO: 925116 - RNA, 18 nt, Human
aaccgcaugacagccccc

SEQ ID NO: 925117 - RNA, 18 nt, Human
acgacagagacgcacgcg

SEQ ID NO: 925118 - RNA, 21 nt, Human
acggcgccgacccggucaacu

SEQ ID NO: 925119 - RNA, 18 nt, Human
cagcagcaaguuccucca

SEQ ID NO: 925120 - RNA, 20 nt, Human
cagcccccucggcagggucc

SEQ ID NO: 925121 - RNA, 22 nt, Human
cauuuuauuccucaggacgcua

SEQ ID NO: 925122 - RNA, 25 nt, Human
ccagcagcgcccgcugacgcuuccc

SEQ ID NO: 925123 - RNA, 19 nt, Human
cccccgccgccgucagcgc

SEQ ID NO: 925124 - RNA, 18 nt, Human
ccccucggcagggucccc

SEQ ID NO: 925125 - RNA, 18 nt, Human
cccgcugacgcuucccuc

SEQ ID NO: 925126 - RNA, 18 nt, Human
cccucggagccgugccca

SEQ ID NO: 925127 - RNA, 22 nt, Human
cccucggagccgugcccagccu

SEQ ID NO: 925128 - RNA, 19 nt, Human
ccgccgccgucagcgcugc

SEQ ID NO: 925129 - RNA, 21 nt, Human
ccgccgccgucagcgcugcgc

SEQ ID NO: 925130 - RNA, 23 nt, Human
ccgccgucagcgcugcgccccgg

SEQ ID NO: 925131 - RNA, 18 nt, Human
ccgggcccaggugugagg

SEQ ID NO: 925132 - RNA, 21 nt, Human
ccuggcaugcauaugcggugg

SEQ ID NO: 925133 - RNA, 20 nt, Human
ccuggcggagcaggucagug

SEQ ID NO: 925134 - RNA, 24 nt, Human
cgugcccagccuggcaugcauaug

SEQ ID NO: 925135 - RNA, 23 nt, Human
cguguccacgacagagacgcacg

SEQ ID NO: 925136 - RNA, 20 nt, Human
cuccccccgccgccgucagc

SEQ ID NO: 925137 - RNA, 20 nt, Human
cugcgccccgggagcuccgg

SEQ ID NO: 925138 - RNA, 21 nt, Human
gaagcuggccugcccgggccc

SEQ ID NO: 925139 - RNA, 19 nt, Human
gaaggcagcgcucaggacc

SEQ ID NO: 925140 - RNA, 19 nt, Human
gacccggucaacuccgcgg

SEQ ID NO: 925141 - RNA, 19 nt, Human
gaccgacggcgccgacccg

SEQ ID NO: 925142 - RNA, 20 nt, Human
gcaaguuccuccagcacgaa

SEQ ID NO: 925143 - RNA, 26 nt, Human
gcccgcugacgcuucccucugcgguc

SEQ ID NO: 925144 - RNA, 20 nt, Human
gcggggcgggggcuccaggu

SEQ ID NO: 925145 - RNA, 22 nt, Human
gcucaggaccgacggcgccgac

SEQ ID NO: 925146 - RNA, 23 nt, Human
gcuccagguggggccgcggcgga

SEQ ID NO: 925147 - RNA, 21 nt, Human
ggaaaccgcaugacagccccc

SEQ ID NO: 925148 - RNA, 22 nt, Human
ggccauggcgcggggcgggggc

SEQ ID NO: 925149 - RNA, 18 nt, Human
gggacuguucugcuccca

SEQ ID NO: 925150 - RNA, 23 nt, Human
ggggcgggggcuccagguggggc

SEQ ID NO: 925151 - RNA, 22 nt, Human
ucccucugcggucucggcgcaa

SEQ ID NO: 925152 - RNA, 19 nt, Human
uccuccagcacgaagcugg

SEQ ID NO: 925153 - RNA, 24 nt, Human
ugcccgggcccaggugugagggac

SEQ ID NO: 925154 - RNA, 26 nt, Human
uggcaugcauaugcggugguuaagga

SEQ ID NO: 925155 - RNA, 22 nt, Human
agauguagcuaggggcugggga

SEQ ID NO: 925156 - RNA, 23 nt, Human
aggaagggaucccagcaggguuu

SEQ ID NO: 925157 - RNA, 24 nt, Human
aggagcucugggaaaaccugugga

SEQ ID NO: 925158 - RNA, 21 nt, Human
aggagucacaggguggaucug

SEQ ID NO: 925159 - RNA, 22 nt, Human
agggaagagguuacagggggag

SEQ ID NO: 925160 - RNA, 23 nt, Human
agggaagagguuacagggggagg

SEQ ID NO: 925161 - RNA, 21 nt, Human
agggaucccagcaggguuucu

SEQ ID NO: 925162 - RNA, 21 nt, Human
agguuacagggggaggagcug

SEQ ID NO: 925163 - RNA, 19 nt, Human
auggaaagaggccagaaac

SEQ ID NO: 925164 - RNA, 19 nt, Human
cacaggguggaucugugga

SEQ ID NO: 925165 - RNA, 26 nt, Human
cacagucugacugcacagagccgccu

SEQ ID NO: 925166 - RNA, 23 nt, Human
cagcugccuuucugauuuccagc

SEQ ID NO: 925167 - RNA, 23 nt, Human
ccacaccaagguugaugaaggaa

SEQ ID NO: 925168 - RNA, 23 nt, Human
cccacagucugacugcacagagc

SEQ ID NO: 925169 - RNA, 23 nt, Human
ccugagagacugcugugcacccc

SEQ ID NO: 925170 - RNA, 19 nt, Human
ccugggggaaagggcagcc

SEQ ID NO: 925171 - RNA, 18 nt, Human
cugcucuggggcuggcag

SEQ ID NO: 925172 - RNA, 19 nt, Human
cugcucuggggcuggcagg

SEQ ID NO: 925173 - RNA, 19 nt, Human
cugcucuggggcuggcagg

SEQ ID NO: 925174 - RNA, 21 nt, Human
cugugcaccccacagucugac

SEQ ID NO: 925175 - RNA, 18 nt, Human
cuuuuccuuuucucucuc

SEQ ID NO: 925176 - RNA, 23 nt, Human
gaaagaggccagaaaccccagcc

SEQ ID NO: 925177 - RNA, 24 nt, Human
gaagagguuacagggggaggagcu

SEQ ID NO: 925178 - RNA, 20 nt, Human
gaaggaagggaucccagcag

SEQ ID NO: 925179 - RNA, 20 nt, Human
gagcauccuccacaccaagg

SEQ ID NO: 925180 - RNA, 23 nt, Human
gaggagucacaggguggaucugu

SEQ ID NO: 925181 - RNA, 18 nt, Human
gaucuguggagggaagag

SEQ ID NO: 925182 - RNA, 22 nt, Human
gcucuggggcuggcagguugcc

SEQ ID NO: 925183 - RNA, 21 nt, Human
ggaagagguuacagggggagg

SEQ ID NO: 925184 - RNA, 20 nt, Human
ggagggaagagguuacaggg

SEQ ID NO: 925185 - RNA, 21 nt, Human
ggagggggagguggaagcgcu

SEQ ID NO: 925186 - RNA, 19 nt, Human
ggaucuguggagggaagag

SEQ ID NO: 925187 - RNA, 25 nt, Human
ggccagaaaccccagccugagagac

SEQ ID NO: 925188 - RNA, 22 nt, Human
gggaaguaggacuguccaggga

SEQ ID NO: 925189 - RNA, 19 nt, Human
ggggcuggggagggggagg

SEQ ID NO: 925190 - RNA, 25 nt, Human
gggggaaagggcagccaggcagagg

SEQ ID NO: 925191 - RNA, 20 nt, Human
guccagggaaggguggagag

SEQ ID NO: 925192 - RNA, 19 nt, Human
guggagggaagagguuaca

SEQ ID NO: 925193 - RNA, 23 nt, Human
guuggcaggaggcacugaggcuc

SEQ ID NO: 925194 - RNA, 22 nt, Human
uagcuaggggcuggggaggggg

SEQ ID NO: 925195 - RNA, 22 nt, Human
uccaagaggagcucugggaaaa

SEQ ID NO: 925196 - RNA, 23 nt, Human
uccacaccaagguugaugaagga

SEQ ID NO: 925197 - RNA, 25 nt, Human
ucucucugauuguuuuaauuguucu

SEQ ID NO: 925198 - RNA, 23 nt, Human
ucuguuggcaggaggcacugagg

SEQ ID NO: 925199 - RNA, 19 nt, Human
ugaaggaagggaucccagc

SEQ ID NO: 925200 - RNA, 18 nt, Human
ugacugcacagagccgcc

SEQ ID NO: 925201 - RNA, 23 nt, Human
ugagcauccuccacaccaagguu

SEQ ID NO: 925202 - RNA, 24 nt, Human
ugauuggauggaaagaggccagaa

SEQ ID NO: 925203 - RNA, 19 nt, Human
ugccugggggaaagggcag

SEQ ID NO: 925204 - RNA, 22 nt, Human
ugccugggggaaagggcagcca

SEQ ID NO: 925205 - RNA, 25 nt, Human
ugcucuggggcuggcagguugccug

SEQ ID NO: 925206 - RNA, 19 nt, Human
uggaaagaggccagaaacc

SEQ ID NO: 925207 - RNA, 22 nt, Human
uggaaagaggccagaaacccca

SEQ ID NO: 925208 - RNA, 19 nt, Human
uggaaggggugauuggaug

SEQ ID NO: 925209 - RNA, 24 nt, Human
uggauggaaagaggccagaaaccc

SEQ ID NO: 925210 - RNA, 18 nt, Human
ugggaaaaccuguggaua

SEQ ID NO: 925211 - RNA, 22 nt, Human
uggggagggggagguggaagcg

SEQ ID NO: 925212 - RNA, 23 nt, Human
ugguaggcugcugaauuuccugg

SEQ ID NO: 925213 - RNA, 20 nt, Human
uguggauaaaaccaaaugcc

SEQ ID NO: 925214 - RNA, 20 nt, Human
uugagcauccuccacaccaa

SEQ ID NO: 925215 - RNA, 21 nt, Human
uugccugguauuaugcccaag

SEQ ID NO: 925216 - RNA, 21 nt, Human
uuucugcucuggggcuggcag

SEQ ID NO: 925217 - RNA, 22 nt, Human
uuucugcucuggggcuggcagg

SEQ ID NO: 925218 - RNA, 19 nt, Human
aaaaaaaacagacaaauca

SEQ ID NO: 925219 - RNA, 23 nt, Human
aaaaaaaacagacaaaucagggu

SEQ ID NO: 925220 - RNA, 19 nt, Human
aaaaaaacagacaaaucag

SEQ ID NO: 925221 - RNA, 22 nt, Human
aaaacagacaaaucaguuguca

SEQ ID NO: 925222 - RNA, 22 nt, Human
aaacagacaaaucaguugucag

SEQ ID NO: 925223 - RNA, 22 nt, Human
aaacagcaacgagauguggaac

SEQ ID NO: 925224 - RNA, 19 nt, Human
aaacaggggccauuuaaac

SEQ ID NO: 925225 - RNA, 24 nt, Human
aaacauggcacuuucaacguucuc

SEQ ID NO: 925226 - RNA, 21 nt, Human
aaagccuauuuuuaaaagucu

SEQ ID NO: 925227 - RNA, 20 nt, Human
aacagguaggucuucaaagc

SEQ ID NO: 925228 - RNA, 20 nt, Human
aagaaagacaaaaucuacac

SEQ ID NO: 925229 - RNA, 23 nt, Human
aagaaagacaaaaucuacacuga

SEQ ID NO: 925230 - RNA, 21 nt, Human
aagacaaaaucuacacugaaa

SEQ ID NO: 925231 - RNA, 23 nt, Human
acauggcacuuucaacguucucu

SEQ ID NO: 925232 - RNA, 24 nt, Human
acuuugucauuuguuucuuuaagu

SEQ ID NO: 925233 - RNA, 19 nt, Human
agacaaaaucuacacugaa

SEQ ID NO: 925234 - RNA, 19 nt, Human
agagaaaaaaaacagacaa

SEQ ID NO: 925235 - RNA, 22 nt, Human
aggaagaugcaggcuccacaaa

SEQ ID NO: 925236 - RNA, 25 nt, Human
aucaacagagaucacgcaaaaggaa

SEQ ID NO: 925237 - RNA, 23 nt, Human
auggaaaaagacagagaaaaaaa

SEQ ID NO: 925238 - RNA, 23 nt, Human
auggcacuuucaacguucucuuc

SEQ ID NO: 925239 - RNA, 20 nt, Human
auuccuuccucccacaccuc

SEQ ID NO: 925240 - RNA, 22 nt, Human
caaauauaagaaagccuauuuu

SEQ ID NO: 925241 - RNA, 22 nt, Human
caagaaagacaaaaucuacacu

SEQ ID NO: 925242 - RNA, 21 nt, Human
caauuccagagugccaucaac

SEQ ID NO: 925243 - RNA, 18 nt, Human
caccaaaaauaacagcaa

SEQ ID NO: 925244 - RNA, 22 nt, Human
cauggaaaaagacagagaaaaa

SEQ ID NO: 925245 - RNA, 20 nt, Human
ccacaacacuuauuuuguag

SEQ ID NO: 925246 - RNA, 21 nt, Human
ccuuccucccacaccucuuca

SEQ ID NO: 925247 - RNA, 19 nt, Human
cgcaaaaggaaacauggca

SEQ ID NO: 925248 - RNA, 24 nt, Human
cuucaaagaauucauaacacccaa

SEQ ID NO: 925249 - RNA, 22 nt, Human
gagcucacaagcuuuucuccgg

SEQ ID NO: 925250 - RNA, 21 nt, Human
ggaaaaagacagagaaaaaaa

SEQ ID NO: 925251 - RNA, 22 nt, Human
uaaaauguauuccuuccuccca

SEQ ID NO: 925252 - RNA, 20 nt, Human
uagauaaaccacaacacuua

SEQ ID NO: 925253 - RNA, 19 nt, Human
uagauugaaauaaacuaua

SEQ ID NO: 925254 - RNA, 24 nt, Human
uauaagagucauggaaaaagacag

SEQ ID NO: 925255 - RNA, 21 nt, Human
ucaaccaugaaacagaagugu

SEQ ID NO: 925256 - RNA, 21 nt, Human
ucacaagcuuuucuccgguaa

SEQ ID NO: 925257 - RNA, 23 nt, Human
ucuaaaaugacuuaacugaaaca

SEQ ID NO: 925258 - RNA, 18 nt, Human
ucuccgguaauuucuugu

SEQ ID NO: 925259 - RNA, 23 nt, Human
ugucaguauccauggccucugau

SEQ ID NO: 925260 - RNA, 18 nt, Human
ugucucaaccaugaaaca

SEQ ID NO: 925261 - RNA, 20 nt, Human
uucacuacaacauuuuauaa

SEQ ID NO: 925262 - RNA, 22 nt, Human
uucacuacaacauuuuauaaaa

SEQ ID NO: 925263 - RNA, 21 nt, Human
uuccucccacaccucuucaaa

SEQ ID NO: 925264 - RNA, 24 nt, Human
uuuuuaacauacuuaaaacuccua

SEQ ID NO: 925265 - RNA, 18 nt, Human
aaugacgcucuuuucaga

SEQ ID NO: 925266 - RNA, 18 nt, Human
acacgguagagcccuggc

SEQ ID NO: 925267 - RNA, 18 nt, Human
accagcgcugcgggcgcg

SEQ ID NO: 925268 - RNA, 21 nt, Human
acccucacgccuguguccucu

SEQ ID NO: 925269 - RNA, 20 nt, Human
acgggcucggggccggcguc

SEQ ID NO: 925270 - RNA, 20 nt, Human
aggcauagacguccacggac

SEQ ID NO: 925271 - RNA, 21 nt, Human
aggccagggagguggcgcugg

SEQ ID NO: 925272 - RNA, 24 nt, Human
aggggcuucagcugagcgggggcc

SEQ ID NO: 925273 - RNA, 21 nt, Human
agggggaccacgggcuguggg

SEQ ID NO: 925274 - RNA, 21 nt, Human
aggggugucggcugggccagc

SEQ ID NO: 925275 - RNA, 28 nt, Human
aguaccuaucacacuuuuggcaaaugac

SEQ ID NO: 925276 - RNA, 24 nt, Human
auccugcugcuccuugggcugcag

SEQ ID NO: 925277 - RNA, 27 nt, Human
aucuggaggggcuucagcugagcgggg

SEQ ID NO: 925278 - RNA, 21 nt, Human
auggacuuggccacgaucuug

SEQ ID NO: 925279 - RNA, 18 nt, Human
caccuggaccugcagggg

SEQ ID NO: 925280 - RNA, 21 nt, Human
cacgguagagcccuggccgcu

SEQ ID NO: 925281 - RNA, 23 nt, Human
cagcacaaugcaccgcuugcccu

SEQ ID NO: 925282 - RNA, 19 nt, Human
cagcaggcccuucaggauc

SEQ ID NO: 925283 - RNA, 23 nt, Human
cagcgcgggccagauccucuccc

SEQ ID NO: 925284 - RNA, 22 nt, Human
cagcgugccggggacgucucgg

SEQ ID NO: 925285 - RNA, 23 nt, Human
cagcgugccggggacgucucggc

SEQ ID NO: 925286 - RNA, 18 nt, Human
cagguacgguggcaggug

SEQ ID NO: 925287 - RNA, 19 nt, Human
ccaagcaucacgcucugcu

SEQ ID NO: 925288 - RNA, 19 nt, Human
cccaaaggcauagacgucc

SEQ ID NO: 925289 - RNA, 24 nt, Human
cccaaaggcauagacguccacgga

SEQ ID NO: 925290 - RNA, 19 nt, Human
cccagaagucguagaagcg

SEQ ID NO: 925291 - RNA, 18 nt, Human
ccccaccugggaggcugg

SEQ ID NO: 925292 - RNA, 22 nt, Human
ccccgcgccgcgcccgggcucc

SEQ ID NO: 925293 - RNA, 18 nt, Human
cccggcgccucggcugcc

SEQ ID NO: 925294 - RNA, 19 nt, Human
cccggcgccucggcugccu

SEQ ID NO: 925295 - RNA, 20 nt, Human
cccuuggcgcuggacuccca

SEQ ID NO: 925296 - RNA, 19 nt, Human
ccgagguggccaucuccag

SEQ ID NO: 925297 - RNA, 18 nt, Human
ccgcgccgccuucgcccg

SEQ ID NO: 925298 - RNA, 21 nt, Human
ccgcugucgaaggugcugucc

SEQ ID NO: 925299 - RNA, 24 nt, Human
ccggcaccagcugcggagaaccuu

SEQ ID NO: 925300 - RNA, 18 nt, Human
ccggccgcgccgccuucg

SEQ ID NO: 925301 - RNA, 19 nt, Human
ccggcgcugcaggggcugc

SEQ ID NO: 925302 - RNA, 18 nt, Human
ccggggacgucucggcgg

SEQ ID NO: 925303 - RNA, 18 nt, Human
ccgucgauucccgccagg

SEQ ID NO: 925304 - RNA, 22 nt, Human
ccgugggcugcugguaggcccc

SEQ ID NO: 925305 - RNA, 19 nt, Human
ccucacggucgccgccgcc

SEQ ID NO: 925306 - RNA, 21 nt, Human
ccuugugugcaggaacagcag

SEQ ID NO: 925307 - RNA, 21 nt, Human
cgaugggguccgggccgggcu

SEQ ID NO: 925308 - RNA, 21 nt, Human
cgaugguggacuuccugccgu

SEQ ID NO: 925309 - RNA, 21 nt, Human
cgccaugcccgcgggccccgc

SEQ ID NO: 925310 - RNA, 21 nt, Human
cgcccgaggcuccgccaugcc

SEQ ID NO: 925311 - RNA, 22 nt, Human
cgcccgaggcuccgccaugccc

SEQ ID NO: 925312 - RNA, 23 nt, Human
cgcccgggcuccaucagcgugcc

SEQ ID NO: 925313 - RNA, 21 nt, Human
cgcgggccagauccucucccg

SEQ ID NO: 925314 - RNA, 22 nt, Human
cggccuccggcuccucgggcuc

SEQ ID NO: 925315 - RNA, 23 nt, Human
cgggcgcgggggcggcggggcgu

SEQ ID NO: 925316 - RNA, 25 nt, Human
cggucggcaggucugggagggccgg

SEQ ID NO: 925317 - RNA, 22 nt, Human
cuccgggggcucccggcugcgc

SEQ ID NO: 925318 - RNA, 21 nt, Human
cuccuugggcugcagcgcggg

SEQ ID NO: 925319 - RNA, 19 nt, Human
cugaggugguggcacggga

SEQ ID NO: 925320 - RNA, 19 nt, Human
cugcagcgcgggccagauc

SEQ ID NO: 925321 - RNA, 24 nt, Human
cugccuccaagcccggcggcuccu

SEQ ID NO: 925322 - RNA, 21 nt, Human
cugcgccgcagaaagcgcugg

SEQ ID NO: 925323 - RNA, 22 nt, Human
cugcggcaggacgggccccucg

SEQ ID NO: 925324 - RNA, 25 nt, Human
cuuggggucuuccacccagagccuc

SEQ ID NO: 925325 - RNA, 20 nt, Human
cuuucccuucaguuucuugg

SEQ ID NO: 925326 - RNA, 20 nt, Human
gcacaaugcaccgcuugccc

SEQ ID NO: 925327 - RNA, 20 nt, Human
gcagaaagcgcuggggcccc

SEQ ID NO: 925328 - RNA, 24 nt, Human
gcgccgccuucgcccgaggcuccg

SEQ ID NO: 925329 - RNA, 21 nt, Human
gcgggcgcgggggcggcgggg

SEQ ID NO: 925330 - RNA, 22 nt, Human
gcugcgggcgcgggggcggcgg

SEQ ID NO: 925331 - RNA, 19 nt, Human
gcuggggccccggccgcgc

SEQ ID NO: 925332 - RNA, 19 nt, Human
ggaccccuggccuuguccg

SEQ ID NO: 925333 - RNA, 20 nt, Human
ggccccggccgcgccgccuu

SEQ ID NO: 925334 - RNA, 19 nt, Human
ggcccgggcugcccagccu

SEQ ID NO: 925335 - RNA, 19 nt, Human
ggccggcguccgcgggggc

SEQ ID NO: 925336 - RNA, 27 nt, Human
ggcggcggggcguccgcgggcgcgcuc

SEQ ID NO: 925337 - RNA, 26 nt, Human
gggcaggcgcgguuucgacagcggcu

SEQ ID NO: 925338 - RNA, 23 nt, Human
gggcggcggggcguccgcgggcg

SEQ ID NO: 925339 - RNA, 26 nt, Human
gggcugcagcgcgggccagauccucu

SEQ ID NO: 925340 - RNA, 18 nt, Human
gggcugcccacauccugc

SEQ ID NO: 925341 - RNA, 22 nt, Human
gggcuucagcugagcgggggcc

SEQ ID NO: 925342 - RNA, 22 nt, Human
gggggcggcggggcguccgcgg

SEQ ID NO: 925343 - RNA, 18 nt, Human
guccuugggcuuucccuu

SEQ ID NO: 925344 - RNA, 19 nt, Human
gucgccgccgccuccuccc

SEQ ID NO: 925345 - RNA, 21 nt, Human
gugauggggggcacaacagga

SEQ ID NO: 925346 - RNA, 21 nt, Human
uaccuuuccuccuuguuuuug

SEQ ID NO: 925347 - RNA, 19 nt, Human
ucagaguggccaggcccaa

SEQ ID NO: 925348 - RNA, 22 nt, Human
uccaagcccggcggcuccuccu

SEQ ID NO: 925349 - RNA, 18 nt, Human
uccgggccgggcuccugc

SEQ ID NO: 925350 - RNA, 21 nt, Human
uccugcugcuccuugggcugc

SEQ ID NO: 925351 - RNA, 24 nt, Human
uccugcugcuccuugggcugcagc

SEQ ID NO: 925352 - RNA, 26 nt, Human
ucgacagcggcugcgaugggguccuu

SEQ ID NO: 925353 - RNA, 23 nt, Human
ucggcugccuccaagcccggcgg

SEQ ID NO: 925354 - RNA, 18 nt, Human
ucggggccggcguccgcg

SEQ ID NO: 925355 - RNA, 21 nt, Human
ucgguggaugauggguggcgu

SEQ ID NO: 925356 - RNA, 22 nt, Human
ucucuugggccaccucauccgg

SEQ ID NO: 925357 - RNA, 19 nt, Human
ucuggaggggcuucagcug

SEQ ID NO: 925358 - RNA, 23 nt, Human
ugagcaagcggcugcaggggcgc

SEQ ID NO: 925359 - RNA, 24 nt, Human
ugaguacacgguagagcccuggcc

SEQ ID NO: 925360 - RNA, 19 nt, Human
ugaucucguaccuuuccuc

SEQ ID NO: 925361 - RNA, 21 nt, Human
ugauggguggcguccuugugu

SEQ ID NO: 925362 - RNA, 18 nt, Human
ugcaggaacagcaggccc

SEQ ID NO: 925363 - RNA, 19 nt, Human
ugcccuuggcgcuggacuc

SEQ ID NO: 925364 - RNA, 21 nt, Human
ugccuccaagcccggcggcuc

SEQ ID NO: 925365 - RNA, 19 nt, Human
ugcgcuaccagcgcugcgg

SEQ ID NO: 925366 - RNA, 25 nt, Human
uggagggggaccacgggcugugggg

SEQ ID NO: 925367 - RNA, 25 nt, Human
uggcaggugggggggaaccggcugg

SEQ ID NO: 925368 - RNA, 23 nt, Human
ugggccaccucauccggcgucuc

SEQ ID NO: 925369 - RNA, 23 nt, Human
uggggggcacaacaggaaucggg

SEQ ID NO: 925370 - RNA, 21 nt, Human
ugggguccgggccgggcuccu

SEQ ID NO: 925371 - RNA, 23 nt, Human
uggggucuuccacccagagccuc

SEQ ID NO: 925372 - RNA, 19 nt, Human
ugucacauuucaggucucg

SEQ ID NO: 925373 - RNA, 18 nt, Human
uguccuugggcuuucccu

SEQ ID NO: 925374 - RNA, 20 nt, Human
uguuggggugcugcaggccu

SEQ ID NO: 925375 - RNA, 18 nt, Human
uucaggaucugccggcac

SEQ ID NO: 925376 - RNA, 22 nt, Human
uuccucacggucgccgccgccu

SEQ ID NO: 925377 - RNA, 20 nt, Human
uugcagauacacuccccaau

SEQ ID NO: 925378 - RNA, 21 nt, Human
uuucaggaucgugcacuuucu

SEQ ID NO: 925379 - RNA, 23 nt, Human
uuucaggaucgugcacuuucuca

SEQ ID NO: 925380 - RNA, 23 nt, Human
aucuuccuugcucaguuuuguug

SEQ ID NO: 925381 - RNA, 22 nt, Human
ccauggugggcccugguguggg

SEQ ID NO: 925382 - RNA, 19 nt, Human
gauucugagaacacaagcu

SEQ ID NO: 925383 - RNA, 20 nt, Human
uccauggugggcccuggugu

SEQ ID NO: 925384 - RNA, 19 nt, Human
uccguggccggggauugcc

SEQ ID NO: 925385 - RNA, 19 nt, Human
ugagaacacaagcuccaug

SEQ ID NO: 925386 - RNA, 20 nt, Human
ugagaacacaagcuccaugg

SEQ ID NO: 925387 - RNA, 20 nt, Human
uggccggggauugccaacau

SEQ ID NO: 925388 - RNA, 22 nt, Human
uggccggggauugccaacauga

SEQ ID NO: 925389 - RNA, 18 nt, Human
aaaacaaaagacuaucuc

SEQ ID NO: 925390 - RNA, 21 nt, Human
acccacucuacccccacauua

SEQ ID NO: 925391 - RNA, 18 nt, Human
agucacaaagagggaaga

SEQ ID NO: 925392 - RNA, 21 nt, Human
auccauccaucugcucacaua

SEQ ID NO: 925393 - RNA, 18 nt, Human
augaacuucuucaaucuu

SEQ ID NO: 925394 - RNA, 19 nt, Human
cagcugauucucuuccuca

SEQ ID NO: 925395 - RNA, 22 nt, Human
cagcugauucucuuccucagcu

SEQ ID NO: 925396 - RNA, 24 nt, Human
cauccaucugcucacauaaaacca

SEQ ID NO: 925397 - RNA, 19 nt, Human
cauccugauuuucuagcaa

SEQ ID NO: 925398 - RNA, 22 nt, Human
ccaaucuuuaaaaacuuucaug

SEQ ID NO: 925399 - RNA, 22 nt, Human
cccccacauuaaaaacuacaag

SEQ ID NO: 925400 - RNA, 22 nt, Human
cuaguuuaauaaaauauccaaa

SEQ ID NO: 925401 - RNA, 22 nt, Human
cugacccacucuacccccacau

SEQ ID NO: 925402 - RNA, 22 nt, Human
cugggcaguacuagaaaucuau

SEQ ID NO: 925403 - RNA, 18 nt, Human
uaaaaacaaaagacuauc

SEQ ID NO: 925404 - RNA, 24 nt, Human
uaaaauauccaaauaacuaaccaa

SEQ ID NO: 925405 - RNA, 21 nt, Human
uaaaugacaacuuuauagacu

SEQ ID NO: 925406 - RNA, 22 nt, Human
uaaaugacaacuuuauagacug

SEQ ID NO: 925407 - RNA, 26 nt, Human
uaaaugacaacuuuauagacugcuua

SEQ ID NO: 925408 - RNA, 21 nt, Human
uaagaaaaugauuacguggca

SEQ ID NO: 925409 - RNA, 23 nt, Human
uaaggcuaaggaauagucacaaa

SEQ ID NO: 925410 - RNA, 23 nt, Human
uacaauuaaaaacuccuccucag

SEQ ID NO: 925411 - RNA, 23 nt, Human
uaggaaaggguccaucauccauc

SEQ ID NO: 925412 - RNA, 19 nt, Human
uauagauaaacucaaugug

SEQ ID NO: 925413 - RNA, 21 nt, Human
uauccaaauaacuaaccaauu

SEQ ID NO: 925414 - RNA, 22 nt, Human
uauuuuaguuuuuuuauacaaa

SEQ ID NO: 925415 - RNA, 26 nt, Human
ucuaagaaaaugauuacguggcagac

SEQ ID NO: 925416 - RNA, 22 nt, Human
ugaaaaagauaauacguuagua

SEQ ID NO: 925417 - RNA, 21 nt, Human
ugaaauuagauuuccugggca

SEQ ID NO: 925418 - RNA, 28 nt, Human
ugagaacccuaaguaugcuagauaauca

SEQ ID NO: 925419 - RNA, 22 nt, Human
ugaggaggcucauuaggaaagg

SEQ ID NO: 925420 - RNA, 21 nt, Human
ugcauauaugauuuguauaug

SEQ ID NO: 925421 - RNA, 19 nt, Human
ugcuagauaaucaacuagg

SEQ ID NO: 925422 - RNA, 22 nt, Human
ugggcaguacuagaaaucuaua

SEQ ID NO: 925423 - RNA, 25 nt, Human
ugucugcauauaugauuuguauaug

SEQ ID NO: 925424 - RNA, 18 nt, Human
uuaaaaacuccuccucag

SEQ ID NO: 925425 - RNA, 18 nt, Human
uuugguuaaaucuggugg

SEQ ID NO: 925426 - RNA, 20 nt, Human
aaaagcauuauaacucacag

SEQ ID NO: 925427 - RNA, 22 nt, Human
aaacaaaacaaaacaaaacaaa

SEQ ID NO: 925428 - RNA, 22 nt, Human
aaacaaaacaaaacaaaacuga

SEQ ID NO: 925429 - RNA, 24 nt, Human
aaacaaaacaaaacaaaacugaaa

SEQ ID NO: 925430 - RNA, 24 nt, Human
aacaaaacaaaacugaaaagggaa

SEQ ID NO: 925431 - RNA, 25 nt, Human
aagagaaaaacaaaacaaaacaaaa

SEQ ID NO: 925432 - RNA, 21 nt, Human
acaaaacaaaacaaaacaaaa

SEQ ID NO: 925433 - RNA, 23 nt, Human
acaaaacaaaacaaaacaaaacu

SEQ ID NO: 925434 - RNA, 19 nt, Human
acaaaacaaaacaaaacug

SEQ ID NO: 925435 - RNA, 22 nt, Human
acaaaacaaaacaaaacugaaa

SEQ ID NO: 925436 - RNA, 21 nt, Human
acccauggugaugaauaagcc

SEQ ID NO: 925437 - RNA, 20 nt, Human
accccuuucuccccagcuuc

SEQ ID NO: 925438 - RNA, 25 nt, Human
acgcuguauccguuguugaggggga

SEQ ID NO: 925439 - RNA, 24 nt, Human
agacuuagauaaggugugaggugg

SEQ ID NO: 925440 - RNA, 23 nt, Human
agagaaaaacaaaacaaaacaaa

SEQ ID NO: 925441 - RNA, 19 nt, Human
aggaaggaaacaucagaga

SEQ ID NO: 925442 - RNA, 24 nt, Human
aggcucagaaaccuccucuaccag

SEQ ID NO: 925443 - RNA, 23 nt, Human
aguuauauucugaaggggcugua

SEQ ID NO: 925444 - RNA, 21 nt, Human
auccguguucuucccccucaa

SEQ ID NO: 925445 - RNA, 20 nt, Human
augaagucuaaaugaacccc

SEQ ID NO: 925446 - RNA, 21 nt, Human
caaaacaaaacaaaacaaaac

SEQ ID NO: 925447 - RNA, 22 nt, Human
caaaacaaaacaaaacaaaacu

SEQ ID NO: 925448 - RNA, 25 nt, Human
caaaacaaaacaaaacaaaacugaa

SEQ ID NO: 925449 - RNA, 23 nt, Human
cauccguguucuucccccucacu

SEQ ID NO: 925450 - RNA, 21 nt, Human
cauuauaacucacagcacaca

SEQ ID NO: 925451 - RNA, 22 nt, Human
ccccucacucccccgcgaaaca

SEQ ID NO: 925452 - RNA, 22 nt, Human
ccccuccgaccucgcuacgccu

SEQ ID NO: 925453 - RNA, 24 nt, Human
ccuccgaccucgcuacgccucucc

SEQ ID NO: 925454 - RNA, 23 nt, Human
cgaaacaaaauauacggaaauac

SEQ ID NO: 925455 - RNA, 23 nt, Human
cgcgaaacaaaauauacggaaau

SEQ ID NO: 925456 - RNA, 18 nt, Human
cucacaugaucccuccaa

SEQ ID NO: 925457 - RNA, 18 nt, Human
cucucccacgcaggucag

SEQ ID NO: 925458 - RNA, 23 nt, Human
cugagugaaagagaaaaacaaaa

SEQ ID NO: 925459 - RNA, 20 nt, Human
gaaaacaaugaggaagaagu

SEQ ID NO: 925460 - RNA, 28 nt, Human
gaaaacaaugaggaagaaguaccauagc

SEQ ID NO: 925461 - RNA, 23 nt, Human
gagaaaaacaaaacaaaacaaaa

SEQ ID NO: 925462 - RNA, 21 nt, Human
gagaaauaaauuugauaacaa

SEQ ID NO: 925463 - RNA, 24 nt, Human
gaucacuuuuuaaguaaacaucac

SEQ ID NO: 925464 - RNA, 18 nt, Human
gcuaugagggaaaagggg

SEQ ID NO: 925465 - RNA, 19 nt, Human
gcugcuuugggagguagcu

SEQ ID NO: 925466 - RNA, 22 nt, Human
gcugcuuugggagguagcuggg

SEQ ID NO: 925467 - RNA, 23 nt, Human
ggaaauacaagugcuugguacua

SEQ ID NO: 925468 - RNA, 24 nt, Human
ggaagaaguaccauagccuacagg

SEQ ID NO: 925469 - RNA, 20 nt, Human
ggagaaugaagucacucucc

SEQ ID NO: 925470 - RNA, 18 nt, Human
ggcagaaaauucagaauu

SEQ ID NO: 925471 - RNA, 21 nt, Human
ggcuacaaggauaaggaagga

SEQ ID NO: 925472 - RNA, 21 nt, Human
uaagcccuugggcuaggcuca

SEQ ID NO: 925473 - RNA, 18 nt, Human
uaaguaaacaucaccaga

SEQ ID NO: 925474 - RNA, 28 nt, Human
uaaguaaacaucaccagaagaaucucuu

SEQ ID NO: 925475 - RNA, 22 nt, Human
uacaaaguccauuuuacuuaac

SEQ ID NO: 925476 - RNA, 24 nt, Human
uacaagugauuuuccuaaauucac

SEQ ID NO: 925477 - RNA, 19 nt, Human
uacaauaaauguuaggcua

SEQ ID NO: 925478 - RNA, 27 nt, Human
uaccagccuguuucauaagaauuacac

SEQ ID NO: 925479 - RNA, 21 nt, Human
uaccauagccuacaggcaccu

SEQ ID NO: 925480 - RNA, 19 nt, Human
uagaaaacaaugaggaaga

SEQ ID NO: 925481 - RNA, 20 nt, Human
uagcauacagaagcucgaaa

SEQ ID NO: 925482 - RNA, 20 nt, Human
uagcugggagaaaaggcaac

SEQ ID NO: 925483 - RNA, 22 nt, Human
uaguagagacaagaauuuuuaa

SEQ ID NO: 925484 - RNA, 28 nt, Human
ucccccgcgaaacaaaauauacggaaau

SEQ ID NO: 925485 - RNA, 23 nt, Human
uccguguucuucccccucacucc

SEQ ID NO: 925486 - RNA, 26 nt, Human
uccucuaccagccuguuucauaagaa

SEQ ID NO: 925487 - RNA, 20 nt, Human
ucucccuuuccccuccgacc

SEQ ID NO: 925488 - RNA, 21 nt, Human
ugaaaagggaacuuucacuac

SEQ ID NO: 925489 - RNA, 23 nt, Human
ugaagucacucucccucccuaga

SEQ ID NO: 925490 - RNA, 23 nt, Human
ugagaacagggcuauuuaaacug

SEQ ID NO: 925491 - RNA, 23 nt, Human
ugcccaauaauaagcacgcugua

SEQ ID NO: 925492 - RNA, 18 nt, Human
ugcuguacaauuacaaag

SEQ ID NO: 925493 - RNA, 22 nt, Human
ugcuguacaauuacaaagucca

SEQ ID NO: 925494 - RNA, 21 nt, Human
uguguucaucaacuuuagcac

SEQ ID NO: 925495 - RNA, 20 nt, Human
uuaccuagaaaacaaugagg

SEQ ID NO: 925496 - RNA, 19 nt, Human
uuauaauaguagagacaag

SEQ ID NO: 925497 - RNA, 18 nt, Human
uucacaacuuucacauuu

SEQ ID NO: 925498 - RNA, 23 nt, Human
uucuuucaggucucucucuuaaa

SEQ ID NO: 925499 - RNA, 22 nt, Human
aaagacagagucucggucuguc

SEQ ID NO: 925500 - RNA, 21 nt, Human
aaccugcaaacuaaaucuaag

SEQ ID NO: 925501 - RNA, 20 nt, Human
aagcagacagaaauuucaca

SEQ ID NO: 925502 - RNA, 24 nt, Human
aaggaaagcagacagaaauuucac

SEQ ID NO: 925503 - RNA, 20 nt, Human
acagacaacuacaauauaug

SEQ ID NO: 925504 - RNA, 19 nt, Human
acaguaagcaacggggaga

SEQ ID NO: 925505 - RNA, 19 nt, Human
acauagaaugguggagacc

SEQ ID NO: 925506 - RNA, 18 nt, Human
acaugccaccacugcggg

SEQ ID NO: 925507 - RNA, 18 nt, Human
acuuuguuacccaggcug

SEQ ID NO: 925508 - RNA, 25 nt, Human
acuuuguuacccaggcuggucuuga

SEQ ID NO: 925509 - RNA, 21 nt, Human
aggcaugagccaccaugacca

SEQ ID NO: 925510 - RNA, 24 nt, Human
aggguguugggauuauaggcauga

SEQ ID NO: 925511 - RNA, 23 nt, Human
agugcaguggagugaucagagcu

SEQ ID NO: 925512 - RNA, 24 nt, Human
agugcaguggagugaucagagcuc

SEQ ID NO: 925513 - RNA, 18 nt, Human
augguggagaccagggca

SEQ ID NO: 925514 - RNA, 19 nt, Human
augugccaccacacccagc

SEQ ID NO: 925515 - RNA, 24 nt, Human
caauggauccucccaccccagucu

SEQ ID NO: 925516 - RNA, 21 nt, Human
caauuaaaaaaaaaaaaaaaa

SEQ ID NO: 925517 - RNA, 19 nt, Human
cacuuuguuacccaggcug

SEQ ID NO: 925518 - RNA, 24 nt, Human
cacuuuguuacccaggcuggucuu

SEQ ID NO: 925519 - RNA, 23 nt, Human
cagccuugaucuccuggucucaa

SEQ ID NO: 925520 - RNA, 20 nt, Human
caugugccaccacacccagc

SEQ ID NO: 925521 - RNA, 18 nt, Human
cauuuuagggaguuggga

SEQ ID NO: 925522 - RNA, 24 nt, Human
ccaggguguugggauuauaggcau

SEQ ID NO: 925523 - RNA, 20 nt, Human
ccagucucggguagcugcac

SEQ ID NO: 925524 - RNA, 20 nt, Human
ccucaggcuacaaaggugaa

SEQ ID NO: 925525 - RNA, 21 nt, Human
ccucccaccccagucucgggu

SEQ ID NO: 925526 - RNA, 19 nt, Human
ccuccugccuuagucuccc

SEQ ID NO: 925527 - RNA, 22 nt, Human
cucaagcuauccuuccuccugc

SEQ ID NO: 925528 - RNA, 21 nt, Human
cugggugugggagggaggugu

SEQ ID NO: 925529 - RNA, 19 nt, Human
cugucacccaggcuggagu

SEQ ID NO: 925530 - RNA, 20 nt, Human
cuguuguuuucuaaguccug

SEQ ID NO: 925531 - RNA, 19 nt, Human
cuuaaccugcaaacuaaau

SEQ ID NO: 925532 - RNA, 23 nt, Human
cuuauaccuucucugguugggca

SEQ ID NO: 925533 - RNA, 23 nt, Human
gaaggaaagcagacagaaauuuc

SEQ ID NO: 925534 - RNA, 24 nt, Human
gagcucgcugcagccuugaucucc

SEQ ID NO: 925535 - RNA, 21 nt, Human
gauuauaggcaugagccacca

SEQ ID NO: 925536 - RNA, 22 nt, Human
gauuauaggcaugagccaccau

SEQ ID NO: 925537 - RNA, 24 nt, Human
gccuuagucucccaggguguuggg

SEQ ID NO: 925538 - RNA, 19 nt, Human
gcugcagccuugaucuccu

SEQ ID NO: 925539 - RNA, 23 nt, Human
gcuggucuugagcuccugaccuc

SEQ ID NO: 925540 - RNA, 24 nt, Human
ggagaauguucaguaagacuugaa

SEQ ID NO: 925541 - RNA, 24 nt, Human
ggauuauaggcaugagccaccaug

SEQ ID NO: 925542 - RNA, 20 nt, Human
ggcaugugccaccacaccca

SEQ ID NO: 925543 - RNA, 24 nt, Human
ggcuggucuugagcuccugaccuc

SEQ ID NO: 925544 - RNA, 20 nt, Human
gggagggaggugugaaaagu

SEQ ID NO: 925545 - RNA, 19 nt, Human
guagagaugggggucucac

SEQ ID NO: 925546 - RNA, 19 nt, Human
gucucggguagcugcacug

SEQ ID NO: 925547 - RNA, 18 nt, Human
uaagcccucaggcuacaa

SEQ ID NO: 925548 - RNA, 24 nt, Human
uaagcuagaacgguaggggaagua

SEQ ID NO: 925549 - RNA, 20 nt, Human
uaaggcauuuuagggaguug

SEQ ID NO: 925550 - RNA, 21 nt, Human
uacaaaucuugaagcacuuua

SEQ ID NO: 925551 - RNA, 24 nt, Human
uacccaggcuggucuugagcuccu

SEQ ID NO: 925552 - RNA, 21 nt, Human
uaggacaaacugaauagccag

SEQ ID NO: 925553 - RNA, 23 nt, Human
uaggacaaacugaauagccagua

SEQ ID NO: 925554 - RNA, 21 nt, Human
uaggcaugagccaccaugacc

SEQ ID NO: 925555 - RNA, 20 nt, Human
uagggaauaugccugagucc

SEQ ID NO: 925556 - RNA, 25 nt, Human
uauacagacaacuacaauauaugau

SEQ ID NO: 925557 - RNA, 22 nt, Human
uauauaauccuuuuuucugaag

SEQ ID NO: 925558 - RNA, 20 nt, Human
ucaauggauccucccacccc

SEQ ID NO: 925559 - RNA, 22 nt, Human
ucacccaggcuggagugcagug

SEQ ID NO: 925560 - RNA, 22 nt, Human
uccacacuggguaaaauaaaag

SEQ ID NO: 925561 - RNA, 24 nt, Human
ucccaggguguugggauuauaggc

SEQ ID NO: 925562 - RNA, 23 nt, Human
ucgcugcagccuugaucuccugg

SEQ ID NO: 925563 - RNA, 19 nt, Human
ucucacuuuguuacccagg

SEQ ID NO: 925564 - RNA, 23 nt, Human
ucucacuuuguuacccaggcugg

SEQ ID NO: 925565 - RNA, 26 nt, Human
ucucacuuuguuacccaggcuggucu

SEQ ID NO: 925566 - RNA, 27 nt, Human
ucucacuuuguuacccaggcuggucuu

SEQ ID NO: 925567 - RNA, 23 nt, Human
ucucggucugucacccaggcugg

SEQ ID NO: 925568 - RNA, 24 nt, Human
ucucggucugucacccaggcugga

SEQ ID NO: 925569 - RNA, 19 nt, Human
ucugucacccaggcuggag

SEQ ID NO: 925570 - RNA, 24 nt, Human
ucugucacccaggcuggagugcag

SEQ ID NO: 925571 - RNA, 23 nt, Human
ugaaagacagagucucggucugu

SEQ ID NO: 925572 - RNA, 20 nt, Human
ugaauccuugcaauaacccu

SEQ ID NO: 925573 - RNA, 19 nt, Human
ugccaccacacccagcugu

SEQ ID NO: 925574 - RNA, 19 nt, Human
uggagugcaguggagugau

SEQ ID NO: 925575 - RNA, 20 nt, Human
uggagugcaguggagugauc

SEQ ID NO: 925576 - RNA, 22 nt, Human
uggauccucccaccccagucuc

SEQ ID NO: 925577 - RNA, 18 nt, Human
ugggauuauaggcaugag

SEQ ID NO: 925578 - RNA, 22 nt, Human
ugggauuauaggcaugagccac

SEQ ID NO: 925579 - RNA, 23 nt, Human
ugggauuauaggcaugagccacc

SEQ ID NO: 925580 - RNA, 24 nt, Human
ugggauuauaggcaugagccacca

SEQ ID NO: 925581 - RNA, 25 nt, Human
ugggauuauaggcaugagccaccau

SEQ ID NO: 925582 - RNA, 23 nt, Human
ugguacagacuacugguuaagag

SEQ ID NO: 925583 - RNA, 20 nt, Human
ugucuuagaaguguggacau

SEQ ID NO: 925584 - RNA, 18 nt, Human
uguuacccaggcuggucu

SEQ ID NO: 925585 - RNA, 21 nt, Human
uguuacccaggcuggucuuga

SEQ ID NO: 925586 - RNA, 18 nt, Human
uuagucucccaggguguu

SEQ ID NO: 925587 - RNA, 22 nt, Human
uuccucagggucuggaaaaugg

SEQ ID NO: 925588 - RNA, 21 nt, Human
uugggauuauaggcaugagcc

SEQ ID NO: 925589 - RNA, 21 nt, Human
uuucauguuuuguagagaugg

SEQ ID NO: 925590 - RNA, 24 nt, Human
uuuguuacccaggcuggucuugag

SEQ ID NO: 925591 - RNA, 20 nt, Human
uuuuugaaagacagagucuc

SEQ ID NO: 925592 - RNA, 20 nt, Human
aaaaaacaagcuguaacuua

SEQ ID NO: 925593 - RNA, 25 nt, Human
aaaaacaaacaaaaccaugcuaugc

SEQ ID NO: 925594 - RNA, 25 nt, Human
aaaaacaaacaaaaccaugcuaugc

SEQ ID NO: 925595 - RNA, 23 nt, Human
aaaaaucacuaaacuaccacaac

SEQ ID NO: 925596 - RNA, 22 nt, Human
aacgcuccaucuccucuguaag

SEQ ID NO: 925597 - RNA, 22 nt, Human
aagaaugugcugcucuccaccc

SEQ ID NO: 925598 - RNA, 23 nt, Human
aagcaaaaacaaacaaaaccaug

SEQ ID NO: 925599 - RNA, 19 nt, Human
aaggaggcugacucagggg

SEQ ID NO: 925600 - RNA, 20 nt, Human
acaaacaaaaccaugcuaug

SEQ ID NO: 925601 - RNA, 21 nt, Human
accaugcaaucccacacacaa

SEQ ID NO: 925602 - RNA, 21 nt, Human
acccaacaguggcccagcaca

SEQ ID NO: 925603 - RNA, 22 nt, Human
acuaauccuaauccugaacaug

SEQ ID NO: 925604 - RNA, 21 nt, Human
agaaaauugaaagcaaaaaca

SEQ ID NO: 925605 - RNA, 24 nt, Human
agaaagaacaugaaaaauaaacau

SEQ ID NO: 925606 - RNA, 19 nt, Human
agguagaacuaacucaaaa

SEQ ID NO: 925607 - RNA, 24 nt, Human
auagugcaguauucucacaaaaca

SEQ ID NO: 925608 - RNA, 18 nt, Human
augucaaaaacguauagc

SEQ ID NO: 925609 - RNA, 20 nt, Human
auuaauuauccucuauuuca

SEQ ID NO: 925610 - RNA, 21 nt, Human
auucacuggucuucauaauaa

SEQ ID NO: 925611 - RNA, 18 nt, Human
auuugcuuuuucucucca

SEQ ID NO: 925612 - RNA, 20 nt, Human
caaaacaacuuuugggacaa

SEQ ID NO: 925613 - RNA, 26 nt, Human
caaaagaggcacugcaucuggaagua

SEQ ID NO: 925614 - RNA, 19 nt, Human
caaauaauguagugcaguc

SEQ ID NO: 925615 - RNA, 19 nt, Human
caacaggaacaaaaguaaa

SEQ ID NO: 925616 - RNA, 25 nt, Human
caaucccacacacaaucagaaagga

SEQ ID NO: 925617 - RNA, 22 nt, Human
cagauccaugugugacaaauaa

SEQ ID NO: 925618 - RNA, 20 nt, Human
cagggguguaagcaacagua

SEQ ID NO: 925619 - RNA, 18 nt, Human
cauuugcuuuuucucucc

SEQ ID NO: 925620 - RNA, 18 nt, Human
ccccuccucccuuuucuc

SEQ ID NO: 925621 - RNA, 19 nt, Human
ccccuccucccuuuucuca

SEQ ID NO: 925622 - RNA, 20 nt, Human
ccccuccucccuuuucucaa

SEQ ID NO: 925623 - RNA, 22 nt, Human
ccucuguaagaaugugcugcuc

SEQ ID NO: 925624 - RNA, 21 nt, Human
cuaauccuaauccugaacaug

SEQ ID NO: 925625 - RNA, 27 nt, Human
cucauaacgcuccaucucuugacgggc

SEQ ID NO: 925626 - RNA, 19 nt, Human
cuccaaaagaggcacugca

SEQ ID NO: 925627 - RNA, 21 nt, Human
cucccuugucccaagcucggg

SEQ ID NO: 925628 - RNA, 22 nt, Human
cucucaaaaaacaagcuguaac

SEQ ID NO: 925629 - RNA, 19 nt, Human
cugacucaggggcgggcag

SEQ ID NO: 925630 - RNA, 19 nt, Human
gugaagauaccuauccaca

SEQ ID NO: 925631 - RNA, 21 nt, Human
guggcccagcacauuccaucc

SEQ ID NO: 925632 - RNA, 26 nt, Human
guggcccagcacauuccauccgcucc

SEQ ID NO: 925633 - RNA, 19 nt, Human
guuaaaaacaacaggaaca

SEQ ID NO: 925634 - RNA, 22 nt, Human
uaaaaacaacaggaacaaaagu

SEQ ID NO: 925635 - RNA, 18 nt, Human
uaacagauccauguguga

SEQ ID NO: 925636 - RNA, 20 nt, Human
uaagaauaauuagguaagag

SEQ ID NO: 925637 - RNA, 24 nt, Human
uaaggaguuuuuaguucuaccuuu

SEQ ID NO: 925638 - RNA, 21 nt, Human
uaaugcaaauacaaauguagc

SEQ ID NO: 925639 - RNA, 21 nt, Human
uaccacaacuuaaaacuugua

SEQ ID NO: 925640 - RNA, 20 nt, Human
uagaugcaaucaggacacca

SEQ ID NO: 925641 - RNA, 25 nt, Human
ucagaaagaacaugaaaaauaaaca

SEQ ID NO: 925642 - RNA, 21 nt, Human
ucagacuaucuuccccuccuc

SEQ ID NO: 925643 - RNA, 22 nt, Human
uccgcuccaccuagaugcaauc

SEQ ID NO: 925644 - RNA, 24 nt, Human
ucugaaccaccaugggaagacccu

SEQ ID NO: 925645 - RNA, 27 nt, Human
ugaaaaauaaacaugucuucuccaaaa

SEQ ID NO: 925646 - RNA, 18 nt, Human
ugacucaggggcgggcag

SEQ ID NO: 925647 - RNA, 20 nt, Human
ugagaaaaagaguaaugauu

SEQ ID NO: 925648 - RNA, 24 nt, Human
ugcaguauucucacaaaacagaga

SEQ ID NO: 925649 - RNA, 20 nt, Human
ugcugcucuccacccaacag

SEQ ID NO: 925650 - RNA, 24 nt, Human
ugggcaccagguagaacuaacuca

SEQ ID NO: 925651 - RNA, 22 nt, Human
uguaauugugaaaauuagacuc

SEQ ID NO: 925652 - RNA, 24 nt, Human
uuaaaaaauuuaugcauacuagga

SEQ ID NO: 925653 - RNA, 22 nt, Human
uuaaaaacagacuuucaggggu

SEQ ID NO: 925654 - RNA, 20 nt, Human
uucacuggucuucauaauaa

SEQ ID NO: 925655 - RNA, 18 nt, Human
uuccccuccucccuuuuc

SEQ ID NO: 925656 - RNA, 20 nt, Human
uuuuuuuuuuuuuaacuuuu

SEQ ID NO: 925657 - RNA, 23 nt, Human
aaaaaagaacaggauaacagcga

SEQ ID NO: 925658 - RNA, 20 nt, Human
aaaagaacaggauaacagcg

SEQ ID NO: 925659 - RNA, 24 nt, Human
aaaauacuaaauuccuacuauaau

SEQ ID NO: 925660 - RNA, 19 nt, Human
aaagaaaauaaacuauaaa

SEQ ID NO: 925661 - RNA, 19 nt, Human
aacaccccugagaaagaga

SEQ ID NO: 925662 - RNA, 24 nt, Human
aauaaacuauaaaacacaaaucca

SEQ ID NO: 925663 - RNA, 22 nt, Human
aauagucuuugaacauuuguuc

SEQ ID NO: 925664 - RNA, 20 nt, Human
aaucaauuuuggucagaccg

SEQ ID NO: 925665 - RNA, 19 nt, Human
aaugucuaucaauagguga

SEQ ID NO: 925666 - RNA, 19 nt, Human
acacccuucacccccaaau

SEQ ID NO: 925667 - RNA, 19 nt, Human
acccccaaauuccacagcu

SEQ ID NO: 925668 - RNA, 22 nt, Human
agaaguaaacaaaauaaaguca

SEQ ID NO: 925669 - RNA, 25 nt, Human
agaauuaaaagcaaucugucauuua

SEQ ID NO: 925670 - RNA, 20 nt, Human
agacaccaggagcauaagca

SEQ ID NO: 925671 - RNA, 18 nt, Human
aggucaaaaguguuucuu

SEQ ID NO: 925672 - RNA, 25 nt, Human
auacaugguuauuuacuggaguuga

SEQ ID NO: 925673 - RNA, 25 nt, Human
caaaagacaccaggagcauaagcac

SEQ ID NO: 925674 - RNA, 20 nt, Human
caaagcaaaggaaaacaaac

SEQ ID NO: 925675 - RNA, 24 nt, Human
caaucaaagcaaaggaaaacaaac

SEQ ID NO: 925676 - RNA, 18 nt, Human
caaucugucauuuagauu

SEQ ID NO: 925677 - RNA, 22 nt, Human
caauucacagucucaggaaucc

SEQ ID NO: 925678 - RNA, 19 nt, Human
caauuuucaagcauauaau

SEQ ID NO: 925679 - RNA, 20 nt, Human
cacacccuucacccccaaag

SEQ ID NO: 925680 - RNA, 24 nt, Human
caccagcaaguggagcaaaagaca

SEQ ID NO: 925681 - RNA, 27 nt, Human
cacccccaaauuccacagcugguucaa

SEQ ID NO: 925682 - RNA, 25 nt, Human
cacccuucacccccaaauuccacag

SEQ ID NO: 925683 - RNA, 19 nt, Human
caccugacugaaaguggac

SEQ ID NO: 925684 - RNA, 18 nt, Human
cacugaauucucuuucuc

SEQ ID NO: 925685 - RNA, 27 nt, Human
cagcaaggaacaccccugagaaagaga

SEQ ID NO: 925686 - RNA, 22 nt, Human
cagccaaaaacuguagaccauc

SEQ ID NO: 925687 - RNA, 18 nt, Human
cagcgauguucagggaac

SEQ ID NO: 925688 - RNA, 28 nt, Human
cccccaucuccccuagugcucccaggcu

SEQ ID NO: 925689 - RNA, 21 nt, Human
cccuucacccccaaauuccac

SEQ ID NO: 925690 - RNA, 20 nt, Human
ccucacacccuucaccccca

SEQ ID NO: 925691 - RNA, 20 nt, Human
ccucuuuaaaauuguaacac

SEQ ID NO: 925692 - RNA, 20 nt, Human
cuagagaaaugaaaauuaaa

SEQ ID NO: 925693 - RNA, 21 nt, Human
cuaggcaacuuguccuauacc

SEQ ID NO: 925694 - RNA, 23 nt, Human
cuauaccacuuccucacacccuu

SEQ ID NO: 925695 - RNA, 21 nt, Human
cuccccuagugcucccaggcu

SEQ ID NO: 925696 - RNA, 18 nt, Human
cucuuguccauagucauu

SEQ ID NO: 925697 - RNA, 22 nt, Human
cugaaggaaacaauaauuuuaa

SEQ ID NO: 925698 - RNA, 25 nt, Human
cugcuucuuuuuaaauuauucuuaa

SEQ ID NO: 925699 - RNA, 22 nt, Human
cuggcugccugugggcugggug

SEQ ID NO: 925700 - RNA, 22 nt, Human
gaaaguggacacaagagaacuu

SEQ ID NO: 925701 - RNA, 19 nt, Human
gaauagcuaaauggaacua

SEQ ID NO: 925702 - RNA, 19 nt, Human
gcaacuuguccuauaccac

SEQ ID NO: 925703 - RNA, 18 nt, Human
gcuggcugccugugggcu

SEQ ID NO: 925704 - RNA, 21 nt, Human
gcuggcugccugugggcuggg

SEQ ID NO: 925705 - RNA, 18 nt, Human
ggaaauucccaccuaauc

SEQ ID NO: 925706 - RNA, 25 nt, Human
gggaacaagggagauaaccgguacc

SEQ ID NO: 925707 - RNA, 22 nt, Human
guggagcaaaagacaccaggag

SEQ ID NO: 925708 - RNA, 23 nt, Human
guggagcaaaagacaccaggagc

SEQ ID NO: 925709 - RNA, 19 nt, Human
uaaaacaccagcaagugga

SEQ ID NO: 925710 - RNA, 21 nt, Human
uaaaacaccagcaaguggagc

SEQ ID NO: 925711 - RNA, 24 nt, Human
uaaaauacuaaauuccuacuauaa

SEQ ID NO: 925712 - RNA, 24 nt, Human
uaacagcgauguucagggaacaag

SEQ ID NO: 925713 - RNA, 28 nt, Human
uagaagguguguguguuuaauuuacaca

SEQ ID NO: 925714 - RNA, 21 nt, Human
uauaccacuuccucacacccu

SEQ ID NO: 925715 - RNA, 24 nt, Human
uaucaggggcugguuucccccgau

SEQ ID NO: 925716 - RNA, 21 nt, Human
uauuuuauuaacuaucucaau

SEQ ID NO: 925717 - RNA, 25 nt, Human
ucaaaagcaaauaggagaaauauca

SEQ ID NO: 925718 - RNA, 23 nt, Human
ucaauagcaugauacaugcagua

SEQ ID NO: 925719 - RNA, 22 nt, Human
ucaaugacaaugcgugcccgaa

SEQ ID NO: 925720 - RNA, 18 nt, Human
ucacuagcaauuuuaauu

SEQ ID NO: 925721 - RNA, 24 nt, Human
uccaaccaaggagaauuaaaagca

SEQ ID NO: 925722 - RNA, 18 nt, Human
ucccucaaaaugaagaga

SEQ ID NO: 925723 - RNA, 21 nt, Human
ucgcacacguguuugccucuu

SEQ ID NO: 925724 - RNA, 20 nt, Human
ucucucacaggucaaaagug

SEQ ID NO: 925725 - RNA, 19 nt, Human
ucugaucucacccugccuc

SEQ ID NO: 925726 - RNA, 28 nt, Human
ucugcuucuuuuuaaauuauucuuaauu

SEQ ID NO: 925727 - RNA, 23 nt, Human
ugaaagaggcaaaaucuacugau

SEQ ID NO: 925728 - RNA, 21 nt, Human
ugaaauacauauacauugugg

SEQ ID NO: 925729 - RNA, 24 nt, Human
ugaaauggcugcuuugggaauguc

SEQ ID NO: 925730 - RNA, 23 nt, Human
ugaaucuauaaaacaccagcaag

SEQ ID NO: 925731 - RNA, 18 nt, Human
ugaaugaguucuggagga

SEQ ID NO: 925732 - RNA, 21 nt, Human
ugccccgguccucugaucuca

SEQ ID NO: 925733 - RNA, 28 nt, Human
uggaacagagccauauuucucuucuuuc

SEQ ID NO: 925734 - RNA, 26 nt, Human
uggaauagcuaaauggaacuaacuaa

SEQ ID NO: 925735 - RNA, 25 nt, Human
uggcacaccugacugaaaguggaca

SEQ ID NO: 925736 - RNA, 20 nt, Human
uggcugccugugggcugggu

SEQ ID NO: 925737 - RNA, 20 nt, Human
ugggaaugucugucuuuuac

SEQ ID NO: 925738 - RNA, 23 nt, Human
ugggauggcacaccugacugaaa

SEQ ID NO: 925739 - RNA, 20 nt, Human
uucauaacagccaaaaacug

SEQ ID NO: 925740 - RNA, 22 nt, Human
uucccccgauacacaaaaagac

SEQ ID NO: 925741 - RNA, 18 nt, Human
uuccuacuauaauccagg

SEQ ID NO: 925742 - RNA, 24 nt, Human
uuccucacacccuucacccccaaa

SEQ ID NO: 925743 - RNA, 19 nt, Human
uucucuuucucagcaagga

SEQ ID NO: 925744 - RNA, 20 nt, Human
uugaacauuuguuccaacca

SEQ ID NO: 925745 - RNA, 19 nt, Human
uuguaacacuuaauacuga

SEQ ID NO: 925746 - RNA, 22 nt, Human
uuguacauguuuaucauguaua

SEQ ID NO: 925747 - RNA, 21 nt, Human
uuucucagcaaggaacacccc

SEQ ID NO: 925748 - RNA, 24 nt, Human
uuucucagcaaggaacaccccuga

SEQ ID NO: 925749 - RNA, 23 nt, Human
uuugggaaugucugucuuuuacg

SEQ ID NO: 925750 - RNA, 24 nt, Human
aaaaauuuucuugggcccucacaa

SEQ ID NO: 925751 - RNA, 18 nt, Human
aaaagcaaauaaaaauug

SEQ ID NO: 925752 - RNA, 22 nt, Human
aaaaggaaccuaauuuuucuca

SEQ ID NO: 925753 - RNA, 23 nt, Human
aaacucgcaauauguaagucagc

SEQ ID NO: 925754 - RNA, 19 nt, Human
aaauaaaaauugugagucu

SEQ ID NO: 925755 - RNA, 22 nt, Human
aaauaaauacaaaugaaaaaga

SEQ ID NO: 925756 - RNA, 18 nt, Human
aaauacaaaugaaaaaga

SEQ ID NO: 925757 - RNA, 22 nt, Human
aaaucagaacguaugucaagug

SEQ ID NO: 925758 - RNA, 21 nt, Human
aaaucaguugccugaaacuga

SEQ ID NO: 925759 - RNA, 24 nt, Human
aaccaagaaagggaaacuuaaguc

SEQ ID NO: 925760 - RNA, 21 nt, Human
aagaggaaaaauuuucuuggg

SEQ ID NO: 925761 - RNA, 21 nt, Human
aagcauuugacaugggcaaua

SEQ ID NO: 925762 - RNA, 18 nt, Human
aagcuuuacauaaagagu

SEQ ID NO: 925763 - RNA, 22 nt, Human
accccuaugugccacaaaauga

SEQ ID NO: 925764 - RNA, 21 nt, Human
agaaaggaauuaaaccauaaa

SEQ ID NO: 925765 - RNA, 21 nt, Human
aggaugauuuacaagcaacua

SEQ ID NO: 925766 - RNA, 19 nt, Human
aguggccaucuauucuugu

SEQ ID NO: 925767 - RNA, 23 nt, Human
auagaauuccucaguuuucaaaa

SEQ ID NO: 925768 - RNA, 23 nt, Human
aucaauugcuuccuuuaaaaaau

SEQ ID NO: 925769 - RNA, 25 nt, Human
caaauaaaucgcuagcuccuaggcc

SEQ ID NO: 925770 - RNA, 24 nt, Human
caaauaaaugcaacagaaugugga

SEQ ID NO: 925771 - RNA, 23 nt, Human
cagcagagauagauguugaggca

SEQ ID NO: 925772 - RNA, 23 nt, Human
caggguuuagguuugcuaacgcc

SEQ ID NO: 925773 - RNA, 19 nt, Human
cauaaaccaagaaagggaa

SEQ ID NO: 925774 - RNA, 18 nt, Human
cauuuuuauuuucagggg

SEQ ID NO: 925775 - RNA, 18 nt, Human
cauuuuuauuuucagggg

SEQ ID NO: 925776 - RNA, 18 nt, Human
ccacugcugugacuggca

SEQ ID NO: 925777 - RNA, 20 nt, Human
ccaucagcugucguauucuu

SEQ ID NO: 925778 - RNA, 18 nt, Human
ccccacugccugucuucu

SEQ ID NO: 925779 - RNA, 21 nt, Human
ccuacagcuaaagacagccau

SEQ ID NO: 925780 - RNA, 27 nt, Human
ccuacagcuaaagacagccauucuaac

SEQ ID NO: 925781 - RNA, 19 nt, Human
ccuggaucaaaaacaaauu

SEQ ID NO: 925782 - RNA, 20 nt, Human
cuaaagacagccauucuaac

SEQ ID NO: 925783 - RNA, 26 nt, Human
cuacagcuaaagacagccauucuaac

SEQ ID NO: 925784 - RNA, 19 nt, Human
cucagauaaugaguucagg

SEQ ID NO: 925785 - RNA, 20 nt, Human
gaaaaagcagaggacucaga

SEQ ID NO: 925786 - RNA, 19 nt, Human
gagaaaaagcagaggacuc

SEQ ID NO: 925787 - RNA, 19 nt, Human
gagaacaguagaacagacc

SEQ ID NO: 925788 - RNA, 22 nt, Human
gauauugaggggccgagaaaaa

SEQ ID NO: 925789 - RNA, 21 nt, Human
ggacucagacccagacuaaug

SEQ ID NO: 925790 - RNA, 22 nt, Human
ggggccgagaaaaagcagagga

SEQ ID NO: 925791 - RNA, 19 nt, Human
uaaagacagccauucuaac

SEQ ID NO: 925792 - RNA, 22 nt, Human
uaaagcuuuacauaaagaguuu

SEQ ID NO: 925793 - RNA, 19 nt, Human
uaagaaaugauacauugca

SEQ ID NO: 925794 - RNA, 19 nt, Human
uaauacauaucuaaaauca

SEQ ID NO: 925795 - RNA, 18 nt, Human
uaccuugaugacuaagcc

SEQ ID NO: 925796 - RNA, 20 nt, Human
uagcuccuaggccuacagcu

SEQ ID NO: 925797 - RNA, 23 nt, Human
uaugucaaguggaaauuuaaauc

SEQ ID NO: 925798 - RNA, 23 nt, Human
uauuuaacuaucauaucuacaua

SEQ ID NO: 925799 - RNA, 21 nt, Human
ucaaugacacuucaaaaagaa

SEQ ID NO: 925800 - RNA, 19 nt, Human
ucccuggaucaaaaacaaa

SEQ ID NO: 925801 - RNA, 18 nt, Human
ucgcuagcuccuaggccu

SEQ ID NO: 925802 - RNA, 20 nt, Human
ucggcaaauaaaugcaacag

SEQ ID NO: 925803 - RNA, 23 nt, Human
ucguauucuuucaacuucagacc

SEQ ID NO: 925804 - RNA, 21 nt, Human
ucucuuuucccaagugagagc

SEQ ID NO: 925805 - RNA, 18 nt, Human
ucuucucagccucucucc

SEQ ID NO: 925806 - RNA, 23 nt, Human
ugaaaaagaacaacuaaucuucu

SEQ ID NO: 925807 - RNA, 24 nt, Human
ugaaaaggaaccuaauuuuucuca

SEQ ID NO: 925808 - RNA, 22 nt, Human
ugacacuucaaaaagaaaggaa

SEQ ID NO: 925809 - RNA, 24 nt, Human
ugaggcaggagaauuuuggaguuc

SEQ ID NO: 925810 - RNA, 26 nt, Human
ugaguauaauuaaaauagggcaagac

SEQ ID NO: 925811 - RNA, 22 nt, Human
ugagucugaaaaugaaucuuua

SEQ ID NO: 925812 - RNA, 24 nt, Human
ugcaacagaauguggaagucagaa

SEQ ID NO: 925813 - RNA, 25 nt, Human
ugccugaaacugagaacaguagaac

SEQ ID NO: 925814 - RNA, 20 nt, Human
uguuguuuuaauccuccaag

SEQ ID NO: 925815 - RNA, 22 nt, Human
uuaauuuacuucucuuuuccca

SEQ ID NO: 925816 - RNA, 22 nt, Human
uuacauacuuaacauucauucc

SEQ ID NO: 925817 - RNA, 25 nt, Human
uuacauacuuaacauucauuccauc

SEQ ID NO: 925818 - RNA, 21 nt, Human
uuagaaucucaaccugccuuc

SEQ ID NO: 925819 - RNA, 22 nt, Human
uuagaaucucaaccugccuucu

SEQ ID NO: 925820 - RNA, 19 nt, Human
uucaaaaccaagcauuuga

SEQ ID NO: 925821 - RNA, 20 nt, Human
uucaggggaaaagaggaaaa

SEQ ID NO: 925822 - RNA, 22 nt, Human
uuccaucagcugucguauucuu

SEQ ID NO: 925823 - RNA, 24 nt, Human
uuucauaggcauuugaaaucaguu

SEQ ID NO: 925824 - RNA, 23 nt, Human
uuuccaccccaggucuuuuccac

SEQ ID NO: 925825 - RNA, 21 nt, Human
uuucccaagugagagccccac

SEQ ID NO: 925826 - RNA, 19 nt, Human
uuuuuuuuuuuuuaaggga

SEQ ID NO: 925827 - RNA, 25 nt, Human
uuuuuuuuuuuuuuuuuuuuaaggg

SEQ ID NO: 925828 - RNA, 21 nt, Human
aaacaugguuaaauagugccg

SEQ ID NO: 925829 - RNA, 23 nt, Human
aaacgcagccaccgccgucacca

SEQ ID NO: 925830 - RNA, 20 nt, Human
aaacgcagccaccgccgucu

SEQ ID NO: 925831 - RNA, 21 nt, Human
aagauaaccgccccggccccc

SEQ ID NO: 925832 - RNA, 24 nt, Human
aaguguuuucuguuaaaaggaucc

SEQ ID NO: 925833 - RNA, 23 nt, Human
accaauauugguauuuuugccau

SEQ ID NO: 925834 - RNA, 18 nt, Human
acuuuagggaaugaggaa

SEQ ID NO: 925835 - RNA, 18 nt, Human
agggaagggccgccugcg

SEQ ID NO: 925836 - RNA, 22 nt, Human
aucuaucacccccaccucccag

SEQ ID NO: 925837 - RNA, 19 nt, Human
auggugguuccuuucugga

SEQ ID NO: 925838 - RNA, 21 nt, Human
auuuacauacaguaaaaucac

SEQ ID NO: 925839 - RNA, 18 nt, Human
caagauaaccgccccggc

SEQ ID NO: 925840 - RNA, 23 nt, Human
cacccccaccucccagucccugg

SEQ ID NO: 925841 - RNA, 21 nt, Human
caccucccuccgccccccggg

SEQ ID NO: 925842 - RNA, 23 nt, Human
cagcagccaggacuuucucucug

SEQ ID NO: 925843 - RNA, 24 nt, Human
cagucuuacugaaaaaagggaaac

SEQ ID NO: 925844 - RNA, 19 nt, Human
ccagcccagcugcuaaccu

SEQ ID NO: 925845 - RNA, 22 nt, Human
ccaggacuuucucucugggucc

SEQ ID NO: 925846 - RNA, 18 nt, Human
cccaagauaaccgccccg

SEQ ID NO: 925847 - RNA, 18 nt, Human
ccccccgggacagauggc

SEQ ID NO: 925848 - RNA, 19 nt, Human
cccggcccccucucagcga

SEQ ID NO: 925849 - RNA, 22 nt, Human
ccgccccggcccccucucagcg

SEQ ID NO: 925850 - RNA, 20 nt, Human
cgccccggcccccucucagc

SEQ ID NO: 925851 - RNA, 23 nt, Human
cggaggcgauuuugacaccuccc

SEQ ID NO: 925852 - RNA, 21 nt, Human
cguuccaaguguguuuucugc

SEQ ID NO: 925853 - RNA, 22 nt, Human
cugaagguccugcagugcccaa

SEQ ID NO: 925854 - RNA, 22 nt, Human
cuuccaaaacgcagccaccgcc

SEQ ID NO: 925855 - RNA, 27 nt, Human
cuuccaaaacgcagccaccgccgucac

SEQ ID NO: 925856 - RNA, 18 nt, Human
gaaguagaauauaucuau

SEQ ID NO: 925857 - RNA, 19 nt, Human
gauggcaacgccuggggac

SEQ ID NO: 925858 - RNA, 18 nt, Human
gauuuugacaccucccuc

SEQ ID NO: 925859 - RNA, 21 nt, Human
gcccauuugugcauucuuggu

SEQ ID NO: 925860 - RNA, 21 nt, Human
ggaaaaaauaucuccuuguga

SEQ ID NO: 925861 - RNA, 22 nt, Human
ggaggcgauuuugacaccuccc

SEQ ID NO: 925862 - RNA, 21 nt, Human
guagaauauaucuaucacccc

SEQ ID NO: 925863 - RNA, 23 nt, Human
gugcauucuugguaacggugggu

SEQ ID NO: 925864 - RNA, 23 nt, Human
uaaaaguugcucagaacaguaau

SEQ ID NO: 925865 - RNA, 23 nt, Human
uaaccgccccggcccccucucag

SEQ ID NO: 925866 - RNA, 22 nt, Human
uaauaauaauaguccagucuua

SEQ ID NO: 925867 - RNA, 21 nt, Human
uagaaggggcuguuguugggc

SEQ ID NO: 925868 - RNA, 24 nt, Human
uauaucuaucacccccaccuccca

SEQ ID NO: 925869 - RNA, 19 nt, Human
uauggugguuccuuucugg

SEQ ID NO: 925870 - RNA, 21 nt, Human
uauguaauuaaauguuuucag

SEQ ID NO: 925871 - RNA, 24 nt, Human
ucagaccgagugugucagcagcca

SEQ ID NO: 925872 - RNA, 19 nt, Human
ucagugguuagcuuugauu

SEQ ID NO: 925873 - RNA, 23 nt, Human
uccaaaaacagaauuuugaaaua

SEQ ID NO: 925874 - RNA, 18 nt, Human
ugaaaagaaacgcuaacu

SEQ ID NO: 925875 - RNA, 23 nt, Human
ugaagguccugcagugcccaaga

SEQ ID NO: 925876 - RNA, 18 nt, Human
ugacaccucccuccgccc

SEQ ID NO: 925877 - RNA, 23 nt, Human
ugaguagacuacaguuuuuuggg

SEQ ID NO: 925878 - RNA, 18 nt, Human
ugaguccauagguuuguu

SEQ ID NO: 925879 - RNA, 19 nt, Human
ugcauucuugguaacggug

SEQ ID NO: 925880 - RNA, 20 nt, Human
ugcgucagggugucugcccu

SEQ ID NO: 925881 - RNA, 24 nt, Human
uggaauggcucuugguuccgaccc

SEQ ID NO: 925882 - RNA, 18 nt, Human
uggaauggcucuugguuu

SEQ ID NO: 925883 - RNA, 21 nt, Human
uggcuugcuuuucagaccgag

SEQ ID NO: 925884 - RNA, 19 nt, Human
ugggacaguaauuugagaa

SEQ ID NO: 925885 - RNA, 19 nt, Human
uggugaaaagaaacgcuaa

SEQ ID NO: 925886 - RNA, 19 nt, Human
uguuaacgugcugcucuuc

SEQ ID NO: 925887 - RNA, 20 nt, Human
uuaaaaguugcucagaacag

SEQ ID NO: 925888 - RNA, 24 nt, Human
uuaaucuuaagaaauauguaauua

SEQ ID NO: 925889 - RNA, 20 nt, Human
uuccaaaacgcagccaccgc

SEQ ID NO: 925890 - RNA, 19 nt, Human
uucuguuaaaaggauccua

SEQ ID NO: 925891 - RNA, 22 nt, Human
uuuauggaaaaaggauuugacu

SEQ ID NO: 925892 - RNA, 22 nt, Human
uuucuggaguuaaucccccucc

SEQ ID NO: 925893 - RNA, 24 nt, Human
uuuggcaagauuuuuauggaaaaa

SEQ ID NO: 925894 - RNA, 18 nt, Human
uuugugcauuucaaaaau

SEQ ID NO: 925895 - RNA, 19 nt, Human
uuuuuuuuuuuuaagaagu

SEQ ID NO: 925896 - RNA, 19 nt, Human
uuuuuuuuuuuuuuuuugg

SEQ ID NO: 925897 - RNA, 22 nt, Human
uuuuuuuuuuuuuuuuuggcuu

SEQ ID NO: 925898 - RNA, 18 nt, Human
aaaaacugucaagaaccu

SEQ ID NO: 925899 - RNA, 24 nt, Human
aaaaggcugaaaagacagaaauca

SEQ ID NO: 925900 - RNA, 22 nt, Human
aaaaggucuauaguccaaaaaa

SEQ ID NO: 925901 - RNA, 20 nt, Human
aaaauuacagaauuagccaa

SEQ ID NO: 925902 - RNA, 22 nt, Human
aaacaauaagaugugaccaaga

SEQ ID NO: 925903 - RNA, 22 nt, Human
aacaagaugggaaagcauucac

SEQ ID NO: 925904 - RNA, 20 nt, Human
aagaagccaggcaauagacu

SEQ ID NO: 925905 - RNA, 22 nt, Human
aagcauucacagccacagagaa

SEQ ID NO: 925906 - RNA, 18 nt, Human
aaggggugggguauaaga

SEQ ID NO: 925907 - RNA, 24 nt, Human
aauaaacaauaagaugugaccaag

SEQ ID NO: 925908 - RNA, 21 nt, Human
accucauuaucucuacacuuc

SEQ ID NO: 925909 - RNA, 22 nt, Human
accugaugauccagauauacug

SEQ ID NO: 925910 - RNA, 18 nt, Human
acgugcaagaacagaaau

SEQ ID NO: 925911 - RNA, 22 nt, Human
acuaacauguuaccauauauac

SEQ ID NO: 925912 - RNA, 18 nt, Human
acucacacaguaacucau

SEQ ID NO: 925913 - RNA, 18 nt, Human
acucacacaguaacucau

SEQ ID NO: 925914 - RNA, 23 nt, Human
agaaaaaggcugaaaagacagaa

SEQ ID NO: 925915 - RNA, 22 nt, Human
agaaaacaaaaagaaugaaagg

SEQ ID NO: 925916 - RNA, 21 nt, Human
agaaacacagacacuugcaga

SEQ ID NO: 925917 - RNA, 19 nt, Human
agaaagaaacaagguuaga

SEQ ID NO: 925918 - RNA, 22 nt, Human
agaaagaaacaagguuagagaa

SEQ ID NO: 925919 - RNA, 21 nt, Human
agaagaacgugcaagaacaga

SEQ ID NO: 925920 - RNA, 21 nt, Human
agagaaacacagacacuugca

SEQ ID NO: 925921 - RNA, 19 nt, Human
agaugccaccaaaaaaaag

SEQ ID NO: 925922 - RNA, 21 nt, Human
agaugccaccaaaaaaaaggg

SEQ ID NO: 925923 - RNA, 18 nt, Human
agccuauacccacccagc

SEQ ID NO: 925924 - RNA, 21 nt, Human
agcuguccacaacucuccaaa

SEQ ID NO: 925925 - RNA, 27 nt, Human
aggaacaauaugagagcuguccacaac

SEQ ID NO: 925926 - RNA, 21 nt, Human
aggcaaaaacagaaaacaaaa

SEQ ID NO: 925927 - RNA, 28 nt, Human
aggcaaaaacagaaaacaaaagggaccc

SEQ ID NO: 925928 - RNA, 25 nt, Human
agugcuucuaagguuauucuuaauu

SEQ ID NO: 925929 - RNA, 18 nt, Human
aucaaguagaagaaggga

SEQ ID NO: 925930 - RNA, 20 nt, Human
augcacagucuugaagagaa

SEQ ID NO: 925931 - RNA, 20 nt, Human
auguuaccauauauacccaa

SEQ ID NO: 925932 - RNA, 21 nt, Human
caaaaaggaccauuuaugaca

SEQ ID NO: 925933 - RNA, 21 nt, Human
caaaaaggaccauuuaugaca

SEQ ID NO: 925934 - RNA, 22 nt, Human
cacugauaguugcaggcaaggc

SEQ ID NO: 925935 - RNA, 19 nt, Human
cacugcacucagugcugag

SEQ ID NO: 925936 - RNA, 24 nt, Human
cacuucaaaauacauauaccuaga

SEQ ID NO: 925937 - RNA, 23 nt, Human
cagaaagaaacaagguuagagaa

SEQ ID NO: 925938 - RNA, 22 nt, Human
cagaguagcuauucuagaagac

SEQ ID NO: 925939 - RNA, 22 nt, Human
cagcagccuauacccacccagc

SEQ ID NO: 925940 - RNA, 23 nt, Human
cagcagccuauacccacccagca

SEQ ID NO: 925941 - RNA, 20 nt, Human
cagcaugucacagaaaucuu

SEQ ID NO: 925942 - RNA, 21 nt, Human
cagccaagcuaacucaauuac

SEQ ID NO: 925943 - RNA, 19 nt, Human
caggauuccuaagaauauc

SEQ ID NO: 925944 - RNA, 19 nt, Human
caggauuccuaagaauauc

SEQ ID NO: 925945 - RNA, 21 nt, Human
cagugcugaggacucagcagu

SEQ ID NO: 925946 - RNA, 24 nt, Human
cauccaaaaaggaccauuuaugac

SEQ ID NO: 925947 - RNA, 24 nt, Human
cauccaaaaaggaccauuuaugac

SEQ ID NO: 925948 - RNA, 25 nt, Human
cauccaaaaaggaccauuuaugaca

SEQ ID NO: 925949 - RNA, 25 nt, Human
cauccaaaaaggaccauuuaugaca

SEQ ID NO: 925950 - RNA, 22 nt, Human
ccaaaaaggaccauuuaugaca

SEQ ID NO: 925951 - RNA, 22 nt, Human
ccaaaaaggaccauuuaugaca

SEQ ID NO: 925952 - RNA, 24 nt, Human
ccaaaaggucuauaguccaaaaaa

SEQ ID NO: 925953 - RNA, 24 nt, Human
ccaagacaugagacagcagccuau

SEQ ID NO: 925954 - RNA, 19 nt, Human
ccacagagaacauccugaa

SEQ ID NO: 925955 - RNA, 19 nt, Human
ccaggaaaugacguuaggg

SEQ ID NO: 925956 - RNA, 18 nt, Human
ccucugcugaggcuugcc

SEQ ID NO: 925957 - RNA, 20 nt, Human
ccugugaauuucagagauga

SEQ ID NO: 925958 - RNA, 20 nt, Human
ccuuaagaauacuacuuucu

SEQ ID NO: 925959 - RNA, 19 nt, Human
cugacaaccaaggaacaau

SEQ ID NO: 925960 - RNA, 18 nt, Human
cuucacuccaaucucaga

SEQ ID NO: 925961 - RNA, 24 nt, Human
cuuccagguaccaacugugaacaa

SEQ ID NO: 925962 - RNA, 18 nt, Human
gaaaagacagaaaucaag

SEQ ID NO: 925963 - RNA, 23 nt, Human
gaaacacagacacuugcagaucu

SEQ ID NO: 925964 - RNA, 22 nt, Human
gaacaauaugagagcuguccac

SEQ ID NO: 925965 - RNA, 24 nt, Human
gaagcuuuacuuuggggaauggga

SEQ ID NO: 925966 - RNA, 22 nt, Human
gacaaacaaguauaucagcaau

SEQ ID NO: 925967 - RNA, 18 nt, Human
gagaugccaccaaaaaaa

SEQ ID NO: 925968 - RNA, 22 nt, Human
gcauuuaccacgcacugcacuc

SEQ ID NO: 925969 - RNA, 20 nt, Human
gccacagagaacauccugaa

SEQ ID NO: 925970 - RNA, 20 nt, Human
guagaagaagccaggcaaua

SEQ ID NO: 925971 - RNA, 25 nt, Human
gugaauuucagagaugaagacagag

SEQ ID NO: 925972 - RNA, 18 nt, Human
uaacuuggcugacaacca

SEQ ID NO: 925973 - RNA, 23 nt, Human
uaccauauauacccaagggugcc

SEQ ID NO: 925974 - RNA, 21 nt, Human
uacuacuuucugggagagcaa

SEQ ID NO: 925975 - RNA, 19 nt, Human
ucaaaauaaacccagccug

SEQ ID NO: 925976 - RNA, 24 nt, Human
ucacagaaaucuucacuccaaucu

SEQ ID NO: 925977 - RNA, 21 nt, Human
ucacagccacagagaacaucc

SEQ ID NO: 925978 - RNA, 23 nt, Human
ucacuggauggccuucaggaauc

SEQ ID NO: 925979 - RNA, 23 nt, Human
uccagagauuuuccaaaucaucu

SEQ ID NO: 925980 - RNA, 18 nt, Human
ucccucccagagaaacac

SEQ ID NO: 925981 - RNA, 19 nt, Human
ucccuguaagccaugcaca

SEQ ID NO: 925982 - RNA, 21 nt, Human
ucuccagagauuuuccaaauc

SEQ ID NO: 925983 - RNA, 23 nt, Human
ucuccagagauuuuccaaaucau

SEQ ID NO: 925984 - RNA, 24 nt, Human
ucuccagagauuuuccaaaucauc

SEQ ID NO: 925985 - RNA, 19 nt, Human
ucucugggagaaggucaau

SEQ ID NO: 925986 - RNA, 21 nt, Human
ugaaaagacagaaaucaagua

SEQ ID NO: 925987 - RNA, 24 nt, Human
ugaaaagacagaaaucaaguagaa

SEQ ID NO: 925988 - RNA, 25 nt, Human
ugacaaacaaguauaucagcaauau

SEQ ID NO: 925989 - RNA, 19 nt, Human
ugacaaccaaggaacaaua

SEQ ID NO: 925990 - RNA, 19 nt, Human
ugacaaggaaaaaauaagg

SEQ ID NO: 925991 - RNA, 19 nt, Human
ugaccaagacaugagacag

SEQ ID NO: 925992 - RNA, 22 nt, Human
ugaccaagacaugagacagcag

SEQ ID NO: 925993 - RNA, 19 nt, Human
ugagaccaggaaaugacgu

SEQ ID NO: 925994 - RNA, 24 nt, Human
ugagaugccaccaaaaaaaagggg

SEQ ID NO: 925995 - RNA, 18 nt, Human
ugagcuggucaagagcug

SEQ ID NO: 925996 - RNA, 24 nt, Human
ugagcuggucaagagcugauucgg

SEQ ID NO: 925997 - RNA, 22 nt, Human
ugcacuccugaaugauauaugu

SEQ ID NO: 925998 - RNA, 21 nt, Human
ugcuucuaagguuauucuuaa

SEQ ID NO: 925999 - RNA, 22 nt, Human
uggaugagcauuccagguuugg

SEQ ID NO: 926000 - RNA, 18 nt, Human
ugggagaagaacgugcaa

SEQ ID NO: 926001 - RNA, 19 nt, Human
uguagaagaagccaggcaa

SEQ ID NO: 926002 - RNA, 22 nt, Human
uguagaauauaaaccugacaac

SEQ ID NO: 926003 - RNA, 20 nt, Human
ugucaagaaccucugcugag

SEQ ID NO: 926004 - RNA, 23 nt, Human
ugucacagaaaucuucacuccaa

SEQ ID NO: 926005 - RNA, 22 nt, Human
uucacagccacagagaacaucc

SEQ ID NO: 926006 - RNA, 19 nt, Human
uugccuaacaucucagagg

SEQ ID NO: 926007 - RNA, 23 nt, Human
uuuucagucucuccagagauuuu

SEQ ID NO: 926008 - RNA, 22 nt, Human
uuuuuuuuuuuuuuuuucuagg

SEQ ID NO: 926009 - RNA, 24 nt, Human
aaguagauuuuuuuaaagugguuu

SEQ ID NO: 926010 - RNA, 19 nt, Human
acaagucaagccaaagcgg

SEQ ID NO: 926011 - RNA, 24 nt, Human
agacucaguuggaagaggaagaau

SEQ ID NO: 926012 - RNA, 24 nt, Human
ggagaggacuuuacaccccucuag

SEQ ID NO: 926013 - RNA, 24 nt, Human
guagauuuuuuuaaagugguuuua

SEQ ID NO: 926014 - RNA, 25 nt, Human
uacuuaguaaaaaguagauuuuuuu

SEQ ID NO: 926015 - RNA, 19 nt, Human
uccagaucaggacucuagg

SEQ ID NO: 926016 - RNA, 28 nt, Human
uggaagaggaagaauuacaguuccagau

SEQ ID NO: 926017 - RNA, 23 nt, Human
uguuacuuaguaaaaaguagauu

SEQ ID NO: 926018 - RNA, 26 nt, Human
uuuucugcaaauccaucugagucuga

SEQ ID NO: 926019 - RNA, 19 nt, Human
aaacaguacagcaccaaca

SEQ ID NO: 926020 - RNA, 19 nt, Human
aacauuuccucaguaaucu

SEQ ID NO: 926021 - RNA, 22 nt, Human
acuggguguggugccucacgcc

SEQ ID NO: 926022 - RNA, 23 nt, Human
agaaaaaaguaaaaaucaaagau

SEQ ID NO: 926023 - RNA, 24 nt, Human
agaaaaaaguaaaaaucaaagaug

SEQ ID NO: 926024 - RNA, 21 nt, Human
agaaugggggagaaauuagaa

SEQ ID NO: 926025 - RNA, 23 nt, Human
agaugaacuagaauaacaaagaa

SEQ ID NO: 926026 - RNA, 23 nt, Human
agcacuuugggaggcuggggugg

SEQ ID NO: 926027 - RNA, 18 nt, Human
auaaauuuuccucuaagc

SEQ ID NO: 926028 - RNA, 20 nt, Human
auauuuuaaaauuucuguua

SEQ ID NO: 926029 - RNA, 21 nt, Human
caaaauaauucauggacuuaa

SEQ ID NO: 926030 - RNA, 24 nt, Human
cacgccuauaaucucagcacuuug

SEQ ID NO: 926031 - RNA, 24 nt, Human
cagcacuuugggaggcuggggugg

SEQ ID NO: 926032 - RNA, 23 nt, Human
caguacagcaccaacauuuccuc

SEQ ID NO: 926033 - RNA, 22 nt, Human
ccuauaaucucagcacuuuggg

SEQ ID NO: 926034 - RNA, 22 nt, Human
cucacgccuauaaucucagcac

SEQ ID NO: 926035 - RNA, 24 nt, Human
cucacgccuauaaucucagcacuu

SEQ ID NO: 926036 - RNA, 24 nt, Human
cucuucuuuuucuacuuuccuaaa

SEQ ID NO: 926037 - RNA, 22 nt, Human
cugcccagugguagaggcuugc

SEQ ID NO: 926038 - RNA, 20 nt, Human
cuuccucugcaaaccagccu

SEQ ID NO: 926039 - RNA, 24 nt, Human
gauuacuugggcucgggaguuuga

SEQ ID NO: 926040 - RNA, 19 nt, Human
gcauuucccccugcccagu

SEQ ID NO: 926041 - RNA, 19 nt, Human
gcccagugguagaggcuug

SEQ ID NO: 926042 - RNA, 18 nt, Human
ggcucgggaguuugagac

SEQ ID NO: 926043 - RNA, 24 nt, Human
ggugccucacgccuauaaucucag

SEQ ID NO: 926044 - RNA, 23 nt, Human
gguguggugccucacgccuauaa

SEQ ID NO: 926045 - RNA, 20 nt, Human
guaaaaaucaaagauguuua

SEQ ID NO: 926046 - RNA, 22 nt, Human
gugggugucucuucagagcagg

SEQ ID NO: 926047 - RNA, 23 nt, Human
uaaaaaaagucauaauuucaagu

SEQ ID NO: 926048 - RNA, 20 nt, Human
uagaauaacaaagaaaaaag

SEQ ID NO: 926049 - RNA, 26 nt, Human
uagaauaacaaagaaaaaaguaaaaa

SEQ ID NO: 926050 - RNA, 19 nt, Human
uagaugaacuagaauaaca

SEQ ID NO: 926051 - RNA, 19 nt, Human
uagcuacauugcauagauu

SEQ ID NO: 926052 - RNA, 18 nt, Human
uauaacaaucaaaaggau

SEQ ID NO: 926053 - RNA, 19 nt, Human
uauaugcauucauacuaua

SEQ ID NO: 926054 - RNA, 21 nt, Human
ucaaaaggauuugagauaauu

SEQ ID NO: 926055 - RNA, 19 nt, Human
ucuguuaagauuucuucuu

SEQ ID NO: 926056 - RNA, 23 nt, Human
ugacauuguuguacaacagaucu

SEQ ID NO: 926057 - RNA, 20 nt, Human
ugagacuagcuugggcccuc

SEQ ID NO: 926058 - RNA, 26 nt, Human
ugauaguuguauuuuuauuuucauuu

SEQ ID NO: 926059 - RNA, 21 nt, Human
ugccaaaauuaaacaguacag

SEQ ID NO: 926060 - RNA, 22 nt, Human
ugccucacgccuauaaucucag

SEQ ID NO: 926061 - RNA, 24 nt, Human
ugccucacgccuauaaucucagca

SEQ ID NO: 926062 - RNA, 18 nt, Human
ugggaagauaauccaugu

SEQ ID NO: 926063 - RNA, 21 nt, Human
ugggaggcugggguggcggau

SEQ ID NO: 926064 - RNA, 22 nt, Human
ugggcccucaaauguaauuuau

SEQ ID NO: 926065 - RNA, 22 nt, Human
uggguguggugccucacgccua

SEQ ID NO: 926066 - RNA, 21 nt, Human
uugagauaauuuuuuucauua

SEQ ID NO: 926067 - RNA, 24 nt, Human
uugcauagauuuugauaguuguau

SEQ ID NO: 926068 - RNA, 24 nt, Human
uuuuuucccucuauuuccuauuuu

SEQ ID NO: 926069 - RNA, 18 nt, Human
uuuuuuuuuuuuuuuuug

SEQ ID NO: 926070 - RNA, 22 nt, Human
uuuuuuuuuuuuuuuuugccaa

SEQ ID NO: 926071 - RNA, 21 nt, Human
aaaaacagagcaccugacuua

SEQ ID NO: 926072 - RNA, 24 nt, Human
aaaacagagcaccugacuuaaaau

SEQ ID NO: 926073 - RNA, 20 nt, Human
aaagagauuauguucugccu

SEQ ID NO: 926074 - RNA, 22 nt, Human
aaagagauuauguucugccuuc

SEQ ID NO: 926075 - RNA, 25 nt, Human
aaauagcauuuuuaaaaguaccucu

SEQ ID NO: 926076 - RNA, 22 nt, Human
aagcauuaauuagcaagaauau

SEQ ID NO: 926077 - RNA, 19 nt, Human
acaaauauucagaccauag

SEQ ID NO: 926078 - RNA, 19 nt, Human
acagagcaccugacuuaaa

SEQ ID NO: 926079 - RNA, 19 nt, Human
acauaggaaauuuuggggg

SEQ ID NO: 926080 - RNA, 21 nt, Human
accauguaaaaacuuccugaa

SEQ ID NO: 926081 - RNA, 22 nt, Human
agaccauagcaaguggucauuu

SEQ ID NO: 926082 - RNA, 18 nt, Human
agagcaccugacuuaaaa

SEQ ID NO: 926083 - RNA, 23 nt, Human
agagguccauuuacugggagcua

SEQ ID NO: 926084 - RNA, 21 nt, Human
agcauuaauuagcaagaauau

SEQ ID NO: 926085 - RNA, 21 nt, Human
agcuaaugaagcuucaguuuc

SEQ ID NO: 926086 - RNA, 28 nt, Human
aggcacccagcagauuggugccuggcga

SEQ ID NO: 926087 - RNA, 21 nt, Human
aguguuggaccugagacuuug

SEQ ID NO: 926088 - RNA, 22 nt, Human
auuauguuaguccuuggugaua

SEQ ID NO: 926089 - RNA, 26 nt, Human
caaaagucuaaccuuuuaguaccauc

SEQ ID NO: 926090 - RNA, 18 nt, Human
cagagcaccugacuuaaa

SEQ ID NO: 926091 - RNA, 18 nt, Human
cagagccuugugccacuc

SEQ ID NO: 926092 - RNA, 20 nt, Human
cagcagauuggugccuggcg

SEQ ID NO: 926093 - RNA, 18 nt, Human
cucacaguguccucacau

SEQ ID NO: 926094 - RNA, 20 nt, Human
cucuccuauguaugagaccu

SEQ ID NO: 926095 - RNA, 18 nt, Human
ggaggcuuagaaauaaca

SEQ ID NO: 926096 - RNA, 19 nt, Human
gggggacacaaauauucag

SEQ ID NO: 926097 - RNA, 19 nt, Human
guuggaccugagacuuugc

SEQ ID NO: 926098 - RNA, 25 nt, Human
uaaaaucuacacaucucaguuuuga

SEQ ID NO: 926099 - RNA, 23 nt, Human
uaaagaaagagauuauguucugc

SEQ ID NO: 926100 - RNA, 18 nt, Human
uaaauaaaaacagagcac

SEQ ID NO: 926101 - RNA, 19 nt, Human
uaaauguaugcucauaguc

SEQ ID NO: 926102 - RNA, 21 nt, Human
uaacaaaauacuauaaacugg

SEQ ID NO: 926103 - RNA, 20 nt, Human
uagcaagaauaugaaguaaa

SEQ ID NO: 926104 - RNA, 21 nt, Human
uagcaaguggucauuuguguc

SEQ ID NO: 926105 - RNA, 22 nt, Human
uagcaugaguuaaagaaagaga

SEQ ID NO: 926106 - RNA, 22 nt, Human
uauguaugagaccuaguuauuu

SEQ ID NO: 926107 - RNA, 22 nt, Human
uauuuuaaauaaaaacagagca

SEQ ID NO: 926108 - RNA, 26 nt, Human
ucagaccauagcaaguggugggaaac

SEQ ID NO: 926109 - RNA, 21 nt, Human
uccaaggucaaggcacccagc

SEQ ID NO: 926110 - RNA, 22 nt, Human
uccgaaaugauuucucaacuag

SEQ ID NO: 926111 - RNA, 21 nt, Human
ugaagcuucaguuucaggucu

SEQ ID NO: 926112 - RNA, 19 nt, Human
ugaauccauuuccacuaaa

SEQ ID NO: 926113 - RNA, 18 nt, Human
ugacuugccuggugucau

SEQ ID NO: 926114 - RNA, 19 nt, Human
ugagacuuugccuccaauu

SEQ ID NO: 926115 - RNA, 21 nt, Human
ugccuucucagagggugcuac

SEQ ID NO: 926116 - RNA, 18 nt, Human
uggaagggacuagccagg

SEQ ID NO: 926117 - RNA, 18 nt, Human
uggcgauauuuuguaugg

SEQ ID NO: 926118 - RNA, 18 nt, Human
uggcgauauuuuguaugg

SEQ ID NO: 926119 - RNA, 18 nt, Human
ugggggcccagaagucca

SEQ ID NO: 926120 - RNA, 26 nt, Human
ugggggcccagaaguccaaggucaag

SEQ ID NO: 926121 - RNA, 22 nt, Human
ugucagaguuacuuucagauuu

SEQ ID NO: 926122 - RNA, 21 nt, Human
uguugcauagauaauacuaaa

SEQ ID NO: 926123 - RNA, 19 nt, Human
uuaguccuuggcgauacuu

SEQ ID NO: 926124 - RNA, 19 nt, Human
uuaguccuuggcgauacuu

SEQ ID NO: 926125 - RNA, 19 nt, Human
uuaguccuuggcgauacuu

SEQ ID NO: 926126 - RNA, 19 nt, Human
uuaguccuuggcgauacuu

SEQ ID NO: 926127 - RNA, 19 nt, Human
uuaguccuuggcgauacuu

SEQ ID NO: 926128 - RNA, 19 nt, Human
uuaguccuuggcgauacuu

SEQ ID NO: 926129 - RNA, 24 nt, Human
aaaagaaagcucauccccuuuagc

SEQ ID NO: 926130 - RNA, 20 nt, Human
aaagugcugagauuacaggc

SEQ ID NO: 926131 - RNA, 20 nt, Human
aaagugcugagauuacaggc

SEQ ID NO: 926132 - RNA, 24 nt, Human
aaagugcugagauuacaggcguga

SEQ ID NO: 926133 - RNA, 20 nt, Human
aaccuccaucucccaggcuc

SEQ ID NO: 926134 - RNA, 26 nt, Human
aagugcugagauuacaggcgugagcc

SEQ ID NO: 926135 - RNA, 21 nt, Human
aauuuuugacauaaucaaaau

SEQ ID NO: 926136 - RNA, 21 nt, Human
acuaaacuccuaucuauagua

SEQ ID NO: 926137 - RNA, 21 nt, Human
acuacuuuuuuuuuuuuuuuu

SEQ ID NO: 926138 - RNA, 20 nt, Human
agauuacaggcgugagccac

SEQ ID NO: 926139 - RNA, 18 nt, Human
aggcagaaaugcaguggc

SEQ ID NO: 926140 - RNA, 21 nt, Human
aggcagaaaugcaguggcacc

SEQ ID NO: 926141 - RNA, 24 nt, Human
aggugaucugcccgccucggccuc

SEQ ID NO: 926142 - RNA, 18 nt, Human
agugcugagauuacaggc

SEQ ID NO: 926143 - RNA, 24 nt, Human
augggguuuugccgccuuggccag

SEQ ID NO: 926144 - RNA, 20 nt, Human
auuacaggcaugagccacca

SEQ ID NO: 926145 - RNA, 24 nt, Human
auuuuuguauuuuuaguagagaug

SEQ ID NO: 926146 - RNA, 23 nt, Human
caaccuccaucucccaggcucaa

SEQ ID NO: 926147 - RNA, 24 nt, Human
caaccuccaucucccaggcucaag

SEQ ID NO: 926148 - RNA, 20 nt, Human
caagcgauucuccugccuca

SEQ ID NO: 926149 - RNA, 22 nt, Human
caagcgauucuccugccucagc

SEQ ID NO: 926150 - RNA, 24 nt, Human
caccacaccuggcuaauuuuugua

SEQ ID NO: 926151 - RNA, 26 nt, Human
cauuuugccagcccugggcacccacu

SEQ ID NO: 926152 - RNA, 20 nt, Human
ccagcccugggcacccacug

SEQ ID NO: 926153 - RNA, 23 nt, Human
ccagcccugggcacccacuguaa

SEQ ID NO: 926154 - RNA, 20 nt, Human
cccaggcucaagcgauucuc

SEQ ID NO: 926155 - RNA, 20 nt, Human
cccauuuugccagcccuggg

SEQ ID NO: 926156 - RNA, 21 nt, Human
cccauuuugccagcccugggc

SEQ ID NO: 926157 - RNA, 24 nt, Human
cccgaguagcugcuauuacaggca

SEQ ID NO: 926158 - RNA, 18 nt, Human
cccuuuucccauuuugcc

SEQ ID NO: 926159 - RNA, 23 nt, Human
cccuuuucccauuuugccagccc

SEQ ID NO: 926160 - RNA, 19 nt, Human
ccgccuuggccaggcuggu

SEQ ID NO: 926161 - RNA, 21 nt, Human
ccgccuuggccaggcuggucu

SEQ ID NO: 926162 - RNA, 22 nt, Human
ccuucauucucuugauuaguua

SEQ ID NO: 926163 - RNA, 18 nt, Human
ccuuuaggaacuuuuauu

SEQ ID NO: 926164 - RNA, 19 nt, Human
cgugaccucaggugaucug

SEQ ID NO: 926165 - RNA, 23 nt, Human
cuaauuuuuguauuuuuaguaga

SEQ ID NO: 926166 - RNA, 24 nt, Human
cucaagcgauucuccugccucagc

SEQ ID NO: 926167 - RNA, 24 nt, Human
cucacugcaaccuccaucucccag

SEQ ID NO: 926168 - RNA, 25 nt, Human
cucccaggcucaagcgauucuccug

SEQ ID NO: 926169 - RNA, 25 nt, Human
cucccuuuucccauuuugccagccc

SEQ ID NO: 926170 - RNA, 26 nt, Human
cucgugaccucaggugaucugcccgc

SEQ ID NO: 926171 - RNA, 23 nt, Human
cugcaaccuccaucucccaggcu

SEQ ID NO: 926172 - RNA, 24 nt, Human
cugcaaccuccaucucccaggcuc

SEQ ID NO: 926173 - RNA, 23 nt, Human
cugccucagccucccgaguagcu

SEQ ID NO: 926174 - RNA, 19 nt, Human
cuuaaagugcugagauuac

SEQ ID NO: 926175 - RNA, 23 nt, Human
cuuguauagcuccaggggaaaau

SEQ ID NO: 926176 - RNA, 18 nt, Human
cuuuuuuuuuuuuuuuug

SEQ ID NO: 926177 - RNA, 24 nt, Human
gaccucaggugaucugcccgccuc

SEQ ID NO: 926178 - RNA, 24 nt, Human
gacggagucucgcucuguugccag

SEQ ID NO: 926179 - RNA, 18 nt, Human
gauuacaggcgugagcca

SEQ ID NO: 926180 - RNA, 24 nt, Human
gauuacaggcgugagccacagugc

SEQ ID NO: 926181 - RNA, 21 nt, Human
gauucuccugccucagccucc

SEQ ID NO: 926182 - RNA, 26 nt, Human
gccauuaccucucccuuuucccauuu

SEQ ID NO: 926183 - RNA, 20 nt, Human
gccucagccucccgaguagc

SEQ ID NO: 926184 - RNA, 20 nt, Human
gccuuggccaggcuggucuu

SEQ ID NO: 926185 - RNA, 24 nt, Human
gcgauucuccugccucagccuccc

SEQ ID NO: 926186 - RNA, 22 nt, Human
ggcuacuuuacuaaacuccuau

SEQ ID NO: 926187 - RNA, 22 nt, Human
gggguuuugccgccuuggccag

SEQ ID NO: 926188 - RNA, 21 nt, Human
guccauuuagauuuggcaagu

SEQ ID NO: 926189 - RNA, 24 nt, Human
gugaucugcccgccucggccucuu

SEQ ID NO: 926190 - RNA, 24 nt, Human
uaaagugcugagauuacaggcgug

SEQ ID NO: 926191 - RNA, 22 nt, Human
uaagucuuucaagaaacuuuaa

SEQ ID NO: 926192 - RNA, 24 nt, Human
uaauuuuuguauuuuuaguagaga

SEQ ID NO: 926193 - RNA, 18 nt, Human
uacaggcaugagccacca

SEQ ID NO: 926194 - RNA, 22 nt, Human
uacaggcaugagccaccacacc

SEQ ID NO: 926195 - RNA, 24 nt, Human
uacaggcgugagccacagugccca

SEQ ID NO: 926196 - RNA, 24 nt, Human
uacauuuauuaacuuaggaagaac

SEQ ID NO: 926197 - RNA, 24 nt, Human
uaccuuuucuugucuagucuuuuu

SEQ ID NO: 926198 - RNA, 23 nt, Human
uacuuuacuaaacuccuaucuau

SEQ ID NO: 926199 - RNA, 22 nt, Human
uaggaacuuuuauuuguaacuu

SEQ ID NO: 926200 - RNA, 21 nt, Human
uaggaagaacuaauaauaaug

SEQ ID NO: 926201 - RNA, 19 nt, Human
uaguagagaugggguuuug

SEQ ID NO: 926202 - RNA, 22 nt, Human
uaguagagaugggguuuugccg

SEQ ID NO: 926203 - RNA, 25 nt, Human
uauuuuguuuguauaugacaacugg

SEQ ID NO: 926204 - RNA, 23 nt, Human
ucaagaaacuuuaaacuuuucau

SEQ ID NO: 926205 - RNA, 24 nt, Human
ucacugcaaccuccaucucccagg

SEQ ID NO: 926206 - RNA, 25 nt, Human
ucacugcaaccuccaucucccaggc

SEQ ID NO: 926207 - RNA, 26 nt, Human
ucagcucacugcaaccuccaucuccc

SEQ ID NO: 926208 - RNA, 22 nt, Human
ucauuugaaguguacaauucaa

SEQ ID NO: 926209 - RNA, 24 nt, Human
ucauuugaaguguacaauucaagg

SEQ ID NO: 926210 - RNA, 22 nt, Human
uccaacaauaucaccagcaaau

SEQ ID NO: 926211 - RNA, 21 nt, Human
ucccaggcucaagcgauucuc

SEQ ID NO: 926212 - RNA, 24 nt, Human
ucccaggcucaagcgauucuccug

SEQ ID NO: 926213 - RNA, 24 nt, Human
ucccgaguagcugcuauuacaggc

SEQ ID NO: 926214 - RNA, 24 nt, Human
ucucccaggcucaagcgauucucc

SEQ ID NO: 926215 - RNA, 24 nt, Human
ucuccugccucagccucccgagua

SEQ ID NO: 926216 - RNA, 23 nt, Human
ucucgcucuguugccaggcagaa

SEQ ID NO: 926217 - RNA, 23 nt, Human
ucuguagauaccuuuucuugucu

SEQ ID NO: 926218 - RNA, 20 nt, Human
ucuguugccaggcagaaauu

SEQ ID NO: 926219 - RNA, 18 nt, Human
ugaccucaggugaucugc

SEQ ID NO: 926220 - RNA, 20 nt, Human
ugaccucaggugaucugccc

SEQ ID NO: 926221 - RNA, 24 nt, Human
ugaccucaggugaucugcccgccu

SEQ ID NO: 926222 - RNA, 22 nt, Human
ugagacggagucucgcucuguu

SEQ ID NO: 926223 - RNA, 18 nt, Human
ugagauuacaggcgugag

SEQ ID NO: 926224 - RNA, 19 nt, Human
ugagauuacaggcgugagc

SEQ ID NO: 926225 - RNA, 21 nt, Human
ugagauuacaggcgugagcca

SEQ ID NO: 926226 - RNA, 22 nt, Human
ugagauuacaggcgugagccac

SEQ ID NO: 926227 - RNA, 22 nt, Human
ugagauuacaggcgugagccac

SEQ ID NO: 926228 - RNA, 26 nt, Human
ugagauuacaggcgugagccacagug

SEQ ID NO: 926229 - RNA, 27 nt, Human
ugagauuacaggcgugagccacagugc

SEQ ID NO: 926230 - RNA, 25 nt, Human
ugcaaccuccaucucccaggcucaa

SEQ ID NO: 926231 - RNA, 22 nt, Human
ugcaguggcaccaucucagcuc

SEQ ID NO: 926232 - RNA, 23 nt, Human
ugccucagccucccgaguagcug

SEQ ID NO: 926233 - RNA, 24 nt, Human
ugcuauuacaggcaugagccacca

SEQ ID NO: 926234 - RNA, 25 nt, Human
ugcugagauuacaggcgugagccac

SEQ ID NO: 926235 - RNA, 19 nt, Human
uggcaccaucucagcucac

SEQ ID NO: 926236 - RNA, 24 nt, Human
uggcaccaucucagcucacugcaa

SEQ ID NO: 926237 - RNA, 24 nt, Human
uggccaggcuggucuugaacucgu

SEQ ID NO: 926238 - RNA, 24 nt, Human
ugggguuuugccgccuuggccagg

SEQ ID NO: 926239 - RNA, 21 nt, Human
uguauuuuuaguagagauggg

SEQ ID NO: 926240 - RNA, 20 nt, Human
uguugcuguuguaaaggucu

SEQ ID NO: 926241 - RNA, 24 nt, Human
uuaaagugcugagauuacaggcgu

SEQ ID NO: 926242 - RNA, 18 nt, Human
uuaguagagaugggguuu

SEQ ID NO: 926243 - RNA, 22 nt, Human
uuaguagagaugggguuuugcc

SEQ ID NO: 926244 - RNA, 23 nt, Human
uuaguagagaugggguuuugccg

SEQ ID NO: 926245 - RNA, 23 nt, Human
uuaucacuuccaaaagaaagcuc

SEQ ID NO: 926246 - RNA, 23 nt, Human
uuguauuuuuaguagagaugggg

SEQ ID NO: 926247 - RNA, 25 nt, Human
uuucaagaaacuuuaaacuuuucau

SEQ ID NO: 926248 - RNA, 20 nt, Human
uuucagaagugacuuuauag

SEQ ID NO: 926249 - RNA, 20 nt, Human
uuugaaguguacaauucaag

SEQ ID NO: 926250 - RNA, 21 nt, Human
uuuugccagcccugggcaccc

SEQ ID NO: 926251 - RNA, 23 nt, Human
uuuugccaugguauuuuuuguuc

SEQ ID NO: 926252 - RNA, 21 nt, Human
uuuuuaguagagaugggguuu

SEQ ID NO: 926253 - RNA, 24 nt, Human
uuuuuaguagagaugggguuuugc

SEQ ID NO: 926254 - RNA, 20 nt, Human
uuuuuguauuuuuaguagag

SEQ ID NO: 926255 - RNA, 25 nt, Human
uuuuuuuuuuuugagacggagucuc

SEQ ID NO: 926256 - RNA, 22 nt, Human
uuuuuuuuuuuuuugagacgga

SEQ ID NO: 926257 - RNA, 22 nt, Human
uuuuuuuuuuuuuuuuuccuuu

SEQ ID NO: 926258 - RNA, 23 nt, Human
uuuuuuuuuuuuuuuuuuccuuu

SEQ ID NO: 926259 - RNA, 26 nt, Human
uuuuuuuuuuuuuuuuuuuccuuuag

SEQ ID NO: 926260 - RNA, 18 nt, Human
aaaaaaaaaaaaaaaagc

SEQ ID NO: 926261 - RNA, 19 nt, Human
aaaaaaaaaaaaaagcggc

SEQ ID NO: 926262 - RNA, 23 nt, Human
aaaaauaacaaauaagacacagc

SEQ ID NO: 926263 - RNA, 20 nt, Human
aaaaggaaaaaauuuagcca

SEQ ID NO: 926264 - RNA, 20 nt, Human
aaaaugccauucugccaaaa

SEQ ID NO: 926265 - RNA, 18 nt, Human
aaaauuagcugggcgugg

SEQ ID NO: 926266 - RNA, 23 nt, Human
aaaauuuccaaaacugauuaaag

SEQ ID NO: 926267 - RNA, 20 nt, Human
aacauagugaaaccccgucu

SEQ ID NO: 926268 - RNA, 21 nt, Human
aacauagugaaaccccgucuc

SEQ ID NO: 926269 - RNA, 20 nt, Human
aacauggcaaaaccaugucu

SEQ ID NO: 926270 - RNA, 22 nt, Human
aacauggcaaaaccaugucucu

SEQ ID NO: 926271 - RNA, 24 nt, Human
aacugcuugauccugggaggugga

SEQ ID NO: 926272 - RNA, 19 nt, Human
aagacuguaaaccagccuu

SEQ ID NO: 926273 - RNA, 24 nt, Human
aaucaccugaaccugggagacaga

SEQ ID NO: 926274 - RNA, 25 nt, Human
aauggcaugugaaaauacuaauuua

SEQ ID NO: 926275 - RNA, 26 nt, Human
acaagaaugcuaaaaacuaaagauaa

SEQ ID NO: 926276 - RNA, 21 nt, Human
acacacauauaugugcauaua

SEQ ID NO: 926277 - RNA, 20 nt, Human
acacgccuauaaucccagca

SEQ ID NO: 926278 - RNA, 24 nt, Human
acagagcaagacuccaucucaaaa

SEQ ID NO: 926279 - RNA, 24 nt, Human
acagagcgagacucugucucaaaa

SEQ ID NO: 926280 - RNA, 23 nt, Human
acauaagugaaaaaguggcuuug

SEQ ID NO: 926281 - RNA, 29 nt, Human
acauauacacacauauaugugcauauaua

SEQ ID NO: 926282 - RNA, 18 nt, Human
accaugucucuacuaaaa

SEQ ID NO: 926283 - RNA, 24 nt, Human
accccgucucuacugaaaauacaa

SEQ ID NO: 926284 - RNA, 28 nt, Human
acuccaucucaaaaaaaaaaaaaaaaaa

SEQ ID NO: 926285 - RNA, 23 nt, Human
acugcacuucagccuggcgacag

SEQ ID NO: 926286 - RNA, 25 nt, Human
acugcacuucagccuggcgacagag

SEQ ID NO: 926287 - RNA, 24 nt, Human
agaagauaggauuaggaaaccaga

SEQ ID NO: 926288 - RNA, 24 nt, Human
agacagagguugcagugagccaag

SEQ ID NO: 926289 - RNA, 22 nt, Human
agagguugcagugagccaagau

SEQ ID NO: 926290 - RNA, 24 nt, Human
agagguugcagugagccaagauug

SEQ ID NO: 926291 - RNA, 22 nt, Human
agagugaaaacaguauuugaaa

SEQ ID NO: 926292 - RNA, 24 nt, Human
agcacuuugggaggccgaggcagg

SEQ ID NO: 926293 - RNA, 18 nt, Human
agccuggccaacauggca

SEQ ID NO: 926294 - RNA, 21 nt, Human
agccuggcgacagagcgagac

SEQ ID NO: 926295 - RNA, 23 nt, Human
agccuggcgacagagcgagacuc

SEQ ID NO: 926296 - RNA, 23 nt, Human
agcugggcgugguggcaggugcc

SEQ ID NO: 926297 - RNA, 18 nt, Human
aggcaggagaaucaccug

SEQ ID NO: 926298 - RNA, 22 nt, Human
aggcaggagaaucaccugaacc

SEQ ID NO: 926299 - RNA, 24 nt, Human
aggcaggagaaucaccugaaccug

SEQ ID NO: 926300 - RNA, 24 nt, Human
aggcagguggaucaugaggucagg

SEQ ID NO: 926301 - RNA, 20 nt, Human
aggccgaggcagguggauca

SEQ ID NO: 926302 - RNA, 21 nt, Human
aggcgggcagaucacuugagg

SEQ ID NO: 926303 - RNA, 23 nt, Human
aggcgggcagaucacuugagguc

SEQ ID NO: 926304 - RNA, 26 nt, Human
aggcgggcagaucacuugaggucagg

SEQ ID NO: 926305 - RNA, 24 nt, Human
aggcugaggcaggagaaucaccug

SEQ ID NO: 926306 - RNA, 25 nt, Human
agguggagguugcagugacaacggu

SEQ ID NO: 926307 - RNA, 20 nt, Human
agguggagguugcagugagc

SEQ ID NO: 926308 - RNA, 24 nt, Human
agguggagguugcagugagcugag

SEQ ID NO: 926309 - RNA, 24 nt, Human
agguggaucaugaggucaggagau

SEQ ID NO: 926310 - RNA, 22 nt, Human
aggugugugugugugugugugu

SEQ ID NO: 926311 - RNA, 22 nt, Human
auacacacguauauaugugugu

SEQ ID NO: 926312 - RNA, 18 nt, Human
auauauauguauauaugu

SEQ ID NO: 926313 - RNA, 23 nt, Human
auauauguguauauauauauuua

SEQ ID NO: 926314 - RNA, 25 nt, Human
auaugugcauauauacguguauaua

SEQ ID NO: 926315 - RNA, 23 nt, Human
auggcacacgccuauaaucccag

SEQ ID NO: 926316 - RNA, 20 nt, Human
auguguguauauauauguau

SEQ ID NO: 926317 - RNA, 24 nt, Human
auugcgccacugcacuucagccug

SEQ ID NO: 926318 - RNA, 19 nt, Human
caaaaccaugucucuacua

SEQ ID NO: 926319 - RNA, 18 nt, Human
caaacaagaaugcuaaaa

SEQ ID NO: 926320 - RNA, 23 nt, Human
caaauaagacacagcagaagaua

SEQ ID NO: 926321 - RNA, 24 nt, Human
caacauagugaaaccccgucucua

SEQ ID NO: 926322 - RNA, 24 nt, Human
caacauggcaaaaccaugucucua

SEQ ID NO: 926323 - RNA, 24 nt, Human
caagacuauccuggccaacauagu

SEQ ID NO: 926324 - RNA, 21 nt, Human
caagacuccaucucaaaaaaa

SEQ ID NO: 926325 - RNA, 24 nt, Human
caagauugcgccacugcacuucag

SEQ ID NO: 926326 - RNA, 24 nt, Human
caaggcgggcagaucacuugaggu

SEQ ID NO: 926327 - RNA, 26 nt, Human
caaggcgggcagaucacuugagguca

SEQ ID NO: 926328 - RNA, 24 nt, Human
cacaccuguaaccccagcuauuug

SEQ ID NO: 926329 - RNA, 21 nt, Human
caccacauuaucucuccagca

SEQ ID NO: 926330 - RNA, 18 nt, Human
caccuguaaccccagcua

SEQ ID NO: 926331 - RNA, 22 nt, Human
caccuguaaccccagcuauuug

SEQ ID NO: 926332 - RNA, 22 nt, Human
cacgccuauaaucccagcacuu

SEQ ID NO: 926333 - RNA, 24 nt, Human
cacgccuauaaucccagcacuuug

SEQ ID NO: 926334 - RNA, 18 nt, Human
cacugcacuucagccugg

SEQ ID NO: 926335 - RNA, 20 nt, Human
cacugcacuucagccuggcg

SEQ ID NO: 926336 - RNA, 22 nt, Human
cacugcacuucagccuggcgac

SEQ ID NO: 926337 - RNA, 23 nt, Human
cacugcacuucagccuggcgaca

SEQ ID NO: 926338 - RNA, 23 nt, Human
cacugcacuucagccuggcgaca

SEQ ID NO: 926339 - RNA, 22 nt, Human
cacuucagccuggcgacagagc

SEQ ID NO: 926340 - RNA, 23 nt, Human
cacuucagccuggcgacagagcg

SEQ ID NO: 926341 - RNA, 27 nt, Human
cagaucacuugaggucaggaauucaag

SEQ ID NO: 926342 - RNA, 24 nt, Human
cagcacuuugggaggccgaggcag

SEQ ID NO: 926343 - RNA, 26 nt, Human
cagcacuuugggaggccgaggcaggu

SEQ ID NO: 926344 - RNA, 24 nt, Human
cagcauuuuggaaggccaaggcgg

SEQ ID NO: 926345 - RNA, 20 nt, Human
cagccuggcgacagagcgag

SEQ ID NO: 926346 - RNA, 24 nt, Human
cagcuacucgggaggcugaggcag

SEQ ID NO: 926347 - RNA, 25 nt, Human
cagcuuuauuugggaauucuuagac

SEQ ID NO: 926348 - RNA, 26 nt, Human
cauauauacguguauauauauacacg

SEQ ID NO: 926349 - RNA, 18 nt, Human
ccacugcacuucagccug

SEQ ID NO: 926350 - RNA, 19 nt, Human
ccacugcacuucagccugg

SEQ ID NO: 926351 - RNA, 19 nt, Human
ccacugcacuucagccugg

SEQ ID NO: 926352 - RNA, 20 nt, Human
ccacugcacuucagccuggc

SEQ ID NO: 926353 - RNA, 23 nt, Human
ccacugcacuucagccuggcgac

SEQ ID NO: 926354 - RNA, 26 nt, Human
ccagccuggccaacauggcaaaacca

SEQ ID NO: 926355 - RNA, 21 nt, Human
ccaggcaccauggcacacgcc

SEQ ID NO: 926356 - RNA, 24 nt, Human
cccagcugggcgugguggcucacg

SEQ ID NO: 926357 - RNA, 24 nt, Human
cccauacugaaacauguacaagag

SEQ ID NO: 926358 - RNA, 22 nt, Human
ccuaggugacagagcaagacuc

SEQ ID NO: 926359 - RNA, 22 nt, Human
ccuauaaucccagcacuuuggg

SEQ ID NO: 926360 - RNA, 23 nt, Human
ccuggccaacauagugaaacccc

SEQ ID NO: 926361 - RNA, 24 nt, Human
ccuggccaacauagugaaaccccg

SEQ ID NO: 926362 - RNA, 21 nt, Human
ccuggcgacagagcgagacuc

SEQ ID NO: 926363 - RNA, 21 nt, Human
ccugggagguggagguugcag

SEQ ID NO: 926364 - RNA, 24 nt, Human
ccuguaaccccagcuauuugugag

SEQ ID NO: 926365 - RNA, 19 nt, Human
ccuguagucccagcuacuc

SEQ ID NO: 926366 - RNA, 21 nt, Human
ccuguagucccagcuacucgg

SEQ ID NO: 926367 - RNA, 24 nt, Human
cgaggcagguggaucaugagguca

SEQ ID NO: 926368 - RNA, 23 nt, Human
cgccuauaaucccagcacuuugg

SEQ ID NO: 926369 - RNA, 18 nt, Human
cgggcagaucacuugagg

SEQ ID NO: 926370 - RNA, 24 nt, Human
cgggcagaucacuugaggucagga

SEQ ID NO: 926371 - RNA, 26 nt, Human
cguauauauguguguauauauaugua

SEQ ID NO: 926372 - RNA, 19 nt, Human
cuagucacuugggagugcc

SEQ ID NO: 926373 - RNA, 19 nt, Human
cuauuugugagacugaagc

SEQ ID NO: 926374 - RNA, 18 nt, Human
cucaaaaaaaaaaaaaaa

SEQ ID NO: 926375 - RNA, 23 nt, Human
cucacgccuauauaaucgcagca

SEQ ID NO: 926376 - RNA, 19 nt, Human
cuccaucucaaaaaaaaaa

SEQ ID NO: 926377 - RNA, 25 nt, Human
cucuacuaaaaggaaaaaauuuagc

SEQ ID NO: 926378 - RNA, 19 nt, Human
cucugucucaaaaaaaaaa

SEQ ID NO: 926379 - RNA, 24 nt, Human
cugcuugauccugggagguggagg

SEQ ID NO: 926380 - RNA, 18 nt, Human
cuguugggcugacagaau

SEQ ID NO: 926381 - RNA, 24 nt, Human
cuucagccuggcgacagagcgaga

SEQ ID NO: 926382 - RNA, 21 nt, Human
gaauuugaauucuuucaaaga

SEQ ID NO: 926383 - RNA, 24 nt, Human
gacagagcgagacucugucucaaa

SEQ ID NO: 926384 - RNA, 20 nt, Human
gagaucgugccuaggugaca

SEQ ID NO: 926385 - RNA, 18 nt, Human
gagcugagaucgugccua

SEQ ID NO: 926386 - RNA, 23 nt, Human
gaggcagguggaucaugagguca

SEQ ID NO: 926387 - RNA, 18 nt, Human
gagguugcagugagccaa

SEQ ID NO: 926388 - RNA, 23 nt, Human
gagguugcagugagcugagaucg

SEQ ID NO: 926389 - RNA, 18 nt, Human
gaucacuugaggucagga

SEQ ID NO: 926390 - RNA, 24 nt, Human
gaucacuugaggucaggaauucaa

SEQ ID NO: 926391 - RNA, 19 nt, Human
gcacaccuguaaccccagc

SEQ ID NO: 926392 - RNA, 23 nt, Human
gcacuucagccuggcgacagagc

SEQ ID NO: 926393 - RNA, 18 nt, Human
gcagcauuuuggaaggcc

SEQ ID NO: 926394 - RNA, 22 nt, Human
gcaggagaaucaccugaaccug

SEQ ID NO: 926395 - RNA, 24 nt, Human
gccaacauagugaaaccccgucuc

SEQ ID NO: 926396 - RNA, 24 nt, Human
gcgacagagcgagacucugucuca

SEQ ID NO: 926397 - RNA, 18 nt, Human
gcugggcgugguggcuca

SEQ ID NO: 926398 - RNA, 19 nt, Human
gcuugauccugggaggugg

SEQ ID NO: 926399 - RNA, 18 nt, Human
gcuuguuuacuagucacu

SEQ ID NO: 926400 - RNA, 20 nt, Human
ggagaacugcuugauccugg

SEQ ID NO: 926401 - RNA, 22 nt, Human
ggagguugcagugagcugagau

SEQ ID NO: 926402 - RNA, 23 nt, Human
ggagguugcagugagcugagauc

SEQ ID NO: 926403 - RNA, 24 nt, Human
ggagguugcagugagcugagaucg

SEQ ID NO: 926404 - RNA, 23 nt, Human
gggaggcugaggcaggagaauca

SEQ ID NO: 926405 - RNA, 21 nt, Human
gggcgugguggcucacgccua

SEQ ID NO: 926406 - RNA, 19 nt, Human
gguggagguugcagugagc

SEQ ID NO: 926407 - RNA, 26 nt, Human
gguggcucacgccuauauaaucgcag

SEQ ID NO: 926408 - RNA, 33 nt, Human
guauauacauacauauacacacauauauguggu

SEQ ID NO: 926409 - RNA, 25 nt, Human
guauauauacacacguauauauggu

SEQ ID NO: 926410 - RNA, 21 nt, Human
gugaaaccccgucucuacuga

SEQ ID NO: 926411 - RNA, 23 nt, Human
guguauauauauacacguauaua

SEQ ID NO: 926412 - RNA, 21 nt, Human
guguauauauauguauauaaa

SEQ ID NO: 926413 - RNA, 22 nt, Human
guguguguguguguguguguaa

SEQ ID NO: 926414 - RNA, 24 nt, Human
guuccuuagacaccucaucacagu

SEQ ID NO: 926415 - RNA, 24 nt, Human
guugcagugagcugagaucgugcc

SEQ ID NO: 926416 - RNA, 25 nt, Human
uaaaaaaauaacaaauaagacacag

SEQ ID NO: 926417 - RNA, 23 nt, Human
uaaagacuguaaaccagccuuga

SEQ ID NO: 926418 - RNA, 18 nt, Human
uaacaaaaaugguacaua

SEQ ID NO: 926419 - RNA, 20 nt, Human
uaacugugagaauggguugg

SEQ ID NO: 926420 - RNA, 20 nt, Human
uaauaugcugaaaacauggu

SEQ ID NO: 926421 - RNA, 20 nt, Human
uacacacguauauaugugug

SEQ ID NO: 926422 - RNA, 26 nt, Human
uacacacguauauauguguguauaua

SEQ ID NO: 926423 - RNA, 19 nt, Human
uacauaaauuguuuuuaca

SEQ ID NO: 926424 - RNA, 22 nt, Human
uacauacauauacacacauaua

SEQ ID NO: 926425 - RNA, 19 nt, Human
uacauauacacacauauau

SEQ ID NO: 926426 - RNA, 18 nt, Human
uacguguauauauauaca

SEQ ID NO: 926427 - RNA, 26 nt, Human
uacguguauauauauacacguauaua

SEQ ID NO: 926428 - RNA, 23 nt, Human
uacugaaaauacaaaaauuagcu

SEQ ID NO: 926429 - RNA, 18 nt, Human
uagugcacaccuguaacc

SEQ ID NO: 926430 - RNA, 24 nt, Human
uauacacacguauauaugugugua

SEQ ID NO: 926431 - RNA, 24 nt, Human
uauauacacacguauauaugugug

SEQ ID NO: 926432 - RNA, 32 nt, Human
uauauacacguauauacauacauauacacagu

SEQ ID NO: 926433 - RNA, 27 nt, Human
uauauacacguauauacauacauauag

SEQ ID NO: 926434 - RNA, 22 nt, Human
uauauacacguauauauacaca

SEQ ID NO: 926435 - RNA, 23 nt, Human
uauauacguguauauauauacac

SEQ ID NO: 926436 - RNA, 21 nt, Human
uauauauacacacguauauau

SEQ ID NO: 926437 - RNA, 19 nt, Human
uauauauacacguauauac

SEQ ID NO: 926438 - RNA, 25 nt, Human
uauauauacacguauauauacacac

SEQ ID NO: 926439 - RNA, 19 nt, Human
uauauauauacacguauau

SEQ ID NO: 926440 - RNA, 22 nt, Human
uauauauauacacguauauaua

SEQ ID NO: 926441 - RNA, 23 nt, Human
uauauauauacacguauauauac

SEQ ID NO: 926442 - RNA, 18 nt, Human
uauauauguguauauaua

SEQ ID NO: 926443 - RNA, 21 nt, Human
uauauauguguguauauauau

SEQ ID NO: 926444 - RNA, 18 nt, Human
uauauguauauaugugua

SEQ ID NO: 926445 - RNA, 19 nt, Human
uauauguauauauguguau

SEQ ID NO: 926446 - RNA, 22 nt, Human
uauauguauauauguguauaua

SEQ ID NO: 926447 - RNA, 22 nt, Human
uauauguauauauguguauaua

SEQ ID NO: 926448 - RNA, 18 nt, Human
uauauguguauauauaua

SEQ ID NO: 926449 - RNA, 24 nt, Human
uauguauauauauacacguauaua

SEQ ID NO: 926450 - RNA, 26 nt, Human
uauguauauauauacacguauauaca

SEQ ID NO: 926451 - RNA, 20 nt, Human
uauguauauauguguauaua

SEQ ID NO: 926452 - RNA, 22 nt, Human
uauguauauauguguauauaua

SEQ ID NO: 926453 - RNA, 24 nt, Human
uaugugcauauauacguguauaua

SEQ ID NO: 926454 - RNA, 18 nt, Human
uauguguauauauauauu

SEQ ID NO: 926455 - RNA, 22 nt, Human
uauguguauauauauauuuaua

SEQ ID NO: 926456 - RNA, 18 nt, Human
ucaagacuauccuggcca

SEQ ID NO: 926457 - RNA, 19 nt, Human
ucaagacuauccuggccaa

SEQ ID NO: 926458 - RNA, 23 nt, Human
ucaccugaaccugggagacagag

SEQ ID NO: 926459 - RNA, 22 nt, Human
ucacuugggagugccauuuaac

SEQ ID NO: 926460 - RNA, 18 nt, Human
ucaugaggucaggagauc

SEQ ID NO: 926461 - RNA, 24 nt, Human
ucaugaggucaggagaucaagacu

SEQ ID NO: 926462 - RNA, 19 nt, Human
uccacagaauauguagguc

SEQ ID NO: 926463 - RNA, 23 nt, Human
uccaucucaaaaaaaaaaaaaaa

SEQ ID NO: 926464 - RNA, 25 nt, Human
ucgggaggcugaggcaggagaauca

SEQ ID NO: 926465 - RNA, 18 nt, Human
ucuaguuucuuuuuuauu

SEQ ID NO: 926466 - RNA, 18 nt, Human
ucuccagcaguaggaagg

SEQ ID NO: 926467 - RNA, 21 nt, Human
ucucuacugaaaauacaaaaa

SEQ ID NO: 926468 - RNA, 19 nt, Human
ucugucucaaaaaaaaaaa

SEQ ID NO: 926469 - RNA, 25 nt, Human
ugaaaggugugugugugugugugug

SEQ ID NO: 926470 - RNA, 19 nt, Human
ugaaccggacugaauccua

SEQ ID NO: 926471 - RNA, 24 nt, Human
ugaaccugggagacagagguugca

SEQ ID NO: 926472 - RNA, 18 nt, Human
ugaaucacuuaaaguagu

SEQ ID NO: 926473 - RNA, 22 nt, Human
ugagccaagauugcgccacugc

SEQ ID NO: 926474 - RNA, 20 nt, Human
ugaggcaggagaaucaccug

SEQ ID NO: 926475 - RNA, 24 nt, Human
ugaggcaggagaaucaccugaacc

SEQ ID NO: 926476 - RNA, 25 nt, Human
ugaggcaggagaaucaccugaaccu

SEQ ID NO: 926477 - RNA, 26 nt, Human
ugcagguagggugggacagcuggcag

SEQ ID NO: 926478 - RNA, 24 nt, Human
ugccuguagucccagcuacucggg

SEQ ID NO: 926479 - RNA, 24 nt, Human
ugcuaaaaacuaaagauaacacag

SEQ ID NO: 926480 - RNA, 21 nt, Human
ugcuugauccugggaggugga

SEQ ID NO: 926481 - RNA, 24 nt, Human
uggaaggccaaggcgggcagauca

SEQ ID NO: 926482 - RNA, 23 nt, Human
uggcaaaaccaugucucuacuaa

SEQ ID NO: 926483 - RNA, 24 nt, Human
uggcacacgccuauaaucccagca

SEQ ID NO: 926484 - RNA, 26 nt, Human
uggcucacgccuauauaaucgcagca

SEQ ID NO: 926485 - RNA, 19 nt, Human
uggcuuuggccuugaauuu

SEQ ID NO: 926486 - RNA, 24 nt, Human
ugggagacagagguugcagugagc

SEQ ID NO: 926487 - RNA, 24 nt, Human
ugggaggccgaggcagguggauca

SEQ ID NO: 926488 - RNA, 18 nt, Human
ugggagguggagguugca

SEQ ID NO: 926489 - RNA, 24 nt, Human
ugggagguggagguugcagugagc

SEQ ID NO: 926490 - RNA, 21 nt, Human
ugguacauaagugaaaaagug

SEQ ID NO: 926491 - RNA, 24 nt, Human
ugguggcaggugccuguaguccca

SEQ ID NO: 926492 - RNA, 22 nt, Human
ugguguaauggcuccacagaau

SEQ ID NO: 926493 - RNA, 22 nt, Human
uguauauauauacacguauaua

SEQ ID NO: 926494 - RNA, 23 nt, Human
uguauauauauacacguauauac

SEQ ID NO: 926495 - RNA, 24 nt, Human
uguauauauauacacguauauaua

SEQ ID NO: 926496 - RNA, 18 nt, Human
uguauauauauguauaua

SEQ ID NO: 926497 - RNA, 20 nt, Human
uguauauauauguauauauu

SEQ ID NO: 926498 - RNA, 18 nt, Human
uguauauauguguauaua

SEQ ID NO: 926499 - RNA, 22 nt, Human
uguauauauguguauauauaua

SEQ ID NO: 926500 - RNA, 22 nt, Human
uguauguauauauauacacgua

SEQ ID NO: 926501 - RNA, 22 nt, Human
ugugagaauggguuggugucua

SEQ ID NO: 926502 - RNA, 22 nt, Human
ugugcauauauacguguauaua

SEQ ID NO: 926503 - RNA, 24 nt, Human
uguguauauauauauuuauauuug

SEQ ID NO: 926504 - RNA, 20 nt, Human
uguguauauauauguauaua

SEQ ID NO: 926505 - RNA, 20 nt, Human
uguguauauauauguauaua

SEQ ID NO: 926506 - RNA, 23 nt, Human
uguguauauauauguauauaugu

SEQ ID NO: 926507 - RNA, 18 nt, Human
uguguauguauauauaua

SEQ ID NO: 926508 - RNA, 20 nt, Human
uguguauguauauauauaca

SEQ ID NO: 926509 - RNA, 21 nt, Human
uguguauguauauauauacac

SEQ ID NO: 926510 - RNA, 22 nt, Human
uguguauguauauauauacacg

SEQ ID NO: 926511 - RNA, 22 nt, Human
uguguguauauauauguauaua

SEQ ID NO: 926512 - RNA, 18 nt, Human
uguguguauguauauaua

SEQ ID NO: 926513 - RNA, 20 nt, Human
uguguguguguauguauaua

SEQ ID NO: 926514 - RNA, 19 nt, Human
uguguguguguguauguau

SEQ ID NO: 926515 - RNA, 24 nt, Human
uguguguguguguguauguauaua

SEQ ID NO: 926516 - RNA, 21 nt, Human
uguguguguguguguguaugu

SEQ ID NO: 926517 - RNA, 22 nt, Human
uguguguguguguguguaugua

SEQ ID NO: 926518 - RNA, 18 nt, Human
ugugugugugugugugug

SEQ ID NO: 926519 - RNA, 24 nt, Human
uuagcugggcgugguggcaggugc

SEQ ID NO: 926520 - RNA, 19 nt, Human
uuaucagagaaacuuucaa

SEQ ID NO: 926521 - RNA, 19 nt, Human
uugaaaaguggauggcuaa

SEQ ID NO: 926522 - RNA, 24 nt, Human
uugauccugggagguggagguugc

SEQ ID NO: 926523 - RNA, 19 nt, Human
uugcagguagggugggaca

SEQ ID NO: 926524 - RNA, 22 nt, Human
uugcagugagccaagauugcgc

SEQ ID NO: 926525 - RNA, 21 nt, Human
uugcagugagcugagaucgug

SEQ ID NO: 926526 - RNA, 22 nt, Human
uugcagugagcugagaucgugc

SEQ ID NO: 926527 - RNA, 24 nt, Human
uugcagugagcugagaucgugccu

SEQ ID NO: 926528 - RNA, 25 nt, Human
uugggaggccgaggcagguggauca

SEQ ID NO: 926529 - RNA, 28 nt, Human
uuuaacaaaaaugguacauaagugaaaa

SEQ ID NO: 926530 - RNA, 18 nt, Human
uuuuuuuuuuuuuuuuug

SEQ ID NO: 926531 - RNA, 18 nt, Human
uuuuuuuuuuuuuuuuug

SEQ ID NO: 926532 - RNA, 18 nt, Human
aaaaucacuuagggugcu

SEQ ID NO: 926533 - RNA, 19 nt, Human
aaccauguggcauauaccc

SEQ ID NO: 926534 - RNA, 22 nt, Human
aaccauguggcauauaccccca

SEQ ID NO: 926535 - RNA, 19 nt, Human
aauuuauaaaaaguucccc

SEQ ID NO: 926536 - RNA, 19 nt, Human
acaguggagaaugcaccuc

SEQ ID NO: 926537 - RNA, 26 nt, Human
acccagugaagucuuugcaguggccc

SEQ ID NO: 926538 - RNA, 18 nt, Human
aggcaguguuuccuaagc

SEQ ID NO: 926539 - RNA, 20 nt, Human
aggggagugcaacaggggcc

SEQ ID NO: 926540 - RNA, 24 nt, Human
aggggccccuggaguuggaucugc

SEQ ID NO: 926541 - RNA, 21 nt, Human
agugaagggcuuugagaaaaa

SEQ ID NO: 926542 - RNA, 23 nt, Human
aguucuucaggauguuaauagaa

SEQ ID NO: 926543 - RNA, 24 nt, Human
auaaaucugccucauuuuauucug

SEQ ID NO: 926544 - RNA, 21 nt, Human
aucuguagauucuucuucccc

SEQ ID NO: 926545 - RNA, 21 nt, Human
caagagcaccuguggccuugc

SEQ ID NO: 926546 - RNA, 20 nt, Human
cagauuaauuucucaguggu

SEQ ID NO: 926547 - RNA, 24 nt, Human
caugagaauaaggagaugaaacca

SEQ ID NO: 926548 - RNA, 20 nt, Human
ccaggcaguguuuccuaagc

SEQ ID NO: 926549 - RNA, 20 nt, Human
cccagacuagggccuuggag

SEQ ID NO: 926550 - RNA, 21 nt, Human
ccucuaaaauccagucuauag

SEQ ID NO: 926551 - RNA, 26 nt, Human
ccugguacccccuuucagagaugcua

SEQ ID NO: 926552 - RNA, 20 nt, Human
cugaaggcuggaaaaagacc

SEQ ID NO: 926553 - RNA, 18 nt, Human
cuggccaggcagcaaccu

SEQ ID NO: 926554 - RNA, 19 nt, Human
cuggcccucaaagccuaag

SEQ ID NO: 926555 - RNA, 22 nt, Human
cuuccugguacccccuuucaga

SEQ ID NO: 926556 - RNA, 19 nt, Human
cuuuguuccucuaaaaucc

SEQ ID NO: 926557 - RNA, 27 nt, Human
gaagggcuuugagaaaaagcauuuuga

SEQ ID NO: 926558 - RNA, 19 nt, Human
gagaaugcaccuccccaag

SEQ ID NO: 926559 - RNA, 20 nt, Human
gagccagugaagggcuuuga

SEQ ID NO: 926560 - RNA, 21 nt, Human
gagugcacuagaacugaaggc

SEQ ID NO: 926561 - RNA, 23 nt, Human
gaguugcagaguggcuacagagg

SEQ ID NO: 926562 - RNA, 20 nt, Human
gaugagaaaacaauuaagaa

SEQ ID NO: 926563 - RNA, 23 nt, Human
gcaaccucauucucacccugucu

SEQ ID NO: 926564 - RNA, 22 nt, Human
ggaccuuuguaaagcuaaccug

SEQ ID NO: 926565 - RNA, 18 nt, Human
ggauucugaugagggaag

SEQ ID NO: 926566 - RNA, 22 nt, Human
gggcuuugagaaaaagcauuuu

SEQ ID NO: 926567 - RNA, 18 nt, Human
ggggagccagugaagggc

SEQ ID NO: 926568 - RNA, 21 nt, Human
ggugauaagugugacgaguac

SEQ ID NO: 926569 - RNA, 23 nt, Human
gugcaacaggggccccuggaguu

SEQ ID NO: 926570 - RNA, 23 nt, Human
guggagaaugcaccuccccaagg

SEQ ID NO: 926571 - RNA, 20 nt, Human
guuccucuaaaauccagucu

SEQ ID NO: 926572 - RNA, 19 nt, Human
uaaaugaagaguuuggacc

SEQ ID NO: 926573 - RNA, 20 nt, Human
uacccccauucccucuauga

SEQ ID NO: 926574 - RNA, 19 nt, Human
uaccuggacucagauggga

SEQ ID NO: 926575 - RNA, 19 nt, Human
uaccuggacucagauggga

SEQ ID NO: 926576 - RNA, 21 nt, Human
uaccuggacucagaugggacc

SEQ ID NO: 926577 - RNA, 21 nt, Human
uaccuggacucagaugggacc

SEQ ID NO: 926578 - RNA, 21 nt, Human
ucagugaaucuccaaggggga

SEQ ID NO: 926579 - RNA, 19 nt, Human
ucaguggaacuggaaucug

SEQ ID NO: 926580 - RNA, 18 nt, Human
uccacagaacauuaguuc

SEQ ID NO: 926581 - RNA, 22 nt, Human
uccacagaacauuaguucuuca

SEQ ID NO: 926582 - RNA, 23 nt, Human
uccauacucuaagccaaagcgag

SEQ ID NO: 926583 - RNA, 19 nt, Human
ugaauggaugagaaaacaa

SEQ ID NO: 926584 - RNA, 21 nt, Human
ugagaaaacaauuaagaagcc

SEQ ID NO: 926585 - RNA, 20 nt, Human
ugcaggguggaucagagugc

SEQ ID NO: 926586 - RNA, 22 nt, Human
ugcccagacuagggccuuggag

SEQ ID NO: 926587 - RNA, 24 nt, Human
ugcccagacuagggccuuggagac

SEQ ID NO: 926588 - RNA, 18 nt, Human
ugccuaaacuauuauaau

SEQ ID NO: 926589 - RNA, 19 nt, Human
uggaaaaagacccagugaa

SEQ ID NO: 926590 - RNA, 22 nt, Human
uggaaaaagacccagugaaguc

SEQ ID NO: 926591 - RNA, 21 nt, Human
uggaaucugagacauacuguu

SEQ ID NO: 926592 - RNA, 22 nt, Human
uguccaagagguuuuaaaggag

SEQ ID NO: 926593 - RNA, 18 nt, Human
uguguaauguucugugug

SEQ ID NO: 926594 - RNA, 25 nt, Human
ugugugcucagugaaucuccaaggg

SEQ ID NO: 926595 - RNA, 20 nt, Human
uguucugugugcucagugaa

SEQ ID NO: 926596 - RNA, 23 nt, Human
uuaagugggauuugacuuuuuuu

SEQ ID NO: 926597 - RNA, 28 nt, Human
uuaccagauuaauuucucaguggugugc

SEQ ID NO: 926598 - RNA, 18 nt, Human
uugcccagacuagggccu

SEQ ID NO: 926599 - RNA, 19 nt, Human
uuuaccagauuaauuucuc

SEQ ID NO: 926600 - RNA, 18 nt, Human
uuucucaucucuuaaaug

SEQ ID NO: 926601 - RNA, 18 nt, Human
uuuuugguugcaaauuug

SEQ ID NO: 926602 - RNA, 23 nt, Human
uuuuuuuuuuuuuuuuaaguggg

SEQ ID NO: 926603 - RNA, 20 nt, Human
aaaaugccaugaaguuacag

SEQ ID NO: 926604 - RNA, 24 nt, Human
aaagugaugggguuacaggcguga

SEQ ID NO: 926605 - RNA, 23 nt, Human
aaaugccaugaaguuacagggau

SEQ ID NO: 926606 - RNA, 24 nt, Human
aagcaauccaccuacucuggccuc

SEQ ID NO: 926607 - RNA, 18 nt, Human
aauccaccuacucuggcc

SEQ ID NO: 926608 - RNA, 21 nt, Human
acaaaaaugccaugaaguuac

SEQ ID NO: 926609 - RNA, 19 nt, Human
acuacaggcgcaugccacc

SEQ ID NO: 926610 - RNA, 22 nt, Human
acugcaaccuccacuucccagg

SEQ ID NO: 926611 - RNA, 22 nt, Human
agaaagaacccaaauguccacc

SEQ ID NO: 926612 - RNA, 21 nt, Human
agaggauggcuggagccugag

SEQ ID NO: 926613 - RNA, 18 nt, Human
agcacagauacauguagg

SEQ ID NO: 926614 - RNA, 26 nt, Human
agccaaaagguagaaagaagggaccc

SEQ ID NO: 926615 - RNA, 24 nt, Human
aggcacaguggcacacgccuguag

SEQ ID NO: 926616 - RNA, 24 nt, Human
aggcucaggugauccauccaccuc

SEQ ID NO: 926617 - RNA, 19 nt, Human
aggcugaggugagaggaug

SEQ ID NO: 926618 - RNA, 22 nt, Human
aggguuuugccaugcuguccag

SEQ ID NO: 926619 - RNA, 23 nt, Human
aggguuuugccaugcuguccagg

SEQ ID NO: 926620 - RNA, 18 nt, Human
agguagaaagaacccaaa

SEQ ID NO: 926621 - RNA, 24 nt, Human
aggugauccauccaccucagccuc

SEQ ID NO: 926622 - RNA, 18 nt, Human
agugcaguggcaugacuu

SEQ ID NO: 926623 - RNA, 24 nt, Human
aguggcacacgccuguaguccuag

SEQ ID NO: 926624 - RNA, 21 nt, Human
auacauguagggguauaugca

SEQ ID NO: 926625 - RNA, 19 nt, Human
auaggguuuugccaugcug

SEQ ID NO: 926626 - RNA, 24 nt, Human
aucgcaauugaaaaaguuuugauc

SEQ ID NO: 926627 - RNA, 19 nt, Human
cacaauagccaaaagguag

SEQ ID NO: 926628 - RNA, 24 nt, Human
cacagauacauguagggguauaug

SEQ ID NO: 926629 - RNA, 23 nt, Human
caccuacucuggccucccaaagu

SEQ ID NO: 926630 - RNA, 24 nt, Human
caccucagccucccaaguagaugg

SEQ ID NO: 926631 - RNA, 23 nt, Human
cacgccuguaguccuagcuacuu

SEQ ID NO: 926632 - RNA, 19 nt, Human
cacugauauauccauucag

SEQ ID NO: 926633 - RNA, 22 nt, Human
cacugcacccagccuaaauuca

SEQ ID NO: 926634 - RNA, 23 nt, Human
cagccuacugcaaccuccacuuc

SEQ ID NO: 926635 - RNA, 24 nt, Human
caguucugcucuuaacugauuuca

SEQ ID NO: 926636 - RNA, 24 nt, Human
caugccaccacaccuggcuaauuu

SEQ ID NO: 926637 - RNA, 24 nt, Human
caugcuguccaggcuagucucgaa

SEQ ID NO: 926638 - RNA, 22 nt, Human
ccaaagugaugggguuacaggc

SEQ ID NO: 926639 - RNA, 24 nt, Human
ccaaagugaugggguuacaggcgu

SEQ ID NO: 926640 - RNA, 23 nt, Human
ccacagaguaugaauuccaguuc

SEQ ID NO: 926641 - RNA, 19 nt, Human
ccacugcacccagccuaaa

SEQ ID NO: 926642 - RNA, 20 nt, Human
ccacugcacccagccuaaau

SEQ ID NO: 926643 - RNA, 21 nt, Human
ccagaacagguaaauccauag

SEQ ID NO: 926644 - RNA, 23 nt, Human
ccaggcucaggugauccauccac

SEQ ID NO: 926645 - RNA, 18 nt, Human
cccaaauguccaccaacu

SEQ ID NO: 926646 - RNA, 23 nt, Human
cccaaguagaugggacuacaggc

SEQ ID NO: 926647 - RNA, 18 nt, Human
cccaggcucaggugaucc

SEQ ID NO: 926648 - RNA, 20 nt, Human
ccuggguugaagcaauccac

SEQ ID NO: 926649 - RNA, 22 nt, Human
ccuguaguccuagcuacuuggg

SEQ ID NO: 926650 - RNA, 26 nt, Human
cgacacugugaaugcacuaaauacca

SEQ ID NO: 926651 - RNA, 24 nt, Human
cgccuguaguccuagcuacuuggg

SEQ ID NO: 926652 - RNA, 22 nt, Human
cuaaaguuuucuuugcagaaaa

SEQ ID NO: 926653 - RNA, 24 nt, Human
cuacugcaaccuccacuucccagg

SEQ ID NO: 926654 - RNA, 24 nt, Human
cugcaaccuccacuucccaggcuc

SEQ ID NO: 926655 - RNA, 20 nt, Human
cugcacccagccuaaauuca

SEQ ID NO: 926656 - RNA, 23 nt, Human
gaaugccuggguugaagcaaucc

SEQ ID NO: 926657 - RNA, 21 nt, Human
gagcagcuacugugugccaga

SEQ ID NO: 926658 - RNA, 24 nt, Human
gcaaaguauuauucagucauaaag

SEQ ID NO: 926659 - RNA, 19 nt, Human
gcaguggcaugacuucagc

SEQ ID NO: 926660 - RNA, 22 nt, Human
ggaggagggggaugggagaggg

SEQ ID NO: 926661 - RNA, 20 nt, Human
ggaggcugaggugagaggau

SEQ ID NO: 926662 - RNA, 21 nt, Human
ggguuuugccaugcuguccag

SEQ ID NO: 926663 - RNA, 22 nt, Human
ggguuuugccaugcuguccagg

SEQ ID NO: 926664 - RNA, 18 nt, Human
gguuacaggcgugagcca

SEQ ID NO: 926665 - RNA, 22 nt, Human
gguuacaggcgugagccacugc

SEQ ID NO: 926666 - RNA, 21 nt, Human
guagagauaggguuuugccau

SEQ ID NO: 926667 - RNA, 22 nt, Human
guagagauaggguuuugccaug

SEQ ID NO: 926668 - RNA, 19 nt, Human
gucacaauagccaaaaggu

SEQ ID NO: 926669 - RNA, 22 nt, Human
guccaggcuagucucgaaugcc

SEQ ID NO: 926670 - RNA, 20 nt, Human
gucuuggaacuagauacagg

SEQ ID NO: 926671 - RNA, 24 nt, Human
gugauccauccaccucagccuccc

SEQ ID NO: 926672 - RNA, 25 nt, Human
uaaauccauagagacaaaaagcaaa

SEQ ID NO: 926673 - RNA, 23 nt, Human
uaauuuuuuauuuuuuguagaga

SEQ ID NO: 926674 - RNA, 22 nt, Human
uacacaauauaagggagggcag

SEQ ID NO: 926675 - RNA, 20 nt, Human
uacagacauuuaaaauuaua

SEQ ID NO: 926676 - RNA, 22 nt, Human
uacaggcgcaugccaccacacc

SEQ ID NO: 926677 - RNA, 19 nt, Human
uacaggcgugagccacugc

SEQ ID NO: 926678 - RNA, 24 nt, Human
uacaggcgugagccacugcaccca

SEQ ID NO: 926679 - RNA, 21 nt, Human
uagaaagaacccaaaugucca

SEQ ID NO: 926680 - RNA, 20 nt, Human
uagagauaggguuuugccau

SEQ ID NO: 926681 - RNA, 24 nt, Human
uaggguuuugccaugcuguccagg

SEQ ID NO: 926682 - RNA, 19 nt, Human
uauaacauggaugcuuagu

SEQ ID NO: 926683 - RNA, 28 nt, Human
uauccagaacagguaaauccauagaggg

SEQ ID NO: 926684 - RNA, 23 nt, Human
ucaacaauuuucuaaaguuuucu

SEQ ID NO: 926685 - RNA, 18 nt, Human
ucagaagaaacggaaaca

SEQ ID NO: 926686 - RNA, 25 nt, Human
ucagccuacugcaaccuccacuucc

SEQ ID NO: 926687 - RNA, 24 nt, Human
uccaccaacugaugaaaggacaaa

SEQ ID NO: 926688 - RNA, 20 nt, Human
uccagaacagguaaauccau

SEQ ID NO: 926689 - RNA, 24 nt, Human
uccagaacagguaaauccauagag

SEQ ID NO: 926690 - RNA, 21 nt, Human
uccauccaccucagccuccca

SEQ ID NO: 926691 - RNA, 22 nt, Human
uccauuauaaacucuuagggau

SEQ ID NO: 926692 - RNA, 24 nt, Human
ucccaaagugaugggguuacaggc

SEQ ID NO: 926693 - RNA, 24 nt, Human
ucccaaguagaugggacuacaggc

SEQ ID NO: 926694 - RNA, 20 nt, Human
ucccacucaguauacguaac

SEQ ID NO: 926695 - RNA, 18 nt, Human
ucccaggcucaggugauc

SEQ ID NO: 926696 - RNA, 19 nt, Human
uccgccagguuugagugca

SEQ ID NO: 926697 - RNA, 24 nt, Human
ucuacagcaaaugagaccgggguc

SEQ ID NO: 926698 - RNA, 25 nt, Human
ucucacucuguccgccagguuugag

SEQ ID NO: 926699 - RNA, 23 nt, Human
ucuccuuuuggggagaugaaaau

SEQ ID NO: 926700 - RNA, 19 nt, Human
ucuuggaacuagauacagg

SEQ ID NO: 926701 - RNA, 19 nt, Human
ugaaaggacaaauaaaaca

SEQ ID NO: 926702 - RNA, 19 nt, Human
ugaaugcacuaaauaccac

SEQ ID NO: 926703 - RNA, 22 nt, Human
ugagauagggucucacucuguc

SEQ ID NO: 926704 - RNA, 21 nt, Human
ugagcagcuacugugugccaa

SEQ ID NO: 926705 - RNA, 18 nt, Human
ugaggugagaggauggcu

SEQ ID NO: 926706 - RNA, 24 nt, Human
ugauccauccaccucagccuccca

SEQ ID NO: 926707 - RNA, 25 nt, Human
ugcaaccuccacuucccaggcucaa

SEQ ID NO: 926708 - RNA, 24 nt, Human
ugccaugaaguuacagggauguau

SEQ ID NO: 926709 - RNA, 24 nt, Human
ugccaugcuguccaggcuagucuc

SEQ ID NO: 926710 - RNA, 21 nt, Human
uggcacacgccuguaguccua

SEQ ID NO: 926711 - RNA, 19 nt, Human
uggcuggagccugagaagu

SEQ ID NO: 926712 - RNA, 21 nt, Human
ugggacuacaggcgcaugcca

SEQ ID NO: 926713 - RNA, 22 nt, Human
ugggacuacaggcgcaugccac

SEQ ID NO: 926714 - RNA, 24 nt, Human
ugggacuacaggcgcaugccacca

SEQ ID NO: 926715 - RNA, 19 nt, Human
ugggaggcugaggugagag

SEQ ID NO: 926716 - RNA, 18 nt, Human
ugggguuacaggcgugag

SEQ ID NO: 926717 - RNA, 19 nt, Human
ugggguuacaggcgugagc

SEQ ID NO: 926718 - RNA, 22 nt, Human
ugggguuacaggcgugagccac

SEQ ID NO: 926719 - RNA, 22 nt, Human
ugggguuacaggcgugagccac

SEQ ID NO: 926720 - RNA, 24 nt, Human
ugggguuacaggcgugagccacug

SEQ ID NO: 926721 - RNA, 18 nt, Human
uggguugaagcaauccac

SEQ ID NO: 926722 - RNA, 22 nt, Human
uguagagauaggguuuugccau

SEQ ID NO: 926723 - RNA, 21 nt, Human
ugugaaugcacuaaauaccac

SEQ ID NO: 926724 - RNA, 24 nt, Human
uguuaugugaguuuuaucgcaauu

SEQ ID NO: 926725 - RNA, 21 nt, Human
uguuuucuguuauuacauccc

SEQ ID NO: 926726 - RNA, 21 nt, Human
uuacaggcgugagccacugca

SEQ ID NO: 926727 - RNA, 24 nt, Human
uuaggccaggcacaguggcacacg

SEQ ID NO: 926728 - RNA, 22 nt, Human
uuccacauugcugauucauucc

SEQ ID NO: 926729 - RNA, 19 nt, Human
uugagugcaguggcaugac

SEQ ID NO: 926730 - RNA, 18 nt, Human
uugggaggcugaggugag

SEQ ID NO: 926731 - RNA, 19 nt, Human
uugggaggcugaggugaga

SEQ ID NO: 926732 - RNA, 24 nt, Human
uuguagagauaggguuuugccaug

SEQ ID NO: 926733 - RNA, 21 nt, Human
uuugcaacaccacuagucaca

SEQ ID NO: 926734 - RNA, 20 nt, Human
uuuguagagauaggguuuug

SEQ ID NO: 926735 - RNA, 23 nt, Human
uuuguagagauaggguuuugcca

SEQ ID NO: 926736 - RNA, 24 nt, Human
uuuguagagauaggguuuugccau

SEQ ID NO: 926737 - RNA, 24 nt, Human
uuuuuuguagagauaggguuuugc

SEQ ID NO: 926738 - RNA, 23 nt, Human
uuuuuuuuuugagauagggucuc

SEQ ID NO: 926739 - RNA, 23 nt, Human
uuuuuuuuuuuugagauaggguc

SEQ ID NO: 926740 - RNA, 26 nt, Human
uuuuuuuuuuuugagauagggucuca

SEQ ID NO: 926741 - RNA, 30 nt, Human
uuuuuuuuuuuuuuuuuuuugagauagggg

SEQ ID NO: 926742 - RNA, 22 nt, Human
aaaaaaaaaaaggauaaacaga

SEQ ID NO: 926743 - RNA, 23 nt, Human
aaaaggucugccuuuuguaaaaa

SEQ ID NO: 926744 - RNA, 21 nt, Human
aaauaaccuuauauaagaaua

SEQ ID NO: 926745 - RNA, 25 nt, Human
acacagcuuaaaaaagggggaacgc

SEQ ID NO: 926746 - RNA, 23 nt, Human
acagcuacagcagcucuaaauac

SEQ ID NO: 926747 - RNA, 23 nt, Human
acccagugagucaacauaggcuc

SEQ ID NO: 926748 - RNA, 19 nt, Human
agcuacagaccagguagag

SEQ ID NO: 926749 - RNA, 20 nt, Human
agcuacagcagcucuaaaua

SEQ ID NO: 926750 - RNA, 21 nt, Human
aggucugccuuuuguaaaaag

SEQ ID NO: 926751 - RNA, 19 nt, Human
caacaacguggccccgaac

SEQ ID NO: 926752 - RNA, 21 nt, Human
caccugaaagacguacuaguc

SEQ ID NO: 926753 - RNA, 21 nt, Human
caguuacagcuacagaccagg

SEQ ID NO: 926754 - RNA, 18 nt, Human
caugucaaguuugaaaau

SEQ ID NO: 926755 - RNA, 20 nt, Human
ccacccagugagucaacaua

SEQ ID NO: 926756 - RNA, 24 nt, Human
ccaccugaaagacguacuagucau

SEQ ID NO: 926757 - RNA, 20 nt, Human
ccagaaaaaaaguuguaaaa

SEQ ID NO: 926758 - RNA, 28 nt, Human
ccagcaaauaaccuuauauuguaaugac

SEQ ID NO: 926759 - RNA, 23 nt, Human
cuaguaucauugcauuuguuuuc

SEQ ID NO: 926760 - RNA, 23 nt, Human
cugaaagacguacuagucauuua

SEQ ID NO: 926761 - RNA, 20 nt, Human
cugaacuagaggccaacaau

SEQ ID NO: 926762 - RNA, 27 nt, Human
gaaaauaacuggggaaaaguguaugac

SEQ ID NO: 926763 - RNA, 25 nt, Human
ggccaacaauagccagcaaauaacc

SEQ ID NO: 926764 - RNA, 20 nt, Human
ggcuauguggguuacacagc

SEQ ID NO: 926765 - RNA, 18 nt, Human
ggggaaaaguguaugacg

SEQ ID NO: 926766 - RNA, 18 nt, Human
ggguuacacagcuuaaaa

SEQ ID NO: 926767 - RNA, 24 nt, Human
uaaauaacacagacugaacuagag

SEQ ID NO: 926768 - RNA, 25 nt, Human
uaacacagacugaacuagaggccaa

SEQ ID NO: 926769 - RNA, 23 nt, Human
uaagaagggacccccacccagug

SEQ ID NO: 926770 - RNA, 20 nt, Human
uacaacaacguggccccgaa

SEQ ID NO: 926771 - RNA, 22 nt, Human
ucaggcacuugccacgugugcu

SEQ ID NO: 926772 - RNA, 20 nt, Human
ugccaggugguuaggcuaug

SEQ ID NO: 926773 - RNA, 19 nt, Human
ugguaacuacaccuaaagc

SEQ ID NO: 926774 - RNA, 21 nt, Human
uuaaaaaaggucugccuuuug

SEQ ID NO: 926775 - RNA, 23 nt, Human
uuaggcuauguggguuacacagc

SEQ ID NO: 926776 - RNA, 20 nt, Human
uucguagucauucugccagg

SEQ ID NO: 926777 - RNA, 23 nt, Human
aaacuucugggcacaagcgaucc

SEQ ID NO: 926778 - RNA, 24 nt, Human
aaagugcugggauuacaggcauga

SEQ ID NO: 926779 - RNA, 24 nt, Human
aaagugcugggauuacagguguga

SEQ ID NO: 926780 - RNA, 18 nt, Human
aaauguauaagcuugaaa

SEQ ID NO: 926781 - RNA, 18 nt, Human
aacauggagauaaguuga

SEQ ID NO: 926782 - RNA, 20 nt, Human
aaccuccgccucccugguuc

SEQ ID NO: 926783 - RNA, 23 nt, Human
aagguaucauuuccaaauuugug

SEQ ID NO: 926784 - RNA, 18 nt, Human
aagugcugggauuacagg

SEQ ID NO: 926785 - RNA, 19 nt, Human
aagugcugggauuacaggc

SEQ ID NO: 926786 - RNA, 21 nt, Human
aagugcugggauuacaggcau

SEQ ID NO: 926787 - RNA, 26 nt, Human
aagugcugggauuacaggcaugagcc

SEQ ID NO: 926788 - RNA, 19 nt, Human
aagugcugggauuacaggu

SEQ ID NO: 926789 - RNA, 26 nt, Human
aagugcugggauuacaggugugagcc

SEQ ID NO: 926790 - RNA, 19 nt, Human
aauaaaucauaaagaauug

SEQ ID NO: 926791 - RNA, 24 nt, Human
aaugguaugaucucggcucauugc

SEQ ID NO: 926792 - RNA, 25 nt, Human
aauuguuuaaaaucuuuuuuuuuuu

SEQ ID NO: 926793 - RNA, 24 nt, Human
acaggguuaauccauguuggucag

SEQ ID NO: 926794 - RNA, 23 nt, Human
acccaguuaauuuuguauuuuua

SEQ ID NO: 926795 - RNA, 19 nt, Human
acgggguuucaccaugcua

SEQ ID NO: 926796 - RNA, 20 nt, Human
acgggguuucaccaugcuag

SEQ ID NO: 926797 - RNA, 26 nt, Human
acgggguuucaccaugcuagccagga

SEQ ID NO: 926798 - RNA, 25 nt, Human
acucuguuguccaggcuggagugca

SEQ ID NO: 926799 - RNA, 18 nt, Human
acugcaagcuaugccucc

SEQ ID NO: 926800 - RNA, 19 nt, Human
acugcagccucaaacuucu

SEQ ID NO: 926801 - RNA, 18 nt, Human
agaaaauucuccucacca

SEQ ID NO: 926802 - RNA, 24 nt, Human
agcaauucuugugccucagccucc

SEQ ID NO: 926803 - RNA, 18 nt, Human
agccaccacaccuggccc

SEQ ID NO: 926804 - RNA, 20 nt, Human
agccaccacaccuggcccua

SEQ ID NO: 926805 - RNA, 23 nt, Human
aggcaugagccacugugccuggc

SEQ ID NO: 926806 - RNA, 25 nt, Human
aggcuggagugcaguggcgcaaucu

SEQ ID NO: 926807 - RNA, 25 nt, Human
aggcuggagugcaguggcgugaucu

SEQ ID NO: 926808 - RNA, 21 nt, Human
aggcugggauuacagguguga

SEQ ID NO: 926809 - RNA, 23 nt, Human
aggcugggauuacaggugugagc

SEQ ID NO: 926810 - RNA, 24 nt, Human
aguacaauggcgugaucuuggcuu

SEQ ID NO: 926811 - RNA, 18 nt, Human
aguaccugggauuacagg

SEQ ID NO: 926812 - RNA, 18 nt, Human
aguagcugggauuacagg

SEQ ID NO: 926813 - RNA, 24 nt, Human
agugcaaugguaugaucucggcuc

SEQ ID NO: 926814 - RNA, 20 nt, Human
agugcaguggcgcaaucucg

SEQ ID NO: 926815 - RNA, 24 nt, Human
agugcaguggcgcaaucucggcuc

SEQ ID NO: 926816 - RNA, 23 nt, Human
agugcaguggcgugaucuuggcu

SEQ ID NO: 926817 - RNA, 24 nt, Human
agugcaguggcgugaucuuggcuc

SEQ ID NO: 926818 - RNA, 18 nt, Human
agugcugggauuacaggc

SEQ ID NO: 926819 - RNA, 26 nt, Human
aguuaauuuuguauuuuuaguagaga

SEQ ID NO: 926820 - RNA, 24 nt, Human
aguuuaaaaaucaaauuaaaugua

SEQ ID NO: 926821 - RNA, 24 nt, Human
aucugcucaccuccgccucccaaa

SEQ ID NO: 926822 - RNA, 24 nt, Human
augaucugcccgccucggccuccc

SEQ ID NO: 926823 - RNA, 24 nt, Human
auuccaggcugggauuacaggugu

SEQ ID NO: 926824 - RNA, 24 nt, Human
auugcaccacugcauuccaggcug

SEQ ID NO: 926825 - RNA, 24 nt, Human
caaagugcugggauuacaggcaug

SEQ ID NO: 926826 - RNA, 24 nt, Human
caaagugcugggauuacaggugug

SEQ ID NO: 926827 - RNA, 20 nt, Human
caaccuccgcuuccugggcu

SEQ ID NO: 926828 - RNA, 23 nt, Human
caaccuccgcuuccugggcucaa

SEQ ID NO: 926829 - RNA, 28 nt, Human
caagcaauucuugugccucagccuccug

SEQ ID NO: 926830 - RNA, 20 nt, Human
caagcgauccuccugcccca

SEQ ID NO: 926831 - RNA, 22 nt, Human
caagcgauucuccugcuucagc

SEQ ID NO: 926832 - RNA, 22 nt, Human
cacaucauucuccugccucagc

SEQ ID NO: 926833 - RNA, 24 nt, Human
caccacacccagcuaauuuuugua

SEQ ID NO: 926834 - RNA, 22 nt, Human
caccaugcuagccaggaugguc

SEQ ID NO: 926835 - RNA, 24 nt, Human
caccaugcuagccaggauggucuc

SEQ ID NO: 926836 - RNA, 24 nt, Human
caccuccgccucccaaagugcugg

SEQ ID NO: 926837 - RNA, 24 nt, Human
cacucuguuguccaggcuggagug

SEQ ID NO: 926838 - RNA, 23 nt, Human
cacugcaagcuaugccucccggg

SEQ ID NO: 926839 - RNA, 18 nt, Human
cacugcauuccaggcugg

SEQ ID NO: 926840 - RNA, 19 nt, Human
cacugcauuccaggcuggg

SEQ ID NO: 926841 - RNA, 21 nt, Human
cacugcauuccaggcugggau

SEQ ID NO: 926842 - RNA, 20 nt, Human
cagccucccgaguaccuggg

SEQ ID NO: 926843 - RNA, 20 nt, Human
cagccuccugaguagcuggg

SEQ ID NO: 926844 - RNA, 21 nt, Human
caggaguuugaaguugcugug

SEQ ID NO: 926845 - RNA, 21 nt, Human
caggcgcccgccacuacgccc

SEQ ID NO: 926846 - RNA, 24 nt, Human
caggguuaauccauguuggucagg

SEQ ID NO: 926847 - RNA, 30 nt, Human
caguuaauuuuguauuuuuaguagagacaa

SEQ ID NO: 926848 - RNA, 24 nt, Human
cauguuggucaggcuggucuugaa

SEQ ID NO: 926849 - RNA, 24 nt, Human
cauuccaggcugggauuacaggug

SEQ ID NO: 926850 - RNA, 21 nt, Human
ccaaagugcugggauuacagg

SEQ ID NO: 926851 - RNA, 21 nt, Human
ccaaagugcugggauuacagg

SEQ ID NO: 926852 - RNA, 23 nt, Human
ccaaagugcugggauuacaggca

SEQ ID NO: 926853 - RNA, 24 nt, Human
ccaaagugcugggauuacaggcau

SEQ ID NO: 926854 - RNA, 24 nt, Human
ccaaagugcugggauuacaggugu

SEQ ID NO: 926855 - RNA, 19 nt, Human
ccaccacaccuggcccuaa

SEQ ID NO: 926856 - RNA, 20 nt, Human
ccacugcauuccaggcuggg

SEQ ID NO: 926857 - RNA, 20 nt, Human
ccacugcauuccaggcuggg

SEQ ID NO: 926858 - RNA, 22 nt, Human
ccacugcauuccaggcugggau

SEQ ID NO: 926859 - RNA, 18 nt, Human
ccaggcuggagugcagug

SEQ ID NO: 926860 - RNA, 21 nt, Human
ccaggcuggagugcaguggcg

SEQ ID NO: 926861 - RNA, 18 nt, Human
ccaggcugggauuacagg

SEQ ID NO: 926862 - RNA, 18 nt, Human
ccaggcugggauuacagg

SEQ ID NO: 926863 - RNA, 21 nt, Human
ccaggcugggauuacaggugu

SEQ ID NO: 926864 - RNA, 19 nt, Human
ccauguuggucaggcuggu

SEQ ID NO: 926865 - RNA, 21 nt, Human
ccauguuggucaggcuggucu

SEQ ID NO: 926866 - RNA, 21 nt, Human
ccauguuggucaggcuggucu

SEQ ID NO: 926867 - RNA, 24 nt, Human
cccaaagugcugggauuacaggca

SEQ ID NO: 926868 - RNA, 20 nt, Human
cccacauaccuggccaagau

SEQ ID NO: 926869 - RNA, 19 nt, Human
ccccaggcuggagugcagu

SEQ ID NO: 926870 - RNA, 19 nt, Human
cccgaguaccugggauuac

SEQ ID NO: 926871 - RNA, 24 nt, Human
cccgaguggcugagacuacaggcg

SEQ ID NO: 926872 - RNA, 22 nt, Human
cccguacugaguacacaagggg

SEQ ID NO: 926873 - RNA, 19 nt, Human
cccugguucaagcaauucu

SEQ ID NO: 926874 - RNA, 21 nt, Human
ccgaguaccugggauuacagg

SEQ ID NO: 926875 - RNA, 24 nt, Human
ccgaguaccugggauuacaggugu

SEQ ID NO: 926876 - RNA, 19 nt, Human
ccuaggcuggagugcaaug

SEQ ID NO: 926877 - RNA, 24 nt, Human
ccugaccucaggugaucugcucac

SEQ ID NO: 926878 - RNA, 23 nt, Human
ccugaguagcugggauuacaggc

SEQ ID NO: 926879 - RNA, 24 nt, Human
ccugaguagcugggauuacaggcg

SEQ ID NO: 926880 - RNA, 23 nt, Human
ccuggccaagauuuugaguuuuu

SEQ ID NO: 926881 - RNA, 20 nt, Human
ccugggcucaagcgauucuc

SEQ ID NO: 926882 - RNA, 23 nt, Human
ccugggcucaagcgauucuccug

SEQ ID NO: 926883 - RNA, 22 nt, Human
ccuugcucugucccccaggcug

SEQ ID NO: 926884 - RNA, 23 nt, Human
ccuugcucugucccccaggcugg

SEQ ID NO: 926885 - RNA, 24 nt, Human
ccuugcucugucccccaggcugga

SEQ ID NO: 926886 - RNA, 24 nt, Human
cgccucggccucccaaagugcugg

SEQ ID NO: 926887 - RNA, 24 nt, Human
cgcucuuguugccuaggcuggagu

SEQ ID NO: 926888 - RNA, 24 nt, Human
cgggguuucaccaugcuagccagg

SEQ ID NO: 926889 - RNA, 24 nt, Human
cucaagcgauucuccugcuucagc

SEQ ID NO: 926890 - RNA, 24 nt, Human
cucacucuguuguccaggcuggag

SEQ ID NO: 926891 - RNA, 24 nt, Human
cucacugcaagcuaugccucccgg

SEQ ID NO: 926892 - RNA, 24 nt, Human
cucacugcagccucaaacuucugg

SEQ ID NO: 926893 - RNA, 23 nt, Human
cucagccuccugaguagcuggga

SEQ ID NO: 926894 - RNA, 24 nt, Human
cucaggugaucugcucaccuccgc

SEQ ID NO: 926895 - RNA, 18 nt, Human
cucaugaucugcccgccu

SEQ ID NO: 926896 - RNA, 24 nt, Human
cucauugcaaccuccgcuuccugg

SEQ ID NO: 926897 - RNA, 24 nt, Human
cuccugaccucaugaucugcccgc

SEQ ID NO: 926898 - RNA, 21 nt, Human
cuccugccccagugcucagga

SEQ ID NO: 926899 - RNA, 23 nt, Human
cucgcucuguugccaggcuggag

SEQ ID NO: 926900 - RNA, 22 nt, Human
cugaguagcugggauuacaggc

SEQ ID NO: 926901 - RNA, 21 nt, Human
cugcaaccuccgccucccugg

SEQ ID NO: 926902 - RNA, 21 nt, Human
cugcaaccuccgccucccugg

SEQ ID NO: 926903 - RNA, 24 nt, Human
cugcaaccuccgccucccugguuc

SEQ ID NO: 926904 - RNA, 23 nt, Human
cugccucagccucccgaguggcu

SEQ ID NO: 926905 - RNA, 23 nt, Human
cugcuucagccucccgaguaccu

SEQ ID NO: 926906 - RNA, 24 nt, Human
cuggagugcaaugguaugaucucg

SEQ ID NO: 926907 - RNA, 20 nt, Human
cuggccaagauuuugaguuu

SEQ ID NO: 926908 - RNA, 19 nt, Human
cuggcccgauuuugaguuu

SEQ ID NO: 926909 - RNA, 23 nt, Human
cugggacucucuacccguacuga

SEQ ID NO: 926910 - RNA, 24 nt, Human
cuuccugggcucaagcgauucucc

SEQ ID NO: 926911 - RNA, 25 nt, Human
cuugugccucagccuccugaguagc

SEQ ID NO: 926912 - RNA, 24 nt, Human
cuuguugccuaggcuggagugcaa

SEQ ID NO: 926913 - RNA, 23 nt, Human
gaaagcacacguaacuuagagaa

SEQ ID NO: 926914 - RNA, 20 nt, Human
gaauuuuuuuuuuuuuuucc

SEQ ID NO: 926915 - RNA, 24 nt, Human
gaccucaggugaucugcucaccuc

SEQ ID NO: 926916 - RNA, 24 nt, Human
gacggagucucgcucuguugccag

SEQ ID NO: 926917 - RNA, 20 nt, Human
gagacgggguuucaccaugc

SEQ ID NO: 926918 - RNA, 26 nt, Human
gaguagcugggauuacaggcgcacgc

SEQ ID NO: 926919 - RNA, 20 nt, Human
gaucucaccacuccucccac

SEQ ID NO: 926920 - RNA, 18 nt, Human
gauuacaggcaugagcca

SEQ ID NO: 926921 - RNA, 21 nt, Human
gauuacaggcaugagccacug

SEQ ID NO: 926922 - RNA, 24 nt, Human
gauuacaggcaugagccacugugc

SEQ ID NO: 926923 - RNA, 18 nt, Human
gauuacaggcgcacgcca

SEQ ID NO: 926924 - RNA, 18 nt, Human
gauuacaggugugagcca

SEQ ID NO: 926925 - RNA, 21 nt, Human
gauuacaggugugagccacca

SEQ ID NO: 926926 - RNA, 22 nt, Human
gauuacaggugugagccaccac

SEQ ID NO: 926927 - RNA, 18 nt, Human
gauuacaggugugagcua

SEQ ID NO: 926928 - RNA, 21 nt, Human
gauucuccugcuucagccucc

SEQ ID NO: 926929 - RNA, 22 nt, Human
gcaaccuccgccucccugguuc

SEQ ID NO: 926930 - RNA, 20 nt, Human
gcaaccuccgcuuccugggc

SEQ ID NO: 926931 - RNA, 21 nt, Human
gcacuacaccaccgcacccag

SEQ ID NO: 926932 - RNA, 19 nt, Human
gccacugugccuggcccga

SEQ ID NO: 926933 - RNA, 25 nt, Human
gcccagcuaauuuuuuuuuguauuu

SEQ ID NO: 926934 - RNA, 24 nt, Human
gccuaggcuggagugcaaugguau

SEQ ID NO: 926935 - RNA, 20 nt, Human
gccucagccucccgaguggc

SEQ ID NO: 926936 - RNA, 24 nt, Human
gcgauucuccugcuucagccuccc

SEQ ID NO: 926937 - RNA, 19 nt, Human
gcuggaguacaauggcgug

SEQ ID NO: 926938 - RNA, 19 nt, Human
gcuggagugcaguggcgca

SEQ ID NO: 926939 - RNA, 19 nt, Human
gcuggagugcaguggcgug

SEQ ID NO: 926940 - RNA, 23 nt, Human
gcuggucuugaacuccugaccuc

SEQ ID NO: 926941 - RNA, 20 nt, Human
ggaauuuuuuuuuuuuuuuc

SEQ ID NO: 926942 - RNA, 24 nt, Human
ggauuacaggcaugagccacugug

SEQ ID NO: 926943 - RNA, 22 nt, Human
ggcuggaguacaauggcgugau

SEQ ID NO: 926944 - RNA, 22 nt, Human
ggcuggagugcaguggcgugau

SEQ ID NO: 926945 - RNA, 24 nt, Human
ggcuggucuugaacuccugaccuc

SEQ ID NO: 926946 - RNA, 19 nt, Human
gggcacaagcgauccuccu

SEQ ID NO: 926947 - RNA, 19 nt, Human
gggcucaagcgauucuccu

SEQ ID NO: 926948 - RNA, 23 nt, Human
gggguuucaccaugcuagccagg

SEQ ID NO: 926949 - RNA, 20 nt, Human
ggucucgaucuccugaccuc

SEQ ID NO: 926950 - RNA, 19 nt, Human
ggucuugaacuccugaccu

SEQ ID NO: 926951 - RNA, 24 nt, Human
gguuucaccaugcuagccaggaug

SEQ ID NO: 926952 - RNA, 18 nt, Human
guagcugggauuacaggc

SEQ ID NO: 926953 - RNA, 24 nt, Human
guccaggcuggagugcaguggcgu

SEQ ID NO: 926954 - RNA, 24 nt, Human
gucucgcucuguugccaggcugga

SEQ ID NO: 926955 - RNA, 22 nt, Human
gugccucagccuccugaguagc

SEQ ID NO: 926956 - RNA, 20 nt, Human
uaaacauggagauaaguuga

SEQ ID NO: 926957 - RNA, 23 nt, Human
uaaccuagaggauauuucagcac

SEQ ID NO: 926958 - RNA, 18 nt, Human
uacaaaauacugugucac

SEQ ID NO: 926959 - RNA, 22 nt, Human
uacaggcaugagccacugugcc

SEQ ID NO: 926960 - RNA, 24 nt, Human
uacaggcgcacgccaccacaccca

SEQ ID NO: 926961 - RNA, 22 nt, Human
uacaggugugagccaccacacc

SEQ ID NO: 926962 - RNA, 23 nt, Human
uacaggugugagccaccacaccu

SEQ ID NO: 926963 - RNA, 22 nt, Human
uagagacaggguuaauccaugu

SEQ ID NO: 926964 - RNA, 24 nt, Human
uaguagagacaggguuaauccaug

SEQ ID NO: 926965 - RNA, 24 nt, Human
uaguagagacgggguuucaccaug

SEQ ID NO: 926966 - RNA, 26 nt, Human
uaguagagacgggguuucaccaugcu

SEQ ID NO: 926967 - RNA, 21 nt, Human
ucacaucauucuccugccuca

SEQ ID NO: 926968 - RNA, 24 nt, Human
ucaccaugcuagccaggauggucu

SEQ ID NO: 926969 - RNA, 23 nt, Human
ucaccuccgccucccaaagugcu

SEQ ID NO: 926970 - RNA, 24 nt, Human
ucacucuguuguccaggcuggagu

SEQ ID NO: 926971 - RNA, 24 nt, Human
ucacugcaagcuaugccucccggg

SEQ ID NO: 926972 - RNA, 24 nt, Human
ucacugcagccucaaacuucuggg

SEQ ID NO: 926973 - RNA, 20 nt, Human
ucagccuccugaguagcugg

SEQ ID NO: 926974 - RNA, 24 nt, Human
ucauugcaaccuccgcuuccuggg

SEQ ID NO: 926975 - RNA, 25 nt, Human
ucauugcaaccuccgcuuccugggc

SEQ ID NO: 926976 - RNA, 19 nt, Human
uccaggcugggauuacagg

SEQ ID NO: 926977 - RNA, 24 nt, Human
uccaggcugggauuacagguguga

SEQ ID NO: 926978 - RNA, 23 nt, Human
uccauguuggucaggcuggucuu

SEQ ID NO: 926979 - RNA, 23 nt, Human
ucccaaagugcugggauuacagg

SEQ ID NO: 926980 - RNA, 24 nt, Human
ucccaaagugcugggauuacaggc

SEQ ID NO: 926981 - RNA, 24 nt, Human
ucccccaggcuggagugcaguggc

SEQ ID NO: 926982 - RNA, 23 nt, Human
ucccgaguaccugggauuacagg

SEQ ID NO: 926983 - RNA, 24 nt, Human
ucccgaguaccugggauuacaggu

SEQ ID NO: 926984 - RNA, 24 nt, Human
ucccgaguggcugagacuacaggc

SEQ ID NO: 926985 - RNA, 21 nt, Human
ucccggguucacaucauucuc

SEQ ID NO: 926986 - RNA, 24 nt, Human
ucccggguucacaucauucuccug

SEQ ID NO: 926987 - RNA, 20 nt, Human
ucccugguucaagcaauucu

SEQ ID NO: 926988 - RNA, 20 nt, Human
ucccugguucaagcaauucu

SEQ ID NO: 926989 - RNA, 24 nt, Human
uccgccucccugguucaagcaauu

SEQ ID NO: 926990 - RNA, 21 nt, Human
uccucccacauaccuggccaa

SEQ ID NO: 926991 - RNA, 24 nt, Human
uccugaguagcugggauuacaggc

SEQ ID NO: 926992 - RNA, 20 nt, Human
uccugggcucaagcgauucu

SEQ ID NO: 926993 - RNA, 21 nt, Human
uccugggcucaagcgauucuc

SEQ ID NO: 926994 - RNA, 24 nt, Human
uccugggcucaagcgauucuccug

SEQ ID NO: 926995 - RNA, 21 nt, Human
ucgcucuuguugccuaggcug

SEQ ID NO: 926996 - RNA, 23 nt, Human
ucgcucuuguugccuaggcugga

SEQ ID NO: 926997 - RNA, 18 nt, Human
ucggccucccaaagugcu

SEQ ID NO: 926998 - RNA, 22 nt, Human
ucucacucuguuguccaggcug

SEQ ID NO: 926999 - RNA, 22 nt, Human
ucucacucuguuguccaggcug

SEQ ID NO: 927000 - RNA, 23 nt, Human
ucucacucuguuguccaggcugg

SEQ ID NO: 927001 - RNA, 24 nt, Human
ucucacucuguuguccaggcugga

SEQ ID NO: 927002 - RNA, 26 nt, Human
ucuccugccucagccucccgaguggc

SEQ ID NO: 927003 - RNA, 21 nt, Human
ucucgcucuguugccaggcug

SEQ ID NO: 927004 - RNA, 22 nt, Human
ucucgcucuguugccaggcugg

SEQ ID NO: 927005 - RNA, 23 nt, Human
ucucgcucuguugccaggcugga

SEQ ID NO: 927006 - RNA, 19 nt, Human
ucugucccccaggcuggag

SEQ ID NO: 927007 - RNA, 24 nt, Human
ucugucccccaggcuggagugcag

SEQ ID NO: 927008 - RNA, 18 nt, Human
ucuguugccaggcuggag

SEQ ID NO: 927009 - RNA, 24 nt, Human
ucuguuguccaggcuggagugcag

SEQ ID NO: 927010 - RNA, 23 nt, Human
ucuugaacuccugaccucaggug

SEQ ID NO: 927011 - RNA, 19 nt, Human
ucuuguugccuaggcugga

SEQ ID NO: 927012 - RNA, 20 nt, Human
ucuuuuuuuuuuuuuuuaag

SEQ ID NO: 927013 - RNA, 19 nt, Human
ugaaaugcagauaaauugu

SEQ ID NO: 927014 - RNA, 25 nt, Human
ugaccucaggugaucugcucaccuc

SEQ ID NO: 927015 - RNA, 22 nt, Human
ugagacggagccuugcucuguc

SEQ ID NO: 927016 - RNA, 22 nt, Human
ugagacggagucucgcucuguu

SEQ ID NO: 927017 - RNA, 21 nt, Human
ugagacuacaggcgcccgcca

SEQ ID NO: 927018 - RNA, 24 nt, Human
ugagacuacaggcgcccgccacua

SEQ ID NO: 927019 - RNA, 23 nt, Human
ugaggaucuugaguuuuuguuug

SEQ ID NO: 927020 - RNA, 24 nt, Human
ugaucugcucaccuccgccuccca

SEQ ID NO: 927021 - RNA, 20 nt, Human
ugcaaccuccgcuuccuggg

SEQ ID NO: 927022 - RNA, 19 nt, Human
ugcacuacaccaccgcacc

SEQ ID NO: 927023 - RNA, 20 nt, Human
ugcacuacaccaccgcaccc

SEQ ID NO: 927024 - RNA, 22 nt, Human
ugcaguggcgcaaucucggcuc

SEQ ID NO: 927025 - RNA, 23 nt, Human
ugcaguggcgcaaucucggcuca

SEQ ID NO: 927026 - RNA, 23 nt, Human
ugccaggcuggaguacaauggcg

SEQ ID NO: 927027 - RNA, 24 nt, Human
ugccaggcuggaguacaauggcgu

SEQ ID NO: 927028 - RNA, 20 nt, Human
ugccuaggcuggagugcaau

SEQ ID NO: 927029 - RNA, 21 nt, Human
ugccuaggcuggagugcaaug

SEQ ID NO: 927030 - RNA, 24 nt, Human
ugccuaggcuggagugcaauggua

SEQ ID NO: 927031 - RNA, 24 nt, Human
ugccucagccucccgaguggcuga

SEQ ID NO: 927032 - RNA, 24 nt, Human
ugccucagccuccugaguagcugg

SEQ ID NO: 927033 - RNA, 24 nt, Human
ugccuggcccgauuuugaguuuuu

SEQ ID NO: 927034 - RNA, 21 nt, Human
ugcucugucccccaggcugga

SEQ ID NO: 927035 - RNA, 24 nt, Human
ugcucugucccccaggcuggagug

SEQ ID NO: 927036 - RNA, 24 nt, Human
ugcugggauuacaggugugagcca

SEQ ID NO: 927037 - RNA, 24 nt, Human
ugcuucagccucccgaguaccugg

SEQ ID NO: 927038 - RNA, 19 nt, Human
uggaguacaauggcgugau

SEQ ID NO: 927039 - RNA, 23 nt, Human
uggaguacaauggcgugaucuug

SEQ ID NO: 927040 - RNA, 24 nt, Human
uggaguacaauggcgugaucuugg

SEQ ID NO: 927041 - RNA, 19 nt, Human
uggagugcaaugguaugau

SEQ ID NO: 927042 - RNA, 24 nt, Human
uggagugcaaugguaugaucucgg

SEQ ID NO: 927043 - RNA, 23 nt, Human
uggagugcaguggcgcaaucucg

SEQ ID NO: 927044 - RNA, 24 nt, Human
uggagugcaguggcgcaaucucgg

SEQ ID NO: 927045 - RNA, 19 nt, Human
uggagugcaguggcgugau

SEQ ID NO: 927046 - RNA, 23 nt, Human
uggagugcaguggcgugaucuug

SEQ ID NO: 927047 - RNA, 24 nt, Human
uggagugcaguggcgugaucuugg

SEQ ID NO: 927048 - RNA, 18 nt, Human
uggaguguacugguguga

SEQ ID NO: 927049 - RNA, 18 nt, Human
uggcccgauuuugaguuu

SEQ ID NO: 927050 - RNA, 18 nt, Human
ugggauuacaggcaugag

SEQ ID NO: 927051 - RNA, 21 nt, Human
ugggauuacaggcaugagcca

SEQ ID NO: 927052 - RNA, 22 nt, Human
ugggauuacaggcaugagccac

SEQ ID NO: 927053 - RNA, 22 nt, Human
ugggauuacaggcaugagccac

SEQ ID NO: 927054 - RNA, 22 nt, Human
ugggauuacaggcaugagccac

SEQ ID NO: 927055 - RNA, 23 nt, Human
ugggauuacaggcaugagccacu

SEQ ID NO: 927056 - RNA, 24 nt, Human
ugggauuacaggcaugagccacug

SEQ ID NO: 927057 - RNA, 22 nt, Human
ugggauuacaggcgcacgccac

SEQ ID NO: 927058 - RNA, 24 nt, Human
ugggauuacaggcgcacgccacca

SEQ ID NO: 927059 - RNA, 18 nt, Human
ugggauuacaggugugag

SEQ ID NO: 927060 - RNA, 18 nt, Human
ugggauuacaggugugag

SEQ ID NO: 927061 - RNA, 19 nt, Human
ugggauuacaggugugagc

SEQ ID NO: 927062 - RNA, 19 nt, Human
ugggauuacaggugugagc

SEQ ID NO: 927063 - RNA, 19 nt, Human
ugggauuacaggugugagc

SEQ ID NO: 927064 - RNA, 19 nt, Human
ugggauuacaggugugagc

SEQ ID NO: 927065 - RNA, 22 nt, Human
ugggauuacaggugugagccac

SEQ ID NO: 927066 - RNA, 23 nt, Human
ugggauuacaggugugagccacc

SEQ ID NO: 927067 - RNA, 24 nt, Human
ugggauuacaggugugagccacca

SEQ ID NO: 927068 - RNA, 21 nt, Human
ugggauuacaggugugagcua

SEQ ID NO: 927069 - RNA, 22 nt, Human
ugggauuacaggugugagcuau

SEQ ID NO: 927070 - RNA, 19 nt, Human
ugggauuacaggugugcac

SEQ ID NO: 927071 - RNA, 19 nt, Human
ugggauuacaggugugcac

SEQ ID NO: 927072 - RNA, 22 nt, Human
ugggauuacaggugugcacuaa

SEQ ID NO: 927073 - RNA, 22 nt, Human
ugggauuacaggugugcacuac

SEQ ID NO: 927074 - RNA, 26 nt, Human
ugggauuacaggugugcacuacacca

SEQ ID NO: 927075 - RNA, 29 nt, Human
ugggauuacaggugugcacuacaccaccg

SEQ ID NO: 927076 - RNA, 30 nt, Human
ugggauuacaggugugcacuacaccaccgg

SEQ ID NO: 927077 - RNA, 24 nt, Human
ugggcucaagcgauucuccugcuu

SEQ ID NO: 927078 - RNA, 24 nt, Human
uggucaggcuggucuugaacuccu

SEQ ID NO: 927079 - RNA, 24 nt, Human
uggugugaugacggcucacugcag

SEQ ID NO: 927080 - RNA, 21 nt, Human
uguauuuuuaguagagacggg

SEQ ID NO: 927081 - RNA, 20 nt, Human
uguccaggcuggagugcagu

SEQ ID NO: 927082 - RNA, 22 nt, Human
uguccaggcuggagugcagugg

SEQ ID NO: 927083 - RNA, 24 nt, Human
uguccaggcuggagugcaguggcg

SEQ ID NO: 927084 - RNA, 22 nt, Human
ugugcacuacaccaccgcaccc

SEQ ID NO: 927085 - RNA, 24 nt, Human
ugugccucagccuccugaguagcu

SEQ ID NO: 927086 - RNA, 25 nt, Human
ugugucacaacaaaggaaguuugcg

SEQ ID NO: 927087 - RNA, 20 nt, Human
uguugccuaggcuggagugc

SEQ ID NO: 927088 - RNA, 19 nt, Human
uguuguccaggcuggagug

SEQ ID NO: 927089 - RNA, 23 nt, Human
uuaaaaucuuuuuuuuuuuuuuu

SEQ ID NO: 927090 - RNA, 24 nt, Human
uuacaggugugcacuacaccaccg

SEQ ID NO: 927091 - RNA, 24 nt, Human
uuaguagagacaggguuaauccau

SEQ ID NO: 927092 - RNA, 18 nt, Human
uuaguagagacgggguuu

SEQ ID NO: 927093 - RNA, 22 nt, Human
uuaguagagacgggguuucacc

SEQ ID NO: 927094 - RNA, 24 nt, Human
uuaguagagacgggguuucaccau

SEQ ID NO: 927095 - RNA, 23 nt, Human
uucaagcaauucuugugccucag

SEQ ID NO: 927096 - RNA, 23 nt, Human
uuccaggcugggauuacaggugu

SEQ ID NO: 927097 - RNA, 25 nt, Human
uuccugggcucaagcgauucuccug

SEQ ID NO: 927098 - RNA, 24 nt, Human
uucgcucuuguugccuaggcugga

SEQ ID NO: 927099 - RNA, 24 nt, Human
uugcaaccuccgcuuccugggcuc

SEQ ID NO: 927100 - RNA, 18 nt, Human
uugccuaggcuggagugc

SEQ ID NO: 927101 - RNA, 24 nt, Human
uugcucugucccccaggcuggagu

SEQ ID NO: 927102 - RNA, 19 nt, Human
uugcugcaaccuccgccuc

SEQ ID NO: 927103 - RNA, 24 nt, Human
uugcugcaaccuccgccucccugg

SEQ ID NO: 927104 - RNA, 19 nt, Human
uuguuuguuuguuuuugau

SEQ ID NO: 927105 - RNA, 20 nt, Human
uuucaccaugcuagccagga

SEQ ID NO: 927106 - RNA, 24 nt, Human
uuucgcucuuguugccuaggcugg

SEQ ID NO: 927107 - RNA, 19 nt, Human
uuuuguauuuuuaguagag

SEQ ID NO: 927108 - RNA, 20 nt, Human
uuuuguauuuuuaguagaga

SEQ ID NO: 927109 - RNA, 24 nt, Human
uuuuuaguagagacgggguuucac

SEQ ID NO: 927110 - RNA, 23 nt, Human
uuuuucgcucuuguugccuaggc

SEQ ID NO: 927111 - RNA, 22 nt, Human
uuuuugauuuugagacacgguc

SEQ ID NO: 927112 - RNA, 21 nt, Human
uuuuuguauuuuuaguagaga

SEQ ID NO: 927113 - RNA, 19 nt, Human
uuuuuguuuguuuguuuuu

SEQ ID NO: 927114 - RNA, 22 nt, Human
uuuuuguuuguuuguuuuugau

SEQ ID NO: 927115 - RNA, 20 nt, Human
uuuuuguuuguuuguuuuuu

SEQ ID NO: 927116 - RNA, 21 nt, Human
uuuuuuguauuuuuaguagag

SEQ ID NO: 927117 - RNA, 24 nt, Human
uuuuuuguauuuuuaguagagacg

SEQ ID NO: 927118 - RNA, 24 nt, Human
uuuuuuuccugagacggagccuuu

SEQ ID NO: 927119 - RNA, 19 nt, Human
uuuuuuuuuuaagacagag

SEQ ID NO: 927120 - RNA, 19 nt, Human
aaacaaaagacugagcucc

SEQ ID NO: 927121 - RNA, 24 nt, Human
aacuugacacucccccagcacuuc

SEQ ID NO: 927122 - RNA, 25 nt, Human
agccacugucaggcugucgucucga

SEQ ID NO: 927123 - RNA, 18 nt, Human
agcccucuauggccaccu

SEQ ID NO: 927124 - RNA, 22 nt, Human
augacacagggagccaagagag

SEQ ID NO: 927125 - RNA, 21 nt, Human
auuucauuuuucuuggagcga

SEQ ID NO: 927126 - RNA, 22 nt, Human
caccagccaagaucacauuaac

SEQ ID NO: 927127 - RNA, 26 nt, Human
cacuucugccuuuggcccuucagaga

SEQ ID NO: 927128 - RNA, 18 nt, Human
cagcaggucagccuccuc

SEQ ID NO: 927129 - RNA, 18 nt, Human
ccagcccacacacgguca

SEQ ID NO: 927130 - RNA, 25 nt, Human
cccacacacggucacuggauuggug

SEQ ID NO: 927131 - RNA, 24 nt, Human
cccccagcacuucugccuuuggcc

SEQ ID NO: 927132 - RNA, 20 nt, Human
cccucuauggccaccugguc

SEQ ID NO: 927133 - RNA, 19 nt, Human
ccuugcucugcccucccca

SEQ ID NO: 927134 - RNA, 19 nt, Human
cuccugaagauaccugguu

SEQ ID NO: 927135 - RNA, 21 nt, Human
cugguuugguguggugacccc

SEQ ID NO: 927136 - RNA, 22 nt, Human
cuucugccuuuggcccuucaga

SEQ ID NO: 927137 - RNA, 24 nt, Human
gacacucccccagcacuucugccu

SEQ ID NO: 927138 - RNA, 24 nt, Human
gagccgccagcccacacacgguca

SEQ ID NO: 927139 - RNA, 23 nt, Human
gcauccagaaauguaugcacaga

SEQ ID NO: 927140 - RNA, 21 nt, Human
ggcauacuggguggugguggg

SEQ ID NO: 927141 - RNA, 23 nt, Human
gugggguuguccuugcucugccc

SEQ ID NO: 927142 - RNA, 18 nt, Human
uaaaugaaaacuugacac

SEQ ID NO: 927143 - RNA, 19 nt, Human
uaacaaagaaaucucugcc

SEQ ID NO: 927144 - RNA, 19 nt, Human
uaaguaaaugcauccagaa

SEQ ID NO: 927145 - RNA, 24 nt, Human
uaauacacuugucaacaccagcca

SEQ ID NO: 927146 - RNA, 20 nt, Human
uaugaacaaacaaaagacug

SEQ ID NO: 927147 - RNA, 21 nt, Human
ucacgcacggugcuccgugcc

SEQ ID NO: 927148 - RNA, 21 nt, Human
ucacuggauuggugugagugg

SEQ ID NO: 927149 - RNA, 21 nt, Human
ucagccuccucuuuccugucc

SEQ ID NO: 927150 - RNA, 19 nt, Human
uccccagcccucuauggcc

SEQ ID NO: 927151 - RNA, 21 nt, Human
ucccccagcacuucugccuuu

SEQ ID NO: 927152 - RNA, 26 nt, Human
ucccccagcacuucugccuuuggccc

SEQ ID NO: 927153 - RNA, 22 nt, Human
uccuguccaccucugguuccca

SEQ ID NO: 927154 - RNA, 21 nt, Human
ugaacaaacaaaagacugagc

SEQ ID NO: 927155 - RNA, 22 nt, Human
ugacacagggagccaagagagu

SEQ ID NO: 927156 - RNA, 19 nt, Human
ugacauuaacauucuuggg

SEQ ID NO: 927157 - RNA, 19 nt, Human
ugagggcaaggggaaucuc

SEQ ID NO: 927158 - RNA, 21 nt, Human
ugcacagauuuaaguuuuccc

SEQ ID NO: 927159 - RNA, 21 nt, Human
ugccccugagucuucucuccu

SEQ ID NO: 927160 - RNA, 27 nt, Human
ugccuuuggcccuucagagauuuggag

SEQ ID NO: 927161 - RNA, 26 nt, Human
uggcauacugggugguggugggguug

SEQ ID NO: 927162 - RNA, 22 nt, Human
ugguggugggguuguccuugcu

SEQ ID NO: 927163 - RNA, 22 nt, Human
uggugugaguggguuccaagcc

SEQ ID NO: 927164 - RNA, 18 nt, Human
ugguucccagauugguuu

SEQ ID NO: 927165 - RNA, 21 nt, Human
uucagacuuuaacaaagaaau

SEQ ID NO: 927166 - RNA, 24 nt, Human
uugcucugcccuccccagcccucu

SEQ ID NO: 927167 - RNA, 18 nt, Human
uuuuuuuuuuuuuuuuug

SEQ ID NO: 927168 - RNA, 24 nt, Human
aaagugcugggauuacaggcauga

SEQ ID NO: 927169 - RNA, 20 nt, Human
aacaguaagcgaggccaccc

SEQ ID NO: 927170 - RNA, 21 nt, Human
aagcugguuucaucaaacuua

SEQ ID NO: 927171 - RNA, 23 nt, Human
aagcugguuucauccgugacaca

SEQ ID NO: 927172 - RNA, 19 nt, Human
aagugcugggauuacaggc

SEQ ID NO: 927173 - RNA, 21 nt, Human
aagugcugggauuacaggcau

SEQ ID NO: 927174 - RNA, 26 nt, Human
aagugcugggauuacaggcaugagcc

SEQ ID NO: 927175 - RNA, 22 nt, Human
acaaaauaaguaauucucucuu

SEQ ID NO: 927176 - RNA, 31 nt, Human
acaaacccaaagugcugggauuacaggcauu

SEQ ID NO: 927177 - RNA, 19 nt, Human
acaugggauuuugaugagu

SEQ ID NO: 927178 - RNA, 27 nt, Human
acuaagugcuaaauuaauggguucuga

SEQ ID NO: 927179 - RNA, 21 nt, Human
acucccaccccccaaaacaaa

SEQ ID NO: 927180 - RNA, 27 nt, Human
agaccaggggcagacugggugggagga

SEQ ID NO: 927181 - RNA, 22 nt, Human
agagcaggaguuucuaauucuu

SEQ ID NO: 927182 - RNA, 18 nt, Human
agugcugggauuacaggc

SEQ ID NO: 927183 - RNA, 19 nt, Human
augaaacaguaguggaaua

SEQ ID NO: 927184 - RNA, 22 nt, Human
auuggaugggcagagaccaggg

SEQ ID NO: 927185 - RNA, 18 nt, Human
caaacccaaagugcuggg

SEQ ID NO: 927186 - RNA, 30 nt, Human
caaacccaaagugcugggauuacaggcauu

SEQ ID NO: 927187 - RNA, 24 nt, Human
caaagugcugggauuacaggcaug

SEQ ID NO: 927188 - RNA, 31 nt, Human
caacucccaccccccaaaacaaacccaaagg

SEQ ID NO: 927189 - RNA, 19 nt, Human
caccccccaaaacaaaccc

SEQ ID NO: 927190 - RNA, 21 nt, Human
caccccccaaaacaaacccaa

SEQ ID NO: 927191 - RNA, 24 nt, Human
caccccccaaaacaaacccaaagu

SEQ ID NO: 927192 - RNA, 23 nt, Human
cacugaaugagugggagcacccc

SEQ ID NO: 927193 - RNA, 23 nt, Human
ccaaagugcugggauuacaggca

SEQ ID NO: 927194 - RNA, 24 nt, Human
ccaaagugcugggauuacaggcau

SEQ ID NO: 927195 - RNA, 25 nt, Human
ccaaagugcugggauuacaggcauu

SEQ ID NO: 927196 - RNA, 18 nt, Human
ccacguggcagucagagu

SEQ ID NO: 927197 - RNA, 21 nt, Human
ccacugcgcccagccagaaga

SEQ ID NO: 927198 - RNA, 22 nt, Human
ccacugcgcccagccagaagag

SEQ ID NO: 927199 - RNA, 25 nt, Human
ccagccucugcucaggggccccaca

SEQ ID NO: 927200 - RNA, 24 nt, Human
cccaaagugcugggauuacaggca

SEQ ID NO: 927201 - RNA, 25 nt, Human
cccaaagugcugggauuacaggcau

SEQ ID NO: 927202 - RNA, 24 nt, Human
cccaaagugcugggauuacaggcc

SEQ ID NO: 927203 - RNA, 24 nt, Human
cccacacacugaaugagugggagc

SEQ ID NO: 927204 - RNA, 20 nt, Human
cccaccccccaaaacaaacc

SEQ ID NO: 927205 - RNA, 19 nt, Human
ccccccaaaacaaacccaa

SEQ ID NO: 927206 - RNA, 21 nt, Human
cccugugcucggccugggcug

SEQ ID NO: 927207 - RNA, 25 nt, Human
ccugggcuggaacaguaagcgaggc

SEQ ID NO: 927208 - RNA, 18 nt, Human
cucccaccccccaaaaca

SEQ ID NO: 927209 - RNA, 23 nt, Human
cucccaccccccaaaacaaaccc

SEQ ID NO: 927210 - RNA, 19 nt, Human
cugccagcacucugaacac

SEQ ID NO: 927211 - RNA, 18 nt, Human
cuggaacaguaagcgagg

SEQ ID NO: 927212 - RNA, 23 nt, Human
cugguuggugguuagguugaaga

SEQ ID NO: 927213 - RNA, 21 nt, Human
gagcacccccaggugugcuga

SEQ ID NO: 927214 - RNA, 18 nt, Human
gauuacaggcaugagcca

SEQ ID NO: 927215 - RNA, 22 nt, Human
gauuacaggcaugagccacugc

SEQ ID NO: 927216 - RNA, 22 nt, Human
gauuacaggcaugagccacugc

SEQ ID NO: 927217 - RNA, 20 nt, Human
gcaaauagggaaaagguaau

SEQ ID NO: 927218 - RNA, 22 nt, Human
ggauuacaggcaugagccacug

SEQ ID NO: 927219 - RNA, 21 nt, Human
guaguggaauauuuggggaac

SEQ ID NO: 927220 - RNA, 23 nt, Human
gugcugagccccagauuguuugc

SEQ ID NO: 927221 - RNA, 25 nt, Human
guggcaaugcccagccucugcucag

SEQ ID NO: 927222 - RNA, 24 nt, Human
uaagguuuauuuauaagagcagga

SEQ ID NO: 927223 - RNA, 24 nt, Human
uacaggcaugagccacugcgccca

SEQ ID NO: 927224 - RNA, 23 nt, Human
uaggaaaugagaagacacuuuaa

SEQ ID NO: 927225 - RNA, 18 nt, Human
ucagugguucuuugaaau

SEQ ID NO: 927226 - RNA, 22 nt, Human
ucccuggacacgugcagggcug

SEQ ID NO: 927227 - RNA, 24 nt, Human
uccuugcucucuaggagcucaggu

SEQ ID NO: 927228 - RNA, 20 nt, Human
ucugaaauaagcaacaaagg

SEQ ID NO: 927229 - RNA, 20 nt, Human
ugaaauaagcaacaaaggug

SEQ ID NO: 927230 - RNA, 22 nt, Human
ugcagugucccuggacacgugc

SEQ ID NO: 927231 - RNA, 22 nt, Human
ugcccagccucugcucaggggc

SEQ ID NO: 927232 - RNA, 22 nt, Human
ugcucggccugggcuggaacag

SEQ ID NO: 927233 - RNA, 19 nt, Human
uggaugggcagagaccaac

SEQ ID NO: 927234 - RNA, 18 nt, Human
ugggauuacaggcaugag

SEQ ID NO: 927235 - RNA, 19 nt, Human
ugggauuacaggcaugagc

SEQ ID NO: 927236 - RNA, 21 nt, Human
ugggauuacaggcaugagcca

SEQ ID NO: 927237 - RNA, 22 nt, Human
ugggauuacaggcaugagccac

SEQ ID NO: 927238 - RNA, 22 nt, Human
ugggauuacaggcaugagccac

SEQ ID NO: 927239 - RNA, 24 nt, Human
ugggauuacaggcaugagccacug

SEQ ID NO: 927240 - RNA, 26 nt, Human
ugggauuacaggcaugagccacugcg

SEQ ID NO: 927241 - RNA, 21 nt, Human
uguaagguuuauuuauaagag

SEQ ID NO: 927242 - RNA, 21 nt, Human
uuagcugugacaugggauuuu

SEQ ID NO: 927243 - RNA, 23 nt, Human
uuagcugugccuugaaagacuuu

SEQ ID NO: 927244 - RNA, 20 nt, Human
uuccaggagggugggcucug

SEQ ID NO: 927245 - RNA, 24 nt, Human
uugacaaaauaaguaauucucucu

SEQ ID NO: 927246 - RNA, 23 nt, Human
uuguuuguuuuugugugugccgu

SEQ ID NO: 927247 - RNA, 22 nt, Human
uuuagaguuugcugcaaauggu

SEQ ID NO: 927248 - RNA, 24 nt, Human
uuuagcagcaguuugaggcauucu

SEQ ID NO: 927249 - RNA, 22 nt, Human
uuugugugugccgugaacuucu

SEQ ID NO: 927250 - RNA, 27 nt, Human
uuuuagaauaggaaucugguuuggagg

SEQ ID NO: 927251 - RNA, 22 nt, Human
uuuuuuuuuuuuuuuuuuucag

SEQ ID NO: 927252 - RNA, 21 nt, Human
aaaacaaacagaaaaagaaac

SEQ ID NO: 927253 - RNA, 21 nt, Human
aaacaaaaugguaauuucgau

SEQ ID NO: 927254 - RNA, 26 nt, Human
aaacagaaaaagaaacaaaagggacc

SEQ ID NO: 927255 - RNA, 23 nt, Human
aaacagaaaaagaaacaaaaugg

SEQ ID NO: 927256 - RNA, 25 nt, Human
aaacagaaaaagaaacaaaauggua

SEQ ID NO: 927257 - RNA, 23 nt, Human
aaacccugccccucuuuuuacac

SEQ ID NO: 927258 - RNA, 20 nt, Human
aaagugcugggauuacaggc

SEQ ID NO: 927259 - RNA, 22 nt, Human
aaagugcugggauuacaggcgu

SEQ ID NO: 927260 - RNA, 24 nt, Human
aaagugcugggauuacaggcguga

SEQ ID NO: 927261 - RNA, 21 nt, Human
aaauggcaagucgcuuaagca

SEQ ID NO: 927262 - RNA, 19 nt, Human
aagugcugggauuacaggc

SEQ ID NO: 927263 - RNA, 19 nt, Human
aagugcugggauuacaggc

SEQ ID NO: 927264 - RNA, 18 nt, Human
acaggguuucaccauguu

SEQ ID NO: 927265 - RNA, 19 nt, Human
acaggguuucaccauguua

SEQ ID NO: 927266 - RNA, 20 nt, Human
acaggguuucaccauguuag

SEQ ID NO: 927267 - RNA, 24 nt, Human
acaggguuucaccauguuagccag

SEQ ID NO: 927268 - RNA, 24 nt, Human
acccugccccucuuuuuacacaca

SEQ ID NO: 927269 - RNA, 24 nt, Human
accuugugaucuucccgccuuggc

SEQ ID NO: 927270 - RNA, 24 nt, Human
acucugccaccaggcuagagguca

SEQ ID NO: 927271 - RNA, 19 nt, Human
agaacuuuucaaagcuuac

SEQ ID NO: 927272 - RNA, 20 nt, Human
agaguuguuucugcuuuauc

SEQ ID NO: 927273 - RNA, 24 nt, Human
agcgauucuccugccucagccucc

SEQ ID NO: 927274 - RNA, 22 nt, Human
aggagacaguuuugaggaaagc

SEQ ID NO: 927275 - RNA, 20 nt, Human
aggcacgcaccaccgugccc

SEQ ID NO: 927276 - RNA, 23 nt, Human
aggcgugagucacugcgcccggc

SEQ ID NO: 927277 - RNA, 24 nt, Human
agguaaaaaacaaacagaaaaaga

SEQ ID NO: 927278 - RNA, 24 nt, Human
aggucaguggugugaucuuggcuc

SEQ ID NO: 927279 - RNA, 22 nt, Human
aguagagacaggguuucaccau

SEQ ID NO: 927280 - RNA, 18 nt, Human
aguagcugggacuacagg

SEQ ID NO: 927281 - RNA, 18 nt, Human
agugcugggauuacaggc

SEQ ID NO: 927282 - RNA, 24 nt, Human
auuuuuguauuuuuaguagagaca

SEQ ID NO: 927283 - RNA, 20 nt, Human
caagcgauucuccugccuca

SEQ ID NO: 927284 - RNA, 22 nt, Human
caagcgauucuccugccucagc

SEQ ID NO: 927285 - RNA, 23 nt, Human
caauggcagcaacaagcugagag

SEQ ID NO: 927286 - RNA, 24 nt, Human
cacaaaucaucaguuuucuauacu

SEQ ID NO: 927287 - RNA, 18 nt, Human
cacacaaaucaucaguuu

SEQ ID NO: 927288 - RNA, 18 nt, Human
caccauauaaccuugggg

SEQ ID NO: 927289 - RNA, 23 nt, Human
caccauauaaccuuggggaugcc

SEQ ID NO: 927290 - RNA, 18 nt, Human
caccauguuagccaggau

SEQ ID NO: 927291 - RNA, 22 nt, Human
caccauguuagccaggaugguc

SEQ ID NO: 927292 - RNA, 24 nt, Human
caccauguuagccaggauggucuc

SEQ ID NO: 927293 - RNA, 24 nt, Human
caccgugcccagcuaauuuuugua

SEQ ID NO: 927294 - RNA, 23 nt, Human
cacgcaccaccgugcccagcuaa

SEQ ID NO: 927295 - RNA, 18 nt, Human
cacucugucgccaccuag

SEQ ID NO: 927296 - RNA, 21 nt, Human
cacugcaaccucugccucccg

SEQ ID NO: 927297 - RNA, 23 nt, Human
cacugcaaccucugccucccggg

SEQ ID NO: 927298 - RNA, 23 nt, Human
cagaaucaaucaagacuuuucgu

SEQ ID NO: 927299 - RNA, 27 nt, Human
cagcugcacucugucgccaccuaguca

SEQ ID NO: 927300 - RNA, 24 nt, Human
caggguuucaccauguuagccagg

SEQ ID NO: 927301 - RNA, 19 nt, Human
caguuuucuauacuguuca

SEQ ID NO: 927302 - RNA, 19 nt, Human
cauauaaccuuggggaugc

SEQ ID NO: 927303 - RNA, 23 nt, Human
cccgaguagcugggacuacaggc

SEQ ID NO: 927304 - RNA, 24 nt, Human
cccgaguagcugggacuacaggca

SEQ ID NO: 927305 - RNA, 20 nt, Human
cccggguucaagcgauucuc

SEQ ID NO: 927306 - RNA, 23 nt, Human
cccggguucaagcgauucuccug

SEQ ID NO: 927307 - RNA, 23 nt, Human
ccuaaagugcugggauuacaggc

SEQ ID NO: 927308 - RNA, 24 nt, Human
ccucccggguucaagcgauucucc

SEQ ID NO: 927309 - RNA, 20 nt, Human
ccucugcuguguaaaggugu

SEQ ID NO: 927310 - RNA, 23 nt, Human
ccugccucagccucccgaguagc

SEQ ID NO: 927311 - RNA, 21 nt, Human
ccuugcuuuuaccuguuuccc

SEQ ID NO: 927312 - RNA, 22 nt, Human
ccuuggggaugccucagcuucc

SEQ ID NO: 927313 - RNA, 21 nt, Human
cgacaaauagguaaaaaacaa

SEQ ID NO: 927314 - RNA, 23 nt, Human
cgcccuuuccccuuggugaugua

SEQ ID NO: 927315 - RNA, 22 nt, Human
cuaaagugcugggauuacaggc

SEQ ID NO: 927316 - RNA, 24 nt, Human
cuaaagugcugggauuacaggcgu

SEQ ID NO: 927317 - RNA, 24 nt, Human
cucacugcaaccucugccucccgg

SEQ ID NO: 927318 - RNA, 24 nt, Human
cucagccucccgaguagcugggac

SEQ ID NO: 927319 - RNA, 24 nt, Human
cuccugaccuugugaucuucccgc

SEQ ID NO: 927320 - RNA, 23 nt, Human
cugaccuugugaucuucccgccu

SEQ ID NO: 927321 - RNA, 19 nt, Human
cugcaaccucugccucccg

SEQ ID NO: 927322 - RNA, 23 nt, Human
cugcaaccucugccucccggguu

SEQ ID NO: 927323 - RNA, 24 nt, Human
cugcaaccucugccucccggguuc

SEQ ID NO: 927324 - RNA, 23 nt, Human
cugccucagccucccgaguagcu

SEQ ID NO: 927325 - RNA, 27 nt, Human
cuugugaucuucccgccuuggccuccu

SEQ ID NO: 927326 - RNA, 20 nt, Human
gaaaucaaugaguuggacaa

SEQ ID NO: 927327 - RNA, 21 nt, Human
gaccuugugaucuucccgccu

SEQ ID NO: 927328 - RNA, 24 nt, Human
gaccuugugaucuucccgccuugg

SEQ ID NO: 927329 - RNA, 24 nt, Human
gacuacaggcacgcaccaccgugc

SEQ ID NO: 927330 - RNA, 23 nt, Human
gagacaguuuugaggaaagcuga

SEQ ID NO: 927331 - RNA, 20 nt, Human
gagcaauggcagcaacaagc

SEQ ID NO: 927332 - RNA, 20 nt, Human
gaguagcugggacuacaggc

SEQ ID NO: 927333 - RNA, 24 nt, Human
gaguagcugggacuacaggcacgc

SEQ ID NO: 927334 - RNA, 18 nt, Human
gauuacaggcgugaguca

SEQ ID NO: 927335 - RNA, 22 nt, Human
gauuacaggcgugagucacugc

SEQ ID NO: 927336 - RNA, 22 nt, Human
gauuacaggcgugagucacugc

SEQ ID NO: 927337 - RNA, 22 nt, Human
gcaaccucugccucccggguuc

SEQ ID NO: 927338 - RNA, 19 nt, Human
gcacgcaccaccgugccca

SEQ ID NO: 927339 - RNA, 22 nt, Human
gcccagcuaauuuuuguauuuu

SEQ ID NO: 927340 - RNA, 22 nt, Human
gccuuggccuccuaaagugcug

SEQ ID NO: 927341 - RNA, 24 nt, Human
gcgauucuccugccucagccuccc

SEQ ID NO: 927342 - RNA, 21 nt, Human
gcucacugcaaccucugccuc

SEQ ID NO: 927343 - RNA, 24 nt, Human
ggauggucucgaucuccugaccuu

SEQ ID NO: 927344 - RNA, 20 nt, Human
ggucucgaucuccugaccuu

SEQ ID NO: 927345 - RNA, 24 nt, Human
gguuucaccauguuagccaggaug

SEQ ID NO: 927346 - RNA, 22 nt, Human
guaaaccaaaacccaaagauac

SEQ ID NO: 927347 - RNA, 24 nt, Human
guccuugcuuuuaccuguuuccca

SEQ ID NO: 927348 - RNA, 25 nt, Human
uaaaaaacaaacagaaaaagaaaca

SEQ ID NO: 927349 - RNA, 24 nt, Human
uaaagugcugggauuacaggcgug

SEQ ID NO: 927350 - RNA, 19 nt, Human
uaaauagauuaucugggga

SEQ ID NO: 927351 - RNA, 24 nt, Human
uaauuuuuguauuuuuaguagaga

SEQ ID NO: 927352 - RNA, 19 nt, Human
uacaggcgugagucacugc

SEQ ID NO: 927353 - RNA, 19 nt, Human
uaccuuggcuaaaaucagc

SEQ ID NO: 927354 - RNA, 24 nt, Human
uacgacaaauagguaaaaaacaaa

SEQ ID NO: 927355 - RNA, 22 nt, Human
uagagacaggguuucaccaugu

SEQ ID NO: 927356 - RNA, 24 nt, Human
uagauuaucuggggagacugucuu

SEQ ID NO: 927357 - RNA, 20 nt, Human
uaggugcaaauguccuauag

SEQ ID NO: 927358 - RNA, 24 nt, Human
uaguagagacaggguuucaccaug

SEQ ID NO: 927359 - RNA, 26 nt, Human
uaguagagacaggguuucaccauguu

SEQ ID NO: 927360 - RNA, 19 nt, Human
uaucuuucaaacccugccc

SEQ ID NO: 927361 - RNA, 24 nt, Human
ucaccauguuagccaggauggucu

SEQ ID NO: 927362 - RNA, 24 nt, Human
ucacugcaaccucugccucccggg

SEQ ID NO: 927363 - RNA, 25 nt, Human
ucacugcaaccucugccucccgggu

SEQ ID NO: 927364 - RNA, 23 nt, Human
ucagccucccgaguagcugggac

SEQ ID NO: 927365 - RNA, 24 nt, Human
ucccgaguagcugggacuacaggc

SEQ ID NO: 927366 - RNA, 21 nt, Human
ucccggguucaagcgauucuc

SEQ ID NO: 927367 - RNA, 24 nt, Human
ucccggguucaagcgauucuccug

SEQ ID NO: 927368 - RNA, 24 nt, Human
uccuaaagugcugggauuacaggc

SEQ ID NO: 927369 - RNA, 23 nt, Human
ucucacucugccaccaggcuaga

SEQ ID NO: 927370 - RNA, 24 nt, Human
ucuccugccucagccucccgagua

SEQ ID NO: 927371 - RNA, 21 nt, Human
ucuuucgcccuuuccccuugg

SEQ ID NO: 927372 - RNA, 23 nt, Human
ugaaauaguuuauuuuaaaggca

SEQ ID NO: 927373 - RNA, 22 nt, Human
ugaaggauacacauuuccacag

SEQ ID NO: 927374 - RNA, 22 nt, Human
ugaccuugugaucuucccgccu

SEQ ID NO: 927375 - RNA, 22 nt, Human
ugagauggagucucacucugcc

SEQ ID NO: 927376 - RNA, 25 nt, Human
ugaggaaagcugacuaauuacagua

SEQ ID NO: 927377 - RNA, 24 nt, Human
ugccucagccucccgaguagcugg

SEQ ID NO: 927378 - RNA, 23 nt, Human
ugccucagcuucccuaucucuga

SEQ ID NO: 927379 - RNA, 24 nt, Human
ugcugggauuacaggcgugaguca

SEQ ID NO: 927380 - RNA, 23 nt, Human
uggcaagucgcuuaagcagagau

SEQ ID NO: 927381 - RNA, 21 nt, Human
ugggacuacaggcacgcacca

SEQ ID NO: 927382 - RNA, 24 nt, Human
ugggacuacaggcacgcaccaccg

SEQ ID NO: 927383 - RNA, 18 nt, Human
ugggauuacaggcgugag

SEQ ID NO: 927384 - RNA, 18 nt, Human
ugggauuacaggcgugag

SEQ ID NO: 927385 - RNA, 21 nt, Human
ugggauuacaggcgugaguca

SEQ ID NO: 927386 - RNA, 22 nt, Human
ugggauuacaggcgugagucac

SEQ ID NO: 927387 - RNA, 22 nt, Human
ugggauuacaggcgugagucac

SEQ ID NO: 927388 - RNA, 24 nt, Human
ugggauuacaggcgugagucacug

SEQ ID NO: 927389 - RNA, 20 nt, Human
uguaacucaaauggcaaguc

SEQ ID NO: 927390 - RNA, 21 nt, Human
uguggauaacuaggagacagu

SEQ ID NO: 927391 - RNA, 24 nt, Human
uuaguagagacaggguuucaccau

SEQ ID NO: 927392 - RNA, 21 nt, Human
uucaagcgauucuccugccuc

SEQ ID NO: 927393 - RNA, 23 nt, Human
uucaagcgauucuccugccucag

SEQ ID NO: 927394 - RNA, 24 nt, Human
uucaagcgauucuccugccucagc

SEQ ID NO: 927395 - RNA, 18 nt, Human
uuggccuccuaaagugcu

SEQ ID NO: 927396 - RNA, 19 nt, Human
uuucaccauguuagccagg

SEQ ID NO: 927397 - RNA, 20 nt, Human
uuucaccauguuagccagga

SEQ ID NO: 927398 - RNA, 18 nt, Human
uuucccaauuucucuuuu

SEQ ID NO: 927399 - RNA, 20 nt, Human
uuugacgcugagguaggugc

SEQ ID NO: 927400 - RNA, 24 nt, Human
uuuuuaguagagacaggguuucac

SEQ ID NO: 927401 - RNA, 20 nt, Human
uuuuuguauuuuuaguagag

SEQ ID NO: 927402 - RNA, 26 nt, Human
uuuuuuuuuuuugagauggagucuca

SEQ ID NO: 927403 - RNA, 22 nt, Human
uuuuuuuuuuuuuugagaugga

SEQ ID NO: 927404 - RNA, 21 nt, Human
aaaaaucugggaagaugagua

SEQ ID NO: 927405 - RNA, 19 nt, Human
aaagugcugggauuacaug

SEQ ID NO: 927406 - RNA, 24 nt, Human
aaagugcugggauuacaugcguga

SEQ ID NO: 927407 - RNA, 22 nt, Human
aaauggaucuuaguagagaucu

SEQ ID NO: 927408 - RNA, 22 nt, Human
aaggauuaucacagaagcauca

SEQ ID NO: 927409 - RNA, 19 nt, Human
aagugcugggauuacaugc

SEQ ID NO: 927410 - RNA, 26 nt, Human
aagugcugggauuacaugcgugagcc

SEQ ID NO: 927411 - RNA, 18 nt, Human
aauagucucccggccucc

SEQ ID NO: 927412 - RNA, 20 nt, Human
acagaagcaucacaacaggc

SEQ ID NO: 927413 - RNA, 18 nt, Human
acaggguuucaccguguu

SEQ ID NO: 927414 - RNA, 23 nt, Human
acaggguuucaccguguuggcca

SEQ ID NO: 927415 - RNA, 24 nt, Human
acaggguuucaccguguuggccag

SEQ ID NO: 927416 - RNA, 24 nt, Human
accguguuggccaggauggucucg

SEQ ID NO: 927417 - RNA, 19 nt, Human
agauacaggguuucaccgu

SEQ ID NO: 927418 - RNA, 24 nt, Human
agugcugggauuacaugcgugagc

SEQ ID NO: 927419 - RNA, 20 nt, Human
auacaaggaaugugcccaca

SEQ ID NO: 927420 - RNA, 24 nt, Human
caaagugcugggauuacaugcgug

SEQ ID NO: 927421 - RNA, 18 nt, Human
caccguguuggccaggau

SEQ ID NO: 927422 - RNA, 21 nt, Human
caccguguuggccaggauggu

SEQ ID NO: 927423 - RNA, 24 nt, Human
caccguguuggccaggauggucuc

SEQ ID NO: 927424 - RNA, 19 nt, Human
cagagaacucucaaagcac

SEQ ID NO: 927425 - RNA, 24 nt, Human
caggguuucaccguguuggccagg

SEQ ID NO: 927426 - RNA, 20 nt, Human
ccaaagugcugggauuacau

SEQ ID NO: 927427 - RNA, 22 nt, Human
ccaaagugcugggauuacaugc

SEQ ID NO: 927428 - RNA, 24 nt, Human
ccaaagugcugggauuacaugcgu

SEQ ID NO: 927429 - RNA, 19 nt, Human
cccacaauaggguuggauu

SEQ ID NO: 927430 - RNA, 28 nt, Human
ccugaccucgugauccaccagccucggc

SEQ ID NO: 927431 - RNA, 25 nt, Human
cggccuccaacccccucuacauccc

SEQ ID NO: 927432 - RNA, 24 nt, Human
cgugauccaccagccucggccucc

SEQ ID NO: 927433 - RNA, 19 nt, Human
cucagaaaugaaagaaguc

SEQ ID NO: 927434 - RNA, 18 nt, Human
cuccugaccucgugaucc

SEQ ID NO: 927435 - RNA, 19 nt, Human
cucuguagcuccauugccc

SEQ ID NO: 927436 - RNA, 23 nt, Human
cuuuuucuuucguuuuccucuga

SEQ ID NO: 927437 - RNA, 19 nt, Human
gaccucgugauccaccagc

SEQ ID NO: 927438 - RNA, 22 nt, Human
gaccucgugauccaccagccuc

SEQ ID NO: 927439 - RNA, 22 nt, Human
gaccucgugauccaccagccuc

SEQ ID NO: 927440 - RNA, 24 nt, Human
gaccucgugauccaccagccucgg

SEQ ID NO: 927441 - RNA, 18 nt, Human
gauuacaugcgugagcca

SEQ ID NO: 927442 - RNA, 23 nt, Human
gcaaaaggauuaucacagaagca

SEQ ID NO: 927443 - RNA, 24 nt, Human
ggauggucucgaucuccugaccuc

SEQ ID NO: 927444 - RNA, 22 nt, Human
ggguuucaccguguuggccagg

SEQ ID NO: 927445 - RNA, 18 nt, Human
gugagccaccgcgccaag

SEQ ID NO: 927446 - RNA, 24 nt, Human
gugauccaccagccucggccuccc

SEQ ID NO: 927447 - RNA, 20 nt, Human
uaaaaguaggcaggaggacu

SEQ ID NO: 927448 - RNA, 20 nt, Human
uagcucauaaaauaugggga

SEQ ID NO: 927449 - RNA, 21 nt, Human
uaguagauacaggguuucacc

SEQ ID NO: 927450 - RNA, 24 nt, Human
uaguagauacaggguuucaccgug

SEQ ID NO: 927451 - RNA, 23 nt, Human
uauggaauagggccuaauuuuaa

SEQ ID NO: 927452 - RNA, 18 nt, Human
uauuuguuaauuuuuuaa

SEQ ID NO: 927453 - RNA, 19 nt, Human
uauuuuacuucucccccaa

SEQ ID NO: 927454 - RNA, 21 nt, Human
ucaaagauaaacauaucagga

SEQ ID NO: 927455 - RNA, 24 nt, Human
ucaccguguuggccaggauggucu

SEQ ID NO: 927456 - RNA, 18 nt, Human
ucccaaagugcugggauu

SEQ ID NO: 927457 - RNA, 24 nt, Human
ucccaaagugcugggauuacaugc

SEQ ID NO: 927458 - RNA, 18 nt, Human
ucggccucccaaagugcu

SEQ ID NO: 927459 - RNA, 20 nt, Human
ugaaagaagucuauugaugu

SEQ ID NO: 927460 - RNA, 23 nt, Human
ugcgugagccaccgcgccaagcc

SEQ ID NO: 927461 - RNA, 24 nt, Human
ugcugggauuacaugcgugagcca

SEQ ID NO: 927462 - RNA, 24 nt, Human
uggccaggauggucucgaucuccu

SEQ ID NO: 927463 - RNA, 19 nt, Human
ugggauuacaugcgugagc

SEQ ID NO: 927464 - RNA, 22 nt, Human
ugggauuacaugcgugagccac

SEQ ID NO: 927465 - RNA, 23 nt, Human
ugggauuacaugcgugagccacc

SEQ ID NO: 927466 - RNA, 24 nt, Human
ugggauuacaugcgugagccaccg

SEQ ID NO: 927467 - RNA, 21 nt, Human
uguagcaguacagaagauggg

SEQ ID NO: 927468 - RNA, 23 nt, Human
uguagcaguacagaagaugggcu

SEQ ID NO: 927469 - RNA, 19 nt, Human
uuaaaagucuucaaagcuu

SEQ ID NO: 927470 - RNA, 22 nt, Human
uuaguagauacaggguuucacc

SEQ ID NO: 927471 - RNA, 24 nt, Human
uuaguagauacaggguuucaccgu

SEQ ID NO: 927472 - RNA, 20 nt, Human
uucaauaugucuugugucag

SEQ ID NO: 927473 - RNA, 23 nt, Human
uucucccccaaaacguuuuuaaa

SEQ ID NO: 927474 - RNA, 19 nt, Human
uuucaccguguuggccagg

SEQ ID NO: 927475 - RNA, 24 nt, Human
uuuuuaguagauacaggguuucac

SEQ ID NO: 927476 - RNA, 22 nt, Human
uuuuuuguguuuuuaguagaua

SEQ ID NO: 927477 - RNA, 23 nt, Human
aaaaaaaaaaaaaaagcacauag

SEQ ID NO: 927478 - RNA, 20 nt, Human
aaaaaaaaaaagcacauaga

SEQ ID NO: 927479 - RNA, 23 nt, Human
aaaaaaaaaaagcacauagaugg

SEQ ID NO: 927480 - RNA, 27 nt, Human
aaaaaacaaaaaccaaacccuauguac

SEQ ID NO: 927481 - RNA, 18 nt, Human
aaaacaaaaaccaaaccc

SEQ ID NO: 927482 - RNA, 18 nt, Human
aaacauguagagacacau

SEQ ID NO: 927483 - RNA, 24 nt, Human
aaacauguagagacacaugcuccu

SEQ ID NO: 927484 - RNA, 23 nt, Human
aaauuacccugcuaaauaaaagc

SEQ ID NO: 927485 - RNA, 24 nt, Human
aacauaccuauaaauaaagcagaa

SEQ ID NO: 927486 - RNA, 20 nt, Human
aagagugugggucccugagc

SEQ ID NO: 927487 - RNA, 18 nt, Human
aagccagucacccuaaug

SEQ ID NO: 927488 - RNA, 22 nt, Human
aaucucuuuagaagaauaacaa

SEQ ID NO: 927489 - RNA, 20 nt, Human
aaugaagaauaaaauugucu

SEQ ID NO: 927490 - RNA, 24 nt, Human
aauucaugucuuuguuuucuuccu

SEQ ID NO: 927491 - RNA, 21 nt, Human
acaaauccaaugugaacacca

SEQ ID NO: 927492 - RNA, 20 nt, Human
acaauagggguggggaaaga

SEQ ID NO: 927493 - RNA, 18 nt, Human
accagaagucugcauaug

SEQ ID NO: 927494 - RNA, 23 nt, Human
accagaagucugcauaugauggg

SEQ ID NO: 927495 - RNA, 21 nt, Human
acuaacauguaccugagacag

SEQ ID NO: 927496 - RNA, 22 nt, Human
acuuccaggaaaugaaaagaag

SEQ ID NO: 927497 - RNA, 22 nt, Human
acuuuaagagugaggugaggaa

SEQ ID NO: 927498 - RNA, 19 nt, Human
agacacaugcuccucagua

SEQ ID NO: 927499 - RNA, 26 nt, Human
agagacacaugcuccucaguagaccc

SEQ ID NO: 927500 - RNA, 20 nt, Human
agauguugggagcuucaacu

SEQ ID NO: 927501 - RNA, 20 nt, Human
agccagugacaacuacuguc

SEQ ID NO: 927502 - RNA, 18 nt, Human
agggaagagccagugaca

SEQ ID NO: 927503 - RNA, 26 nt, Human
aguugagagucacauacagcugagau

SEQ ID NO: 927504 - RNA, 25 nt, Human
auaaagcagaauguaauauuuaccu

SEQ ID NO: 927505 - RNA, 23 nt, Human
auagcccagaguaaggauauucc

SEQ ID NO: 927506 - RNA, 24 nt, Human
aucucaucucuuacacauccccaa

SEQ ID NO: 927507 - RNA, 26 nt, Human
caaaaaccaaacccuauguacuucca

SEQ ID NO: 927508 - RNA, 21 nt, Human
caaaguaaaaggagcaagcca

SEQ ID NO: 927509 - RNA, 20 nt, Human
caauacagcauaaugacauu

SEQ ID NO: 927510 - RNA, 18 nt, Human
cacacaggacuauguggg

SEQ ID NO: 927511 - RNA, 18 nt, Human
cacauacagcugagauga

SEQ ID NO: 927512 - RNA, 20 nt, Human
cagaauagcuguaagaaagc

SEQ ID NO: 927513 - RNA, 21 nt, Human
cauguaaaaaaaaaaaacaaa

SEQ ID NO: 927514 - RNA, 23 nt, Human
cauguaaaaaaaaaaaacaaaaa

SEQ ID NO: 927515 - RNA, 20 nt, Human
cauguagagacacaugcucc

SEQ ID NO: 927516 - RNA, 20 nt, Human
cauuccuuuuuuuaccacuu

SEQ ID NO: 927517 - RNA, 20 nt, Human
ccagaagucugcauaugaug

SEQ ID NO: 927518 - RNA, 18 nt, Human
cccacagaauucugagcc

SEQ ID NO: 927519 - RNA, 19 nt, Human
cccacagaauucugagcca

SEQ ID NO: 927520 - RNA, 19 nt, Human
cccacuuuaagagugaggu

SEQ ID NO: 927521 - RNA, 24 nt, Human
ccuucuaugccuuugcuuuucuca

SEQ ID NO: 927522 - RNA, 25 nt, Human
cugaaaaucccaaaccacuguugcu

SEQ ID NO: 927523 - RNA, 22 nt, Human
cuggaagggauauccuagauua

SEQ ID NO: 927524 - RNA, 18 nt, Human
cuuaaaaaaaaaaaaaaa

SEQ ID NO: 927525 - RNA, 24 nt, Human
cuuaaaaaaaaaaaaaaagcacau

SEQ ID NO: 927526 - RNA, 18 nt, Human
cuucuuguaaguugagag

SEQ ID NO: 927527 - RNA, 21 nt, Human
gagcccgucuuagaccauccg

SEQ ID NO: 927528 - RNA, 22 nt, Human
gaggcucuccuaguccaacuaa

SEQ ID NO: 927529 - RNA, 22 nt, Human
ggcagaggggcaaggaaacucc

SEQ ID NO: 927530 - RNA, 18 nt, Human
guaaggauauuccuaggu

SEQ ID NO: 927531 - RNA, 30 nt, Human
uaaaaaaaaaaaacaaaaaccaaacccuag

SEQ ID NO: 927532 - RNA, 21 nt, Human
uaaaaggagcaagccagucac

SEQ ID NO: 927533 - RNA, 23 nt, Human
uaaaagggcacuacuuaugaaca

SEQ ID NO: 927534 - RNA, 20 nt, Human
uaaaauugucuuaaaaaaaa

SEQ ID NO: 927535 - RNA, 21 nt, Human
uaaauaaagcagaauguaaua

SEQ ID NO: 927536 - RNA, 23 nt, Human
uaaauaaauagauauacacacaa

SEQ ID NO: 927537 - RNA, 23 nt, Human
uaaaugagccuuucccuggcuac

SEQ ID NO: 927538 - RNA, 21 nt, Human
uaacauguaccugagacaguu

SEQ ID NO: 927539 - RNA, 19 nt, Human
uaagaaagcugaagcugug

SEQ ID NO: 927540 - RNA, 20 nt, Human
uaagaaagcugaagcugugg

SEQ ID NO: 927541 - RNA, 22 nt, Human
uaagcuaaaagggcacuacuua

SEQ ID NO: 927542 - RNA, 18 nt, Human
uaaucugugaacauaccu

SEQ ID NO: 927543 - RNA, 22 nt, Human
uaaugcaugcccauuauguaug

SEQ ID NO: 927544 - RNA, 26 nt, Human
uacauuaucuugguauucuggaaggg

SEQ ID NO: 927545 - RNA, 22 nt, Human
uacccugaaaaucccaaaccac

SEQ ID NO: 927546 - RNA, 18 nt, Human
uaccugagacaguugggc

SEQ ID NO: 927547 - RNA, 19 nt, Human
uacugugguaguacaugaa

SEQ ID NO: 927548 - RNA, 27 nt, Human
uacuuccaggaaaugaaaagaaguaaa

SEQ ID NO: 927549 - RNA, 20 nt, Human
uagaaauccuguuuauguau

SEQ ID NO: 927550 - RNA, 23 nt, Human
uaguccaacuaaccaacagccaa

SEQ ID NO: 927551 - RNA, 21 nt, Human
uaucaugaaauucaugucuuu

SEQ ID NO: 927552 - RNA, 21 nt, Human
uccacacaggacuaugugggc

SEQ ID NO: 927553 - RNA, 20 nt, Human
ucccaaucucaucucuuaca

SEQ ID NO: 927554 - RNA, 18 nt, Human
ucccugagccagguuucc

SEQ ID NO: 927555 - RNA, 23 nt, Human
uccucaguagaccagaagucugc

SEQ ID NO: 927556 - RNA, 19 nt, Human
uccucuagauacuuaauua

SEQ ID NO: 927557 - RNA, 19 nt, Human
ugaaaagaaguaaagaacc

SEQ ID NO: 927558 - RNA, 21 nt, Human
ugaaaagaaguaaagaaccaa

SEQ ID NO: 927559 - RNA, 23 nt, Human
ugagaauguugaugcuacuaucc

SEQ ID NO: 927560 - RNA, 21 nt, Human
ugagacaguugggcacaaagu

SEQ ID NO: 927561 - RNA, 26 nt, Human
ugagggcagagaaauucuccccgagg

SEQ ID NO: 927562 - RNA, 21 nt, Human
ugaggugaggaagcuagaaug

SEQ ID NO: 927563 - RNA, 21 nt, Human
ugccaagagaaacaaugaagu

SEQ ID NO: 927564 - RNA, 24 nt, Human
uggcagaggggcaaggaaacucca

SEQ ID NO: 927565 - RNA, 23 nt, Human
ugguacccugaaaaucccaaacc

SEQ ID NO: 927566 - RNA, 18 nt, Human
uggucuagcuucuuguaa

SEQ ID NO: 927567 - RNA, 23 nt, Human
uguaaaaaaaaaaaacaaaaacc

SEQ ID NO: 927568 - RNA, 23 nt, Human
uguaagaaagcugaagcuguggg

SEQ ID NO: 927569 - RNA, 19 nt, Human
ugucacacaucauuguuca

SEQ ID NO: 927570 - RNA, 18 nt, Human
ugucuuuguuuucuuccu

SEQ ID NO: 927571 - RNA, 23 nt, Human
uguugggagcuucaacucucacg

SEQ ID NO: 927572 - RNA, 23 nt, Human
uguuuucuuccucuagauacuua

SEQ ID NO: 927573 - RNA, 23 nt, Human
uucaacucucacguucuuggaau

SEQ ID NO: 927574 - RNA, 24 nt, Human
uucaucauguaaaaaaaaaaaaca

SEQ ID NO: 927575 - RNA, 23 nt, Human
uucaugucuuuguuuucuuccuc

SEQ ID NO: 927576 - RNA, 27 nt, Human
uucccaaucucaucucuuacacauccc

SEQ ID NO: 927577 - RNA, 20 nt, Human
uuccuagguguucaagaaaa

SEQ ID NO: 927578 - RNA, 21 nt, Human
uugggcacaaaguaaaaggag

SEQ ID NO: 927579 - RNA, 20 nt, Human
uuuagccuccauccaaguuu

SEQ ID NO: 927580 - RNA, 21 nt, Human
uuucaggucauuccuuuuuuu

SEQ ID NO: 927581 - RNA, 25 nt, Human
uuugcuuuucucaaauaaaugagcc

SEQ ID NO: 927582 - RNA, 24 nt, Human
uuugguacccugaaaaucccaaac

SEQ ID NO: 927583 - RNA, 19 nt, Human
uuugucuuaggcaauacag

SEQ ID NO: 927584 - RNA, 18 nt, Human
uuuuuuuuuuuuuuuuug

SEQ ID NO: 927585 - RNA, 20 nt, Human
uuuuuuuuuuuuuuuuuggu

SEQ ID NO: 927586 - RNA, 22 nt, Human
aagccaaagauaguuuagacac

SEQ ID NO: 927587 - RNA, 23 nt, Human
aaugaccauuugaacugaaaaag

SEQ ID NO: 927588 - RNA, 24 nt, Human
agacaacuauuuuacuuuacaaaa

SEQ ID NO: 927589 - RNA, 22 nt, Human
agccagugggggaguggcuggc

SEQ ID NO: 927590 - RNA, 22 nt, Human
aguucuguggagcgucacaggg

SEQ ID NO: 927591 - RNA, 19 nt, Human
aucacagcucuuugaggca

SEQ ID NO: 927592 - RNA, 23 nt, Human
auucucauauaaauaacagcuac

SEQ ID NO: 927593 - RNA, 24 nt, Human
caaaagacugcuuuaucuaaccau

SEQ ID NO: 927594 - RNA, 18 nt, Human
caguccccugccuagccu

SEQ ID NO: 927595 - RNA, 19 nt, Human
caguccccugccuagccuc

SEQ ID NO: 927596 - RNA, 18 nt, Human
cauugcacgugaaugucc

SEQ ID NO: 927597 - RNA, 22 nt, Human
ccacuggguucuaaaggggaag

SEQ ID NO: 927598 - RNA, 19 nt, Human
cccgccugcugucccuacc

SEQ ID NO: 927599 - RNA, 19 nt, Human
cuagagagcaaaagacugc

SEQ ID NO: 927600 - RNA, 20 nt, Human
cucgcaguccccugccuagc

SEQ ID NO: 927601 - RNA, 18 nt, Human
cugcaggacuagcccgga

SEQ ID NO: 927602 - RNA, 20 nt, Human
cuggcucggugccugacccc

SEQ ID NO: 927603 - RNA, 19 nt, Human
cuuccagugagccuuucug

SEQ ID NO: 927604 - RNA, 19 nt, Human
gaaaauguggauucagaua

SEQ ID NO: 927605 - RNA, 19 nt, Human
gacaccuucugccuuuuag

SEQ ID NO: 927606 - RNA, 18 nt, Human
gauuuuuuuuuuuuuuuu

SEQ ID NO: 927607 - RNA, 23 nt, Human
gcaaaagacugcuuuaucuaacc

SEQ ID NO: 927608 - RNA, 22 nt, Human
gccaaaagaaaaaaauuggauc

SEQ ID NO: 927609 - RNA, 21 nt, Human
ggguucuaaaggggaagccaa

SEQ ID NO: 927610 - RNA, 21 nt, Human
gguacucgcaguccccugccu

SEQ ID NO: 927611 - RNA, 19 nt, Human
gugcuuuuuaacuuggcau

SEQ ID NO: 927612 - RNA, 19 nt, Human
guugcacuucuugucuguu

SEQ ID NO: 927613 - RNA, 20 nt, Human
uaaaagcaaauaaugaccau

SEQ ID NO: 927614 - RNA, 21 nt, Human
uaaauaacagcuaccucuuuu

SEQ ID NO: 927615 - RNA, 26 nt, Human
uaaaugaauauuuucaaaagucagaa

SEQ ID NO: 927616 - RNA, 21 nt, Human
uaacagcuaccucuuuuuugc

SEQ ID NO: 927617 - RNA, 20 nt, Human
uaacuuggcauugcacguga

SEQ ID NO: 927618 - RNA, 21 nt, Human
uaaggagguuccuaagacauu

SEQ ID NO: 927619 - RNA, 18 nt, Human
uaauuacucugguucaag

SEQ ID NO: 927620 - RNA, 26 nt, Human
uagaauucucauauaaauaacagcua

SEQ ID NO: 927621 - RNA, 20 nt, Human
ucagguugcacuucuugucu

SEQ ID NO: 927622 - RNA, 19 nt, Human
uccacauaggcuagagagc

SEQ ID NO: 927623 - RNA, 21 nt, Human
uccccgccugcugucccuacc

SEQ ID NO: 927624 - RNA, 22 nt, Human
ucuguguggcugcaggacuagc

SEQ ID NO: 927625 - RNA, 18 nt, Human
ucuuugaggcacucagcu

SEQ ID NO: 927626 - RNA, 24 nt, Human
ugaggcacucagcuccuuugaaag

SEQ ID NO: 927627 - RNA, 18 nt, Human
uggagcgucacagggcgg

SEQ ID NO: 927628 - RNA, 18 nt, Human
ugggggaguggcuggcca

SEQ ID NO: 927629 - RNA, 21 nt, Human
uggguucuaaaggggaagcca

SEQ ID NO: 927630 - RNA, 21 nt, Human
ugguaggugcauaauacccuc

SEQ ID NO: 927631 - RNA, 22 nt, Human
ugugccugagaguuucucgucg

SEQ ID NO: 927632 - RNA, 21 nt, Human
ugugccugagaguuucucgug

SEQ ID NO: 927633 - RNA, 23 nt, Human
uguguguauuuagucugaauaau

SEQ ID NO: 927634 - RNA, 24 nt, Human
uguuaagaucucuguucuggauga

SEQ ID NO: 927635 - RNA, 18 nt, Human
uucuguggagcgucacag

SEQ ID NO: 927636 - RNA, 18 nt, Human
uugaaaccauuauuggca

SEQ ID NO: 927637 - RNA, 21 nt, Human
uuguaacuaccaaccuggcuc

SEQ ID NO: 927638 - RNA, 23 nt, Human
uuuacuagaaucuuuugaaacca

SEQ ID NO: 927639 - RNA, 20 nt, Human
uuuuaaaaauuuccucaucu

SEQ ID NO: 927640 - RNA, 18 nt, Human
aacacggcggcuccgucu

SEQ ID NO: 927641 - RNA, 18 nt, Human
acaaggcauucacacuac

SEQ ID NO: 927642 - RNA, 23 nt, Human
accaaguucucauuccacauucc

SEQ ID NO: 927643 - RNA, 25 nt, Human
agaaugacaggcacgaaacaugagg

SEQ ID NO: 927644 - RNA, 24 nt, Human
augggcccacacccaggcgcugcc

SEQ ID NO: 927645 - RNA, 22 nt, Human
caaaaugggcccacacccaggc

SEQ ID NO: 927646 - RNA, 19 nt, Human
cagcaggaagggaagagag

SEQ ID NO: 927647 - RNA, 22 nt, Human
cccacacccaggcgcugccaac

SEQ ID NO: 927648 - RNA, 19 nt, Human
ccccaaaaugggcccacac

SEQ ID NO: 927649 - RNA, 19 nt, Human
gaccacagcuugcuguuug

SEQ ID NO: 927650 - RNA, 19 nt, Human
gggaagagagauggagauc

SEQ ID NO: 927651 - RNA, 21 nt, Human
uacauacauguagcuuaucac

SEQ ID NO: 927652 - RNA, 21 nt, Human
uacauguagcuuaucacauac

SEQ ID NO: 927653 - RNA, 25 nt, Human
uauugcaacauuuacauacauguag

SEQ ID NO: 927654 - RNA, 21 nt, Human
uccacauuccuuucccacacu

SEQ ID NO: 927655 - RNA, 22 nt, Human
uccaucccaugggggugcacgu

SEQ ID NO: 927656 - RNA, 18 nt, Human
uccccaaaaugggcccac

SEQ ID NO: 927657 - RNA, 18 nt, Human
ugcugggaggacucccac

SEQ ID NO: 927658 - RNA, 20 nt, Human
uuccacauuccuuucccaca

SEQ ID NO: 927659 - RNA, 24 nt, Human
uugcuguuugguccccaaaauggg

SEQ ID NO: 927660 - RNA, 21 nt, Human
uuuuuuuuuuuuuuuuccauu

SEQ ID NO: 927661 - RNA, 24 nt, Human
aaaaacaccaccaaaacuggagac

SEQ ID NO: 927662 - RNA, 20 nt, Human
aaaaauagaaagcuaagaac

SEQ ID NO: 927663 - RNA, 18 nt, Human
aaaacaaaaacaccacca

SEQ ID NO: 927664 - RNA, 20 nt, Human
aaaacaaaaacaccaccaaa

SEQ ID NO: 927665 - RNA, 23 nt, Human
aaaacaccaccaaaacccacucc

SEQ ID NO: 927666 - RNA, 24 nt, Human
aaaacagaauaaaacaaaaacacc

SEQ ID NO: 927667 - RNA, 24 nt, Human
aaacaaaaacaccaccaaaaccca

SEQ ID NO: 927668 - RNA, 20 nt, Human
aaacaccaccaaaacccacu

SEQ ID NO: 927669 - RNA, 21 nt, Human
aacaccaccaaaacccacucu

SEQ ID NO: 927670 - RNA, 23 nt, Human
aacagaugggauaaaaauucaaa

SEQ ID NO: 927671 - RNA, 19 nt, Human
aacauuguggauauaugcu

SEQ ID NO: 927672 - RNA, 21 nt, Human
aagaaaagaaaguacccaaac

SEQ ID NO: 927673 - RNA, 22 nt, Human
acaccaccaaaacccacuccaa

SEQ ID NO: 927674 - RNA, 21 nt, Human
acagaguauacaggaauucuu

SEQ ID NO: 927675 - RNA, 25 nt, Human
agaaaacagaauaaaacaaaaacac

SEQ ID NO: 927676 - RNA, 28 nt, Human
agaaaacagaauaaaacaaaaacaccac

SEQ ID NO: 927677 - RNA, 26 nt, Human
agaaaagaaaguacccaaacaaagaa

SEQ ID NO: 927678 - RNA, 28 nt, Human
agaaaagaaaguacccaaacaaagaaaa

SEQ ID NO: 927679 - RNA, 26 nt, Human
agaauaaaacaaaaacaccaccaaaa

SEQ ID NO: 927680 - RNA, 21 nt, Human
agacuguuaagccuaugaaaa

SEQ ID NO: 927681 - RNA, 23 nt, Human
agaguagcuuguugcccaaagaa

SEQ ID NO: 927682 - RNA, 23 nt, Human
aggcugccaugagaaauaaccaa

SEQ ID NO: 927683 - RNA, 21 nt, Human
agguaggcucuguucuuguga

SEQ ID NO: 927684 - RNA, 23 nt, Human
aguggaaggcugccaugagaaau

SEQ ID NO: 927685 - RNA, 19 nt, Human
auaaaacaaaaacaccacc

SEQ ID NO: 927686 - RNA, 22 nt, Human
auuauuuccagaguagcuuguu

SEQ ID NO: 927687 - RNA, 18 nt, Human
caaaaaaaacccaguaac

SEQ ID NO: 927688 - RNA, 21 nt, Human
caccaccaaaacccacuccaa

SEQ ID NO: 927689 - RNA, 26 nt, Human
cacuucuaauuugauagagccaagaa

SEQ ID NO: 927690 - RNA, 26 nt, Human
cagaacuuauuaaagcacucaauaaa

SEQ ID NO: 927691 - RNA, 22 nt, Human
cauagggaaaauuauuauuucc

SEQ ID NO: 927692 - RNA, 23 nt, Human
caucuugguuuuaaaagucuucc

SEQ ID NO: 927693 - RNA, 26 nt, Human
cauguaacaguuaagaaaacagaaua

SEQ ID NO: 927694 - RNA, 26 nt, Human
ccaaaacccacuccaauacauuauac

SEQ ID NO: 927695 - RNA, 25 nt, Human
ccaauaaagcaguggugaagcucuu

SEQ ID NO: 927696 - RNA, 23 nt, Human
ccccuaaacagaugggauaaaaa

SEQ ID NO: 927697 - RNA, 23 nt, Human
cggcaggaagaaaagaaaguacc

SEQ ID NO: 927698 - RNA, 27 nt, Human
cggcaggaagaaaagaaaguacccaaa

SEQ ID NO: 927699 - RNA, 28 nt, Human
cggcaggaagaaaagaaaguacccaaac

SEQ ID NO: 927700 - RNA, 21 nt, Human
cucaagcacuucuaauuugau

SEQ ID NO: 927701 - RNA, 24 nt, Human
cuccccaucuugguuuuaaaaguc

SEQ ID NO: 927702 - RNA, 22 nt, Human
cuucacaggaauaaaguaacaa

SEQ ID NO: 927703 - RNA, 24 nt, Human
cuucuccccaucuugguuuuaaaa

SEQ ID NO: 927704 - RNA, 23 nt, Human
cuuuuguaaacucaaguugaaaa

SEQ ID NO: 927705 - RNA, 21 nt, Human
gaaaagugacaaaaaaaaccc

SEQ ID NO: 927706 - RNA, 22 nt, Human
gaaaguacccaaacaaagaaaa

SEQ ID NO: 927707 - RNA, 22 nt, Human
gaaggaaaaugaaauugaaagu

SEQ ID NO: 927708 - RNA, 20 nt, Human
gcuguuuucuucuccccauc

SEQ ID NO: 927709 - RNA, 23 nt, Human
gggauaaaaauucaaaagaagga

SEQ ID NO: 927710 - RNA, 24 nt, Human
gucacaucucaagcacuucuaauu

SEQ ID NO: 927711 - RNA, 19 nt, Human
uaaaacaaaaacaccacca

SEQ ID NO: 927712 - RNA, 24 nt, Human
uaaaacaaaaacaccaccaaaacc

SEQ ID NO: 927713 - RNA, 23 nt, Human
uaaaauccccuaaacagauggga

SEQ ID NO: 927714 - RNA, 25 nt, Human
uaagaaaacagaauaaaacaaaaac

SEQ ID NO: 927715 - RNA, 18 nt, Human
uaagccuaugaaaacaga

SEQ ID NO: 927716 - RNA, 19 nt, Human
uagaaagcuaagaacggca

SEQ ID NO: 927717 - RNA, 27 nt, Human
ucaauaguaaucacagguaggcucuuu

SEQ ID NO: 927718 - RNA, 21 nt, Human
ucaugucacaucucaagcacu

SEQ ID NO: 927719 - RNA, 18 nt, Human
ucauuugucauuucauuu

SEQ ID NO: 927720 - RNA, 21 nt, Human
uccccuaaacagaugggauaa

SEQ ID NO: 927721 - RNA, 22 nt, Human
uccccuaaacagaugggauaaa

SEQ ID NO: 927722 - RNA, 22 nt, Human
uccccuaaacagaugggauaaa

SEQ ID NO: 927723 - RNA, 20 nt, Human
uccuacaaaagucugcaaaa

SEQ ID NO: 927724 - RNA, 22 nt, Human
ucuaaggaaugccucacaagaa

SEQ ID NO: 927725 - RNA, 19 nt, Human
ugaaaaauagaaagcuaag

SEQ ID NO: 927726 - RNA, 23 nt, Human
ugacaaaaaaaacccaguaacau

SEQ ID NO: 927727 - RNA, 26 nt, Human
ugccaugagaaauaaccaacauaggg

SEQ ID NO: 927728 - RNA, 19 nt, Human
ugcuguuuucuucucccca

SEQ ID NO: 927729 - RNA, 18 nt, Human
uggaaggcugccaugaga

SEQ ID NO: 927730 - RNA, 25 nt, Human
uguaacaguuaagaaaacagaauaa

SEQ ID NO: 927731 - RNA, 20 nt, Human
uguccccaauuaugaugauc

SEQ ID NO: 927732 - RNA, 18 nt, Human
uucaaaagaaggaaaaug

SEQ ID NO: 927733 - RNA, 19 nt, Human
uugguuaaaugaacauugu

SEQ ID NO: 927734 - RNA, 21 nt, Human
uuuaaaauccccuaaacagau

SEQ ID NO: 927735 - RNA, 24 nt, Human
uuuaaauuugaaggcucuccuaaa

SEQ ID NO: 927736 - RNA, 23 nt, Human
uuuauuugcaggugauuucuuuc

SEQ ID NO: 927737 - RNA, 18 nt, Human
uuuugguuacauuuucuu

SEQ ID NO: 927738 - RNA, 19 nt, Human
aaaaaaguguggaacuaag

SEQ ID NO: 927739 - RNA, 22 nt, Human
aagcaugaagagaaaagacaac

SEQ ID NO: 927740 - RNA, 21 nt, Human
acaaacaaaauuuaaccuuca

SEQ ID NO: 927741 - RNA, 20 nt, Human
acaaccaacuauccaaaacc

SEQ ID NO: 927742 - RNA, 22 nt, Human
acaggauccugauucaguauca

SEQ ID NO: 927743 - RNA, 23 nt, Human
accucaccaucacucgagugucc

SEQ ID NO: 927744 - RNA, 24 nt, Human
acgauaaauugaaaacuggugagg

SEQ ID NO: 927745 - RNA, 22 nt, Human
acuuuaagaggacaaggaggga

SEQ ID NO: 927746 - RNA, 22 nt, Human
agaaguugugugucuguaagaa

SEQ ID NO: 927747 - RNA, 24 nt, Human
agacuggucaacaugaugaaaccu

SEQ ID NO: 927748 - RNA, 22 nt, Human
agauaaggaagcaugaagagaa

SEQ ID NO: 927749 - RNA, 24 nt, Human
agcaaauauaccuuuucuauucuc

SEQ ID NO: 927750 - RNA, 23 nt, Human
aggagggaggauugcuugagccc

SEQ ID NO: 927751 - RNA, 23 nt, Human
agggaggauugcuugagcccagg

SEQ ID NO: 927752 - RNA, 18 nt, Human
auugcuugagcccagggg

SEQ ID NO: 927753 - RNA, 21 nt, Human
auugcuugagcccagggguuc

SEQ ID NO: 927754 - RNA, 19 nt, Human
caacaugaugaaaccugau

SEQ ID NO: 927755 - RNA, 22 nt, Human
caaccaacuauccaaaaccaga

SEQ ID NO: 927756 - RNA, 22 nt, Human
caagcgcagugacucgcaccca

SEQ ID NO: 927757 - RNA, 23 nt, Human
caagugauuuacauuuacacaga

SEQ ID NO: 927758 - RNA, 24 nt, Human
caccucaccaucacucgagugucc

SEQ ID NO: 927759 - RNA, 21 nt, Human
caggauccugauucaguauca

SEQ ID NO: 927760 - RNA, 21 nt, Human
ccaaaaccagacaaaagccaa

SEQ ID NO: 927761 - RNA, 24 nt, Human
ccaacuauccaaaaccagacaaaa

SEQ ID NO: 927762 - RNA, 22 nt, Human
ccagaccagacuggucaacaug

SEQ ID NO: 927763 - RNA, 18 nt, Human
cccauaauuucaacacuu

SEQ ID NO: 927764 - RNA, 20 nt, Human
cgcacccauaauuucaacac

SEQ ID NO: 927765 - RNA, 22 nt, Human
cucaccaucacucgaguguccu

SEQ ID NO: 927766 - RNA, 21 nt, Human
cuggugaggcauaaaauuuca

SEQ ID NO: 927767 - RNA, 21 nt, Human
cuugagcccagggguuccaga

SEQ ID NO: 927768 - RNA, 19 nt, Human
gaagauguuagacaagauc

SEQ ID NO: 927769 - RNA, 23 nt, Human
gaagauguuagacaagaucagug

SEQ ID NO: 927770 - RNA, 19 nt, Human
gagucuuggaagggaugca

SEQ ID NO: 927771 - RNA, 24 nt, Human
ggagauaaggaagcaugaagagaa

SEQ ID NO: 927772 - RNA, 22 nt, Human
ggccaggugaagaaauuuggaa

SEQ ID NO: 927773 - RNA, 23 nt, Human
gggaagauguuagacaagaucag

SEQ ID NO: 927774 - RNA, 18 nt, Human
ggugauaugguagaaagg

SEQ ID NO: 927775 - RNA, 18 nt, Human
uaaaugguauaccuaaga

SEQ ID NO: 927776 - RNA, 22 nt, Human
uaauagagcuagaauggccaag

SEQ ID NO: 927777 - RNA, 24 nt, Human
uaauuagaaaugugaaauuggcuu

SEQ ID NO: 927778 - RNA, 23 nt, Human
uacaaacaaaauuuaaccuucaa

SEQ ID NO: 927779 - RNA, 21 nt, Human
uagaaaugugaaauuggcuua

SEQ ID NO: 927780 - RNA, 27 nt, Human
uagcagggaaguggagguagaagaaga

SEQ ID NO: 927781 - RNA, 19 nt, Human
uauccaaaaccagacaaaa

SEQ ID NO: 927782 - RNA, 21 nt, Human
uauccaaaaccagacaaaagc

SEQ ID NO: 927783 - RNA, 27 nt, Human
uccaaaaccagacaaaagccaaagcaa

SEQ ID NO: 927784 - RNA, 18 nt, Human
uccucuugccuucucaaa

SEQ ID NO: 927785 - RNA, 22 nt, Human
uccuuuguuuucaagcauaugu

SEQ ID NO: 927786 - RNA, 22 nt, Human
ucuggcagcugugaggagcaag

SEQ ID NO: 927787 - RNA, 24 nt, Human
ugaaugaauucagcucauuuguga

SEQ ID NO: 927788 - RNA, 23 nt, Human
ugagcccagggguuccagaccag

SEQ ID NO: 927789 - RNA, 24 nt, Human
ugaggggcuugagaaguagcaggg

SEQ ID NO: 927790 - RNA, 21 nt, Human
uggaugacauaggagcuucug

SEQ ID NO: 927791 - RNA, 18 nt, Human
uggcagcugugaggagca

SEQ ID NO: 927792 - RNA, 23 nt, Human
uggcagcugugaggagcaaggau

SEQ ID NO: 927793 - RNA, 21 nt, Human
uggccaagugauuuacauuua

SEQ ID NO: 927794 - RNA, 23 nt, Human
ugggaguauauggaugacuuagu

SEQ ID NO: 927795 - RNA, 22 nt, Human
ugucucugggaaacuauaaauu

SEQ ID NO: 927796 - RNA, 19 nt, Human
uuacugaauaacuaaagug

SEQ ID NO: 927797 - RNA, 19 nt, Human
uuccaugaauuaacagagg

SEQ ID NO: 927798 - RNA, 22 nt, Human
uugaggggcuugagaaguagca

SEQ ID NO: 927799 - RNA, 23 nt, Human
uugcuugagcccagggguuccag

SEQ ID NO: 927800 - RNA, 25 nt, Human
uugggaguucagaauauccauguaa

SEQ ID NO: 927801 - RNA, 24 nt, Human
uuuucuauucucugugaugccuua

SEQ ID NO: 927802 - RNA, 21 nt, Human
aacaaaaacacuuagaaagga

SEQ ID NO: 927803 - RNA, 18 nt, Human
aagcaggaggauugcuug

SEQ ID NO: 927804 - RNA, 24 nt, Human
aagcaggaggauugcuugggccca

SEQ ID NO: 927805 - RNA, 26 nt, Human
acaaaacaaaacaaaaacacuuagaa

SEQ ID NO: 927806 - RNA, 27 nt, Human
acaaaacaaaacaaaaacacuuagaaa

SEQ ID NO: 927807 - RNA, 20 nt, Human
accccacacucucccccgag

SEQ ID NO: 927808 - RNA, 20 nt, Human
acuguggggcuggggacccu

SEQ ID NO: 927809 - RNA, 21 nt, Human
acuguggggcuggggacccuc

SEQ ID NO: 927810 - RNA, 24 nt, Human
agacugaagcaggaggauugcuug

SEQ ID NO: 927811 - RNA, 24 nt, Human
agcacuuugggaggccgagguggg

SEQ ID NO: 927812 - RNA, 19 nt, Human
agcccccagcacuuuggga

SEQ ID NO: 927813 - RNA, 22 nt, Human
agccugggcaacauaguaagac

SEQ ID NO: 927814 - RNA, 18 nt, Human
agccugggcaacauggug

SEQ ID NO: 927815 - RNA, 18 nt, Human
agccugggcaacauggug

SEQ ID NO: 927816 - RNA, 21 nt, Human
agccugggcaacauggugucc

SEQ ID NO: 927817 - RNA, 20 nt, Human
aggaucucuugggcccagga

SEQ ID NO: 927818 - RNA, 20 nt, Human
aggauugcuugggcccagga

SEQ ID NO: 927819 - RNA, 24 nt, Human
aggauugcuugggcccaggaguuc

SEQ ID NO: 927820 - RNA, 22 nt, Human
aggcagcucaugcugaaguuca

SEQ ID NO: 927821 - RNA, 24 nt, Human
aggcaugguggcucacaccuguag

SEQ ID NO: 927822 - RNA, 18 nt, Human
aggccgaggugggaggau

SEQ ID NO: 927823 - RNA, 24 nt, Human
aggccgaggugggaggaucucuug

SEQ ID NO: 927824 - RNA, 22 nt, Human
aggugggaggaucucuugggcc

SEQ ID NO: 927825 - RNA, 24 nt, Human
auugcuugggcccaggaguucagg

SEQ ID NO: 927826 - RNA, 24 nt, Human
auugcuugggcccaggaguucagg

SEQ ID NO: 927827 - RNA, 24 nt, Human
auuuguaauccaaacacuuugcca

SEQ ID NO: 927828 - RNA, 22 nt, Human
caaaacaaaacaaaaacacuua

SEQ ID NO: 927829 - RNA, 24 nt, Human
caacauaguaagacgcugucucuu

SEQ ID NO: 927830 - RNA, 25 nt, Human
cacaccuguagcccccagcacuuug

SEQ ID NO: 927831 - RNA, 24 nt, Human
caccuguagcccccagcacuuugg

SEQ ID NO: 927832 - RNA, 25 nt, Human
caccuguagcccccagcacuuuggg

SEQ ID NO: 927833 - RNA, 19 nt, Human
cacuuagaaaggggccagg

SEQ ID NO: 927834 - RNA, 23 nt, Human
cacuuagccucuuugggccucca

SEQ ID NO: 927835 - RNA, 21 nt, Human
cagcacuuugggaggccgagg

SEQ ID NO: 927836 - RNA, 24 nt, Human
cagcacuuugggaggccgaggugg

SEQ ID NO: 927837 - RNA, 22 nt, Human
caggaguucagggccagccugg

SEQ ID NO: 927838 - RNA, 24 nt, Human
cagggacaucccugcuccagccca

SEQ ID NO: 927839 - RNA, 19 nt, Human
caguaucagucuacugugg

SEQ ID NO: 927840 - RNA, 19 nt, Human
caucacccucuacaccaug

SEQ ID NO: 927841 - RNA, 21 nt, Human
ccacacucucccccgagagaa

SEQ ID NO: 927842 - RNA, 20 nt, Human
ccccagcacuuugggaggcc

SEQ ID NO: 927843 - RNA, 20 nt, Human
cccccagcacuuugggaggc

SEQ ID NO: 927844 - RNA, 20 nt, Human
cccccgagagaaggcagcuc

SEQ ID NO: 927845 - RNA, 18 nt, Human
cccucacaggugacaggg

SEQ ID NO: 927846 - RNA, 21 nt, Human
ccucccaugagaugggagggc

SEQ ID NO: 927847 - RNA, 23 nt, Human
ccucuacaccauguuugucaccu

SEQ ID NO: 927848 - RNA, 22 nt, Human
ccugggcaacauggugucccca

SEQ ID NO: 927849 - RNA, 21 nt, Human
ccugggcaagucacuuagccu

SEQ ID NO: 927850 - RNA, 23 nt, Human
ccuugugacugcugagcgcucug

SEQ ID NO: 927851 - RNA, 19 nt, Human
cggagugggcugggugggg

SEQ ID NO: 927852 - RNA, 25 nt, Human
cucacaccuguagcccccagcacuu

SEQ ID NO: 927853 - RNA, 18 nt, Human
cugaaguucacauagagg

SEQ ID NO: 927854 - RNA, 21 nt, Human
cuugccaggacgcccagccca

SEQ ID NO: 927855 - RNA, 22 nt, Human
gaggaucucuugggcccaggag

SEQ ID NO: 927856 - RNA, 23 nt, Human
gaggugggaggaucucuugggcc

SEQ ID NO: 927857 - RNA, 21 nt, Human
gauccugggcaagucacuuag

SEQ ID NO: 927858 - RNA, 23 nt, Human
gauugagaccagccugggcaaca

SEQ ID NO: 927859 - RNA, 24 nt, Human
gauugcuugggcccaggaguucag

SEQ ID NO: 927860 - RNA, 22 nt, Human
gcccaggaguucagggccagcc

SEQ ID NO: 927861 - RNA, 18 nt, Human
gccucggucaucacccuc

SEQ ID NO: 927862 - RNA, 24 nt, Human
gcucacaccuguagcccccagcac

SEQ ID NO: 927863 - RNA, 19 nt, Human
gcugggugggguggggugu

SEQ ID NO: 927864 - RNA, 18 nt, Human
gcugugaccccacacucu

SEQ ID NO: 927865 - RNA, 21 nt, Human
ggagauugagaccagccuggg

SEQ ID NO: 927866 - RNA, 23 nt, Human
ggauugcuugggcccaggaguuc

SEQ ID NO: 927867 - RNA, 25 nt, Human
ggcaugguggcucacaccuguagcc

SEQ ID NO: 927868 - RNA, 21 nt, Human
ggccaggcaugguggcucaca

SEQ ID NO: 927869 - RNA, 19 nt, Human
ggcccaggagauugagacc

SEQ ID NO: 927870 - RNA, 18 nt, Human
gggcuggguggggugggg

SEQ ID NO: 927871 - RNA, 19 nt, Human
gggugcagacggcuguggg

SEQ ID NO: 927872 - RNA, 20 nt, Human
gggugucucuggucuggcag

SEQ ID NO: 927873 - RNA, 20 nt, Human
gugauccugggcaagucacu

SEQ ID NO: 927874 - RNA, 18 nt, Human
guggacucaaaugccugc

SEQ ID NO: 927875 - RNA, 19 nt, Human
uaaaaauaguaccuuccuc

SEQ ID NO: 927876 - RNA, 24 nt, Human
uaaaaauuaacaaaacaaaacaaa

SEQ ID NO: 927877 - RNA, 22 nt, Human
uagaaaggggccaggcauggug

SEQ ID NO: 927878 - RNA, 28 nt, Human
ucaccuggucagcccuauccaguauccc

SEQ ID NO: 927879 - RNA, 20 nt, Human
uccauguggacucaaaugcc

SEQ ID NO: 927880 - RNA, 21 nt, Human
ucccaugagaugggagggccc

SEQ ID NO: 927881 - RNA, 20 nt, Human
uccccaaaaaaaaaaaaaaa

SEQ ID NO: 927882 - RNA, 23 nt, Human
uccccugcugugcggcuuggggu

SEQ ID NO: 927883 - RNA, 22 nt, Human
uccugggucaguaucagucuac

SEQ ID NO: 927884 - RNA, 19 nt, Human
ucucucugcccuugugacu

SEQ ID NO: 927885 - RNA, 19 nt, Human
ucuguuccugaguugucuc

SEQ ID NO: 927886 - RNA, 24 nt, Human
ucuugggcccaggagauugagacc

SEQ ID NO: 927887 - RNA, 25 nt, Human
ugaagcaggaggauugcuugggccc

SEQ ID NO: 927888 - RNA, 24 nt, Human
ugagaccagccugggcaacauagu

SEQ ID NO: 927889 - RNA, 18 nt, Human
ugagccuggcauugccac

SEQ ID NO: 927890 - RNA, 21 nt, Human
ugagugguuggcuguguaucu

SEQ ID NO: 927891 - RNA, 22 nt, Human
ugccagacugaagcaggaggau

SEQ ID NO: 927892 - RNA, 23 nt, Human
uggauuguugaagggcuauagau

SEQ ID NO: 927893 - RNA, 23 nt, Human
uggcucacaccuguagcccccag

SEQ ID NO: 927894 - RNA, 25 nt, Human
uggcucacaccuguagcccccagca

SEQ ID NO: 927895 - RNA, 19 nt, Human
ugggaggccgaggugggag

SEQ ID NO: 927896 - RNA, 23 nt, Human
ugggcccaggagauugagaccag

SEQ ID NO: 927897 - RNA, 23 nt, Human
ugggcccaggaguucagggccag

SEQ ID NO: 927898 - RNA, 21 nt, Human
uggggucagggaaggagcaug

SEQ ID NO: 927899 - RNA, 23 nt, Human
uggggucagggaaggagcaugga

SEQ ID NO: 927900 - RNA, 25 nt, Human
uggggucagggaaggagcauggacu

SEQ ID NO: 927901 - RNA, 26 nt, Human
ugggugcagacggcuguggggucagg

SEQ ID NO: 927902 - RNA, 24 nt, Human
ugggugggguggggugucucuggu

SEQ ID NO: 927903 - RNA, 23 nt, Human
ugguguccccaaaaaaaaaaaaa

SEQ ID NO: 927904 - RNA, 27 nt, Human
uguaaaacacuuagaaaggggccaggc

SEQ ID NO: 927905 - RNA, 18 nt, Human
uguaauccaaacacuuug

SEQ ID NO: 927906 - RNA, 20 nt, Human
uguaauccaaacacuuugcc

SEQ ID NO: 927907 - RNA, 22 nt, Human
uguccccaaaaaaaaaaaaaaa

SEQ ID NO: 927908 - RNA, 24 nt, Human
ugugauccugggcaagucacuuag

SEQ ID NO: 927909 - RNA, 24 nt, Human
uguugcugggacuugagugguugg

SEQ ID NO: 927910 - RNA, 23 nt, Human
uuccuugucuguaaaauagagau

SEQ ID NO: 927911 - RNA, 23 nt, Human
uugcuugggcccaggaguucagg

SEQ ID NO: 927912 - RNA, 23 nt, Human
uugggccuccauuuccuugucug

SEQ ID NO: 927913 - RNA, 22 nt, Human
aaagcugaacuugucagaaagu

SEQ ID NO: 927914 - RNA, 23 nt, Human
aacagcccaacaccccacccaaa

SEQ ID NO: 927915 - RNA, 22 nt, Human
aagaaaaucaucucacaaaugg

SEQ ID NO: 927916 - RNA, 21 nt, Human
aaguauaaugaagaggaugau

SEQ ID NO: 927917 - RNA, 19 nt, Human
acaaaguaguggaagaaga

SEQ ID NO: 927918 - RNA, 21 nt, Human
acccaaagagauguuccagag

SEQ ID NO: 927919 - RNA, 18 nt, Human
acuacacuccagccuggg

SEQ ID NO: 927920 - RNA, 24 nt, Human
acuacacuccagccugggugacag

SEQ ID NO: 927921 - RNA, 18 nt, Human
acuucaguaaccaucuaa

SEQ ID NO: 927922 - RNA, 19 nt, Human
acuuuuuuuuuuuuuccuu

SEQ ID NO: 927923 - RNA, 19 nt, Human
agaaacugaggcacagaua

SEQ ID NO: 927924 - RNA, 22 nt, Human
agagcacauguacucuaucuuc

SEQ ID NO: 927925 - RNA, 20 nt, Human
agaggaacauggugcuccag

SEQ ID NO: 927926 - RNA, 22 nt, Human
agcccaacaccccacccaaaga

SEQ ID NO: 927927 - RNA, 24 nt, Human
aggcgugguggcucaggccaguaa

SEQ ID NO: 927928 - RNA, 22 nt, Human
aggguuauuauaauguuaaaug

SEQ ID NO: 927929 - RNA, 23 nt, Human
aggugggaggauugcuugagccc

SEQ ID NO: 927930 - RNA, 22 nt, Human
aguaaccaucuaauuagguagc

SEQ ID NO: 927931 - RNA, 19 nt, Human
agucacacacccucugcuu

SEQ ID NO: 927932 - RNA, 18 nt, Human
auaaguauaaugaagagg

SEQ ID NO: 927933 - RNA, 19 nt, Human
auccuuuuucuaucccucu

SEQ ID NO: 927934 - RNA, 18 nt, Human
augaauucauuuuguuca

SEQ ID NO: 927935 - RNA, 27 nt, Human
auucuuguuuuaaagagauuuuaaaga

SEQ ID NO: 927936 - RNA, 21 nt, Human
caaaguaauuacuuacuaggc

SEQ ID NO: 927937 - RNA, 22 nt, Human
caaauuggaaaauucaaagcac

SEQ ID NO: 927938 - RNA, 20 nt, Human
caacaccccacccaaagaga

SEQ ID NO: 927939 - RNA, 21 nt, Human
caacuuccaggacuuuccaau

SEQ ID NO: 927940 - RNA, 24 nt, Human
caacuuuuuuuuuuuuuccuuaga

SEQ ID NO: 927941 - RNA, 18 nt, Human
caagaugucagagacuua

SEQ ID NO: 927942 - RNA, 18 nt, Human
cacagucuagaagaagca

SEQ ID NO: 927943 - RNA, 27 nt, Human
cacccaaagagauguuccagagcacau

SEQ ID NO: 927944 - RNA, 19 nt, Human
caccccacccaaagagaug

SEQ ID NO: 927945 - RNA, 24 nt, Human
cacuacacuccagccugggugaca

SEQ ID NO: 927946 - RNA, 18 nt, Human
cacuccagccugggugac

SEQ ID NO: 927947 - RNA, 22 nt, Human
cacuccagccugggugacagag

SEQ ID NO: 927948 - RNA, 23 nt, Human
caguacuucuggagccaaggugg

SEQ ID NO: 927949 - RNA, 18 nt, Human
ccaauaccucauucagug

SEQ ID NO: 927950 - RNA, 20 nt, Human
ccacccaaagagauguucca

SEQ ID NO: 927951 - RNA, 20 nt, Human
ccacuacacuccagccuggg

SEQ ID NO: 927952 - RNA, 21 nt, Human
ccacuacacuccagccugggu

SEQ ID NO: 927953 - RNA, 23 nt, Human
ccacuacacuccagccuggguga

SEQ ID NO: 927954 - RNA, 24 nt, Human
ccacuacacuccagccugggugac

SEQ ID NO: 927955 - RNA, 24 nt, Human
ccagagcacauguacucuaucuuc

SEQ ID NO: 927956 - RNA, 23 nt, Human
cccaaagagauguuccagagcac

SEQ ID NO: 927957 - RNA, 19 nt, Human
ccuuagaaggauacuaggc

SEQ ID NO: 927958 - RNA, 19 nt, Human
cucacaaauggaaguaaca

SEQ ID NO: 927959 - RNA, 20 nt, Human
cucacaaauggaaguaacac

SEQ ID NO: 927960 - RNA, 20 nt, Human
cucuaaaugcugucuagcca

SEQ ID NO: 927961 - RNA, 18 nt, Human
cuggagccaaggugggag

SEQ ID NO: 927962 - RNA, 18 nt, Human
cuuugugugaguuaucca

SEQ ID NO: 927963 - RNA, 23 nt, Human
gaaagcauuuggcagacacuuga

SEQ ID NO: 927964 - RNA, 25 nt, Human
gaagaaacagcccaacaccccaccc

SEQ ID NO: 927965 - RNA, 18 nt, Human
gaagaagcaauuauucaa

SEQ ID NO: 927966 - RNA, 21 nt, Human
gagaaagcauuuggcagacac

SEQ ID NO: 927967 - RNA, 24 nt, Human
gagccaaggugggaggauugcuug

SEQ ID NO: 927968 - RNA, 23 nt, Human
gagcccaaggcaaaguaacacaa

SEQ ID NO: 927969 - RNA, 20 nt, Human
gcagacacuugaugaucauc

SEQ ID NO: 927970 - RNA, 19 nt, Human
gccacuacacuccagccug

SEQ ID NO: 927971 - RNA, 20 nt, Human
ggcaacuuuuuuuuuuuuuc

SEQ ID NO: 927972 - RNA, 21 nt, Human
ggcaacuuuuuuuuuuuuucc

SEQ ID NO: 927973 - RNA, 19 nt, Human
ggguaggcgugguggcuca

SEQ ID NO: 927974 - RNA, 19 nt, Human
gucaucuuuauccuuuuuc

SEQ ID NO: 927975 - RNA, 18 nt, Human
gugugacuuugugugagu

SEQ ID NO: 927976 - RNA, 22 nt, Human
uaaaaaaaaaaccucacaaguu

SEQ ID NO: 927977 - RNA, 21 nt, Human
uaaaaaacgucucuuaaagaa

SEQ ID NO: 927978 - RNA, 24 nt, Human
uaaaaaacgucucuuaaagaagca

SEQ ID NO: 927979 - RNA, 23 nt, Human
uaaaauguuuccaaaugaguuuc

SEQ ID NO: 927980 - RNA, 20 nt, Human
uaaagguggagaaacugagg

SEQ ID NO: 927981 - RNA, 21 nt, Human
uaaaugcugucuagccacuga

SEQ ID NO: 927982 - RNA, 22 nt, Human
uaacuagugcuaacuauguccc

SEQ ID NO: 927983 - RNA, 23 nt, Human
uaagaauauguuaccauaucugu

SEQ ID NO: 927984 - RNA, 19 nt, Human
uaagcauaggcaagaacug

SEQ ID NO: 927985 - RNA, 22 nt, Human
uaauccugauuuuaccaauacc

SEQ ID NO: 927986 - RNA, 18 nt, Human
uaauuggaagaaacagcc

SEQ ID NO: 927987 - RNA, 21 nt, Human
uaccauaucugucuuuccuag

SEQ ID NO: 927988 - RNA, 24 nt, Human
uacucuaucuucuuuucagaauua

SEQ ID NO: 927989 - RNA, 21 nt, Human
uacugugcagugcuggagagu

SEQ ID NO: 927990 - RNA, 21 nt, Human
uacuucaguaaccaucuaauu

SEQ ID NO: 927991 - RNA, 19 nt, Human
uacuucuggagccaaggug

SEQ ID NO: 927992 - RNA, 19 nt, Human
uagaauggcaaauaugaca

SEQ ID NO: 927993 - RNA, 24 nt, Human
uagaguaagaauccaaaucugaga

SEQ ID NO: 927994 - RNA, 24 nt, Human
uauaauguuaaaugagauauaugu

SEQ ID NO: 927995 - RNA, 20 nt, Human
uccagccugggugacagaga

SEQ ID NO: 927996 - RNA, 20 nt, Human
ucuccuaugugccagagguu

SEQ ID NO: 927997 - RNA, 23 nt, Human
ucucuugggaucuaaaauucuug

SEQ ID NO: 927998 - RNA, 23 nt, Human
ugagauuaaaaaaaaaaccucac

SEQ ID NO: 927999 - RNA, 22 nt, Human
ugagcccaguaguuugaggcug

SEQ ID NO: 928000 - RNA, 26 nt, Human
ugagcccaguaguuugaggcuggacc

SEQ ID NO: 928001 - RNA, 21 nt, Human
ugcuaacuaugucccagguac

SEQ ID NO: 928002 - RNA, 25 nt, Human
uggaagaaacagcccaacaccccac

SEQ ID NO: 928003 - RNA, 20 nt, Human
uggaagaaacagcccaacag

SEQ ID NO: 928004 - RNA, 20 nt, Human
uggcaacuuuuuuuuuuuuu

SEQ ID NO: 928005 - RNA, 20 nt, Human
ugguggcucaggccaguaau

SEQ ID NO: 928006 - RNA, 25 nt, Human
ugucagaaaguccuaaucauuucag

SEQ ID NO: 928007 - RNA, 19 nt, Human
uguucuguauuuuuuguuu

SEQ ID NO: 928008 - RNA, 22 nt, Human
uguucuguauuuuuuguuuaau

SEQ ID NO: 928009 - RNA, 23 nt, Human
uuaauccugauuuuaccaauacc

SEQ ID NO: 928010 - RNA, 20 nt, Human
uuaaugauuauuaaaucuaa

SEQ ID NO: 928011 - RNA, 22 nt, Human
uuacuaggcuagcucauaguau

SEQ ID NO: 928012 - RNA, 21 nt, Human
uuagggcuaugaaacucuuuu

SEQ ID NO: 928013 - RNA, 21 nt, Human
uuauacugcauggagucuuuc

SEQ ID NO: 928014 - RNA, 23 nt, Human
uuaugagugucaucuuuauccuu

SEQ ID NO: 928015 - RNA, 24 nt, Human
uugcuugagcccaguaguuugagg

SEQ ID NO: 928016 - RNA, 18 nt, Human
uuguucuguauuuuuugu

SEQ ID NO: 928017 - RNA, 22 nt, Human
uuguuuguuuggauuacuugaa

SEQ ID NO: 928018 - RNA, 20 nt, Human
uuucagaauuagaauuuguu

SEQ ID NO: 928019 - RNA, 18 nt, Human
uuuggcagacacuugaug

SEQ ID NO: 928020 - RNA, 24 nt, Human
uuuguucaccauuuaacacagucu

SEQ ID NO: 928021 - RNA, 32 nt, Human
uuuuauaauuauauguaagaauauguuaccuc

SEQ ID NO: 928022 - RNA, 19 nt, Human
uuuuccauugucugucuuc

SEQ ID NO: 928023 - RNA, 23 nt, Human
aaagauaaaaugagugacuacag

SEQ ID NO: 928024 - RNA, 24 nt, Human
aacuuugguaaacugaauucugaa

SEQ ID NO: 928025 - RNA, 21 nt, Human
aagacuuuccaccguccacag

SEQ ID NO: 928026 - RNA, 20 nt, Human
aagcaacguggugauagaau

SEQ ID NO: 928027 - RNA, 20 nt, Human
accguccacaguucucuaag

SEQ ID NO: 928028 - RNA, 23 nt, Human
agaaagcaacguggugauagaau

SEQ ID NO: 928029 - RNA, 22 nt, Human
agauauuuuuacuagaauuuca

SEQ ID NO: 928030 - RNA, 19 nt, Human
caccagggacucuuucagc

SEQ ID NO: 928031 - RNA, 21 nt, Human
caccccagcgaaggauggccu

SEQ ID NO: 928032 - RNA, 20 nt, Human
ccucuaaaugacuaauaccu

SEQ ID NO: 928033 - RNA, 19 nt, Human
ccugcacugcgcaccaggg

SEQ ID NO: 928034 - RNA, 21 nt, Human
cuaaaugacuaauaccugcac

SEQ ID NO: 928035 - RNA, 24 nt, Human
cugaaugcuuuccguucaccccag

SEQ ID NO: 928036 - RNA, 21 nt, Human
cuggucaugauaagacuuucc

SEQ ID NO: 928037 - RNA, 24 nt, Human
cuguaauaguaacuauaccucuaa

SEQ ID NO: 928038 - RNA, 18 nt, Human
gaaaauagacuuuuaaaa

SEQ ID NO: 928039 - RNA, 21 nt, Human
gaucuuuuugcccacuccgaa

SEQ ID NO: 928040 - RNA, 23 nt, Human
gcaggaggcagacaugaggucgc

SEQ ID NO: 928041 - RNA, 18 nt, Human
gccuggucaugauaagac

SEQ ID NO: 928042 - RNA, 20 nt, Human
gcuaauggaauaaauaauau

SEQ ID NO: 928043 - RNA, 20 nt, Human
guacccaggguuacugcuuc

SEQ ID NO: 928044 - RNA, 20 nt, Human
uaaaaugaaguucagagaaa

SEQ ID NO: 928045 - RNA, 18 nt, Human
uacauauccaauugcagc

SEQ ID NO: 928046 - RNA, 23 nt, Human
uaccugcacugcgcaccagggac

SEQ ID NO: 928047 - RNA, 23 nt, Human
uauaugucauauaggcacauaua

SEQ ID NO: 928048 - RNA, 22 nt, Human
ucaaaaugaauauggaguaguc

SEQ ID NO: 928049 - RNA, 20 nt, Human
ucagagaaagcaacguggug

SEQ ID NO: 928050 - RNA, 24 nt, Human
ucauuuccaucucaaaauucucuu

SEQ ID NO: 928051 - RNA, 19 nt, Human
uccacagaaugccaaaugc

SEQ ID NO: 928052 - RNA, 26 nt, Human
ugccuuauccuccugcauuagguuua

SEQ ID NO: 928053 - RNA, 19 nt, Human
uucagaaugucugcaguua

SEQ ID NO: 928054 - RNA, 21 nt, Human
uuccacagaaugccaaaugcc

SEQ ID NO: 928055 - RNA, 19 nt, Human
uuccugguugagcaguguu

SEQ ID NO: 928056 - RNA, 18 nt, Human
uuguuuucaauuuucccc

SEQ ID NO: 928057 - RNA, 24 nt, Human
uuuuuuuuuuuuguuguuuucaau

SEQ ID NO: 928058 - RNA, 18 nt, Human
uuuuuuuuuuuuuuuuug

SEQ ID NO: 928059 - RNA, 25 nt, Human
uuuuuuuuuuuuuuuuuuguuguuu

SEQ ID NO: 928060 - RNA, 22 nt, Human
aaaaaggagauaaaacuacaga

SEQ ID NO: 928061 - RNA, 18 nt, Human
aaaauauuuccaagacac

SEQ ID NO: 928062 - RNA, 19 nt, Human
aaacaaggucacacaauuu

SEQ ID NO: 928063 - RNA, 21 nt, Human
aaaugcuauaaagacaagaca

SEQ ID NO: 928064 - RNA, 24 nt, Human
aaaugggguucaaggaccgagggc

SEQ ID NO: 928065 - RNA, 18 nt, Human
aacaaaaagccaagaaaa

SEQ ID NO: 928066 - RNA, 20 nt, Human
aagcaccuuguacuacaagg

SEQ ID NO: 928067 - RNA, 29 nt, Human
aagcagaaggcagaugaugaagggacccc

SEQ ID NO: 928068 - RNA, 21 nt, Human
aagcauuuacagcaugguuuc

SEQ ID NO: 928069 - RNA, 21 nt, Human
aaggcuaagcacaaucacuua

SEQ ID NO: 928070 - RNA, 20 nt, Human
aaugcuggaaacgggaacac

SEQ ID NO: 928071 - RNA, 24 nt, Human
aauguguuuauucacaaccauuug

SEQ ID NO: 928072 - RNA, 22 nt, Human
aauuaauuuuaaaaauugaaag

SEQ ID NO: 928073 - RNA, 18 nt, Human
acaaaaaggcuaagcaca

SEQ ID NO: 928074 - RNA, 22 nt, Human
acaaugaaauaggcuucauaaa

SEQ ID NO: 928075 - RNA, 23 nt, Human
acccaggcccggcagcugcaucc

SEQ ID NO: 928076 - RNA, 18 nt, Human
aggaaaaaccaaaaaaca

SEQ ID NO: 928077 - RNA, 21 nt, Human
agggcacggggcgacgaaaga

SEQ ID NO: 928078 - RNA, 26 nt, Human
aucauaccaaauccucagcaaaauca

SEQ ID NO: 928079 - RNA, 20 nt, Human
aucccauuaaagcaccuugu

SEQ ID NO: 928080 - RNA, 24 nt, Human
aucuaacaucguucauuggaaaua

SEQ ID NO: 928081 - RNA, 19 nt, Human
aucucccuuacaaaaaggc

SEQ ID NO: 928082 - RNA, 23 nt, Human
augccgcccaggcgccgccgcuc

SEQ ID NO: 928083 - RNA, 24 nt, Human
caaaguaaauuuaaucaguaacau

SEQ ID NO: 928084 - RNA, 23 nt, Human
caaauccucagcaaaaucaagga

SEQ ID NO: 928085 - RNA, 23 nt, Human
caagacacagcuacaacuuaaau

SEQ ID NO: 928086 - RNA, 22 nt, Human
caagaggaaaaaaaauuaaaaa

SEQ ID NO: 928087 - RNA, 19 nt, Human
caaggaccgagggcgggcc

SEQ ID NO: 928088 - RNA, 21 nt, Human
cacaucaacuguacuuacuau

SEQ ID NO: 928089 - RNA, 20 nt, Human
caccgucauuguugcaagag

SEQ ID NO: 928090 - RNA, 18 nt, Human
cagaaaugcuauaaagac

SEQ ID NO: 928091 - RNA, 24 nt, Human
cauagaaauaaauaaugcuggaaa

SEQ ID NO: 928092 - RNA, 20 nt, Human
cauguaaauaaacacaugua

SEQ ID NO: 928093 - RNA, 23 nt, Human
ccaaaaaacaguuugcuuacuaa

SEQ ID NO: 928094 - RNA, 19 nt, Human
ccaacuugaaauguccaaa

SEQ ID NO: 928095 - RNA, 22 nt, Human
ccauuaaagcaccuuguacuac

SEQ ID NO: 928096 - RNA, 19 nt, Human
cccaaacccaggcccggca

SEQ ID NO: 928097 - RNA, 24 nt, Human
cccauuaaagcaccuuguacuaca

SEQ ID NO: 928098 - RNA, 24 nt, Human
ccgcacggcacgagccgaaauggg

SEQ ID NO: 928099 - RNA, 21 nt, Human
ccucccgcucaaugcccaaac

SEQ ID NO: 928100 - RNA, 20 nt, Human
cgaaaugggguucaaggacc

SEQ ID NO: 928101 - RNA, 19 nt, Human
cgagggaggagcaccgggc

SEQ ID NO: 928102 - RNA, 18 nt, Human
cgcacggcacgagccgaa

SEQ ID NO: 928103 - RNA, 19 nt, Human
cgcaugccgcccaggcgcc

SEQ ID NO: 928104 - RNA, 19 nt, Human
cgcucaaugcccaaaccca

SEQ ID NO: 928105 - RNA, 23 nt, Human
cucuggacucccucgccguccgc

SEQ ID NO: 928106 - RNA, 25 nt, Human
cugacgaucccuccucaugcuuccu

SEQ ID NO: 928107 - RNA, 22 nt, Human
cugagucugacgaucccuccuc

SEQ ID NO: 928108 - RNA, 21 nt, Human
cuuacaaaaaggcuaagcaca

SEQ ID NO: 928109 - RNA, 24 nt, Human
cuuucauaccagaaaggauuuuau

SEQ ID NO: 928110 - RNA, 20 nt, Human
gaaauaggcuucauaaauca

SEQ ID NO: 928111 - RNA, 19 nt, Human
gauccuaucaucccuacuc

SEQ ID NO: 928112 - RNA, 19 nt, Human
gccgcccaggcgccgccgc

SEQ ID NO: 928113 - RNA, 20 nt, Human
ggcggcgugagggcacgggg

SEQ ID NO: 928114 - RNA, 18 nt, Human
gggaacaaaggcaguguu

SEQ ID NO: 928115 - RNA, 22 nt, Human
gggaacaaaggcaguguuuacu

SEQ ID NO: 928116 - RNA, 21 nt, Human
ggucuugaaaagcagaaggca

SEQ ID NO: 928117 - RNA, 21 nt, Human
gguucaaggaccgagggcggg

SEQ ID NO: 928118 - RNA, 25 nt, Human
uaaaaucauaccaaauccucagcaa

SEQ ID NO: 928119 - RNA, 24 nt, Human
uaaaaugaaguggaaaaaacuaaa

SEQ ID NO: 928120 - RNA, 23 nt, Human
uaaagcaccuuguacuacaaggu

SEQ ID NO: 928121 - RNA, 21 nt, Human
uaauucuguaucaauucagau

SEQ ID NO: 928122 - RNA, 20 nt, Human
uaccaaauccucagcaaaau

SEQ ID NO: 928123 - RNA, 20 nt, Human
uaccauaguaaacagaaaug

SEQ ID NO: 928124 - RNA, 19 nt, Human
uaccauuuguuaccauucc

SEQ ID NO: 928125 - RNA, 18 nt, Human
uagagucaucuacccaca

SEQ ID NO: 928126 - RNA, 23 nt, Human
uauauuuacauauuuaaaguauc

SEQ ID NO: 928127 - RNA, 21 nt, Human
ucaaauauugaaagagccaca

SEQ ID NO: 928128 - RNA, 25 nt, Human
ucaaauauugaaagagccacaugau

SEQ ID NO: 928129 - RNA, 23 nt, Human
ugacauauacauuuuagagaaaa

SEQ ID NO: 928130 - RNA, 19 nt, Human
ugauaaacaaggucacaca

SEQ ID NO: 928131 - RNA, 20 nt, Human
ugcccaaacccaggcccggc

SEQ ID NO: 928132 - RNA, 21 nt, Human
ugccgauacuucagcauuucu

SEQ ID NO: 928133 - RNA, 22 nt, Human
uggaaaaaacuaaauauauaua

SEQ ID NO: 928134 - RNA, 23 nt, Human
uggcaccuaaaaacuuaauacug

SEQ ID NO: 928135 - RNA, 26 nt, Human
uguguuuauucacaaccauuuguaaa

SEQ ID NO: 928136 - RNA, 18 nt, Human
uguuuucuaucccuggcc

SEQ ID NO: 928137 - RNA, 24 nt, Human
uucagauccuaucaucccuacucc

SEQ ID NO: 928138 - RNA, 18 nt, Human
uucuuacacaucucccuu

SEQ ID NO: 928139 - RNA, 24 nt, Human
uuuaaaguaucauauuaauuucua

SEQ ID NO: 928140 - RNA, 21 nt, Human
uuuaagcacagcaagaacuuu

SEQ ID NO: 928141 - RNA, 19 nt, Human
uuuaugaacaaaaagccaa

SEQ ID NO: 928142 - RNA, 20 nt, Human
uuuucuaucccuggccuugu

SEQ ID NO: 928143 - RNA, 21 nt, Human
uuuuuuuuuuuuuuuuuuaag

SEQ ID NO: 928144 - RNA, 22 nt, Human
aaagaucagaccguuccuaaga

SEQ ID NO: 928145 - RNA, 19 nt, Human
aaagugcuaggauuacagg

SEQ ID NO: 928146 - RNA, 24 nt, Human
aaagugcuaggauuacagguguga

SEQ ID NO: 928147 - RNA, 19 nt, Human
aaagugcugggauuacaga

SEQ ID NO: 928148 - RNA, 24 nt, Human
aaagugcugggauuacagauguga

SEQ ID NO: 928149 - RNA, 22 nt, Human
aaauagcugaauagaagacccu

SEQ ID NO: 928150 - RNA, 19 nt, Human
aaccaucauucccauccua

SEQ ID NO: 928151 - RNA, 28 nt, Human
aacuuucuuuuuaaaaaaaauagaggcc

SEQ ID NO: 928152 - RNA, 24 nt, Human
aacuuuuuuuuuuuugagaugggg

SEQ ID NO: 928153 - RNA, 20 nt, Human
aagcccccauuauugcccag

SEQ ID NO: 928154 - RNA, 22 nt, Human
aaguagcugggacuacuggcgc

SEQ ID NO: 928155 - RNA, 26 nt, Human
aagugcuaggauuacaggugugagcc

SEQ ID NO: 928156 - RNA, 18 nt, Human
aagugcugggauuacaga

SEQ ID NO: 928157 - RNA, 19 nt, Human
aagugcugggauuacagau

SEQ ID NO: 928158 - RNA, 23 nt, Human
aaguguucccugaguucaagucc

SEQ ID NO: 928159 - RNA, 18 nt, Human
acagaugugagucaccau

SEQ ID NO: 928160 - RNA, 24 nt, Human
acccaggccuggagugcaguggcg

SEQ ID NO: 928161 - RNA, 18 nt, Human
acgggguuucaccauguu

SEQ ID NO: 928162 - RNA, 19 nt, Human
acgggguuucaccauguua

SEQ ID NO: 928163 - RNA, 20 nt, Human
acgggguuucaccauguuag

SEQ ID NO: 928164 - RNA, 24 nt, Human
acgggguuucaccauguuagccag

SEQ ID NO: 928165 - RNA, 24 nt, Human
acuccagccugggcagcagaguga

SEQ ID NO: 928166 - RNA, 25 nt, Human
acucuauugcccaggcugguuugca

SEQ ID NO: 928167 - RNA, 21 nt, Human
acugaauaaaaacugaacaua

SEQ ID NO: 928168 - RNA, 20 nt, Human
acugcaagcucugccuccug

SEQ ID NO: 928169 - RNA, 24 nt, Human
acuguacuccagccugggcagcag

SEQ ID NO: 928170 - RNA, 26 nt, Human
acuguacuccagccugggcagcagag

SEQ ID NO: 928171 - RNA, 20 nt, Human
agaaaucaguaaaaaaauaa

SEQ ID NO: 928172 - RNA, 19 nt, Human
agaauauauauccuuucuc

SEQ ID NO: 928173 - RNA, 18 nt, Human
agacagggucucgcacug

SEQ ID NO: 928174 - RNA, 23 nt, Human
agaggcagggguggacacagugg

SEQ ID NO: 928175 - RNA, 22 nt, Human
agcaaagcccccauuauugccc

SEQ ID NO: 928176 - RNA, 23 nt, Human
agccaucuucucgccuuggucuc

SEQ ID NO: 928177 - RNA, 24 nt, Human
agccugggaaauguagggaaaccu

SEQ ID NO: 928178 - RNA, 19 nt, Human
agccugggaggucgagacu

SEQ ID NO: 928179 - RNA, 23 nt, Human
agccugggcagcagagugagauc

SEQ ID NO: 928180 - RNA, 20 nt, Human
agcgcgguggcgcagucucg

SEQ ID NO: 928181 - RNA, 24 nt, Human
agcgcgguggcgcagucucggcuc

SEQ ID NO: 928182 - RNA, 18 nt, Human
agcucugccuccuggguu

SEQ ID NO: 928183 - RNA, 19 nt, Human
aggaguucaagaccagccu

SEQ ID NO: 928184 - RNA, 22 nt, Human
aggcaggaggaucgcuugagcc

SEQ ID NO: 928185 - RNA, 24 nt, Human
aggcaggaggaucgcuugagccug

SEQ ID NO: 928186 - RNA, 21 nt, Human
aggcagggguggacacagugg

SEQ ID NO: 928187 - RNA, 24 nt, Human
aggcagggguggacacagugguuc

SEQ ID NO: 928188 - RNA, 21 nt, Human
aggcugagacgggucagucgc

SEQ ID NO: 928189 - RNA, 24 nt, Human
aggcugagacgggucagucgcuug

SEQ ID NO: 928190 - RNA, 24 nt, Human
agguguguuggcacacaccugugg

SEQ ID NO: 928191 - RNA, 18 nt, Human
aguagcugggacuacagg

SEQ ID NO: 928192 - RNA, 19 nt, Human
aguagcugggacuacaggc

SEQ ID NO: 928193 - RNA, 27 nt, Human
aguccaggaguucaagaccagccuggg

SEQ ID NO: 928194 - RNA, 24 nt, Human
agucgcuugaguccaggaguucaa

SEQ ID NO: 928195 - RNA, 20 nt, Human
agugcaguggcgcgaucucg

SEQ ID NO: 928196 - RNA, 23 nt, Human
agugcaguggcgcgaucucggcu

SEQ ID NO: 928197 - RNA, 24 nt, Human
agugcaguggcgcgaucucggcuc

SEQ ID NO: 928198 - RNA, 23 nt, Human
agugguucacgccugugguccca

SEQ ID NO: 928199 - RNA, 19 nt, Human
auaaagccuuccuacuaaa

SEQ ID NO: 928200 - RNA, 24 nt, Human
augauccgcccgccucggccuccc

SEQ ID NO: 928201 - RNA, 23 nt, Human
auguagcauuucuauggcagaau

SEQ ID NO: 928202 - RNA, 22 nt, Human
auuccuggccucaagccaucuu

SEQ ID NO: 928203 - RNA, 20 nt, Human
auucuguaguacucaauugc

SEQ ID NO: 928204 - RNA, 24 nt, Human
caaagugcuaggauuacaggugug

SEQ ID NO: 928205 - RNA, 24 nt, Human
caaagugcugggauuacagaugug

SEQ ID NO: 928206 - RNA, 23 nt, Human
caaccuugaccucccgggcccaa

SEQ ID NO: 928207 - RNA, 24 nt, Human
caaccuugaccucccgggcccaag

SEQ ID NO: 928208 - RNA, 21 nt, Human
caagaacauuccuucuuagau

SEQ ID NO: 928209 - RNA, 24 nt, Human
caauuuuuuguauuuuuuauagag

SEQ ID NO: 928210 - RNA, 25 nt, Human
cacaccuguggucccagcuacucug

SEQ ID NO: 928211 - RNA, 19 nt, Human
caccacaagcucugccucc

SEQ ID NO: 928212 - RNA, 19 nt, Human
caccaugucuaauuucaaa

SEQ ID NO: 928213 - RNA, 24 nt, Human
caccaugucuaauuucaaaacucu

SEQ ID NO: 928214 - RNA, 18 nt, Human
caccauguuagccaggau

SEQ ID NO: 928215 - RNA, 22 nt, Human
caccauguuagccaggaugguc

SEQ ID NO: 928216 - RNA, 24 nt, Human
caccauguuagccaggauggucuc

SEQ ID NO: 928217 - RNA, 21 nt, Human
caccuguggucccagcuacuc

SEQ ID NO: 928218 - RNA, 24 nt, Human
caccuguggucccagcuacucugg

SEQ ID NO: 928219 - RNA, 24 nt, Human
cacgccuguggucccaacaccuug

SEQ ID NO: 928220 - RNA, 19 nt, Human
cacucuauugcccaggcug

SEQ ID NO: 928221 - RNA, 20 nt, Human
cacugcaaccuugaccuccc

SEQ ID NO: 928222 - RNA, 21 nt, Human
cacugcaaccuugaccucccg

SEQ ID NO: 928223 - RNA, 23 nt, Human
cacugcaaccuugaccucccggg

SEQ ID NO: 928224 - RNA, 23 nt, Human
cacugcaagcucugccuccuggg

SEQ ID NO: 928225 - RNA, 19 nt, Human
cacuguacuccagccuggg

SEQ ID NO: 928226 - RNA, 20 nt, Human
cacuguacuccagccugggc

SEQ ID NO: 928227 - RNA, 22 nt, Human
cacuguacuccagccugggcag

SEQ ID NO: 928228 - RNA, 23 nt, Human
cacuguacuccagccugggcagc

SEQ ID NO: 928229 - RNA, 24 nt, Human
cacuguacuccagccugggcagca

SEQ ID NO: 928230 - RNA, 21 nt, Human
cagaggucuauguugcccagg

SEQ ID NO: 928231 - RNA, 24 nt, Human
cagaguagcugggacuacaggcac

SEQ ID NO: 928232 - RNA, 18 nt, Human
cagcagagugagauccug

SEQ ID NO: 928233 - RNA, 24 nt, Human
cagggucucacucuauugcccagg

SEQ ID NO: 928234 - RNA, 24 nt, Human
cauguagcauuucuauggcagaau

SEQ ID NO: 928235 - RNA, 18 nt, Human
cauuccuguuuggcugga

SEQ ID NO: 928236 - RNA, 21 nt, Human
ccaaagugcuaggauuacagg

SEQ ID NO: 928237 - RNA, 24 nt, Human
ccaaagugcuaggauuacaggugu

SEQ ID NO: 928238 - RNA, 21 nt, Human
ccaaagugcugggauuacaga

SEQ ID NO: 928239 - RNA, 22 nt, Human
ccaaagugcugggauuacagau

SEQ ID NO: 928240 - RNA, 24 nt, Human
ccaaagugcugggauuacagaugu

SEQ ID NO: 928241 - RNA, 19 nt, Human
ccacaagcucugccucccg

SEQ ID NO: 928242 - RNA, 21 nt, Human
ccacaagcucugccucccggg

SEQ ID NO: 928243 - RNA, 20 nt, Human
ccacuguacuccagccuggg

SEQ ID NO: 928244 - RNA, 20 nt, Human
ccacuguacuccagccuggg

SEQ ID NO: 928245 - RNA, 22 nt, Human
ccacuguacuccagccugggca

SEQ ID NO: 928246 - RNA, 22 nt, Human
ccacuguacuccagccugggca

SEQ ID NO: 928247 - RNA, 22 nt, Human
ccacuguacuccagccugggca

SEQ ID NO: 928248 - RNA, 24 nt, Human
ccacuguacuccagccugggcagc

SEQ ID NO: 928249 - RNA, 24 nt, Human
ccagaguagcugggacuacaggca

SEQ ID NO: 928250 - RNA, 25 nt, Human
ccaugcucggccuaacuuuuuuuuu

SEQ ID NO: 928251 - RNA, 20 nt, Human
cccaaguagcugggacuacu

SEQ ID NO: 928252 - RNA, 20 nt, Human
cccauuauugcccagccauu

SEQ ID NO: 928253 - RNA, 21 nt, Human
cccgggcccaagugaaccucu

SEQ ID NO: 928254 - RNA, 22 nt, Human
cccuuggccaaaguccucaaaa

SEQ ID NO: 928255 - RNA, 20 nt, Human
ccgcgcccggccaacucaua

SEQ ID NO: 928256 - RNA, 18 nt, Human
ccuaagaugacacggacu

SEQ ID NO: 928257 - RNA, 21 nt, Human
ccuggucagguaucucaaacc

SEQ ID NO: 928258 - RNA, 22 nt, Human
ccuguggucccagcuacucugg

SEQ ID NO: 928259 - RNA, 22 nt, Human
ccuugaccucccgggcccaagu

SEQ ID NO: 928260 - RNA, 23 nt, Human
cgcaaugacagcucacugcaacc

SEQ ID NO: 928261 - RNA, 18 nt, Human
cgcacugucacccaggcc

SEQ ID NO: 928262 - RNA, 24 nt, Human
cgccucggccucccaaagugcuag

SEQ ID NO: 928263 - RNA, 23 nt, Human
cgccuguggucccaacaccuugg

SEQ ID NO: 928264 - RNA, 19 nt, Human
cgcgggccgagaaggaagc

SEQ ID NO: 928265 - RNA, 24 nt, Human
cuaggccucccaaguagcugggac

SEQ ID NO: 928266 - RNA, 20 nt, Human
cucacucuauugcccaggcc

SEQ ID NO: 928267 - RNA, 24 nt, Human
cucacugcaaccuugaccucccgg

SEQ ID NO: 928268 - RNA, 24 nt, Human
cucacugcaagcucugccuccugg

SEQ ID NO: 928269 - RNA, 18 nt, Human
cucaugauccgcccgccu

SEQ ID NO: 928270 - RNA, 21 nt, Human
cucccggguucacaccauucu

SEQ ID NO: 928271 - RNA, 24 nt, Human
cuccugaccucaugauccgcccgc

SEQ ID NO: 928272 - RNA, 19 nt, Human
cuccugccuaggccuccca

SEQ ID NO: 928273 - RNA, 24 nt, Human
cucgcucugucacccaggcuggag

SEQ ID NO: 928274 - RNA, 22 nt, Human
cucugucacccaggcuggagcg

SEQ ID NO: 928275 - RNA, 20 nt, Human
cugaauaaaaacugaacaua

SEQ ID NO: 928276 - RNA, 22 nt, Human
cugcaaccuugaccucccgggc

SEQ ID NO: 928277 - RNA, 23 nt, Human
cugcaaccuugaccucccgggcc

SEQ ID NO: 928278 - RNA, 19 nt, Human
cugcaagcucugccuccug

SEQ ID NO: 928279 - RNA, 24 nt, Human
cugcaccuggugaugacccucguc

SEQ ID NO: 928280 - RNA, 22 nt, Human
cuggcgccugccaccaugccca

SEQ ID NO: 928281 - RNA, 21 nt, Human
cuugaccucccgggcccaagu

SEQ ID NO: 928282 - RNA, 21 nt, Human
cuuuuuuuuuuuugagauggg

SEQ ID NO: 928283 - RNA, 20 nt, Human
gaacuuggagaaccuauggg

SEQ ID NO: 928284 - RNA, 21 nt, Human
gacacagugguucacgccugu

SEQ ID NO: 928285 - RNA, 20 nt, Human
gaccguuccuaagaugacac

SEQ ID NO: 928286 - RNA, 22 nt, Human
gaccucaugauccgcccgccuc

SEQ ID NO: 928287 - RNA, 24 nt, Human
gacuacaggcacaugccaccauac

SEQ ID NO: 928288 - RNA, 20 nt, Human
gagacagggucucgcacugu

SEQ ID NO: 928289 - RNA, 23 nt, Human
gaggaucgcuugagccugggagg

SEQ ID NO: 928290 - RNA, 25 nt, Human
gaguagcugggacuacaggcacaug

SEQ ID NO: 928291 - RNA, 24 nt, Human
gaucgcuugagccugggaggucga

SEQ ID NO: 928292 - RNA, 18 nt, Human
gauuacagaugugaguca

SEQ ID NO: 928293 - RNA, 21 nt, Human
gauuacagaugugagucacca

SEQ ID NO: 928294 - RNA, 24 nt, Human
gauuacagaugugagucaccaugc

SEQ ID NO: 928295 - RNA, 18 nt, Human
gauuacaggugugagcca

SEQ ID NO: 928296 - RNA, 20 nt, Human
gauuacaggugugagccacc

SEQ ID NO: 928297 - RNA, 22 nt, Human
gauuacaggugugagccaccgc

SEQ ID NO: 928298 - RNA, 22 nt, Human
gcaaagcccccauuauugccca

SEQ ID NO: 928299 - RNA, 22 nt, Human
gcacacaccuguggucccagcu

SEQ ID NO: 928300 - RNA, 20 nt, Human
gcagugcucucagauauucc

SEQ ID NO: 928301 - RNA, 19 nt, Human
gccacuguacuccagccug

SEQ ID NO: 928302 - RNA, 22 nt, Human
gccacuguacuccagccugggc

SEQ ID NO: 928303 - RNA, 23 nt, Human
gccacuguacuccagccugggca

SEQ ID NO: 928304 - RNA, 24 nt, Human
gccacuguacuccagccugggcag

SEQ ID NO: 928305 - RNA, 25 nt, Human
gcccagcuaauuuuuuuuguauuuu

SEQ ID NO: 928306 - RNA, 23 nt, Human
gcccuuggccaaaguccucaaaa

SEQ ID NO: 928307 - RNA, 21 nt, Human
gccucagacuccagaguagcu

SEQ ID NO: 928308 - RNA, 23 nt, Human
gccucagacuccagaguagcugg

SEQ ID NO: 928309 - RNA, 25 nt, Human
gccucccggguucacaccauucucc

SEQ ID NO: 928310 - RNA, 22 nt, Human
gccuuggucucccaaagugcug

SEQ ID NO: 928311 - RNA, 24 nt, Human
gccuuggucucccaaagugcuggg

SEQ ID NO: 928312 - RNA, 23 nt, Human
gcgcgguggcgcagucucggcuc

SEQ ID NO: 928313 - RNA, 25 nt, Human
gcucugucacccaggcuggagcgcg

SEQ ID NO: 928314 - RNA, 20 nt, Human
gcugggauuacagaugugag

SEQ ID NO: 928315 - RNA, 22 nt, Human
gcuugaguccaggaguucaaga

SEQ ID NO: 928316 - RNA, 22 nt, Human
ggauuacaggugugagccaccg

SEQ ID NO: 928317 - RNA, 25 nt, Human
ggcgcaaugacagcucacugcaacc

SEQ ID NO: 928318 - RNA, 22 nt, Human
gggaggucgagacuucagugag

SEQ ID NO: 928319 - RNA, 21 nt, Human
gggcagcagagugagauccug

SEQ ID NO: 928320 - RNA, 23 nt, Human
gggguuucaccauguuagccagg

SEQ ID NO: 928321 - RNA, 22 nt, Human
ggguuucaccauguuagccagg

SEQ ID NO: 928322 - RNA, 20 nt, Human
ggucucaaucuccugaccuc

SEQ ID NO: 928323 - RNA, 24 nt, Human
ggugagaucucagaauucuguggc

SEQ ID NO: 928324 - RNA, 24 nt, Human
gguuucaccauguuagccaggaug

SEQ ID NO: 928325 - RNA, 23 nt, Human
guacuccagccugggcagcagag

SEQ ID NO: 928326 - RNA, 24 nt, Human
gucucgcucugucacccaggcugg

SEQ ID NO: 928327 - RNA, 24 nt, Human
guuggcacacaccuguggucccag

SEQ ID NO: 928328 - RNA, 20 nt, Human
uaaaaauucuggagcaugau

SEQ ID NO: 928329 - RNA, 24 nt, Human
uaaauuuuaaaaauugccaaaaag

SEQ ID NO: 928330 - RNA, 22 nt, Human
uaagaaaucaguaaaaaaauaa

SEQ ID NO: 928331 - RNA, 18 nt, Human
uaagagguucacgcccuu

SEQ ID NO: 928332 - RNA, 20 nt, Human
uaagccacaaaaaaaccuaa

SEQ ID NO: 928333 - RNA, 21 nt, Human
uacaagcauaauuuaauaaac

SEQ ID NO: 928334 - RNA, 22 nt, Human
uacagacgggguuucaccaugu

SEQ ID NO: 928335 - RNA, 24 nt, Human
uacaggcacaugccaccauaccca

SEQ ID NO: 928336 - RNA, 23 nt, Human
uacaggugugagccaccgcgccc

SEQ ID NO: 928337 - RNA, 22 nt, Human
uacuccagccugggcagcagag

SEQ ID NO: 928338 - RNA, 23 nt, Human
uacuccagccugggcagcagagu

SEQ ID NO: 928339 - RNA, 24 nt, Human
uacuccagccugggcagcagagug

SEQ ID NO: 928340 - RNA, 21 nt, Human
uagaaaaauguugagggcaag

SEQ ID NO: 928341 - RNA, 19 nt, Human
uagagacagaggucuaugu

SEQ ID NO: 928342 - RNA, 21 nt, Human
uagaggcagggguggacacag

SEQ ID NO: 928343 - RNA, 18 nt, Human
uaggauuacaggugugag

SEQ ID NO: 928344 - RNA, 19 nt, Human
uaggauuacaggugugagc

SEQ ID NO: 928345 - RNA, 21 nt, Human
uaggauuacaggugugagcca

SEQ ID NO: 928346 - RNA, 22 nt, Human
uaggauuacaggugugagccac

SEQ ID NO: 928347 - RNA, 23 nt, Human
uaggauuacaggugugagccacc

SEQ ID NO: 928348 - RNA, 24 nt, Human
uaggauuacaggugugagccaccg

SEQ ID NO: 928349 - RNA, 18 nt, Human
uaggccucccaaguagcu

SEQ ID NO: 928350 - RNA, 24 nt, Human
uaguacagacgggguuucaccaug

SEQ ID NO: 928351 - RNA, 20 nt, Human
uauguugcccaggcuggccu

SEQ ID NO: 928352 - RNA, 22 nt, Human
uauguugcccaggcuggccuug

SEQ ID NO: 928353 - RNA, 24 nt, Human
uauguugcccaggcuggccuugaa

SEQ ID NO: 928354 - RNA, 24 nt, Human
ucaccacaagcucugccucccggg

SEQ ID NO: 928355 - RNA, 24 nt, Human
ucaccauguuagccaggauggucu

SEQ ID NO: 928356 - RNA, 23 nt, Human
ucacgccuguggucccaacaccu

SEQ ID NO: 928357 - RNA, 23 nt, Human
ucacugcaaccuugaccucccgg

SEQ ID NO: 928358 - RNA, 24 nt, Human
ucacugcaaccuugaccucccggg

SEQ ID NO: 928359 - RNA, 18 nt, Human
ucacugcaagcucugccu

SEQ ID NO: 928360 - RNA, 23 nt, Human
ucacugcaagcucugccuccugg

SEQ ID NO: 928361 - RNA, 24 nt, Human
ucacugcaagcucugccuccuggg

SEQ ID NO: 928362 - RNA, 23 nt, Human
uccacggcacgaugcaugugcag

SEQ ID NO: 928363 - RNA, 24 nt, Human
uccagaguagcugggacuacaggc

SEQ ID NO: 928364 - RNA, 23 nt, Human
uccagccugggcagcagagugag

SEQ ID NO: 928365 - RNA, 24 nt, Human
uccagccugggcagcagagugaga

SEQ ID NO: 928366 - RNA, 23 nt, Human
ucccaaagugcuaggauuacagg

SEQ ID NO: 928367 - RNA, 18 nt, Human
ucccaaagugcugggauu

SEQ ID NO: 928368 - RNA, 23 nt, Human
ucccaaagugcugggauuacaga

SEQ ID NO: 928369 - RNA, 24 nt, Human
ucccaaguagcugggacuacuggc

SEQ ID NO: 928370 - RNA, 23 nt, Human
ucccgggcccaagugaaccucuc

SEQ ID NO: 928371 - RNA, 21 nt, Human
ucccggguucacaccauucuc

SEQ ID NO: 928372 - RNA, 24 nt, Human
ucccggguucacaccauucuccug

SEQ ID NO: 928373 - RNA, 19 nt, Human
ucccugaguucaagucccu

SEQ ID NO: 928374 - RNA, 21 nt, Human
uccugagcuaaaguggugagc

SEQ ID NO: 928375 - RNA, 22 nt, Human
uccuguaucaacaacuacaaaa

SEQ ID NO: 928376 - RNA, 19 nt, Human
ucgcacugucacccaggcc

SEQ ID NO: 928377 - RNA, 25 nt, Human
ucgcacugucacccaggccuggagu

SEQ ID NO: 928378 - RNA, 23 nt, Human
ucgccuuggucucccaaagugcu

SEQ ID NO: 928379 - RNA, 18 nt, Human
ucgcuugagccugggagg

SEQ ID NO: 928380 - RNA, 23 nt, Human
ucgcuugagccugggaggucgag

SEQ ID NO: 928381 - RNA, 23 nt, Human
ucgcuugaguccaggaguucaag

SEQ ID NO: 928382 - RNA, 18 nt, Human
ucggccucccaaagugcu

SEQ ID NO: 928383 - RNA, 18 nt, Human
ucuauguugcccaggcug

SEQ ID NO: 928384 - RNA, 24 nt, Human
ucuauguugcccaggcuggccuug

SEQ ID NO: 928385 - RNA, 23 nt, Human
ucucaaaccaucauucccauccu

SEQ ID NO: 928386 - RNA, 18 nt, Human
ucucacucuauugcccag

SEQ ID NO: 928387 - RNA, 23 nt, Human
ucucacucuauugcccaggcugg

SEQ ID NO: 928388 - RNA, 26 nt, Human
ucucacucuauugcccaggcugguuu

SEQ ID NO: 928389 - RNA, 27 nt, Human
ucucacucuauugcccaggcugguuug

SEQ ID NO: 928390 - RNA, 25 nt, Human
ucucgcacugucacccaggccugga

SEQ ID NO: 928391 - RNA, 19 nt, Human
ucucgcucugucacccagg

SEQ ID NO: 928392 - RNA, 23 nt, Human
ucucgcucugucacccaggcugg

SEQ ID NO: 928393 - RNA, 24 nt, Human
ucucgcucugucacccaggcugga

SEQ ID NO: 928394 - RNA, 18 nt, Human
ucugaggcaggaggaucg

SEQ ID NO: 928395 - RNA, 19 nt, Human
ucuguauugauugaggaag

SEQ ID NO: 928396 - RNA, 18 nt, Human
ucugucacccaggcugga

SEQ ID NO: 928397 - RNA, 23 nt, Human
ugaagaguguuucucagaaacaa

SEQ ID NO: 928398 - RNA, 21 nt, Human
ugaauagaagacccuuuugaa

SEQ ID NO: 928399 - RNA, 22 nt, Human
ugacagcucacugcaaccuuga

SEQ ID NO: 928400 - RNA, 21 nt, Human
ugagaaauguaauagagagug

SEQ ID NO: 928401 - RNA, 22 nt, Human
ugagacagggucucgcacuguc

SEQ ID NO: 928402 - RNA, 25 nt, Human
ugagacgggucagucgcuugagucc

SEQ ID NO: 928403 - RNA, 20 nt, Human
ugagaucucagaauucugug

SEQ ID NO: 928404 - RNA, 22 nt, Human
ugagauggggucucgcucuguc

SEQ ID NO: 928405 - RNA, 18 nt, Human
ugagccugggaggucgag

SEQ ID NO: 928406 - RNA, 22 nt, Human
ugagcugugauugugccacugu

SEQ ID NO: 928407 - RNA, 21 nt, Human
ugaggaaucugcaucucaaca

SEQ ID NO: 928408 - RNA, 24 nt, Human
ugaggaaucugcaucucaacagaa

SEQ ID NO: 928409 - RNA, 24 nt, Human
ugaggcaggaggaucgcuugagcc

SEQ ID NO: 928410 - RNA, 25 nt, Human
ugaggcaggaggaucgcuugagccu

SEQ ID NO: 928411 - RNA, 22 nt, Human
ugcaguggcgcgaucucggcuc

SEQ ID NO: 928412 - RNA, 24 nt, Human
ugcccaggcuggccuugaauuccu

SEQ ID NO: 928413 - RNA, 19 nt, Human
ugccucccggguucacacc

SEQ ID NO: 928414 - RNA, 24 nt, Human
ugcuaggauuacaggugugagcca

SEQ ID NO: 928415 - RNA, 21 nt, Human
ugcugagggaggcugcuaauu

SEQ ID NO: 928416 - RNA, 18 nt, Human
ugcugggauuacagaugu

SEQ ID NO: 928417 - RNA, 24 nt, Human
ugcugggauuacagaugugaguca

SEQ ID NO: 928418 - RNA, 19 nt, Human
uggacacagugguucacgc

SEQ ID NO: 928419 - RNA, 20 nt, Human
uggagcaucucagccccagc

SEQ ID NO: 928420 - RNA, 24 nt, Human
uggagcgcgguggcgcagucucgg

SEQ ID NO: 928421 - RNA, 23 nt, Human
uggagugcaguggcgcgaucucg

SEQ ID NO: 928422 - RNA, 24 nt, Human
uggagugcaguggcgcgaucucgg

SEQ ID NO: 928423 - RNA, 24 nt, Human
uggccucaagccaucuucucgccu

SEQ ID NO: 928424 - RNA, 20 nt, Human
uggccuugaauuccuggccu

SEQ ID NO: 928425 - RNA, 24 nt, Human
uggcgcaaugacagcucacugcaa

SEQ ID NO: 928426 - RNA, 28 nt, Human
uggcgcaaugacagcucacugcaaccuu

SEQ ID NO: 928427 - RNA, 20 nt, Human
uggcgcagucucggcucacu

SEQ ID NO: 928428 - RNA, 24 nt, Human
uggcgcgaucucggcucaccacaa

SEQ ID NO: 928429 - RNA, 20 nt, Human
uggcuggacuaagauuuagc

SEQ ID NO: 928430 - RNA, 21 nt, Human
ugggacuacaggcacaugcca

SEQ ID NO: 928431 - RNA, 22 nt, Human
ugggacuacaggcacaugccac

SEQ ID NO: 928432 - RNA, 24 nt, Human
ugggacuacaggcacaugccacca

SEQ ID NO: 928433 - RNA, 25 nt, Human
ugggacuacaggcacaugccaccau

SEQ ID NO: 928434 - RNA, 24 nt, Human
ugggacuacuggcgccugccacca

SEQ ID NO: 928435 - RNA, 23 nt, Human
ugggaggcugagacgggucaguc

SEQ ID NO: 928436 - RNA, 24 nt, Human
ugggaggcugagacgggucagucg

SEQ ID NO: 928437 - RNA, 24 nt, Human
ugggaggucgagacuucagugagc

SEQ ID NO: 928438 - RNA, 18 nt, Human
ugggauuacagaugugag

SEQ ID NO: 928439 - RNA, 19 nt, Human
ugggauuacagaugugagu

SEQ ID NO: 928440 - RNA, 22 nt, Human
ugggauuacagaugugagucac

SEQ ID NO: 928441 - RNA, 24 nt, Human
ugggauuacagaugugagucacca

SEQ ID NO: 928442 - RNA, 25 nt, Human
ugggauuacagaugugagucaccau

SEQ ID NO: 928443 - RNA, 21 nt, Human
ugggcagcagagugagauccu

SEQ ID NO: 928444 - RNA, 24 nt, Human
uggggucucgcucugucacccagg

SEQ ID NO: 928445 - RNA, 24 nt, Human
ugguucacgccuguggucccaaca

SEQ ID NO: 928446 - RNA, 24 nt, Human
ugucugaggcaggaggaucgcuug

SEQ ID NO: 928447 - RNA, 21 nt, Human
ugugagucaccaugcucggcc

SEQ ID NO: 928448 - RNA, 22 nt, Human
ugugccacuguacuccagccug

SEQ ID NO: 928449 - RNA, 24 nt, Human
uguuggcacacaccugugguccca

SEQ ID NO: 928450 - RNA, 24 nt, Human
uuaguacagacgggguuucaccau

SEQ ID NO: 928451 - RNA, 24 nt, Human
uucuuuuagauuaaauauuucuuu

SEQ ID NO: 928452 - RNA, 21 nt, Human
uugagauggggucucgcucug

SEQ ID NO: 928453 - RNA, 22 nt, Human
uugaguccaggaguucaagacc

SEQ ID NO: 928454 - RNA, 20 nt, Human
uuggaucugcucagaugcuu

SEQ ID NO: 928455 - RNA, 23 nt, Human
uuguauuuuuaguacagacgggg

SEQ ID NO: 928456 - RNA, 23 nt, Human
uugugccacuguacuccagccug

SEQ ID NO: 928457 - RNA, 19 nt, Human
uuucaccauguuagccagg

SEQ ID NO: 928458 - RNA, 20 nt, Human
uuucaccauguuagccagga

SEQ ID NO: 928459 - RNA, 22 nt, Human
uuugagauggggucucgcucug

SEQ ID NO: 928460 - RNA, 24 nt, Human
uuuuauaaagccuuccuacuaaaa

SEQ ID NO: 928461 - RNA, 19 nt, Human
uuuuuagauaaggaaaauu

SEQ ID NO: 928462 - RNA, 24 nt, Human
uuuuuaguacagacgggguuucac

SEQ ID NO: 928463 - RNA, 24 nt, Human
uuuuuuguauuuuuaguacagacg

SEQ ID NO: 928464 - RNA, 24 nt, Human
uuuuuuguauuuuuuauagagaca

SEQ ID NO: 928465 - RNA, 24 nt, Human
uuuuuuuuuugagacagggucucg

SEQ ID NO: 928466 - RNA, 24 nt, Human
uuuuuuuuuugagauggggucucg

SEQ ID NO: 928467 - RNA, 20 nt, Human
uuuuuuuuuuugagacaggg

SEQ ID NO: 928468 - RNA, 23 nt, Human
uuuuuuuuuuuugagacaggguc

SEQ ID NO: 928469 - RNA, 25 nt, Human
uuuuuuuuuuuugagauggggucuc

SEQ ID NO: 928470 - RNA, 18 nt, Human
aaaugggguugagaaccc

SEQ ID NO: 928471 - RNA, 24 nt, Human
aagaauaagauauauuuaagagga

SEQ ID NO: 928472 - RNA, 19 nt, Human
aagacacagaagaauaaga

SEQ ID NO: 928473 - RNA, 21 nt, Human
aagacacagaagaauaagaua

SEQ ID NO: 928474 - RNA, 20 nt, Human
aagcccugcagucacccaaa

SEQ ID NO: 928475 - RNA, 20 nt, Human
aagcccugcagucacccaaa

SEQ ID NO: 928476 - RNA, 23 nt, Human
acagcuggagccaaaucugcuga

SEQ ID NO: 928477 - RNA, 21 nt, Human
accguuccuccauucccuucu

SEQ ID NO: 928478 - RNA, 22 nt, Human
acugugugaccucaagcagguc

SEQ ID NO: 928479 - RNA, 20 nt, Human
aggggcuagcucgaggcagg

SEQ ID NO: 928480 - RNA, 20 nt, Human
caaaagcccuagagucaccc

SEQ ID NO: 928481 - RNA, 22 nt, Human
caaaagcccuagaguccagaca

SEQ ID NO: 928482 - RNA, 19 nt, Human
caaagcccuagagucaccc

SEQ ID NO: 928483 - RNA, 22 nt, Human
cacccaaaagcccuagagucac

SEQ ID NO: 928484 - RNA, 24 nt, Human
cacccaaaagcccuagaguccaga

SEQ ID NO: 928485 - RNA, 22 nt, Human
cacccaaaagcccugcagucac

SEQ ID NO: 928486 - RNA, 22 nt, Human
cacccaaaagcccugcagucac

SEQ ID NO: 928487 - RNA, 23 nt, Human
cagccaccgcaccuggaccuuuc

SEQ ID NO: 928488 - RNA, 19 nt, Human
caggagugaugacgggugg

SEQ ID NO: 928489 - RNA, 25 nt, Human
cagucacccaaaagcccuagagucc

SEQ ID NO: 928490 - RNA, 21 nt, Human
cagugagguaugguggugugc

SEQ ID NO: 928491 - RNA, 19 nt, Human
cccaaaagcccuagaguca

SEQ ID NO: 928492 - RNA, 22 nt, Human
cccaaaagcccuagagucaccc

SEQ ID NO: 928493 - RNA, 20 nt, Human
cccaaaagcccugcagucac

SEQ ID NO: 928494 - RNA, 20 nt, Human
cccaaaagcccugcagucac

SEQ ID NO: 928495 - RNA, 24 nt, Human
cccaaagcccuagagucacucaaa

SEQ ID NO: 928496 - RNA, 24 nt, Human
cccaaagcccuagagucacucaaa

SEQ ID NO: 928497 - RNA, 22 nt, Human
cccuagagucacucaaaagccc

SEQ ID NO: 928498 - RNA, 22 nt, Human
cccuagagucacucaaaagccc

SEQ ID NO: 928499 - RNA, 22 nt, Human
cccuagaguccagacagcugga

SEQ ID NO: 928500 - RNA, 21 nt, Human
ccuagagucacccaaaagccc

SEQ ID NO: 928501 - RNA, 21 nt, Human
ccuagagucacccaaaagccc

SEQ ID NO: 928502 - RNA, 21 nt, Human
ccuagagucacucaaaagccc

SEQ ID NO: 928503 - RNA, 21 nt, Human
ccuagagucacucaaaagccc

SEQ ID NO: 928504 - RNA, 21 nt, Human
ccuguugacagaagcccuaga

SEQ ID NO: 928505 - RNA, 19 nt, Human
cuagagucacucaaaagcc

SEQ ID NO: 928506 - RNA, 19 nt, Human
cuagagucacucaaaagcc

SEQ ID NO: 928507 - RNA, 21 nt, Human
cucaaaagcccuagagucacc

SEQ ID NO: 928508 - RNA, 21 nt, Human
cucaaaagcccuagagucacc

SEQ ID NO: 928509 - RNA, 22 nt, Human
cucaaaagcccuagagucaccc

SEQ ID NO: 928510 - RNA, 19 nt, Human
cucucagcaaggccuccca

SEQ ID NO: 928511 - RNA, 26 nt, Human
cucuucuucccucugccucucuguca

SEQ ID NO: 928512 - RNA, 19 nt, Human
cugcagucacccaaaagcc

SEQ ID NO: 928513 - RNA, 19 nt, Human
cugcagucacccaaaagcc

SEQ ID NO: 928514 - RNA, 19 nt, Human
gaagcagccaccgcaccug

SEQ ID NO: 928515 - RNA, 22 nt, Human
gacagaagcccuagagucaccc

SEQ ID NO: 928516 - RNA, 22 nt, Human
gaggaagcagccaccgcaccug

SEQ ID NO: 928517 - RNA, 20 nt, Human
ggaggagagcuugugggaga

SEQ ID NO: 928518 - RNA, 19 nt, Human
uagagucacccaaaagccc

SEQ ID NO: 928519 - RNA, 22 nt, Human
uagaguccagacagcuggagcc

SEQ ID NO: 928520 - RNA, 25 nt, Human
uaugguggugugccuuacuugagag

SEQ ID NO: 928521 - RNA, 24 nt, Human
ucaagcaggucauuuaaacucaug

SEQ ID NO: 928522 - RNA, 24 nt, Human
ucacccaaaagcccuagagucacc

SEQ ID NO: 928523 - RNA, 24 nt, Human
ucagugcaguuugguaauacagga

SEQ ID NO: 928524 - RNA, 19 nt, Human
ucccuucuccccuuaucag

SEQ ID NO: 928525 - RNA, 22 nt, Human
uccuccauucccuucuccccuu

SEQ ID NO: 928526 - RNA, 21 nt, Human
ucuucugcagucucuugaaag

SEQ ID NO: 928527 - RNA, 19 nt, Human
ugaaaagggcuaaaauuua

SEQ ID NO: 928528 - RNA, 22 nt, Human
ugacagaagcccuagagucacc

SEQ ID NO: 928529 - RNA, 20 nt, Human
ugacugugugaccucaagca

SEQ ID NO: 928530 - RNA, 18 nt, Human
ugagaggcggaggagagc

SEQ ID NO: 928531 - RNA, 26 nt, Human
ugaguggaucuuuucuucugcagucu

SEQ ID NO: 928532 - RNA, 18 nt, Human
ugccccaggcucauucag

SEQ ID NO: 928533 - RNA, 19 nt, Human
ugccccaggcucauucagu

SEQ ID NO: 928534 - RNA, 21 nt, Human
uggaguaggcgcccaggcauc

SEQ ID NO: 928535 - RNA, 25 nt, Human
uggcaggagugaugacgggugggau

SEQ ID NO: 928536 - RNA, 21 nt, Human
ugggaaaacagugagguaugg

SEQ ID NO: 928537 - RNA, 20 nt, Human
ugguggggccugaggccagu

SEQ ID NO: 928538 - RNA, 24 nt, Human
ugugccuuacuugagaggcggagg

SEQ ID NO: 928539 - RNA, 19 nt, Human
uucucuucuucccucugcc

SEQ ID NO: 928540 - RNA, 18 nt, Human
uuuaaacuuugcauuguu

SEQ ID NO: 928541 - RNA, 24 nt, Human
uuuuuuugccccaggcucauucag

SEQ ID NO: 928542 - RNA, 21 nt, Human
aaaccauucauaucaguauug

SEQ ID NO: 928543 - RNA, 18 nt, Human
aaccuuugacugcuuccu

SEQ ID NO: 928544 - RNA, 20 nt, Human
acugauuuauauccuguuca

SEQ ID NO: 928545 - RNA, 19 nt, Human
acugcuuccucucucaacc

SEQ ID NO: 928546 - RNA, 24 nt, Human
acuguuuguacaggaacauguuga

SEQ ID NO: 928547 - RNA, 22 nt, Human
agaaaggaggcucacagaggua

SEQ ID NO: 928548 - RNA, 18 nt, Human
agacaaaaacaagacuga

SEQ ID NO: 928549 - RNA, 21 nt, Human
agucaaaguagagaaaggagg

SEQ ID NO: 928550 - RNA, 25 nt, Human
auaaauacuacuuccugauucucau

SEQ ID NO: 928551 - RNA, 22 nt, Human
aucucacccuucuggguuccag

SEQ ID NO: 928552 - RNA, 21 nt, Human
augaauguucaugugugugca

SEQ ID NO: 928553 - RNA, 20 nt, Human
augcaaugaauguucaugug

SEQ ID NO: 928554 - RNA, 22 nt, Human
caaaccauucauaucaguauug

SEQ ID NO: 928555 - RNA, 22 nt, Human
caaguuagacaaaaacaagacu

SEQ ID NO: 928556 - RNA, 23 nt, Human
caaugaaagaaaaugauuccaga

SEQ ID NO: 928557 - RNA, 18 nt, Human
cacacaaguuagacaaaa

SEQ ID NO: 928558 - RNA, 20 nt, Human
cagaauaccccauaaaacca

SEQ ID NO: 928559 - RNA, 22 nt, Human
caguagauuggcauaaccuucc

SEQ ID NO: 928560 - RNA, 23 nt, Human
cauaaccuuccuguaaaauccaa

SEQ ID NO: 928561 - RNA, 25 nt, Human
caucacacaaguuagacaaaaacaa

SEQ ID NO: 928562 - RNA, 25 nt, Human
caugcaaugaauguucaugugugug

SEQ ID NO: 928563 - RNA, 18 nt, Human
caugcccucauuagcaau

SEQ ID NO: 928564 - RNA, 24 nt, Human
ccaaaaugaagcugauagugcuac

SEQ ID NO: 928565 - RNA, 23 nt, Human
ccaaucuggaaaccuuugacugc

SEQ ID NO: 928566 - RNA, 27 nt, Human
ccaucuucuccauaaucauuuccagaa

SEQ ID NO: 928567 - RNA, 19 nt, Human
ccccauaaaaccaaauuac

SEQ ID NO: 928568 - RNA, 19 nt, Human
cccccuuccuuccuuccca

SEQ ID NO: 928569 - RNA, 18 nt, Human
ccuuuuguagaacgagag

SEQ ID NO: 928570 - RNA, 21 nt, Human
cggugaguucuucccaggcuu

SEQ ID NO: 928571 - RNA, 20 nt, Human
cucaaacucaucacacaagu

SEQ ID NO: 928572 - RNA, 21 nt, Human
cuccauacuacuccccaaaag

SEQ ID NO: 928573 - RNA, 24 nt, Human
cucccucuaauucaccuuuuguag

SEQ ID NO: 928574 - RNA, 23 nt, Human
cuuaacagcagucaaaguagaga

SEQ ID NO: 928575 - RNA, 18 nt, Human
cuuacucuugauuucugu

SEQ ID NO: 928576 - RNA, 20 nt, Human
cuuccuguaaaauccaaauu

SEQ ID NO: 928577 - RNA, 21 nt, Human
cuuugacugcuuccucucuca

SEQ ID NO: 928578 - RNA, 19 nt, Human
gaguuaucuuuccaaaauu

SEQ ID NO: 928579 - RNA, 18 nt, Human
gcgcccccuuccuuccuu

SEQ ID NO: 928580 - RNA, 27 nt, Human
guagagaaaggaggcucaacccaagag

SEQ ID NO: 928581 - RNA, 20 nt, Human
gucaaaguagagaaaggagg

SEQ ID NO: 928582 - RNA, 23 nt, Human
guuaaaauacaagaaccuugcca

SEQ ID NO: 928583 - RNA, 26 nt, Human
uacacaacucaaacucaucacacaag

SEQ ID NO: 928584 - RNA, 18 nt, Human
uaccccauaaaaccaaau

SEQ ID NO: 928585 - RNA, 21 nt, Human
uauuugaguaaaaacugaggg

SEQ ID NO: 928586 - RNA, 24 nt, Human
ucaaaguagagaaaggaggcucac

SEQ ID NO: 928587 - RNA, 18 nt, Human
uccccaaaagacagaggc

SEQ ID NO: 928588 - RNA, 22 nt, Human
uccuccauacuacuccccaaaa

SEQ ID NO: 928589 - RNA, 18 nt, Human
uccuuccuucccagcucc

SEQ ID NO: 928590 - RNA, 21 nt, Human
ucuaccuuaccgccaucucac

SEQ ID NO: 928591 - RNA, 23 nt, Human
ucugugugacaggugggccacag

SEQ ID NO: 928592 - RNA, 20 nt, Human
ugaaauuagaauaauccucc

SEQ ID NO: 928593 - RNA, 18 nt, Human
ugggaaauuuguuagugc

SEQ ID NO: 928594 - RNA, 24 nt, Human
uguagaacgagaguuaucuuucca

SEQ ID NO: 928595 - RNA, 25 nt, Human
ugugugcacuguuuguacaggaaca

SEQ ID NO: 928596 - RNA, 23 nt, Human
uuagcaaucaaguggauuugugu

SEQ ID NO: 928597 - RNA, 21 nt, Human
uuccuucccagcucccucuaa

SEQ ID NO: 928598 - RNA, 22 nt, Human
uugacugcuuccucucucaacc

SEQ ID NO: 928599 - RNA, 23 nt, Human
uugaguaaaaacugaggguggga

SEQ ID NO: 928600 - RNA, 21 nt, Human
uuucaaaauaaccuuaaaaca

SEQ ID NO: 928601 - RNA, 24 nt, Human
uuuuuuuuuuuuuuuuuuaauaug

SEQ ID NO: 928602 - RNA, 27 nt, Human
aaaaaaaaaaaaaagcggcuggggcag

SEQ ID NO: 928603 - RNA, 20 nt, Human
aaaaaaaaaaagcggcuggg

SEQ ID NO: 928604 - RNA, 25 nt, Human
aaagccuuuuguccuuccuucuuac

SEQ ID NO: 928605 - RNA, 24 nt, Human
aaaucagugccacuggcaagccag

SEQ ID NO: 928606 - RNA, 22 nt, Human
aaauggaaguaaauguuacccc

SEQ ID NO: 928607 - RNA, 19 nt, Human
aaggaaaagucagaaacca

SEQ ID NO: 928608 - RNA, 24 nt, Human
aauaaauguaaauucauuguacaa

SEQ ID NO: 928609 - RNA, 19 nt, Human
acaaaaaaaaaaaaaaagc

SEQ ID NO: 928610 - RNA, 20 nt, Human
acaaaaaaaaaaaaaaagcg

SEQ ID NO: 928611 - RNA, 24 nt, Human
acagcagugguucccaaacauuga

SEQ ID NO: 928612 - RNA, 20 nt, Human
acccccaaaauacaaaucaa

SEQ ID NO: 928613 - RNA, 24 nt, Human
acucuucuuugggggcagggggug

SEQ ID NO: 928614 - RNA, 20 nt, Human
agaaaccagaauagaaggug

SEQ ID NO: 928615 - RNA, 21 nt, Human
agauguagaaggaucuggaac

SEQ ID NO: 928616 - RNA, 21 nt, Human
aggaaaagucagaaaccagaa

SEQ ID NO: 928617 - RNA, 22 nt, Human
aguuuguagaaagggcagauuu

SEQ ID NO: 928618 - RNA, 18 nt, Human
augucacauuuuauguuc

SEQ ID NO: 928619 - RNA, 20 nt, Human
cacccgaaagucuaacuuaa

SEQ ID NO: 928620 - RNA, 20 nt, Human
cacuggcaagccagggaaau

SEQ ID NO: 928621 - RNA, 24 nt, Human
cagaauagaaggugguaccuccag

SEQ ID NO: 928622 - RNA, 24 nt, Human
cagcaaguugagaguaaaagcuaa

SEQ ID NO: 928623 - RNA, 21 nt, Human
cagcuacagagagccagcuac

SEQ ID NO: 928624 - RNA, 22 nt, Human
cagguacccccaaaauacaaau

SEQ ID NO: 928625 - RNA, 31 nt, Human
cagguacccccaaaauacaaaucaaaauagu

SEQ ID NO: 928626 - RNA, 25 nt, Human
caucaagaaggaaaagucagaaacc

SEQ ID NO: 928627 - RNA, 19 nt, Human
ccacacccgaaagucuaac

SEQ ID NO: 928628 - RNA, 23 nt, Human
ccccugagagagaagccacaccc

SEQ ID NO: 928629 - RNA, 24 nt, Human
cccuuacagcagugguucccaaac

SEQ ID NO: 928630 - RNA, 23 nt, Human
cuaaagccuuuuguccuuccuuc

SEQ ID NO: 928631 - RNA, 24 nt, Human
cuaacuuaaggaauguaaagagaa

SEQ ID NO: 928632 - RNA, 21 nt, Human
cuagccaucuaucagcuacag

SEQ ID NO: 928633 - RNA, 22 nt, Human
cucaacacagguacccccaaaa

SEQ ID NO: 928634 - RNA, 22 nt, Human
cugaaagggaagaccucagucu

SEQ ID NO: 928635 - RNA, 22 nt, Human
cuggcaagccagggaaaugaaa

SEQ ID NO: 928636 - RNA, 23 nt, Human
cuggcaagccagggaaaugaaau

SEQ ID NO: 928637 - RNA, 19 nt, Human
cuuacuucccugggcugga

SEQ ID NO: 928638 - RNA, 18 nt, Human
gaauguggggugagagag

SEQ ID NO: 928639 - RNA, 22 nt, Human
gacacacacaaaaaaaaaaaaa

SEQ ID NO: 928640 - RNA, 21 nt, Human
gagagagaagccacacccgaa

SEQ ID NO: 928641 - RNA, 20 nt, Human
ggcccagagggucaaauuua

SEQ ID NO: 928642 - RNA, 19 nt, Human
ggguaguuuguagaaaggg

SEQ ID NO: 928643 - RNA, 20 nt, Human
guccuuccuucuuaccacac

SEQ ID NO: 928644 - RNA, 22 nt, Human
gucuaacuuaaggaauguaaag

SEQ ID NO: 928645 - RNA, 23 nt, Human
uaaaagaggacucuucuuugggg

SEQ ID NO: 928646 - RNA, 21 nt, Human
uacccccaaaauacaaaucaa

SEQ ID NO: 928647 - RNA, 25 nt, Human
uacuuggaaccuccucccuucucuc

SEQ ID NO: 928648 - RNA, 19 nt, Human
uaucaaaugucacauuuua

SEQ ID NO: 928649 - RNA, 21 nt, Human
ucccuaaaagaggacucuucu

SEQ ID NO: 928650 - RNA, 26 nt, Human
ucccuaaaagaggacucuucuuuggg

SEQ ID NO: 928651 - RNA, 26 nt, Human
uccuuugacaaugacaugcucuguaa

SEQ ID NO: 928652 - RNA, 23 nt, Human
ucucagggccacagauuuccuuu

SEQ ID NO: 928653 - RNA, 19 nt, Human
ucuuucugcugaaagggaa

SEQ ID NO: 928654 - RNA, 23 nt, Human
ugaagguucugauucccuaaaag

SEQ ID NO: 928655 - RNA, 23 nt, Human
ugagagagguggguuauugaaau

SEQ ID NO: 928656 - RNA, 20 nt, Human
ugagaguaaaagcuaaaaug

SEQ ID NO: 928657 - RNA, 21 nt, Human
ugcaacagaacaacuugggua

SEQ ID NO: 928658 - RNA, 21 nt, Human
uggaaccuccucccuucucuc

SEQ ID NO: 928659 - RNA, 22 nt, Human
uggggugagagagguggguuau

SEQ ID NO: 928660 - RNA, 20 nt, Human
uguaaauucauuguacaaaa

SEQ ID NO: 928661 - RNA, 22 nt, Human
ugucaccauaaauaaauguaaa

SEQ ID NO: 928662 - RNA, 20 nt, Human
uuaaacucauuggguguucg

SEQ ID NO: 928663 - RNA, 23 nt, Human
uucugauucccuaaaagaggacu

SEQ ID NO: 928664 - RNA, 19 nt, Human
uugagaguaaaagcuaaaa

SEQ ID NO: 928665 - RNA, 19 nt, Human
uuggaaccuccucccuucu

SEQ ID NO: 928666 - RNA, 20 nt, Human
aaaacaaacaacaaaacgug

SEQ ID NO: 928667 - RNA, 24 nt, Human
aaacaaaacaaaacaaacaacaaa

SEQ ID NO: 928668 - RNA, 26 nt, Human
aaacaaaacaaaacaaacaacaaaac

SEQ ID NO: 928669 - RNA, 21 nt, Human
aaacaaguacaaagagccagg

SEQ ID NO: 928670 - RNA, 18 nt, Human
aaagagccagggcauuag

SEQ ID NO: 928671 - RNA, 22 nt, Human
aaagugcugguaauacaagcuu

SEQ ID NO: 928672 - RNA, 18 nt, Human
aaauaucacccucagaca

SEQ ID NO: 928673 - RNA, 24 nt, Human
aacaaaacaaaacaaacaacaaaa

SEQ ID NO: 928674 - RNA, 20 nt, Human
aacaaaacaaacaacaaaac

SEQ ID NO: 928675 - RNA, 21 nt, Human
aaccucuccaagcuuaugcug

SEQ ID NO: 928676 - RNA, 23 nt, Human
aacgugugugugugugugugugu

SEQ ID NO: 928677 - RNA, 24 nt, Human
aagaagacugcuuguuaaacauuu

SEQ ID NO: 928678 - RNA, 20 nt, Human
aagagccagggcauuaggug

SEQ ID NO: 928679 - RNA, 23 nt, Human
acaaaacaaaacaaacaacaaaa

SEQ ID NO: 928680 - RNA, 26 nt, Human
accucacuuaucugauauuucuucca

SEQ ID NO: 928681 - RNA, 22 nt, Human
acgugugugugugugugugugu

SEQ ID NO: 928682 - RNA, 22 nt, Human
acgugugugugugugugugugu

SEQ ID NO: 928683 - RNA, 21 nt, Human
acuccagaaaugcccaguccu

SEQ ID NO: 928684 - RNA, 23 nt, Human
acucuccaauuaucuucaugaaa

SEQ ID NO: 928685 - RNA, 24 nt, Human
acucuccaauuaucuucaugaaag

SEQ ID NO: 928686 - RNA, 25 nt, Human
acucuguugcccaggcuggaguaca

SEQ ID NO: 928687 - RNA, 19 nt, Human
acugaagccuugaccucuu

SEQ ID NO: 928688 - RNA, 26 nt, Human
acugcaccuggccagauuucuuaauc

SEQ ID NO: 928689 - RNA, 26 nt, Human
agaguccucugaugcccuguccacuc

SEQ ID NO: 928690 - RNA, 24 nt, Human
agauggugaugauauuugaaaaug

SEQ ID NO: 928691 - RNA, 18 nt, Human
agccuccugaauagcugg

SEQ ID NO: 928692 - RNA, 21 nt, Human
aggcaaacaaaauagguaucc

SEQ ID NO: 928693 - RNA, 20 nt, Human
aguacaguggugcaaucaug

SEQ ID NO: 928694 - RNA, 23 nt, Human
aguacaguggugcaaucauggcu

SEQ ID NO: 928695 - RNA, 21 nt, Human
augcccaguccuuucuggagg

SEQ ID NO: 928696 - RNA, 24 nt, Human
auggcucacugaagccuugaccuc

SEQ ID NO: 928697 - RNA, 19 nt, Human
augggguuuugccauguug

SEQ ID NO: 928698 - RNA, 24 nt, Human
augggguuuugccauguugcccag

SEQ ID NO: 928699 - RNA, 21 nt, Human
caaaacaaaacaaaacaaaca

SEQ ID NO: 928700 - RNA, 24 nt, Human
caaaacaaaacagcaggaauaaau

SEQ ID NO: 928701 - RNA, 27 nt, Human
caaaacgugugugugugugugugugug

SEQ ID NO: 928702 - RNA, 19 nt, Human
caaaagaaaggcaaacaaa

SEQ ID NO: 928703 - RNA, 22 nt, Human
caaaagaucaaaacaaaacaaa

SEQ ID NO: 928704 - RNA, 24 nt, Human
caaaagaucaaaacaaaacaaaac

SEQ ID NO: 928705 - RNA, 22 nt, Human
cacucuguugcccaggcuggag

SEQ ID NO: 928706 - RNA, 23 nt, Human
cagagcaucauuugucauaacuu

SEQ ID NO: 928707 - RNA, 18 nt, Human
cagaguccucugaugccc

SEQ ID NO: 928708 - RNA, 23 nt, Human
cagcaggaauaaauaucacccuc

SEQ ID NO: 928709 - RNA, 24 nt, Human
cagggucucacucuguugcccagg

SEQ ID NO: 928710 - RNA, 22 nt, Human
caugccucuuucucauucaaaa

SEQ ID NO: 928711 - RNA, 20 nt, Human
cauggcucacugaagccuug

SEQ ID NO: 928712 - RNA, 22 nt, Human
cauguugcccaggcugcucuug

SEQ ID NO: 928713 - RNA, 24 nt, Human
cauguugcccaggcugcucuugaa

SEQ ID NO: 928714 - RNA, 24 nt, Human
cauuccuguuuccaccuaugggga

SEQ ID NO: 928715 - RNA, 23 nt, Human
cauuucuuauuucugccucccua

SEQ ID NO: 928716 - RNA, 23 nt, Human
ccacuaagcuaucugagcuucua

SEQ ID NO: 928717 - RNA, 18 nt, Human
ccacugcaccuggccaga

SEQ ID NO: 928718 - RNA, 19 nt, Human
ccacugcaccuggccagau

SEQ ID NO: 928719 - RNA, 21 nt, Human
ccauguugcccaggcugcucu

SEQ ID NO: 928720 - RNA, 22 nt, Human
cccaacucugcaaugaaugaac

SEQ ID NO: 928721 - RNA, 22 nt, Human
ccccuagagcacagagaauaga

SEQ ID NO: 928722 - RNA, 23 nt, Human
ccuaccugguccccaaaacaaaa

SEQ ID NO: 928723 - RNA, 22 nt, Human
ccucccuaccugguccccaaaa

SEQ ID NO: 928724 - RNA, 24 nt, Human
ccugaauagcugggacuaugggug

SEQ ID NO: 928725 - RNA, 20 nt, Human
ccuucucuggguuuucuugg

SEQ ID NO: 928726 - RNA, 24 nt, Human
cucacucuguugcccaggcuggag

SEQ ID NO: 928727 - RNA, 18 nt, Human
cuccugaauagcugggac

SEQ ID NO: 928728 - RNA, 23 nt, Human
cugagcuucuaucuccccaucug

SEQ ID NO: 928729 - RNA, 24 nt, Human
cugccuugaccuccuaaagugcug

SEQ ID NO: 928730 - RNA, 23 nt, Human
cuuaccuuagccuccugaauagc

SEQ ID NO: 928731 - RNA, 24 nt, Human
cuuagccuccugaauagcugggac

SEQ ID NO: 928732 - RNA, 20 nt, Human
cuuauuucugccucccuaga

SEQ ID NO: 928733 - RNA, 22 nt, Human
cuuccugccuugaccuccuaaa

SEQ ID NO: 928734 - RNA, 19 nt, Human
cuucugcagcaaucugcau

SEQ ID NO: 928735 - RNA, 21 nt, Human
cuugaacuccugagcuccagg

SEQ ID NO: 928736 - RNA, 24 nt, Human
cuuuuuaauuguaaguuugcugcu

SEQ ID NO: 928737 - RNA, 18 nt, Human
gagaugggguuuugccau

SEQ ID NO: 928738 - RNA, 23 nt, Human
gaucaaaacaaaacaaaacaaac

SEQ ID NO: 928739 - RNA, 18 nt, Human
gcauuuuuuuccaaggga

SEQ ID NO: 928740 - RNA, 22 nt, Human
gcugcuucguacaaagaguaaa

SEQ ID NO: 928741 - RNA, 20 nt, Human
ggaaaguaguagcagcuaga

SEQ ID NO: 928742 - RNA, 22 nt, Human
gggguuuugccauguugcccag

SEQ ID NO: 928743 - RNA, 22 nt, Human
ggguuuugccauguugcccagg

SEQ ID NO: 928744 - RNA, 19 nt, Human
guagagaugggguuuugcc

SEQ ID NO: 928745 - RNA, 21 nt, Human
guagagaugggguuuugccau

SEQ ID NO: 928746 - RNA, 22 nt, Human
guagagaugggguuuugccaug

SEQ ID NO: 928747 - RNA, 19 nt, Human
gugcugguaauacaagcuu

SEQ ID NO: 928748 - RNA, 21 nt, Human
gugugugugugugugugugug

SEQ ID NO: 928749 - RNA, 21 nt, Human
gugugugugugugugugugug

SEQ ID NO: 928750 - RNA, 25 nt, Human
uaaacaaguacaaagagccagggca

SEQ ID NO: 928751 - RNA, 20 nt, Human
uaauagcaacaguuguguua

SEQ ID NO: 928752 - RNA, 22 nt, Human
uacaagcuugagccacugcacc

SEQ ID NO: 928753 - RNA, 23 nt, Human
uacaguggugcaaucauggcuca

SEQ ID NO: 928754 - RNA, 24 nt, Human
uaccuuagccuccugaauagcugg

SEQ ID NO: 928755 - RNA, 23 nt, Human
uagaaugugugcugugauaggga

SEQ ID NO: 928756 - RNA, 20 nt, Human
uagacucuccaauuaucuuc

SEQ ID NO: 928757 - RNA, 22 nt, Human
uagagaugggguuuugccaugu

SEQ ID NO: 928758 - RNA, 20 nt, Human
uagguaaauauuccuaauag

SEQ ID NO: 928759 - RNA, 18 nt, Human
uaggucccaaaagaucaa

SEQ ID NO: 928760 - RNA, 21 nt, Human
uauagcagaugcuaaaugaaa

SEQ ID NO: 928761 - RNA, 21 nt, Human
ucaaaagaaaggcaaacaaaa

SEQ ID NO: 928762 - RNA, 24 nt, Human
ucacucuguugcccaggcuggagu

SEQ ID NO: 928763 - RNA, 24 nt, Human
ucacugaagccuugaccucuuggg

SEQ ID NO: 928764 - RNA, 23 nt, Human
uccccaaaacaaaacagcaggaa

SEQ ID NO: 928765 - RNA, 19 nt, Human
ucccuaccugguccccaaa

SEQ ID NO: 928766 - RNA, 24 nt, Human
uccugaauagcugggacuaugggu

SEQ ID NO: 928767 - RNA, 23 nt, Human
ucucacucuguugcccaggcugg

SEQ ID NO: 928768 - RNA, 24 nt, Human
ucucacucuguugcccaggcugga

SEQ ID NO: 928769 - RNA, 25 nt, Human
ucucacucuguugcccaggcuggag

SEQ ID NO: 928770 - RNA, 26 nt, Human
ucucacucuguugcccaggcuggagu

SEQ ID NO: 928771 - RNA, 25 nt, Human
ucuccaauuaucuucaugaaagaau

SEQ ID NO: 928772 - RNA, 18 nt, Human
ucuguugcccaggcugga

SEQ ID NO: 928773 - RNA, 21 nt, Human
ucuugaacuccugagcuccag

SEQ ID NO: 928774 - RNA, 22 nt, Human
ugaaaaggggauggggagacca

SEQ ID NO: 928775 - RNA, 24 nt, Human
ugaacuccugagcuccagggaucu

SEQ ID NO: 928776 - RNA, 24 nt, Human
ugaaugaacugugcgucauugagc

SEQ ID NO: 928777 - RNA, 20 nt, Human
ugagacagggucucacucug

SEQ ID NO: 928778 - RNA, 22 nt, Human
ugagacagggucucacucuguu

SEQ ID NO: 928779 - RNA, 20 nt, Human
ugagcuccagggaucuuccu

SEQ ID NO: 928780 - RNA, 20 nt, Human
ugauuccaagucacuggccu

SEQ ID NO: 928781 - RNA, 23 nt, Human
ugcaaugaaugaacugugcguca

SEQ ID NO: 928782 - RNA, 24 nt, Human
ugccauguugcccaggcugcucuu

SEQ ID NO: 928783 - RNA, 31 nt, Human
ugccauguugcccaggcugcucuugaacucc

SEQ ID NO: 928784 - RNA, 24 nt, Human
ugcccaggcugcucuugaacuccu

SEQ ID NO: 928785 - RNA, 21 nt, Human
ugcccaggcuggaguacagug

SEQ ID NO: 928786 - RNA, 24 nt, Human
ugcccaggcuggaguacaguggug

SEQ ID NO: 928787 - RNA, 25 nt, Human
ugcucuugaacuccugagcuccagg

SEQ ID NO: 928788 - RNA, 24 nt, Human
uggaguacaguggugcaaucaugg

SEQ ID NO: 928789 - RNA, 24 nt, Human
uggcucacugaagccuugaccucu

SEQ ID NO: 928790 - RNA, 21 nt, Human
ugggacuaugggugaguacca

SEQ ID NO: 928791 - RNA, 23 nt, Human
ugggccaauuagggaaaaaaaaa

SEQ ID NO: 928792 - RNA, 24 nt, Human
ugggcucaggugauuuucuuaccu

SEQ ID NO: 928793 - RNA, 24 nt, Human
ugggguuuugccauguugcccagg

SEQ ID NO: 928794 - RNA, 24 nt, Human
uguagagaugggguuuugccaugu

SEQ ID NO: 928795 - RNA, 18 nt, Human
uguggaaagacaugacug

SEQ ID NO: 928796 - RNA, 18 nt, Human
ugugugugugugugugug

SEQ ID NO: 928797 - RNA, 18 nt, Human
ugugugugugugugugug

SEQ ID NO: 928798 - RNA, 18 nt, Human
ugugugugugugugugug

SEQ ID NO: 928799 - RNA, 18 nt, Human
ugugugugugugugugug

SEQ ID NO: 928800 - RNA, 18 nt, Human
ugugugugugugugugug

SEQ ID NO: 928801 - RNA, 18 nt, Human
ugugugugugugugugug

SEQ ID NO: 928802 - RNA, 18 nt, Human
ugugugugugugugugug

SEQ ID NO: 928803 - RNA, 18 nt, Human
ugugugugugugugugug

SEQ ID NO: 928804 - RNA, 18 nt, Human
ugugugugugugugugug

SEQ ID NO: 928805 - RNA, 18 nt, Human
ugugugugugugugugug

SEQ ID NO: 928806 - RNA, 21 nt, Human
ugugugugugugugugugugu

SEQ ID NO: 928807 - RNA, 21 nt, Human
ugugugugugugugugugugu

SEQ ID NO: 928808 - RNA, 21 nt, Human
ugugugugugugugugugugu

SEQ ID NO: 928809 - RNA, 21 nt, Human
ugugugugugugugugugugu

SEQ ID NO: 928810 - RNA, 21 nt, Human
ugugugugugugugugugugu

SEQ ID NO: 928811 - RNA, 21 nt, Human
ugugugugugugugugugugu

SEQ ID NO: 928812 - RNA, 21 nt, Human
ugugugugugugugugugugu

SEQ ID NO: 928813 - RNA, 21 nt, Human
ugugugugugugugugugugu

SEQ ID NO: 928814 - RNA, 21 nt, Human
ugugugugugugugugugugu

SEQ ID NO: 928815 - RNA, 21 nt, Human
ugugugugugugugugugugu

SEQ ID NO: 928816 - RNA, 21 nt, Human
ugugugugugugugugugugu

SEQ ID NO: 928817 - RNA, 21 nt, Human
ugugugugugugugugugugu

SEQ ID NO: 928818 - RNA, 21 nt, Human
ugugugugugugugugugugu

SEQ ID NO: 928819 - RNA, 21 nt, Human
ugugugugugugugugugugu

SEQ ID NO: 928820 - RNA, 21 nt, Human
ugugugugugugugugugugu

SEQ ID NO: 928821 - RNA, 21 nt, Human
ugugugugugugugugugugu

SEQ ID NO: 928822 - RNA, 22 nt, Human
ugugugugugugugugugugug

SEQ ID NO: 928823 - RNA, 22 nt, Human
ugugugugugugugugugugug

SEQ ID NO: 928824 - RNA, 22 nt, Human
ugugugugugugugugugugug

SEQ ID NO: 928825 - RNA, 22 nt, Human
ugugugugugugugugugugug

SEQ ID NO: 928826 - RNA, 22 nt, Human
ugugugugugugugugugugug

SEQ ID NO: 928827 - RNA, 22 nt, Human
ugugugugugugugugugugug

SEQ ID NO: 928828 - RNA, 22 nt, Human
uuaaugucuuaauuugucuucu

SEQ ID NO: 928829 - RNA, 21 nt, Human
uuagggaaaaaaaaaaaaaaa

SEQ ID NO: 928830 - RNA, 24 nt, Human
uuauuucugccucccuagacaugu

SEQ ID NO: 928831 - RNA, 26 nt, Human
uucaacagccucccuaccuggucccc

SEQ ID NO: 928832 - RNA, 18 nt, Human
uucagguuucagaccuug

SEQ ID NO: 928833 - RNA, 18 nt, Human
uuccuguuuccaccuaug

SEQ ID NO: 928834 - RNA, 21 nt, Human
uuccuguuuccaccuaugggg

SEQ ID NO: 928835 - RNA, 21 nt, Human
uucucuggguuuucuuggcuu

SEQ ID NO: 928836 - RNA, 22 nt, Human
uugagacagggucucacucugu

SEQ ID NO: 928837 - RNA, 24 nt, Human
uugcccaggcuggaguacaguggu

SEQ ID NO: 928838 - RNA, 24 nt, Human
uuguagagaugggguuuugccaug

SEQ ID NO: 928839 - RNA, 23 nt, Human
uuuguagagaugggguuuugcca

SEQ ID NO: 928840 - RNA, 24 nt, Human
uuuguagagaugggguuuugccau

SEQ ID NO: 928841 - RNA, 22 nt, Human
uuugucauaacuuaaagaagac

SEQ ID NO: 928842 - RNA, 19 nt, Human
uuuugccauguugcccagg

SEQ ID NO: 928843 - RNA, 19 nt, Human
uuuuucuuuuugagacagg

SEQ ID NO: 928844 - RNA, 24 nt, Human
uuuuucuuuuugagacagggucuc

SEQ ID NO: 928845 - RNA, 24 nt, Human
uuuuuuguagagaugggguuuugc

SEQ ID NO: 928846 - RNA, 20 nt, Human
aaacaccccucccaacuccc

SEQ ID NO: 928847 - RNA, 22 nt, Human
aacaccccucccaacucccuua

SEQ ID NO: 928848 - RNA, 27 nt, Human
aaccaaaagguggcguaagguuuuacu

SEQ ID NO: 928849 - RNA, 22 nt, Human
aagcauuuuguucuccucugua

SEQ ID NO: 928850 - RNA, 21 nt, Human
aaugcuguaaaaaaaauuaaa

SEQ ID NO: 928851 - RNA, 18 nt, Human
agagauugggaccuagug

SEQ ID NO: 928852 - RNA, 25 nt, Human
aggaacuauagagucuuuauaaacu

SEQ ID NO: 928853 - RNA, 18 nt, Human
aggaugaaacaccccucc

SEQ ID NO: 928854 - RNA, 19 nt, Human
auaccacagcagucagcag

SEQ ID NO: 928855 - RNA, 21 nt, Human
caaaagaguuacuuuauagug

SEQ ID NO: 928856 - RNA, 18 nt, Human
caugauccgugccaauac

SEQ ID NO: 928857 - RNA, 22 nt, Human
ccaauaccacagcagucagcag

SEQ ID NO: 928858 - RNA, 20 nt, Human
cccucucccuccucccuucc

SEQ ID NO: 928859 - RNA, 21 nt, Human
cccuguccucccucucccucc

SEQ ID NO: 928860 - RNA, 21 nt, Human
ccuagggccugacaaagugac

SEQ ID NO: 928861 - RNA, 18 nt, Human
ccucccucucccuccucc

SEQ ID NO: 928862 - RNA, 19 nt, Human
ccucccuuccccuaucuau

SEQ ID NO: 928863 - RNA, 20 nt, Human
ccucuguaacagcacagggc

SEQ ID NO: 928864 - RNA, 18 nt, Human
ccuugcugaaagcauuuu

SEQ ID NO: 928865 - RNA, 18 nt, Human
cucccuccucccuucccc

SEQ ID NO: 928866 - RNA, 23 nt, Human
cugcaguaacuguaugaaauuua

SEQ ID NO: 928867 - RNA, 20 nt, Human
gaucgguuuugaaaauuagg

SEQ ID NO: 928868 - RNA, 19 nt, Human
gguguggaagauagaaagg

SEQ ID NO: 928869 - RNA, 20 nt, Human
gucaucuccagccaucuguu

SEQ ID NO: 928870 - RNA, 22 nt, Human
gugaguauuuuuagcuucaguc

SEQ ID NO: 928871 - RNA, 18 nt, Human
uaacagcacccugaucga

SEQ ID NO: 928872 - RNA, 24 nt, Human
uaauagacuauagccaaaagaguu

SEQ ID NO: 928873 - RNA, 19 nt, Human
uaccaauagacaauacuca

SEQ ID NO: 928874 - RNA, 22 nt, Human
uaccaauagacaauacucaggc

SEQ ID NO: 928875 - RNA, 19 nt, Human
uaccacagcagucagcagc

SEQ ID NO: 928876 - RNA, 21 nt, Human
uacuuugcagaguugcuguga

SEQ ID NO: 928877 - RNA, 23 nt, Human
ucagauauccaauaguuacaaau

SEQ ID NO: 928878 - RNA, 21 nt, Human
ucagcagcuguugucugugcu

SEQ ID NO: 928879 - RNA, 28 nt, Human
uccauguggugcacuuuuucaggcauug

SEQ ID NO: 928880 - RNA, 20 nt, Human
uccucccucucccuccuccc

SEQ ID NO: 928881 - RNA, 19 nt, Human
ucucccuguccucccucuc

SEQ ID NO: 928882 - RNA, 19 nt, Human
ucugcaccucagucucuuc

SEQ ID NO: 928883 - RNA, 22 nt, Human
ugaaacaccccucccaacuccc

SEQ ID NO: 928884 - RNA, 24 nt, Human
ugacaaagugacccuggauaaaug

SEQ ID NO: 928885 - RNA, 22 nt, Human
ugaccccuggauucagauaucc

SEQ ID NO: 928886 - RNA, 22 nt, Human
uggaaauauuuugaacacucag

SEQ ID NO: 928887 - RNA, 24 nt, Human
uugaacacucagauauaaaaauuc

SEQ ID NO: 928888 - RNA, 23 nt, Human
uuuagcuucagucccacauucuc

SEQ ID NO: 928889 - RNA, 24 nt, Human
uuuuuuuuuuuuuuuuuuucaaag

SEQ ID NO: 928890 - RNA, 21 nt, Human
aaaacuugaacauuuucuaga

SEQ ID NO: 928891 - RNA, 24 nt, Human
aaaaggauagaaaaugcccacagg

SEQ ID NO: 928892 - RNA, 20 nt, Human
aaacuuaucugucagcuggc

SEQ ID NO: 928893 - RNA, 23 nt, Human
aaagaaccguuuuacauguccca

SEQ ID NO: 928894 - RNA, 24 nt, Human
aagaaacugacccaaagucauaug

SEQ ID NO: 928895 - RNA, 23 nt, Human
aagcaggcaccccaguggccuca

SEQ ID NO: 928896 - RNA, 18 nt, Human
aagcagucaguguagcag

SEQ ID NO: 928897 - RNA, 23 nt, Human
accaacagcuaucguuucugacc

SEQ ID NO: 928898 - RNA, 18 nt, Human
agagaagcagagaagcug

SEQ ID NO: 928899 - RNA, 22 nt, Human
agaugaaaucagggauguggcu

SEQ ID NO: 928900 - RNA, 21 nt, Human
agcaaaaaggauagaaaaugc

SEQ ID NO: 928901 - RNA, 24 nt, Human
agcagcguagcagagaagcagaga

SEQ ID NO: 928902 - RNA, 22 nt, Human
agcuagcaaacagcugagcuuc

SEQ ID NO: 928903 - RNA, 22 nt, Human
aggaaaacuugaacauuuucua

SEQ ID NO: 928904 - RNA, 20 nt, Human
aggccuuacaucugugaaaa

SEQ ID NO: 928905 - RNA, 23 nt, Human
aucccacuucucaggccccuucc

SEQ ID NO: 928906 - RNA, 19 nt, Human
auugggggaaagggaaaag

SEQ ID NO: 928907 - RNA, 21 nt, Human
caccccaguggccucauccua

SEQ ID NO: 928908 - RNA, 18 nt, Human
cacugugcaaaguauuuu

SEQ ID NO: 928909 - RNA, 22 nt, Human
cagcaccccagucucagcacuu

SEQ ID NO: 928910 - RNA, 22 nt, Human
cagcacucuuugguggaugucc

SEQ ID NO: 928911 - RNA, 21 nt, Human
caggaugccugugacaaccga

SEQ ID NO: 928912 - RNA, 21 nt, Human
caggccccgaaaugggcacag

SEQ ID NO: 928913 - RNA, 20 nt, Human
cagugcuuuguuuggcuucu

SEQ ID NO: 928914 - RNA, 25 nt, Human
caguggccucauccuaguucuggcc

SEQ ID NO: 928915 - RNA, 19 nt, Human
cauccuaguucuggcccug

SEQ ID NO: 928916 - RNA, 19 nt, Human
ccacauuuagaaacaaaau

SEQ ID NO: 928917 - RNA, 22 nt, Human
ccaguggccucauccuaguucu

SEQ ID NO: 928918 - RNA, 19 nt, Human
ccaugggagccgaaacccu

SEQ ID NO: 928919 - RNA, 20 nt, Human
ccccaaagaguugugaaaga

SEQ ID NO: 928920 - RNA, 24 nt, Human
ccccaaagaguugugaaagauaag

SEQ ID NO: 928921 - RNA, 18 nt, Human
ccccagaucacgcagcua

SEQ ID NO: 928922 - RNA, 21 nt, Human
ccugauacaguggugauuacu

SEQ ID NO: 928923 - RNA, 21 nt, Human
cuacagcaccccagucucagc

SEQ ID NO: 928924 - RNA, 21 nt, Human
cuucucaggccccuuccacua

SEQ ID NO: 928925 - RNA, 18 nt, Human
gauugccuccauucucca

SEQ ID NO: 928926 - RNA, 22 nt, Human
gcagcguagcagagaagcagag

SEQ ID NO: 928927 - RNA, 22 nt, Human
gcccacaggggaaaaaaaugau

SEQ ID NO: 928928 - RNA, 23 nt, Human
gcccugaaauguucugaaaugag

SEQ ID NO: 928929 - RNA, 21 nt, Human
gcuugccgaggucuuagguga

SEQ ID NO: 928930 - RNA, 24 nt, Human
ggcaagcaggcaccccaguggccc

SEQ ID NO: 928931 - RNA, 26 nt, Human
guagcagcguagcagagaagcagaga

SEQ ID NO: 928932 - RNA, 18 nt, Human
uaaauguaauaagcaaaa

SEQ ID NO: 928933 - RNA, 26 nt, Human
uaaauucccccagaucacgcagcuag

SEQ ID NO: 928934 - RNA, 23 nt, Human
uaagaaacugacccaaagucaua

SEQ ID NO: 928935 - RNA, 19 nt, Human
uaauaggccuuacaucugu

SEQ ID NO: 928936 - RNA, 23 nt, Human
uacaguggugauuacuucugaaa

SEQ ID NO: 928937 - RNA, 23 nt, Human
uaccaacagcuaucguuucugac

SEQ ID NO: 928938 - RNA, 18 nt, Human
uacugugcagcaucacug

SEQ ID NO: 928939 - RNA, 23 nt, Human
uagaaaaccgaaucuguuuauca

SEQ ID NO: 928940 - RNA, 25 nt, Human
uagaaaaugcccacaggggaaaaaa

SEQ ID NO: 928941 - RNA, 22 nt, Human
uagucacuugaaacugcuguuc

SEQ ID NO: 928942 - RNA, 18 nt, Human
uauagaaaaccgaaucug

SEQ ID NO: 928943 - RNA, 21 nt, Human
uaucugucagcuggcccugaa

SEQ ID NO: 928944 - RNA, 26 nt, Human
ucaaaguagaagcauauuauuaaaaa

SEQ ID NO: 928945 - RNA, 19 nt, Human
uccccaaagaguugugaaa

SEQ ID NO: 928946 - RNA, 21 nt, Human
ucccccagaucacgcagcuag

SEQ ID NO: 928947 - RNA, 18 nt, Human
ucuaugcucauccuaagg

SEQ ID NO: 928948 - RNA, 18 nt, Human
ucucaggccccuuccacu

SEQ ID NO: 928949 - RNA, 18 nt, Human
ucugucagcuggcccuga

SEQ ID NO: 928950 - RNA, 21 nt, Human
ugaauaggaaugaaaucccac

SEQ ID NO: 928951 - RNA, 19 nt, Human
ugaccauuuacugugcagc

SEQ ID NO: 928952 - RNA, 20 nt, Human
ugacccaaagucauaugcag

SEQ ID NO: 928953 - RNA, 22 nt, Human
ugagguucagagaagugaagua

SEQ ID NO: 928954 - RNA, 23 nt, Human
ugccugugacaaccgaauaguuu

SEQ ID NO: 928955 - RNA, 23 nt, Human
ugggggcggcuccuucagugcuu

SEQ ID NO: 928956 - RNA, 26 nt, Human
uguaauaagcaaaaaggauagaaaau

SEQ ID NO: 928957 - RNA, 19 nt, Human
ugugaaaacuuaucuguca

SEQ ID NO: 928958 - RNA, 22 nt, Human
uuaagggaggauacaauaaggu

SEQ ID NO: 928959 - RNA, 20 nt, Human
uucaggaaggaaaacuugaa

SEQ ID NO: 928960 - RNA, 26 nt, Human
uucagugcuuuguuuggcuucuuuuu

SEQ ID NO: 928961 - RNA, 22 nt, Human
uucucuaaggaaguucucccca

SEQ ID NO: 928962 - RNA, 18 nt, Human
uugggggcggcuccuuca

SEQ ID NO: 928963 - RNA, 18 nt, Human
uuuguuccugaaugccac

SEQ ID NO: 928964 - RNA, 22 nt, Human
aaaaaugccucuugcgugagga

SEQ ID NO: 928965 - RNA, 23 nt, Human
aaacaagaagagaacuuuucuaa

SEQ ID NO: 928966 - RNA, 21 nt, Human
aagaacggcgguaacaguuau

SEQ ID NO: 928967 - RNA, 20 nt, Human
acaaggcaccuccugguguc

SEQ ID NO: 928968 - RNA, 23 nt, Human
acacacacacacacacacacaca

SEQ ID NO: 928969 - RNA, 23 nt, Human
acacacacacacacacacacaca

SEQ ID NO: 928970 - RNA, 23 nt, Human
acacacacacacacacacacaca

SEQ ID NO: 928971 - RNA, 23 nt, Human
acacacacacacacacacacaca

SEQ ID NO: 928972 - RNA, 23 nt, Human
acacacacacacacacacacaca

SEQ ID NO: 928973 - RNA, 23 nt, Human
acacacacacacacacacacaca

SEQ ID NO: 928974 - RNA, 25 nt, Human
acacacacacacacacacacacgaa

SEQ ID NO: 928975 - RNA, 23 nt, Human
acacacacacacacacgaaaaac

SEQ ID NO: 928976 - RNA, 23 nt, Human
acacacacacacacgaaaaacaa

SEQ ID NO: 928977 - RNA, 24 nt, Human
acacacacgaaaaacaaagaaaaa

SEQ ID NO: 928978 - RNA, 22 nt, Human
acacacgaaaaacaaagaaaaa

SEQ ID NO: 928979 - RNA, 20 nt, Human
agaaaaacacacacacacac

SEQ ID NO: 928980 - RNA, 21 nt, Human
agagugccaaauaucuugaaa

SEQ ID NO: 928981 - RNA, 23 nt, Human
aggaauguguuuaaaacaagaag

SEQ ID NO: 928982 - RNA, 20 nt, Human
auccuuggauguacaaaaaa

SEQ ID NO: 928983 - RNA, 20 nt, Human
caagagguuucccuucccuu

SEQ ID NO: 928984 - RNA, 20 nt, Human
cacacacacacacacacaca

SEQ ID NO: 928985 - RNA, 20 nt, Human
cacacacacacacacacaca

SEQ ID NO: 928986 - RNA, 20 nt, Human
cacacacacacacacacaca

SEQ ID NO: 928987 - RNA, 20 nt, Human
cacacacacacacacacaca

SEQ ID NO: 928988 - RNA, 20 nt, Human
cacacacacacacacacaca

SEQ ID NO: 928989 - RNA, 20 nt, Human
cacacacacacacacacaca

SEQ ID NO: 928990 - RNA, 20 nt, Human
cacacacacacacacacaca

SEQ ID NO: 928991 - RNA, 20 nt, Human
cacacacacacacacacaca

SEQ ID NO: 928992 - RNA, 20 nt, Human
cacacacacacacacacaca

SEQ ID NO: 928993 - RNA, 20 nt, Human
cacacacacacacacacaca

SEQ ID NO: 928994 - RNA, 20 nt, Human
cacacacacacacacacaca

SEQ ID NO: 928995 - RNA, 22 nt, Human
cacacacacacacacacacaca

SEQ ID NO: 928996 - RNA, 22 nt, Human
cacacacacacacacacacaca

SEQ ID NO: 928997 - RNA, 22 nt, Human
cacacacacacacacacacaca

SEQ ID NO: 928998 - RNA, 22 nt, Human
cacacacacacacacacacaca

SEQ ID NO: 928999 - RNA, 22 nt, Human
cacacacacacacacacacaca

SEQ ID NO: 929000 - RNA, 26 nt, Human
cacacacacacacacacacacacaca

SEQ ID NO: 929001 - RNA, 26 nt, Human
cacacacacacacacacacacacaca

SEQ ID NO: 929002 - RNA, 26 nt, Human
cacacacacacacacacacacacaca

SEQ ID NO: 929003 - RNA, 26 nt, Human
cacacacacacacacacacacacaca

SEQ ID NO: 929004 - RNA, 26 nt, Human
cacacacacacacacacacacacaca

SEQ ID NO: 929005 - RNA, 26 nt, Human
cacacacacacacacacacacacacg

SEQ ID NO: 929006 - RNA, 23 nt, Human
cacacacacacacgaaaaacaaa

SEQ ID NO: 929007 - RNA, 21 nt, Human
cacacacacacgaaaaacaaa

SEQ ID NO: 929008 - RNA, 20 nt, Human
caccuccuggugucuaacuc

SEQ ID NO: 929009 - RNA, 21 nt, Human
cagaaaaacacacacacacac

SEQ ID NO: 929010 - RNA, 21 nt, Human
cagcugccuguuuugcauggu

SEQ ID NO: 929011 - RNA, 24 nt, Human
cagcugccuguuuugcaugguauu

SEQ ID NO: 929012 - RNA, 22 nt, Human
cgaaaaacaaagaaaaaaaugc

SEQ ID NO: 929013 - RNA, 24 nt, Human
cgaaaaacaaagaaaaaaaugcuu

SEQ ID NO: 929014 - RNA, 18 nt, Human
cggccggagcaagcgggu

SEQ ID NO: 929015 - RNA, 19 nt, Human
cggccggagcaagcggguu

SEQ ID NO: 929016 - RNA, 24 nt, Human
cggcgguaacaguuauuggcaaaa

SEQ ID NO: 929017 - RNA, 21 nt, Human
cguucccucuuuucuuaauuc

SEQ ID NO: 929018 - RNA, 23 nt, Human
cucuuaaggcacaccagcugccu

SEQ ID NO: 929019 - RNA, 24 nt, Human
gaaaaacaaagaaaaaaaugcuug

SEQ ID NO: 929020 - RNA, 31 nt, Human
gaaaaacacacacacacacacacacacacag

SEQ ID NO: 929021 - RNA, 22 nt, Human
gaaaaauaugaccgacaaggca

SEQ ID NO: 929022 - RNA, 21 nt, Human
gacaaugaguuaagggagaga

SEQ ID NO: 929023 - RNA, 19 nt, Human
gagugccaaauaucuugaa

SEQ ID NO: 929024 - RNA, 20 nt, Human
gucuguugugugagcagccu

SEQ ID NO: 929025 - RNA, 22 nt, Human
guuucccuucccuuccccguuc

SEQ ID NO: 929026 - RNA, 23 nt, Human
uaaaaagaagucucaguugcagc

SEQ ID NO: 929027 - RNA, 22 nt, Human
uaucaggaauguguuuaaaaca

SEQ ID NO: 929028 - RNA, 24 nt, Human
uauuaugucaguuuauucucuuua

SEQ ID NO: 929029 - RNA, 33 nt, Human
ucagaaaaacacacacacacacacacacacagu

SEQ ID NO: 929030 - RNA, 20 nt, Human
ucccccaaagacaaugaguu

SEQ ID NO: 929031 - RNA, 19 nt, Human
uccccuugcagucuguugu

SEQ ID NO: 929032 - RNA, 19 nt, Human
ucgcugauuuggcuguucc

SEQ ID NO: 929033 - RNA, 20 nt, Human
ucucugugcucugaguccac

SEQ ID NO: 929034 - RNA, 19 nt, Human
ucuguagauauucuguuuu

SEQ ID NO: 929035 - RNA, 18 nt, Human
ucuguuauuuauagggau

SEQ ID NO: 929036 - RNA, 24 nt, Human
ucuuaaggcacaccagcugccugu

SEQ ID NO: 929037 - RNA, 21 nt, Human
ugaaaugccaaaaggcauuuu

SEQ ID NO: 929038 - RNA, 18 nt, Human
ugaagcggcaacaccagg

SEQ ID NO: 929039 - RNA, 25 nt, Human
ugaagcggcaacaccagguguuuug

SEQ ID NO: 929040 - RNA, 19 nt, Human
ugggccagaucggccggag

SEQ ID NO: 929041 - RNA, 20 nt, Human
ugguauuugcaaaaaugccu

SEQ ID NO: 929042 - RNA, 21 nt, Human
uguguuuaaaacaagaagaga

SEQ ID NO: 929043 - RNA, 24 nt, Human
uguguuucuuuguugcugcaagcu

SEQ ID NO: 929044 - RNA, 18 nt, Human
uguuuuauuuuggucauc

SEQ ID NO: 929045 - RNA, 20 nt, Human
uuccccuugcagucuguugu

SEQ ID NO: 929046 - RNA, 27 nt, Human
uucuucgcugauuuggcuguucccaau

SEQ ID NO: 929047 - RNA, 22 nt, Human
uugcugcaagcuaucugcccaa

SEQ ID NO: 929048 - RNA, 23 nt, Human
uuuuuuauguuguuauccuugga

SEQ ID NO: 929049 - RNA, 23 nt, Human
uuuuuuauguuguuauccuugga

SEQ ID NO: 929050 - RNA, 18 nt, Human
aaaaagaagaagagaugg

SEQ ID NO: 929051 - RNA, 19 nt, Human
aaaagaagaagagauggua

SEQ ID NO: 929052 - RNA, 24 nt, Human
aaagugcugggauuacaggcauga

SEQ ID NO: 929053 - RNA, 21 nt, Human
aaaguucccucaaccuucccu

SEQ ID NO: 929054 - RNA, 19 nt, Human
aagaagaagagaugguacc

SEQ ID NO: 929055 - RNA, 25 nt, Human
aagcgauccucccaccuuggccuuc

SEQ ID NO: 929056 - RNA, 22 nt, Human
aagcucccuuacaucuuccccu

SEQ ID NO: 929057 - RNA, 19 nt, Human
aagugcugggauuacaggc

SEQ ID NO: 929058 - RNA, 21 nt, Human
aagugcugggauuacaggcau

SEQ ID NO: 929059 - RNA, 26 nt, Human
aagugcugggauuacaggcaugaacc

SEQ ID NO: 929060 - RNA, 23 nt, Human
acaugccugguacacgcacagaa

SEQ ID NO: 929061 - RNA, 23 nt, Human
acccuauuguugucagccucagc

SEQ ID NO: 929062 - RNA, 20 nt, Human
acuggucuugaacuccuggg

SEQ ID NO: 929063 - RNA, 19 nt, Human
agccuugaccucccagggc

SEQ ID NO: 929064 - RNA, 19 nt, Human
agcucagacuccugaguag

SEQ ID NO: 929065 - RNA, 22 nt, Human
agcucagacuccugaguagcug

SEQ ID NO: 929066 - RNA, 19 nt, Human
aggcaugaaccaccaugcc

SEQ ID NO: 929067 - RNA, 18 nt, Human
aguagcugggacuacagg

SEQ ID NO: 929068 - RNA, 20 nt, Human
auggaaauccagcuccucuc

SEQ ID NO: 929069 - RNA, 24 nt, Human
caaagugcugggauuacaggcaug

SEQ ID NO: 929070 - RNA, 22 nt, Human
caaaucccuggaccggguccca

SEQ ID NO: 929071 - RNA, 27 nt, Human
caagcgauccucccaccuuggccuucc

SEQ ID NO: 929072 - RNA, 22 nt, Human
cacugcagccuugaccucccag

SEQ ID NO: 929073 - RNA, 25 nt, Human
cagccuugaccucccagggcuugag

SEQ ID NO: 929074 - RNA, 24 nt, Human
cagcucacugcagccuugaccucc

SEQ ID NO: 929075 - RNA, 24 nt, Human
cagcuuuccauugcuucuuuccca

SEQ ID NO: 929076 - RNA, 19 nt, Human
cagugggccuuguggaagu

SEQ ID NO: 929077 - RNA, 21 nt, Human
cagugggccuuguggaaguuc

SEQ ID NO: 929078 - RNA, 22 nt, Human
ccaaagugcugggauuacaggc

SEQ ID NO: 929079 - RNA, 24 nt, Human
ccaaagugcugggauuacaggcau

SEQ ID NO: 929080 - RNA, 21 nt, Human
ccacagaucccguccucaccc

SEQ ID NO: 929081 - RNA, 24 nt, Human
ccagacuggucuugaacuccuggg

SEQ ID NO: 929082 - RNA, 20 nt, Human
ccagggcuugagugauccuc

SEQ ID NO: 929083 - RNA, 26 nt, Human
ccauugcuucuuucccacuucucuca

SEQ ID NO: 929084 - RNA, 20 nt, Human
ccccuuagcuccccacccua

SEQ ID NO: 929085 - RNA, 18 nt, Human
cccuaaaguucccucaac

SEQ ID NO: 929086 - RNA, 21 nt, Human
cccuauuguugucagccucag

SEQ ID NO: 929087 - RNA, 24 nt, Human
cccuggaccgggucccauuuccca

SEQ ID NO: 929088 - RNA, 23 nt, Human
ccuacugagauggauuucccacc

SEQ ID NO: 929089 - RNA, 18 nt, Human
ccucaaucaaacccaucu

SEQ ID NO: 929090 - RNA, 26 nt, Human
ccucccaccuuggccuuccaaagugc

SEQ ID NO: 929091 - RNA, 19 nt, Human
ccucccagcucagacuccu

SEQ ID NO: 929092 - RNA, 19 nt, Human
ccucccagcucagacuccu

SEQ ID NO: 929093 - RNA, 21 nt, Human
ccucuugcuaaggguugggag

SEQ ID NO: 929094 - RNA, 22 nt, Human
ccucuugcuaaggguugggagc

SEQ ID NO: 929095 - RNA, 23 nt, Human
ccugaguagcugggacuacaggc

SEQ ID NO: 929096 - RNA, 24 nt, Human
ccugaguagcugggacuacaggca

SEQ ID NO: 929097 - RNA, 18 nt, Human
ccugggcucaagcgaucc

SEQ ID NO: 929098 - RNA, 24 nt, Human
cucaagcgauccucccaccuuggc

SEQ ID NO: 929099 - RNA, 24 nt, Human
cucaaguccaaaucacuccauucc

SEQ ID NO: 929100 - RNA, 23 nt, Human
cuccugggcucaagcgauccucc

SEQ ID NO: 929101 - RNA, 23 nt, Human
cucucauuuuuccagugggccuu

SEQ ID NO: 929102 - RNA, 25 nt, Human
cuuagcuucuucauguccuuacuug

SEQ ID NO: 929103 - RNA, 24 nt, Human
gacuacaggcacaugccaccaugc

SEQ ID NO: 929104 - RNA, 20 nt, Human
gaguagcugggacuacaggc

SEQ ID NO: 929105 - RNA, 25 nt, Human
gaguagcugggacuacaggcacaug

SEQ ID NO: 929106 - RNA, 23 nt, Human
gauccucccagcucagacuccug

SEQ ID NO: 929107 - RNA, 21 nt, Human
gauuacaggcaugaaccacca

SEQ ID NO: 929108 - RNA, 22 nt, Human
gauuacaggcaugaaccaccau

SEQ ID NO: 929109 - RNA, 24 nt, Human
gauugccaucacuuucucucauuc

SEQ ID NO: 929110 - RNA, 24 nt, Human
gccuggcuaauuuuuuuguauuuu

SEQ ID NO: 929111 - RNA, 19 nt, Human
gccugguacacgcacagaa

SEQ ID NO: 929112 - RNA, 19 nt, Human
gcucagacuccugaguagc

SEQ ID NO: 929113 - RNA, 24 nt, Human
ggauuacaggcaugaaccaccaug

SEQ ID NO: 929114 - RNA, 21 nt, Human
gguugggcaggacacuuagcu

SEQ ID NO: 929115 - RNA, 19 nt, Human
guagagaugggggccucaa

SEQ ID NO: 929116 - RNA, 20 nt, Human
guauuuuuuuguagagaugg

SEQ ID NO: 929117 - RNA, 22 nt, Human
gugauccucccagcucagacuc

SEQ ID NO: 929118 - RNA, 21 nt, Human
guuucuuaaccuuucugugcu

SEQ ID NO: 929119 - RNA, 20 nt, Human
uaaaguucccucaaccuucc

SEQ ID NO: 929120 - RNA, 22 nt, Human
uacaggcacaugccaccaugcc

SEQ ID NO: 929121 - RNA, 24 nt, Human
uacaggcaugaaccaccaugccca

SEQ ID NO: 929122 - RNA, 19 nt, Human
ucaaauggggauccugauu

SEQ ID NO: 929123 - RNA, 24 nt, Human
ucaagcgauccucccaccuuggcc

SEQ ID NO: 929124 - RNA, 23 nt, Human
ucacccugaggauggccccucuu

SEQ ID NO: 929125 - RNA, 19 nt, Human
ucacugcagccuugaccuc

SEQ ID NO: 929126 - RNA, 23 nt, Human
ucacugcagccuugaccucccag

SEQ ID NO: 929127 - RNA, 24 nt, Human
ucacugcagccuugaccucccagg

SEQ ID NO: 929128 - RNA, 25 nt, Human
ucacugcagccuugaccucccaggg

SEQ ID NO: 929129 - RNA, 23 nt, Human
uccaaagugcugggauuacaggc

SEQ ID NO: 929130 - RNA, 24 nt, Human
uccaaagugcugggauuacaggca

SEQ ID NO: 929131 - RNA, 21 nt, Human
uccacagaucccguccucacc

SEQ ID NO: 929132 - RNA, 22 nt, Human
ucccagggcuugagugauccuc

SEQ ID NO: 929133 - RNA, 19 nt, Human
ucccucaaccuucccucaa

SEQ ID NO: 929134 - RNA, 24 nt, Human
uccugaguagcugggacuacaggc

SEQ ID NO: 929135 - RNA, 21 nt, Human
uccugggcucaagcgauccuc

SEQ ID NO: 929136 - RNA, 24 nt, Human
uccugggcucaagcgauccuccca

SEQ ID NO: 929137 - RNA, 23 nt, Human
ucucggucugucacccagguugg

SEQ ID NO: 929138 - RNA, 24 nt, Human
ucucggucugucacccagguugga

SEQ ID NO: 929139 - RNA, 18 nt, Human
ucugucacccagguugga

SEQ ID NO: 929140 - RNA, 19 nt, Human
ucuugaacuccugggcuca

SEQ ID NO: 929141 - RNA, 23 nt, Human
ucuugaacuccugggcucaagcg

SEQ ID NO: 929142 - RNA, 25 nt, Human
ugaacuccugggcucaagcgauccu

SEQ ID NO: 929143 - RNA, 19 nt, Human
ugaacuggaaaccuucccu

SEQ ID NO: 929144 - RNA, 22 nt, Human
ugacccagcuuuccauugcuuc

SEQ ID NO: 929145 - RNA, 18 nt, Human
ugaccuugggcaaguuuc

SEQ ID NO: 929146 - RNA, 22 nt, Human
ugagacagggucucggucuguc

SEQ ID NO: 929147 - RNA, 21 nt, Human
ugauugcagcucacugcagcc

SEQ ID NO: 929148 - RNA, 24 nt, Human
ugcccagacuggucuugaacuccu

SEQ ID NO: 929149 - RNA, 23 nt, Human
ugcugggauuacaggcaugaacc

SEQ ID NO: 929150 - RNA, 21 nt, Human
uggaaaccuucccuaaaguuc

SEQ ID NO: 929151 - RNA, 22 nt, Human
uggaaaccuucccuaaaguucc

SEQ ID NO: 929152 - RNA, 21 nt, Human
ugggacuacaggcacaugcca

SEQ ID NO: 929153 - RNA, 22 nt, Human
ugggacuacaggcacaugccac

SEQ ID NO: 929154 - RNA, 24 nt, Human
ugggacuacaggcacaugccacca

SEQ ID NO: 929155 - RNA, 25 nt, Human
ugggacuacaggcacaugccaccau

SEQ ID NO: 929156 - RNA, 23 nt, Human
ugggauuacaggcaugaaccacc

SEQ ID NO: 929157 - RNA, 24 nt, Human
ugggauuacaggcaugaaccacca

SEQ ID NO: 929158 - RNA, 25 nt, Human
ugggauuacaggcaugaaccaccau

SEQ ID NO: 929159 - RNA, 25 nt, Human
uguagagaugggggccucaauuugu

SEQ ID NO: 929160 - RNA, 19 nt, Human
ugucaaauggggauccuga

SEQ ID NO: 929161 - RNA, 20 nt, Human
ugugaggaggguuaagcccu

SEQ ID NO: 929162 - RNA, 22 nt, Human
uguugcccagacuggucuugaa

SEQ ID NO: 929163 - RNA, 24 nt, Human
uuaacaagcucccuuacaucuucc

SEQ ID NO: 929164 - RNA, 18 nt, Human
uugggcaggacacuuagc

SEQ ID NO: 929165 - RNA, 22 nt, Human
uuucucccucucucucucuuuu

SEQ ID NO: 929166 - RNA, 23 nt, Human
uuucugugcuauuucccuaucug

SEQ ID NO: 929167 - RNA, 24 nt, Human
uuuguugcccagacuggucuugaa

SEQ ID NO: 929168 - RNA, 26 nt, Human
uuuguuuuuuugagacagggucucgg

SEQ ID NO: 929169 - RNA, 25 nt, Human
uuuuguuuuuuugagacagggucuc

SEQ ID NO: 929170 - RNA, 20 nt, Human
uuuuuuguagagaugggggc

SEQ ID NO: 929171 - RNA, 22 nt, Human
uuuuuuguauuuuuuuguagag

SEQ ID NO: 929172 - RNA, 25 nt, Human
uuuuuuguauuuuuuuguagagaug

SEQ ID NO: 929173 - RNA, 24 nt, Human
uuuuuuuguuuuuuugagacaggg

SEQ ID NO: 929174 - RNA, 23 nt, Human
aaaugaaagcaaaagucuaaaac

SEQ ID NO: 929175 - RNA, 20 nt, Human
aacagaauuaggaaauccuc

SEQ ID NO: 929176 - RNA, 19 nt, Human
agaaaacuuggcgcugacc

SEQ ID NO: 929177 - RNA, 21 nt, Human
agauuccugaaguguucuuug

SEQ ID NO: 929178 - RNA, 19 nt, Human
aggguggauuuuuaaaugg

SEQ ID NO: 929179 - RNA, 20 nt, Human
auagauggggcaaaaguuug

SEQ ID NO: 929180 - RNA, 23 nt, Human
auuauuuuaauguaguugauuuu

SEQ ID NO: 929181 - RNA, 22 nt, Human
auuuuuuuuucugucucucuca

SEQ ID NO: 929182 - RNA, 22 nt, Human
caaaagucuaaaaccgguucua

SEQ ID NO: 929183 - RNA, 21 nt, Human
caagaagagagaaaacuuggc

SEQ ID NO: 929184 - RNA, 22 nt, Human
cagguaaccacagugaaauguu

SEQ ID NO: 929185 - RNA, 20 nt, Human
cagguuuucacugacaaugc

SEQ ID NO: 929186 - RNA, 22 nt, Human
caguaaauucauuucaagguuu

SEQ ID NO: 929187 - RNA, 18 nt, Human
caguuaaaaugaauggaa

SEQ ID NO: 929188 - RNA, 21 nt, Human
gagaacaagaagagagaaaac

SEQ ID NO: 929189 - RNA, 26 nt, Human
gagaacaagaagagagaaaacuuggc

SEQ ID NO: 929190 - RNA, 18 nt, Human
gaucacagcuucaaauuu

SEQ ID NO: 929191 - RNA, 21 nt, Human
gcuuuuguuaggucugggcaa

SEQ ID NO: 929192 - RNA, 22 nt, Human
gguaugagaacaagaagagaga

SEQ ID NO: 929193 - RNA, 19 nt, Human
guaaaauauacucuggccc

SEQ ID NO: 929194 - RNA, 20 nt, Human
guccuguuaucuucaauugc

SEQ ID NO: 929195 - RNA, 22 nt, Human
gugaaacuuuuuucugaauuuu

SEQ ID NO: 929196 - RNA, 18 nt, Human
uaacauagaugagggugg

SEQ ID NO: 929197 - RNA, 23 nt, Human
uacuauguuuuugcuccauguuu

SEQ ID NO: 929198 - RNA, 18 nt, Human
uaguugauuuuucuggaa

SEQ ID NO: 929199 - RNA, 25 nt, Human
ucaccaaaaacucugguaacagaau

SEQ ID NO: 929200 - RNA, 21 nt, Human
uccauaaaguaucuaguuaaa

SEQ ID NO: 929201 - RNA, 22 nt, Human
ugagaagagggccuuaaugacc

SEQ ID NO: 929202 - RNA, 18 nt, Human
ugaggguggauuuuuaaa

SEQ ID NO: 929203 - RNA, 22 nt, Human
ugguaacauagaugagggugga

SEQ ID NO: 929204 - RNA, 21 nt, Human
uguacugcccauucuuuugug

SEQ ID NO: 929205 - RNA, 18 nt, Human
uucacugacaaugcuuuu

SEQ ID NO: 929206 - RNA, 26 nt, Human
uucacugacaaugcuuuuuuaaaaau

SEQ ID NO: 929207 - RNA, 27 nt, Human
uucacugacaaugcuuuuuuaaaaaua

SEQ ID NO: 929208 - RNA, 18 nt, Human
uucaggauaucauuuaau

SEQ ID NO: 929209 - RNA, 25 nt, Human
uuggagagaauuucuggacauuuuu

SEQ ID NO: 929210 - RNA, 24 nt, Human
uuggucauuaccuacagagugcca

SEQ ID NO: 929211 - RNA, 21 nt, Human
uuguaucgaccccuuucuaca

SEQ ID NO: 929212 - RNA, 23 nt, Human
uuuaaacagaguugaaaagugag

SEQ ID NO: 929213 - RNA, 21 nt, Human
uuuucaacauguuuuacucag

SEQ ID NO: 929214 - RNA, 23 nt, Human
uuuucaguccuguuaucuucaau

SEQ ID NO: 929215 - RNA, 24 nt, Human
uuuuucuaucuuucuucuuuaauu

SEQ ID NO: 929216 - RNA, 18 nt, Human
uuuuuuuuuuuuuuuuug

SEQ ID NO: 929217 - RNA, 24 nt, Human
uuuuuuuuuuuuuuuuuuguuagu

SEQ ID NO: 929218 - RNA, 21 nt, Human
aagaagcagaagugaagagaa

SEQ ID NO: 929219 - RNA, 23 nt, Human
aagaauccaaaacagcuguugua

SEQ ID NO: 929220 - RNA, 25 nt, Human
aagcacccaugauagugcccggcaa

SEQ ID NO: 929221 - RNA, 23 nt, Human
aagcagaagugaagagaagggac

SEQ ID NO: 929222 - RNA, 25 nt, Human
aagcagaagugaagagaaguggacc

SEQ ID NO: 929223 - RNA, 23 nt, Human
aagcagggggaaugaucuucucu

SEQ ID NO: 929224 - RNA, 21 nt, Human
aaggaaaaagcaugggcuuua

SEQ ID NO: 929225 - RNA, 19 nt, Human
aaggggaggagcugggacc

SEQ ID NO: 929226 - RNA, 18 nt, Human
aaggguggcgggggggca

SEQ ID NO: 929227 - RNA, 30 nt, Human
acucacuuuucaaugaauauguuuucuacu

SEQ ID NO: 929228 - RNA, 19 nt, Human
agagaacaugagaccucau

SEQ ID NO: 929229 - RNA, 21 nt, Human
agagaaguggaccucguacug

SEQ ID NO: 929230 - RNA, 20 nt, Human
agagaggggaaugagugaca

SEQ ID NO: 929231 - RNA, 18 nt, Human
aggggaggagcugggacc

SEQ ID NO: 929232 - RNA, 19 nt, Human
aucuuuucaaaugcucugg

SEQ ID NO: 929233 - RNA, 20 nt, Human
caaaaaggcuguauuaguga

SEQ ID NO: 929234 - RNA, 24 nt, Human
caaacaaaccugggcucaccuucu

SEQ ID NO: 929235 - RNA, 19 nt, Human
caagauggagcugcuggca

SEQ ID NO: 929236 - RNA, 19 nt, Human
cacacugagucccuuuugg

SEQ ID NO: 929237 - RNA, 22 nt, Human
cagaguaaguagaccacacuga

SEQ ID NO: 929238 - RNA, 22 nt, Human
cagucaugugcaauggacacuc

SEQ ID NO: 929239 - RNA, 21 nt, Human
ccaaaggucuuggcuuaggug

SEQ ID NO: 929240 - RNA, 22 nt, Human
ccccuuggcacagggcagaggc

SEQ ID NO: 929241 - RNA, 19 nt, Human
ccugccuggauagugcuga

SEQ ID NO: 929242 - RNA, 18 nt, Human
cuacuggacaaacaagcu

SEQ ID NO: 929243 - RNA, 18 nt, Human
cugaguggaaggggagga

SEQ ID NO: 929244 - RNA, 23 nt, Human
cugaguggaaggggaggagcugg

SEQ ID NO: 929245 - RNA, 21 nt, Human
cuguuguaacucugcagcuca

SEQ ID NO: 929246 - RNA, 24 nt, Human
cuuacaagaauccaaaacagcugu

SEQ ID NO: 929247 - RNA, 18 nt, Human
cuucugcugucgugugcu

SEQ ID NO: 929248 - RNA, 22 nt, Human
gaguggaggccaagauggagcu

SEQ ID NO: 929249 - RNA, 24 nt, Human
gaucuucucuggagcuuccucagc

SEQ ID NO: 929250 - RNA, 20 nt, Human
gcggccuuuuuaaccuaucu

SEQ ID NO: 929251 - RNA, 18 nt, Human
ggaggagcugggacccaa

SEQ ID NO: 929252 - RNA, 18 nt, Human
ggcucuacuggacaaaca

SEQ ID NO: 929253 - RNA, 22 nt, Human
ggggagguacaaaggaaaaagc

SEQ ID NO: 929254 - RNA, 21 nt, Human
gguaaggaucugacuggaagc

SEQ ID NO: 929255 - RNA, 22 nt, Human
guacugaugaugacaugaacac

SEQ ID NO: 929256 - RNA, 24 nt, Human
gugaagaagcagaagugaagagaa

SEQ ID NO: 929257 - RNA, 20 nt, Human
guggaaggggaggagcuggg

SEQ ID NO: 929258 - RNA, 19 nt, Human
guuaagagagaggggaaug

SEQ ID NO: 929259 - RNA, 19 nt, Human
guuuucuucugcaaaaggg

SEQ ID NO: 929260 - RNA, 20 nt, Human
uaaccaaaguagauggagca

SEQ ID NO: 929261 - RNA, 20 nt, Human
uaagacaaugaguguaaagc

SEQ ID NO: 929262 - RNA, 24 nt, Human
uacaaaaaaaaaaaaaaaaaaaaa

SEQ ID NO: 929263 - RNA, 23 nt, Human
uaccuaaccaaaguagauggagc

SEQ ID NO: 929264 - RNA, 21 nt, Human
uaguuuguuuuuguuuucuuc

SEQ ID NO: 929265 - RNA, 19 nt, Human
ucaaacaaaccugggcuca

SEQ ID NO: 929266 - RNA, 20 nt, Human
ucaaacaaaccugggcucac

SEQ ID NO: 929267 - RNA, 20 nt, Human
ucaaugaauauguuuucuac

SEQ ID NO: 929268 - RNA, 22 nt, Human
ucagagacuuucagccccuugg

SEQ ID NO: 929269 - RNA, 20 nt, Human
uccaaaacagcuguuguaac

SEQ ID NO: 929270 - RNA, 22 nt, Human
uccaaaacagcuguuguaacuc

SEQ ID NO: 929271 - RNA, 20 nt, Human
uccuaaaucuccaaaggcuc

SEQ ID NO: 929272 - RNA, 18 nt, Human
uccugcggccuuuuuaac

SEQ ID NO: 929273 - RNA, 20 nt, Human
ucuacaaaaaaaaaaaaaaa

SEQ ID NO: 929274 - RNA, 21 nt, Human
ucucuggagcuuccucagccu

SEQ ID NO: 929275 - RNA, 22 nt, Human
ugagggagaguggaggccaaga

SEQ ID NO: 929276 - RNA, 20 nt, Human
ugagucccuuuugguccucc

SEQ ID NO: 929277 - RNA, 24 nt, Human
ugaguguaaagcacccaugauagu

SEQ ID NO: 929278 - RNA, 21 nt, Human
ugauaugcacagucaugugca

SEQ ID NO: 929279 - RNA, 20 nt, Human
ugccuggauagugcugagug

SEQ ID NO: 929280 - RNA, 22 nt, Human
ugcuaugugcuuacuuaaucug

SEQ ID NO: 929281 - RNA, 19 nt, Human
ugcugaagcaaacaugaag

SEQ ID NO: 929282 - RNA, 18 nt, Human
uggcuaaagagggguggg

SEQ ID NO: 929283 - RNA, 23 nt, Human
ugggacaaggcauauccgagagc

SEQ ID NO: 929284 - RNA, 21 nt, Human
uuacuuaaucugacucuuagu

SEQ ID NO: 929285 - RNA, 23 nt, Human
uuaggugugggagcagagaacau

SEQ ID NO: 929286 - RNA, 24 nt, Human
uuccucagccuguagaagcuggga

SEQ ID NO: 929287 - RNA, 20 nt, Human
aaacaggcgagagccagcac

SEQ ID NO: 929288 - RNA, 26 nt, Human
aaacaggcgagagccagcacacacag

SEQ ID NO: 929289 - RNA, 21 nt, Human
acaccggaaacaggcgagagc

SEQ ID NO: 929290 - RNA, 19 nt, Human
acaggcgagagccagcaca

SEQ ID NO: 929291 - RNA, 19 nt, Human
accgcggggcaggccagac

SEQ ID NO: 929292 - RNA, 19 nt, Human
acuuuguaaauaaaaaggg

SEQ ID NO: 929293 - RNA, 22 nt, Human
agaaagagagaguuugagccuc

SEQ ID NO: 929294 - RNA, 24 nt, Human
agaaggcccccaaccccucggucc

SEQ ID NO: 929295 - RNA, 24 nt, Human
agacaccggaaacaggcgagagcc

SEQ ID NO: 929296 - RNA, 22 nt, Human
agagaaacaagccaguuagagg

SEQ ID NO: 929297 - RNA, 22 nt, Human
agagccagcacacacagcccua

SEQ ID NO: 929298 - RNA, 26 nt, Human
aggcccccaaccccucgguccuccac

SEQ ID NO: 929299 - RNA, 22 nt, Human
aguuaugacaaggagaaagaga

SEQ ID NO: 929300 - RNA, 24 nt, Human
auaaagaaaucaaggggaauggag

SEQ ID NO: 929301 - RNA, 23 nt, Human
caaauaaagacuguaaaccaaua

SEQ ID NO: 929302 - RNA, 21 nt, Human
caaaugagacuaacuguggua

SEQ ID NO: 929303 - RNA, 23 nt, Human
caaccccucgguccuccacaccg

SEQ ID NO: 929304 - RNA, 20 nt, Human
cacacagcccuagucugagc

SEQ ID NO: 929305 - RNA, 21 nt, Human
caccccaccccaccccccacc

SEQ ID NO: 929306 - RNA, 23 nt, Human
caccggaaacaggcgagagccaa

SEQ ID NO: 929307 - RNA, 21 nt, Human
cagacggacagccagugggca

SEQ ID NO: 929308 - RNA, 24 nt, Human
caguuuacuuaaggacaucacauc

SEQ ID NO: 929309 - RNA, 22 nt, Human
ccaccccccaccaccgcuuacc

SEQ ID NO: 929310 - RNA, 22 nt, Human
cccaccaccgcuuaccuaagaa

SEQ ID NO: 929311 - RNA, 18 nt, Human
cccaccccccaccaccgc

SEQ ID NO: 929312 - RNA, 20 nt, Human
ccccaaccccucgguccucc

SEQ ID NO: 929313 - RNA, 20 nt, Human
ccccaccccaccccccacca

SEQ ID NO: 929314 - RNA, 19 nt, Human
cccccaaccccucgguccu

SEQ ID NO: 929315 - RNA, 24 nt, Human
ccccggccagcccgccugagauga

SEQ ID NO: 929316 - RNA, 22 nt, Human
ccguccggaugcagcugauugc

SEQ ID NO: 929317 - RNA, 24 nt, Human
ccugcccaucgggucaaccucagc

SEQ ID NO: 929318 - RNA, 20 nt, Human
cgagggccccggccagcccg

SEQ ID NO: 929319 - RNA, 19 nt, Human
cggaaacaggcgagagcca

SEQ ID NO: 929320 - RNA, 19 nt, Human
cggaaacaggcgagagcca

SEQ ID NO: 929321 - RNA, 24 nt, Human
cggccagcccgccugagaugaugu

SEQ ID NO: 929322 - RNA, 22 nt, Human
cgguagaaggcccccaaccccu

SEQ ID NO: 929323 - RNA, 23 nt, Human
cucaggguuuuaauggccucaug

SEQ ID NO: 929324 - RNA, 25 nt, Human
cuccaccccaccccaccccccacca

SEQ ID NO: 929325 - RNA, 23 nt, Human
cugcaagcgcugcuucaccacug

SEQ ID NO: 929326 - RNA, 21 nt, Human
cugugguuggaaccgcggggc

SEQ ID NO: 929327 - RNA, 23 nt, Human
gaaggcccccaaccccucggucc

SEQ ID NO: 929328 - RNA, 18 nt, Human
gagcagccgcggagggcc

SEQ ID NO: 929329 - RNA, 21 nt, Human
gagcagccgcggagggccagc

SEQ ID NO: 929330 - RNA, 18 nt, Human
gagggccccggccagccc

SEQ ID NO: 929331 - RNA, 20 nt, Human
gcaaaugagacuaacugugg

SEQ ID NO: 929332 - RNA, 18 nt, Human
gcauuuuuagguuuuuca

SEQ ID NO: 929333 - RNA, 24 nt, Human
gcccccaaccccucgguccuccac

SEQ ID NO: 929334 - RNA, 18 nt, Human
gccugagaugauguggga

SEQ ID NO: 929335 - RNA, 21 nt, Human
gcgaauguuuauuugggcauu

SEQ ID NO: 929336 - RNA, 24 nt, Human
gcgagagccagcacacacagcccu

SEQ ID NO: 929337 - RNA, 18 nt, Human
gcugcuucaccacugugg

SEQ ID NO: 929338 - RNA, 26 nt, Human
ggacuggaaggggauguucaugguca

SEQ ID NO: 929339 - RNA, 20 nt, Human
ggauguggccccaccccagg

SEQ ID NO: 929340 - RNA, 21 nt, Human
ggccagcucccggcaguccua

SEQ ID NO: 929341 - RNA, 23 nt, Human
ggccagcucccggcaguccuagg

SEQ ID NO: 929342 - RNA, 19 nt, Human
ggggauguucauggucagc

SEQ ID NO: 929343 - RNA, 23 nt, Human
gguuggauguggccccaccccag

SEQ ID NO: 929344 - RNA, 23 nt, Human
guccgguggggguugaccugcuc

SEQ ID NO: 929345 - RNA, 22 nt, Human
guguacuaaacaaaacagaaca

SEQ ID NO: 929346 - RNA, 18 nt, Human
uaaaaagaagcccaagau

SEQ ID NO: 929347 - RNA, 18 nt, Human
uagaaggcccccaacccc

SEQ ID NO: 929348 - RNA, 25 nt, Human
uagcuccgguagaaggcccccaacc

SEQ ID NO: 929349 - RNA, 22 nt, Human
uagguuaaaauccauuuuuauc

SEQ ID NO: 929350 - RNA, 23 nt, Human
uagucugagcagccgcggagggc

SEQ ID NO: 929351 - RNA, 18 nt, Human
ucaaggggaauggagaag

SEQ ID NO: 929352 - RNA, 22 nt, Human
uccaccccaccccaccccccac

SEQ ID NO: 929353 - RNA, 19 nt, Human
uccucuccaccccacccca

SEQ ID NO: 929354 - RNA, 19 nt, Human
ucuccaccccaccccaccc

SEQ ID NO: 929355 - RNA, 22 nt, Human
ucugcaagcgcugcuucaccac

SEQ ID NO: 929356 - RNA, 22 nt, Human
ugagaugaugugggacugcggg

SEQ ID NO: 929357 - RNA, 22 nt, Human
ugagcagccgcggagggccagc

SEQ ID NO: 929358 - RNA, 21 nt, Human
ugccugaaucuugcugaaggc

SEQ ID NO: 929359 - RNA, 18 nt, Human
uggaaggggauguucaug

SEQ ID NO: 929360 - RNA, 21 nt, Human
uggccccaccccaggucggaa

SEQ ID NO: 929361 - RNA, 22 nt, Human
ugggcaguggguuggauguggc

SEQ ID NO: 929362 - RNA, 25 nt, Human
uguaaaccaauaguuaugacaagga

SEQ ID NO: 929363 - RNA, 20 nt, Human
uguguacuaaacaaaacaga

SEQ ID NO: 929364 - RNA, 21 nt, Human
uguguacuaaacaaaacagaa

SEQ ID NO: 929365 - RNA, 21 nt, Human
uuaaaaaagauaaacaaaacc

SEQ ID NO: 929366 - RNA, 22 nt, Human
uuuaauggccucauguauugcc

SEQ ID NO: 929367 - RNA, 19 nt, Human
uuuguaaauaaaaaggggg

SEQ ID NO: 929368 - RNA, 26 nt, Human
uuuucauugaacuacuuccuagaagg

SEQ ID NO: 929369 - RNA, 21 nt, Human
aaaaaggagauauaucugaga

SEQ ID NO: 929370 - RNA, 19 nt, Human
aagaaaucacaaagguaaa

SEQ ID NO: 929371 - RNA, 23 nt, Human
aagaacauuuuuuggggaggaaa

SEQ ID NO: 929372 - RNA, 18 nt, Human
aauacuguguuaaaauau

SEQ ID NO: 929373 - RNA, 19 nt, Human
accauauggccugcaaagu

SEQ ID NO: 929374 - RNA, 19 nt, Human
aggaaauguugauaacaaa

SEQ ID NO: 929375 - RNA, 21 nt, Human
agugggaaaauacuuuuaaau

SEQ ID NO: 929376 - RNA, 18 nt, Human
cacaaaaauggaaacaaa

SEQ ID NO: 929377 - RNA, 24 nt, Human
caccuccccaucacaaaaaaagga

SEQ ID NO: 929378 - RNA, 23 nt, Human
cagcacugaaagguuguaguaga

SEQ ID NO: 929379 - RNA, 23 nt, Human
cauauggccugcaaagucaaaaa

SEQ ID NO: 929380 - RNA, 24 nt, Human
caugacuuaaaauacguguauaug

SEQ ID NO: 929381 - RNA, 18 nt, Human
ccagagcagaguugagua

SEQ ID NO: 929382 - RNA, 22 nt, Human
gacaccuccccaucacaaaaaa

SEQ ID NO: 929383 - RNA, 20 nt, Human
gagauagaagaaaucacaaa

SEQ ID NO: 929384 - RNA, 22 nt, Human
gccgacaccuccccaucacaag

SEQ ID NO: 929385 - RNA, 20 nt, Human
gccucacucaccucauccca

SEQ ID NO: 929386 - RNA, 22 nt, Human
uaaaaagcaaacagcacugaaa

SEQ ID NO: 929387 - RNA, 25 nt, Human
uaaaaagcaaacagcacugaaaggu

SEQ ID NO: 929388 - RNA, 20 nt, Human
uaaugugccgacaccucccc

SEQ ID NO: 929389 - RNA, 24 nt, Human
uacuccagaauuccgaguauaagu

SEQ ID NO: 929390 - RNA, 22 nt, Human
uauuuugcucuucauggaccuu

SEQ ID NO: 929391 - RNA, 18 nt, Human
ucacaaagguaaaaacug

SEQ ID NO: 929392 - RNA, 24 nt, Human
ucacucaccucaucccagucacau

SEQ ID NO: 929393 - RNA, 20 nt, Human
uccaccagagcagaguugag

SEQ ID NO: 929394 - RNA, 30 nt, Human
ugaaauaaaaacaaaauuuaaacagcauuu

SEQ ID NO: 929395 - RNA, 24 nt, Human
ugaguaguugggacagagaccaua

SEQ ID NO: 929396 - RNA, 20 nt, Human
ugcagaguuuuugcauguuu

SEQ ID NO: 929397 - RNA, 25 nt, Human
ugccucacucaccucaucccaguca

SEQ ID NO: 929398 - RNA, 23 nt, Human
uggcacaaaaauggaaacaaaua

SEQ ID NO: 929399 - RNA, 23 nt, Human
ugggaaaauacuuuuaaauggug

SEQ ID NO: 929400 - RNA, 24 nt, Human
ugggaaaauacuuuuaaauggugu

SEQ ID NO: 929401 - RNA, 21 nt, Human
uggggaggaaaacaaccuguc

SEQ ID NO: 929402 - RNA, 25 nt, Human
uguaaaaagcaaacagcacugaaag

SEQ ID NO: 929403 - RNA, 23 nt, Human
uguuauguuucuuaaauaauaca

SEQ ID NO: 929404 - RNA, 25 nt, Human
uuuucauaaauuacuggaguaaaua

SEQ ID NO: 929405 - RNA, 19 nt, Human
uuuuuggggaggaaaacaa

SEQ ID NO: 929406 - RNA, 18 nt, Human
uuuuuuuuuuccacccac

SEQ ID NO: 929407 - RNA, 19 nt, Human
aaacagccaaaaaccuucg

SEQ ID NO: 929408 - RNA, 24 nt, Human
aaagccaaagacaucuccaaucac

SEQ ID NO: 929409 - RNA, 22 nt, Human
aaccaugcugauuggcagcaca

SEQ ID NO: 929410 - RNA, 19 nt, Human
aacccccauuuacuuuuca

SEQ ID NO: 929411 - RNA, 20 nt, Human
aagaagaauguucaccucau

SEQ ID NO: 929412 - RNA, 23 nt, Human
aagcagcaccuauucacuggcuc

SEQ ID NO: 929413 - RNA, 18 nt, Human
acacuguggaauuugucc

SEQ ID NO: 929414 - RNA, 20 nt, Human
agacagaguacugucuugua

SEQ ID NO: 929415 - RNA, 18 nt, Human
agagagccacaggggagc

SEQ ID NO: 929416 - RNA, 24 nt, Human
agagagccacaggggagcagaggg

SEQ ID NO: 929417 - RNA, 24 nt, Human
agccaaaaaccuucgguucuuguu

SEQ ID NO: 929418 - RNA, 25 nt, Human
agcuaaagugcaaagccaaagacau

SEQ ID NO: 929419 - RNA, 19 nt, Human
aggcaaaaaggauuccaga

SEQ ID NO: 929420 - RNA, 25 nt, Human
agguuuuuaguuggucuguaaucau

SEQ ID NO: 929421 - RNA, 19 nt, Human
auccucauuuuuuuuuucc

SEQ ID NO: 929422 - RNA, 23 nt, Human
cacuaggaaggguccuacacagg

SEQ ID NO: 929423 - RNA, 24 nt, Human
cagaggguuccuucgcuaaaacac

SEQ ID NO: 929424 - RNA, 23 nt, Human
cagcuaaagugcaaagccaaaga

SEQ ID NO: 929425 - RNA, 24 nt, Human
cagcuuaagccauagccagaaacc

SEQ ID NO: 929426 - RNA, 18 nt, Human
cauuucuucccucaaccc

SEQ ID NO: 929427 - RNA, 19 nt, Human
ccauuaaucuagaggcaaa

SEQ ID NO: 929428 - RNA, 21 nt, Human
cccuuagcuuuuaugagccuc

SEQ ID NO: 929429 - RNA, 19 nt, Human
ccuacugccaugcuguugu

SEQ ID NO: 929430 - RNA, 20 nt, Human
ccuaggcccucuuccacucc

SEQ ID NO: 929431 - RNA, 21 nt, Human
cuaaagugcaaagccaaagac

SEQ ID NO: 929432 - RNA, 24 nt, Human
cucaaaugcuccacuagaacagcu

SEQ ID NO: 929433 - RNA, 22 nt, Human
cucuguccuaggcccucuucca

SEQ ID NO: 929434 - RNA, 20 nt, Human
cuggaaccgagugcuucaua

SEQ ID NO: 929435 - RNA, 18 nt, Human
cuggaaucuccuagguuu

SEQ ID NO: 929436 - RNA, 22 nt, Human
cugguguccucuguaaaaucuc

SEQ ID NO: 929437 - RNA, 22 nt, Human
cugucccggucuacucucuucc

SEQ ID NO: 929438 - RNA, 19 nt, Human
cuuuauaccugguguccuc

SEQ ID NO: 929439 - RNA, 18 nt, Human
gaaauuccuucuugucuu

SEQ ID NO: 929440 - RNA, 23 nt, Human
gaagacagaaccacacuaggaag

SEQ ID NO: 929441 - RNA, 21 nt, Human
gagugcuucauaaauguuugg

SEQ ID NO: 929442 - RNA, 22 nt, Human
gaugaugagaaacagccaaaaa

SEQ ID NO: 929443 - RNA, 23 nt, Human
gcaaagccaaagacaucuccaau

SEQ ID NO: 929444 - RNA, 21 nt, Human
gcugauaccuccccaacccua

SEQ ID NO: 929445 - RNA, 18 nt, Human
gcugcauuucuucccuca

SEQ ID NO: 929446 - RNA, 22 nt, Human
gcuuccaucucaaaugcuccac

SEQ ID NO: 929447 - RNA, 19 nt, Human
gggaaugggaauaagaaga

SEQ ID NO: 929448 - RNA, 18 nt, Human
gucuacucucuucccuua

SEQ ID NO: 929449 - RNA, 21 nt, Human
uaagccauagccagaaaccca

SEQ ID NO: 929450 - RNA, 18 nt, Human
uacacaagaaaagccauc

SEQ ID NO: 929451 - RNA, 20 nt, Human
uacuugacuccucugucccg

SEQ ID NO: 929452 - RNA, 18 nt, Human
uagaacagcucucacuaa

SEQ ID NO: 929453 - RNA, 24 nt, Human
uagaacagcucucacuaacgucuu

SEQ ID NO: 929454 - RNA, 23 nt, Human
uagccagaaacccaaauccuauu

SEQ ID NO: 929455 - RNA, 24 nt, Human
ucaaaugugcauaucuuuugccuc

SEQ ID NO: 929456 - RNA, 20 nt, Human
ucacugauguuggauuccca

SEQ ID NO: 929457 - RNA, 20 nt, Human
ucauuuuuuuuuuccugcau

SEQ ID NO: 929458 - RNA, 23 nt, Human
uccauaccaugacacuguggaag

SEQ ID NO: 929459 - RNA, 19 nt, Human
uccuacugccaugcuguug

SEQ ID NO: 929460 - RNA, 19 nt, Human
ucuccuagguuuuuaguug

SEQ ID NO: 929461 - RNA, 23 nt, Human
ucuguaaaaucucuuuuuuguuu

SEQ ID NO: 929462 - RNA, 20 nt, Human
ugacacuguggaauuugucc

SEQ ID NO: 929463 - RNA, 19 nt, Human
ugacauguuucuuuagcaa

SEQ ID NO: 929464 - RNA, 20 nt, Human
ugacauguuucuuuagcaca

SEQ ID NO: 929465 - RNA, 19 nt, Human
ugagaaacagccaaaaacc

SEQ ID NO: 929466 - RNA, 24 nt, Human
ugagaaacagccaaaaaccuucgg

SEQ ID NO: 929467 - RNA, 19 nt, Human
ugagccucauccucauuuu

SEQ ID NO: 929468 - RNA, 19 nt, Human
ugccaggagcccauuauuc

SEQ ID NO: 929469 - RNA, 21 nt, Human
ugccugccagacacauuauuu

SEQ ID NO: 929470 - RNA, 25 nt, Human
uggcagcagcagcaaagggcacuuc

SEQ ID NO: 929471 - RNA, 21 nt, Human
uggugaauaagugaaugacau

SEQ ID NO: 929472 - RNA, 19 nt, Human
uguaaaaucucuuuuuugu

SEQ ID NO: 929473 - RNA, 22 nt, Human
uuagcuuuuaugagccucaucc

SEQ ID NO: 929474 - RNA, 21 nt, Human
uucacugauguuggauuccca

SEQ ID NO: 929475 - RNA, 20 nt, Human
uucauggugcuaaauucaac

SEQ ID NO: 929476 - RNA, 23 nt, Human
uuccagaaugggaaugggaauaa

SEQ ID NO: 929477 - RNA, 23 nt, Human
uucuucccucaacccccauuuac

SEQ ID NO: 929478 - RNA, 20 nt, Human
uucuuuagcacaagaccugg

SEQ ID NO: 929479 - RNA, 23 nt, Human
uuggcugauaccuccccaacccu

SEQ ID NO: 929480 - RNA, 23 nt, Human
uuguuguuguuuuccacuuucuc

SEQ ID NO: 929481 - RNA, 20 nt, Human
uuuaaccuauuuacuuaccu

SEQ ID NO: 929482 - RNA, 26 nt, Human
uuucccacugugguuguuucuacuuu

SEQ ID NO: 929483 - RNA, 25 nt, Human
uuuuuuuguuguuguuguuuuccac

SEQ ID NO: 929484 - RNA, 23 nt, Human
aaaaauaaggauugugagagaga

SEQ ID NO: 929485 - RNA, 18 nt, Human
aaaagaaaagcaaaagaa

SEQ ID NO: 929486 - RNA, 26 nt, Human
aaaagaaaagcaaaagaaacaugcga

SEQ ID NO: 929487 - RNA, 19 nt, Human
aacaaaagaaaagcaaaag

SEQ ID NO: 929488 - RNA, 24 nt, Human
aagaaaagcaaaagaaacaugcga

SEQ ID NO: 929489 - RNA, 18 nt, Human
aagcaaaagaaacaugcg

SEQ ID NO: 929490 - RNA, 19 nt, Human
aaucucuguucugagucuc

SEQ ID NO: 929491 - RNA, 23 nt, Human
acacaacaaaagaaaagcaaaag

SEQ ID NO: 929492 - RNA, 26 nt, Human
accuugacaguuuuggucuuuccuug

SEQ ID NO: 929493 - RNA, 20 nt, Human
agagaauagaaucugacuau

SEQ ID NO: 929494 - RNA, 23 nt, Human
agccaagugucaguuucuuuauu

SEQ ID NO: 929495 - RNA, 19 nt, Human
aguuuuggucuuuccuugg

SEQ ID NO: 929496 - RNA, 20 nt, Human
auucuacagcguuccucuaa

SEQ ID NO: 929497 - RNA, 23 nt, Human
caaaguaaccaacagcaccugac

SEQ ID NO: 929498 - RNA, 21 nt, Human
caacagcaccugacauauaau

SEQ ID NO: 929499 - RNA, 21 nt, Human
cacaacaaaagaaaagcaaaa

SEQ ID NO: 929500 - RNA, 19 nt, Human
cagauugcagaauuaugac

SEQ ID NO: 929501 - RNA, 22 nt, Human
cagauugcagaauuaugaccaa

SEQ ID NO: 929502 - RNA, 23 nt, Human
cagcaagaugacuguaagaacug

SEQ ID NO: 929503 - RNA, 25 nt, Human
caucugaacauuggccugaauguuu

SEQ ID NO: 929504 - RNA, 23 nt, Human
ccaauaccagcuaacaaaagaga

SEQ ID NO: 929505 - RNA, 28 nt, Human
ccuugcuaaaagauguuuacuuuucucg

SEQ ID NO: 929506 - RNA, 18 nt, Human
cuacagcguuccucuaag

SEQ ID NO: 929507 - RNA, 19 nt, Human
cucaagagauaggguugcc

SEQ ID NO: 929508 - RNA, 20 nt, Human
cucagucuucaagcuuuagc

SEQ ID NO: 929509 - RNA, 22 nt, Human
cugaacauuggccugaauguuu

SEQ ID NO: 929510 - RNA, 18 nt, Human
cugagucucuucagagaa

SEQ ID NO: 929511 - RNA, 22 nt, Human
cuugacaguuuuggucuuuccu

SEQ ID NO: 929512 - RNA, 24 nt, Human
gaaaauaaaagccuugcuaaaaga

SEQ ID NO: 929513 - RNA, 20 nt, Human
gagaauggagccuagcuagg

SEQ ID NO: 929514 - RNA, 19 nt, Human
gccugaauguuuuaguugu

SEQ ID NO: 929515 - RNA, 20 nt, Human
uaacaaaagagaaauaguaa

SEQ ID NO: 929516 - RNA, 20 nt, Human
uaacagguuccacuuauaau

SEQ ID NO: 929517 - RNA, 28 nt, Human
uaacagguuccacuuauaauuaagauuc

SEQ ID NO: 929518 - RNA, 20 nt, Human
uaaguuuuggggugguuugu

SEQ ID NO: 929519 - RNA, 19 nt, Human
uaauugcucagucuucaag

SEQ ID NO: 929520 - RNA, 22 nt, Human
uacagcguuccucuaagacagg

SEQ ID NO: 929521 - RNA, 21 nt, Human
uagccuuggcuuuauuuguuc

SEQ ID NO: 929522 - RNA, 20 nt, Human
ucucaagagauaggguugcc

SEQ ID NO: 929523 - RNA, 19 nt, Human
ucucggccuaccuugacag

SEQ ID NO: 929524 - RNA, 20 nt, Human
ucugauucuucuuuucuguc

SEQ ID NO: 929525 - RNA, 21 nt, Human
ucugugguuuuaaaaaaaaag

SEQ ID NO: 929526 - RNA, 19 nt, Human
ucuguucugagucucuuca

SEQ ID NO: 929527 - RNA, 19 nt, Human
ugacuguaagaacugccua

SEQ ID NO: 929528 - RNA, 21 nt, Human
ugccaguaaguuuuggggugg

SEQ ID NO: 929529 - RNA, 18 nt, Human
ugccuaguugagcccugc

SEQ ID NO: 929530 - RNA, 20 nt, Human
ugcuggcuguguaacuaugg

SEQ ID NO: 929531 - RNA, 18 nt, Human
uggcugaaagcaguagua

SEQ ID NO: 929532 - RNA, 22 nt, Human
ugugguuuuaaaaaaaaagcgg

SEQ ID NO: 929533 - RNA, 23 nt, Human
uguguaacuaugggcagguuacu

SEQ ID NO: 929534 - RNA, 23 nt, Human
uguugugccaguaaguuuugggg

SEQ ID NO: 929535 - RNA, 20 nt, Human
uuauacuuaccauccuguca

SEQ ID NO: 929536 - RNA, 20 nt, Human
uuccuuucaguuuggguugg

SEQ ID NO: 929537 - RNA, 18 nt, Human
uuguuacacaacaaaaga

SEQ ID NO: 929538 - RNA, 19 nt, Human
uuuggggugguuuguuaca

SEQ ID NO: 929539 - RNA, 19 nt, Human
uuuucucggccuaccuuga

SEQ ID NO: 929540 - RNA, 18 nt, Human
aaaauuguagcaaggaca

SEQ ID NO: 929541 - RNA, 22 nt, Human
aaaucuguuuuaaacaugcuag

SEQ ID NO: 929542 - RNA, 20 nt, Human
aacauacucaagauuuaaga

SEQ ID NO: 929543 - RNA, 23 nt, Human
aagaaaaaauaaguucaggaaaa

SEQ ID NO: 929544 - RNA, 21 nt, Human
acucaagauuuaagaaagagg

SEQ ID NO: 929545 - RNA, 26 nt, Human
agaaagaaaaugaaacauacucaaga

SEQ ID NO: 929546 - RNA, 27 nt, Human
agaaagagggaacgagcaguaccauuu

SEQ ID NO: 929547 - RNA, 20 nt, Human
agacuuaaguguaacugaua

SEQ ID NO: 929548 - RNA, 21 nt, Human
aguaccauucacugauuuggc

SEQ ID NO: 929549 - RNA, 23 nt, Human
augaaaucuguuuuaaacaugcu

SEQ ID NO: 929550 - RNA, 22 nt, Human
augaagccugcagcagcagacc

SEQ ID NO: 929551 - RNA, 22 nt, Human
caagaaaagccacugguuggua

SEQ ID NO: 929552 - RNA, 21 nt, Human
caaggcaaaaucaauucugcu

SEQ ID NO: 929553 - RNA, 20 nt, Human
caagucaagaaaagccacug

SEQ ID NO: 929554 - RNA, 25 nt, Human
caggaaaaccagaugcuucucaaau

SEQ ID NO: 929555 - RNA, 23 nt, Human
ccaacaucucaauugguucagcu

SEQ ID NO: 929556 - RNA, 19 nt, Human
cuugaaauguccaguaagc

SEQ ID NO: 929557 - RNA, 19 nt, Human
cuugacagcauuugaucuc

SEQ ID NO: 929558 - RNA, 21 nt, Human
gacgaagcaaaguuuuagaug

SEQ ID NO: 929559 - RNA, 19 nt, Human
gcacauauuuuuccauaca

SEQ ID NO: 929560 - RNA, 21 nt, Human
ggaaaaguuaaucuuguuuau

SEQ ID NO: 929561 - RNA, 27 nt, Human
ggugaagaagaaagaaaagggagggcc

SEQ ID NO: 929562 - RNA, 20 nt, Human
guccaguaagcauuuauucu

SEQ ID NO: 929563 - RNA, 22 nt, Human
uaaauuuucuugcaccaaaaua

SEQ ID NO: 929564 - RNA, 20 nt, Human
uaacuugcugcacauauuuu

SEQ ID NO: 929565 - RNA, 19 nt, Human
uaagaaagagggaacgagc

SEQ ID NO: 929566 - RNA, 21 nt, Human
uaagaaggauaggacaucagu

SEQ ID NO: 929567 - RNA, 20 nt, Human
uaauuccauucuauuagacu

SEQ ID NO: 929568 - RNA, 22 nt, Human
uaauugggacaaggcauugucc

SEQ ID NO: 929569 - RNA, 20 nt, Human
uagaggugaagaagaaagaa

SEQ ID NO: 929570 - RNA, 21 nt, Human
uagcaaggacaaacaucaaau

SEQ ID NO: 929571 - RNA, 18 nt, Human
uauaacaugucugaacag

SEQ ID NO: 929572 - RNA, 20 nt, Human
uauaacaugucugaacagga

SEQ ID NO: 929573 - RNA, 20 nt, Human
uccauucuauuagacuuaag

SEQ ID NO: 929574 - RNA, 20 nt, Human
ucucugauuauagaggugaa

SEQ ID NO: 929575 - RNA, 24 nt, Human
ucugaacaggaucuaguuugaggc

SEQ ID NO: 929576 - RNA, 25 nt, Human
ugaaacauacucaagauuuaagaaa

SEQ ID NO: 929577 - RNA, 21 nt, Human
ugaaacuagaguaggaacugg

SEQ ID NO: 929578 - RNA, 21 nt, Human
ugacagcauuugaucucugau

SEQ ID NO: 929579 - RNA, 19 nt, Human
ugcaaagagucccuaucaa

SEQ ID NO: 929580 - RNA, 21 nt, Human
ugccccaaagaaaucaguagc

SEQ ID NO: 929581 - RNA, 23 nt, Human
uggaagaauggugaaaucauuga

SEQ ID NO: 929582 - RNA, 24 nt, Human
uggaagaauggugaaaucauugau

SEQ ID NO: 929583 - RNA, 23 nt, Human
ugggacaaggcauugucccaaac

SEQ ID NO: 929584 - RNA, 19 nt, Human
ugguggggggaggaaaacu

SEQ ID NO: 929585 - RNA, 22 nt, Human
uguaacugauacuuuaguucaa

SEQ ID NO: 929586 - RNA, 22 nt, Human
ugucaaaaucuuugcggguucc

SEQ ID NO: 929587 - RNA, 25 nt, Human
uuaagaaaaaauaaguucaggaaaa

SEQ ID NO: 929588 - RNA, 23 nt, Human
uuaaggagagauuuguuuuucau

SEQ ID NO: 929589 - RNA, 18 nt, Human
uugauggugaaaguugug

SEQ ID NO: 929590 - RNA, 22 nt, Human
uugguggggggaggaaaacuug

SEQ ID NO: 929591 - RNA, 23 nt, Human
uuuuuuuuuuuuuuucuuaauug

SEQ ID NO: 929592 - RNA, 26 nt, Human
aaauaacugagagugugcuaaaucuc

SEQ ID NO: 929593 - RNA, 21 nt, Human
aacuguguuuuccuuccuuaa

SEQ ID NO: 929594 - RNA, 18 nt, Human
acaaaacaaaacucagaa

SEQ ID NO: 929595 - RNA, 23 nt, Human
acaccaagucccuagaguucggc

SEQ ID NO: 929596 - RNA, 21 nt, Human
acagaaucagaguauuaaaaa

SEQ ID NO: 929597 - RNA, 18 nt, Human
acuuuuuuuuuuuuuucu

SEQ ID NO: 929598 - RNA, 24 nt, Human
agaaacaggaacaccacacaaugu

SEQ ID NO: 929599 - RNA, 21 nt, Human
aggaggagaggggcuggggaa

SEQ ID NO: 929600 - RNA, 20 nt, Human
auacagaaaauacagaaaaa

SEQ ID NO: 929601 - RNA, 20 nt, Human
auccaauauggaauaucaau

SEQ ID NO: 929602 - RNA, 19 nt, Human
caaugcuaacaaaacaaca

SEQ ID NO: 929603 - RNA, 23 nt, Human
caaugcuaacaaaacaacaggaa

SEQ ID NO: 929604 - RNA, 19 nt, Human
cagcaccauagacacaucg

SEQ ID NO: 929605 - RNA, 20 nt, Human
caggaaggguacucgugagc

SEQ ID NO: 929606 - RNA, 22 nt, Human
cauacagaaaauacagaaaaaa

SEQ ID NO: 929607 - RNA, 23 nt, Human
caugaacauaacagaacaucacg

SEQ ID NO: 929608 - RNA, 23 nt, Human
ccaagcaacaccaagucccuaga

SEQ ID NO: 929609 - RNA, 21 nt, Human
ccagaaacaggaacaccacac

SEQ ID NO: 929610 - RNA, 20 nt, Human
ccagacacacauggauacau

SEQ ID NO: 929611 - RNA, 24 nt, Human
ccagccaaggucagacgacccuaa

SEQ ID NO: 929612 - RNA, 20 nt, Human
ccucuuggucuucugauugc

SEQ ID NO: 929613 - RNA, 20 nt, Human
ccugccuccacacuguuucu

SEQ ID NO: 929614 - RNA, 28 nt, Human
cuuucuauucaugauauuggcaguuuca

SEQ ID NO: 929615 - RNA, 27 nt, Human
gagcaucucacgguuaagucagaaaug

SEQ ID NO: 929616 - RNA, 18 nt, Human
gcuucccagacacacaug

SEQ ID NO: 929617 - RNA, 20 nt, Human
ggaucguuuuaaaaacugug

SEQ ID NO: 929618 - RNA, 19 nt, Human
guaaaacaaaacaaaacuc

SEQ ID NO: 929619 - RNA, 19 nt, Human
uaaaaaaaaggaggagagg

SEQ ID NO: 929620 - RNA, 19 nt, Human
uaaaacaaaacaaaacuca

SEQ ID NO: 929621 - RNA, 22 nt, Human
uaaaacaaaacaaaacucagaa

SEQ ID NO: 929622 - RNA, 19 nt, Human
uaaauuagaucacagugcu

SEQ ID NO: 929623 - RNA, 25 nt, Human
uaauagguucaccauaucgaagucu

SEQ ID NO: 929624 - RNA, 27 nt, Human
uacaaaggaaaaaaagacaccauuaca

SEQ ID NO: 929625 - RNA, 24 nt, Human
uacagaaaaaaaauuggcuuuuga

SEQ ID NO: 929626 - RNA, 21 nt, Human
uacgaagaaugcaaaaugcag

SEQ ID NO: 929627 - RNA, 19 nt, Human
uagugagugugaaugacac

SEQ ID NO: 929628 - RNA, 22 nt, Human
uauaguaguauaaauaauaaaa

SEQ ID NO: 929629 - RNA, 19 nt, Human
ucaacauacauacucaaga

SEQ ID NO: 929630 - RNA, 22 nt, Human
ucaaugcuaacaaaacaacagg

SEQ ID NO: 929631 - RNA, 23 nt, Human
ucagaaguacaacagcaaggugc

SEQ ID NO: 929632 - RNA, 25 nt, Human
ucagaaguacaacagcaaggugcag

SEQ ID NO: 929633 - RNA, 23 nt, Human
ucaggccacagucaugaaaggau

SEQ ID NO: 929634 - RNA, 20 nt, Human
uccagaaacaggaacaccac

SEQ ID NO: 929635 - RNA, 22 nt, Human
ucguaaauuaauuuggccgugu

SEQ ID NO: 929636 - RNA, 22 nt, Human
ucuuucuccuuuaugguucucc

SEQ ID NO: 929637 - RNA, 23 nt, Human
ucuuucuccuuuaugguucuccc

SEQ ID NO: 929638 - RNA, 19 nt, Human
ugaaauacaguggaaaaac

SEQ ID NO: 929639 - RNA, 19 nt, Human
ugagagugugcuaaaucuc

SEQ ID NO: 929640 - RNA, 22 nt, Human
uggaagaacugcaaggucacac

SEQ ID NO: 929641 - RNA, 23 nt, Human
uggaauaucaauuauuuugcaaa

SEQ ID NO: 929642 - RNA, 18 nt, Human
uggaucguuuuaaaaacu

SEQ ID NO: 929643 - RNA, 21 nt, Human
ugguaggucuggggaaaagug

SEQ ID NO: 929644 - RNA, 19 nt, Human
uguuucuuuagguuuacau

SEQ ID NO: 929645 - RNA, 22 nt, Human
uucggcugaucgcgccugccuc

SEQ ID NO: 929646 - RNA, 23 nt, Human
uucuuuagguuuacaugaacaua

SEQ ID NO: 929647 - RNA, 25 nt, Human
uuuaaaaacuguguuuuccuuccuu

SEQ ID NO: 929648 - RNA, 22 nt, Human
uuuuccuuccuuaauuuuuggu

SEQ ID NO: 929649 - RNA, 18 nt, Human
uuuuuuuuuuuuuuuuug

SEQ ID NO: 929650 - RNA, 22 nt, Human
aaaaaacugccauacaagccaa

SEQ ID NO: 929651 - RNA, 21 nt, Human
aaaacaaccaagauucaggug

SEQ ID NO: 929652 - RNA, 24 nt, Human
aaagaagcacaaaucacugccugu

SEQ ID NO: 929653 - RNA, 21 nt, Human
aaagguccaagccccaaccaa

SEQ ID NO: 929654 - RNA, 19 nt, Human
aagcaggaaauauauaagg

SEQ ID NO: 929655 - RNA, 19 nt, Human
aagcaggaaauauauaagg

SEQ ID NO: 929656 - RNA, 19 nt, Human
aagguacucauuacccaaa

SEQ ID NO: 929657 - RNA, 22 nt, Human
aagguacucauuacccaaaugu

SEQ ID NO: 929658 - RNA, 24 nt, Human
aauaguaaaaacaaccaagauuca

SEQ ID NO: 929659 - RNA, 24 nt, Human
acaaagcagaauuugucaagccuu

SEQ ID NO: 929660 - RNA, 21 nt, Human
acucauuacccaaauguucag

SEQ ID NO: 929661 - RNA, 22 nt, Human
acucauuacccaaauguucaga

SEQ ID NO: 929662 - RNA, 18 nt, Human
agacaagcaggaaauaua

SEQ ID NO: 929663 - RNA, 23 nt, Human
agagucccaguuggagcacccag

SEQ ID NO: 929664 - RNA, 20 nt, Human
agauaccacaaaaggagcgg

SEQ ID NO: 929665 - RNA, 21 nt, Human
agccaauucccuaggcugaag

SEQ ID NO: 929666 - RNA, 22 nt, Human
caaagaagcacaaaucacugcc

SEQ ID NO: 929667 - RNA, 20 nt, Human
caaagguccaagccccaacc

SEQ ID NO: 929668 - RNA, 18 nt, Human
caccugacaaagcagaau

SEQ ID NO: 929669 - RNA, 22 nt, Human
cacugugcucaguuuaucuucc

SEQ ID NO: 929670 - RNA, 25 nt, Human
cagcuuuggcugaucaggacaacuu

SEQ ID NO: 929671 - RNA, 24 nt, Human
caggaaauauauaaggaacuccau

SEQ ID NO: 929672 - RNA, 21 nt, Human
caggacggacaagagucagaa

SEQ ID NO: 929673 - RNA, 21 nt, Human
caggcaaugacacaccauucc

SEQ ID NO: 929674 - RNA, 21 nt, Human
ccaaaggcauacaagacaagc

SEQ ID NO: 929675 - RNA, 18 nt, Human
cccuaggcugaaggcaga

SEQ ID NO: 929676 - RNA, 22 nt, Human
ccgaugauaaaaaccaaagaag

SEQ ID NO: 929677 - RNA, 24 nt, Human
cgaugauaaaaaccaaagaagcac

SEQ ID NO: 929678 - RNA, 19 nt, Human
cuagauccaaaggcauaca

SEQ ID NO: 929679 - RNA, 18 nt, Human
cucaaccucuccuuauuu

SEQ ID NO: 929680 - RNA, 23 nt, Human
cucauuacccaaauguucagacu

SEQ ID NO: 929681 - RNA, 23 nt, Human
cugaaccauauuuuaugacaccu

SEQ ID NO: 929682 - RNA, 22 nt, Human
cugacaaagcagaauuugucaa

SEQ ID NO: 929683 - RNA, 18 nt, Human
cuuggcaaaauauuucua

SEQ ID NO: 929684 - RNA, 20 nt, Human
gaucaggacaacuuaaaaga

SEQ ID NO: 929685 - RNA, 26 nt, Human
gccccaaccaaggggauucuucgauc

SEQ ID NO: 929686 - RNA, 20 nt, Human
gcggaaaaaacugccauaca

SEQ ID NO: 929687 - RNA, 24 nt, Human
uaaaacaaagacuccaucauaagc

SEQ ID NO: 929688 - RNA, 24 nt, Human
uaauaguaaaaacaaccaagauuc

SEQ ID NO: 929689 - RNA, 18 nt, Human
uacaagacaagcaggaaa

SEQ ID NO: 929690 - RNA, 23 nt, Human
uacuagauccaaaggcauacaag

SEQ ID NO: 929691 - RNA, 26 nt, Human
uaggacaagguacucauuacccaaau

SEQ ID NO: 929692 - RNA, 21 nt, Human
uaguaacuccauuucauaaag

SEQ ID NO: 929693 - RNA, 22 nt, Human
uauaaggaacuccauuauggca

SEQ ID NO: 929694 - RNA, 25 nt, Human
uaucuuacagauaaugugacucuug

SEQ ID NO: 929695 - RNA, 21 nt, Human
uaugacaccugacaaagcaga

SEQ ID NO: 929696 - RNA, 22 nt, Human
ucaaccucuccuuauuuccuua

SEQ ID NO: 929697 - RNA, 24 nt, Human
ucagaagugguaauacagggaaug

SEQ ID NO: 929698 - RNA, 21 nt, Human
uccaagccccaaccaagggga

SEQ ID NO: 929699 - RNA, 22 nt, Human
ucccuaggcugaaggcagaaau

SEQ ID NO: 929700 - RNA, 21 nt, Human
ucugaaccauauuuuaugaca

SEQ ID NO: 929701 - RNA, 23 nt, Human
ucugaagagucuuagcguuugug

SEQ ID NO: 929702 - RNA, 28 nt, Human
ucuugugauguuuuccuuuggucacgga

SEQ ID NO: 929703 - RNA, 23 nt, Human
ugacacuacagaugcguucugaa

SEQ ID NO: 929704 - RNA, 26 nt, Human
ugacacuacagaugcguucugaacca

SEQ ID NO: 929705 - RNA, 27 nt, Human
ugacacuacagaugcguucugaaccag

SEQ ID NO: 929706 - RNA, 23 nt, Human
ugauuuuacaaugugugguuuug

SEQ ID NO: 929707 - RNA, 23 nt, Human
ugcucaguuuaucuuccuaggac

SEQ ID NO: 929708 - RNA, 19 nt, Human
uggcaaagguccaagcccc

SEQ ID NO: 929709 - RNA, 26 nt, Human
uggcaaagguccaagccccaaccaag

SEQ ID NO: 929710 - RNA, 20 nt, Human
ugugauguuuuccuuuggcc

SEQ ID NO: 929711 - RNA, 23 nt, Human
uucaggacggacaagagucagaa

SEQ ID NO: 929712 - RNA, 21 nt, Human
uucucaaccucuccuuauuuc

SEQ ID NO: 929713 - RNA, 22 nt, Human
uuuaucuuccuaggacaaggua

SEQ ID NO: 929714 - RNA, 22 nt, Human
uuucugcuuugaguuuuaagag

SEQ ID NO: 929715 - RNA, 19 nt, Human
aaaggagaaaucacaugag

SEQ ID NO: 929716 - RNA, 23 nt, Human
aacuccgccccuccaggcauuca

SEQ ID NO: 929717 - RNA, 19 nt, Human
aggaaucacuccuaggacc

SEQ ID NO: 929718 - RNA, 22 nt, Human
agguaaucggaaggaaauagaa

SEQ ID NO: 929719 - RNA, 20 nt, Human
caaaguaguuauguaucagc

SEQ ID NO: 929720 - RNA, 18 nt, Human
cacaggagcaccauuuga

SEQ ID NO: 929721 - RNA, 21 nt, Human
cacugagcggagucuaguccu

SEQ ID NO: 929722 - RNA, 21 nt, Human
cagcagaugggccacccuucu

SEQ ID NO: 929723 - RNA, 18 nt, Human
caggcauucacucgcacc

SEQ ID NO: 929724 - RNA, 23 nt, Human
cauuggaggaaucacuccuagga

SEQ ID NO: 929725 - RNA, 22 nt, Human
ccagaagacggagguaucuagg

SEQ ID NO: 929726 - RNA, 24 nt, Human
cccuucuaauucugcaguagcuug

SEQ ID NO: 929727 - RNA, 21 nt, Human
ccucugcauagacucugcugu

SEQ ID NO: 929728 - RNA, 22 nt, Human
cggaaggaaauagaaaccuauc

SEQ ID NO: 929729 - RNA, 24 nt, Human
cuacuggucuuuuugggguuuucc

SEQ ID NO: 929730 - RNA, 24 nt, Human
cuccuaggaccuuccugauucguc

SEQ ID NO: 929731 - RNA, 25 nt, Human
gaaaaagaaaacacaauagcuguua

SEQ ID NO: 929732 - RNA, 22 nt, Human
gcacugagcggagucuaguccu

SEQ ID NO: 929733 - RNA, 18 nt, Human
gcagugaaaggcacccgg

SEQ ID NO: 929734 - RNA, 20 nt, Human
gugaaaaagaaaacacaaua

SEQ ID NO: 929735 - RNA, 20 nt, Human
guuuuuuuuuuuuuguaggu

SEQ ID NO: 929736 - RNA, 21 nt, Human
uacccagcagaugggccaccc

SEQ ID NO: 929737 - RNA, 23 nt, Human
ucaacauuacauuccuagccuaa

SEQ ID NO: 929738 - RNA, 19 nt, Human
ucgcaccccaggcauuugc

SEQ ID NO: 929739 - RNA, 21 nt, Human
ucugaagugugaaaaagaaaa

SEQ ID NO: 929740 - RNA, 30 nt, Human
ugaaaggcacccggcgaagucugcgaaagg

SEQ ID NO: 929741 - RNA, 21 nt, Human
ugagacuacaaauacaagaca

SEQ ID NO: 929742 - RNA, 24 nt, Human
ugauacauuugcuaaagcuuaaca

SEQ ID NO: 929743 - RNA, 20 nt, Human
uggaggcagccacugugcua

SEQ ID NO: 929744 - RNA, 19 nt, Human
uguagguuuccccuguguu

SEQ ID NO: 929745 - RNA, 27 nt, Human
uuauauaauuauauauacauuugggcu

SEQ ID NO: 929746 - RNA, 19 nt, Human
uucagauuccuuccuuguc

SEQ ID NO: 929747 - RNA, 22 nt, Human
uuugagacuacaaauacaagac

SEQ ID NO: 929748 - RNA, 23 nt, Human
uuugcaggcccucugcauagacu

SEQ ID NO: 929749 - RNA, 24 nt, Human
uuuugagacuacaaauacaagaca

SEQ ID NO: 929750 - RNA, 21 nt, Human
aaaaaggaaacuaaaguuaga

SEQ ID NO: 929751 - RNA, 27 nt, Human
aaaaggaaacuaaaguuagagacagaa

SEQ ID NO: 929752 - RNA, 20 nt, Human
aaaauuaacaaggaauuuaa

SEQ ID NO: 929753 - RNA, 18 nt, Human
aacuaaaguuagagacag

SEQ ID NO: 929754 - RNA, 27 nt, Human
aacuucuaauucaacauauucugacac

SEQ ID NO: 929755 - RNA, 22 nt, Human
aauauuuacaccccauaucuaa

SEQ ID NO: 929756 - RNA, 19 nt, Human
aaucugcagucauguccuu

SEQ ID NO: 929757 - RNA, 21 nt, Human
accccuuucaccacugugucc

SEQ ID NO: 929758 - RNA, 25 nt, Human
acgguaaugaaagugaaauccaaga

SEQ ID NO: 929759 - RNA, 19 nt, Human
acuaaguaaagauaagaaa

SEQ ID NO: 929760 - RNA, 21 nt, Human
aggaguagcugucauuugaua

SEQ ID NO: 929761 - RNA, 19 nt, Human
aguggcaucugggagcaga

SEQ ID NO: 929762 - RNA, 24 nt, Human
cauaacucuaaacagcaaucugca

SEQ ID NO: 929763 - RNA, 18 nt, Human
ccccuccccaucuuccca

SEQ ID NO: 929764 - RNA, 22 nt, Human
cccuccccaucuucccacuuaa

SEQ ID NO: 929765 - RNA, 20 nt, Human
cucuccucaagcccuuaaaa

SEQ ID NO: 929766 - RNA, 21 nt, Human
cuuacauguuuguccucccca

SEQ ID NO: 929767 - RNA, 21 nt, Human
cuuucaccacuguguccuuuu

SEQ ID NO: 929768 - RNA, 23 nt, Human
gagcuuuacaaagcuacucuagu

SEQ ID NO: 929769 - RNA, 18 nt, Human
gggagcagaaaaauccaa

SEQ ID NO: 929770 - RNA, 24 nt, Human
gucaccccuuucaccacugugucc

SEQ ID NO: 929771 - RNA, 24 nt, Human
gucagggaagcugaaaaaggaaac

SEQ ID NO: 929772 - RNA, 20 nt, Human
uaaacagcaaucugcaguca

SEQ ID NO: 929773 - RNA, 22 nt, Human
uaacaaggaauuuaacauacaa

SEQ ID NO: 929774 - RNA, 21 nt, Human
uaacauacaaaugagggacca

SEQ ID NO: 929775 - RNA, 22 nt, Human
uaagcaaaaggguucaucucuc

SEQ ID NO: 929776 - RNA, 23 nt, Human
uaaguucuggcucuaagcaaaag

SEQ ID NO: 929777 - RNA, 23 nt, Human
uauaaaguuucuccuaaaaguca

SEQ ID NO: 929778 - RNA, 19 nt, Human
uaucauuuuucucucauau

SEQ ID NO: 929779 - RNA, 23 nt, Human
uccauauuucuucuuccccuuuu

SEQ ID NO: 929780 - RNA, 24 nt, Human
uccccacaucuagcccagugauug

SEQ ID NO: 929781 - RNA, 19 nt, Human
uccccaucuucccacuuaa

SEQ ID NO: 929782 - RNA, 22 nt, Human
uccuaaaagucaccccuuucac

SEQ ID NO: 929783 - RNA, 23 nt, Human
uccuaaaagucaccccuuucacc

SEQ ID NO: 929784 - RNA, 21 nt, Human
uccucaagcccuuaaaaucac

SEQ ID NO: 929785 - RNA, 19 nt, Human
uccuguugacuucuguuca

SEQ ID NO: 929786 - RNA, 20 nt, Human
ucucuccucaagcccuuaaa

SEQ ID NO: 929787 - RNA, 19 nt, Human
ucugacacuaaacacaaau

SEQ ID NO: 929788 - RNA, 19 nt, Human
ugaaaaaggaaacuaaagu

SEQ ID NO: 929789 - RNA, 26 nt, Human
ugaaagugaaauccaagaucaacaau

SEQ ID NO: 929790 - RNA, 21 nt, Human
ugagggaccaggaguagcugu

SEQ ID NO: 929791 - RNA, 27 nt, Human
ugcaaggaacauuauugcugccuuuga

SEQ ID NO: 929792 - RNA, 24 nt, Human
ugcagaauuaguaacuucuguuaa

SEQ ID NO: 929793 - RNA, 24 nt, Human
uguacagaccguuucauauguaua

SEQ ID NO: 929794 - RNA, 23 nt, Human
ugucaucaucucuaccaccacuc

SEQ ID NO: 929795 - RNA, 22 nt, Human
uuacauguuuguccuccccaca

SEQ ID NO: 929796 - RNA, 24 nt, Human
uuagcacacuuccccuccccaucu

SEQ ID NO: 929797 - RNA, 25 nt, Human
uugaucccaucucuuaauauuuccu

SEQ ID NO: 929798 - RNA, 30 nt, Human
uugcaaggaacauuauugcugccuuugauu

SEQ ID NO: 929799 - RNA, 21 nt, Human
uuuuacacacuuuguacaagu

SEQ ID NO: 929800 - RNA, 24 nt, Human
uuuuaucacauauccaauacuuaa

SEQ ID NO: 929801 - RNA, 19 nt, Human
aaaaacaguccccuacuaa

SEQ ID NO: 929802 - RNA, 29 nt, Human
aaaagcaaacagaccaauugucaaccuag

SEQ ID NO: 929803 - RNA, 22 nt, Human
aagcaaacagaccaauugucaa

SEQ ID NO: 929804 - RNA, 18 nt, Human
aagccagggccauaagca

SEQ ID NO: 929805 - RNA, 22 nt, Human
aaugcugggauuacaggcauga

SEQ ID NO: 929806 - RNA, 19 nt, Human
agccaccacgcucacccug

SEQ ID NO: 929807 - RNA, 21 nt, Human
aggacuuuguaagcuugugcu

SEQ ID NO: 929808 - RNA, 22 nt, Human
aguaacuaagggugaagagaga

SEQ ID NO: 929809 - RNA, 19 nt, Human
auagaacagauauuaagac

SEQ ID NO: 929810 - RNA, 24 nt, Human
caaaagcaaacagaccaauuguca

SEQ ID NO: 929811 - RNA, 22 nt, Human
caagugagccuccugccucagc

SEQ ID NO: 929812 - RNA, 22 nt, Human
caauugucaaccuaauuauuuu

SEQ ID NO: 929813 - RNA, 19 nt, Human
cacacuccuccgcccgccc

SEQ ID NO: 929814 - RNA, 22 nt, Human
cacugaacaucugccuuccucc

SEQ ID NO: 929815 - RNA, 23 nt, Human
cacuggacuuggccucauacacc

SEQ ID NO: 929816 - RNA, 24 nt, Human
cagaaugcugggauuacaggcaug

SEQ ID NO: 929817 - RNA, 20 nt, Human
cagggcagaguuucuaagga

SEQ ID NO: 929818 - RNA, 23 nt, Human
ccagaaugcugggauuacaggca

SEQ ID NO: 929819 - RNA, 24 nt, Human
ccagaaugcugggauuacaggcau

SEQ ID NO: 929820 - RNA, 24 nt, Human
cccagaaugcugggauuacaggca

SEQ ID NO: 929821 - RNA, 22 nt, Human
ccuccugccucagccucccaga

SEQ ID NO: 929822 - RNA, 24 nt, Human
ccugccucagccucccagaaugcu

SEQ ID NO: 929823 - RNA, 18 nt, Human
ccugggcucaagugagcc

SEQ ID NO: 929824 - RNA, 20 nt, Human
ccugggcucaagugagccuc

SEQ ID NO: 929825 - RNA, 21 nt, Human
ccugggcucaagugagccucc

SEQ ID NO: 929826 - RNA, 23 nt, Human
ccugggcucaagugagccuccug

SEQ ID NO: 929827 - RNA, 18 nt, Human
ccuuuuccauuugcugac

SEQ ID NO: 929828 - RNA, 22 nt, Human
cuaaccuuagaaagccagcaug

SEQ ID NO: 929829 - RNA, 19 nt, Human
cugaggacuccaacacaaa

SEQ ID NO: 929830 - RNA, 24 nt, Human
cugccucagccucccagaaugcug

SEQ ID NO: 929831 - RNA, 19 nt, Human
gaacagauauuaagacucu

SEQ ID NO: 929832 - RNA, 21 nt, Human
gacuuuguaagcuugugcuug

SEQ ID NO: 929833 - RNA, 22 nt, Human
gagugguccugaggacuccaac

SEQ ID NO: 929834 - RNA, 18 nt, Human
gauuacaggcaugagcca

SEQ ID NO: 929835 - RNA, 21 nt, Human
gauuacaggcaugagccacca

SEQ ID NO: 929836 - RNA, 22 nt, Human
gauuacaggcaugagccaccac

SEQ ID NO: 929837 - RNA, 20 nt, Human
gcaaacagaccaauugucaa

SEQ ID NO: 929838 - RNA, 19 nt, Human
gcccuaaggcccgucacac

SEQ ID NO: 929839 - RNA, 27 nt, Human
gccuccugccucagccucccagaaugc

SEQ ID NO: 929840 - RNA, 18 nt, Human
gcuuguuuuccacuggac

SEQ ID NO: 929841 - RNA, 19 nt, Human
ggauuacaggcaugagcca

SEQ ID NO: 929842 - RNA, 20 nt, Human
gucuugugaagguccuugug

SEQ ID NO: 929843 - RNA, 24 nt, Human
gugagccuccugccucagccuccc

SEQ ID NO: 929844 - RNA, 19 nt, Human
gugcuuguuuuccacugga

SEQ ID NO: 929845 - RNA, 19 nt, Human
uaaaaacaguccccuacua

SEQ ID NO: 929846 - RNA, 21 nt, Human
uaaauacauguaugacaaaag

SEQ ID NO: 929847 - RNA, 22 nt, Human
uaacaucaaauggaaaagauau

SEQ ID NO: 929848 - RNA, 22 nt, Human
uacacugaacaucugccuuccu

SEQ ID NO: 929849 - RNA, 19 nt, Human
uacaggcaugagccaccac

SEQ ID NO: 929850 - RNA, 18 nt, Human
uagaaagccagcaugcuu

SEQ ID NO: 929851 - RNA, 24 nt, Human
ucccagaaugcugggauuacaggc

SEQ ID NO: 929852 - RNA, 21 nt, Human
uccugggcucaagugagccuc

SEQ ID NO: 929853 - RNA, 22 nt, Human
uccugggcucaagugagccucc

SEQ ID NO: 929854 - RNA, 22 nt, Human
uccugggcucaagugagccucc

SEQ ID NO: 929855 - RNA, 24 nt, Human
uccugggcucaagugagccuccug

SEQ ID NO: 929856 - RNA, 25 nt, Human
uccuuuugcugaaauaagccagggc

SEQ ID NO: 929857 - RNA, 22 nt, Human
ucuacacugaacaucugccuuc

SEQ ID NO: 929858 - RNA, 21 nt, Human
ucucaaacuccugggcucaag

SEQ ID NO: 929859 - RNA, 20 nt, Human
ucuggaauuuugguacauac

SEQ ID NO: 929860 - RNA, 23 nt, Human
ugaaacaauauggucuacacuga

SEQ ID NO: 929861 - RNA, 19 nt, Human
ugacaaaagcaaacagacc

SEQ ID NO: 929862 - RNA, 24 nt, Human
ugacaaaagcaaacagaccaauug

SEQ ID NO: 929863 - RNA, 25 nt, Human
ugacaauacuaaccuuagaaagcca

SEQ ID NO: 929864 - RNA, 24 nt, Human
ugccucagccucccagaaugcugg

SEQ ID NO: 929865 - RNA, 20 nt, Human
ugccugaauuaguuaugaaa

SEQ ID NO: 929866 - RNA, 18 nt, Human
ugggauuacaggcaugag

SEQ ID NO: 929867 - RNA, 19 nt, Human
ugggauuacaggcaugagc

SEQ ID NO: 929868 - RNA, 22 nt, Human
ugggauuacaggcaugagccac

SEQ ID NO: 929869 - RNA, 23 nt, Human
ugggauuacaggcaugagccacc

SEQ ID NO: 929870 - RNA, 24 nt, Human
ugggauuacaggcaugagccacca

SEQ ID NO: 929871 - RNA, 24 nt, Human
ugggauuacaggcaugagccacca

SEQ ID NO: 929872 - RNA, 21 nt, Human
ugucuugugaagguccuugug

SEQ ID NO: 929873 - RNA, 20 nt, Human
uuaaaaacaguccccuacua

SEQ ID NO: 929874 - RNA, 23 nt, Human
uuaacaucaaauggaaaagauau

SEQ ID NO: 929875 - RNA, 21 nt, Human
uuacuaccuuaaaaacagucc

SEQ ID NO: 929876 - RNA, 24 nt, Human
uuacuaccuuaaaaacaguccccu

SEQ ID NO: 929877 - RNA, 23 nt, Human
uugaaguaugaagucauauccac

SEQ ID NO: 929878 - RNA, 23 nt, Human
uugauuucucgaggguucccauu

SEQ ID NO: 929879 - RNA, 25 nt, Human
aaauugugaucugaacuuggaguga

SEQ ID NO: 929880 - RNA, 24 nt, Human
aaugcggaauuguaaauugugauc

SEQ ID NO: 929881 - RNA, 19 nt, Human
acaauuacaaaaugcggaa

SEQ ID NO: 929882 - RNA, 22 nt, Human
agaaggcucuuggauuuaaucc

SEQ ID NO: 929883 - RNA, 24 nt, Human
agaaugagcuugaggucuuugggg

SEQ ID NO: 929884 - RNA, 19 nt, Human
aucugaacuuggagugaga

SEQ ID NO: 929885 - RNA, 24 nt, Human
caaaaugcggaauuguaaauugug

SEQ ID NO: 929886 - RNA, 21 nt, Human
cagccccgucucccaacccaa

SEQ ID NO: 929887 - RNA, 19 nt, Human
ccugggcagaaugagcuug

SEQ ID NO: 929888 - RNA, 27 nt, Human
ccuuccauuauuguaugcuuccugcau

SEQ ID NO: 929889 - RNA, 20 nt, Human
gcucuuggauuuaauccugg

SEQ ID NO: 929890 - RNA, 19 nt, Human
gcuuccugcaugccagaaa

SEQ ID NO: 929891 - RNA, 24 nt, Human
gggcagaaugagcuugaggucuuu

SEQ ID NO: 929892 - RNA, 21 nt, Human
ucaggguuaaaaagaugccuc

SEQ ID NO: 929893 - RNA, 23 nt, Human
ucuucuuucuuucccuuccauua

SEQ ID NO: 929894 - RNA, 20 nt, Human
ugccucagagccuagaugac

SEQ ID NO: 929895 - RNA, 20 nt, Human
ugcggaauuguaaauuguga

SEQ ID NO: 929896 - RNA, 21 nt, Human
ugggcagaaugagcuugaggu

SEQ ID NO: 929897 - RNA, 21 nt, Human
uucuuucuuucccuuccauua

SEQ ID NO: 929898 - RNA, 20 nt, Human
uuuuuuuuuuuuuuugucuu

SEQ ID NO: 929899 - RNA, 18 nt, Human
aaacuaaaaauuuagacu

SEQ ID NO: 929900 - RNA, 23 nt, Human
aaaucgguuucuugaugucuuuu

SEQ ID NO: 929901 - RNA, 21 nt, Human
aagcaaaucgguuucuugaug

SEQ ID NO: 929902 - RNA, 18 nt, Human
aagguguguaccaaguga

SEQ ID NO: 929903 - RNA, 24 nt, Human
agccauggagaacucugaaaggaa

SEQ ID NO: 929904 - RNA, 21 nt, Human
aggguuugcccucuucauguc

SEQ ID NO: 929905 - RNA, 18 nt, Human
agucacauacaugauguc

SEQ ID NO: 929906 - RNA, 18 nt, Human
cagagugcucuagaauaa

SEQ ID NO: 929907 - RNA, 24 nt, Human
caugcuacucuuaaccucccaaaa

SEQ ID NO: 929908 - RNA, 20 nt, Human
ccaaauaguuauauccaaaa

SEQ ID NO: 929909 - RNA, 24 nt, Human
cccaaaaagcaguaucuaagucac

SEQ ID NO: 929910 - RNA, 20 nt, Human
cccaaguuuccuucuccacu

SEQ ID NO: 929911 - RNA, 19 nt, Human
ccccccaaguuuccuucuc

SEQ ID NO: 929912 - RNA, 26 nt, Human
cccccuauuaaaauagaaacagggau

SEQ ID NO: 929913 - RNA, 20 nt, Human
ccccuaccuuguccccccua

SEQ ID NO: 929914 - RNA, 21 nt, Human
cccucuccccuaccuuguccc

SEQ ID NO: 929915 - RNA, 27 nt, Human
cucuccccuaccuuguccccccuauua

SEQ ID NO: 929916 - RNA, 19 nt, Human
cuuuugguucuccuugccu

SEQ ID NO: 929917 - RNA, 23 nt, Human
gcaagcccuucucccaucagucc

SEQ ID NO: 929918 - RNA, 18 nt, Human
ggagaaacaccuugaucu

SEQ ID NO: 929919 - RNA, 23 nt, Human
ggagccuuucuuacaaccuugau

SEQ ID NO: 929920 - RNA, 19 nt, Human
ggauucaugagguggccag

SEQ ID NO: 929921 - RNA, 23 nt, Human
uauauccaaaacuguuuuucccu

SEQ ID NO: 929922 - RNA, 20 nt, Human
uaugcgugcugcagcagugg

SEQ ID NO: 929923 - RNA, 23 nt, Human
ucacauacaugaugucuugggca

SEQ ID NO: 929924 - RNA, 22 nt, Human
ugagagaauaaaugguaaugga

SEQ ID NO: 929925 - RNA, 24 nt, Human
ugagagaauaaaugguaauggaga

SEQ ID NO: 929926 - RNA, 22 nt, Human
ugagguggccagaccaaugugu

SEQ ID NO: 929927 - RNA, 21 nt, Human
ugggcauuuucucagccaugg

SEQ ID NO: 929928 - RNA, 24 nt, Human
uguuguuguuuuuuuaagcuuccc

SEQ ID NO: 929929 - RNA, 21 nt, Human
uguuuuucccucuccccuacc

SEQ ID NO: 929930 - RNA, 22 nt, Human
uuaaaauagaaacagggauuga

SEQ ID NO: 929931 - RNA, 21 nt, Human
uucuccuugccugcuccugau

SEQ ID NO: 929932 - RNA, 20 nt, Human
uugggcauuuucucagccau

SEQ ID NO: 929933 - RNA, 19 nt, Human
uuguuguuguuguuuuuuu

SEQ ID NO: 929934 - RNA, 23 nt, Human
uuguuuuguuguuguuguuuuuu

SEQ ID NO: 929935 - RNA, 24 nt, Human
uuucucagccauggagaacucuga

SEQ ID NO: 929936 - RNA, 24 nt, Human
aaagugcugggauuacaggcauga

SEQ ID NO: 929937 - RNA, 23 nt, Human
aagauaaaagcuguacccucuac

SEQ ID NO: 929938 - RNA, 19 nt, Human
aagugcugggauuacaggc

SEQ ID NO: 929939 - RNA, 21 nt, Human
aagugcugggauuacaggcau

SEQ ID NO: 929940 - RNA, 26 nt, Human
aagugcugggauuacaggcaugagcc

SEQ ID NO: 929941 - RNA, 23 nt, Human
acagauccaaguugagugaacac

SEQ ID NO: 929942 - RNA, 23 nt, Human
accucagccucccaaagugcugg

SEQ ID NO: 929943 - RNA, 18 nt, Human
agagaugggguuucucca

SEQ ID NO: 929944 - RNA, 27 nt, Human
agcuguacccucuaccagauguacuga

SEQ ID NO: 929945 - RNA, 20 nt, Human
aggcauguaccaccauaccc

SEQ ID NO: 929946 - RNA, 18 nt, Human
aggcuucugcuggggugg

SEQ ID NO: 929947 - RNA, 22 nt, Human
aguagagaugggguuucuccau

SEQ ID NO: 929948 - RNA, 18 nt, Human
agugcugggauuacaggc

SEQ ID NO: 929949 - RNA, 20 nt, Human
aguuuaucagaaaccugugg

SEQ ID NO: 929950 - RNA, 20 nt, Human
auaaaauagaaauauggcaa

SEQ ID NO: 929951 - RNA, 22 nt, Human
auaugaaauguguuuccuuuau

SEQ ID NO: 929952 - RNA, 23 nt, Human
aucaaugucaacaaauacuucuc

SEQ ID NO: 929953 - RNA, 21 nt, Human
aucaugaccauaaucagcaac

SEQ ID NO: 929954 - RNA, 20 nt, Human
augggguuucuccauuuugg

SEQ ID NO: 929955 - RNA, 24 nt, Human
augggguuucuccauuuuggucag

SEQ ID NO: 929956 - RNA, 24 nt, Human
caaagugcugggauuacaggcaug

SEQ ID NO: 929957 - RNA, 20 nt, Human
caaauacuucucgccauccc

SEQ ID NO: 929958 - RNA, 23 nt, Human
cagaaaccuguggaucaauguca

SEQ ID NO: 929959 - RNA, 18 nt, Human
cagcaucaggacacacuu

SEQ ID NO: 929960 - RNA, 24 nt, Human
caggugauaugcccaccccugaag

SEQ ID NO: 929961 - RNA, 22 nt, Human
caugaccauaaucagcaaccag

SEQ ID NO: 929962 - RNA, 23 nt, Human
ccaaagugcugggauuacaggca

SEQ ID NO: 929963 - RNA, 24 nt, Human
ccaaagugcugggauuacaggcau

SEQ ID NO: 929964 - RNA, 18 nt, Human
ccaccacgcccagccgca

SEQ ID NO: 929965 - RNA, 19 nt, Human
ccauuuuggucaggcuggu

SEQ ID NO: 929966 - RNA, 24 nt, Human
cccaaagugcugggauuacaggca

SEQ ID NO: 929967 - RNA, 22 nt, Human
ccgccaggagcugggccucgug

SEQ ID NO: 929968 - RNA, 23 nt, Human
cgcaaaacccucugaagguaucu

SEQ ID NO: 929969 - RNA, 29 nt, Human
cggcuaguuuuguauuuuuaguagagaug

SEQ ID NO: 929970 - RNA, 24 nt, Human
cuccauuuuggucaggcuggucuu

SEQ ID NO: 929971 - RNA, 21 nt, Human
cucgcuccgccaggagcuggg

SEQ ID NO: 929972 - RNA, 23 nt, Human
cuguacccucuaccagauguacu

SEQ ID NO: 929973 - RNA, 21 nt, Human
cugugguguuuucugaaauuu

SEQ ID NO: 929974 - RNA, 21 nt, Human
cuguuagaucugcuguuccug

SEQ ID NO: 929975 - RNA, 21 nt, Human
gaaaccuguggaucaauguca

SEQ ID NO: 929976 - RNA, 24 nt, Human
gaccucaggugauaugcccaccuc

SEQ ID NO: 929977 - RNA, 18 nt, Human
gagaugggguuucuccau

SEQ ID NO: 929978 - RNA, 24 nt, Human
gagaugggguuucuccauuuuggu

SEQ ID NO: 929979 - RNA, 18 nt, Human
gauuacaggcaugagcca

SEQ ID NO: 929980 - RNA, 21 nt, Human
gauuacaggcaugagccacca

SEQ ID NO: 929981 - RNA, 22 nt, Human
gauuacaggcaugagccaccac

SEQ ID NO: 929982 - RNA, 24 nt, Human
gauuacaggcauguaccaccauac

SEQ ID NO: 929983 - RNA, 18 nt, Human
gcugggauuacaggcaug

SEQ ID NO: 929984 - RNA, 19 nt, Human
ggauuacaggcaugagcca

SEQ ID NO: 929985 - RNA, 26 nt, Human
ggcuaguuuuguauuuuuaguagaga

SEQ ID NO: 929986 - RNA, 24 nt, Human
ggugauaugcccaccucagccucc

SEQ ID NO: 929987 - RNA, 22 nt, Human
gucaacaaauacuucucgccau

SEQ ID NO: 929988 - RNA, 24 nt, Human
gugauaugcccaccucagccuccc

SEQ ID NO: 929989 - RNA, 19 nt, Human
uaaaauguccaagcugaaa

SEQ ID NO: 929990 - RNA, 24 nt, Human
uacaggcaugagccaccacgccca

SEQ ID NO: 929991 - RNA, 23 nt, Human
uacaggcauguaccaccauaccc

SEQ ID NO: 929992 - RNA, 27 nt, Human
uaccugcaguauaugaaauguguuucc

SEQ ID NO: 929993 - RNA, 18 nt, Human
uaguagagaugggguuuc

SEQ ID NO: 929994 - RNA, 19 nt, Human
uaguagagaugggguuucu

SEQ ID NO: 929995 - RNA, 26 nt, Human
uaguagagaugggguuucuccauuuu

SEQ ID NO: 929996 - RNA, 23 nt, Human
uauaugaaauguguuuccuuuau

SEQ ID NO: 929997 - RNA, 20 nt, Human
ucaacaugaucccuuguuuc

SEQ ID NO: 929998 - RNA, 18 nt, Human
ucagccucccaaagugcu

SEQ ID NO: 929999 - RNA, 24 nt, Human
ucccaaagugcugggauuacaggc

SEQ ID NO: 930000 - RNA, 24 nt, Human
ucgaugauaacaccagcaucagga

SEQ ID NO: 930001 - RNA, 25 nt, Human
ucgcaaaacccucugaagguaucug

SEQ ID NO: 930002 - RNA, 18 nt, Human
ucugcuguuccuggggca

SEQ ID NO: 930003 - RNA, 21 nt, Human
ugaaaagauaaaauacuuuga

SEQ ID NO: 930004 - RNA, 18 nt, Human
ugaccucaggugauaugc

SEQ ID NO: 930005 - RNA, 26 nt, Human
ugagaaaguuccucgaugauaacacc

SEQ ID NO: 930006 - RNA, 21 nt, Human
ugauaugcccaccucagccuc

SEQ ID NO: 930007 - RNA, 19 nt, Human
ugcacaggaagaacaucaa

SEQ ID NO: 930008 - RNA, 26 nt, Human
ugcacaggaagaacaucaaaaaauuc

SEQ ID NO: 930009 - RNA, 22 nt, Human
ugcaccaaagccagucacaacc

SEQ ID NO: 930010 - RNA, 18 nt, Human
ugggauuacaggcaugag

SEQ ID NO: 930011 - RNA, 19 nt, Human
ugggauuacaggcaugagc

SEQ ID NO: 930012 - RNA, 22 nt, Human
ugggauuacaggcaugagccac

SEQ ID NO: 930013 - RNA, 23 nt, Human
ugggauuacaggcaugagccacc

SEQ ID NO: 930014 - RNA, 24 nt, Human
ugggauuacaggcaugagccacca

SEQ ID NO: 930015 - RNA, 24 nt, Human
ugggauuacaggcaugagccacca

SEQ ID NO: 930016 - RNA, 21 nt, Human
ugggauuacaggcauguacca

SEQ ID NO: 930017 - RNA, 24 nt, Human
ugggauuacaggcauguaccacca

SEQ ID NO: 930018 - RNA, 21 nt, Human
uggucaggcuggucuuuaacu

SEQ ID NO: 930019 - RNA, 19 nt, Human
uggucgcaaaacccucuga

SEQ ID NO: 930020 - RNA, 21 nt, Human
uguauuuuuaguagagauggg

SEQ ID NO: 930021 - RNA, 18 nt, Human
ugugcaagauaaaagcug

SEQ ID NO: 930022 - RNA, 24 nt, Human
uguuuucugaaauuuaugcacagg

SEQ ID NO: 930023 - RNA, 18 nt, Human
uuaguagagaugggguuu

SEQ ID NO: 930024 - RNA, 22 nt, Human
uuaguagagaugggguuucucc

SEQ ID NO: 930025 - RNA, 24 nt, Human
uuaguagagaugggguuucuccau

SEQ ID NO: 930026 - RNA, 24 nt, Human
uuauaugaaauguguuuccuuuau

SEQ ID NO: 930027 - RNA, 22 nt, Human
uugcaccaaagccagucacaac

SEQ ID NO: 930028 - RNA, 23 nt, Human
uuguauuuuuaguagagaugggg

SEQ ID NO: 930029 - RNA, 23 nt, Human
uuuaacugcugaccucagguuga

SEQ ID NO: 930030 - RNA, 23 nt, Human
uuucuugggccgacugaagggua

SEQ ID NO: 930031 - RNA, 23 nt, Human
uuuguuaccugcaguauaugaaa

SEQ ID NO: 930032 - RNA, 19 nt, Human
uuuuguauuuuuaguagag

SEQ ID NO: 930033 - RNA, 20 nt, Human
uuuuguauuuuuaguagaga

SEQ ID NO: 930034 - RNA, 22 nt, Human
uuuuuaguagagaugggguuuc

SEQ ID NO: 930035 - RNA, 18 nt, Human
aaacaauucuaaaccuca

SEQ ID NO: 930036 - RNA, 18 nt, Human
aaacuagcugggagacua

SEQ ID NO: 930037 - RNA, 24 nt, Human
aaagaauaccagagugggaaucca

SEQ ID NO: 930038 - RNA, 21 nt, Human
aaaggcccucugugucucuga

SEQ ID NO: 930039 - RNA, 20 nt, Human
aaaggucauuagggcuaaaa

SEQ ID NO: 930040 - RNA, 20 nt, Human
aacuagagcugucauagaca

SEQ ID NO: 930041 - RNA, 22 nt, Human
aacugccccccacgcccccccg

SEQ ID NO: 930042 - RNA, 19 nt, Human
aaguacaacuagagcuguc

SEQ ID NO: 930043 - RNA, 24 nt, Human
aaugaagaaguccuacaaagagga

SEQ ID NO: 930044 - RNA, 18 nt, Human
aaugauguaaagggaaga

SEQ ID NO: 930045 - RNA, 22 nt, Human
acuccaaggcugggaggcagca

SEQ ID NO: 930046 - RNA, 21 nt, Human
acugccccccacgcccccccg

SEQ ID NO: 930047 - RNA, 20 nt, Human
agccuggacuguugccauuu

SEQ ID NO: 930048 - RNA, 20 nt, Human
aggaauguguagugauucug

SEQ ID NO: 930049 - RNA, 21 nt, Human
aggcaagaaaaugcuuaauuu

SEQ ID NO: 930050 - RNA, 23 nt, Human
aggcagcaggugcugggaacaag

SEQ ID NO: 930051 - RNA, 20 nt, Human
agguauuuagucacaccaag

SEQ ID NO: 930052 - RNA, 21 nt, Human
agguauuuagucacaccaagu

SEQ ID NO: 930053 - RNA, 19 nt, Human
agucauggaagaccucagu

SEQ ID NO: 930054 - RNA, 20 nt, Human
auccuguuuccauuuaugcc

SEQ ID NO: 930055 - RNA, 21 nt, Human
aucugcagccauuugaugaug

SEQ ID NO: 930056 - RNA, 21 nt, Human
augaagcaaaggaggcaagaa

SEQ ID NO: 930057 - RNA, 21 nt, Human
cacccccaagccuacuccuuu

SEQ ID NO: 930058 - RNA, 21 nt, Human
cacgcccccccgccaccuccc

SEQ ID NO: 930059 - RNA, 24 nt, Human
cagaacccaauuccauaggaaucc

SEQ ID NO: 930060 - RNA, 23 nt, Human
cagagugggaauccaguuuugcc

SEQ ID NO: 930061 - RNA, 21 nt, Human
cagucccauccaaaaggucau

SEQ ID NO: 930062 - RNA, 26 nt, Human
caguuuugccucaaacuagcugggag

SEQ ID NO: 930063 - RNA, 18 nt, Human
caugcagguaacugcccc

SEQ ID NO: 930064 - RNA, 23 nt, Human
cauuucuccucauuccuucaggg

SEQ ID NO: 930065 - RNA, 24 nt, Human
cauuucuccucauuccuucaggga

SEQ ID NO: 930066 - RNA, 20 nt, Human
ccacccccaagccuacuccu

SEQ ID NO: 930067 - RNA, 21 nt, Human
ccagagauuuuguguggcugc

SEQ ID NO: 930068 - RNA, 22 nt, Human
ccaugacacagucauuucugau

SEQ ID NO: 930069 - RNA, 18 nt, Human
ccccacccccaagccuac

SEQ ID NO: 930070 - RNA, 22 nt, Human
cccccaagccuacuccuuuagg

SEQ ID NO: 930071 - RNA, 22 nt, Human
cccccacgcccccccgccaccu

SEQ ID NO: 930072 - RNA, 21 nt, Human
cccccaguuccuccugaucua

SEQ ID NO: 930073 - RNA, 18 nt, Human
cccccccgccaccuccca

SEQ ID NO: 930074 - RNA, 21 nt, Human
ccucccauuucuccucauucc

SEQ ID NO: 930075 - RNA, 26 nt, Human
ccuccuugcuuacuggcaauuaggga

SEQ ID NO: 930076 - RNA, 22 nt, Human
cgugguguucuaguccccccca

SEQ ID NO: 930077 - RNA, 23 nt, Human
cucagccacugagcugccucaac

SEQ ID NO: 930078 - RNA, 21 nt, Human
cucccauuucuccucauuccu

SEQ ID NO: 930079 - RNA, 20 nt, Human
cucuccccacccccaagccu

SEQ ID NO: 930080 - RNA, 18 nt, Human
cucucuccccacccccaa

SEQ ID NO: 930081 - RNA, 21 nt, Human
gaagaaguccuacaaagagga

SEQ ID NO: 930082 - RNA, 23 nt, Human
gaaugaagaaguccuacaaagag

SEQ ID NO: 930083 - RNA, 23 nt, Human
gacuggauggucaugaagucccu

SEQ ID NO: 930084 - RNA, 18 nt, Human
gacuggauuuacugagcg

SEQ ID NO: 930085 - RNA, 18 nt, Human
gagccaaggagcuugcaa

SEQ ID NO: 930086 - RNA, 21 nt, Human
gaugacuaugcggacuucuau

SEQ ID NO: 930087 - RNA, 21 nt, Human
gauucuugcucccuccggggg

SEQ ID NO: 930088 - RNA, 19 nt, Human
gcagguaacugccccccac

SEQ ID NO: 930089 - RNA, 22 nt, Human
gcugggaggcagcaggugcugg

SEQ ID NO: 930090 - RNA, 24 nt, Human
ggaaugaagaaguccuacaaagag

SEQ ID NO: 930091 - RNA, 18 nt, Human
guucuagucccccccagu

SEQ ID NO: 930092 - RNA, 21 nt, Human
uaaagcauuuguaccaauggu

SEQ ID NO: 930093 - RNA, 24 nt, Human
uacacagcuuuauauaacaacuag

SEQ ID NO: 930094 - RNA, 24 nt, Human
uaccaugaaagagucuaugcuuca

SEQ ID NO: 930095 - RNA, 26 nt, Human
uaccccuaccucccaguuuagacugg

SEQ ID NO: 930096 - RNA, 25 nt, Human
uacccugauucccagggaggaauga

SEQ ID NO: 930097 - RNA, 18 nt, Human
uacgcagcagagcuaugg

SEQ ID NO: 930098 - RNA, 24 nt, Human
uagaaucaaacaauucuaaaccuc

SEQ ID NO: 930099 - RNA, 24 nt, Human
uaguagaaacgagccuugccuuua

SEQ ID NO: 930100 - RNA, 25 nt, Human
ucaaaaccugcagaagcagguugcc

SEQ ID NO: 930101 - RNA, 21 nt, Human
ucaggacauuauaaaggaggg

SEQ ID NO: 930102 - RNA, 21 nt, Human
ucagugucuuaugaagcugac

SEQ ID NO: 930103 - RNA, 23 nt, Human
uccaaaaggucauuagggcuaaa

SEQ ID NO: 930104 - RNA, 23 nt, Human
uccaaacuccaaggcugggaggc

SEQ ID NO: 930105 - RNA, 24 nt, Human
uccccacccccaagccuacucccc

SEQ ID NO: 930106 - RNA, 23 nt, Human
ucuggugugaguucuggucucuc

SEQ ID NO: 930107 - RNA, 18 nt, Human
ugaagcaaaggaggcaag

SEQ ID NO: 930108 - RNA, 24 nt, Human
ugaagcaaaggaggcaagaaaaug

SEQ ID NO: 930109 - RNA, 24 nt, Human
ugaaugagcaccaugacacaguca

SEQ ID NO: 930110 - RNA, 22 nt, Human
ugacacagucauuucugauccc

SEQ ID NO: 930111 - RNA, 18 nt, Human
ugagguccuaaagaaaac

SEQ ID NO: 930112 - RNA, 20 nt, Human
ugcagaagcagguugccuuu

SEQ ID NO: 930113 - RNA, 22 nt, Human
ugcagaagcagguugccuuuga

SEQ ID NO: 930114 - RNA, 18 nt, Human
ugcuagccauugggugau

SEQ ID NO: 930115 - RNA, 23 nt, Human
ugggaggcagcaggugcugggaa

SEQ ID NO: 930116 - RNA, 21 nt, Human
ugggaguuugcagugaaugag

SEQ ID NO: 930117 - RNA, 18 nt, Human
ugggcaggacuccacagg

SEQ ID NO: 930118 - RNA, 21 nt, Human
ugggcaggacuccacaggagc

SEQ ID NO: 930119 - RNA, 21 nt, Human
uguaaagggaagaaagaauac

SEQ ID NO: 930120 - RNA, 22 nt, Human
ugucuuaugaagcugacacuuc

SEQ ID NO: 930121 - RNA, 19 nt, Human
uuuuuuuuuuuuuugucca

SEQ ID NO: 930122 - RNA, 20 nt, Human
uuuuuuuuuuuuuuugucca

SEQ ID NO: 930123 - RNA, 18 nt, Human
uuuuuuuuuuuuuuuuug

SEQ ID NO: 930124 - RNA, 19 nt, Human
uuuuuuuuuuuuuuuuugu

SEQ ID NO: 930125 - RNA, 18 nt, Human
aaacagaauauacaugca

SEQ ID NO: 930126 - RNA, 23 nt, Human
aaagaaacagaauauacaugcaa

SEQ ID NO: 930127 - RNA, 18 nt, Human
aaagacauacucaagacu

SEQ ID NO: 930128 - RNA, 24 nt, Human
aaaggcaaaugaagauuugggcca

SEQ ID NO: 930129 - RNA, 20 nt, Human
acuuaaaaugaacauuuucc

SEQ ID NO: 930130 - RNA, 22 nt, Human
agacugggaagaaaaagaggug

SEQ ID NO: 930131 - RNA, 21 nt, Human
agaucagagguggccaaagac

SEQ ID NO: 930132 - RNA, 19 nt, Human
agccaaaccauaucauaaa

SEQ ID NO: 930133 - RNA, 20 nt, Human
caacagaaaaacauguaaug

SEQ ID NO: 930134 - RNA, 22 nt, Human
caaguaacgucuuacauggaug

SEQ ID NO: 930135 - RNA, 22 nt, Human
cacaacacauaggaauucaaga

SEQ ID NO: 930136 - RNA, 26 nt, Human
cacaacacauaggaauucaagaugag

SEQ ID NO: 930137 - RNA, 19 nt, Human
caccuugacuuggugaccc

SEQ ID NO: 930138 - RNA, 19 nt, Human
cauaggaauucaagaugag

SEQ ID NO: 930139 - RNA, 30 nt, Human
caugcuggagauaaaggaguugaaaaggcc

SEQ ID NO: 930140 - RNA, 23 nt, Human
cauggagucuggugcccauaggg

SEQ ID NO: 930141 - RNA, 21 nt, Human
ccaaaccauaucauaaaagaa

SEQ ID NO: 930142 - RNA, 23 nt, Human
cuaaagcaucccuuuuucaauag

SEQ ID NO: 930143 - RNA, 22 nt, Human
cuacaaugguucaaccuaaagc

SEQ ID NO: 930144 - RNA, 18 nt, Human
cuaucaccagaacagcau

SEQ ID NO: 930145 - RNA, 20 nt, Human
cuccacaugcuggagauaaa

SEQ ID NO: 930146 - RNA, 24 nt, Human
cuccacaugcuggagauaaaggag

SEQ ID NO: 930147 - RNA, 20 nt, Human
cucugcaaaauguuuuuccu

SEQ ID NO: 930148 - RNA, 24 nt, Human
cuuuaauguguuuauuuaggaaaa

SEQ ID NO: 930149 - RNA, 21 nt, Human
gaagaaaaagagguguaaugg

SEQ ID NO: 930150 - RNA, 18 nt, Human
gacugggaagaaaaagag

SEQ ID NO: 930151 - RNA, 22 nt, Human
gcugaagugcaaagacuggaug

SEQ ID NO: 930152 - RNA, 23 nt, Human
ggacacagccaaaccauaucaua

SEQ ID NO: 930153 - RNA, 19 nt, Human
ggaguugaaaaggcaaaug

SEQ ID NO: 930154 - RNA, 18 nt, Human
ggcagcaggcaaagagag

SEQ ID NO: 930155 - RNA, 26 nt, Human
gggaagaaaaagagguguaauggaag

SEQ ID NO: 930156 - RNA, 21 nt, Human
ggugguggguacacauguugg

SEQ ID NO: 930157 - RNA, 23 nt, Human
gucuaagagauuuaaaaagagaa

SEQ ID NO: 930158 - RNA, 18 nt, Human
uaaaaagagaagugauau

SEQ ID NO: 930159 - RNA, 18 nt, Human
uaacccagaucaauagca

SEQ ID NO: 930160 - RNA, 23 nt, Human
uaacccagaucaauagcaccuug

SEQ ID NO: 930161 - RNA, 24 nt, Human
uaagucaguaaccauguuaaacaa

SEQ ID NO: 930162 - RNA, 18 nt, Human
uacaugcaacagaaaaac

SEQ ID NO: 930163 - RNA, 25 nt, Human
uagaguggacagucaggaaagacca

SEQ ID NO: 930164 - RNA, 21 nt, Human
uagcagaugagaucagaggug

SEQ ID NO: 930165 - RNA, 19 nt, Human
ucaagacugggaagaaaaa

SEQ ID NO: 930166 - RNA, 19 nt, Human
ucaauagcaccuugacuug

SEQ ID NO: 930167 - RNA, 20 nt, Human
ucaauagcaccuugacuugg

SEQ ID NO: 930168 - RNA, 26 nt, Human
ucaaugaccucccacaggguccuucc

SEQ ID NO: 930169 - RNA, 23 nt, Human
ucacuaucaccagaacagcaugg

SEQ ID NO: 930170 - RNA, 18 nt, Human
ucauaaaagaaacagacu

SEQ ID NO: 930171 - RNA, 24 nt, Human
uccacaugcuggagauaaaggagu

SEQ ID NO: 930172 - RNA, 24 nt, Human
uccccugcuauguuuuguggaagc

SEQ ID NO: 930173 - RNA, 18 nt, Human
ugagaaagaaacagaaua

SEQ ID NO: 930174 - RNA, 19 nt, Human
ugagaucagagguggccaa

SEQ ID NO: 930175 - RNA, 24 nt, Human
ugagaucagagguggccaaagacu

SEQ ID NO: 930176 - RNA, 22 nt, Human
ugagauuugcauggggacacag

SEQ ID NO: 930177 - RNA, 19 nt, Human
ugauggguguauuuuaggu

SEQ ID NO: 930178 - RNA, 19 nt, Human
uggcugggaagaucucaca

SEQ ID NO: 930179 - RNA, 18 nt, Human
uggcuugggauggacuga

SEQ ID NO: 930180 - RNA, 24 nt, Human
ugggaagaucucacaagcauggug

SEQ ID NO: 930181 - RNA, 19 nt, Human
uuaacccagaucaauagca

SEQ ID NO: 930182 - RNA, 23 nt, Human
uuaacccagaucaauagcaccuu

SEQ ID NO: 930183 - RNA, 18 nt, Human
uuacaauuuugcuguaag

SEQ ID NO: 930184 - RNA, 20 nt, Human
uuaguccauuuucaggcugc

SEQ ID NO: 930185 - RNA, 18 nt, Human
uucaaauucaguuugugc

SEQ ID NO: 930186 - RNA, 20 nt, Human
uugaaauuuuccuaucauca

SEQ ID NO: 930187 - RNA, 19 nt, Human
uuuacauuuaugagaaaga

SEQ ID NO: 930188 - RNA, 24 nt, Human
uuuaggaaaagauagaaucugagg

SEQ ID NO: 930189 - RNA, 22 nt, Human
uuuguggaagcauucaagggac

SEQ ID NO: 930190 - RNA, 27 nt, Human
uuuuuuuuuuuuuuuuuuuuuuugggg

SEQ ID NO: 930191 - RNA, 20 nt, Human
aaaaaaauagacuccuggau

SEQ ID NO: 930192 - RNA, 22 nt, Human
aaauaaacccaagggugaacac

SEQ ID NO: 930193 - RNA, 21 nt, Human
aaauaacccagccacaaaaau

SEQ ID NO: 930194 - RNA, 27 nt, Human
aacccagccacaaaaauauaaauacug

SEQ ID NO: 930195 - RNA, 20 nt, Human
aaccuuguauuuucuaaaua

SEQ ID NO: 930196 - RNA, 22 nt, Human
aagggcaauggggacuuaaaac

SEQ ID NO: 930197 - RNA, 21 nt, Human
aaucauggagacaaaauagaa

SEQ ID NO: 930198 - RNA, 18 nt, Human
agcccaugagccucagau

SEQ ID NO: 930199 - RNA, 20 nt, Human
agggcaauggggacuuaaaa

SEQ ID NO: 930200 - RNA, 19 nt, Human
caaacuuaucucagaacca

SEQ ID NO: 930201 - RNA, 24 nt, Human
caagacauaauccacuacagugaa

SEQ ID NO: 930202 - RNA, 21 nt, Human
caaguugaaaaaaaaauagac

SEQ ID NO: 930203 - RNA, 21 nt, Human
ccuuaccacuuuuccuuuccu

SEQ ID NO: 930204 - RNA, 19 nt, Human
ccuuguauuuucuaaauaa

SEQ ID NO: 930205 - RNA, 24 nt, Human
cuaaauaaacccaagggugaacac

SEQ ID NO: 930206 - RNA, 25 nt, Human
cuuacugcuaauaaugaucuuugga

SEQ ID NO: 930207 - RNA, 18 nt, Human
cuucccacuuccuuacca

SEQ ID NO: 930208 - RNA, 20 nt, Human
gaaaaaaaaauagacuccug

SEQ ID NO: 930209 - RNA, 19 nt, Human
gcguacccaccccauccca

SEQ ID NO: 930210 - RNA, 23 nt, Human
ggacuuaaaacggccauaguuuc

SEQ ID NO: 930211 - RNA, 21 nt, Human
uaaacccaagggugaacacaa

SEQ ID NO: 930212 - RNA, 26 nt, Human
uaaauuucucucacuuagauguaauc

SEQ ID NO: 930213 - RNA, 21 nt, Human
uaaccaaaaucauggagacaa

SEQ ID NO: 930214 - RNA, 21 nt, Human
uaaccaaaaucauggagacaa

SEQ ID NO: 930215 - RNA, 24 nt, Human
uaaccaaaaucauggagacaaaau

SEQ ID NO: 930216 - RNA, 24 nt, Human
uaagugaaauaacccagccacaaa

SEQ ID NO: 930217 - RNA, 18 nt, Human
uaauuccacugacaugaa

SEQ ID NO: 930218 - RNA, 23 nt, Human
uagaauagugguuacugggaaga

SEQ ID NO: 930219 - RNA, 25 nt, Human
uagacuccuggauauaguauucaaa

SEQ ID NO: 930220 - RNA, 25 nt, Human
uauagaguaaccaaaaucauggaga

SEQ ID NO: 930221 - RNA, 21 nt, Human
uauauacuacacauuacaugg

SEQ ID NO: 930222 - RNA, 20 nt, Human
uauuagggcaauuuucuaac

SEQ ID NO: 930223 - RNA, 18 nt, Human
ucucagaaccacaagaau

SEQ ID NO: 930224 - RNA, 18 nt, Human
ucuuuuuauugcguaccc

SEQ ID NO: 930225 - RNA, 23 nt, Human
ugaaauaacccagccacaaaaau

SEQ ID NO: 930226 - RNA, 19 nt, Human
ugacaugaaguauauagag

SEQ ID NO: 930227 - RNA, 21 nt, Human
ugauauauacuacacauuaca

SEQ ID NO: 930228 - RNA, 21 nt, Human
ugauuucuucaaacuuaucuc

SEQ ID NO: 930229 - RNA, 18 nt, Human
aagcgcugcaggcccagc

SEQ ID NO: 930230 - RNA, 22 nt, Human
acaguucuuccuagggacugug

SEQ ID NO: 930231 - RNA, 18 nt, Human
agagugaagaucucgaag

SEQ ID NO: 930232 - RNA, 23 nt, Human
auuuacaguucuuccuagggacu

SEQ ID NO: 930233 - RNA, 20 nt, Human
uagggcacccucuuuucuug

SEQ ID NO: 930234 - RNA, 18 nt, Human
uccauguggugguguaug

SEQ ID NO: 930235 - RNA, 22 nt, Human
ugcuaugucaucguagucagug

SEQ ID NO: 930236 - RNA, 23 nt, Human
uggugguguaugugcgcuuccca

SEQ ID NO: 930237 - RNA, 22 nt, Human
uguaugugcgcuucccagggau

SEQ ID NO: 930238 - RNA, 23 nt, Human
aaacaggagaaucacaugcuuua

SEQ ID NO: 930239 - RNA, 26 nt, Human
aaaccaauugcagaucaaaaauauua

SEQ ID NO: 930240 - RNA, 23 nt, Human
aaccaauaccccauggauaccaa

SEQ ID NO: 930241 - RNA, 23 nt, Human
aagcaagauaaugguuuacagaa

SEQ ID NO: 930242 - RNA, 24 nt, Human
aauuaauaagguagucauuccugu

SEQ ID NO: 930243 - RNA, 23 nt, Human
aauuuuuauuuuaauuaauaagg

SEQ ID NO: 930244 - RNA, 21 nt, Human
agacuuuauuugcguaaguga

SEQ ID NO: 930245 - RNA, 28 nt, Human
aggaaugaaaauauacauguuaagaaga

SEQ ID NO: 930246 - RNA, 22 nt, Human
augcuuuaaagaacacuuucuc

SEQ ID NO: 930247 - RNA, 19 nt, Human
caaaaacaggagaaucaca

SEQ ID NO: 930248 - RNA, 22 nt, Human
caaaaacaggagaaucacaugc

SEQ ID NO: 930249 - RNA, 21 nt, Human
caauugcagaucaaaaauauu

SEQ ID NO: 930250 - RNA, 20 nt, Human
cagcaaaaacaggagaauca

SEQ ID NO: 930251 - RNA, 22 nt, Human
cagcaaaaacaggagaaucaca

SEQ ID NO: 930252 - RNA, 21 nt, Human
caucuguggauuaaaccaauu

SEQ ID NO: 930253 - RNA, 22 nt, Human
cauggauaccaagggacaacug

SEQ ID NO: 930254 - RNA, 22 nt, Human
ccaauaccccauggauaccaag

SEQ ID NO: 930255 - RNA, 19 nt, Human
cugcaucuguggauuaaac

SEQ ID NO: 930256 - RNA, 25 nt, Human
cuucuuauggaaacuuuauaggaau

SEQ ID NO: 930257 - RNA, 23 nt, Human
gaaccaauaccccauggauacca

SEQ ID NO: 930258 - RNA, 19 nt, Human
gaaguaccuguaacaaaac

SEQ ID NO: 930259 - RNA, 23 nt, Human
gaaguaccuguaacaaaacaguu

SEQ ID NO: 930260 - RNA, 21 nt, Human
gacuugaguauacuuggauuu

SEQ ID NO: 930261 - RNA, 18 nt, Human
gagauauguuccuccagu

SEQ ID NO: 930262 - RNA, 23 nt, Human
gcccucuguauccauguacucug

SEQ ID NO: 930263 - RNA, 21 nt, Human
uaaaaucuucaggaaugacau

SEQ ID NO: 930264 - RNA, 21 nt, Human
uaaaccaauugcagaucaaaa

SEQ ID NO: 930265 - RNA, 22 nt, Human
uaagaugcuuguagaguugugg

SEQ ID NO: 930266 - RNA, 19 nt, Human
uaagcugaaaagaggaaca

SEQ ID NO: 930267 - RNA, 23 nt, Human
uacacaaaacuugucaagaacuc

SEQ ID NO: 930268 - RNA, 22 nt, Human
uacagaauuugcuuuacacaaa

SEQ ID NO: 930269 - RNA, 24 nt, Human
uacuuggauuuuugguaucugugg

SEQ ID NO: 930270 - RNA, 25 nt, Human
uagaaaaaauaaaaauaauacaaau

SEQ ID NO: 930271 - RNA, 24 nt, Human
uagcaauaaaaggaaugaacccua

SEQ ID NO: 930272 - RNA, 22 nt, Human
uagguggugguuaaaauucuug

SEQ ID NO: 930273 - RNA, 24 nt, Human
uauaacaguuauuuaaauagcauu

SEQ ID NO: 930274 - RNA, 20 nt, Human
uauuugaagaaaauguuuug

SEQ ID NO: 930275 - RNA, 18 nt, Human
ucccagccuaaacaggga

SEQ ID NO: 930276 - RNA, 19 nt, Human
ucccagccuaaacagggag

SEQ ID NO: 930277 - RNA, 23 nt, Human
ucccagccuaaacagggagaguc

SEQ ID NO: 930278 - RNA, 19 nt, Human
ucuaagcugaaaagaggaa

SEQ ID NO: 930279 - RNA, 26 nt, Human
ucuagggauaaaguauacaggcggau

SEQ ID NO: 930280 - RNA, 20 nt, Human
ugaaaagaggaacagguggg

SEQ ID NO: 930281 - RNA, 20 nt, Human
ugccuuuguuuauaaaaucu

SEQ ID NO: 930282 - RNA, 19 nt, Human
uggguuggggggacggucc

SEQ ID NO: 930283 - RNA, 19 nt, Human
uggguuggggggacggucc

SEQ ID NO: 930284 - RNA, 22 nt, Human
uguaaaaauuuugucaaagaug

SEQ ID NO: 930285 - RNA, 19 nt, Human
uguuucuaagcugaaaaga

SEQ ID NO: 930286 - RNA, 20 nt, Human
uuagaaaaaauaaaaauaau

SEQ ID NO: 930287 - RNA, 22 nt, Human
uuccaggcuguaguaugaucau

SEQ ID NO: 930288 - RNA, 22 nt, Human
uucucuagcaauaaaaggaaug

SEQ ID NO: 930289 - RNA, 23 nt, Human
uucucuagcaauaaaaggaauga

SEQ ID NO: 930290 - RNA, 22 nt, Human
uugggaaauauucuuuacuaca

SEQ ID NO: 930291 - RNA, 20 nt, Human
uuuuuuguuugagugauucc

SEQ ID NO: 930292 - RNA, 18 nt, Human
uuuuuuuuuuuuuuuuug

SEQ ID NO: 930293 - RNA, 21 nt, Human
uuuuuuuuuuuuuuuuugcag

SEQ ID NO: 930294 - RNA, 22 nt, Human
uuuuuuuuuuuuuuuuugcagg

SEQ ID NO: 930295 - RNA, 22 nt, Human
aagcuucacugagugcugcagu

SEQ ID NO: 930296 - RNA, 22 nt, Human
agagacaaggucucuuucuguu

SEQ ID NO: 930297 - RNA, 21 nt, Human
agugguuugccugcuggggcc

SEQ ID NO: 930298 - RNA, 20 nt, Human
cacaguggcuuauaaggaac

SEQ ID NO: 930299 - RNA, 19 nt, Human
caccacaaccauccaaggu

SEQ ID NO: 930300 - RNA, 23 nt, Human
cacugagugcugcaguucucaaa

SEQ ID NO: 930301 - RNA, 21 nt, Human
cauucccuuuaacaaagcuuc

SEQ ID NO: 930302 - RNA, 24 nt, Human
cucuuucuguuguccaggcuggag

SEQ ID NO: 930303 - RNA, 21 nt, Human
cuuuucaugaauugauuucgu

SEQ ID NO: 930304 - RNA, 22 nt, Human
ggcuggaguguaguggugugau

SEQ ID NO: 930305 - RNA, 24 nt, Human
guccaggcuggaguguaguggugu

SEQ ID NO: 930306 - RNA, 20 nt, Human
ucaagaucagaagcuggguu

SEQ ID NO: 930307 - RNA, 27 nt, Human
ucaccacaaccauccaagggggcccuc

SEQ ID NO: 930308 - RNA, 20 nt, Human
ucauucccuuuaacaaagcu

SEQ ID NO: 930309 - RNA, 23 nt, Human
ucucuuucuguuguccaggcugg

SEQ ID NO: 930310 - RNA, 24 nt, Human
ucucuuucuguuguccaggcugga

SEQ ID NO: 930311 - RNA, 24 nt, Human
ucuguuguccaggcuggaguguag

SEQ ID NO: 930312 - RNA, 21 nt, Human
ucuuucuguuguccaggcugg

SEQ ID NO: 930313 - RNA, 24 nt, Human
ucuuucuguuguccaggcuggagu

SEQ ID NO: 930314 - RNA, 24 nt, Human
ugaagugguuugccugcuggggcc

SEQ ID NO: 930315 - RNA, 20 nt, Human
ugagcucuucauccuagcac

SEQ ID NO: 930316 - RNA, 22 nt, Human
ugaguuaacgaaaguaguugau

SEQ ID NO: 930317 - RNA, 23 nt, Human
ugauguuauucucauuuaacauu

SEQ ID NO: 930318 - RNA, 21 nt, Human
ugccugcuggggccuaaacuc

SEQ ID NO: 930319 - RNA, 19 nt, Human
ugcuggggccuaaacuccu

SEQ ID NO: 930320 - RNA, 18 nt, Human
uggguuuugggguugaga

SEQ ID NO: 930321 - RNA, 20 nt, Human
uguccaggcuggaguguagu

SEQ ID NO: 930322 - RNA, 24 nt, Human
uguccaggcuggaguguaguggug

SEQ ID NO: 930323 - RNA, 19 nt, Human
uguuguccaggcuggagug

SEQ ID NO: 930324 - RNA, 30 nt, Human; identical to SEQ ID NO: 834456

SEQ ID NO: 930325 - RNA, 21 nt, Human
uguuuuguuuuguuuuuagag

SEQ ID NO: 930326 - RNA, 24 nt, Human
uguuuuguuuuguuuuuagagaca

SEQ ID NO: 930327 - RNA, 23 nt, Human
uguuuuguuuuuagagacaaggu

SEQ ID NO: 930328 - RNA, 24 nt, Human
uguuuuguuuuuagagacaagguc

SEQ ID NO: 930329 - RNA, 20 nt, Human
uuaacauugaguuaacgaaa

SEQ ID NO: 930330 - RNA, 19 nt, Human
uuagagacaaggucucuuu

SEQ ID NO: 930331 - RNA, 24 nt, Human
uuguccaggcuggaguguaguggu

SEQ ID NO: 930332 - RNA, 20 nt, Human
uuguuuguuuguuuuguuuu

SEQ ID NO: 930333 - RNA, 18 nt, Human
uuuguuuuguuuuguuuu

SEQ ID NO: 930334 - RNA, 25 nt, Human
uuuuuuaagccgaaaaaaugcuuaa

SEQ ID NO: 930335 - RNA, 19 nt, Human
aaaaaaaaacagacugaga

SEQ ID NO: 930336 - RNA, 23 nt, Human
aaaaaaaaacagacugagaaaaa

SEQ ID NO: 930337 - RNA, 24 nt, Human
aaaaaaaaauacaaaaacaaagaa

SEQ ID NO: 930338 - RNA, 19 nt, Human
aaaaaaacagacugagaaa

SEQ ID NO: 930339 - RNA, 23 nt, Human
aaaacagacugagaaaaaagccc

SEQ ID NO: 930340 - RNA, 21 nt, Human
aaaauuaaaagcaagggggcc

SEQ ID NO: 930341 - RNA, 23 nt, Human
aaacagacugagaaaaaagccca

SEQ ID NO: 930342 - RNA, 19 nt, Human
aaagaaacaaacacaaagc

SEQ ID NO: 930343 - RNA, 21 nt, Human
aaagagauggacaaugccauu

SEQ ID NO: 930344 - RNA, 24 nt, Human
aaagcaacugauucgugaaaauaa

SEQ ID NO: 930345 - RNA, 18 nt, Human
aaagcaagaaaaugagaa

SEQ ID NO: 930346 - RNA, 21 nt, Human
aaaugucuccuuuaaaauccc

SEQ ID NO: 930347 - RNA, 22 nt, Human
aaccucuccacugaccuccaaa

SEQ ID NO: 930348 - RNA, 23 nt, Human
aagacagacaucgaaacgagaua

SEQ ID NO: 930349 - RNA, 26 nt, Human
aagcaagaaaaugagaaauaaccuag

SEQ ID NO: 930350 - RNA, 19 nt, Human
aagcccaggucucuuuacc

SEQ ID NO: 930351 - RNA, 23 nt, Human
aauacacacacacacacaaaaau

SEQ ID NO: 930352 - RNA, 24 nt, Human
aaucgcuugaauccuggaggugga

SEQ ID NO: 930353 - RNA, 21 nt, Human
aaugccauuuauccuuuucac

SEQ ID NO: 930354 - RNA, 18 nt, Human
aauuagccaggcauggug

SEQ ID NO: 930355 - RNA, 20 nt, Human
aauugcuugaacccaggagg

SEQ ID NO: 930356 - RNA, 24 nt, Human
aauugcuugaacccaggaggcaga

SEQ ID NO: 930357 - RNA, 20 nt, Human
acaagagcgaaacucugucu

SEQ ID NO: 930358 - RNA, 21 nt, Human
acaagagcgaaacucugucuc

SEQ ID NO: 930359 - RNA, 24 nt, Human
acagagcaagaccuagucucaaaa

SEQ ID NO: 930360 - RNA, 19 nt, Human
acaugguaaaaccccaucu

SEQ ID NO: 930361 - RNA, 24 nt, Human
acccaggaggcagagguugcagug

SEQ ID NO: 930362 - RNA, 18 nt, Human
accccaucucuacuaaaa

SEQ ID NO: 930363 - RNA, 18 nt, Human
acugcacuccagccuggg

SEQ ID NO: 930364 - RNA, 24 nt, Human
acugcacuccagccugggugacaa

SEQ ID NO: 930365 - RNA, 25 nt, Human
acugcacuccagccugggugacaag

SEQ ID NO: 930366 - RNA, 24 nt, Human
acugcacuccagucugggugacag

SEQ ID NO: 930367 - RNA, 26 nt, Human
acugcacuccagucugggugacagag

SEQ ID NO: 930368 - RNA, 20 nt, Human
agaaaggucuaauauccaga

SEQ ID NO: 930369 - RNA, 24 nt, Human
agacugaggcaggggaaucgcuug

SEQ ID NO: 930370 - RNA, 24 nt, Human
agagauggacaaugccauuuaucc

SEQ ID NO: 930371 - RNA, 22 nt, Human
agagcgaaacucugucucaaaa

SEQ ID NO: 930372 - RNA, 18 nt, Human
agagguugcagugagccg

SEQ ID NO: 930373 - RNA, 23 nt, Human
agagguugcagugagccgagauc

SEQ ID NO: 930374 - RNA, 24 nt, Human
agagguugcagugagccgagauca

SEQ ID NO: 930375 - RNA, 20 nt, Human
agcacuuugggaggcuaagg

SEQ ID NO: 930376 - RNA, 23 nt, Human
agccaggcauggugguguguacc

SEQ ID NO: 930377 - RNA, 21 nt, Human
agcgguggcucaugccuguaa

SEQ ID NO: 930378 - RNA, 18 nt, Human
aggcacgagaauugcuug

SEQ ID NO: 930379 - RNA, 21 nt, Human
aggcagagguugcagugagcc

SEQ ID NO: 930380 - RNA, 24 nt, Human
aggcagagguugcagugagccgag

SEQ ID NO: 930381 - RNA, 18 nt, Human
aggcaggcggaucaccug

SEQ ID NO: 930382 - RNA, 22 nt, Human
aggcaggcggaucaccugaggg

SEQ ID NO: 930383 - RNA, 25 nt, Human
aggcaggggaaucgcuugaauccug

SEQ ID NO: 930384 - RNA, 24 nt, Human
agguggagacugcagcgagucaag

SEQ ID NO: 930385 - RNA, 24 nt, Human
agucugggugacagagcaagaccu

SEQ ID NO: 930386 - RNA, 24 nt, Human
aucaugccacugcacuccagucug

SEQ ID NO: 930387 - RNA, 19 nt, Human
augccuguaaucccagcac

SEQ ID NO: 930388 - RNA, 20 nt, Human
auuauauuacacaagaugcc

SEQ ID NO: 930389 - RNA, 24 nt, Human
auugugccacugcacuccagccug

SEQ ID NO: 930390 - RNA, 20 nt, Human
caaaaaaaaacagacugaga

SEQ ID NO: 930391 - RNA, 24 nt, Human
caaaaacaaagaaacaaacacaaa

SEQ ID NO: 930392 - RNA, 21 nt, Human
caaaauuaaaagcaagaaaau

SEQ ID NO: 930393 - RNA, 26 nt, Human
caaagaaacaaacacaaagcaacuga

SEQ ID NO: 930394 - RNA, 23 nt, Human
caagaugccucaaagaaacacua

SEQ ID NO: 930395 - RNA, 24 nt, Human
caagauugugccacugcacuccag

SEQ ID NO: 930396 - RNA, 20 nt, Human
caagggggccgagagcggug

SEQ ID NO: 930397 - RNA, 19 nt, Human
cacaugguaaaaccccauc

SEQ ID NO: 930398 - RNA, 21 nt, Human
cacaugguaaaaccccaucuc

SEQ ID NO: 930399 - RNA, 21 nt, Human
cacuccagccugggugacaag

SEQ ID NO: 930400 - RNA, 24 nt, Human
cacuccagccugggugacaagagc

SEQ ID NO: 930401 - RNA, 25 nt, Human
cacuccagccugggugacaagagcg

SEQ ID NO: 930402 - RNA, 22 nt, Human
cacuccagucugggugacagag

SEQ ID NO: 930403 - RNA, 23 nt, Human
cacuccagucugggugacagagc

SEQ ID NO: 930404 - RNA, 19 nt, Human
cacugcacuccagccuggg

SEQ ID NO: 930405 - RNA, 19 nt, Human
cacugcacuccagccuggg

SEQ ID NO: 930406 - RNA, 22 nt, Human
cacugcacuccagccuggguga

SEQ ID NO: 930407 - RNA, 23 nt, Human
cacugcacuccagccugggugac

SEQ ID NO: 930408 - RNA, 24 nt, Human
cacugcacuccagccugggugaca

SEQ ID NO: 930409 - RNA, 25 nt, Human
cacugcacuccagccugggugacaa

SEQ ID NO: 930410 - RNA, 19 nt, Human
cacugcacuccagucuggg

SEQ ID NO: 930411 - RNA, 21 nt, Human
cacugcacuccagucugggug

SEQ ID NO: 930412 - RNA, 22 nt, Human
cacugcacuccagucuggguga

SEQ ID NO: 930413 - RNA, 23 nt, Human
cacugcacuccagucugggugac

SEQ ID NO: 930414 - RNA, 24 nt, Human
cacugcacuccagucugggugaca

SEQ ID NO: 930415 - RNA, 24 nt, Human
cacugcacuccagucugggugaca

SEQ ID NO: 930416 - RNA, 24 nt, Human
cagcacuuugggaggcuaaggcag

SEQ ID NO: 930417 - RNA, 24 nt, Human
cagcacuuugggaggcuaaggcag

SEQ ID NO: 930418 - RNA, 19 nt, Human
caggaacaaaaaaaaaaaa

SEQ ID NO: 930419 - RNA, 21 nt, Human
caugagaaaaagaagaauauu

SEQ ID NO: 930420 - RNA, 24 nt, Human
caugccuguaaucccagcacuuug

SEQ ID NO: 930421 - RNA, 21 nt, Human
ccacugaccuccaaaugacau

SEQ ID NO: 930422 - RNA, 20 nt, Human
ccacugcacuccagccuggg

SEQ ID NO: 930423 - RNA, 20 nt, Human
ccacugcacuccagccuggg

SEQ ID NO: 930424 - RNA, 20 nt, Human
ccacugcacuccagccuggg

SEQ ID NO: 930425 - RNA, 21 nt, Human
ccacugcacuccagccugggu

SEQ ID NO: 930426 - RNA, 21 nt, Human
ccacugcacuccagccugggu

SEQ ID NO: 930427 - RNA, 23 nt, Human
ccacugcacuccagccuggguga

SEQ ID NO: 930428 - RNA, 24 nt, Human
ccacugcacuccagccugggugac

SEQ ID NO: 930429 - RNA, 20 nt, Human
ccacugcacuccagucuggg

SEQ ID NO: 930430 - RNA, 20 nt, Human
ccacugcacuccagucuggg

SEQ ID NO: 930431 - RNA, 20 nt, Human
ccacugcacuccagucuggg

SEQ ID NO: 930432 - RNA, 21 nt, Human
ccacugcacuccagucugggu

SEQ ID NO: 930433 - RNA, 21 nt, Human
ccacugcacuccagucugggu

SEQ ID NO: 930434 - RNA, 24 nt, Human
ccacugcacuccagucugggugac

SEQ ID NO: 930435 - RNA, 18 nt, Human
ccgagagcgguggcucau

SEQ ID NO: 930436 - RNA, 21 nt, Human
ccuacaaucccagcugcuugg

SEQ ID NO: 930437 - RNA, 23 nt, Human
ccuggccacaugguaaaacccca

SEQ ID NO: 930438 - RNA, 21 nt, Human
ccuuuaaaauccuacugcaaa

SEQ ID NO: 930439 - RNA, 24 nt, Human
cgagaucaugccacugcacuccag

SEQ ID NO: 930440 - RNA, 22 nt, Human
cggaucaccugagguugaguuc

SEQ ID NO: 930441 - RNA, 20 nt, Human
cuagaccagccuggccacau

SEQ ID NO: 930442 - RNA, 21 nt, Human
cucaaaaaauucuuccucuua

SEQ ID NO: 930443 - RNA, 23 nt, Human
cucaugccuguaaucccagcacu

SEQ ID NO: 930444 - RNA, 24 nt, Human
cucaugccuguaaucccagcacuu

SEQ ID NO: 930445 - RNA, 22 nt, Human
cuggccacaugguaaaacccca

SEQ ID NO: 930446 - RNA, 19 nt, Human
cugggugacagagcaagac

SEQ ID NO: 930447 - RNA, 25 nt, Human
gaaaaaaaaauacaaaaacaaagaa

SEQ ID NO: 930448 - RNA, 22 nt, Human
gacaagagcgaaacucugucuc

SEQ ID NO: 930449 - RNA, 20 nt, Human
gagcaagaccuagucucaaa

SEQ ID NO: 930450 - RNA, 21 nt, Human
gagugcuuuauaacuaaucug

SEQ ID NO: 930451 - RNA, 20 nt, Human
gaucaccugagguugaguuc

SEQ ID NO: 930452 - RNA, 24 nt, Human
gcacuccagucugggugacagagc

SEQ ID NO: 930453 - RNA, 18 nt, Human
gcagcgagucaagauugu

SEQ ID NO: 930454 - RNA, 19 nt, Human
gccacugcacuccagccug

SEQ ID NO: 930455 - RNA, 24 nt, Human
gccacugcacuccagccuggguga

SEQ ID NO: 930456 - RNA, 19 nt, Human
gccacugcacuccagucug

SEQ ID NO: 930457 - RNA, 24 nt, Human
gccacugcacuccagucuggguga

SEQ ID NO: 930458 - RNA, 20 nt, Human
gccgagaucaugccacugca

SEQ ID NO: 930459 - RNA, 22 nt, Human
gcuuaaaaaaaaucaaaagcuc

SEQ ID NO: 930460 - RNA, 22 nt, Human
ggaggcagagguugcagugagc

SEQ ID NO: 930461 - RNA, 21 nt, Human
ggaucaccugagguugaguuc

SEQ ID NO: 930462 - RNA, 19 nt, Human
ggccacaugguaaaacccc

SEQ ID NO: 930463 - RNA, 21 nt, Human
ggcucaugccuguaaucccag

SEQ ID NO: 930464 - RNA, 18 nt, Human
gggagaaaauauucauaa

SEQ ID NO: 930465 - RNA, 18 nt, Human
gguagggaaugcagucaa

SEQ ID NO: 930466 - RNA, 23 nt, Human
gguggcucaugccuguaauccca

SEQ ID NO: 930467 - RNA, 24 nt, Human
gguggcucaugccuguaaucccag

SEQ ID NO: 930468 - RNA, 24 nt, Human
guugcagugagccgagaucaugcc

SEQ ID NO: 930469 - RNA, 21 nt, Human
uaaaaauacacacacacacac

SEQ ID NO: 930470 - RNA, 19 nt, Human
uaaagagauggacaaugcc

SEQ ID NO: 930471 - RNA, 26 nt, Human
uaacaaguuuauuacaaugucaaaaa

SEQ ID NO: 930472 - RNA, 20 nt, Human
uaaggcaggcggaucaccug

SEQ ID NO: 930473 - RNA, 21 nt, Human
uaaggcaggcggaucaccuga

SEQ ID NO: 930474 - RNA, 24 nt, Human
uaaggcaggcggaucaccugaggu

SEQ ID NO: 930475 - RNA, 22 nt, Human
uaagugguuaaucaaaaaauug

SEQ ID NO: 930476 - RNA, 21 nt, Human
uaaucacuaugaguucuccau

SEQ ID NO: 930477 - RNA, 24 nt, Human
uaccuacaaucccagcugcuuggg

SEQ ID NO: 930478 - RNA, 24 nt, Human
uaggcacgagaauugcuugaaccc

SEQ ID NO: 930479 - RNA, 24 nt, Human
uaguucauuaaagagauggacaau

SEQ ID NO: 930480 - RNA, 21 nt, Human
uauccagaaucuauaagaaac

SEQ ID NO: 930481 - RNA, 22 nt, Human
uaucuggucuugaauggucauu

SEQ ID NO: 930482 - RNA, 21 nt, Human
ucaaaauuaaaagcaaggggg

SEQ ID NO: 930483 - RNA, 18 nt, Human
ucaaaccucuccacugac

SEQ ID NO: 930484 - RNA, 20 nt, Human
ucaggaacaaaaaaaaaaaa

SEQ ID NO: 930485 - RNA, 23 nt, Human
ucaggaacaaaaaaaaaaaaaaa

SEQ ID NO: 930486 - RNA, 21 nt, Human
ucaguucucucuagggaagca

SEQ ID NO: 930487 - RNA, 23 nt, Human
ucaugccacugcacuccagucug

SEQ ID NO: 930488 - RNA, 25 nt, Human
ucauuugcaucaugagaucaguucu

SEQ ID NO: 930489 - RNA, 19 nt, Human
uccagccugggugacaaga

SEQ ID NO: 930490 - RNA, 24 nt, Human
uccagucugggugacagagcaaga

SEQ ID NO: 930491 - RNA, 18 nt, Human
ucgcuugaauccuggagg

SEQ ID NO: 930492 - RNA, 22 nt, Human
ucgcuugaauccuggaggugga

SEQ ID NO: 930493 - RNA, 24 nt, Human
ucuaaagacagacaucgaaacgag

SEQ ID NO: 930494 - RNA, 30 nt, Human
ucuacuaaaaauacacacacacacacagug

SEQ ID NO: 930495 - RNA, 20 nt, Human
ucuagaccagccuggccaca

SEQ ID NO: 930496 - RNA, 24 nt, Human
ugaaaaaaaaauacaaaaacaaag

SEQ ID NO: 930497 - RNA, 21 nt, Human
ugacaagagcgaaacucuguc

SEQ ID NO: 930498 - RNA, 19 nt, Human
ugagaaaaaagcccagguc

SEQ ID NO: 930499 - RNA, 21 nt, Human
ugagaaaaaagcccaggucuc

SEQ ID NO: 930500 - RNA, 26 nt, Human
ugagaaaaagaagaauauucuucuua

SEQ ID NO: 930501 - RNA, 22 nt, Human
ugagccgagaucaugccacugc

SEQ ID NO: 930502 - RNA, 22 nt, Human
ugaggcaggggaaucgcuugaa

SEQ ID NO: 930503 - RNA, 25 nt, Human
ugaggcaggggaaucgcuugaaucc

SEQ ID NO: 930504 - RNA, 24 nt, Human
ugccacugcacuccagucugggug

SEQ ID NO: 930505 - RNA, 24 nt, Human
ugcccguaagcccagcuacucggg

SEQ ID NO: 930506 - RNA, 23 nt, Human
ugccuguaaucccagcacuuugg

SEQ ID NO: 930507 - RNA, 24 nt, Human
ugccuguaaucccagcacuuuggg

SEQ ID NO: 930508 - RNA, 20 nt, Human
uggagguggagacugcagcg

SEQ ID NO: 930509 - RNA, 24 nt, Human
uggcucaugccuguaaucccagca

SEQ ID NO: 930510 - RNA, 18 nt, Human
ugggaggcuaaggcaggc

SEQ ID NO: 930511 - RNA, 24 nt, Human
ugggaggcuaaggcaggcggauca

SEQ ID NO: 930512 - RNA, 19 nt, Human
uggguaggugaaaaaaaaa

SEQ ID NO: 930513 - RNA, 24 nt, Human
uggugguguguaccuacaauccca

SEQ ID NO: 930514 - RNA, 22 nt, Human
ugguguguaccuacaaucccag

SEQ ID NO: 930515 - RNA, 24 nt, Human
ugguguguaccuacaaucccagcu

SEQ ID NO: 930516 - RNA, 24 nt, Human
uguaauuugaguuucaacaugaga

SEQ ID NO: 930517 - RNA, 23 nt, Human
uuaauuaacacuucagucuuccu

SEQ ID NO: 930518 - RNA, 23 nt, Human
uuauguguacuuucaaaauuaaa

SEQ ID NO: 930519 - RNA, 21 nt, Human
uucaacaugagaaaaagaaga

SEQ ID NO: 930520 - RNA, 22 nt, Human
uucaacaugagaaaaagaagaa

SEQ ID NO: 930521 - RNA, 23 nt, Human
uucaggaacaaaaaaaaaaaaaa

SEQ ID NO: 930522 - RNA, 24 nt, Human
uucaggaacaaaaaaaaaaaaaaa

SEQ ID NO: 930523 - RNA, 20 nt, Human
uuccaauaaagaauccacag

SEQ ID NO: 930524 - RNA, 18 nt, Human
uugcagugagccgagauc

SEQ ID NO: 930525 - RNA, 19 nt, Human
uugcagugagccgagauca

SEQ ID NO: 930526 - RNA, 20 nt, Human
uugcagugagccgagaucau

SEQ ID NO: 930527 - RNA, 24 nt, Human
uugcuugaacccaggaggcagagg

SEQ ID NO: 930528 - RNA, 24 nt, Human
uugggagacugaggcaggggaauc

SEQ ID NO: 930529 - RNA, 25 nt, Human
uugggaggcuaaggcaggcggauca

SEQ ID NO: 930530 - RNA, 23 nt, Human
uugugccacugcacuccagccug

SEQ ID NO: 930531 - RNA, 22 nt, Human
aaaaaucucuccauaaucacgg

SEQ ID NO: 930532 - RNA, 25 nt, Human
aaacacucggaaucgcuugucaaua

SEQ ID NO: 930533 - RNA, 20 nt, Human
aacaauucuugcaccucuuc

SEQ ID NO: 930534 - RNA, 25 nt, Human
aaucgcuugucaauagcaagccuau

SEQ ID NO: 930535 - RNA, 18 nt, Human
aggaggcuuagcagcuug

SEQ ID NO: 930536 - RNA, 21 nt, Human
caggaaccucaucagggucaa

SEQ ID NO: 930537 - RNA, 30 nt, Human
cuauguguaacauuucuuaagaaaauccuu

SEQ ID NO: 930538 - RNA, 22 nt, Human
cucuaaauguaucuucuucuug

SEQ ID NO: 930539 - RNA, 23 nt, Human
cucuccauaaucacggauaaaca

SEQ ID NO: 930540 - RNA, 24 nt, Human
cuucuuguucuucuagucguuuca

SEQ ID NO: 930541 - RNA, 18 nt, Human
cuugcaccucuucuggca

SEQ ID NO: 930542 - RNA, 25 nt, Human
gaaugggguuugucagaaguugcaa

SEQ ID NO: 930543 - RNA, 19 nt, Human
gcuacugggaguaccucca

SEQ ID NO: 930544 - RNA, 19 nt, Human
guaccuccaaagccugcaa

SEQ ID NO: 930545 - RNA, 22 nt, Human
gugacauaaucaggaaccucau

SEQ ID NO: 930546 - RNA, 19 nt, Human
uaaagaauacucgauacca

SEQ ID NO: 930547 - RNA, 21 nt, Human
uaacauuucuuaagaaaaucc

SEQ ID NO: 930548 - RNA, 18 nt, Human
uaacuggacauuaaaaau

SEQ ID NO: 930549 - RNA, 19 nt, Human
uaccuccaaagccugcaaa

SEQ ID NO: 930550 - RNA, 23 nt, Human
uacugggaguaccuccaaagccu

SEQ ID NO: 930551 - RNA, 24 nt, Human
uauaaagaauacucgauaccauga

SEQ ID NO: 930552 - RNA, 22 nt, Human
uaucaggaaaguuuaaauacuu

SEQ ID NO: 930553 - RNA, 19 nt, Human
ucaguuaucuuacacauga

SEQ ID NO: 930554 - RNA, 18 nt, Human
uccaaagccugcaaaacu

SEQ ID NO: 930555 - RNA, 24 nt, Human
uccaaagccugcaaaacugcuuuc

SEQ ID NO: 930556 - RNA, 24 nt, Human
ugacaaaaaugacuuaaauaggaa

SEQ ID NO: 930557 - RNA, 23 nt, Human
ugcaaguaguaaaacuggagcaa

SEQ ID NO: 930558 - RNA, 25 nt, Human
ugcaaguaguaaaacuggagcaaau

SEQ ID NO: 930559 - RNA, 19 nt, Human
uggcucaggugguggugcu

SEQ ID NO: 930560 - RNA, 24 nt, Human
uggcucaggugguggugcuacugg

SEQ ID NO: 930561 - RNA, 26 nt, Human
uggcucaggugguggugcuacuggga

SEQ ID NO: 930562 - RNA, 19 nt, Human
uuggcucaggugguggugc

SEQ ID NO: 930563 - RNA, 18 nt, Human
aacuuuugccagcuugau

SEQ ID NO: 930564 - RNA, 21 nt, Human
aucagucuuuuucuuuaugac

SEQ ID NO: 930565 - RNA, 23 nt, Human
caagugacccugcuauauuuccc

SEQ ID NO: 930566 - RNA, 27 nt, Human
cacaacuacuuauccauucuccugcag

SEQ ID NO: 930567 - RNA, 23 nt, Human
cagagaauauaaacacccaugua

SEQ ID NO: 930568 - RNA, 22 nt, Human
cauuuuuguuuuaaugauaaaa

SEQ ID NO: 930569 - RNA, 18 nt, Human
ccccacucuucuuuccca

SEQ ID NO: 930570 - RNA, 21 nt, Human
ccccauuuccccacauccuca

SEQ ID NO: 930571 - RNA, 20 nt, Human
cccugcuauauuucccccca

SEQ ID NO: 930572 - RNA, 27 nt, Human
ccucacagucacacauuaacuuuugcc

SEQ ID NO: 930573 - RNA, 22 nt, Human
ccugaagcugaugugcaucuuc

SEQ ID NO: 930574 - RNA, 26 nt, Human
cucacagucacacauuaacuuuugcc

SEQ ID NO: 930575 - RNA, 19 nt, Human
gcauauaccacaacuacuu

SEQ ID NO: 930576 - RNA, 20 nt, Human
gccaaauuguuuuccacagu

SEQ ID NO: 930577 - RNA, 21 nt, Human
gccaaauuguuuuccacagug

SEQ ID NO: 930578 - RNA, 25 nt, Human
gucugcuuuucagguuuauuccuac

SEQ ID NO: 930579 - RNA, 24 nt, Human
uaaaauaauuccugauaccuggua

SEQ ID NO: 930580 - RNA, 24 nt, Human
uaaacacccauguaaauaucaccc

SEQ ID NO: 930581 - RNA, 18 nt, Human
uaacuggaucuugccaaa

SEQ ID NO: 930582 - RNA, 21 nt, Human
uaacuuuugccagcuugaugg

SEQ ID NO: 930583 - RNA, 19 nt, Human
ucacccacagauuaaacag

SEQ ID NO: 930584 - RNA, 25 nt, Human
ucagugcugaaauuaauauccuaau

SEQ ID NO: 930585 - RNA, 22 nt, Human
ucauucagaagucugcuuuuca

SEQ ID NO: 930586 - RNA, 20 nt, Human
uccacagugguuggaccaau

SEQ ID NO: 930587 - RNA, 23 nt, Human
ucccagacauaucuaaauauccu

SEQ ID NO: 930588 - RNA, 19 nt, Human
ucccaugugaacaagugac

SEQ ID NO: 930589 - RNA, 19 nt, Human
ucccccagcagugugugug

SEQ ID NO: 930590 - RNA, 21 nt, Human
uccucguguauaccguucccc

SEQ ID NO: 930591 - RNA, 19 nt, Human
ucguguauaccguucccca

SEQ ID NO: 930592 - RNA, 24 nt, Human
ucucuaugcagagauuauaaagau

SEQ ID NO: 930593 - RNA, 25 nt, Human
ucuuguguuuuuaguuauaauuguu

SEQ ID NO: 930594 - RNA, 21 nt, Human
ugaacaagugacccugcuaua

SEQ ID NO: 930595 - RNA, 23 nt, Human
ugcaucuucccuuucuugguuuu

SEQ ID NO: 930596 - RNA, 23 nt, Human
ugcuuguuuuucagguuuuuauu

SEQ ID NO: 930597 - RNA, 24 nt, Human
uggauauuuagguuguuuccaauu

SEQ ID NO: 930598 - RNA, 18 nt, Human
uggaucuguuuggauacu

SEQ ID NO: 930599 - RNA, 20 nt, Human
uguaauggcuauuucugcuu

SEQ ID NO: 930600 - RNA, 19 nt, Human
uguacagaguuuguuuggc

SEQ ID NO: 930601 - RNA, 21 nt, Human
uuacugaguuguauguuauau

SEQ ID NO: 930602 - RNA, 20 nt, Human
uucagaagucugcuuuucag

SEQ ID NO: 930603 - RNA, 26 nt, Human
uucccaugugaacaagugacccugcu

SEQ ID NO: 930604 - RNA, 19 nt, Human
uucuauauuuucuucuaaa

SEQ ID NO: 930605 - RNA, 22 nt, Human
uucuugguuuuagauguucauu

SEQ ID NO: 930606 - RNA, 25 nt, Human
uuuacauaaauauuaccuguauccu

SEQ ID NO: 930607 - RNA, 24 nt, Human
uuuccacagugguuggaccaauuu

SEQ ID NO: 930608 - RNA, 20 nt, Human
aaaaaagccaauccugcagg

SEQ ID NO: 930609 - RNA, 19 nt, Human
aaaaagccaauccugcagg

SEQ ID NO: 930610 - RNA, 22 nt, Human
aaaccaaccaacaagcacacuu

SEQ ID NO: 930611 - RNA, 21 nt, Human
aacuacuggccucaagugcuc

SEQ ID NO: 930612 - RNA, 19 nt, Human
aagugcugggauuacaggc

SEQ ID NO: 930613 - RNA, 19 nt, Human
aagugcugggauuacaggc

SEQ ID NO: 930614 - RNA, 23 nt, Human
aagugcugggauuacaggcguga

SEQ ID NO: 930615 - RNA, 26 nt, Human
aagugcugggauuacaggcgugagcc

SEQ ID NO: 930616 - RNA, 19 nt, Human
aauguuacaggguggagua

SEQ ID NO: 930617 - RNA, 22 nt, Human
acaaccuccgccucccggguuc

SEQ ID NO: 930618 - RNA, 20 nt, Human
acacguauuugaccacugaa

SEQ ID NO: 930619 - RNA, 25 nt, Human
acccugcccccuccucagcaccgcc

SEQ ID NO: 930620 - RNA, 19 nt, Human
acggagucucacugugugg

SEQ ID NO: 930621 - RNA, 23 nt, Human
acggagucucacuguguggccca

SEQ ID NO: 930622 - RNA, 18 nt, Human
acgggguuucgccauguu

SEQ ID NO: 930623 - RNA, 23 nt, Human
acgggguuucgccauguuggcca

SEQ ID NO: 930624 - RNA, 24 nt, Human
acgggguuucgccauguuggccag

SEQ ID NO: 930625 - RNA, 21 nt, Human
agcacagcguguuggcuaccu

SEQ ID NO: 930626 - RNA, 22 nt, Human
aggcuguuuuuucuaagcuucu

SEQ ID NO: 930627 - RNA, 22 nt, Human
aguagagacgggguuucgccau

SEQ ID NO: 930628 - RNA, 20 nt, Human
agugcagcggcgcgaucucg

SEQ ID NO: 930629 - RNA, 24 nt, Human
agugcagcggcgcgaucucggcuc

SEQ ID NO: 930630 - RNA, 18 nt, Human
agugcugggauuacaggc

SEQ ID NO: 930631 - RNA, 24 nt, Human
auuggccagguaugguggcucaca

SEQ ID NO: 930632 - RNA, 24 nt, Human
auuuuuguaucuuuaguagagacg

SEQ ID NO: 930633 - RNA, 20 nt, Human
caacaagcacacuucuccaa

SEQ ID NO: 930634 - RNA, 24 nt, Human
caacaagcacacuucuccaacccu

SEQ ID NO: 930635 - RNA, 22 nt, Human
caacccagcuccuacccucacu

SEQ ID NO: 930636 - RNA, 21 nt, Human
caagcgauucuccugccucag

SEQ ID NO: 930637 - RNA, 24 nt, Human
caccacacccagcuaauuuuugua

SEQ ID NO: 930638 - RNA, 18 nt, Human
cacccauggccaacucuc

SEQ ID NO: 930639 - RNA, 23 nt, Human
caccgccugccuuuggucucauu

SEQ ID NO: 930640 - RNA, 21 nt, Human
cacuacaaccuccgccucccg

SEQ ID NO: 930641 - RNA, 23 nt, Human
cacuguguggcccaggcuggagu

SEQ ID NO: 930642 - RNA, 24 nt, Human
cacuguguggcccaggcuggagug

SEQ ID NO: 930643 - RNA, 24 nt, Human
cagcuccuacccucacuuccagau

SEQ ID NO: 930644 - RNA, 21 nt, Human
caggguggaguaggaaaaaug

SEQ ID NO: 930645 - RNA, 24 nt, Human
cauguuggccaggcuggucuccaa

SEQ ID NO: 930646 - RNA, 24 nt, Human
cauuggcaaaugucacuagagggg

SEQ ID NO: 930647 - RNA, 20 nt, Human
cauuugucccuguguguccu

SEQ ID NO: 930648 - RNA, 20 nt, Human
ccagggccccucccuuuccu

SEQ ID NO: 930649 - RNA, 22 nt, Human
ccauggccaacucucgcuagcu

SEQ ID NO: 930650 - RNA, 19 nt, Human
ccauguuggccaggcuggu

SEQ ID NO: 930651 - RNA, 25 nt, Human
ccccuucugucuguccauuuguccc

SEQ ID NO: 930652 - RNA, 24 nt, Human
cccgaagugcugggauuacaggcg

SEQ ID NO: 930653 - RNA, 20 nt, Human
cccggguucaagcgauucuc

SEQ ID NO: 930654 - RNA, 23 nt, Human
cccggguucaagcgauucuccug

SEQ ID NO: 930655 - RNA, 19 nt, Human
cccucccuuuccuucacgc

SEQ ID NO: 930656 - RNA, 22 nt, Human
cccucccuuuccuucacgcuuc

SEQ ID NO: 930657 - RNA, 24 nt, Human
ccgaagugcugggauuacaggcgu

SEQ ID NO: 930658 - RNA, 21 nt, Human
ccgaguagcuggaacuacagg

SEQ ID NO: 930659 - RNA, 24 nt, Human
ccgccucccggguucaagcgauuc

SEQ ID NO: 930660 - RNA, 24 nt, Human
ccgcugaacacaugcaguguuucc

SEQ ID NO: 930661 - RNA, 21 nt, Human
ccucagcaccgccugccuuug

SEQ ID NO: 930662 - RNA, 18 nt, Human
ccuccagggccccucccu

SEQ ID NO: 930663 - RNA, 24 nt, Human
ccucccggguucaagcgauucucc

SEQ ID NO: 930664 - RNA, 24 nt, Human
ccuccuaucccacuguuugaaacc

SEQ ID NO: 930665 - RNA, 18 nt, Human
ccucucuuccuccccuuc

SEQ ID NO: 930666 - RNA, 23 nt, Human
ccugccucagucuccgaguagcu

SEQ ID NO: 930667 - RNA, 24 nt, Human
cgaagugcugggauuacaggcgug

SEQ ID NO: 930668 - RNA, 24 nt, Human
cgccauguuggccaggcuggucuc

SEQ ID NO: 930669 - RNA, 21 nt, Human
cgugagccaccacgccuggcc

SEQ ID NO: 930670 - RNA, 23 nt, Human
cuacaaccuccgccucccggguu

SEQ ID NO: 930671 - RNA, 24 nt, Human
cucacuacaaccuccgccucccgg

SEQ ID NO: 930672 - RNA, 27 nt, Human
cuccccuucugucuguccauuuguccc

SEQ ID NO: 930673 - RNA, 22 nt, Human
cucgggauucugguuuccuaag

SEQ ID NO: 930674 - RNA, 18 nt, Human
cugcccccuccucagcac

SEQ ID NO: 930675 - RNA, 25 nt, Human
cuggaacuacaggugcccaccacac

SEQ ID NO: 930676 - RNA, 22 nt, Human
cuguaauagcaagcugagcaca

SEQ ID NO: 930677 - RNA, 20 nt, Human
cuguagucagccucuccucc

SEQ ID NO: 930678 - RNA, 23 nt, Human
cuucuuagcccguaaacauugcu

SEQ ID NO: 930679 - RNA, 24 nt, Human
gaagugcugggauuacaggcguga

SEQ ID NO: 930680 - RNA, 24 nt, Human
gagacgggguuucgccauguuggc

SEQ ID NO: 930681 - RNA, 19 nt, Human
gaggagggaggguaacauc

SEQ ID NO: 930682 - RNA, 18 nt, Human
gauuacaggcgugagcca

SEQ ID NO: 930683 - RNA, 21 nt, Human
gauuacaggcgugagccacca

SEQ ID NO: 930684 - RNA, 22 nt, Human
gauuacaggcgugagccaccac

SEQ ID NO: 930685 - RNA, 21 nt, Human
gauucuccugccucagucucc

SEQ ID NO: 930686 - RNA, 23 nt, Human
gccauguuggccaggcuggucuc

SEQ ID NO: 930687 - RNA, 19 nt, Human
gcccaggcuggagugcagc

SEQ ID NO: 930688 - RNA, 25 nt, Human
gcugcaaaaaagccaauccugcagg

SEQ ID NO: 930689 - RNA, 19 nt, Human
gcuggagugcagcggcgcg

SEQ ID NO: 930690 - RNA, 24 nt, Human
ggaaggagggguccuguuucuuuc

SEQ ID NO: 930691 - RNA, 19 nt, Human
ggauuacaggcgugagcca

SEQ ID NO: 930692 - RNA, 23 nt, Human
ggccaaugagaggaaacucuggc

SEQ ID NO: 930693 - RNA, 24 nt, Human
ggccucaagugcucugcccaucuc

SEQ ID NO: 930694 - RNA, 23 nt, Human
ggcgcgaucucggcucacuacaa

SEQ ID NO: 930695 - RNA, 23 nt, Human
gggaaggagggguccuguuucuu

SEQ ID NO: 930696 - RNA, 18 nt, Human
gggaggguaacaucuuuu

SEQ ID NO: 930697 - RNA, 23 nt, Human
gggguuucgccauguuggccagg

SEQ ID NO: 930698 - RNA, 22 nt, Human
ggguuucgccauguuggccagg

SEQ ID NO: 930699 - RNA, 23 nt, Human
guacugguuuguaucugucuuuu

SEQ ID NO: 930700 - RNA, 23 nt, Human
guagagacgggguuucgccaugu

SEQ ID NO: 930701 - RNA, 22 nt, Human
gucacaucuccacucgggauuc

SEQ ID NO: 930702 - RNA, 20 nt, Human
guccuaggccuguuugugcc

SEQ ID NO: 930703 - RNA, 19 nt, Human
guggcccaggcuggagugc

SEQ ID NO: 930704 - RNA, 26 nt, Human
uaaagacacgaggccucucuuccucc

SEQ ID NO: 930705 - RNA, 22 nt, Human
uaaguuuccaacccagcuccua

SEQ ID NO: 930706 - RNA, 24 nt, Human
uaauuuuuguaucuuuaguagaga

SEQ ID NO: 930707 - RNA, 22 nt, Human
uacaggcgugagccaccacgcc

SEQ ID NO: 930708 - RNA, 22 nt, Human
uacaggcgugagccaccacgcc

SEQ ID NO: 930709 - RNA, 23 nt, Human
uacaggcgugagccaccacgccu

SEQ ID NO: 930710 - RNA, 21 nt, Human
uacaggugcccaccacaccca

SEQ ID NO: 930711 - RNA, 22 nt, Human
uagagacgggguuucgccaugu

SEQ ID NO: 930712 - RNA, 20 nt, Human
uagcuggaacuacaggugcc

SEQ ID NO: 930713 - RNA, 23 nt, Human
uaggauacaccccuuugccacuc

SEQ ID NO: 930714 - RNA, 24 nt, Human
uaguagagacgggguuucgccaug

SEQ ID NO: 930715 - RNA, 24 nt, Human
uagucagccucuccuccagggccc

SEQ ID NO: 930716 - RNA, 24 nt, Human
ucacuacaaccuccgccucccggg

SEQ ID NO: 930717 - RNA, 25 nt, Human
ucacuacaaccuccgccucccgggu

SEQ ID NO: 930718 - RNA, 27 nt, Human
ucacuacaaccuccgccucccggguuc

SEQ ID NO: 930719 - RNA, 19 nt, Human
ucagggaaaaaauaaagac

SEQ ID NO: 930720 - RNA, 21 nt, Human
ucagggaaaaaauaaagacac

SEQ ID NO: 930721 - RNA, 25 nt, Human
ucagggaauauuuguuaggggauag

SEQ ID NO: 930722 - RNA, 19 nt, Human
ucccgaagugcugggauua

SEQ ID NO: 930723 - RNA, 24 nt, Human
ucccgaagugcugggauuacaggc

SEQ ID NO: 930724 - RNA, 21 nt, Human
ucccggguucaagcgauucuc

SEQ ID NO: 930725 - RNA, 24 nt, Human
ucccggguucaagcgauucuccug

SEQ ID NO: 930726 - RNA, 18 nt, Human
ucccuguguguccuuccu

SEQ ID NO: 930727 - RNA, 23 nt, Human
uccgaguagcuggaacuacaggu

SEQ ID NO: 930728 - RNA, 24 nt, Human
uccgaguagcuggaacuacaggug

SEQ ID NO: 930729 - RNA, 23 nt, Human
uccucuuuuuugagaggagggag

SEQ ID NO: 930730 - RNA, 22 nt, Human
ucgccauguuggccaggcuggu

SEQ ID NO: 930731 - RNA, 24 nt, Human
ucgccauguuggccaggcuggucu

SEQ ID NO: 930732 - RNA, 24 nt, Human
ucucacuguguggcccaggcugga

SEQ ID NO: 930733 - RNA, 26 nt, Human
ucucacuguguggcccaggcuggagu

SEQ ID NO: 930734 - RNA, 20 nt, Human
ucucggccucccgaagugcu

SEQ ID NO: 930735 - RNA, 21 nt, Human
ucugcucugggcugcaaaaaa

SEQ ID NO: 930736 - RNA, 21 nt, Human
ucuguagucagccucuccucc

SEQ ID NO: 930737 - RNA, 21 nt, Human
ucugucuguccauuugucccu

SEQ ID NO: 930738 - RNA, 25 nt, Human
ucuuacacaaacuuggaguucaaga

SEQ ID NO: 930739 - RNA, 22 nt, Human
ucuuuaguagagacgggguuuc

SEQ ID NO: 930740 - RNA, 23 nt, Human
ucuuuaguagagacgggguuucg

SEQ ID NO: 930741 - RNA, 19 nt, Human
ugaaaccaaccaacaagca

SEQ ID NO: 930742 - RNA, 23 nt, Human
ugaauuaacacaaaaauuggcug

SEQ ID NO: 930743 - RNA, 20 nt, Human
ugacugcagaccagggacug

SEQ ID NO: 930744 - RNA, 18 nt, Human
ugagaggaaacucuggca

SEQ ID NO: 930745 - RNA, 22 nt, Human
ugagcacagcguguuggcuacc

SEQ ID NO: 930746 - RNA, 24 nt, Human
ugauuaaaaaguuuuuugucuguu

SEQ ID NO: 930747 - RNA, 23 nt, Human
ugccucagucuccgaguagcugg

SEQ ID NO: 930748 - RNA, 21 nt, Human
ugccuggguuuggccaaugag

SEQ ID NO: 930749 - RNA, 24 nt, Human
ugcugggauuacaggcgugagcca

SEQ ID NO: 930750 - RNA, 21 nt, Human
uggaacuacaggugcccacca

SEQ ID NO: 930751 - RNA, 23 nt, Human
uggagugcagcggcgcgaucucg

SEQ ID NO: 930752 - RNA, 24 nt, Human
uggagugcagcggcgcgaucucgg

SEQ ID NO: 930753 - RNA, 19 nt, Human
uggauaggauacaccccuu

SEQ ID NO: 930754 - RNA, 21 nt, Human
uggccaggcuggucuccaacu

SEQ ID NO: 930755 - RNA, 18 nt, Human
uggcccaggcuggagugc

SEQ ID NO: 930756 - RNA, 23 nt, Human
uggcccaggcuggagugcagcgg

SEQ ID NO: 930757 - RNA, 18 nt, Human
uggccucaagugcucugc

SEQ ID NO: 930758 - RNA, 18 nt, Human
ugggauuacaggcgugag

SEQ ID NO: 930759 - RNA, 19 nt, Human
ugggauuacaggcgugagc

SEQ ID NO: 930760 - RNA, 22 nt, Human
ugggauuacaggcgugagccac

SEQ ID NO: 930761 - RNA, 23 nt, Human
ugggauuacaggcgugagccacc

SEQ ID NO: 930762 - RNA, 24 nt, Human
ugggauuacaggcgugagccacca

SEQ ID NO: 930763 - RNA, 19 nt, Human
ugggcugcaaaaaagccaa

SEQ ID NO: 930764 - RNA, 20 nt, Human
ugguuucugccccacugccc

SEQ ID NO: 930765 - RNA, 19 nt, Human
uguaauagcaagcugagca

SEQ ID NO: 930766 - RNA, 24 nt, Human
ugucuguagucagccucuccucca

SEQ ID NO: 930767 - RNA, 21 nt, Human
uguggcccaggcuggagugca

SEQ ID NO: 930768 - RNA, 22 nt, Human
uguguggcccaggcuggagugc

SEQ ID NO: 930769 - RNA, 24 nt, Human
uuaacacaaaaauuggccagguau

SEQ ID NO: 930770 - RNA, 21 nt, Human
uuaacauuacacaucgucuaa

SEQ ID NO: 930771 - RNA, 18 nt, Human
uuaguagagacgggguuu

SEQ ID NO: 930772 - RNA, 22 nt, Human
uuaguagagacgggguuucgcc

SEQ ID NO: 930773 - RNA, 24 nt, Human
uuaguagagacgggguuucgccau

SEQ ID NO: 930774 - RNA, 21 nt, Human
uucaagcgauucuccugccuc

SEQ ID NO: 930775 - RNA, 23 nt, Human
uucaagcgauucuccugccucag

SEQ ID NO: 930776 - RNA, 24 nt, Human
uucaagcgauucuccugccucagu

SEQ ID NO: 930777 - RNA, 20 nt, Human
uuggcaaaugucacuagagg

SEQ ID NO: 930778 - RNA, 22 nt, Human
uuggcaaaugucacuagagggg

SEQ ID NO: 930779 - RNA, 24 nt, Human
uuucgccauguuggccaggcuggu

SEQ ID NO: 930780 - RNA, 18 nt, Human
uuucucaccuuuucccug

SEQ ID NO: 930781 - RNA, 27 nt, Human
uuucuguaauagcaagcugagcacagc

SEQ ID NO: 930782 - RNA, 19 nt, Human
uuucuuucuaaagccacug

SEQ ID NO: 930783 - RNA, 20 nt, Human
uuuuuguaucuuuaguagag

SEQ ID NO: 930784 - RNA, 26 nt, Human
uuuuuuuuuuuugagacggagucuca

SEQ ID NO: 930785 - RNA, 22 nt, Human
uuuuuuuuuuuuuugagacgga

SEQ ID NO: 930786 - RNA, 18 nt, Human
uuuuuuuuuuuuuuuuug

SEQ ID NO: 930787 - RNA, 19 nt, Human
aaacauauuccaagggcaa

SEQ ID NO: 930788 - RNA, 22 nt, Human
aacuaccugagaccagcuguga

SEQ ID NO: 930789 - RNA, 25 nt, Human
acagaauaacucuucuuaacuaaaa

SEQ ID NO: 930790 - RNA, 19 nt, Human
acaucaaagugugguguuu

SEQ ID NO: 930791 - RNA, 18 nt, Human
acugcaaauuugacugug

SEQ ID NO: 930792 - RNA, 19 nt, Human
auaccccaccaaacaaagu

SEQ ID NO: 930793 - RNA, 22 nt, Human
caagcacaaguacuggggacac

SEQ ID NO: 930794 - RNA, 20 nt, Human
ccaccaaacaaagucuugaa

SEQ ID NO: 930795 - RNA, 23 nt, Human
cccaccaaacaaagucuugaagg

SEQ ID NO: 930796 - RNA, 19 nt, Human
ccccaccaaacaaagucuu

SEQ ID NO: 930797 - RNA, 25 nt, Human
cuucuugacaauauaaaugcugcag

SEQ ID NO: 930798 - RNA, 21 nt, Human
gaaacuuugcacgguaugagc

SEQ ID NO: 930799 - RNA, 21 nt, Human
gauguaguucuucuggacaga

SEQ ID NO: 930800 - RNA, 21 nt, Human
ggacagaccacaacucuaaga

SEQ ID NO: 930801 - RNA, 18 nt, Human
ggguauguuucacuucuu

SEQ ID NO: 930802 - RNA, 20 nt, Human
guacauacauauuauauaua

SEQ ID NO: 930803 - RNA, 23 nt, Human
guacauacauauuauauauacac

SEQ ID NO: 930804 - RNA, 22 nt, Human
guuaaaaaagaaacauauucca

SEQ ID NO: 930805 - RNA, 21 nt, Human
uaaaaaagaaacauauuccaa

SEQ ID NO: 930806 - RNA, 20 nt, Human
uaaaaaccuagucaaacaag

SEQ ID NO: 930807 - RNA, 23 nt, Human
uacauacauauuauauauacaca

SEQ ID NO: 930808 - RNA, 23 nt, Human
uauacacauacauauauauacua

SEQ ID NO: 930809 - RNA, 19 nt, Human
uauauacacauacauauau

SEQ ID NO: 930810 - RNA, 20 nt, Human
uauauacacauacauauaua

SEQ ID NO: 930811 - RNA, 19 nt, Human
uauauauacacauacauau

SEQ ID NO: 930812 - RNA, 25 nt, Human
uauauauacacauacauauauauag

SEQ ID NO: 930813 - RNA, 24 nt, Human
uccagcuugacaagauugagaggc

SEQ ID NO: 930814 - RNA, 23 nt, Human
uccauaacuauagcugaugcaga

SEQ ID NO: 930815 - RNA, 22 nt, Human
ugaaguaaaaccgauaccuguc

SEQ ID NO: 930816 - RNA, 24 nt, Human
ugacaagauugagaggcccaugcc

SEQ ID NO: 930817 - RNA, 19 nt, Human
ugacuacagcauggaaaaa

SEQ ID NO: 930818 - RNA, 24 nt, Human
ugacuacagcauggaaaaaaauag

SEQ ID NO: 930819 - RNA, 25 nt, Human
ugacuacagcauggaaaaaaauagu

SEQ ID NO: 930820 - RNA, 19 nt, Human
ugaugcagaaaguccagcc

SEQ ID NO: 930821 - RNA, 18 nt, Human
ugcagaaaguccagccag

SEQ ID NO: 930822 - RNA, 19 nt, Human
ugcagaaaguccagccagu

SEQ ID NO: 930823 - RNA, 19 nt, Human
ugccagacuucauccagcu

SEQ ID NO: 930824 - RNA, 18 nt, Human
uggaaauucaagcacaag

SEQ ID NO: 930825 - RNA, 21 nt, Human
uggggacacaucaaagugugg

SEQ ID NO: 930826 - RNA, 19 nt, Human
ugguaugcuuaguauauuc

SEQ ID NO: 930827 - RNA, 24 nt, Human
uguaaacaaaaaguagauaguuuc

SEQ ID NO: 930828 - RNA, 19 nt, Human
uuaguauauuccaaccuaa

SEQ ID NO: 930829 - RNA, 21 nt, Human
uucaagcacaaguacugggga

SEQ ID NO: 930830 - RNA, 26 nt, Human
uucacauuuuauauguugcacauagc

SEQ ID NO: 930831 - RNA, 21 nt, Human
uucuaauuuaaguaaguuuga

SEQ ID NO: 930832 - RNA, 21 nt, Human
uuuuauauguugcacauagcc

SEQ ID NO: 930833 - RNA, 19 nt, Human
uuuugcauuucaaaaguug

SEQ ID NO: 930834 - RNA, 27 nt, Human
aaaaaaaaaccaaccugagagucagaa

SEQ ID NO: 930835 - RNA, 26 nt, Human
aaaaaaacaaaauauaaccuugcaaa

SEQ ID NO: 930836 - RNA, 24 nt, Human
aaaaaaaccaaccugagagucaga

SEQ ID NO: 930837 - RNA, 23 nt, Human
aaacuccuggacucaagcaaucc

SEQ ID NO: 930838 - RNA, 18 nt, Human
aaagcugggauuacaggc

SEQ ID NO: 930839 - RNA, 19 nt, Human
aaaguuaugagaauuuaug

SEQ ID NO: 930840 - RNA, 24 nt, Human
aagcaauccucuugccuuggucuc

SEQ ID NO: 930841 - RNA, 25 nt, Human
aagcaauccucuugccuuggucucc

SEQ ID NO: 930842 - RNA, 24 nt, Human
acagcauuugguucucuaaaaugu

SEQ ID NO: 930843 - RNA, 19 nt, Human
acauagcaccucgccugau

SEQ ID NO: 930844 - RNA, 20 nt, Human
accccaagaaaguuaugaga

SEQ ID NO: 930845 - RNA, 22 nt, Human
accccaagaaaguuaugagaau

SEQ ID NO: 930846 - RNA, 25 nt, Human
caaacuccuggacucaagcaauccu

SEQ ID NO: 930847 - RNA, 24 nt, Human
caaagcugggauuacaggccugag

SEQ ID NO: 930848 - RNA, 25 nt, Human
caaaugcaacaaguacaugaggucu

SEQ ID NO: 930849 - RNA, 18 nt, Human
caagcaauccucuugccu

SEQ ID NO: 930850 - RNA, 19 nt, Human
caccaccuaaaaauccaac

SEQ ID NO: 930851 - RNA, 22 nt, Human
caccaccuaaaaauccaacuca

SEQ ID NO: 930852 - RNA, 23 nt, Human
caccuaaaaauccaacucacaga

SEQ ID NO: 930853 - RNA, 25 nt, Human
caccuaaaaauccaacucacagaag

SEQ ID NO: 930854 - RNA, 20 nt, Human
caugacugauuucuacagcu

SEQ ID NO: 930855 - RNA, 18 nt, Human
ccaacugucuuacaguga

SEQ ID NO: 930856 - RNA, 23 nt, Human
ccaagaaaguuaugagaauuuau

SEQ ID NO: 930857 - RNA, 18 nt, Human
ccaauaaauaaaagcuac

SEQ ID NO: 930858 - RNA, 22 nt, Human
ccaccaccuaaaaauccaacuc

SEQ ID NO: 930859 - RNA, 28 nt, Human
cccaaagcugggauuacaggccugagac

SEQ ID NO: 930860 - RNA, 18 nt, Human
ccccuauaccauacugcu

SEQ ID NO: 930861 - RNA, 19 nt, Human
cccuauaccauacugcuuc

SEQ ID NO: 930862 - RNA, 20 nt, Human
ccuggacucaagcaauccuc

SEQ ID NO: 930863 - RNA, 22 nt, Human
cuacagcucuucuauaggaaau

SEQ ID NO: 930864 - RNA, 22 nt, Human
cucccaaagcugggauuacagg

SEQ ID NO: 930865 - RNA, 21 nt, Human
cuuacagugaaagccugugca

SEQ ID NO: 930866 - RNA, 21 nt, Human
cuuggucucccaaagcuggga

SEQ ID NO: 930867 - RNA, 23 nt, Human
gaaaaaaaaaaccaaccugagag

SEQ ID NO: 930868 - RNA, 23 nt, Human
gagagguuuguacuagauugcuu

SEQ ID NO: 930869 - RNA, 18 nt, Human
gauuacaggccugagaca

SEQ ID NO: 930870 - RNA, 22 nt, Human
gccuuggucucccaaagcuggg

SEQ ID NO: 930871 - RNA, 19 nt, Human
gcuagucucaaacuccugg

SEQ ID NO: 930872 - RNA, 21 nt, Human
ggccugagacauagcaccucg

SEQ ID NO: 930873 - RNA, 21 nt, Human
guauaauggaaaaaaaaaacc

SEQ ID NO: 930874 - RNA, 19 nt, Human
guuuguacuagauugcuuc

SEQ ID NO: 930875 - RNA, 18 nt, Human
uaaaaugucuuaagcuua

SEQ ID NO: 930876 - RNA, 22 nt, Human
uaacaauauuccuguaauuuau

SEQ ID NO: 930877 - RNA, 24 nt, Human
uaaccuugcaaagguuauacugcc

SEQ ID NO: 930878 - RNA, 20 nt, Human
uaagcaacuugcccaagguc

SEQ ID NO: 930879 - RNA, 19 nt, Human
uaauagcaaaguaaagacu

SEQ ID NO: 930880 - RNA, 22 nt, Human
uacuagauugcuuccaagaucc

SEQ ID NO: 930881 - RNA, 18 nt, Human
uacugcuucuacuacuuc

SEQ ID NO: 930882 - RNA, 23 nt, Human
uauaccauacugcuucuacuacu

SEQ ID NO: 930883 - RNA, 19 nt, Human
uaucauaaacagcauuugg

SEQ ID NO: 930884 - RNA, 22 nt, Human
ucccaaagcugggauuacaggc

SEQ ID NO: 930885 - RNA, 19 nt, Human
ucgccugaugauauucucu

SEQ ID NO: 930886 - RNA, 24 nt, Human
ucucccaaagcugggauuacaggc

SEQ ID NO: 930887 - RNA, 22 nt, Human
ucugugcugaaauauauuacaa

SEQ ID NO: 930888 - RNA, 23 nt, Human
ucuuacagugaaagccugugcaa

SEQ ID NO: 930889 - RNA, 23 nt, Human
ucuucaagaaacauuucuuucac

SEQ ID NO: 930890 - RNA, 22 nt, Human
ucuugcugacacaggaaaaaaa

SEQ ID NO: 930891 - RNA, 25 nt, Human
ugaaaagaggcuguaaaguauaaug

SEQ ID NO: 930892 - RNA, 20 nt, Human
ugaagcagagauaagcaacu

SEQ ID NO: 930893 - RNA, 23 nt, Human
ugacaauauuuuugagcuggaag

SEQ ID NO: 930894 - RNA, 19 nt, Human
ugagcuggaagagaccuuu

SEQ ID NO: 930895 - RNA, 19 nt, Human
ugccuuggucucccaaagc

SEQ ID NO: 930896 - RNA, 21 nt, Human
uggaaaaaaaaaaccaaccug

SEQ ID NO: 930897 - RNA, 24 nt, Human
uggacucaagcaauccucuugccu

SEQ ID NO: 930898 - RNA, 18 nt, Human
ugggauuacaggccugag

SEQ ID NO: 930899 - RNA, 21 nt, Human
ugggauuacaggccugagaca

SEQ ID NO: 930900 - RNA, 21 nt, Human
ugggauuacaggccugagaca

SEQ ID NO: 930901 - RNA, 24 nt, Human
uguacuagauugcuuccaagaucc

SEQ ID NO: 930902 - RNA, 18 nt, Human
ugucacaggaaugacaau

SEQ ID NO: 930903 - RNA, 23 nt, Human
uguuauaaguaaugauacauauu

SEQ ID NO: 930904 - RNA, 21 nt, Human
uucauaacaauauuccuguaa

SEQ ID NO: 930905 - RNA, 23 nt, Human
uugaccccaagaaaguuaugaga

SEQ ID NO: 930906 - RNA, 21 nt, Human
uugccuuggucucccaaagcu

SEQ ID NO: 930907 - RNA, 18 nt, Human
uuuaugaaacuacaugac

SEQ ID NO: 930908 - RNA, 19 nt, Human
aaaaaaaaaacucacccau

SEQ ID NO: 930909 - RNA, 19 nt, Human
aagaagcuggcuggaggag

SEQ ID NO: 930910 - RNA, 20 nt, Human
acugggggcaggugugugcc

SEQ ID NO: 930911 - RNA, 27 nt, Human
agcccucuccaaggcacaaucuuauug

SEQ ID NO: 930912 - RNA, 18 nt, Human
aggacuuaugaauggaaa

SEQ ID NO: 930913 - RNA, 23 nt, Human
aggcgagacugggggcaggugug

SEQ ID NO: 930914 - RNA, 22 nt, Human
aggugauucagucuggcuagga

SEQ ID NO: 930915 - RNA, 18 nt, Human
aucuugacaaauguaaaa

SEQ ID NO: 930916 - RNA, 23 nt, Human
augccucucugcgggaggaaagg

SEQ ID NO: 930917 - RNA, 21 nt, Human
auuucauaguguggcuauaau

SEQ ID NO: 930918 - RNA, 24 nt, Human
caaucuuauuggaggggaaaauaa

SEQ ID NO: 930919 - RNA, 21 nt, Human
ccggaaccuaaagguagaaaa

SEQ ID NO: 930920 - RNA, 23 nt, Human
cgggaggaaaggagagugcaggc

SEQ ID NO: 930921 - RNA, 20 nt, Human
cugcgggaggaaaggagagu

SEQ ID NO: 930922 - RNA, 20 nt, Human
cuugacaaauguaaaacucu

SEQ ID NO: 930923 - RNA, 20 nt, Human
gaaaaguggguuugugagga

SEQ ID NO: 930924 - RNA, 24 nt, Human
gaaaauaacacacauaccaaaaca

SEQ ID NO: 930925 - RNA, 19 nt, Human
gaagaaaauuuugaagcau

SEQ ID NO: 930926 - RNA, 24 nt, Human
gagccggaaccuaaagguagaaaa

SEQ ID NO: 930927 - RNA, 21 nt, Human
gaggagaccgccucuggaacc

SEQ ID NO: 930928 - RNA, 21 nt, Human
ggaggggaaaauaacacacau

SEQ ID NO: 930929 - RNA, 22 nt, Human
guaggguaugugaggcacucag

SEQ ID NO: 930930 - RNA, 25 nt, Human
uaccaaaacaaaaaauucagggcag

SEQ ID NO: 930931 - RNA, 24 nt, Human
uagcuuuuuuuucaacuguuuaca

SEQ ID NO: 930932 - RNA, 27 nt, Human
uaggcaucugagguguuuacaauuuuu

SEQ ID NO: 930933 - RNA, 27 nt, Human
uauauguauuuuucuacguguguauau

SEQ ID NO: 930934 - RNA, 24 nt, Human
uauguauuuuucuacguguguaua

SEQ ID NO: 930935 - RNA, 21 nt, Human
uauuucauaguguggcuauaa

SEQ ID NO: 930936 - RNA, 18 nt, Human
ucaauaaaaauaauacac

SEQ ID NO: 930937 - RNA, 21 nt, Human
ucugcgggaggaaaggagagu

SEQ ID NO: 930938 - RNA, 23 nt, Human
ucuguauugucuuugaaaaaaaa

SEQ ID NO: 930939 - RNA, 18 nt, Human
ugagaggaggagaaagga

SEQ ID NO: 930940 - RNA, 19 nt, Human
ugaggcacucaggcaagag

SEQ ID NO: 930941 - RNA, 24 nt, Human
ugcgggaggaaaggagagugcagg

SEQ ID NO: 930942 - RNA, 20 nt, Human
ugcuuacauagaaguggaau

SEQ ID NO: 930943 - RNA, 21 nt, Human
ugcuuacauagaaguggaaua

SEQ ID NO: 930944 - RNA, 24 nt, Human
ugggaagaaaauuuugaagcauuu

SEQ ID NO: 930945 - RNA, 21 nt, Human
ugggaggugauucagucuggc

SEQ ID NO: 930946 - RNA, 22 nt, Human
uguaaaacacucuagaugcugu

SEQ ID NO: 930947 - RNA, 19 nt, Human
uguagcuuuuuuuucaacu

SEQ ID NO: 930948 - RNA, 21 nt, Human
ugugaggacuuaugaauggaa

SEQ ID NO: 930949 - RNA, 21 nt, Human
uguguauauggauuucacaug

SEQ ID NO: 930950 - RNA, 19 nt, Human
uuacuggcauauaauugug

SEQ ID NO: 930951 - RNA, 18 nt, Human
uuuuuuuuuuuuuuucug

SEQ ID NO: 930952 - RNA, 22 nt, Human
uuuuuuuuuuuuuuucuguauu

SEQ ID NO: 930953 - RNA, 25 nt, Human
aagugauccucccaccucagccucc

SEQ ID NO: 930954 - RNA, 25 nt, Human
acacuggaacuuccacaaccggagg

SEQ ID NO: 930955 - RNA, 25 nt, Human
accacaccaagcuaauuuuuugauc

SEQ ID NO: 930956 - RNA, 23 nt, Human
accucagccuccuggguagcuga

SEQ ID NO: 930957 - RNA, 22 nt, Human
acuuuuguaaugagaaaaaaaa

SEQ ID NO: 930958 - RNA, 20 nt, Human
agagaagguuaaagcccaga

SEQ ID NO: 930959 - RNA, 20 nt, Human
agauguugauucagacuccu

SEQ ID NO: 930960 - RNA, 24 nt, Human
aggcgcgcgccaccacaccaagcu

SEQ ID NO: 930961 - RNA, 18 nt, Human
aguauaauaggcuuaaaa

SEQ ID NO: 930962 - RNA, 25 nt, Human
agugauccucccaccucagccuccu

SEQ ID NO: 930963 - RNA, 21 nt, Human
agugcagugguaugaucagug

SEQ ID NO: 930964 - RNA, 24 nt, Human
agugcagugguaugaucaguggcu

SEQ ID NO: 930965 - RNA, 25 nt, Human
agugcagugguaugaucaguggcuc

SEQ ID NO: 930966 - RNA, 20 nt, Human
cacagcagccucgaccuccc

SEQ ID NO: 930967 - RNA, 20 nt, Human
cagccuccuggguagcugag

SEQ ID NO: 930968 - RNA, 21 nt, Human
cagccucgaccucccgggcuu

SEQ ID NO: 930969 - RNA, 24 nt, Human
cagccucgaccucccgggcuuaag

SEQ ID NO: 930970 - RNA, 24 nt, Human
cccaccucagccuccuggguagcu

SEQ ID NO: 930971 - RNA, 22 nt, Human
cccgggcuuaagugauccuccc

SEQ ID NO: 930972 - RNA, 23 nt, Human
cccgggcuuaagugauccuccca

SEQ ID NO: 930973 - RNA, 20 nt, Human
ccucgaccucccgggcuuaa

SEQ ID NO: 930974 - RNA, 21 nt, Human
ccucgaccucccgggcuuaag

SEQ ID NO: 930975 - RNA, 24 nt, Human
cgcgcgccaccacaccaagcuaau

SEQ ID NO: 930976 - RNA, 23 nt, Human
cuagaaauccucuaccgaagugg

SEQ ID NO: 930977 - RNA, 18 nt, Human
cucacaauauggcccagg

SEQ ID NO: 930978 - RNA, 18 nt, Human
cucacagcagccucgacc

SEQ ID NO: 930979 - RNA, 24 nt, Human
cucacagcagccucgaccucccgg

SEQ ID NO: 930980 - RNA, 20 nt, Human
cucuguugcccagacuggag

SEQ ID NO: 930981 - RNA, 24 nt, Human
cugaaacaggaucgcucuguugcc

SEQ ID NO: 930982 - RNA, 24 nt, Human
cuuaagugauccucccaccucagc

SEQ ID NO: 930983 - RNA, 25 nt, Human
cuuccacagaaguuucgcuuuauca

SEQ ID NO: 930984 - RNA, 24 nt, Human
cuuuuguaaugagaaaaaaaaaaa

SEQ ID NO: 930985 - RNA, 26 nt, Human
gaaaauagagauauaccccaaaaugu

SEQ ID NO: 930986 - RNA, 22 nt, Human
gaagagaagguuaaagcccaga

SEQ ID NO: 930987 - RNA, 18 nt, Human
gagaaauaacaucaacuu

SEQ ID NO: 930988 - RNA, 24 nt, Human
gaucgcucuguugcccagacugga

SEQ ID NO: 930989 - RNA, 20 nt, Human
gcccagacuggagugcagug

SEQ ID NO: 930990 - RNA, 24 nt, Human
gcccagacuggagugcagugguau

SEQ ID NO: 930991 - RNA, 20 nt, Human
gcccaggcugguguugaacu

SEQ ID NO: 930992 - RNA, 23 nt, Human
gcgcgccaccacaccaagcuaau

SEQ ID NO: 930993 - RNA, 18 nt, Human
gcucacggcucacagcag

SEQ ID NO: 930994 - RNA, 25 nt, Human
gcucuguugcccagacuggagugca

SEQ ID NO: 930995 - RNA, 21 nt, Human
gucuuggaucuuuuuuuucuc

SEQ ID NO: 930996 - RNA, 24 nt, Human
gugauccucccaccucagccuccu

SEQ ID NO: 930997 - RNA, 18 nt, Human
uaagugauccucccaccu

SEQ ID NO: 930998 - RNA, 23 nt, Human
uaauuuuuugaucgucuguagag

SEQ ID NO: 930999 - RNA, 19 nt, Human
uaccacgagaaauaacauc

SEQ ID NO: 931000 - RNA, 24 nt, Human
uagaagagaagguuaaagcccaga

SEQ ID NO: 931001 - RNA, 23 nt, Human
ucacagcagccucgaccucccgg

SEQ ID NO: 931002 - RNA, 24 nt, Human
ucacagcagccucgaccucccggg

SEQ ID NO: 931003 - RNA, 22 nt, Human
ucacauuuugaacuaacuugga

SEQ ID NO: 931004 - RNA, 26 nt, Human
uccucccaccucagccuccuggguag

SEQ ID NO: 931005 - RNA, 19 nt, Human
uccucuaccgaaguggaau

SEQ ID NO: 931006 - RNA, 24 nt, Human
uccuggguagcugagaucacaggc

SEQ ID NO: 931007 - RNA, 22 nt, Human
ucgcucuguugcccagacugga

SEQ ID NO: 931008 - RNA, 24 nt, Human
ucuguugcccagacuggagugcag

SEQ ID NO: 931009 - RNA, 24 nt, Human
ugagaucacaggcgcgcgccacca

SEQ ID NO: 931010 - RNA, 21 nt, Human
ugcccagacuggagugcagug

SEQ ID NO: 931011 - RNA, 21 nt, Human
uggaacuuccacagaaguuuc

SEQ ID NO: 931012 - RNA, 19 nt, Human
uggagugcagugguaugau

SEQ ID NO: 931013 - RNA, 21 nt, Human
uggagugcagugguaugauca

SEQ ID NO: 931014 - RNA, 25 nt, Human
uggagugcagugguaugaucagugg

SEQ ID NO: 931015 - RNA, 26 nt, Human
uguaaugagaaaaaaaaaaaaaaagc

SEQ ID NO: 931016 - RNA, 21 nt, Human
uguagagacguguucucacaa

SEQ ID NO: 931017 - RNA, 23 nt, Human
uuaauuagcccacaagaaacuag

SEQ ID NO: 931018 - RNA, 22 nt, Human
uuacugaggagugcaacggugg

SEQ ID NO: 931019 - RNA, 20 nt, Human
uuuguaaacgcuaauauuac

SEQ ID NO: 931020 - RNA, 22 nt, Human
uuuucugaauuuaccacgagaa

SEQ ID NO: 931021 - RNA, 25 nt, Human
uuuucugaauuuaccacgagaaaua

SEQ ID NO: 931022 - RNA, 20 nt, Human
uuuuuuuuuuuuagaagagu

SEQ ID NO: 931023 - RNA, 20 nt, Human
aacccaaaaguaaaaaauaa

SEQ ID NO: 931024 - RNA, 21 nt, Human
auaaaagcuccugacuccuuu

SEQ ID NO: 931025 - RNA, 23 nt, Human
caagcuuacuuaacaaucauaaa

SEQ ID NO: 931026 - RNA, 19 nt, Human
cauaugaucuaggugaacc

SEQ ID NO: 931027 - RNA, 21 nt, Human
ccaauuuacauaguaaaguca

SEQ ID NO: 931028 - RNA, 18 nt, Human
ccauauucucagcaaagu

SEQ ID NO: 931029 - RNA, 23 nt, Human
cccacagcuccucuccuucacua

SEQ ID NO: 931030 - RNA, 22 nt, Human
ccuaacuccucauuccuucucc

SEQ ID NO: 931031 - RNA, 19 nt, Human
cucaggauuugccuuuaug

SEQ ID NO: 931032 - RNA, 19 nt, Human
gauuccugacccacagcuc

SEQ ID NO: 931033 - RNA, 24 nt, Human
uaaaugguaugaauauauauuuug

SEQ ID NO: 931034 - RNA, 24 nt, Human
uaaauuacaaaaaacgcacuauga

SEQ ID NO: 931035 - RNA, 19 nt, Human
uacaagaucuaacacuaag

SEQ ID NO: 931036 - RNA, 23 nt, Human
uagaaguuauguuuguugauguu

SEQ ID NO: 931037 - RNA, 23 nt, Human
uauaaaacaaugcuuguggaaaa

SEQ ID NO: 931038 - RNA, 24 nt, Human
uauaaaauacaaugcagcccuuga

SEQ ID NO: 931039 - RNA, 23 nt, Human
uauucuguuuucuuccuuacugc

SEQ ID NO: 931040 - RNA, 24 nt, Human
ucagcaaaguuggcauaaaucuga

SEQ ID NO: 931041 - RNA, 18 nt, Human
uccucauuccuucuccuu

SEQ ID NO: 931042 - RNA, 24 nt, Human
uccugacuccuuuuaaggaccaaa

SEQ ID NO: 931043 - RNA, 28 nt, Human
ucuaacacuaagcuuguguuauccugau

SEQ ID NO: 931044 - RNA, 21 nt, Human
ugacccacagcuccucuccuu

SEQ ID NO: 931045 - RNA, 23 nt, Human
ugacccacagcuccucuccuuca

SEQ ID NO: 931046 - RNA, 22 nt, Human
ugaccugaauaaacaggguuau

SEQ ID NO: 931047 - RNA, 23 nt, Human
ugauuccugacccacagcuccuc

SEQ ID NO: 931048 - RNA, 23 nt, Human
ugcauacuuuacaauaaagaaaa

SEQ ID NO: 931049 - RNA, 20 nt, Human
ugcuuguggaaaauuaaccu

SEQ ID NO: 931050 - RNA, 22 nt, Human
uggaaaauuaaccuaggagaaa

SEQ ID NO: 931051 - RNA, 21 nt, Human
uggccauagauuaccacaaaa

SEQ ID NO: 931052 - RNA, 23 nt, Human
uguucacucaucuauacccucca

SEQ ID NO: 931053 - RNA, 25 nt, Human
uguuuucuuccuuacugccauuuca

SEQ ID NO: 931054 - RNA, 19 nt, Human
uuacaaaaaacgcacuaug

SEQ ID NO: 931055 - RNA, 18 nt, Human
uuccauguguaaguuuua

SEQ ID NO: 931056 - RNA, 24 nt, Human
uucuuccuuacugccauuucacau

SEQ ID NO: 931057 - RNA, 18 nt, Human
uuuuuuuuuuuuuuuuug

SEQ ID NO: 931058 - RNA, 19 nt, Human
uuuuuuuuuuuuuuuuugu

SEQ ID NO: 931059 - RNA, 20 nt, Human
aaagauaauauccuuuauuc

SEQ ID NO: 931060 - RNA, 24 nt, Human
aaagugccgggauuacaggcguga

SEQ ID NO: 931061 - RNA, 25 nt, Human
aagcaagcuuuucuccuaaaguaau

SEQ ID NO: 931062 - RNA, 19 nt, Human
aaguaacugggauuacagg

SEQ ID NO: 931063 - RNA, 24 nt, Human
aaguaacugggauuacaggcgcgc

SEQ ID NO: 931064 - RNA, 19 nt, Human
aaguaauuguacucguuga

SEQ ID NO: 931065 - RNA, 24 nt, Human
aagugauccacccaccuuggccuc

SEQ ID NO: 931066 - RNA, 26 nt, Human
aagugccgggauuacaggcgugagcc

SEQ ID NO: 931067 - RNA, 22 nt, Human
acagauuccccuccuauuguuu

SEQ ID NO: 931068 - RNA, 19 nt, Human
accaggcaccaugcuaagc

SEQ ID NO: 931069 - RNA, 25 nt, Human
acccaccuuggccucccaaagugcc

SEQ ID NO: 931070 - RNA, 23 nt, Human
aguaggauuauagcucacauuug

SEQ ID NO: 931071 - RNA, 19 nt, Human
agugauccacccaccuugg

SEQ ID NO: 931072 - RNA, 22 nt, Human
aguuuuguauuuuuaguagaca

SEQ ID NO: 931073 - RNA, 19 nt, Human
augggguuccacugugugg

SEQ ID NO: 931074 - RNA, 24 nt, Human
augggguuccacuguguggccuaa

SEQ ID NO: 931075 - RNA, 24 nt, Human
caaagugccgggauuacaggcgug

SEQ ID NO: 931076 - RNA, 20 nt, Human
caaccuccgccucccagguu

SEQ ID NO: 931077 - RNA, 22 nt, Human
cacccaccuuggccucccaaag

SEQ ID NO: 931078 - RNA, 23 nt, Human
cacccaccuuggccucccaaagu

SEQ ID NO: 931079 - RNA, 21 nt, Human
cacugcaaccuccgccuccca

SEQ ID NO: 931080 - RNA, 22 nt, Human
cacuguguggccuaauacgggc

SEQ ID NO: 931081 - RNA, 23 nt, Human
cagccuccuaaguaacugggauu

SEQ ID NO: 931082 - RNA, 24 nt, Human
cagcguuucgccaucuuggccagg

SEQ ID NO: 931083 - RNA, 20 nt, Human
cagugacuuucucuaaggac

SEQ ID NO: 931084 - RNA, 22 nt, Human
ccaaagugccgggauuacaggc

SEQ ID NO: 931085 - RNA, 24 nt, Human
ccaaagugccgggauuacaggcgu

SEQ ID NO: 931086 - RNA, 24 nt, Human
ccacaguggaacugcuuagcaucc

SEQ ID NO: 931087 - RNA, 19 nt, Human
ccaucuuggccaggcuggu

SEQ ID NO: 931088 - RNA, 22 nt, Human
ccaucuuggccaggcuggucuc

SEQ ID NO: 931089 - RNA, 19 nt, Human
ccuaaguaacugggauuac

SEQ ID NO: 931090 - RNA, 23 nt, Human
ccuaaguaacugggauuacaggc

SEQ ID NO: 931091 - RNA, 24 nt, Human
ccuaaguaacugggauuacaggcg

SEQ ID NO: 931092 - RNA, 24 nt, Human
ccucccagguugaugugauucucc

SEQ ID NO: 931093 - RNA, 29 nt, Human
ccucccagguugaugugauucuccugccu

SEQ ID NO: 931094 - RNA, 24 nt, Human
ccugaccucaagugauccacccac

SEQ ID NO: 931095 - RNA, 24 nt, Human
cgccaucuuggccaggcuggucuc

SEQ ID NO: 931096 - RNA, 21 nt, Human
cgggauuacaggcgugagcca

SEQ ID NO: 931097 - RNA, 22 nt, Human
cgggauuacaggcgugagccau

SEQ ID NO: 931098 - RNA, 24 nt, Human
cgggauuacaggcgugagccaucg

SEQ ID NO: 931099 - RNA, 20 nt, Human
cgggcagcaacaacucugau

SEQ ID NO: 931100 - RNA, 22 nt, Human
cuaaguaacugggauuacaggc

SEQ ID NO: 931101 - RNA, 24 nt, Human
cucaagugauccacccaccuuggc

SEQ ID NO: 931102 - RNA, 24 nt, Human
cucacugcaaccuccgccucccag

SEQ ID NO: 931103 - RNA, 18 nt, Human
cuuggccaggcuggucuc

SEQ ID NO: 931104 - RNA, 21 nt, Human
cuuuauucugcucauuuucua

SEQ ID NO: 931105 - RNA, 23 nt, Human
gaccucaagugauccacccaccu

SEQ ID NO: 931106 - RNA, 18 nt, Human
gauuacaggcgcgcgcca

SEQ ID NO: 931107 - RNA, 18 nt, Human
gauuacaggcgugagcca

SEQ ID NO: 931108 - RNA, 22 nt, Human
gauuacaggcgugagccaucgc

SEQ ID NO: 931109 - RNA, 23 nt, Human
gauuacaggcgugagccaucgca

SEQ ID NO: 931110 - RNA, 21 nt, Human
gcaaccuccgccucccagguu

SEQ ID NO: 931111 - RNA, 24 nt, Human
gccaucuuggccaggcuggucucg

SEQ ID NO: 931112 - RNA, 23 nt, Human
gcuggucucgaacuccugaccuc

SEQ ID NO: 931113 - RNA, 24 nt, Human
ggcuggucucgaacuccugaccuc

SEQ ID NO: 931114 - RNA, 18 nt, Human
gggauuacaggcgugagc

SEQ ID NO: 931115 - RNA, 20 nt, Human
gggauuacaggcgugagcca

SEQ ID NO: 931116 - RNA, 25 nt, Human
gggauuacaggcgugagccaucgca

SEQ ID NO: 931117 - RNA, 19 nt, Human
ggucucgaacuccugaccu

SEQ ID NO: 931118 - RNA, 24 nt, Human
gugauccacccaccuuggccuccc

SEQ ID NO: 931119 - RNA, 19 nt, Human
gugauucuccugccucagc

SEQ ID NO: 931120 - RNA, 23 nt, Human
gugauucuccugccucagccucc

SEQ ID NO: 931121 - RNA, 19 nt, Human
guucacauugauaauccua

SEQ ID NO: 931122 - RNA, 19 nt, Human
uaacugggauuacaggcgc

SEQ ID NO: 931123 - RNA, 22 nt, Human
uauaccaggcaccaugcuaagc

SEQ ID NO: 931124 - RNA, 23 nt, Human
uauucugcucauuuucuaggcgu

SEQ ID NO: 931125 - RNA, 19 nt, Human
ucacugcaaccuccgccuc

SEQ ID NO: 931126 - RNA, 24 nt, Human
ucacugcaaccuccgccucccagg

SEQ ID NO: 931127 - RNA, 25 nt, Human
ucacugcaaccuccgccucccaggu

SEQ ID NO: 931128 - RNA, 26 nt, Human
ucacugcaaccuccgccucccagguu

SEQ ID NO: 931129 - RNA, 24 nt, Human
ucccaaagugccgggauuacaggc

SEQ ID NO: 931130 - RNA, 21 nt, Human
ucccagguugaugugauucuc

SEQ ID NO: 931131 - RNA, 24 nt, Human
ucccagguugaugugauucuccug

SEQ ID NO: 931132 - RNA, 24 nt, Human
uccuaaguaacugggauuacaggc

SEQ ID NO: 931133 - RNA, 21 nt, Human
ucguauauaccaggcaccaug

SEQ ID NO: 931134 - RNA, 18 nt, Human
ucuaaggacccugaagca

SEQ ID NO: 931135 - RNA, 24 nt, Human
ucuccugccucagccuccuaagua

SEQ ID NO: 931136 - RNA, 21 nt, Human
ucucgaacuccugaccucaag

SEQ ID NO: 931137 - RNA, 18 nt, Human
ugacaccugccacagugg

SEQ ID NO: 931138 - RNA, 24 nt, Human
ugauccacccaccuuggccuccca

SEQ ID NO: 931139 - RNA, 20 nt, Human
ugauucuccugccucagccu

SEQ ID NO: 931140 - RNA, 22 nt, Human
ugcaaauauuuucuuccauauc

SEQ ID NO: 931141 - RNA, 24 nt, Human
ugccgggauuacaggcgugagcca

SEQ ID NO: 931142 - RNA, 24 nt, Human
ugccucagccuccuaaguaacugg

SEQ ID NO: 931143 - RNA, 24 nt, Human
uggcaugaucuaagcucacugcaa

SEQ ID NO: 931144 - RNA, 24 nt, Human
uggccaggcuggucucgaacuccu

SEQ ID NO: 931145 - RNA, 18 nt, Human
ugggauuacaggcgcgcg

SEQ ID NO: 931146 - RNA, 22 nt, Human
ugggauuacaggcgcgcgccac

SEQ ID NO: 931147 - RNA, 24 nt, Human
ugggauuacaggcgcgcgccacca

SEQ ID NO: 931148 - RNA, 25 nt, Human
ugggauuacaggcgcgcgccaccau

SEQ ID NO: 931149 - RNA, 24 nt, Human
ugugauucuccugccucagccucc

SEQ ID NO: 931150 - RNA, 24 nt, Human
uuaguagacacagcguuucgccau

SEQ ID NO: 931151 - RNA, 21 nt, Human
uucuacuagcaaaugacaccu

SEQ ID NO: 931152 - RNA, 24 nt, Human
uuucgccaucuuggccaggcuggu

SEQ ID NO: 931153 - RNA, 18 nt, Human
uuuuguauuuuuaguaga

SEQ ID NO: 931154 - RNA, 22 nt, Human
uuuuuugguugcgaaaucugcu

SEQ ID NO: 931155 - RNA, 24 nt, Human
uuuuuuuuuuuuuuuuuuccaaag

SEQ ID NO: 931156 - RNA, 21 nt, Human
aaaaaggagauccuacuguuu

SEQ ID NO: 931157 - RNA, 18 nt, Human
aaggagaggaaaugggga

SEQ ID NO: 931158 - RNA, 20 nt, Human
acaaaaauaaacuuugcagu

SEQ ID NO: 931159 - RNA, 18 nt, Human
acaauggaacauuauuca

SEQ ID NO: 931160 - RNA, 18 nt, Human
acaguagaaaugacauga

SEQ ID NO: 931161 - RNA, 19 nt, Human
acuucgaaagaacagaagg

SEQ ID NO: 931162 - RNA, 19 nt, Human
aggaaauggggagauauag

SEQ ID NO: 931163 - RNA, 24 nt, Human
aggaaauggggagauauaggucaa

SEQ ID NO: 931164 - RNA, 18 nt, Human
agguaaauacgaguucac

SEQ ID NO: 931165 - RNA, 18 nt, Human
auauguaggaugaacaag

SEQ ID NO: 931166 - RNA, 21 nt, Human
aucugcuucaccauuuugcug

SEQ ID NO: 931167 - RNA, 21 nt, Human
auguguguguauagacaaugu

SEQ ID NO: 931168 - RNA, 24 nt, Human
auguguguguguauacguuuaugu

SEQ ID NO: 931169 - RNA, 20 nt, Human
auuagggugcaauaaaaugu

SEQ ID NO: 931170 - RNA, 23 nt, Human
caaaauagcagauauguaggaug

SEQ ID NO: 931171 - RNA, 24 nt, Human
caagauagggaagcaaccuaaaug

SEQ ID NO: 931172 - RNA, 23 nt, Human
caccaaggaaaauauugcauaau

SEQ ID NO: 931173 - RNA, 22 nt, Human
cagcaaaaguaggauuuacaua

SEQ ID NO: 931174 - RNA, 20 nt, Human
cagggggaccaauguuagua

SEQ ID NO: 931175 - RNA, 23 nt, Human
cauguaucuuuuuaugugccuca

SEQ ID NO: 931176 - RNA, 20 nt, Human
ccaagggagaggaaaucacc

SEQ ID NO: 931177 - RNA, 21 nt, Human
cccaagggagaggaaaucacc

SEQ ID NO: 931178 - RNA, 18 nt, Human
ccccucaagcuuucccuu

SEQ ID NO: 931179 - RNA, 18 nt, Human
ccugucccugguauacac

SEQ ID NO: 931180 - RNA, 22 nt, Human
cuaaaauacacagaacgaaaca

SEQ ID NO: 931181 - RNA, 18 nt, Human
cuacuggugguggggaag

SEQ ID NO: 931182 - RNA, 20 nt, Human
cucacucauauguagaauau

SEQ ID NO: 931183 - RNA, 20 nt, Human
cucuucagauuacuuucuug

SEQ ID NO: 931184 - RNA, 18 nt, Human
gacaauguacaauggaac

SEQ ID NO: 931185 - RNA, 18 nt, Human
gauauguaggaugaacaa

SEQ ID NO: 931186 - RNA, 21 nt, Human
gauccaugucccuauuucaga

SEQ ID NO: 931187 - RNA, 23 nt, Human
gcuaaaauacacagaacgaaaca

SEQ ID NO: 931188 - RNA, 19 nt, Human
ggaccugaaggacguuaug

SEQ ID NO: 931189 - RNA, 24 nt, Human
gguggggaaggagaggaaaugggg

SEQ ID NO: 931190 - RNA, 22 nt, Human
guuugcuuccucucacuuccau

SEQ ID NO: 931191 - RNA, 24 nt, Human
guuuuucuuuuggcuugcugaugg

SEQ ID NO: 931192 - RNA, 18 nt, Human
uaaaccucaguugcacaa

SEQ ID NO: 931193 - RNA, 19 nt, Human
uaaaugagauaagccagac

SEQ ID NO: 931194 - RNA, 26 nt, Human
uacaaaauagcagauauguaggauga

SEQ ID NO: 931195 - RNA, 22 nt, Human
uaccacaacauagauggaccug

SEQ ID NO: 931196 - RNA, 18 nt, Human
uacuguuuaccacaacau

SEQ ID NO: 931197 - RNA, 21 nt, Human
uaggaugaacaaguuuagaga

SEQ ID NO: 931198 - RNA, 22 nt, Human
uauacguuuauguguguguaua

SEQ ID NO: 931199 - RNA, 26 nt, Human
uauggucauguaucuuuuuaugugcc

SEQ ID NO: 931200 - RNA, 22 nt, Human
uauuucagaccacacuuuuccc

SEQ ID NO: 931201 - RNA, 19 nt, Human
ucccugguauacacccaag

SEQ ID NO: 931202 - RNA, 22 nt, Human
ucccuuuuucacuuuaaagaag

SEQ ID NO: 931203 - RNA, 26 nt, Human
ugaaaugauagcuauauuaaucugcu

SEQ ID NO: 931204 - RNA, 18 nt, Human
ugacuugauguuuuucuu

SEQ ID NO: 931205 - RNA, 19 nt, Human
ugagacaguagaaaugaca

SEQ ID NO: 931206 - RNA, 18 nt, Human
ugaggaauggcuaaagaa

SEQ ID NO: 931207 - RNA, 18 nt, Human
ugaguaaagaagggcugc

SEQ ID NO: 931208 - RNA, 19 nt, Human
ugaguaaagaagggcugcu

SEQ ID NO: 931209 - RNA, 21 nt, Human
ugauggaguugguggaaggca

SEQ ID NO: 931210 - RNA, 20 nt, Human
ugauguuuuucuuuuggcuu

SEQ ID NO: 931211 - RNA, 20 nt, Human
ugcugucuauauuccauagc

SEQ ID NO: 931212 - RNA, 23 nt, Human
ugcuucaccauuuugcugucuau

SEQ ID NO: 931213 - RNA, 26 nt, Human
uguaaaccucaguugcacaaugaaau

SEQ ID NO: 931214 - RNA, 25 nt, Human
uguauacguuuauguguguguauaa

SEQ ID NO: 931215 - RNA, 22 nt, Human
ugugaaaugauagcuauauuaa

SEQ ID NO: 931216 - RNA, 24 nt, Human
uguguguauacguuuaugugugug

SEQ ID NO: 931217 - RNA, 25 nt, Human
uguguguauacguuuaugugugugu

SEQ ID NO: 931218 - RNA, 21 nt, Human
uguguguguauacguuuaugu

SEQ ID NO: 931219 - RNA, 22 nt, Human
uuaaucugcuucaccauuuugc

SEQ ID NO: 931220 - RNA, 21 nt, Human
uucuuuuggcuugcugauggc

SEQ ID NO: 931221 - RNA, 21 nt, Human
uugaagauucugggugcacag

SEQ ID NO: 931222 - RNA, 20 nt, Human
uuguuugcuuccucucacuu

SEQ ID NO: 931223 - RNA, 20 nt, Human
uuugcaguuggaggaacacu

SEQ ID NO: 931224 - RNA, 19 nt, Human
uuugcugucuauauuccau

SEQ ID NO: 931225 - RNA, 23 nt, Human
aaaggaaacauuuacacuucuag

SEQ ID NO: 931226 - RNA, 23 nt, Human
aaauaaaagcaacuccucagccc

SEQ ID NO: 931227 - RNA, 20 nt, Human
aaaucaagcuauggaaaggc

SEQ ID NO: 931228 - RNA, 21 nt, Human
aaaucaagcuauggaaaggcu

SEQ ID NO: 931229 - RNA, 23 nt, Human
aacaucuaccuuauccuuuuggc

SEQ ID NO: 931230 - RNA, 24 nt, Human
aagcagccaaaagacauuccccag

SEQ ID NO: 931231 - RNA, 19 nt, Human
aagcuauggaaaggcuuug

SEQ ID NO: 931232 - RNA, 19 nt, Human
aaggaaaaacccuuggaug

SEQ ID NO: 931233 - RNA, 23 nt, Human
aauguuucaagaugaaaagcaaa

SEQ ID NO: 931234 - RNA, 25 nt, Human
acaaagcagccaaaagacauucccc

SEQ ID NO: 931235 - RNA, 24 nt, Human
acacggcuuuugcagagguccccc

SEQ ID NO: 931236 - RNA, 26 nt, Human
acaucaccucuuucccuuuaaauuca

SEQ ID NO: 931237 - RNA, 21 nt, Human
accccaggaccccuguuccca

SEQ ID NO: 931238 - RNA, 23 nt, Human
accccaggggccgcaucccacac

SEQ ID NO: 931239 - RNA, 20 nt, Human
acccccaccccaggggccgc

SEQ ID NO: 931240 - RNA, 22 nt, Human
acugugaaaaaaggaaaaaccc

SEQ ID NO: 931241 - RNA, 24 nt, Human
agcuguauggcccagcaugacccc

SEQ ID NO: 931242 - RNA, 18 nt, Human
aggaauguuuuguaacuu

SEQ ID NO: 931243 - RNA, 22 nt, Human
aggagucauuaagucagacacc

SEQ ID NO: 931244 - RNA, 23 nt, Human
aggucccccuuucauucuucacc

SEQ ID NO: 931245 - RNA, 23 nt, Human
aucaccucuuucccuuuaaauuc

SEQ ID NO: 931246 - RNA, 21 nt, Human
augaaaagcaaaagucugaag

SEQ ID NO: 931247 - RNA, 18 nt, Human
auuacaaauccaauaaga

SEQ ID NO: 931248 - RNA, 23 nt, Human
caaagccccuacccaccuccaaa

SEQ ID NO: 931249 - RNA, 25 nt, Human
caaaguacagaaaaaacugggcaua

SEQ ID NO: 931250 - RNA, 23 nt, Human
caaauacagagguauauacuucg

SEQ ID NO: 931251 - RNA, 20 nt, Human
caagaugaaaagcaaaaguc

SEQ ID NO: 931252 - RNA, 23 nt, Human
caagcuauggaaaggcuuugucu

SEQ ID NO: 931253 - RNA, 22 nt, Human
caauacgggcaaggcaaagccc

SEQ ID NO: 931254 - RNA, 22 nt, Human
cacacaguccggcacccccacc

SEQ ID NO: 931255 - RNA, 20 nt, Human
caccuccuacuucuccugga

SEQ ID NO: 931256 - RNA, 20 nt, Human
cagaauucucaauuaaaaaa

SEQ ID NO: 931257 - RNA, 21 nt, Human
cagccaaaagacauuccccag

SEQ ID NO: 931258 - RNA, 21 nt, Human
caguaggcuguuggcuuccca

SEQ ID NO: 931259 - RNA, 21 nt, Human
cauucuauuacuuuucaucuu

SEQ ID NO: 931260 - RNA, 18 nt, Human
ccagucucaucuaacacu

SEQ ID NO: 931261 - RNA, 19 nt, Human
ccccaggaccccuguuccc

SEQ ID NO: 931262 - RNA, 21 nt, Human
ccccaggaccccuguucccag

SEQ ID NO: 931263 - RNA, 20 nt, Human
cccccuuucauucuucaccc

SEQ ID NO: 931264 - RNA, 20 nt, Human
cccuacccaccuccaaacag

SEQ ID NO: 931265 - RNA, 19 nt, Human
ccuauagcgacugcacuca

SEQ ID NO: 931266 - RNA, 27 nt, Human
ccuccaauccuauagcgacugcacuca

SEQ ID NO: 931267 - RNA, 18 nt, Human
cggcacccccaccccagg

SEQ ID NO: 931268 - RNA, 20 nt, Human
cuacaaagcagccaaaagaa

SEQ ID NO: 931269 - RNA, 23 nt, Human
cuccaauccuauagcgacugcac

SEQ ID NO: 931270 - RNA, 19 nt, Human
cugaacugaagccacucag

SEQ ID NO: 931271 - RNA, 18 nt, Human
gaauuacaaauccaauaa

SEQ ID NO: 931272 - RNA, 18 nt, Human
gaggaccuagugaaaaac

SEQ ID NO: 931273 - RNA, 19 nt, Human
gaggacuacuguuuauguc

SEQ ID NO: 931274 - RNA, 22 nt, Human
gcaaagccccuacccaccucca

SEQ ID NO: 931275 - RNA, 22 nt, Human
gcaacuccucagccccaauuuu

SEQ ID NO: 931276 - RNA, 23 nt, Human
gcaaggcaaagccccuacccacc

SEQ ID NO: 931277 - RNA, 20 nt, Human
gcaugaccccuaccuugccu

SEQ ID NO: 931278 - RNA, 21 nt, Human
gccuaccugccucccagucuc

SEQ ID NO: 931279 - RNA, 23 nt, Human
gcuauggaaaggcuuugucuaaa

SEQ ID NO: 931280 - RNA, 21 nt, Human
gcucacacagaaaucuuugca

SEQ ID NO: 931281 - RNA, 22 nt, Human
gcugaaaauaaauauaugaaua

SEQ ID NO: 931282 - RNA, 24 nt, Human
gcugcccuacuacuuugcuaagaa

SEQ ID NO: 931283 - RNA, 21 nt, Human
ggcaaaaauaaaacguuucca

SEQ ID NO: 931284 - RNA, 23 nt, Human
ggcaaaaauaaaacguuuccaaa

SEQ ID NO: 931285 - RNA, 22 nt, Human
ggccucuaacauagagagguuu

SEQ ID NO: 931286 - RNA, 23 nt, Human
ggcuacgaggaccuagugaaaaa

SEQ ID NO: 931287 - RNA, 27 nt, Human
gggcuuuuuuuuaagucauaccaaagg

SEQ ID NO: 931288 - RNA, 22 nt, Human
ggguugauuucuucauuauucu

SEQ ID NO: 931289 - RNA, 21 nt, Human
guacagaaaaaacugggcaua

SEQ ID NO: 931290 - RNA, 18 nt, Human
gucugaagucccuuggaa

SEQ ID NO: 931291 - RNA, 19 nt, Human
gugaaaaaaggaaaaaccc

SEQ ID NO: 931292 - RNA, 27 nt, Human
uaaacuguuaucuuuuaggaauguguu

SEQ ID NO: 931293 - RNA, 22 nt, Human
uaacgagacauuuaaaucaagc

SEQ ID NO: 931294 - RNA, 22 nt, Human
uaagaacaagaaccacacaguc

SEQ ID NO: 931295 - RNA, 21 nt, Human
uaagucagacaccuaugugag

SEQ ID NO: 931296 - RNA, 19 nt, Human
uaaguuaauuuaggaaugu

SEQ ID NO: 931297 - RNA, 20 nt, Human
uaaguuaauuuaggaauguu

SEQ ID NO: 931298 - RNA, 25 nt, Human
uacaaagcagccaaaagacauuccc

SEQ ID NO: 931299 - RNA, 22 nt, Human
uaccuuauccuuuuggccucua

SEQ ID NO: 931300 - RNA, 22 nt, Human
uaccuugccuaccugccuccca

SEQ ID NO: 931301 - RNA, 26 nt, Human
uaccuugccuaccugccucccagucu

SEQ ID NO: 931302 - RNA, 21 nt, Human
uagaggacuacuguuuauguc

SEQ ID NO: 931303 - RNA, 21 nt, Human
uauacaaacccgcuacacggc

SEQ ID NO: 931304 - RNA, 21 nt, Human
uauacugugaaaaaaggaaaa

SEQ ID NO: 931305 - RNA, 19 nt, Human
uaugcuuauuaaaaguuca

SEQ ID NO: 931306 - RNA, 23 nt, Human
uaugcuuauuaaaaguucaacau

SEQ ID NO: 931307 - RNA, 23 nt, Human
uauuauuacuaaaggcucacaca

SEQ ID NO: 931308 - RNA, 25 nt, Human
uauuuuauuuaaacuuuaaacaagc

SEQ ID NO: 931309 - RNA, 19 nt, Human
ucaaauggacaaccauaga

SEQ ID NO: 931310 - RNA, 23 nt, Human
ucaacugucaagcugaaaauaaa

SEQ ID NO: 931311 - RNA, 26 nt, Human
ucacacagaaaucuuugcaugcuaca

SEQ ID NO: 931312 - RNA, 19 nt, Human
ucaccuccuacuucuccug

SEQ ID NO: 931313 - RNA, 21 nt, Human
ucaguucuuuccagaauucac

SEQ ID NO: 931314 - RNA, 21 nt, Human
uccacaaaagccuauccuagg

SEQ ID NO: 931315 - RNA, 30 nt, Human
ucccacaccccaggaccccuguucccaguu

SEQ ID NO: 931316 - RNA, 18 nt, Human
uccccuugacaucagccc

SEQ ID NO: 931317 - RNA, 21 nt, Human
uccucgggcuacgaggaccua

SEQ ID NO: 931318 - RNA, 24 nt, Human
ucuaacacuauaugcccccucaau

SEQ ID NO: 931319 - RNA, 25 nt, Human
ucucugaacugaagccacucaguuc

SEQ ID NO: 931320 - RNA, 24 nt, Human
ugaagccacucaguucuuuccaga

SEQ ID NO: 931321 - RNA, 19 nt, Human
ugagcucuuuuccccagga

SEQ ID NO: 931322 - RNA, 20 nt, Human
uggccucuaacauagagagg

SEQ ID NO: 931323 - RNA, 21 nt, Human
uguuuaugucuauguuaccag

SEQ ID NO: 931324 - RNA, 18 nt, Human
uucaaaguacagaaaaaa

SEQ ID NO: 931325 - RNA, 19 nt, Human
uucauuauacaaacccgcu

SEQ ID NO: 931326 - RNA, 22 nt, Human
uuuugcagaggucccccuuuca

SEQ ID NO: 931327 - RNA, 26 nt, Human
uuuuuuaagucauaccaaaggugaua

SEQ ID NO: 931328 - RNA, 21 nt, Human
aacaagugagaacaugcacaa

SEQ ID NO: 931329 - RNA, 21 nt, Human
aaguucuccccaccacccucc

SEQ ID NO: 931330 - RNA, 24 nt, Human
acaacauuuucuuuauccauuugu

SEQ ID NO: 931331 - RNA, 19 nt, Human
acaagugagaacaugcaca

SEQ ID NO: 931332 - RNA, 18 nt, Human
acccggugguccccggga

SEQ ID NO: 931333 - RNA, 19 nt, Human
accgcuacaccagcagagu

SEQ ID NO: 931334 - RNA, 22 nt, Human
acuaacgugugcacaccuuuca

SEQ ID NO: 931335 - RNA, 26 nt, Human
caaaugacaggaucucagucuuuuuu

SEQ ID NO: 931336 - RNA, 19 nt, Human
cacuuaacauaaugaccuu

SEQ ID NO: 931337 - RNA, 20 nt, Human
cagacacccgaggggcccau

SEQ ID NO: 931338 - RNA, 22 nt, Human
cagacacccgaggggcccaugu

SEQ ID NO: 931339 - RNA, 18 nt, Human
cagcagaguaagacugca

SEQ ID NO: 931340 - RNA, 20 nt, Human
caggagcccgcggugcaggg

SEQ ID NO: 931341 - RNA, 22 nt, Human
caggagcccgcggugcagggug

SEQ ID NO: 931342 - RNA, 21 nt, Human
ccauccucucggccucgaccc

SEQ ID NO: 931343 - RNA, 23 nt, Human
ccccaccacccuccauuccagca

SEQ ID NO: 931344 - RNA, 20 nt, Human
cccucccuccuaugcccuuc

SEQ ID NO: 931345 - RNA, 22 nt, Human
ccuccuaugcccuucuguucag

SEQ ID NO: 931346 - RNA, 20 nt, Human
cuccuacaaacaagugagaa

SEQ ID NO: 931347 - RNA, 20 nt, Human
cuccuacaaacaagugagac

SEQ ID NO: 931348 - RNA, 19 nt, Human
cucggccucgacccggugg

SEQ ID NO: 931349 - RNA, 22 nt, Human
cugcagggcugcggcccucccu

SEQ ID NO: 931350 - RNA, 23 nt, Human
cuucaguuccauccacguuguug

SEQ ID NO: 931351 - RNA, 18 nt, Human
guaagacugcagggcugc

SEQ ID NO: 931352 - RNA, 19 nt, Human
guauaguacuccauuuugu

SEQ ID NO: 931353 - RNA, 20 nt, Human
gugcaggguggggugggagu

SEQ ID NO: 931354 - RNA, 25 nt, Human
uacgaccagaaaacaggacccuaga

SEQ ID NO: 931355 - RNA, 18 nt, Human
uagguuuucaagucuugg

SEQ ID NO: 931356 - RNA, 24 nt, Human
uauugugaauacugcugccauaaa

SEQ ID NO: 931357 - RNA, 19 nt, Human
uccccaccacccuccauuc

SEQ ID NO: 931358 - RNA, 22 nt, Human
ucuccccaccacccuccauucc

SEQ ID NO: 931359 - RNA, 24 nt, Human
ucuugguuauugugaauacugcug

SEQ ID NO: 931360 - RNA, 19 nt, Human
ugacaggaucucagucuuu

SEQ ID NO: 931361 - RNA, 21 nt, Human
uguucagacacccgaggggcc

SEQ ID NO: 931362 - RNA, 24 nt, Human
uucagacacccgaggggcccaugu

SEQ ID NO: 931363 - RNA, 18 nt, Human
uucuccccaccacccucc

SEQ ID NO: 931364 - RNA, 24 nt, Human
uucugugccuggcuuauuucacuu

SEQ ID NO: 931365 - RNA, 21 nt, Human
uuugucuuucugugccuggcu

SEQ ID NO: 931366 - RNA, 18 nt, Human
uuuuuuuuuuuuuuuuug

SEQ ID NO: 931367 - RNA, 23 nt, Human
uuuuuuuuuuuuuuuuugacaag

SEQ ID NO: 931368 - RNA, 23 nt, Human
aaaacaauaauuuggaaaaaccc

SEQ ID NO: 931369 - RNA, 22 nt, Human
aaacaauaauuuggaaaaaccc

SEQ ID NO: 931370 - RNA, 20 nt, Human
aacaaagaauccaaaggcug

SEQ ID NO: 931371 - RNA, 20 nt, Human
aacauagaagaauuucugcc

SEQ ID NO: 931372 - RNA, 23 nt, Human
aagaaaacggugaaagccaucag

SEQ ID NO: 931373 - RNA, 22 nt, Human
aagagacaaaaaagucgcaacc

SEQ ID NO: 931374 - RNA, 23 nt, Human
aagagacaaaaaagucgcaacca

SEQ ID NO: 931375 - RNA, 20 nt, Human
aaggaaaaacuaagagaaug

SEQ ID NO: 931376 - RNA, 19 nt, Human
aagggcuuuaagggagagg

SEQ ID NO: 931377 - RNA, 20 nt, Human
aagugccccgguggggccgg

SEQ ID NO: 931378 - RNA, 23 nt, Human
acauaaucuucucuaaacacuaa

SEQ ID NO: 931379 - RNA, 22 nt, Human
agacaaaaaagucgcaaccaau

SEQ ID NO: 931380 - RNA, 21 nt, Human
agauggucagugguuuuaagc

SEQ ID NO: 931381 - RNA, 19 nt, Human
agcucugggcagaggggcc

SEQ ID NO: 931382 - RNA, 19 nt, Human
agcucugggcagaggggcc

SEQ ID NO: 931383 - RNA, 18 nt, Human
aggaggcucaagccuguc

SEQ ID NO: 931384 - RNA, 23 nt, Human
aggcagaacauagaagaagggac

SEQ ID NO: 931385 - RNA, 22 nt, Human
aggcaggagcgaaugggcaagg

SEQ ID NO: 931386 - RNA, 21 nt, Human
agggcuuuaagggagaggaga

SEQ ID NO: 931387 - RNA, 23 nt, Human
agggugaaggugcugagggcugg

SEQ ID NO: 931388 - RNA, 21 nt, Human
aggugcugagggcuggaggcu

SEQ ID NO: 931389 - RNA, 24 nt, Human
aggugcugagggcuggaggcucag

SEQ ID NO: 931390 - RNA, 24 nt, Human
aggugggccuggggcucgcugagu

SEQ ID NO: 931391 - RNA, 18 nt, Human
aggugguggcaggggccu

SEQ ID NO: 931392 - RNA, 24 nt, Human
agugugaaaaugaucacaauacac

SEQ ID NO: 931393 - RNA, 23 nt, Human
aucuucucuaaacacuaaugcca

SEQ ID NO: 931394 - RNA, 19 nt, Human
auguuuuaguaccuguaau

SEQ ID NO: 931395 - RNA, 20 nt, Human
auuuggcccagacugaggca

SEQ ID NO: 931396 - RNA, 18 nt, Human
caacggaacaggccacuc

SEQ ID NO: 931397 - RNA, 18 nt, Human
caacggagcaggccacuc

SEQ ID NO: 931398 - RNA, 22 nt, Human
cacacagccauauauacauaau

SEQ ID NO: 931399 - RNA, 18 nt, Human
cagugggaagugccccgg

SEQ ID NO: 931400 - RNA, 24 nt, Human
cauaaacacugucccuccaccgaa

SEQ ID NO: 931401 - RNA, 22 nt, Human
cauagaagaauuucugccaggu

SEQ ID NO: 931402 - RNA, 20 nt, Human
ccaggaaccagguccacgcu

SEQ ID NO: 931403 - RNA, 19 nt, Human
cccacucauggucccagac

SEQ ID NO: 931404 - RNA, 24 nt, Human
cccagggagaaggcaggagcgaau

SEQ ID NO: 931405 - RNA, 19 nt, Human
ccccaggaaccagguccac

SEQ ID NO: 931406 - RNA, 21 nt, Human
ccccaugcugucuggaggacc

SEQ ID NO: 931407 - RNA, 19 nt, Human
cccccaggaaccaggucca

SEQ ID NO: 931408 - RNA, 23 nt, Human
cccgcacgcggccaucuuggcca

SEQ ID NO: 931409 - RNA, 24 nt, Human
cccucaaaagcacguggagaagga

SEQ ID NO: 931410 - RNA, 20 nt, Human
ccucugcucucuggcggggc

SEQ ID NO: 931411 - RNA, 18 nt, Human
ccugaaaacugcagauac

SEQ ID NO: 931412 - RNA, 20 nt, Human
cgaucgcccccaggaaccag

SEQ ID NO: 931413 - RNA, 30 nt, Human
cgggaucauaaacacugucccuccaccgag

SEQ ID NO: 931414 - RNA, 18 nt, Human
cucugcucagcggccuag

SEQ ID NO: 931415 - RNA, 18 nt, Human
cucugcucagcggccuag

SEQ ID NO: 931416 - RNA, 23 nt, Human
cugaccuuuaaaggcagaacaua

SEQ ID NO: 931417 - RNA, 22 nt, Human
cugggugugcucagaggcucau

SEQ ID NO: 931418 - RNA, 21 nt, Human
cuuggagccgggcagcaggcu

SEQ ID NO: 931419 - RNA, 21 nt, Human
cuuuaagggagaggagaggug

SEQ ID NO: 931420 - RNA, 18 nt, Human
gaaacuggggagaagcau

SEQ ID NO: 931421 - RNA, 22 nt, Human
gagaagcaugccuccugucccc

SEQ ID NO: 931422 - RNA, 21 nt, Human
gaggaccaaggaggcucaagc

SEQ ID NO: 931423 - RNA, 20 nt, Human
gccaggaaggauucagacac

SEQ ID NO: 931424 - RNA, 19 nt, Human
gccuaaguuuagagucugu

SEQ ID NO: 931425 - RNA, 24 nt, Human
gcuuuaagggagaggagagguggg

SEQ ID NO: 931426 - RNA, 19 nt, Human
ggaaaaacccaugaaggua

SEQ ID NO: 931427 - RNA, 21 nt, Human
ggagccgggcagcaggcuggg

SEQ ID NO: 931428 - RNA, 25 nt, Human
ggcagcaggcggccgccaggaagga

SEQ ID NO: 931429 - RNA, 24 nt, Human
ggccugggcgucgggcuuccucug

SEQ ID NO: 931430 - RNA, 19 nt, Human
ggcgucgggcuuccucugc

SEQ ID NO: 931431 - RNA, 19 nt, Human
gggcagcaggcggccgccc

SEQ ID NO: 931432 - RNA, 24 nt, Human
gggcuggaggcucaggagguggug

SEQ ID NO: 931433 - RNA, 20 nt, Human
ggugcugagggcuggaggcu

SEQ ID NO: 931434 - RNA, 19 nt, Human
gucgcaaccaauugaagau

SEQ ID NO: 931435 - RNA, 22 nt, Human
guuaauaaaaaaaaaaaaaaaa

SEQ ID NO: 931436 - RNA, 18 nt, Human
uaagggagaggagaggug

SEQ ID NO: 931437 - RNA, 23 nt, Human
uagagugaggcacauuuuccacu

SEQ ID NO: 931438 - RNA, 24 nt, Human
ucccacucauggucccagacacuu

SEQ ID NO: 931439 - RNA, 21 nt, Human
uccuucccacucaugguccca

SEQ ID NO: 931440 - RNA, 22 nt, Human
ugaaaaguauuugccucuggaa

SEQ ID NO: 931441 - RNA, 24 nt, Human
ugaugggugacuggcgaucgcccc

SEQ ID NO: 931442 - RNA, 22 nt, Human
ugccucuggaaagaacaacugg

SEQ ID NO: 931443 - RNA, 19 nt, Human
ugccugggagugagggcuc

SEQ ID NO: 931444 - RNA, 19 nt, Human
ugccugggagugagggcuc

SEQ ID NO: 931445 - RNA, 18 nt, Human
uggaaagaacaacuggca

SEQ ID NO: 931446 - RNA, 18 nt, Human
uggcccagacugaggcag

SEQ ID NO: 931447 - RNA, 22 nt, Human
ugggaagugccccgguggggcc

SEQ ID NO: 931448 - RNA, 20 nt, Human
ugguguggggguagaaccgc

SEQ ID NO: 931449 - RNA, 18 nt, Human
uguacuuaaccauuuuca

SEQ ID NO: 931450 - RNA, 21 nt, Human
ugucuggaggaccaaggaggc

SEQ ID NO: 931451 - RNA, 18 nt, Human
uucaagguggugugaaaa

SEQ ID NO: 931452 - RNA, 26 nt, Human
uucacacagccauauauacauaaucu

SEQ ID NO: 931453 - RNA, 22 nt, Human
uugacccucuggaaugccagaa

SEQ ID NO: 931454 - RNA, 24 nt, Human
uuggcccagacugaggcagauggg

SEQ ID NO: 931455 - RNA, 22 nt, Human
uuuagagucuguucaagguggu

SEQ ID NO: 931456 - RNA, 22 nt, Human
uuucccucaaaagcacguggaa

SEQ ID NO: 931457 - RNA, 20 nt, Human
aaaacacccaggacacuucu

SEQ ID NO: 931458 - RNA, 22 nt, Human
aaacacccuuacccaugccccu

SEQ ID NO: 931459 - RNA, 23 nt, Human
aaagacccucgacgcccccaccu

SEQ ID NO: 931460 - RNA, 19 nt, Human
aacaugauuaaaaacaccc

SEQ ID NO: 931461 - RNA, 24 nt, Human
aacauucaaacaugauuaaaaaca

SEQ ID NO: 931462 - RNA, 20 nt, Human
aaccuacuuccuuaaagcug

SEQ ID NO: 931463 - RNA, 20 nt, Human
aaccuucuccaauccuaucg

SEQ ID NO: 931464 - RNA, 19 nt, Human
aagggaggaggaggcagag

SEQ ID NO: 931465 - RNA, 23 nt, Human
acacaaaccuucuccaauccuau

SEQ ID NO: 931466 - RNA, 18 nt, Human
acagcagacauaaucccc

SEQ ID NO: 931467 - RNA, 20 nt, Human
acccuaaagacccagacaug

SEQ ID NO: 931468 - RNA, 20 nt, Human
acucuggccagagauaggga

SEQ ID NO: 931469 - RNA, 18 nt, Human
agacauaauccccacccc

SEQ ID NO: 931470 - RNA, 20 nt, Human
agacccagacaugacagcag

SEQ ID NO: 931471 - RNA, 21 nt, Human
agaccuggcaggccuggcuga

SEQ ID NO: 931472 - RNA, 22 nt, Human
agccaaagccagugagaggacg

SEQ ID NO: 931473 - RNA, 20 nt, Human
aggaggaggcagagagcuuu

SEQ ID NO: 931474 - RNA, 21 nt, Human
aggccuggcugacaggucugu

SEQ ID NO: 931475 - RNA, 18 nt, Human
agggaggaggaggcagag

SEQ ID NO: 931476 - RNA, 21 nt, Human
agggaggaggaggcagagagc

SEQ ID NO: 931477 - RNA, 19 nt, Human
auaccagggucuccugaga

SEQ ID NO: 931478 - RNA, 22 nt, Human
caaccuacuuccuuaaagcugu

SEQ ID NO: 931479 - RNA, 24 nt, Human
caacuaccaaggcgucgggaacac

SEQ ID NO: 931480 - RNA, 24 nt, Human
caagagguucacccuauauggggc

SEQ ID NO: 931481 - RNA, 18 nt, Human
cacaugaagccuugugga

SEQ ID NO: 931482 - RNA, 21 nt, Human
caggccuggcugacaggucug

SEQ ID NO: 931483 - RNA, 24 nt, Human
cagguaaccucucugaccgaccaa

SEQ ID NO: 931484 - RNA, 18 nt, Human
ccaggacacuucucuugc

SEQ ID NO: 931485 - RNA, 24 nt, Human
ccaggacacuucucuugcuggcag

SEQ ID NO: 931486 - RNA, 25 nt, Human
ccagugauuccuccaaacauucccc

SEQ ID NO: 931487 - RNA, 19 nt, Human
ccccggacuggggagcggg

SEQ ID NO: 931488 - RNA, 21 nt, Human
ccccuagagaccucaggaaga

SEQ ID NO: 931489 - RNA, 21 nt, Human
ccuacccuaaagacccagaca

SEQ ID NO: 931490 - RNA, 23 nt, Human
ccuacccuaaagacccagacaug

SEQ ID NO: 931491 - RNA, 19 nt, Human
ccuccugucaccuccuugg

SEQ ID NO: 931492 - RNA, 22 nt, Human
ccuccuuggguuuggugaaagc

SEQ ID NO: 931493 - RNA, 26 nt, Human
ccugccaaacucuggccagagauagg

SEQ ID NO: 931494 - RNA, 19 nt, Human
ccuuacccaugccccuccc

SEQ ID NO: 931495 - RNA, 21 nt, Human
cgggagggguguugggcggug

SEQ ID NO: 931496 - RNA, 26 nt, Human
cucaaagacccucgacgcccccaccu

SEQ ID NO: 931497 - RNA, 18 nt, Human
cuccuccugucaccuccu

SEQ ID NO: 931498 - RNA, 18 nt, Human
cugaggaaacacccuuac

SEQ ID NO: 931499 - RNA, 18 nt, Human
cuuguggagacuccugcc

SEQ ID NO: 931500 - RNA, 21 nt, Human
gaaacacccuuacccaugccc

SEQ ID NO: 931501 - RNA, 20 nt, Human
gaaagggaggaggaggcaga

SEQ ID NO: 931502 - RNA, 22 nt, Human
gagaaucuuccagggcucagcu

SEQ ID NO: 931503 - RNA, 20 nt, Human
gaggaaacacccuuacccau

SEQ ID NO: 931504 - RNA, 24 nt, Human
gcaaagcgugcucuagaaauaccc

SEQ ID NO: 931505 - RNA, 21 nt, Human
gcaugaagggaccuucccaga

SEQ ID NO: 931506 - RNA, 21 nt, Human
gccacaccccagauaauggca

SEQ ID NO: 931507 - RNA, 20 nt, Human
gcucagcugaggcucagagc

SEQ ID NO: 931508 - RNA, 19 nt, Human
ggacuggggagcgggaggg

SEQ ID NO: 931509 - RNA, 21 nt, Human
ggacuggggagcgggaggggu

SEQ ID NO: 931510 - RNA, 20 nt, Human
ggagccaaagccagugagag

SEQ ID NO: 931511 - RNA, 30 nt, Human
ggagccaaagccagugagaggacgaaggaa

SEQ ID NO: 931512 - RNA, 19 nt, Human
ggagcgggagggguguugg

SEQ ID NO: 931513 - RNA, 20 nt, Human
ggaggcagagagcuuaucaa

SEQ ID NO: 931514 - RNA, 20 nt, Human
ggccuggcugacaggucugu

SEQ ID NO: 931515 - RNA, 20 nt, Human
gggaacacaaaccuucucca

SEQ ID NO: 931516 - RNA, 19 nt, Human
gggcagggccugcccuaua

SEQ ID NO: 931517 - RNA, 20 nt, Human
guaaccucucugaccgacca

SEQ ID NO: 931518 - RNA, 21 nt, Human
uaauggcaguccugccaaacu

SEQ ID NO: 931519 - RNA, 24 nt, Human
uacccaugccccuccccuagagac

SEQ ID NO: 931520 - RNA, 20 nt, Human
uacccuaaagacccagacau

SEQ ID NO: 931521 - RNA, 20 nt, Human
ucacccuauauggggcugga

SEQ ID NO: 931522 - RNA, 19 nt, Human
ucccagagggcagggccug

SEQ ID NO: 931523 - RNA, 21 nt, Human
ucccagagggcagggccugcc

SEQ ID NO: 931524 - RNA, 18 nt, Human
uccuccugucaccuccuu

SEQ ID NO: 931525 - RNA, 19 nt, Human
ucggggcugagaucccuuu

SEQ ID NO: 931526 - RNA, 24 nt, Human
ucucugaccgaccaaucgaaaucc

SEQ ID NO: 931527 - RNA, 21 nt, Human
ucucuugcuggcagaggccac

SEQ ID NO: 931528 - RNA, 27 nt, Human
ugaaagcaaagcgugcucuagaaauac

SEQ ID NO: 931529 - RNA, 20 nt, Human
ugaagggaccuucccagagg

SEQ ID NO: 931530 - RNA, 21 nt, Human
ugagaggacgaaggaguccua

SEQ ID NO: 931531 - RNA, 20 nt, Human
ugauuccuccaaacauuccc

SEQ ID NO: 931532 - RNA, 26 nt, Human
ugcgggggcuccuccugucaccuccu

SEQ ID NO: 931533 - RNA, 24 nt, Human
uggcaggccuggcugacaggucug

SEQ ID NO: 931534 - RNA, 23 nt, Human
uggcaguccugccaaacucuggc

SEQ ID NO: 931535 - RNA, 25 nt, Human
uggccagagauagggacccaagcug

SEQ ID NO: 931536 - RNA, 21 nt, Human
uucacccuauauggggcugga

SEQ ID NO: 931537 - RNA, 18 nt, Human
uuccagggcucagcugag

SEQ ID NO: 931538 - RNA, 24 nt, Human
aagcgcuugacacuggccaccacc

SEQ ID NO: 931539 - RNA, 21 nt, Human
agccgaauauuauacagacug

SEQ ID NO: 931540 - RNA, 21 nt, Human
aucacagcuaagagagcagca

SEQ ID NO: 931541 - RNA, 23 nt, Human
aucacucuccaucacauagaucc

SEQ ID NO: 931542 - RNA, 21 nt, Human
aucuuccuccagcccucggcg

SEQ ID NO: 931543 - RNA, 22 nt, Human
caauaauagugaaucacagcua

SEQ ID NO: 931544 - RNA, 22 nt, Human
cagaaaggugcucucgucgaua

SEQ ID NO: 931545 - RNA, 24 nt, Human
cagcaguuccuuucccgagguauu

SEQ ID NO: 931546 - RNA, 19 nt, Human
caucugcucugggcaauaa

SEQ ID NO: 931547 - RNA, 20 nt, Human
ccaacaacgggaaguagggu

SEQ ID NO: 931548 - RNA, 21 nt, Human
ccagaacaccauggcauccuc

SEQ ID NO: 931549 - RNA, 22 nt, Human
ccggcggggccuccaucuuccu

SEQ ID NO: 931550 - RNA, 21 nt, Human
ccuccaacaacgggaaguagg

SEQ ID NO: 931551 - RNA, 23 nt, Human
cggcuuaaugugcuccugcucau

SEQ ID NO: 931552 - RNA, 20 nt, Human
cucggccguaggccuuggcc

SEQ ID NO: 931553 - RNA, 24 nt, Human
cugaacguugagaagcgcuugaca

SEQ ID NO: 931554 - RNA, 21 nt, Human
cugaaggcagcaguuccuuuc

SEQ ID NO: 931555 - RNA, 19 nt, Human
cugaggucggacucuguca

SEQ ID NO: 931556 - RNA, 24 nt, Human
cugcagguuggcggcgaucuuggc

SEQ ID NO: 931557 - RNA, 24 nt, Human
cuggaugacagacuggugucccug

SEQ ID NO: 931558 - RNA, 25 nt, Human
cugguccccuuucaggaugaggcuu

SEQ ID NO: 931559 - RNA, 18 nt, Human
gaaguucuuucgaggcac

SEQ ID NO: 931560 - RNA, 18 nt, Human
gagagcagcaccaucacu

SEQ ID NO: 931561 - RNA, 19 nt, Human
gagcagcaccaucacugcc

SEQ ID NO: 931562 - RNA, 21 nt, Human
gcggggccuccaucuuccucc

SEQ ID NO: 931563 - RNA, 22 nt, Human
gcugaaggcagcaguuccuuuc

SEQ ID NO: 931564 - RNA, 23 nt, Human
ggccaccaccuucucgaugcuga

SEQ ID NO: 931565 - RNA, 22 nt, Human
ggccuccaucuuccuccagccc

SEQ ID NO: 931566 - RNA, 23 nt, Human
ggccuccaucuuccuccagcccu

SEQ ID NO: 931567 - RNA, 18 nt, Human
gggcauccaccauugcca

SEQ ID NO: 931568 - RNA, 21 nt, Human
gggucucugagguccucaggg

SEQ ID NO: 931569 - RNA, 22 nt, Human
guagaaagggucucugaggucc

SEQ ID NO: 931570 - RNA, 22 nt, Human
uaacuucuuucucuguuaucuc

SEQ ID NO: 931571 - RNA, 19 nt, Human
uaagauauucauuggagaa

SEQ ID NO: 931572 - RNA, 20 nt, Human
uagcggaccuuuugaugagc

SEQ ID NO: 931573 - RNA, 19 nt, Human
ucagaaaggugcucucguc

SEQ ID NO: 931574 - RNA, 20 nt, Human
ucagggauguuaucucggcc

SEQ ID NO: 931575 - RNA, 21 nt, Human
ucaucuccacaguguaggcca

SEQ ID NO: 931576 - RNA, 21 nt, Human
uccaucuuccuccagcccucg

SEQ ID NO: 931577 - RNA, 21 nt, Human
ucuccaucacauagaucccuu

SEQ ID NO: 931578 - RNA, 21 nt, Human
ugccaugugggcacucauuuu

SEQ ID NO: 931579 - RNA, 19 nt, Human
uucucgaugcugaucaucu

SEQ ID NO: 931580 - RNA, 20 nt, Human
aaaaaacaauagcaagagca

SEQ ID NO: 931581 - RNA, 19 nt, Human
aaaaacaauagcaagagcc

SEQ ID NO: 931582 - RNA, 18 nt, Human
aaaguggauggaugaagc

SEQ ID NO: 931583 - RNA, 24 nt, Human
aaauacaugcuucgagcaaauaug

SEQ ID NO: 931584 - RNA, 19 nt, Human
aacagauuucacacauauu

SEQ ID NO: 931585 - RNA, 23 nt, Human
aagaagcagaggaaaugugcucc

SEQ ID NO: 931586 - RNA, 21 nt, Human
acaguuugugaaguuugucua

SEQ ID NO: 931587 - RNA, 18 nt, Human
agaaagcucagaaacaga

SEQ ID NO: 931588 - RNA, 21 nt, Human
agaaagcucagaaacagauuu

SEQ ID NO: 931589 - RNA, 18 nt, Human
agaagcugcaaaguggau

SEQ ID NO: 931590 - RNA, 24 nt, Human
auauaaagaguaugcuauacuuua

SEQ ID NO: 931591 - RNA, 23 nt, Human
auccaucccuuuucccuccuuca

SEQ ID NO: 931592 - RNA, 19 nt, Human
aucccuuuucccuccuuca

SEQ ID NO: 931593 - RNA, 21 nt, Human
augauaaaagaagcagaggaa

SEQ ID NO: 931594 - RNA, 28 nt, Human
caucccuuuucccuccuucccucugaag

SEQ ID NO: 931595 - RNA, 18 nt, Human
cccagagauacuguaaaa

SEQ ID NO: 931596 - RNA, 25 nt, Human
cccuccuucaccaucccuuuauauc

SEQ ID NO: 931597 - RNA, 24 nt, Human
cccuuuucccuccuucaccauccc

SEQ ID NO: 931598 - RNA, 18 nt, Human
ccuccaauaucccucucu

SEQ ID NO: 931599 - RNA, 19 nt, Human
ccuccaauaucccucucug

SEQ ID NO: 931600 - RNA, 22 nt, Human
ccuccaauaucccucucuguca

SEQ ID NO: 931601 - RNA, 24 nt, Human
cuccuucaccaucccuuuauaucc

SEQ ID NO: 931602 - RNA, 20 nt, Human
gaugaagcacagucuuugga

SEQ ID NO: 931603 - RNA, 22 nt, Human
gcuccaaguucacaaggguagg

SEQ ID NO: 931604 - RNA, 22 nt, Human
guaaaaaucagagaugaaaaua

SEQ ID NO: 931605 - RNA, 22 nt, Human
uaaaagaagcagaggaaaugug

SEQ ID NO: 931606 - RNA, 21 nt, Human
uaagacaguuugugaaguuug

SEQ ID NO: 931607 - RNA, 19 nt, Human
uacaugcuucgagcaaaua

SEQ ID NO: 931608 - RNA, 27 nt, Human
uauccuaagaaugguuucuuacugugg

SEQ ID NO: 931609 - RNA, 25 nt, Human
ucacacauauuuggaaaaugggauu

SEQ ID NO: 931610 - RNA, 24 nt, Human
ucauuugagcucuuaguaaaugug

SEQ ID NO: 931611 - RNA, 25 nt, Human
uccuuugucccccuaguaauuugug

SEQ ID NO: 931612 - RNA, 23 nt, Human
ugagaugggcuacacauccaucc

SEQ ID NO: 931613 - RNA, 21 nt, Human
ugcugggacaauuaguuacuc

SEQ ID NO: 931614 - RNA, 24 nt, Human
uggcaggggaugguuaaaaaacaa

SEQ ID NO: 931615 - RNA, 22 nt, Human
ugguacauauauaaagaguaug

SEQ ID NO: 931616 - RNA, 22 nt, Human
uuaaaaaacaauagcaagagca

SEQ ID NO: 931617 - RNA, 20 nt, Human
uucaccaucccuuuauaucc

SEQ ID NO: 931618 - RNA, 23 nt, Human
uucaccaucccuuuauauccuuu

SEQ ID NO: 931619 - RNA, 22 nt, Human
uugucuaaauuaagacaguuug

SEQ ID NO: 931620 - RNA, 22 nt, Human
uugucuaaauuaagacaguuug

SEQ ID NO: 931621 - RNA, 24 nt, Human
uuuccacauaaacuuucuguuaua

SEQ ID NO: 931622 - RNA, 21 nt, Human
aaacccagaggcuugugggga

SEQ ID NO: 931623 - RNA, 18 nt, Human
aagaaugguuggcugcuu

SEQ ID NO: 931624 - RNA, 22 nt, Human
aagauccacaaaagaaaugaaa

SEQ ID NO: 931625 - RNA, 20 nt, Human
aagccaauuucaguuuuugg

SEQ ID NO: 931626 - RNA, 20 nt, Human
acaaccugccacuuuuaauc

SEQ ID NO: 931627 - RNA, 19 nt, Human
agaaacagaagccaauuuc

SEQ ID NO: 931628 - RNA, 24 nt, Human
agcaacugaagauccacaaaagaa

SEQ ID NO: 931629 - RNA, 19 nt, Human
aggugucaggccucugaac

SEQ ID NO: 931630 - RNA, 20 nt, Human
augguaguggcgauggcagu

SEQ ID NO: 931631 - RNA, 22 nt, Human
cagaaacagaagccaauuucag

SEQ ID NO: 931632 - RNA, 18 nt, Human
cauccagauggccugaag

SEQ ID NO: 931633 - RNA, 20 nt, Human
ccugugaccugcauguauac

SEQ ID NO: 931634 - RNA, 19 nt, Human
cuuguggggagaaagggcu

SEQ ID NO: 931635 - RNA, 20 nt, Human
gccuggaccaacucagaaac

SEQ ID NO: 931636 - RNA, 22 nt, Human
gcgauggcagugaggacagacu

SEQ ID NO: 931637 - RNA, 27 nt, Human
ggcagugaggacagacugguaaaggga

SEQ ID NO: 931638 - RNA, 24 nt, Human
gguaaagggaaaacccagaggcuu

SEQ ID NO: 931639 - RNA, 25 nt, Human
guaaagggaaaacccagaggcuugg

SEQ ID NO: 931640 - RNA, 18 nt, Human
guggggagaaagggcuuu

SEQ ID NO: 931641 - RNA, 19 nt, Human
uaaagggaaaacccagagg

SEQ ID NO: 931642 - RNA, 24 nt, Human
uaaaucuuccacauuuggcagccu

SEQ ID NO: 931643 - RNA, 24 nt, Human
uaugaaauccaggcugguuuugga

SEQ ID NO: 931644 - RNA, 19 nt, Human
uauucccugugaccugcau

SEQ ID NO: 931645 - RNA, 21 nt, Human
ucaggccucugaacccaagcu

SEQ ID NO: 931646 - RNA, 24 nt, Human
uccacaaaagaaaugaaaauagcc

SEQ ID NO: 931647 - RNA, 21 nt, Human
ugcacaaccugccacuuuuaa

SEQ ID NO: 931648 - RNA, 18 nt, Human
uggcagccugagguguca

SEQ ID NO: 931649 - RNA, 23 nt, Human
uggcagccugaggugucaggccu

SEQ ID NO: 931650 - RNA, 25 nt, Human
uggcagugaggacagacugguaaag

SEQ ID NO: 931651 - RNA, 25 nt, Human
uggcgauggcagugaggacagacug

SEQ ID NO: 931652 - RNA, 19 nt, Human
uuggauguuaacauggagc

SEQ ID NO: 931653 - RNA, 24 nt, Human
uuuuuuuuuuuuuuuuuuaacaug

SEQ ID NO: 931654 - RNA, 21 nt, Human
aaagaugguccucaaugaacc

SEQ ID NO: 931655 - RNA, 24 nt, Human
acaaaacacaaauaaucaacugaa

SEQ ID NO: 931656 - RNA, 21 nt, Human
acuuacugucuuggcugcugg

SEQ ID NO: 931657 - RNA, 23 nt, Human
aggagagggaauuuuaaaaauau

SEQ ID NO: 931658 - RNA, 23 nt, Human
auaaaauaagcauaagaguaguc

SEQ ID NO: 931659 - RNA, 20 nt, Human
auucugaaauaaggaguagc

SEQ ID NO: 931660 - RNA, 18 nt, Human
caaugaaccaugccuccc

SEQ ID NO: 931661 - RNA, 19 nt, Human
cauuuggaaaagugguuuc

SEQ ID NO: 931662 - RNA, 22 nt, Human
ccacacagccacgcugaucacc

SEQ ID NO: 931663 - RNA, 25 nt, Human
cgcugaucacccuuuucuuccuuug

SEQ ID NO: 931664 - RNA, 22 nt, Human
cuaugagccaagaggagaggga

SEQ ID NO: 931665 - RNA, 24 nt, Human
gccaagaggagagggaauuuuaaa

SEQ ID NO: 931666 - RNA, 18 nt, Human
gcugaucacccuuuucuu

SEQ ID NO: 931667 - RNA, 23 nt, Human
ggauaacaaaauaaggauguaau

SEQ ID NO: 931668 - RNA, 21 nt, Human
gugaugugaaaugacagaaua

SEQ ID NO: 931669 - RNA, 18 nt, Human
uaaaacaacagcuccaua

SEQ ID NO: 931670 - RNA, 24 nt, Human
uaaaacaacagcuccauagggucc

SEQ ID NO: 931671 - RNA, 19 nt, Human
uaaaauaagcauaagagua

SEQ ID NO: 931672 - RNA, 18 nt, Human
uaaaauagaucaggaaac

SEQ ID NO: 931673 - RNA, 21 nt, Human
uaaagcaauuuguuuagagua

SEQ ID NO: 931674 - RNA, 20 nt, Human
uaaggauguaauguaaccau

SEQ ID NO: 931675 - RNA, 19 nt, Human
uacugaccacacagccacg

SEQ ID NO: 931676 - RNA, 20 nt, Human
uagcaagucgacaaagaugg

SEQ ID NO: 931677 - RNA, 22 nt, Human
uaucuuacaaaucuugccaaau

SEQ ID NO: 931678 - RNA, 24 nt, Human
ucacugaaauuugguugacucaaa

SEQ ID NO: 931679 - RNA, 23 nt, Human
ucacuuacugucuuggcugcugg

SEQ ID NO: 931680 - RNA, 18 nt, Human
ucccaaaggcuaauacuu

SEQ ID NO: 931681 - RNA, 21 nt, Human
uccugacagauauuauugaag

SEQ ID NO: 931682 - RNA, 20 nt, Human
ugaaaucaaggggaucuuca

SEQ ID NO: 931683 - RNA, 19 nt, Human
ugaagugauuuguuuucug

SEQ ID NO: 931684 - RNA, 23 nt, Human
ugaagugauuuguuuucuguuuu

SEQ ID NO: 931685 - RNA, 19 nt, Human
ugauacaauacaacauuuu

SEQ ID NO: 931686 - RNA, 22 nt, Human
ugauacaauacaacauuuuaaa

SEQ ID NO: 931687 - RNA, 27 nt, Human
ugcacuaaauuaguucuaauuuacucc

SEQ ID NO: 931688 - RNA, 22 nt, Human
ugguaagugcaacaaugaggac

SEQ ID NO: 931689 - RNA, 20 nt, Human
uuaaaacaacagcuccauag

SEQ ID NO: 931690 - RNA, 20 nt, Human
uuaacacugguuuaaaguca

SEQ ID NO: 931691 - RNA, 24 nt, Human
uuggcugcuggaugaaaucaaggg

SEQ ID NO: 931692 - RNA, 21 nt, Human
uugugacaucacagcuccacc

SEQ ID NO: 931693 - RNA, 18 nt, Human
aaaagaaacugaucaaaa

SEQ ID NO: 931694 - RNA, 21 nt, Human
aaacaaacacccagcaacaac

SEQ ID NO: 931695 - RNA, 25 nt, Human
aaacaaacacccagcaacaacccuc

SEQ ID NO: 931696 - RNA, 26 nt, Human
aaacaaacacccagcaacaacccucg

SEQ ID NO: 931697 - RNA, 20 nt, Human
aaacacccagcaacaacccu

SEQ ID NO: 931698 - RNA, 22 nt, Human
aagagagcaucucccuguagcc

SEQ ID NO: 931699 - RNA, 22 nt, Human
aauguuuccugaaaagaaacug

SEQ ID NO: 931700 - RNA, 20 nt, Human
acaaagcaacccaacuacuc

SEQ ID NO: 931701 - RNA, 23 nt, Human
agaaacugaucaaaacguuugaa

SEQ ID NO: 931702 - RNA, 21 nt, Human
agaaguggcaaacgguuacaa

SEQ ID NO: 931703 - RNA, 22 nt, Human
auaaaauaacugugugaaaagc

SEQ ID NO: 931704 - RNA, 22 nt, Human
aucacuuagcucaggaaacaaa

SEQ ID NO: 931705 - RNA, 20 nt, Human
caaagcaacccaacuacucc

SEQ ID NO: 931706 - RNA, 24 nt, Human
caaagccaguaggccuacauaugg

SEQ ID NO: 931707 - RNA, 19 nt, Human
caacaacccucguaucuca

SEQ ID NO: 931708 - RNA, 18 nt, Human
caacccaacuacuccagc

SEQ ID NO: 931709 - RNA, 23 nt, Human
caacccaacuacuccagcuacac

SEQ ID NO: 931710 - RNA, 22 nt, Human
caaucuguggcccucacugacu

SEQ ID NO: 931711 - RNA, 23 nt, Human
caaugcccaggagccucucaaag

SEQ ID NO: 931712 - RNA, 23 nt, Human
cacaaagcaacccaacuacucca

SEQ ID NO: 931713 - RNA, 22 nt, Human
cacccucaaacccaaaugauuc

SEQ ID NO: 931714 - RNA, 18 nt, Human
cacuuagcucaggaaaca

SEQ ID NO: 931715 - RNA, 18 nt, Human
caggaaacaaacacccag

SEQ ID NO: 931716 - RNA, 23 nt, Human
caucccccacgguuuaaaccuaa

SEQ ID NO: 931717 - RNA, 24 nt, Human
caugacucaaaauaacacacccuc

SEQ ID NO: 931718 - RNA, 20 nt, Human
cccaccuacgaaaaaaaggu

SEQ ID NO: 931719 - RNA, 24 nt, Human
cccccuauugcuacaguucugccc

SEQ ID NO: 931720 - RNA, 18 nt, Human
cgcuucauccgcugcuug

SEQ ID NO: 931721 - RNA, 20 nt, Human
cuacauaugaaacgcaaagg

SEQ ID NO: 931722 - RNA, 24 nt, Human
gagccaagcucugauaggaaaagc

SEQ ID NO: 931723 - RNA, 21 nt, Human
gcugcaacuccacuacagucu

SEQ ID NO: 931724 - RNA, 18 nt, Human
ggaaaagcccaccuacga

SEQ ID NO: 931725 - RNA, 19 nt, Human
ggaaacaaacacccagcaa

SEQ ID NO: 931726 - RNA, 22 nt, Human
ggaugucaggucgaagcaauuc

SEQ ID NO: 931727 - RNA, 25 nt, Human
uaacacaaagcaacccaacuacucc

SEQ ID NO: 931728 - RNA, 20 nt, Human
uaacacacaucacacuguuu

SEQ ID NO: 931729 - RNA, 19 nt, Human
uaacacacccucaaaccca

SEQ ID NO: 931730 - RNA, 19 nt, Human
uacacaaagccaguaggcc

SEQ ID NO: 931731 - RNA, 24 nt, Human
uacauucaugacucaaaauaacac

SEQ ID NO: 931732 - RNA, 23 nt, Human
uaggaaaagcccaccuacgaaaa

SEQ ID NO: 931733 - RNA, 25 nt, Human
ucaaacccaaaugauucuaaagcca

SEQ ID NO: 931734 - RNA, 22 nt, Human
uccuccuaacacaaagcaaccc

SEQ ID NO: 931735 - RNA, 21 nt, Human
ucugaagaaguggcaaacggu

SEQ ID NO: 931736 - RNA, 25 nt, Human
ugaaaagaaacugaucaaaacguuu

SEQ ID NO: 931737 - RNA, 22 nt, Human
ugaccaagccuuggcaaaaguc

SEQ ID NO: 931738 - RNA, 19 nt, Human
ugcaacuccacuacagucu

SEQ ID NO: 931739 - RNA, 21 nt, Human
ugugaaaagccauggccuuca

SEQ ID NO: 931740 - RNA, 22 nt, Human
uuccaaaagcugagaaaacgcu

SEQ ID NO: 931741 - RNA, 21 nt, Human
agacagggacauggcagggga

SEQ ID NO: 931742 - RNA, 18 nt, Human
agagcgggaagacaggca

SEQ ID NO: 931743 - RNA, 23 nt, Human
agcaaggaggcugcaggggcucg

SEQ ID NO: 931744 - RNA, 23 nt, Human
agggcuggagagcgggaagacag

SEQ ID NO: 931745 - RNA, 21 nt, Human
aggggacacaggacagagggg

SEQ ID NO: 931746 - RNA, 21 nt, Human
aguugcagcaggacgucacca

SEQ ID NO: 931747 - RNA, 19 nt, Human
caccgcaauucauuuagua

SEQ ID NO: 931748 - RNA, 21 nt, Human
ccacgggaggggggccccggg

SEQ ID NO: 931749 - RNA, 22 nt, Human
ccuaugccggagccucgagggc

SEQ ID NO: 931750 - RNA, 21 nt, Human
ccucacccaccgcaauucauu

SEQ ID NO: 931751 - RNA, 21 nt, Human
ccucgagggcuggagagcggg

SEQ ID NO: 931752 - RNA, 19 nt, Human
cggagccucgagggcugga

SEQ ID NO: 931753 - RNA, 21 nt, Human
gcggagagggcccacagugga

SEQ ID NO: 931754 - RNA, 21 nt, Human
ggcacaggggcagcuccggca

SEQ ID NO: 931755 - RNA, 19 nt, Human
ggcccacaguggacuuggu

SEQ ID NO: 931756 - RNA, 18 nt, Human
gucccacgaggcacugcg

SEQ ID NO: 931757 - RNA, 21 nt, Human
uaccccaggccugggucagac

SEQ ID NO: 931758 - RNA, 23 nt, Human
uaugccggagccucgagggcugg

SEQ ID NO: 931759 - RNA, 24 nt, Human
uccccagcugccaccucacccacc

SEQ ID NO: 931760 - RNA, 19 nt, Human
ucucaggccuaugccggag

SEQ ID NO: 931761 - RNA, 19 nt, Human
ucuggugcggagagggccc

SEQ ID NO: 931762 - RNA, 22 nt, Human
ugcgcagcaaggaggcugcagg

SEQ ID NO: 931763 - RNA, 20 nt, Human
ugcucggggaguugcagcag

SEQ ID NO: 931764 - RNA, 19 nt, Human
aacuucucucuuacauccc

SEQ ID NO: 931765 - RNA, 18 nt, Human
agacacaugagcagcaau

SEQ ID NO: 931766 - RNA, 22 nt, Human
aucccgcuccccuuguugcuua

SEQ ID NO: 931767 - RNA, 21 nt, Human
auuuuccagacauaauuucuc

SEQ ID NO: 931768 - RNA, 26 nt, Human
caccaugaaaggaaagcaaaugaucc

SEQ ID NO: 931769 - RNA, 23 nt, Human
cccugggcugauccccucuccac

SEQ ID NO: 931770 - RNA, 24 nt, Human
ccucuauggggcaccuacaggaau

SEQ ID NO: 931771 - RNA, 22 nt, Human
ccugggcugauccccucuccac

SEQ ID NO: 931772 - RNA, 18 nt, Human
cggcuauagauucaggca

SEQ ID NO: 931773 - RNA, 21 nt, Human
cguuucuccaucuucagcuga

SEQ ID NO: 931774 - RNA, 19 nt, Human
cucuuacaucccgcucccc

SEQ ID NO: 931775 - RNA, 22 nt, Human
cucuuacaucccgcuccccuug

SEQ ID NO: 931776 - RNA, 20 nt, Human
cugggcugauccccucucca

SEQ ID NO: 931777 - RNA, 23 nt, Human
uaacaccaugaaaggaaagcaaa

SEQ ID NO: 931778 - RNA, 22 nt, Human
uaauuucucaaugccacaccuc

SEQ ID NO: 931779 - RNA, 21 nt, Human
ucgcaggcaugccuggccccu

SEQ ID NO: 931780 - RNA, 20 nt, Human
ucuauggggcaccuacagga

SEQ ID NO: 931781 - RNA, 21 nt, Human
ucucaaugccacaccucuaug

SEQ ID NO: 931782 - RNA, 18 nt, Human
ugaaaggaaagcaaauga

SEQ ID NO: 931783 - RNA, 19 nt, Human
ugaaaggaaagcaaaugau

SEQ ID NO: 931784 - RNA, 21 nt, Human
ugggcugauccccucuccacu

SEQ ID NO: 931785 - RNA, 18 nt, Human
ugugaugaugcggcaaca

SEQ ID NO: 931786 - RNA, 19 nt, Human
uguuuuaaggggcagcaca

SEQ ID NO: 931787 - RNA, 24 nt, Human
uucauuugaccuucucugugauga

SEQ ID NO: 931788 - RNA, 25 nt, Human
aaaagccaggggugggcaauaacaa

SEQ ID NO: 931789 - RNA, 21 nt, Human
aaaagugcuagcaauucacag

SEQ ID NO: 931790 - RNA, 18 nt, Human
aaacagguaaucgggccu

SEQ ID NO: 931791 - RNA, 20 nt, Human
aaaccagacauggaagccau

SEQ ID NO: 931792 - RNA, 20 nt, Human
aaaguaauuauuuucuuuug

SEQ ID NO: 931793 - RNA, 24 nt, Human
aaagugcugggauuacagguguga

SEQ ID NO: 931794 - RNA, 22 nt, Human
aaaugccacaaaccagacaugg

SEQ ID NO: 931795 - RNA, 23 nt, Human
aaauggccccuuaucaaaagaac

SEQ ID NO: 931796 - RNA, 24 nt, Human
aagcaaaaagggggcuaauacugc

SEQ ID NO: 931797 - RNA, 20 nt, Human
aagcaagcagacauaccagg

SEQ ID NO: 931798 - RNA, 23 nt, Human
aagcaagcagacauaccagguca

SEQ ID NO: 931799 - RNA, 25 nt, Human
aagcaauucuccugccucagccucc

SEQ ID NO: 931800 - RNA, 21 nt, Human
aagccuccagugugacagcuu

SEQ ID NO: 931801 - RNA, 22 nt, Human
aagcggcugagcugcccaagca

SEQ ID NO: 931802 - RNA, 23 nt, Human
aagcugaguuccaauugagucug

SEQ ID NO: 931803 - RNA, 18 nt, Human
aaggaaaagcagcaagca

SEQ ID NO: 931804 - RNA, 20 nt, Human
aaguagcugagauuauaggc

SEQ ID NO: 931805 - RNA, 26 nt, Human
aaguagcugagauuauaggcgcaugc

SEQ ID NO: 931806 - RNA, 19 nt, Human
aagugcagcuugaggaaca

SEQ ID NO: 931807 - RNA, 18 nt, Human
aagugcugggauuacagg

SEQ ID NO: 931808 - RNA, 19 nt, Human
aagugcugggauuacaggu

SEQ ID NO: 931809 - RNA, 26 nt, Human
aagugcugggauuacaggugugagcc

SEQ ID NO: 931810 - RNA, 21 nt, Human
aauguuucuguaaauguuugg

SEQ ID NO: 931811 - RNA, 24 nt, Human
aauuuuguauuuuuaguagagaug

SEQ ID NO: 931812 - RNA, 23 nt, Human
acaaaaauagacucccaccuugc

SEQ ID NO: 931813 - RNA, 21 nt, Human
acaaaccagacauggaagcca

SEQ ID NO: 931814 - RNA, 23 nt, Human
acacacacaggcacagacagagu

SEQ ID NO: 931815 - RNA, 24 nt, Human
acacaggcacagacagaguaccuc

SEQ ID NO: 931816 - RNA, 22 nt, Human
acagaaauagccaagcagcaac

SEQ ID NO: 931817 - RNA, 21 nt, Human
acagaguaccaccaagcaaaa

SEQ ID NO: 931818 - RNA, 21 nt, Human
acagcaagucaucccaagacc

SEQ ID NO: 931819 - RNA, 18 nt, Human
accaggacuuuggcuucc

SEQ ID NO: 931820 - RNA, 22 nt, Human
acccggaaaagccagggguggg

SEQ ID NO: 931821 - RNA, 21 nt, Human
acccucccgcuacccuccccu

SEQ ID NO: 931822 - RNA, 23 nt, Human
accggcuccucagcagcauguac

SEQ ID NO: 931823 - RNA, 18 nt, Human
accuuauccccaaaugcc

SEQ ID NO: 931824 - RNA, 21 nt, Human
accuuauccccaaaugccaca

SEQ ID NO: 931825 - RNA, 25 nt, Human
acggaguuuugcuguuguugcccag

SEQ ID NO: 931826 - RNA, 18 nt, Human
acucccaccuugcuuuug

SEQ ID NO: 931827 - RNA, 23 nt, Human
acugcaccaggcugcugcuaaac

SEQ ID NO: 931828 - RNA, 23 nt, Human
agaaagcaaggaaaagcagcaag

SEQ ID NO: 931829 - RNA, 18 nt, Human
agacauaccaggucaaca

SEQ ID NO: 931830 - RNA, 26 nt, Human
agaguccuuuccucuuccuccucugg

SEQ ID NO: 931831 - RNA, 20 nt, Human
agcaagcaagcagacauacc

SEQ ID NO: 931832 - RNA, 25 nt, Human
agcaccuacauauucuugagcaagu

SEQ ID NO: 931833 - RNA, 18 nt, Human
agcccgaggccugcccaa

SEQ ID NO: 931834 - RNA, 20 nt, Human
aggcgcaugccaccacgccc

SEQ ID NO: 931835 - RNA, 24 nt, Human
agugacuaucacacacacacacag

SEQ ID NO: 931836 - RNA, 24 nt, Human
auacugcaucuuaaagguagcaaa

SEQ ID NO: 931837 - RNA, 19 nt, Human
auccaugggaaggccaugu

SEQ ID NO: 931838 - RNA, 21 nt, Human
aucucaguucccucugaguuu

SEQ ID NO: 931839 - RNA, 24 nt, Human
augggguuucuccauguuggucag

SEQ ID NO: 931840 - RNA, 22 nt, Human
caaaccagacauggaagccaug

SEQ ID NO: 931841 - RNA, 24 nt, Human
caaagugcugggauuacaggugug

SEQ ID NO: 931842 - RNA, 23 nt, Human
caacgaggccucaaacaaacugc

SEQ ID NO: 931843 - RNA, 19 nt, Human
caagcaagcagacauacca

SEQ ID NO: 931844 - RNA, 25 nt, Human
caagcaagguccuucuguaucuguc

SEQ ID NO: 931845 - RNA, 22 nt, Human
caagcaauucuccugccucagc

SEQ ID NO: 931846 - RNA, 21 nt, Human
caagcggcugagcugcccaag

SEQ ID NO: 931847 - RNA, 24 nt, Human
cacacacacaggcacagacagagu

SEQ ID NO: 931848 - RNA, 21 nt, Human
cacagcaagucaucccaagac

SEQ ID NO: 931849 - RNA, 22 nt, Human
cacagcaagucaucccaagacc

SEQ ID NO: 931850 - RNA, 25 nt, Human
cacagggagacccaguaacaagaca

SEQ ID NO: 931851 - RNA, 24 nt, Human
caccaagcaaaaagggggcuaaua

SEQ ID NO: 931852 - RNA, 22 nt, Human
caccacuccuuugaaugcauca

SEQ ID NO: 931853 - RNA, 22 nt, Human
caccaggcugcugcuaaaccuu

SEQ ID NO: 931854 - RNA, 21 nt, Human
cacccaacaccuacagcccga

SEQ ID NO: 931855 - RNA, 21 nt, Human
caccgcaaccuccgccuccug

SEQ ID NO: 931856 - RNA, 23 nt, Human
cacucucucuuaacaaucauucc

SEQ ID NO: 931857 - RNA, 22 nt, Human
cagagauggccccaaagugcag

SEQ ID NO: 931858 - RNA, 19 nt, Human
cagcaagcaagcagacaua

SEQ ID NO: 931859 - RNA, 19 nt, Human
cagcagcauguacauucaa

SEQ ID NO: 931860 - RNA, 24 nt, Human
cagucaucaauggugggcaaccaa

SEQ ID NO: 931861 - RNA, 21 nt, Human
caguggguggcauccugcaga

SEQ ID NO: 931862 - RNA, 24 nt, Human
cauaacccccaaaugugugcauca

SEQ ID NO: 931863 - RNA, 24 nt, Human
caugccaccacgcccggcuaauuu

SEQ ID NO: 931864 - RNA, 24 nt, Human
cauuccagacauggaucuugccau

SEQ ID NO: 931865 - RNA, 21 nt, Human
ccaaagugcugggauuacagg

SEQ ID NO: 931866 - RNA, 21 nt, Human
ccaaagugcugggauuacagg

SEQ ID NO: 931867 - RNA, 24 nt, Human
ccaaagugcugggauuacaggugu

SEQ ID NO: 931868 - RNA, 18 nt, Human
ccaacaccuacagcccga

SEQ ID NO: 931869 - RNA, 22 nt, Human
ccaacaccuacagcccgaggcc

SEQ ID NO: 931870 - RNA, 23 nt, Human
ccaaccaccuagccucacacgac

SEQ ID NO: 931871 - RNA, 22 nt, Human
ccaaguagcugagauuauaggc

SEQ ID NO: 931872 - RNA, 18 nt, Human
ccaccaagcaaaaagggg

SEQ ID NO: 931873 - RNA, 19 nt, Human
ccagaguccuuuccucuuc

SEQ ID NO: 931874 - RNA, 24 nt, Human
ccagcagagcuuggugcagugaca

SEQ ID NO: 931875 - RNA, 23 nt, Human
ccaggccggagugcaauggcacg

SEQ ID NO: 931876 - RNA, 19 nt, Human
ccauguuggucaggcuggu

SEQ ID NO: 931877 - RNA, 22 nt, Human
ccauguuggucaggcuggucuc

SEQ ID NO: 931878 - RNA, 23 nt, Human
cccaaagugcagcuugaggaaca

SEQ ID NO: 931879 - RNA, 23 nt, Human
cccaaguagcugagauuauaggc

SEQ ID NO: 931880 - RNA, 23 nt, Human
cccaaguagcugagauuauaggc

SEQ ID NO: 931881 - RNA, 21 nt, Human
cccaggaggaccguggguuug

SEQ ID NO: 931882 - RNA, 18 nt, Human
ccccaaagugcagcuuga

SEQ ID NO: 931883 - RNA, 23 nt, Human
ccccuuaucaaaagaacgaaggu

SEQ ID NO: 931884 - RNA, 21 nt, Human
cccgcuacccuccccuuuccc

SEQ ID NO: 931885 - RNA, 18 nt, Human
ccgcaaccuccgccuccu

SEQ ID NO: 931886 - RNA, 23 nt, Human
ccgcaaccuccgccuccuggguu

SEQ ID NO: 931887 - RNA, 24 nt, Human
ccgcaaccuccgccuccuggguuc

SEQ ID NO: 931888 - RNA, 26 nt, Human
ccgccuccuggguucaagcaauucuu

SEQ ID NO: 931889 - RNA, 22 nt, Human
ccuccccuuucccucccuuuca

SEQ ID NO: 931890 - RNA, 23 nt, Human
ccuccccuuucccucccuuuccc

SEQ ID NO: 931891 - RNA, 27 nt, Human
ccucccgcuacccuccccuuucccucc

SEQ ID NO: 931892 - RNA, 21 nt, Human
ccucccuuucaggcccuuggg

SEQ ID NO: 931893 - RNA, 19 nt, Human
ccuccgccuccuggguuca

SEQ ID NO: 931894 - RNA, 24 nt, Human
ccuccuggguucaagcaauucucc

SEQ ID NO: 931895 - RNA, 20 nt, Human
ccugcccgcugaacagaaau

SEQ ID NO: 931896 - RNA, 24 nt, Human
ccugccucagccucccaaguagcu

SEQ ID NO: 931897 - RNA, 23 nt, Human
ccuggguucaagcaauucuccug

SEQ ID NO: 931898 - RNA, 19 nt, Human
cgcacuggcaaaagucaug

SEQ ID NO: 931899 - RNA, 19 nt, Human
cggcugagcugcccaagca

SEQ ID NO: 931900 - RNA, 22 nt, Human
cuaacugcauggcuuccugcaa

SEQ ID NO: 931901 - RNA, 24 nt, Human
cuaauuuuguauuuuuaguagaga

SEQ ID NO: 931902 - RNA, 19 nt, Human
cuacccuccccuuucccuc

SEQ ID NO: 931903 - RNA, 21 nt, Human
cuccagcccagucaaaugauc

SEQ ID NO: 931904 - RNA, 24 nt, Human
cuccauguuggucaggcuggucuc

SEQ ID NO: 931905 - RNA, 26 nt, Human
cucccgaccuccggugauccgcccgc

SEQ ID NO: 931906 - RNA, 25 nt, Human
cuccugccucagccucccaaguagc

SEQ ID NO: 931907 - RNA, 21 nt, Human
cuccuggguucaagcaauucu

SEQ ID NO: 931908 - RNA, 25 nt, Human
cucucugcucuaagaaggccaugag

SEQ ID NO: 931909 - RNA, 22 nt, Human
cugaccccaagauauaugaaaa

SEQ ID NO: 931910 - RNA, 24 nt, Human
cuugagagccccacuauaccaaau

SEQ ID NO: 931911 - RNA, 20 nt, Human
gacauacuccucucucugcu

SEQ ID NO: 931912 - RNA, 24 nt, Human
gaccuccggugauccgcccgccuc

SEQ ID NO: 931913 - RNA, 24 nt, Human
gagaaagcaaggaaaagcagcaag

SEQ ID NO: 931914 - RNA, 24 nt, Human
gagaugggguuucuccauguuggu

SEQ ID NO: 931915 - RNA, 23 nt, Human
gagcagauguacagcacauccau

SEQ ID NO: 931916 - RNA, 18 nt, Human
gauuacaggugugagcca

SEQ ID NO: 931917 - RNA, 22 nt, Human
gauuacaggugugagccaccgc

SEQ ID NO: 931918 - RNA, 22 nt, Human
gauuacaggugugagccaccgc

SEQ ID NO: 931919 - RNA, 23 nt, Human
gcaaaagucaugaacuugggguu

SEQ ID NO: 931920 - RNA, 22 nt, Human
gcaaccaaaaggccauguugga

SEQ ID NO: 931921 - RNA, 21 nt, Human
gcauguuuucaaagaacaugg

SEQ ID NO: 931922 - RNA, 19 nt, Human
gccggagugcaauggcacg

SEQ ID NO: 931923 - RNA, 20 nt, Human
gccucagccucccaaguagc

SEQ ID NO: 931924 - RNA, 23 nt, Human
gccucggccucccaaagugcugg

SEQ ID NO: 931925 - RNA, 22 nt, Human
gcuaaguaaugcuugguggcug

SEQ ID NO: 931926 - RNA, 25 nt, Human
gcugcagcucaucucacucagccug

SEQ ID NO: 931927 - RNA, 20 nt, Human
gcugcuaaaccuuccagccc

SEQ ID NO: 931928 - RNA, 23 nt, Human
gcuggucucaaacucccgaccuc

SEQ ID NO: 931929 - RNA, 21 nt, Human
gcuguuguugcccaggccgga

SEQ ID NO: 931930 - RNA, 19 nt, Human
gcuuccugcaagcaagguc

SEQ ID NO: 931931 - RNA, 18 nt, Human
gggguuucuccauguugg

SEQ ID NO: 931932 - RNA, 22 nt, Human
gggguuucuccauguuggucag

SEQ ID NO: 931933 - RNA, 19 nt, Human
guaccaccaagcaaaaagg

SEQ ID NO: 931934 - RNA, 24 nt, Human
gugauccgcccgccucggccuccc

SEQ ID NO: 931935 - RNA, 26 nt, Human
uaacugcauggcuuccugcaagcaag

SEQ ID NO: 931936 - RNA, 22 nt, Human
uaaugcuugguggcugcucuga

SEQ ID NO: 931937 - RNA, 24 nt, Human
uacaggugugagccaccgcgccca

SEQ ID NO: 931938 - RNA, 18 nt, Human
uacaguggguggcauccu

SEQ ID NO: 931939 - RNA, 21 nt, Human
uacugcaucuuaaagguagca

SEQ ID NO: 931940 - RNA, 24 nt, Human
uaguagagaugggguuucuccaug

SEQ ID NO: 931941 - RNA, 22 nt, Human
uaucucaguucccucugaguuu

SEQ ID NO: 931942 - RNA, 24 nt, Human
ucaaaaccaggacuuuggcuuccc

SEQ ID NO: 931943 - RNA, 19 nt, Human
ucaagcaauucuccugccu

SEQ ID NO: 931944 - RNA, 21 nt, Human
ucacacgacuaacugcagaaa

SEQ ID NO: 931945 - RNA, 24 nt, Human
ucaccgcaaccuccgccuccuggg

SEQ ID NO: 931946 - RNA, 25 nt, Human
ucaccgcaaccuccgccuccugggu

SEQ ID NO: 931947 - RNA, 27 nt, Human
ucaccgcaaccuccgccuccuggguuc

SEQ ID NO: 931948 - RNA, 21 nt, Human
ucagccucccaaguagcugag

SEQ ID NO: 931949 - RNA, 20 nt, Human
uccaagagaaagcaaggaaa

SEQ ID NO: 931950 - RNA, 18 nt, Human
uccauguuggucaggcug

SEQ ID NO: 931951 - RNA, 23 nt, Human
ucccaaagugcugggauuacagg

SEQ ID NO: 931952 - RNA, 24 nt, Human
ucccaaguagcugagauuauaggc

SEQ ID NO: 931953 - RNA, 23 nt, Human
uccccaaaugccacaaaccagac

SEQ ID NO: 931954 - RNA, 24 nt, Human
uccgccuccuggguucaagcaauu

SEQ ID NO: 931955 - RNA, 23 nt, Human
uccucucugggaaagcagaacua

SEQ ID NO: 931956 - RNA, 21 nt, Human
uccuggguucaagcaauucuc

SEQ ID NO: 931957 - RNA, 24 nt, Human
uccuggguucaagcaauucuccug

SEQ ID NO: 931958 - RNA, 18 nt, Human
ucggccucccaaagugcu

SEQ ID NO: 931959 - RNA, 19 nt, Human
ucuggaucugcaaggagug

SEQ ID NO: 931960 - RNA, 24 nt, Human
ugaagaugcuugagagccccacua

SEQ ID NO: 931961 - RNA, 21 nt, Human
ugagauuauaggcgcaugcca

SEQ ID NO: 931962 - RNA, 22 nt, Human
ugagauuauaggcgcaugccac

SEQ ID NO: 931963 - RNA, 24 nt, Human
ugagauuauaggcgcaugccacca

SEQ ID NO: 931964 - RNA, 23 nt, Human
ugagucuggucacuccuccagca

SEQ ID NO: 931965 - RNA, 18 nt, Human
ugcagggugagggcaagc

SEQ ID NO: 931966 - RNA, 21 nt, Human
ugcagggugagggcaagcggc

SEQ ID NO: 931967 - RNA, 21 nt, Human
ugccacaaaccagacauggaa

SEQ ID NO: 931968 - RNA, 20 nt, Human
ugccacaaguacacagggag

SEQ ID NO: 931969 - RNA, 24 nt, Human
ugcccaaccaccuagccucacacg

SEQ ID NO: 931970 - RNA, 24 nt, Human
ugcccaggccggagugcaauggca

SEQ ID NO: 931971 - RNA, 24 nt, Human
ugccucagccucccaaguagcuga

SEQ ID NO: 931972 - RNA, 25 nt, Human
ugcuaaaccuuccagcccuaggaac

SEQ ID NO: 931973 - RNA, 24 nt, Human
ugcugggauuacaggugugagcca

SEQ ID NO: 931974 - RNA, 20 nt, Human
uggaacacgcacuggcaaaa

SEQ ID NO: 931975 - RNA, 24 nt, Human
uggcacgaucucaacucaccgcaa

SEQ ID NO: 931976 - RNA, 23 nt, Human
ugggaaagcagaacuauacagug

SEQ ID NO: 931977 - RNA, 18 nt, Human
ugggauuacaggugugag

SEQ ID NO: 931978 - RNA, 19 nt, Human
ugggauuacaggugugagc

SEQ ID NO: 931979 - RNA, 21 nt, Human
ugggauuacaggugugagcca

SEQ ID NO: 931980 - RNA, 22 nt, Human
ugggauuacaggugugagccac

SEQ ID NO: 931981 - RNA, 23 nt, Human
ugggauuacaggugugagccacc

SEQ ID NO: 931982 - RNA, 24 nt, Human
ugggauuacaggugugagccaccg

SEQ ID NO: 931983 - RNA, 22 nt, Human
ugggguugaauugcaaacaggu

SEQ ID NO: 931984 - RNA, 24 nt, Human
ugggguuucuccauguuggucagg

SEQ ID NO: 931985 - RNA, 20 nt, Human
ugggucuuuuucccacccaa

SEQ ID NO: 931986 - RNA, 21 nt, Human
uggguucaagcaauucuccug

SEQ ID NO: 931987 - RNA, 23 nt, Human
uggguucaagcaauucuccugcc

SEQ ID NO: 931988 - RNA, 21 nt, Human
uggucaggcuggucucaaacu

SEQ ID NO: 931989 - RNA, 19 nt, Human
uggucucaaacucccgacc

SEQ ID NO: 931990 - RNA, 21 nt, Human
uguauuuuuaguagagauggg

SEQ ID NO: 931991 - RNA, 21 nt, Human
ugugacagcuuugcuguuggc

SEQ ID NO: 931992 - RNA, 20 nt, Human
uguugcccaggccggagugc

SEQ ID NO: 931993 - RNA, 24 nt, Human
uuaguaaaaugacauacuccucuc

SEQ ID NO: 931994 - RNA, 18 nt, Human
uuaguagagaugggguuu

SEQ ID NO: 931995 - RNA, 24 nt, Human
uuaguagagaugggguuucuccau

SEQ ID NO: 931996 - RNA, 24 nt, Human
uuauaccgcucucuccauuccaga

SEQ ID NO: 931997 - RNA, 21 nt, Human
uucaagcaauucuccugccuc

SEQ ID NO: 931998 - RNA, 24 nt, Human
uucaagcaauucuccugccucagc

SEQ ID NO: 931999 - RNA, 18 nt, Human
uugcccaggccggagugc

SEQ ID NO: 932000 - RNA, 18 nt, Human
uugcugaauuuaaguccu

SEQ ID NO: 932001 - RNA, 23 nt, Human
uuguauuuuuaguagagaugggg

SEQ ID NO: 932002 - RNA, 23 nt, Human
uuguugcccaggccggagugcaa

SEQ ID NO: 932003 - RNA, 21 nt, Human
uuucuccauguuggucaggcu

SEQ ID NO: 932004 - RNA, 24 nt, Human
uuugcuguuguugcccaggccgga

SEQ ID NO: 932005 - RNA, 18 nt, Human
uuuggcuucccaugcagu

SEQ ID NO: 932006 - RNA, 18 nt, Human
uuuucccacccaacaccu

SEQ ID NO: 932007 - RNA, 24 nt, Human
uuuugcuguuguugcccaggccgg

SEQ ID NO: 932008 - RNA, 19 nt, Human
uuuuguauuuuuaguagag

SEQ ID NO: 932009 - RNA, 20 nt, Human
uuuuguauuuuuaguagaga

SEQ ID NO: 932010 - RNA, 22 nt, Human
uuuuuaguagagaugggguuuc

SEQ ID NO: 932011 - RNA, 22 nt, Human
uuuuuuuuuuuuuugagacgga

SEQ ID NO: 932012 - RNA, 18 nt, Human
uuuuuuuuuuuuuuuuug

SEQ ID NO: 932013 - RNA, 25 nt, Human
aaaugggaccuaaagaccagcaacc

SEQ ID NO: 932014 - RNA, 22 nt, Human
aacauuauuaaugaaagcuauu

SEQ ID NO: 932015 - RNA, 21 nt, Human
aagagucaccaccucaugcca

SEQ ID NO: 932016 - RNA, 23 nt, Human
aauauggaagaagauggaaaaaa

SEQ ID NO: 932017 - RNA, 22 nt, Human
acaucaguuuuaaggacuugua

SEQ ID NO: 932018 - RNA, 19 nt, Human
accaccucaugccaucuug

SEQ ID NO: 932019 - RNA, 20 nt, Human
agaccagcaaccauacugaa

SEQ ID NO: 932020 - RNA, 23 nt, Human
aggugggaggauggcuugaggcc

SEQ ID NO: 932021 - RNA, 22 nt, Human
aucacaguuuuuuuuuuacucu

SEQ ID NO: 932022 - RNA, 23 nt, Human
aucuaccccuucuuuuucuccaa

SEQ ID NO: 932023 - RNA, 21 nt, Human
auggaaaaaacuuguuuaaug

SEQ ID NO: 932024 - RNA, 19 nt, Human
caaugacuguggaauaaua

SEQ ID NO: 932025 - RNA, 23 nt, Human
cauaaacucuagaugucuuuggc

SEQ ID NO: 932026 - RNA, 21 nt, Human
cauucugaacuuucaccgcuu

SEQ ID NO: 932027 - RNA, 23 nt, Human
ccgcuuuuaaagaagcaugccgc

SEQ ID NO: 932028 - RNA, 18 nt, Human
ccuaaaacaaaugcagaa

SEQ ID NO: 932029 - RNA, 19 nt, Human
ccuaaagaccagcaaccau

SEQ ID NO: 932030 - RNA, 19 nt, Human
cuaacuccauucugaacuu

SEQ ID NO: 932031 - RNA, 23 nt, Human
cuaccccuucuuuuucuccaaau

SEQ ID NO: 932032 - RNA, 23 nt, Human
cugguccuuuuuugaauuuguau

SEQ ID NO: 932033 - RNA, 20 nt, Human
cuuugggagguugagguggg

SEQ ID NO: 932034 - RNA, 22 nt, Human
ggagguugaggugggaggaugg

SEQ ID NO: 932035 - RNA, 20 nt, Human
gguaagaaauaaaaacugua

SEQ ID NO: 932036 - RNA, 21 nt, Human
guacuccaauuuaaaacuuuu

SEQ ID NO: 932037 - RNA, 21 nt, Human
uaaaaugggaccuaaagacca

SEQ ID NO: 932038 - RNA, 22 nt, Human
uaagauagagaucguaucuguc

SEQ ID NO: 932039 - RNA, 24 nt, Human
uaagauagagaucguaucugucau

SEQ ID NO: 932040 - RNA, 18 nt, Human
uaagugacugacucuuug

SEQ ID NO: 932041 - RNA, 20 nt, Human
uaagugacugacucuuuggg

SEQ ID NO: 932042 - RNA, 19 nt, Human
uaauggguaagaaauaaaa

SEQ ID NO: 932043 - RNA, 23 nt, Human
uacagaauauauaccgcuuuuaa

SEQ ID NO: 932044 - RNA, 24 nt, Human
uacucuuagcugaaaagaaagauc

SEQ ID NO: 932045 - RNA, 19 nt, Human
uagcugaaaagaaagauca

SEQ ID NO: 932046 - RNA, 20 nt, Human
uaggucuugaaacuuggugg

SEQ ID NO: 932047 - RNA, 21 nt, Human
uaugcaaauauaauguguaau

SEQ ID NO: 932048 - RNA, 19 nt, Human
ucagucuacccauaaguga

SEQ ID NO: 932049 - RNA, 23 nt, Human
ucuaggguaggucuugaaacuug

SEQ ID NO: 932050 - RNA, 25 nt, Human
ucuuuuauuuauuuauuuaguuuug

SEQ ID NO: 932051 - RNA, 22 nt, Human
ucuuuuuauauauauauaugua

SEQ ID NO: 932052 - RNA, 21 nt, Human
ugaggugggaggauggcuuga

SEQ ID NO: 932053 - RNA, 24 nt, Human
ugaggugggaggauggcuugaggc

SEQ ID NO: 932054 - RNA, 21 nt, Human
ugagguuggcauacuaugagg

SEQ ID NO: 932055 - RNA, 21 nt, Human
uggaagaagauggaaaaaacu

SEQ ID NO: 932056 - RNA, 27 nt, Human
uggaagaagauggaaaaaacuuguuua

SEQ ID NO: 932057 - RNA, 20 nt, Human
ugugucagaaaccuuaaaca

SEQ ID NO: 932058 - RNA, 20 nt, Human
uguguuuuuuccugaguuuc

SEQ ID NO: 932059 - RNA, 24 nt, Human
uucugcuuugggagguugaggugg

SEQ ID NO: 932060 - RNA, 20 nt, Human
uucuuuuuauauauauauau

SEQ ID NO: 932061 - RNA, 19 nt, Human
uuucaugccauguauuagc

SEQ ID NO: 932062 - RNA, 23 nt, Human
uuugggagguugaggugggagga

SEQ ID NO: 932063 - RNA, 22 nt, Human
uuuuuuuuuuucuucuuucuuu

SEQ ID NO: 932064 - RNA, 18 nt, Human
aaacccaggggauaacag

SEQ ID NO: 932065 - RNA, 24 nt, Human
aaacuuccaagcaauuaacacuuu

SEQ ID NO: 932066 - RNA, 24 nt, Human
aaagugcugggauuacaggcauga

SEQ ID NO: 932067 - RNA, 25 nt, Human
aaccucagaaaucugucaucaguau

SEQ ID NO: 932068 - RNA, 20 nt, Human
aacuucugccuccugaguuc

SEQ ID NO: 932069 - RNA, 23 nt, Human
aagagaaaaacacuugaacuuca

SEQ ID NO: 932070 - RNA, 19 nt, Human
aagugcugggauuacaggc

SEQ ID NO: 932071 - RNA, 21 nt, Human
aagugcugggauuacaggcau

SEQ ID NO: 932072 - RNA, 26 nt, Human
aagugcugggauuacaggcaugagcc

SEQ ID NO: 932073 - RNA, 24 nt, Human
acacagaaucucgcucugucuccc

SEQ ID NO: 932074 - RNA, 21 nt, Human
acagugugugugucugcuggg

SEQ ID NO: 932075 - RNA, 24 nt, Human
accauguuggccaggguggucuug

SEQ ID NO: 932076 - RNA, 24 nt, Human
acgggacuucaccauguuggccag

SEQ ID NO: 932077 - RNA, 26 nt, Human
acucgaauuugaucaggaaaguaacc

SEQ ID NO: 932078 - RNA, 21 nt, Human
agaggacagggagucgggacu

SEQ ID NO: 932079 - RNA, 24 nt, Human
agcugggacuacaagugcccgcca

SEQ ID NO: 932080 - RNA, 21 nt, Human
aggcaaccucagaaaucuguc

SEQ ID NO: 932081 - RNA, 21 nt, Human
agggagucgggacuuaggaag

SEQ ID NO: 932082 - RNA, 20 nt, Human
agggcaguggcgugaucucg

SEQ ID NO: 932083 - RNA, 22 nt, Human
agggcaguggcgugaucucggc

SEQ ID NO: 932084 - RNA, 24 nt, Human
aggugaucugcccaccucggccuc

SEQ ID NO: 932085 - RNA, 18 nt, Human
aguagcugggacuacaag

SEQ ID NO: 932086 - RNA, 24 nt, Human
agugauucuccugcuucagccucc

SEQ ID NO: 932087 - RNA, 20 nt, Human
aguucaagugauucuccugc

SEQ ID NO: 932088 - RNA, 20 nt, Human
auaacguaaccuucccagua

SEQ ID NO: 932089 - RNA, 21 nt, Human
aucaagauuuucaaaagaucu

SEQ ID NO: 932090 - RNA, 19 nt, Human
aucucgcucugucucccca

SEQ ID NO: 932091 - RNA, 20 nt, Human
augaggcugauaugaacacc

SEQ ID NO: 932092 - RNA, 24 nt, Human
auuugaaacaaaaaacacaaaaca

SEQ ID NO: 932093 - RNA, 22 nt, Human
auuuuuguauuuuuaguagaga

SEQ ID NO: 932094 - RNA, 24 nt, Human
auuuuuguauuuuuaguagagacg

SEQ ID NO: 932095 - RNA, 23 nt, Human
caaaagcuauuuugaaagacucg

SEQ ID NO: 932096 - RNA, 24 nt, Human
caaagugcugggauuacaggcaug

SEQ ID NO: 932097 - RNA, 22 nt, Human
caagugauucuccugcuucagc

SEQ ID NO: 932098 - RNA, 23 nt, Human
cacagaaucucgcucugucuccc

SEQ ID NO: 932099 - RNA, 24 nt, Human
caccaugcccagcugauuuuugua

SEQ ID NO: 932100 - RNA, 18 nt, Human
caccauguuggccagggu

SEQ ID NO: 932101 - RNA, 22 nt, Human
caccauguuggccagggugguc

SEQ ID NO: 932102 - RNA, 24 nt, Human
caccauguuggccaggguggucuu

SEQ ID NO: 932103 - RNA, 24 nt, Human
caccucggccucccaaagugcugg

SEQ ID NO: 932104 - RNA, 20 nt, Human
cagccuccugaguagcuggg

SEQ ID NO: 932105 - RNA, 24 nt, Human
cagcgucuaaacccaggggauaac

SEQ ID NO: 932106 - RNA, 20 nt, Human
cauauuuacauaccguguuu

SEQ ID NO: 932107 - RNA, 23 nt, Human
caucaguauuaaccugcuuaaaa

SEQ ID NO: 932108 - RNA, 23 nt, Human
ccaaagugcugggauuacaggca

SEQ ID NO: 932109 - RNA, 24 nt, Human
ccaaagugcugggauuacaggcau

SEQ ID NO: 932110 - RNA, 24 nt, Human
cccaaagugcugggauuacaggca

SEQ ID NO: 932111 - RNA, 20 nt, Human
cccaaggucacacugcuguu

SEQ ID NO: 932112 - RNA, 23 nt, Human
cccagcugauuuuuguauuuuua

SEQ ID NO: 932113 - RNA, 24 nt, Human
ccccaggcuggagggcaguggcgu

SEQ ID NO: 932114 - RNA, 23 nt, Human
ccgcaacuucugccuccugaguu

SEQ ID NO: 932115 - RNA, 24 nt, Human
ccuccugaguucaagugauucucc

SEQ ID NO: 932116 - RNA, 23 nt, Human
ccugaguagcugggacuacaagu

SEQ ID NO: 932117 - RNA, 23 nt, Human
ccugaguucaagugauucuccug

SEQ ID NO: 932118 - RNA, 24 nt, Human
cgggacuucaccauguuggccagg

SEQ ID NO: 932119 - RNA, 19 nt, Human
cuccugaguucaagugauu

SEQ ID NO: 932120 - RNA, 23 nt, Human
cugaccucaggugaucugcccac

SEQ ID NO: 932121 - RNA, 23 nt, Human
cugccuccugaguucaagugauu

SEQ ID NO: 932122 - RNA, 24 nt, Human
cugccuccugaguucaagugauuc

SEQ ID NO: 932123 - RNA, 23 nt, Human
cugcuucagccuccugaguagcu

SEQ ID NO: 932124 - RNA, 18 nt, Human
cuuaggaaggccuugccc

SEQ ID NO: 932125 - RNA, 19 nt, Human
cuucaccauguuggccagg

SEQ ID NO: 932126 - RNA, 21 nt, Human
gaacagugugugugucugcug

SEQ ID NO: 932127 - RNA, 18 nt, Human
gaauacauacaccaucaa

SEQ ID NO: 932128 - RNA, 24 nt, Human
gaccucaggugaucugcccaccuc

SEQ ID NO: 932129 - RNA, 18 nt, Human
gacuucaccauguuggcc

SEQ ID NO: 932130 - RNA, 18 nt, Human
gaggcugauaugaacacc

SEQ ID NO: 932131 - RNA, 18 nt, Human
gauuacaggcaugagcca

SEQ ID NO: 932132 - RNA, 21 nt, Human
gauuacaggcaugagccacca

SEQ ID NO: 932133 - RNA, 22 nt, Human
gauuacaggcaugagccaccac

SEQ ID NO: 932134 - RNA, 19 nt, Human
ggauuacaggcaugagcca

SEQ ID NO: 932135 - RNA, 22 nt, Human
ggcuggagggcaguggcgugau

SEQ ID NO: 932136 - RNA, 23 nt, Human
gggacuucaccauguuggccagg

SEQ ID NO: 932137 - RNA, 23 nt, Human
gguggucuuggacugcugaccuc

SEQ ID NO: 932138 - RNA, 24 nt, Human
gugaucugcccaccucggccuccc

SEQ ID NO: 932139 - RNA, 24 nt, Human
gugauucuccugcuucagccuccu

SEQ ID NO: 932140 - RNA, 18 nt, Human
guguuauuccggugaaca

SEQ ID NO: 932141 - RNA, 21 nt, Human
uaaccgcaacuucugccuccu

SEQ ID NO: 932142 - RNA, 23 nt, Human
uacaggcaugagccaccacgccc

SEQ ID NO: 932143 - RNA, 22 nt, Human
uagagacgggacuucaccaugu

SEQ ID NO: 932144 - RNA, 24 nt, Human
uaguagagacgggacuucaccaug

SEQ ID NO: 932145 - RNA, 26 nt, Human
uaguagagacgggacuucaccauguu

SEQ ID NO: 932146 - RNA, 21 nt, Human
uaucgaggaagagaauggucu

SEQ ID NO: 932147 - RNA, 24 nt, Human
ucaccauguuggccaggguggucu

SEQ ID NO: 932148 - RNA, 23 nt, Human
ucagccuccugaguagcugggac

SEQ ID NO: 932149 - RNA, 24 nt, Human
ucccaaagugcugggauuacaggc

SEQ ID NO: 932150 - RNA, 18 nt, Human
uccugaguagcugggacu

SEQ ID NO: 932151 - RNA, 21 nt, Human
uccugaguucaagugauucuc

SEQ ID NO: 932152 - RNA, 24 nt, Human
uccugaguucaagugauucuccug

SEQ ID NO: 932153 - RNA, 18 nt, Human
ucggccucccaaagugcu

SEQ ID NO: 932154 - RNA, 24 nt, Human
ucucgcucugucuccccaggcugg

SEQ ID NO: 932155 - RNA, 25 nt, Human
ucucgcucugucuccccaggcugga

SEQ ID NO: 932156 - RNA, 23 nt, Human
ucucuacaggcaaccucagaaau

SEQ ID NO: 932157 - RNA, 18 nt, Human
ucugucuccccaggcugg

SEQ ID NO: 932158 - RNA, 23 nt, Human
ugaaacaaaaaacacaaaacauu

SEQ ID NO: 932159 - RNA, 23 nt, Human
ugaaacuuccaagcaauuaacac

SEQ ID NO: 932160 - RNA, 22 nt, Human
ugacacagaaucucgcucuguc

SEQ ID NO: 932161 - RNA, 24 nt, Human
ugacacagaaucucgcucugucuc

SEQ ID NO: 932162 - RNA, 18 nt, Human
ugaccucaggugaucugc

SEQ ID NO: 932163 - RNA, 21 nt, Human
ugaccucaggugaucugccca

SEQ ID NO: 932164 - RNA, 24 nt, Human
ugaccucaggugaucugcccaccu

SEQ ID NO: 932165 - RNA, 18 nt, Human
ugaguucaagugauucuc

SEQ ID NO: 932166 - RNA, 20 nt, Human
ugaguucaagugauucuccu

SEQ ID NO: 932167 - RNA, 24 nt, Human
ugaguucaagugauucuccugcuu

SEQ ID NO: 932168 - RNA, 24 nt, Human
ugaucugcccaccucggccuccca

SEQ ID NO: 932169 - RNA, 20 nt, Human
ugauucuccugcuucagccu

SEQ ID NO: 932170 - RNA, 22 nt, Human
ugccuccugaguucaagugauu

SEQ ID NO: 932171 - RNA, 24 nt, Human
ugcuucagccuccugaguagcugg

SEQ ID NO: 932172 - RNA, 19 nt, Human
uggagggcaguggcgugau

SEQ ID NO: 932173 - RNA, 24 nt, Human
uggagggcaguggcgugaucucgg

SEQ ID NO: 932174 - RNA, 21 nt, Human
ugggacuacaagugcccgcca

SEQ ID NO: 932175 - RNA, 24 nt, Human
ugggacuacaagugcccgccacca

SEQ ID NO: 932176 - RNA, 18 nt, Human
ugggauuacaggcaugag

SEQ ID NO: 932177 - RNA, 19 nt, Human
ugggauuacaggcaugagc

SEQ ID NO: 932178 - RNA, 22 nt, Human
ugggauuacaggcaugagccac

SEQ ID NO: 932179 - RNA, 23 nt, Human
ugggauuacaggcaugagccacc

SEQ ID NO: 932180 - RNA, 24 nt, Human
ugggauuacaggcaugagccacca

SEQ ID NO: 932181 - RNA, 24 nt, Human
ugggauuacaggcaugagccacca

SEQ ID NO: 932182 - RNA, 22 nt, Human
ugugauggaauuuccaccagaa

SEQ ID NO: 932183 - RNA, 18 nt, Human
uuaagugguuaauuucac

SEQ ID NO: 932184 - RNA, 18 nt, Human
uuaguagagacgggacuu

SEQ ID NO: 932185 - RNA, 24 nt, Human
uuaguagagacgggacuucaccau

SEQ ID NO: 932186 - RNA, 23 nt, Human
uucaagggacgaauguuuuagcg

SEQ ID NO: 932187 - RNA, 23 nt, Human
uucaagugauucuccugcuucag

SEQ ID NO: 932188 - RNA, 24 nt, Human
uucaagugauucuccugcuucagc

SEQ ID NO: 932189 - RNA, 24 nt, Human
uucagccuccugaguagcugggac

SEQ ID NO: 932190 - RNA, 24 nt, Human
uuuuuaguagagacgggacuucac

SEQ ID NO: 932191 - RNA, 20 nt, Human
uuuuuguauuuuuaguagag

SEQ ID NO: 932192 - RNA, 25 nt, Human
uuuuuuuuuuuugacacagaaucuc

SEQ ID NO: 932193 - RNA, 18 nt, Human
uuuuuuuuuuuuuuuuug

SEQ ID NO: 932194 - RNA, 24 nt, Human
uuuuuuuuuuuuuuuuugacacag

SEQ ID NO: 932195 - RNA, 26 nt, Human
aaaaauugagacaauuuuucagacaa

SEQ ID NO: 932196 - RNA, 22 nt, Human
aaaagagaagauaugcagagga

SEQ ID NO: 932197 - RNA, 19 nt, Human
aaacaggguauuucauaua

SEQ ID NO: 932198 - RNA, 20 nt, Human
aaacugcugggauuacaggc

SEQ ID NO: 932199 - RNA, 24 nt, Human
aaacugcugggauuacaggcuuga

SEQ ID NO: 932200 - RNA, 27 nt, Human
aagaguucuucuauccaaauaaaggag

SEQ ID NO: 932201 - RNA, 19 nt, Human
aauaaaggagcaaugaaaa

SEQ ID NO: 932202 - RNA, 23 nt, Human
aauagcuggaauuacaggcgugu

SEQ ID NO: 932203 - RNA, 23 nt, Human
aaugaguugcaggauaaugcagu

SEQ ID NO: 932204 - RNA, 21 nt, Human
aauuaaaaaaaaaaaaaaaaa

SEQ ID NO: 932205 - RNA, 22 nt, Human
aauuacaggcgugugcuaccau

SEQ ID NO: 932206 - RNA, 18 nt, Human
acgggguuucuccauguu

SEQ ID NO: 932207 - RNA, 20 nt, Human
acgggguuucuccauguugg

SEQ ID NO: 932208 - RNA, 24 nt, Human
acgggguuucuccauguuggucag

SEQ ID NO: 932209 - RNA, 24 nt, Human
acugcugggauuacaggcuugagc

SEQ ID NO: 932210 - RNA, 22 nt, Human
agaagcuauggcuuuugcaggu

SEQ ID NO: 932211 - RNA, 22 nt, Human
agagaaucaagaguucuucuau

SEQ ID NO: 932212 - RNA, 18 nt, Human
agaugauccgcccgccuc

SEQ ID NO: 932213 - RNA, 18 nt, Human
agccuccugaauagcugg

SEQ ID NO: 932214 - RNA, 20 nt, Human
agugcaauggcgugaucucg

SEQ ID NO: 932215 - RNA, 24 nt, Human
agugcaauggcgugaucucggcuc

SEQ ID NO: 932216 - RNA, 24 nt, Human
aucacuaacucuuagaagcuaugg

SEQ ID NO: 932217 - RNA, 21 nt, Human
augaacuuuuaaaaccuucag

SEQ ID NO: 932218 - RNA, 24 nt, Human
augauccgcccgccucagccuccc

SEQ ID NO: 932219 - RNA, 18 nt, Human
augcagaggaacgaaccc

SEQ ID NO: 932220 - RNA, 20 nt, Human
augcauuucacugcccauau

SEQ ID NO: 932221 - RNA, 24 nt, Human
auuaaaaaaaaaaaaaaaaagaau

SEQ ID NO: 932222 - RNA, 20 nt, Human
auuccccugccucagccucc

SEQ ID NO: 932223 - RNA, 21 nt, Human
caaacugagauacaguaaugu

SEQ ID NO: 932224 - RNA, 18 nt, Human
caaacugcugggauuaca

SEQ ID NO: 932225 - RNA, 23 nt, Human
caaccuccaccucccggguucaa

SEQ ID NO: 932226 - RNA, 22 nt, Human
caauauaguucccaagaauuaa

SEQ ID NO: 932227 - RNA, 18 nt, Human
cacacaaaccucacaaua

SEQ ID NO: 932228 - RNA, 26 nt, Human
caccuccgaaagaaagaggagguaac

SEQ ID NO: 932229 - RNA, 21 nt, Human
cacugcaaccuccaccucccg

SEQ ID NO: 932230 - RNA, 23 nt, Human
cacugcaaccuccaccucccggg

SEQ ID NO: 932231 - RNA, 21 nt, Human
cagcucuuaacuuaauuaaua

SEQ ID NO: 932232 - RNA, 23 nt, Human
caucuuuauugcuaaucuggagg

SEQ ID NO: 932233 - RNA, 24 nt, Human
cauuuuguauuuuuaguagagacg

SEQ ID NO: 932234 - RNA, 23 nt, Human
ccaaacugcugggauuacaggcu

SEQ ID NO: 932235 - RNA, 19 nt, Human
ccaagaauuaaaaaaaaaa

SEQ ID NO: 932236 - RNA, 29 nt, Human
ccaagaauuaaaaaaaaaaaaaaaaagaa

SEQ ID NO: 932237 - RNA, 24 nt, Human
ccacaucuuuauugcuaaucugga

SEQ ID NO: 932238 - RNA, 20 nt, Human
ccaccgcgcccggccaaaca

SEQ ID NO: 932239 - RNA, 22 nt, Human
ccaccgcgcccggccaaacagg

SEQ ID NO: 932240 - RNA, 27 nt, Human
ccaccucccggguucaagcaauucuuu

SEQ ID NO: 932241 - RNA, 19 nt, Human
ccauguuggucaggcuggu

SEQ ID NO: 932242 - RNA, 22 nt, Human
ccauguuggucaggcuggucuc

SEQ ID NO: 932243 - RNA, 23 nt, Human
ccauguuggucaggcuggucucg

SEQ ID NO: 932244 - RNA, 24 nt, Human
cccaaacugcugggauuacaggcu

SEQ ID NO: 932245 - RNA, 20 nt, Human
cccggguucaagcaauuccc

SEQ ID NO: 932246 - RNA, 23 nt, Human
cccggguucaagcaauuccccug

SEQ ID NO: 932247 - RNA, 23 nt, Human
ccgcccgccucagccucccaaac

SEQ ID NO: 932248 - RNA, 22 nt, Human
ccucccggguucaagcaauucc

SEQ ID NO: 932249 - RNA, 18 nt, Human
ccugaccucagaugaucc

SEQ ID NO: 932250 - RNA, 22 nt, Human
ccugaccucagaugauccgccc

SEQ ID NO: 932251 - RNA, 23 nt, Human
ccugccucagccuccugaauagc

SEQ ID NO: 932252 - RNA, 24 nt, Human
ccugccucagccuccugaauagcu

SEQ ID NO: 932253 - RNA, 24 nt, Human
cgggguuucuccauguuggucagg

SEQ ID NO: 932254 - RNA, 22 nt, Human
cuaaagaaauacgguugggguc

SEQ ID NO: 932255 - RNA, 23 nt, Human
cuagaaucaucgcaaaaguauua

SEQ ID NO: 932256 - RNA, 24 nt, Human
cucacugcaaccuccaccucccgg

SEQ ID NO: 932257 - RNA, 24 nt, Human
cuccauguuggucaggcuggucuc

SEQ ID NO: 932258 - RNA, 21 nt, Human
cucccaaacugcugggauuac

SEQ ID NO: 932259 - RNA, 18 nt, Human
cucccacccucuuuucca

SEQ ID NO: 932260 - RNA, 24 nt, Human
cuccugaauagcuggaauuacagg

SEQ ID NO: 932261 - RNA, 26 nt, Human
cuccugaccucagaugauccgcccgc

SEQ ID NO: 932262 - RNA, 24 nt, Human
cugaauagcuggaauuacaggcgu

SEQ ID NO: 932263 - RNA, 18 nt, Human
cugcaaccuccaccuccc

SEQ ID NO: 932264 - RNA, 23 nt, Human
cugcaaccuccaccucccggguu

SEQ ID NO: 932265 - RNA, 24 nt, Human
cugcaaccuccaccucccggguuc

SEQ ID NO: 932266 - RNA, 24 nt, Human
cuuauugcccagguuggagugcaa

SEQ ID NO: 932267 - RNA, 25 nt, Human
cuucccuuuucucccacccucuuuu

SEQ ID NO: 932268 - RNA, 23 nt, Human
cuuccugcugcucucauuagcac

SEQ ID NO: 932269 - RNA, 25 nt, Human
gaauagcuggaauuacaggcgugug

SEQ ID NO: 932270 - RNA, 24 nt, Human
gaccucagaugauccgcccgccuc

SEQ ID NO: 932271 - RNA, 23 nt, Human
gagacgggguuucuccauguugg

SEQ ID NO: 932272 - RNA, 24 nt, Human
gagacgggguuucuccauguuggu

SEQ ID NO: 932273 - RNA, 18 nt, Human
gauuacaggcuugagcca

SEQ ID NO: 932274 - RNA, 22 nt, Human
gauuacaggcuugagccaccgc

SEQ ID NO: 932275 - RNA, 23 nt, Human
gccucagccucccaaacugcugg

SEQ ID NO: 932276 - RNA, 22 nt, Human
gcgugugcuaccaugcccagcu

SEQ ID NO: 932277 - RNA, 20 nt, Human
gcucuuauugcccagguugg

SEQ ID NO: 932278 - RNA, 21 nt, Human
gcucuuauugcccagguugga

SEQ ID NO: 932279 - RNA, 23 nt, Human
gcuggucucgaacuccugaccuc

SEQ ID NO: 932280 - RNA, 21 nt, Human
ggcgugugcuaccaugcccag

SEQ ID NO: 932281 - RNA, 24 nt, Human
ggcuggucucgaacuccugaccuc

SEQ ID NO: 932282 - RNA, 23 nt, Human
gggguuucuccauguuggucagg

SEQ ID NO: 932283 - RNA, 19 nt, Human
ggucucgaacuccugaccu

SEQ ID NO: 932284 - RNA, 22 nt, Human
gguuggagugcaauggcgugau

SEQ ID NO: 932285 - RNA, 23 nt, Human
guagagacgggguuucuccaugu

SEQ ID NO: 932286 - RNA, 18 nt, Human
gucucacacaaaccucac

SEQ ID NO: 932287 - RNA, 19 nt, Human
uaaagucagguuuccaacu

SEQ ID NO: 932288 - RNA, 23 nt, Human
uacaggcuugagccaccgcgccc

SEQ ID NO: 932289 - RNA, 23 nt, Human
uaccaaagaauuucaacauucca

SEQ ID NO: 932290 - RNA, 24 nt, Human
uaguagagacgggguuucuccaug

SEQ ID NO: 932291 - RNA, 19 nt, Human
uauaaaagagaagauaugc

SEQ ID NO: 932292 - RNA, 18 nt, Human
uaugcagaggaacgaacc

SEQ ID NO: 932293 - RNA, 19 nt, Human
uauugcccagguuggagug

SEQ ID NO: 932294 - RNA, 23 nt, Human
ucacugcaaccuccaccucccgg

SEQ ID NO: 932295 - RNA, 24 nt, Human
ucacugcaaccuccaccucccggg

SEQ ID NO: 932296 - RNA, 25 nt, Human
ucacugcaaccuccaccucccgggu

SEQ ID NO: 932297 - RNA, 27 nt, Human
ucacugcaaccuccaccucccggguuc

SEQ ID NO: 932298 - RNA, 21 nt, Human
ucacuucccuuuucucccacc

SEQ ID NO: 932299 - RNA, 26 nt, Human
ucauuagcaccuccgaaagaaagagg

SEQ ID NO: 932300 - RNA, 23 nt, Human
uccaaauaaaggagcaaugaaaa

SEQ ID NO: 932301 - RNA, 26 nt, Human
uccaccacaccaugaagguaugugca

SEQ ID NO: 932302 - RNA, 23 nt, Human
uccacugcaaucuuggaagaaug

SEQ ID NO: 932303 - RNA, 24 nt, Human
ucccaaacugcugggauuacaggc

SEQ ID NO: 932304 - RNA, 24 nt, Human
uccccugccucagccuccugaaua

SEQ ID NO: 932305 - RNA, 19 nt, Human
ucccggguucaagcaauuc

SEQ ID NO: 932306 - RNA, 24 nt, Human
ucccggguucaagcaauuccccug

SEQ ID NO: 932307 - RNA, 21 nt, Human
uccgcccgccucagccuccca

SEQ ID NO: 932308 - RNA, 19 nt, Human
uccucguggaugcauuuca

SEQ ID NO: 932309 - RNA, 22 nt, Human
ucguggaugcauuucacugccc

SEQ ID NO: 932310 - RNA, 21 nt, Human
ucuuuaucuucccucccucac

SEQ ID NO: 932311 - RNA, 24 nt, Human
ugaagguaugugcaauuuccuaaa

SEQ ID NO: 932312 - RNA, 18 nt, Human
ugaccucagaugauccgc

SEQ ID NO: 932313 - RNA, 24 nt, Human
ugaccucagaugauccgcccgccu

SEQ ID NO: 932314 - RNA, 18 nt, Human
ugcccagguuggagugca

SEQ ID NO: 932315 - RNA, 21 nt, Human
ugcccagguuggagugcaaug

SEQ ID NO: 932316 - RNA, 24 nt, Human
ugcccagguuggagugcaauggcg

SEQ ID NO: 932317 - RNA, 27 nt, Human
ugccucagccuccugaauagcuggaau

SEQ ID NO: 932318 - RNA, 19 nt, Human
uggaagaauguuacaaagg

SEQ ID NO: 932319 - RNA, 18 nt, Human
uggaauuacaggcgugug

SEQ ID NO: 932320 - RNA, 22 nt, Human
uggaauuacaggcgugugcuac

SEQ ID NO: 932321 - RNA, 24 nt, Human
uggaauuacaggcgugugcuacca

SEQ ID NO: 932322 - RNA, 25 nt, Human
uggaauuacaggcgugugcuaccau

SEQ ID NO: 932323 - RNA, 20 nt, Human
uggaauuuuagcaugaacuu

SEQ ID NO: 932324 - RNA, 19 nt, Human
uggagugcaauggcgugau

SEQ ID NO: 932325 - RNA, 23 nt, Human
uggagugcaauggcgugaucucg

SEQ ID NO: 932326 - RNA, 24 nt, Human
uggagugcaauggcgugaucucgg

SEQ ID NO: 932327 - RNA, 20 nt, Human
uggcgugaucucggcucacu

SEQ ID NO: 932328 - RNA, 18 nt, Human
ugggauuacaggcuugag

SEQ ID NO: 932329 - RNA, 19 nt, Human
ugggauuacaggcuugagc

SEQ ID NO: 932330 - RNA, 21 nt, Human
ugggauuacaggcuugagcca

SEQ ID NO: 932331 - RNA, 22 nt, Human
ugggauuacaggcuugagccac

SEQ ID NO: 932332 - RNA, 23 nt, Human
ugggauuacaggcuugagccacc

SEQ ID NO: 932333 - RNA, 24 nt, Human
ugggauuacaggcuugagccaccg

SEQ ID NO: 932334 - RNA, 24 nt, Human
uggucaggcuggucucgaacuccu

SEQ ID NO: 932335 - RNA, 20 nt, Human
uguuacaaaggaaagacguu

SEQ ID NO: 932336 - RNA, 18 nt, Human
uuaguagagacgggguuu

SEQ ID NO: 932337 - RNA, 24 nt, Human
uuaguagagacgggguuucuccau

SEQ ID NO: 932338 - RNA, 21 nt, Human
uucaagcaauuccccugccuc

SEQ ID NO: 932339 - RNA, 24 nt, Human
uucaagcaauuccccugccucagc

SEQ ID NO: 932340 - RNA, 22 nt, Human
uucagacaauauaguucccaag

SEQ ID NO: 932341 - RNA, 19 nt, Human
uuccccugccucagccucc

SEQ ID NO: 932342 - RNA, 18 nt, Human
uucuccuaaguauuugag

SEQ ID NO: 932343 - RNA, 21 nt, Human
uucuuuaucuucccucccuca

SEQ ID NO: 932344 - RNA, 18 nt, Human
uugcccagguuggagugc

SEQ ID NO: 932345 - RNA, 23 nt, Human
uuguauuuuuaguagagacgggg

SEQ ID NO: 932346 - RNA, 22 nt, Human
uuuccaagcuguuucgcuuugc

SEQ ID NO: 932347 - RNA, 21 nt, Human
uuucuccauguuggucaggcu

SEQ ID NO: 932348 - RNA, 24 nt, Human
uuugcucuuauugcccagguugga

SEQ ID NO: 932349 - RNA, 24 nt, Human
uuuugcucuuauugcccagguugg

SEQ ID NO: 932350 - RNA, 19 nt, Human
uuuuguauuuuuaguagag

SEQ ID NO: 932351 - RNA, 20 nt, Human
uuuuguauuuuuaguagaga

SEQ ID NO: 932352 - RNA, 22 nt, Human
uuuuuaguagagacgggguuuc

SEQ ID NO: 932353 - RNA, 23 nt, Human
acagcaggaggcagguuccugga

SEQ ID NO: 932354 - RNA, 18 nt, Human
accccacacacccgucuc

SEQ ID NO: 932355 - RNA, 21 nt, Human
accucccuccugccaguuucc

SEQ ID NO: 932356 - RNA, 20 nt, Human
agaccuggcaauggacagca

SEQ ID NO: 932357 - RNA, 19 nt, Human
agacucgaauucuugagua

SEQ ID NO: 932358 - RNA, 21 nt, Human
agcacaggugucagggugcaa

SEQ ID NO: 932359 - RNA, 18 nt, Human
agcgccucagcacaggug

SEQ ID NO: 932360 - RNA, 24 nt, Human
aggcagcccugaaugggccuguuu

SEQ ID NO: 932361 - RNA, 19 nt, Human
agggucccugccccuaccu

SEQ ID NO: 932362 - RNA, 22 nt, Human
aguccccauuugcucaggcagc

SEQ ID NO: 932363 - RNA, 22 nt, Human
caccccacacacccgucucuug

SEQ ID NO: 932364 - RNA, 21 nt, Human
cacuaaaccaaggucaugagc

SEQ ID NO: 932365 - RNA, 22 nt, Human
cagcaggaggcagguuccugga

SEQ ID NO: 932366 - RNA, 22 nt, Human
cagccccucccugccccugccc

SEQ ID NO: 932367 - RNA, 21 nt, Human
cagcugccagagcgccucagc

SEQ ID NO: 932368 - RNA, 22 nt, Human
cagcuucauaggcuggggugac

SEQ ID NO: 932369 - RNA, 23 nt, Human
caguggccagcaggcccaucugg

SEQ ID NO: 932370 - RNA, 20 nt, Human
cagugggggcaguuugccuu

SEQ ID NO: 932371 - RNA, 19 nt, Human
ccaccugcagccccucccu

SEQ ID NO: 932372 - RNA, 21 nt, Human
ccaccugcagccccucccugc

SEQ ID NO: 932373 - RNA, 19 nt, Human
ccagacaguccuguuugug

SEQ ID NO: 932374 - RNA, 20 nt, Human
ccaucuggagugggaguggg

SEQ ID NO: 932375 - RNA, 21 nt, Human
cccagacggcuuagcccaagu

SEQ ID NO: 932376 - RNA, 18 nt, Human
cccgggugacuggcaguu

SEQ ID NO: 932377 - RNA, 20 nt, Human
cccguggagcuggggguggg

SEQ ID NO: 932378 - RNA, 21 nt, Human
cccuugguccagacaguccug

SEQ ID NO: 932379 - RNA, 23 nt, Human
ccgcagccguggcuaggauucca

SEQ ID NO: 932380 - RNA, 23 nt, Human
ccgcccacaggccauccggcugu

SEQ ID NO: 932381 - RNA, 19 nt, Human
ccugcagccccucccugcc

SEQ ID NO: 932382 - RNA, 27 nt, Human
ccugccccugcccuagcugcugugugu

SEQ ID NO: 932383 - RNA, 19 nt, Human
ccuugacaccucacucuca

SEQ ID NO: 932384 - RNA, 23 nt, Human
cgucacagugucugcugugauug

SEQ ID NO: 932385 - RNA, 19 nt, Human
cguggagcugggggugggc

SEQ ID NO: 932386 - RNA, 18 nt, Human
cguggggucugaaagcac

SEQ ID NO: 932387 - RNA, 18 nt, Human
cuaccucagccggcgugg

SEQ ID NO: 932388 - RNA, 19 nt, Human
cucaagcuuggucaucuuc

SEQ ID NO: 932389 - RNA, 20 nt, Human
cuccugccaguuucccuugg

SEQ ID NO: 932390 - RNA, 23 nt, Human
cuucacaccaccugcagccccuc

SEQ ID NO: 932391 - RNA, 18 nt, Human
cuuccgccuugacaccuc

SEQ ID NO: 932392 - RNA, 23 nt, Human
gacagcaggaggcagguuccugg

SEQ ID NO: 932393 - RNA, 20 nt, Human
gagaggcagagggugacggg

SEQ ID NO: 932394 - RNA, 23 nt, Human
gagugggagugggcacuuccacc

SEQ ID NO: 932395 - RNA, 23 nt, Human
gcagccccucccugccccugccc

SEQ ID NO: 932396 - RNA, 22 nt, Human
gcucaggcagcccugaaugggc

SEQ ID NO: 932397 - RNA, 19 nt, Human
ggaaaaaaaaaaaaaaagc

SEQ ID NO: 932398 - RNA, 21 nt, Human
ggaaggaauauagcuuccagc

SEQ ID NO: 932399 - RNA, 24 nt, Human
ggacagcaggaggcagguuccugg

SEQ ID NO: 932400 - RNA, 20 nt, Human
ggcaccaucuggguccccug

SEQ ID NO: 932401 - RNA, 21 nt, Human
ggcagguuccuggagcugggg

SEQ ID NO: 932402 - RNA, 18 nt, Human
ggucccgggugacuggca

SEQ ID NO: 932403 - RNA, 22 nt, Human
guagacccagacggcuuagccc

SEQ ID NO: 932404 - RNA, 23 nt, Human
guagacccagacggcuuagccca

SEQ ID NO: 932405 - RNA, 24 nt, Human
uaacucaagcuuggucaucuucag

SEQ ID NO: 932406 - RNA, 18 nt, Human
uaagauaacagacuccag

SEQ ID NO: 932407 - RNA, 20 nt, Human
uaccuaagcuggaggcuggc

SEQ ID NO: 932408 - RNA, 21 nt, Human
uaccuaagcuggaggcuggcg

SEQ ID NO: 932409 - RNA, 25 nt, Human
uagacccagacggcuuagcccaagu

SEQ ID NO: 932410 - RNA, 20 nt, Human
uagcccaagucuaguugcag

SEQ ID NO: 932411 - RNA, 20 nt, Human
ucccaccucccuccugccag

SEQ ID NO: 932412 - RNA, 23 nt, Human
ucccucagcacaggugggucagu

SEQ ID NO: 932413 - RNA, 21 nt, Human
ucccugccccuaccuccacug

SEQ ID NO: 932414 - RNA, 18 nt, Human
ucccuggggacagucgcu

SEQ ID NO: 932415 - RNA, 22 nt, Human
ucccuggggacagucgcuuccg

SEQ ID NO: 932416 - RNA, 20 nt, Human
uccgcagccguggcuaggau

SEQ ID NO: 932417 - RNA, 19 nt, Human
uccugccaguuucccuugg

SEQ ID NO: 932418 - RNA, 20 nt, Human
uccuuucccaccucccuccu

SEQ ID NO: 932419 - RNA, 18 nt, Human
ucucaggcaguccugauu

SEQ ID NO: 932420 - RNA, 23 nt, Human
ucucugugcaguuagugccaccc

SEQ ID NO: 932421 - RNA, 18 nt, Human
ugccaguuucccuugguu

SEQ ID NO: 932422 - RNA, 26 nt, Human
ugccccuaccuccacugccagacccu

SEQ ID NO: 932423 - RNA, 21 nt, Human
ugccguggggucugaaagcac

SEQ ID NO: 932424 - RNA, 19 nt, Human
ugccuucuuucuaccucag

SEQ ID NO: 932425 - RNA, 19 nt, Human
ugcucaggcagcccugaau

SEQ ID NO: 932426 - RNA, 18 nt, Human
uggaaggaauauagcuuc

SEQ ID NO: 932427 - RNA, 24 nt, Human
uggagugcaaucagccuccuccag

SEQ ID NO: 932428 - RNA, 22 nt, Human
uggcuaggauuccacuuccugu

SEQ ID NO: 932429 - RNA, 20 nt, Human
ugggcacuuccaccccgccc

SEQ ID NO: 932430 - RNA, 22 nt, Human
uggggggugaccugagaggcag

SEQ ID NO: 932431 - RNA, 21 nt, Human
uggugaguggagccuggaggc

SEQ ID NO: 932432 - RNA, 21 nt, Human
uguaccuaagcuggaggcugg

SEQ ID NO: 932433 - RNA, 21 nt, Human
uucccuugguccagacagucc

SEQ ID NO: 932434 - RNA, 21 nt, Human
uuuacaggaaugguaaauugg

SEQ ID NO: 932435 - RNA, 20 nt, Human
uuuaccugccguggggucug

SEQ ID NO: 932436 - RNA, 23 nt, Human
aaacccacuuacaauccuguacc

SEQ ID NO: 932437 - RNA, 24 nt, Human
aaagugcugggauuacaggcauga

SEQ ID NO: 932438 - RNA, 20 nt, Human
aagacacuccuauguacccc

SEQ ID NO: 932439 - RNA, 19 nt, Human
aagugcugggauuacaggc

SEQ ID NO: 932440 - RNA, 21 nt, Human
aagugcugggauuacaggcau

SEQ ID NO: 932441 - RNA, 26 nt, Human
aagugcugggauuacaggcaugagcc

SEQ ID NO: 932442 - RNA, 21 nt, Human
acaaagacaagauauguauua

SEQ ID NO: 932443 - RNA, 24 nt, Human
acacuaccccuaccaucgucacug

SEQ ID NO: 932444 - RNA, 18 nt, Human
acagaaaaguuacaaaga

SEQ ID NO: 932445 - RNA, 27 nt, Human
acuuacaauccuguaccacaaucuguc

SEQ ID NO: 932446 - RNA, 19 nt, Human
agaaaacccacuuacaauc

SEQ ID NO: 932447 - RNA, 19 nt, Human
agagaugggguuucaccgu

SEQ ID NO: 932448 - RNA, 18 nt, Human
agugcugggauuacaggc

SEQ ID NO: 932449 - RNA, 20 nt, Human
aucugucuuccuuuucuuuc

SEQ ID NO: 932450 - RNA, 19 nt, Human
augaucaaauauauuuauc

SEQ ID NO: 932451 - RNA, 18 nt, Human
augggguuucaccguguu

SEQ ID NO: 932452 - RNA, 24 nt, Human
augggguuucaccguguuagccag

SEQ ID NO: 932453 - RNA, 19 nt, Human
auucugcauuaucuuacua

SEQ ID NO: 932454 - RNA, 24 nt, Human
caaagugcugggauuacaggcaug

SEQ ID NO: 932455 - RNA, 28 nt, Human
caagacacuccuauguaccccacaggac

SEQ ID NO: 932456 - RNA, 23 nt, Human
caagacacuccuauguaccccuc

SEQ ID NO: 932457 - RNA, 20 nt, Human
cacaauaaugauaauagaaa

SEQ ID NO: 932458 - RNA, 18 nt, Human
caccguguuagccaggau

SEQ ID NO: 932459 - RNA, 24 nt, Human
caccguguuagccaggaugaucuc

SEQ ID NO: 932460 - RNA, 23 nt, Human
caccuugcagcccgaguucuacu

SEQ ID NO: 932461 - RNA, 25 nt, Human
cagcccgaguucuacugaauccaga

SEQ ID NO: 932462 - RNA, 23 nt, Human
ccaaagugcugggauuacaggca

SEQ ID NO: 932463 - RNA, 24 nt, Human
ccaaagugcugggauuacaggcau

SEQ ID NO: 932464 - RNA, 24 nt, Human
cccaaagugcugggauuacaggca

SEQ ID NO: 932465 - RNA, 20 nt, Human
ccccacagcugguugccacu

SEQ ID NO: 932466 - RNA, 22 nt, Human
cccgucucggccucccaaagug

SEQ ID NO: 932467 - RNA, 19 nt, Human
ccuguaccacaaucugucu

SEQ ID NO: 932468 - RNA, 19 nt, Human
cgaucacagcaccagcuuu

SEQ ID NO: 932469 - RNA, 18 nt, Human
cuacugguguugaccugg

SEQ ID NO: 932470 - RNA, 22 nt, Human
cuccccugacuugugacaauuu

SEQ ID NO: 932471 - RNA, 23 nt, Human
cuccugaccucgugauccgcccg

SEQ ID NO: 932472 - RNA, 19 nt, Human
cuggucccagauccaucga

SEQ ID NO: 932473 - RNA, 20 nt, Human
cuguaugcugagcccuuauc

SEQ ID NO: 932474 - RNA, 22 nt, Human
gaccucgugauccgcccgucuc

SEQ ID NO: 932475 - RNA, 22 nt, Human
gaccucgugauccgcccgucuc

SEQ ID NO: 932476 - RNA, 24 nt, Human
gaccucgugauccgcccgucucgg

SEQ ID NO: 932477 - RNA, 24 nt, Human
gagaugggguuucaccguguuagc

SEQ ID NO: 932478 - RNA, 18 nt, Human
gauuacaggcaugagcca

SEQ ID NO: 932479 - RNA, 22 nt, Human
gauuacaggcaugagccaccgc

SEQ ID NO: 932480 - RNA, 22 nt, Human
gauuacaggcaugagccaccgc

SEQ ID NO: 932481 - RNA, 20 nt, Human
gccaaguuucuccaccauac

SEQ ID NO: 932482 - RNA, 24 nt, Human
gcccggcuaauuuuuuuguauuuu

SEQ ID NO: 932483 - RNA, 23 nt, Human
gccucuguugugauuuuccugau

SEQ ID NO: 932484 - RNA, 19 nt, Human
gccuguuuuuucccuuccg

SEQ ID NO: 932485 - RNA, 22 nt, Human
ggauuacaggcaugagccaccg

SEQ ID NO: 932486 - RNA, 18 nt, Human
gggguuucaccguguuag

SEQ ID NO: 932487 - RNA, 22 nt, Human
gggguuucaccguguuagccag

SEQ ID NO: 932488 - RNA, 19 nt, Human
guaccacaaucugucuucc

SEQ ID NO: 932489 - RNA, 19 nt, Human
guagagaugggguuucacc

SEQ ID NO: 932490 - RNA, 19 nt, Human
guagagaugggguuucacc

SEQ ID NO: 932491 - RNA, 19 nt, Human
guauuuuuuguagagaugg

SEQ ID NO: 932492 - RNA, 22 nt, Human
gucuuccuuuucuuucucauua

SEQ ID NO: 932493 - RNA, 20 nt, Human
gugacaauuucucugacucu

SEQ ID NO: 932494 - RNA, 23 nt, Human
guuuugguuagaaucacaugaga

SEQ ID NO: 932495 - RNA, 19 nt, Human
uaaggaaaaccagcauagg

SEQ ID NO: 932496 - RNA, 19 nt, Human
uacaaagauaguacaagac

SEQ ID NO: 932497 - RNA, 24 nt, Human
uacaggcaugagccaccgcgccca

SEQ ID NO: 932498 - RNA, 25 nt, Human
uaccccuaccaucgucacugucugc

SEQ ID NO: 932499 - RNA, 18 nt, Human
uagacacuaccccuacca

SEQ ID NO: 932500 - RNA, 18 nt, Human
uaucuuacuaguaugaag

SEQ ID NO: 932501 - RNA, 22 nt, Human
ucaaaagacauacggugagcac

SEQ ID NO: 932502 - RNA, 24 nt, Human
ucaaaagacauacggugagcacga

SEQ ID NO: 932503 - RNA, 24 nt, Human
ucaccguguuagccaggaugaucu

SEQ ID NO: 932504 - RNA, 19 nt, Human
ucacugucugccucuucuc

SEQ ID NO: 932505 - RNA, 24 nt, Human
ucaucugggcuggcuguucccgac

SEQ ID NO: 932506 - RNA, 24 nt, Human
ucccaaagugcugggauuacaggc

SEQ ID NO: 932507 - RNA, 20 nt, Human
ucucggccucccaaagugcu

SEQ ID NO: 932508 - RNA, 21 nt, Human
ucugaaaauccacucucucau

SEQ ID NO: 932509 - RNA, 24 nt, Human
ugaccuggaugaacuggcugaggu

SEQ ID NO: 932510 - RNA, 24 nt, Human
ugacuugugacaauuucucugacu

SEQ ID NO: 932511 - RNA, 22 nt, Human
ugagaaaguugcucaucugggc

SEQ ID NO: 932512 - RNA, 19 nt, Human
ugauaugcuauuauuaacu

SEQ ID NO: 932513 - RNA, 21 nt, Human
ugauaugcuauuauuaacuag

SEQ ID NO: 932514 - RNA, 24 nt, Human
ugccagacauaaggaaaaccagca

SEQ ID NO: 932515 - RNA, 19 nt, Human
uggaagaauucaaggagaa

SEQ ID NO: 932516 - RNA, 18 nt, Human
uggcugaggucguacuug

SEQ ID NO: 932517 - RNA, 18 nt, Human
ugggauuacaggcaugag

SEQ ID NO: 932518 - RNA, 19 nt, Human
ugggauuacaggcaugagc

SEQ ID NO: 932519 - RNA, 21 nt, Human
ugggauuacaggcaugagcca

SEQ ID NO: 932520 - RNA, 22 nt, Human
ugggauuacaggcaugagccac

SEQ ID NO: 932521 - RNA, 23 nt, Human
ugggauuacaggcaugagccacc

SEQ ID NO: 932522 - RNA, 24 nt, Human
ugggauuacaggcaugagccaccg

SEQ ID NO: 932523 - RNA, 24 nt, Human
ugggauuacaggcaugagccaccg

SEQ ID NO: 932524 - RNA, 26 nt, Human
ugggauuacaggcaugagccaccgcg

SEQ ID NO: 932525 - RNA, 24 nt, Human
ugggguuucaccguguuagccagg

SEQ ID NO: 932526 - RNA, 18 nt, Human
ugggucgaucacagcacc

SEQ ID NO: 932527 - RNA, 24 nt, Human
uguagagaugggguuucaccgugu

SEQ ID NO: 932528 - RNA, 24 nt, Human
uguccaugaaucauccauagcuuu

SEQ ID NO: 932529 - RNA, 24 nt, Human
uguguccuuaggcuccccugacuu

SEQ ID NO: 932530 - RNA, 21 nt, Human
uuaaagucucugaaaauccac

SEQ ID NO: 932531 - RNA, 20 nt, Human
uuaguuuuugccuguuuuuu

SEQ ID NO: 932532 - RNA, 22 nt, Human
uuaucugggucgaucacagcac

SEQ ID NO: 932533 - RNA, 23 nt, Human
uuccauuuuuuaaaauaaauguu

SEQ ID NO: 932534 - RNA, 21 nt, Human
uucucugacucuguuuuugau

SEQ ID NO: 932535 - RNA, 24 nt, Human
uuguagagaugggguuucaccgug

SEQ ID NO: 932536 - RNA, 24 nt, Human
uuuacagaaaaguuacaaagauag

SEQ ID NO: 932537 - RNA, 19 nt, Human
uuuaguggucauguguccu

SEQ ID NO: 932538 - RNA, 19 nt, Human
uuucaccguguuagccagg

SEQ ID NO: 932539 - RNA, 24 nt, Human
uuuguagagaugggguuucaccgu

SEQ ID NO: 932540 - RNA, 22 nt, Human
uuuuuuguagagaugggguuuc

SEQ ID NO: 932541 - RNA, 24 nt, Human
uuuuuuguagagaugggguuucac

SEQ ID NO: 932542 - RNA, 21 nt, Human
uuuuuuguauuuuuuguagag

SEQ ID NO: 932543 - RNA, 24 nt, Human
uuuuuuguauuuuuuguagagaug

SEQ ID NO: 932544 - RNA, 24 nt, Human
aaaaagaaaaaaagaugaggaaaa

SEQ ID NO: 932545 - RNA, 24 nt, Human
aaaaggaaacuaagggacagugaa

SEQ ID NO: 932546 - RNA, 19 nt, Human
aaaccuaaagcagauggcg

SEQ ID NO: 932547 - RNA, 20 nt, Human
aacaugguaaaacccugucu

SEQ ID NO: 932548 - RNA, 21 nt, Human
aacaugguaaaacccugucuc

SEQ ID NO: 932549 - RNA, 21 nt, Human
aaccaaugggaaaccuaaagc

SEQ ID NO: 932550 - RNA, 24 nt, Human
aagaaccuuuauuuaaccuaccaa

SEQ ID NO: 932551 - RNA, 24 nt, Human
aaucacuugaacccgggaggcaga

SEQ ID NO: 932552 - RNA, 23 nt, Human
acagagagagacucugucucaaa

SEQ ID NO: 932553 - RNA, 24 nt, Human
acagagagagacucugucucaaaa

SEQ ID NO: 932554 - RNA, 21 nt, Human
accaaacuaaaagagcaauaa

SEQ ID NO: 932555 - RNA, 24 nt, Human
accaacaugguaaaacccugucuc

SEQ ID NO: 932556 - RNA, 22 nt, Human
accaugcgguguaacaccugga

SEQ ID NO: 932557 - RNA, 24 nt, Human
acccugucucuacuaaaaauacaa

SEQ ID NO: 932558 - RNA, 24 nt, Human
accugaggucaggaguuugagacc

SEQ ID NO: 932559 - RNA, 22 nt, Human
acuucagccugggggacagaga

SEQ ID NO: 932560 - RNA, 24 nt, Human
agaaaaaggcagauucaguuucca

SEQ ID NO: 932561 - RNA, 22 nt, Human
agaaucacuugaacccgggagg

SEQ ID NO: 932562 - RNA, 18 nt, Human
agagagagacucugucuc

SEQ ID NO: 932563 - RNA, 18 nt, Human
agagguugcagugagcug

SEQ ID NO: 932564 - RNA, 22 nt, Human
agagguugcagugagcugagau

SEQ ID NO: 932565 - RNA, 23 nt, Human
agagguugcagugagcugagauc

SEQ ID NO: 932566 - RNA, 24 nt, Human
agagguugcagugagcugagauca

SEQ ID NO: 932567 - RNA, 20 nt, Human
agagguugcagugagcuggc

SEQ ID NO: 932568 - RNA, 20 nt, Human
agcaacuucuugggauuagc

SEQ ID NO: 932569 - RNA, 24 nt, Human
agcacuuugggaggccgaggcagg

SEQ ID NO: 932570 - RNA, 23 nt, Human
agccaggugugguggugggugcc

SEQ ID NO: 932571 - RNA, 18 nt, Human
agcccugugcauuagggu

SEQ ID NO: 932572 - RNA, 24 nt, Human
agccugggggacagagagagacuc

SEQ ID NO: 932573 - RNA, 20 nt, Human
aggaguuugagaccagccug

SEQ ID NO: 932574 - RNA, 20 nt, Human
aggcagagguugcagugagc

SEQ ID NO: 932575 - RNA, 24 nt, Human
aggcagagguugcagugagcugag

SEQ ID NO: 932576 - RNA, 18 nt, Human
aggcaggagaaucacuug

SEQ ID NO: 932577 - RNA, 24 nt, Human
aggcaggagaaucacuugaacccg

SEQ ID NO: 932578 - RNA, 18 nt, Human
aggcagguggaucaccug

SEQ ID NO: 932579 - RNA, 22 nt, Human
aggcagguggaucaccugaggu

SEQ ID NO: 932580 - RNA, 26 nt, Human
aggcagguggaucaccugaggucagg

SEQ ID NO: 932581 - RNA, 21 nt, Human
aggccgaggcagguggaucac

SEQ ID NO: 932582 - RNA, 24 nt, Human
aggcugaggcaggagaaucacuug

SEQ ID NO: 932583 - RNA, 24 nt, Human
aggugugguggugggugccuguaa

SEQ ID NO: 932584 - RNA, 24 nt, Human
aguggcucacgccuguaaucccag

SEQ ID NO: 932585 - RNA, 26 nt, Human
auaaaacuuuucuuaagacccuuaaa

SEQ ID NO: 932586 - RNA, 27 nt, Human
auaaaacuuuucuuaagacccuuaaaa

SEQ ID NO: 932587 - RNA, 24 nt, Human
auaggccgggcgcaguggcucacg

SEQ ID NO: 932588 - RNA, 20 nt, Human
auauauauauucaaccaccc

SEQ ID NO: 932589 - RNA, 23 nt, Human
augaaacaauacauucauuccuu

SEQ ID NO: 932590 - RNA, 22 nt, Human
caaaaaaaagaaaaaaagauga

SEQ ID NO: 932591 - RNA, 24 nt, Human
caacaugguaaaacccugucucua

SEQ ID NO: 932592 - RNA, 20 nt, Human
caaccaccccaaaagcccug

SEQ ID NO: 932593 - RNA, 24 nt, Human
caaguaagacugcugccacuuggg

SEQ ID NO: 932594 - RNA, 23 nt, Human
caccugaggucaggaguuugaga

SEQ ID NO: 932595 - RNA, 18 nt, Human
caccuggauauaccaauu

SEQ ID NO: 932596 - RNA, 24 nt, Human
cacgccuguaaucccagcacuuug

SEQ ID NO: 932597 - RNA, 24 nt, Human
cacugaccaauacagagaaaaggg

SEQ ID NO: 932598 - RNA, 26 nt, Human
cacuucagccugggggacagagagag

SEQ ID NO: 932599 - RNA, 26 nt, Human
cagaagauauauauauauucaaccac

SEQ ID NO: 932600 - RNA, 24 nt, Human
cagcacuuugggaggccgaggcag

SEQ ID NO: 932601 - RNA, 26 nt, Human
cagcacuuugggaggccgaggcaggu

SEQ ID NO: 932602 - RNA, 22 nt, Human
cagccugggggacagagagaga

SEQ ID NO: 932603 - RNA, 24 nt, Human
cagcuacucaggaggcugaggcag

SEQ ID NO: 932604 - RNA, 24 nt, Human
caggaggcugaggcaggagaauca

SEQ ID NO: 932605 - RNA, 19 nt, Human
ccgcugcacuucagccugg

SEQ ID NO: 932606 - RNA, 22 nt, Human
ccgcugcacuucagccuggggg

SEQ ID NO: 932607 - RNA, 24 nt, Human
ccgcugcacuucagccugggggac

SEQ ID NO: 932608 - RNA, 18 nt, Human
ccuaccaaacuaaaagag

SEQ ID NO: 932609 - RNA, 22 nt, Human
ccugaccaacaugguaaaaccc

SEQ ID NO: 932610 - RNA, 24 nt, Human
ccugaccaacaugguaaaacccug

SEQ ID NO: 932611 - RNA, 22 nt, Human
ccugaggucaggaguuugagac

SEQ ID NO: 932612 - RNA, 22 nt, Human
ccuguaaucccagcacuuuggg

SEQ ID NO: 932613 - RNA, 21 nt, Human
ccuguaaucccagcuacucag

SEQ ID NO: 932614 - RNA, 20 nt, Human
cgaggcagguggaucaccug

SEQ ID NO: 932615 - RNA, 24 nt, Human
cgaggcagguggaucaccugaggu

SEQ ID NO: 932616 - RNA, 26 nt, Human
cgaggcagguggaucaccugagguca

SEQ ID NO: 932617 - RNA, 18 nt, Human
cgcugcacuucagccugg

SEQ ID NO: 932618 - RNA, 25 nt, Human
cgcugcacuucagccugggggacag

SEQ ID NO: 932619 - RNA, 24 nt, Human
cgggaggcagagguugcagugagc

SEQ ID NO: 932620 - RNA, 20 nt, Human
cucaaaaaaaagaaaaaaag

SEQ ID NO: 932621 - RNA, 23 nt, Human
cucaaaaggauauccaacugaug

SEQ ID NO: 932622 - RNA, 22 nt, Human
cucacgccuguaaucccagcac

SEQ ID NO: 932623 - RNA, 24 nt, Human
cucacgccuguaaucccagcacuu

SEQ ID NO: 932624 - RNA, 20 nt, Human
cugcacuucagccuggggga

SEQ ID NO: 932625 - RNA, 22 nt, Human
cugcugccacuugggucugucu

SEQ ID NO: 932626 - RNA, 23 nt, Human
gagaccagccugaccaacauggu

SEQ ID NO: 932627 - RNA, 21 nt, Human
gaucaccugaggucaggaguu

SEQ ID NO: 932628 - RNA, 24 nt, Human
gaucaccugaggucaggaguuuga

SEQ ID NO: 932629 - RNA, 23 nt, Human
gcaggagaaucacuugaacccgg

SEQ ID NO: 932630 - RNA, 26 nt, Human
gccaaagcacuuccauuaaaaauuaa

SEQ ID NO: 932631 - RNA, 20 nt, Human
gcgcaguggcucacgccugu

SEQ ID NO: 932632 - RNA, 24 nt, Human
gcugcacuucagccugggggacag

SEQ ID NO: 932633 - RNA, 21 nt, Human
ggaaaccuaaagcagauggcg

SEQ ID NO: 932634 - RNA, 21 nt, Human
ggaaauaggccgggcgcagug

SEQ ID NO: 932635 - RNA, 23 nt, Human
ggcgcaguggcucacgccuguaa

SEQ ID NO: 932636 - RNA, 21 nt, Human
ggggacagagagagacucugu

SEQ ID NO: 932637 - RNA, 19 nt, Human
ggucaggaguuugagacca

SEQ ID NO: 932638 - RNA, 24 nt, Human
gguggugggugccuguaaucccag

SEQ ID NO: 932639 - RNA, 21 nt, Human
guggaucaccugaggucagga

SEQ ID NO: 932640 - RNA, 24 nt, Human
guugcagugagcugagaucaugcc

SEQ ID NO: 932641 - RNA, 24 nt, Human
uaaaaagaauuugcucauguuuuu

SEQ ID NO: 932642 - RNA, 22 nt, Human
uaaaagagcaauaaaauaaaaa

SEQ ID NO: 932643 - RNA, 24 nt, Human
uaaaagagcaauaaaauaaaaaua

SEQ ID NO: 932644 - RNA, 21 nt, Human
uaaaaggaaacuaagggacag

SEQ ID NO: 932645 - RNA, 23 nt, Human
uaaaaggaaacuaagggacagug

SEQ ID NO: 932646 - RNA, 21 nt, Human
uaaaauagaauguucugagug

SEQ ID NO: 932647 - RNA, 25 nt, Human
uaaauaauauacuuaaaauagaaug

SEQ ID NO: 932648 - RNA, 22 nt, Human
uaacaccuggauauaccaauug

SEQ ID NO: 932649 - RNA, 21 nt, Human
uaaccaaugggaaaccuaaag

SEQ ID NO: 932650 - RNA, 25 nt, Human
uaaccuaccaaacuaaaagagcaau

SEQ ID NO: 932651 - RNA, 25 nt, Human
uaagacugcugccacuugggucugu

SEQ ID NO: 932652 - RNA, 24 nt, Human
uaaucaaucuucuucugaucaauu

SEQ ID NO: 932653 - RNA, 19 nt, Human
uaccaugcgguguaacacc

SEQ ID NO: 932654 - RNA, 22 nt, Human
uauauauauauucaaccacccc

SEQ ID NO: 932655 - RNA, 20 nt, Human
uauauauauucaaccacccc

SEQ ID NO: 932656 - RNA, 24 nt, Human
uauauauauucaaccaccccaaaa

SEQ ID NO: 932657 - RNA, 21 nt, Human
uauauauucaaccaccccaaa

SEQ ID NO: 932658 - RNA, 18 nt, Human
ucaaugauuaguguaaug

SEQ ID NO: 932659 - RNA, 19 nt, Human
ucaccugaggucaggaguu

SEQ ID NO: 932660 - RNA, 23 nt, Human
ucaugccgcugcacuucagccug

SEQ ID NO: 932661 - RNA, 22 nt, Human
ucucuacuaaaaauacaaaaaa

SEQ ID NO: 932662 - RNA, 24 nt, Human
ucugaucaauuuguccauaguucu

SEQ ID NO: 932663 - RNA, 22 nt, Human
ucugucucaaaaaaaagaaaaa

SEQ ID NO: 932664 - RNA, 23 nt, Human
ucugucucaaaaaaaagaaaaaa

SEQ ID NO: 932665 - RNA, 24 nt, Human
ucugucucaaaaaaaagaaaaaaa

SEQ ID NO: 932666 - RNA, 23 nt, Human
ugaaacaauacauucauuccuuu

SEQ ID NO: 932667 - RNA, 24 nt, Human
ugaccaacaugguaaaacccuguc

SEQ ID NO: 932668 - RNA, 23 nt, Human
ugagaccagccugaccaacaugg

SEQ ID NO: 932669 - RNA, 22 nt, Human
ugaggaacugccaacaauaaau

SEQ ID NO: 932670 - RNA, 20 nt, Human
ugaggcaggagaaucacuug

SEQ ID NO: 932671 - RNA, 24 nt, Human
ugaggcaggagaaucacuugaacc

SEQ ID NO: 932672 - RNA, 25 nt, Human
ugaggcaggagaaucacuugaaccc

SEQ ID NO: 932673 - RNA, 18 nt, Human
ugaggucaggaguuugag

SEQ ID NO: 932674 - RNA, 23 nt, Human
ugagugucccagggcagcaacuu

SEQ ID NO: 932675 - RNA, 21 nt, Human
ugccacuugggucugucuguu

SEQ ID NO: 932676 - RNA, 23 nt, Human
ugccgcugcacuucagccugggg

SEQ ID NO: 932677 - RNA, 24 nt, Human
ugccuguaaucccagcuacucagg

SEQ ID NO: 932678 - RNA, 23 nt, Human
uggaucaccugaggucaggaguu

SEQ ID NO: 932679 - RNA, 24 nt, Human
uggaucaccugaggucaggaguuu

SEQ ID NO: 932680 - RNA, 27 nt, Human
uggaucaccugaggucaggaguuugag

SEQ ID NO: 932681 - RNA, 22 nt, Human
uggcucacgccuguaaucccag

SEQ ID NO: 932682 - RNA, 24 nt, Human
uggcucacgccuguaaucccagca

SEQ ID NO: 932683 - RNA, 24 nt, Human
ugggaggccgaggcagguggauca

SEQ ID NO: 932684 - RNA, 22 nt, Human
uggugggugccuguaaucccag

SEQ ID NO: 932685 - RNA, 24 nt, Human
uggugggugccuguaaucccagcu

SEQ ID NO: 932686 - RNA, 24 nt, Human
ugguggugggugccuguaauccca

SEQ ID NO: 932687 - RNA, 18 nt, Human
ugugggcauauauauaug

SEQ ID NO: 932688 - RNA, 21 nt, Human
uuaaaaauuaacaacagacac

SEQ ID NO: 932689 - RNA, 24 nt, Human
uuaccaagaaccuuuauuuaaccu

SEQ ID NO: 932690 - RNA, 24 nt, Human
uuagccaggugugguggugggugc

SEQ ID NO: 932691 - RNA, 24 nt, Human
uucagaauaaaaggaaacuaaggg

SEQ ID NO: 932692 - RNA, 18 nt, Human
uugcagugagcugagauc

SEQ ID NO: 932693 - RNA, 19 nt, Human
uugcagugagcugagauca

SEQ ID NO: 932694 - RNA, 20 nt, Human
uugcagugagcugagaucau

SEQ ID NO: 932695 - RNA, 25 nt, Human
uugggaggccgaggcagguggauca

SEQ ID NO: 932696 - RNA, 22 nt, Human
uuuaaaguaucuauuacuuuca

SEQ ID NO: 932697 - RNA, 19 nt, Human
uuuguccauaguucuggaa

SEQ ID NO: 932698 - RNA, 22 nt, Human
aaacagaaugagcuaguggcau

SEQ ID NO: 932699 - RNA, 24 nt, Human
aaacagaugugaaucuagcuucau

SEQ ID NO: 932700 - RNA, 25 nt, Human
aacagaaugagcuaguggcaugaga

SEQ ID NO: 932701 - RNA, 20 nt, Human
aagaaaaauacagagugcuc

SEQ ID NO: 932702 - RNA, 18 nt, Human
aagagggagggaagaaag

SEQ ID NO: 932703 - RNA, 24 nt, Human
aagcaagaaaaugagcuuaucuga

SEQ ID NO: 932704 - RNA, 19 nt, Human
aaucuacauuacaaacuuu

SEQ ID NO: 932705 - RNA, 23 nt, Human
agaaaaaaaauggaaucuacaaa

SEQ ID NO: 932706 - RNA, 24 nt, Human
agaaaaaaaauggaaucuacaaag

SEQ ID NO: 932707 - RNA, 22 nt, Human
agaagaaaaaagaaguagaaag

SEQ ID NO: 932708 - RNA, 18 nt, Human
agaaggagggagagaggg

SEQ ID NO: 932709 - RNA, 23 nt, Human
aggaagaaggugcaaaaagaagc

SEQ ID NO: 932710 - RNA, 25 nt, Human
aggaaggaagaaggugcaaaaagaa

SEQ ID NO: 932711 - RNA, 21 nt, Human
aguaagcagcaggguauacaa

SEQ ID NO: 932712 - RNA, 21 nt, Human
agucugcagagacagucaugg

SEQ ID NO: 932713 - RNA, 20 nt, Human
aguugugaaguuuaacagau

SEQ ID NO: 932714 - RNA, 22 nt, Human
aucccaaagccacagagcacac

SEQ ID NO: 932715 - RNA, 28 nt, Human
augaaaauacagauuagguauacaaaua

SEQ ID NO: 932716 - RNA, 18 nt, Human
augagcuuaucugauuua

SEQ ID NO: 932717 - RNA, 21 nt, Human
auugaaggacuauaagaggag

SEQ ID NO: 932718 - RNA, 24 nt, Human
caaaaagaagcuagcaggaaucug

SEQ ID NO: 932719 - RNA, 24 nt, Human
caaagaaaagaacauggcacccuu

SEQ ID NO: 932720 - RNA, 23 nt, Human
cacccuugaugagcugagauaag

SEQ ID NO: 932721 - RNA, 19 nt, Human
cagaagaaaaaagaaguag

SEQ ID NO: 932722 - RNA, 20 nt, Human
cagagcacacauuuaauuug

SEQ ID NO: 932723 - RNA, 23 nt, Human
cagagugcucuaagagagaauaa

SEQ ID NO: 932724 - RNA, 23 nt, Human
ccaaaaaaaaaaaaaaaaaaaaa

SEQ ID NO: 932725 - RNA, 19 nt, Human
ccaaagccacagagcacac

SEQ ID NO: 932726 - RNA, 18 nt, Human
cccaaaaaaaaaaaaaaa

SEQ ID NO: 932727 - RNA, 23 nt, Human
cccaaaaaaaaaaaaaaaaaaaa

SEQ ID NO: 932728 - RNA, 22 nt, Human
cuagaguuccacuugcuauaaa

SEQ ID NO: 932729 - RNA, 22 nt, Human
cucucuggagggcccauaaaag

SEQ ID NO: 932730 - RNA, 18 nt, Human
cugaaggcuauccuacug

SEQ ID NO: 932731 - RNA, 21 nt, Human
gaaagagggagggaagaaagg

SEQ ID NO: 932732 - RNA, 21 nt, Human
gaacugggcuacagaugccag

SEQ ID NO: 932733 - RNA, 20 nt, Human
gaagaaggugcaaaaagaag

SEQ ID NO: 932734 - RNA, 20 nt, Human
gaaggacuggguagugucag

SEQ ID NO: 932735 - RNA, 19 nt, Human
gaagugcagaggagaacug

SEQ ID NO: 932736 - RNA, 25 nt, Human
gagaauaacaauaggaaccgguacc

SEQ ID NO: 932737 - RNA, 21 nt, Human
gcaaggaaagagggagggaag

SEQ ID NO: 932738 - RNA, 21 nt, Human
gcagaggagaacugggcuaca

SEQ ID NO: 932739 - RNA, 19 nt, Human
ggagagagggaggaaggaa

SEQ ID NO: 932740 - RNA, 18 nt, Human
gugaaucuagcuucaugg

SEQ ID NO: 932741 - RNA, 19 nt, Human
uaaaaccauucccaauaga

SEQ ID NO: 932742 - RNA, 19 nt, Human
uacaaagaaaagaacaugg

SEQ ID NO: 932743 - RNA, 21 nt, Human
uacaaagaaaagaacauggca

SEQ ID NO: 932744 - RNA, 27 nt, Human
uaggagagaugacaaauuauacaaugg

SEQ ID NO: 932745 - RNA, 19 nt, Human
uaggggaacugauuaagua

SEQ ID NO: 932746 - RNA, 22 nt, Human
uaugaguagguauugaaauuac

SEQ ID NO: 932747 - RNA, 28 nt, Human
uauuuaucccaaaaaaaaaaaaaaaaaa

SEQ ID NO: 932748 - RNA, 20 nt, Human
ucccaaaaaaaaaaaaaaaa

SEQ ID NO: 932749 - RNA, 22 nt, Human
ucugaagugcagaggagaacug

SEQ ID NO: 932750 - RNA, 24 nt, Human
ucugcagagacagucaugggccag

SEQ ID NO: 932751 - RNA, 20 nt, Human
ugaaaaauagagcugaugcc

SEQ ID NO: 932752 - RNA, 23 nt, Human
ugaaaaauagagcugaugcccaa

SEQ ID NO: 932753 - RNA, 23 nt, Human
ugagaaaaaauuaauuaaugagg

SEQ ID NO: 932754 - RNA, 23 nt, Human
ugaggauaugaaaaauagagcug

SEQ ID NO: 932755 - RNA, 18 nt, Human
ugauagcaucccaaagcc

SEQ ID NO: 932756 - RNA, 22 nt, Human
ugcaaaaagaagcuagcaggaa

SEQ ID NO: 932757 - RNA, 18 nt, Human
ugcagaggagaacugggc

SEQ ID NO: 932758 - RNA, 21 nt, Human
ugucagcaauaauuuucaggu

SEQ ID NO: 932759 - RNA, 23 nt, Human
uuaucccaaaaaaaaaaaaaaaa

SEQ ID NO: 932760 - RNA, 21 nt, Human
uugauucugucaucauucuua

SEQ ID NO: 932761 - RNA, 27 nt, Human
uuggcaaaaggauggauuacugaggcc

SEQ ID NO: 932762 - RNA, 23 nt, Human
uuuuuuaagucacuaagguugcu

SEQ ID NO: 932763 - RNA, 24 nt, Human
aaauugcugggauuacaggcguga

SEQ ID NO: 932764 - RNA, 18 nt, Human
acgagguuucaccguguu

SEQ ID NO: 932765 - RNA, 20 nt, Human
acgagguuucaccguguuag

SEQ ID NO: 932766 - RNA, 20 nt, Human
acugcaagcuccgccucccg

SEQ ID NO: 932767 - RNA, 20 nt, Human
acuugcuguuaggaguuuga

SEQ ID NO: 932768 - RNA, 18 nt, Human
aguagcugggacuacagg

SEQ ID NO: 932769 - RNA, 24 nt, Human
agugcaauggcgccaucucggcuc

SEQ ID NO: 932770 - RNA, 22 nt, Human
auagcaguuauaaucuauggug

SEQ ID NO: 932771 - RNA, 24 nt, Human
augauccgccagccucagccuccc

SEQ ID NO: 932772 - RNA, 21 nt, Human
auucuccugccucagccuccc

SEQ ID NO: 932773 - RNA, 24 nt, Human
caaauugcugggauuacaggcgug

SEQ ID NO: 932774 - RNA, 28 nt, Human
caauaauaaauauaauuguguuaguuuc

SEQ ID NO: 932775 - RNA, 21 nt, Human
cacaguguuuuaaaauacuug

SEQ ID NO: 932776 - RNA, 18 nt, Human
caccguguuagccaggau

SEQ ID NO: 932777 - RNA, 24 nt, Human
caccguguuagccaggauggucuc

SEQ ID NO: 932778 - RNA, 22 nt, Human
cacgccauucuccugccucagc

SEQ ID NO: 932779 - RNA, 21 nt, Human
cagccucagccucccaaauug

SEQ ID NO: 932780 - RNA, 25 nt, Human
cagccucagccucccaaauugcugg

SEQ ID NO: 932781 - RNA, 21 nt, Human
caggugcccgccaucgcgccc

SEQ ID NO: 932782 - RNA, 24 nt, Human
caugauccgccagccucagccucc

SEQ ID NO: 932783 - RNA, 20 nt, Human
ccaaauugcugggauuacag

SEQ ID NO: 932784 - RNA, 22 nt, Human
ccaaauugcugggauuacaggc

SEQ ID NO: 932785 - RNA, 22 nt, Human
ccaaauugcugggauuacaggc

SEQ ID NO: 932786 - RNA, 24 nt, Human
ccaaauugcugggauuacaggcgu

SEQ ID NO: 932787 - RNA, 22 nt, Human
ccacuguggauauuuugaguau

SEQ ID NO: 932788 - RNA, 22 nt, Human
cccaggcuggagugcaauggcg

SEQ ID NO: 932789 - RNA, 23 nt, Human
cccgaguagcugggacuacaggu

SEQ ID NO: 932790 - RNA, 24 nt, Human
cccgaguagcugggacuacaggug

SEQ ID NO: 932791 - RNA, 24 nt, Human
ccgccagccucagccucccaaauu

SEQ ID NO: 932792 - RNA, 28 nt, Human
ccugaccucaugauccgccagccucagc

SEQ ID NO: 932793 - RNA, 23 nt, Human
ccugccucagccucccgaguagc

SEQ ID NO: 932794 - RNA, 24 nt, Human
cgagguuucaccguguuagccagg

SEQ ID NO: 932795 - RNA, 19 nt, Human
cgccucccggguucacgcc

SEQ ID NO: 932796 - RNA, 18 nt, Human
cguguccauuuaacugag

SEQ ID NO: 932797 - RNA, 25 nt, Human
cuaccaaaaaaagauagcaguuaua

SEQ ID NO: 932798 - RNA, 24 nt, Human
cucagccucccgaguagcugggac

SEQ ID NO: 932799 - RNA, 18 nt, Human
cucaugauccgccagccu

SEQ ID NO: 932800 - RNA, 21 nt, Human
cucccggguucacgccauucu

SEQ ID NO: 932801 - RNA, 20 nt, Human
cuccugaccucaugauccgc

SEQ ID NO: 932802 - RNA, 19 nt, Human
cucuuuuugcccaggcugg

SEQ ID NO: 932803 - RNA, 21 nt, Human
cucuuuuugcccaggcuggag

SEQ ID NO: 932804 - RNA, 22 nt, Human
cucuuuuugcccaggcuggagu

SEQ ID NO: 932805 - RNA, 23 nt, Human
cugccucagccucccgaguagcu

SEQ ID NO: 932806 - RNA, 18 nt, Human
cuggcucuuuuugcccag

SEQ ID NO: 932807 - RNA, 24 nt, Human
cuuuuugcccaggcuggagugcaa

SEQ ID NO: 932808 - RNA, 18 nt, Human
gaagaagacacuucuccg

SEQ ID NO: 932809 - RNA, 20 nt, Human
gaaguuggaagaagacacuu

SEQ ID NO: 932810 - RNA, 22 nt, Human
gaccucaugauccgccagccuc

SEQ ID NO: 932811 - RNA, 18 nt, Human
gauuacaggcgugagcca

SEQ ID NO: 932812 - RNA, 22 nt, Human
gauuacaggcgugagccaccgc

SEQ ID NO: 932813 - RNA, 22 nt, Human
gauuacaggcgugagccaccgc

SEQ ID NO: 932814 - RNA, 20 nt, Human
gcaacaaaaauuuaugaaga

SEQ ID NO: 932815 - RNA, 19 nt, Human
gcccaggcuggagugcaau

SEQ ID NO: 932816 - RNA, 25 nt, Human
gcccggcuaauuuuuuuuuguauuu

SEQ ID NO: 932817 - RNA, 25 nt, Human
gccucccggguucacgccauucucc

SEQ ID NO: 932818 - RNA, 21 nt, Human
gcucuuuuugcccaggcugga

SEQ ID NO: 932819 - RNA, 20 nt, Human
gcuggagugcaauggcgcca

SEQ ID NO: 932820 - RNA, 24 nt, Human
ggauggucucgaucuccugaccuc

SEQ ID NO: 932821 - RNA, 28 nt, Human
uaauuuuuuuuuguauuuuuaguagaga

SEQ ID NO: 932822 - RNA, 21 nt, Human
uacaggcgugagccaccgcgc

SEQ ID NO: 932823 - RNA, 22 nt, Human
uacaggcgugagccaccgcgcu

SEQ ID NO: 932824 - RNA, 18 nt, Human
uaccaaaaaaagauagca

SEQ ID NO: 932825 - RNA, 24 nt, Human
uaccaaaaaaagauagcaguuaua

SEQ ID NO: 932826 - RNA, 26 nt, Human
uaccaaaaaaagauagcaguuauaau

SEQ ID NO: 932827 - RNA, 26 nt, Human
uaccaaaaaaagauagcaguuauaau

SEQ ID NO: 932828 - RNA, 27 nt, Human
uagaauguaauuuuauucuuuaauaau

SEQ ID NO: 932829 - RNA, 21 nt, Human
uaguagagacgagguuucacc

SEQ ID NO: 932830 - RNA, 24 nt, Human
uaguagagacgagguuucaccgug

SEQ ID NO: 932831 - RNA, 25 nt, Human
uaguagagacgagguuucaccgugu

SEQ ID NO: 932832 - RNA, 18 nt, Human
uauauacuuauauaaaca

SEQ ID NO: 932833 - RNA, 24 nt, Human
ucaccguguuagccaggauggucu

SEQ ID NO: 932834 - RNA, 18 nt, Human
ucacugcaagcuccgccu

SEQ ID NO: 932835 - RNA, 19 nt, Human
ucacugcaagcuccgccuc

SEQ ID NO: 932836 - RNA, 24 nt, Human
ucacugcaagcuccgccucccggg

SEQ ID NO: 932837 - RNA, 23 nt, Human
ucagccucccgaguagcugggac

SEQ ID NO: 932838 - RNA, 24 nt, Human
ucccaaauugcugggauuacaggc

SEQ ID NO: 932839 - RNA, 23 nt, Human
ucccgaguagcugggacuacagg

SEQ ID NO: 932840 - RNA, 24 nt, Human
ucccgaguagcugggacuacaggu

SEQ ID NO: 932841 - RNA, 21 nt, Human
ucccggguucacgccauucuc

SEQ ID NO: 932842 - RNA, 24 nt, Human
ucccggguucacgccauucuccug

SEQ ID NO: 932843 - RNA, 24 nt, Human
ucuccugccucagccucccgagua

SEQ ID NO: 932844 - RNA, 24 nt, Human
ucuggcucuuuuugcccaggcugg

SEQ ID NO: 932845 - RNA, 23 nt, Human
ugaccuagucuagagguuaaugg

SEQ ID NO: 932846 - RNA, 24 nt, Human
ugcaaacuuuuacuuaggcuacug

SEQ ID NO: 932847 - RNA, 23 nt, Human
ugcaacaaaaauuuaugaagaaa

SEQ ID NO: 932848 - RNA, 18 nt, Human
ugcccaggcuggagugca

SEQ ID NO: 932849 - RNA, 21 nt, Human
ugcccaggcuggagugcaaug

SEQ ID NO: 932850 - RNA, 21 nt, Human
ugcccaggcuggagugcaaug

SEQ ID NO: 932851 - RNA, 24 nt, Human
ugccucagccucccgaguagcugg

SEQ ID NO: 932852 - RNA, 20 nt, Human
ugcugggauuacaggcguga

SEQ ID NO: 932853 - RNA, 24 nt, Human
ugcugggauuacaggcgugagcca

SEQ ID NO: 932854 - RNA, 23 nt, Human
uggagugcaauggcgccaucucg

SEQ ID NO: 932855 - RNA, 24 nt, Human
uggagugcaauggcgccaucucgg

SEQ ID NO: 932856 - RNA, 18 nt, Human
ugggacuacaggugcccg

SEQ ID NO: 932857 - RNA, 19 nt, Human
ugggacuacaggugcccgc

SEQ ID NO: 932858 - RNA, 21 nt, Human
ugggacuacaggugcccgcca

SEQ ID NO: 932859 - RNA, 21 nt, Human
ugggacuacaggugcccgcca

SEQ ID NO: 932860 - RNA, 22 nt, Human
ugggacuacaggugcccgccau

SEQ ID NO: 932861 - RNA, 24 nt, Human
ugggacuacaggugcccgccaucg

SEQ ID NO: 932862 - RNA, 18 nt, Human
ugggauuacaggcgugag

SEQ ID NO: 932863 - RNA, 19 nt, Human
ugggauuacaggcgugagc

SEQ ID NO: 932864 - RNA, 21 nt, Human
ugggauuacaggcgugagcca

SEQ ID NO: 932865 - RNA, 22 nt, Human
ugggauuacaggcgugagccac

SEQ ID NO: 932866 - RNA, 23 nt, Human
ugggauuacaggcgugagccacc

SEQ ID NO: 932867 - RNA, 24 nt, Human
ugggauuacaggcgugagccaccg

SEQ ID NO: 932868 - RNA, 22 nt, Human
uuaggcuacugguguuuuuggu

SEQ ID NO: 932869 - RNA, 22 nt, Human
uuaguagagacgagguuucacc

SEQ ID NO: 932870 - RNA, 24 nt, Human
uuaguagagacgagguuucaccgu

SEQ ID NO: 932871 - RNA, 23 nt, Human
uugaaaugaaguuggaagaagac

SEQ ID NO: 932872 - RNA, 24 nt, Human
uugaccucaaaaaacuaauuuaga

SEQ ID NO: 932873 - RNA, 25 nt, Human
uugaccucaaaaaacuaauuuagaa

SEQ ID NO: 932874 - RNA, 24 nt, Human
uugagacggagucuggcucuuuuu

SEQ ID NO: 932875 - RNA, 18 nt, Human
uugcccaggcuggagugc

SEQ ID NO: 932876 - RNA, 19 nt, Human
uuucaccguguuagccagg

SEQ ID NO: 932877 - RNA, 25 nt, Human
uuugaguaauccuaccaaaaaaaga

SEQ ID NO: 932878 - RNA, 18 nt, Human
uuugcuguuguuuuugac

SEQ ID NO: 932879 - RNA, 24 nt, Human
uuuuuaguagagacgagguuucac

SEQ ID NO: 932880 - RNA, 21 nt, Human
uuuuuguauuuuuaguagaga

SEQ ID NO: 932881 - RNA, 21 nt, Human
uuuuuuguauuuuuaguagag

SEQ ID NO: 932882 - RNA, 24 nt, Human
uuuuuuguauuuuuaguagagacg

SEQ ID NO: 932883 - RNA, 23 nt, Human
uuuuuuuuugagacggagucugg

SEQ ID NO: 932884 - RNA, 25 nt, Human
uuuuuuuuuuugagacggagucugg

SEQ ID NO: 932885 - RNA, 22 nt, Human
uuuuuuuuuuuuuugagacgga

SEQ ID NO: 932886 - RNA, 18 nt, Human
uuuuuuuuuuuuuuuuug

SEQ ID NO: 932887 - RNA, 18 nt, Human
uuuuauugaccacaugac

SEQ ID NO: 932888 - RNA, 26 nt, Human
aaaaauggcaaagaguuuuugccaaa

SEQ ID NO: 932889 - RNA, 21 nt, Human
agagcaguuuggaaaauauca

SEQ ID NO: 932890 - RNA, 22 nt, Human
agagcaguuuggaaaauaucau

SEQ ID NO: 932891 - RNA, 19 nt, Human
caaccaaaaauggcaaaga

SEQ ID NO: 932892 - RNA, 18 nt, Human
cauugcaguuuauuucuu

SEQ ID NO: 932893 - RNA, 19 nt, Human
cugggcugcuuaauauagu

SEQ ID NO: 932894 - RNA, 22 nt, Human
guuccaucaaaaucauugcagu

SEQ ID NO: 932895 - RNA, 23 nt, Human
ucagagcaguuuggaaaauauca

SEQ ID NO: 932896 - RNA, 20 nt, Human
ucuuuggaacaaauuacugc

SEQ ID NO: 932897 - RNA, 19 nt, Human
ugccaaaaacuuuuaaagg

SEQ ID NO: 932898 - RNA, 23 nt, Human
uggcaaagaguuuuugccaaaaa

SEQ ID NO: 932899 - RNA, 19 nt, Human
ugugcugguuagaucaggg

SEQ ID NO: 932900 - RNA, 23 nt, Human
uucuuuggaacaaauuacugcuu

SEQ ID NO: 932901 - RNA, 18 nt, Human
uugguagaagauucuucu

SEQ ID NO: 932902 - RNA, 21 nt, Human
uugguagaagauucuucuuug

SEQ ID NO: 932903 - RNA, 22 nt, Human
uuuugccaaaaacuuuuaaagg

SEQ ID NO: 932904 - RNA, 23 nt, Human
aaagagucaagacuauuuuaaaa

SEQ ID NO: 932905 - RNA, 20 nt, Human
aaauacauacuuucauaaca

SEQ ID NO: 932906 - RNA, 23 nt, Human
aaggagaaggugaagccagugaa

SEQ ID NO: 932907 - RNA, 23 nt, Human
acacacuuaaaauuuauccauug

SEQ ID NO: 932908 - RNA, 21 nt, Human
acacauucaaacaugagaaac

SEQ ID NO: 932909 - RNA, 23 nt, Human
acacauucaaacaugagaaacag

SEQ ID NO: 932910 - RNA, 24 nt, Human
acagcgucuguuacccaggcugga

SEQ ID NO: 932911 - RNA, 19 nt, Human
acccaggcuggagugcagu

SEQ ID NO: 932912 - RNA, 19 nt, Human
agagaaacaaaccccaugc

SEQ ID NO: 932913 - RNA, 24 nt, Human
agcgucuguuacccaggcuggagu

SEQ ID NO: 932914 - RNA, 22 nt, Human
aggcauggcggcucacacucag

SEQ ID NO: 932915 - RNA, 18 nt, Human
aggcuggagugcaguggc

SEQ ID NO: 932916 - RNA, 21 nt, Human
agugcaguggccugauccuag

SEQ ID NO: 932917 - RNA, 24 nt, Human
agugcaguggccugauccuagcuc

SEQ ID NO: 932918 - RNA, 22 nt, Human
auacaagcuguuuguauguaau

SEQ ID NO: 932919 - RNA, 24 nt, Human
auacauacuuucauaacaaaacua

SEQ ID NO: 932920 - RNA, 20 nt, Human
auauaaaauauaauacaagc

SEQ ID NO: 932921 - RNA, 23 nt, Human
aucaauuuagagaaacaaacccc

SEQ ID NO: 932922 - RNA, 23 nt, Human
augguauacaguauuuacaaaau

SEQ ID NO: 932923 - RNA, 23 nt, Human
caaaauacauacuuucauaacaa

SEQ ID NO: 932924 - RNA, 26 nt, Human
caaaucaauuuagagaaacaaacccc

SEQ ID NO: 932925 - RNA, 19 nt, Human
caaguacuaugcucaaaaa

SEQ ID NO: 932926 - RNA, 18 nt, Human
caaucuccacuucucagg

SEQ ID NO: 932927 - RNA, 19 nt, Human
cacacacaaagagucaaga

SEQ ID NO: 932928 - RNA, 18 nt, Human
cacauuuagaucuucacc

SEQ ID NO: 932929 - RNA, 20 nt, Human
caggcucaagagaugcuccc

SEQ ID NO: 932930 - RNA, 18 nt, Human
caguggccugauccuagc

SEQ ID NO: 932931 - RNA, 22 nt, Human
caucuccuagucacacauucaa

SEQ ID NO: 932932 - RNA, 21 nt, Human
ccaguaaaguagaagucaaaa

SEQ ID NO: 932933 - RNA, 19 nt, Human
ccugcaaugugggcagggc

SEQ ID NO: 932934 - RNA, 19 nt, Human
ccuuuuuuuugagacagcg

SEQ ID NO: 932935 - RNA, 20 nt, Human
ccuuuuuuuugagacagcgu

SEQ ID NO: 932936 - RNA, 23 nt, Human
cgucuguuacccaggcuggagug

SEQ ID NO: 932937 - RNA, 24 nt, Human
cucaaaaaccucaaugcugcuccu

SEQ ID NO: 932938 - RNA, 25 nt, Human
gaauggauauauaccaaaaccagaa

SEQ ID NO: 932939 - RNA, 22 nt, Human
gagaaggagaaggugaagccag

SEQ ID NO: 932940 - RNA, 20 nt, Human
gcagggcaaaauacauacuu

SEQ ID NO: 932941 - RNA, 19 nt, Human
gcgauggaugcugcuagga

SEQ ID NO: 932942 - RNA, 21 nt, Human
gcgucuguuacccaggcugga

SEQ ID NO: 932943 - RNA, 25 nt, Human
gcuggagugcaguggccugauccua

SEQ ID NO: 932944 - RNA, 20 nt, Human
uaaaauuagaggcauuaagc

SEQ ID NO: 932945 - RNA, 18 nt, Human
uaaaguagaagucaaaaa

SEQ ID NO: 932946 - RNA, 23 nt, Human
uaaaguagaagucaaaaaaaucc

SEQ ID NO: 932947 - RNA, 20 nt, Human
uaauauaccucucaaguaug

SEQ ID NO: 932948 - RNA, 21 nt, Human
uacccaggcuggagugcagug

SEQ ID NO: 932949 - RNA, 18 nt, Human
uagagaaacaaaccccau

SEQ ID NO: 932950 - RNA, 20 nt, Human
uagcaaaaaugggaauagga

SEQ ID NO: 932951 - RNA, 18 nt, Human
uauaaaauauaauacaag

SEQ ID NO: 932952 - RNA, 22 nt, Human
uauacacauaauacaugguaua

SEQ ID NO: 932953 - RNA, 24 nt, Human
uauggccaggcauggcggcucaca

SEQ ID NO: 932954 - RNA, 21 nt, Human
ucaagaguccagggauauggg

SEQ ID NO: 932955 - RNA, 22 nt, Human
ucaaguacuaugcucaaaaacc

SEQ ID NO: 932956 - RNA, 25 nt, Human
uccauuucuguaccaauuuucucaa

SEQ ID NO: 932957 - RNA, 21 nt, Human
ucucaggcucaagagaugcuc

SEQ ID NO: 932958 - RNA, 19 nt, Human
ucuguuacccaggcuggag

SEQ ID NO: 932959 - RNA, 24 nt, Human
ucuguuacccaggcuggagugcag

SEQ ID NO: 932960 - RNA, 20 nt, Human
ugagaaacagucacacacaa

SEQ ID NO: 932961 - RNA, 21 nt, Human
ugcaaauaaaaucggucuucc

SEQ ID NO: 932962 - RNA, 25 nt, Human
ugcaaucuccacuucucaggcucaa

SEQ ID NO: 932963 - RNA, 24 nt, Human
uggaauggauauauaccaaaacca

SEQ ID NO: 932964 - RNA, 19 nt, Human
uggagugcaguggccugau

SEQ ID NO: 932965 - RNA, 19 nt, Human
uggagugcaguggccugau

SEQ ID NO: 932966 - RNA, 18 nt, Human
uggauauauaccaaaacc

SEQ ID NO: 932967 - RNA, 18 nt, Human
uguauauauacaaaacac

SEQ ID NO: 932968 - RNA, 24 nt, Human
uuacccaggcuggagugcaguggc

SEQ ID NO: 932969 - RNA, 25 nt, Human
uucucaggcucaagagaugcucccg

SEQ ID NO: 932970 - RNA, 22 nt, Human
uucuguaccaauuuucucaaga

SEQ ID NO: 932971 - RNA, 23 nt, Human
uugucgcucagcaacgaagagag

SEQ ID NO: 932972 - RNA, 23 nt, Human
uuuagaucuucaccuugagauuu

SEQ ID NO: 932973 - RNA, 19 nt, Human
uuuagcaaaaaugggaaua

SEQ ID NO: 932974 - RNA, 19 nt, Human
uuuugagacagcgucuguu

SEQ ID NO: 932975 - RNA, 22 nt, Human
agaauuuacagggaaaaaugga

SEQ ID NO: 932976 - RNA, 22 nt, Human
agauuauuucuccccaaagcuc

SEQ ID NO: 932977 - RNA, 20 nt, Human
aucugcuggucaaaaugacu

SEQ ID NO: 932978 - RNA, 22 nt, Human
caaaaugacucuugccaguuga

SEQ ID NO: 932979 - RNA, 24 nt, Human
caguuguucauauuuggggugcag

SEQ ID NO: 932980 - RNA, 21 nt, Human
cauggguuuuuucuacaauuu

SEQ ID NO: 932981 - RNA, 19 nt, Human
cgggaaggaggcuguggau

SEQ ID NO: 932982 - RNA, 24 nt, Human
gagaauuuacagggaaaaauggag

SEQ ID NO: 932983 - RNA, 19 nt, Human
gcaucaggauggaguggug

SEQ ID NO: 932984 - RNA, 23 nt, Human
ggggcaucaggauggaguggugg

SEQ ID NO: 932985 - RNA, 22 nt, Human
ggguaguggugucuuuuguggu

SEQ ID NO: 932986 - RNA, 19 nt, Human
uauuuggggugcaggagua

SEQ ID NO: 932987 - RNA, 21 nt, Human
ucgggaaggaggcuguggaua

SEQ ID NO: 932988 - RNA, 22 nt, Human
ucuuacaguugauuaaucugcu

SEQ ID NO: 932989 - RNA, 18 nt, Human
ucuuuuguggugguggug

SEQ ID NO: 932990 - RNA, 24 nt, Human
ugcaggaguagggaggguaggauc

SEQ ID NO: 932991 - RNA, 21 nt, Human
ugcauggguuuuuucuacaau

SEQ ID NO: 932992 - RNA, 24 nt, Human
ugcauggguuuuuucuacaauuuc

SEQ ID NO: 932993 - RNA, 23 nt, Human
ugugguggugguggcaccugcug

SEQ ID NO: 932994 - RNA, 21 nt, Human
uucucauccaaaaauggaagc

SEQ ID NO: 932995 - RNA, 18 nt, Human
aaguuucagcgcccucca

SEQ ID NO: 932996 - RNA, 19 nt, Human
agugccagcuuggaauccc

SEQ ID NO: 932997 - RNA, 22 nt, Human
gauaaagaguuccagggaaaga

SEQ ID NO: 932998 - RNA, 22 nt, Human
ggaaagaaaggucacagugcuc

SEQ ID NO: 932999 - RNA, 24 nt, Human
gguuguguuguucauucuggcuag

SEQ ID NO: 933000 - RNA, 23 nt, Human
gucacagugcucgguaaacaacc

SEQ ID NO: 933001 - RNA, 23 nt, Human
uggcagugccagcuuggaauccc

SEQ ID NO: 933002 - RNA, 22 nt, Human
uggucuggggcugugacggccu

SEQ ID NO: 933003 - RNA, 21 nt, Human
ugugaugaaguuucagcgccc

SEQ ID NO: 933004 - RNA, 21 nt, Human
uuccagggaaagaaaggucac

SEQ ID NO: 933005 - RNA, 24 nt, Human
aaaaaacaaaaugaaguugcaaau

SEQ ID NO: 933006 - RNA, 24 nt, Human
aaacaaagggucaaugucaucaac

SEQ ID NO: 933007 - RNA, 27 nt, Human
uaaauaacauuuauaaaaaacaaaaug

SEQ ID NO: 933008 - RNA, 18 nt, Human
uaaaucaaguuaucauca

SEQ ID NO: 933009 - RNA, 20 nt, Human
ugacaauggaucaaaaauga

SEQ ID NO: 933010 - RNA, 20 nt, Human
uuaucaucagauacauuuaa

SEQ ID NO: 933011 - RNA, 19 nt, Human
uuuuuuguauaaauaacau

SEQ ID NO: 933012 - RNA, 19 nt, Human
uuuuuuuuuuuuuuuuugu

SEQ ID NO: 933013 - RNA, 20 nt, Human
uuuuuuuuuuuuuuuuuugg

SEQ ID NO: 933014 - RNA, 18 nt, Human
cggcggcgguggcggcgg

SEQ ID NO: 933015 - RNA, 18 nt, Human
cucggcggcgguggcggc

SEQ ID NO: 933016 - RNA, 26 nt, Human
cucggcggcgguggcggcggcucccu

SEQ ID NO: 933017 - RNA, 20 nt, Human
gcggcgguggcggcggcucc

SEQ ID NO: 933018 - RNA, 22 nt, Human
gcggcgguggcggcggcucccg

SEQ ID NO: 933019 - RNA, 25 nt, Human
gcggcgguggcggcggcucccggac

SEQ ID NO: 933020 - RNA, 21 nt, Human
gcgguggcggcggcucccgga

SEQ ID NO: 933021 - RNA, 25 nt, Human
uccugacuccucggcggcgguggcg

SEQ ID NO: 933022 - RNA, 18 nt, Human
ucuucagucuuuguauuu

SEQ ID NO: 933023 - RNA, 24 nt, Human
ugacuccucggcggcgguggcggc

SEQ ID NO: 933024 - RNA, 19 nt, Human
ugcugugaaauuucuucag

SEQ ID NO: 933025 - RNA, 24 nt, Human
uuccucaaauuugcuggagaaaua

SEQ ID NO: 933026 - RNA, 21 nt, Human
uuuguauuuacucaaacccuu

SEQ ID NO: 933027 - RNA, 22 nt, Human
aaacaaugucuacacaguucgu

SEQ ID NO: 933028 - RNA, 19 nt, Human
aaacacuucaauucuucuc

SEQ ID NO: 933029 - RNA, 19 nt, Human
aaagugcuaggauuacagg

SEQ ID NO: 933030 - RNA, 24 nt, Human
aaagugcuaggauuacaggcguga

SEQ ID NO: 933031 - RNA, 18 nt, Human
aaccucugccucccaggc

SEQ ID NO: 933032 - RNA, 27 nt, Human
aaguagccggaaucacaggcagaagcc

SEQ ID NO: 933033 - RNA, 26 nt, Human
aagugcuaggauuacaggcgugagcc

SEQ ID NO: 933034 - RNA, 23 nt, Human
accucggccucccaaagugcuag

SEQ ID NO: 933035 - RNA, 28 nt, Human
agaaaacaugauagaacuaaacacuuca

SEQ ID NO: 933036 - RNA, 19 nt, Human
agcgaucuacccaccucgg

SEQ ID NO: 933037 - RNA, 20 nt, Human
agugcaauggcgcaaucucg

SEQ ID NO: 933038 - RNA, 24 nt, Human
agugcaauggcgcaaucucggcuc

SEQ ID NO: 933039 - RNA, 24 nt, Human
caaagugcuaggauuacaggcgug

SEQ ID NO: 933040 - RNA, 23 nt, Human
caaccucugccucccaggcuuaa

SEQ ID NO: 933041 - RNA, 18 nt, Human
cacacaggcuagagugca

SEQ ID NO: 933042 - RNA, 24 nt, Human
caccucagccucccaaguagccgg

SEQ ID NO: 933043 - RNA, 19 nt, Human
cacgcccggccaaacaaaa

SEQ ID NO: 933044 - RNA, 18 nt, Human
cacugcaaccucugccuc

SEQ ID NO: 933045 - RNA, 21 nt, Human
cacugcaaccucugccuccca

SEQ ID NO: 933046 - RNA, 24 nt, Human
cagcgaaacccgaacacucccuuu

SEQ ID NO: 933047 - RNA, 18 nt, Human
cagcuccuuagagagagc

SEQ ID NO: 933048 - RNA, 20 nt, Human
cauguugcccaggcucgucu

SEQ ID NO: 933049 - RNA, 24 nt, Human
cauguugcccaggcucgucuugaa

SEQ ID NO: 933050 - RNA, 22 nt, Human
ccaaagugcuaggauuacaggc

SEQ ID NO: 933051 - RNA, 24 nt, Human
ccaaagugcuaggauuacaggcgu

SEQ ID NO: 933052 - RNA, 22 nt, Human
ccaccacgcccggccaaacaaa

SEQ ID NO: 933053 - RNA, 19 nt, Human
ccauguugcccaggcucgu

SEQ ID NO: 933054 - RNA, 21 nt, Human
ccauguugcccaggcucgucu

SEQ ID NO: 933055 - RNA, 23 nt, Human
cccaccucagccucccaaguagc

SEQ ID NO: 933056 - RNA, 18 nt, Human
cccagcgaaacccgaaca

SEQ ID NO: 933057 - RNA, 18 nt, Human
cccaggcuuaagcaaucc

SEQ ID NO: 933058 - RNA, 18 nt, Human
ccccagcgaaacccgaac

SEQ ID NO: 933059 - RNA, 28 nt, Human
cccgaacacucccuuucagaccguccuu

SEQ ID NO: 933060 - RNA, 22 nt, Human
ccuagggauugggcugccuucc

SEQ ID NO: 933061 - RNA, 23 nt, Human
ccucccaccucagccucccaagu

SEQ ID NO: 933062 - RNA, 26 nt, Human
ccucccaccucagccucccaaguagc

SEQ ID NO: 933063 - RNA, 24 nt, Human
ccugagcucaagcgaucuacccac

SEQ ID NO: 933064 - RNA, 24 nt, Human
cgaucuacccaccucggccuccca

SEQ ID NO: 933065 - RNA, 23 nt, Human
cggcauuugccauguugcccagg

SEQ ID NO: 933066 - RNA, 25 nt, Human
cgugagccaccacgcccggccaaac

SEQ ID NO: 933067 - RNA, 24 nt, Human
cucaagcgaucuacccaccucggc

SEQ ID NO: 933068 - RNA, 24 nt, Human
cucacugcaaccucugccucccag

SEQ ID NO: 933069 - RNA, 24 nt, Human
cucacugcaaccucugccucccag

SEQ ID NO: 933070 - RNA, 26 nt, Human
cucccaggcuuaagcaaucccuccca

SEQ ID NO: 933071 - RNA, 20 nt, Human
cucugucacacaggcuagag

SEQ ID NO: 933072 - RNA, 23 nt, Human
cugcaaccucugccucccaggcu

SEQ ID NO: 933073 - RNA, 24 nt, Human
cugcaaccucugccucccaggcuu

SEQ ID NO: 933074 - RNA, 24 nt, Human
gagcucaagcgaucuacccaccuc

SEQ ID NO: 933075 - RNA, 21 nt, Human
gagguucaaguccuuuuccca

SEQ ID NO: 933076 - RNA, 18 nt, Human
gauuacaggcgugagcca

SEQ ID NO: 933077 - RNA, 21 nt, Human
gauuacaggcgugagccacca

SEQ ID NO: 933078 - RNA, 22 nt, Human
gauuacaggcgugagccaccac

SEQ ID NO: 933079 - RNA, 24 nt, Human
gcgaucuacccaccucggccuccc

SEQ ID NO: 933080 - RNA, 19 nt, Human
gcuagagugcaauggcgca

SEQ ID NO: 933081 - RNA, 20 nt, Human
ggaaucacaggcagaagcca

SEQ ID NO: 933082 - RNA, 23 nt, Human
ggaaucacaggcagaagccaccg

SEQ ID NO: 933083 - RNA, 19 nt, Human
ggauuacaggcgugagcca

SEQ ID NO: 933084 - RNA, 22 nt, Human
ggauuacaggcgugagccacca

SEQ ID NO: 933085 - RNA, 22 nt, Human
ggcauuugccauguugcccagg

SEQ ID NO: 933086 - RNA, 22 nt, Human
uaauaaaaacaaugucuacaca

SEQ ID NO: 933087 - RNA, 25 nt, Human
uaauuuuaguauuuuuuugcagaga

SEQ ID NO: 933088 - RNA, 23 nt, Human
uacaggcgugagccaccacgccc

SEQ ID NO: 933089 - RNA, 22 nt, Human
uacccaccucggccucccaaag

SEQ ID NO: 933090 - RNA, 23 nt, Human
uacccaccucggccucccaaagu

SEQ ID NO: 933091 - RNA, 22 nt, Human
uagagugcaauggcgcaaucuc

SEQ ID NO: 933092 - RNA, 24 nt, Human
uagccggaaucacaggcagaagcc

SEQ ID NO: 933093 - RNA, 18 nt, Human
uaggauuacaggcgugag

SEQ ID NO: 933094 - RNA, 19 nt, Human
uaggauuacaggcgugagc

SEQ ID NO: 933095 - RNA, 22 nt, Human
uaggauuacaggcgugagccac

SEQ ID NO: 933096 - RNA, 24 nt, Human
uaggauuacaggcgugagccacca

SEQ ID NO: 933097 - RNA, 21 nt, Human
ucaaccgugagagggguuccc

SEQ ID NO: 933098 - RNA, 20 nt, Human
ucacaggcagaagccaccgc

SEQ ID NO: 933099 - RNA, 19 nt, Human
ucacugcaaccucugccuc

SEQ ID NO: 933100 - RNA, 24 nt, Human
ucacugcaaccucugccucccagg

SEQ ID NO: 933101 - RNA, 25 nt, Human
ucacugcaaccucugccucccaggc

SEQ ID NO: 933102 - RNA, 20 nt, Human
ucagccucccaaguagccgg

SEQ ID NO: 933103 - RNA, 21 nt, Human
ucagccucccaaguagccgga

SEQ ID NO: 933104 - RNA, 24 nt, Human
ucccaaagugcuaggauuacaggc

SEQ ID NO: 933105 - RNA, 18 nt, Human
ucccaggcuuaagcaauc

SEQ ID NO: 933106 - RNA, 18 nt, Human
ucggccucccaaagugcu

SEQ ID NO: 933107 - RNA, 24 nt, Human
ucugucacacaggcuagagugcaa

SEQ ID NO: 933108 - RNA, 18 nt, Human
ucuugaacuccugagcuc

SEQ ID NO: 933109 - RNA, 23 nt, Human
ucuugaacuccugagcucaagcg

SEQ ID NO: 933110 - RNA, 19 nt, Human
ucuugcucugucacacagg

SEQ ID NO: 933111 - RNA, 24 nt, Human
ucuugcucugucacacaggcuaga

SEQ ID NO: 933112 - RNA, 22 nt, Human
ugagacagggucuugcucuguc

SEQ ID NO: 933113 - RNA, 23 nt, Human
ugcaauggcgcaaucucggcuca

SEQ ID NO: 933114 - RNA, 23 nt, Human
ugcagagacggcauuugccaugu

SEQ ID NO: 933115 - RNA, 24 nt, Human
ugccauguugcccaggcucgucuu

SEQ ID NO: 933116 - RNA, 31 nt, Human
ugccauguugcccaggcucgucuugaacucc

SEQ ID NO: 933117 - RNA, 24 nt, Human
ugcccaggcucgucuugaacuccu

SEQ ID NO: 933118 - RNA, 24 nt, Human
ugcuaggauuacaggcgugagcca

SEQ ID NO: 933119 - RNA, 22 nt, Human
uggcagggcguaaaaagguaau

SEQ ID NO: 933120 - RNA, 22 nt, Human
uucaaguccuuuucccauuguc

SEQ ID NO: 933121 - RNA, 22 nt, Human
uugagacagggucuugcucugu

SEQ ID NO: 933122 - RNA, 18 nt, Human
uugccauguugcccaggc

SEQ ID NO: 933123 - RNA, 24 nt, Human
aacauuucuucuccgcaccuacua

SEQ ID NO: 933124 - RNA, 23 nt, Human
aacccccucccacagauccccug

SEQ ID NO: 933125 - RNA, 20 nt, Human
aagagucuguucauccuuug

SEQ ID NO: 933126 - RNA, 23 nt, Human
accaggaaugaccccuuggucca

SEQ ID NO: 933127 - RNA, 22 nt, Human
acccccucccacagauccccug

SEQ ID NO: 933128 - RNA, 24 nt, Human
acccugaacaggcaguaagagaga

SEQ ID NO: 933129 - RNA, 23 nt, Human
accucauuuucuucaucugccaa

SEQ ID NO: 933130 - RNA, 20 nt, Human
aggcacagaggaggggaggg

SEQ ID NO: 933131 - RNA, 18 nt, Human
agggauggggaucgugaa

SEQ ID NO: 933132 - RNA, 24 nt, Human
auauacauacauugcuggugugug

SEQ ID NO: 933133 - RNA, 22 nt, Human
caccugacucugaccauucauc

SEQ ID NO: 933134 - RNA, 19 nt, Human
cacgagguugaauguagca

SEQ ID NO: 933135 - RNA, 22 nt, Human
cagaaugaauaaaugaagaguc

SEQ ID NO: 933136 - RNA, 24 nt, Human
cagauccccugcagggcaaagccu

SEQ ID NO: 933137 - RNA, 21 nt, Human
cauccugggcucaucugcucc

SEQ ID NO: 933138 - RNA, 22 nt, Human
ccagggucccucucugugcucc

SEQ ID NO: 933139 - RNA, 19 nt, Human
cccaggccaaguucccagg

SEQ ID NO: 933140 - RNA, 19 nt, Human
cccccggagacccucaauu

SEQ ID NO: 933141 - RNA, 20 nt, Human
cccccggagacccucaauuc

SEQ ID NO: 933142 - RNA, 21 nt, Human
ccccuugguccacagagcucu

SEQ ID NO: 933143 - RNA, 22 nt, Human
cccucccacagauccccugcag

SEQ ID NO: 933144 - RNA, 22 nt, Human
ccuccuaacccccucccacaga

SEQ ID NO: 933145 - RNA, 18 nt, Human
ccugaacaggcaguaaga

SEQ ID NO: 933146 - RNA, 24 nt, Human
cggagacccucaauucuggacuga

SEQ ID NO: 933147 - RNA, 20 nt, Human
cgggcagcaccugacucuga

SEQ ID NO: 933148 - RNA, 24 nt, Human
cuaggcacagaggaggggaggggg

SEQ ID NO: 933149 - RNA, 23 nt, Human
cucauaacaaugccgcuuccucc

SEQ ID NO: 933150 - RNA, 19 nt, Human
cucccuccuaacccccucc

SEQ ID NO: 933151 - RNA, 21 nt, Human
cucccuccuaacccccuccca

SEQ ID NO: 933152 - RNA, 22 nt, Human
cucccuggacucgugaccuccg

SEQ ID NO: 933153 - RNA, 23 nt, Human
cucucugcaccucauuuucuuca

SEQ ID NO: 933154 - RNA, 23 nt, Human
cugcaccucauuuucuucaucug

SEQ ID NO: 933155 - RNA, 21 nt, Human
cuucugggauucuagccaugu

SEQ ID NO: 933156 - RNA, 18 nt, Human
gaccccuugguccacaga

SEQ ID NO: 933157 - RNA, 26 nt, Human
gcagggcaaagccucugcccuccccc

SEQ ID NO: 933158 - RNA, 23 nt, Human
gccucccuugcuuucccagagac

SEQ ID NO: 933159 - RNA, 23 nt, Human
ggaaugaccccuugguccacaga

SEQ ID NO: 933160 - RNA, 18 nt, Human
ggggaucgugaagcucug

SEQ ID NO: 933161 - RNA, 23 nt, Human
uaacaaugccgcuuccuccagga

SEQ ID NO: 933162 - RNA, 21 nt, Human
uaacccccucccacagauccc

SEQ ID NO: 933163 - RNA, 19 nt, Human
uacauacauugcuggugug

SEQ ID NO: 933164 - RNA, 20 nt, Human
uacauacauugcuggugugu

SEQ ID NO: 933165 - RNA, 20 nt, Human
ucccacagauccccugcagg

SEQ ID NO: 933166 - RNA, 20 nt, Human
ucccagagacagcuguggcu

SEQ ID NO: 933167 - RNA, 19 nt, Human
ucccagggucccucucugu

SEQ ID NO: 933168 - RNA, 24 nt, Human
uccccugcagggcaaagccucugc

SEQ ID NO: 933169 - RNA, 22 nt, Human
ucccuugcuuucccagagacag

SEQ ID NO: 933170 - RNA, 22 nt, Human
uccgccgggcagcaccugacuc

SEQ ID NO: 933171 - RNA, 20 nt, Human
ucugaccauucauccugggc

SEQ ID NO: 933172 - RNA, 20 nt, Human
ucugaccauucauccugggg

SEQ ID NO: 933173 - RNA, 23 nt, Human
ucugcucccuccuaacccccucc

SEQ ID NO: 933174 - RNA, 24 nt, Human
ucugguguaugcauggaggugggg

SEQ ID NO: 933175 - RNA, 19 nt, Human
ugauccccucccuggacuc

SEQ ID NO: 933176 - RNA, 20 nt, Human
ugcauggagguggggggugg

SEQ ID NO: 933177 - RNA, 22 nt, Human
ugcucaaauacauuuugcugau

SEQ ID NO: 933178 - RNA, 23 nt, Human
ugcucccuccuaacccccuccca

SEQ ID NO: 933179 - RNA, 18 nt, Human
uggagguggggggugggc

SEQ ID NO: 933180 - RNA, 18 nt, Human
ugguuguucagggauggg

SEQ ID NO: 933181 - RNA, 18 nt, Human
ugucucuuccuucaaggc

SEQ ID NO: 933182 - RNA, 18 nt, Human
uucccaggccaaguuccc

SEQ ID NO: 933183 - RNA, 21 nt, Human
uuccuucaaggcucauaacaa

SEQ ID NO: 933184 - RNA, 19 nt, Human
aaaaaaccccacacauaca

SEQ ID NO: 933185 - RNA, 21 nt, Human
aaaagccaaaucaaacucaaa

SEQ ID NO: 933186 - RNA, 19 nt, Human
aaacaagccgaaugccacc

SEQ ID NO: 933187 - RNA, 23 nt, Human
aaacaagccgaaugccaccaaag

SEQ ID NO: 933188 - RNA, 21 nt, Human
aaagacaaaaacauguccaca

SEQ ID NO: 933189 - RNA, 21 nt, Human
aaauggccauauuuucaaaaa

SEQ ID NO: 933190 - RNA, 24 nt, Human
aacacagaaacauaagaaagaccc

SEQ ID NO: 933191 - RNA, 26 nt, Human
aacagaccagagcauggcagugggca

SEQ ID NO: 933192 - RNA, 22 nt, Human
aaccaaacaaacaaaccuaaga

SEQ ID NO: 933193 - RNA, 20 nt, Human
aacuaaagaaaauaaaacaa

SEQ ID NO: 933194 - RNA, 24 nt, Human
aagaaaaaaguaaaaacccuacag

SEQ ID NO: 933195 - RNA, 21 nt, Human
aagaaacucaguuuauaaaac

SEQ ID NO: 933196 - RNA, 23 nt, Human
aagauggcaauguuugggugacc

SEQ ID NO: 933197 - RNA, 23 nt, Human
aagcacaauaauaauaacauuac

SEQ ID NO: 933198 - RNA, 22 nt, Human
aaguacuuuuguucaugagguu

SEQ ID NO: 933199 - RNA, 22 nt, Human
acaauaauaauaacauuacgaa

SEQ ID NO: 933200 - RNA, 19 nt, Human
acacaaauucuugauaccc

SEQ ID NO: 933201 - RNA, 21 nt, Human
acacaacauaucuaucuguac

SEQ ID NO: 933202 - RNA, 23 nt, Human
acacagaaacauaagaaagaccc

SEQ ID NO: 933203 - RNA, 24 nt, Human
acacaguucacuggaucaaacacu

SEQ ID NO: 933204 - RNA, 18 nt, Human
acacuguuuaauuuugga

SEQ ID NO: 933205 - RNA, 22 nt, Human
acagaaacauaagaaagacccc

SEQ ID NO: 933206 - RNA, 19 nt, Human
acauacuauuuacacagaa

SEQ ID NO: 933207 - RNA, 24 nt, Human
acauguaugucucaucacaucaca

SEQ ID NO: 933208 - RNA, 24 nt, Human
acuaaaaaaaccugaaaauuuuua

SEQ ID NO: 933209 - RNA, 28 nt, Human
acuaaaccuauuaacuagcacacacgcc

SEQ ID NO: 933210 - RNA, 21 nt, Human
agaaagacaaaagcauaaagg

SEQ ID NO: 933211 - RNA, 23 nt, Human
agaaagacccccauuaguauguu

SEQ ID NO: 933212 - RNA, 23 nt, Human
agaaauuauuuuguugccuggga

SEQ ID NO: 933213 - RNA, 22 nt, Human
agacaaaagcauaaaaaauaua

SEQ ID NO: 933214 - RNA, 20 nt, Human
agagauuugugagaagaugg

SEQ ID NO: 933215 - RNA, 22 nt, Human
agagcaaggaggcagaaagugc

SEQ ID NO: 933216 - RNA, 23 nt, Human
agagcaaggaggcagaaagugcc

SEQ ID NO: 933217 - RNA, 21 nt, Human
agcaaggaggcagaaagugcc

SEQ ID NO: 933218 - RNA, 23 nt, Human
agcaaggaggcagaaagugccaa

SEQ ID NO: 933219 - RNA, 21 nt, Human
aggaacccagggguccauugg

SEQ ID NO: 933220 - RNA, 24 nt, Human
aggaaguauaauuuuuugugacau

SEQ ID NO: 933221 - RNA, 23 nt, Human
aggcauguaaaccauucuacagg

SEQ ID NO: 933222 - RNA, 21 nt, Human
aguaaacccauuacaugcuaa

SEQ ID NO: 933223 - RNA, 20 nt, Human
auaguccccccugaaaggcu

SEQ ID NO: 933224 - RNA, 25 nt, Human
aucacaucacagaaagacccccauu

SEQ ID NO: 933225 - RNA, 20 nt, Human
auggauaaugauucuauaac

SEQ ID NO: 933226 - RNA, 24 nt, Human
caaaacaagccgaaugccaccaaa

SEQ ID NO: 933227 - RNA, 25 nt, Human
caaacaaacaaaccuaagauaaugu

SEQ ID NO: 933228 - RNA, 21 nt, Human
caaaccaaacaaacaaaccua

SEQ ID NO: 933229 - RNA, 22 nt, Human
caaaccaaacaaacaaaccuaa

SEQ ID NO: 933230 - RNA, 22 nt, Human
caagaaaaaaguaaaaacccua

SEQ ID NO: 933231 - RNA, 22 nt, Human
caagaugcuaagaaaacacugu

SEQ ID NO: 933232 - RNA, 23 nt, Human
caagccgaaugccaccaaauacc

SEQ ID NO: 933233 - RNA, 23 nt, Human
caauaggaaaagaagaaaucauu

SEQ ID NO: 933234 - RNA, 20 nt, Human
cacaguuucagaacagacca

SEQ ID NO: 933235 - RNA, 23 nt, Human
caccaaauaccuuauugcuaucu

SEQ ID NO: 933236 - RNA, 18 nt, Human
cagaccagagcauggcag

SEQ ID NO: 933237 - RNA, 23 nt, Human
cagcgggucccgcuccgcuacuc

SEQ ID NO: 933238 - RNA, 22 nt, Human
cauauauacacuuacauguaug

SEQ ID NO: 933239 - RNA, 20 nt, Human
caucacagaaagacccccau

SEQ ID NO: 933240 - RNA, 21 nt, Human
caucacaucacagaaagaccc

SEQ ID NO: 933241 - RNA, 18 nt, Human
cauguccacacaaaaggu

SEQ ID NO: 933242 - RNA, 18 nt, Human
ccaaaaacacagaaacau

SEQ ID NO: 933243 - RNA, 18 nt, Human
ccaaacaaacaaaccuaa

SEQ ID NO: 933244 - RNA, 20 nt, Human
ccaaacaaacaaaccuaaga

SEQ ID NO: 933245 - RNA, 19 nt, Human
ccaacagucuaaaaagcua

SEQ ID NO: 933246 - RNA, 22 nt, Human
ccagggcaggacucggggagga

SEQ ID NO: 933247 - RNA, 24 nt, Human
ccccucaguguuccuccuuccuuu

SEQ ID NO: 933248 - RNA, 18 nt, Human
cccucaguguuccuccuu

SEQ ID NO: 933249 - RNA, 19 nt, Human
ccuguucucucugcuccaa

SEQ ID NO: 933250 - RNA, 19 nt, Human
ccuucugccugccucauca

SEQ ID NO: 933251 - RNA, 19 nt, Human
cgaaugcuaagaaacucag

SEQ ID NO: 933252 - RNA, 18 nt, Human
cgguaagaguccaauaaa

SEQ ID NO: 933253 - RNA, 23 nt, Human
cucauacaauuuaggaaaacaga

SEQ ID NO: 933254 - RNA, 18 nt, Human
cucuaaaaagcagcauua

SEQ ID NO: 933255 - RNA, 24 nt, Human
cuggacccccuuacacuuacgcuc

SEQ ID NO: 933256 - RNA, 22 nt, Human
gaaaauacaaaaggaaguagca

SEQ ID NO: 933257 - RNA, 18 nt, Human
gaaaugacacaccugaaa

SEQ ID NO: 933258 - RNA, 21 nt, Human
gaggagucuguagggauggag

SEQ ID NO: 933259 - RNA, 19 nt, Human
gcaaaaaugagcauggaua

SEQ ID NO: 933260 - RNA, 22 nt, Human
gccugacauuaaagacaaaaac

SEQ ID NO: 933261 - RNA, 18 nt, Human
gcucacacacacuuuuuc

SEQ ID NO: 933262 - RNA, 18 nt, Human
ggaaaacagaggggaaaa

SEQ ID NO: 933263 - RNA, 19 nt, Human
ggacaaaugauguuauccc

SEQ ID NO: 933264 - RNA, 19 nt, Human
guuucuggcacgucccugg

SEQ ID NO: 933265 - RNA, 26 nt, Human
uaaaaaaaccugaaaauuuuuaaagg

SEQ ID NO: 933266 - RNA, 23 nt, Human
uaaaagccaaaucaaacucaaac

SEQ ID NO: 933267 - RNA, 19 nt, Human
uaaagaaaaaaaccccaca

SEQ ID NO: 933268 - RNA, 19 nt, Human
uaaaguugcaagaaaucac

SEQ ID NO: 933269 - RNA, 23 nt, Human
uaacagcccacacacucagauua

SEQ ID NO: 933270 - RNA, 28 nt, Human
uaacuaaacucuuaagggcuugaaaauu

SEQ ID NO: 933271 - RNA, 21 nt, Human
uaagaaaacacuguuuaauuu

SEQ ID NO: 933272 - RNA, 24 nt, Human
uaagaaacucaguuuauaaaacca

SEQ ID NO: 933273 - RNA, 21 nt, Human
uaagaaagacaaaagcauaaa

SEQ ID NO: 933274 - RNA, 18 nt, Human
uaagaaagacccuaccua

SEQ ID NO: 933275 - RNA, 18 nt, Human
uaagaaagguacuaaaua

SEQ ID NO: 933276 - RNA, 18 nt, Human
uacaugcuaacacaaaua

SEQ ID NO: 933277 - RNA, 23 nt, Human
uaccaaaaacacagaaacauaag

SEQ ID NO: 933278 - RNA, 19 nt, Human
uaggaaaagaagaaaucau

SEQ ID NO: 933279 - RNA, 23 nt, Human
uaggauuccagacacaacuacug

SEQ ID NO: 933280 - RNA, 20 nt, Human
uagguaaucuggcucuauga

SEQ ID NO: 933281 - RNA, 26 nt, Human
uauaacaagaaacaaaacuaaagaaa

SEQ ID NO: 933282 - RNA, 28 nt, Human
ucaaacaucaacauucauucugauacuu

SEQ ID NO: 933283 - RNA, 18 nt, Human
ucaagaaugacuaugugu

SEQ ID NO: 933284 - RNA, 19 nt, Human
ucaaucagguaagaaagac

SEQ ID NO: 933285 - RNA, 21 nt, Human
ucauuuaaaaauaaagaaaaa

SEQ ID NO: 933286 - RNA, 21 nt, Human
uccaagaaaaaaguaaaaacc

SEQ ID NO: 933287 - RNA, 18 nt, Human
uccaguuugcaaaaaucu

SEQ ID NO: 933288 - RNA, 18 nt, Human
uccauuggccauacuuug

SEQ ID NO: 933289 - RNA, 21 nt, Human
ucccgcuccgcuacucgcgga

SEQ ID NO: 933290 - RNA, 18 nt, Human
ucccuagguaaucuggcu

SEQ ID NO: 933291 - RNA, 25 nt, Human
ucuaaaacuuuuggucucuggaccc

SEQ ID NO: 933292 - RNA, 19 nt, Human
ucuaaucuaaagccugaca

SEQ ID NO: 933293 - RNA, 28 nt, Human
ucuauaacaagaaacaaaaccggggucc

SEQ ID NO: 933294 - RNA, 21 nt, Human
ucucucugcuccaagaaaaaa

SEQ ID NO: 933295 - RNA, 19 nt, Human
ucuggacccccuuacacuu

SEQ ID NO: 933296 - RNA, 19 nt, Human
ucuuaagggcuugaaaauu

SEQ ID NO: 933297 - RNA, 18 nt, Human
ugaaaaguuuggaagugg

SEQ ID NO: 933298 - RNA, 22 nt, Human
ugaaaggcucucaaggaaccca

SEQ ID NO: 933299 - RNA, 24 nt, Human
ugaacaacugucuuguuuucuuuu

SEQ ID NO: 933300 - RNA, 19 nt, Human
ugagaucuguguggggcua

SEQ ID NO: 933301 - RNA, 23 nt, Human
ugauauacaauagcagguucuug

SEQ ID NO: 933302 - RNA, 22 nt, Human
ugcaacacuuuuuuugagauag

SEQ ID NO: 933303 - RNA, 19 nt, Human
uggaagcagcaggaaauga

SEQ ID NO: 933304 - RNA, 20 nt, Human
uggcaagcaugugauagagg

SEQ ID NO: 933305 - RNA, 19 nt, Human
uggcagggguucucuaaca

SEQ ID NO: 933306 - RNA, 18 nt, Human
uguagggauggagcugga

SEQ ID NO: 933307 - RNA, 23 nt, Human
uuaaaccuguuugugcugugugg

SEQ ID NO: 933308 - RNA, 26 nt, Human
uuacauguaugucucaucacaucaca

SEQ ID NO: 933309 - RNA, 21 nt, Human
uuacugccugucauuaaucca

SEQ ID NO: 933310 - RNA, 24 nt, Human
uuagaaaacaugcuaaguacaucc

SEQ ID NO: 933311 - RNA, 25 nt, Human
uuagaguugaggagguugaggguca

SEQ ID NO: 933312 - RNA, 23 nt, Human
uuaugaacaacugucuuguuuuc

SEQ ID NO: 933313 - RNA, 23 nt, Human
uuauugcucacacacacuuuuuc

SEQ ID NO: 933314 - RNA, 19 nt, Human
uucaaaaacaaaaaaagag

SEQ ID NO: 933315 - RNA, 19 nt, Human
uugauccuuguaaagcccu

SEQ ID NO: 933316 - RNA, 21 nt, Human
uugguuccagggcaggacucg

SEQ ID NO: 933317 - RNA, 24 nt, Human
uuuauuuagcauaccaaaaacaca

SEQ ID NO: 933318 - RNA, 23 nt, Human
uuucuugugguuucuggcacguc

SEQ ID NO: 933319 - RNA, 23 nt, Human
uuugcaacacuuuuuuugagaua

SEQ ID NO: 933320 - RNA, 26 nt, Human
agugcacgaagacacgcgugugcaca

SEQ ID NO: 933321 - RNA, 20 nt, Human
ccagggcagccucgggccgg

SEQ ID NO: 933322 - RNA, 24 nt, Human
cccauacacaagauggcacagccg

SEQ ID NO: 933323 - RNA, 18 nt, Human
ccccacuccaaguccagc

SEQ ID NO: 933324 - RNA, 23 nt, Human
ccccccgcccuuucccuggguua

SEQ ID NO: 933325 - RNA, 26 nt, Human
ccccuacucccaccauuccccacucc

SEQ ID NO: 933326 - RNA, 19 nt, Human
ccucgggccggaugacccc

SEQ ID NO: 933327 - RNA, 22 nt, Human
gcagccucgggccggaugaccc

SEQ ID NO: 933328 - RNA, 21 nt, Human
gccaggacacgggaacacguu

SEQ ID NO: 933329 - RNA, 21 nt, Human
gcggaacugaccagugcccuc

SEQ ID NO: 933330 - RNA, 21 nt, Human
gcggggcucugcgugugcgua

SEQ ID NO: 933331 - RNA, 21 nt, Human
gggaacacguugccgaaaaca

SEQ ID NO: 933332 - RNA, 24 nt, Human
gggcagccucgggccggaugaccc

SEQ ID NO: 933333 - RNA, 22 nt, Human
uagcggcuuccggaauccgguu

SEQ ID NO: 933334 - RNA, 21 nt, Human
uccagcuucggcgucuaugag

SEQ ID NO: 933335 - RNA, 19 nt, Human
uccuggguccgaauuuccc

SEQ ID NO: 933336 - RNA, 23 nt, Human
ucugcccauacacaagauggcac

SEQ ID NO: 933337 - RNA, 18 nt, Human
ugaccccuacucccacca

SEQ ID NO: 933338 - RNA, 27 nt, Human
ugcacaggcggggcucugaccucaagg

SEQ ID NO: 933339 - RNA, 18 nt, Human
ugcgugugcguacccugu

SEQ ID NO: 933340 - RNA, 21 nt, Human
ugggcuccuggguccgaauuu

SEQ ID NO: 933341 - RNA, 24 nt, Human
ugggcuccuggguccgaauuuccc

SEQ ID NO: 933342 - RNA, 24 nt, Human
ugugcacaggcggggcucugcgug

SEQ ID NO: 933343 - RNA, 21 nt, Human
ugugggggcccgugaggggcc

SEQ ID NO: 933344 - RNA, 18 nt, Human
uguguauauccauacgcg

SEQ ID NO: 933345 - RNA, 22 nt, Human
uugcaaauaugccccccgcccu

SEQ ID NO: 933346 - RNA, 25 nt, Human
aaaagaaaaagaaaagcaagucucc

SEQ ID NO: 933347 - RNA, 26 nt, Human
aaaaggcaaaauggauggugggcacc

SEQ ID NO: 933348 - RNA, 26 nt, Human
aaagagaccauuccauaaccuguuac

SEQ ID NO: 933349 - RNA, 21 nt, Human
aauguuaacacugaaauuuac

SEQ ID NO: 933350 - RNA, 22 nt, Human
aauuuucuuuuuaaaaaauugc

SEQ ID NO: 933351 - RNA, 19 nt, Human
acaaacaugcaaauuugca

SEQ ID NO: 933352 - RNA, 21 nt, Human
acaguucuauagagacucuuc

SEQ ID NO: 933353 - RNA, 18 nt, Human
agagaccauuccauaacc

SEQ ID NO: 933354 - RNA, 25 nt, Human
agcuaugaggacaguucuauagaga

SEQ ID NO: 933355 - RNA, 24 nt, Human
caaaauggaugccugacuaauuaa

SEQ ID NO: 933356 - RNA, 21 nt, Human
caaugagaagaaaccagauau

SEQ ID NO: 933357 - RNA, 21 nt, Human
cacacagaaaagauacaaaaa

SEQ ID NO: 933358 - RNA, 24 nt, Human
cacaccaacauggcacauguauac

SEQ ID NO: 933359 - RNA, 24 nt, Human
cagaaugggggguccaauaauguc

SEQ ID NO: 933360 - RNA, 23 nt, Human
caugcaaauuugcagugcacgau

SEQ ID NO: 933361 - RNA, 21 nt, Human
ccacaauucaguugcuggauu

SEQ ID NO: 933362 - RNA, 18 nt, Human
cccccggggaggcacuac

SEQ ID NO: 933363 - RNA, 24 nt, Human
cgcuuauucuucuguccacuuuua

SEQ ID NO: 933364 - RNA, 20 nt, Human
cucauauauccugaacaaac

SEQ ID NO: 933365 - RNA, 22 nt, Human
cuccaugcaaagucuuacugug

SEQ ID NO: 933366 - RNA, 23 nt, Human
cuccaugcaaagucuuacugugc

SEQ ID NO: 933367 - RNA, 19 nt, Human
cugaaggacaggagaugaa

SEQ ID NO: 933368 - RNA, 24 nt, Human
cugcacguugugcucguguacccu

SEQ ID NO: 933369 - RNA, 21 nt, Human
cuggguucagcacaccaacau

SEQ ID NO: 933370 - RNA, 20 nt, Human
cuuggucgcuuuucucuccu

SEQ ID NO: 933371 - RNA, 18 nt, Human
gaguugcguaaaguggcc

SEQ ID NO: 933372 - RNA, 18 nt, Human
gauaauuuugugcugcag

SEQ ID NO: 933373 - RNA, 25 nt, Human
gauaucuaaagaacuuugcauucaa

SEQ ID NO: 933374 - RNA, 22 nt, Human
gcaaagucuuacugugcucuaa

SEQ ID NO: 933375 - RNA, 23 nt, Human
gcaaagucuuacugugcucuaaa

SEQ ID NO: 933376 - RNA, 19 nt, Human
gcuaccuaaauggaugacc

SEQ ID NO: 933377 - RNA, 24 nt, Human
gcucucugcaggcagcucuucaca

SEQ ID NO: 933378 - RNA, 19 nt, Human
guaaaacaaaauauugccc

SEQ ID NO: 933379 - RNA, 18 nt, Human
gugauaggauaaaagaga

SEQ ID NO: 933380 - RNA, 18 nt, Human
uaacaaaacugacauaug

SEQ ID NO: 933381 - RNA, 24 nt, Human
uaauauauauauuucacugagccu

SEQ ID NO: 933382 - RNA, 21 nt, Human
uacaacuguaacaaaacugac

SEQ ID NO: 933383 - RNA, 22 nt, Human
uacacacagaaaagauacaaaa

SEQ ID NO: 933384 - RNA, 23 nt, Human
uacauugaguauguagcuacaac

SEQ ID NO: 933385 - RNA, 18 nt, Human
uagaaggggguaauagua

SEQ ID NO: 933386 - RNA, 21 nt, Human
uaguccaaaacaaacaugcaa

SEQ ID NO: 933387 - RNA, 18 nt, Human
uauaaaaaaagaaaaaga

SEQ ID NO: 933388 - RNA, 31 nt, Human
uauaaaaaaagaaaaagaaaagcaagucucc

SEQ ID NO: 933389 - RNA, 20 nt, Human
uauauauuucacugagccuu

SEQ ID NO: 933390 - RNA, 24 nt, Human
uaugaagauuuguguuuuaaaguu

SEQ ID NO: 933391 - RNA, 19 nt, Human
uauguuuacacacagaaaa

SEQ ID NO: 933392 - RNA, 22 nt, Human
uccaauguuaacacugaaauuu

SEQ ID NO: 933393 - RNA, 19 nt, Human
uccacuuuuaucuuggucg

SEQ ID NO: 933394 - RNA, 24 nt, Human
ucgccagagucgauaauuuugugc

SEQ ID NO: 933395 - RNA, 22 nt, Human
ucucugcaggcagcucuucaca

SEQ ID NO: 933396 - RNA, 22 nt, Human
ugaaauaagagaaaaaugaagg

SEQ ID NO: 933397 - RNA, 19 nt, Human
ugaacaaacccagcuauga

SEQ ID NO: 933398 - RNA, 24 nt, Human
ugaacaaacccagcuaugaggaca

SEQ ID NO: 933399 - RNA, 22 nt, Human
ugaacgcaagaaaacugaaaaa

SEQ ID NO: 933400 - RNA, 20 nt, Human
ugaccacaauucaguugcug

SEQ ID NO: 933401 - RNA, 18 nt, Human
ugagaagaaaccagauau

SEQ ID NO: 933402 - RNA, 23 nt, Human
ugagcuugagaaacaaaaacugg

SEQ ID NO: 933403 - RNA, 18 nt, Human
ugaggaaaauuacaaaau

SEQ ID NO: 933404 - RNA, 22 nt, Human
ugccacauaaguaaaacaaaau

SEQ ID NO: 933405 - RNA, 21 nt, Human
uggaaugcugaggcaguccag

SEQ ID NO: 933406 - RNA, 18 nt, Human
uggaugaacgcaagaaaa

SEQ ID NO: 933407 - RNA, 18 nt, Human
uggcaaaaggacaaaguc

SEQ ID NO: 933408 - RNA, 19 nt, Human
uggcacauguauacauaug

SEQ ID NO: 933409 - RNA, 27 nt, Human
uguauacauauguaacuaaccugcacg

SEQ ID NO: 933410 - RNA, 23 nt, Human
uguuuuaaaguuuuuuagugggg

SEQ ID NO: 933411 - RNA, 21 nt, Human
uuaaaaaauugcaucucucau

SEQ ID NO: 933412 - RNA, 20 nt, Human
uuaguccaaaacaaacaugc

SEQ ID NO: 933413 - RNA, 19 nt, Human
uuguuugcuuuuguaaagu

SEQ ID NO: 933414 - RNA, 22 nt, Human
uuuugaggaaaauuacaaaaug

SEQ ID NO: 933415 - RNA, 20 nt, Human
aaaauguucacaaauuucuc

SEQ ID NO: 933416 - RNA, 22 nt, Human
aagcagcaggggguacacaauu

SEQ ID NO: 933417 - RNA, 20 nt, Human
acaacacaaagcaaaaacag

SEQ ID NO: 933418 - RNA, 24 nt, Human
acuuugagaauauauugugacagg

SEQ ID NO: 933419 - RNA, 21 nt, Human
aguggaauucuuuaaccacug

SEQ ID NO: 933420 - RNA, 20 nt, Human
cacaacacaaagcaaaaaca

SEQ ID NO: 933421 - RNA, 22 nt, Human
cacaacacaaagcaaaaacaga

SEQ ID NO: 933422 - RNA, 22 nt, Human
caguucaaauguaaaaaugauc

SEQ ID NO: 933423 - RNA, 24 nt, Human
ccaaauaucagaucacuuugagaa

SEQ ID NO: 933424 - RNA, 21 nt, Human
ccacaacacaaagcaaaaaca

SEQ ID NO: 933425 - RNA, 25 nt, Human
cucaacaaggauacuuguuuccaaa

SEQ ID NO: 933426 - RNA, 19 nt, Human
cugguccaugcuccccagc

SEQ ID NO: 933427 - RNA, 24 nt, Human
gcuuuacuacuccuauucaggccu

SEQ ID NO: 933428 - RNA, 20 nt, Human
uaccacaacacaaagcaaaa

SEQ ID NO: 933429 - RNA, 23 nt, Human
uaccacaacacaaagcaaaaaca

SEQ ID NO: 933430 - RNA, 24 nt, Human
uaccacaacacaaagcaaaaacag

SEQ ID NO: 933431 - RNA, 19 nt, Human
uagguaggggauagaugag

SEQ ID NO: 933432 - RNA, 18 nt, Human
uaugccacucaugagugu

SEQ ID NO: 933433 - RNA, 19 nt, Human
ugaaaauguucacaaauuu

SEQ ID NO: 933434 - RNA, 19 nt, Human
ugacaggcagauguccuug

SEQ ID NO: 933435 - RNA, 18 nt, Human
ugagaaauagguagggga

SEQ ID NO: 933436 - RNA, 23 nt, Human
ugcugagugcuaauagugggggu

SEQ ID NO: 933437 - RNA, 21 nt, Human
uguaaaaucagcauagaauga

SEQ ID NO: 933438 - RNA, 21 nt, Human
uucagacaccacugauucaau

SEQ ID NO: 933439 - RNA, 19 nt, Human
uuugagaaauagguagggg

SEQ ID NO: 933440 - RNA, 20 nt, Human
aaacaagacagaagagaacc

SEQ ID NO: 933441 - RNA, 20 nt, Human
accagggccugacuuggcag

SEQ ID NO: 933442 - RNA, 23 nt, Human
accagggccugacuuggcagugg

SEQ ID NO: 933443 - RNA, 23 nt, Human
agacagaagagaaccagggccug

SEQ ID NO: 933444 - RNA, 24 nt, Human
agacagaagagaaccagggccuga

SEQ ID NO: 933445 - RNA, 20 nt, Human
caaacaagacagaagagaac

SEQ ID NO: 933446 - RNA, 21 nt, Human
ccccaggcugcaugggcucag

SEQ ID NO: 933447 - RNA, 18 nt, Human
cccccugggggcggggcg

SEQ ID NO: 933448 - RNA, 24 nt, Human
ccgcggccugacgcccccucugcc

SEQ ID NO: 933449 - RNA, 19 nt, Human
ccuccucucgcgccgggcc

SEQ ID NO: 933450 - RNA, 23 nt, Human
ccucugccuccucucgcgccggg

SEQ ID NO: 933451 - RNA, 23 nt, Human
cgcggccugacgcccccucugcc

SEQ ID NO: 933452 - RNA, 23 nt, Human
cgggcccggggcgcccccugggg

SEQ ID NO: 933453 - RNA, 18 nt, Human
cucugccuccucucgcgc

SEQ ID NO: 933454 - RNA, 18 nt, Human
cugacgcccccucugccu

SEQ ID NO: 933455 - RNA, 18 nt, Human
cugcccucuacucccagc

SEQ ID NO: 933456 - RNA, 25 nt, Human
gcccggggcgcccccugggggcggg

SEQ ID NO: 933457 - RNA, 24 nt, Human
gcgcccccugggggcggggcgggg

SEQ ID NO: 933458 - RNA, 21 nt, Human
gcggggcggggugggagcucu

SEQ ID NO: 933459 - RNA, 23 nt, Human
ggcccggggcgcccccugggggc

SEQ ID NO: 933460 - RNA, 21 nt, Human
ugccuccucucgcgccgggcc

SEQ ID NO: 933461 - RNA, 23 nt, Human
ugggggcggggcggggugggagc

SEQ ID NO: 933462 - RNA, 24 nt, Human
ugggggcggggcggggugggagcu

SEQ ID NO: 933463 - RNA, 22 nt, Human
uuuuuuuuuuuugaagaaugcc

SEQ ID NO: 933464 - RNA, 24 nt, Human
aaagcgcuggggcccggggcgggg

SEQ ID NO: 933465 - RNA, 19 nt, Human
acaaaagcgcuggggcccg

SEQ ID NO: 933466 - RNA, 23 nt, Human
agcgcuggggcccggggcggggc

SEQ ID NO: 933467 - RNA, 24 nt, Human
aggaauaaauaagauaugugggca

SEQ ID NO: 933468 - RNA, 23 nt, Human
aggcggggccugaggccgucggg

SEQ ID NO: 933469 - RNA, 21 nt, Human
auacacaaaagcgcuggggcc

SEQ ID NO: 933470 - RNA, 19 nt, Human
ccccagagguagagguaga

SEQ ID NO: 933471 - RNA, 19 nt, Human
ccgcccgaggccgccgcag

SEQ ID NO: 933472 - RNA, 22 nt, Human
cgcccgaggccgccgcagaucc

SEQ ID NO: 933473 - RNA, 19 nt, Human
cgggggagcaggcagcagg

SEQ ID NO: 933474 - RNA, 22 nt, Human
cguccgggcccccagagguaga

SEQ ID NO: 933475 - RNA, 21 nt, Human
gaagucgugggggcggggaca

SEQ ID NO: 933476 - RNA, 18 nt, Human
gaggcggggccugaggcc

SEQ ID NO: 933477 - RNA, 23 nt, Human
gagguagagguagaugagccuau

SEQ ID NO: 933478 - RNA, 23 nt, Human
gcagcagccguccgggcccccag

SEQ ID NO: 933479 - RNA, 23 nt, Human
ggcccggggcggggccggaaguc

SEQ ID NO: 933480 - RNA, 18 nt, Human
ggccggaagucguggggg

SEQ ID NO: 933481 - RNA, 18 nt, Human
ggccugaugccuuggagg

SEQ ID NO: 933482 - RNA, 24 nt, Human
gggcggggccggaagucguggggg

SEQ ID NO: 933483 - RNA, 21 nt, Human
gggcggggccugaugccuugg

SEQ ID NO: 933484 - RNA, 22 nt, Human
gggcgggggagcaggcagcagg

SEQ ID NO: 933485 - RNA, 21 nt, Human
uagagguagaugagccuauuu

SEQ ID NO: 933486 - RNA, 20 nt, Human
uggaggaauaaauaagauau

SEQ ID NO: 933487 - RNA, 19 nt, Human
uggggcccggggcggggcc

SEQ ID NO: 933488 - RNA, 24 nt, Human
uuuuuuguuuuuuuuuuuauuuuu

SEQ ID NO: 933489 - RNA, 21 nt, Human
uuuuuuuuuuuuuuuguuuuu

SEQ ID NO: 933490 - RNA, 18 nt, Human
uuuuuuuuuuuuuuuuug

SEQ ID NO: 933491 - RNA, 22 nt, Human
aaagauccagcccucccaccuc

SEQ ID NO: 933492 - RNA, 24 nt, Human
aagugcacgccgggaccaggauuc

SEQ ID NO: 933493 - RNA, 21 nt, Human
accacuucgccucucgccccc

SEQ ID NO: 933494 - RNA, 23 nt, Human
accugaaguccuucagaagugca

SEQ ID NO: 933495 - RNA, 23 nt, Human
acgccgggaccaggauuccggga

SEQ ID NO: 933496 - RNA, 22 nt, Human
aguuauggagcuucccucaggg

SEQ ID NO: 933497 - RNA, 24 nt, Human
caaggggccgcgggguaugcuggg

SEQ ID NO: 933498 - RNA, 18 nt, Human
cacccaggacgcgagcag

SEQ ID NO: 933499 - RNA, 20 nt, Human
ccacuucgccucucgccccc

SEQ ID NO: 933500 - RNA, 23 nt, Human
cccaaagacuccgccuucccaag

SEQ ID NO: 933501 - RNA, 26 nt, Human
cccaaagacuccgccuucccaagagc

SEQ ID NO: 933502 - RNA, 25 nt, Human
cccaagagccccugcggccgggcgc

SEQ ID NO: 933503 - RNA, 18 nt, Human
ccccucaccccgggcgga

SEQ ID NO: 933504 - RNA, 19 nt, Human
cccgggcggaugcccaaag

SEQ ID NO: 933505 - RNA, 23 nt, Human
cccucccaccucauuuuuuacua

SEQ ID NO: 933506 - RNA, 24 nt, Human
cccucccaccucauuuuuuacuau

SEQ ID NO: 933507 - RNA, 19 nt, Human
ccucagaaccucagccaga

SEQ ID NO: 933508 - RNA, 28 nt, Human
cgacuccucccugccccacgaaugcccc

SEQ ID NO: 933509 - RNA, 19 nt, Human
cgggaagagaccgaucccc

SEQ ID NO: 933510 - RNA, 19 nt, Human
cuccgccuuggcugccucc

SEQ ID NO: 933511 - RNA, 21 nt, Human
cucggccuucggcgccugacc

SEQ ID NO: 933512 - RNA, 21 nt, Human
cugaaguccuucagaagugca

SEQ ID NO: 933513 - RNA, 19 nt, Human
cuuccgggugacugcuucc

SEQ ID NO: 933514 - RNA, 20 nt, Human
gaaguccuucagaagugcac

SEQ ID NO: 933515 - RNA, 22 nt, Human
gacggccgggcgcuccugaagc

SEQ ID NO: 933516 - RNA, 22 nt, Human
gcaggagccucauacucuuggu

SEQ ID NO: 933517 - RNA, 19 nt, Human
gcccaggagucagugcugg

SEQ ID NO: 933518 - RNA, 21 nt, Human
gcccccaggcuuccgggugac

SEQ ID NO: 933519 - RNA, 20 nt, Human
gccggacgcgaguugugaga

SEQ ID NO: 933520 - RNA, 21 nt, Human
gccgggaccaggauuccggga

SEQ ID NO: 933521 - RNA, 18 nt, Human
gcgggguaugcugggacc

SEQ ID NO: 933522 - RNA, 21 nt, Human
ggacaguaggacgcggggcac

SEQ ID NO: 933523 - RNA, 18 nt, Human
ggccggggccggagcggc

SEQ ID NO: 933524 - RNA, 26 nt, Human
gggccggggccggagcggcucuuuga

SEQ ID NO: 933525 - RNA, 21 nt, Human
ggucaggauggucagcuccag

SEQ ID NO: 933526 - RNA, 21 nt, Human
gguccccucaccccgggcgga

SEQ ID NO: 933527 - RNA, 18 nt, Human
gguucugccuccucgucc

SEQ ID NO: 933528 - RNA, 18 nt, Human
guccugcgccucuuucuc

SEQ ID NO: 933529 - RNA, 21 nt, Human
guccuucagaagugcacgccg

SEQ ID NO: 933530 - RNA, 21 nt, Human
guuauggagcuucccucaggg

SEQ ID NO: 933531 - RNA, 22 nt, Human
uacagcuuuaccucuagccuuu

SEQ ID NO: 933532 - RNA, 20 nt, Human
uacugcucgugcugcugcuc

SEQ ID NO: 933533 - RNA, 24 nt, Human
ucagaggcggcacccaggacgcga

SEQ ID NO: 933534 - RNA, 19 nt, Human
uccccgcgugcucucggcc

SEQ ID NO: 933535 - RNA, 19 nt, Human
uccccgcgugcucucggcc

SEQ ID NO: 933536 - RNA, 24 nt, Human
ucccugccccacgaaugccgggaa

SEQ ID NO: 933537 - RNA, 21 nt, Human
uccuacugcucgugcugcugc

SEQ ID NO: 933538 - RNA, 21 nt, Human
ucggguucugccuccucgucc

SEQ ID NO: 933539 - RNA, 24 nt, Human
ucggugcccucagaaccucagcca

SEQ ID NO: 933540 - RNA, 25 nt, Human
ucugccuccucguccugcgccucuu

SEQ ID NO: 933541 - RNA, 22 nt, Human
ugaccacuucgccucucgcccc

SEQ ID NO: 933542 - RNA, 18 nt, Human
uggcggcggcggcgacgg

SEQ ID NO: 933543 - RNA, 26 nt, Human
uugcuagguauaauuuuauuuuauau

SEQ ID NO: 933544 - RNA, 18 nt, Human
uuggagggaccugccccc

SEQ ID NO: 933545 - RNA, 22 nt, Human
uuuuuuuuuuuucagcagcuca

SEQ ID NO: 933546 - RNA, 21 nt, Human
gguauagagacugcagaggga

SEQ ID NO: 933547 - RNA, 18 nt, Human
aaacugaccaaugaggaa

SEQ ID NO: 933548 - RNA, 22 nt, Human
aacaugagcugccccuucccag

SEQ ID NO: 933549 - RNA, 23 nt, Human
aacugaccaaugaggaauguggc

SEQ ID NO: 933550 - RNA, 23 nt, Human
acagacgaacaaucaagaaacug

SEQ ID NO: 933551 - RNA, 19 nt, Human
accaaugaggaauguggcu

SEQ ID NO: 933552 - RNA, 24 nt, Human
agccaggaugaugguggugguggg

SEQ ID NO: 933553 - RNA, 19 nt, Human
agcugccccuucccagccc

SEQ ID NO: 933554 - RNA, 18 nt, Human
agcuucuaccuagagcag

SEQ ID NO: 933555 - RNA, 23 nt, Human
aggcaucagaacagcugagagca

SEQ ID NO: 933556 - RNA, 21 nt, Human
cagaaaccaugcuccacagca

SEQ ID NO: 933557 - RNA, 19 nt, Human
cagcacuggagcugggaca

SEQ ID NO: 933558 - RNA, 19 nt, Human
cagcugagagcagcuccau

SEQ ID NO: 933559 - RNA, 19 nt, Human
ccaacagacgaacaaucaa

SEQ ID NO: 933560 - RNA, 21 nt, Human
ccaggaugaugguggugguuu

SEQ ID NO: 933561 - RNA, 18 nt, Human
cccagcccccgucacccu

SEQ ID NO: 933562 - RNA, 21 nt, Human
cccagcccccgucacccucuc

SEQ ID NO: 933563 - RNA, 21 nt, Human
ccccuucccagcccccgucac

SEQ ID NO: 933564 - RNA, 23 nt, Human
ccuccacaacaggccuucuaccc

SEQ ID NO: 933565 - RNA, 21 nt, Human
ccuucccagcccccgucaccc

SEQ ID NO: 933566 - RNA, 23 nt, Human
cgaacaaucaagaaacugaccaa

SEQ ID NO: 933567 - RNA, 20 nt, Human
gagcugccccuucccagccc

SEQ ID NO: 933568 - RNA, 18 nt, Human
gcuuuuucuuucuaaugu

SEQ ID NO: 933569 - RNA, 19 nt, Human
ggagagcuucuaccuagag

SEQ ID NO: 933570 - RNA, 21 nt, Human
gggguccaguucuucaaaucu

SEQ ID NO: 933571 - RNA, 23 nt, Human
uagggagcaccucuccaacagac

SEQ ID NO: 933572 - RNA, 21 nt, Human
uaucaggacuuauuggaaggg

SEQ ID NO: 933573 - RNA, 22 nt, Human
uccaacagacgaacaaucaaga

SEQ ID NO: 933574 - RNA, 22 nt, Human
ucccagcccccgucacccucuc

SEQ ID NO: 933575 - RNA, 23 nt, Human
ucccagcccccgucacccucucc

SEQ ID NO: 933576 - RNA, 23 nt, Human
ugaaggcaucagaacagcugaga

SEQ ID NO: 933577 - RNA, 21 nt, Human
ugagcugccccuucccagccc

SEQ ID NO: 933578 - RNA, 21 nt, Human
ugaggucuuccugcugaaggc

SEQ ID NO: 933579 - RNA, 19 nt, Human
ugcaaugaggucuuccugc

SEQ ID NO: 933580 - RNA, 21 nt, Human
ugcaaugaggucuuccugcug

SEQ ID NO: 933581 - RNA, 18 nt, Human
uggaaggguuucccaguu

SEQ ID NO: 933582 - RNA, 20 nt, Human
uggcuucuuaaaaacagcag

SEQ ID NO: 933583 - RNA, 22 nt, Human
ugggagcccacaaguucagguc

SEQ ID NO: 933584 - RNA, 18 nt, Human
uggugguggugggaggca

SEQ ID NO: 933585 - RNA, 26 nt, Human
uguggcuucuuaaaaacagcagggag

SEQ ID NO: 933586 - RNA, 23 nt, Human
uuaguagacuucccaauaggcuu

SEQ ID NO: 933587 - RNA, 26 nt, Human
uuaguagacuucccaauaggcuuccc

SEQ ID NO: 933588 - RNA, 18 nt, Human
uuuuugggacccugaagu

SEQ ID NO: 933589 - RNA, 19 nt, Human
uuuuuuuuuuuugggaccc

SEQ ID NO: 933590 - RNA, 26 nt, Human
aaaaaaaaaaaaaaaaaugcagggag

SEQ ID NO: 933591 - RNA, 20 nt, Human
aaaugaguucucccuccccu

SEQ ID NO: 933592 - RNA, 23 nt, Human
aagagcuuugcuuuucuccuuag

SEQ ID NO: 933593 - RNA, 26 nt, Human
acacacacaucccucaucacaccucu

SEQ ID NO: 933594 - RNA, 20 nt, Human
cacaccucucucucaaaaaa

SEQ ID NO: 933595 - RNA, 26 nt, Human
cccuguacauguuucuauugaauccu

SEQ ID NO: 933596 - RNA, 18 nt, Human
cucaaaaaaaaaaaaaaa

SEQ ID NO: 933597 - RNA, 18 nt, Human
cucucucaaaaaaaaaaa

SEQ ID NO: 933598 - RNA, 23 nt, Human
gauuaugaggaaaauaagaaaga

SEQ ID NO: 933599 - RNA, 18 nt, Human
gcagggagauguguccug

SEQ ID NO: 933600 - RNA, 23 nt, Human
uaauggucuacaauaagcugcac

SEQ ID NO: 933601 - RNA, 22 nt, Human
uacccuguacauguuucuauug

SEQ ID NO: 933602 - RNA, 23 nt, Human
ucccucaucacaccucucucuca

SEQ ID NO: 933603 - RNA, 25 nt, Human
ucccucaucacaccucucucucaaa

SEQ ID NO: 933604 - RNA, 25 nt, Human
ucucucaaaaaaaaaaaaaaaaaaa

SEQ ID NO: 933605 - RNA, 23 nt, Human
ucucucucaaaaaaaaaaaaaaa

SEQ ID NO: 933606 - RNA, 20 nt, Human
ugagcuggaaauccucgugc

SEQ ID NO: 933607 - RNA, 20 nt, Human
ugggaaagcuaaaaugggua

SEQ ID NO: 933608 - RNA, 25 nt, Human
uguaaaaugaguucucccuccccuc

SEQ ID NO: 933609 - RNA, 18 nt, Human
cacagugggcuuaucuuu

SEQ ID NO: 933610 - RNA, 19 nt, Human
cagccucugaaugucagcc

SEQ ID NO: 933611 - RNA, 26 nt, Human
caggucucccccaucauugaugccuc

SEQ ID NO: 933612 - RNA, 20 nt, Human
cauugggguugugcagacug

SEQ ID NO: 933613 - RNA, 18 nt, Human
cucgguucauggcaauga

SEQ ID NO: 933614 - RNA, 26 nt, Human
gcaaugaaccucuccacagugggcuu

SEQ ID NO: 933615 - RNA, 22 nt, Human
gcuacuucugcuaucucauccu

SEQ ID NO: 933616 - RNA, 25 nt, Human
ucagccagcagcuccuguuuucucc

SEQ ID NO: 933617 - RNA, 25 nt, Human
ucccccaucauugaugccucgguuc

SEQ ID NO: 933618 - RNA, 23 nt, Human
uccuucagccucugaaugucagc

SEQ ID NO: 933619 - RNA, 24 nt, Human
ugggcuuaucuuugacauuggggu

SEQ ID NO: 933620 - RNA, 18 nt, Human
uuccuuuccucuguggau

SEQ ID NO: 933621 - RNA, 23 nt, Human
uuuucaauuucauuagcuacuuc

SEQ ID NO: 933622 - RNA, 19 nt, Human
ccccgggagccaccgccgc

SEQ ID NO: 933623 - RNA, 23 nt, Human
ccccgggagccaccgccgccucc

SEQ ID NO: 933624 - RNA, 18 nt, Human
cgcggggaauccggggcg

SEQ ID NO: 933625 - RNA, 19 nt, Human
cgcucaaacgccccgggag

SEQ ID NO: 933626 - RNA, 19 nt, Human
cucaaacgccccgggagcc

SEQ ID NO: 933627 - RNA, 22 nt, Human
cucagcgcugaaaagacucuuc

SEQ ID NO: 933628 - RNA, 20 nt, Human
gaaaagacucuuccuucgga

SEQ ID NO: 933629 - RNA, 18 nt, Human
ggcucgggugagcccgcu

SEQ ID NO: 933630 - RNA, 23 nt, Human
ucagcgcugaaaagacucuuccu

SEQ ID NO: 933631 - RNA, 25 nt, Human
uccucagcgccaguccucagcgcug

SEQ ID NO: 933632 - RNA, 21 nt, Human
uccucagcgcugaaaagacuc

SEQ ID NO: 933633 - RNA, 18 nt, Human
ugaaaagacucuuccuuc

SEQ ID NO: 933634 - RNA, 21 nt, Human
ugaaaagacucuuccuucgga

SEQ ID NO: 933635 - RNA, 22 nt, Human
ugaaaagacucuuccuucggaa

SEQ ID NO: 933636 - RNA, 25 nt, Human
aaaaaaaaaaaaaaaaaacggaaga

SEQ ID NO: 933637 - RNA, 21 nt, Human
aaaaaaaaaaaaaacggaaug

SEQ ID NO: 933638 - RNA, 18 nt, Human
aaaaaaacggaaugaugg

SEQ ID NO: 933639 - RNA, 18 nt, Human
aagcccgggaggcggcga

SEQ ID NO: 933640 - RNA, 21 nt, Human
accaucuucgucugagcuugu

SEQ ID NO: 933641 - RNA, 22 nt, Human
caaugagucuguaucaagaucu

SEQ ID NO: 933642 - RNA, 19 nt, Human
ccacuuguauucucuuuuc

SEQ ID NO: 933643 - RNA, 25 nt, Human
cgaggagaugcggcggcgcggggcg

SEQ ID NO: 933644 - RNA, 20 nt, Human
gaaucugaacauucuuccau

SEQ ID NO: 933645 - RNA, 24 nt, Human
gagaccggggguccgaagcccggg

SEQ ID NO: 933646 - RNA, 20 nt, Human
gaggagaugcggcggcgcgg

SEQ ID NO: 933647 - RNA, 20 nt, Human
gaugaauaauguacaaccac

SEQ ID NO: 933648 - RNA, 23 nt, Human
ugcggcggcgcggggcggccgcg

SEQ ID NO: 933649 - RNA, 20 nt, Human
uuaaaaaaaaaaaaaaaaaa

SEQ ID NO: 933650 - RNA, 31 nt, Human
uuaagcuugguuaaaaaaaaaaaaaaaaaaa

SEQ ID NO: 933651 - RNA, 18 nt, Human
uucaucucuuguuugcuc

SEQ ID NO: 933652 - RNA, 19 nt, Human
uugguuaaaaaaaaaaaaa

SEQ ID NO: 933653 - RNA, 26 nt, Human
uuuuuaaaaaaaacuuuauuuuaaaa

SEQ ID NO: 933654 - RNA, 28 nt, Human
uuuuuuuaaaaaaaacuuuauuuuaaaa

SEQ ID NO: 933655 - RNA, 21 nt, Human
aaaaaaaaccauacagagcac

SEQ ID NO: 933656 - RNA, 18 nt, Human
aaaacccacaaacaguga

SEQ ID NO: 933657 - RNA, 22 nt, Human
aaacagugaaaagacagucugg

SEQ ID NO: 933658 - RNA, 18 nt, Human
aaaugacccuaauauuca

SEQ ID NO: 933659 - RNA, 22 nt, Human
aacaaagggauuuucucccuca

SEQ ID NO: 933660 - RNA, 18 nt, Human
aagcccgggaggcggcga

SEQ ID NO: 933661 - RNA, 20 nt, Human
acaaacagugaaaagacagu

SEQ ID NO: 933662 - RNA, 24 nt, Human
acacuaauugaaaauaugcuacaa

SEQ ID NO: 933663 - RNA, 21 nt, Human
acagugaaaagacagucuggu

SEQ ID NO: 933664 - RNA, 22 nt, Human
acuaguguuuguauuuuuggaa

SEQ ID NO: 933665 - RNA, 18 nt, Human
acuaucaauuacacauua

SEQ ID NO: 933666 - RNA, 22 nt, Human
agaaaauaaaaacaauauagcc

SEQ ID NO: 933667 - RNA, 23 nt, Human
agaaaugcuauccuuuaguuaac

SEQ ID NO: 933668 - RNA, 18 nt, Human
agcaucaugauuuuuucu

SEQ ID NO: 933669 - RNA, 21 nt, Human
agccacaaaacuaaauuaccu

SEQ ID NO: 933670 - RNA, 25 nt, Human
auaccaaaaaaaaccauacagagca

SEQ ID NO: 933671 - RNA, 20 nt, Human
augcggcggcgcggggaugc

SEQ ID NO: 933672 - RNA, 24 nt, Human
cacacacuaauugaaaauaugcua

SEQ ID NO: 933673 - RNA, 19 nt, Human
caccagcugccgcagaggc

SEQ ID NO: 933674 - RNA, 19 nt, Human
cacgcaagccaccugcgcc

SEQ ID NO: 933675 - RNA, 21 nt, Human
cacgcaagccaccugcgccac

SEQ ID NO: 933676 - RNA, 23 nt, Human
cagagcacacauuguuccaaaga

SEQ ID NO: 933677 - RNA, 23 nt, Human
cauaccaaaaaaaaccauacaga

SEQ ID NO: 933678 - RNA, 23 nt, Human
ccaaaaaaaaccauacagagcac

SEQ ID NO: 933679 - RNA, 24 nt, Human
ccaaaaaaaaccauacagagcaca

SEQ ID NO: 933680 - RNA, 25 nt, Human
ccaaaaaaaaccauacagagcacac

SEQ ID NO: 933681 - RNA, 24 nt, Human
ccaaagaagcuggauaauguagca

SEQ ID NO: 933682 - RNA, 25 nt, Human
cccacaguauuugggaaaagaggca

SEQ ID NO: 933683 - RNA, 18 nt, Human
ccgccgcugccgccgccg

SEQ ID NO: 933684 - RNA, 22 nt, Human
ccgcugccgccgccguagcugc

SEQ ID NO: 933685 - RNA, 24 nt, Human
ccuaagacuucacugaaugcccuu

SEQ ID NO: 933686 - RNA, 19 nt, Human
ccucuuuaaaagcaaaaau

SEQ ID NO: 933687 - RNA, 25 nt, Human
ccugcgccaccagcugccgcagagg

SEQ ID NO: 933688 - RNA, 21 nt, Human
ccugcugccggggccgcgggc

SEQ ID NO: 933689 - RNA, 21 nt, Human
cgccgcugccgccgccguagc

SEQ ID NO: 933690 - RNA, 18 nt, Human
cggggaugcgggcggcgg

SEQ ID NO: 933691 - RNA, 22 nt, Human
cggggaugcgggcggcggacgc

SEQ ID NO: 933692 - RNA, 23 nt, Human
cguccacgcaagccaccugcgcc

SEQ ID NO: 933693 - RNA, 21 nt, Human
cugccggggccgcgggcgccg

SEQ ID NO: 933694 - RNA, 21 nt, Human
gagaaguauccuacuugcuga

SEQ ID NO: 933695 - RNA, 24 nt, Human
gagaccggggguccgaagcccggg

SEQ ID NO: 933696 - RNA, 20 nt, Human
gaggagaugcggcggcgcgg

SEQ ID NO: 933697 - RNA, 24 nt, Human
gauucauuccuauauauacccagu

SEQ ID NO: 933698 - RNA, 22 nt, Human
gcccgcgggcgggggaggaugc

SEQ ID NO: 933699 - RNA, 19 nt, Human
ggcggcgcggggaugcggg

SEQ ID NO: 933700 - RNA, 19 nt, Human
gggcccagcuaccgggccc

SEQ ID NO: 933701 - RNA, 24 nt, Human
uaacuagaauaaaucuaaguaagu

SEQ ID NO: 933702 - RNA, 22 nt, Human
uagaauucucaguucaauguca

SEQ ID NO: 933703 - RNA, 24 nt, Human
uaguguuuguauuuuuggaaucua

SEQ ID NO: 933704 - RNA, 21 nt, Human
uauuugggaaaagaggcaagg

SEQ ID NO: 933705 - RNA, 21 nt, Human
ucauaccaaaaaaaaccauac

SEQ ID NO: 933706 - RNA, 19 nt, Human
uccacgcaagccaccugcg

SEQ ID NO: 933707 - RNA, 22 nt, Human
uccacgcaagccaccugcgcca

SEQ ID NO: 933708 - RNA, 20 nt, Human
uccacgcaagccaccugcgg

SEQ ID NO: 933709 - RNA, 30 nt, Human
ucgcaaccgcgccgccgcugccgccgccgg

SEQ ID NO: 933710 - RNA, 25 nt, Human
ucuagaaaauaaaaacaauauagcc

SEQ ID NO: 933711 - RNA, 24 nt, Human
ucucaaaacggugauuccuaguuc

SEQ ID NO: 933712 - RNA, 23 nt, Human
ugaaaacaguuaucucagagggu

SEQ ID NO: 933713 - RNA, 23 nt, Human
ugaaaagacagucugguaaaucc

SEQ ID NO: 933714 - RNA, 25 nt, Human
ugcuacaaccaugucuggaaaagca

SEQ ID NO: 933715 - RNA, 24 nt, Human
ugguaaauccaagguuuguaaaaa

SEQ ID NO: 933716 - RNA, 23 nt, Human
uuaacuuuugauaaaaagggagu

SEQ ID NO: 933717 - RNA, 26 nt, Human
uuaauacugcacaaguuacacuuagc

SEQ ID NO: 933718 - RNA, 23 nt, Human
uuccauuauaagaccucuuuaaa

SEQ ID NO: 933719 - RNA, 21 nt, Human
uugaaaauaugcuacaaccau

SEQ ID NO: 933720 - RNA, 25 nt, Human
uuuaaaagcaaaaaugcaauucugu

SEQ ID NO: 933721 - RNA, 23 nt, Human
uuuaacauuuucuaaauggauuu

SEQ ID NO: 933722 - RNA, 18 nt, Human
uuuaacccuaaagccaga

SEQ ID NO: 933723 - RNA, 18 nt, Human
uuuuuuuuuuuuuuuuug

SEQ ID NO: 933724 - RNA, 22 nt, Human
uuuuuuuuuuuuuuuuugauag

SEQ ID NO: 933725 - RNA, 22 nt, Human
aaaaaaaacaugacucuuccca

SEQ ID NO: 933726 - RNA, 30 nt, Human
aaaaaaacaugacucuucccacccuccacu

SEQ ID NO: 933727 - RNA, 24 nt, Human
aaaaacaugacucuucccacccuc

SEQ ID NO: 933728 - RNA, 21 nt, Human
aagggagacagaaaaacaaaa

SEQ ID NO: 933729 - RNA, 21 nt, Human
aaggggacagguuggaaggga

SEQ ID NO: 933730 - RNA, 21 nt, Human
aaugagggugaggaugagcac

SEQ ID NO: 933731 - RNA, 25 nt, Human
acucuucccacccuccaccaccccu

SEQ ID NO: 933732 - RNA, 19 nt, Human
agaaaaacaaaaucaaaga

SEQ ID NO: 933733 - RNA, 22 nt, Human
agaaaaacaaaaucaaagagga

SEQ ID NO: 933734 - RNA, 21 nt, Human
agaaaggaggaggggcaaagc

SEQ ID NO: 933735 - RNA, 19 nt, Human
agacagaaaaacaaaauca

SEQ ID NO: 933736 - RNA, 18 nt, Human
agagagguugggacccga

SEQ ID NO: 933737 - RNA, 22 nt, Human
agagagguugggacccgagucc

SEQ ID NO: 933738 - RNA, 20 nt, Human
agaggggcaaggagaccuuu

SEQ ID NO: 933739 - RNA, 22 nt, Human
agcccccacucccgccccggcc

SEQ ID NO: 933740 - RNA, 22 nt, Human
aggaaggugggugaaaagagag

SEQ ID NO: 933741 - RNA, 23 nt, Human
aggaaggugggugaaaagagagg

SEQ ID NO: 933742 - RNA, 24 nt, Human
aggaaggugggugaaaagagagga

SEQ ID NO: 933743 - RNA, 25 nt, Human
aggaaggugggugaaaagagaggac

SEQ ID NO: 933744 - RNA, 20 nt, Human
aggagaaaaaaaacaugacu

SEQ ID NO: 933745 - RNA, 22 nt, Human
auuuuauuuguguuugucuuuu

SEQ ID NO: 933746 - RNA, 19 nt, Human
cacagcugaggaggcugcc

SEQ ID NO: 933747 - RNA, 19 nt, Human
caccucuuccucggcuuuc

SEQ ID NO: 933748 - RNA, 23 nt, Human
cagaaaaacaaaaucaaagagga

SEQ ID NO: 933749 - RNA, 20 nt, Human
cagcccccacucccgccccg

SEQ ID NO: 933750 - RNA, 18 nt, Human
cagcgccuccgcuuccgc

SEQ ID NO: 933751 - RNA, 19 nt, Human
cagcgccuccgcuuccgcc

SEQ ID NO: 933752 - RNA, 23 nt, Human
ccaccccgaggacguccggccgc

SEQ ID NO: 933753 - RNA, 24 nt, Human
cccacccuccaccaccccuggccc

SEQ ID NO: 933754 - RNA, 26 nt, Human
cccacccuccaccaccccuggcccca

SEQ ID NO: 933755 - RNA, 22 nt, Human
ccccagcgccuccgcuuccgcc

SEQ ID NO: 933756 - RNA, 24 nt, Human
ccccagcgccuccgcuuccgccug

SEQ ID NO: 933757 - RNA, 23 nt, Human
cccccacucccgccccggccucc

SEQ ID NO: 933758 - RNA, 24 nt, Human
ccccggccuccucccucucccuuc

SEQ ID NO: 933759 - RNA, 18 nt, Human
ccccuggaggggaggggg

SEQ ID NO: 933760 - RNA, 18 nt, Human
ccccuugccaccucuucc

SEQ ID NO: 933761 - RNA, 18 nt, Human
cccgcgcccucucugccu

SEQ ID NO: 933762 - RNA, 20 nt, Human
cccucucccuucucucuucc

SEQ ID NO: 933763 - RNA, 20 nt, Human
cccucucccuucucucuucc

SEQ ID NO: 933764 - RNA, 20 nt, Human
cccuggaggggaggggguga

SEQ ID NO: 933765 - RNA, 18 nt, Human
cccugggggcccugagag

SEQ ID NO: 933766 - RNA, 23 nt, Human
ccgagggugacagcccccacucc

SEQ ID NO: 933767 - RNA, 22 nt, Human
ccgcuuccgccugggguccucc

SEQ ID NO: 933768 - RNA, 22 nt, Human
ccgucucagcucgugccgaauu

SEQ ID NO: 933769 - RNA, 22 nt, Human
ccuccaccaccccuggccccag

SEQ ID NO: 933770 - RNA, 21 nt, Human
ccucggcuuucgcccuuccug

SEQ ID NO: 933771 - RNA, 18 nt, Human
ccucuccucuucuccguc

SEQ ID NO: 933772 - RNA, 18 nt, Human
ccugaggggcgggcccgg

SEQ ID NO: 933773 - RNA, 21 nt, Human
ccugggggcccugagaguggg

SEQ ID NO: 933774 - RNA, 23 nt, Human
cgagucccggauaucuggacuau

SEQ ID NO: 933775 - RNA, 21 nt, Human
cgcacggccccucucacgccg

SEQ ID NO: 933776 - RNA, 20 nt, Human
cgcccucucugccucuccuc

SEQ ID NO: 933777 - RNA, 18 nt, Human
cgccugggguccuccagc

SEQ ID NO: 933778 - RNA, 24 nt, Human
cggccaccgacugggggcccaccc

SEQ ID NO: 933779 - RNA, 25 nt, Human
cggccccucucacgccgggguccga

SEQ ID NO: 933780 - RNA, 22 nt, Human
cuccacagcugaggaggcugcc

SEQ ID NO: 933781 - RNA, 18 nt, Human
cuccccuggaggggaggg

SEQ ID NO: 933782 - RNA, 21 nt, Human
cugacgguccccgcgcccucu

SEQ ID NO: 933783 - RNA, 25 nt, Human
cuuccgagaauagcugaacgauugu

SEQ ID NO: 933784 - RNA, 22 nt, Human
cuuuccccuugccaccucuucc

SEQ ID NO: 933785 - RNA, 21 nt, Human
gaauagcugaacgauuguagc

SEQ ID NO: 933786 - RNA, 20 nt, Human
gaccucgcgguccaguccuc

SEQ ID NO: 933787 - RNA, 21 nt, Human
gagaauagcugaacgauugua

SEQ ID NO: 933788 - RNA, 22 nt, Human
gagacagaaaaacaaaaucaaa

SEQ ID NO: 933789 - RNA, 22 nt, Human
gaggaggggcaaagccuggaaa

SEQ ID NO: 933790 - RNA, 23 nt, Human
gcacacacagcgggcgaacagca

SEQ ID NO: 933791 - RNA, 21 nt, Human
gccaggagaacacagagugac

SEQ ID NO: 933792 - RNA, 22 nt, Human
gccccagcgccuccgcuuccgc

SEQ ID NO: 933793 - RNA, 20 nt, Human
gcccucucugccucuccucu

SEQ ID NO: 933794 - RNA, 21 nt, Human
gccuccucccucucccuucuc

SEQ ID NO: 933795 - RNA, 20 nt, Human
gcggcucugccaagcaggga

SEQ ID NO: 933796 - RNA, 21 nt, Human
ggagacagaaaaacaaaauca

SEQ ID NO: 933797 - RNA, 21 nt, Human
ggccaccgacugggggcccac

SEQ ID NO: 933798 - RNA, 18 nt, Human
gggaaugaaccccggaua

SEQ ID NO: 933799 - RNA, 18 nt, Human
gggagacagaaaaacaaa

SEQ ID NO: 933800 - RNA, 21 nt, Human
gggcaaagccuggaaauuugg

SEQ ID NO: 933801 - RNA, 18 nt, Human
ggggagggggugacaacc

SEQ ID NO: 933802 - RNA, 20 nt, Human
ggggccuggccugguagggg

SEQ ID NO: 933803 - RNA, 21 nt, Human
ggggggaaggggacagguugg

SEQ ID NO: 933804 - RNA, 22 nt, Human
ggguaucugagaaaggaggagg

SEQ ID NO: 933805 - RNA, 21 nt, Human
gguggggggaaggggacaggu

SEQ ID NO: 933806 - RNA, 23 nt, Human
gucaaugagggugaggaugagca

SEQ ID NO: 933807 - RNA, 18 nt, Human
uagagguccgaagggcug

SEQ ID NO: 933808 - RNA, 21 nt, Human
uaucugaacgggauggagacu

SEQ ID NO: 933809 - RNA, 19 nt, Human
uaucuggacuaugaggacu

SEQ ID NO: 933810 - RNA, 23 nt, Human
uccaccaccccuggccccaggcc

SEQ ID NO: 933811 - RNA, 19 nt, Human
uccagcggcucugccaagc

SEQ ID NO: 933812 - RNA, 18 nt, Human
ucccacccuccaccaccc

SEQ ID NO: 933813 - RNA, 20 nt, Human
uccccgcgcccucucugccu

SEQ ID NO: 933814 - RNA, 20 nt, Human
uccccuugccaccucuuccu

SEQ ID NO: 933815 - RNA, 20 nt, Human
ucccuucucucuuccgagaa

SEQ ID NO: 933816 - RNA, 20 nt, Human
uccgaagggcugggccuggg

SEQ ID NO: 933817 - RNA, 18 nt, Human
uccuccagcggcucugcc

SEQ ID NO: 933818 - RNA, 18 nt, Human
uccucccucucccuucuc

SEQ ID NO: 933819 - RNA, 22 nt, Human
uccucggcuuucgcccuuccug

SEQ ID NO: 933820 - RNA, 21 nt, Human
ucgagggcgacagcugccgaa

SEQ ID NO: 933821 - RNA, 21 nt, Human
ucuuuuucuuuuuuugguggg

SEQ ID NO: 933822 - RNA, 18 nt, Human
ugacgguccccgcgcccu

SEQ ID NO: 933823 - RNA, 21 nt, Human
ugacugcuggacuccacagcu

SEQ ID NO: 933824 - RNA, 18 nt, Human
ugagaaaggaggaggggc

SEQ ID NO: 933825 - RNA, 19 nt, Human
ugagcaaacugaggaaggu

SEQ ID NO: 933826 - RNA, 23 nt, Human
ugaggaaggugggugaaaagaga

SEQ ID NO: 933827 - RNA, 24 nt, Human
ugaggacuguuacccggguaucug

SEQ ID NO: 933828 - RNA, 23 nt, Human
ugaggaggcugccugucuagagg

SEQ ID NO: 933829 - RNA, 21 nt, Human
ugggggcccugagaguggggc

SEQ ID NO: 933830 - RNA, 21 nt, Human
uggggucugaaccccgaauau

SEQ ID NO: 933831 - RNA, 22 nt, Human
ugucuuuuucuuuuuuuggugg

SEQ ID NO: 933832 - RNA, 26 nt, Human
uucccacccuccaccaccccuggccc

SEQ ID NO: 933833 - RNA, 23 nt, Human
uuccggauuucugauuguggggu

SEQ ID NO: 933834 - RNA, 18 nt, Human
uuuguguuugucuuuuuc

SEQ ID NO: 933835 - RNA, 22 nt, Human
uuuuuuuuuuuuuuuuucacag

SEQ ID NO: 933836 - RNA, 24 nt, Human
uuuuuuuuuuuuuuuuucacaguu

SEQ ID NO: 933837 - RNA, 20 nt, Human
accccgaucucucuccucug

SEQ ID NO: 933838 - RNA, 21 nt, Human
acuguaggaucuccagggcca

SEQ ID NO: 933839 - RNA, 22 nt, Human
acuguaggaucuccagggccau

SEQ ID NO: 933840 - RNA, 19 nt, Human
agccagggaggagggcagc

SEQ ID NO: 933841 - RNA, 23 nt, Human
aggaggggaggggcguccugggu

SEQ ID NO: 933842 - RNA, 18 nt, Human
agggcagccaggaggcag

SEQ ID NO: 933843 - RNA, 23 nt, Human
cagggccaucaaagcccccucgu

SEQ ID NO: 933844 - RNA, 24 nt, Human
ccaccuuuccuccgucuccgaccu

SEQ ID NO: 933845 - RNA, 21 nt, Human
ccccucgugggauagggagac

SEQ ID NO: 933846 - RNA, 24 nt, Human
ccgaucucucuccucugugccucu

SEQ ID NO: 933847 - RNA, 19 nt, Human
cucgugggauagggagacu

SEQ ID NO: 933848 - RNA, 23 nt, Human
gaggaggggaggggcguccuggg

SEQ ID NO: 933849 - RNA, 19 nt, Human
gaggggcguccuggguccu

SEQ ID NO: 933850 - RNA, 27 nt, Human
gcugccaccuuuccuccgucuccgacc

SEQ ID NO: 933851 - RNA, 21 nt, Human
gggaggagggcagccaggagg

SEQ ID NO: 933852 - RNA, 21 nt, Human
ggguccugcagcuguagucuu

SEQ ID NO: 933853 - RNA, 22 nt, Human
gugggauagggagacuauuuac

SEQ ID NO: 933854 - RNA, 18 nt, Human
uacuguaggaucuccagg

SEQ ID NO: 933855 - RNA, 19 nt, Human
uccuggguccugcagcugu

SEQ ID NO: 933856 - RNA, 18 nt, Human
ucucuccucugugccucu

SEQ ID NO: 933857 - RNA, 21 nt, Human
ugaggaggggaggggcguccu

SEQ ID NO: 933858 - RNA, 24 nt, Human
ugcccgaaugaggaggggaggggc

SEQ ID NO: 933859 - RNA, 21 nt, Human
uggguccugcagcuguagucu

SEQ ID NO: 933860 - RNA, 20 nt, Human
uuuuuuuuuuuuuugggcgg

SEQ ID NO: 933861 - RNA, 23 nt, Human
uuuuuuuuuuuuuuuuuuuuggg

SEQ ID NO: 933862 - RNA, 18 nt, Human
aaacccccuguccugccc

SEQ ID NO: 933863 - RNA, 21 nt, Human
aaagggccuggcccaggcugc

SEQ ID NO: 933864 - RNA, 21 nt, Human
aaccacccccaguugggaagg

SEQ ID NO: 933865 - RNA, 22 nt, Human
aagcagcacaggguggacgggg

SEQ ID NO: 933866 - RNA, 18 nt, Human
aagcagccacccaacccc

SEQ ID NO: 933867 - RNA, 21 nt, Human
aagcagccacccaaccccacc

SEQ ID NO: 933868 - RNA, 26 nt, Human
aagcagccacccaaccccacccaccu

SEQ ID NO: 933869 - RNA, 21 nt, Human
aagccccagggcuucaggucc

SEQ ID NO: 933870 - RNA, 21 nt, Human
aaggauagaacccaggcugac

SEQ ID NO: 933871 - RNA, 24 nt, Human
aagggccuggcccaggcugccgac

SEQ ID NO: 933872 - RNA, 24 nt, Human
aaucuggagaggcuggagccuggg

SEQ ID NO: 933873 - RNA, 22 nt, Human
acacaguccagaagggugaagg

SEQ ID NO: 933874 - RNA, 23 nt, Human
acagagaaagggcuggagccaga

SEQ ID NO: 933875 - RNA, 23 nt, Human
acaggugugcaccaugggugggu

SEQ ID NO: 933876 - RNA, 21 nt, Human
accacaguguguggccaggcu

SEQ ID NO: 933877 - RNA, 19 nt, Human
acccaaccccacccaccuc

SEQ ID NO: 933878 - RNA, 22 nt, Human
acccaaccccacccaccucccg

SEQ ID NO: 933879 - RNA, 18 nt, Human
acccagauggcaccacag

SEQ ID NO: 933880 - RNA, 19 nt, Human
acccuaaucgggaggaccc

SEQ ID NO: 933881 - RNA, 19 nt, Human
accuggcccaggcccaugg

SEQ ID NO: 933882 - RNA, 22 nt, Human
acuuggggaacuggggggaaau

SEQ ID NO: 933883 - RNA, 18 nt, Human
agaagcugagugggaacc

SEQ ID NO: 933884 - RNA, 25 nt, Human
agaaggcaccaagggcggugggcug

SEQ ID NO: 933885 - RNA, 23 nt, Human
agacauucuucaccuacuguggg

SEQ ID NO: 933886 - RNA, 19 nt, Human
agaggagggagcaacagag

SEQ ID NO: 933887 - RNA, 22 nt, Human
agaggugagcagcccgggaccc

SEQ ID NO: 933888 - RNA, 19 nt, Human
agcaacagagccugaaggg

SEQ ID NO: 933889 - RNA, 23 nt, Human
agccacccaaccccacccaccuc

SEQ ID NO: 933890 - RNA, 23 nt, Human
agcccccugugcuaccucuacuc

SEQ ID NO: 933891 - RNA, 20 nt, Human
aggaggcaccuggggaaugg

SEQ ID NO: 933892 - RNA, 22 nt, Human
aggcaggucacacaguauggcu

SEQ ID NO: 933893 - RNA, 24 nt, Human
aggccagguccuaucccuucccaa

SEQ ID NO: 933894 - RNA, 18 nt, Human
aggcccacaucuccaaac

SEQ ID NO: 933895 - RNA, 21 nt, Human
aggcugggucgugcugcaugu

SEQ ID NO: 933896 - RNA, 21 nt, Human
agggagacagugaaggccagg

SEQ ID NO: 933897 - RNA, 20 nt, Human
auagaacccaggcugacacu

SEQ ID NO: 933898 - RNA, 27 nt, Human
auggaauggacauccaacggggagagg

SEQ ID NO: 933899 - RNA, 22 nt, Human
caaacccccuguccugcccuca

SEQ ID NO: 933900 - RNA, 22 nt, Human
caaagcugggcccuggccccau

SEQ ID NO: 933901 - RNA, 24 nt, Human
caaaggcccacaucuccaaacccc

SEQ ID NO: 933902 - RNA, 19 nt, Human
caacuccaccagagcagcu

SEQ ID NO: 933903 - RNA, 26 nt, Human
caagggagacagugaaggccaggucc

SEQ ID NO: 933904 - RNA, 19 nt, Human
cacaggacacuccacccag

SEQ ID NO: 933905 - RNA, 18 nt, Human
cacauaggccuaucucca

SEQ ID NO: 933906 - RNA, 21 nt, Human
caccacaguguguggccaggc

SEQ ID NO: 933907 - RNA, 19 nt, Human
cacccaaccccacccaccu

SEQ ID NO: 933908 - RNA, 20 nt, Human
cagacaccagauggcgccuu

SEQ ID NO: 933909 - RNA, 18 nt, Human
cagcacaggguggacggg

SEQ ID NO: 933910 - RNA, 19 nt, Human
cagccacccaaccccaccc

SEQ ID NO: 933911 - RNA, 19 nt, Human
cagcccccugugcuaccuc

SEQ ID NO: 933912 - RNA, 21 nt, Human
cagcccgggacccucccccag

SEQ ID NO: 933913 - RNA, 21 nt, Human
cagcugcccaccaagaggggu

SEQ ID NO: 933914 - RNA, 18 nt, Human
caggcugacacucgaccc

SEQ ID NO: 933915 - RNA, 24 nt, Human
cagggcggcaacuccuaccuuccc

SEQ ID NO: 933916 - RNA, 22 nt, Human
caggguggacggggcaaggcca

SEQ ID NO: 933917 - RNA, 23 nt, Human
cagguccccagagacacuugggg

SEQ ID NO: 933918 - RNA, 24 nt, Human
cagguccuaucccuucccaacucc

SEQ ID NO: 933919 - RNA, 22 nt, Human
cagugccaggccaggcucccag

SEQ ID NO: 933920 - RNA, 21 nt, Human
caguguguggccaggcugggu

SEQ ID NO: 933921 - RNA, 19 nt, Human
caugcagacaccagauggc

SEQ ID NO: 933922 - RNA, 22 nt, Human
caugcaggaaaagggccuggcc

SEQ ID NO: 933923 - RNA, 19 nt, Human
cauggcccuccaccagagg

SEQ ID NO: 933924 - RNA, 22 nt, Human
ccaaagcugggcccuggcccca

SEQ ID NO: 933925 - RNA, 22 nt, Human
ccaaagcugggcccuggcccca

SEQ ID NO: 933926 - RNA, 18 nt, Human
ccaacacccaugcagaca

SEQ ID NO: 933927 - RNA, 23 nt, Human
ccaacacccaugcagacaccaga

SEQ ID NO: 933928 - RNA, 23 nt, Human
ccaacuccaccagagcagcugcc

SEQ ID NO: 933929 - RNA, 23 nt, Human
ccacccaaccccacccaccuccc

SEQ ID NO: 933930 - RNA, 24 nt, Human
ccacccaccucccgcaggggcuga

SEQ ID NO: 933931 - RNA, 21 nt, Human
ccacugaaggcagcuguggag

SEQ ID NO: 933932 - RNA, 18 nt, Human
ccagcacugcaguucccu

SEQ ID NO: 933933 - RNA, 18 nt, Human
ccaggcucccaguucagg

SEQ ID NO: 933934 - RNA, 19 nt, Human
ccaggcugccaacacccau

SEQ ID NO: 933935 - RNA, 18 nt, Human
ccccagagacacuugggg

SEQ ID NO: 933936 - RNA, 23 nt, Human
ccccagggcuucagguccccaga

SEQ ID NO: 933937 - RNA, 23 nt, Human
cccccaggugccccauuccccag

SEQ ID NO: 933938 - RNA, 27 nt, Human
cccccuguccugcccucaggaccaggc

SEQ ID NO: 933939 - RNA, 25 nt, Human
cccccugugcuaccucuacucuguc

SEQ ID NO: 933940 - RNA, 20 nt, Human
ccccugugcuaccucuacuc

SEQ ID NO: 933941 - RNA, 19 nt, Human
cccuggccccauucuaccc

SEQ ID NO: 933942 - RNA, 24 nt, Human
ccucgcgcgggcggcgggcucuuc

SEQ ID NO: 933943 - RNA, 26 nt, Human
ccucugggaaagcagccacccaaccc

SEQ ID NO: 933944 - RNA, 18 nt, Human
ccugccgucaagcuaagg

SEQ ID NO: 933945 - RNA, 20 nt, Human
ccuggccccauucuacccac

SEQ ID NO: 933946 - RNA, 18 nt, Human
cgugcagcugcagaggag

SEQ ID NO: 933947 - RNA, 19 nt, Human
cgugcugcaugugugcaca

SEQ ID NO: 933948 - RNA, 23 nt, Human
cuacaggugugcaccaugggugg

SEQ ID NO: 933949 - RNA, 19 nt, Human
cucccaggcugccaacacc

SEQ ID NO: 933950 - RNA, 22 nt, Human
cucccuggagaggcagccuguu

SEQ ID NO: 933951 - RNA, 18 nt, Human
cucccuuuaaccaccccc

SEQ ID NO: 933952 - RNA, 18 nt, Human
cucggcggcucugccggc

SEQ ID NO: 933953 - RNA, 18 nt, Human
cucugccuuggcccccag

SEQ ID NO: 933954 - RNA, 19 nt, Human
cugcaccaaaggauagaac

SEQ ID NO: 933955 - RNA, 22 nt, Human
cugccgucaagcuaaggccaaa

SEQ ID NO: 933956 - RNA, 21 nt, Human
cugggagguggagggcuguuu

SEQ ID NO: 933957 - RNA, 26 nt, Human
gaacccaggcugacacucgacccuaa

SEQ ID NO: 933958 - RNA, 25 nt, Human
gaacuggggggaaauucugaggcca

SEQ ID NO: 933959 - RNA, 24 nt, Human
gaaggcacagagaaagggcuggag

SEQ ID NO: 933960 - RNA, 21 nt, Human
gaaggcagugccccgucuaca

SEQ ID NO: 933961 - RNA, 20 nt, Human
gaccuagccaggggcuacgg

SEQ ID NO: 933962 - RNA, 24 nt, Human
gagaaggcagugccccuggcaccc

SEQ ID NO: 933963 - RNA, 21 nt, Human
gagauaccacaaaagaaaugg

SEQ ID NO: 933964 - RNA, 23 nt, Human
gaggacccccuucccucugccuu

SEQ ID NO: 933965 - RNA, 20 nt, Human
gaugguucuggcucaggccu

SEQ ID NO: 933966 - RNA, 19 nt, Human
gcagcuguggaggaagggg

SEQ ID NO: 933967 - RNA, 22 nt, Human
gcaggaaaagggccuggcccag

SEQ ID NO: 933968 - RNA, 23 nt, Human
gcaggaaaagggccuggcccagg

SEQ ID NO: 933969 - RNA, 22 nt, Human
gcccauggugaggacaggggcu

SEQ ID NO: 933970 - RNA, 22 nt, Human
gccccagggcuucaggucccca

SEQ ID NO: 933971 - RNA, 22 nt, Human
gccucugggaaagcagccaccc

SEQ ID NO: 933972 - RNA, 20 nt, Human
gcgggcucuucggcgucucg

SEQ ID NO: 933973 - RNA, 18 nt, Human
gcuggagccagacauucu

SEQ ID NO: 933974 - RNA, 26 nt, Human
ggaccaggcccacccugggcaagaga

SEQ ID NO: 933975 - RNA, 22 nt, Human
ggacccagauggcaccacagug

SEQ ID NO: 933976 - RNA, 20 nt, Human
ggacuacaggugugcaccau

SEQ ID NO: 933977 - RNA, 21 nt, Human
ggacuacaggugugcaccaug

SEQ ID NO: 933978 - RNA, 18 nt, Human
ggagaggcuggagccugg

SEQ ID NO: 933979 - RNA, 23 nt, Human
ggagccagacauucuucaccuac

SEQ ID NO: 933980 - RNA, 23 nt, Human
ggcaggugugcacgaugggcgug

SEQ ID NO: 933981 - RNA, 21 nt, Human
ggccacacaguccagaagggu

SEQ ID NO: 933982 - RNA, 18 nt, Human
ggccaggcugggucgugc

SEQ ID NO: 933983 - RNA, 21 nt, Human
gggaaugugugaaaccaggga

SEQ ID NO: 933984 - RNA, 21 nt, Human
gggcucccuuuaaccaccccc

SEQ ID NO: 933985 - RNA, 22 nt, Human
ggggcaaggccagcugugagaa

SEQ ID NO: 933986 - RNA, 19 nt, Human
ggguggacggggcaaggcc

SEQ ID NO: 933987 - RNA, 23 nt, Human
ggugugcacgaugggcaggugug

SEQ ID NO: 933988 - RNA, 20 nt, Human
gucaaggcacaagcuuugug

SEQ ID NO: 933989 - RNA, 19 nt, Human
guccugggaccaggaaggc

SEQ ID NO: 933990 - RNA, 21 nt, Human
guccugggaccaggaaggcuc

SEQ ID NO: 933991 - RNA, 19 nt, Human
gugccaggccaggcuccca

SEQ ID NO: 933992 - RNA, 21 nt, Human
gugccccauuccccagguagc

SEQ ID NO: 933993 - RNA, 20 nt, Human
guggccaggcugggucgugc

SEQ ID NO: 933994 - RNA, 21 nt, Human
uacaaagaaggcaccaagggc

SEQ ID NO: 933995 - RNA, 24 nt, Human
uacaaagaaggcaccaagggcggu

SEQ ID NO: 933996 - RNA, 25 nt, Human
uacagaggauacguuuacaaacugg

SEQ ID NO: 933997 - RNA, 24 nt, Human
uacaggugugcaccaugggugggu

SEQ ID NO: 933998 - RNA, 23 nt, Human
uaccagggucucccacuggagca

SEQ ID NO: 933999 - RNA, 18 nt, Human
uacugugggccacauagg

SEQ ID NO: 934000 - RNA, 23 nt, Human
ucacucccaggcugccaacaccc

SEQ ID NO: 934001 - RNA, 23 nt, Human
ucagcagaaggggagaggugagc

SEQ ID NO: 934002 - RNA, 22 nt, Human
ucaggaccaggcccacccuggg

SEQ ID NO: 934003 - RNA, 21 nt, Human
uccaaacccccuguccugccc

SEQ ID NO: 934004 - RNA, 18 nt, Human
uccacgccauggcccucc

SEQ ID NO: 934005 - RNA, 22 nt, Human
uccagcuugaggcucaguggga

SEQ ID NO: 934006 - RNA, 18 nt, Human
ucccaaaggguccugagc

SEQ ID NO: 934007 - RNA, 18 nt, Human
uccccagguagcagcagu

SEQ ID NO: 934008 - RNA, 21 nt, Human
uccccagguagcagcaguggg

SEQ ID NO: 934009 - RNA, 19 nt, Human
ucccccagggcggcaacuc

SEQ ID NO: 934010 - RNA, 20 nt, Human
ucccccagggcggcaacucc

SEQ ID NO: 934011 - RNA, 18 nt, Human
ucccgcaggggcuccuuc

SEQ ID NO: 934012 - RNA, 18 nt, Human
ucccucugccuuggcccc

SEQ ID NO: 934013 - RNA, 19 nt, Human
ucccuggagaggcagccug

SEQ ID NO: 934014 - RNA, 22 nt, Human
ucgugcugcaugugugcacagc

SEQ ID NO: 934015 - RNA, 21 nt, Human
ucuccaaacccccuguccugc

SEQ ID NO: 934016 - RNA, 24 nt, Human
ucuccacugccuccugcccagggg

SEQ ID NO: 934017 - RNA, 19 nt, Human
ucucggcggcucugccggc

SEQ ID NO: 934018 - RNA, 19 nt, Human
ucuggagaggcuggagccu

SEQ ID NO: 934019 - RNA, 20 nt, Human
ucuggagaggcuggagccug

SEQ ID NO: 934020 - RNA, 22 nt, Human
ucuuggcugggagguggagggc

SEQ ID NO: 934021 - RNA, 21 nt, Human
ugaaaccagggagaagggcuc

SEQ ID NO: 934022 - RNA, 20 nt, Human
ugaaggaagacagaucuugg

SEQ ID NO: 934023 - RNA, 22 nt, Human
ugaaggcacagagaaagggcug

SEQ ID NO: 934024 - RNA, 25 nt, Human
ugaaggcacagagaaagggcuggag

SEQ ID NO: 934025 - RNA, 25 nt, Human
ugaaggcagcuguggaggaaggggc

SEQ ID NO: 934026 - RNA, 21 nt, Human
ugaagggaagcagcacagggu

SEQ ID NO: 934027 - RNA, 19 nt, Human
ugaggcucagugggaccca

SEQ ID NO: 934028 - RNA, 19 nt, Human
ugccuuggcccccaggugc

SEQ ID NO: 934029 - RNA, 21 nt, Human
uggaagguuaaugcugugaag

SEQ ID NO: 934030 - RNA, 22 nt, Human
uggaagguuaaugcugugaagg

SEQ ID NO: 934031 - RNA, 20 nt, Human
uggagaggcuggagccuggg

SEQ ID NO: 934032 - RNA, 21 nt, Human
uggagccagacauucuucacc

SEQ ID NO: 934033 - RNA, 19 nt, Human
uggccaggcugggucgugc

SEQ ID NO: 934034 - RNA, 23 nt, Human
uggcccccaggugccccauuccc

SEQ ID NO: 934035 - RNA, 19 nt, Human
uggcgccuucgugcagcug

SEQ ID NO: 934036 - RNA, 18 nt, Human
ugggaaccaaacccuccu

SEQ ID NO: 934037 - RNA, 27 nt, Human
ugggaaggaggcaccuggggaauggaa

SEQ ID NO: 934038 - RNA, 22 nt, Human
ugggagguggagggcuguuucg

SEQ ID NO: 934039 - RNA, 23 nt, Human
uggggaugguucuggcucaggcc

SEQ ID NO: 934040 - RNA, 22 nt, Human
ugugaagggaagcagcacaggg

SEQ ID NO: 934041 - RNA, 21 nt, Human
ugugcaccaugggugggugug

SEQ ID NO: 934042 - RNA, 19 nt, Human
ugugcacgaugggcaggug

SEQ ID NO: 934043 - RNA, 24 nt, Human
ugugcacgaugggcaggugugcac

SEQ ID NO: 934044 - RNA, 22 nt, Human
ugugcacgaugggcgugcagug

SEQ ID NO: 934045 - RNA, 22 nt, Human
uguggaggaaagggggucccag

SEQ ID NO: 934046 - RNA, 19 nt, Human
ugugggccacauaggccua

SEQ ID NO: 934047 - RNA, 26 nt, Human
uguguggccaggcugggucgugcugc

SEQ ID NO: 934048 - RNA, 22 nt, Human
uuaguuuuguuucccacuggag

SEQ ID NO: 934049 - RNA, 20 nt, Human
uugggaaggaggcaccuggg

SEQ ID NO: 934050 - RNA, 22 nt, Human
uuggggaaaagucaaagggcaa

SEQ ID NO: 934051 - RNA, 18 nt, Human
aagaauaaaccaccaccg

SEQ ID NO: 934052 - RNA, 21 nt, Human
aaugacaaggacccaauucag

SEQ ID NO: 934053 - RNA, 24 nt, Human
accaccgcucaccgaauaaccgcu

SEQ ID NO: 934054 - RNA, 22 nt, Human
agaaaugacaaggacccaauuc

SEQ ID NO: 934055 - RNA, 21 nt, Human
agacccugaagaccugagaug

SEQ ID NO: 934056 - RNA, 22 nt, Human
caccgaauaaccgcugcuaaua

SEQ ID NO: 934057 - RNA, 18 nt, Human
ccaguuaaaaaaaguaaa

SEQ ID NO: 934058 - RNA, 27 nt, Human
cggaagaauaaaccaccaccgcucacu

SEQ ID NO: 934059 - RNA, 21 nt, Human
gacagaaaugacaaggaccca

SEQ ID NO: 934060 - RNA, 19 nt, Human
gacccaauucaguauguaa

SEQ ID NO: 934061 - RNA, 23 nt, Human
guaaagccuuccuaguguggaag

SEQ ID NO: 934062 - RNA, 21 nt, Human
ugacaaggacccaauucagua

SEQ ID NO: 934063 - RNA, 21 nt, Human
ugagauguccacggagcccuu

SEQ ID NO: 934064 - RNA, 25 nt, Human
uggaagauuaagacguccaugaagg

SEQ ID NO: 934065 - RNA, 22 nt, Human
uggacagaaaugacaaggaccc

SEQ ID NO: 934066 - RNA, 23 nt, Human
uggacagaaaugacaaggaccca

SEQ ID NO: 934067 - RNA, 20 nt, Human
uguggaagauuaagacgucc

SEQ ID NO: 934068 - RNA, 20 nt, Human
uuccaaaaaaaggggaugug

SEQ ID NO: 934069 - RNA, 23 nt, Human
uuccagauggaagacccugaaga

SEQ ID NO: 934070 - RNA, 23 nt, Human
aaacacacagguaaguggcauca

SEQ ID NO: 934071 - RNA, 24 nt, Human
caaucccugggccccguagcuccc

SEQ ID NO: 934072 - RNA, 22 nt, Human
caccaggcacacaagcaccucc

SEQ ID NO: 934073 - RNA, 22 nt, Human
cacuacuuuaaacacaaucccu

SEQ ID NO: 934074 - RNA, 18 nt, Human
cccugggccccguagcuc

SEQ ID NO: 934075 - RNA, 21 nt, Human
cuuccgggguaccagccgcgu

SEQ ID NO: 934076 - RNA, 18 nt, Human
ggaggagugggagaggcu

SEQ ID NO: 934077 - RNA, 22 nt, Human
uaaacacaaucccugggccccg

SEQ ID NO: 934078 - RNA, 23 nt, Human
uaggaggagugggagaggcuccu

SEQ ID NO: 934079 - RNA, 19 nt, Human
uauagaguccuaaccacuu

SEQ ID NO: 934080 - RNA, 22 nt, Human
ucccgcaccaggcacacaagca

SEQ ID NO: 934081 - RNA, 24 nt, Human
ucccgcaccaggcacacaagcacc

SEQ ID NO: 934082 - RNA, 20 nt, Human
ucccggaaguugcagcgacu

SEQ ID NO: 934083 - RNA, 22 nt, Human
ucccugggccccguagcucccg

SEQ ID NO: 934084 - RNA, 20 nt, Human
uccgggguaccagccgcguu

SEQ ID NO: 934085 - RNA, 20 nt, Human
aaaaauuacaagcaaagaca

SEQ ID NO: 934086 - RNA, 24 nt, Human
auggaauggaaaggccuacacauc

SEQ ID NO: 934087 - RNA, 22 nt, Human
guaggacacucagugugaauaa

SEQ ID NO: 934088 - RNA, 19 nt, Human
auugcauacuagaauccca

SEQ ID NO: 934089 - RNA, 20 nt, Human
aaccaaagacuuggagacag

SEQ ID NO: 934090 - RNA, 18 nt, Human
agcucaggggccgcucag

SEQ ID NO: 934091 - RNA, 21 nt, Human
aucuucucuucaaccaaagac

SEQ ID NO: 934092 - RNA, 19 nt, Human
cgccguuccacugcgcagu

SEQ ID NO: 934093 - RNA, 21 nt, Human
cuucaggucagugcagaggca

SEQ ID NO: 934094 - RNA, 21 nt, Human
gaaaaccaaguucugugaaag

SEQ ID NO: 934095 - RNA, 20 nt, Human
ucaacagucauauaucuucu

SEQ ID NO: 934096 - RNA, 20 nt, Human
ucgccguuccacugcgcagu

SEQ ID NO: 934097 - RNA, 19 nt, Human
ugaauagcaggucucggca

SEQ ID NO: 934098 - RNA, 24 nt, Human
aaauaucccuccuaucacaaaaau

SEQ ID NO: 934099 - RNA, 20 nt, Human
aacaacacaacauacaaagu

SEQ ID NO: 934100 - RNA, 19 nt, Human
aacauuacagaauccacau

SEQ ID NO: 934101 - RNA, 19 nt, Human
aagcuguaagcuucgaaca

SEQ ID NO: 934102 - RNA, 23 nt, Human
acaguagaacaaucucaacaguu

SEQ ID NO: 934103 - RNA, 18 nt, Human
acucagcaggaacaagag

SEQ ID NO: 934104 - RNA, 18 nt, Human
acuggggacaacaacaca

SEQ ID NO: 934105 - RNA, 23 nt, Human
agaaacaucuggcagaacaacua

SEQ ID NO: 934106 - RNA, 22 nt, Human
agacuuugaaggugagaaaacu

SEQ ID NO: 934107 - RNA, 21 nt, Human
agguauaugggcuauuguuuu

SEQ ID NO: 934108 - RNA, 25 nt, Human
caacacaacauacaaaguaagaaua

SEQ ID NO: 934109 - RNA, 19 nt, Human
caaguaacucagcaggaac

SEQ ID NO: 934110 - RNA, 18 nt, Human
cacuggggacaacaacac

SEQ ID NO: 934111 - RNA, 18 nt, Human
cacuggggacaacaacac

SEQ ID NO: 934112 - RNA, 21 nt, Human
cacuggggacaacaacacaac

SEQ ID NO: 934113 - RNA, 19 nt, Human
cuuguugcuauuggagcug

SEQ ID NO: 934114 - RNA, 20 nt, Human
cuuguugcuauuggagcugu

SEQ ID NO: 934115 - RNA, 22 nt, Human
ggaaaacaagcuguaagcuucg

SEQ ID NO: 934116 - RNA, 24 nt, Human
gggugcugaagacucacaacagcc

SEQ ID NO: 934117 - RNA, 21 nt, Human
guaaacaacccaucaaaaaca

SEQ ID NO: 934118 - RNA, 24 nt, Human
uaaaauauguaaauaucccuccua

SEQ ID NO: 934119 - RNA, 19 nt, Human
uaagcuucgaacaaguaac

SEQ ID NO: 934120 - RNA, 24 nt, Human
uacaggaugacacaaaauagguac

SEQ ID NO: 934121 - RNA, 20 nt, Human
uagaaacaucuggcagaaca

SEQ ID NO: 934122 - RNA, 24 nt, Human
uagagcacaccauccaacuuaaaa

SEQ ID NO: 934123 - RNA, 24 nt, Human
uaucacaaaaauaaauuaaaccuc

SEQ ID NO: 934124 - RNA, 19 nt, Human
ucaaaacagccguuagagc

SEQ ID NO: 934125 - RNA, 22 nt, Human
uccacauagaaacaucuggcag

SEQ ID NO: 934126 - RNA, 24 nt, Human
ugaaaaacaaguuaggauguuuua

SEQ ID NO: 934127 - RNA, 19 nt, Human
ugagaaaacuucaucauuc

SEQ ID NO: 934128 - RNA, 24 nt, Human
ugcacaaauacauuaguuuguagg

SEQ ID NO: 934129 - RNA, 26 nt, Human
uggggacaacaacacaacauacaaag

SEQ ID NO: 934130 - RNA, 25 nt, Human
uucagaguaaacaacccaucaaaaa

SEQ ID NO: 934131 - RNA, 20 nt, Human
uucgcugucccagcaacuac

SEQ ID NO: 934132 - RNA, 19 nt, Human
aaaaaaaaaaaaaaaaguc

SEQ ID NO: 934133 - RNA, 24 nt, Human
aaaaaaaccccaacauauacacca

SEQ ID NO: 934134 - RNA, 18 nt, Human
aaaucacaacucuauccc

SEQ ID NO: 934135 - RNA, 22 nt, Human
aagacaaagaagcuuagaaaaa

SEQ ID NO: 934136 - RNA, 26 nt, Human
aaucacuaccccacaaaauguugaga

SEQ ID NO: 934137 - RNA, 23 nt, Human
acacaguuacaaauagcacugaa

SEQ ID NO: 934138 - RNA, 18 nt, Human
acacuaaugacaaugaaa

SEQ ID NO: 934139 - RNA, 22 nt, Human
acacuugccaaaucacuacccc

SEQ ID NO: 934140 - RNA, 24 nt, Human
accagccggacucaaaaaaaaaaa

SEQ ID NO: 934141 - RNA, 18 nt, Human
agaaaggaaauauguaua

SEQ ID NO: 934142 - RNA, 21 nt, Human
agaaaggggagaggaagaaga

SEQ ID NO: 934143 - RNA, 25 nt, Human
agacaaagaagcuuagaaaaaaaac

SEQ ID NO: 934144 - RNA, 18 nt, Human
agagauaaugaauuugga

SEQ ID NO: 934145 - RNA, 19 nt, Human
agagauaaugaauuuggaa

SEQ ID NO: 934146 - RNA, 23 nt, Human
agagcugaaaacaauuuaaaaua

SEQ ID NO: 934147 - RNA, 22 nt, Human
agaggaagaagagcaaaaaaaa

SEQ ID NO: 934148 - RNA, 21 nt, Human
agcaaaaaaaaaaaaaaaaaa

SEQ ID NO: 934149 - RNA, 25 nt, Human
agcgucccuugcugucccccugcuu

SEQ ID NO: 934150 - RNA, 20 nt, Human
aggaagaagagcaaaaaaaa

SEQ ID NO: 934151 - RNA, 21 nt, Human
agggcugaaagcaaucaagcu

SEQ ID NO: 934152 - RNA, 20 nt, Human
aguaacauauggaaauugag

SEQ ID NO: 934153 - RNA, 23 nt, Human
aguggcucaugccuguaauccca

SEQ ID NO: 934154 - RNA, 24 nt, Human
aguggcucaugccuguaaucccag

SEQ ID NO: 934155 - RNA, 20 nt, Human
aucauaauacacaaagagcc

SEQ ID NO: 934156 - RNA, 24 nt, Human
augcaaaguuaacaaugaacuugg

SEQ ID NO: 934157 - RNA, 22 nt, Human
caaaaaaaaaaaaaaaaaaaaa

SEQ ID NO: 934158 - RNA, 21 nt, Human
caauaaugauguaaucagacu

SEQ ID NO: 934159 - RNA, 23 nt, Human
cacaaaucacaacucuaucccaa

SEQ ID NO: 934160 - RNA, 23 nt, Human
cacgaaauggaugaacagcugau

SEQ ID NO: 934161 - RNA, 22 nt, Human
cagacuuacaaguuaaagccac

SEQ ID NO: 934162 - RNA, 24 nt, Human
caugccuguaaucccagccuuuuu

SEQ ID NO: 934163 - RNA, 29 nt, Human
ccagccggacucaaaaaaaaaaaaaaaaa

SEQ ID NO: 934164 - RNA, 23 nt, Human
cgccugagcgucccuugcugucc

SEQ ID NO: 934165 - RNA, 23 nt, Human
cucaugccuguaaucccagccuu

SEQ ID NO: 934166 - RNA, 23 nt, Human
cuucuccugauugccagcuuuag

SEQ ID NO: 934167 - RNA, 20 nt, Human
cuugccaaaucacuacccca

SEQ ID NO: 934168 - RNA, 24 nt, Human
gaaaaaaaaccccaacauauacac

SEQ ID NO: 934169 - RNA, 26 nt, Human
gaaaaaaaaccccaacauauacacca

SEQ ID NO: 934170 - RNA, 22 nt, Human
gaaaucuguauuuuugcaccaa

SEQ ID NO: 934171 - RNA, 18 nt, Human
gaacuaaaaguuccuaca

SEQ ID NO: 934172 - RNA, 23 nt, Human
gaagcuuagaaaaaaaaccccaa

SEQ ID NO: 934173 - RNA, 18 nt, Human
gauguaaucagacuuaca

SEQ ID NO: 934174 - RNA, 23 nt, Human
gccaaaucacuaccccacaaaau

SEQ ID NO: 934175 - RNA, 24 nt, Human
gccuuuuuugguuaguuuuaaaaa

SEQ ID NO: 934176 - RNA, 24 nt, Human
gcgucccuugcugucccccugcuu

SEQ ID NO: 934177 - RNA, 21 nt, Human
ggaguugggugcaguggcuca

SEQ ID NO: 934178 - RNA, 23 nt, Human
ggugcaguggcucaugccuguaa

SEQ ID NO: 934179 - RNA, 23 nt, Human
guuaauacacuaaugacaaugaa

SEQ ID NO: 934180 - RNA, 22 nt, Human
uaaaauaaaaaaauuauaugga

SEQ ID NO: 934181 - RNA, 22 nt, Human
uaaaugacugauaacuuuacaa

SEQ ID NO: 934182 - RNA, 23 nt, Human
uaagacaaagaagcuuagaaaaa

SEQ ID NO: 934183 - RNA, 21 nt, Human
uaaucagacuuacaaguuaaa

SEQ ID NO: 934184 - RNA, 19 nt, Human
uacaguuuaccagcauaca

SEQ ID NO: 934185 - RNA, 19 nt, Human
uaugacacaacuuuuugug

SEQ ID NO: 934186 - RNA, 21 nt, Human
uaugacacaacuuuuugugua

SEQ ID NO: 934187 - RNA, 20 nt, Human
ucaaaugauagaaaaacaua

SEQ ID NO: 934188 - RNA, 22 nt, Human
ucauuauucacaaugacucaca

SEQ ID NO: 934189 - RNA, 19 nt, Human
uccaaagaauaaaaucaga

SEQ ID NO: 934190 - RNA, 19 nt, Human
uccacauuuaaaacaaagu

SEQ ID NO: 934191 - RNA, 23 nt, Human
uccaguguucauauaauggaacu

SEQ ID NO: 934192 - RNA, 24 nt, Human
ucuacaguuuaccagcauacacac

SEQ ID NO: 934193 - RNA, 19 nt, Human
ugaacaacugaucaaguga

SEQ ID NO: 934194 - RNA, 20 nt, Human
ugaacagcugaucgagucga

SEQ ID NO: 934195 - RNA, 22 nt, Human
ugaacuuggggaacugaaaggu

SEQ ID NO: 934196 - RNA, 25 nt, Human
ugauagaaaaacauaucuggguaag

SEQ ID NO: 934197 - RNA, 22 nt, Human
ugccaaaucacuaccccacaaa

SEQ ID NO: 934198 - RNA, 24 nt, Human
ugccaaaucacuaccccacaaaau

SEQ ID NO: 934199 - RNA, 19 nt, Human
ugccuguaaucccagccuu

SEQ ID NO: 934200 - RNA, 19 nt, Human
ugccuguaaucccagccuu

SEQ ID NO: 934201 - RNA, 23 nt, Human
uggaaccagccggacucaaaaaa

SEQ ID NO: 934202 - RNA, 21 nt, Human
uggaacuaaaaguuccuacag

SEQ ID NO: 934203 - RNA, 24 nt, Human
uggaacuguuugaauuuuaaagau

SEQ ID NO: 934204 - RNA, 19 nt, Human
uggaauauguuuguuaguu

SEQ ID NO: 934205 - RNA, 18 nt, Human
uggaugaacagcugaucg

SEQ ID NO: 934206 - RNA, 21 nt, Human
uggcucaugccuguaauccca

SEQ ID NO: 934207 - RNA, 22 nt, Human
uggcucaugccuguaaucccag

SEQ ID NO: 934208 - RNA, 23 nt, Human
uguuugaauuuuaaagauguuuu

SEQ ID NO: 934209 - RNA, 21 nt, Human
uuaaacccauauaaagaaagg

SEQ ID NO: 934210 - RNA, 18 nt, Human
uucaaaugauagaaaaac

SEQ ID NO: 934211 - RNA, 23 nt, Human
uucacaaaucacaacucuauccc

SEQ ID NO: 934212 - RNA, 19 nt, Human
uucacaaugacucacagga

SEQ ID NO: 934213 - RNA, 25 nt, Human
uuuccaaagaauaaaaucagauuac

SEQ ID NO: 934214 - RNA, 24 nt, Human
aagaacaaccgggaugucagccgg

SEQ ID NO: 934215 - RNA, 20 nt, Human
aaugucgaccgucugagcag

SEQ ID NO: 934216 - RNA, 21 nt, Human
aaugucgaccgucugagcagc

SEQ ID NO: 934217 - RNA, 23 nt, Human
acagguggauggggauggagauc

SEQ ID NO: 934218 - RNA, 18 nt, Human
agacaggaucccaacccc

SEQ ID NO: 934219 - RNA, 20 nt, Human
aggaacauucucaaacugca

SEQ ID NO: 934220 - RNA, 21 nt, Human
aucccaacccccacccaaauu

SEQ ID NO: 934221 - RNA, 25 nt, Human
auuggcugcaaacgccucucucagg

SEQ ID NO: 934222 - RNA, 23 nt, Human
caccuaagacccugagaccucca

SEQ ID NO: 934223 - RNA, 20 nt, Human
caggagagacccacaaagaa

SEQ ID NO: 934224 - RNA, 23 nt, Human
caggaucccaacccccacccaaa

SEQ ID NO: 934225 - RNA, 19 nt, Human
ccgcggggauggcugccgg

SEQ ID NO: 934226 - RNA, 22 nt, Human
ccggcacagaagaacaaccggg

SEQ ID NO: 934227 - RNA, 21 nt, Human
ccuaagacccugagaccucca

SEQ ID NO: 934228 - RNA, 23 nt, Human
ccugccuggcacguucuuucucu

SEQ ID NO: 934229 - RNA, 23 nt, Human
ccuggcucccaucagggacaguc

SEQ ID NO: 934230 - RNA, 22 nt, Human
cuaagacccugagaccuccacc

SEQ ID NO: 934231 - RNA, 19 nt, Human
cucaaacugcaacggaaaa

SEQ ID NO: 934232 - RNA, 22 nt, Human
ucaaacugcaacggaaaagaug

SEQ ID NO: 934233 - RNA, 18 nt, Human
ucccaacccccacccaaa

SEQ ID NO: 934234 - RNA, 20 nt, Human
ucccuguggccuggcuccca

SEQ ID NO: 934235 - RNA, 21 nt, Human
ucccuguggccuggcucccau

SEQ ID NO: 934236 - RNA, 21 nt, Human
uuggcugcaaacgccucucuc

SEQ ID NO: 934237 - RNA, 24 nt, Human
acaagccaagacaucccaguucua

SEQ ID NO: 934238 - RNA, 21 nt, Human
acccccaagggggaaagagcc

SEQ ID NO: 934239 - RNA, 18 nt, Human
accccuccccagcccccc

SEQ ID NO: 934240 - RNA, 18 nt, Human
acggagcagcugcaaacc

SEQ ID NO: 934241 - RNA, 19 nt, Human
agcugugugugggaaaaug

SEQ ID NO: 934242 - RNA, 23 nt, Human
aggagcccugggggaggucaggg

SEQ ID NO: 934243 - RNA, 25 nt, Human
auucccccuaccccuccccagcccc

SEQ ID NO: 934244 - RNA, 21 nt, Human
caaaaaacauacaagccaaga

SEQ ID NO: 934245 - RNA, 22 nt, Human
caaaaaacauacaagccaagac

SEQ ID NO: 934246 - RNA, 24 nt, Human
caagacaucccaguucuagucccc

SEQ ID NO: 934247 - RNA, 18 nt, Human
caggagccgagccgggcc

SEQ ID NO: 934248 - RNA, 21 nt, Human
caguucuagucccccacuccc

SEQ ID NO: 934249 - RNA, 21 nt, Human
cccacucccuaaaggaguaca

SEQ ID NO: 934250 - RNA, 22 nt, Human
cccagcacccccacccccugca

SEQ ID NO: 934251 - RNA, 20 nt, Human
ccccauucccccuaccccuc

SEQ ID NO: 934252 - RNA, 22 nt, Human
ccccauucccccuaccccuccc

SEQ ID NO: 934253 - RNA, 25 nt, Human
ccccauucccccuaccccuccccag

SEQ ID NO: 934254 - RNA, 22 nt, Human
cccccaagggggaaagagccug

SEQ ID NO: 934255 - RNA, 18 nt, Human
cccccacccccugcacga

SEQ ID NO: 934256 - RNA, 21 nt, Human
cccccuaccccuccccagccc

SEQ ID NO: 934257 - RNA, 20 nt, Human
ccccuaccccuccccagccc

SEQ ID NO: 934258 - RNA, 23 nt, Human
ccccuaccccuccccagcccccc

SEQ ID NO: 934259 - RNA, 24 nt, Human
ccccuaccccuccccagcccccca

SEQ ID NO: 934260 - RNA, 20 nt, Human
ccccuccccagccccccagc

SEQ ID NO: 934261 - RNA, 19 nt, Human
cccggggagguugccugcc

SEQ ID NO: 934262 - RNA, 23 nt, Human
cccugggcaggggacccccaagg

SEQ ID NO: 934263 - RNA, 18 nt, Human
cccugggggaggucaggg

SEQ ID NO: 934264 - RNA, 22 nt, Human
cccugggggaggucaggguggc

SEQ ID NO: 934265 - RNA, 21 nt, Human
ccugcucccacacugcuggcc

SEQ ID NO: 934266 - RNA, 25 nt, Human
cgcggccgcuuuuuuuuuuuuuuuu

SEQ ID NO: 934267 - RNA, 19 nt, Human
cuagucccccacucccuaa

SEQ ID NO: 934268 - RNA, 20 nt, Human
cugcaaaccagcggccgcga

SEQ ID NO: 934269 - RNA, 18 nt, Human
cugcacacgagcgcgaga

SEQ ID NO: 934270 - RNA, 18 nt, Human
gaccgaggccggggccuc

SEQ ID NO: 934271 - RNA, 26 nt, Human
gaggagcccugggggaggucagggug

SEQ ID NO: 934272 - RNA, 19 nt, Human
gcggccgcuuuuuuuuuuu

SEQ ID NO: 934273 - RNA, 22 nt, Human
gcuggggaggagcccuggggga

SEQ ID NO: 934274 - RNA, 26 nt, Human
ggagcccugggggaggucaggguggc

SEQ ID NO: 934275 - RNA, 19 nt, Human
ggaggagcccugggggagg

SEQ ID NO: 934276 - RNA, 18 nt, Human
ggaggucaggguggcugg

SEQ ID NO: 934277 - RNA, 19 nt, Human
ggaggucaggguggcuggc

SEQ ID NO: 934278 - RNA, 22 nt, Human
ggccgcuuuuuuuuuuuuuuuu

SEQ ID NO: 934279 - RNA, 20 nt, Human
gggaaagagccuguccccau

SEQ ID NO: 934280 - RNA, 19 nt, Human
ggggaggagcccuggggga

SEQ ID NO: 934281 - RNA, 18 nt, Human
ucaccggcuggggaggag

SEQ ID NO: 934282 - RNA, 19 nt, Human
ucccacacugcuggccagg

SEQ ID NO: 934283 - RNA, 23 nt, Human
uccccauucccccuaccccuccc

SEQ ID NO: 934284 - RNA, 23 nt, Human
ucccccuaccccuccccagcccc

SEQ ID NO: 934285 - RNA, 22 nt, Human
ugcagcauaugagcugugugug

SEQ ID NO: 934286 - RNA, 20 nt, Human
ugcccugggcaggggacccc

SEQ ID NO: 934287 - RNA, 23 nt, Human
uggcucccagcacccccaccccc

SEQ ID NO: 934288 - RNA, 21 nt, Human
uggggaggagcccugggggag

SEQ ID NO: 934289 - RNA, 19 nt, Human
uucaaaaaacauacaagcc

SEQ ID NO: 934290 - RNA, 18 nt, Human
uucccccuaccccucccc

SEQ ID NO: 934291 - RNA, 19 nt, Human
uucccccuaccccucccca

SEQ ID NO: 934292 - RNA, 24 nt, Human
uuuuuuuuuuuuuuuuuuuuuggg

SEQ ID NO: 934293 - RNA, 19 nt, Human
acacacaucuaacccuaua

SEQ ID NO: 934294 - RNA, 21 nt, Human
cacaucuaacccuauauuccg

SEQ ID NO: 934295 - RNA, 19 nt, Human
cccaugcaguccccuaagc

SEQ ID NO: 934296 - RNA, 18 nt, Human
ccuuccucccucccgacc

SEQ ID NO: 934297 - RNA, 21 nt, Human
cucagcuacccuuucccucca

SEQ ID NO: 934298 - RNA, 22 nt, Human
cucagcuacccuuucccuccag

SEQ ID NO: 934299 - RNA, 28 nt, Human
gggucuccgggacggccuaacaacaacu

SEQ ID NO: 934300 - RNA, 21 nt, Human
ucccgaccgggucuccgggac

SEQ ID NO: 934301 - RNA, 21 nt, Human
agguugccgcgggcccggagc

SEQ ID NO: 934302 - RNA, 20 nt, Human
cucgagaagccugccgcccc

SEQ ID NO: 934303 - RNA, 20 nt, Human
uugccgcgggcccggagcuc

SEQ ID NO: 934304 - RNA, 21 nt, Human
agggggcggggguagugcagu

SEQ ID NO: 934305 - RNA, 19 nt, Human
ccggcuccgcggccggggu

SEQ ID NO: 934306 - RNA, 18 nt, Human
gagcgcccgcgacuucgg

SEQ ID NO: 934307 - RNA, 19 nt, Human
ggaggaaagaagggggcgg

SEQ ID NO: 934308 - RNA, 23 nt, Human
gggcggggguagugcagugagcc

SEQ ID NO: 934309 - RNA, 23 nt, Human
uccgcggccgggguagcuauaac

SEQ ID NO: 934310 - RNA, 19 nt, Human
ucuggaggaaagaaggggg

SEQ ID NO: 934311 - RNA, 22 nt, Human
uggaggaaagaagggggcgggg

SEQ ID NO: 934312 - RNA, 20 nt, Human
aaaaagccaaaacccucaau

SEQ ID NO: 934313 - RNA, 26 nt, Human
aaagccaaaacccucaaugcaaagga

SEQ ID NO: 934314 - RNA, 23 nt, Human
aaauaaaaagccaaaacccucaa

SEQ ID NO: 934315 - RNA, 20 nt, Human
aacccguccucccccaacuc

SEQ ID NO: 934316 - RNA, 18 nt, Human
aacucacgcccgcugcag

SEQ ID NO: 934317 - RNA, 21 nt, Human
aaugcaaaggaaaacugcagu

SEQ ID NO: 934318 - RNA, 18 nt, Human
aggcgagucggcaacccg

SEQ ID NO: 934319 - RNA, 18 nt, Human
agugugucuauauauaug

SEQ ID NO: 934320 - RNA, 19 nt, Human
agugugucuauauauaugu

SEQ ID NO: 934321 - RNA, 19 nt, Human
augugccccuguagcaugu

SEQ ID NO: 934322 - RNA, 20 nt, Human
caaaacccucaaugcaaaga

SEQ ID NO: 934323 - RNA, 24 nt, Human
caaaacccucaaugcaaaggaaaa

SEQ ID NO: 934324 - RNA, 20 nt, Human
caaaauguuuugaccugaaa

SEQ ID NO: 934325 - RNA, 18 nt, Human
cacgcccgcugcagcugc

SEQ ID NO: 934326 - RNA, 22 nt, Human
cagaaaaugugccccuguagca

SEQ ID NO: 934327 - RNA, 20 nt, Human
cccguccucccccaacucac

SEQ ID NO: 934328 - RNA, 21 nt, Human
cggcaacccguccucccccaa

SEQ ID NO: 934329 - RNA, 20 nt, Human
cucaaugcaaaggaaaacug

SEQ ID NO: 934330 - RNA, 18 nt, Human
cucccccaacucacgccc

SEQ ID NO: 934331 - RNA, 18 nt, Human
cuucuggucuuaacucuu

SEQ ID NO: 934332 - RNA, 22 nt, Human
gcccaccgcggacuccagggcg

SEQ ID NO: 934333 - RNA, 18 nt, Human
uaaaaagccaaaacccuc

SEQ ID NO: 934334 - RNA, 28 nt, Human
uaaaaagccaaaacccucaaugcaaagg

SEQ ID NO: 934335 - RNA, 20 nt, Human
uaaccacagaaaaugugccc

SEQ ID NO: 934336 - RNA, 19 nt, Human
uaacucuucugaauuacac

SEQ ID NO: 934337 - RNA, 23 nt, Human
uacaaauaaaaagccaaaacccu

SEQ ID NO: 934338 - RNA, 18 nt, Human
uagcauguuuuuaaaugg

SEQ ID NO: 934339 - RNA, 24 nt, Human
uauauauauguauacgucucuaca

SEQ ID NO: 934340 - RNA, 20 nt, Human
ucggacaccggauacaggcc

SEQ ID NO: 934341 - RNA, 29 nt, Human
ucucgcccaccgcggacuccagggcgcga

SEQ ID NO: 934342 - RNA, 18 nt, Human
ugucuauauauauguaua

SEQ ID NO: 934343 - RNA, 20 nt, Human
ugucuuguuucuccuagguc

SEQ ID NO: 934344 - RNA, 22 nt, Human
ugucuuguuucuccuaggucaa

SEQ ID NO: 934345 - RNA, 18 nt, Human
ugugucuauauauaugua

SEQ ID NO: 934346 - RNA, 19 nt, Human
ugugucuauauauauguau

SEQ ID NO: 934347 - RNA, 21 nt, Human
ugugucuauauauauguauac

SEQ ID NO: 934348 - RNA, 20 nt, Human
uguuuucugucuuguuucuc

SEQ ID NO: 934349 - RNA, 27 nt, Human
uuccaguacuucuggucuuaacucuuc

SEQ ID NO: 934350 - RNA, 23 nt, Human
uuuacaaauaaaaagccaaaacc

SEQ ID NO: 934351 - RNA, 27 nt, Human
uuuacaaauaaaaagccaaaacccuca

SEQ ID NO: 934352 - RNA, 24 nt, Human
aaaaaaaaaaaaaaagcaaucuuc

SEQ ID NO: 934353 - RNA, 25 nt, Human
aaaaaaaaaaagcaaucuucuagga

SEQ ID NO: 934354 - RNA, 23 nt, Human
aaaguacagaucauuuguaccaa

SEQ ID NO: 934355 - RNA, 19 nt, Human
aacacggucaaaccccguc

SEQ ID NO: 934356 - RNA, 20 nt, Human
aacacggucaaaccccgucu

SEQ ID NO: 934357 - RNA, 21 nt, Human
aacacggucaaaccccgucuc

SEQ ID NO: 934358 - RNA, 24 nt, Human
aacagagcaagauucugucucaaa

SEQ ID NO: 934359 - RNA, 19 nt, Human
aauacaaaaaauuagccgg

SEQ ID NO: 934360 - RNA, 24 nt, Human
acagagcaagauucugucucaaaa

SEQ ID NO: 934361 - RNA, 24 nt, Human
accccgucucuacuaaaaauacaa

SEQ ID NO: 934362 - RNA, 24 nt, Human
accgcgccacugcacuccagccug

SEQ ID NO: 934363 - RNA, 24 nt, Human
acugcacuccagccugggcaacag

SEQ ID NO: 934364 - RNA, 24 nt, Human
acugcacuccagccugggcaacag

SEQ ID NO: 934365 - RNA, 25 nt, Human
agagaaaccaauauucacugaaggg

SEQ ID NO: 934366 - RNA, 24 nt, Human
agagcuugcagugagccgagaccg

SEQ ID NO: 934367 - RNA, 24 nt, Human
agcacuuugggaggcugaggcagg

SEQ ID NO: 934368 - RNA, 23 nt, Human
agccggaugugguggcgggugcc

SEQ ID NO: 934369 - RNA, 24 nt, Human
agccugggcaacagagcaagauuc

SEQ ID NO: 934370 - RNA, 23 nt, Human
agccuguaaucccagcacuuugg

SEQ ID NO: 934371 - RNA, 24 nt, Human
agccuguaaucccagcacuuuggg

SEQ ID NO: 934372 - RNA, 21 nt, Human
aggcagagcuugcagugagcc

SEQ ID NO: 934373 - RNA, 24 nt, Human
aggcagagcuugcagugagccgag

SEQ ID NO: 934374 - RNA, 22 nt, Human
aggcaggagaauggcgugaacc

SEQ ID NO: 934375 - RNA, 24 nt, Human
aggcaggagaauggcgugaaccug

SEQ ID NO: 934376 - RNA, 20 nt, Human
aggcaggcggaucacaaggu

SEQ ID NO: 934377 - RNA, 26 nt, Human
aggcaggcggaucacaaggucaggag

SEQ ID NO: 934378 - RNA, 24 nt, Human
aggcggaucacaaggucaggagau

SEQ ID NO: 934379 - RNA, 19 nt, Human
aggcugaggcaggagaaug

SEQ ID NO: 934380 - RNA, 19 nt, Human
aggcugaggcaggcggauc

SEQ ID NO: 934381 - RNA, 21 nt, Human
aggcugaggcaggcggaucac

SEQ ID NO: 934382 - RNA, 24 nt, Human
caagaccauccuggcuaacacggu

SEQ ID NO: 934383 - RNA, 24 nt, Human
caagccuguaaucccagcacuuug

SEQ ID NO: 934384 - RNA, 19 nt, Human
cacugcacuccagccuggg

SEQ ID NO: 934385 - RNA, 21 nt, Human
cacugcacuccagccugggca

SEQ ID NO: 934386 - RNA, 22 nt, Human
cacugcacuccagccugggcaa

SEQ ID NO: 934387 - RNA, 23 nt, Human
cacugcacuccagccugggcaac

SEQ ID NO: 934388 - RNA, 24 nt, Human
cacugcacuccagccugggcaaca

SEQ ID NO: 934389 - RNA, 26 nt, Human
cacugcacuccagccugggcaacaga

SEQ ID NO: 934390 - RNA, 24 nt, Human
cagcacuuugggaggcugaggcag

SEQ ID NO: 934391 - RNA, 26 nt, Human
cagcacuuugggaggcugaggcaggc

SEQ ID NO: 934392 - RNA, 24 nt, Human
cagcuacucgggaggcugaggcag

SEQ ID NO: 934393 - RNA, 20 nt, Human
caguuaaaaaaaaaaaaaaa

SEQ ID NO: 934394 - RNA, 20 nt, Human
ccacugcacuccagccuggg

SEQ ID NO: 934395 - RNA, 20 nt, Human
ccacugcacuccagccuggg

SEQ ID NO: 934396 - RNA, 21 nt, Human
ccacugcacuccagccugggc

SEQ ID NO: 934397 - RNA, 23 nt, Human
ccacugcacuccagccugggcaa

SEQ ID NO: 934398 - RNA, 24 nt, Human
ccacugcacuccagccugggcaac

SEQ ID NO: 934399 - RNA, 24 nt, Human
cccaagccuguaaucccagcacuu

SEQ ID NO: 934400 - RNA, 19 nt, Human
ccguauuucuaagaguaaa

SEQ ID NO: 934401 - RNA, 23 nt, Human
ccuggcuaacacggucaaacccc

SEQ ID NO: 934402 - RNA, 24 nt, Human
ccuggcuaacacggucaaaccccg

SEQ ID NO: 934403 - RNA, 22 nt, Human
ccugggcaacagagcaagauuc

SEQ ID NO: 934404 - RNA, 19 nt, Human
ccuguagucccagcuacuc

SEQ ID NO: 934405 - RNA, 21 nt, Human
ccuguagucccagcuacucgg

SEQ ID NO: 934406 - RNA, 22 nt, Human
ccuguagucccagcuacucggg

SEQ ID NO: 934407 - RNA, 24 nt, Human
cgagaccgcgccacugcacuccag

SEQ ID NO: 934408 - RNA, 24 nt, Human
cgccacugcacuccagccugggca

SEQ ID NO: 934409 - RNA, 31 nt, Human
cucaaaaaaaaaaaaaaccucuccaggaaaa

SEQ ID NO: 934410 - RNA, 18 nt, Human
cuggcuaacacggucaaa

SEQ ID NO: 934411 - RNA, 23 nt, Human
cugucucaaaaaaaaaaaaaacc

SEQ ID NO: 934412 - RNA, 21 nt, Human
cuugcagugagccgagaccgc

SEQ ID NO: 934413 - RNA, 20 nt, Human
gaaccugggaggcagagcuu

SEQ ID NO: 934414 - RNA, 18 nt, Human
gagcuugcagugagccga

SEQ ID NO: 934415 - RNA, 24 nt, Human
gcacuccagccugggcaacagagc

SEQ ID NO: 934416 - RNA, 22 nt, Human
gccacugcacuccagccugggc

SEQ ID NO: 934417 - RNA, 24 nt, Human
gccacugcacuccagccugggcaa

SEQ ID NO: 934418 - RNA, 20 nt, Human
gccgagaccgcgccacugca

SEQ ID NO: 934419 - RNA, 22 nt, Human
gcugaggcaggagaauggcgug

SEQ ID NO: 934420 - RNA, 21 nt, Human
ggcccaagccuguaaucccag

SEQ ID NO: 934421 - RNA, 23 nt, Human
ggcgcgguggcccaagccuguaa

SEQ ID NO: 934422 - RNA, 23 nt, Human
gguggcccaagccuguaauccca

SEQ ID NO: 934423 - RNA, 24 nt, Human
gguggcccaagccuguaaucccag

SEQ ID NO: 934424 - RNA, 23 nt, Human
guuaaaaaaaaaaaaaaagcaau

SEQ ID NO: 934425 - RNA, 24 nt, Human
uaacacggucaaaccccgucucua

SEQ ID NO: 934426 - RNA, 19 nt, Human
uaacuuguaaaaauucauc

SEQ ID NO: 934427 - RNA, 18 nt, Human
uaauacuggaacuacagu

SEQ ID NO: 934428 - RNA, 26 nt, Human
uacaguuaaaaaaaaaaaaaaagcaa

SEQ ID NO: 934429 - RNA, 21 nt, Human
uagccggaugugguggcgggu

SEQ ID NO: 934430 - RNA, 22 nt, Human
uagccggaugugguggcgggug

SEQ ID NO: 934431 - RNA, 19 nt, Human
uaugaaauauagcuacaaa

SEQ ID NO: 934432 - RNA, 18 nt, Human
ucacaaggucaggagauc

SEQ ID NO: 934433 - RNA, 24 nt, Human
ucacaaggucaggagaucaagacc

SEQ ID NO: 934434 - RNA, 19 nt, Human
uccaggaaaucaauaguca

SEQ ID NO: 934435 - RNA, 25 nt, Human
uccuaacuguaguuuaaaguacaga

SEQ ID NO: 934436 - RNA, 22 nt, Human
ucucuacuaaaaauacaaaaaa

SEQ ID NO: 934437 - RNA, 22 nt, Human
ucugucucaaaaaaaaaaaaaa

SEQ ID NO: 934438 - RNA, 22 nt, Human
ugagccgagaccgcgccacugc

SEQ ID NO: 934439 - RNA, 23 nt, Human
ugaggcaggagaauggcgugaac

SEQ ID NO: 934440 - RNA, 24 nt, Human
ugaggcaggagaauggcgugaacc

SEQ ID NO: 934441 - RNA, 25 nt, Human
ugaggcaggagaauggcgugaaccu

SEQ ID NO: 934442 - RNA, 24 nt, Human
ugaggcaggcggaucacaagguca

SEQ ID NO: 934443 - RNA, 25 nt, Human
ugaggcaggcggaucacaaggucag

SEQ ID NO: 934444 - RNA, 24 nt, Human
ugccuguagucccagcuacucggg

SEQ ID NO: 934445 - RNA, 22 nt, Human
uggcccaagccuguaaucccag

SEQ ID NO: 934446 - RNA, 24 nt, Human
uggcccaagccuguaaucccagca

SEQ ID NO: 934447 - RNA, 24 nt, Human
uggcgggugccuguagucccagcu

SEQ ID NO: 934448 - RNA, 23 nt, Human
uggcugggcgcgguggcccaagc

SEQ ID NO: 934449 - RNA, 18 nt, Human
ugggaggcugaggcaggc

SEQ ID NO: 934450 - RNA, 20 nt, Human
ugggaggcugaggcaggcgg

SEQ ID NO: 934451 - RNA, 24 nt, Human
ugggaggcugaggcaggcggauca

SEQ ID NO: 934452 - RNA, 24 nt, Human
ugguggcgggugccuguaguccca

SEQ ID NO: 934453 - RNA, 24 nt, Human
uguuuggagcuguacgacaaugga

SEQ ID NO: 934454 - RNA, 20 nt, Human
uuaaaguacagaucauuugu

SEQ ID NO: 934455 - RNA, 18 nt, Human
uugcagugagccgagacc

SEQ ID NO: 934456 - RNA, 18 nt, Human
uugcagugagccgagacc

SEQ ID NO: 934457 - RNA, 22 nt, Human
uugcagugagccgagaccgcgc

SEQ ID NO: 934458 - RNA, 25 nt, Human
uugggaggcugaggcaggcggauca

SEQ ID NO: 934459 - RNA, 20 nt, Human
uuuuccacaaauccguucug

SEQ ID NO: 934460 - RNA, 24 nt, Human
aaaaagcaggaguagcaacaccac

SEQ ID NO: 934461 - RNA, 25 nt, Human
aaaagggcaagcguggcagcacagg

SEQ ID NO: 934462 - RNA, 20 nt, Human
aaacaggaaucaacuuuagc

SEQ ID NO: 934463 - RNA, 20 nt, Human
aaacaucccaguaccacuaa

SEQ ID NO: 934464 - RNA, 20 nt, Human
aaagaagacagaggagaagg

SEQ ID NO: 934465 - RNA, 20 nt, Human
aaagacagagucucggucug

SEQ ID NO: 934466 - RNA, 19 nt, Human
aaagugcugggauuacagg

SEQ ID NO: 934467 - RNA, 20 nt, Human
aaagugcugggauuacaggg

SEQ ID NO: 934468 - RNA, 24 nt, Human
aaagugcugggauuacagggguga

SEQ ID NO: 934469 - RNA, 24 nt, Human
aaagugcugggauuacagguguga

SEQ ID NO: 934470 - RNA, 18 nt, Human
aaauucacuccccagccc

SEQ ID NO: 934471 - RNA, 25 nt, Human
aacaaaaaaccccaauguaucaccc

SEQ ID NO: 934472 - RNA, 22 nt, Human
aacagacacaagacguuacaag

SEQ ID NO: 934473 - RNA, 20 nt, Human
aacucuucucucucccacuc

SEQ ID NO: 934474 - RNA, 22 nt, Human
aacucuucucucucccacucug

SEQ ID NO: 934475 - RNA, 22 nt, Human
aagaauacagcaaaaugugaau

SEQ ID NO: 934476 - RNA, 27 nt, Human
aagcaaucccccugccucagcuuccca

SEQ ID NO: 934477 - RNA, 24 nt, Human
aagcaggugaaucaagagggcaag

SEQ ID NO: 934478 - RNA, 24 nt, Human
aagcuuacgcugaaagcaccucag

SEQ ID NO: 934479 - RNA, 19 nt, Human
aagcuuguggagcuuguca

SEQ ID NO: 934480 - RNA, 18 nt, Human
aaggaauccuaagacaga

SEQ ID NO: 934481 - RNA, 20 nt, Human
aaguagcugggacuacaggc

SEQ ID NO: 934482 - RNA, 24 nt, Human
aaguagcugggacuacaggcaugu

SEQ ID NO: 934483 - RNA, 25 nt, Human
aaguagcugggacuacaggcaugug

SEQ ID NO: 934484 - RNA, 18 nt, Human
aagugcugggauuacagg

SEQ ID NO: 934485 - RNA, 18 nt, Human
aagugcugggauuacagg

SEQ ID NO: 934486 - RNA, 21 nt, Human
aagugcugggauuacaggggu

SEQ ID NO: 934487 - RNA, 19 nt, Human
aagugcugggauuacaggu

SEQ ID NO: 934488 - RNA, 23 nt, Human
aauucacuccccagccaccuccc

SEQ ID NO: 934489 - RNA, 20 nt, Human
acaaagcaugucccaggagc

SEQ ID NO: 934490 - RNA, 19 nt, Human
acacacgguuuccccaccu

SEQ ID NO: 934491 - RNA, 19 nt, Human
acagacacaagacguuaca

SEQ ID NO: 934492 - RNA, 24 nt, Human
accacagaaccaagggggcugugg

SEQ ID NO: 934493 - RNA, 21 nt, Human
accacgcccccugguggcaaa

SEQ ID NO: 934494 - RNA, 20 nt, Human
acccgccaccacuccacucc

SEQ ID NO: 934495 - RNA, 19 nt, Human
acccuaaacaucccaguac

SEQ ID NO: 934496 - RNA, 22 nt, Human
acccuaaacaucccaguaccac

SEQ ID NO: 934497 - RNA, 24 nt, Human
accguguuggccaggcuggucuug

SEQ ID NO: 934498 - RNA, 21 nt, Human
accugccugccaaugccucca

SEQ ID NO: 934499 - RNA, 20 nt, Human
accuuggccacccgccacca

SEQ ID NO: 934500 - RNA, 28 nt, Human
acgcaccccuccccggccugggcggcgg

SEQ ID NO: 934501 - RNA, 18 nt, Human
acgggguuucaccguguu

SEQ ID NO: 934502 - RNA, 23 nt, Human
acgggguuucaccguguuggcca

SEQ ID NO: 934503 - RNA, 24 nt, Human
acgggguuucaccguguuggccag

SEQ ID NO: 934504 - RNA, 23 nt, Human
acguuacaaggaucacacccugc

SEQ ID NO: 934505 - RNA, 25 nt, Human
acuauguugcccagacuggucuuga

SEQ ID NO: 934506 - RNA, 21 nt, Human
acucugguccuuccaucagaa

SEQ ID NO: 934507 - RNA, 19 nt, Human
agagacgggguuucaccgu

SEQ ID NO: 934508 - RNA, 21 nt, Human
agagcuccuucccaccugccu

SEQ ID NO: 934509 - RNA, 19 nt, Human
agaggagaagguaggagca

SEQ ID NO: 934510 - RNA, 19 nt, Human
agauaggagcuuggaccag

SEQ ID NO: 934511 - RNA, 20 nt, Human
agauaggagcuuggaccagg

SEQ ID NO: 934512 - RNA, 18 nt, Human
agcacaguucuaccuacc

SEQ ID NO: 934513 - RNA, 22 nt, Human
agcauccagucacuuuggagac

SEQ ID NO: 934514 - RNA, 23 nt, Human
agcugcaagaauacagcaaaaug

SEQ ID NO: 934515 - RNA, 21 nt, Human
agcugguuccgcuacgaccuc

SEQ ID NO: 934516 - RNA, 21 nt, Human
agcuguuacuaccuuaaguau

SEQ ID NO: 934517 - RNA, 21 nt, Human
agcuugucagggaccugggcu

SEQ ID NO: 934518 - RNA, 18 nt, Human
aggagcacagaaucugua

SEQ ID NO: 934519 - RNA, 20 nt, Human
agggggcugugggcgugggg

SEQ ID NO: 934520 - RNA, 20 nt, Human
agggggcugugggcgugggg

SEQ ID NO: 934521 - RNA, 22 nt, Human
agggggcugugggcgugggggu

SEQ ID NO: 934522 - RNA, 19 nt, Human
aguaacggggguuggggaa

SEQ ID NO: 934523 - RNA, 18 nt, Human
aguacccaaacgcccuuc

SEQ ID NO: 934524 - RNA, 18 nt, Human
aguaccucgcaaagugag

SEQ ID NO: 934525 - RNA, 20 nt, Human
aguagagacgggguuucacc

SEQ ID NO: 934526 - RNA, 21 nt, Human
aguagagacgggguuucaccg

SEQ ID NO: 934527 - RNA, 23 nt, Human
aguugagagccaccgccuggggg

SEQ ID NO: 934528 - RNA, 26 nt, Human
auaacggacagccuggcuagcccaca

SEQ ID NO: 934529 - RNA, 19 nt, Human
auccacacacagccucccu

SEQ ID NO: 934530 - RNA, 21 nt, Human
aucccccugccucagcuuccc

SEQ ID NO: 934531 - RNA, 19 nt, Human
auccuuauacgccuuccuc

SEQ ID NO: 934532 - RNA, 20 nt, Human
augaacaaguuucacccaag

SEQ ID NO: 934533 - RNA, 24 nt, Human
augagacagcacagaaccuucuua

SEQ ID NO: 934534 - RNA, 23 nt, Human
auggcaggcaggcagcacaguuc

SEQ ID NO: 934535 - RNA, 22 nt, Human
auggugcugggucacugccacu

SEQ ID NO: 934536 - RNA, 21 nt, Human
auucagaguuugacuuuacuc

SEQ ID NO: 934537 - RNA, 24 nt, Human
auuuuuguauuuuuaguagagacg

SEQ ID NO: 934538 - RNA, 21 nt, Human
caaaaacaccccugaaauuuc

SEQ ID NO: 934539 - RNA, 24 nt, Human
caaagugcugggauuacaggggug

SEQ ID NO: 934540 - RNA, 24 nt, Human
caaagugcugggauuacaggugug

SEQ ID NO: 934541 - RNA, 21 nt, Human
caacucuucucucucccacuc

SEQ ID NO: 934542 - RNA, 22 nt, Human
caacucuucucucucccacucc

SEQ ID NO: 934543 - RNA, 19 nt, Human
caaggaugucacccuaaac

SEQ ID NO: 934544 - RNA, 18 nt, Human
caaguccuuccgacacau

SEQ ID NO: 934545 - RNA, 20 nt, Human
caagugauucuccugccuga

SEQ ID NO: 934546 - RNA, 21 nt, Human
caagugauucuccugccugag

SEQ ID NO: 934547 - RNA, 22 nt, Human
caaguggucucuggguacccaa

SEQ ID NO: 934548 - RNA, 22 nt, Human
caauaccaguacacacaucaaa

SEQ ID NO: 934549 - RNA, 21 nt, Human
cacaagcuagugggaggggag

SEQ ID NO: 934550 - RNA, 21 nt, Human
cacacaauucuaacacaucca

SEQ ID NO: 934551 - RNA, 22 nt, Human
cacacaauucuaacacauccac

SEQ ID NO: 934552 - RNA, 23 nt, Human
cacacaucaaaaacaacuuacuc

SEQ ID NO: 934553 - RNA, 20 nt, Human
cacagaaucuguacuaucca

SEQ ID NO: 934554 - RNA, 24 nt, Human
caccacaccuggcuaauuuuugua

SEQ ID NO: 934555 - RNA, 24 nt, Human
cacccaaacacauccugugcccac

SEQ ID NO: 934556 - RNA, 25 nt, Human
cacccaaacacauccugugcccacc

SEQ ID NO: 934557 - RNA, 25 nt, Human
cacccccccacaaaaaaauacacug

SEQ ID NO: 934558 - RNA, 24 nt, Human
caccccuccccggccugggcggcg

SEQ ID NO: 934559 - RNA, 21 nt, Human
cacccgccaccacuccacucc

SEQ ID NO: 934560 - RNA, 21 nt, Human
caccguguuggccaggcuggu

SEQ ID NO: 934561 - RNA, 23 nt, Human
caccguguuggccaggcuggucu

SEQ ID NO: 934562 - RNA, 24 nt, Human
caccguguuggccaggcuggucuu

SEQ ID NO: 934563 - RNA, 23 nt, Human
caccugccauggccucccaaagu

SEQ ID NO: 934564 - RNA, 24 nt, Human
cacuauguugcccagacuggucuu

SEQ ID NO: 934565 - RNA, 27 nt, Human
cacuauguugcccagacuggucuugaa

SEQ ID NO: 934566 - RNA, 21 nt, Human
cacugcaaccucugccuccug

SEQ ID NO: 934567 - RNA, 23 nt, Human
cacugcaaccucugccuccuggg

SEQ ID NO: 934568 - RNA, 19 nt, Human
cagaggcaugugugugaag

SEQ ID NO: 934569 - RNA, 20 nt, Human
cagccaccucccgagccucg

SEQ ID NO: 934570 - RNA, 18 nt, Human
cagcuggcucuguggaaa

SEQ ID NO: 934571 - RNA, 19 nt, Human
cagggaccugggcuuguca

SEQ ID NO: 934572 - RNA, 24 nt, Human
cauacaggaagaagggcagacucc

SEQ ID NO: 934573 - RNA, 21 nt, Human
cauccuuauacgccuuccucc

SEQ ID NO: 934574 - RNA, 19 nt, Human
cauugcacaccguucccac

SEQ ID NO: 934575 - RNA, 18 nt, Human
cauuugugggcugaugau

SEQ ID NO: 934576 - RNA, 19 nt, Human
ccaaagugcugggauuaca

SEQ ID NO: 934577 - RNA, 20 nt, Human
ccaaagugcugggauuacag

SEQ ID NO: 934578 - RNA, 21 nt, Human
ccaaagugcugggauuacagg

SEQ ID NO: 934579 - RNA, 21 nt, Human
ccaaagugcugggauuacagg

SEQ ID NO: 934580 - RNA, 21 nt, Human
ccaaagugcugggauuacagg

SEQ ID NO: 934581 - RNA, 24 nt, Human
ccaaagugcugggauuacaggggu

SEQ ID NO: 934582 - RNA, 24 nt, Human
ccaaagugcugggauuacaggugu

SEQ ID NO: 934583 - RNA, 23 nt, Human
ccaaguagcugggacuacaggca

SEQ ID NO: 934584 - RNA, 20 nt, Human
ccaccacaccuggcuaauuu

SEQ ID NO: 934585 - RNA, 24 nt, Human
ccaccugccugccaaugccuccag

SEQ ID NO: 934586 - RNA, 20 nt, Human
ccacgcccccugguggcaaa

SEQ ID NO: 934587 - RNA, 24 nt, Human
ccacuccacuccuuuuccacacac

SEQ ID NO: 934588 - RNA, 19 nt, Human
ccacugcaccuggccuugg

SEQ ID NO: 934589 - RNA, 19 nt, Human
ccacugcaccuggccuugg

SEQ ID NO: 934590 - RNA, 19 nt, Human
ccacugcaccuggccuugg

SEQ ID NO: 934591 - RNA, 20 nt, Human
ccacugcaccuggccuuggu

SEQ ID NO: 934592 - RNA, 21 nt, Human
ccacugcaccuggccuuggug

SEQ ID NO: 934593 - RNA, 20 nt, Human
ccagaaaauucacuccccag

SEQ ID NO: 934594 - RNA, 18 nt, Human
ccagcaaccuucccacag

SEQ ID NO: 934595 - RNA, 21 nt, Human
ccagcugauggugaagccuca

SEQ ID NO: 934596 - RNA, 22 nt, Human
cccaaacgcccuucgcucaguc

SEQ ID NO: 934597 - RNA, 23 nt, Human
cccaaacgcccuucgcucagucc

SEQ ID NO: 934598 - RNA, 18 nt, Human
cccacagagacaguaacg

SEQ ID NO: 934599 - RNA, 23 nt, Human
cccauggugcggaagaauggagc

SEQ ID NO: 934600 - RNA, 21 nt, Human
ccccaaagacccaggguccuc

SEQ ID NO: 934601 - RNA, 22 nt, Human
ccccacaaaaaaauacacugua

SEQ ID NO: 934602 - RNA, 24 nt, Human
cccccugccucagcuucccaaagu

SEQ ID NO: 934603 - RNA, 18 nt, Human
ccccuccccggccugggc

SEQ ID NO: 934604 - RNA, 19 nt, Human
ccgccaccacuccacuccu

SEQ ID NO: 934605 - RNA, 21 nt, Human
ccuaaauccaaggcucagucu

SEQ ID NO: 934606 - RNA, 24 nt, Human
ccuacagcuggggcauccuuauac

SEQ ID NO: 934607 - RNA, 22 nt, Human
ccucaagagcagugccuggccc

SEQ ID NO: 934608 - RNA, 23 nt, Human
ccuccaacgcuccagcccaggca

SEQ ID NO: 934609 - RNA, 24 nt, Human
ccuccuggguucaagugauucucc

SEQ ID NO: 934610 - RNA, 22 nt, Human
ccucugccuccuggguucaagu

SEQ ID NO: 934611 - RNA, 21 nt, Human
ccugacacuaacgcaccccuc

SEQ ID NO: 934612 - RNA, 21 nt, Human
ccugaccucaagugauccacc

SEQ ID NO: 934613 - RNA, 23 nt, Human
ccugaccucaagugauccaccug

SEQ ID NO: 934614 - RNA, 23 nt, Human
ccugaccucaagugauccaccug

SEQ ID NO: 934615 - RNA, 23 nt, Human
ccugccaaugccuccaacgcucc

SEQ ID NO: 934616 - RNA, 20 nt, Human
ccuggacucaagcaaucccc

SEQ ID NO: 934617 - RNA, 23 nt, Human
ccuggguucaagugauucuccuc

SEQ ID NO: 934618 - RNA, 23 nt, Human
ccuggguucaagugauucuccug

SEQ ID NO: 934619 - RNA, 19 nt, Human
ccugugaacacugcaguga

SEQ ID NO: 934620 - RNA, 21 nt, Human
ccuugacaaccccucuuauug

SEQ ID NO: 934621 - RNA, 19 nt, Human
cgcagaacuaggagacugc

SEQ ID NO: 934622 - RNA, 23 nt, Human
cgccuuccagaaaauucacuccc

SEQ ID NO: 934623 - RNA, 23 nt, Human
cggcggcgacggcaguacccaaa

SEQ ID NO: 934624 - RNA, 24 nt, Human
cguguuggccaggcuggucuugaa

SEQ ID NO: 934625 - RNA, 22 nt, Human
cuaacgcaccccuccccggccu

SEQ ID NO: 934626 - RNA, 21 nt, Human
cuaagacaaaaauagagaacc

SEQ ID NO: 934627 - RNA, 23 nt, Human
cuaauuuuuguauuuuuaguaga

SEQ ID NO: 934628 - RNA, 21 nt, Human
cucaaacaccuauugaacgcu

SEQ ID NO: 934629 - RNA, 24 nt, Human
cucaagcaaucccccugccucagc

SEQ ID NO: 934630 - RNA, 20 nt, Human
cucacaaaguccacucacca

SEQ ID NO: 934631 - RNA, 24 nt, Human
cucacugcaaccucugccuccugg

SEQ ID NO: 934632 - RNA, 20 nt, Human
cucagggagagucucuuuau

SEQ ID NO: 934633 - RNA, 24 nt, Human
cuccagcaccucaagagcagugcc

SEQ ID NO: 934634 - RNA, 20 nt, Human
cuccuggguucaagugauuc

SEQ ID NO: 934635 - RNA, 21 nt, Human
cuccuggguucaagugauucu

SEQ ID NO: 934636 - RNA, 22 nt, Human
cugacacuaacgcaccccuccc

SEQ ID NO: 934637 - RNA, 24 nt, Human
cugaguugaccaaguagcugggac

SEQ ID NO: 934638 - RNA, 19 nt, Human
cugcaaccucugccuccug

SEQ ID NO: 934639 - RNA, 23 nt, Human
cugcaaccucugccuccuggguu

SEQ ID NO: 934640 - RNA, 24 nt, Human
cugcaaccucugccuccuggguuc

SEQ ID NO: 934641 - RNA, 20 nt, Human
cugcagugagagcuccuucc

SEQ ID NO: 934642 - RNA, 23 nt, Human
cugccucagcuucccaaagugcu

SEQ ID NO: 934643 - RNA, 24 nt, Human
cugccucagcuucccaaagugcug

SEQ ID NO: 934644 - RNA, 23 nt, Human
cugccuccuggguucaagugauu

SEQ ID NO: 934645 - RNA, 23 nt, Human
cuggaguggcuugaucucagcuc

SEQ ID NO: 934646 - RNA, 26 nt, Human
cugucacccaggcuggaguggcuuga

SEQ ID NO: 934647 - RNA, 18 nt, Human
cugugcccaccacagaac

SEQ ID NO: 934648 - RNA, 20 nt, Human
cuugucagggaccugggcuu

SEQ ID NO: 934649 - RNA, 25 nt, Human
gaaauuucugaacaaugagacaaag

SEQ ID NO: 934650 - RNA, 22 nt, Human
gaaggaauauccaaauucaaaa

SEQ ID NO: 934651 - RNA, 21 nt, Human
gacaacuccaggaggcacgag

SEQ ID NO: 934652 - RNA, 22 nt, Human
gacacuaacgcaccccuccccg

SEQ ID NO: 934653 - RNA, 24 nt, Human
gaccaaguagcugggacuacaggc

SEQ ID NO: 934654 - RNA, 22 nt, Human
gaccucaagugauccaccugcc

SEQ ID NO: 934655 - RNA, 21 nt, Human
gacuccaaguccuuccgacac

SEQ ID NO: 934656 - RNA, 20 nt, Human
gacuuuacucacacccaaac

SEQ ID NO: 934657 - RNA, 24 nt, Human
gagacgggguuucaccguguuggc

SEQ ID NO: 934658 - RNA, 22 nt, Human
gagagaugggaucucacuaugu

SEQ ID NO: 934659 - RNA, 19 nt, Human
gagcuugucagggaccugg

SEQ ID NO: 934660 - RNA, 20 nt, Human
gauaaggaauccuaagacag

SEQ ID NO: 934661 - RNA, 19 nt, Human
gauuacaggggugagcuac

SEQ ID NO: 934662 - RNA, 18 nt, Human
gauuacaggugugagcca

SEQ ID NO: 934663 - RNA, 22 nt, Human
gauuacaggugugagccacugc

SEQ ID NO: 934664 - RNA, 23 nt, Human
gauuacaggugugagccacugca

SEQ ID NO: 934665 - RNA, 22 nt, Human
gcaaccucugccuccuggguuc

SEQ ID NO: 934666 - RNA, 21 nt, Human
gcaguacccaaacgcccuucg

SEQ ID NO: 934667 - RNA, 19 nt, Human
gcagugcuuccaagugcgc

SEQ ID NO: 934668 - RNA, 23 nt, Human
gccacccgccaccacuccacucc

SEQ ID NO: 934669 - RNA, 24 nt, Human
gccucagcuucccaaagugcuggg

SEQ ID NO: 934670 - RNA, 18 nt, Human
gccugggggugcaagcuc

SEQ ID NO: 934671 - RNA, 20 nt, Human
gcucgguuuucaaugagaca

SEQ ID NO: 934672 - RNA, 20 nt, Human
gcugaugaugacauacagga

SEQ ID NO: 934673 - RNA, 23 nt, Human
gcuggucuugaacuccugaccuc

SEQ ID NO: 934674 - RNA, 20 nt, Human
gcuuacgcugaaagcaccuc

SEQ ID NO: 934675 - RNA, 19 nt, Human
ggacuacaggcaugugcca

SEQ ID NO: 934676 - RNA, 23 nt, Human
ggaggggaguguggaagaagccg

SEQ ID NO: 934677 - RNA, 19 nt, Human
ggcauuugaggaugcagaa

SEQ ID NO: 934678 - RNA, 20 nt, Human
ggcuagcucuccucccagga

SEQ ID NO: 934679 - RNA, 24 nt, Human
ggcuggucuugaacuccugaccuc

SEQ ID NO: 934680 - RNA, 18 nt, Human
gggcggcggcgacggcag

SEQ ID NO: 934681 - RNA, 20 nt, Human
gggcggcggcgacggcagua

SEQ ID NO: 934682 - RNA, 23 nt, Human
gggguuucaccguguuggccagg

SEQ ID NO: 934683 - RNA, 22 nt, Human
ggguuucaccguguuggccagg

SEQ ID NO: 934684 - RNA, 19 nt, Human
ggucuugaacuccugaccu

SEQ ID NO: 934685 - RNA, 23 nt, Human
guagagacgggguuucaccgugu

SEQ ID NO: 934686 - RNA, 24 nt, Human
gugauccaccugccauggccuccc

SEQ ID NO: 934687 - RNA, 19 nt, Human
guuuccccaccuugccccu

SEQ ID NO: 934688 - RNA, 21 nt, Human
uaaaauaccaacccaauagca

SEQ ID NO: 934689 - RNA, 22 nt, Human
uaaagacagagucucggucugu

SEQ ID NO: 934690 - RNA, 19 nt, Human
uaacagacacaagacguua

SEQ ID NO: 934691 - RNA, 24 nt, Human
uaagacaaaaauagagaaccccaa

SEQ ID NO: 934692 - RNA, 22 nt, Human
uaaggagggagagcagccccca

SEQ ID NO: 934693 - RNA, 24 nt, Human
uaauuuuuguauuuuuaguagaga

SEQ ID NO: 934694 - RNA, 21 nt, Human
uacaaaaacaccccugaaauu

SEQ ID NO: 934695 - RNA, 22 nt, Human
uacaggcaugugccaccacacc

SEQ ID NO: 934696 - RNA, 23 nt, Human
uacaggggugagcuacggcgccu

SEQ ID NO: 934697 - RNA, 22 nt, Human
uacaggugugagccacugcacc

SEQ ID NO: 934698 - RNA, 22 nt, Human
uacaggugugagccacugcacc

SEQ ID NO: 934699 - RNA, 23 nt, Human
uacaggugugagccacugcaccu

SEQ ID NO: 934700 - RNA, 19 nt, Human
uaccaguacacacaucaaa

SEQ ID NO: 934701 - RNA, 19 nt, Human
uaccuuaaguauacauugg

SEQ ID NO: 934702 - RNA, 20 nt, Human
uagcucuccucccaggaggu

SEQ ID NO: 934703 - RNA, 22 nt, Human
uagcuucaguguuucacugagc

SEQ ID NO: 934704 - RNA, 21 nt, Human
uaguagagacgggguuucacc

SEQ ID NO: 934705 - RNA, 24 nt, Human
uaguagagacgggguuucaccgug

SEQ ID NO: 934706 - RNA, 21 nt, Human
uaugcaaacaaaaaaccccaa

SEQ ID NO: 934707 - RNA, 19 nt, Human
uauguugcccagacugguc

SEQ ID NO: 934708 - RNA, 20 nt, Human
uauguugcccagacuggucu

SEQ ID NO: 934709 - RNA, 23 nt, Human
uauguugcccagacuggucuuga

SEQ ID NO: 934710 - RNA, 24 nt, Human
uauguugcccagacuggucuugaa

SEQ ID NO: 934711 - RNA, 19 nt, Human
ucaagugauucuccugccu

SEQ ID NO: 934712 - RNA, 21 nt, Human
ucacccaggcuggaguggcuu

SEQ ID NO: 934713 - RNA, 24 nt, Human
ucaccguguuggccaggcuggucu

SEQ ID NO: 934714 - RNA, 21 nt, Human
ucacgccagaugggaagagga

SEQ ID NO: 934715 - RNA, 23 nt, Human
ucacuccccagccaccucccgag

SEQ ID NO: 934716 - RNA, 24 nt, Human
ucacuccccagccaccucccgagc

SEQ ID NO: 934717 - RNA, 23 nt, Human
ucacugcaaccucugccuccugg

SEQ ID NO: 934718 - RNA, 24 nt, Human
ucacugcaaccucugccuccuggg

SEQ ID NO: 934719 - RNA, 27 nt, Human
ucacugcaaccucugccuccuggguuc

SEQ ID NO: 934720 - RNA, 25 nt, Human
ucacugccacugaaugcauuugugg

SEQ ID NO: 934721 - RNA, 21 nt, Human
uccacacacgguuuccccacc

SEQ ID NO: 934722 - RNA, 18 nt, Human
uccagcccaggcagugcu

SEQ ID NO: 934723 - RNA, 23 nt, Human
ucccaaagugcugggauuacagg

SEQ ID NO: 934724 - RNA, 23 nt, Human
ucccaaagugcugggauuacagg

SEQ ID NO: 934725 - RNA, 19 nt, Human
ucccaggagguucacuggg

SEQ ID NO: 934726 - RNA, 19 nt, Human
ucccauuagcuucaguguu

SEQ ID NO: 934727 - RNA, 19 nt, Human
uccccaaagacccaggguc

SEQ ID NO: 934728 - RNA, 21 nt, Human
uccccagccaccucccgagcc

SEQ ID NO: 934729 - RNA, 23 nt, Human
uccccagccaccucccgagccuc

SEQ ID NO: 934730 - RNA, 21 nt, Human
uccccggccugggcggcggcg

SEQ ID NO: 934731 - RNA, 22 nt, Human
ucccggcgccuuuaaagucgcc

SEQ ID NO: 934732 - RNA, 20 nt, Human
uccuaaauccaaggcucagu

SEQ ID NO: 934733 - RNA, 20 nt, Human
uccuagucuaccuuggccac

SEQ ID NO: 934734 - RNA, 21 nt, Human
uccuggguucaagugauucuc

SEQ ID NO: 934735 - RNA, 24 nt, Human
uccuggguucaagugauucuccug

SEQ ID NO: 934736 - RNA, 24 nt, Human
ucggucugucacccaggcuggagu

SEQ ID NO: 934737 - RNA, 22 nt, Human
ucuagauuauuauuuuuuugag

SEQ ID NO: 934738 - RNA, 19 nt, Human
ucucacuauguugcccaga

SEQ ID NO: 934739 - RNA, 26 nt, Human
ucucacuauguugcccagacuggucu

SEQ ID NO: 934740 - RNA, 23 nt, Human
ucucggucugucacccaggcugg

SEQ ID NO: 934741 - RNA, 24 nt, Human
ucucggucugucacccaggcugga

SEQ ID NO: 934742 - RNA, 27 nt, Human
ucucuggguacccacucuuccuagucu

SEQ ID NO: 934743 - RNA, 19 nt, Human
ucugucacccaggcuggag

SEQ ID NO: 934744 - RNA, 22 nt, Human
ucugucacccaggcuggagugg

SEQ ID NO: 934745 - RNA, 19 nt, Human
ucuguggaaacuccuuacc

SEQ ID NO: 934746 - RNA, 23 nt, Human
ucuuccagcugauggugaagccu

SEQ ID NO: 934747 - RNA, 21 nt, Human
ucuugaacuccugaccucaag

SEQ ID NO: 934748 - RNA, 23 nt, Human
ucuugaacuccuggacucaagca

SEQ ID NO: 934749 - RNA, 23 nt, Human
ugaaagcaccucagggagagucu

SEQ ID NO: 934750 - RNA, 18 nt, Human
ugaaaggaagguaaggaa

SEQ ID NO: 934751 - RNA, 25 nt, Human
ugaacuccuggacucaagcaauccc

SEQ ID NO: 934752 - RNA, 19 nt, Human
ugaaucccuggccuggcag

SEQ ID NO: 934753 - RNA, 18 nt, Human
ugaaugcauuugugggcu

SEQ ID NO: 934754 - RNA, 18 nt, Human
ugacagucuguuaauaac

SEQ ID NO: 934755 - RNA, 19 nt, Human
ugaccucaagugauccacc

SEQ ID NO: 934756 - RNA, 22 nt, Human
ugacuggcucgguuuucaauga

SEQ ID NO: 934757 - RNA, 19 nt, Human
ugagaggcaacagcacaca

SEQ ID NO: 934758 - RNA, 22 nt, Human
ugagcacuucuuauggauccca

SEQ ID NO: 934759 - RNA, 18 nt, Human
ugauggugcugggucacu

SEQ ID NO: 934760 - RNA, 21 nt, Human
ugcacaccguucccacucuau

SEQ ID NO: 934761 - RNA, 22 nt, Human
ugcaccagcaaccuucccacag

SEQ ID NO: 934762 - RNA, 24 nt, Human
ugcagaaaauugaacuaagacaaa

SEQ ID NO: 934763 - RNA, 21 nt, Human
ugccaaugccuccaacgcucc

SEQ ID NO: 934764 - RNA, 24 nt, Human
ugcccagacuggucuugaacuccu

SEQ ID NO: 934765 - RNA, 24 nt, Human
ugccucagcuucccaaagugcugg

SEQ ID NO: 934766 - RNA, 22 nt, Human
ugccuccuggguucaagugauu

SEQ ID NO: 934767 - RNA, 18 nt, Human
ugccugugaacacugcag

SEQ ID NO: 934768 - RNA, 24 nt, Human
ugcugggauuacaggugugagcca

SEQ ID NO: 934769 - RNA, 24 nt, Human
uggaaacuccuuaccgacauccgu

SEQ ID NO: 934770 - RNA, 24 nt, Human
uggagaaagaaaacuggguggcua

SEQ ID NO: 934771 - RNA, 24 nt, Human
uggcaggaauaaacaaagcauguc

SEQ ID NO: 934772 - RNA, 20 nt, Human
uggcauuugaggaugcagaa

SEQ ID NO: 934773 - RNA, 24 nt, Human
uggccaggcuggucuugaacuccu

SEQ ID NO: 934774 - RNA, 18 nt, Human
uggccagggcuagcucuc

SEQ ID NO: 934775 - RNA, 24 nt, Human
uggcuugaucucagcucacugcaa

SEQ ID NO: 934776 - RNA, 18 nt, Human
ugggaagaggaguuaacu

SEQ ID NO: 934777 - RNA, 23 nt, Human
ugggaagaggaguuaacuucuga

SEQ ID NO: 934778 - RNA, 18 nt, Human
ugggacuacaggcaugug

SEQ ID NO: 934779 - RNA, 21 nt, Human
ugggacuacaggcaugugcca

SEQ ID NO: 934780 - RNA, 22 nt, Human
ugggacuacaggcaugugccac

SEQ ID NO: 934781 - RNA, 24 nt, Human
ugggacuacaggcaugugccacca

SEQ ID NO: 934782 - RNA, 18 nt, Human
ugggaucucacuauguug

SEQ ID NO: 934783 - RNA, 23 nt, Human
ugggaucucacuauguugcccag

SEQ ID NO: 934784 - RNA, 18 nt, Human
ugggauuacaggggugag

SEQ ID NO: 934785 - RNA, 19 nt, Human
ugggauuacaggggugagc

SEQ ID NO: 934786 - RNA, 19 nt, Human
ugggauuacaggggugagc

SEQ ID NO: 934787 - RNA, 22 nt, Human
ugggauuacaggggugagcuac

SEQ ID NO: 934788 - RNA, 22 nt, Human
ugggauuacaggggugagcuac

SEQ ID NO: 934789 - RNA, 19 nt, Human
ugggauuacaggugugagc

SEQ ID NO: 934790 - RNA, 21 nt, Human
ugggauuacaggugugagcca

SEQ ID NO: 934791 - RNA, 22 nt, Human
ugggauuacaggugugagccac

SEQ ID NO: 934792 - RNA, 22 nt, Human
ugggauuacaggugugagccac

SEQ ID NO: 934793 - RNA, 24 nt, Human
ugggauuacaggugugagccacug

SEQ ID NO: 934794 - RNA, 19 nt, Human
uggggaauagggcugcuga

SEQ ID NO: 934795 - RNA, 21 nt, Human
ugggguuggcauuugaggaug

SEQ ID NO: 934796 - RNA, 23 nt, Human
uggguucaagugauucuccugcc

SEQ ID NO: 934797 - RNA, 24 nt, Human
uggguucaagugauucuccugccu

SEQ ID NO: 934798 - RNA, 21 nt, Human
uguauuuuuaguagagacggg

SEQ ID NO: 934799 - RNA, 20 nt, Human
ugucacccuaaacaucccag

SEQ ID NO: 934800 - RNA, 23 nt, Human
ugugcagaagacagucccaguuc

SEQ ID NO: 934801 - RNA, 22 nt, Human
uguucugacaacuccaggaggc

SEQ ID NO: 934802 - RNA, 21 nt, Human
uguuggcaccauucaauggag

SEQ ID NO: 934803 - RNA, 18 nt, Human
uuaguagagacgggguuu

SEQ ID NO: 934804 - RNA, 22 nt, Human
uuaguagagacgggguuucacc

SEQ ID NO: 934805 - RNA, 24 nt, Human
uuaguagagacgggguuucaccgu

SEQ ID NO: 934806 - RNA, 25 nt, Human
uucaagugauucuccugccugaguu

SEQ ID NO: 934807 - RNA, 20 nt, Human
uuccagaaaauucacucccc

SEQ ID NO: 934808 - RNA, 19 nt, Human
uuccugguuacaccuguuu

SEQ ID NO: 934809 - RNA, 22 nt, Human
uugccccuguugugcuuacaua

SEQ ID NO: 934810 - RNA, 23 nt, Human
uuguauuuuuaguagagacgggg

SEQ ID NO: 934811 - RNA, 23 nt, Human
uuuaaaauaccaacccaauagca

SEQ ID NO: 934812 - RNA, 24 nt, Human
uuucaccguguuggccaggcuggu

SEQ ID NO: 934813 - RNA, 20 nt, Human
uuucauggcagaccccaugg

SEQ ID NO: 934814 - RNA, 22 nt, Human
uuucauggcagaccccauggcu

SEQ ID NO: 934815 - RNA, 24 nt, Human
uuuccccaccuugccccuguugug

SEQ ID NO: 934816 - RNA, 24 nt, Human
uuuuaagaucugcugucaucuugg

SEQ ID NO: 934817 - RNA, 21 nt, Human
uuuuccugguuacaccuguuu

SEQ ID NO: 934818 - RNA, 21 nt, Human
uuuugagagaugggaucucac

SEQ ID NO: 934819 - RNA, 24 nt, Human
uuuuuaguagagacgggguuucac

SEQ ID NO: 934820 - RNA, 20 nt, Human
uuuuuguauuuuuaguagag

SEQ ID NO: 934821 - RNA, 19 nt, Human
aaaaugaggaaggagugga

SEQ ID NO: 934822 - RNA, 20 nt, Human
acagugcugggggcacugcu

SEQ ID NO: 934823 - RNA, 21 nt, Human
agcaaaaugaggaaggagugg

SEQ ID NO: 934824 - RNA, 20 nt, Human
agcagcgucccaguccuggc

SEQ ID NO: 934825 - RNA, 20 nt, Human
aggcagccacgagccagaga

SEQ ID NO: 934826 - RNA, 18 nt, Human
agggcgggcccugguguc

SEQ ID NO: 934827 - RNA, 18 nt, Human
cacgagccagagaggagc

SEQ ID NO: 934828 - RNA, 21 nt, Human
cagugcugggggcacugcugg

SEQ ID NO: 934829 - RNA, 18 nt, Human
ccagcagcagcgucccag

SEQ ID NO: 934830 - RNA, 18 nt, Human
ccagcagcagcgucccag

SEQ ID NO: 934831 - RNA, 23 nt, Human
ccagcccagccccucaccgaccc

SEQ ID NO: 934832 - RNA, 20 nt, Human
ccgucugcaacacucagaag

SEQ ID NO: 934833 - RNA, 18 nt, Human
ccuggcagggcuggccca

SEQ ID NO: 934834 - RNA, 24 nt, Human
ccugggagacgacaggcucccucu

SEQ ID NO: 934835 - RNA, 25 nt, Human
ccugguguccagcccagccccucac

SEQ ID NO: 934836 - RNA, 21 nt, Human
cuagaaucagcagcaaaauga

SEQ ID NO: 934837 - RNA, 25 nt, Human
cuccugccacaggcuggccugaugg

SEQ ID NO: 934838 - RNA, 27 nt, Human
gaaaaagcucaaccuguuuuguuuggg

SEQ ID NO: 934839 - RNA, 20 nt, Human
gcaacacucagaaggcagcc

SEQ ID NO: 934840 - RNA, 18 nt, Human
gcaagguggggacagugc

SEQ ID NO: 934841 - RNA, 20 nt, Human
ggacccagggcagggagcag

SEQ ID NO: 934842 - RNA, 24 nt, Human
ggaggacacagucugggacccagg

SEQ ID NO: 934843 - RNA, 19 nt, Human
ggcacugcuggcuccacug

SEQ ID NO: 934844 - RNA, 18 nt, Human
gggccaggcgccagcagc

SEQ ID NO: 934845 - RNA, 22 nt, Human
gggcuggcccaggccccccuuc

SEQ ID NO: 934846 - RNA, 20 nt, Human
gguucugggcccuagcaagg

SEQ ID NO: 934847 - RNA, 20 nt, Human
guggggacagugcugggggc

SEQ ID NO: 934848 - RNA, 24 nt, Human
uccagcccagccccucaccgaccc

SEQ ID NO: 934849 - RNA, 24 nt, Human
ucuccugccacaggcuggccugau

SEQ ID NO: 934850 - RNA, 21 nt, Human
ugaggaaggaguggagcucag

SEQ ID NO: 934851 - RNA, 19 nt, Human
ugaggggaggaaaaagcuc

SEQ ID NO: 934852 - RNA, 20 nt, Human
uggaggacacagucugggac

SEQ ID NO: 934853 - RNA, 21 nt, Human
uggcagggcuggcccaggccc

SEQ ID NO: 934854 - RNA, 21 nt, Human
uggcuccacuggcagggcagg

SEQ ID NO: 934855 - RNA, 20 nt, Human
uuuuuuuuuuugaacagaac

SEQ ID NO: 934856 - RNA, 24 nt, Human
aaaaagaaaaaaagaugaggaaaa

SEQ ID NO: 934857 - RNA, 20 nt, Human
aacaugguaaaacccugucu

SEQ ID NO: 934858 - RNA, 21 nt, Human
aacaugguaaaacccugucuc

SEQ ID NO: 934859 - RNA, 24 nt, Human
aagaaccuuuauuuaaccuaccaa

SEQ ID NO: 934860 - RNA, 24 nt, Human
aaucacuugaacccgggaggcaga

SEQ ID NO: 934861 - RNA, 19 nt, Human
acaaaaaguacaugaccuc

SEQ ID NO: 934862 - RNA, 24 nt, Human
acagagagagacucugccucaaaa

SEQ ID NO: 934863 - RNA, 18 nt, Human
acagagcaggagaggaaa

SEQ ID NO: 934864 - RNA, 21 nt, Human
acagccaggcugcccaaagcc

SEQ ID NO: 934865 - RNA, 21 nt, Human
accaaacuaaaagagcaauaa

SEQ ID NO: 934866 - RNA, 24 nt, Human
accaacaugguaaaacccugucuc

SEQ ID NO: 934867 - RNA, 24 nt, Human
acccugucucuacuaaaaauacaa

SEQ ID NO: 934868 - RNA, 24 nt, Human
accugaggucaggaguuugagacc

SEQ ID NO: 934869 - RNA, 20 nt, Human
acugcaguugguggcucaga

SEQ ID NO: 934870 - RNA, 22 nt, Human
acuucagccugggggacagaga

SEQ ID NO: 934871 - RNA, 21 nt, Human
acuuguaggcuuuauuuccuc

SEQ ID NO: 934872 - RNA, 22 nt, Human
agaaucacuugaacccgggagg

SEQ ID NO: 934873 - RNA, 26 nt, Human
agaauccucugcugccaccucugcuc

SEQ ID NO: 934874 - RNA, 18 nt, Human
agagcaauaaaauaaaaa

SEQ ID NO: 934875 - RNA, 18 nt, Human
agagguugcagugagcug

SEQ ID NO: 934876 - RNA, 22 nt, Human
agagguugcagugagcugagau

SEQ ID NO: 934877 - RNA, 23 nt, Human
agagguugcagugagcugagauc

SEQ ID NO: 934878 - RNA, 24 nt, Human
agagguugcagugagcugagauca

SEQ ID NO: 934879 - RNA, 20 nt, Human
agagguugcagugagcuggc

SEQ ID NO: 934880 - RNA, 24 nt, Human
agcacuuugggaggccgaggcagg

SEQ ID NO: 934881 - RNA, 23 nt, Human
agccaggugugguggugggugcc

SEQ ID NO: 934882 - RNA, 24 nt, Human
agccugggggacagagagagacuc

SEQ ID NO: 934883 - RNA, 19 nt, Human
aggaauggaaucaaaauau

SEQ ID NO: 934884 - RNA, 20 nt, Human
aggaguuugagaccagccug

SEQ ID NO: 934885 - RNA, 20 nt, Human
aggcagagguugcagugagc

SEQ ID NO: 934886 - RNA, 24 nt, Human
aggcagagguugcagugagcugag

SEQ ID NO: 934887 - RNA, 18 nt, Human
aggcaggagaaucacuug

SEQ ID NO: 934888 - RNA, 24 nt, Human
aggcaggagaaucacuugaacccg

SEQ ID NO: 934889 - RNA, 18 nt, Human
aggcagguggaucaccug

SEQ ID NO: 934890 - RNA, 22 nt, Human
aggcagguggaucaccugaggu

SEQ ID NO: 934891 - RNA, 26 nt, Human
aggcagguggaucaccugaggucagg

SEQ ID NO: 934892 - RNA, 21 nt, Human
aggccgaggcagguggaucac

SEQ ID NO: 934893 - RNA, 24 nt, Human
aggcugaggcaggagaaucacuug

SEQ ID NO: 934894 - RNA, 18 nt, Human
aggcugugugucgccgug

SEQ ID NO: 934895 - RNA, 22 nt, Human
agguggaucaccugaggucagg

SEQ ID NO: 934896 - RNA, 24 nt, Human
aggugugguggugggugccuguaa

SEQ ID NO: 934897 - RNA, 21 nt, Human
agugaaaaaggaaaacccaaa

SEQ ID NO: 934898 - RNA, 21 nt, Human
agugaaaaaggaaaacccaaa

SEQ ID NO: 934899 - RNA, 24 nt, Human
aguggcucacgccuguaaucccag

SEQ ID NO: 934900 - RNA, 24 nt, Human
auaggccgggcgcaguggcucacg

SEQ ID NO: 934901 - RNA, 20 nt, Human
aucaccugaggucaggaguu

SEQ ID NO: 934902 - RNA, 24 nt, Human
aucaccugaggucaggaguuugag

SEQ ID NO: 934903 - RNA, 24 nt, Human
aucaugccgcugcacuucagccug

SEQ ID NO: 934904 - RNA, 22 nt, Human
auuaauuucacacuuguaggcu

SEQ ID NO: 934905 - RNA, 22 nt, Human
caaaaaaaagaaaaaaagauga

SEQ ID NO: 934906 - RNA, 21 nt, Human
caaaaaacugcagaacucuac

SEQ ID NO: 934907 - RNA, 19 nt, Human
caaagucuucauugcugac

SEQ ID NO: 934908 - RNA, 24 nt, Human
caacaugguaaaacccugucucua

SEQ ID NO: 934909 - RNA, 22 nt, Human
cacagccaggcugcccaaagcc

SEQ ID NO: 934910 - RNA, 23 nt, Human
cacauaaaaauaaaucugacauu

SEQ ID NO: 934911 - RNA, 23 nt, Human
caccugaggucaggaguuugaga

SEQ ID NO: 934912 - RNA, 24 nt, Human
cacgccuguaaucccagcacuuug

SEQ ID NO: 934913 - RNA, 19 nt, Human
cacuagccggaaaaagcuc

SEQ ID NO: 934914 - RNA, 24 nt, Human
cacugaccaauacagagaaaaggg

SEQ ID NO: 934915 - RNA, 26 nt, Human
cacuucagccugggggacagagagag

SEQ ID NO: 934916 - RNA, 24 nt, Human
cagcacuuugggaggccgaggcag

SEQ ID NO: 934917 - RNA, 26 nt, Human
cagcacuuugggaggccgaggcaggu

SEQ ID NO: 934918 - RNA, 23 nt, Human
cagcauacacagggauccacaua

SEQ ID NO: 934919 - RNA, 22 nt, Human
cagccugggggacagagagaga

SEQ ID NO: 934920 - RNA, 24 nt, Human
cagcuacucaggaggcugaggcag

SEQ ID NO: 934921 - RNA, 23 nt, Human
caggaaggguuagaagaauagug

SEQ ID NO: 934922 - RNA, 24 nt, Human
caggaggcugaggcaggagaauca

SEQ ID NO: 934923 - RNA, 18 nt, Human
caggcugcccaaagccaa

SEQ ID NO: 934924 - RNA, 21 nt, Human
caggcugcccaaagccaaagg

SEQ ID NO: 934925 - RNA, 24 nt, Human
cagguggaucaccugaggucagga

SEQ ID NO: 934926 - RNA, 20 nt, Human
cccaaagccaaaggagccac

SEQ ID NO: 934927 - RNA, 19 nt, Human
ccgcugcacuucagccugg

SEQ ID NO: 934928 - RNA, 22 nt, Human
ccgcugcacuucagccuggggg

SEQ ID NO: 934929 - RNA, 24 nt, Human
ccgcugcacuucagccugggggac

SEQ ID NO: 934930 - RNA, 21 nt, Human
ccucugcugccaccucugcuc

SEQ ID NO: 934931 - RNA, 22 nt, Human
ccugaccaacaugguaaaaccc

SEQ ID NO: 934932 - RNA, 24 nt, Human
ccugaccaacaugguaaaacccug

SEQ ID NO: 934933 - RNA, 22 nt, Human
ccugaggucaggaguuugagac

SEQ ID NO: 934934 - RNA, 22 nt, Human
ccuguaaucccagcacuuuggg

SEQ ID NO: 934935 - RNA, 21 nt, Human
ccuguaaucccagcuacucag

SEQ ID NO: 934936 - RNA, 22 nt, Human
ccuguaaucccagcuacucagg

SEQ ID NO: 934937 - RNA, 20 nt, Human
cgaggcagguggaucaccug

SEQ ID NO: 934938 - RNA, 24 nt, Human
cgaggcagguggaucaccugaggu

SEQ ID NO: 934939 - RNA, 26 nt, Human
cgaggcagguggaucaccugagguca

SEQ ID NO: 934940 - RNA, 23 nt, Human
cgccuguaaucccagcacuuugg

SEQ ID NO: 934941 - RNA, 25 nt, Human
cgcugcacuucagccugggggacag

SEQ ID NO: 934942 - RNA, 24 nt, Human
cggaugcauuuaaaauucuggggu

SEQ ID NO: 934943 - RNA, 24 nt, Human
cgggaggcagagguugcagugagc

SEQ ID NO: 934944 - RNA, 20 nt, Human
cuaaaugucuaccauaaauu

SEQ ID NO: 934945 - RNA, 23 nt, Human
cuaauucauucauaaccugagua

SEQ ID NO: 934946 - RNA, 20 nt, Human
cuaguucugguucugucccu

SEQ ID NO: 934947 - RNA, 20 nt, Human
cucaaaaaaaagaaaaaaag

SEQ ID NO: 934948 - RNA, 24 nt, Human
cucaaaaggauauccaacugaugc

SEQ ID NO: 934949 - RNA, 22 nt, Human
cucacgccuguaaucccagcac

SEQ ID NO: 934950 - RNA, 24 nt, Human
cucacgccuguaaucccagcacuu

SEQ ID NO: 934951 - RNA, 24 nt, Human
cucagaauccucugcugccaccuc

SEQ ID NO: 934952 - RNA, 22 nt, Human
cucaggcucuaguucugguucu

SEQ ID NO: 934953 - RNA, 20 nt, Human
cugcacuucagccuggggga

SEQ ID NO: 934954 - RNA, 18 nt, Human
cugcccaaagccaaagga

SEQ ID NO: 934955 - RNA, 22 nt, Human
cugcuccucaaguggaugcucc

SEQ ID NO: 934956 - RNA, 21 nt, Human
gaaaaaggaaaacccaaauau

SEQ ID NO: 934957 - RNA, 24 nt, Human
gaucaccugaggucaggaguuuga

SEQ ID NO: 934958 - RNA, 23 nt, Human
gcaggagaaucacuugaacccgg

SEQ ID NO: 934959 - RNA, 20 nt, Human
gcgcaguggcucacgccugu

SEQ ID NO: 934960 - RNA, 24 nt, Human
gcugcacuucagccugggggacag

SEQ ID NO: 934961 - RNA, 24 nt, Human
ggaaaacccaaauauuugugaaag

SEQ ID NO: 934962 - RNA, 19 nt, Human
ggaaagauucucugugaag

SEQ ID NO: 934963 - RNA, 21 nt, Human
ggaaauaggccgggcgcagug

SEQ ID NO: 934964 - RNA, 22 nt, Human
ggaucaccugaggucaggaguu

SEQ ID NO: 934965 - RNA, 23 nt, Human
ggcgcaguggcucacgccuguaa

SEQ ID NO: 934966 - RNA, 23 nt, Human
ggcucagaauccucugcugccac

SEQ ID NO: 934967 - RNA, 21 nt, Human
gggaaagaauaauucuucaga

SEQ ID NO: 934968 - RNA, 22 nt, Human
ggggacagagagagacucugcc

SEQ ID NO: 934969 - RNA, 19 nt, Human
ggucaggaguuugagacca

SEQ ID NO: 934970 - RNA, 24 nt, Human
gguggugggugccuguaaucccag

SEQ ID NO: 934971 - RNA, 23 nt, Human
guggugggugccuguaaucccag

SEQ ID NO: 934972 - RNA, 24 nt, Human
guugcagugagcugagaucaugcc

SEQ ID NO: 934973 - RNA, 24 nt, Human
uaaaagagcaauaaaauaaaaaua

SEQ ID NO: 934974 - RNA, 21 nt, Human
uaaaauagaauguucugagug

SEQ ID NO: 934975 - RNA, 25 nt, Human
uaaauaauauacuuaaaauagaaug

SEQ ID NO: 934976 - RNA, 19 nt, Human
uaauacugaaaaacugaga

SEQ ID NO: 934977 - RNA, 21 nt, Human
uagcaaggguucacuucaaag

SEQ ID NO: 934978 - RNA, 19 nt, Human
uagugcaacauaaaauaau

SEQ ID NO: 934979 - RNA, 22 nt, Human
uaucacagaagcacuagccgga

SEQ ID NO: 934980 - RNA, 18 nt, Human
ucaggcucuaguucuggu

SEQ ID NO: 934981 - RNA, 23 nt, Human
uccacagccaggcugcccaaagc

SEQ ID NO: 934982 - RNA, 21 nt, Human
uccacauaaaaauaaaucuga

SEQ ID NO: 934983 - RNA, 24 nt, Human
uccacauaaaaauaaaucugacau

SEQ ID NO: 934984 - RNA, 20 nt, Human
uccucugcugccaccucugc

SEQ ID NO: 934985 - RNA, 18 nt, Human
uccugcugcucugggugc

SEQ ID NO: 934986 - RNA, 23 nt, Human
uccugcugcucugggugcccuuu

SEQ ID NO: 934987 - RNA, 22 nt, Human
ucucuacuaaaaauacaaaaaa

SEQ ID NO: 934988 - RNA, 22 nt, Human
ucucuguaauacugaaaaacug

SEQ ID NO: 934989 - RNA, 24 nt, Human
ucugaucaauuuguccauaguucu

SEQ ID NO: 934990 - RNA, 22 nt, Human
ucugccucaaaaaaaagaaaaa

SEQ ID NO: 934991 - RNA, 24 nt, Human
ucugccucaaaaaaaagaaaaaaa

SEQ ID NO: 934992 - RNA, 20 nt, Human
ucuguaguucagcauacaca

SEQ ID NO: 934993 - RNA, 21 nt, Human
ugaaaguguaagacggaugca

SEQ ID NO: 934994 - RNA, 19 nt, Human
ugaagacccaaaauugagg

SEQ ID NO: 934995 - RNA, 26 nt, Human
ugaagacccaaaauugaggacugguu

SEQ ID NO: 934996 - RNA, 24 nt, Human
ugaccaacaugguaaaacccuguc

SEQ ID NO: 934997 - RNA, 23 nt, Human
ugagaccagccugaccaacaugg

SEQ ID NO: 934998 - RNA, 24 nt, Human
ugagaccagccugaccaacauggu

SEQ ID NO: 934999 - RNA, 22 nt, Human
ugaggaacugccaacaauaaau

SEQ ID NO: 935000 - RNA, 20 nt, Human
ugaggcaggagaaucacuug

SEQ ID NO: 935001 - RNA, 24 nt, Human
ugaggcaggagaaucacuugaacc

SEQ ID NO: 935002 - RNA, 25 nt, Human
ugaggcaggagaaucacuugaaccc

SEQ ID NO: 935003 - RNA, 18 nt, Human
ugaggucaggaguuugag

SEQ ID NO: 935004 - RNA, 19 nt, Human
ugagugaaaaaggaaaacc

SEQ ID NO: 935005 - RNA, 18 nt, Human
ugcccaaagccaaaggag

SEQ ID NO: 935006 - RNA, 23 nt, Human
ugccgcugcacuucagccugggg

SEQ ID NO: 935007 - RNA, 24 nt, Human
ugccuguaaucccagcuacucagg

SEQ ID NO: 935008 - RNA, 23 nt, Human
uggaucaccugaggucaggaguu

SEQ ID NO: 935009 - RNA, 24 nt, Human
uggaucaccugaggucaggaguuu

SEQ ID NO: 935010 - RNA, 27 nt, Human
uggaucaccugaggucaggaguuugag

SEQ ID NO: 935011 - RNA, 23 nt, Human
uggcauguuuuacaaucaguggc

SEQ ID NO: 935012 - RNA, 22 nt, Human
uggcucacgccuguaaucccag

SEQ ID NO: 935013 - RNA, 24 nt, Human
uggcucacgccuguaaucccagca

SEQ ID NO: 935014 - RNA, 24 nt, Human
ugggaggccgaggcagguggauca

SEQ ID NO: 935015 - RNA, 26 nt, Human
ugggggacagagagagacucugccuc

SEQ ID NO: 935016 - RNA, 22 nt, Human
uggguugggcucaggcucuagu

SEQ ID NO: 935017 - RNA, 24 nt, Human
uggugggugccuguaaucccagcu

SEQ ID NO: 935018 - RNA, 24 nt, Human
ugguggugggugccuguaauccca

SEQ ID NO: 935019 - RNA, 24 nt, Human
uuaccaagaaccuuuauuuaaccu

SEQ ID NO: 935020 - RNA, 24 nt, Human
uuagccaggugugguggugggugc

SEQ ID NO: 935021 - RNA, 20 nt, Human
uucugguucugucccucauc

SEQ ID NO: 935022 - RNA, 24 nt, Human
uugaggacugguuuuauaacucua

SEQ ID NO: 935023 - RNA, 18 nt, Human
uugcagugagcugagauc

SEQ ID NO: 935024 - RNA, 20 nt, Human
uugcagugagcugagaucau

SEQ ID NO: 935025 - RNA, 21 nt, Human
uugcagugagcugagaucaug

SEQ ID NO: 935026 - RNA, 25 nt, Human
uugggaggccgaggcagguggauca

SEQ ID NO: 935027 - RNA, 22 nt, Human
uugugagugaaaaaggaaaacc

SEQ ID NO: 935028 - RNA, 26 nt, Human
uuuccauaucacagaagcacuagccg

SEQ ID NO: 935029 - RNA, 22 nt, Human
uuugcucucuguaauacugaaa

SEQ ID NO: 935030 - RNA, 22 nt, Human
uuuguaaacuucaaaaaacugc

SEQ ID NO: 935031 - RNA, 19 nt, Human
uuuguccauaguucuggaa

SEQ ID NO: 935032 - RNA, 22 nt, Human
aaaaaaaaaaaaaaaagcaaaa

SEQ ID NO: 935033 - RNA, 26 nt, Human
aaaaaaaaaaaaaaaagcaaaauuaa

SEQ ID NO: 935034 - RNA, 23 nt, Human
aaaaaaaaagaaaccccaaaaaa

SEQ ID NO: 935035 - RNA, 20 nt, Human
aaaaaaaagaaaccccaaaa

SEQ ID NO: 935036 - RNA, 24 nt, Human
aaaaaaaagcaaaauuaaacugaa

SEQ ID NO: 935037 - RNA, 23 nt, Human
aaaaaagcaaaauuaaacugaaa

SEQ ID NO: 935038 - RNA, 30 nt, Human
aaaaagaaaccccaaaaaaacaaaaacaaa

SEQ ID NO: 935039 - RNA, 22 nt, Human
aaacaaaaacaaaaaaaaucaa

SEQ ID NO: 935040 - RNA, 23 nt, Human
aaacaaaaacaaaaaaaaucaaa

SEQ ID NO: 935041 - RNA, 24 nt, Human
aaacaagacauuacuuagugcuga

SEQ ID NO: 935042 - RNA, 20 nt, Human
aaagccuaagguaguaaaaa

SEQ ID NO: 935043 - RNA, 22 nt, Human
aaauagaaaaaaaggugacaag

SEQ ID NO: 935044 - RNA, 23 nt, Human
aaccccaaaaaaacaaaaacaaa

SEQ ID NO: 935045 - RNA, 24 nt, Human
aacuucaaaaacaucuacgaaaaa

SEQ ID NO: 935046 - RNA, 20 nt, Human
aagauuccacaaugcuuucc

SEQ ID NO: 935047 - RNA, 19 nt, Human
aagcaaaauuaaacugaaa

SEQ ID NO: 935048 - RNA, 23 nt, Human
aauaaguuccaagccaggagaaa

SEQ ID NO: 935049 - RNA, 22 nt, Human
aaugauaacagcauggaaaaaa

SEQ ID NO: 935050 - RNA, 21 nt, Human
acaaagcuucgcucacaagaa

SEQ ID NO: 935051 - RNA, 22 nt, Human
acaacucugccuuuacauaugc

SEQ ID NO: 935052 - RNA, 19 nt, Human
accccaaaaaaacaaaaac

SEQ ID NO: 935053 - RNA, 24 nt, Human
accccaaaaaaacaaaaacaaaaa

SEQ ID NO: 935054 - RNA, 28 nt, Human
accccaaaaaaacaaaaacaaaaaaaau

SEQ ID NO: 935055 - RNA, 18 nt, Human
acguaugucaacuaaguu

SEQ ID NO: 935056 - RNA, 23 nt, Human
acuaaguacaucaauuucaaaaa

SEQ ID NO: 935057 - RNA, 22 nt, Human
acuaaguugaaaggaaaaaaaa

SEQ ID NO: 935058 - RNA, 19 nt, Human
agaaaccccaaaaaaacaa

SEQ ID NO: 935059 - RNA, 23 nt, Human
agaaaucacuuuguugucuuaag

SEQ ID NO: 935060 - RNA, 19 nt, Human
agcauggaaaaaaaaaaga

SEQ ID NO: 935061 - RNA, 24 nt, Human
aggaaugauaacagcauuacaacg

SEQ ID NO: 935062 - RNA, 21 nt, Human
auagaaaauauacaugaccau

SEQ ID NO: 935063 - RNA, 23 nt, Human
auauacaugaccauucugucuac

SEQ ID NO: 935064 - RNA, 18 nt, Human
augaaucuugaaacuaag

SEQ ID NO: 935065 - RNA, 25 nt, Human
auuucauuuuauaaccaaggaauga

SEQ ID NO: 935066 - RNA, 27 nt, Human
auuucauuuuauaaccaaggaaugaaa

SEQ ID NO: 935067 - RNA, 26 nt, Human
caaaaaaaaucaaacucuggucccca

SEQ ID NO: 935068 - RNA, 26 nt, Human
caaaaaaacaaaaacaaaaaaaauca

SEQ ID NO: 935069 - RNA, 28 nt, Human
caaaaaaacaaaaacaaaaaaaaucaaa

SEQ ID NO: 935070 - RNA, 23 nt, Human
cacaaacaagacauuacuuagug

SEQ ID NO: 935071 - RNA, 24 nt, Human
cacuaguuuuccuuuuuaaggcac

SEQ ID NO: 935072 - RNA, 21 nt, Human
cagcauggaaaaaaaaaagaa

SEQ ID NO: 935073 - RNA, 21 nt, Human
caugaccauucugucuacaua

SEQ ID NO: 935074 - RNA, 24 nt, Human
caugucaacuucaaaaacaucuac

SEQ ID NO: 935075 - RNA, 24 nt, Human
ccaaaaaaacaaaaacaaaaaaaa

SEQ ID NO: 935076 - RNA, 23 nt, Human
ccaaaucuuaauuacaaacuaag

SEQ ID NO: 935077 - RNA, 23 nt, Human
ccaagccaggagaaacaaaaacu

SEQ ID NO: 935078 - RNA, 23 nt, Human
cccauauaacagugugcccuaaa

SEQ ID NO: 935079 - RNA, 25 nt, Human
cccauauaacagugugcccuaaaca

SEQ ID NO: 935080 - RNA, 18 nt, Human
ccccaaaaaaacaaaaac

SEQ ID NO: 935081 - RNA, 22 nt, Human
ccccaaaaaaacaaaaacaaaa

SEQ ID NO: 935082 - RNA, 25 nt, Human
ccccaaaaaaacaaaaacaaaaaaa

SEQ ID NO: 935083 - RNA, 19 nt, Human
cccuaaacaaccaauuccu

SEQ ID NO: 935084 - RNA, 21 nt, Human
cgaaaaauauucagccacaaa

SEQ ID NO: 935085 - RNA, 24 nt, Human
cuaaagauguaaaaacucaacuaa

SEQ ID NO: 935086 - RNA, 24 nt, Human
cugcuuuauucuuucaauaucaug

SEQ ID NO: 935087 - RNA, 25 nt, Human
gaaaaaaaaaagaaaccccaaaaaa

SEQ ID NO: 935088 - RNA, 21 nt, Human
gaaaaauauucagccacaaac

SEQ ID NO: 935089 - RNA, 19 nt, Human
gaaacaaaaacuuaaccuu

SEQ ID NO: 935090 - RNA, 20 nt, Human
gaaaccccaaaaaaacaaaa

SEQ ID NO: 935091 - RNA, 21 nt, Human
gauacgucccacaagagugug

SEQ ID NO: 935092 - RNA, 21 nt, Human
gcacaugcucagaaauccaca

SEQ ID NO: 935093 - RNA, 24 nt, Human
ggaaaaaaaaaagaaaccccaaaa

SEQ ID NO: 935094 - RNA, 22 nt, Human
uaacagugugcccuaaacaacc

SEQ ID NO: 935095 - RNA, 20 nt, Human
uaaccaaggaaugauaacag

SEQ ID NO: 935096 - RNA, 22 nt, Human
uaacuaaugccuacauucauaa

SEQ ID NO: 935097 - RNA, 19 nt, Human
uaacugaaucuagaccaga

SEQ ID NO: 935098 - RNA, 24 nt, Human
uaagguaguaaaaacuaaaaaugc

SEQ ID NO: 935099 - RNA, 19 nt, Human
uacacaccccugccuaaac

SEQ ID NO: 935100 - RNA, 27 nt, Human
uacauagauaacagaaucuaugaaucu

SEQ ID NO: 935101 - RNA, 20 nt, Human
uagaaaaaaaggugacaagc

SEQ ID NO: 935102 - RNA, 21 nt, Human
uagaacagaugaaauauagca

SEQ ID NO: 935103 - RNA, 19 nt, Human
ucaaaauaaguuccaagcc

SEQ ID NO: 935104 - RNA, 20 nt, Human
ucaaaauaaguuccaagcca

SEQ ID NO: 935105 - RNA, 18 nt, Human
uccaagccaggagaaaca

SEQ ID NO: 935106 - RNA, 24 nt, Human
ucugucuacauagauaacagaauc

SEQ ID NO: 935107 - RNA, 21 nt, Human
ugaccuguagauucugagcca

SEQ ID NO: 935108 - RNA, 19 nt, Human
ugcucagaaauccacaacc

SEQ ID NO: 935109 - RNA, 27 nt, Human
ugcuuuauucuuucaauaucauguauc

SEQ ID NO: 935110 - RNA, 22 nt, Human
uggaaaaaaaaaagaaacccca

SEQ ID NO: 935111 - RNA, 24 nt, Human
uggaaaaaaaaaagaaaccccaaa

SEQ ID NO: 935112 - RNA, 21 nt, Human
uguacgaaaagguuaagauuc

SEQ ID NO: 935113 - RNA, 23 nt, Human
uucaaaaacaucuacgaaaaaua

SEQ ID NO: 935114 - RNA, 25 nt, Human
uuccaagccaggagaaacaaaaacu

SEQ ID NO: 935115 - RNA, 18 nt, Human
uuccuuuuuaaggcacgu

SEQ ID NO: 935116 - RNA, 23 nt, Human
uugaaaggaaaaaaaaaaaaaaa

SEQ ID NO: 935117 - RNA, 20 nt, Human
uuuuacacaccccugccuaa

SEQ ID NO: 935118 - RNA, 20 nt, Human
uuuuuuuuuuuuuuuuuguu

SEQ ID NO: 935119 - RNA, 20 nt, Human
uuuuuuuuuuuuuuuuuugg

SEQ ID NO: 935120 - RNA, 22 nt, Human
aaaaaaacagucuucgaaaaca

SEQ ID NO: 935121 - RNA, 19 nt, Human
aaacuuagcaggacaggca

SEQ ID NO: 935122 - RNA, 23 nt, Human
acaggcaagaaagcaacacuaug

SEQ ID NO: 935123 - RNA, 23 nt, Human
agaaaaacacacaaaaaccugga

SEQ ID NO: 935124 - RNA, 22 nt, Human
aggcaagaaagcaacacuauga

SEQ ID NO: 935125 - RNA, 24 nt, Human
auaaagaaaaacacacaaaaaccu

SEQ ID NO: 935126 - RNA, 23 nt, Human
caaaauaaugagguggcaggagc

SEQ ID NO: 935127 - RNA, 21 nt, Human
cacuuuuguuuccuuuaaagg

SEQ ID NO: 935128 - RNA, 21 nt, Human
caguaaaaacaauaugguauu

SEQ ID NO: 935129 - RNA, 24 nt, Human
caucauauucaaauaaaaaugcca

SEQ ID NO: 935130 - RNA, 22 nt, Human
cauuuccuuccuauauuauuuc

SEQ ID NO: 935131 - RNA, 18 nt, Human
ccauacuacucacuauuu

SEQ ID NO: 935132 - RNA, 20 nt, Human
cucccaaacuauaaagugaa

SEQ ID NO: 935133 - RNA, 19 nt, Human
gcaaguaaaaacuuagcag

SEQ ID NO: 935134 - RNA, 19 nt, Human
uaaaaaugccauaguguau

SEQ ID NO: 935135 - RNA, 19 nt, Human
uaaacugagagagaaacug

SEQ ID NO: 935136 - RNA, 27 nt, Human
uaaaucauuaaacugagagagaaacug

SEQ ID NO: 935137 - RNA, 20 nt, Human
uaagguacacaucuuaucuu

SEQ ID NO: 935138 - RNA, 19 nt, Human
uagcaggacaggcaagaaa

SEQ ID NO: 935139 - RNA, 21 nt, Human
uauaauuuacagaaagcaagu

SEQ ID NO: 935140 - RNA, 23 nt, Human
uaucuuguauccauggacgcucc

SEQ ID NO: 935141 - RNA, 19 nt, Human
uaugacaguaaaaacaaua

SEQ ID NO: 935142 - RNA, 21 nt, Human
ucauguaauuaccaaagcucu

SEQ ID NO: 935143 - RNA, 19 nt, Human
ugacaguaaaaacaauaug

SEQ ID NO: 935144 - RNA, 19 nt, Human
ugacaguaaaaacaauaug

SEQ ID NO: 935145 - RNA, 22 nt, Human
ugacaguaaaaacaauauggua

SEQ ID NO: 935146 - RNA, 18 nt, Human
ugaugaaaaaaacagucu

SEQ ID NO: 935147 - RNA, 19 nt, Human
uggaaagagaauauaaaag

SEQ ID NO: 935148 - RNA, 21 nt, Human
uuagaaccucaguauucuuaa

SEQ ID NO: 935149 - RNA, 23 nt, Human
uuggcucacagaacuaaagaaag

SEQ ID NO: 935150 - RNA, 18 nt, Human
acgugaaaagcaaagcug

SEQ ID NO: 935151 - RNA, 20 nt, Human
agaacgcaggcccguccccu

SEQ ID NO: 935152 - RNA, 23 nt, Human
aggagcaagccacauuguccuca

SEQ ID NO: 935153 - RNA, 19 nt, Human
caaaaaggagcaagccaca

SEQ ID NO: 935154 - RNA, 28 nt, Human
caaaaaggagcaagccacauuguccuca

SEQ ID NO: 935155 - RNA, 26 nt, Human
caaauguuuuauugaguguagacauc

SEQ ID NO: 935156 - RNA, 19 nt, Human
cagcggcagcgagagaaag

SEQ ID NO: 935157 - RNA, 24 nt, Human
ccacauuguccucacugucaaaug

SEQ ID NO: 935158 - RNA, 27 nt, Human
ccagcggcagcgagagaaagguccuuu

SEQ ID NO: 935159 - RNA, 22 nt, Human
ccugccggcagcuggaggcggg

SEQ ID NO: 935160 - RNA, 22 nt, Human
ccuuuuggaaguuguauguuuu

SEQ ID NO: 935161 - RNA, 21 nt, Human
cggcagcgagagaaagguccu

SEQ ID NO: 935162 - RNA, 18 nt, Human
cggcagcuggaggcgggg

SEQ ID NO: 935163 - RNA, 20 nt, Human
cugaaaagcuucuacaauuu

SEQ ID NO: 935164 - RNA, 20 nt, Human
cuguucacauuuagugaacc

SEQ ID NO: 935165 - RNA, 18 nt, Human
gaacgcaggcccgucccc

SEQ ID NO: 935166 - RNA, 20 nt, Human
gaacgcaggcccguccccuc

SEQ ID NO: 935167 - RNA, 23 nt, Human
gaggaaggaggagagaacgcaga

SEQ ID NO: 935168 - RNA, 23 nt, Human
gcauuucaugggggggggggggu

SEQ ID NO: 935169 - RNA, 18 nt, Human
gccggcagcuggaggcgg

SEQ ID NO: 935170 - RNA, 19 nt, Human
ggaggaaggaggagagaac

SEQ ID NO: 935171 - RNA, 23 nt, Human
uaaaaaucagaugccuuuuggaa

SEQ ID NO: 935172 - RNA, 18 nt, Human
uacuguaaaacaugcauu

SEQ ID NO: 935173 - RNA, 22 nt, Human
ucaaagauucccaucuccccaa

SEQ ID NO: 935174 - RNA, 19 nt, Human
ugaaguaucaugagaguaa

SEQ ID NO: 935175 - RNA, 23 nt, Human
ugucgcauugguuuucagaaauu

SEQ ID NO: 935176 - RNA, 18 nt, Human
ugugucaggcuuggcaua

SEQ ID NO: 935177 - RNA, 19 nt, Human
uucacauuuagugaaccug

SEQ ID NO: 935178 - RNA, 18 nt, Human
uuuuuuuuuuuuuuuuug

SEQ ID NO: 935179 - RNA, 24 nt, Human
uuuuuuuuuuuuuuuuuugguuuu

SEQ ID NO: 935180 - RNA, 23 nt, Human
aaacauggacagcaucuccccca

SEQ ID NO: 935181 - RNA, 22 nt, Human
aacgagaaagcaaaugaauacc

SEQ ID NO: 935182 - RNA, 24 nt, Human
agauuuaggagaagccagaagucu

SEQ ID NO: 935183 - RNA, 20 nt, Human
agcagguuuagcagccaaag

SEQ ID NO: 935184 - RNA, 19 nt, Human
aggcaggagggguaagccu

SEQ ID NO: 935185 - RNA, 21 nt, Human
aggcaggagggguaagccuag

SEQ ID NO: 935186 - RNA, 23 nt, Human
aggcaggagggguaagccuaggg

SEQ ID NO: 935187 - RNA, 18 nt, Human
aggcaggggaagggaggc

SEQ ID NO: 935188 - RNA, 18 nt, Human
aggcaggggaagggaggc

SEQ ID NO: 935189 - RNA, 25 nt, Human
aggcaggggaagggaggcaggaggg

SEQ ID NO: 935190 - RNA, 20 nt, Human
aggggaagggaggcaggagg

SEQ ID NO: 935191 - RNA, 26 nt, Human
cacccgaggcccucgcauuuccguuc

SEQ ID NO: 935192 - RNA, 19 nt, Human
cagcagcaggcaggggaag

SEQ ID NO: 935193 - RNA, 24 nt, Human
cagcagguuuagcagccaaagccc

SEQ ID NO: 935194 - RNA, 25 nt, Human
caggccuaguggauagacagggucc

SEQ ID NO: 935195 - RNA, 19 nt, Human
ccagaagucuuccuuucaa

SEQ ID NO: 935196 - RNA, 21 nt, Human
ccccuagaaacauggacagca

SEQ ID NO: 935197 - RNA, 18 nt, Human
gaagggaggcaggagggg

SEQ ID NO: 935198 - RNA, 18 nt, Human
ggaagggaggcaggaggg

SEQ ID NO: 935199 - RNA, 20 nt, Human
ggaaguccaggauggcagcu

SEQ ID NO: 935200 - RNA, 18 nt, Human
ggacagcaucucccccag

SEQ ID NO: 935201 - RNA, 18 nt, Human
ggaggcaggagggguaag

SEQ ID NO: 935202 - RNA, 27 nt, Human
ggaggcaggagggguaagccuagggug

SEQ ID NO: 935203 - RNA, 19 nt, Human
gggaaaagaaccugaaagc

SEQ ID NO: 935204 - RNA, 22 nt, Human
gggaagggaggcaggaggggua

SEQ ID NO: 935205 - RNA, 22 nt, Human
uaagccuaggguguucccuagg

SEQ ID NO: 935206 - RNA, 20 nt, Human
ucaaagggaaaauggggaaa

SEQ ID NO: 935207 - RNA, 22 nt, Human
ucagggaaguccaggauggcag

SEQ ID NO: 935208 - RNA, 24 nt, Human
uccccuuacccagagaacggagau

SEQ ID NO: 935209 - RNA, 21 nt, Human
ugaauaccccuagaaacaugg

SEQ ID NO: 935210 - RNA, 22 nt, Human
uggcagcugaaggcagcagguu

SEQ ID NO: 935211 - RNA, 21 nt, Human
uucaaagggaaaauggggaaa

SEQ ID NO: 935212 - RNA, 22 nt, Human
uucaaagggaaaauggggaaaa

SEQ ID NO: 935213 - RNA, 21 nt, Human
uuccguuccucaugacagagg

SEQ ID NO: 935214 - RNA, 24 nt, Human
uuccguuccucaugacagaggcuu

SEQ ID NO: 935215 - RNA, 22 nt, Human
uuuuuuuuuuuuuuuuuuucag

SEQ ID NO: 935216 - RNA, 26 nt, Human
aaaaaauagacacaacaaauggaaga

SEQ ID NO: 935217 - RNA, 27 nt, Human
accaaauauauaaaaaauagacacaau

SEQ ID NO: 935218 - RNA, 19 nt, Human
acugcacuccagccugcag

SEQ ID NO: 935219 - RNA, 18 nt, Human
acugcagcugaaaagaca

SEQ ID NO: 935220 - RNA, 18 nt, Human
acugcagcugaaaagaca

SEQ ID NO: 935221 - RNA, 19 nt, Human
agacagaagucuggggcca

SEQ ID NO: 935222 - RNA, 21 nt, Human
agacagaagucuggggccagc

SEQ ID NO: 935223 - RNA, 19 nt, Human
agacagaagucuggggcgc

SEQ ID NO: 935224 - RNA, 22 nt, Human
agacagaagucuggggcgcagu

SEQ ID NO: 935225 - RNA, 19 nt, Human
agccugcagccccgagccu

SEQ ID NO: 935226 - RNA, 19 nt, Human
agcgcugucccacugcacu

SEQ ID NO: 935227 - RNA, 18 nt, Human
caacaaauggaagaguau

SEQ ID NO: 935228 - RNA, 18 nt, Human
cacugcacuccagccugc

SEQ ID NO: 935229 - RNA, 19 nt, Human
cacugcacuccagccugca

SEQ ID NO: 935230 - RNA, 21 nt, Human
cacugcacuccagccugcagc

SEQ ID NO: 935231 - RNA, 25 nt, Human
cacugcacuccagccugcagccccg

SEQ ID NO: 935232 - RNA, 18 nt, Human
cagccccgagccuucacu

SEQ ID NO: 935233 - RNA, 18 nt, Human
cagccccgagccuucacu

SEQ ID NO: 935234 - RNA, 18 nt, Human
ccacugcacuccagccug

SEQ ID NO: 935235 - RNA, 18 nt, Human
ccacugcacuccagccug

SEQ ID NO: 935236 - RNA, 18 nt, Human
ccacugcacuccagccug

SEQ ID NO: 935237 - RNA, 19 nt, Human
ccacugcacuccagccugc

SEQ ID NO: 935238 - RNA, 22 nt, Human
ccacugcacuccagccugcagc

SEQ ID NO: 935239 - RNA, 24 nt, Human
cccacugcacuccagccugcagcc

SEQ ID NO: 935240 - RNA, 20 nt, Human
ccuucacugcagcugaaaag

SEQ ID NO: 935241 - RNA, 20 nt, Human
ccuucacugcagcugaaaag

SEQ ID NO: 935242 - RNA, 23 nt, Human
cugaaaagacagaagucuggggc

SEQ ID NO: 935243 - RNA, 21 nt, Human
gaaaagacagaagucuggggc

SEQ ID NO: 935244 - RNA, 21 nt, Human
gaauacugaauacauucaguu

SEQ ID NO: 935245 - RNA, 24 nt, Human
gcugucccacugcacuccagccug

SEQ ID NO: 935246 - RNA, 21 nt, Human
uaacacaaaugacaaauagau

SEQ ID NO: 935247 - RNA, 25 nt, Human
uaagacuuccuuuaugugacaaguu

SEQ ID NO: 935248 - RNA, 23 nt, Human
uaauguucauauuagaggugaca

SEQ ID NO: 935249 - RNA, 25 nt, Human
uaauuucaaauauaacacaaaugac

SEQ ID NO: 935250 - RNA, 22 nt, Human
uacaaaaaaaauaugcucugcc

SEQ ID NO: 935251 - RNA, 22 nt, Human
uagaaaaaaacuaccucaaacu

SEQ ID NO: 935252 - RNA, 18 nt, Human
uagaaaacaguuaaaauu

SEQ ID NO: 935253 - RNA, 20 nt, Human
uauuuggaauuuucaaaaaa

SEQ ID NO: 935254 - RNA, 22 nt, Human
ucccacugcacuccagccugca

SEQ ID NO: 935255 - RNA, 19 nt, Human
ucuccgcaccagcgcuguc

SEQ ID NO: 935256 - RNA, 21 nt, Human
ucugcagccccgagccuucac

SEQ ID NO: 935257 - RNA, 22 nt, Human
ugaauacugaauacauucaguu

SEQ ID NO: 935258 - RNA, 24 nt, Human
ugacaauuagaaaacaguuaaaau

SEQ ID NO: 935259 - RNA, 19 nt, Human
ugcagccccgagccuucac

SEQ ID NO: 935260 - RNA, 21 nt, Human
uggaaaaagcauaauuucuaa

SEQ ID NO: 935261 - RNA, 18 nt, Human
uggaauuuucaaaaaauc

SEQ ID NO: 935262 - RNA, 23 nt, Human
ugucccacugcacuccagccugc

SEQ ID NO: 935263 - RNA, 20 nt, Human
uucacugcagcugaaaagac

SEQ ID NO: 935264 - RNA, 20 nt, Human
uucacugcagcugaaaagac

SEQ ID NO: 935265 - RNA, 22 nt, Human
uugaauacugaauacauucagu

SEQ ID NO: 935266 - RNA, 22 nt, Human
uuggaauuuucaaaaaauacca

SEQ ID NO: 935267 - RNA, 24 nt, Human
aaagugcugggauuauaggcauga

SEQ ID NO: 935268 - RNA, 23 nt, Human
aacacugauuuuucuuuuucucu

SEQ ID NO: 935269 - RNA, 23 nt, Human
aacuccuaggcucaggcaauccu

SEQ ID NO: 935270 - RNA, 23 nt, Human
aagggcuccccaccugccaccuu

SEQ ID NO: 935271 - RNA, 19 nt, Human
aagugcugggauuauaggc

SEQ ID NO: 935272 - RNA, 21 nt, Human
aagugcugggauuauaggcau

SEQ ID NO: 935273 - RNA, 22 nt, Human
acaagacauagcuaacauccaa

SEQ ID NO: 935274 - RNA, 18 nt, Human
acucugauuacuagaaug

SEQ ID NO: 935275 - RNA, 18 nt, Human
agacagggucuugcuaug

SEQ ID NO: 935276 - RNA, 19 nt, Human
agacagggucuugcuaugu

SEQ ID NO: 935277 - RNA, 23 nt, Human
agacagggucuugcuauguugcc

SEQ ID NO: 935278 - RNA, 24 nt, Human
agcuggucucaaacuccugggcuc

SEQ ID NO: 935279 - RNA, 23 nt, Human
aggcaauccucccacucggccuc

SEQ ID NO: 935280 - RNA, 20 nt, Human
agugugcuuccugccucagc

SEQ ID NO: 935281 - RNA, 30 nt, Human
aucucaauuagauauuuuuguucccaaucu

SEQ ID NO: 935282 - RNA, 24 nt, Human
auggggucucaccauggugcccag

SEQ ID NO: 935283 - RNA, 30 nt, Human
auucaauaacuaucaacauuucuaaacacc

SEQ ID NO: 935284 - RNA, 24 nt, Human
caaacuccugggcuccagugugcu

SEQ ID NO: 935285 - RNA, 24 nt, Human
caaagugcugggauuauaggcaug

SEQ ID NO: 935286 - RNA, 23 nt, Human
cacaggcuucagccaccaugccc

SEQ ID NO: 935287 - RNA, 21 nt, Human
caccagaaggguaaagggcuc

SEQ ID NO: 935288 - RNA, 22 nt, Human
caccagaaggguaaagggcucc

SEQ ID NO: 935289 - RNA, 30 nt, Human
caccauggugcccaggcugguuuaaacucc

SEQ ID NO: 935290 - RNA, 24 nt, Human
cacugauuuuucuuuuucucuuuu

SEQ ID NO: 935291 - RNA, 24 nt, Human
cagggucuugcuauguugcccaag

SEQ ID NO: 935292 - RNA, 21 nt, Human
caguauuaauuaauaagucaa

SEQ ID NO: 935293 - RNA, 24 nt, Human
cagugaaauaaaaauugcuucuaa

SEQ ID NO: 935294 - RNA, 23 nt, Human
cauggugcccaggcugguuuaaa

SEQ ID NO: 935295 - RNA, 24 nt, Human
cauuagagaguugaucuuuggcua

SEQ ID NO: 935296 - RNA, 24 nt, Human
ccaaagugcugggauuauaggcau

SEQ ID NO: 935297 - RNA, 25 nt, Human
ccaaccccgccuccucaggauacgc

SEQ ID NO: 935298 - RNA, 19 nt, Human
ccauuagcaccauuagaga

SEQ ID NO: 935299 - RNA, 24 nt, Human
ccugccucagccucccaaagugcu

SEQ ID NO: 935300 - RNA, 23 nt, Human
ccugggcuccagugugcuucccc

SEQ ID NO: 935301 - RNA, 18 nt, Human
cgguagcaaaacacccag

SEQ ID NO: 935302 - RNA, 26 nt, Human
cuaauacucagaaacaucuacuuagc

SEQ ID NO: 935303 - RNA, 23 nt, Human
cuagagcuccgcccacguuaguc

SEQ ID NO: 935304 - RNA, 22 nt, Human
cucacaagacauagcuaacauc

SEQ ID NO: 935305 - RNA, 23 nt, Human
cucaggcaauccucccacucggc

SEQ ID NO: 935306 - RNA, 19 nt, Human
cuccccaccugccaccuug

SEQ ID NO: 935307 - RNA, 19 nt, Human
cugauuuuucuuuuucucu

SEQ ID NO: 935308 - RNA, 24 nt, Human
cugccucagccucccaaagugcug

SEQ ID NO: 935309 - RNA, 24 nt, Human
cugcuaauguuugugaaaggcaaa

SEQ ID NO: 935310 - RNA, 26 nt, Human
cuuccugccucagccucccaaagugc

SEQ ID NO: 935311 - RNA, 21 nt, Human
gauuauaggcaugagccauug

SEQ ID NO: 935312 - RNA, 24 nt, Human
gauuauaggcaugagccauugugc

SEQ ID NO: 935313 - RNA, 18 nt, Human
gauuccugauauuuauau

SEQ ID NO: 935314 - RNA, 22 nt, Human
gcaauccucccacucggccucc

SEQ ID NO: 935315 - RNA, 21 nt, Human
gcuucagccaccaugcccgga

SEQ ID NO: 935316 - RNA, 23 nt, Human
ggaucuucgccuaggccaacccc

SEQ ID NO: 935317 - RNA, 22 nt, Human
ggcaaucgaaacaagggaggaa

SEQ ID NO: 935318 - RNA, 22 nt, Human
ggggucucaccauggugcccag

SEQ ID NO: 935319 - RNA, 22 nt, Human
gggucucaccauggugcccagg

SEQ ID NO: 935320 - RNA, 19 nt, Human
ggucacgguagcaaaacac

SEQ ID NO: 935321 - RNA, 24 nt, Human
gucacguucagcaacagcuucacu

SEQ ID NO: 935322 - RNA, 25 nt, Human
gucucaaacuccugggcuccagugu

SEQ ID NO: 935323 - RNA, 22 nt, Human
gugcuuccugccucagccuccc

SEQ ID NO: 935324 - RNA, 18 nt, Human
guucagcaacagcuucac

SEQ ID NO: 935325 - RNA, 26 nt, Human
uaaacggucacgguagcaaaacaccc

SEQ ID NO: 935326 - RNA, 23 nt, Human
uaagaaacauuuuaaauaauaga

SEQ ID NO: 935327 - RNA, 24 nt, Human
uaauagagauggggucucaccaug

SEQ ID NO: 935328 - RNA, 26 nt, Human
uaauagagauggggucucaccauggu

SEQ ID NO: 935329 - RNA, 20 nt, Human
uagagauggggucucaccau

SEQ ID NO: 935330 - RNA, 21 nt, Human
uagcaccauuagagaguugau

SEQ ID NO: 935331 - RNA, 22 nt, Human
uaggccaaccccgccuccucag

SEQ ID NO: 935332 - RNA, 21 nt, Human
uagugcuuaaaauuggaauuu

SEQ ID NO: 935333 - RNA, 23 nt, Human
uauguugcccaagcuggucucaa

SEQ ID NO: 935334 - RNA, 24 nt, Human
uauguugcccaagcuggucucaaa

SEQ ID NO: 935335 - RNA, 22 nt, Human
uauuucagcaacgauagugguc

SEQ ID NO: 935336 - RNA, 25 nt, Human
ucacaagaguccacagcgcaccaag

SEQ ID NO: 935337 - RNA, 20 nt, Human
ucacaggcuucagccaccau

SEQ ID NO: 935338 - RNA, 20 nt, Human
ucagaaacaucuacuuagca

SEQ ID NO: 935339 - RNA, 24 nt, Human
ucccaaagugcugggauuauaggc

SEQ ID NO: 935340 - RNA, 18 nt, Human
uccuaggcucaggcaauc

SEQ ID NO: 935341 - RNA, 24 nt, Human
uccuaggcucaggcaauccuccca

SEQ ID NO: 935342 - RNA, 23 nt, Human
uccucccacucggccucccaaca

SEQ ID NO: 935343 - RNA, 21 nt, Human
uccugcagguaauaacacuga

SEQ ID NO: 935344 - RNA, 23 nt, Human
ucuaauacucagaaacaucuacu

SEQ ID NO: 935345 - RNA, 21 nt, Human
ucucaaacuccugggcuccag

SEQ ID NO: 935346 - RNA, 25 nt, Human
ucucuuucagacagaucuaugaaau

SEQ ID NO: 935347 - RNA, 18 nt, Human
ucuugcuauguugcccaa

SEQ ID NO: 935348 - RNA, 23 nt, Human
ucuugcuauguugcccaagcugg

SEQ ID NO: 935349 - RNA, 24 nt, Human
ucuugcuauguugcccaagcuggu

SEQ ID NO: 935350 - RNA, 23 nt, Human
ugcccaggcugguuuaaacuccu

SEQ ID NO: 935351 - RNA, 24 nt, Human
ugccucagccucccaaagugcugg

SEQ ID NO: 935352 - RNA, 24 nt, Human
ugcuauguugcccaagcuggucuc

SEQ ID NO: 935353 - RNA, 27 nt, Human
ugcuauguugcccaagcuggucucaaa

SEQ ID NO: 935354 - RNA, 21 nt, Human
ugggaucacaggcuucagcca

SEQ ID NO: 935355 - RNA, 22 nt, Human
ugggaucacaggcuucagccac

SEQ ID NO: 935356 - RNA, 24 nt, Human
ugggaucacaggcuucagccacca

SEQ ID NO: 935357 - RNA, 18 nt, Human
ugggauuauaggcaugag

SEQ ID NO: 935358 - RNA, 19 nt, Human
ugggauuauaggcaugagc

SEQ ID NO: 935359 - RNA, 21 nt, Human
ugggauuauaggcaugagcca

SEQ ID NO: 935360 - RNA, 21 nt, Human
ugggauuauaggcaugagcca

SEQ ID NO: 935361 - RNA, 21 nt, Human
ugggauuauaggcaugagcca

SEQ ID NO: 935362 - RNA, 22 nt, Human
ugggauuauaggcaugagccau

SEQ ID NO: 935363 - RNA, 23 nt, Human
ugggauuauaggcaugagccauu

SEQ ID NO: 935364 - RNA, 24 nt, Human
ugggauuauaggcaugagccauug

SEQ ID NO: 935365 - RNA, 24 nt, Human
uggggucucaccauggugcccagg

SEQ ID NO: 935366 - RNA, 20 nt, Human
uguuauacaaauauaagaua

SEQ ID NO: 935367 - RNA, 24 nt, Human
uuaacuucaccagaaggguaaagg

SEQ ID NO: 935368 - RNA, 22 nt, Human
uuaguacugaagacuuccuaaa

SEQ ID NO: 935369 - RNA, 24 nt, Human
uucaaauguuuuuuaauauccugc

SEQ ID NO: 935370 - RNA, 20 nt, Human
uucuuuaggugugagguugg

SEQ ID NO: 935371 - RNA, 27 nt, Human
uucuuuaggugugagguuggacaaaua

SEQ ID NO: 935372 - RNA, 21 nt, Human
uuuuguucccaaucucuuuca

SEQ ID NO: 935373 - RNA, 19 nt, Human
aaaaaagaaaggaaaauca

SEQ ID NO: 935374 - RNA, 23 nt, Human
aaugaugaaagcuaucagaagaa

SEQ ID NO: 935375 - RNA, 18 nt, Human
ccacagaugcuguggcag

SEQ ID NO: 935376 - RNA, 18 nt, Human
cccauagaucgcccagac

SEQ ID NO: 935377 - RNA, 22 nt, Human
ccuaggcggcgcgcagcagccc

SEQ ID NO: 935378 - RNA, 20 nt, Human
cgcccagacaccuaggcggc

SEQ ID NO: 935379 - RNA, 21 nt, Human
cuuagaaaaaaagaaaggaaa

SEQ ID NO: 935380 - RNA, 22 nt, Human
cuuagaaaaaaagaaaggaaaa

SEQ ID NO: 935381 - RNA, 22 nt, Human
ugagcauagccacagaugcugu

SEQ ID NO: 935382 - RNA, 18 nt, Human
acugaaguccaccgcacu

SEQ ID NO: 935383 - RNA, 20 nt, Human
caccgcacugucuccucaaa

SEQ ID NO: 935384 - RNA, 19 nt, Human
cccagcgcugcuucgggau

SEQ ID NO: 935385 - RNA, 24 nt, Human
cgcacugucuccucaaaguugcgg

SEQ ID NO: 935386 - RNA, 22 nt, Human
ugaaguccaccgcacugucucc

SEQ ID NO: 935387 - RNA, 22 nt, Human
ugcccgcacuuacgcucccagc

SEQ ID NO: 935388 - RNA, 26 nt, Human
ugucuccucaaaguugcguucccaaa

SEQ ID NO: 935389 - RNA, 22 nt, Human
aaauaaugacccccaagugccc

SEQ ID NO: 935390 - RNA, 23 nt, Human
aacacaccgcgcugccaccggug

SEQ ID NO: 935391 - RNA, 22 nt, Human
aagacagaaaaguggccugaac

SEQ ID NO: 935392 - RNA, 24 nt, Human
aagagaccccacguuggcaaaggc

SEQ ID NO: 935393 - RNA, 19 nt, Human
aaggaagauguuuacgcug

SEQ ID NO: 935394 - RNA, 24 nt, Human
acaaacccgauguaaaaggcacca

SEQ ID NO: 935395 - RNA, 19 nt, Human
acgcggccaggucuguggg

SEQ ID NO: 935396 - RNA, 19 nt, Human
agacagaaaaguggccuga

SEQ ID NO: 935397 - RNA, 21 nt, Human
agccacaguaggcuaauagcc

SEQ ID NO: 935398 - RNA, 19 nt, Human
agugcugaaguuagaagag

SEQ ID NO: 935399 - RNA, 25 nt, Human
caaaggccccccaggcgaugaucuu

SEQ ID NO: 935400 - RNA, 19 nt, Human
caacacaccauggaaggag

SEQ ID NO: 935401 - RNA, 24 nt, Human
caagugcccucgccucuuccugcu

SEQ ID NO: 935402 - RNA, 26 nt, Human
caccagcaccucacaugggacucagu

SEQ ID NO: 935403 - RNA, 18 nt, Human
caccgcgcugccaccggu

SEQ ID NO: 935404 - RNA, 20 nt, Human
ccaguccauuaaccaugggg

SEQ ID NO: 935405 - RNA, 20 nt, Human
ccccacguuggcaaaggccc

SEQ ID NO: 935406 - RNA, 27 nt, Human
cccccaagugcccucgccucuuccugc

SEQ ID NO: 935407 - RNA, 23 nt, Human
ccgcgguggcggcggccccagcc

SEQ ID NO: 935408 - RNA, 21 nt, Human
ccucucaguucuaggcacucu

SEQ ID NO: 935409 - RNA, 22 nt, Human
cggggaguuccaaaugaguucc

SEQ ID NO: 935410 - RNA, 19 nt, Human
cgguggcggcggccccagc

SEQ ID NO: 935411 - RNA, 21 nt, Human
cguggugaacuaucaagguca

SEQ ID NO: 935412 - RNA, 19 nt, Human
cucaaauaaugacccccaa

SEQ ID NO: 935413 - RNA, 18 nt, Human
cucgucugaaggaagaug

SEQ ID NO: 935414 - RNA, 21 nt, Human
cucuagaaggaaggggaaccc

SEQ ID NO: 935415 - RNA, 19 nt, Human
cuugcccugugcgccucga

SEQ ID NO: 935416 - RNA, 24 nt, Human
gaacaaacccgauguaaaaggcac

SEQ ID NO: 935417 - RNA, 19 nt, Human
gauccagcaggcgcggagc

SEQ ID NO: 935418 - RNA, 19 nt, Human
gccccagcccgagaaggcu

SEQ ID NO: 935419 - RNA, 20 nt, Human
gccccccaggcgaugaucug

SEQ ID NO: 935420 - RNA, 21 nt, Human
gggaacccuucccccaguauc

SEQ ID NO: 935421 - RNA, 18 nt, Human
gggaagggaauaaucgga

SEQ ID NO: 935422 - RNA, 25 nt, Human
uaaaaagcauccuaacuuaaaaaca

SEQ ID NO: 935423 - RNA, 19 nt, Human
uaaaagacagaaaaguggc

SEQ ID NO: 935424 - RNA, 27 nt, Human
uaaaauaaaaacuggugaccaguccau

SEQ ID NO: 935425 - RNA, 30 nt, Human
uaacaacaguaaccaaauaaaagacagaag

SEQ ID NO: 935426 - RNA, 21 nt, Human
uaaucggaagcgaggcuccua

SEQ ID NO: 935427 - RNA, 22 nt, Human
uagaagagaccccacguuggca

SEQ ID NO: 935428 - RNA, 18 nt, Human
ucccccaguaucaauuuc

SEQ ID NO: 935429 - RNA, 23 nt, Human
ucccuuuucugcucuagaaggaa

SEQ ID NO: 935430 - RNA, 24 nt, Human
uccuaugcaggcagcuacccucuc

SEQ ID NO: 935431 - RNA, 24 nt, Human
ucgccaugugguaggaggucuuac

SEQ ID NO: 935432 - RNA, 25 nt, Human
ugaauaauauugggaagggaauaau

SEQ ID NO: 935433 - RNA, 21 nt, Human
ugacccccaagugcccucgcc

SEQ ID NO: 935434 - RNA, 19 nt, Human
ugcauccacgauccagcag

SEQ ID NO: 935435 - RNA, 20 nt, Human
ugccgcgguggcggcggccc

SEQ ID NO: 935436 - RNA, 22 nt, Human
ugccgcgguggcggcggcccca

SEQ ID NO: 935437 - RNA, 20 nt, Human
uggaaggagaacaaacccga

SEQ ID NO: 935438 - RNA, 21 nt, Human
uggaaggagaacaaacccgau

SEQ ID NO: 935439 - RNA, 20 nt, Human
uggcaacugugaaugaauag

SEQ ID NO: 935440 - RNA, 18 nt, Human
uggcggcggccccagccc

SEQ ID NO: 935441 - RNA, 24 nt, Human
uggcuaagucuggaugaauaauau

SEQ ID NO: 935442 - RNA, 25 nt, Human
ugggaaacaagacuuacgaucucaa

SEQ ID NO: 935443 - RNA, 19 nt, Human
ugggaagggaauaaucgga

SEQ ID NO: 935444 - RNA, 28 nt, Human
uggggagaagcugugguguucacugccc

SEQ ID NO: 935445 - RNA, 23 nt, Human
uguuaaaaagcauccuaacuuaa

SEQ ID NO: 935446 - RNA, 18 nt, Human
uucacugccucucuagca

SEQ ID NO: 935447 - RNA, 22 nt, Human
accuuggagccacggaggcagc

SEQ ID NO: 935448 - RNA, 19 nt, Human
acguacacacguguacaca

SEQ ID NO: 935449 - RNA, 19 nt, Human
agaagccucggagcccaga

SEQ ID NO: 935450 - RNA, 21 nt, Human
agaagccucggagcccagagc

SEQ ID NO: 935451 - RNA, 23 nt, Human
agagcaugcccuugccacgccag

SEQ ID NO: 935452 - RNA, 22 nt, Human
aggaggccacggaggccugggc

SEQ ID NO: 935453 - RNA, 29 nt, Human
aggcagaaaggggagggaggagggacccc

SEQ ID NO: 935454 - RNA, 19 nt, Human
aggcagcaugaccccagca

SEQ ID NO: 935455 - RNA, 18 nt, Human
aggccucagcgcacccag

SEQ ID NO: 935456 - RNA, 18 nt, Human
agggaggacccugguucc

SEQ ID NO: 935457 - RNA, 19 nt, Human
aggugcacaggagaaaagc

SEQ ID NO: 935458 - RNA, 23 nt, Human
aguguuuguggacgagcgcccac

SEQ ID NO: 935459 - RNA, 19 nt, Human
auccgcugccucucagcca

SEQ ID NO: 935460 - RNA, 28 nt, Human
cacacgcauacacacguacacacgugua

SEQ ID NO: 935461 - RNA, 19 nt, Human
cacaggaggaggccacgga

SEQ ID NO: 935462 - RNA, 20 nt, Human
caccccucgccuucagccuc

SEQ ID NO: 935463 - RNA, 19 nt, Human
cacgaggcagccacggccc

SEQ ID NO: 935464 - RNA, 21 nt, Human
cacgaggcagccacggcccag

SEQ ID NO: 935465 - RNA, 29 nt, Human
cacgcauacacacguacacacguguacac

SEQ ID NO: 935466 - RNA, 25 nt, Human
cacgugcacaccacaggcggccacg

SEQ ID NO: 935467 - RNA, 23 nt, Human
cagcacccggguuccaggccccc

SEQ ID NO: 935468 - RNA, 22 nt, Human
cagcaucgcugccuggauccgc

SEQ ID NO: 935469 - RNA, 19 nt, Human
caggagaaaagcaaaaaac

SEQ ID NO: 935470 - RNA, 21 nt, Human
cccacgcacaccgggucaccg

SEQ ID NO: 935471 - RNA, 23 nt, Human
ccccacgcacaccgggucaccgg

SEQ ID NO: 935472 - RNA, 21 nt, Human
cccccuugaggggcagcucag

SEQ ID NO: 935473 - RNA, 18 nt, Human
cccugccuggaccacacc

SEQ ID NO: 935474 - RNA, 21 nt, Human
ccgcugccucucagccacgga

SEQ ID NO: 935475 - RNA, 21 nt, Human
ccucucagccacggaguguuu

SEQ ID NO: 935476 - RNA, 23 nt, Human
ccugagggacacacugccccaga

SEQ ID NO: 935477 - RNA, 19 nt, Human
ccuggauccgcugccucuc

SEQ ID NO: 935478 - RNA, 19 nt, Human
ccuugagggcaaggccggg

SEQ ID NO: 935479 - RNA, 24 nt, Human
cgagaggacgcgccgcacacagcg

SEQ ID NO: 935480 - RNA, 21 nt, Human
cgagaugucccugccuggacc

SEQ ID NO: 935481 - RNA, 21 nt, Human
cggaggcagcaugaccccagc

SEQ ID NO: 935482 - RNA, 21 nt, Human
cgugcacaccacaggcggcca

SEQ ID NO: 935483 - RNA, 23 nt, Human
cgugcacaccacaggcggccacg

SEQ ID NO: 935484 - RNA, 19 nt, Human
gaaaggggagggaggaccc

SEQ ID NO: 935485 - RNA, 21 nt, Human
gaccacaccauggcuggguga

SEQ ID NO: 935486 - RNA, 23 nt, Human
gaccccaucauccacguguccuc

SEQ ID NO: 935487 - RNA, 20 nt, Human
gagagcagcgcggggccggc

SEQ ID NO: 935488 - RNA, 22 nt, Human
gagggacacacugccccagagc

SEQ ID NO: 935489 - RNA, 21 nt, Human
gaggggcagcucagugaucuc

SEQ ID NO: 935490 - RNA, 23 nt, Human
gaguguuuguggacgagcgccca

SEQ ID NO: 935491 - RNA, 19 nt, Human
gcccacacgagcugcgggg

SEQ ID NO: 935492 - RNA, 19 nt, Human
gcccggagccacuccgccc

SEQ ID NO: 935493 - RNA, 18 nt, Human
gccgcacacagcgcgagg

SEQ ID NO: 935494 - RNA, 20 nt, Human
gccgggcacguggcuccugg

SEQ ID NO: 935495 - RNA, 21 nt, Human
gcgcacccagggcccacggag

SEQ ID NO: 935496 - RNA, 24 nt, Human
gcguacacacacgcauacacacgu

SEQ ID NO: 935497 - RNA, 20 nt, Human
ggagagcagcgcggggccgg

SEQ ID NO: 935498 - RNA, 18 nt, Human
ggagcuuggugggccaga

SEQ ID NO: 935499 - RNA, 21 nt, Human
ggaggacccugguuccugagg

SEQ ID NO: 935500 - RNA, 18 nt, Human
ggcaaggccgggcacgug

SEQ ID NO: 935501 - RNA, 18 nt, Human
ggccagaggccacggggc

SEQ ID NO: 935502 - RNA, 21 nt, Human
ggccaguaaagggugugcggu

SEQ ID NO: 935503 - RNA, 32 nt, Human
guacacacgcgcguacacacgcguacacacag

SEQ ID NO: 935504 - RNA, 23 nt, Human
gugaaaggaaggcucggaggaga

SEQ ID NO: 935505 - RNA, 22 nt, Human
guguuuguggacgagcgcccac

SEQ ID NO: 935506 - RNA, 28 nt, Human
uacacacacgcauacacacguacacacg

SEQ ID NO: 935507 - RNA, 31 nt, Human
uacacacgcguacacacacgcauacacacgg

SEQ ID NO: 935508 - RNA, 18 nt, Human
uacacauggagaugaggc

SEQ ID NO: 935509 - RNA, 19 nt, Human
ucgccuucagccucgccag

SEQ ID NO: 935510 - RNA, 22 nt, Human
ucucugaccccaucauccacgu

SEQ ID NO: 935511 - RNA, 21 nt, Human
ucuggagaagccucggagccc

SEQ ID NO: 935512 - RNA, 22 nt, Human
ugagggcaaggccgggcacgug

SEQ ID NO: 935513 - RNA, 23 nt, Human
ugcacaggagaaaagcaaaaaac

SEQ ID NO: 935514 - RNA, 18 nt, Human
ugccacgccagccagcuc

SEQ ID NO: 935515 - RNA, 20 nt, Human
ugcucgugaagaugacccuc

SEQ ID NO: 935516 - RNA, 22 nt, Human
ugcuggggccuccuccaccccu

SEQ ID NO: 935517 - RNA, 22 nt, Human
uggagaagccucggagcccaga

SEQ ID NO: 935518 - RNA, 18 nt, Human
ugggaaggggucgcggcg

SEQ ID NO: 935519 - RNA, 22 nt, Human
uggugggccagaggccacgggg

SEQ ID NO: 935520 - RNA, 24 nt, Human
uguacacauggagaugaggcugug

SEQ ID NO: 935521 - RNA, 18 nt, Human
ugugaaaggaaggcucgg

SEQ ID NO: 935522 - RNA, 30 nt, Human
uguguacacacgcgcguacacacgcguaca

SEQ ID NO: 935523 - RNA, 19 nt, Human
uguuuguggacgagcgccc

SEQ ID NO: 935524 - RNA, 23 nt, Human
uuuuuuuuuuuuuggaagccuca

SEQ ID NO: 935525 - RNA, 18 nt, Human
uuuuuuuuuuuuuuuuug

SEQ ID NO: 935526 - RNA, 22 nt, Human
acuccugucucaggaaugggga

SEQ ID NO: 935527 - RNA, 23 nt, Human
acuccugucucaggaauggggau

SEQ ID NO: 935528 - RNA, 18 nt, Human
aggaauggggauagaugg

SEQ ID NO: 935529 - RNA, 21 nt, Human
cccugcacacccgcuccgcgg

SEQ ID NO: 935530 - RNA, 25 nt, Human
cucaggaauggggauagaugggagg

SEQ ID NO: 935531 - RNA, 19 nt, Human
cuccugucucaggaauggg

SEQ ID NO: 935532 - RNA, 22 nt, Human
uuggaugugagggccaaaaggg

SEQ ID NO: 935533 - RNA, 20 nt, Human
uuuuuuuuuuuuuuuuuggu

SEQ ID NO: 935534 - RNA, 20 nt, Human
uuuuuuuuuuuuuuuuuugg

SEQ ID NO: 935535 - RNA, 19 nt, Human
uaccacagagugaaaaaca

SEQ ID NO: 935536 - RNA, 21 nt, Human
aaccaguaucgccaggcgcug

SEQ ID NO: 935537 - RNA, 18 nt, Human
aagcgagagggcuggugg

SEQ ID NO: 935538 - RNA, 20 nt, Human
aagcgagagggcuggugggg

SEQ ID NO: 935539 - RNA, 19 nt, Human
aggaagaggggcggcagag

SEQ ID NO: 935540 - RNA, 20 nt, Human
aggcagggacagggaggggu

SEQ ID NO: 935541 - RNA, 22 nt, Human
aggcagggacagggaggggucg

SEQ ID NO: 935542 - RNA, 21 nt, Human
cacgcgcggcguuuaaagggc

SEQ ID NO: 935543 - RNA, 21 nt, Human
cagucccgggaggcuugggaa

SEQ ID NO: 935544 - RNA, 24 nt, Human
ccagggaugggauuccacugaaaa

SEQ ID NO: 935545 - RNA, 18 nt, Human
ccccgcggguuggccggg

SEQ ID NO: 935546 - RNA, 19 nt, Human
cccucugcucugcgcgggg

SEQ ID NO: 935547 - RNA, 22 nt, Human
cccugagccccagcaggugccc

SEQ ID NO: 935548 - RNA, 18 nt, Human
cccuguguuagaagcgag

SEQ ID NO: 935549 - RNA, 22 nt, Human
ccuaacaucccugagccccagc

SEQ ID NO: 935550 - RNA, 23 nt, Human
cgagagggcuggugggggugcgu

SEQ ID NO: 935551 - RNA, 23 nt, Human
cgagggcccccacccacaggaug

SEQ ID NO: 935552 - RNA, 19 nt, Human
cgccccagggcaguggcag

SEQ ID NO: 935553 - RNA, 23 nt, Human
cgccccagggcaguggcagggcu

SEQ ID NO: 935554 - RNA, 28 nt, Human
cgccccgcggguuggccggggugagggc

SEQ ID NO: 935555 - RNA, 19 nt, Human
cgcgaaacgaagacgccga

SEQ ID NO: 935556 - RNA, 25 nt, Human
cucgucccuaacaucccugagcccc

SEQ ID NO: 935557 - RNA, 25 nt, Human
cuggaacucgucccuaacaucccug

SEQ ID NO: 935558 - RNA, 23 nt, Human
cuggcccaguggccccaggcccu

SEQ ID NO: 935559 - RNA, 22 nt, Human
gaagagugggaaccaggggaac

SEQ ID NO: 935560 - RNA, 23 nt, Human
gcccuggcagcuggcgucuuccg

SEQ ID NO: 935561 - RNA, 23 nt, Human
gcgaaacgaagacgccgaggcac

SEQ ID NO: 935562 - RNA, 22 nt, Human
ggcagaaugauccugcccccaa

SEQ ID NO: 935563 - RNA, 21 nt, Human
ggcagagcagggaggcaggga

SEQ ID NO: 935564 - RNA, 19 nt, Human
ggccccaggcccuggcagc

SEQ ID NO: 935565 - RNA, 21 nt, Human
ggcuggugggggugcguggac

SEQ ID NO: 935566 - RNA, 22 nt, Human
gggcaguggcagggcuggaacu

SEQ ID NO: 935567 - RNA, 19 nt, Human
ggguuggccggggugaggg

SEQ ID NO: 935568 - RNA, 20 nt, Human
gucgagggcccccacccaca

SEQ ID NO: 935569 - RNA, 22 nt, Human
uaucgccaggcgcuggcccagu

SEQ ID NO: 935570 - RNA, 24 nt, Human
ucagcgcucucgggacugggcgug

SEQ ID NO: 935571 - RNA, 22 nt, Human
uccacugaaaacaaaccguccu

SEQ ID NO: 935572 - RNA, 19 nt, Human
ucccugagccccagcaggu

SEQ ID NO: 935573 - RNA, 20 nt, Human
ugccaugacaggcgccacaa

SEQ ID NO: 935574 - RNA, 21 nt, Human
ugcccuguguuagaagcgaga

SEQ ID NO: 935575 - RNA, 19 nt, Human
uggccccaggcccuggcag

SEQ ID NO: 935576 - RNA, 29 nt, Human
uggugggggugcguggacaaggggccgac

SEQ ID NO: 935577 - RNA, 18 nt, Human
uguguuagaagcgagagg

SEQ ID NO: 935578 - RNA, 24 nt, Human
uuccuuuauugcaaacauguccca

SEQ ID NO: 935579 - RNA, 21 nt, Human
uugcaaacaugucccaguccc

SEQ ID NO: 935580 - RNA, 22 nt, Human
uuuccaugagaugccugccaug

SEQ ID NO: 935581 - RNA, 20 nt, Human
uuuuuuuuuuuuuuuuccau

SEQ ID NO: 935582 - RNA, 24 nt, Human
uuuuuuuuuuuuuuuuuuuccaug

SEQ ID NO: 935583 - RNA, 29 nt, Human
uuuuuuuuuuuuuuuuuuuuccaugagaa

SEQ ID NO: 935584 - RNA, 19 nt, Human
aaacaggaaagaaacaccu

SEQ ID NO: 935585 - RNA, 22 nt, Human
aaacaggaaagaaacaccugcc

SEQ ID NO: 935586 - RNA, 27 nt, Human
aaacaggaaagaaacaccugccccugg

SEQ ID NO: 935587 - RNA, 23 nt, Human
aaagagacaccuucaaaaucagg

SEQ ID NO: 935588 - RNA, 24 nt, Human
aaagugcugggauuacaggcauga

SEQ ID NO: 935589 - RNA, 19 nt, Human
aagaaacgggcacugccuu

SEQ ID NO: 935590 - RNA, 20 nt, Human
aagacaaacaggaaagaaac

SEQ ID NO: 935591 - RNA, 19 nt, Human
aagugcugggauuacaggc

SEQ ID NO: 935592 - RNA, 21 nt, Human
aagugcugggauuacaggcau

SEQ ID NO: 935593 - RNA, 26 nt, Human
aagugcugggauuacaggcaugagcc

SEQ ID NO: 935594 - RNA, 20 nt, Human
acaagggagaagacaaaucc

SEQ ID NO: 935595 - RNA, 24 nt, Human
acccagcacccacaggcgcuccag

SEQ ID NO: 935596 - RNA, 22 nt, Human
acccagcgacaaaggugaaggu

SEQ ID NO: 935597 - RNA, 25 nt, Human
accccagggaagcgcgugggccuug

SEQ ID NO: 935598 - RNA, 24 nt, Human
acccccaccaccacacccagcuaa

SEQ ID NO: 935599 - RNA, 25 nt, Human
acccccaccaccacacccagcuaau

SEQ ID NO: 935600 - RNA, 22 nt, Human
acgccagggggcaggcaaggac

SEQ ID NO: 935601 - RNA, 18 nt, Human
acgggguuucaccguguu

SEQ ID NO: 935602 - RNA, 19 nt, Human
acgggguuucaccguguua

SEQ ID NO: 935603 - RNA, 20 nt, Human
acgggguuucaccguguuag

SEQ ID NO: 935604 - RNA, 24 nt, Human
acgggguuucaccguguuagccag

SEQ ID NO: 935605 - RNA, 21 nt, Human
acucaggcacucagggaagcc

SEQ ID NO: 935606 - RNA, 18 nt, Human
acucagggaagccaacgg

SEQ ID NO: 935607 - RNA, 18 nt, Human
agacacaagacaaacagg

SEQ ID NO: 935608 - RNA, 19 nt, Human
agacccaaggcacacacga

SEQ ID NO: 935609 - RNA, 21 nt, Human
agagaagggcccuugucagcg

SEQ ID NO: 935610 - RNA, 18 nt, Human
agagcaccccggcuccuc

SEQ ID NO: 935611 - RNA, 22 nt, Human
agagggaguggaaucagggcag

SEQ ID NO: 935612 - RNA, 19 nt, Human
agcacuuagcgcccgcacu

SEQ ID NO: 935613 - RNA, 22 nt, Human
agcagccacacccagcacccac

SEQ ID NO: 935614 - RNA, 23 nt, Human
agcccggaaccaccccacagaca

SEQ ID NO: 935615 - RNA, 24 nt, Human
agcgcccgcacuaugggaacccac

SEQ ID NO: 935616 - RNA, 19 nt, Human
agcggccucaugggcaggc

SEQ ID NO: 935617 - RNA, 20 nt, Human
aggaacaaggcguguuugcc

SEQ ID NO: 935618 - RNA, 21 nt, Human
aggacuucccggaagaggagg

SEQ ID NO: 935619 - RNA, 23 nt, Human
aggacuucccggaagaggagggc

SEQ ID NO: 935620 - RNA, 18 nt, Human
aggagcugcugugggcag

SEQ ID NO: 935621 - RNA, 23 nt, Human
aggcagcccccccagcccggaac

SEQ ID NO: 935622 - RNA, 19 nt, Human
aggccgggaagcagccaca

SEQ ID NO: 935623 - RNA, 25 nt, Human
aggcuggagugcaguggcgcgaucu

SEQ ID NO: 935624 - RNA, 21 nt, Human
aggggcacccacggcugaaga

SEQ ID NO: 935625 - RNA, 20 nt, Human
aguaccuuuccagaaacucc

SEQ ID NO: 935626 - RNA, 20 nt, Human
aguagagacgggguuucacc

SEQ ID NO: 935627 - RNA, 20 nt, Human
agugcaguggcgcgaucucg

SEQ ID NO: 935628 - RNA, 23 nt, Human
agugcaguggcgcgaucucggcu

SEQ ID NO: 935629 - RNA, 24 nt, Human
agugcaguggcgcgaucucggcuc

SEQ ID NO: 935630 - RNA, 19 nt, Human
auagaaccuccagaagacu

SEQ ID NO: 935631 - RNA, 23 nt, Human
caaaaccaaauuuacaugagcgu

SEQ ID NO: 935632 - RNA, 20 nt, Human
caaacaggaaagaaacaccc

SEQ ID NO: 935633 - RNA, 22 nt, Human
caaacaggaaagaaacaccugc

SEQ ID NO: 935634 - RNA, 24 nt, Human
caaagugcugggauuacaggcaug

SEQ ID NO: 935635 - RNA, 21 nt, Human
caagacacaagacaaacagga

SEQ ID NO: 935636 - RNA, 23 nt, Human
caagacacaagacaaacaggaaa

SEQ ID NO: 935637 - RNA, 22 nt, Human
caagccucgcagccugagggca

SEQ ID NO: 935638 - RNA, 22 nt, Human
cacaagacaaacaggaaagaaa

SEQ ID NO: 935639 - RNA, 27 nt, Human
cacaagacaaacaggaaagaaacaccu

SEQ ID NO: 935640 - RNA, 18 nt, Human
cacaggcgcccaccccca

SEQ ID NO: 935641 - RNA, 20 nt, Human
caccaagcugaacugggaag

SEQ ID NO: 935642 - RNA, 24 nt, Human
caccagucugcugccucagccucc

SEQ ID NO: 935643 - RNA, 23 nt, Human
cacccaucaccucaguaaacccc

SEQ ID NO: 935644 - RNA, 22 nt, Human
caccccggcuccuccugagggc

SEQ ID NO: 935645 - RNA, 22 nt, Human
caccccugagcacagggcccaa

SEQ ID NO: 935646 - RNA, 18 nt, Human
caccguguuagccaggau

SEQ ID NO: 935647 - RNA, 24 nt, Human
caccguguuagccaggaugguguc

SEQ ID NO: 935648 - RNA, 19 nt, Human
caccucccggguucacacc

SEQ ID NO: 935649 - RNA, 23 nt, Human
caccugccucagccucccaaagu

SEQ ID NO: 935650 - RNA, 19 nt, Human
caccuucaaaaucaggugc

SEQ ID NO: 935651 - RNA, 19 nt, Human
cagagcaccccggcuccuc

SEQ ID NO: 935652 - RNA, 26 nt, Human
cagagcaccccggcuccuccugaggg

SEQ ID NO: 935653 - RNA, 24 nt, Human
cagcacccacaggcgcuccagagc

SEQ ID NO: 935654 - RNA, 24 nt, Human
cagcagcugagacccaaggcacac

SEQ ID NO: 935655 - RNA, 18 nt, Human
cagcagggcccggccaug

SEQ ID NO: 935656 - RNA, 26 nt, Human
cagcccccccagcccggaaccacccc

SEQ ID NO: 935657 - RNA, 22 nt, Human
caggcugcgugucagcagcuga

SEQ ID NO: 935658 - RNA, 18 nt, Human
cagggcccaaugucagga

SEQ ID NO: 935659 - RNA, 18 nt, Human
caggugggggccgccucu

SEQ ID NO: 935660 - RNA, 19 nt, Human
caguagagaagggcccuug

SEQ ID NO: 935661 - RNA, 24 nt, Human
cauggaugaaagagacaccuucaa

SEQ ID NO: 935662 - RNA, 23 nt, Human
ccaaagugcugggauuacaggca

SEQ ID NO: 935663 - RNA, 24 nt, Human
ccaaagugcugggauuacaggcau

SEQ ID NO: 935664 - RNA, 18 nt, Human
ccacacccagcacccaca

SEQ ID NO: 935665 - RNA, 22 nt, Human
ccacacccagcacccacaggcg

SEQ ID NO: 935666 - RNA, 20 nt, Human
ccacccccaccaccacaccc

SEQ ID NO: 935667 - RNA, 22 nt, Human
ccacccccaccaccacacccag

SEQ ID NO: 935668 - RNA, 23 nt, Human
ccacccccaccaccacacccagc

SEQ ID NO: 935669 - RNA, 26 nt, Human
ccaccugccucagccucccaaagugc

SEQ ID NO: 935670 - RNA, 20 nt, Human
ccagcacccacaggcgcucc

SEQ ID NO: 935671 - RNA, 23 nt, Human
ccagcacccacaggcgcuccaga

SEQ ID NO: 935672 - RNA, 21 nt, Human
ccagccccagacuccaccccu

SEQ ID NO: 935673 - RNA, 20 nt, Human
ccagccggccccacaagucc

SEQ ID NO: 935674 - RNA, 21 nt, Human
ccaggggcacccacggcugaa

SEQ ID NO: 935675 - RNA, 24 nt, Human
cccaaagugcugggauuacaggca

SEQ ID NO: 935676 - RNA, 24 nt, Human
cccacaaguccucaggcccacugg

SEQ ID NO: 935677 - RNA, 20 nt, Human
cccacaggcgcuccagagca

SEQ ID NO: 935678 - RNA, 21 nt, Human
cccaccaagcugaacugggaa

SEQ ID NO: 935679 - RNA, 21 nt, Human
cccacccccaccaccacaccc

SEQ ID NO: 935680 - RNA, 21 nt, Human
cccacggcugaagaaacgggc

SEQ ID NO: 935681 - RNA, 22 nt, Human
cccaggcuggagugcaguggcg

SEQ ID NO: 935682 - RNA, 22 nt, Human
ccccacaaguccucaggcccac

SEQ ID NO: 935683 - RNA, 18 nt, Human
cccccagcccggaaccac

SEQ ID NO: 935684 - RNA, 21 nt, Human
cccccagcccggaaccacccc

SEQ ID NO: 935685 - RNA, 22 nt, Human
ccccccagcccggaaccacccc

SEQ ID NO: 935686 - RNA, 21 nt, Human
cccccccagcccggaaccacc

SEQ ID NO: 935687 - RNA, 22 nt, Human
ccccucugaccucugcuggcuu

SEQ ID NO: 935688 - RNA, 18 nt, Human
ccccugagcacagggccc

SEQ ID NO: 935689 - RNA, 19 nt, Human
ccccugagcacagggccca

SEQ ID NO: 935690 - RNA, 20 nt, Human
ccccugggaggaaagaaccc

SEQ ID NO: 935691 - RNA, 20 nt, Human
cccgagccacgcgaaugacu

SEQ ID NO: 935692 - RNA, 20 nt, Human
cccggaaccaccccacagac

SEQ ID NO: 935693 - RNA, 18 nt, Human
cccucugggaacaagccu

SEQ ID NO: 935694 - RNA, 28 nt, Human
ccucacccagccccagacuccaccccug

SEQ ID NO: 935695 - RNA, 19 nt, Human
ccucccggguucacaccag

SEQ ID NO: 935696 - RNA, 20 nt, Human
ccucgcagccugagggcagg

SEQ ID NO: 935697 - RNA, 19 nt, Human
ccugaccucgugauccacc

SEQ ID NO: 935698 - RNA, 21 nt, Human
ccugaccucgugauccaccug

SEQ ID NO: 935699 - RNA, 19 nt, Human
ccuugagcaccaaaaccaa

SEQ ID NO: 935700 - RNA, 24 nt, Human
cgcccacccccaccaccacaccca

SEQ ID NO: 935701 - RNA, 24 nt, Human
cgcucugucgcccaggcuggagug

SEQ ID NO: 935702 - RNA, 23 nt, Human
cggccccacaaguccucaggccc

SEQ ID NO: 935703 - RNA, 20 nt, Human
cggcccggaggacuucccgg

SEQ ID NO: 935704 - RNA, 18 nt, Human
cggcugaagaaacgggca

SEQ ID NO: 935705 - RNA, 19 nt, Human
cggcugaagaaacgggcac

SEQ ID NO: 935706 - RNA, 24 nt, Human
cgggcgcagcggcaggaccaggcu

SEQ ID NO: 935707 - RNA, 22 nt, Human
cgucggugcccucacccagccc

SEQ ID NO: 935708 - RNA, 24 nt, Human
cgugauccaccugccucagccucc

SEQ ID NO: 935709 - RNA, 21 nt, Human
cuaauuuuuuguauuuuuuag

SEQ ID NO: 935710 - RNA, 20 nt, Human
cucacccagccccagacucc

SEQ ID NO: 935711 - RNA, 24 nt, Human
cucacugcaagcuccaccucccgg

SEQ ID NO: 935712 - RNA, 23 nt, Human
cucagccucccacguagcuggga

SEQ ID NO: 935713 - RNA, 24 nt, Human
cuccugaccucgugauccaccugc

SEQ ID NO: 935714 - RNA, 24 nt, Human
cucgcucugucgcccaggcuggag

SEQ ID NO: 935715 - RNA, 20 nt, Human
cucugcccaggccccuccuc

SEQ ID NO: 935716 - RNA, 18 nt, Human
cugacccagcgacaaagg

SEQ ID NO: 935717 - RNA, 24 nt, Human
cugcaagcuccaccucccggguuc

SEQ ID NO: 935718 - RNA, 24 nt, Human
cugcagacagacagccagagagcg

SEQ ID NO: 935719 - RNA, 23 nt, Human
cugccucagccucccaaagugcu

SEQ ID NO: 935720 - RNA, 24 nt, Human
cugccucagccucccaaagugcug

SEQ ID NO: 935721 - RNA, 23 nt, Human
cugccucagccucccacguagcu

SEQ ID NO: 935722 - RNA, 19 nt, Human
gaaagaaacaccugccccu

SEQ ID NO: 935723 - RNA, 24 nt, Human
gaacaaggcguguuugccucccac

SEQ ID NO: 935724 - RNA, 22 nt, Human
gaccucgugauccaccugccuc

SEQ ID NO: 935725 - RNA, 24 nt, Human
gaccucgugauccaccugccucag

SEQ ID NO: 935726 - RNA, 24 nt, Human
gagacgggguuucaccguguuagc

SEQ ID NO: 935727 - RNA, 18 nt, Human
gagcaccccggcuccucc

SEQ ID NO: 935728 - RNA, 18 nt, Human
gagcaggaacaaggcgug

SEQ ID NO: 935729 - RNA, 18 nt, Human
gagccaccgugccccgcc

SEQ ID NO: 935730 - RNA, 19 nt, Human
gagcugcugugggcaggcg

SEQ ID NO: 935731 - RNA, 21 nt, Human
gaggacuucccggaagaggag

SEQ ID NO: 935732 - RNA, 19 nt, Human
gagggcugcaggcgcugcc

SEQ ID NO: 935733 - RNA, 21 nt, Human
gagggggaggaggaccucccg

SEQ ID NO: 935734 - RNA, 18 nt, Human
gauuacaggcaugagcca

SEQ ID NO: 935735 - RNA, 21 nt, Human
gauuacaggcaugagccaccg

SEQ ID NO: 935736 - RNA, 24 nt, Human
gauuacaggcaugagccaccgugc

SEQ ID NO: 935737 - RNA, 21 nt, Human
gcaaaggaggcagccccccca

SEQ ID NO: 935738 - RNA, 19 nt, Human
gcaugagccaccgugcccc

SEQ ID NO: 935739 - RNA, 21 nt, Human
gcccacccccaccaccacacc

SEQ ID NO: 935740 - RNA, 19 nt, Human
gcccaggcuggagugcagu

SEQ ID NO: 935741 - RNA, 20 nt, Human
gcccaggcuggagugcagug

SEQ ID NO: 935742 - RNA, 22 nt, Human
gccccagacuccaccccugagc

SEQ ID NO: 935743 - RNA, 19 nt, Human
gcccucugggaacaagccu

SEQ ID NO: 935744 - RNA, 23 nt, Human
gcgcccgcacuaugggaacccac

SEQ ID NO: 935745 - RNA, 25 nt, Human
gcucugucgcccaggcuggagugca

SEQ ID NO: 935746 - RNA, 19 nt, Human
gcuggagugcaguggcgcg

SEQ ID NO: 935747 - RNA, 19 nt, Human
gcuugggcuggcagagacc

SEQ ID NO: 935748 - RNA, 24 nt, Human
ggagaagacaaauccuuuugagaa

SEQ ID NO: 935749 - RNA, 24 nt, Human
ggauuacaggcaugagccaccgug

SEQ ID NO: 935750 - RNA, 24 nt, Human
gggaagcagccacacccagcaccc

SEQ ID NO: 935751 - RNA, 20 nt, Human
gggcaagcaccgccagggcc

SEQ ID NO: 935752 - RNA, 19 nt, Human
gggcacaggugggggccgc

SEQ ID NO: 935753 - RNA, 22 nt, Human
gggcacugcagacagacagcca

SEQ ID NO: 935754 - RNA, 22 nt, Human
gggcaggaaggugagggcugca

SEQ ID NO: 935755 - RNA, 23 nt, Human
gggccaagcagggaagagggagu

SEQ ID NO: 935756 - RNA, 19 nt, Human
ggggaggcagagccagggg

SEQ ID NO: 935757 - RNA, 22 nt, Human
ggggaggcagagccaggggcac

SEQ ID NO: 935758 - RNA, 22 nt, Human
ggggcacccacggcugaagaaa

SEQ ID NO: 935759 - RNA, 23 nt, Human
gggguuucaccguguuagccagg

SEQ ID NO: 935760 - RNA, 22 nt, Human
ggguuucaccguguuagccagg

SEQ ID NO: 935761 - RNA, 23 nt, Human
guagagacgggguuucaccgugu

SEQ ID NO: 935762 - RNA, 22 nt, Human
guagcugggaucacaggcgccc

SEQ ID NO: 935763 - RNA, 24 nt, Human
gugauccaccugccucagccuccc

SEQ ID NO: 935764 - RNA, 20 nt, Human
guuuugggggauccccgggg

SEQ ID NO: 935765 - RNA, 22 nt, Human
uaaggccaagcucucaagacac

SEQ ID NO: 935766 - RNA, 25 nt, Human
uaauuuuuuguauuuuuuaguagag

SEQ ID NO: 935767 - RNA, 26 nt, Human
uaauuuuuuguauuuuuuaguagaga

SEQ ID NO: 935768 - RNA, 24 nt, Human
uacaggcaugagccaccgugcccc

SEQ ID NO: 935769 - RNA, 21 nt, Human
uaguagagacgggguuucacc

SEQ ID NO: 935770 - RNA, 24 nt, Human
uaguagagacgggguuucaccgug

SEQ ID NO: 935771 - RNA, 26 nt, Human
uaguagagacgggguuucaccguguu

SEQ ID NO: 935772 - RNA, 26 nt, Human
uaguagagacgggguuucaccguugg

SEQ ID NO: 935773 - RNA, 22 nt, Human
ucaccguguuagccaggauggu

SEQ ID NO: 935774 - RNA, 24 nt, Human
ucacugcaagcuccaccucccggg

SEQ ID NO: 935775 - RNA, 23 nt, Human
ucagagcugcgggggcacaggug

SEQ ID NO: 935776 - RNA, 21 nt, Human
ucagcagcugagacccaaggc

SEQ ID NO: 935777 - RNA, 28 nt, Human
ucagggcagcgacagcugugugggucgg

SEQ ID NO: 935778 - RNA, 18 nt, Human
ucauaucaaaccaaaccc

SEQ ID NO: 935779 - RNA, 21 nt, Human
uccacacggacgccagggggc

SEQ ID NO: 935780 - RNA, 21 nt, Human
uccagaaacucccaaaauuau

SEQ ID NO: 935781 - RNA, 24 nt, Human
ucccaaagugcugggauuacaggc

SEQ ID NO: 935782 - RNA, 18 nt, Human
ucccagguccaggcccuc

SEQ ID NO: 935783 - RNA, 18 nt, Human
ucccagguccaggcccuc

SEQ ID NO: 935784 - RNA, 23 nt, Human
ucccagguccaggcccucugccc

SEQ ID NO: 935785 - RNA, 19 nt, Human
uccccggggaggcagagcc

SEQ ID NO: 935786 - RNA, 23 nt, Human
ucccggaucucaucugcaggcuc

SEQ ID NO: 935787 - RNA, 20 nt, Human
ucccggguucacaccagucu

SEQ ID NO: 935788 - RNA, 22 nt, Human
uccggcagcuuccccuccaccc

SEQ ID NO: 935789 - RNA, 22 nt, Human
ucgcccaggcuggagugcagug

SEQ ID NO: 935790 - RNA, 24 nt, Human
ucgcucugucgcccaggcuggagu

SEQ ID NO: 935791 - RNA, 19 nt, Human
ucucgcucugucgcccagg

SEQ ID NO: 935792 - RNA, 22 nt, Human
ucucgcucugucgcccaggcug

SEQ ID NO: 935793 - RNA, 23 nt, Human
ucucgcucugucgcccaggcugg

SEQ ID NO: 935794 - RNA, 24 nt, Human
ucucgcucugucgcccaggcugga

SEQ ID NO: 935795 - RNA, 26 nt, Human
ucucgcucugucgcccaggcuggagu

SEQ ID NO: 935796 - RNA, 27 nt, Human
ucucgcucugucgcccaggcuggagug

SEQ ID NO: 935797 - RNA, 22 nt, Human
ucugcaggcuccagagcaggcu

SEQ ID NO: 935798 - RNA, 18 nt, Human
ucuuuuuuuuuuuuuuuu

SEQ ID NO: 935799 - RNA, 24 nt, Human
ucuuuuuuuuuuuuuuuuuuuuga

SEQ ID NO: 935800 - RNA, 22 nt, Human
ugagauggagucucgcucuguc

SEQ ID NO: 935801 - RNA, 24 nt, Human
ugagcgcaggagagggggaggagg

SEQ ID NO: 935802 - RNA, 19 nt, Human
ugaucccagguccaggccc

SEQ ID NO: 935803 - RNA, 22 nt, Human
ugcaguggcgcgaucucggcuc

SEQ ID NO: 935804 - RNA, 20 nt, Human
ugcccaggccccuccucagc

SEQ ID NO: 935805 - RNA, 25 nt, Human
ugccccgccuauucuucuuuuaaac

SEQ ID NO: 935806 - RNA, 24 nt, Human
ugccucagccucccaaagugcugg

SEQ ID NO: 935807 - RNA, 24 nt, Human
ugccucagccucccacguagcugg

SEQ ID NO: 935808 - RNA, 24 nt, Human
uggagucucgcucugucgcccagg

SEQ ID NO: 935809 - RNA, 23 nt, Human
uggagugcaguggcgcgaucucg

SEQ ID NO: 935810 - RNA, 24 nt, Human
uggagugcaguggcgcgaucucgg

SEQ ID NO: 935811 - RNA, 25 nt, Human
uggcaggcgggccgucccacuuccu

SEQ ID NO: 935812 - RNA, 22 nt, Human
ugggaaaagccccuuguggacg

SEQ ID NO: 935813 - RNA, 22 nt, Human
ugggaucacaggcgcccacccc

SEQ ID NO: 935814 - RNA, 25 nt, Human
ugggaucacaggcgcccacccccac

SEQ ID NO: 935815 - RNA, 18 nt, Human
ugggauuacaggcaugag

SEQ ID NO: 935816 - RNA, 21 nt, Human
ugggauuacaggcaugagcca

SEQ ID NO: 935817 - RNA, 22 nt, Human
ugggauuacaggcaugagccac

SEQ ID NO: 935818 - RNA, 23 nt, Human
ugggauuacaggcaugagccacc

SEQ ID NO: 935819 - RNA, 23 nt, Human
ugggauuacaggcaugagccacc

SEQ ID NO: 935820 - RNA, 24 nt, Human
ugggauuacaggcaugagccaccg

SEQ ID NO: 935821 - RNA, 22 nt, Human
ugggccuugaucccagguccag

SEQ ID NO: 935822 - RNA, 21 nt, Human
ugucgcccaggcuggagugca

SEQ ID NO: 935823 - RNA, 18 nt, Human
uuaguagagacgggguuu

SEQ ID NO: 935824 - RNA, 22 nt, Human
uuaguagagacgggguuucacc

SEQ ID NO: 935825 - RNA, 24 nt, Human
uuaguagagacgggguuucaccgu

SEQ ID NO: 935826 - RNA, 19 nt, Human
uucaggugagucaaaacca

SEQ ID NO: 935827 - RNA, 20 nt, Human
uucccggaagaggagggccc

SEQ ID NO: 935828 - RNA, 19 nt, Human
uugagaaauccuaguaccu

SEQ ID NO: 935829 - RNA, 19 nt, Human
uuucaccguguuagccagg

SEQ ID NO: 935830 - RNA, 24 nt, Human
uuuuuaguagagacgggguuucac

SEQ ID NO: 935831 - RNA, 22 nt, Human
uuuuuguauuuuuuaguagaga

SEQ ID NO: 935832 - RNA, 23 nt, Human
uuuuuuaguagagacgggguuuc

SEQ ID NO: 935833 - RNA, 25 nt, Human
uuuuuuguauuuuuuaguagagacg

SEQ ID NO: 935834 - RNA, 25 nt, Human
uuuuuuuuuuuugagauggagucuc

SEQ ID NO: 935835 - RNA, 22 nt, Human
uuuuuuuuuuuuuugagaugga

SEQ ID NO: 935836 - RNA, 18 nt, Human
uuuuuuuuuuuuuuuuug

SEQ ID NO: 935837 - RNA, 21 nt, Human
aaaaaaaagucaaauauaaaa

SEQ ID NO: 935838 - RNA, 19 nt, Human
aaaaacacacagaagugaa

SEQ ID NO: 935839 - RNA, 19 nt, Human
aaaauacucuagccugguc

SEQ ID NO: 935840 - RNA, 18 nt, Human
aaacaaacaaaaccccaa

SEQ ID NO: 935841 - RNA, 22 nt, Human
aaacagugugacaaaauuaaac

SEQ ID NO: 935842 - RNA, 20 nt, Human
aaagaaauaugaggcucaaa

SEQ ID NO: 935843 - RNA, 22 nt, Human
aacaaaaccccaaauacucuaa

SEQ ID NO: 935844 - RNA, 22 nt, Human
aacauuuuuuguuuccuuuuga

SEQ ID NO: 935845 - RNA, 19 nt, Human
aaguaucaaagaaauauga

SEQ ID NO: 935846 - RNA, 23 nt, Human
aaugcuauuaaaaaaaagucaaa

SEQ ID NO: 935847 - RNA, 20 nt, Human
acuaaaacauacuguaaacg

SEQ ID NO: 935848 - RNA, 19 nt, Human
agaaaaacauucacuucua

SEQ ID NO: 935849 - RNA, 21 nt, Human
agacaucagacuuucuagaac

SEQ ID NO: 935850 - RNA, 23 nt, Human
auagaaaauaucugguacccuua

SEQ ID NO: 935851 - RNA, 22 nt, Human
aucugucaacccacaauuauuc

SEQ ID NO: 935852 - RNA, 18 nt, Human
auggcucuugcagcaggu

SEQ ID NO: 935853 - RNA, 25 nt, Human
auuucaaucugaacauaaauguuug

SEQ ID NO: 935854 - RNA, 23 nt, Human
caaaugcaucacugauuuucagc

SEQ ID NO: 935855 - RNA, 26 nt, Human
caacauggaaugauuucaguucuccu

SEQ ID NO: 935856 - RNA, 21 nt, Human
caacuaaaacauacuguaaac

SEQ ID NO: 935857 - RNA, 21 nt, Human
caaucugaacauaaauguuug

SEQ ID NO: 935858 - RNA, 20 nt, Human
caauuugcccauaaauguau

SEQ ID NO: 935859 - RNA, 23 nt, Human
cagcuuagaaaauacucuagccu

SEQ ID NO: 935860 - RNA, 24 nt, Human
cauaaaguuuagaucaagaaauua

SEQ ID NO: 935861 - RNA, 19 nt, Human
ccccaaauacucuaaauuc

SEQ ID NO: 935862 - RNA, 20 nt, Human
ccuacagucugacagagcua

SEQ ID NO: 935863 - RNA, 22 nt, Human
ccucuauuucaaguaucaaaga

SEQ ID NO: 935864 - RNA, 18 nt, Human
cuagaacuggcccaacug

SEQ ID NO: 935865 - RNA, 18 nt, Human
cucacagagcauuagaaa

SEQ ID NO: 935866 - RNA, 20 nt, Human
cuguacuaaaagcuggacuu

SEQ ID NO: 935867 - RNA, 21 nt, Human
cuuagaaaauacucuagccug

SEQ ID NO: 935868 - RNA, 23 nt, Human
cuucacugcuauauaaauuuacu

SEQ ID NO: 935869 - RNA, 20 nt, Human
gauccuacagucugacagag

SEQ ID NO: 935870 - RNA, 18 nt, Human
gcuauuaaaaaaaaguca

SEQ ID NO: 935871 - RNA, 20 nt, Human
ggacuuuuaaaaaacuagua

SEQ ID NO: 935872 - RNA, 19 nt, Human
gugaaaagugcuauuuucc

SEQ ID NO: 935873 - RNA, 25 nt, Human
uaaaagacugcugcaauauaaagca

SEQ ID NO: 935874 - RNA, 21 nt, Human
uaaaauguccaccagaaggca

SEQ ID NO: 935875 - RNA, 18 nt, Human
uaacugauaaugcaaagc

SEQ ID NO: 935876 - RNA, 19 nt, Human
uagaacuggcccaacugua

SEQ ID NO: 935877 - RNA, 22 nt, Human
uagguaugauacugccaacuaa

SEQ ID NO: 935878 - RNA, 19 nt, Human
uaucaaagaaauaugaggc

SEQ ID NO: 935879 - RNA, 23 nt, Human
uaugaaaugugcauuuccgauaa

SEQ ID NO: 935880 - RNA, 22 nt, Human
uaugugugucugucuacgugua

SEQ ID NO: 935881 - RNA, 22 nt, Human
ucaaagaaauaugaggcucaaa

SEQ ID NO: 935882 - RNA, 25 nt, Human
ucaaagaaauaugaggcucaaaauc

SEQ ID NO: 935883 - RNA, 20 nt, Human
uccggcgcugagugcagcca

SEQ ID NO: 935884 - RNA, 24 nt, Human
ucugacagagcuagcacagcuacu

SEQ ID NO: 935885 - RNA, 18 nt, Human
ucuuucugucccacaaga

SEQ ID NO: 935886 - RNA, 23 nt, Human
ugaaaggugcauauauuaccuua

SEQ ID NO: 935887 - RNA, 22 nt, Human
ugaggcucaaaaucucucuagg

SEQ ID NO: 935888 - RNA, 28 nt, Human
ugauuauuuguaaacaaacaaaacccca

SEQ ID NO: 935889 - RNA, 20 nt, Human
ugcagccaggcgccccggcc

SEQ ID NO: 935890 - RNA, 20 nt, Human
ugcuuuacuuacucgaacac

SEQ ID NO: 935891 - RNA, 21 nt, Human
uggaaucaacgcuaugaaaac

SEQ ID NO: 935892 - RNA, 20 nt, Human
ugguuuuggagaaaaaaguc

SEQ ID NO: 935893 - RNA, 22 nt, Human
uguaaacaaacaaaaccccaaa

SEQ ID NO: 935894 - RNA, 18 nt, Human
uguaaacgaugaguuaua

SEQ ID NO: 935895 - RNA, 18 nt, Human
uguaauucuucacugcua

SEQ ID NO: 935896 - RNA, 19 nt, Human
uguaugugugucugucuac

SEQ ID NO: 935897 - RNA, 20 nt, Human
uuaaaguuucagagugagcu

SEQ ID NO: 935898 - RNA, 21 nt, Human
uuaacagauuaaacauuaagu

SEQ ID NO: 935899 - RNA, 21 nt, Human
uuagaaaaugccucaaaguua

SEQ ID NO: 935900 - RNA, 22 nt, Human
uuggccucacagagcauuagaa

SEQ ID NO: 935901 - RNA, 22 nt, Human
uuucuagcuuuaacucaaaaau

SEQ ID NO: 935902 - RNA, 24 nt, Human
uuucugaaaggugcauauauuacc

SEQ ID NO: 935903 - RNA, 18 nt, Human
aaaaugccagcccggugg

SEQ ID NO: 935904 - RNA, 20 nt, Human
accaucccaaacugcaguga

SEQ ID NO: 935905 - RNA, 24 nt, Human
agaaacacuuuccuggagcccagg

SEQ ID NO: 935906 - RNA, 22 nt, Human
agcugccagcccuccugaccuc

SEQ ID NO: 935907 - RNA, 21 nt, Human
aggccccugacccagcccccu

SEQ ID NO: 935908 - RNA, 23 nt, Human
caagagagguggaggauguggcg

SEQ ID NO: 935909 - RNA, 24 nt, Human
cacaaaaugccagcccgguggccc

SEQ ID NO: 935910 - RNA, 21 nt, Human
cacacagacgagaugcaggga

SEQ ID NO: 935911 - RNA, 19 nt, Human
cacccugggcacacagacg

SEQ ID NO: 935912 - RNA, 18 nt, Human
cagcccugacugacccca

SEQ ID NO: 935913 - RNA, 24 nt, Human
caggccccugacccagcccccuua

SEQ ID NO: 935914 - RNA, 20 nt, Human
cagggacagcaacagggaag

SEQ ID NO: 935915 - RNA, 21 nt, Human
cccaaacugcagugaccccug

SEQ ID NO: 935916 - RNA, 23 nt, Human
cccggacacccugggcacacaga

SEQ ID NO: 935917 - RNA, 20 nt, Human
cccgguggcccucggacgcu

SEQ ID NO: 935918 - RNA, 21 nt, Human
ccucccagaaacacuuuccug

SEQ ID NO: 935919 - RNA, 23 nt, Human
ccucccagaaacacuuuccugga

SEQ ID NO: 935920 - RNA, 25 nt, Human
ccucccagaaacacuuuccuggagc

SEQ ID NO: 935921 - RNA, 22 nt, Human
cugcagugaccccugccccagc

SEQ ID NO: 935922 - RNA, 21 nt, Human
gacccagcccccuuaagccag

SEQ ID NO: 935923 - RNA, 22 nt, Human
gaugcagggacagcaacaggga

SEQ ID NO: 935924 - RNA, 20 nt, Human
gcagggagcggaaggugggc

SEQ ID NO: 935925 - RNA, 24 nt, Human
gccccagcccugacugaccccacu

SEQ ID NO: 935926 - RNA, 19 nt, Human
gcguucagcugccagcccu

SEQ ID NO: 935927 - RNA, 21 nt, Human
gcguucagcugccagcccucc

SEQ ID NO: 935928 - RNA, 28 nt, Human
gcugggacccuagucucagcuccccggg

SEQ ID NO: 935929 - RNA, 21 nt, Human
gcuugacccuggcccggcaac

SEQ ID NO: 935930 - RNA, 20 nt, Human
ggacccuagucucagcuccc

SEQ ID NO: 935931 - RNA, 23 nt, Human
uagaaaauacagcauucaaccau

SEQ ID NO: 935932 - RNA, 22 nt, Human
ucccagaaacacuuuccuggag

SEQ ID NO: 935933 - RNA, 21 nt, Human
uccccggacacccugggcaca

SEQ ID NO: 935934 - RNA, 21 nt, Human
uccgcgccgucggagcccucc

SEQ ID NO: 935935 - RNA, 19 nt, Human
uccuggagcccaggaagga

SEQ ID NO: 935936 - RNA, 24 nt, Human
ucggagcccuccgcuugacccugg

SEQ ID NO: 935937 - RNA, 19 nt, Human
ugacccagcccccuuaagc

SEQ ID NO: 935938 - RNA, 26 nt, Human
ugacccagcccccuuaagccagccag

SEQ ID NO: 935939 - RNA, 21 nt, Human
ugaccccacuucuuguggcca

SEQ ID NO: 935940 - RNA, 18 nt, Human
ugaccccugccccagccc

SEQ ID NO: 935941 - RNA, 18 nt, Human
ugaccucccagaaacacu

SEQ ID NO: 935942 - RNA, 24 nt, Human
ugaccucccagaaacacuuuccug

SEQ ID NO: 935943 - RNA, 23 nt, Human
ugccaggccccugacccagcccc

SEQ ID NO: 935944 - RNA, 21 nt, Human
ugccccagcccugacugaccc

SEQ ID NO: 935945 - RNA, 22 nt, Human
uggaggauguggcggaggcugu

SEQ ID NO: 935946 - RNA, 25 nt, Human
uggcagggagcggaaggugggcagc

SEQ ID NO: 935947 - RNA, 19 nt, Human
uggccaaagguuucugggc

SEQ ID NO: 935948 - RNA, 28 nt, Human
uggcccggcaacgcucgcuggaccaaga

SEQ ID NO: 935949 - RNA, 23 nt, Human
ugguggcagggagcggaaggugg

SEQ ID NO: 935950 - RNA, 21 nt, Human
ugugcugggacccuagucuca

SEQ ID NO: 935951 - RNA, 23 nt, Human
uguggccaaagguuucugggcug

SEQ ID NO: 935952 - RNA, 25 nt, Human
aaaaaaaaaaaaucaaugguuaagc

SEQ ID NO: 935953 - RNA, 23 nt, Human
aaaaauuagccaaaaauuuguga

SEQ ID NO: 935954 - RNA, 23 nt, Human
aaaaugcugacaucauuuauaau

SEQ ID NO: 935955 - RNA, 24 nt, Human
aaacaaaaauaaguugguaaacac

SEQ ID NO: 935956 - RNA, 20 nt, Human
aaaccagucuuuaauuuuca

SEQ ID NO: 935957 - RNA, 18 nt, Human
aaagguauguaauuauua

SEQ ID NO: 935958 - RNA, 20 nt, Human
aaauaaccaagggccuccag

SEQ ID NO: 935959 - RNA, 19 nt, Human
aacacacuucugauaagua

SEQ ID NO: 935960 - RNA, 23 nt, Human
aacacacuucugauaaguauggg

SEQ ID NO: 935961 - RNA, 21 nt, Human
aacagaaaagaagugcacuga

SEQ ID NO: 935962 - RNA, 23 nt, Human
aacauuaauacacaucaccauuu

SEQ ID NO: 935963 - RNA, 24 nt, Human
aacuaguggaacugagcuuuacaa

SEQ ID NO: 935964 - RNA, 19 nt, Human
aagaacaccacagaauuga

SEQ ID NO: 935965 - RNA, 25 nt, Human
aagaagugcacugagguuuaccccc

SEQ ID NO: 935966 - RNA, 18 nt, Human
aagugcacugagguuuac

SEQ ID NO: 935967 - RNA, 24 nt, Human
aagugcuuuuaguauuaaaguuuu

SEQ ID NO: 935968 - RNA, 23 nt, Human
aauacugaggccaacagaaaaga

SEQ ID NO: 935969 - RNA, 18 nt, Human
aauauacuccacuugaaa

SEQ ID NO: 935970 - RNA, 24 nt, Human
aauccaguaauacugaggccaaca

SEQ ID NO: 935971 - RNA, 24 nt, Human
aaugaugcaaagaaacugaagucu

SEQ ID NO: 935972 - RNA, 19 nt, Human
acaaagcaucucuaccuuu

SEQ ID NO: 935973 - RNA, 22 nt, Human
acaagaagcagcaauucuucaa

SEQ ID NO: 935974 - RNA, 20 nt, Human
acagaaaagaagugcacuga

SEQ ID NO: 935975 - RNA, 24 nt, Human
acauauauacacacaaacauauua

SEQ ID NO: 935976 - RNA, 23 nt, Human
accauauauacaauccaaacacu

SEQ ID NO: 935977 - RNA, 23 nt, Human
accaucuuuuauguucuuugcca

SEQ ID NO: 935978 - RNA, 27 nt, Human
acccaaauacagagguugccaaaucug

SEQ ID NO: 935979 - RNA, 18 nt, Human
acuuccagaguuuuccuu

SEQ ID NO: 935980 - RNA, 22 nt, Human
agaacacuaucagauaguuucc

SEQ ID NO: 935981 - RNA, 20 nt, Human
aggaagcaagaauguagaau

SEQ ID NO: 935982 - RNA, 24 nt, Human
aggaggcggcgguggucguggcgg

SEQ ID NO: 935983 - RNA, 24 nt, Human
aggcauuccuauaauuagccauau

SEQ ID NO: 935984 - RNA, 30 nt, Human
aggcggcggcgacacaggcgguggcggugg

SEQ ID NO: 935985 - RNA, 18 nt, Human
aggcgguggcgguggcug

SEQ ID NO: 935986 - RNA, 21 nt, Human
aggcgguggcgguggcugcag

SEQ ID NO: 935987 - RNA, 22 nt, Human
aggcgguggcgguggcugcagg

SEQ ID NO: 935988 - RNA, 20 nt, Human
aggcgguggcgguggcugcc

SEQ ID NO: 935989 - RNA, 23 nt, Human
agugcacugcagaaugaccaaug

SEQ ID NO: 935990 - RNA, 22 nt, Human
auaaaaagcaaauuucaucaca

SEQ ID NO: 935991 - RNA, 24 nt, Human
auaaccaagggccuccagaggccc

SEQ ID NO: 935992 - RNA, 24 nt, Human
aucacuguaagacuugguaaaaaa

SEQ ID NO: 935993 - RNA, 20 nt, Human
aucugucuagcuugaggccu

SEQ ID NO: 935994 - RNA, 23 nt, Human
augauaagugaaaugaaccuccu

SEQ ID NO: 935995 - RNA, 18 nt, Human
augaugauaaaugcaugu

SEQ ID NO: 935996 - RNA, 20 nt, Human
auuauauuuccugaaacucc

SEQ ID NO: 935997 - RNA, 25 nt, Human
auucuuuucucaggcccucccuguu

SEQ ID NO: 935998 - RNA, 19 nt, Human
auuuguaaaaagaugagga

SEQ ID NO: 935999 - RNA, 19 nt, Human
caacagaaaagaagugcac

SEQ ID NO: 936000 - RNA, 19 nt, Human
caacuaaaaagagauggca

SEQ ID NO: 936001 - RNA, 23 nt, Human
caagaacaccacagaauugagga

SEQ ID NO: 936002 - RNA, 21 nt, Human
cacagaauugaggaauauguu

SEQ ID NO: 936003 - RNA, 21 nt, Human
cagacaguauaaauauauggu

SEQ ID NO: 936004 - RNA, 22 nt, Human
cagaguuuuccuucaacuaaaa

SEQ ID NO: 936005 - RNA, 23 nt, Human
cagcaauucuucaauccaguaau

SEQ ID NO: 936006 - RNA, 23 nt, Human
caggauaaccacucuuauggggg

SEQ ID NO: 936007 - RNA, 23 nt, Human
caggucagaacucuuguaaaaug

SEQ ID NO: 936008 - RNA, 18 nt, Human
ccaacagaaaagaagugc

SEQ ID NO: 936009 - RNA, 23 nt, Human
ccagaguuuuccuucaacuaaaa

SEQ ID NO: 936010 - RNA, 21 nt, Human
ccauccaggucagaacucuug

SEQ ID NO: 936011 - RNA, 21 nt, Human
cccacagaacuauaaccacac

SEQ ID NO: 936012 - RNA, 21 nt, Human
ccccuguucuuccuuuugccc

SEQ ID NO: 936013 - RNA, 21 nt, Human
ccuauggaagcuucauuagac

SEQ ID NO: 936014 - RNA, 22 nt, Human
ccucucucucaauaaacgcaaa

SEQ ID NO: 936015 - RNA, 23 nt, Human
cggcucggagcagagcgcguacc

SEQ ID NO: 936016 - RNA, 18 nt, Human
cuauaaccacacaucccc

SEQ ID NO: 936017 - RNA, 19 nt, Human
cucucgcacuaaguuuuua

SEQ ID NO: 936018 - RNA, 25 nt, Human
cucuguggauuucaaucagguuccc

SEQ ID NO: 936019 - RNA, 24 nt, Human
cuuauacuuccacuucccuuuaaa

SEQ ID NO: 936020 - RNA, 20 nt, Human
cuuugaguccuuuacauuuu

SEQ ID NO: 936021 - RNA, 19 nt, Human
gagcggcgguggcggcgau

SEQ ID NO: 936022 - RNA, 18 nt, Human
gaggcacauauauacaca

SEQ ID NO: 936023 - RNA, 27 nt, Human
gaggcggcggcgacacaggcgguggcg

SEQ ID NO: 936024 - RNA, 30 nt, Human
gaggcggcggcgacacaggcgguggcggug

SEQ ID NO: 936025 - RNA, 21 nt, Human
gaggcggcgguggucguggcg

SEQ ID NO: 936026 - RNA, 18 nt, Human
gaugcaaagaaacugaag

SEQ ID NO: 936027 - RNA, 19 nt, Human
gcccccucccauucuuuuc

SEQ ID NO: 936028 - RNA, 19 nt, Human
gcggcgguggcggcgaugc

SEQ ID NO: 936029 - RNA, 23 nt, Human
gcgguggcgguggcugcagggca

SEQ ID NO: 936030 - RNA, 23 nt, Human
ggaagcuucauuagacuuacuaa

SEQ ID NO: 936031 - RNA, 20 nt, Human
ggagaaaacugaggcucaga

SEQ ID NO: 936032 - RNA, 18 nt, Human
ggcggagcggcgguggcg

SEQ ID NO: 936033 - RNA, 20 nt, Human
ggcggagcggcgguggcggc

SEQ ID NO: 936034 - RNA, 30 nt, Human
ggcggcgacacaggcgguggcgguggcugg

SEQ ID NO: 936035 - RNA, 19 nt, Human
ggcucggagcagagcgcgu

SEQ ID NO: 936036 - RNA, 20 nt, Human
gggccuccagaggccccugu

SEQ ID NO: 936037 - RNA, 19 nt, Human
gugcuuugaguaugaaguu

SEQ ID NO: 936038 - RNA, 19 nt, Human
guggcggagcggcgguggc

SEQ ID NO: 936039 - RNA, 22 nt, Human
guggcggagcggcgguggcggc

SEQ ID NO: 936040 - RNA, 25 nt, Human
guggcggagcggcgguggcggcgau

SEQ ID NO: 936041 - RNA, 22 nt, Human
uaaaaaaaaaaaaaaaucaaug

SEQ ID NO: 936042 - RNA, 24 nt, Human
uaaaaagaugaggacacacauuaa

SEQ ID NO: 936043 - RNA, 23 nt, Human
uaaaauaaucacuguaagacuug

SEQ ID NO: 936044 - RNA, 24 nt, Human
uaaaccacauaaggucuaguguuc

SEQ ID NO: 936045 - RNA, 18 nt, Human
uaaagagcauauucuaca

SEQ ID NO: 936046 - RNA, 19 nt, Human
uaaccacucuuaugggggc

SEQ ID NO: 936047 - RNA, 21 nt, Human
uaauagcccccucccauucuu

SEQ ID NO: 936048 - RNA, 23 nt, Human
uaaugauaagugaaaugaaccuc

SEQ ID NO: 936049 - RNA, 21 nt, Human
uacaaaccaaggcuguccucu

SEQ ID NO: 936050 - RNA, 19 nt, Human
uacaagauacaaaauauuu

SEQ ID NO: 936051 - RNA, 22 nt, Human
uacugcaugauuuggggaaagg

SEQ ID NO: 936052 - RNA, 24 nt, Human
uagacaaagacaucuagauuuaga

SEQ ID NO: 936053 - RNA, 21 nt, Human
uagcaccauauauacaaucca

SEQ ID NO: 936054 - RNA, 23 nt, Human
uagcaccauauauacaauccaaa

SEQ ID NO: 936055 - RNA, 20 nt, Human
uagcagaaacccauuucuuu

SEQ ID NO: 936056 - RNA, 22 nt, Human
uaguuuucauuaaucaugaugg

SEQ ID NO: 936057 - RNA, 22 nt, Human
uauauacaauccaaacacugca

SEQ ID NO: 936058 - RNA, 19 nt, Human
uauaugguugaacuaacau

SEQ ID NO: 936059 - RNA, 25 nt, Human
uaucucaaguuccacuuccaguagc

SEQ ID NO: 936060 - RNA, 19 nt, Human
uauuaacauguauggcaga

SEQ ID NO: 936061 - RNA, 23 nt, Human
ucaaaaaaaauuagacaaagaca

SEQ ID NO: 936062 - RNA, 19 nt, Human
ucaaugaugauaaaugcau

SEQ ID NO: 936063 - RNA, 21 nt, Human
ucacuugucugcauagagguc

SEQ ID NO: 936064 - RNA, 21 nt, Human
ucauacagccggucccgaggc

SEQ ID NO: 936065 - RNA, 23 nt, Human
ucauuggugaccaaaaucuggug

SEQ ID NO: 936066 - RNA, 20 nt, Human
uccaaacccaaguaaccaaa

SEQ ID NO: 936067 - RNA, 19 nt, Human
uccaggauaaccacucuua

SEQ ID NO: 936068 - RNA, 20 nt, Human
ucuuuucucaggcccucccu

SEQ ID NO: 936069 - RNA, 28 nt, Human
ugaaccuccuaacaagaagcagcaauuc

SEQ ID NO: 936070 - RNA, 23 nt, Human
ugaacuaacauuaauacacauca

SEQ ID NO: 936071 - RNA, 19 nt, Human
ugacaaaauuauuucuccc

SEQ ID NO: 936072 - RNA, 23 nt, Human
ugaccaaaaucuggugacaccau

SEQ ID NO: 936073 - RNA, 18 nt, Human
ugagcaggcaaauaacca

SEQ ID NO: 936074 - RNA, 20 nt, Human
ugaugcaaagaaacugaagu

SEQ ID NO: 936075 - RNA, 18 nt, Human
ugcaaaggagaaaacuga

SEQ ID NO: 936076 - RNA, 24 nt, Human
ugcacaagacaaaggcaacauuuu

SEQ ID NO: 936077 - RNA, 19 nt, Human
uggcagacacuacuucaug

SEQ ID NO: 936078 - RNA, 21 nt, Human
uggcagacacuacuucaugua

SEQ ID NO: 936079 - RNA, 21 nt, Human
uggcgguggcugcagggcagg

SEQ ID NO: 936080 - RNA, 26 nt, Human
uggcugcagggcaggaggcggcggug

SEQ ID NO: 936081 - RNA, 19 nt, Human
ugggaaaaaaauuacaaga

SEQ ID NO: 936082 - RNA, 18 nt, Human
ugggaaggaaaaaaaaaa

SEQ ID NO: 936083 - RNA, 20 nt, Human
ugggcuggcugcuucuaggu

SEQ ID NO: 936084 - RNA, 21 nt, Human
ugguaaaaaaaaaaaaaaauu

SEQ ID NO: 936085 - RNA, 20 nt, Human
uggucguggcggagcggcgg

SEQ ID NO: 936086 - RNA, 20 nt, Human
ugugacugcaugccugggcu

SEQ ID NO: 936087 - RNA, 23 nt, Human
ugugugaccaagaacaccacaga

SEQ ID NO: 936088 - RNA, 26 nt, Human
uuaauagcccccucccauucuuuucu

SEQ ID NO: 936089 - RNA, 19 nt, Human
uucaaaauuaucuagaccu

SEQ ID NO: 936090 - RNA, 22 nt, Human
uucauuagcagaaacccauuuc

SEQ ID NO: 936091 - RNA, 18 nt, Human
uugguggagcaguaauca

SEQ ID NO: 936092 - RNA, 19 nt, Human
uuucuccucaguacacaau

SEQ ID NO: 936093 - RNA, 21 nt, Human
agguaaucuugguuauucugg

SEQ ID NO: 936094 - RNA, 18 nt, Human
uuuuuuuuuuuuuuuuug

SEQ ID NO: 936095 - RNA, 21 nt, Human
aaaagcuacccccaccaaccc

SEQ ID NO: 936096 - RNA, 22 nt, Human
aaaccccucuucagccugugcu

SEQ ID NO: 936097 - RNA, 22 nt, Human
aaguccuccuugagcaccuuuc

SEQ ID NO: 936098 - RNA, 23 nt, Human
aaguccuccuugagcaccuuucc

SEQ ID NO: 936099 - RNA, 18 nt, Human
aauagagaauugucuaga

SEQ ID NO: 936100 - RNA, 20 nt, Human
aauggaggagcaaagaggga

SEQ ID NO: 936101 - RNA, 18 nt, Human
agaaaccccucuucagcc

SEQ ID NO: 936102 - RNA, 21 nt, Human
agagggaaaagcuacccccac

SEQ ID NO: 936103 - RNA, 23 nt, Human
agcgcuggugacgccaggagaaa

SEQ ID NO: 936104 - RNA, 21 nt, Human
caaaccggacagaccggggca

SEQ ID NO: 936105 - RNA, 23 nt, Human
caccaacccagcgcuggugacgc

SEQ ID NO: 936106 - RNA, 23 nt, Human
cacccagcagccgcugccgccau

SEQ ID NO: 936107 - RNA, 18 nt, Human
ccagcgcuggugacgcca

SEQ ID NO: 936108 - RNA, 22 nt, Human
ccaggagaaagcgauccucucc

SEQ ID NO: 936109 - RNA, 27 nt, Human
ccccgccgcgcggccgccgcagccgca

SEQ ID NO: 936110 - RNA, 24 nt, Human
cccgccgcgcggccgccgcagccg

SEQ ID NO: 936111 - RNA, 26 nt, Human
cccgccgcgcggccgccgcagccgca

SEQ ID NO: 936112 - RNA, 24 nt, Human
cccgggccgcggcgcgcucauggg

SEQ ID NO: 936113 - RNA, 22 nt, Human
cccggggccccgccgcgcggcc

SEQ ID NO: 936114 - RNA, 22 nt, Human
ccgcgcggccgccgcagccgca

SEQ ID NO: 936115 - RNA, 20 nt, Human
cgccgcgcggccgccgcagc

SEQ ID NO: 936116 - RNA, 20 nt, Human
cucuccggaugggacgaaca

SEQ ID NO: 936117 - RNA, 22 nt, Human
cuugagcaccuuucccagguua

SEQ ID NO: 936118 - RNA, 23 nt, Human
cuuuaaugauugccagaauugcc

SEQ ID NO: 936119 - RNA, 21 nt, Human
gaggagcaaagagggaaaagc

SEQ ID NO: 936120 - RNA, 22 nt, Human
gccagcccgggccgcggcgcgc

SEQ ID NO: 936121 - RNA, 19 nt, Human
gccgcagccgcacccgcac

SEQ ID NO: 936122 - RNA, 18 nt, Human
gccgcgcggccgccgcag

SEQ ID NO: 936123 - RNA, 19 nt, Human
gcucccgcucccgcauccu

SEQ ID NO: 936124 - RNA, 19 nt, Human
ggccuccagcugcucaccc

SEQ ID NO: 936125 - RNA, 21 nt, Human
ggccuccagcugcucacccag

SEQ ID NO: 936126 - RNA, 23 nt, Human
uaagcuguaaacgcuucacauga

SEQ ID NO: 936127 - RNA, 21 nt, Human
ucaagaauggaggagcaaaga

SEQ ID NO: 936128 - RNA, 22 nt, Human
ucaagaauggaggagcaaagag

SEQ ID NO: 936129 - RNA, 18 nt, Human
ucccagguuagaaacccc

SEQ ID NO: 936130 - RNA, 19 nt, Human
ucccagugccacgcugcgu

SEQ ID NO: 936131 - RNA, 24 nt, Human
uccucggggccgcgcgccccgcuc

SEQ ID NO: 936132 - RNA, 22 nt, Human
uccuugagcaccuuucccaggu

SEQ ID NO: 936133 - RNA, 21 nt, Human
ugaguuaggcaagcgcuuuuu

SEQ ID NO: 936134 - RNA, 24 nt, Human
ugcaaaccggacagaccggggcag

SEQ ID NO: 936135 - RNA, 22 nt, Human
ugccgccauuaaaaagcaacgg

SEQ ID NO: 936136 - RNA, 19 nt, Human
uguaaacgcuucacaugac

SEQ ID NO: 936137 - RNA, 19 nt, Human
uuaagauagaaaucuaugc

SEQ ID NO: 936138 - RNA, 18 nt, Human
uugcccagcauagcuuca

SEQ ID NO: 936139 - RNA, 20 nt, Human
uuuaagauagaaaucuaugc

SEQ ID NO: 936140 - RNA, 24 nt, Human
aaacaaaacauccaaaugacccaa

SEQ ID NO: 936141 - RNA, 22 nt, Human
aaagggagggagggcagagagg

SEQ ID NO: 936142 - RNA, 19 nt, Human
aaagugccuggguucagag

SEQ ID NO: 936143 - RNA, 22 nt, Human
aaaugacccaagauaaccacac

SEQ ID NO: 936144 - RNA, 21 nt, Human
aagaugaccagaacacacuga

SEQ ID NO: 936145 - RNA, 26 nt, Human
aagaugaccagaacacacugagagua

SEQ ID NO: 936146 - RNA, 19 nt, Human
aaucugaauuguuccagcu

SEQ ID NO: 936147 - RNA, 21 nt, Human
aaucugaauuguuccagcucc

SEQ ID NO: 936148 - RNA, 18 nt, Human
acacauguacacagcccc

SEQ ID NO: 936149 - RNA, 24 nt, Human
acagaaacaaacaaaacauccaaa

SEQ ID NO: 936150 - RNA, 21 nt, Human
accuagaagcacagaaagcuc

SEQ ID NO: 936151 - RNA, 22 nt, Human
agagagguguugcucagccuuc

SEQ ID NO: 936152 - RNA, 24 nt, Human
aggcauuaggacaggccccaaacu

SEQ ID NO: 936153 - RNA, 21 nt, Human
augacccaagauaaccacacc

SEQ ID NO: 936154 - RNA, 19 nt, Human
caaaacauccaaaugaccc

SEQ ID NO: 936155 - RNA, 27 nt, Human
caaacaaaacauccaaaugacccaaga

SEQ ID NO: 936156 - RNA, 24 nt, Human
caaaggcagaauucuuuaggacaa

SEQ ID NO: 936157 - RNA, 24 nt, Human
cacaaauuuaaaaaaauuuaacac

SEQ ID NO: 936158 - RNA, 23 nt, Human
cacacagaaacaaacaaaacauc

SEQ ID NO: 936159 - RNA, 24 nt, Human
cacacagaaacaaacaaaacaucc

SEQ ID NO: 936160 - RNA, 21 nt, Human
cacagaaagcucagcccuuac

SEQ ID NO: 936161 - RNA, 26 nt, Human
cacagccccacggccaacccuccaga

SEQ ID NO: 936162 - RNA, 24 nt, Human
cacagccccacggccaacccuccu

SEQ ID NO: 936163 - RNA, 21 nt, Human
cagccccacggccaacccucc

SEQ ID NO: 936164 - RNA, 23 nt, Human
cagccuucagccugacccccagu

SEQ ID NO: 936165 - RNA, 21 nt, Human
caggguuuccuuagcaucagg

SEQ ID NO: 936166 - RNA, 23 nt, Human
cagucugacacacagaaacaaac

SEQ ID NO: 936167 - RNA, 18 nt, Human
ccaagauaaccacaccau

SEQ ID NO: 936168 - RNA, 23 nt, Human
ccacagcuacugguuccucuugc

SEQ ID NO: 936169 - RNA, 20 nt, Human
ccagaacacacugagaguac

SEQ ID NO: 936170 - RNA, 22 nt, Human
cccacggccaacccuccagaag

SEQ ID NO: 936171 - RNA, 21 nt, Human
ccccugggcacacacaugguc

SEQ ID NO: 936172 - RNA, 19 nt, Human
cggccaacccuccagaagc

SEQ ID NO: 936173 - RNA, 23 nt, Human
cuacaacuaagccacaagaugac

SEQ ID NO: 936174 - RNA, 23 nt, Human
cucagccuucagccugaccccca

SEQ ID NO: 936175 - RNA, 19 nt, Human
gaagcacagaaagcucagc

SEQ ID NO: 936176 - RNA, 23 nt, Human
gagaugggacaaagggagggagg

SEQ ID NO: 936177 - RNA, 21 nt, Human
gaggagcuugaaguagcagca

SEQ ID NO: 936178 - RNA, 20 nt, Human
gcaguaggaggcaagcagag

SEQ ID NO: 936179 - RNA, 20 nt, Human
gcaguaggaggcaagcagag

SEQ ID NO: 936180 - RNA, 20 nt, Human
gccaacccuccagaagcugg

SEQ ID NO: 936181 - RNA, 21 nt, Human
gccaacccuccagaagcuggg

SEQ ID NO: 936182 - RNA, 24 nt, Human
gcgggugaaucugaauuguuccag

SEQ ID NO: 936183 - RNA, 19 nt, Human
ggagaugggacaaagggag

SEQ ID NO: 936184 - RNA, 22 nt, Human
ggagaugggacaaagggaggga

SEQ ID NO: 936185 - RNA, 22 nt, Human
ggagggagggcagagagguguu

SEQ ID NO: 936186 - RNA, 20 nt, Human
ggcagagagguguugcucag

SEQ ID NO: 936187 - RNA, 19 nt, Human
gggagaugggacaaaggga

SEQ ID NO: 936188 - RNA, 24 nt, Human
ggguguccggucucaauugcucca

SEQ ID NO: 936189 - RNA, 18 nt, Human
ggguguguguggugaugu

SEQ ID NO: 936190 - RNA, 23 nt, Human
gugcaguaggaggcaagcagagg

SEQ ID NO: 936191 - RNA, 21 nt, Human
guucagaggugcccauuccuu

SEQ ID NO: 936192 - RNA, 24 nt, Human
uaauuugcuacaauccugucacaa

SEQ ID NO: 936193 - RNA, 19 nt, Human
uacacagccccacggccaa

SEQ ID NO: 936194 - RNA, 19 nt, Human
uacagucugacacacagaa

SEQ ID NO: 936195 - RNA, 20 nt, Human
uacuaauccagguuaggcac

SEQ ID NO: 936196 - RNA, 26 nt, Human
uagaaauacaggccuaaaugaugcca

SEQ ID NO: 936197 - RNA, 21 nt, Human
uagcagcaauacauguaggag

SEQ ID NO: 936198 - RNA, 21 nt, Human
uaggacaggccccaaacugag

SEQ ID NO: 936199 - RNA, 22 nt, Human
uaggacaggccccaaacugaga

SEQ ID NO: 936200 - RNA, 19 nt, Human
uaggaggcaagcagaggca

SEQ ID NO: 936201 - RNA, 23 nt, Human
uauauacucaacgguaauuugaa

SEQ ID NO: 936202 - RNA, 18 nt, Human
ucagagccucagcugaaa

SEQ ID NO: 936203 - RNA, 21 nt, Human
ucagauagucugauccucucc

SEQ ID NO: 936204 - RNA, 22 nt, Human
uccagcuccaccuagaagcaca

SEQ ID NO: 936205 - RNA, 23 nt, Human
ucccaucuccccuugggaaaauc

SEQ ID NO: 936206 - RNA, 19 nt, Human
uccugggugcugagugugc

SEQ ID NO: 936207 - RNA, 18 nt, Human
uccuuagcaucagggcgg

SEQ ID NO: 936208 - RNA, 25 nt, Human
ucuacaacuaagccacaagaugacc

SEQ ID NO: 936209 - RNA, 18 nt, Human
ucucagaaggccaaacau

SEQ ID NO: 936210 - RNA, 24 nt, Human
ucuccuuugaaaugcaauggagac

SEQ ID NO: 936211 - RNA, 22 nt, Human
ugacacacagaaacaaacaaaa

SEQ ID NO: 936212 - RNA, 21 nt, Human
ugacacugucccaucuccccu

SEQ ID NO: 936213 - RNA, 18 nt, Human
ugacccaagauaaccaca

SEQ ID NO: 936214 - RNA, 20 nt, Human
ugcaguaggaggcaagcaga

SEQ ID NO: 936215 - RNA, 23 nt, Human
ugcaguaggaggcaagcagaggc

SEQ ID NO: 936216 - RNA, 19 nt, Human
ugcccauuccuuucccaca

SEQ ID NO: 936217 - RNA, 20 nt, Human
ugcccauuccuuucccacag

SEQ ID NO: 936218 - RNA, 22 nt, Human
ugcccuugggaaagaggaauga

SEQ ID NO: 936219 - RNA, 20 nt, Human
uggaggagcuugaaguagca

SEQ ID NO: 936220 - RNA, 18 nt, Human
uuccagcuccaccuagaa

SEQ ID NO: 936221 - RNA, 21 nt, Human
uuucucagaaggccaaacauu

SEQ ID NO: 936222 - RNA, 23 nt, Human
uuuuuuuuuuuuuuuuuuaaaug

SEQ ID NO: 936223 - RNA, 19 nt, Human
aaaaaagccucgaggcccc

SEQ ID NO: 936224 - RNA, 23 nt, Human
aagcacacccccucuccuaggcc

SEQ ID NO: 936225 - RNA, 22 nt, Human
aaugccauuuccugcgagcagc

SEQ ID NO: 936226 - RNA, 18 nt, Human
accuccucuuccuccccc

SEQ ID NO: 936227 - RNA, 23 nt, Human
agaaaaaaagccucgaggccccg

SEQ ID NO: 936228 - RNA, 20 nt, Human
agagaugaugagaauuuuga

SEQ ID NO: 936229 - RNA, 18 nt, Human
agaggcgaggccaaaacc

SEQ ID NO: 936230 - RNA, 22 nt, Human
agccggcgaccucuccuaccuc

SEQ ID NO: 936231 - RNA, 22 nt, Human
agccuuguuuguggcaauucua

SEQ ID NO: 936232 - RNA, 24 nt, Human
agcggucgcgccacgacccggagc

SEQ ID NO: 936233 - RNA, 26 nt, Human
aguuuuccaacacauaucccagaucu

SEQ ID NO: 936234 - RNA, 19 nt, Human
aucucuuccuccucccuca

SEQ ID NO: 936235 - RNA, 19 nt, Human
caaaguuuuuuugaguucu

SEQ ID NO: 936236 - RNA, 23 nt, Human
caagucucuuuccucucccgcuc

SEQ ID NO: 936237 - RNA, 25 nt, Human
caagucucuuuccucucccgcuccu

SEQ ID NO: 936238 - RNA, 19 nt, Human
caccacaaaauuucauaaa

SEQ ID NO: 936239 - RNA, 19 nt, Human
caccccccuccuucuccac

SEQ ID NO: 936240 - RNA, 19 nt, Human
caccccccuccuucuccac

SEQ ID NO: 936241 - RNA, 18 nt, Human
cacccccucuccuaggcc

SEQ ID NO: 936242 - RNA, 21 nt, Human
cagcaccaccucaugcugcug

SEQ ID NO: 936243 - RNA, 19 nt, Human
cagcgccccccgagcagcc

SEQ ID NO: 936244 - RNA, 24 nt, Human
cauuauggcacagugaacauaagg

SEQ ID NO: 936245 - RNA, 18 nt, Human
ccccaaaagugcgugggg

SEQ ID NO: 936246 - RNA, 21 nt, Human
ccccccuccuucuccaccucc

SEQ ID NO: 936247 - RNA, 23 nt, Human
cccggagccgccagcaccaccuc

SEQ ID NO: 936248 - RNA, 20 nt, Human
cccucaagcacacccccucu

SEQ ID NO: 936249 - RNA, 22 nt, Human
cccucaagcacacccccucucc

SEQ ID NO: 936250 - RNA, 18 nt, Human
cccugggacccaggaguc

SEQ ID NO: 936251 - RNA, 20 nt, Human
ccgaccccugggacccagga

SEQ ID NO: 936252 - RNA, 19 nt, Human
ccgcguccucucggcugga

SEQ ID NO: 936253 - RNA, 23 nt, Human
ccgcucaggcccaauuccgaccc

SEQ ID NO: 936254 - RNA, 22 nt, Human
ccggcgaccucuccuaccuccc

SEQ ID NO: 936255 - RNA, 25 nt, Human
ccuaggccgcagcauagcaaccgaa

SEQ ID NO: 936256 - RNA, 23 nt, Human
ccucaagcacacccccucuccua

SEQ ID NO: 936257 - RNA, 19 nt, Human
ccucaugcugcugggcagc

SEQ ID NO: 936258 - RNA, 19 nt, Human
ccuccgaccccgcggccaa

SEQ ID NO: 936259 - RNA, 20 nt, Human
ccuccuccucuaucucuucc

SEQ ID NO: 936260 - RNA, 21 nt, Human
ccuccuucuccaccuccucuu

SEQ ID NO: 936261 - RNA, 21 nt, Human
ccuggccccaauccuccgacc

SEQ ID NO: 936262 - RNA, 24 nt, Human
cgaccccugggacccaggaguccu

SEQ ID NO: 936263 - RNA, 19 nt, Human
cgaccucuccuaccucccu

SEQ ID NO: 936264 - RNA, 18 nt, Human
cgaggccaaaacccugcc

SEQ ID NO: 936265 - RNA, 25 nt, Human
cgaggccaaaacccugccucgcuag

SEQ ID NO: 936266 - RNA, 20 nt, Human
cgcggccaaagccaagucuc

SEQ ID NO: 936267 - RNA, 22 nt, Human
cggaaaagcgcacugcgcggcg

SEQ ID NO: 936268 - RNA, 21 nt, Human
cggcggcggcagcaacaggag

SEQ ID NO: 936269 - RNA, 22 nt, Human
cuccuccuccucuaucucuucc

SEQ ID NO: 936270 - RNA, 23 nt, Human
cucuaucucuuccuccucccuca

SEQ ID NO: 936271 - RNA, 21 nt, Human
cuuuuugcuuucaugauacag

SEQ ID NO: 936272 - RNA, 22 nt, Human
gagguggcagggaggcgggcag

SEQ ID NO: 936273 - RNA, 20 nt, Human
gcaccaccacaaaauuucau

SEQ ID NO: 936274 - RNA, 26 nt, Human
gcacugcgcggcgugagcuggcgggu

SEQ ID NO: 936275 - RNA, 26 nt, Human
gcagcggucgcgccacgacccggagc

SEQ ID NO: 936276 - RNA, 21 nt, Human
gcauagcaaccgaacauggcg

SEQ ID NO: 936277 - RNA, 22 nt, Human
gccacgacccggagccgccagc

SEQ ID NO: 936278 - RNA, 22 nt, Human
gccgcagcggucgcgccacgac

SEQ ID NO: 936279 - RNA, 20 nt, Human
gcgcggcgugagcuggcggg

SEQ ID NO: 936280 - RNA, 21 nt, Human
gcgugggggagggggccuggc

SEQ ID NO: 936281 - RNA, 19 nt, Human
ggaggcgaucucgcgagag

SEQ ID NO: 936282 - RNA, 19 nt, Human
ggcagggaggcgggcagcc

SEQ ID NO: 936283 - RNA, 25 nt, Human
guggccaggagcggcggcggcagca

SEQ ID NO: 936284 - RNA, 20 nt, Human
uaaaaugccauuuccugcga

SEQ ID NO: 936285 - RNA, 20 nt, Human
uaauccacacccccaaaagu

SEQ ID NO: 936286 - RNA, 18 nt, Human
uaccucagcgccccccga

SEQ ID NO: 936287 - RNA, 23 nt, Human
uaccucagcgccccccgagcagc

SEQ ID NO: 936288 - RNA, 19 nt, Human
uacuucuuuuugcuuucau

SEQ ID NO: 936289 - RNA, 23 nt, Human
uacuucuuuuugcuuucaugaua

SEQ ID NO: 936290 - RNA, 22 nt, Human
uaggccgcagcauagcaaccga

SEQ ID NO: 936291 - RNA, 19 nt, Human
ucccucaagcacacccccu

SEQ ID NO: 936292 - RNA, 19 nt, Human
ucccugcagggaugagaua

SEQ ID NO: 936293 - RNA, 22 nt, Human
uccucuaucucuuccuccuccc

SEQ ID NO: 936294 - RNA, 18 nt, Human
uccuucuccaccuccucu

SEQ ID NO: 936295 - RNA, 18 nt, Human
ucuaucucuuccuccucc

SEQ ID NO: 936296 - RNA, 21 nt, Human
ucucggcuggagaaaaaaagc

SEQ ID NO: 936297 - RNA, 21 nt, Human
ugcgugggggagggggccugg

SEQ ID NO: 936298 - RNA, 22 nt, Human
ugcgugggggagggggccuggc

SEQ ID NO: 936299 - RNA, 20 nt, Human
uggcagggaggcgggcagcc

SEQ ID NO: 936300 - RNA, 19 nt, Human
ugggggagggggccuggcc

SEQ ID NO: 936301 - RNA, 19 nt, Human
uggugguggggcgcgagga

SEQ ID NO: 936302 - RNA, 23 nt, Human
uguccacacaaagucuucguaua

SEQ ID NO: 936303 - RNA, 21 nt, Human
ugugugagagugcaagaggag

SEQ ID NO: 936304 - RNA, 19 nt, Human
ugugugugagagugcaaga

SEQ ID NO: 936305 - RNA, 21 nt, Human
uuccaacacauaucccagauc

SEQ ID NO: 936306 - RNA, 21 nt, Human
uuccgaccccugggacccagg

SEQ ID NO: 936307 - RNA, 18 nt, Human
uugcauggcaccaccaca

SEQ ID NO: 936308 - RNA, 20 nt, Human
uuguaaaaugccauuuccug

SEQ ID NO: 936309 - RNA, 20 nt, Human
uuuuucagagcugacuccuc

SEQ ID NO: 936310 - RNA, 20 nt, Human
uuuuuuuucagagcugacuc

SEQ ID NO: 936311 - RNA, 23 nt, Human
uuuuuuuuuuuuuuuuuuuucag

SEQ ID NO: 936312 - RNA, 19 nt, Human
aaaaucucuccgaacugcc

SEQ ID NO: 936313 - RNA, 19 nt, Human
aaagaauggcgggagaaag

SEQ ID NO: 936314 - RNA, 24 nt, Human
aaaggaaccauccagcaaaagaaa

SEQ ID NO: 936315 - RNA, 21 nt, Human
aacacggagccccaggaacuu

SEQ ID NO: 936316 - RNA, 22 nt, Human
aacccagugucaccacaaacua

SEQ ID NO: 936317 - RNA, 20 nt, Human
aacgugcuuggcacucagga

SEQ ID NO: 936318 - RNA, 20 nt, Human
aacuguaucacuguaagaua

SEQ ID NO: 936319 - RNA, 24 nt, Human
aacuguaucacuguaagauauuga

SEQ ID NO: 936320 - RNA, 22 nt, Human
aagaacacauugcuacuggccc

SEQ ID NO: 936321 - RNA, 25 nt, Human
aagcaaagagagaguauggaaucac

SEQ ID NO: 936322 - RNA, 23 nt, Human
aagcugcauaaaggaaccaucca

SEQ ID NO: 936323 - RNA, 20 nt, Human
aaggaaggggcccuguggca

SEQ ID NO: 936324 - RNA, 20 nt, Human
acacacacacacacacagaa

SEQ ID NO: 936325 - RNA, 20 nt, Human
acagguaggagguucguagg

SEQ ID NO: 936326 - RNA, 18 nt, Human
accucacucagccagggg

SEQ ID NO: 936327 - RNA, 23 nt, Human
accucacucagccagggggugaa

SEQ ID NO: 936328 - RNA, 24 nt, Human
agaaaggcaaaugcucaucaaagg

SEQ ID NO: 936329 - RNA, 23 nt, Human
agacaggagaccucagaaaaaga

SEQ ID NO: 936330 - RNA, 25 nt, Human
agacagggccaagcugcauaaagga

SEQ ID NO: 936331 - RNA, 22 nt, Human
agaugcuaggaauuaagaacac

SEQ ID NO: 936332 - RNA, 21 nt, Human
agcaaaagaaaaagggcccca

SEQ ID NO: 936333 - RNA, 24 nt, Human
agcucggggccgcccagccgggcc

SEQ ID NO: 936334 - RNA, 23 nt, Human
aggaaauaggaaaucaggaacuu

SEQ ID NO: 936335 - RNA, 19 nt, Human
aggagauaagucauuacuu

SEQ ID NO: 936336 - RNA, 21 nt, Human
aggcaggaagagaugggcauc

SEQ ID NO: 936337 - RNA, 20 nt, Human
aggcuggccaacagguagga

SEQ ID NO: 936338 - RNA, 19 nt, Human
agggaaaggcugccuugcg

SEQ ID NO: 936339 - RNA, 20 nt, Human
agggagguauuuucuuagug

SEQ ID NO: 936340 - RNA, 20 nt, Human
aguaucguguguauauguau

SEQ ID NO: 936341 - RNA, 26 nt, Human
agugcacacacacacacacacagaau

SEQ ID NO: 936342 - RNA, 18 nt, Human
augcuaggaauuaagaac

SEQ ID NO: 936343 - RNA, 19 nt, Human
caacccaagcuaguccagg

SEQ ID NO: 936344 - RNA, 18 nt, Human
caagaagcaaggaguccu

SEQ ID NO: 936345 - RNA, 31 nt, Human
caauauauauuauauacacacguacauaugg

SEQ ID NO: 936346 - RNA, 27 nt, Human
cacacacacacagaaugacagaaagga

SEQ ID NO: 936347 - RNA, 19 nt, Human
cacacacagaaugacagaa

SEQ ID NO: 936348 - RNA, 23 nt, Human
cacucccccuuaucuccugggga

SEQ ID NO: 936349 - RNA, 26 nt, Human
cagaaaggacuggaauacacgcccua

SEQ ID NO: 936350 - RNA, 20 nt, Human
cagcaaaagaaaaagggccc

SEQ ID NO: 936351 - RNA, 24 nt, Human
cagcggccgcaaacgccgcuucug

SEQ ID NO: 936352 - RNA, 22 nt, Human
cagggccaagcugcauaaagga

SEQ ID NO: 936353 - RNA, 19 nt, Human
cauaguguggccggcaggg

SEQ ID NO: 936354 - RNA, 20 nt, Human
cauaguguggccggcagggc

SEQ ID NO: 936355 - RNA, 23 nt, Human
caucaaaccuccccauaaaaucc

SEQ ID NO: 936356 - RNA, 19 nt, Human
ccaaagggaaaggcugccu

SEQ ID NO: 936357 - RNA, 27 nt, Human
cccacuuaccucggggacccuagcaaa

SEQ ID NO: 936358 - RNA, 18 nt, Human
ccccagcucauccuccca

SEQ ID NO: 936359 - RNA, 19 nt, Human
ccccccgccaccgccgccg

SEQ ID NO: 936360 - RNA, 20 nt, Human
cccccgccaccgccgccggg

SEQ ID NO: 936361 - RNA, 23 nt, Human
ccccgccaccgccgccgggcgga

SEQ ID NO: 936362 - RNA, 23 nt, Human
cccgcgccucagcagcccggggc

SEQ ID NO: 936363 - RNA, 18 nt, Human
cccgcuccuccacagcgc

SEQ ID NO: 936364 - RNA, 19 nt, Human
cccgcuccuccacagcgcc

SEQ ID NO: 936365 - RNA, 20 nt, Human
ccgccaccgccgccgggcgg

SEQ ID NO: 936366 - RNA, 18 nt, Human
ccucggggacccuagcaa

SEQ ID NO: 936367 - RNA, 28 nt, Human
ccugaacugcaacacggagccccaggaa

SEQ ID NO: 936368 - RNA, 20 nt, Human
ccugggcucccccuccuucc

SEQ ID NO: 936369 - RNA, 24 nt, Human
cgcguccccgcgccucagcagccc

SEQ ID NO: 936370 - RNA, 23 nt, Human
cgcuccguuccucacacuccccc

SEQ ID NO: 936371 - RNA, 21 nt, Human
cgcuggcccugcgaccugcgc

SEQ ID NO: 936372 - RNA, 25 nt, Human
cggagccccaggaacuucuggaaag

SEQ ID NO: 936373 - RNA, 21 nt, Human
cggggacccuagcaaaaauca

SEQ ID NO: 936374 - RNA, 20 nt, Human
cguccccgcgccucagcagc

SEQ ID NO: 936375 - RNA, 25 nt, Human
cucagaaaaagaauggcgggagaaa

SEQ ID NO: 936376 - RNA, 23 nt, Human
cuccccauaaaauccuaggaaag

SEQ ID NO: 936377 - RNA, 22 nt, Human
cucgcgcauaguguggccggca

SEQ ID NO: 936378 - RNA, 22 nt, Human
cucuuccaccacucuguagccu

SEQ ID NO: 936379 - RNA, 21 nt, Human
cugcagcggccgcaaacgccg

SEQ ID NO: 936380 - RNA, 24 nt, Human
cugcauaaaggaaccauccagcaa

SEQ ID NO: 936381 - RNA, 19 nt, Human
cugcgaccugcgcggcugc

SEQ ID NO: 936382 - RNA, 20 nt, Human
cuggcccuuucuaguggcaa

SEQ ID NO: 936383 - RNA, 19 nt, Human
cuuaccucggggacccuag

SEQ ID NO: 936384 - RNA, 18 nt, Human
cuugcgugcacacgugug

SEQ ID NO: 936385 - RNA, 22 nt, Human
gaagaaaaagugcaggcgaaga

SEQ ID NO: 936386 - RNA, 23 nt, Human
gaagaaaaagugcaggcgaagag

SEQ ID NO: 936387 - RNA, 22 nt, Human
gacccuagcaaaaaucaauagc

SEQ ID NO: 936388 - RNA, 24 nt, Human
gagauguguguguguccucuucca

SEQ ID NO: 936389 - RNA, 18 nt, Human
gagcucggggccgcccag

SEQ ID NO: 936390 - RNA, 19 nt, Human
gaguucaucucuacccucc

SEQ ID NO: 936391 - RNA, 21 nt, Human
gauagugaaagcaaagagaga

SEQ ID NO: 936392 - RNA, 21 nt, Human
gauuuaaaaggaaauaggaaa

SEQ ID NO: 936393 - RNA, 21 nt, Human
gcaacacggagccccaggaac

SEQ ID NO: 936394 - RNA, 20 nt, Human
gcauaaaggaaccauccagc

SEQ ID NO: 936395 - RNA, 21 nt, Human
gccaaccucaucuucugucac

SEQ ID NO: 936396 - RNA, 24 nt, Human
gccacagagcucggggccgcccag

SEQ ID NO: 936397 - RNA, 26 nt, Human
gcgggagaaaggaggagggagguucc

SEQ ID NO: 936398 - RNA, 19 nt, Human
gcucauccucccagggagg

SEQ ID NO: 936399 - RNA, 25 nt, Human
gcucccgcuccuccacagcgccacc

SEQ ID NO: 936400 - RNA, 24 nt, Human
ggaagaaaaagugcaggcgaagag

SEQ ID NO: 936401 - RNA, 25 nt, Human
ggagacaggagaccucagaaaaaga

SEQ ID NO: 936402 - RNA, 19 nt, Human
ggagguuccuuccccacuu

SEQ ID NO: 936403 - RNA, 22 nt, Human
ggaguuccugggauuuuuuggg

SEQ ID NO: 936404 - RNA, 22 nt, Human
ggccggcucgcgcauagugugg

SEQ ID NO: 936405 - RNA, 19 nt, Human
gggaaggagugggagacag

SEQ ID NO: 936406 - RNA, 24 nt, Human
gggagaaaggaggagggagguucc

SEQ ID NO: 936407 - RNA, 23 nt, Human
gggccggcucgcgcauagugugg

SEQ ID NO: 936408 - RNA, 22 nt, Human
gggccguccucgcggacgcugg

SEQ ID NO: 936409 - RNA, 21 nt, Human
ggggacccuagcaaaaaucaa

SEQ ID NO: 936410 - RNA, 20 nt, Human
guggguaggggacaaacagu

SEQ ID NO: 936411 - RNA, 23 nt, Human
uaaaaggaaauaggaaaucagga

SEQ ID NO: 936412 - RNA, 20 nt, Human
uaagaaaaaucucuccgaac

SEQ ID NO: 936413 - RNA, 20 nt, Human
uaagaacacauugcuacugu

SEQ ID NO: 936414 - RNA, 20 nt, Human
uaccugggcucccccuccuu

SEQ ID NO: 936415 - RNA, 24 nt, Human
uaccugggcucccccuccuuccuu

SEQ ID NO: 936416 - RNA, 18 nt, Human
uaguggcaauuucaccac

SEQ ID NO: 936417 - RNA, 19 nt, Human
uauauacacacguacauau

SEQ ID NO: 936418 - RNA, 26 nt, Human
uauauacacacguacauauggaccca

SEQ ID NO: 936419 - RNA, 22 nt, Human
ucacucagccagggggugaagc

SEQ ID NO: 936420 - RNA, 24 nt, Human
ucagccagggggugaagcuuuuua

SEQ ID NO: 936421 - RNA, 20 nt, Human
ucauauuaucacauacaaua

SEQ ID NO: 936422 - RNA, 23 nt, Human
uccaugcugagcuaacccaguug

SEQ ID NO: 936423 - RNA, 21 nt, Human
uccccauaaaauccuaggaaa

SEQ ID NO: 936424 - RNA, 20 nt, Human
uccccgcgccucagcagccc

SEQ ID NO: 936425 - RNA, 18 nt, Human
ucccgaaggccgccgacc

SEQ ID NO: 936426 - RNA, 22 nt, Human
ucccugggauagugaaagcaaa

SEQ ID NO: 936427 - RNA, 24 nt, Human
uccugaacugcaacacggagcccc

SEQ ID NO: 936428 - RNA, 18 nt, Human
ucggcgccccgcuuucuc

SEQ ID NO: 936429 - RNA, 18 nt, Human
ucucuggggagaaaggca

SEQ ID NO: 936430 - RNA, 19 nt, Human
ucugaaucagacucagucc

SEQ ID NO: 936431 - RNA, 18 nt, Human
ugaauaugaacauuacaa

SEQ ID NO: 936432 - RNA, 22 nt, Human
ugacacagaacccacccaguuu

SEQ ID NO: 936433 - RNA, 20 nt, Human
ugagcuaacccagugucacc

SEQ ID NO: 936434 - RNA, 22 nt, Human
ugagugggcugggagcaggcag

SEQ ID NO: 936435 - RNA, 20 nt, Human
ugcacacacacacacacaca

SEQ ID NO: 936436 - RNA, 21 nt, Human
ugcauuuggcucuggcugcuc

SEQ ID NO: 936437 - RNA, 23 nt, Human
uggcucuggcugcucagugaguu

SEQ ID NO: 936438 - RNA, 19 nt, Human
uggggaagaaaaagugcag

SEQ ID NO: 936439 - RNA, 20 nt, Human
uguaaauacaaaacuguauc

SEQ ID NO: 936440 - RNA, 23 nt, Human
uguggccggcagggcccggcgcc

SEQ ID NO: 936441 - RNA, 18 nt, Human
uuagugguuuuuucuuuc

SEQ ID NO: 936442 - RNA, 19 nt, Human
uuauauuauucgcuccguu

SEQ ID NO: 936443 - RNA, 22 nt, Human
uuauugaggucugaucagcugc

SEQ ID NO: 936444 - RNA, 23 nt, Human
uucaccacauuuaucuagccaaa

SEQ ID NO: 936445 - RNA, 22 nt, Human
uucccgaaggccgccgaccccc

SEQ ID NO: 936446 - RNA, 23 nt, Human
uuggguggguaggggacaaacag

SEQ ID NO: 936447 - RNA, 19 nt, Human
uuuaaaaggaaauaggaaa

SEQ ID NO: 936448 - RNA, 21 nt, Human
uuucucggccgcgcucccgcu

SEQ ID NO: 936449 - RNA, 23 nt, Human
uuugguuuuaauaaggcacaguu

SEQ ID NO: 936450 - RNA, 20 nt, Human
uuuuugguuuugaucauguc

SEQ ID NO: 936451 - RNA, 20 nt, Human
uuuuuugguuuugaucaugu

SEQ ID NO: 936452 - RNA, 20 nt, Human
uuuuuuuuuuuuuuuuuugg

SEQ ID NO: 936453 - RNA, 22 nt, Human
aaaaaaaacaaaacaaaacacc

SEQ ID NO: 936454 - RNA, 25 nt, Human
aaaaaaacaaaacaaaacaccacag

SEQ ID NO: 936455 - RNA, 26 nt, Human
aaaaaaacaaaacaaaacaccacaga

SEQ ID NO: 936456 - RNA, 23 nt, Human
aaaacaaaacaaaacaccacaga

SEQ ID NO: 936457 - RNA, 21 nt, Human
aaaacaaaacaccacagauca

SEQ ID NO: 936458 - RNA, 20 nt, Human
aaacaaaacaccacagauca

SEQ ID NO: 936459 - RNA, 21 nt, Human
aaacaaaacaccacagaucaa

SEQ ID NO: 936460 - RNA, 19 nt, Human
aaaggggaaaucuucccca

SEQ ID NO: 936461 - RNA, 19 nt, Human
aagucagucccagccagaa

SEQ ID NO: 936462 - RNA, 20 nt, Human
aauaaacuccugaaaccaug

SEQ ID NO: 936463 - RNA, 25 nt, Human
accucuuccuuuuccugggguucaa

SEQ ID NO: 936464 - RNA, 26 nt, Human
agaaaacauucuuuuaaaauacugaa

SEQ ID NO: 936465 - RNA, 22 nt, Human
agaagagccacccuggccccug

SEQ ID NO: 936466 - RNA, 19 nt, Human
agagccaaggagggguggg

SEQ ID NO: 936467 - RNA, 19 nt, Human
agcagaaauggaagauuuc

SEQ ID NO: 936468 - RNA, 19 nt, Human
agccccaguuggguggugg

SEQ ID NO: 936469 - RNA, 19 nt, Human
aggaaguucuggccacuuc

SEQ ID NO: 936470 - RNA, 19 nt, Human
agggagagauggguccggg

SEQ ID NO: 936471 - RNA, 18 nt, Human
agggguggggagagaaga

SEQ ID NO: 936472 - RNA, 19 nt, Human
auggccaagucagucccag

SEQ ID NO: 936473 - RNA, 26 nt, Human
auuacaaaaauauuuugcaagccaaa

SEQ ID NO: 936474 - RNA, 21 nt, Human
caaaacaaaacaccacagauc

SEQ ID NO: 936475 - RNA, 19 nt, Human
caacacaugacagacagcc

SEQ ID NO: 936476 - RNA, 18 nt, Human
caagcucaggucuagaag

SEQ ID NO: 936477 - RNA, 25 nt, Human
cacaagacccaaccauggacuucaa

SEQ ID NO: 936478 - RNA, 21 nt, Human
cacagaaggcugcacuaccag

SEQ ID NO: 936479 - RNA, 19 nt, Human
cacagcugcaccauccccc

SEQ ID NO: 936480 - RNA, 28 nt, Human
caccacagaucaaguuuucuaacaccuc

SEQ ID NO: 936481 - RNA, 19 nt, Human
caccaucccccuggcuguc

SEQ ID NO: 936482 - RNA, 18 nt, Human
caccuguaggaccuccag

SEQ ID NO: 936483 - RNA, 23 nt, Human
cagaggguuuugucuccaguccu

SEQ ID NO: 936484 - RNA, 24 nt, Human
cagaucaaguuuucuaacaccuca

SEQ ID NO: 936485 - RNA, 22 nt, Human
cagcaaccucaccaagccugga

SEQ ID NO: 936486 - RNA, 24 nt, Human
caggacaacaaacuguuaaaccuc

SEQ ID NO: 936487 - RNA, 18 nt, Human
caggcuggacuuaccaca

SEQ ID NO: 936488 - RNA, 19 nt, Human
caggcuggacuuaccacag

SEQ ID NO: 936489 - RNA, 22 nt, Human
cagguugccaggcuaaagcuaa

SEQ ID NO: 936490 - RNA, 25 nt, Human
ccaagaaaacauucuuuuaaaauac

SEQ ID NO: 936491 - RNA, 18 nt, Human
ccacagaucaaguuuucu

SEQ ID NO: 936492 - RNA, 22 nt, Human
ccaggacaacaaacuguuaaac

SEQ ID NO: 936493 - RNA, 23 nt, Human
cccacauggugauggacggaggc

SEQ ID NO: 936494 - RNA, 23 nt, Human
cccagggagucuuggagggaccc

SEQ ID NO: 936495 - RNA, 23 nt, Human
ccccagagagcugggucuaugcu

SEQ ID NO: 936496 - RNA, 18 nt, Human
ccccugggucccagagcc

SEQ ID NO: 936497 - RNA, 27 nt, Human
ccccugggucccagagccugcaccgcc

SEQ ID NO: 936498 - RNA, 20 nt, Human
cccugggcccggucaggccc

SEQ ID NO: 936499 - RNA, 21 nt, Human
cccugggcccggucaggcccu

SEQ ID NO: 936500 - RNA, 21 nt, Human
ccgcggcuucucugcgagcga

SEQ ID NO: 936501 - RNA, 22 nt, Human
ccucagacuucacaagacccaa

SEQ ID NO: 936502 - RNA, 22 nt, Human
ccucuggccaaccuucugggac

SEQ ID NO: 936503 - RNA, 23 nt, Human
ccuggccccugggucccagagcc

SEQ ID NO: 936504 - RNA, 20 nt, Human
ccuguuuccuucccagcagu

SEQ ID NO: 936505 - RNA, 18 nt, Human
cgccccagcccuccggga

SEQ ID NO: 936506 - RNA, 23 nt, Human
cgccccagcccuccgggaacugg

SEQ ID NO: 936507 - RNA, 20 nt, Human
cuccaagaauuaaaaaauaa

SEQ ID NO: 936508 - RNA, 28 nt, Human
cuuaaaauaaacuccugaaaccaugcuc

SEQ ID NO: 936509 - RNA, 24 nt, Human
cuucacaagacccaaccauggacu

SEQ ID NO: 936510 - RNA, 21 nt, Human
cuuuagccuagggauggggga

SEQ ID NO: 936511 - RNA, 26 nt, Human
gaaaucuuccccacucuagggcacuc

SEQ ID NO: 936512 - RNA, 20 nt, Human
gaccucuuccuuuuccuggg

SEQ ID NO: 936513 - RNA, 19 nt, Human
gaccugauccuucuugccc

SEQ ID NO: 936514 - RNA, 26 nt, Human
gagccugcaccgccccagcccuccgg

SEQ ID NO: 936515 - RNA, 20 nt, Human
gagggguccucuccuccucc

SEQ ID NO: 936516 - RNA, 20 nt, Human
gaggugguggaggucagggg

SEQ ID NO: 936517 - RNA, 20 nt, Human
gcaacacaguugggccccag

SEQ ID NO: 936518 - RNA, 19 nt, Human
gccaaccuucugggacaga

SEQ ID NO: 936519 - RNA, 26 nt, Human
gccuuauucccuuauuucccccucca

SEQ ID NO: 936520 - RNA, 18 nt, Human
gcuuagugcuagcuggag

SEQ ID NO: 936521 - RNA, 18 nt, Human
ggagagccaaggaggggg

SEQ ID NO: 936522 - RNA, 18 nt, Human
ggagagccaaggaggggu

SEQ ID NO: 936523 - RNA, 22 nt, Human
gggaacuggguuggcugugcuc

SEQ ID NO: 936524 - RNA, 18 nt, Human
gggacaagaaagcgcgua

SEQ ID NO: 936525 - RNA, 23 nt, Human
gggagcucuggccaaagcugucc

SEQ ID NO: 936526 - RNA, 25 nt, Human
gggaugggggcggucacuaaagggg

SEQ ID NO: 936527 - RNA, 23 nt, Human
ggguuccagaguuuuuuuccagc

SEQ ID NO: 936528 - RNA, 18 nt, Human
gguucccuggcugguuug

SEQ ID NO: 936529 - RNA, 18 nt, Human
gguucugggacuuggagg

SEQ ID NO: 936530 - RNA, 28 nt, Human
gucccagagccugcaccgccccagcccu

SEQ ID NO: 936531 - RNA, 24 nt, Human
guccggguggagcaacacaguugg

SEQ ID NO: 936532 - RNA, 24 nt, Human
gucuagaagggagagauggguccg

SEQ ID NO: 936533 - RNA, 23 nt, Human
guggagcaacacaguugggcccc

SEQ ID NO: 936534 - RNA, 27 nt, Human
gugugugcaugcgugugcacacguaug

SEQ ID NO: 936535 - RNA, 27 nt, Human
guugccaggcuaaagcuaaagcuauac

SEQ ID NO: 936536 - RNA, 22 nt, Human
uaaaagagagggagacgaaggu

SEQ ID NO: 936537 - RNA, 24 nt, Human
uacagccugagccagaaaucccuu

SEQ ID NO: 936538 - RNA, 18 nt, Human
uaccacagcggggucaca

SEQ ID NO: 936539 - RNA, 19 nt, Human
uaccacagcggggucacag

SEQ ID NO: 936540 - RNA, 25 nt, Human
uacccagaaaucuuuauuacaaaaa

SEQ ID NO: 936541 - RNA, 23 nt, Human
uaugagaggugguggggaggggu

SEQ ID NO: 936542 - RNA, 23 nt, Human
ucaacacaugacagacagccaag

SEQ ID NO: 936543 - RNA, 19 nt, Human
ucacagaaggcugcacuac

SEQ ID NO: 936544 - RNA, 19 nt, Human
uccaggacucauggcucuu

SEQ ID NO: 936545 - RNA, 22 nt, Human
uccagggaguggcugaccugau

SEQ ID NO: 936546 - RNA, 23 nt, Human
ucccagaugccacacgggagcuc

SEQ ID NO: 936547 - RNA, 23 nt, Human
uccuccccacccuggaagaucag

SEQ ID NO: 936548 - RNA, 19 nt, Human
ucgcuguaagaaaaucccu

SEQ ID NO: 936549 - RNA, 26 nt, Human
ucuccagggaguggcugaccugaucc

SEQ ID NO: 936550 - RNA, 20 nt, Human
ucuccuccccacccuggaag

SEQ ID NO: 936551 - RNA, 20 nt, Human
ucucuggguaaaagagaggg

SEQ ID NO: 936552 - RNA, 21 nt, Human
ucucuggguaaaagagaggga

SEQ ID NO: 936553 - RNA, 20 nt, Human
ugaaaauggcaccaagaaaa

SEQ ID NO: 936554 - RNA, 18 nt, Human
ugaauaaauagggcuugc

SEQ ID NO: 936555 - RNA, 18 nt, Human
ugagaggugguggggagg

SEQ ID NO: 936556 - RNA, 24 nt, Human
ugcaugcgugugcacacguaugug

SEQ ID NO: 936557 - RNA, 20 nt, Human
ugcuagcuggaggggcaagc

SEQ ID NO: 936558 - RNA, 20 nt, Human
uggaagaucaggcuucggag

SEQ ID NO: 936559 - RNA, 21 nt, Human
uggaagaucaggcuucggagc

SEQ ID NO: 936560 - RNA, 20 nt, Human
uggcagcaaccucaccaagc

SEQ ID NO: 936561 - RNA, 22 nt, Human
uggccccugggucccagagccu

SEQ ID NO: 936562 - RNA, 24 nt, Human
uggcucccagaugccacacgggag

SEQ ID NO: 936563 - RNA, 19 nt, Human
ugggcaucccaaggccagg

SEQ ID NO: 936564 - RNA, 25 nt, Human
ugggguucaauacacaagguaugug

SEQ ID NO: 936565 - RNA, 20 nt, Human
ugggguucugggacuuggag

SEQ ID NO: 936566 - RNA, 19 nt, Human
uggguaaaagagagggaga

SEQ ID NO: 936567 - RNA, 18 nt, Human
ugggugguggugguagug

SEQ ID NO: 936568 - RNA, 22 nt, Human
uggguuggcugugcucaucacg

SEQ ID NO: 936569 - RNA, 20 nt, Human
ugguagugguggugguggug

SEQ ID NO: 936570 - RNA, 19 nt, Human
ugguggaggucaggggagg

SEQ ID NO: 936571 - RNA, 19 nt, Human
ugguggaggugguggaggu

SEQ ID NO: 936572 - RNA, 22 nt, Human
ugguggugguaguggugguggu

SEQ ID NO: 936573 - RNA, 20 nt, Human
ugguggugguggagguggug

SEQ ID NO: 936574 - RNA, 22 nt, Human
uggugguggugguggagguggu

SEQ ID NO: 936575 - RNA, 18 nt, Human
uggugguggugguggugg

SEQ ID NO: 936576 - RNA, 20 nt, Human
uggugguggugguggugguc

SEQ ID NO: 936577 - RNA, 20 nt, Human
uggugguggugguggugguc

SEQ ID NO: 936578 - RNA, 20 nt, Human
uggugguggugguggugguc

SEQ ID NO: 936579 - RNA, 20 nt, Human
uggugguggugguggugguc

SEQ ID NO: 936580 - RNA, 20 nt, Human
ugguggugguggugguggug

SEQ ID NO: 936581 - RNA, 20 nt, Human
ugguggugguggugguggug

SEQ ID NO: 936582 - RNA, 20 nt, Human
ugguggugguggugguggug

SEQ ID NO: 936583 - RNA, 20 nt, Human
ugguggugguggugguggug

SEQ ID NO: 936584 - RNA, 21 nt, Human
ugucuccaguccuuugggagg

SEQ ID NO: 936585 - RNA, 21 nt, Human
ugugugcaugcgugugcacac

SEQ ID NO: 936586 - RNA, 21 nt, Human
ugugugcaugcgugugcacac

SEQ ID NO: 936587 - RNA, 24 nt, Human
ugugugugugcaugcgugugcaca

SEQ ID NO: 936588 - RNA, 21 nt, Human
uguuuuaagaaaaaaaacaaa

SEQ ID NO: 936589 - RNA, 24 nt, Human
uguuuuaagaaaaaaaacaaaaca

SEQ ID NO: 936590 - RNA, 21 nt, Human
uuaaaaaauaaaauaaaauga

SEQ ID NO: 936591 - RNA, 23 nt, Human
uugaaaucaccaggugaccaucc

SEQ ID NO: 936592 - RNA, 18 nt, Human
uugggugguggugguagu

SEQ ID NO: 936593 - RNA, 22 nt, Human
uuuggaauuuggaacuagccug

SEQ ID NO: 936594 - RNA, 19 nt, Human
aaccgauuccccuccaccc

SEQ ID NO: 936595 - RNA, 18 nt, Human
aagcaagugaaaauugau

SEQ ID NO: 936596 - RNA, 22 nt, Human
aagcacacucuuccuggaaacc

SEQ ID NO: 936597 - RNA, 21 nt, Human
aagcagauauucauuacaaua

SEQ ID NO: 936598 - RNA, 28 nt, Human
acacaacuucaaccaagaagggaacgcc

SEQ ID NO: 936599 - RNA, 23 nt, Human
acacagcugccucugcgccgccu

SEQ ID NO: 936600 - RNA, 20 nt, Human
acacaggaaaucugcagccc

SEQ ID NO: 936601 - RNA, 19 nt, Human
acaggugucugcccccggg

SEQ ID NO: 936602 - RNA, 23 nt, Human
accauguagagacauaagcaaua

SEQ ID NO: 936603 - RNA, 23 nt, Human
accggagguuucucuucaaacau

SEQ ID NO: 936604 - RNA, 24 nt, Human
acugcuaaacugcgcugacuacgg

SEQ ID NO: 936605 - RNA, 21 nt, Human
acuggauuuuuccacaaaucu

SEQ ID NO: 936606 - RNA, 21 nt, Human
agacacacaauuaaagucaga

SEQ ID NO: 936607 - RNA, 21 nt, Human
agagagaaguaauuuuggaaa

SEQ ID NO: 936608 - RNA, 21 nt, Human
agcacacucuuccuggaaacc

SEQ ID NO: 936609 - RNA, 20 nt, Human
aggaguuagaaauuacaagu

SEQ ID NO: 936610 - RNA, 20 nt, Human
aggggcagggccggucggcu

SEQ ID NO: 936611 - RNA, 19 nt, Human
augcucgcagcccucuccg

SEQ ID NO: 936612 - RNA, 20 nt, Human
auuccugacaacauccgugg

SEQ ID NO: 936613 - RNA, 22 nt, Human
auuuguucuuccugguuguggu

SEQ ID NO: 936614 - RNA, 20 nt, Human
caaguaggcauaugcuuccu

SEQ ID NO: 936615 - RNA, 22 nt, Human
cacaacuucaaccaagaaggug

SEQ ID NO: 936616 - RNA, 21 nt, Human
cacagcugccucugcgccgcc

SEQ ID NO: 936617 - RNA, 19 nt, Human
cagcugccucugcgccgcc

SEQ ID NO: 936618 - RNA, 20 nt, Human
cagcugccucugcgccgccu

SEQ ID NO: 936619 - RNA, 19 nt, Human
caguaggccguguucccuc

SEQ ID NO: 936620 - RNA, 24 nt, Human
ccacacagcugccucugcgccgcc

SEQ ID NO: 936621 - RNA, 25 nt, Human
ccacacaggaaaucugcagcccaca

SEQ ID NO: 936622 - RNA, 21 nt, Human
ccagcuuccccggccacuccu

SEQ ID NO: 936623 - RNA, 23 nt, Human
cccacacagcugccucugcgccg

SEQ ID NO: 936624 - RNA, 21 nt, Human
cccacacaggaaaucugcagc

SEQ ID NO: 936625 - RNA, 21 nt, Human
ccccacagguccgggacgugc

SEQ ID NO: 936626 - RNA, 18 nt, Human
ccccugaaucacucugcu

SEQ ID NO: 936627 - RNA, 24 nt, Human
ccgaaaguggcagaugacaagcac

SEQ ID NO: 936628 - RNA, 21 nt, Human
ccgccucgaacgugcuggcua

SEQ ID NO: 936629 - RNA, 21 nt, Human
ccuggaggagccagcgggggc

SEQ ID NO: 936630 - RNA, 23 nt, Human
cgcugaaccccacacaggaaauc

SEQ ID NO: 936631 - RNA, 19 nt, Human
cggcugguuucucacuucc

SEQ ID NO: 936632 - RNA, 23 nt, Human
cgugguucauuaagugaucccgg

SEQ ID NO: 936633 - RNA, 22 nt, Human
cucacaccggagguuucucuuc

SEQ ID NO: 936634 - RNA, 20 nt, Human
cuccccugaggccccugagg

SEQ ID NO: 936635 - RNA, 22 nt, Human
cugcagcccacacagcugccuc

SEQ ID NO: 936636 - RNA, 23 nt, Human
cugguuucucacuucccuuccag

SEQ ID NO: 936637 - RNA, 23 nt, Human
cuucccuuccaggcucuacgcag

SEQ ID NO: 936638 - RNA, 25 nt, Human
cuugggcugacagguguggcugacg

SEQ ID NO: 936639 - RNA, 18 nt, Human
gaaaugcucgcagcccuc

SEQ ID NO: 936640 - RNA, 20 nt, Human
gaaccgauuccccuccaccc

SEQ ID NO: 936641 - RNA, 20 nt, Human
gagagaaguaauuuuggaaa

SEQ ID NO: 936642 - RNA, 24 nt, Human
gaggagccagcgggggccuggcag

SEQ ID NO: 936643 - RNA, 21 nt, Human
gaucauccuggucaaugaagu

SEQ ID NO: 936644 - RNA, 21 nt, Human
gcaaaggugaggucaggggag

SEQ ID NO: 936645 - RNA, 22 nt, Human
gccacuccugcacaguggaucc

SEQ ID NO: 936646 - RNA, 22 nt, Human
gcugaaccccacacaggaaauc

SEQ ID NO: 936647 - RNA, 18 nt, Human
ggaaaugcucgcagcccu

SEQ ID NO: 936648 - RNA, 24 nt, Human
gggaagggcgggauggaggugcgu

SEQ ID NO: 936649 - RNA, 19 nt, Human
gugaauuguccuauuucug

SEQ ID NO: 936650 - RNA, 21 nt, Human
gugaauuguccuauuucuggg

SEQ ID NO: 936651 - RNA, 23 nt, Human
gugcaggucgcccugaucuccuc

SEQ ID NO: 936652 - RNA, 23 nt, Human
gugccgggcggccucacugagug

SEQ ID NO: 936653 - RNA, 18 nt, Human
uaacuggauuuuuccaca

SEQ ID NO: 936654 - RNA, 21 nt, Human
uaacuuugcaaaggugagguc

SEQ ID NO: 936655 - RNA, 24 nt, Human
uacaauaccauguagagacauaag

SEQ ID NO: 936656 - RNA, 22 nt, Human
uagagagaaguaauuuuggaaa

SEQ ID NO: 936657 - RNA, 22 nt, Human
ucacagguaagcauucacgggg

SEQ ID NO: 936658 - RNA, 22 nt, Human
ucaguaggccguguucccucug

SEQ ID NO: 936659 - RNA, 21 nt, Human
uccccucucuggggccccaca

SEQ ID NO: 936660 - RNA, 21 nt, Human
ucccuuccaggcucuacgcag

SEQ ID NO: 936661 - RNA, 21 nt, Human
uccgaguugcccugaucuccu

SEQ ID NO: 936662 - RNA, 20 nt, Human
ucggcugguuucucacuucc

SEQ ID NO: 936663 - RNA, 23 nt, Human
ucucacaccggagguuucucuuc

SEQ ID NO: 936664 - RNA, 24 nt, Human
ucucacaccggagguuucucuuca

SEQ ID NO: 936665 - RNA, 19 nt, Human
ucuccgaguugcccugauc

SEQ ID NO: 936666 - RNA, 23 nt, Human
ucugcagcccacacagcugccuc

SEQ ID NO: 936667 - RNA, 19 nt, Human
ucuggggccccacaggucc

SEQ ID NO: 936668 - RNA, 23 nt, Human
ugacaagcacacucuuccuggaa

SEQ ID NO: 936669 - RNA, 23 nt, Human
ugacaagcacacucuuccuggaa

SEQ ID NO: 936670 - RNA, 19 nt, Human
ugccagccucaagugggca

SEQ ID NO: 936671 - RNA, 23 nt, Human
ugcccugaucuccuucucuccca

SEQ ID NO: 936672 - RNA, 19 nt, Human
ugccuggaggagccagcgg

SEQ ID NO: 936673 - RNA, 21 nt, Human
ugccuggaggagccagcgggg

SEQ ID NO: 936674 - RNA, 19 nt, Human
ugcucaaugcccagauuug

SEQ ID NO: 936675 - RNA, 20 nt, Human
ugcugugggaagggcgggau

SEQ ID NO: 936676 - RNA, 20 nt, Human
uggaggagccagcgggggcc

SEQ ID NO: 936677 - RNA, 23 nt, Human
uggcaggguucgugugcucccgg

SEQ ID NO: 936678 - RNA, 18 nt, Human
ugggaagggcgggaugga

SEQ ID NO: 936679 - RNA, 19 nt, Human
uggggugggggcuccccug

SEQ ID NO: 936680 - RNA, 21 nt, Human
uggggugggggcuccccugag

SEQ ID NO: 936681 - RNA, 24 nt, Human
uggggugggggcuccccugaggcc

SEQ ID NO: 936682 - RNA, 24 nt, Human
ugugaucauccuggucaaugaagu

SEQ ID NO: 936683 - RNA, 19 nt, Human
uguucccucugguagggcc

SEQ ID NO: 936684 - RNA, 24 nt, Human
uucccuuccaggcucuacgcagug

SEQ ID NO: 936685 - RNA, 26 nt, Human
uucucccaaugauaaacucucucaaa

SEQ ID NO: 936686 - RNA, 23 nt, Human
uugaugaaccgauuccccuccac

SEQ ID NO: 936687 - RNA, 20 nt, Human
uuuaagcaagugaaaauuga

SEQ ID NO: 936688 - RNA, 19 nt, Human
uuuuccacaaaucucucuu

SEQ ID NO: 936689 - RNA, 20 nt, Human
uuuuccacaaaucucucuuu

SEQ ID NO: 936690 - RNA, 19 nt, Human
aaaaaucccuucuuagcaa

SEQ ID NO: 936691 - RNA, 23 nt, Human
aaaagagagacaaguaguuaaaa

SEQ ID NO: 936692 - RNA, 24 nt, Human
aaaagagagacaaguaguuaaaaa

SEQ ID NO: 936693 - RNA, 18 nt, Human
aaauguccuuauaaggag

SEQ ID NO: 936694 - RNA, 18 nt, Human
aagcaaaacagaaagucc

SEQ ID NO: 936695 - RNA, 19 nt, Human
aagcaaaacagaaaguccg

SEQ ID NO: 936696 - RNA, 20 nt, Human
aagcaaaacagaaaguccga

SEQ ID NO: 936697 - RNA, 18 nt, Human
aagcuccuucuagaagcc

SEQ ID NO: 936698 - RNA, 22 nt, Human
aaguaguuaaaacucuugauac

SEQ ID NO: 936699 - RNA, 20 nt, Human
aauaacaaagaugcugagaa

SEQ ID NO: 936700 - RNA, 23 nt, Human
aauaacaaagaugcugagaaaaa

SEQ ID NO: 936701 - RNA, 19 nt, Human
aauaauagagaguaaauac

SEQ ID NO: 936702 - RNA, 20 nt, Human
acaaaaucugccuuaggcug

SEQ ID NO: 936703 - RNA, 22 nt, Human
acacaaggagcuggaaaucuua

SEQ ID NO: 936704 - RNA, 20 nt, Human
acaguggauagaguucugga

SEQ ID NO: 936705 - RNA, 23 nt, Human
accgccaagggucuucuagucuc

SEQ ID NO: 936706 - RNA, 19 nt, Human
agaagccaaggcggagacg

SEQ ID NO: 936707 - RNA, 19 nt, Human
agacaaaacaaaaucugcc

SEQ ID NO: 936708 - RNA, 20 nt, Human
agagcaguaggagguugcgg

SEQ ID NO: 936709 - RNA, 20 nt, Human
agaggaagagcaguaggagg

SEQ ID NO: 936710 - RNA, 22 nt, Human
agaggaagagcaguaggagguu

SEQ ID NO: 936711 - RNA, 18 nt, Human
agagggagagaggaagag

SEQ ID NO: 936712 - RNA, 21 nt, Human
agauagagucaguacagacaa

SEQ ID NO: 936713 - RNA, 18 nt, Human
agcaguaggagguugcgg

SEQ ID NO: 936714 - RNA, 22 nt, Human
agcaguaggagguugcggguaa

SEQ ID NO: 936715 - RNA, 18 nt, Human
agcuugagaaaacuggcg

SEQ ID NO: 936716 - RNA, 18 nt, Human
agucuguggcgccgacag

SEQ ID NO: 936717 - RNA, 22 nt, Human
auaacaaagaugcugagaaaaa

SEQ ID NO: 936718 - RNA, 25 nt, Human
augacaacagcauaaaauccuucuu

SEQ ID NO: 936719 - RNA, 22 nt, Human
auugauggucugacaagucuuc

SEQ ID NO: 936720 - RNA, 18 nt, Human
caaaaucugccuuaggcu

SEQ ID NO: 936721 - RNA, 18 nt, Human
caacacaccuacaccccc

SEQ ID NO: 936722 - RNA, 19 nt, Human
caagacagauuuugcaaac

SEQ ID NO: 936723 - RNA, 20 nt, Human
caaucacuugcaacuuuagc

SEQ ID NO: 936724 - RNA, 23 nt, Human
caccccccgcugccagagcugcu

SEQ ID NO: 936725 - RNA, 23 nt, Human
caccuacaccccccgcugccaga

SEQ ID NO: 936726 - RNA, 23 nt, Human
cagcagcccagcagcagcgccgc

SEQ ID NO: 936727 - RNA, 20 nt, Human
cagcuucaaccucccuaaga

SEQ ID NO: 936728 - RNA, 23 nt, Human
caggaagcuccuucuagaagccu

SEQ ID NO: 936729 - RNA, 18 nt, Human
caguccauucacaagaca

SEQ ID NO: 936730 - RNA, 27 nt, Human
caguguagugcaacacaccuacacccc

SEQ ID NO: 936731 - RNA, 21 nt, Human
cauaaaauccuucuuugcucc

SEQ ID NO: 936732 - RNA, 23 nt, Human
cauuuuucuuuaaaagcaaaaca

SEQ ID NO: 936733 - RNA, 18 nt, Human
ccaagagauugauggucu

SEQ ID NO: 936734 - RNA, 20 nt, Human
ccaagggucuucuagucucc

SEQ ID NO: 936735 - RNA, 22 nt, Human
ccaagggucuucuagucuccgg

SEQ ID NO: 936736 - RNA, 22 nt, Human
ccaccgccaagggucuucuagu

SEQ ID NO: 936737 - RNA, 22 nt, Human
ccagucuuccacaauccaugcc

SEQ ID NO: 936738 - RNA, 21 nt, Human
cccaagagauugauggucuga

SEQ ID NO: 936739 - RNA, 24 nt, Human
ccccgcugccagagcugcuucuca

SEQ ID NO: 936740 - RNA, 20 nt, Human
cccuaagagagggagagagg

SEQ ID NO: 936741 - RNA, 24 nt, Human
ccuggccuucuggacgcccagaag

SEQ ID NO: 936742 - RNA, 19 nt, Human
cgcccagaagccaaggcgg

SEQ ID NO: 936743 - RNA, 19 nt, Human
cuacaaauuuguuuuuccc

SEQ ID NO: 936744 - RNA, 20 nt, Human
cuacaccccccgcugccaga

SEQ ID NO: 936745 - RNA, 22 nt, Human
cuccgcgccagcccagcagccc

SEQ ID NO: 936746 - RNA, 18 nt, Human
cuucagcagcucauccag

SEQ ID NO: 936747 - RNA, 23 nt, Human
gaaacuccaccacgaccccacuu

SEQ ID NO: 936748 - RNA, 19 nt, Human
gagaaacuccaccacgacc

SEQ ID NO: 936749 - RNA, 21 nt, Human
gaggagaaacuccaccacgac

SEQ ID NO: 936750 - RNA, 21 nt, Human
gauacuucagaguugcuacaa

SEQ ID NO: 936751 - RNA, 23 nt, Human
gcagauagagucaguacagacaa

SEQ ID NO: 936752 - RNA, 19 nt, Human
ggggaugcuuacaaaugca

SEQ ID NO: 936753 - RNA, 20 nt, Human
guggcagauagagucaguac

SEQ ID NO: 936754 - RNA, 19 nt, Human
guguagugcaacacaccua

SEQ ID NO: 936755 - RNA, 21 nt, Human
uacauacauacauucugugug

SEQ ID NO: 936756 - RNA, 21 nt, Human
uagguaauauuaucaagacac

SEQ ID NO: 936757 - RNA, 24 nt, Human
uauuacauacauacauucugugug

SEQ ID NO: 936758 - RNA, 24 nt, Human
ucauaccuccaucaucaaaaaacc

SEQ ID NO: 936759 - RNA, 23 nt, Human
uccucggcugggguuugcagagc

SEQ ID NO: 936760 - RNA, 20 nt, Human
ucugcaggucccaggcuuuc

SEQ ID NO: 936761 - RNA, 22 nt, Human
ucuuaaauauguugcccagucu

SEQ ID NO: 936762 - RNA, 21 nt, Human
ucuuuaaaagcaaaacagaaa

SEQ ID NO: 936763 - RNA, 26 nt, Human
ugaaacaaagucaacauugcugcauu

SEQ ID NO: 936764 - RNA, 21 nt, Human
ugacauggcaucugcaggucc

SEQ ID NO: 936765 - RNA, 20 nt, Human
ugagaaaaaugacaacagca

SEQ ID NO: 936766 - RNA, 19 nt, Human
ugagagguggaggagaaac

SEQ ID NO: 936767 - RNA, 22 nt, Human
ugagagguggaggagaaacucc

SEQ ID NO: 936768 - RNA, 18 nt, Human
ugagcagaacagcuagug

SEQ ID NO: 936769 - RNA, 25 nt, Human
ugcauuaaaaauucauauaugagca

SEQ ID NO: 936770 - RNA, 23 nt, Human
ugcccaauaauagagaguaaaua

SEQ ID NO: 936771 - RNA, 21 nt, Human
ugcccagcgccggcccucacg

SEQ ID NO: 936772 - RNA, 23 nt, Human
uggcaucugcaggucccaggcuu

SEQ ID NO: 936773 - RNA, 22 nt, Human
uuacauacauacauucugugug

SEQ ID NO: 936774 - RNA, 21 nt, Human
uuauaucauuccugaaggcau

SEQ ID NO: 936775 - RNA, 19 nt, Human
uucagguccucggcugggg

SEQ ID NO: 936776 - RNA, 22 nt, Human
uugcugcauuaaaaauucauau

SEQ ID NO: 936777 - RNA, 22 nt, Human
uugggggaugcuuacaaaugca

SEQ ID NO: 936778 - RNA, 25 nt, Human
uuugcaaacauuaaagcaucuaaca

SEQ ID NO: 936779 - RNA, 22 nt, Human
uuuguugagagagagauuccag

SEQ ID NO: 936780 - RNA, 26 nt, Human
uuuuguccgcuucaugcugcccuugu

SEQ ID NO: 936781 - RNA, 21 nt, Human
uuuuuggcucuugaagauuga

SEQ ID NO: 936782 - RNA, 24 nt, Human
aaaaccaacaaggcuaaaucagaa

SEQ ID NO: 936783 - RNA, 19 nt, Human
aaaagcccaucccugguua

SEQ ID NO: 936784 - RNA, 25 nt, Human
aaacacaaucuacuuggauucgugc

SEQ ID NO: 936785 - RNA, 18 nt, Human
aaagagacaccugccuuc

SEQ ID NO: 936786 - RNA, 19 nt, Human
aaagcagcuguucccuaug

SEQ ID NO: 936787 - RNA, 21 nt, Human
aaagcagcuguucccuauggg

SEQ ID NO: 936788 - RNA, 22 nt, Human
aaagcagcuguucccuaugguu

SEQ ID NO: 936789 - RNA, 24 nt, Human
aaagcccugcucuguguccuacuu

SEQ ID NO: 936790 - RNA, 23 nt, Human
aaaguauaaugggcuccacaaug

SEQ ID NO: 936791 - RNA, 21 nt, Human
aacagaacagaacaacaugag

SEQ ID NO: 936792 - RNA, 24 nt, Human
aacagcuccccccacacuccacca

SEQ ID NO: 936793 - RNA, 18 nt, Human
aacauugucagggaacau

SEQ ID NO: 936794 - RNA, 19 nt, Human
aaccucuggagauaaugug

SEQ ID NO: 936795 - RNA, 26 nt, Human
aacucuucccaauagauuuucuuuca

SEQ ID NO: 936796 - RNA, 18 nt, Human
aagaaaacagcacggaga

SEQ ID NO: 936797 - RNA, 26 nt, Human
aagaaaacagcacggagaagucucau

SEQ ID NO: 936798 - RNA, 19 nt, Human
aagaguguggagacuuugg

SEQ ID NO: 936799 - RNA, 21 nt, Human
aagaucucacccaucuggaau

SEQ ID NO: 936800 - RNA, 21 nt, Human
aagcaaacuguccccuuccau

SEQ ID NO: 936801 - RNA, 23 nt, Human
aagcagguggucugggagccaga

SEQ ID NO: 936802 - RNA, 23 nt, Human
aagcuaccaccaaagaaacacag

SEQ ID NO: 936803 - RNA, 24 nt, Human
aaggagucuuggccaacacgaagc

SEQ ID NO: 936804 - RNA, 24 nt, Human
aaggcacugaaguaauuguacaga

SEQ ID NO: 936805 - RNA, 22 nt, Human
aagggccuggcugcuacucccu

SEQ ID NO: 936806 - RNA, 19 nt, Human
aaggggaugagcuggggga

SEQ ID NO: 936807 - RNA, 29 nt, Human
aaucagaaaguggaaugcaaagggacccc

SEQ ID NO: 936808 - RNA, 20 nt, Human
aaugaucaagccccuaaaac

SEQ ID NO: 936809 - RNA, 23 nt, Human
acaaagacaaggaggagcagaga

SEQ ID NO: 936810 - RNA, 23 nt, Human
acacaaaaaagcaaagaacaccu

SEQ ID NO: 936811 - RNA, 22 nt, Human
acacuccaccacuaaccucucu

SEQ ID NO: 936812 - RNA, 23 nt, Human
acagaacaacaugaggaacagag

SEQ ID NO: 936813 - RNA, 21 nt, Human
accacaaccccaugccuuacc

SEQ ID NO: 936814 - RNA, 28 nt, Human
accagacacucauucuccgaacauuccu

SEQ ID NO: 936815 - RNA, 19 nt, Human
acccaguaauuaugugugg

SEQ ID NO: 936816 - RNA, 22 nt, Human
acccccucccacugaccacaca

SEQ ID NO: 936817 - RNA, 22 nt, Human
acccuagaucuccaggccugau

SEQ ID NO: 936818 - RNA, 18 nt, Human
accucagagcuccugagc

SEQ ID NO: 936819 - RNA, 19 nt, Human
accugccccuuuggaaccc

SEQ ID NO: 936820 - RNA, 19 nt, Human
accuugggauagcuuguga

SEQ ID NO: 936821 - RNA, 21 nt, Human
acucauggguccuaguuauac

SEQ ID NO: 936822 - RNA, 22 nt, Human
acugauaccucuauguacucua

SEQ ID NO: 936823 - RNA, 19 nt, Human
acugccauucacacaaaag

SEQ ID NO: 936824 - RNA, 23 nt, Human
acuggcucugggaggcagcaggg

SEQ ID NO: 936825 - RNA, 24 nt, Human
agaacagaacaacaugaggaacag

SEQ ID NO: 936826 - RNA, 24 nt, Human
agaacagcuccccccacacuccac

SEQ ID NO: 936827 - RNA, 19 nt, Human
agaagagucugcucaugug

SEQ ID NO: 936828 - RNA, 18 nt, Human
agaagccaaggcaauggu

SEQ ID NO: 936829 - RNA, 19 nt, Human
agaagccaaggcaauggua

SEQ ID NO: 936830 - RNA, 19 nt, Human
agaaggagggcaggggagc

SEQ ID NO: 936831 - RNA, 25 nt, Human
agacauguauacauggaaaaccucc

SEQ ID NO: 936832 - RNA, 20 nt, Human
agaccagccuucaagaugga

SEQ ID NO: 936833 - RNA, 23 nt, Human
agacccccugggggugguggugu

SEQ ID NO: 936834 - RNA, 24 nt, Human
agagguacauacucaaacuccccc

SEQ ID NO: 936835 - RNA, 21 nt, Human
agagucauauuaaaaccaaca

SEQ ID NO: 936836 - RNA, 20 nt, Human
agaugagcaaauccucauca

SEQ ID NO: 936837 - RNA, 22 nt, Human
agcagaacacacaucuccucca

SEQ ID NO: 936838 - RNA, 20 nt, Human
agcagagaaguucccugcag

SEQ ID NO: 936839 - RNA, 20 nt, Human
agcagccucuggacuccggc

SEQ ID NO: 936840 - RNA, 20 nt, Human
agcccaugccaauggaagca

SEQ ID NO: 936841 - RNA, 20 nt, Human
agccccccguggaacacagg

SEQ ID NO: 936842 - RNA, 20 nt, Human
agccccuaaaacucuuccca

SEQ ID NO: 936843 - RNA, 20 nt, Human
agcuccccccacacuccacc

SEQ ID NO: 936844 - RNA, 19 nt, Human
aggaaucugcugaguacag

SEQ ID NO: 936845 - RNA, 24 nt, Human
aggaguaaacaaaucugaaucuca

SEQ ID NO: 936846 - RNA, 20 nt, Human
aggaugaauaaacaugaugg

SEQ ID NO: 936847 - RNA, 19 nt, Human
agggguuacauccuacagg

SEQ ID NO: 936848 - RNA, 21 nt, Human
agggugccaccucagagcucc

SEQ ID NO: 936849 - RNA, 21 nt, Human
aguaaauggugacaaucacaa

SEQ ID NO: 936850 - RNA, 24 nt, Human
agucuuggccaacacgaagcugag

SEQ ID NO: 936851 - RNA, 25 nt, Human
agugagaaaaaaccgguuuaaaucc

SEQ ID NO: 936852 - RNA, 21 nt, Human
agugcuccaaaucuaccccuu

SEQ ID NO: 936853 - RNA, 21 nt, Human
aguuacugugcuuuugcuuuu

SEQ ID NO: 936854 - RNA, 19 nt, Human
aguucaaacaugaucccag

SEQ ID NO: 936855 - RNA, 18 nt, Human
auaagcccaaaggcacug

SEQ ID NO: 936856 - RNA, 21 nt, Human
auaaggggaugagcuggggga

SEQ ID NO: 936857 - RNA, 21 nt, Human
aucacuucuagacauguauac

SEQ ID NO: 936858 - RNA, 24 nt, Human
aucaggaagaaaguacuaaauuuc

SEQ ID NO: 936859 - RNA, 26 nt, Human
auccacuccacacuacugcaccaugg

SEQ ID NO: 936860 - RNA, 21 nt, Human
aucucuugcugcuccccgugu

SEQ ID NO: 936861 - RNA, 23 nt, Human
augaucccagcuccacaagaucu

SEQ ID NO: 936862 - RNA, 24 nt, Human
augccaauggaagcaacuuuuguc

SEQ ID NO: 936863 - RNA, 19 nt, Human
augggccuggagaucuggg

SEQ ID NO: 936864 - RNA, 21 nt, Human
augguaagaaaagcccugcuc

SEQ ID NO: 936865 - RNA, 19 nt, Human
augguuccauuuccccagc

SEQ ID NO: 936866 - RNA, 24 nt, Human
auguuggccugcucagugggggca

SEQ ID NO: 936867 - RNA, 24 nt, Human
auucccacaaagagaggccuacug

SEQ ID NO: 936868 - RNA, 22 nt, Human
auuugagaugacaugacuaucc

SEQ ID NO: 936869 - RNA, 20 nt, Human
caaacucccccgcccccuuc

SEQ ID NO: 936870 - RNA, 24 nt, Human
caaacucccccgcccccuucuuuu

SEQ ID NO: 936871 - RNA, 25 nt, Human
caaacucccccgcccccuucuuuuu

SEQ ID NO: 936872 - RNA, 23 nt, Human
caaagaacaccugacauuauuca

SEQ ID NO: 936873 - RNA, 24 nt, Human
caaaggcagaucccugcaagacaa

SEQ ID NO: 936874 - RNA, 21 nt, Human
caaaugucuggugccagaggc

SEQ ID NO: 936875 - RNA, 18 nt, Human
caacacgaagcugagugc

SEQ ID NO: 936876 - RNA, 21 nt, Human
caacaggagaccccucagaag

SEQ ID NO: 936877 - RNA, 23 nt, Human
caacaggagaccccucagaaggu

SEQ ID NO: 936878 - RNA, 21 nt, Human
caacaggcaccacuuuccagc

SEQ ID NO: 936879 - RNA, 21 nt, Human
caagacaaagccaaggccuug

SEQ ID NO: 936880 - RNA, 24 nt, Human
caagacaaagccaaggccuugcau

SEQ ID NO: 936881 - RNA, 18 nt, Human
caagccgaggcgcggcgc

SEQ ID NO: 936882 - RNA, 20 nt, Human
caagcuguuacccauccuuu

SEQ ID NO: 936883 - RNA, 22 nt, Human
caaggaauuaucauuuccuuca

SEQ ID NO: 936884 - RNA, 20 nt, Human
caaugguagaggccacaacu

SEQ ID NO: 936885 - RNA, 20 nt, Human
cacaaccccaugccuuaccc

SEQ ID NO: 936886 - RNA, 23 nt, Human
cacacuccaccacuaaccucucu

SEQ ID NO: 936887 - RNA, 18 nt, Human
cacaggcuaagaaggagc

SEQ ID NO: 936888 - RNA, 20 nt, Human
cacaucuccuccacuccuaa

SEQ ID NO: 936889 - RNA, 24 nt, Human
caccaaagaaacacagggguuaca

SEQ ID NO: 936890 - RNA, 21 nt, Human
caccacaaccccaugccuuac

SEQ ID NO: 936891 - RNA, 24 nt, Human
caccacaaccccaugccuuaccca

SEQ ID NO: 936892 - RNA, 20 nt, Human
cacccccucccacugaccac

SEQ ID NO: 936893 - RNA, 23 nt, Human
cacccccucccacugaccacaca

SEQ ID NO: 936894 - RNA, 20 nt, Human
cacucugcccucuaagccuc

SEQ ID NO: 936895 - RNA, 21 nt, Human
cacuucaaggccaccagacac

SEQ ID NO: 936896 - RNA, 23 nt, Human
cacuucaaggccaccagacacuc

SEQ ID NO: 936897 - RNA, 23 nt, Human
cagaacacacaucuccuccacuc

SEQ ID NO: 936898 - RNA, 23 nt, Human
cagacugcaaaugucuggugcca

SEQ ID NO: 936899 - RNA, 22 nt, Human
cagagcacccacacaccaaagg

SEQ ID NO: 936900 - RNA, 23 nt, Human
cagagcagugacccccaagagcc

SEQ ID NO: 936901 - RNA, 23 nt, Human
cagcaccugcacaguuggcuugc

SEQ ID NO: 936902 - RNA, 19 nt, Human
cagcagagcagugaccccc

SEQ ID NO: 936903 - RNA, 21 nt, Human
cagcagagcagugacccccaa

SEQ ID NO: 936904 - RNA, 21 nt, Human
cagcaggaauggacguccccu

SEQ ID NO: 936905 - RNA, 25 nt, Human
cagccucuggacuccggcaguuccc

SEQ ID NO: 936906 - RNA, 22 nt, Human
cagccuguacagaccaaacaca

SEQ ID NO: 936907 - RNA, 23 nt, Human
cagccuguacagaccaaacacaa

SEQ ID NO: 936908 - RNA, 19 nt, Human
cagcuccagagcccaugcc

SEQ ID NO: 936909 - RNA, 20 nt, Human
cagcuccagagcccaugcca

SEQ ID NO: 936910 - RNA, 20 nt, Human
cagcuggggcauugggcugg

SEQ ID NO: 936911 - RNA, 21 nt, Human
caggauaagggccuggcugcu

SEQ ID NO: 936912 - RNA, 23 nt, Human
cagggacaggguggacacugaga

SEQ ID NO: 936913 - RNA, 20 nt, Human
caggucagcccaagcccugc

SEQ ID NO: 936914 - RNA, 27 nt, Human
cauagcggggugaacagaacagaacaa

SEQ ID NO: 936915 - RNA, 22 nt, Human
caucaguaaauggugacaauca

SEQ ID NO: 936916 - RNA, 23 nt, Human
cauccucgguucugaguauucac

SEQ ID NO: 936917 - RNA, 18 nt, Human
caucucaccacccagagc

SEQ ID NO: 936918 - RNA, 20 nt, Human
caucuggaauggaagugacc

SEQ ID NO: 936919 - RNA, 21 nt, Human
caugaacuacauuaauuaccc

SEQ ID NO: 936920 - RNA, 21 nt, Human
caugcaaaagcccaucccugg

SEQ ID NO: 936921 - RNA, 28 nt, Human
cauggaaugacaccacucugcccucuaa

SEQ ID NO: 936922 - RNA, 25 nt, Human
cauugcacauauggaucccuuugcc

SEQ ID NO: 936923 - RNA, 22 nt, Human
ccaaacagagcccacaucuaug

SEQ ID NO: 936924 - RNA, 22 nt, Human
ccaaagaaagcuaccaccaaag

SEQ ID NO: 936925 - RNA, 22 nt, Human
ccaagagauccacaaacucaga

SEQ ID NO: 936926 - RNA, 20 nt, Human
ccaagccgaggcgcggcgcg

SEQ ID NO: 936927 - RNA, 22 nt, Human
ccacaaacucagaacaaaagca

SEQ ID NO: 936928 - RNA, 22 nt, Human
ccacaaccccaugccuuaccca

SEQ ID NO: 936929 - RNA, 21 nt, Human
ccacacuccaccacuaaccuc

SEQ ID NO: 936930 - RNA, 23 nt, Human
ccacagagagggccagcacuaaa

SEQ ID NO: 936931 - RNA, 18 nt, Human
ccaccuggugaugaaaug

SEQ ID NO: 936932 - RNA, 19 nt, Human
ccacucugcccucuaagcc

SEQ ID NO: 936933 - RNA, 22 nt, Human
ccagcaggaauggacguccccu

SEQ ID NO: 936934 - RNA, 25 nt, Human
cccacugaccacacaaaaaagcaaa

SEQ ID NO: 936935 - RNA, 19 nt, Human
cccagaaaggaugcaaugu

SEQ ID NO: 936936 - RNA, 19 nt, Human
cccaguggaugugaagaug

SEQ ID NO: 936937 - RNA, 20 nt, Human
ccccagaaaccaaagggacc

SEQ ID NO: 936938 - RNA, 22 nt, Human
ccccaguggaccaccccugagc

SEQ ID NO: 936939 - RNA, 18 nt, Human
ccccaugccuuacccagg

SEQ ID NO: 936940 - RNA, 19 nt, Human
ccccaugccuuacccagga

SEQ ID NO: 936941 - RNA, 21 nt, Human
ccccugaaggagguugcaggg

SEQ ID NO: 936942 - RNA, 18 nt, Human
ccccugguuggcccagau

SEQ ID NO: 936943 - RNA, 18 nt, Human
ccccuucccgcgggggcc

SEQ ID NO: 936944 - RNA, 22 nt, Human
cccgcacugggcuggccucccc

SEQ ID NO: 936945 - RNA, 21 nt, Human
cccgcaucgccggcgcggccg

SEQ ID NO: 936946 - RNA, 19 nt, Human
cccucaugaacagugaggu

SEQ ID NO: 936947 - RNA, 18 nt, Human
cccugcaguuccaccccc

SEQ ID NO: 936948 - RNA, 22 nt, Human
cccugcucuguguccuacuugg

SEQ ID NO: 936949 - RNA, 18 nt, Human
cccugggccucacuucug

SEQ ID NO: 936950 - RNA, 22 nt, Human
cccuuguaucugccccagugga

SEQ ID NO: 936951 - RNA, 18 nt, Human
cccuuuaggguuuugugg

SEQ ID NO: 936952 - RNA, 20 nt, Human
ccgggacuggggcgggcgcg

SEQ ID NO: 936953 - RNA, 24 nt, Human
ccuaaagugcuccaaaucuacccc

SEQ ID NO: 936954 - RNA, 18 nt, Human
ccuacuguggccuucuag

SEQ ID NO: 936955 - RNA, 24 nt, Human
ccuaggagccuuaguuuccucauc

SEQ ID NO: 936956 - RNA, 19 nt, Human
ccuaugguuugcuguuugg

SEQ ID NO: 936957 - RNA, 23 nt, Human
ccucagaaggugcagagcccccc

SEQ ID NO: 936958 - RNA, 22 nt, Human
ccuccagacugcccuggggccu

SEQ ID NO: 936959 - RNA, 20 nt, Human
ccucccacuccccagcaccu

SEQ ID NO: 936960 - RNA, 19 nt, Human
ccucccacugaccacacaa

SEQ ID NO: 936961 - RNA, 19 nt, Human
ccugagcccaguuacugcc

SEQ ID NO: 936962 - RNA, 21 nt, Human
ccugagcccaguuacugccau

SEQ ID NO: 936963 - RNA, 18 nt, Human
ccugcaguuccacccccu

SEQ ID NO: 936964 - RNA, 18 nt, Human
ccugcaguuccacccccu

SEQ ID NO: 936965 - RNA, 22 nt, Human
ccugccccuuuggaacccagga

SEQ ID NO: 936966 - RNA, 21 nt, Human
ccugggccuuuuggagcagca

SEQ ID NO: 936967 - RNA, 20 nt, Human
ccuggggagcugggaaugug

SEQ ID NO: 936968 - RNA, 22 nt, Human
ccuucaagauggagcuuccuag

SEQ ID NO: 936969 - RNA, 20 nt, Human
cgcgaugggcaucugucucc

SEQ ID NO: 936970 - RNA, 19 nt, Human
cuaaagacugagcucuguc

SEQ ID NO: 936971 - RNA, 23 nt, Human
cuaccaccaaagaaacacagggg

SEQ ID NO: 936972 - RNA, 20 nt, Human
cucaaacucccccgcccccu

SEQ ID NO: 936973 - RNA, 18 nt, Human
cucauagaaucugagucu

SEQ ID NO: 936974 - RNA, 22 nt, Human
cuccagacugcccuggggccuu

SEQ ID NO: 936975 - RNA, 18 nt, Human
cucccacuccccagcacc

SEQ ID NO: 936976 - RNA, 20 nt, Human
cucccuccacccucauccug

SEQ ID NO: 936977 - RNA, 19 nt, Human
cuccggcaguuccccaucc

SEQ ID NO: 936978 - RNA, 19 nt, Human
cuccugagcccaguuacug

SEQ ID NO: 936979 - RNA, 20 nt, Human
cuccugagcccaguuacugc

SEQ ID NO: 936980 - RNA, 22 nt, Human
cugaccacacaaaaaagcaaag

SEQ ID NO: 936981 - RNA, 19 nt, Human
cugccuaaagugcuccaaa

SEQ ID NO: 936982 - RNA, 22 nt, Human
cugcuccccguguugugcugug

SEQ ID NO: 936983 - RNA, 18 nt, Human
cuggaagaauuuaaugag

SEQ ID NO: 936984 - RNA, 19 nt, Human
cuggccggccagugaaugc

SEQ ID NO: 936985 - RNA, 18 nt, Human
cuggccuugcguuccugu

SEQ ID NO: 936986 - RNA, 18 nt, Human
cuggcugcuacucccugg

SEQ ID NO: 936987 - RNA, 22 nt, Human
cuggcugucacucauggcccug

SEQ ID NO: 936988 - RNA, 22 nt, Human
cuucagccuguacagaccaaac

SEQ ID NO: 936989 - RNA, 21 nt, Human
cuucccagaagaacuggcauc

SEQ ID NO: 936990 - RNA, 22 nt, Human
cuucuagaggcccaaggacccc

SEQ ID NO: 936991 - RNA, 22 nt, Human
cuucuugaauucucugccccuc

SEQ ID NO: 936992 - RNA, 22 nt, Human
cuugcugcuccccguguugugc

SEQ ID NO: 936993 - RNA, 18 nt, Human
gaaauguccuauggaaag

SEQ ID NO: 936994 - RNA, 22 nt, Human
gaacacacaucuccuccacucc

SEQ ID NO: 936995 - RNA, 23 nt, Human
gaacacagggccaccagucuucc

SEQ ID NO: 936996 - RNA, 22 nt, Human
gaaguucccugcaguuccaccc

SEQ ID NO: 936997 - RNA, 18 nt, Human
gacugcuucucccaaugc

SEQ ID NO: 936998 - RNA, 19 nt, Human
gacuugcccacauuagcaa

SEQ ID NO: 936999 - RNA, 20 nt, Human
gagacuggcuuuccugggga

SEQ ID NO: 937000 - RNA, 21 nt, Human
gagagcagggggcuucagccu

SEQ ID NO: 937001 - RNA, 21 nt, Human
gagcacccacacaccaaagga

SEQ ID NO: 937002 - RNA, 24 nt, Human
gagcccaguuacugccauucacac

SEQ ID NO: 937003 - RNA, 18 nt, Human
gagccgagggaggccagc

SEQ ID NO: 937004 - RNA, 22 nt, Human
gagccucaaucuuuuccaugac

SEQ ID NO: 937005 - RNA, 22 nt, Human
gaggagccuuccagaccccagc

SEQ ID NO: 937006 - RNA, 24 nt, Human
gaggccacaacucuuugucuuuga

SEQ ID NO: 937007 - RNA, 19 nt, Human
gcaaagaacaccuuuauca

SEQ ID NO: 937008 - RNA, 18 nt, Human
gcaaugguagaggccaca

SEQ ID NO: 937009 - RNA, 19 nt, Human
gcacggagaagucucauug

SEQ ID NO: 937010 - RNA, 21 nt, Human
gcagaucccugcaagacaaag

SEQ ID NO: 937011 - RNA, 20 nt, Human
gcagguuaggugugaggaug

SEQ ID NO: 937012 - RNA, 22 nt, Human
gccacaacagcauguuggccug

SEQ ID NO: 937013 - RNA, 22 nt, Human
gccuaagaccuauucacugucc

SEQ ID NO: 937014 - RNA, 19 nt, Human
gcgcggccgcuggcugugc

SEQ ID NO: 937015 - RNA, 21 nt, Human
gcgcggcgcgaacugaggcgg

SEQ ID NO: 937016 - RNA, 19 nt, Human
gcgggcagcucagccccuu

SEQ ID NO: 937017 - RNA, 18 nt, Human
gcucuguguccuacuugg

SEQ ID NO: 937018 - RNA, 19 nt, Human
gcuuguggguguacuucug

SEQ ID NO: 937019 - RNA, 20 nt, Human
ggacacagcuggccggccag

SEQ ID NO: 937020 - RNA, 19 nt, Human
ggaccccugguuggcccag

SEQ ID NO: 937021 - RNA, 23 nt, Human
ggacuggggcgggcgcggggugg

SEQ ID NO: 937022 - RNA, 18 nt, Human
ggagccagaaauccaagg

SEQ ID NO: 937023 - RNA, 25 nt, Human
ggagccagaaauccaaggccuugcu

SEQ ID NO: 937024 - RNA, 25 nt, Human
ggaggccagcaggcccagugggggu

SEQ ID NO: 937025 - RNA, 18 nt, Human
ggagguugcagggggcag

SEQ ID NO: 937026 - RNA, 24 nt, Human
ggaguggaggaugaauaaacauga

SEQ ID NO: 937027 - RNA, 22 nt, Human
ggcaucaggaagaaaguacuaa

SEQ ID NO: 937028 - RNA, 24 nt, Human
ggcccaggcuggggaagggguaca

SEQ ID NO: 937029 - RNA, 25 nt, Human
ggcggcggcgggcagcucagccccu

SEQ ID NO: 937030 - RNA, 24 nt, Human
ggcuuuccuggggagcugggaaug

SEQ ID NO: 937031 - RNA, 19 nt, Human
gggaggccagcaggcccag

SEQ ID NO: 937032 - RNA, 18 nt, Human
ggggaaggccagcugggg

SEQ ID NO: 937033 - RNA, 28 nt, Human
ggggagacccccugggggucaggagccu

SEQ ID NO: 937034 - RNA, 18 nt, Human
gggguuccuuugcuugcc

SEQ ID NO: 937035 - RNA, 22 nt, Human
ggguggggagacccccuggggg

SEQ ID NO: 937036 - RNA, 21 nt, Human
gggugggguggggagaccccc

SEQ ID NO: 937037 - RNA, 21 nt, Human
guacagaccaaacacaaucua

SEQ ID NO: 937038 - RNA, 18 nt, Human
guccagacugcaaauguc

SEQ ID NO: 937039 - RNA, 21 nt, Human
guccagacugcaaaugucugg

SEQ ID NO: 937040 - RNA, 26 nt, Human
guccuguucaugcuuccucuugggcu

SEQ ID NO: 937041 - RNA, 20 nt, Human
gugcuccaaaucuaccccuu

SEQ ID NO: 937042 - RNA, 20 nt, Human
guggagaaauuuccugggcu

SEQ ID NO: 937043 - RNA, 18 nt, Human
guggccccgcaucgccgg

SEQ ID NO: 937044 - RNA, 23 nt, Human
guggcucuggcaagcuguuaccc

SEQ ID NO: 937045 - RNA, 19 nt, Human
guggugguguuggcuccgg

SEQ ID NO: 937046 - RNA, 18 nt, Human
guuuccuuuuuuuccuuu

SEQ ID NO: 937047 - RNA, 20 nt, Human
uaaacaugaugggucagagg

SEQ ID NO: 937048 - RNA, 24 nt, Human
uaaagugaggagccuuccagaccc

SEQ ID NO: 937049 - RNA, 24 nt, Human
uaaagugcuccaaaucuaccccuu

SEQ ID NO: 937050 - RNA, 21 nt, Human
uaacaggauaagggccuggcu

SEQ ID NO: 937051 - RNA, 18 nt, Human
uaagaaaagcccugcucu

SEQ ID NO: 937052 - RNA, 30 nt, Human
uaagaaaauagcauacagcaggcagauuuu

SEQ ID NO: 937053 - RNA, 21 nt, Human
uaaggaaggugcguggguuuc

SEQ ID NO: 937054 - RNA, 22 nt, Human
uaauguacagucaaaaaauaua

SEQ ID NO: 937055 - RNA, 21 nt, Human
uaauuacccugagcuccaggc

SEQ ID NO: 937056 - RNA, 23 nt, Human
uacaggcuccuugcaggcugggg

SEQ ID NO: 937057 - RNA, 18 nt, Human
uaccaccaaagaaacaca

SEQ ID NO: 937058 - RNA, 27 nt, Human
uaccccuucuaauguugaugagggaga

SEQ ID NO: 937059 - RNA, 23 nt, Human
uacuaaggaaggugcguggguuu

SEQ ID NO: 937060 - RNA, 18 nt, Human
uagcauucaggaaucugc

SEQ ID NO: 937061 - RNA, 24 nt, Human
uaucaaacacccaaacuguacaag

SEQ ID NO: 937062 - RNA, 22 nt, Human
uaucuuaggaaaacaugaaucu

SEQ ID NO: 937063 - RNA, 20 nt, Human
uaucuuguuugucucuucca

SEQ ID NO: 937064 - RNA, 26 nt, Human
uaugacccuuucuccuccacauccaa

SEQ ID NO: 937065 - RNA, 18 nt, Human
uauucugccugaccccuc

SEQ ID NO: 937066 - RNA, 19 nt, Human
uauuuuguuuucucuucuc

SEQ ID NO: 937067 - RNA, 23 nt, Human
ucaaaaaauauaucugauauuca

SEQ ID NO: 937068 - RNA, 23 nt, Human
ucaaaggcagaucccugcaagac

SEQ ID NO: 937069 - RNA, 21 nt, Human
ucaaugucucuggaucugggu

SEQ ID NO: 937070 - RNA, 19 nt, Human
ucacaaacccuccuuuaga

SEQ ID NO: 937071 - RNA, 23 nt, Human
ucaccccuuccugagcagaaaaa

SEQ ID NO: 937072 - RNA, 27 nt, Human
ucacccuguaaaugggguggggugggg

SEQ ID NO: 937073 - RNA, 19 nt, Human
ucagaaaguggaaugcaaa

SEQ ID NO: 937074 - RNA, 20 nt, Human
ucagagcuccugagcccagu

SEQ ID NO: 937075 - RNA, 19 nt, Human
ucaugagagaucuacaugg

SEQ ID NO: 937076 - RNA, 24 nt, Human
uccaagaaucugcagagcuaugga

SEQ ID NO: 937077 - RNA, 19 nt, Human
uccaagccuugccacaucc

SEQ ID NO: 937078 - RNA, 23 nt, Human
uccacaaacucagaacaaaagca

SEQ ID NO: 937079 - RNA, 18 nt, Human
uccacaagaucucaccca

SEQ ID NO: 937080 - RNA, 19 nt, Human
uccacaagaucucacccau

SEQ ID NO: 937081 - RNA, 18 nt, Human
uccacacuacugcaccau

SEQ ID NO: 937082 - RNA, 22 nt, Human
uccacacuacugcaccaugguu

SEQ ID NO: 937083 - RNA, 19 nt, Human
uccaccacaaccccaugcc

SEQ ID NO: 937084 - RNA, 24 nt, Human
uccaccacaaccccaugccuuacc

SEQ ID NO: 937085 - RNA, 21 nt, Human
uccacuccacacuacugcacc

SEQ ID NO: 937086 - RNA, 20 nt, Human
ucccaaggcagugagguacc

SEQ ID NO: 937087 - RNA, 21 nt, Human
ucccagaagaacuggcaucag

SEQ ID NO: 937088 - RNA, 19 nt, Human
ucccagggugggagcuuuu

SEQ ID NO: 937089 - RNA, 18 nt, Human
ucccccagacugcuucuc

SEQ ID NO: 937090 - RNA, 20 nt, Human
ucccccagacugcuucuccc

SEQ ID NO: 937091 - RNA, 22 nt, Human
ucccccgcccccuucuuuuuga

SEQ ID NO: 937092 - RNA, 21 nt, Human
ucccugcaguuccacccccuc

SEQ ID NO: 937093 - RNA, 19 nt, Human
ucccugcuguucagucuau

SEQ ID NO: 937094 - RNA, 26 nt, Human
ucccuggaguugagcgggaaccuugg

SEQ ID NO: 937095 - RNA, 21 nt, Human
ucccuggggauccuggcccag

SEQ ID NO: 937096 - RNA, 20 nt, Human
uccuaauagugcccccucca

SEQ ID NO: 937097 - RNA, 22 nt, Human
uccuaugacccuuucuccucca

SEQ ID NO: 937098 - RNA, 23 nt, Human
uccugcuuuagagaaugguuggg

SEQ ID NO: 937099 - RNA, 21 nt, Human
uccuggggagcugggaaugug

SEQ ID NO: 937100 - RNA, 21 nt, Human
uccuugcaucuuccccaaaca

SEQ ID NO: 937101 - RNA, 23 nt, Human
uccuuguuuuacuuggcugugau

SEQ ID NO: 937102 - RNA, 24 nt, Human
uccuuguuuuacuuggcugugauu

SEQ ID NO: 937103 - RNA, 19 nt, Human
uccuuuagaaugcuggaag

SEQ ID NO: 937104 - RNA, 20 nt, Human
ucuaaagcuccauggacucc

SEQ ID NO: 937105 - RNA, 19 nt, Human
ucuagaggcccaaggaccu

SEQ ID NO: 937106 - RNA, 18 nt, Human
ucuauggcaaagcagcug

SEQ ID NO: 937107 - RNA, 27 nt, Human
ucucaccacccagagcaguucucagau

SEQ ID NO: 937108 - RNA, 20 nt, Human
ucucccugcuguucagucua

SEQ ID NO: 937109 - RNA, 23 nt, Human
ucuccuccacuccuaaggagaag

SEQ ID NO: 937110 - RNA, 19 nt, Human
ucucuucuggaggugggca

SEQ ID NO: 937111 - RNA, 19 nt, Human
ucugcugaguacagcugug

SEQ ID NO: 937112 - RNA, 20 nt, Human
ucuggggcuagaccagccuu

SEQ ID NO: 937113 - RNA, 24 nt, Human
ucuguagugagaaaaaaccggggc

SEQ ID NO: 937114 - RNA, 19 nt, Human
ucuguccaccacaacccca

SEQ ID NO: 937115 - RNA, 18 nt, Human
ucuguugguuccuuugca

SEQ ID NO: 937116 - RNA, 22 nt, Human
ucuucaggcucacccaucucuc

SEQ ID NO: 937117 - RNA, 22 nt, Human
ucuuccagaauguuacuccugg

SEQ ID NO: 937118 - RNA, 19 nt, Human
ucuugaauucucugccccu

SEQ ID NO: 937119 - RNA, 23 nt, Human
ucuugggcucacccaugucuucc

SEQ ID NO: 937120 - RNA, 24 nt, Human
ugaaaggaaaagaggcagccccau

SEQ ID NO: 937121 - RNA, 18 nt, Human
ugaaauauucauagaguc

SEQ ID NO: 937122 - RNA, 20 nt, Human
ugaaaugugugcacuggaaa

SEQ ID NO: 937123 - RNA, 19 nt, Human
ugaacagaacagaacaaca

SEQ ID NO: 937124 - RNA, 22 nt, Human
ugaaugcccuuugaugaccuuu

SEQ ID NO: 937125 - RNA, 23 nt, Human
ugaccacacaaaaaagcaaagaa

SEQ ID NO: 937126 - RNA, 23 nt, Human
ugacccccaagagccucaaucuu

SEQ ID NO: 937127 - RNA, 20 nt, Human
ugaccuguuuacccagccca

SEQ ID NO: 937128 - RNA, 23 nt, Human
ugacguaucuguuccacucuagu

SEQ ID NO: 937129 - RNA, 20 nt, Human
ugacuuaggaacagcguccu

SEQ ID NO: 937130 - RNA, 22 nt, Human
ugacuucauccaagaaucugca

SEQ ID NO: 937131 - RNA, 19 nt, Human
ugagaugggcagcuuaucc

SEQ ID NO: 937132 - RNA, 23 nt, Human
ugagcucuguccaccacaacccc

SEQ ID NO: 937133 - RNA, 24 nt, Human
ugaggaacagagcacauuuuuuuu

SEQ ID NO: 937134 - RNA, 18 nt, Human
ugagguaagagcuccugu

SEQ ID NO: 937135 - RNA, 23 nt, Human
ugagugcaucucucuaaagcucc

SEQ ID NO: 937136 - RNA, 19 nt, Human
ugaguggauuucaguuggu

SEQ ID NO: 937137 - RNA, 20 nt, Human
ugaguggauuucaguuggug

SEQ ID NO: 937138 - RNA, 20 nt, Human
ugaucucuacaagacaucuc

SEQ ID NO: 937139 - RNA, 23 nt, Human
ugaugaccuguuuacccagccca

SEQ ID NO: 937140 - RNA, 21 nt, Human
ugcaaguuuguuucucccuga

SEQ ID NO: 937141 - RNA, 22 nt, Human
ugcaggccauugggauucaugg

SEQ ID NO: 937142 - RNA, 21 nt, Human
ugcagguuaggugugaggaug

SEQ ID NO: 937143 - RNA, 21 nt, Human
ugcaucuuccccaaacagagc

SEQ ID NO: 937144 - RNA, 20 nt, Human
ugccacauccuugucccaug

SEQ ID NO: 937145 - RNA, 23 nt, Human
ugccaggaaaaaauaaaaggccc

SEQ ID NO: 937146 - RNA, 23 nt, Human
ugccauuaccugccccuuuggaa

SEQ ID NO: 937147 - RNA, 22 nt, Human
ugcccaguggaugugaagaugu

SEQ ID NO: 937148 - RNA, 19 nt, Human
ugccccagggagguggucc

SEQ ID NO: 937149 - RNA, 18 nt, Human
ugccugaccccucagaag

SEQ ID NO: 937150 - RNA, 23 nt, Human
ugcucagugggggcacuugggug

SEQ ID NO: 937151 - RNA, 24 nt, Human
ugcucagugggggcacuugggugg

SEQ ID NO: 937152 - RNA, 23 nt, Human
ugcucucaugagagaucuacaug

SEQ ID NO: 937153 - RNA, 18 nt, Human
uggaaaauaaucaaaucu

SEQ ID NO: 937154 - RNA, 24 nt, Human
uggaagcaacuuuugucggcuccu

SEQ ID NO: 937155 - RNA, 19 nt, Human
uggaaugacaccacucugc

SEQ ID NO: 937156 - RNA, 19 nt, Human
uggaauggaagugaccuga

SEQ ID NO: 937157 - RNA, 21 nt, Human
uggaauggaagugaccugaaa

SEQ ID NO: 937158 - RNA, 27 nt, Human
uggaauggaagugaccugaaauccauu

SEQ ID NO: 937159 - RNA, 20 nt, Human
uggaggugggcaggugggau

SEQ ID NO: 937160 - RNA, 21 nt, Human
uggaggugggcaggugggaug

SEQ ID NO: 937161 - RNA, 19 nt, Human
uggauuuacuuuuccuauu

SEQ ID NO: 937162 - RNA, 18 nt, Human
uggcaauggggaguggag

SEQ ID NO: 937163 - RNA, 22 nt, Human
uggcagacagcagguucuuccu

SEQ ID NO: 937164 - RNA, 18 nt, Human
uggcuccgcucgggcucc

SEQ ID NO: 937165 - RNA, 23 nt, Human
uggcucugggaggcagcaggguc

SEQ ID NO: 937166 - RNA, 18 nt, Human
ugggauagcuugugaggg

SEQ ID NO: 937167 - RNA, 23 nt, Human
uggggcuagaccagccuucaaga

SEQ ID NO: 937168 - RNA, 21 nt, Human
ugggggaaaucaucacuggcc

SEQ ID NO: 937169 - RNA, 21 nt, Human
uggggguggguccccgggguc

SEQ ID NO: 937170 - RNA, 19 nt, Human
uggguuccaguuuccuggc

SEQ ID NO: 937171 - RNA, 22 nt, Human
ugguagaggccacaacucuuug

SEQ ID NO: 937172 - RNA, 24 nt, Human
uggugaggacuuacagcaagagcu

SEQ ID NO: 937173 - RNA, 24 nt, Human
uguauacauggaaaaccuccaaca

SEQ ID NO: 937174 - RNA, 23 nt, Human
uguauucauaagcccaaaggcac

SEQ ID NO: 937175 - RNA, 19 nt, Human
ugucacagaagugaccauu

SEQ ID NO: 937176 - RNA, 21 nt, Human
ugucccuggacuucuggacag

SEQ ID NO: 937177 - RNA, 23 nt, Human
uguggcuaggguaaagugaggag

SEQ ID NO: 937178 - RNA, 21 nt, Human
ugugucagaagaaacuggagg

SEQ ID NO: 937179 - RNA, 19 nt, Human
uguuguuugcuuugagcuu

SEQ ID NO: 937180 - RNA, 22 nt, Human
uuaaaaccaacaaggcuaaauc

SEQ ID NO: 937181 - RNA, 23 nt, Human
uuacuggacugauaccucuaugu

SEQ ID NO: 937182 - RNA, 20 nt, Human
uuagauaucucugcugugcu

SEQ ID NO: 937183 - RNA, 23 nt, Human
uuauaugcccaguggaugugaag

SEQ ID NO: 937184 - RNA, 20 nt, Human
uucaguuggugaaugcccuu

SEQ ID NO: 937185 - RNA, 18 nt, Human
uuccaaagaaagcuacca

SEQ ID NO: 937186 - RNA, 21 nt, Human
uuccaaagaaagcuaccacca

SEQ ID NO: 937187 - RNA, 21 nt, Human
uuccuaauagugcccccucca

SEQ ID NO: 937188 - RNA, 23 nt, Human
uuccuauuuccuuguuuuacuug

SEQ ID NO: 937189 - RNA, 21 nt, Human
uuccuggccuugcguuccugu

SEQ ID NO: 937190 - RNA, 23 nt, Human
uuccugggcuucucauuacuucc

SEQ ID NO: 937191 - RNA, 22 nt, Human
uuccuggggagcugggaaugug

SEQ ID NO: 937192 - RNA, 19 nt, Human
uuccuugcaucuuccccaa

SEQ ID NO: 937193 - RNA, 20 nt, Human
uucucauagaaucugagucu

SEQ ID NO: 937194 - RNA, 23 nt, Human
uucucauagaaucugagucucau

SEQ ID NO: 937195 - RNA, 24 nt, Human
uucuuuaggaaggaguucaaauuu

SEQ ID NO: 937196 - RNA, 22 nt, Human
uugagggccaaagcuguaccuu

SEQ ID NO: 937197 - RNA, 25 nt, Human
uugaugaccuuuucccaucucuucu

SEQ ID NO: 937198 - RNA, 23 nt, Human
uugcaggcuggggaaggccagcu

SEQ ID NO: 937199 - RNA, 20 nt, Human
uugcuggguuaccccaacau

SEQ ID NO: 937200 - RNA, 21 nt, Human
uuggucucaugcaauauuaua

SEQ ID NO: 937201 - RNA, 24 nt, Human
uugguucccucucauugacucacu

SEQ ID NO: 937202 - RNA, 22 nt, Human
uuucaagguggcugcuggguug

SEQ ID NO: 937203 - RNA, 22 nt, Human
uuugccugaguuuccuuuuuuu

SEQ ID NO: 937204 - RNA, 24 nt, Human
aaaaaagcacugguccuaccucuu

SEQ ID NO: 937205 - RNA, 24 nt, Human
aaaaaagcacugguccuaccucuu

SEQ ID NO: 937206 - RNA, 19 nt, Human
aaaagaaacaaaaaagcac

SEQ ID NO: 937207 - RNA, 19 nt, Human
aaaagaaacaaaaaagcac

SEQ ID NO: 937208 - RNA, 21 nt, Human
aaagaaacaaaaaagcacugg

SEQ ID NO: 937209 - RNA, 21 nt, Human
aaagaaacaaaaaagcacugg

SEQ ID NO: 937210 - RNA, 23 nt, Human
aacaaaaaagcacugguccuacc

SEQ ID NO: 937211 - RNA, 23 nt, Human
aacaaaaaagcacugguccuacc

SEQ ID NO: 937212 - RNA, 26 nt, Human
aagaaacaaaaaagcacugguccuac

SEQ ID NO: 937213 - RNA, 26 nt, Human
aagaaacaaaaaagcacugguccuac

SEQ ID NO: 937214 - RNA, 23 nt, Human
aagucccaguacauccucuaccc

SEQ ID NO: 937215 - RNA, 19 nt, Human
acaaacaucagcuuaugcc

SEQ ID NO: 937216 - RNA, 19 nt, Human
acaaacaucagcuuaugcc

SEQ ID NO: 937217 - RNA, 22 nt, Human
acaaacaucagcuuaugccucc

SEQ ID NO: 937218 - RNA, 22 nt, Human
acaaacaucagcuuaugccucc

SEQ ID NO: 937219 - RNA, 23 nt, Human
acaagcgaaaggcccugcccaca

SEQ ID NO: 937220 - RNA, 21 nt, Human
acuccagaggguaugaccagc

SEQ ID NO: 937221 - RNA, 21 nt, Human
acuccagaggguaugaccagc

SEQ ID NO: 937222 - RNA, 20 nt, Human
agaccuucccacccacccaa

SEQ ID NO: 937223 - RNA, 24 nt, Human
agcccgagccggagcggagcggcg

SEQ ID NO: 937224 - RNA, 24 nt, Human
agcccgaggcgagccggagcccga

SEQ ID NO: 937225 - RNA, 18 nt, Human
aggaagaggggggcgagg

SEQ ID NO: 937226 - RNA, 19 nt, Human
aggaagaggggggcgaggg

SEQ ID NO: 937227 - RNA, 25 nt, Human
aggcagcaccaggccucucagcaca

SEQ ID NO: 937228 - RNA, 19 nt, Human
aggcugagugggaaccuug

SEQ ID NO: 937229 - RNA, 30 nt, Human
aggggcugcagggggcaguggggaggaggg

SEQ ID NO: 937230 - RNA, 23 nt, Human
aggggcuguuguucagccuugca

SEQ ID NO: 937231 - RNA, 21 nt, Human
auaucucaggggcugcagggg

SEQ ID NO: 937232 - RNA, 19 nt, Human
aucagcuuaugccucccca

SEQ ID NO: 937233 - RNA, 19 nt, Human
aucagcuuaugccucccca

SEQ ID NO: 937234 - RNA, 22 nt, Human
auggugccaaggggcuuggccu

SEQ ID NO: 937235 - RNA, 25 nt, Human
caaaaaagcacugguccuaccucuu

SEQ ID NO: 937236 - RNA, 24 nt, Human
caaaaauaacaaaagaaacaaaaa

SEQ ID NO: 937237 - RNA, 24 nt, Human
caaaaauaacaaaagaaacaaaaa

SEQ ID NO: 937238 - RNA, 19 nt, Human
caaaagaaacaaaaaagca

SEQ ID NO: 937239 - RNA, 20 nt, Human
caaggggcuuggccugaguc

SEQ ID NO: 937240 - RNA, 21 nt, Human
caaguggggagggauagugag

SEQ ID NO: 937241 - RNA, 21 nt, Human
cacagcccccugcgagguagg

SEQ ID NO: 937242 - RNA, 21 nt, Human
cacagcccccugcgagguagg

SEQ ID NO: 937243 - RNA, 18 nt, Human
cacauaucagggaagcaa

SEQ ID NO: 937244 - RNA, 24 nt, Human
caccaggccucucagcacaggccu

SEQ ID NO: 937245 - RNA, 25 nt, Human
cagcccgaggcgagccggagcccga

SEQ ID NO: 937246 - RNA, 19 nt, Human
caggaccuucaggggcugg

SEQ ID NO: 937247 - RNA, 18 nt, Human
caggagccacaggggccu

SEQ ID NO: 937248 - RNA, 18 nt, Human
cagugggugccccaggcc

SEQ ID NO: 937249 - RNA, 21 nt, Human
ccacccaaccaaaaauaacaa

SEQ ID NO: 937250 - RNA, 25 nt, Human
ccacccacccacccaaaaauaacaa

SEQ ID NO: 937251 - RNA, 19 nt, Human
cccaaaaauaacaaaagaa

SEQ ID NO: 937252 - RNA, 20 nt, Human
cccaaaaauaacaaaagaaa

SEQ ID NO: 937253 - RNA, 20 nt, Human
cccaaccaaaaauaacaaaa

SEQ ID NO: 937254 - RNA, 18 nt, Human
cccacaugcagagggggc

SEQ ID NO: 937255 - RNA, 23 nt, Human
cccacccaaaaauaacaaaagaa

SEQ ID NO: 937256 - RNA, 25 nt, Human
cccacccaaccaaaaauaacaaaag

SEQ ID NO: 937257 - RNA, 25 nt, Human
cccacccacccaaaaauaacaaaag

SEQ ID NO: 937258 - RNA, 18 nt, Human
ccccagagccagccgucc

SEQ ID NO: 937259 - RNA, 27 nt, Human
ccccaggaccuucaggggcugggccag

SEQ ID NO: 937260 - RNA, 19 nt, Human
cccccagagccagccgucc

SEQ ID NO: 937261 - RNA, 19 nt, Human
cccccggagcccgagccca

SEQ ID NO: 937262 - RNA, 23 nt, Human
cccccggagcccgagcccagccc

SEQ ID NO: 937263 - RNA, 21 nt, Human
ccccggagcccgagcccagcc

SEQ ID NO: 937264 - RNA, 22 nt, Human
cccugcucuaacacugccccuc

SEQ ID NO: 937265 - RNA, 22 nt, Human
cccugcucuaacacugccccuc

SEQ ID NO: 937266 - RNA, 21 nt, Human
cccuggggaggacagucagug

SEQ ID NO: 937267 - RNA, 19 nt, Human
ccgucccggggcccggcgg

SEQ ID NO: 937268 - RNA, 21 nt, Human
ccuccccacagcccccugcga

SEQ ID NO: 937269 - RNA, 21 nt, Human
ccuccccacagcccccugcga

SEQ ID NO: 937270 - RNA, 23 nt, Human
ccucugaacuccagaggguauga

SEQ ID NO: 937271 - RNA, 23 nt, Human
ccucugaacuccagaggguauga

SEQ ID NO: 937272 - RNA, 22 nt, Human
ccugaccaggagcacaggggcc

SEQ ID NO: 937273 - RNA, 19 nt, Human
ccugcccacaguggaaggg

SEQ ID NO: 937274 - RNA, 20 nt, Human
ccuggggaggacagucagug

SEQ ID NO: 937275 - RNA, 24 nt, Human
ccuucccacccacccacccaaaaa

SEQ ID NO: 937276 - RNA, 19 nt, Human
cgagccggagcccgagccg

SEQ ID NO: 937277 - RNA, 18 nt, Human
cgagccggagcggagcgg

SEQ ID NO: 937278 - RNA, 20 nt, Human
cggagcggcgcggcgcggag

SEQ ID NO: 937279 - RNA, 21 nt, Human
cggagcggcgcggcgcggagc

SEQ ID NO: 937280 - RNA, 22 nt, Human
cgggcagccugaccaggagcac

SEQ ID NO: 937281 - RNA, 21 nt, Human
cgucccggggcccggcggcgg

SEQ ID NO: 937282 - RNA, 24 nt, Human
cguuuauuuacaaagcgcuuuaca

SEQ ID NO: 937283 - RNA, 19 nt, Human
cucacucaucccugccaaa

SEQ ID NO: 937284 - RNA, 20 nt, Human
cuccagugcuugccccaugg

SEQ ID NO: 937285 - RNA, 21 nt, Human
cuccccacagcccccugcgag

SEQ ID NO: 937286 - RNA, 21 nt, Human
cuccccacagcccccugcgag

SEQ ID NO: 937287 - RNA, 24 nt, Human
cucucugcagggccucacucaucc

SEQ ID NO: 937288 - RNA, 18 nt, Human
cugcaacagugggucagg

SEQ ID NO: 937289 - RNA, 24 nt, Human
cugccccuccccacaacgggcagc

SEQ ID NO: 937290 - RNA, 24 nt, Human
cugccccuccccacaacgggcagc

SEQ ID NO: 937291 - RNA, 21 nt, Human
cuggcccugagugugcagugg

SEQ ID NO: 937292 - RNA, 21 nt, Human
cugguccuaccucuuccucug

SEQ ID NO: 937293 - RNA, 21 nt, Human
cugguccuaccucuuccucug

SEQ ID NO: 937294 - RNA, 24 nt, Human
cuugcuaagcuccuccuuggccca

SEQ ID NO: 937295 - RNA, 23 nt, Human
gaauggggguguggccugcccca

SEQ ID NO: 937296 - RNA, 23 nt, Human
gaauggggguguggccugcccca

SEQ ID NO: 937297 - RNA, 21 nt, Human
gaccugcuuccccaggaccuu

SEQ ID NO: 937298 - RNA, 21 nt, Human
gagaccuucccacccacccaa

SEQ ID NO: 937299 - RNA, 23 nt, Human
gagcaagauagcccagcauccac

SEQ ID NO: 937300 - RNA, 20 nt, Human
gagccggagcccgagccgga

SEQ ID NO: 937301 - RNA, 26 nt, Human
gagccggagcggagcggcgcggcgcg

SEQ ID NO: 937302 - RNA, 22 nt, Human
gagcgggacuggcgcccggaau

SEQ ID NO: 937303 - RNA, 21 nt, Human
gaggcacggaaugggggugug

SEQ ID NO: 937304 - RNA, 21 nt, Human
gaggcacggaaugggggugug

SEQ ID NO: 937305 - RNA, 19 nt, Human
gcacagcaguaauaggcag

SEQ ID NO: 937306 - RNA, 21 nt, Human
gcagugggugccccaggccag

SEQ ID NO: 937307 - RNA, 26 nt, Human
gcagugggugccccaggccagggccc

SEQ ID NO: 937308 - RNA, 23 nt, Human
gcccgagccggagcggagcggcg

SEQ ID NO: 937309 - RNA, 18 nt, Human
gccucacucaucccugcc

SEQ ID NO: 937310 - RNA, 20 nt, Human
gccugaccaggagcacaggg

SEQ ID NO: 937311 - RNA, 18 nt, Human
gccugagucccccagagc

SEQ ID NO: 937312 - RNA, 20 nt, Human
ggaguguguuugggcagagc

SEQ ID NO: 937313 - RNA, 18 nt, Human
ggcaggcugagugggaac

SEQ ID NO: 937314 - RNA, 18 nt, Human
ggcugagugggaaccuug

SEQ ID NO: 937315 - RNA, 18 nt, Human
gggaaccuuggccuggga

SEQ ID NO: 937316 - RNA, 18 nt, Human
gggagggauagugagcaa

SEQ ID NO: 937317 - RNA, 19 nt, Human
gggcacagcaguaauaggc

SEQ ID NO: 937318 - RNA, 21 nt, Human
gggcacagcaguaauaggcag

SEQ ID NO: 937319 - RNA, 26 nt, Human
gggcaggcugagugggaaccuuggcc

SEQ ID NO: 937320 - RNA, 19 nt, Human
gguccuaccucuuccucug

SEQ ID NO: 937321 - RNA, 19 nt, Human
gguccuaccucuuccucug

SEQ ID NO: 937322 - RNA, 23 nt, Human
gguggggcugggcugcagacuug

SEQ ID NO: 937323 - RNA, 18 nt, Human
gucaguagucauaucuac

SEQ ID NO: 937324 - RNA, 18 nt, Human
gucaguagucauaucuac

SEQ ID NO: 937325 - RNA, 23 nt, Human
guuuauuuacaaagcgcuuuaca

SEQ ID NO: 937326 - RNA, 19 nt, Human
uaacaaaagaaacaaaaaa

SEQ ID NO: 937327 - RNA, 19 nt, Human
uaacaaaagaaacaaaaaa

SEQ ID NO: 937328 - RNA, 22 nt, Human
uaacaaaagaaacaaaaaagca

SEQ ID NO: 937329 - RNA, 22 nt, Human
uaacaaaagaaacaaaaaagca

SEQ ID NO: 937330 - RNA, 23 nt, Human
uaacaaaagaaacaaaaaagcac

SEQ ID NO: 937331 - RNA, 23 nt, Human
uaacaaaagaaacaaaaaagcac

SEQ ID NO: 937332 - RNA, 25 nt, Human
uacaaagcgcuuuacaaacaucagc

SEQ ID NO: 937333 - RNA, 25 nt, Human
uacaaagcgcuuuacaaacaucagc

SEQ ID NO: 937334 - RNA, 23 nt, Human
uacaguuuacagauggggaaauu

SEQ ID NO: 937335 - RNA, 23 nt, Human
uacaguuuacagauggggaaauu

SEQ ID NO: 937336 - RNA, 24 nt, Human
ucagagcacauaucagggaagcaa

SEQ ID NO: 937337 - RNA, 22 nt, Human
ucagggaagcaaguggggaggg

SEQ ID NO: 937338 - RNA, 18 nt, Human
ucccacccacccaaccaa

SEQ ID NO: 937339 - RNA, 22 nt, Human
uccccaggaccuucaggggcug

SEQ ID NO: 937340 - RNA, 23 nt, Human
uccccaggaccuucaggggcugg

SEQ ID NO: 937341 - RNA, 24 nt, Human
uccccaggaccuucaggggcuggg

SEQ ID NO: 937342 - RNA, 20 nt, Human
ucccccagagccagccgucc

SEQ ID NO: 937343 - RNA, 19 nt, Human
ucgccgcccgucccggggc

SEQ ID NO: 937344 - RNA, 23 nt, Human
ucuaacacugccccuccccacaa

SEQ ID NO: 937345 - RNA, 23 nt, Human
ucuaacacugccccuccccacaa

SEQ ID NO: 937346 - RNA, 22 nt, Human
ucuuccucgccaguccaggaug

SEQ ID NO: 937347 - RNA, 18 nt, Human
ugagucccccagagccag

SEQ ID NO: 937348 - RNA, 23 nt, Human
ugcagagggggcaggcugagugg

SEQ ID NO: 937349 - RNA, 19 nt, Human
ugcagugggugccccaggc

SEQ ID NO: 937350 - RNA, 22 nt, Human
ugccaaaagccaggauggugcc

SEQ ID NO: 937351 - RNA, 20 nt, Human
ugccaaggggcuuggccuga

SEQ ID NO: 937352 - RNA, 21 nt, Human
ugccaagucccaguacauccu

SEQ ID NO: 937353 - RNA, 18 nt, Human
ugccccaggccagggccc

SEQ ID NO: 937354 - RNA, 19 nt, Human
ugccccauuuuaaagagac

SEQ ID NO: 937355 - RNA, 19 nt, Human
ugccccauuuuaaagagac

SEQ ID NO: 937356 - RNA, 21 nt, Human
uggaagggggagcaagauagc

SEQ ID NO: 937357 - RNA, 24 nt, Human
uggcauucagagagcacguuuauu

SEQ ID NO: 937358 - RNA, 24 nt, Human
uggcauucagagagcacguuuauu

SEQ ID NO: 937359 - RNA, 21 nt, Human
uggcccugagugugcaguggg

SEQ ID NO: 937360 - RNA, 21 nt, Human
uggccugagucccccagagcc

SEQ ID NO: 937361 - RNA, 19 nt, Human
ugggaguguguuugggcag

SEQ ID NO: 937362 - RNA, 19 nt, Human
ugggaugcucucugcaggg

SEQ ID NO: 937363 - RNA, 23 nt, Human
uggggaggacagucagugugccc

SEQ ID NO: 937364 - RNA, 23 nt, Human
uggggaggagggcgcugcaguuc

SEQ ID NO: 937365 - RNA, 24 nt, Human
uggggaggagggcgcugcaguucc

SEQ ID NO: 937366 - RNA, 19 nt, Human
ugggugccccaggccaggg

SEQ ID NO: 937367 - RNA, 20 nt, Human
uggugccaaggggcuuggcc

SEQ ID NO: 937368 - RNA, 19 nt, Human
ugucacuggcccaagcuga

SEQ ID NO: 937369 - RNA, 24 nt, Human
ugugcagugggugccccaggccag

SEQ ID NO: 937370 - RNA, 21 nt, Human
uuuaaagagaccuucccaccc

SEQ ID NO: 937371 - RNA, 21 nt, Human
uuuaaagagaccuucccaccc

SEQ ID NO: 937372 - RNA, 18 nt, Human
uuugggcagagcaggagg

SEQ ID NO: 937373 - RNA, 22 nt, Human
uuuuaaagagaccuucccaccc

SEQ ID NO: 937374 - RNA, 22 nt, Human
uuuuaaagagaccuucccaccc

SEQ ID NO: 937375 - RNA, 26 nt, Human
uuuuuuuuuuuggcauucagagagca

SEQ ID NO: 937376 - RNA, 26 nt, Human
uuuuuuuuuuuggcauucagagagca

SEQ ID NO: 937377 - RNA, 18 nt, Human
uuuuuuuuuuuuuuuuug

SEQ ID NO: 937378 - RNA, 18 nt, Human
uuuuuuuuuuuuuuuuug

SEQ ID NO: 937379 - RNA, 18 nt, Human
uuuuuuuuuuuuuuuuug

SEQ ID NO: 937380 - RNA, 23 nt, Human
uuuuuuuuuuuuuuuuuggcauu

SEQ ID NO: 937381 - RNA, 22 nt, Human
uuuuuuuuuuuuuuuuuuuggc

SEQ ID NO: 937382 - RNA, 22 nt, Human
uuuuuuuuuuuuuuuuuuuggc

SEQ ID NO: 937383 - RNA, 26 nt, Human
uuuuuuuuuuuuuuuuuuuuuugggg

SEQ ID NO: 937384 - RNA, 20 nt, Human
aagaaaucaauccaggcaac

SEQ ID NO: 937385 - RNA, 18 nt, Human
acgccgccagcugccucg

SEQ ID NO: 937386 - RNA, 23 nt, Human
acgccgcgcgccggcccgcgaac

SEQ ID NO: 937387 - RNA, 24 nt, Human
agcagcagcgccucgcuggccugc

SEQ ID NO: 937388 - RNA, 20 nt, Human
agccagccuccgaacggcga

SEQ ID NO: 937389 - RNA, 22 nt, Human
aguuacugacaugucagccuca

SEQ ID NO: 937390 - RNA, 24 nt, Human
auggcuaugggaagcaggugauac

SEQ ID NO: 937391 - RNA, 20 nt, Human
auuuaaagucuugccuguuc

SEQ ID NO: 937392 - RNA, 18 nt, Human
caagcgacauacucgaaa

SEQ ID NO: 937393 - RNA, 18 nt, Human
cagagcccuccaugcgac

SEQ ID NO: 937394 - RNA, 21 nt, Human
cagagcccuccaugcgacgcc

SEQ ID NO: 937395 - RNA, 24 nt, Human
cagcacggccccgcacgccgcgcg

SEQ ID NO: 937396 - RNA, 18 nt, Human
cagcagcgccucgcuggc

SEQ ID NO: 937397 - RNA, 18 nt, Human
ccaacuaacacguggagu

SEQ ID NO: 937398 - RNA, 24 nt, Human
cccaagacuuugcaaucuccauuu

SEQ ID NO: 937399 - RNA, 20 nt, Human
cccagcagguagagcgccag

SEQ ID NO: 937400 - RNA, 18 nt, Human
cccaugaagagcagcagc

SEQ ID NO: 937401 - RNA, 20 nt, Human
ccccgcacgccgcgcgccgg

SEQ ID NO: 937402 - RNA, 19 nt, Human
cccgcgaacgccccagccg

SEQ ID NO: 937403 - RNA, 22 nt, Human
cccgcucgcccgcaccgccccc

SEQ ID NO: 937404 - RNA, 19 nt, Human
ccgccgcccgccgcgcgcc

SEQ ID NO: 937405 - RNA, 19 nt, Human
ccgccgccgcccgccgcgc

SEQ ID NO: 937406 - RNA, 24 nt, Human
ccgccgccgcccgccgcgcgccca

SEQ ID NO: 937407 - RNA, 21 nt, Human
ccgccgccgcggccgccgccg

SEQ ID NO: 937408 - RNA, 24 nt, Human
ccgccgccgcggccgccgccgccc

SEQ ID NO: 937409 - RNA, 19 nt, Human
ccgcucgcccgcaccgccc

SEQ ID NO: 937410 - RNA, 21 nt, Human
ccggagggcccagcgugccag

SEQ ID NO: 937411 - RNA, 22 nt, Human
ccucagaaaccgcacauggccu

SEQ ID NO: 937412 - RNA, 22 nt, Human
ccucccagcagaacggcgcccc

SEQ ID NO: 937413 - RNA, 21 nt, Human
cggcccgcgaacgccccagcc

SEQ ID NO: 937414 - RNA, 19 nt, Human
cggccgccgccgcccgccg

SEQ ID NO: 937415 - RNA, 19 nt, Human
cuccagcagcuccgucagc

SEQ ID NO: 937416 - RNA, 18 nt, Human
cuccucccggagggccca

SEQ ID NO: 937417 - RNA, 20 nt, Human
cugcgcgcccucccagcaga

SEQ ID NO: 937418 - RNA, 22 nt, Human
gcagcagcgccucgcuggccug

SEQ ID NO: 937419 - RNA, 25 nt, Human
gcagcagcgccucgcuggccugcgc

SEQ ID NO: 937420 - RNA, 24 nt, Human
gcagcggcgcccgcucgcccgcac

SEQ ID NO: 937421 - RNA, 18 nt, Human
gccagcugccucgccccg

SEQ ID NO: 937422 - RNA, 19 nt, Human
gcccgcucgcccgcaccgc

SEQ ID NO: 937423 - RNA, 22 nt, Human
gcgcccucccagcagaacggcg

SEQ ID NO: 937424 - RNA, 19 nt, Human
ggcccaugaagagcagcag

SEQ ID NO: 937425 - RNA, 18 nt, Human
gggaacccagcuagagga

SEQ ID NO: 937426 - RNA, 20 nt, Human
gugaagucagacauuuuaug

SEQ ID NO: 937427 - RNA, 26 nt, Human
uaaguaacaguuuauuaauuuuuuuu

SEQ ID NO: 937428 - RNA, 24 nt, Human
uagagggaaagaagaaaucaaucc

SEQ ID NO: 937429 - RNA, 25 nt, Human
uauggcuaugggaagcaggugauac

SEQ ID NO: 937430 - RNA, 19 nt, Human
uccaugcgacgccgccagc

SEQ ID NO: 937431 - RNA, 21 nt, Human
uccaugcgacgccgccagcug

SEQ ID NO: 937432 - RNA, 19 nt, Human
ucccagcagaacggcgccc

SEQ ID NO: 937433 - RNA, 23 nt, Human
uccccaagacuuugcaaucucca

SEQ ID NO: 937434 - RNA, 21 nt, Human
ucgaaaucugcagcucuccuc

SEQ ID NO: 937435 - RNA, 21 nt, Human
ugacaagcgacauacucgaaa

SEQ ID NO: 937436 - RNA, 21 nt, Human
ugaguuucuguaaaaaaggga

SEQ ID NO: 937437 - RNA, 24 nt, Human
ugcaguaaggcacuuaccaagcuc

SEQ ID NO: 937438 - RNA, 18 nt, Human
ugccaggagacacgcugc

SEQ ID NO: 937439 - RNA, 22 nt, Human
ugccuguucucagugcacccca

SEQ ID NO: 937440 - RNA, 19 nt, Human
ugcgcgcccucccagcaga

SEQ ID NO: 937441 - RNA, 20 nt, Human
ugcgcgcccucccagcagaa

SEQ ID NO: 937442 - RNA, 22 nt, Human
uggccugcgcgcccucccagca

SEQ ID NO: 937443 - RNA, 21 nt, Human
uucacagagaccuugaaugac

SEQ ID NO: 937444 - RNA, 21 nt, Human
aaagcugcuuucacguccuuc

SEQ ID NO: 937445 - RNA, 19 nt, Human
aaagugcugggguuacagg

SEQ ID NO: 937446 - RNA, 23 nt, Human
aaagugcugggguuacaggcaua

SEQ ID NO: 937447 - RNA, 21 nt, Human
aaguagcugagaccacaggca

SEQ ID NO: 937448 - RNA, 25 nt, Human
aaguagcugagaccacaggcacgug

SEQ ID NO: 937449 - RNA, 22 nt, Human
aaguagcugggauuacaggcau

SEQ ID NO: 937450 - RNA, 24 nt, Human
aaguagcugggauuacaggcaugc

SEQ ID NO: 937451 - RNA, 21 nt, Human
aagugcugggguuacaggcau

SEQ ID NO: 937452 - RNA, 26 nt, Human
aagugcugggguuacaggcauaagcc

SEQ ID NO: 937453 - RNA, 21 nt, Human
acccaggcuggagugcagugu

SEQ ID NO: 937454 - RNA, 29 nt, Human
acccauuuccaccuucuccuauuuuccuu

SEQ ID NO: 937455 - RNA, 25 nt, Human
acccugcucucccuccuaacuccca

SEQ ID NO: 937456 - RNA, 18 nt, Human
acucugucacccaggcug

SEQ ID NO: 937457 - RNA, 25 nt, Human
acucugucacccaggcuggagugca

SEQ ID NO: 937458 - RNA, 19 nt, Human
acucuguugccuaggaugg

SEQ ID NO: 937459 - RNA, 19 nt, Human
acugcagccucaaacuccu

SEQ ID NO: 937460 - RNA, 25 nt, Human
acugccucaguuucccccaaaagcu

SEQ ID NO: 937461 - RNA, 18 nt, Human
agccuccaaaguagcugg

SEQ ID NO: 937462 - RNA, 24 nt, Human
aggcacccucauagcucacugcag

SEQ ID NO: 937463 - RNA, 18 nt, Human
aggcauaagccaccaagc

SEQ ID NO: 937464 - RNA, 21 nt, Human
aggcauaagccaccaagcccg

SEQ ID NO: 937465 - RNA, 21 nt, Human
agggaaggagcuugagaagaa

SEQ ID NO: 937466 - RNA, 24 nt, Human
aggugauccgcccaccucggccuc

SEQ ID NO: 937467 - RNA, 18 nt, Human
agugcagugucgcgaccu

SEQ ID NO: 937468 - RNA, 20 nt, Human
agugcagugucgcgaccuug

SEQ ID NO: 937469 - RNA, 24 nt, Human
agugcagugucgcgaccuuggcuc

SEQ ID NO: 937470 - RNA, 18 nt, Human
auagcucacugcagccuc

SEQ ID NO: 937471 - RNA, 21 nt, Human
auguucucuccccaccucccc

SEQ ID NO: 937472 - RNA, 24 nt, Human
auuuuccuuuuuuuuccuucuguu

SEQ ID NO: 937473 - RNA, 24 nt, Human
auuuuuguaauuuuaguagagaug

SEQ ID NO: 937474 - RNA, 25 nt, Human
caaacuccugggcucuggcgauccu

SEQ ID NO: 937475 - RNA, 22 nt, Human
caaaguagcugggauuacaggc

SEQ ID NO: 937476 - RNA, 24 nt, Human
caaaguagcugggauuacaggcau

SEQ ID NO: 937477 - RNA, 24 nt, Human
caaagugcugggguuacaggcaua

SEQ ID NO: 937478 - RNA, 23 nt, Human
caaccuccaccucccagguucaa

SEQ ID NO: 937479 - RNA, 21 nt, Human
caccaagcccggccgaccuuc

SEQ ID NO: 937480 - RNA, 22 nt, Human
cacccugcucucccuccuaacu

SEQ ID NO: 937481 - RNA, 24 nt, Human
caccucagccuccaaaguagcugg

SEQ ID NO: 937482 - RNA, 24 nt, Human
caccucggccucccaaagugcugg

SEQ ID NO: 937483 - RNA, 23 nt, Human
cacucugucacccaggcuggagu

SEQ ID NO: 937484 - RNA, 24 nt, Human
cacucugucacccaggcuggagug

SEQ ID NO: 937485 - RNA, 21 nt, Human
cacugcaaccuccaccuccca

SEQ ID NO: 937486 - RNA, 23 nt, Human
cagccucaaacuccugggcucug

SEQ ID NO: 937487 - RNA, 21 nt, Human
caugcccagcuaauuuuugua

SEQ ID NO: 937488 - RNA, 23 nt, Human
cauuugagggaucggguggggcu

SEQ ID NO: 937489 - RNA, 25 nt, Human
ccaaagccauggccaugcgcuccug

SEQ ID NO: 937490 - RNA, 19 nt, Human
ccaaaguagcugggauuac

SEQ ID NO: 937491 - RNA, 20 nt, Human
ccaaaguagcugggauuaca

SEQ ID NO: 937492 - RNA, 23 nt, Human
ccaaaguagcugggauuacaggc

SEQ ID NO: 937493 - RNA, 24 nt, Human
ccaaaguagcugggauuacaggca

SEQ ID NO: 937494 - RNA, 25 nt, Human
ccaaaguagcugggauuacaggcau

SEQ ID NO: 937495 - RNA, 23 nt, Human
ccaaagugcugggguuacaggca

SEQ ID NO: 937496 - RNA, 24 nt, Human
ccaaagugcugggguuacaggcau

SEQ ID NO: 937497 - RNA, 24 nt, Human
ccaagcgggggcuguccacugcgg

SEQ ID NO: 937498 - RNA, 18 nt, Human
ccaccccuccuucccagg

SEQ ID NO: 937499 - RNA, 26 nt, Human
ccaccucccagguucaagcaauucuu

SEQ ID NO: 937500 - RNA, 25 nt, Human
ccaccuccccuccagcucucaacuu

SEQ ID NO: 937501 - RNA, 22 nt, Human
ccagcgccgcugcguccuccuc

SEQ ID NO: 937502 - RNA, 22 nt, Human
ccaggagugaaccagggcuggc

SEQ ID NO: 937503 - RNA, 24 nt, Human
cccaaagugcugggguuacaggca

SEQ ID NO: 937504 - RNA, 21 nt, Human
cccagccugcugcugcccccu

SEQ ID NO: 937505 - RNA, 24 nt, Human
ccccaccucagccuccaaaguagc

SEQ ID NO: 937506 - RNA, 23 nt, Human
cccccaaaagcugcuuucacguc

SEQ ID NO: 937507 - RNA, 19 nt, Human
cccccagccagggugaggg

SEQ ID NO: 937508 - RNA, 20 nt, Human
cccccagccagggugagggc

SEQ ID NO: 937509 - RNA, 22 nt, Human
cccccagccagggugagggcuc

SEQ ID NO: 937510 - RNA, 22 nt, Human
cccccuucugggacccuaauuu

SEQ ID NO: 937511 - RNA, 24 nt, Human
cccucacaugcaugucguucccca

SEQ ID NO: 937512 - RNA, 20 nt, Human
cccuucccauuccacucgga

SEQ ID NO: 937513 - RNA, 23 nt, Human
ccuaggauggagcacagaggcac

SEQ ID NO: 937514 - RNA, 24 nt, Human
ccucccagguucaagcaauucucc

SEQ ID NO: 937515 - RNA, 24 nt, Human
ccuccuucccagggcuucucuugg

SEQ ID NO: 937516 - RNA, 25 nt, Human
ccuccuucccagggcuucucuuggg

SEQ ID NO: 937517 - RNA, 27 nt, Human
ccucgcccagcuccucgcccuccuucu

SEQ ID NO: 937518 - RNA, 24 nt, Human
ccugaccucaggugauccgcccac

SEQ ID NO: 937519 - RNA, 18 nt, Human
ccugcugcugcccccuuc

SEQ ID NO: 937520 - RNA, 22 nt, Human
ccugggcucuggcgauccuccc

SEQ ID NO: 937521 - RNA, 24 nt, Human
cgccucagccucccaaguagcuga

SEQ ID NO: 937522 - RNA, 24 nt, Human
cgccuccgacucuuucagcgauuu

SEQ ID NO: 937523 - RNA, 21 nt, Human
cggaaugacagcagcugggug

SEQ ID NO: 937524 - RNA, 24 nt, Human
cucaauaaccuccucaaccuccac

SEQ ID NO: 937525 - RNA, 24 nt, Human
cucacucugucacccaggcuggag

SEQ ID NO: 937526 - RNA, 24 nt, Human
cucacugcaaccuccaccucccag

SEQ ID NO: 937527 - RNA, 21 nt, Human
cucacugcagccucaaacucc

SEQ ID NO: 937528 - RNA, 24 nt, Human
cucacugcagccucaaacuccugg

SEQ ID NO: 937529 - RNA, 24 nt, Human
cucagccuccaaaguagcugggau

SEQ ID NO: 937530 - RNA, 21 nt, Human
cucccaaguagcugagaccac

SEQ ID NO: 937531 - RNA, 26 nt, Human
cuccccaccucagccuccaaaguagc

SEQ ID NO: 937532 - RNA, 23 nt, Human
cuccugggcucuggcgauccucc

SEQ ID NO: 937533 - RNA, 25 nt, Human
cucuccccaccuccccuccagcucu

SEQ ID NO: 937534 - RNA, 25 nt, Human
cucuccccaccuccccuccagcucu

SEQ ID NO: 937535 - RNA, 18 nt, Human
cucugcgcgggacuccuc

SEQ ID NO: 937536 - RNA, 19 nt, Human
cucugucuuccccacugcc

SEQ ID NO: 937537 - RNA, 23 nt, Human
cugcaaccuccaccucccagguu

SEQ ID NO: 937538 - RNA, 24 nt, Human
cugcaaccuccaccucccagguuc

SEQ ID NO: 937539 - RNA, 23 nt, Human
cugcagccucaaacuccugggcu

SEQ ID NO: 937540 - RNA, 21 nt, Human
cugccaggagugaaccagggc

SEQ ID NO: 937541 - RNA, 19 nt, Human
cugcccccuucugggaccc

SEQ ID NO: 937542 - RNA, 19 nt, Human
cugcccccuucugggaccc

SEQ ID NO: 937543 - RNA, 27 nt, Human
cuggcgauccucccgccucagccuccc

SEQ ID NO: 937544 - RNA, 20 nt, Human
cuggcugcucugugauguuc

SEQ ID NO: 937545 - RNA, 19 nt, Human
cugucacccaggcuggagu

SEQ ID NO: 937546 - RNA, 20 nt, Human
cuuaguagagaugggguguu

SEQ ID NO: 937547 - RNA, 24 nt, Human
cuucuccuuggagaaggccuucuu

SEQ ID NO: 937548 - RNA, 21 nt, Human
cuuggagaaggccuucuugaa

SEQ ID NO: 937549 - RNA, 24 nt, Human
gaccucaggugauccgcccaccuc

SEQ ID NO: 937550 - RNA, 19 nt, Human
gaccuuggcucacugcaac

SEQ ID NO: 937551 - RNA, 18 nt, Human
gagaucccgacuuggaca

SEQ ID NO: 937552 - RNA, 24 nt, Human
gauuacaggcaugcgcaaucaugc

SEQ ID NO: 937553 - RNA, 22 nt, Human
gcaaccuccaccucccagguuc

SEQ ID NO: 937554 - RNA, 20 nt, Human
gccucagccucccaaguagc

SEQ ID NO: 937555 - RNA, 21 nt, Human
gccucccaugggggcaaggau

SEQ ID NO: 937556 - RNA, 24 nt, Human
gcgauccucccgccucagccuccc

SEQ ID NO: 937557 - RNA, 19 nt, Human
gcgccgcugcguccuccuc

SEQ ID NO: 937558 - RNA, 20 nt, Human
gcgggacuccucaauaaccu

SEQ ID NO: 937559 - RNA, 19 nt, Human
gcugaccucucugucuucu

SEQ ID NO: 937560 - RNA, 22 nt, Human
gcuggcugcucugugauguucu

SEQ ID NO: 937561 - RNA, 23 nt, Human
gcuggucccgaacuccugaccuc

SEQ ID NO: 937562 - RNA, 24 nt, Human
ggauuacaggcaugcgcaaucaug

SEQ ID NO: 937563 - RNA, 19 nt, Human
ggcaaggauccccuuuagg

SEQ ID NO: 937564 - RNA, 24 nt, Human
ggcuggucccgaacuccugaccuc

SEQ ID NO: 937565 - RNA, 20 nt, Human
gggagaggcugaggggaagg

SEQ ID NO: 937566 - RNA, 19 nt, Human
gggggcaaggauccccuuu

SEQ ID NO: 937567 - RNA, 19 nt, Human
gggugccuccaagagccca

SEQ ID NO: 937568 - RNA, 24 nt, Human
gggugggugguguggggagaggcu

SEQ ID NO: 937569 - RNA, 19 nt, Human
ggguuacaggcauaagcca

SEQ ID NO: 937570 - RNA, 19 nt, Human
ggucccgaacuccugaccu

SEQ ID NO: 937571 - RNA, 20 nt, Human
gguuuucgcuuaguagagau

SEQ ID NO: 937572 - RNA, 18 nt, Human
guagcugggauuacaggc

SEQ ID NO: 937573 - RNA, 24 nt, Human
gugauccgcccaccucggccuccc

SEQ ID NO: 937574 - RNA, 23 nt, Human
gugccuccaagagcccauuugag

SEQ ID NO: 937575 - RNA, 21 nt, Human
guggcagggccggcacccugc

SEQ ID NO: 937576 - RNA, 21 nt, Human
gugggugguguggggagaggc

SEQ ID NO: 937577 - RNA, 24 nt, Human
uaauuuuuguaauuuuaguagaga

SEQ ID NO: 937578 - RNA, 20 nt, Human
uacaggcauaagccaccaag

SEQ ID NO: 937579 - RNA, 24 nt, Human
uacaggcaugcgcaaucaugccca

SEQ ID NO: 937580 - RNA, 24 nt, Human
uagcucacugcagccucaaacucc

SEQ ID NO: 937581 - RNA, 20 nt, Human
uaggauggagcacagaggca

SEQ ID NO: 937582 - RNA, 20 nt, Human
uaguagagaugggguguuug

SEQ ID NO: 937583 - RNA, 18 nt, Human
uaguagagauggguuuuc

SEQ ID NO: 937584 - RNA, 19 nt, Human
uaguagagauggguuuucg

SEQ ID NO: 937585 - RNA, 23 nt, Human
uaguagagauggguuuucgcuua

SEQ ID NO: 937586 - RNA, 21 nt, Human
ucaauaaccuccucaaccucc

SEQ ID NO: 937587 - RNA, 24 nt, Human
ucaauaaccuccucaaccuccacc

SEQ ID NO: 937588 - RNA, 24 nt, Human
ucacccaggcuggagugcaguguc

SEQ ID NO: 937589 - RNA, 24 nt, Human
ucacugcaaccuccaccucccagg

SEQ ID NO: 937590 - RNA, 25 nt, Human
ucacugcaaccuccaccucccaggu

SEQ ID NO: 937591 - RNA, 27 nt, Human
ucacugcaaccuccaccucccagguuc

SEQ ID NO: 937592 - RNA, 22 nt, Human
ucacugcaauuuccucugagau

SEQ ID NO: 937593 - RNA, 25 nt, Human
ucacugcaauuuccucuggggcccc

SEQ ID NO: 937594 - RNA, 26 nt, Human
ucacugcaauuuccucuggggcccuc

SEQ ID NO: 937595 - RNA, 25 nt, Human
ucacugcaauuuccucugggguccc

SEQ ID NO: 937596 - RNA, 26 nt, Human
ucacugcaauuuccucugggguccuc

SEQ ID NO: 937597 - RNA, 24 nt, Human
ucacugcagccucaaacuccuggg

SEQ ID NO: 937598 - RNA, 18 nt, Human
ucagccucccaaguagcu

SEQ ID NO: 937599 - RNA, 21 nt, Human
ucagccucccaaguagcugag

SEQ ID NO: 937600 - RNA, 18 nt, Human
ucaguuucccccaaaagc

SEQ ID NO: 937601 - RNA, 19 nt, Human
ucaguuucccccaaaagcu

SEQ ID NO: 937602 - RNA, 22 nt, Human
ucaguuuggccggcagcuucac

SEQ ID NO: 937603 - RNA, 24 nt, Human
uccaaaguagcugggauuacaggc

SEQ ID NO: 937604 - RNA, 24 nt, Human
ucccaaagugcugggguuacaggc

SEQ ID NO: 937605 - RNA, 24 nt, Human
ucccaaguagcugagaccacaggc

SEQ ID NO: 937606 - RNA, 23 nt, Human
ucccagccugcugcugcccccuu

SEQ ID NO: 937607 - RNA, 21 nt, Human
ucccagguucaagcaauucuc

SEQ ID NO: 937608 - RNA, 23 nt, Human
ucccagguucaagcaauucuccc

SEQ ID NO: 937609 - RNA, 18 nt, Human
uccccaccccuccuuccc

SEQ ID NO: 937610 - RNA, 18 nt, Human
uccccaccuccccuccag

SEQ ID NO: 937611 - RNA, 21 nt, Human
uccccaccuccccuccagcuc

SEQ ID NO: 937612 - RNA, 24 nt, Human
ucccccagggaucagggugagaau

SEQ ID NO: 937613 - RNA, 27 nt, Human
uccucccgccucagccucccaaguagc

SEQ ID NO: 937614 - RNA, 22 nt, Human
uccugggcucuggcgauccucc

SEQ ID NO: 937615 - RNA, 22 nt, Human
ucgcccagcuccucgcccuccu

SEQ ID NO: 937616 - RNA, 18 nt, Human
ucgcccucgcccagcucc

SEQ ID NO: 937617 - RNA, 18 nt, Human
ucggccucccaaagugcu

SEQ ID NO: 937618 - RNA, 23 nt, Human
ucggccucccaaagugcuggggu

SEQ ID NO: 937619 - RNA, 21 nt, Human
ucguccacgcgccgcaguguc

SEQ ID NO: 937620 - RNA, 18 nt, Human
ucuauuuuuccauucucc

SEQ ID NO: 937621 - RNA, 22 nt, Human
ucucacucugucacccaggcug

SEQ ID NO: 937622 - RNA, 23 nt, Human
ucucacucugucacccaggcugg

SEQ ID NO: 937623 - RNA, 24 nt, Human
ucucacucugucacccaggcugga

SEQ ID NO: 937624 - RNA, 26 nt, Human
ucucacucugucacccaggcuggagu

SEQ ID NO: 937625 - RNA, 27 nt, Human
ucucacucugucacccaggcuggagug

SEQ ID NO: 937626 - RNA, 19 nt, Human
ucucacucuguugccuagg

SEQ ID NO: 937627 - RNA, 23 nt, Human
ucucacucuguugccuaggaugg

SEQ ID NO: 937628 - RNA, 24 nt, Human
ucucacucuguugccuaggaugga

SEQ ID NO: 937629 - RNA, 24 nt, Human
ucugucacccaggcuggagugcag

SEQ ID NO: 937630 - RNA, 18 nt, Human
ucuuuccucuuugggcag

SEQ ID NO: 937631 - RNA, 18 nt, Human
ugaccucaggugauccgc

SEQ ID NO: 937632 - RNA, 21 nt, Human
ugaccucaggugauccgccca

SEQ ID NO: 937633 - RNA, 24 nt, Human
ugaccucaggugauccgcccaccu

SEQ ID NO: 937634 - RNA, 18 nt, Human
ugagaagaaacugccagg

SEQ ID NO: 937635 - RNA, 22 nt, Human
ugagaagaaacugccaggagug

SEQ ID NO: 937636 - RNA, 21 nt, Human
ugagaccacaggcacgugcca

SEQ ID NO: 937637 - RNA, 24 nt, Human
ugagaccacaggcacgugccacca

SEQ ID NO: 937638 - RNA, 22 nt, Human
ugagauggagucucacucuguc

SEQ ID NO: 937639 - RNA, 20 nt, Human
ugagucccccagggaucagg

SEQ ID NO: 937640 - RNA, 21 nt, Human
ugagucccccagggaucaggg

SEQ ID NO: 937641 - RNA, 24 nt, Human
ugauccgcccaccucggccuccca

SEQ ID NO: 937642 - RNA, 25 nt, Human
ugcagccucaaacuccugggcucug

SEQ ID NO: 937643 - RNA, 20 nt, Human
ugcagugucgcgaccuuggc

SEQ ID NO: 937644 - RNA, 19 nt, Human
ugcauaaacacaucagugu

SEQ ID NO: 937645 - RNA, 30 nt, Human
ugccccugggggugccuccaagagcccauu

SEQ ID NO: 937646 - RNA, 22 nt, Human
ugccucaguuucccccaaaagc

SEQ ID NO: 937647 - RNA, 24 nt, Human
ugcucaguuuggccggcagcuuca

SEQ ID NO: 937648 - RNA, 24 nt, Human
ugcucugucuuccccacugccuca

SEQ ID NO: 937649 - RNA, 18 nt, Human
ugcuggacccccagccag

SEQ ID NO: 937650 - RNA, 23 nt, Human
uggacccccagccagggugaggg

SEQ ID NO: 937651 - RNA, 24 nt, Human
uggagugcagugucgcgaccuugg

SEQ ID NO: 937652 - RNA, 19 nt, Human
uggcugcucugugauguuc

SEQ ID NO: 937653 - RNA, 21 nt, Human
uggcugcucugugauguucuc

SEQ ID NO: 937654 - RNA, 19 nt, Human
ugggaguggaguuccugga

SEQ ID NO: 937655 - RNA, 21 nt, Human
ugggaguggaguuccuggagg

SEQ ID NO: 937656 - RNA, 18 nt, Human
ugggauuacaggcaugcg

SEQ ID NO: 937657 - RNA, 19 nt, Human
ugggauuacaggcaugcgc

SEQ ID NO: 937658 - RNA, 19 nt, Human
ugggauuacaggcaugcgc

SEQ ID NO: 937659 - RNA, 20 nt, Human
ugggauuacaggcaugcgca

SEQ ID NO: 937660 - RNA, 20 nt, Human
ugggauuacaggcaugcgca

SEQ ID NO: 937661 - RNA, 23 nt, Human
ugggauuacaggcaugcgcaauc

SEQ ID NO: 937662 - RNA, 24 nt, Human
ugggauuacaggcaugcgcaauca

SEQ ID NO: 937663 - RNA, 20 nt, Human
ugggcucuggcgauccuccc

SEQ ID NO: 937664 - RNA, 24 nt, Human
ugggcucuggcgauccucccgccu

SEQ ID NO: 937665 - RNA, 18 nt, Human
ugggguuacaggcauaag

SEQ ID NO: 937666 - RNA, 22 nt, Human
ugggguuacaggcauaagccac

SEQ ID NO: 937667 - RNA, 24 nt, Human
ugggguuacaggcauaagccacca

SEQ ID NO: 937668 - RNA, 19 nt, Human
uggguggguggugugggga

SEQ ID NO: 937669 - RNA, 20 nt, Human
uggucccgaacuccugaccu

SEQ ID NO: 937670 - RNA, 24 nt, Human
ugugccaucccucacaugcauggu

SEQ ID NO: 937671 - RNA, 18 nt, Human
uguguccaagcgggggcu

SEQ ID NO: 937672 - RNA, 24 nt, Human
uguucucuccccaccuccccucca

SEQ ID NO: 937673 - RNA, 22 nt, Human
uguuugccaggcuggucccgaa

SEQ ID NO: 937674 - RNA, 19 nt, Human
uuacaggcauaagccacca

SEQ ID NO: 937675 - RNA, 25 nt, Human
uucaagcaauucuccccaccucagc

SEQ ID NO: 937676 - RNA, 19 nt, Human
uucccagggcuucucuugg

SEQ ID NO: 937677 - RNA, 23 nt, Human
uucuccccaccucagccuccaaa

SEQ ID NO: 937678 - RNA, 22 nt, Human
uucucuccccaccuccccucca

SEQ ID NO: 937679 - RNA, 20 nt, Human
uucucuggcagcgccuccga

SEQ ID NO: 937680 - RNA, 18 nt, Human
uugaccauucccuuccca

SEQ ID NO: 937681 - RNA, 24 nt, Human
uugccaggcuggucccgaacuccu

SEQ ID NO: 937682 - RNA, 21 nt, Human
uuuuaguagagauggguuuuc

SEQ ID NO: 937683 - RNA, 20 nt, Human
uuuuuguaauuuuaguagag

SEQ ID NO: 937684 - RNA, 22 nt, Human
agcaggaaagggaauucucuag

SEQ ID NO: 937685 - RNA, 20 nt, Human
aggaaagggaauucucuagc

SEQ ID NO: 937686 - RNA, 19 nt, Human
caaggggauggugguuggg

SEQ ID NO: 937687 - RNA, 22 nt, Human
ccacuagcucacuggggaugag

SEQ ID NO: 937688 - RNA, 18 nt, Human
cccucugcggccucccuu

SEQ ID NO: 937689 - RNA, 18 nt, Human
cucuccacuagcucacug

SEQ ID NO: 937690 - RNA, 24 nt, Human
gccucccuugcucccucuccacua

SEQ ID NO: 937691 - RNA, 20 nt, Human
guuuuuucccucugcggccu

SEQ ID NO: 937692 - RNA, 18 nt, Human
ucacuggggaugagcagg

SEQ ID NO: 937693 - RNA, 19 nt, Human
uccacuagcucacugggga

SEQ ID NO: 937694 - RNA, 22 nt, Human
ucugcggccucccuugcucccu

SEQ ID NO: 937695 - RNA, 18 nt, Human
uggggaugagcaggaaag

SEQ ID NO: 937696 - RNA, 24 nt, Human
ugguuggguggaggccuguagggg

SEQ ID NO: 937697 - RNA, 20 nt, Human
uuggguggaggccuguaggg

SEQ ID NO: 937698 - RNA, 25 nt, Human
aaagaggaaaaacuucuucaaagga

SEQ ID NO: 937699 - RNA, 21 nt, Human
aacgggccaaaaaagaggaaa

SEQ ID NO: 937700 - RNA, 22 nt, Human
aauaacaacgggccaaaaaaga

SEQ ID NO: 937701 - RNA, 21 nt, Human
accggaggucaauuucuguuu

SEQ ID NO: 937702 - RNA, 21 nt, Human
agagguaaagaagggauugua

SEQ ID NO: 937703 - RNA, 23 nt, Human
agcuaaacuauuuagcucuggga

SEQ ID NO: 937704 - RNA, 24 nt, Human
agguaagcuuagcagcuuuuaaug

SEQ ID NO: 937705 - RNA, 19 nt, Human
auuuuuaagguuuaauuag

SEQ ID NO: 937706 - RNA, 24 nt, Human
caaaaaagaggaaaaacuucuuca

SEQ ID NO: 937707 - RNA, 18 nt, Human
cagacuuccugaaguauc

SEQ ID NO: 937708 - RNA, 21 nt, Human
cagacuuccugaaguaucaac

SEQ ID NO: 937709 - RNA, 25 nt, Human
ccaaaaaagaggaaaaacuucuuca

SEQ ID NO: 937710 - RNA, 23 nt, Human
ccaagauuuccauagcaaagcca

SEQ ID NO: 937711 - RNA, 22 nt, Human
ccaccaagauuuccauagcaaa

SEQ ID NO: 937712 - RNA, 23 nt, Human
cuaauaacaacgggccaaaaaag

SEQ ID NO: 937713 - RNA, 23 nt, Human
cugaaacuuuggaaagucaauaa

SEQ ID NO: 937714 - RNA, 23 nt, Human
ggccaaaaaagaggaaaaacuuc

SEQ ID NO: 937715 - RNA, 23 nt, Human
guaauuccugaaacuuuggaaag

SEQ ID NO: 937716 - RNA, 24 nt, Human
uaaaaguaauuccugaaacuuugg

SEQ ID NO: 937717 - RNA, 23 nt, Human
uaacaacgggccaaaaaagagga

SEQ ID NO: 937718 - RNA, 18 nt, Human
uaccggaggucaauuucu

SEQ ID NO: 937719 - RNA, 21 nt, Human
uaucaacuacuagagguauua

SEQ ID NO: 937720 - RNA, 19 nt, Human
ucccauggcuuugauaugg

SEQ ID NO: 937721 - RNA, 21 nt, Human
ugaaaagcuacaccaccaaga

SEQ ID NO: 937722 - RNA, 18 nt, Human
ugaagccucccacucaau

SEQ ID NO: 937723 - RNA, 20 nt, Human
uuagcagcuuuuaaugaagu

SEQ ID NO: 937724 - RNA, 20 nt, Human
uucaauagucuggagcaguu

SEQ ID NO: 937725 - RNA, 25 nt, Human
uucaauagucuggagcaguugaagc

SEQ ID NO: 937726 - RNA, 24 nt, Human
uuuaagguuuaauuagguaauaag

SEQ ID NO: 937727 - RNA, 21 nt, Human
uuugugcugauuugcauacuu

SEQ ID NO: 937728 - RNA, 20 nt, Human
aaguggcugggaggccagga

SEQ ID NO: 937729 - RNA, 19 nt, Human
accuccggguccaggcacu

SEQ ID NO: 937730 - RNA, 22 nt, Human
acgggccacaggcagggcuggg

SEQ ID NO: 937731 - RNA, 19 nt, Human
aggaagcuggaggagggga

SEQ ID NO: 937732 - RNA, 19 nt, Human
aggaagcuggaggagggga

SEQ ID NO: 937733 - RNA, 22 nt, Human
aggaaguggcugggaggccagg

SEQ ID NO: 937734 - RNA, 20 nt, Human
aggaggggaggugcuggggc

SEQ ID NO: 937735 - RNA, 21 nt, Human
aggaggggaggugcuggggcc

SEQ ID NO: 937736 - RNA, 22 nt, Human
aggcagggcugggaguuggggg

SEQ ID NO: 937737 - RNA, 20 nt, Human
aggggaugggauccuguggg

SEQ ID NO: 937738 - RNA, 22 nt, Human
aggugacccucacccccggcuc

SEQ ID NO: 937739 - RNA, 22 nt, Human
augggauccuguggguaccuug

SEQ ID NO: 937740 - RNA, 23 nt, Human
augguggcccugggugguugggg

SEQ ID NO: 937741 - RNA, 21 nt, Human
caacaggugacccucaccccc

SEQ ID NO: 937742 - RNA, 22 nt, Human
caacaggugacccucacccccg

SEQ ID NO: 937743 - RNA, 19 nt, Human
cagggccccgagggggucc

SEQ ID NO: 937744 - RNA, 20 nt, Human
caugccaaguuccccauguc

SEQ ID NO: 937745 - RNA, 18 nt, Human
cccccggcucagggcccc

SEQ ID NO: 937746 - RNA, 21 nt, Human
ccccgaggggguccuggaaac

SEQ ID NO: 937747 - RNA, 24 nt, Human
cccgacaacaggugacccucaccc

SEQ ID NO: 937748 - RNA, 23 nt, Human
cccuugguccucaggccuggagc

SEQ ID NO: 937749 - RNA, 19 nt, Human
ccuguggguaccuuggccc

SEQ ID NO: 937750 - RNA, 20 nt, Human
cuacauggccacgugacgcc

SEQ ID NO: 937751 - RNA, 26 nt, Human
cuacauggccacgugacgccaucacc

SEQ ID NO: 937752 - RNA, 18 nt, Human
cugggaggccaggaagcu

SEQ ID NO: 937753 - RNA, 21 nt, Human
cuggggcccagggcugugcgg

SEQ ID NO: 937754 - RNA, 23 nt, Human
cugugagcauaucccugcauccu

SEQ ID NO: 937755 - RNA, 19 nt, Human
cugugugcgacgugcugca

SEQ ID NO: 937756 - RNA, 18 nt, Human
gaagcuggaggaggggag

SEQ ID NO: 937757 - RNA, 20 nt, Human
gacacuaggugagaauuggg

SEQ ID NO: 937758 - RNA, 22 nt, Human
gaggugcuggggcccagggcug

SEQ ID NO: 937759 - RNA, 24 nt, Human
gccaggaagcuggaggaggggagg

SEQ ID NO: 937760 - RNA, 19 nt, Human
gcucaaggagcggagguga

SEQ ID NO: 937761 - RNA, 23 nt, Human
gcuggaggaggggaggugcuggg

SEQ ID NO: 937762 - RNA, 21 nt, Human
gcugugcgggaggggauggga

SEQ ID NO: 937763 - RNA, 21 nt, Human
gggaggugcuggggcccaggg

SEQ ID NO: 937764 - RNA, 19 nt, Human
ggggaggugcuggggccca

SEQ ID NO: 937765 - RNA, 19 nt, Human
ggggaugggauccuguggg

SEQ ID NO: 937766 - RNA, 18 nt, Human
gggggcggcgggaggggg

SEQ ID NO: 937767 - RNA, 23 nt, Human
ggguaccuuggcccgugugccag

SEQ ID NO: 937768 - RNA, 20 nt, Human
gguggcccugggugguuggg

SEQ ID NO: 937769 - RNA, 20 nt, Human
ggugguugggggcggcggga

SEQ ID NO: 937770 - RNA, 24 nt, Human
ggugguugggggcggcgggagggg

SEQ ID NO: 937771 - RNA, 18 nt, Human
uagaaagugugugugaaa

SEQ ID NO: 937772 - RNA, 18 nt, Human
ucaccuccggguccaggc

SEQ ID NO: 937773 - RNA, 21 nt, Human
ucagggccccgaggggguccu

SEQ ID NO: 937774 - RNA, 21 nt, Human
uccgcaaaccgccgagucggg

SEQ ID NO: 937775 - RNA, 20 nt, Human
uccggugcaccgucccugcu

SEQ ID NO: 937776 - RNA, 19 nt, Human
uccuccgcaaaccgccgag

SEQ ID NO: 937777 - RNA, 20 nt, Human
uccuguggguaccuuggccc

SEQ ID NO: 937778 - RNA, 19 nt, Human
ucuccgcggccgugugcuc

SEQ ID NO: 937779 - RNA, 20 nt, Human
ucugaugguggcccugggug

SEQ ID NO: 937780 - RNA, 20 nt, Human
ugacgucguugcugcaucuc

SEQ ID NO: 937781 - RNA, 18 nt, Human
ugagaggguacuaggggu

SEQ ID NO: 937782 - RNA, 20 nt, Human
ugaggaaguggcugggaggc

SEQ ID NO: 937783 - RNA, 18 nt, Human
ugcucgaucccgccgucc

SEQ ID NO: 937784 - RNA, 22 nt, Human
uggaggaggggaggugcugggg

SEQ ID NO: 937785 - RNA, 23 nt, Human
ugggaguugggggagaaggagug

SEQ ID NO: 937786 - RNA, 18 nt, Human
ugggggcggcgggagggg

SEQ ID NO: 937787 - RNA, 22 nt, Human
ugucugugugcgacgugcugca

SEQ ID NO: 937788 - RNA, 18 nt, Human
ugugcgggaggggauggg

SEQ ID NO: 937789 - RNA, 26 nt, Human
ugugugaaagggcaugcgugcaugug

SEQ ID NO: 937790 - RNA, 21 nt, Human
ugugugacauuaauaugugug

SEQ ID NO: 937791 - RNA, 19 nt, Human
uugguccucaggccuggag

SEQ ID NO: 937792 - RNA, 24 nt, Human
uugguccucaggccuggagccucc

SEQ ID NO: 937793 - RNA, 25 nt, Human
uuuuuuuuuuuuuuuuuuuuuaagg

SEQ ID NO: 937794 - RNA, 22 nt, Human
aauuacuuuuuaaaaauccuuu

SEQ ID NO: 937795 - RNA, 20 nt, Human
agggagggaccacgaccgca

SEQ ID NO: 937796 - RNA, 21 nt, Human
aucugaagagcaagcacaaag

SEQ ID NO: 937797 - RNA, 19 nt, Human
uaagaaaugcaacaagagc

SEQ ID NO: 937798 - RNA, 22 nt, Human
uagaaaccaggcugcauaggga

SEQ ID NO: 937799 - RNA, 24 nt, Human
ugaauuguguuucagucacucugc

SEQ ID NO: 937800 - RNA, 18 nt, Human
ugcagaaaggaaugucag

SEQ ID NO: 937801 - RNA, 19 nt, Human
ugcugccacgcauggaaca

SEQ ID NO: 937802 - RNA, 22 nt, Human
ugucacgcuagaaaccaggcug

SEQ ID NO: 937803 - RNA, 24 nt, Human
uuuguggugccaccgcaguugcag

SEQ ID NO: 937804 - RNA, 20 nt, Human
aaagagaccucagggcccuc

SEQ ID NO: 937805 - RNA, 19 nt, Human
aaaguucugagauuacagg

SEQ ID NO: 937806 - RNA, 18 nt, Human
aacagcaucugagauaag

SEQ ID NO: 937807 - RNA, 25 nt, Human
aagucagcugcacagcuggaaccaa

SEQ ID NO: 937808 - RNA, 24 nt, Human
aagugauccaccugccucagccuc

SEQ ID NO: 937809 - RNA, 20 nt, Human
acagcuggaaccaagccgua

SEQ ID NO: 937810 - RNA, 25 nt, Human
accauguugcccaggcuggucucaa

SEQ ID NO: 937811 - RNA, 18 nt, Human
acuggguuucaccauguu

SEQ ID NO: 937812 - RNA, 19 nt, Human
acuggguuucaccauguug

SEQ ID NO: 937813 - RNA, 24 nt, Human
acuggguuucaccauguugcccag

SEQ ID NO: 937814 - RNA, 19 nt, Human
agauuacaggagugagcca

SEQ ID NO: 937815 - RNA, 24 nt, Human
agugauccaccugccucagccucc

SEQ ID NO: 937816 - RNA, 18 nt, Human
auaagaacaguugaagaa

SEQ ID NO: 937817 - RNA, 24 nt, Human
caaagguacccacugggauuuuaa

SEQ ID NO: 937818 - RNA, 24 nt, Human
caaaguucugagauuacaggagug

SEQ ID NO: 937819 - RNA, 26 nt, Human
caagcuccugagcucaagugauccaa

SEQ ID NO: 937820 - RNA, 22 nt, Human
caagugauccaccugccucagc

SEQ ID NO: 937821 - RNA, 24 nt, Human
caccauguugcccaggcuggucuc

SEQ ID NO: 937822 - RNA, 23 nt, Human
caccugccucagccucccaaagu

SEQ ID NO: 937823 - RNA, 23 nt, Human
cauguugcccaggcuggucucaa

SEQ ID NO: 937824 - RNA, 23 nt, Human
cauguugcccaggcuggucucaa

SEQ ID NO: 937825 - RNA, 24 nt, Human
cauguugcccaggcuggucucaag

SEQ ID NO: 937826 - RNA, 22 nt, Human
ccacagccagacaccucagggc

SEQ ID NO: 937827 - RNA, 19 nt, Human
ccaccugccucagccuccc

SEQ ID NO: 937828 - RNA, 23 nt, Human
ccacugcccaccagcaaggagcc

SEQ ID NO: 937829 - RNA, 21 nt, Human
ccacuugugccaccauacaaa

SEQ ID NO: 937830 - RNA, 20 nt, Human
ccuagagaguaguguggcug

SEQ ID NO: 937831 - RNA, 21 nt, Human
ccugagcucaagugauccacc

SEQ ID NO: 937832 - RNA, 22 nt, Human
ccugagcucaagugauccaccu

SEQ ID NO: 937833 - RNA, 23 nt, Human
ccugagcucaagugauccaccug

SEQ ID NO: 937834 - RNA, 22 nt, Human
ccugccucagccucccaaaguu

SEQ ID NO: 937835 - RNA, 23 nt, Human
cucaagugauccaccugccucag

SEQ ID NO: 937836 - RNA, 25 nt, Human
cucagccucccaaaguucugagauu

SEQ ID NO: 937837 - RNA, 21 nt, Human
cucccaaaguucugagauuac

SEQ ID NO: 937838 - RNA, 24 nt, Human
cuggguuucaccauguugcccagg

SEQ ID NO: 937839 - RNA, 18 nt, Human
cuugaccccugaggccua

SEQ ID NO: 937840 - RNA, 18 nt, Human
gaccucagggcccuccuc

SEQ ID NO: 937841 - RNA, 22 nt, Human
gagccacagccagacaccucag

SEQ ID NO: 937842 - RNA, 24 nt, Human
gagcucaagugauccaccugccuc

SEQ ID NO: 937843 - RNA, 18 nt, Human
gauuacaggagugagcca

SEQ ID NO: 937844 - RNA, 24 nt, Human
gauuacaggagugagccacagugc

SEQ ID NO: 937845 - RNA, 20 nt, Human
gcacagcuggaaccaagccg

SEQ ID NO: 937846 - RNA, 24 nt, Human
gcucaagugauccaccugccucag

SEQ ID NO: 937847 - RNA, 19 nt, Human
ggacagugggaaucuagaa

SEQ ID NO: 937848 - RNA, 22 nt, Human
ggccaaaucuugagccacagcc

SEQ ID NO: 937849 - RNA, 21 nt, Human
ggguuucaccauguugcccag

SEQ ID NO: 937850 - RNA, 22 nt, Human
ggguuucaccauguugcccagg

SEQ ID NO: 937851 - RNA, 24 nt, Human
gugagccacagugcccaggcuucu

SEQ ID NO: 937852 - RNA, 18 nt, Human
gugauccaccugccucag

SEQ ID NO: 937853 - RNA, 24 nt, Human
gugauccaccugccucagccuccc

SEQ ID NO: 937854 - RNA, 24 nt, Human
uacaggagugagccacagugccca

SEQ ID NO: 937855 - RNA, 23 nt, Human
uacuucagcaaacggaacccugg

SEQ ID NO: 937856 - RNA, 21 nt, Human
uagaaacuggguuucaccaug

SEQ ID NO: 937857 - RNA, 24 nt, Human
uauauggcucacguguuucuauug

SEQ ID NO: 937858 - RNA, 19 nt, Human
ucagccucccaaaguucug

SEQ ID NO: 937859 - RNA, 19 nt, Human
ucagggcccuccucugagc

SEQ ID NO: 937860 - RNA, 23 nt, Human
ucagggcccuccucugagcuccu

SEQ ID NO: 937861 - RNA, 18 nt, Human
uccuugaccccugaggcc

SEQ ID NO: 937862 - RNA, 22 nt, Human
uccuuugggagggucugcaugg

SEQ ID NO: 937863 - RNA, 23 nt, Human
ucucaagcuccugagcucaagug

SEQ ID NO: 937864 - RNA, 24 nt, Human
ucugagauaaggaacuuaguguuu

SEQ ID NO: 937865 - RNA, 26 nt, Human
ucuugagaaggcaguauccuuuggga

SEQ ID NO: 937866 - RNA, 21 nt, Human
ugagauuacaggagugagcca

SEQ ID NO: 937867 - RNA, 22 nt, Human
ugagauuacaggagugagccac

SEQ ID NO: 937868 - RNA, 19 nt, Human
ugaggccuagagaguaguc

SEQ ID NO: 937869 - RNA, 24 nt, Human
ugcccaggcuggucucaagcuccu

SEQ ID NO: 937870 - RNA, 28 nt, Human
ugcccaggcuggucucaagcuccugagc

SEQ ID NO: 937871 - RNA, 24 nt, Human
ugccucagccucccaaaguucuga

SEQ ID NO: 937872 - RNA, 21 nt, Human
uggacagugggaaucuagaac

SEQ ID NO: 937873 - RNA, 18 nt, Human
ugggauaacaccaguugg

SEQ ID NO: 937874 - RNA, 19 nt, Human
ugggauaacaccaguugga

SEQ ID NO: 937875 - RNA, 23 nt, Human
ugggauuuuaaaaucaguguuuu

SEQ ID NO: 937876 - RNA, 23 nt, Human
uggguuucaccauguugcccagg

SEQ ID NO: 937877 - RNA, 22 nt, Human
uuaguguuuuuuaaaaaguauu

SEQ ID NO: 937878 - RNA, 22 nt, Human
uuucaccauguugcccaggcug

SEQ ID NO: 937879 - RNA, 23 nt, Human
uuucaccauguugcccaggcugg

SEQ ID NO: 937880 - RNA, 24 nt, Human
uuucaccauguugcccaggcuggu

SEQ ID NO: 937881 - RNA, 22 nt, Human
aaaacaaaacuccagcaaggca

SEQ ID NO: 937882 - RNA, 30 nt, Human
aaaagaagacaguucagaaacagucagaaa

SEQ ID NO: 937883 - RNA, 19 nt, Human
aacagguuuaagcaauguc

SEQ ID NO: 937884 - RNA, 24 nt, Human
aaggggagacaaaaaacccaaaga

SEQ ID NO: 937885 - RNA, 23 nt, Human
aaguuccucagaugugucaucag

SEQ ID NO: 937886 - RNA, 26 nt, Human
acaaaacuccagcaaggcauaaauaa

SEQ ID NO: 937887 - RNA, 28 nt, Human
acccagaaagcacgugaauugagggguc

SEQ ID NO: 937888 - RNA, 20 nt, Human
acugcuuuugccagcaaagc

SEQ ID NO: 937889 - RNA, 23 nt, Human
agaaaauucccaauacuugcuaa

SEQ ID NO: 937890 - RNA, 21 nt, Human
agacaaaaaacccaaagaaca

SEQ ID NO: 937891 - RNA, 24 nt, Human
aggaaggagaccagguaaagaaga

SEQ ID NO: 937892 - RNA, 21 nt, Human
agugcauauauacaauaccag

SEQ ID NO: 937893 - RNA, 22 nt, Human
auaaucaccaagccccaaacac

SEQ ID NO: 937894 - RNA, 21 nt, Human
caaaacaaaacuccagcaagg

SEQ ID NO: 937895 - RNA, 23 nt, Human
caaagccaguaaaguaugacacu

SEQ ID NO: 937896 - RNA, 20 nt, Human
caacaaaacaaaacuccagc

SEQ ID NO: 937897 - RNA, 26 nt, Human
caagccccaaacacauacaaaacacu

SEQ ID NO: 937898 - RNA, 20 nt, Human
caauaccagaaaaguuuaga

SEQ ID NO: 937899 - RNA, 22 nt, Human
cacugcuaauagaaaauuccca

SEQ ID NO: 937900 - RNA, 20 nt, Human
caguacaaucacacagauca

SEQ ID NO: 937901 - RNA, 22 nt, Human
ccaaacuauguucagucuugca

SEQ ID NO: 937902 - RNA, 21 nt, Human
ccaagccccaaacacauacaa

SEQ ID NO: 937903 - RNA, 20 nt, Human
cucccugaggccaccggaug

SEQ ID NO: 937904 - RNA, 20 nt, Human
cugaggcagugcuuuuucca

SEQ ID NO: 937905 - RNA, 19 nt, Human
cuuaaaucuuucaccccca

SEQ ID NO: 937906 - RNA, 22 nt, Human
gaaaaacacuucuucaaaaucc

SEQ ID NO: 937907 - RNA, 18 nt, Human
gcagugcuuuuuccaugu

SEQ ID NO: 937908 - RNA, 26 nt, Human
gcucccugaggccaccggaugcuuuu

SEQ ID NO: 937909 - RNA, 24 nt, Human
gugcuuuuggaucugaacagagac

SEQ ID NO: 937910 - RNA, 24 nt, Human
guuaaaaauuggagcaacaaaaca

SEQ ID NO: 937911 - RNA, 24 nt, Human
uaaaacaccacugcuaauagaaaa

SEQ ID NO: 937912 - RNA, 22 nt, Human
uaagaaaacauaauuuuuagga

SEQ ID NO: 937913 - RNA, 22 nt, Human
uacaguaaaaguuaaaauugga

SEQ ID NO: 937914 - RNA, 22 nt, Human
uaccagaaaaguuuagauuggg

SEQ ID NO: 937915 - RNA, 22 nt, Human
uaugguuuaaaaggaauauugg

SEQ ID NO: 937916 - RNA, 18 nt, Human
uaugugcaugcaccaaug

SEQ ID NO: 937917 - RNA, 19 nt, Human
ucaaaauaaucaccaagcc

SEQ ID NO: 937918 - RNA, 24 nt, Human
ucaaagaacauaaauaaaaaguug

SEQ ID NO: 937919 - RNA, 22 nt, Human
ucuauaccugacauugggaaaa

SEQ ID NO: 937920 - RNA, 23 nt, Human
ucuucaggaauuguuuauuuggu

SEQ ID NO: 937921 - RNA, 21 nt, Human
ugaaaucacuggcauucagug

SEQ ID NO: 937922 - RNA, 27 nt, Human
ugaacagugcagauuauuaugaaacua

SEQ ID NO: 937923 - RNA, 22 nt, Human
ugauuuauccuuuugaaauuca

SEQ ID NO: 937924 - RNA, 20 nt, Human
ugcaacuuguggaaagagua

SEQ ID NO: 937925 - RNA, 19 nt, Human
ugcaaggggaugaacagug

SEQ ID NO: 937926 - RNA, 18 nt, Human
ugccagcaaagcucccuc

SEQ ID NO: 937927 - RNA, 19 nt, Human
ugcuuuuggaucugaacag

SEQ ID NO: 937928 - RNA, 23 nt, Human
ugggcuauaugaccauggccuuu

SEQ ID NO: 937929 - RNA, 18 nt, Human
uggguagcuauaaucaug

SEQ ID NO: 937930 - RNA, 24 nt, Human
ugucuugagucucuuaauucuucu

SEQ ID NO: 937931 - RNA, 21 nt, Human
uguuguuguuuuauuuuuugu

SEQ ID NO: 937932 - RNA, 21 nt, Human
uuaauauaugugcaugcacca

SEQ ID NO: 937933 - RNA, 22 nt, Human
uucaaaauaaucaccaagcccc

SEQ ID NO: 937934 - RNA, 30 nt, Human
uucaaaauccuacacuaugaaaaacugucc

SEQ ID NO: 937935 - RNA, 20 nt, Human
uuguuguuguuuuauuuuuu

SEQ ID NO: 937936 - RNA, 26 nt, Human
uuuaugguuuaaaaggaauauuggug

SEQ ID NO: 937937 - RNA, 20 nt, Human
uuuuauuuuuuguggguagc

SEQ ID NO: 937938 - RNA, 23 nt, Human
aaagccaggauaaccagggccaa

SEQ ID NO: 937939 - RNA, 19 nt, Human
aggauaaccagggccaaga

SEQ ID NO: 937940 - RNA, 23 nt, Human
aggauaaccagggccaagauaug

SEQ ID NO: 937941 - RNA, 19 nt, Human
aucugggcuuccuaguugu

SEQ ID NO: 937942 - RNA, 18 nt, Human
ccaggauaaccagggcca

SEQ ID NO: 937943 - RNA, 22 nt, Human
cuaacccauccaguccacuauc

SEQ ID NO: 937944 - RNA, 18 nt, Human
cugggcuuccuaguugua

SEQ ID NO: 937945 - RNA, 20 nt, Human
gacaauggagggaaagaagg

SEQ ID NO: 937946 - RNA, 24 nt, Human
gagcauacucagacaauggaggga

SEQ ID NO: 937947 - RNA, 19 nt, Human
uauagccuccaaagccagg

SEQ ID NO: 937948 - RNA, 21 nt, Human
ucagacaauggagggaaagaa

SEQ ID NO: 937949 - RNA, 23 nt, Human
uccaaagccaggauaaccagggc

SEQ ID NO: 937950 - RNA, 21 nt, Human
uccuaguuguacaccuggucc

SEQ ID NO: 937951 - RNA, 22 nt, Human
uccuccuaacccauccagucca

SEQ ID NO: 937952 - RNA, 21 nt, Human
uugacgaagguagugguuuau

SEQ ID NO: 937953 - RNA, 24 nt, Human
aaaaauagugagaaaaccaguguc

SEQ ID NO: 937954 - RNA, 24 nt, Human
agugagaaaaccagugucaaaucc

SEQ ID NO: 937955 - RNA, 18 nt, Human
ccagugucaaauccuacc

SEQ ID NO: 937956 - RNA, 19 nt, Human
ccuguguaauucguagagc

SEQ ID NO: 937957 - RNA, 21 nt, Human
cgugcagaaucucccaaaaau

SEQ ID NO: 937958 - RNA, 21 nt, Human
cucccaaaaauagugagaaaa

SEQ ID NO: 937959 - RNA, 20 nt, Human
uaagacaucuuagagacccg

SEQ ID NO: 937960 - RNA, 19 nt, Human
uaauucguagagcgauccc

SEQ ID NO: 937961 - RNA, 23 nt, Human
uagagacccgaaucccgcuuccu

SEQ ID NO: 937962 - RNA, 23 nt, Human
ucccaaaaauagugagaaaaccc

SEQ ID NO: 937963 - RNA, 21 nt, Human
ugaagggggugcgugacucgu

SEQ ID NO: 937964 - RNA, 18 nt, Human
ugacccucugaccugcau

SEQ ID NO: 937965 - RNA, 18 nt, Human
uuuuuuuuuuuuuuuuug

SEQ ID NO: 937966 - RNA, 19 nt, Human
aaugauuuguaucuccugg

SEQ ID NO: 937967 - RNA, 18 nt, Human
acagagcacauaaaaacc

SEQ ID NO: 937968 - RNA, 18 nt, Human
ccacagagcacauaaaaa

SEQ ID NO: 937969 - RNA, 19 nt, Human
gagcagagauaccaauccu

SEQ ID NO: 937970 - RNA, 20 nt, Human
gggugccagaaaucucacaa

SEQ ID NO: 937971 - RNA, 21 nt, Human
ggugccagaaaucucacaacu

SEQ ID NO: 937972 - RNA, 23 nt, Human
ucaaugauuuguaucuccugggu

SEQ ID NO: 937973 - RNA, 24 nt, Human
ucuaugaauggggugccagaaauc

SEQ ID NO: 937974 - RNA, 19 nt, Human
ucuccugggugcaguguca

SEQ ID NO: 937975 - RNA, 21 nt, Human
ugaaggccuuucagugacuca

SEQ ID NO: 937976 - RNA, 18 nt, Human
ugauuuguaucuccuggg

SEQ ID NO: 937977 - RNA, 22 nt, Human
ugccagaaaucucacaacucag

SEQ ID NO: 937978 - RNA, 22 nt, Human
aauaaauacuguuuacguacaa

SEQ ID NO: 937979 - RNA, 23 nt, Human
acacacacacacacacacacaca

SEQ ID NO: 937980 - RNA, 23 nt, Human
acacacacacacacacacacaca

SEQ ID NO: 937981 - RNA, 23 nt, Human
acacacacacacacacacacaca

SEQ ID NO: 937982 - RNA, 23 nt, Human
acacacacacacacacacacaca

SEQ ID NO: 937983 - RNA, 23 nt, Human
acacacacacacacacacacaca

SEQ ID NO: 937984 - RNA, 23 nt, Human
acacacacacacacacacacaca

SEQ ID NO: 937985 - RNA, 23 nt, Human
acacacacacacacacacacaca

SEQ ID NO: 937986 - RNA, 23 nt, Human
acacacacacacacacacacaca

SEQ ID NO: 937987 - RNA, 28 nt, Human
acacacacacacacacacacacaucaaa

SEQ ID NO: 937988 - RNA, 19 nt, Human
agggaaggcagacuucaga

SEQ ID NO: 937989 - RNA, 23 nt, Human
aucaacccugccaccaggucucc

SEQ ID NO: 937990 - RNA, 31 nt, Human
aucaaggucacacacacacacacacacacag

SEQ ID NO: 937991 - RNA, 31 nt, Human
caaggucacacacacacacacacacacacag

SEQ ID NO: 937992 - RNA, 20 nt, Human
cacacacacacacacacaca

SEQ ID NO: 937993 - RNA, 20 nt, Human
cacacacacacacacacaca

SEQ ID NO: 937994 - RNA, 20 nt, Human
cacacacacacacacacaca

SEQ ID NO: 937995 - RNA, 20 nt, Human
cacacacacacacacacaca

SEQ ID NO: 937996 - RNA, 20 nt, Human
cacacacacacacacacaca

SEQ ID NO: 937997 - RNA, 20 nt, Human
cacacacacacacacacaca

SEQ ID NO: 937998 - RNA, 20 nt, Human
cacacacacacacacacaca

SEQ ID NO: 937999 - RNA, 20 nt, Human
cacacacacacacacacaca

SEQ ID NO: 938000 - RNA, 20 nt, Human
cacacacacacacacacaca

SEQ ID NO: 938001 - RNA, 20 nt, Human
cacacacacacacacacaca

SEQ ID NO: 938002 - RNA, 20 nt, Human
cacacacacacacacacaca

SEQ ID NO: 938003 - RNA, 20 nt, Human
cacacacacacacacacaca

SEQ ID NO: 938004 - RNA, 20 nt, Human
cacacacacacacacacaca

SEQ ID NO: 938005 - RNA, 20 nt, Human
cacacacacacacacacaca

SEQ ID NO: 938006 - RNA, 20 nt, Human
cacacacacacacacacaca

SEQ ID NO: 938007 - RNA, 22 nt, Human
cacacacacacacacacacaca

SEQ ID NO: 938008 - RNA, 22 nt, Human
cacacacacacacacacacaca

SEQ ID NO: 938009 - RNA, 22 nt, Human
cacacacacacacacacacaca

SEQ ID NO: 938010 - RNA, 22 nt, Human
cacacacacacacacacacaca

SEQ ID NO: 938011 - RNA, 22 nt, Human
cacacacacacacacacacaca

SEQ ID NO: 938012 - RNA, 22 nt, Human
cacacacacacacacacacaca

SEQ ID NO: 938013 - RNA, 26 nt, Human
cacacacacacacacacacacacaca

SEQ ID NO: 938014 - RNA, 26 nt, Human
cacacacacacacacacacacacaca

SEQ ID NO: 938015 - RNA, 26 nt, Human
cacacacacacacacacacacacaca

SEQ ID NO: 938016 - RNA, 26 nt, Human
cacacacacacacacacacacacaca

SEQ ID NO: 938017 - RNA, 26 nt, Human
cacacacacacacacacacacacaca

SEQ ID NO: 938018 - RNA, 26 nt, Human
cacacacacacacacacacacacaca

SEQ ID NO: 938019 - RNA, 26 nt, Human
cacacacacacacacacacacacaca

SEQ ID NO: 938020 - RNA, 26 nt, Human
cacacacacacacacacacacacaca

SEQ ID NO: 938021 - RNA, 27 nt, Human
cacacacacacacacacacacacauca

SEQ ID NO: 938022 - RNA, 21 nt, Human
ccagucacgguaguaauuuau

SEQ ID NO: 938023 - RNA, 21 nt, Human
cccugccaccaggucuccuug

SEQ ID NO: 938024 - RNA, 23 nt, Human
cgguaguaauuuauaauaaauac

SEQ ID NO: 938025 - RNA, 21 nt, Human
ugagaucaacccugccaccag

SEQ ID NO: 938026 - RNA, 26 nt, Human
ugagaucaacccugccaccaggucuc

SEQ ID NO: 938027 - RNA, 24 nt, Human
uuuuuuuccaaugcauuuuauccu

SEQ ID NO: 938028 - RNA, 20 nt, Human
aacccugcccagacgccgcc

SEQ ID NO: 938029 - RNA, 21 nt, Human
acccgaacccugcccagacgc

SEQ ID NO: 938030 - RNA, 22 nt, Human
agcaggagguggaaggcgaggg

SEQ ID NO: 938031 - RNA, 22 nt, Human
aggagguggaaggcgagggaag

SEQ ID NO: 938032 - RNA, 23 nt, Human
cccagacgccgccgucgggaggc

SEQ ID NO: 938033 - RNA, 18 nt, Human
ccgcacccgaacccugcc

SEQ ID NO: 938034 - RNA, 22 nt, Human
ccgcacccgaacccugcccaga

SEQ ID NO: 938035 - RNA, 24 nt, Human
ccgcacccgaacccugcccagacg

SEQ ID NO: 938036 - RNA, 23 nt, Human
ccuccagcccagggggcgggggc

SEQ ID NO: 938037 - RNA, 20 nt, Human
cgccgccgucgggaggcaga

SEQ ID NO: 938038 - RNA, 25 nt, Human
cgggaggcagaauccggguuucugg

SEQ ID NO: 938039 - RNA, 22 nt, Human
cgugguuggcagaucucccagg

SEQ ID NO: 938040 - RNA, 19 nt, Human
gcacccgaacccugcccag

SEQ ID NO: 938041 - RNA, 20 nt, Human
gcagaucucccaggaggccu

SEQ ID NO: 938042 - RNA, 19 nt, Human
ggaaggaccacacacagcc

SEQ ID NO: 938043 - RNA, 20 nt, Human
ggaggcagaauccggguuuc

SEQ ID NO: 938044 - RNA, 20 nt, Human
gggaagucccaagggcugca

SEQ ID NO: 938045 - RNA, 21 nt, Human
gggaggcagaauccggguuuc

SEQ ID NO: 938046 - RNA, 18 nt, Human
gugggcgugguuggcaga

SEQ ID NO: 938047 - RNA, 18 nt, Human
ucccaagggcugcacugc

SEQ ID NO: 938048 - RNA, 22 nt, Human
ucccaggaggccucaggggucc

SEQ ID NO: 938049 - RNA, 21 nt, Human
ucuuuauuuugggaccaggga

SEQ ID NO: 938050 - RNA, 20 nt, Human
ugcccagacgccgccgucgg

SEQ ID NO: 938051 - RNA, 23 nt, Human
uggaaggcgagggaagucccaag

SEQ ID NO: 938052 - RNA, 23 nt, Human
ugguuggcagaucucccaggagg

SEQ ID NO: 938053 - RNA, 18 nt, Human
aagcagaugagcaggagg

SEQ ID NO: 938054 - RNA, 26 nt, Human
aaggaauccgauccggggaggcaagc

SEQ ID NO: 938055 - RNA, 24 nt, Human
accacagcgacagcuugugaagca

SEQ ID NO: 938056 - RNA, 18 nt, Human
acgccgcuguccggaggc

SEQ ID NO: 938057 - RNA, 18 nt, Human
aggaccacacacagcccu

SEQ ID NO: 938058 - RNA, 26 nt, Human
aggccacgaccugcgaaccgacacca

SEQ ID NO: 938059 - RNA, 19 nt, Human
aggcgguccucgcagucug

SEQ ID NO: 938060 - RNA, 25 nt, Human
agguaguggcgaggauaggcguagc

SEQ ID NO: 938061 - RNA, 20 nt, Human
aguacccgaacccugcccag

SEQ ID NO: 938062 - RNA, 23 nt, Human
augaggugggcguggucugcagg

SEQ ID NO: 938063 - RNA, 19 nt, Human
cacagcccugcagcucagg

SEQ ID NO: 938064 - RNA, 22 nt, Human
cacaggucugcgcccuccggcc

SEQ ID NO: 938065 - RNA, 19 nt, Human
caggguggggccagaccgc

SEQ ID NO: 938066 - RNA, 24 nt, Human
ccccguccgcccgccccgcgccug

SEQ ID NO: 938067 - RNA, 19 nt, Human
ccgcccgccccgcgccugc

SEQ ID NO: 938068 - RNA, 22 nt, Human
cgcggucagaucuagccacgcc

SEQ ID NO: 938069 - RNA, 22 nt, Human
cggaggcgaaauccggguuucc

SEQ ID NO: 938070 - RNA, 20 nt, Human
cgguggagcggggcuguagg

SEQ ID NO: 938071 - RNA, 22 nt, Human
cucuuuauuuugggaccaggga

SEQ ID NO: 938072 - RNA, 20 nt, Human
gaagcagaugagcaggaggu

SEQ ID NO: 938073 - RNA, 23 nt, Human
gagcaggagguggaaggcgagga

SEQ ID NO: 938074 - RNA, 20 nt, Human
gcagcucagggggcgcgggg

SEQ ID NO: 938075 - RNA, 20 nt, Human
gcaggucucccaggaggccu

SEQ ID NO: 938076 - RNA, 21 nt, Human
gccacgcccccgguggagcgg

SEQ ID NO: 938077 - RNA, 21 nt, Human
gccgaggcgguccucgcaguc

SEQ ID NO: 938078 - RNA, 20 nt, Human
gcggucagaucuagccacgc

SEQ ID NO: 938079 - RNA, 21 nt, Human
gcggucagaucuagccacgcc

SEQ ID NO: 938080 - RNA, 19 nt, Human
ggaaggaccacacacagcc

SEQ ID NO: 938081 - RNA, 21 nt, Human
ggguggggccagaccgcgcuc

SEQ ID NO: 938082 - RNA, 22 nt, Human
uacccgaacccugcccagacgc

SEQ ID NO: 938083 - RNA, 19 nt, Human
ucccauaccugagggcggg

SEQ ID NO: 938084 - RNA, 21 nt, Human
ugaggugggcguggucugcag

SEQ ID NO: 938085 - RNA, 23 nt, Human
ugaggugggcguggucugcaggu

SEQ ID NO: 938086 - RNA, 25 nt, Human
ugcccagacgccgcuguccggaggc

SEQ ID NO: 938087 - RNA, 19 nt, Human
ugggaagaacguuuuggag

SEQ ID NO: 938088 - RNA, 20 nt, Human
uguccggaggcgaaauccgg

SEQ ID NO: 938089 - RNA, 22 nt, Human
uuuccagggucgggagugaaca

SEQ ID NO: 938090 - RNA, 22 nt, Human
aaaaaaaaaaaaaaaagcugag

SEQ ID NO: 938091 - RNA, 25 nt, Human
aaaaaaaaaaagcugaguuggagga

SEQ ID NO: 938092 - RNA, 19 nt, Human
aaaaagacaagacacccaa

SEQ ID NO: 938093 - RNA, 25 nt, Human
aaaaaggcugcaacuucugcccuuu

SEQ ID NO: 938094 - RNA, 20 nt, Human
aaaaggcugcaacuucugcc

SEQ ID NO: 938095 - RNA, 26 nt, Human
aaacaggaaaaaaaaaaaagggaccc

SEQ ID NO: 938096 - RNA, 27 nt, Human
aaacaguaaaaggauacacuacaccag

SEQ ID NO: 938097 - RNA, 22 nt, Human
aaacauuguuuucuagaaugaa

SEQ ID NO: 938098 - RNA, 20 nt, Human
aaacccaaaagugucuaaug

SEQ ID NO: 938099 - RNA, 21 nt, Human
aaagaaccaaagaauuaaaau

SEQ ID NO: 938100 - RNA, 18 nt, Human
aaagacaaagcaguggca

SEQ ID NO: 938101 - RNA, 27 nt, Human
aaauauauauauuuuuuucugcaccag

SEQ ID NO: 938102 - RNA, 23 nt, Human
aaccaaaaguauuaaacuauucu

SEQ ID NO: 938103 - RNA, 19 nt, Human
aagaaagacaaaaaggcuc

SEQ ID NO: 938104 - RNA, 24 nt, Human
aaggcugcaacuucugcccuuuga

SEQ ID NO: 938105 - RNA, 20 nt, Human
accaugaaggaaaauaaggc

SEQ ID NO: 938106 - RNA, 20 nt, Human
agaaaaaaauucuuuuugaa

SEQ ID NO: 938107 - RNA, 21 nt, Human
agaaacagcaaagaaccaaag

SEQ ID NO: 938108 - RNA, 20 nt, Human
agaaagacaaagcagugggg

SEQ ID NO: 938109 - RNA, 20 nt, Human
agaagaaaaagauuccuaga

SEQ ID NO: 938110 - RNA, 22 nt, Human
agaagaaaaagauuccuagaag

SEQ ID NO: 938111 - RNA, 21 nt, Human
agacaugugauuaaauuuggg

SEQ ID NO: 938112 - RNA, 19 nt, Human
agaggagggaggggcgggg

SEQ ID NO: 938113 - RNA, 19 nt, Human
agcaggcaggcauggucag

SEQ ID NO: 938114 - RNA, 20 nt, Human
agguaacguggcaaaaaucc

SEQ ID NO: 938115 - RNA, 18 nt, Human
aggucaucauugggugaa

SEQ ID NO: 938116 - RNA, 21 nt, Human
aguguuuagauguaggcuuug

SEQ ID NO: 938117 - RNA, 21 nt, Human
augcauguaccuuguucucau

SEQ ID NO: 938118 - RNA, 27 nt, Human
caaaaucaaaugaaugcaucccccuuc

SEQ ID NO: 938119 - RNA, 21 nt, Human
caaaugaaugcaucccccuuc

SEQ ID NO: 938120 - RNA, 22 nt, Human
caagacacccaauauaauaaag

SEQ ID NO: 938121 - RNA, 21 nt, Human
cacaguaucagauuuggcaaa

SEQ ID NO: 938122 - RNA, 26 nt, Human
caccaagaagguaaugacucagcuuc

SEQ ID NO: 938123 - RNA, 20 nt, Human
caccaaugauaucccugacc

SEQ ID NO: 938124 - RNA, 21 nt, Human
cacugucacuugagauuugcc

SEQ ID NO: 938125 - RNA, 18 nt, Human
cagccgccgccgcucucg

SEQ ID NO: 938126 - RNA, 19 nt, Human
cagccgccgccgcucucgg

SEQ ID NO: 938127 - RNA, 19 nt, Human
cagcgccgccgccgccugu

SEQ ID NO: 938128 - RNA, 23 nt, Human
caguacauucagagagagcuuug

SEQ ID NO: 938129 - RNA, 22 nt, Human
cagugcaguuucuagaaccacu

SEQ ID NO: 938130 - RNA, 24 nt, Human
cauacaagcgacacucccaucuac

SEQ ID NO: 938131 - RNA, 21 nt, Human
caucauugggugaagaguuca

SEQ ID NO: 938132 - RNA, 19 nt, Human
ccagccgccgccgcucucg

SEQ ID NO: 938133 - RNA, 20 nt, Human
cccccgcaggcacuuuccgc

SEQ ID NO: 938134 - RNA, 18 nt, Human
cccgccccccgcaggcac

SEQ ID NO: 938135 - RNA, 19 nt, Human
cccgccgccgccgccgccg

SEQ ID NO: 938136 - RNA, 19 nt, Human
cccgcgccgagccccgggg

SEQ ID NO: 938137 - RNA, 23 nt, Human
cccgcuccgcgccggcucccggc

SEQ ID NO: 938138 - RNA, 20 nt, Human
cccgggcccgacgcgcuccc

SEQ ID NO: 938139 - RNA, 18 nt, Human
ccgacugcgcuccuccuc

SEQ ID NO: 938140 - RNA, 25 nt, Human
ccgcccgccgccgccgccgccgccg

SEQ ID NO: 938141 - RNA, 18 nt, Human
ccgccgccgccgccgccg

SEQ ID NO: 938142 - RNA, 24 nt, Human
ccgccgccgccgccgccgccgccg

SEQ ID NO: 938143 - RNA, 25 nt, Human
ccgccgccgccgccgccgccgccgg

SEQ ID NO: 938144 - RNA, 23 nt, Human
ccgccgccgccgccgccgccgga

SEQ ID NO: 938145 - RNA, 19 nt, Human
ccgccgccgcucucggccg

SEQ ID NO: 938146 - RNA, 20 nt, Human
ccgccgccgcucucggccgc

SEQ ID NO: 938147 - RNA, 22 nt, Human
ccgccgccgcucucggccgccc

SEQ ID NO: 938148 - RNA, 20 nt, Human
ccgccgcgcuccgacugcgc

SEQ ID NO: 938149 - RNA, 22 nt, Human
ccgccgcgcuccgacugcgcuc

SEQ ID NO: 938150 - RNA, 21 nt, Human
ccgcgccgagccccggggcgg

SEQ ID NO: 938151 - RNA, 19 nt, Human
ccgcgcgcucgcccgcccc

SEQ ID NO: 938152 - RNA, 21 nt, Human
ccgcgcgcucgcccgcccccc

SEQ ID NO: 938153 - RNA, 21 nt, Human
ccgcucagcgccgccgccgcc

SEQ ID NO: 938154 - RNA, 22 nt, Human
ccgcucagcgccgccgccgccu

SEQ ID NO: 938155 - RNA, 18 nt, Human
ccgcuccgcgccggcucc

SEQ ID NO: 938156 - RNA, 26 nt, Human
ccuauaauucaaacuaucaacucauu

SEQ ID NO: 938157 - RNA, 18 nt, Human
ccuccuccuccucacuca

SEQ ID NO: 938158 - RNA, 18 nt, Human
ccuccucuuccuccuccu

SEQ ID NO: 938159 - RNA, 20 nt, Human
ccuccucuuccuccuccucc

SEQ ID NO: 938160 - RNA, 21 nt, Human
ccuccucuuccuccuccuccu

SEQ ID NO: 938161 - RNA, 18 nt, Human
ccuccuucuccuccuccu

SEQ ID NO: 938162 - RNA, 20 nt, Human
ccuccuucuccuccuccucc

SEQ ID NO: 938163 - RNA, 21 nt, Human
ccuccuucuccuccuccuccu

SEQ ID NO: 938164 - RNA, 19 nt, Human
ccugugccgcgggcucggg

SEQ ID NO: 938165 - RNA, 24 nt, Human
cgaacggacaagugccucagcucg

SEQ ID NO: 938166 - RNA, 24 nt, Human
cgcaaauuuauucaaccaaccaaa

SEQ ID NO: 938167 - RNA, 20 nt, Human
cgccccccgcaggcacuuuc

SEQ ID NO: 938168 - RNA, 20 nt, Human
cgcccgggcccgacgcgcuc

SEQ ID NO: 938169 - RNA, 20 nt, Human
cgccgagccccggggcggcc

SEQ ID NO: 938170 - RNA, 20 nt, Human
cgccgccgccgccugugccg

SEQ ID NO: 938171 - RNA, 22 nt, Human
cgccgccgccugugccgcgggc

SEQ ID NO: 938172 - RNA, 20 nt, Human
cgccucugccgcugccgccg

SEQ ID NO: 938173 - RNA, 30 nt, Human
cgccucugccgcugccgccgcgcuccgacu

SEQ ID NO: 938174 - RNA, 19 nt, Human
cgcucagcgccgccgccgc

SEQ ID NO: 938175 - RNA, 24 nt, Human
cgcucgggacccggcgucccgcuc

SEQ ID NO: 938176 - RNA, 19 nt, Human
cgcucucggccgcccggcu

SEQ ID NO: 938177 - RNA, 19 nt, Human
cggcgccucugccgcugcc

SEQ ID NO: 938178 - RNA, 20 nt, Human
cggggggucucucugggcug

SEQ ID NO: 938179 - RNA, 24 nt, Human
cucccagccgccgccgcucucggc

SEQ ID NO: 938180 - RNA, 22 nt, Human
cuccuccuucuccuccuccucc

SEQ ID NO: 938181 - RNA, 19 nt, Human
cugccgcugccgccgcgcu

SEQ ID NO: 938182 - RNA, 23 nt, Human
cugcugaccucugacugugaugc

SEQ ID NO: 938183 - RNA, 19 nt, Human
cuucuccuccuccuccucc

SEQ ID NO: 938184 - RNA, 22 nt, Human
gaaacagcaaagaaccaaagaa

SEQ ID NO: 938185 - RNA, 18 nt, Human
gaaagacaaagcaguggc

SEQ ID NO: 938186 - RNA, 23 nt, Human
gaagucucucacaguaacugccu

SEQ ID NO: 938187 - RNA, 24 nt, Human
gacaggcaagcaaaggcgauuacc

SEQ ID NO: 938188 - RNA, 18 nt, Human
gagcccgcucagcgccgc

SEQ ID NO: 938189 - RNA, 22 nt, Human
gagcccgcucagcgccgccgcc

SEQ ID NO: 938190 - RNA, 19 nt, Human
gaggccggcgggcgggcgg

SEQ ID NO: 938191 - RNA, 23 nt, Human
gcaaagaaccaaagaauuaaaau

SEQ ID NO: 938192 - RNA, 19 nt, Human
gcauuuuguauccuuuucu

SEQ ID NO: 938193 - RNA, 22 nt, Human
gcccgggcccgacgcgcuccca

SEQ ID NO: 938194 - RNA, 18 nt, Human
gccgagugcgggcgcggg

SEQ ID NO: 938195 - RNA, 19 nt, Human
gccgagugcgggcgcgggg

SEQ ID NO: 938196 - RNA, 20 nt, Human
gccgcugccgccgcgcuccg

SEQ ID NO: 938197 - RNA, 20 nt, Human
gccggagaggagggaggggc

SEQ ID NO: 938198 - RNA, 18 nt, Human
gccggcucccgcucuggc

SEQ ID NO: 938199 - RNA, 21 nt, Human
gccugugccgcgggcucgggg

SEQ ID NO: 938200 - RNA, 18 nt, Human
gcgcuccuccucuuccuc

SEQ ID NO: 938201 - RNA, 22 nt, Human
gcucccagccgccgccgcucuc

SEQ ID NO: 938202 - RNA, 19 nt, Human
gcuccgcgccggcucccgc

SEQ ID NO: 938203 - RNA, 22 nt, Human
ggagaggagggaggggcggggg

SEQ ID NO: 938204 - RNA, 21 nt, Human
ggcggccggcaccgcgcgcuc

SEQ ID NO: 938205 - RNA, 23 nt, Human
ggcucccgcucuggcucccgcgc

SEQ ID NO: 938206 - RNA, 18 nt, Human
ggcucggggggucucucu

SEQ ID NO: 938207 - RNA, 18 nt, Human
gggcgggggggggggucc

SEQ ID NO: 938208 - RNA, 18 nt, Human
ggucaggucaucauuggg

SEQ ID NO: 938209 - RNA, 18 nt, Human
guaaauaaaucaaaacug

SEQ ID NO: 938210 - RNA, 22 nt, Human
gucaggcauuagaaaaguuauc

SEQ ID NO: 938211 - RNA, 21 nt, Human
gucaggucaucauugggugaa

SEQ ID NO: 938212 - RNA, 21 nt, Human
guccacugucacuugagauuu

SEQ ID NO: 938213 - RNA, 19 nt, Human
guccagguauaacauaguu

SEQ ID NO: 938214 - RNA, 23 nt, Human
gugccgcgggcucggggggucuc

SEQ ID NO: 938215 - RNA, 20 nt, Human
gugcgggcgcggggcgcggg

SEQ ID NO: 938216 - RNA, 24 nt, Human
guuucuuuguucuuuuucuuuuuu

SEQ ID NO: 938217 - RNA, 24 nt, Human
uaaaaaagaaagacaaaaaggcuc

SEQ ID NO: 938218 - RNA, 20 nt, Human
uaaacugacaacgguuucca

SEQ ID NO: 938219 - RNA, 22 nt, Human
uaacagaaagacaaagcagugg

SEQ ID NO: 938220 - RNA, 21 nt, Human
uaacauacaagcgacacuccc

SEQ ID NO: 938221 - RNA, 18 nt, Human
uaacuaacuguuucaacu

SEQ ID NO: 938222 - RNA, 24 nt, Human
uaacuuguauucugagggaggagc

SEQ ID NO: 938223 - RNA, 22 nt, Human
uaagacgaacggacaagugccu

SEQ ID NO: 938224 - RNA, 22 nt, Human
uaagcugggcgggggggggggu

SEQ ID NO: 938225 - RNA, 19 nt, Human
uaaggcacuuucuuuucuu

SEQ ID NO: 938226 - RNA, 20 nt, Human
uaaguuuuucucucauggcc

SEQ ID NO: 938227 - RNA, 23 nt, Human
uagaaacagcaaagaaccaaaga

SEQ ID NO: 938228 - RNA, 23 nt, Human
uauaaaacaagauagaaaaauac

SEQ ID NO: 938229 - RNA, 19 nt, Human
uaucaccucaaguguuuga

SEQ ID NO: 938230 - RNA, 19 nt, Human
uaucucagaauccuuuggg

SEQ ID NO: 938231 - RNA, 22 nt, Human
uaucucagaauccuuuggguua

SEQ ID NO: 938232 - RNA, 27 nt, Human
uauguaaaaucccaacuaaaacccaaa

SEQ ID NO: 938233 - RNA, 26 nt, Human
ucacaguaucagauuuggcaaauuug

SEQ ID NO: 938234 - RNA, 33 nt, Human
ucacccaaacaggaaaaaaaaaaaaaaaaaaag

SEQ ID NO: 938235 - RNA, 22 nt, Human
ucacgaggccggcgggcgggcg

SEQ ID NO: 938236 - RNA, 21 nt, Human
uccgcccgccgccgccgccgc

SEQ ID NO: 938237 - RNA, 20 nt, Human
uccuccuccuccuccucacu

SEQ ID NO: 938238 - RNA, 22 nt, Human
uccuccuccuccuccucacuca

SEQ ID NO: 938239 - RNA, 19 nt, Human
ucgcccgccccccgcaggc

SEQ ID NO: 938240 - RNA, 22 nt, Human
ucggggggucucucugggcugg

SEQ ID NO: 938241 - RNA, 22 nt, Human
ucuaaaauguccagguauaaca

SEQ ID NO: 938242 - RNA, 21 nt, Human
ucuguaaacugaaguuuagau

SEQ ID NO: 938243 - RNA, 21 nt, Human
ucuuccuccuccuccuucucc

SEQ ID NO: 938244 - RNA, 21 nt, Human
ucuuuuuuuuuauaacacuug

SEQ ID NO: 938245 - RNA, 18 nt, Human
ugaccaugaaggaaaaua

SEQ ID NO: 938246 - RNA, 19 nt, Human
ugacgacaggcaagcaaag

SEQ ID NO: 938247 - RNA, 22 nt, Human
ugagauuugccacgucugguac

SEQ ID NO: 938248 - RNA, 22 nt, Human
ugauaaacaucuaaaaugucca

SEQ ID NO: 938249 - RNA, 18 nt, Human
ugaugcugggaaggugug

SEQ ID NO: 938250 - RNA, 22 nt, Human
ugccgccgcgcuccgacugcgc

SEQ ID NO: 938251 - RNA, 21 nt, Human
ugccucagcucgcugcacuga

SEQ ID NO: 938252 - RNA, 23 nt, Human
ugcgggcgcggggcgcgggcugc

SEQ ID NO: 938253 - RNA, 19 nt, Human
ugcuucaacuacauaacua

SEQ ID NO: 938254 - RNA, 19 nt, Human
uggaagaggggacgaguug

SEQ ID NO: 938255 - RNA, 19 nt, Human
uggaucaaauacugguauu

SEQ ID NO: 938256 - RNA, 24 nt, Human
uggcgccggacgaggaggagccgg

SEQ ID NO: 938257 - RNA, 20 nt, Human
uggcucccgcgccgagcccc

SEQ ID NO: 938258 - RNA, 18 nt, Human
uggguuaacauugaagau

SEQ ID NO: 938259 - RNA, 19 nt, Human
uguaacagaaagacaaagc

SEQ ID NO: 938260 - RNA, 18 nt, Human
ugucuccccuucuuaaga

SEQ ID NO: 938261 - RNA, 19 nt, Human
ugugaugcugggaaggugu

SEQ ID NO: 938262 - RNA, 21 nt, Human
uguguaacagaaagacaaagc

SEQ ID NO: 938263 - RNA, 27 nt, Human
uguuucaaugcacuacacuuuaucuac

SEQ ID NO: 938264 - RNA, 24 nt, Human
uucaaaaguuuguucagagccaac

SEQ ID NO: 938265 - RNA, 21 nt, Human
uucaaugcacuacacuuuauc

SEQ ID NO: 938266 - RNA, 19 nt, Human
uucacauucuuuuaaaguu

SEQ ID NO: 938267 - RNA, 22 nt, Human
uucuccuccuccuccuccucac

SEQ ID NO: 938268 - RNA, 20 nt, Human
uuggcggcggaguucgccuc

SEQ ID NO: 938269 - RNA, 20 nt, Human
uugucucccucauaucuucu

SEQ ID NO: 938270 - RNA, 19 nt, Human
uuuuagguguaaaauaaag

SEQ ID NO: 938271 - RNA, 21 nt, Human
aaaacugaaccaaauuaaaau

SEQ ID NO: 938272 - RNA, 23 nt, Human
cagacuccucuuccagagaaagg

SEQ ID NO: 938273 - RNA, 19 nt, Human
ccuccggaaaacugaacca

SEQ ID NO: 938274 - RNA, 24 nt, Human
cuacaaugcagacuccucuucccc

SEQ ID NO: 938275 - RNA, 27 nt, Human
gcagacuccucuuccagagaaaggucu

SEQ ID NO: 938276 - RNA, 22 nt, Human
gccagggcucagcucgcccucc

SEQ ID NO: 938277 - RNA, 20 nt, Human
uggcggcggccagggcucag

SEQ ID NO: 938278 - RNA, 25 nt, Human
acccuaaagaugugugacccagagg

SEQ ID NO: 938279 - RNA, 20 nt, Human
agaugugugacccagagggu

SEQ ID NO: 938280 - RNA, 20 nt, Human
agcagcagguggcagagcca

SEQ ID NO: 938281 - RNA, 19 nt, Human
auuggccacugacccuaaa

SEQ ID NO: 938282 - RNA, 28 nt, Human
caaaugugccccauuggccacugacccu

SEQ ID NO: 938283 - RNA, 23 nt, Human
cagagccagaguugggcucaagc

SEQ ID NO: 938284 - RNA, 21 nt, Human
caggagcagcagguggcagag

SEQ ID NO: 938285 - RNA, 19 nt, Human
caggucacaggagcagcag

SEQ ID NO: 938286 - RNA, 18 nt, Human
cugucugggcuggugugu

SEQ ID NO: 938287 - RNA, 20 nt, Human
gagcagcagguggcagagcc

SEQ ID NO: 938288 - RNA, 19 nt, Human
ggagcagcagguggcagag

SEQ ID NO: 938289 - RNA, 26 nt, Human
gugacccagaggguccugaggagcca

SEQ ID NO: 938290 - RNA, 24 nt, Human
uaacccauggccggugucauccuc

SEQ ID NO: 938291 - RNA, 24 nt, Human
uacagauuaggaaacugagaugag

SEQ ID NO: 938292 - RNA, 21 nt, Human
ucagcccugacaggucacagg

SEQ ID NO: 938293 - RNA, 23 nt, Human
ugagaugagcagaggugaaguca

SEQ ID NO: 938294 - RNA, 18 nt, Human
ugcagcugucugggcugg

SEQ ID NO: 938295 - RNA, 19 nt, Human
uggcagagccagaguuggg

SEQ ID NO: 938296 - RNA, 21 nt, Human
ugucugggcugguguguuggc

SEQ ID NO: 938297 - RNA, 24 nt, Human
uugcagcugucugggcuggugugu

SEQ ID NO: 938298 - RNA, 18 nt, Human
aaaaggacaaaagaccag

SEQ ID NO: 938299 - RNA, 21 nt, Human
aaccauggcuugccucaccug

SEQ ID NO: 938300 - RNA, 18 nt, Human
aaccccaagaagcuucac

SEQ ID NO: 938301 - RNA, 22 nt, Human
aagaccaagcaggagagacuga

SEQ ID NO: 938302 - RNA, 23 nt, Human
aagccagggcaaggcacuagaga

SEQ ID NO: 938303 - RNA, 23 nt, Human
aagcuuccaaaccccacccugaa

SEQ ID NO: 938304 - RNA, 22 nt, Human
aaggagcaaggggugggagggg

SEQ ID NO: 938305 - RNA, 21 nt, Human
aaggggugggaggggagggaa

SEQ ID NO: 938306 - RNA, 22 nt, Human
accaggcucagagggagcagag

SEQ ID NO: 938307 - RNA, 20 nt, Human
agagacccacauccuuccca

SEQ ID NO: 938308 - RNA, 24 nt, Human
agcagccaucuucuccugcagcua

SEQ ID NO: 938309 - RNA, 21 nt, Human
agcugcccuaugcccacugcc

SEQ ID NO: 938310 - RNA, 19 nt, Human
aggagcuggaggcuggcca

SEQ ID NO: 938311 - RNA, 20 nt, Human
aggcaggacuucaaauaagc

SEQ ID NO: 938312 - RNA, 20 nt, Human
aggcaggggguagcguggga

SEQ ID NO: 938313 - RNA, 19 nt, Human
aggcauagagggcccgggg

SEQ ID NO: 938314 - RNA, 18 nt, Human
agggaauggggucagggg

SEQ ID NO: 938315 - RNA, 22 nt, Human
agggagcagagcucaauggggg

SEQ ID NO: 938316 - RNA, 23 nt, Human
agggcaaggcacuagagacccac

SEQ ID NO: 938317 - RNA, 27 nt, Human
aggggugggaggggagggaaugggguc

SEQ ID NO: 938318 - RNA, 22 nt, Human
aggugaaaccuggagagagaag

SEQ ID NO: 938319 - RNA, 21 nt, Human
auuguccggaagggagcaggg

SEQ ID NO: 938320 - RNA, 21 nt, Human
caaaccccacccugaagccaa

SEQ ID NO: 938321 - RNA, 21 nt, Human
caacucgucaggucccaccaa

SEQ ID NO: 938322 - RNA, 21 nt, Human
caagcaagccacucacccuac

SEQ ID NO: 938323 - RNA, 22 nt, Human
caagcaagccacucacccuaca

SEQ ID NO: 938324 - RNA, 21 nt, Human
caagccacucacccuacagcc

SEQ ID NO: 938325 - RNA, 23 nt, Human
cacacuggaaggugaaaccugga

SEQ ID NO: 938326 - RNA, 19 nt, Human
caccaagcaagccacucac

SEQ ID NO: 938327 - RNA, 20 nt, Human
cacccuacagcccagcaacc

SEQ ID NO: 938328 - RNA, 21 nt, Human
cagcaggggaaccuggacccu

SEQ ID NO: 938329 - RNA, 18 nt, Human
cagcucccucucccgccu

SEQ ID NO: 938330 - RNA, 22 nt, Human
caggaggucugaggagcuggag

SEQ ID NO: 938331 - RNA, 18 nt, Human
caggcucagagggagcag

SEQ ID NO: 938332 - RNA, 24 nt, Human
caggucccaccaagcaagccacuc

SEQ ID NO: 938333 - RNA, 22 nt, Human
caucuucuccugcagcuaagcc

SEQ ID NO: 938334 - RNA, 18 nt, Human
cauucaucuuggagacca

SEQ ID NO: 938335 - RNA, 20 nt, Human
cauuccagcccacccagcug

SEQ ID NO: 938336 - RNA, 24 nt, Human
cauuccagcccacccagcuggggg

SEQ ID NO: 938337 - RNA, 23 nt, Human
ccaaaauaaaaaaggacaaaaga

SEQ ID NO: 938338 - RNA, 23 nt, Human
ccaaaccccacccugaagccaaa

SEQ ID NO: 938339 - RNA, 20 nt, Human
ccaccacacgcaagcaccgg

SEQ ID NO: 938340 - RNA, 20 nt, Human
ccagcacgacuuccagaagc

SEQ ID NO: 938341 - RNA, 22 nt, Human
ccagcagcuagugaggaguucc

SEQ ID NO: 938342 - RNA, 20 nt, Human
cccacauccuucccaugcca

SEQ ID NO: 938343 - RNA, 18 nt, Human
cccacugcccggggcugc

SEQ ID NO: 938344 - RNA, 26 nt, Human
cccacugcccggggcugcccucccug

SEQ ID NO: 938345 - RNA, 19 nt, Human
cccugcacagcaggggaac

SEQ ID NO: 938346 - RNA, 21 nt, Human
ccuaugcccacugcccggggc

SEQ ID NO: 938347 - RNA, 21 nt, Human
ccuccaaagaugagcauucau

SEQ ID NO: 938348 - RNA, 30 nt, Human
ccucccaaggcaggggguagcgugggaauu

SEQ ID NO: 938349 - RNA, 25 nt, Human
ccucccuagcuucuaccuggcaccc

SEQ ID NO: 938350 - RNA, 25 nt, Human
ccugaagccaaaccccacccaggag

SEQ ID NO: 938351 - RNA, 24 nt, Human
ccugcagcuaagccagggcaaggc

SEQ ID NO: 938352 - RNA, 18 nt, Human
cggagccccagcagcuag

SEQ ID NO: 938353 - RNA, 25 nt, Human
cuagagacccacauccuucccaugc

SEQ ID NO: 938354 - RNA, 27 nt, Human
cuccaaagaugagcauucaucuuggag

SEQ ID NO: 938355 - RNA, 23 nt, Human
cugaaaaacaggaauguggugcu

SEQ ID NO: 938356 - RNA, 19 nt, Human
cugaagccaaaccccaccc

SEQ ID NO: 938357 - RNA, 22 nt, Human
cuuccaaaccccacccugaagc

SEQ ID NO: 938358 - RNA, 19 nt, Human
cuucuaccuggcacccucc

SEQ ID NO: 938359 - RNA, 22 nt, Human
cuucuaccuggcacccuccaaa

SEQ ID NO: 938360 - RNA, 19 nt, Human
gaaaaacaggaauguggug

SEQ ID NO: 938361 - RNA, 19 nt, Human
gaagcuuccaaaccccacc

SEQ ID NO: 938362 - RNA, 23 nt, Human
gaagggagcagggugggcggagc

SEQ ID NO: 938363 - RNA, 22 nt, Human
gaauuucccacacuucuaggcc

SEQ ID NO: 938364 - RNA, 18 nt, Human
gagaagacacuccccucc

SEQ ID NO: 938365 - RNA, 19 nt, Human
gagcagggugggcggagcc

SEQ ID NO: 938366 - RNA, 19 nt, Human
gaggucugaggagcuggag

SEQ ID NO: 938367 - RNA, 21 nt, Human
gcagcucccucucccgccucc

SEQ ID NO: 938368 - RNA, 20 nt, Human
gcaggagagacugaggcucc

SEQ ID NO: 938369 - RNA, 21 nt, Human
gccucaccugggagaccagca

SEQ ID NO: 938370 - RNA, 18 nt, Human
ggaaucaagcauguguaa

SEQ ID NO: 938371 - RNA, 19 nt, Human
ggacaaaagaccaggcuca

SEQ ID NO: 938372 - RNA, 22 nt, Human
ggaguuccauuccagcccaccc

SEQ ID NO: 938373 - RNA, 18 nt, Human
ggcuucacuugccccagu

SEQ ID NO: 938374 - RNA, 20 nt, Human
gggaggggagggaauggggu

SEQ ID NO: 938375 - RNA, 18 nt, Human
gggcggagccccagcagc

SEQ ID NO: 938376 - RNA, 19 nt, Human
gugcuaagaggccagggac

SEQ ID NO: 938377 - RNA, 19 nt, Human
ucaccaccacacgcaagca

SEQ ID NO: 938378 - RNA, 26 nt, Human
uccaaagaugagcauucaucuuggag

SEQ ID NO: 938379 - RNA, 25 nt, Human
ucccaccaagcaagccacucacccu

SEQ ID NO: 938380 - RNA, 18 nt, Human
ucccagggugcaaaggcu

SEQ ID NO: 938381 - RNA, 21 nt, Human
ucccggcgccgcggcaccgcc

SEQ ID NO: 938382 - RNA, 20 nt, Human
ucccucucccgccuccuccc

SEQ ID NO: 938383 - RNA, 22 nt, Human
ucuaggccagacaaggagcaag

SEQ ID NO: 938384 - RNA, 20 nt, Human
ucucccgccuccuccccagg

SEQ ID NO: 938385 - RNA, 21 nt, Human
ucuggcuucacuugccccagu

SEQ ID NO: 938386 - RNA, 21 nt, Human
ucuucauuguccggaagggag

SEQ ID NO: 938387 - RNA, 18 nt, Human
ugaaaaacaggaaugugg

SEQ ID NO: 938388 - RNA, 22 nt, Human
ugagaaugaggcaggacuucaa

SEQ ID NO: 938389 - RNA, 24 nt, Human
ugagcugcccuaugcccacugccc

SEQ ID NO: 938390 - RNA, 21 nt, Human
ugaggaguuccauuccagccc

SEQ ID NO: 938391 - RNA, 22 nt, Human
ugaggaguuccauuccagccca

SEQ ID NO: 938392 - RNA, 18 nt, Human
ugagucgggucccggcgc

SEQ ID NO: 938393 - RNA, 23 nt, Human
ugccccaguugagggccaagacc

SEQ ID NO: 938394 - RNA, 22 nt, Human
ugccucaccugggagaccagca

SEQ ID NO: 938395 - RNA, 23 nt, Human
uggcuugccucaccugggagacc

SEQ ID NO: 938396 - RNA, 22 nt, Human
ugggaggggagggaaugggguc

SEQ ID NO: 938397 - RNA, 19 nt, Human
uguccggaagggagcaggg

SEQ ID NO: 938398 - RNA, 21 nt, Human
uucccacacuucuaggccaga

SEQ ID NO: 938399 - RNA, 22 nt, Human
aaccccacgaaacccugaaagc

SEQ ID NO: 938400 - RNA, 27 nt, Human
aagcccccgacacaggcugggcagucc

SEQ ID NO: 938401 - RNA, 20 nt, Human
aagccgccuuccgggcaaac

SEQ ID NO: 938402 - RNA, 27 nt, Human
accccacccccucuccuugcugaccag

SEQ ID NO: 938403 - RNA, 22 nt, Human
accccacgaaacccugaaagcc

SEQ ID NO: 938404 - RNA, 21 nt, Human
accgcagcccccaggggaguu

SEQ ID NO: 938405 - RNA, 26 nt, Human
acgccgcuccaggagggagggaacgc

SEQ ID NO: 938406 - RNA, 23 nt, Human
acugcaauuaaauagaauggaaa

SEQ ID NO: 938407 - RNA, 21 nt, Human
acugcagaccuaccaagaccu

SEQ ID NO: 938408 - RNA, 23 nt, Human
agacggggcccagggcggggggc

SEQ ID NO: 938409 - RNA, 24 nt, Human
agccucgggcgcgaccucacacca

SEQ ID NO: 938410 - RNA, 24 nt, Human
agcucugcucucccggggacccca

SEQ ID NO: 938411 - RNA, 21 nt, Human
agcugugcggcucaggacccc

SEQ ID NO: 938412 - RNA, 19 nt, Human
aggaaggagguggcuggcc

SEQ ID NO: 938413 - RNA, 19 nt, Human
aggcagagccgggcugagg

SEQ ID NO: 938414 - RNA, 18 nt, Human
aggcagcucguaguggug

SEQ ID NO: 938415 - RNA, 20 nt, Human
aggcccccagcagggcccag

SEQ ID NO: 938416 - RNA, 18 nt, Human
agggcggggccauggaga

SEQ ID NO: 938417 - RNA, 22 nt, Human
caacccaggucaccaccggcag

SEQ ID NO: 938418 - RNA, 23 nt, Human
caagccucgggcgcgaccucaca

SEQ ID NO: 938419 - RNA, 20 nt, Human
caccaccggcagcugcugcc

SEQ ID NO: 938420 - RNA, 18 nt, Human
caccaugggaccccacuc

SEQ ID NO: 938421 - RNA, 19 nt, Human
caccaugggaccccacucc

SEQ ID NO: 938422 - RNA, 22 nt, Human
caccccacgucccuaugcccga

SEQ ID NO: 938423 - RNA, 20 nt, Human
caccuccgccuugcucagag

SEQ ID NO: 938424 - RNA, 24 nt, Human
caccuccgccuugcucagagaccu

SEQ ID NO: 938425 - RNA, 26 nt, Human
cacugcaauuaaauagaauggaauga

SEQ ID NO: 938426 - RNA, 24 nt, Human
cagagaccugcaccaugggacccc

SEQ ID NO: 938427 - RNA, 20 nt, Human
cagcgggcuggcuggacgcc

SEQ ID NO: 938428 - RNA, 23 nt, Human
cagcucaaacaccucacuagcgg

SEQ ID NO: 938429 - RNA, 22 nt, Human
caggaaggaggcgucugugaug

SEQ ID NO: 938430 - RNA, 23 nt, Human
caggcccgggacucccgcuggcc

SEQ ID NO: 938431 - RNA, 25 nt, Human
caugggaccccacuccauccucagg

SEQ ID NO: 938432 - RNA, 25 nt, Human
ccacuccauccucaggacgguucac

SEQ ID NO: 938433 - RNA, 21 nt, Human
ccacugaggcugccgcggcca

SEQ ID NO: 938434 - RNA, 24 nt, Human
ccagcagggcccagcgggcuggcu

SEQ ID NO: 938435 - RNA, 21 nt, Human
cccacccccacgggcucggga

SEQ ID NO: 938436 - RNA, 22 nt, Human
cccacccccacgggcucgggaa

SEQ ID NO: 938437 - RNA, 20 nt, Human
cccagcgucgcgcccuaacc

SEQ ID NO: 938438 - RNA, 19 nt, Human
cccagggcggggggcuggc

SEQ ID NO: 938439 - RNA, 23 nt, Human
ccccaagccggccucuccuccac

SEQ ID NO: 938440 - RNA, 23 nt, Human
ccccaccccaagccggccucucc

SEQ ID NO: 938441 - RNA, 21 nt, Human
ccccacccccucuccuugcug

SEQ ID NO: 938442 - RNA, 21 nt, Human
ccccacgaaacccugaaagcc

SEQ ID NO: 938443 - RNA, 25 nt, Human
ccccacgaaacccugaaagcccccg

SEQ ID NO: 938444 - RNA, 27 nt, Human
cccccgacacaggcugggcagucccag

SEQ ID NO: 938445 - RNA, 19 nt, Human
cccggccgccaucggccgc

SEQ ID NO: 938446 - RNA, 28 nt, Human
cccuccagaaccuuccgcggaaccccaa

SEQ ID NO: 938447 - RNA, 27 nt, Human
cccuggcugcugccacugauguuggcg

SEQ ID NO: 938448 - RNA, 20 nt, Human
ccgccgccaucuuccccucg

SEQ ID NO: 938449 - RNA, 20 nt, Human
ccgccgcucuccucacggcc

SEQ ID NO: 938450 - RNA, 21 nt, Human
ccgccgcucuccucacggccu

SEQ ID NO: 938451 - RNA, 22 nt, Human
ccggccucuccuccacaccucc

SEQ ID NO: 938452 - RNA, 23 nt, Human
ccggccucuccuccacaccuccg

SEQ ID NO: 938453 - RNA, 24 nt, Human
ccgggcaaaccccacgaaacccug

SEQ ID NO: 938454 - RNA, 20 nt, Human
ccuccagaaccuuccgcgga

SEQ ID NO: 938455 - RNA, 23 nt, Human
ccuccagaaccuuccgcggaacc

SEQ ID NO: 938456 - RNA, 20 nt, Human
ccucccggccgccaucggcc

SEQ ID NO: 938457 - RNA, 23 nt, Human
ccucgcagccgccgcucuccuca

SEQ ID NO: 938458 - RNA, 18 nt, Human
ccugaaagcccccgacac

SEQ ID NO: 938459 - RNA, 18 nt, Human
ccugcugcaggauggcag

SEQ ID NO: 938460 - RNA, 23 nt, Human
cgcacacgcggggagggcggggc

SEQ ID NO: 938461 - RNA, 19 nt, Human
cgccuuccgggcaaacccc

SEQ ID NO: 938462 - RNA, 19 nt, Human
cgcggaaccccacccccuc

SEQ ID NO: 938463 - RNA, 20 nt, Human
cggggggacacuguccuggg

SEQ ID NO: 938464 - RNA, 18 nt, Human
cggguacaagccucgggc

SEQ ID NO: 938465 - RNA, 20 nt, Human
cguuggggccauggaggccg

SEQ ID NO: 938466 - RNA, 23 nt, Human
cuaccaagaccccuccagaaccu

SEQ ID NO: 938467 - RNA, 18 nt, Human
cucccggccgccgccgcc

SEQ ID NO: 938468 - RNA, 19 nt, Human
cucccggccgccgccgcca

SEQ ID NO: 938469 - RNA, 23 nt, Human
cuccucacggccucccggccgcc

SEQ ID NO: 938470 - RNA, 24 nt, Human
cugaaagcccccgacacaggcugg

SEQ ID NO: 938471 - RNA, 19 nt, Human
cugcaggauggcaggcagc

SEQ ID NO: 938472 - RNA, 19 nt, Human
cugcugccacugauguugg

SEQ ID NO: 938473 - RNA, 19 nt, Human
cuggccggcagagucaggg

SEQ ID NO: 938474 - RNA, 24 nt, Human
cuggcgcacacgcggggagggcgg

SEQ ID NO: 938475 - RNA, 25 nt, Human
gaaccuuccgcggaaccccaccccc

SEQ ID NO: 938476 - RNA, 23 nt, Human
gacacaggcugggcagucccaga

SEQ ID NO: 938477 - RNA, 21 nt, Human
gagggcggggccauggagaag

SEQ ID NO: 938478 - RNA, 24 nt, Human
gagggcggggccauggagaaggca

SEQ ID NO: 938479 - RNA, 21 nt, Human
gcaggggucagaggcggcuca

SEQ ID NO: 938480 - RNA, 22 nt, Human
gccucuccuccacaccuccgcc

SEQ ID NO: 938481 - RNA, 19 nt, Human
gccuggcgcacacgcgggg

SEQ ID NO: 938482 - RNA, 24 nt, Human
gcgcucaggccggacaggaaggag

SEQ ID NO: 938483 - RNA, 24 nt, Human
gcggggagggcggggccauggaga

SEQ ID NO: 938484 - RNA, 18 nt, Human
gcugcaggauggcaggca

SEQ ID NO: 938485 - RNA, 19 nt, Human
gcuggacgccgcuccagga

SEQ ID NO: 938486 - RNA, 21 nt, Human
ggagguggcuggccuccccca

SEQ ID NO: 938487 - RNA, 19 nt, Human
ggaguugugucagaagcug

SEQ ID NO: 938488 - RNA, 21 nt, Human
ggcccuggcugcugccacuga

SEQ ID NO: 938489 - RNA, 18 nt, Human
gggacucccgcuggcccc

SEQ ID NO: 938490 - RNA, 18 nt, Human
gggggaggaaagccgccu

SEQ ID NO: 938491 - RNA, 20 nt, Human
ggucagaggcggcucagcug

SEQ ID NO: 938492 - RNA, 20 nt, Human
gugcggcucaggaccccacc

SEQ ID NO: 938493 - RNA, 21 nt, Human
guugugucagaagcugcggag

SEQ ID NO: 938494 - RNA, 19 nt, Human
uaccaagaccccuccagaa

SEQ ID NO: 938495 - RNA, 22 nt, Human
uagaauggaaugagcgcuccuc

SEQ ID NO: 938496 - RNA, 22 nt, Human
uauauacaaacacaauuuugua

SEQ ID NO: 938497 - RNA, 21 nt, Human
ucacggccucccggccgccgc

SEQ ID NO: 938498 - RNA, 23 nt, Human
ucacucggggggacacuguccug

SEQ ID NO: 938499 - RNA, 19 nt, Human
ucaggaccccaccuccgag

SEQ ID NO: 938500 - RNA, 20 nt, Human
ucaggggcuguagccggggc

SEQ ID NO: 938501 - RNA, 28 nt, Human
uccagaaccuuccgcggaaccccacccc

SEQ ID NO: 938502 - RNA, 21 nt, Human
ucccagaggaaggagguggcu

SEQ ID NO: 938503 - RNA, 20 nt, Human
ucccggccgccaucggccgc

SEQ ID NO: 938504 - RNA, 20 nt, Human
ucccuaugcccgaggcgcaa

SEQ ID NO: 938505 - RNA, 22 nt, Human
uccgccuugcucagagaccugc

SEQ ID NO: 938506 - RNA, 18 nt, Human
uccgcggaaccccacccc

SEQ ID NO: 938507 - RNA, 24 nt, Human
ucgcgcccuaacgacccgcaagug

SEQ ID NO: 938508 - RNA, 19 nt, Human
ugacugguuuggccgccgg

SEQ ID NO: 938509 - RNA, 21 nt, Human
ugauguuggcgccugcacccc

SEQ ID NO: 938510 - RNA, 20 nt, Human
ugccgcugucaacagacagu

SEQ ID NO: 938511 - RNA, 18 nt, Human
uggccccaggcgagacgg

SEQ ID NO: 938512 - RNA, 19 nt, Human
uggccucccccacccccac

SEQ ID NO: 938513 - RNA, 21 nt, Human
ugucagaagcugcggagucac

SEQ ID NO: 938514 - RNA, 19 nt, Human
uguccuggggggcgugggg

SEQ ID NO: 938515 - RNA, 22 nt, Human
uugccgcugucaacagacaguu

SEQ ID NO: 938516 - RNA, 22 nt, Human
uugcucagagaccugcaccaug

SEQ ID NO: 938517 - RNA, 24 nt, Human
uuugccgcugucaacagacaguuu

SEQ ID NO: 938518 - RNA, 18 nt, Human
uuuuuuuuuuuuuugccg

SEQ ID NO: 938519 - RNA, 20 nt, Human
uuuuuuuuuuuuuuuugccg

SEQ ID NO: 938520 - RNA, 18 nt, Human
uuuuuuuuuuuuuuuuug

SEQ ID NO: 938521 - RNA, 20 nt, Human
uuuuuuuuuuuuuuuuugcc

SEQ ID NO: 938522 - RNA, 22 nt, Human
aaaaauccacaaggagaaugca

SEQ ID NO: 938523 - RNA, 18 nt, Human
aaacuguaaagcacuuaa

SEQ ID NO: 938524 - RNA, 23 nt, Human
aaaugcauuuccuuaggugacaa

SEQ ID NO: 938525 - RNA, 21 nt, Human
aaccauaaaggcgaagggucc

SEQ ID NO: 938526 - RNA, 19 nt, Human
aagaaguuuccagcacuca

SEQ ID NO: 938527 - RNA, 19 nt, Human
aagccaaucaaagauggga

SEQ ID NO: 938528 - RNA, 21 nt, Human
aagggcccuacaaggaagagu

SEQ ID NO: 938529 - RNA, 22 nt, Human
aaugccaugaacacacauccua

SEQ ID NO: 938530 - RNA, 23 nt, Human
accccaucaccagcccggacacc

SEQ ID NO: 938531 - RNA, 19 nt, Human
acugaggaggaggaggcgg

SEQ ID NO: 938532 - RNA, 24 nt, Human
agaaaaaccugcuaacucuguauc

SEQ ID NO: 938533 - RNA, 22 nt, Human
agccaggaugucaacuguagug

SEQ ID NO: 938534 - RNA, 20 nt, Human
aggaugucaacuguagugaa

SEQ ID NO: 938535 - RNA, 22 nt, Human
aguaagagucuuacgaaaggga

SEQ ID NO: 938536 - RNA, 23 nt, Human
aguugggucacauugugcuggcu

SEQ ID NO: 938537 - RNA, 22 nt, Human
caaauaccaagccaaucaaaga

SEQ ID NO: 938538 - RNA, 18 nt, Human
caacuguagugaaccauc

SEQ ID NO: 938539 - RNA, 19 nt, Human
cagaagcuccaaauaccaa

SEQ ID NO: 938540 - RNA, 19 nt, Human
cagcacacauuguacagcc

SEQ ID NO: 938541 - RNA, 24 nt, Human
cagcccggacaccggcuccagcgg

SEQ ID NO: 938542 - RNA, 19 nt, Human
ccccaucaccagcccggac

SEQ ID NO: 938543 - RNA, 20 nt, Human
ccccaucaccagcccggaca

SEQ ID NO: 938544 - RNA, 18 nt, Human
cccggacuggaauggacu

SEQ ID NO: 938545 - RNA, 22 nt, Human
cccuuugcuggaucacuggccu

SEQ ID NO: 938546 - RNA, 20 nt, Human
cgaaagggaauuaaccccau

SEQ ID NO: 938547 - RNA, 19 nt, Human
cugcaaacaaugaaaacaa

SEQ ID NO: 938548 - RNA, 20 nt, Human
gaaaugcauauuuuuccccc

SEQ ID NO: 938549 - RNA, 19 nt, Human
gacaaaaaauccacaagga

SEQ ID NO: 938550 - RNA, 19 nt, Human
gaggagucccauguccuug

SEQ ID NO: 938551 - RNA, 24 nt, Human
gaucacuggccuuucuucaaaagg

SEQ ID NO: 938552 - RNA, 22 nt, Human
gcgcggcggggcgacggcgggg

SEQ ID NO: 938553 - RNA, 24 nt, Human
guuacugaggaggaggaggcgguu

SEQ ID NO: 938554 - RNA, 19 nt, Human
guuccuuguucauaagugc

SEQ ID NO: 938555 - RNA, 18 nt, Human
uaacagaagcuccaaaua

SEQ ID NO: 938556 - RNA, 25 nt, Human
uaaccccaucaccagcccggacacc

SEQ ID NO: 938557 - RNA, 18 nt, Human
uaauuugcuguacaauag

SEQ ID NO: 938558 - RNA, 25 nt, Human
uacaagaauuuagaaauauaaaaca

SEQ ID NO: 938559 - RNA, 24 nt, Human
uaccuaaaugaauaaggaaagggc

SEQ ID NO: 938560 - RNA, 18 nt, Human
uagaaugauuucuguucc

SEQ ID NO: 938561 - RNA, 20 nt, Human
uauaaaaguuaggaggcauu

SEQ ID NO: 938562 - RNA, 22 nt, Human
ucauucugauguggauuccuag

SEQ ID NO: 938563 - RNA, 24 nt, Human
ucauucugauguggauuccuaguc

SEQ ID NO: 938564 - RNA, 21 nt, Human
ucccacaaaaauaaaauaaaa

SEQ ID NO: 938565 - RNA, 23 nt, Human
uccgcugcaaacaaugaaaacaa

SEQ ID NO: 938566 - RNA, 20 nt, Human
uccuuuggauuugggauugu

SEQ ID NO: 938567 - RNA, 24 nt, Human
ucuauaauguuaacagaagcucca

SEQ ID NO: 938568 - RNA, 24 nt, Human
ucucuauaauguuaacagaagcug

SEQ ID NO: 938569 - RNA, 21 nt, Human
ucuuugauguccagugauccg

SEQ ID NO: 938570 - RNA, 25 nt, Human
ugaacugaaaaaggcuugcaucagc

SEQ ID NO: 938571 - RNA, 22 nt, Human
ugacaaaaaauccacaaggaga

SEQ ID NO: 938572 - RNA, 19 nt, Human
ugcaaaaagaaauacaggg

SEQ ID NO: 938573 - RNA, 21 nt, Human
uggaaguauuuuccugcuuag

SEQ ID NO: 938574 - RNA, 18 nt, Human
uggauuugggauuguggu

SEQ ID NO: 938575 - RNA, 24 nt, Human
uguacaauagagcuuuggaucuga

SEQ ID NO: 938576 - RNA, 26 nt, Human
uuaaccccaucaccagcccggacacc

SEQ ID NO: 938577 - RNA, 22 nt, Human
uuaagaacauaauuuauuuuau

SEQ ID NO: 938578 - RNA, 18 nt, Human
uuacugaggaggaggagg

SEQ ID NO: 938579 - RNA, 21 nt, Human
uugaaaaaaaaaaaguggaag

SEQ ID NO: 938580 - RNA, 26 nt, Human
uuuccagcacucaucaaaugcauuuc

SEQ ID NO: 938581 - RNA, 21 nt, Human
uuuuuugguaauuguuucuga

SEQ ID NO: 938582 - RNA, 22 nt, Human
aaacaaaaccacaacaauucaa

SEQ ID NO: 938583 - RNA, 22 nt, Human
aaauagugucuucuguaugcuu

SEQ ID NO: 938584 - RNA, 24 nt, Human
aagagacaaucauuucuguaacuc

SEQ ID NO: 938585 - RNA, 21 nt, Human
aagggcuaaaaacugagaacc

SEQ ID NO: 938586 - RNA, 21 nt, Human
aaguccaacuuccacgaccac

SEQ ID NO: 938587 - RNA, 23 nt, Human
aauauccuggaggagugggaggu

SEQ ID NO: 938588 - RNA, 18 nt, Human
acaaaaccacaacaauuc

SEQ ID NO: 938589 - RNA, 23 nt, Human
acaagagcucucaaauacaaaca

SEQ ID NO: 938590 - RNA, 19 nt, Human
acaccaugaccagcagguu

SEQ ID NO: 938591 - RNA, 25 nt, Human
acuagaauguaaagaugacgccagu

SEQ ID NO: 938592 - RNA, 22 nt, Human
acuucagcaauggggucaucca

SEQ ID NO: 938593 - RNA, 21 nt, Human
acuuguucauuuucaucugcu

SEQ ID NO: 938594 - RNA, 20 nt, Human
agaacaauugcucacgaugc

SEQ ID NO: 938595 - RNA, 21 nt, Human
agaacaggaauagggcucaga

SEQ ID NO: 938596 - RNA, 18 nt, Human
aggauggaauggcugcaa

SEQ ID NO: 938597 - RNA, 26 nt, Human
aggcuuuggaaguugucaugggagcu

SEQ ID NO: 938598 - RNA, 21 nt, Human
agggaauaaaaccucuggacu

SEQ ID NO: 938599 - RNA, 23 nt, Human
auugcucacagacgaugagacag

SEQ ID NO: 938600 - RNA, 24 nt, Human
caaauaggucauccaaaggcuaga

SEQ ID NO: 938601 - RNA, 18 nt, Human
caacucuuucucucuagg

SEQ ID NO: 938602 - RNA, 23 nt, Human
caagggcuaaaaacugagaacca

SEQ ID NO: 938603 - RNA, 20 nt, Human
cacccuccuccccaaacuac

SEQ ID NO: 938604 - RNA, 21 nt, Human
cacccuccuccccaaacuacu

SEQ ID NO: 938605 - RNA, 23 nt, Human
cacccuccuccccaaacuacucc

SEQ ID NO: 938606 - RNA, 24 nt, Human
cacuuauuucuucaguuguuccua

SEQ ID NO: 938607 - RNA, 20 nt, Human
cagcuaacaagagcucucaa

SEQ ID NO: 938608 - RNA, 24 nt, Human
cagcuaacaagagcucucaaauac

SEQ ID NO: 938609 - RNA, 21 nt, Human
cagcugcuucuauaaugauau

SEQ ID NO: 938610 - RNA, 18 nt, Human
cagugguuuucaaauagg

SEQ ID NO: 938611 - RNA, 21 nt, Human
cauccuugggguccaagccuu

SEQ ID NO: 938612 - RNA, 24 nt, Human
caugaccagcagguuccuaacacc

SEQ ID NO: 938613 - RNA, 20 nt, Human
ccacccuccuccccaaacua

SEQ ID NO: 938614 - RNA, 22 nt, Human
ccagcagguuccuaacaccuca

SEQ ID NO: 938615 - RNA, 21 nt, Human
ccagcugaccucauaggcacu

SEQ ID NO: 938616 - RNA, 24 nt, Human
ccagcugaccucauaggcacugga

SEQ ID NO: 938617 - RNA, 23 nt, Human
ccgcuaaagaaauccccaaauau

SEQ ID NO: 938618 - RNA, 22 nt, Human
ccuggaggagugggagguggcu

SEQ ID NO: 938619 - RNA, 19 nt, Human
ccuucagaugacucagcug

SEQ ID NO: 938620 - RNA, 19 nt, Human
ccuugggguccaagccuuc

SEQ ID NO: 938621 - RNA, 19 nt, Human
cgugcaaaguggagacugg

SEQ ID NO: 938622 - RNA, 23 nt, Human
cuaaaacuuucugagguaaacuu

SEQ ID NO: 938623 - RNA, 26 nt, Human
cuccaauacucuccguuuaacugucc

SEQ ID NO: 938624 - RNA, 20 nt, Human
cugucuuuuccaaugcccca

SEQ ID NO: 938625 - RNA, 20 nt, Human
cuugaggagaugcaggagga

SEQ ID NO: 938626 - RNA, 20 nt, Human
cuuguauucagugcaggguc

SEQ ID NO: 938627 - RNA, 22 nt, Human
gaagugacaguuuuauaaacug

SEQ ID NO: 938628 - RNA, 26 nt, Human
gagucagacaaguugucagauuuagc

SEQ ID NO: 938629 - RNA, 24 nt, Human
gcaaagggcuuccuauuucucuca

SEQ ID NO: 938630 - RNA, 19 nt, Human
gcauccuugggguccaagc

SEQ ID NO: 938631 - RNA, 19 nt, Human
gcucacagacgaugagaca

SEQ ID NO: 938632 - RNA, 18 nt, Human
ggaggacuagaauguaaa

SEQ ID NO: 938633 - RNA, 21 nt, Human
ggcagcuucauuuggccuucc

SEQ ID NO: 938634 - RNA, 18 nt, Human
ggcuuggaaauaauaaug

SEQ ID NO: 938635 - RNA, 24 nt, Human
ggugcuaugagaugugggggaggc

SEQ ID NO: 938636 - RNA, 23 nt, Human
guggcagcuucauuuggccuucc

SEQ ID NO: 938637 - RNA, 22 nt, Human
uaaaaaaacugaaaaaauuaaa

SEQ ID NO: 938638 - RNA, 27 nt, Human
uacucugugggguugaucagguucccc

SEQ ID NO: 938639 - RNA, 21 nt, Human
uagacugcugaaacuuguuca

SEQ ID NO: 938640 - RNA, 22 nt, Human
uaggccccugcuccuacagcuc

SEQ ID NO: 938641 - RNA, 24 nt, Human
uauuucauugcucggaguagaggg

SEQ ID NO: 938642 - RNA, 28 nt, Human
ucagcuggggugcucuccaauacucucc

SEQ ID NO: 938643 - RNA, 23 nt, Human
ucauuucuguaacuccagcuccu

SEQ ID NO: 938644 - RNA, 18 nt, Human
uccaaaggcuagacugcu

SEQ ID NO: 938645 - RNA, 22 nt, Human
uccaacuuccacgaccacuguc

SEQ ID NO: 938646 - RNA, 18 nt, Human
uccaaugccccaguggau

SEQ ID NO: 938647 - RNA, 21 nt, Human
uccauugcucaggaaacuauu

SEQ ID NO: 938648 - RNA, 23 nt, Human
ucccaaaggacugacaagaaacc

SEQ ID NO: 938649 - RNA, 19 nt, Human
uccgcuaaagaaaucccca

SEQ ID NO: 938650 - RNA, 20 nt, Human
uccuggaggagugggaggug

SEQ ID NO: 938651 - RNA, 21 nt, Human
uccuggaggagugggaggugg

SEQ ID NO: 938652 - RNA, 20 nt, Human
ucucccacaaaauguuacug

SEQ ID NO: 938653 - RNA, 23 nt, Human
ucuccguuuaacugucccauagu

SEQ ID NO: 938654 - RNA, 22 nt, Human
ucuguaacuguggucccaaggc

SEQ ID NO: 938655 - RNA, 24 nt, Human
ucuguaacuguggucccaaggcag

SEQ ID NO: 938656 - RNA, 24 nt, Human
ucugugggguugaugcaagugggc

SEQ ID NO: 938657 - RNA, 19 nt, Human
ucuucaguuguuccuaaaa

SEQ ID NO: 938658 - RNA, 23 nt, Human
ucuucaguuguuccuaaaacuuu

SEQ ID NO: 938659 - RNA, 21 nt, Human
ucuucuguaugcuucuuacca

SEQ ID NO: 938660 - RNA, 21 nt, Human
ucuuucucucuaggcuuccuu

SEQ ID NO: 938661 - RNA, 24 nt, Human
ucuuuuguuugucccuucuuccug

SEQ ID NO: 938662 - RNA, 21 nt, Human
ugaagcaccuggcuuacucug

SEQ ID NO: 938663 - RNA, 21 nt, Human
ugaagugacaguuuuauaaac

SEQ ID NO: 938664 - RNA, 21 nt, Human
ugacaagaaacccuguggcag

SEQ ID NO: 938665 - RNA, 23 nt, Human
ugacaagaaacccuguggcagcu

SEQ ID NO: 938666 - RNA, 24 nt, Human
ugacacaguacacaaucaagcccu

SEQ ID NO: 938667 - RNA, 19 nt, Human
ugaccucugcacugccaca

SEQ ID NO: 938668 - RNA, 20 nt, Human
ugacuaugaucuccuauccc

SEQ ID NO: 938669 - RNA, 21 nt, Human
ugagaccuacauugcauuggu

SEQ ID NO: 938670 - RNA, 19 nt, Human
ugagaugugggggaggcau

SEQ ID NO: 938671 - RNA, 23 nt, Human
ugaggggagccuugaggagaugc

SEQ ID NO: 938672 - RNA, 28 nt, Human
ugaggugacacaguacacaaucaagccc

SEQ ID NO: 938673 - RNA, 18 nt, Human
ugaggugguucuugccca

SEQ ID NO: 938674 - RNA, 22 nt, Human
ugaggugguucuugcccauucc

SEQ ID NO: 938675 - RNA, 20 nt, Human
ugcaaauuaugccucugagg

SEQ ID NO: 938676 - RNA, 19 nt, Human
ugcaagugggcuuuaguug

SEQ ID NO: 938677 - RNA, 21 nt, Human
ugcacugccacacuauaaucu

SEQ ID NO: 938678 - RNA, 23 nt, Human
ugccagggccugagaggaacacc

SEQ ID NO: 938679 - RNA, 18 nt, Human
ugcuucgcuaucugcauc

SEQ ID NO: 938680 - RNA, 19 nt, Human
uggaaaaguauguccucuc

SEQ ID NO: 938681 - RNA, 18 nt, Human
uggaggagugggaggugg

SEQ ID NO: 938682 - RNA, 19 nt, Human
uggagucaacagaacaauu

SEQ ID NO: 938683 - RNA, 21 nt, Human
uggagucaacagaacaauugc

SEQ ID NO: 938684 - RNA, 23 nt, Human
ugggcgcuugcuaggccccugcu

SEQ ID NO: 938685 - RNA, 21 nt, Human
ugggucaguggcauccuuggg

SEQ ID NO: 938686 - RNA, 18 nt, Human
uguaaagaugacuucugu

SEQ ID NO: 938687 - RNA, 23 nt, Human
ugucaugggagcugcuugaacac

SEQ ID NO: 938688 - RNA, 27 nt, Human
ugucaugggagcugcuugaacacgaag

SEQ ID NO: 938689 - RNA, 20 nt, Human
uguggucccaaggcaguucc

SEQ ID NO: 938690 - RNA, 21 nt, Human
ugugugugggguccuuccuuu

SEQ ID NO: 938691 - RNA, 22 nt, Human
uuacucugugggguugaugcaa

SEQ ID NO: 938692 - RNA, 19 nt, Human
uuacugcagccagcugaga

SEQ ID NO: 938693 - RNA, 22 nt, Human
uucagcaauggggucauccaaa

SEQ ID NO: 938694 - RNA, 20 nt, Human
uucagggacugccagggccu

SEQ ID NO: 938695 - RNA, 26 nt, Human
uucccaaaggacugacaagaaacccc

SEQ ID NO: 938696 - RNA, 19 nt, Human
uucccacccuccuccccaa

SEQ ID NO: 938697 - RNA, 19 nt, Human
uucccacccuccuccccaa

SEQ ID NO: 938698 - RNA, 20 nt, Human
uucccacccuccuccccaaa

SEQ ID NO: 938699 - RNA, 22 nt, Human
aacauauugcucuucuaacuuu

SEQ ID NO: 938700 - RNA, 20 nt, Human
aauuuccuuaaaaauuaaca

SEQ ID NO: 938701 - RNA, 23 nt, Human
agagaaggaaacauauugcucuu

SEQ ID NO: 938702 - RNA, 18 nt, Human
gagaaggaaacauauugc

SEQ ID NO: 938703 - RNA, 22 nt, Human
uccaaguagauuaucauaguaa

SEQ ID NO: 938704 - RNA, 18 nt, Human
aaaaaaucccucccccuc

SEQ ID NO: 938705 - RNA, 21 nt, Human
aaaaaucccucccccucaacc

SEQ ID NO: 938706 - RNA, 23 nt, Human
aagcaaaacaaugggggaccccu

SEQ ID NO: 938707 - RNA, 23 nt, Human
aaucccucccccucaaccaucac

SEQ ID NO: 938708 - RNA, 22 nt, Human
acagcgcuggcgagcuaggccc

SEQ ID NO: 938709 - RNA, 22 nt, Human
acaggcaaguggucaccagagc

SEQ ID NO: 938710 - RNA, 21 nt, Human
agagcucuagggagcagaggg

SEQ ID NO: 938711 - RNA, 18 nt, Human
agcagggggugcugcagg

SEQ ID NO: 938712 - RNA, 23 nt, Human
agccaccuuucaccuguaggccc

SEQ ID NO: 938713 - RNA, 18 nt, Human
aggcaaguggucaccaga

SEQ ID NO: 938714 - RNA, 22 nt, Human
aggcagggaagaggccccccaa

SEQ ID NO: 938715 - RNA, 26 nt, Human
aggcuuuguggaaucugagggcagcc

SEQ ID NO: 938716 - RNA, 24 nt, Human
agggaagaggccccccaaaaacac

SEQ ID NO: 938717 - RNA, 21 nt, Human
caaagcauuagcaccuccacc

SEQ ID NO: 938718 - RNA, 22 nt, Human
caccaacagcuaacuaaagugc

SEQ ID NO: 938719 - RNA, 21 nt, Human
cacuugggccaccugggccuu

SEQ ID NO: 938720 - RNA, 21 nt, Human
cagccgccuccgcacgcccgg

SEQ ID NO: 938721 - RNA, 20 nt, Human
caggcccugcccgcacuccu

SEQ ID NO: 938722 - RNA, 21 nt, Human
caggcccugcccgcacuccuc

SEQ ID NO: 938723 - RNA, 20 nt, Human
cauccccaaggcccauagaa

SEQ ID NO: 938724 - RNA, 19 nt, Human
cauuagcaccuccaccauc

SEQ ID NO: 938725 - RNA, 21 nt, Human
ccaagcugggccaccaagagc

SEQ ID NO: 938726 - RNA, 18 nt, Human
ccacugccgccuucccgc

SEQ ID NO: 938727 - RNA, 18 nt, Human
ccacugccgccuucccgc

SEQ ID NO: 938728 - RNA, 20 nt, Human
ccccacugcgcucccgucca

SEQ ID NO: 938729 - RNA, 21 nt, Human
ccccuucaaccacugccgccu

SEQ ID NO: 938730 - RNA, 18 nt, Human
cccguccaugaggagcac

SEQ ID NO: 938731 - RNA, 18 nt, Human
ccgcacgcccggcccucg

SEQ ID NO: 938732 - RNA, 25 nt, Human
ccucaucuuuccccuaccuucccca

SEQ ID NO: 938733 - RNA, 21 nt, Human
ccuccaccauccccaaggccc

SEQ ID NO: 938734 - RNA, 22 nt, Human
ccuccaccauccccaaggccca

SEQ ID NO: 938735 - RNA, 22 nt, Human
ccugcccgcacuccuccugggc

SEQ ID NO: 938736 - RNA, 22 nt, Human
ccuucaaccacugccgccuucc

SEQ ID NO: 938737 - RNA, 25 nt, Human
cgagggaggggagagaggcuuugug

SEQ ID NO: 938738 - RNA, 22 nt, Human
cgcuggggaagcaaaacaaugg

SEQ ID NO: 938739 - RNA, 18 nt, Human
cucaggacugucugguca

SEQ ID NO: 938740 - RNA, 22 nt, Human
cuccaggucaggcccugcccgc

SEQ ID NO: 938741 - RNA, 21 nt, Human
cucccccucaaccaucacucc

SEQ ID NO: 938742 - RNA, 18 nt, Human
cugccugggugggggugg

SEQ ID NO: 938743 - RNA, 19 nt, Human
cugggucucaggacugucu

SEQ ID NO: 938744 - RNA, 19 nt, Human
cuuccugccuggguggggg

SEQ ID NO: 938745 - RNA, 21 nt, Human
cuuccugccugggugggggug

SEQ ID NO: 938746 - RNA, 18 nt, Human
cuucugggucucaggacu

SEQ ID NO: 938747 - RNA, 18 nt, Human
gaaaaaaaucccuccccc

SEQ ID NO: 938748 - RNA, 19 nt, Human
gagcacagcgcuggcgagc

SEQ ID NO: 938749 - RNA, 18 nt, Human
gaggagcacagcgcuggc

SEQ ID NO: 938750 - RNA, 18 nt, Human
gagggaggggagagaggc

SEQ ID NO: 938751 - RNA, 23 nt, Human
gcaaaacaaugggggaccccuuc

SEQ ID NO: 938752 - RNA, 23 nt, Human
gcaaagcauuagcaccuccacca

SEQ ID NO: 938753 - RNA, 21 nt, Human
gcagggaagaggccccccaaa

SEQ ID NO: 938754 - RNA, 19 nt, Human
gcugcaggaggaaagugug

SEQ ID NO: 938755 - RNA, 24 nt, Human
gcuuccugccuggguggggguggg

SEQ ID NO: 938756 - RNA, 20 nt, Human
ggaagcaaaacaauggggga

SEQ ID NO: 938757 - RNA, 22 nt, Human
ggagcacagcgcuggcgagcua

SEQ ID NO: 938758 - RNA, 28 nt, Human
gggaagaggccccccaaaaacacagugg

SEQ ID NO: 938759 - RNA, 18 nt, Human
ggugcugcaggaggaaag

SEQ ID NO: 938760 - RNA, 21 nt, Human
gugugugcuggccaagcuggg

SEQ ID NO: 938761 - RNA, 19 nt, Human
uaaagugcuugacaggagc

SEQ ID NO: 938762 - RNA, 22 nt, Human
uaggccccaagcaaagcauuag

SEQ ID NO: 938763 - RNA, 28 nt, Human
uagggagcagaggggccccagaaggcag

SEQ ID NO: 938764 - RNA, 26 nt, Human
ucaacacugugccucaucuuuccccu

SEQ ID NO: 938765 - RNA, 21 nt, Human
uccugccuggguggggguggg

SEQ ID NO: 938766 - RNA, 19 nt, Human
ugaaaaaaaucccuccccc

SEQ ID NO: 938767 - RNA, 23 nt, Human
ugccgccuucccgccuccucagc

SEQ ID NO: 938768 - RNA, 25 nt, Human
ugccucaucuuuccccuaccuuccc

SEQ ID NO: 938769 - RNA, 20 nt, Human
ugccugggugggggugggac

SEQ ID NO: 938770 - RNA, 24 nt, Human
uggccaagcugggccaccaagagc

SEQ ID NO: 938771 - RNA, 20 nt, Human
uggcgagcuaggcccaggga

SEQ ID NO: 938772 - RNA, 18 nt, Human
ugggggugggacgaggga

SEQ ID NO: 938773 - RNA, 23 nt, Human
uuccccacugcgcucccguccau

SEQ ID NO: 938774 - RNA, 19 nt, Human
uugggccaccugggccuuc

SEQ ID NO: 938775 - RNA, 23 nt, Human
uuuccccuaccuuccccacugcg

SEQ ID NO: 938776 - RNA, 24 nt, Human
uuugaaaaaaaucccucccccuca

SEQ ID NO: 938777 - RNA, 21 nt, Human
aaaaaaacaaccuguacuagg

SEQ ID NO: 938778 - RNA, 23 nt, Human
aaaaaaacaaccuguacuaggcu

SEQ ID NO: 938779 - RNA, 24 nt, Human
aaaacaagacucagcaaaccaaag

SEQ ID NO: 938780 - RNA, 19 nt, Human
aaaaggaaaaccaaagaag

SEQ ID NO: 938781 - RNA, 20 nt, Human
aaaaggaaaaccaaagaagu

SEQ ID NO: 938782 - RNA, 21 nt, Human
aaaaggacaggguuagagaua

SEQ ID NO: 938783 - RNA, 21 nt, Human
aaacaagacucagcaaaccaa

SEQ ID NO: 938784 - RNA, 22 nt, Human
aaacagcaaaugaaggcaucug

SEQ ID NO: 938785 - RNA, 18 nt, Human
aaaccgagccaccccggc

SEQ ID NO: 938786 - RNA, 20 nt, Human
aaaccgagccaccccggcca

SEQ ID NO: 938787 - RNA, 23 nt, Human
aaagaaacuuaacacugaaaaag

SEQ ID NO: 938788 - RNA, 23 nt, Human
aaauuaauaauauucuaaaguau

SEQ ID NO: 938789 - RNA, 23 nt, Human
aagaaguggccaaggagaagaaa

SEQ ID NO: 938790 - RNA, 24 nt, Human
aagaaguggccaaggagaagaaau

SEQ ID NO: 938791 - RNA, 20 nt, Human
aagacaccaauuaacugaca

SEQ ID NO: 938792 - RNA, 23 nt, Human
aagagacuuacagaaaaggggca

SEQ ID NO: 938793 - RNA, 28 nt, Human
aagcagaacauagaaguaaaagggaccc

SEQ ID NO: 938794 - RNA, 20 nt, Human
aaggaccccuaagucgacga

SEQ ID NO: 938795 - RNA, 22 nt, Human
aagugaauaggcuauacaccua

SEQ ID NO: 938796 - RNA, 23 nt, Human
acaaaaaaggaaaaccaaagaag

SEQ ID NO: 938797 - RNA, 22 nt, Human
acaaaauggccuccccuccccc

SEQ ID NO: 938798 - RNA, 20 nt, Human
acaaagagaggaggaaaagc

SEQ ID NO: 938799 - RNA, 21 nt, Human
acauagccccaggaaaccgag

SEQ ID NO: 938800 - RNA, 24 nt, Human
accacaacacccuccaaacacuag

SEQ ID NO: 938801 - RNA, 21 nt, Human
accaugaggugguuggggagg

SEQ ID NO: 938802 - RNA, 18 nt, Human
acgcucccacgggcgagc

SEQ ID NO: 938803 - RNA, 21 nt, Human
acucagccucugcuagaaaug

SEQ ID NO: 938804 - RNA, 22 nt, Human
agaaagacaaaccacaacaccc

SEQ ID NO: 938805 - RNA, 26 nt, Human
agaaagacaaaccacaacacccucca

SEQ ID NO: 938806 - RNA, 25 nt, Human
agaacaaaaaaggaaaaccaaagaa

SEQ ID NO: 938807 - RNA, 20 nt, Human
agacaaaccacaacacccuc

SEQ ID NO: 938808 - RNA, 22 nt, Human
agacaaaccacaacacccucca

SEQ ID NO: 938809 - RNA, 23 nt, Human
agacaaaccacaacacccuccaa

SEQ ID NO: 938810 - RNA, 18 nt, Human
agagcaaaugagggggga

SEQ ID NO: 938811 - RNA, 22 nt, Human
agagcaaaugaggggggaagac

SEQ ID NO: 938812 - RNA, 20 nt, Human
agcaaaugaggggggaagac

SEQ ID NO: 938813 - RNA, 25 nt, Human
agccaagcaaaccacaaacauuuua

SEQ ID NO: 938814 - RNA, 21 nt, Human
aggaagggaacaaagagagga

SEQ ID NO: 938815 - RNA, 22 nt, Human
aggcucgagacggcgcgggcga

SEQ ID NO: 938816 - RNA, 22 nt, Human
agggacucaagcacauuaucca

SEQ ID NO: 938817 - RNA, 19 nt, Human
aggugguuggggagggaga

SEQ ID NO: 938818 - RNA, 20 nt, Human
aucaugcuauucacaauucu

SEQ ID NO: 938819 - RNA, 20 nt, Human
augcaguugagcugagcaag

SEQ ID NO: 938820 - RNA, 18 nt, Human
augguaauacaaguuuuc

SEQ ID NO: 938821 - RNA, 19 nt, Human
augguuuauguuuggauga

SEQ ID NO: 938822 - RNA, 18 nt, Human
caaaagguagccauaucc

SEQ ID NO: 938823 - RNA, 25 nt, Human
caaaauggccuccccuccccccuca

SEQ ID NO: 938824 - RNA, 25 nt, Human
caaaccacaacacccuccaaacacu

SEQ ID NO: 938825 - RNA, 22 nt, Human
caaagcccuaauauuaagcaaa

SEQ ID NO: 938826 - RNA, 22 nt, Human
caacaaauacauuaaucuaaca

SEQ ID NO: 938827 - RNA, 25 nt, Human
cacaggaucccaagagacuuacaga

SEQ ID NO: 938828 - RNA, 25 nt, Human
caccagaacaaaaaaggaaaaccaa

SEQ ID NO: 938829 - RNA, 21 nt, Human
cacgacacagaaagacuucuc

SEQ ID NO: 938830 - RNA, 22 nt, Human
cacuccuccuuccugcuuuucc

SEQ ID NO: 938831 - RNA, 21 nt, Human
cagcaagaagagaaaacgggg

SEQ ID NO: 938832 - RNA, 21 nt, Human
cagcuucuacacaggaucccu

SEQ ID NO: 938833 - RNA, 24 nt, Human
caggaaaccgagccaccccggcca

SEQ ID NO: 938834 - RNA, 22 nt, Human
cagucuguuauccaaaaauccc

SEQ ID NO: 938835 - RNA, 20 nt, Human
caguugagcugagcaaguac

SEQ ID NO: 938836 - RNA, 25 nt, Human
ccaccagaacaaaaaaggaaaacca

SEQ ID NO: 938837 - RNA, 22 nt, Human
ccagaacaaaaaaggaaaacca

SEQ ID NO: 938838 - RNA, 22 nt, Human
ccagcccguccgcccgguuccg

SEQ ID NO: 938839 - RNA, 23 nt, Human
ccaucuagaaauauuucaguuua

SEQ ID NO: 938840 - RNA, 19 nt, Human
ccccuaagucgacgagcuc

SEQ ID NO: 938841 - RNA, 27 nt, Human
ccccuaagucgacgagcucaguuacau

SEQ ID NO: 938842 - RNA, 21 nt, Human
ccccuccccccucagggcuuc

SEQ ID NO: 938843 - RNA, 22 nt, Human
cccgguuccggggagucggucc

SEQ ID NO: 938844 - RNA, 19 nt, Human
ccgagccaccccggccaga

SEQ ID NO: 938845 - RNA, 22 nt, Human
ccgcggcuccgcagccucuccc

SEQ ID NO: 938846 - RNA, 21 nt, Human
ccuaagaauaacaaccaguga

SEQ ID NO: 938847 - RNA, 23 nt, Human
ccucagggcuucucggccgggac

SEQ ID NO: 938848 - RNA, 18 nt, Human
ccuccuuccugcuuuucc

SEQ ID NO: 938849 - RNA, 22 nt, Human
cgagggcagcgaagaaggaccc

SEQ ID NO: 938850 - RNA, 19 nt, Human
cggccgggacgcucccacg

SEQ ID NO: 938851 - RNA, 23 nt, Human
cgggcgugaggacagucucucuc

SEQ ID NO: 938852 - RNA, 21 nt, Human
cucccagcccguccgcccggu

SEQ ID NO: 938853 - RNA, 19 nt, Human
cucgccgccggcggcccca

SEQ ID NO: 938854 - RNA, 18 nt, Human
cuuaaaacaagacucagc

SEQ ID NO: 938855 - RNA, 20 nt, Human
gaaaaaggcucgagacggcg

SEQ ID NO: 938856 - RNA, 20 nt, Human
gaaaagccuuucguuguccu

SEQ ID NO: 938857 - RNA, 22 nt, Human
gauaguuaagaugagaaacaaa

SEQ ID NO: 938858 - RNA, 18 nt, Human
gcaaugaagcaaaacuag

SEQ ID NO: 938859 - RNA, 24 nt, Human
gccugcucugccgucgaggaggcg

SEQ ID NO: 938860 - RNA, 19 nt, Human
ggaagcgugggaaaaaggc

SEQ ID NO: 938861 - RNA, 24 nt, Human
ggccaaggagaagaaaugguggca

SEQ ID NO: 938862 - RNA, 20 nt, Human
ggcgagggcagcgaagaagg

SEQ ID NO: 938863 - RNA, 22 nt, Human
gggagggagaagcaaauaaagc

SEQ ID NO: 938864 - RNA, 21 nt, Human
gguuccggggagucggucggg

SEQ ID NO: 938865 - RNA, 19 nt, Human
guuuaccuagcaaguuaca

SEQ ID NO: 938866 - RNA, 20 nt, Human
uaaaacaagacucagcaaac

SEQ ID NO: 938867 - RNA, 21 nt, Human
uaaaacaagacucagcaaacc

SEQ ID NO: 938868 - RNA, 24 nt, Human
uaaaacaagacucagcaaaccaaa

SEQ ID NO: 938869 - RNA, 19 nt, Human
uaaaacagcaaaugaaggc

SEQ ID NO: 938870 - RNA, 19 nt, Human
uaaaacagcaaaugaaggc

SEQ ID NO: 938871 - RNA, 27 nt, Human
uaaaacagcaaaugaaggcaucuggga

SEQ ID NO: 938872 - RNA, 19 nt, Human
uaaaauagguggcuuggau

SEQ ID NO: 938873 - RNA, 22 nt, Human
uaaagaaacuuaacacugaaaa

SEQ ID NO: 938874 - RNA, 19 nt, Human
uaaagcagcaugcagggag

SEQ ID NO: 938875 - RNA, 18 nt, Human
uaagaugagaaacaaaaa

SEQ ID NO: 938876 - RNA, 22 nt, Human
uacggccaacuccucacucggg

SEQ ID NO: 938877 - RNA, 21 nt, Human
uacuaggcuaccaagcugcua

SEQ ID NO: 938878 - RNA, 20 nt, Human
uagcagcauagcaaacuuca

SEQ ID NO: 938879 - RNA, 22 nt, Human
uauccaaaaaucccaguguuua

SEQ ID NO: 938880 - RNA, 20 nt, Human
uauuuagaaagugcagauuu

SEQ ID NO: 938881 - RNA, 19 nt, Human
uauuuuuaguggaaaauua

SEQ ID NO: 938882 - RNA, 23 nt, Human
ucagcaaaccaaagcuaucacuu

SEQ ID NO: 938883 - RNA, 23 nt, Human
ucagggcuucucggccgggacgc

SEQ ID NO: 938884 - RNA, 21 nt, Human
uccaaccuuaagucauggaau

SEQ ID NO: 938885 - RNA, 19 nt, Human
uccgcagccucucccagcc

SEQ ID NO: 938886 - RNA, 19 nt, Human
uccuccuuccugcuuuucc

SEQ ID NO: 938887 - RNA, 20 nt, Human
uccugcacaugcuuccaccu

SEQ ID NO: 938888 - RNA, 22 nt, Human
ucgggacaaaauggccuccccu

SEQ ID NO: 938889 - RNA, 24 nt, Human
ucucccagcccguccgcccgguuc

SEQ ID NO: 938890 - RNA, 20 nt, Human
ucucucucccgagcggaaac

SEQ ID NO: 938891 - RNA, 25 nt, Human
ugaaaccgaauuuguagcuaguacc

SEQ ID NO: 938892 - RNA, 23 nt, Human
ugaaagaacaaauaaaauaggug

SEQ ID NO: 938893 - RNA, 23 nt, Human
ugaagcaaaacuagaaaaaaugc

SEQ ID NO: 938894 - RNA, 19 nt, Human
ugaggcauauaaaauuguu

SEQ ID NO: 938895 - RNA, 22 nt, Human
ugauuuauacuucauuucccuu

SEQ ID NO: 938896 - RNA, 18 nt, Human
uggauagacaggaaggga

SEQ ID NO: 938897 - RNA, 19 nt, Human
uggccuccccucccccccc

SEQ ID NO: 938898 - RNA, 22 nt, Human
uggcggcguccagugccuccga

SEQ ID NO: 938899 - RNA, 18 nt, Human
uggcuuuuguuuguuucu

SEQ ID NO: 938900 - RNA, 18 nt, Human
ugggaggagcggcucggg

SEQ ID NO: 938901 - RNA, 24 nt, Human
ugguaauacaaguuuuccaaaagg

SEQ ID NO: 938902 - RNA, 24 nt, Human
uguacaaaauaaaauuguuaauuc

SEQ ID NO: 938903 - RNA, 22 nt, Human
uguacuaggcuaccaagcugcu

SEQ ID NO: 938904 - RNA, 20 nt, Human
uuaaaacaagacucagcaaa

SEQ ID NO: 938905 - RNA, 20 nt, Human
uuaaaauuaauaauauucua

SEQ ID NO: 938906 - RNA, 19 nt, Human
uuaaauaucaaggccacuu

SEQ ID NO: 938907 - RNA, 19 nt, Human
uuaguggaaaauuagggau

SEQ ID NO: 938908 - RNA, 23 nt, Human
uuccagauaaagggaagcaacaa

SEQ ID NO: 938909 - RNA, 20 nt, Human
uugcagaauagauuugaaau

SEQ ID NO: 938910 - RNA, 21 nt, Human
uuuaaaaaaacaaccuguacu

SEQ ID NO: 938911 - RNA, 20 nt, Human
uuucguuguccuuuuuccaa

SEQ ID NO: 938912 - RNA, 18 nt, Human
uuugucccuuucacucuu

SEQ ID NO: 938913 - RNA, 20 nt, Human
aaaaaaaaaaaaacuaccaa

SEQ ID NO: 938914 - RNA, 27 nt, Human
aaaaaaaaaaacccaaacuauuauauc

SEQ ID NO: 938915 - RNA, 21 nt, Human
aaaaaaaaaacuaccaagacc

SEQ ID NO: 938916 - RNA, 21 nt, Human
aaaacaagcuauauuagcuua

SEQ ID NO: 938917 - RNA, 20 nt, Human
aaaacugacaucuugguuca

SEQ ID NO: 938918 - RNA, 26 nt, Human
aaaauaagcagaagauuagcaauauu

SEQ ID NO: 938919 - RNA, 18 nt, Human
aaacaaauggaaugaaac

SEQ ID NO: 938920 - RNA, 21 nt, Human
aaacagcaaauuuggccaaag

SEQ ID NO: 938921 - RNA, 23 nt, Human
aaacagcaaauuuggccaaagca

SEQ ID NO: 938922 - RNA, 20 nt, Human
aaauacaaggcaacauuuuc

SEQ ID NO: 938923 - RNA, 21 nt, Human
aaaugcagaagauacaaauaa

SEQ ID NO: 938924 - RNA, 20 nt, Human
aacauauccccaauacaaaa

SEQ ID NO: 938925 - RNA, 25 nt, Human
aagaagaaaacaagucugucacuaa

SEQ ID NO: 938926 - RNA, 19 nt, Human
aagcaaaaaaaaaaaaccc

SEQ ID NO: 938927 - RNA, 19 nt, Human
aagcaaaaaaaaaaaaccc

SEQ ID NO: 938928 - RNA, 22 nt, Human
aagcaaaaaaaaaaaacccaaa

SEQ ID NO: 938929 - RNA, 19 nt, Human
aaggagaauauguaaugaa

SEQ ID NO: 938930 - RNA, 19 nt, Human
aauauuuuuaaagcugaau

SEQ ID NO: 938931 - RNA, 20 nt, Human
acaagauacaugaauauaua

SEQ ID NO: 938932 - RNA, 19 nt, Human
acccccgccccugucucca

SEQ ID NO: 938933 - RNA, 19 nt, Human
acgagcaguauuccugaag

SEQ ID NO: 938934 - RNA, 23 nt, Human
acgagcaguauuccugaagcuaa

SEQ ID NO: 938935 - RNA, 18 nt, Human
acgagcuuggccaaguau

SEQ ID NO: 938936 - RNA, 23 nt, Human
acuccacugugagagugcauuuu

SEQ ID NO: 938937 - RNA, 21 nt, Human
acucuauaaucuaguguacug

SEQ ID NO: 938938 - RNA, 20 nt, Human
acugaaaugcagaagauaca

SEQ ID NO: 938939 - RNA, 22 nt, Human
agcuaaauauuucuacaaacug

SEQ ID NO: 938940 - RNA, 22 nt, Human
aggcaggcucagggcuccccga

SEQ ID NO: 938941 - RNA, 19 nt, Human
aggcagggaggcguggugg

SEQ ID NO: 938942 - RNA, 19 nt, Human
aggcgugguggugagggag

SEQ ID NO: 938943 - RNA, 22 nt, Human
auagcuuuuauauaggaaaaga

SEQ ID NO: 938944 - RNA, 24 nt, Human
aucagauuacauaaauuauacaau

SEQ ID NO: 938945 - RNA, 21 nt, Human
augcagaauuucaacaaaaca

SEQ ID NO: 938946 - RNA, 22 nt, Human
auuccugaagcuaaauauuucu

SEQ ID NO: 938947 - RNA, 21 nt, Human
auuuugauugaguuauaacca

SEQ ID NO: 938948 - RNA, 18 nt, Human
caaaaaaaaaaaacccaa

SEQ ID NO: 938949 - RNA, 22 nt, Human
caaaaagcaauacuuaaaaacg

SEQ ID NO: 938950 - RNA, 21 nt, Human
caaaacacaaaccaucuggaa

SEQ ID NO: 938951 - RNA, 24 nt, Human
caaaacacaaaccaucuggaagcc

SEQ ID NO: 938952 - RNA, 23 nt, Human
caaaagcaauagauguaguuaug

SEQ ID NO: 938953 - RNA, 19 nt, Human
caaauuuucaggcagugau

SEQ ID NO: 938954 - RNA, 21 nt, Human
caagacccaaaggcaaccauc

SEQ ID NO: 938955 - RNA, 21 nt, Human
caaguuuuuccuuccuuccuu

SEQ ID NO: 938956 - RNA, 24 nt, Human
cacagaggcccaccaucaccuggc

SEQ ID NO: 938957 - RNA, 23 nt, Human
cacauuuucaaaucaagaaauug

SEQ ID NO: 938958 - RNA, 23 nt, Human
caccaggcaaucacauacuuccc

SEQ ID NO: 938959 - RNA, 18 nt, Human
caccuggccgcgccgugc

SEQ ID NO: 938960 - RNA, 23 nt, Human
caccuggccgcgccgugcaggcc

SEQ ID NO: 938961 - RNA, 23 nt, Human
cagaacauagcagcaaaaagcaa

SEQ ID NO: 938962 - RNA, 24 nt, Human
cagcauuuuuuuguaccucaaaac

SEQ ID NO: 938963 - RNA, 18 nt, Human
cagcccaggggcacggcc

SEQ ID NO: 938964 - RNA, 19 nt, Human
cagggcuccccgacuuccc

SEQ ID NO: 938965 - RNA, 21 nt, Human
ccaagaccucaaacgggaaaa

SEQ ID NO: 938966 - RNA, 19 nt, Human
ccacacggacccgggcgga

SEQ ID NO: 938967 - RNA, 22 nt, Human
cccccgaguucccuagcacagg

SEQ ID NO: 938968 - RNA, 26 nt, Human
ccccgccccugucuccaccuucccca

SEQ ID NO: 938969 - RNA, 19 nt, Human
ccccucccggagggagagc

SEQ ID NO: 938970 - RNA, 24 nt, Human
cccgggcggagggcugcgggggug

SEQ ID NO: 938971 - RNA, 21 nt, Human
ccgcgccgugcaggccucugc

SEQ ID NO: 938972 - RNA, 24 nt, Human
ccgcgccgugcaggccucugccgu

SEQ ID NO: 938973 - RNA, 28 nt, Human
ccuauggcugaugucaaaaccggggucc

SEQ ID NO: 938974 - RNA, 28 nt, Human
ccuccgcugccuccgcgccucccgcccg

SEQ ID NO: 938975 - RNA, 23 nt, Human
ccugauaguguagucucuuucag

SEQ ID NO: 938976 - RNA, 20 nt, Human
ccugccuccuugcggccgag

SEQ ID NO: 938977 - RNA, 19 nt, Human
ccuuccuucuuucuuucuc

SEQ ID NO: 938978 - RNA, 22 nt, Human
ccuucuacauaccaucauggcc

SEQ ID NO: 938979 - RNA, 25 nt, Human
ccuucuacauaccaucauggcccag

SEQ ID NO: 938980 - RNA, 21 nt, Human
cgagcagccuccgcugccucc

SEQ ID NO: 938981 - RNA, 26 nt, Human
cgccccugucuccaccuuccccaggc

SEQ ID NO: 938982 - RNA, 18 nt, Human
cgucuggagaaacacaga

SEQ ID NO: 938983 - RNA, 18 nt, Human
cuaaaauaagcaaaaaaa

SEQ ID NO: 938984 - RNA, 22 nt, Human
cuacauaccaucauggcccagc

SEQ ID NO: 938985 - RNA, 23 nt, Human
cuagcacaggcagugccccuccc

SEQ ID NO: 938986 - RNA, 18 nt, Human
cucugcccccgaguuccc

SEQ ID NO: 938987 - RNA, 21 nt, Human
cucugcgcggacccccgcccc

SEQ ID NO: 938988 - RNA, 22 nt, Human
cuugguucacucuauaaacagc

SEQ ID NO: 938989 - RNA, 24 nt, Human
gacccccgccccugucuccaccuu

SEQ ID NO: 938990 - RNA, 19 nt, Human
gagcagccuccgcugccuc

SEQ ID NO: 938991 - RNA, 19 nt, Human
gagccccccgccccaauuc

SEQ ID NO: 938992 - RNA, 23 nt, Human
gaguucccuagcacaggcagugc

SEQ ID NO: 938993 - RNA, 23 nt, Human
gcaauucauggaaagauugggga

SEQ ID NO: 938994 - RNA, 21 nt, Human
gcagggaggcgugguggugag

SEQ ID NO: 938995 - RNA, 24 nt, Human
gcaguacuugaaccauacuuuuaa

SEQ ID NO: 938996 - RNA, 23 nt, Human
gccaaguauucucugauucaaaa

SEQ ID NO: 938997 - RNA, 21 nt, Human
gcccaaacacaggaaacacug

SEQ ID NO: 938998 - RNA, 19 nt, Human
gcccaggggcacggccgcu

SEQ ID NO: 938999 - RNA, 19 nt, Human
ggacaauggcaaaacuagg

SEQ ID NO: 939000 - RNA, 19 nt, Human
ggacaugaauuuucauuuu

SEQ ID NO: 939001 - RNA, 21 nt, Human
ggacccccgccccugucucca

SEQ ID NO: 939002 - RNA, 21 nt, Human
ggauguggaguaaugcauaau

SEQ ID NO: 939003 - RNA, 25 nt, Human
ggcaccauguuuaaaaaaaaaaaaa

SEQ ID NO: 939004 - RNA, 22 nt, Human
ggcaggcucagggcuccccucu

SEQ ID NO: 939005 - RNA, 20 nt, Human
gggcggagggcugcgggggu

SEQ ID NO: 939006 - RNA, 19 nt, Human
ggggaugguaggcagggag

SEQ ID NO: 939007 - RNA, 24 nt, Human
gggggcuuuccaugugugcugaca

SEQ ID NO: 939008 - RNA, 18 nt, Human
gguccccuuucgucugga

SEQ ID NO: 939009 - RNA, 20 nt, Human
guccuguuucucugcccccg

SEQ ID NO: 939010 - RNA, 24 nt, Human
uaaaaaaaaaaaaaaaacuaccaa

SEQ ID NO: 939011 - RNA, 26 nt, Human
uaaaagcaaaaauaaacucuauaauc

SEQ ID NO: 939012 - RNA, 23 nt, Human
uaaaagcuauuuuuccuucucca

SEQ ID NO: 939013 - RNA, 28 nt, Human
uaaaauaagcaaaaaaaaaaaacccaaa

SEQ ID NO: 939014 - RNA, 20 nt, Human
uaaacaaacucaaauguuaa

SEQ ID NO: 939015 - RNA, 19 nt, Human
uaaagcauaaaagcaaaaa

SEQ ID NO: 939016 - RNA, 19 nt, Human
uaacaagaagaaaacaagu

SEQ ID NO: 939017 - RNA, 18 nt, Human
uaagcaaaaaaaaaaaac

SEQ ID NO: 939018 - RNA, 24 nt, Human
uaagcaacuaacaaaauacauuag

SEQ ID NO: 939019 - RNA, 18 nt, Human
uaaggugaccuuuuuggc

SEQ ID NO: 939020 - RNA, 19 nt, Human
uacaauacaauuggcuuua

SEQ ID NO: 939021 - RNA, 20 nt, Human
uaccucaaaacacaaaccau

SEQ ID NO: 939022 - RNA, 22 nt, Human
uagccuaacuuuagaggcaauc

SEQ ID NO: 939023 - RNA, 20 nt, Human
uaguuaauuaaaaguggcac

SEQ ID NO: 939024 - RNA, 21 nt, Human
uauacaaguuaugagagcauu

SEQ ID NO: 939025 - RNA, 24 nt, Human
uauacaaugcuuacauacuuuuga

SEQ ID NO: 939026 - RNA, 26 nt, Human
uaugaaaagacucaauaauacuacca

SEQ ID NO: 939027 - RNA, 21 nt, Human
uauuucagacuuuaaaggcug

SEQ ID NO: 939028 - RNA, 21 nt, Human
ucaaaacgccucgcgggggca

SEQ ID NO: 939029 - RNA, 18 nt, Human
ucaguauuuugggggagu

SEQ ID NO: 939030 - RNA, 19 nt, Human
uccaccuuccccaggccug

SEQ ID NO: 939031 - RNA, 18 nt, Human
uccccauaaaaagaagag

SEQ ID NO: 939032 - RNA, 24 nt, Human
uccccuuucgucuggagaaacaca

SEQ ID NO: 939033 - RNA, 18 nt, Human
ucgaagacuaacaggccc

SEQ ID NO: 939034 - RNA, 25 nt, Human
ucugcagauacugucauaauacuga

SEQ ID NO: 939035 - RNA, 24 nt, Human
ucugcccccgaguucccuagcacc

SEQ ID NO: 939036 - RNA, 19 nt, Human
ucuuucucucucuuugucc

SEQ ID NO: 939037 - RNA, 20 nt, Human
ucuuucuuucucucucuuuc

SEQ ID NO: 939038 - RNA, 21 nt, Human
ugaaaaauaagcagaagauua

SEQ ID NO: 939039 - RNA, 25 nt, Human
ugaaaaauaagcagaagauuagcaa

SEQ ID NO: 939040 - RNA, 24 nt, Human
ugaaaaaucuauuccugaggaaca

SEQ ID NO: 939041 - RNA, 24 nt, Human
ugaaaagacucaauaauacuacca

SEQ ID NO: 939042 - RNA, 18 nt, Human
ugaagauauuucugggcc

SEQ ID NO: 939043 - RNA, 23 nt, Human
ugaaguuaaugaagucuccuaaa

SEQ ID NO: 939044 - RNA, 19 nt, Human
ugacagacccuucuacaua

SEQ ID NO: 939045 - RNA, 21 nt, Human
ugacagacccuucuacauacc

SEQ ID NO: 939046 - RNA, 22 nt, Human
ugcauuuuuugauggauaaaac

SEQ ID NO: 939047 - RNA, 21 nt, Human
ugcccccgaguucccuagcac

SEQ ID NO: 939048 - RNA, 21 nt, Human
ugcgcggacccccgccccugu

SEQ ID NO: 939049 - RNA, 24 nt, Human
ugcggccgagcagccuccgcugcc

SEQ ID NO: 939050 - RNA, 19 nt, Human
uggaaaaauaaacuaaggu

SEQ ID NO: 939051 - RNA, 22 nt, Human
uggaaaaauaaacuaaggugac

SEQ ID NO: 939052 - RNA, 24 nt, Human
uggaagaaaucaguauuuuggggg

SEQ ID NO: 939053 - RNA, 23 nt, Human
uggaaucugcccgcugcuuuggg

SEQ ID NO: 939054 - RNA, 19 nt, Human
uggaaugaaacaucaacuc

SEQ ID NO: 939055 - RNA, 24 nt, Human
uggaaugaaacaucaacucuauuu

SEQ ID NO: 939056 - RNA, 21 nt, Human
uggaguaaugcauaaugucac

SEQ ID NO: 939057 - RNA, 21 nt, Human
uggauaaaacaaauggaauga

SEQ ID NO: 939058 - RNA, 23 nt, Human
uggggaaagagaaaaacuuugau

SEQ ID NO: 939059 - RNA, 19 nt, Human
ugggucaguaccagcaccu

SEQ ID NO: 939060 - RNA, 18 nt, Human
uggugagggaguugcugg

SEQ ID NO: 939061 - RNA, 21 nt, Human
ugguuauaaaauaauacugcu

SEQ ID NO: 939062 - RNA, 30 nt, Human
uguaaaacauauccccaauacaaaacugaa

SEQ ID NO: 939063 - RNA, 18 nt, Human
uguaacauuuacuguaga

SEQ ID NO: 939064 - RNA, 25 nt, Human
uguacauauguguauauaaaauaua

SEQ ID NO: 939065 - RNA, 23 nt, Human
ugucaaaacgccucgcgggggca

SEQ ID NO: 939066 - RNA, 20 nt, Human
uuaaaacuacuuugcacuuc

SEQ ID NO: 939067 - RNA, 19 nt, Human
uuaaauucagaaagacaua

SEQ ID NO: 939068 - RNA, 18 nt, Human
uuagcaauauuuuuauaa

SEQ ID NO: 939069 - RNA, 19 nt, Human
uucaaaauacuaaaauaag

SEQ ID NO: 939070 - RNA, 18 nt, Human
uuccuucuccauuucuua

SEQ ID NO: 939071 - RNA, 18 nt, Human
uugggggaguggacuuua

SEQ ID NO: 939072 - RNA, 20 nt, Human
uuuacagguaaaacuacucu

SEQ ID NO: 939073 - RNA, 18 nt, Human
uuuauguaaccugaaacc

SEQ ID NO: 939074 - RNA, 21 nt, Human
uuuccuuccuuccuucuuucu

SEQ ID NO: 939075 - RNA, 22 nt, Human
uuugcuuugcuagugauuuaaa

SEQ ID NO: 939076 - RNA, 20 nt, Human
aacagggcugcacgugggaa

SEQ ID NO: 939077 - RNA, 19 nt, Human
aacaggguucccgauguuu

SEQ ID NO: 939078 - RNA, 19 nt, Human
aagaaaacaggguucccga

SEQ ID NO: 939079 - RNA, 23 nt, Human
acacccaaggcuuuccccaaaug

SEQ ID NO: 939080 - RNA, 19 nt, Human
acaccgcugugccuggggu

SEQ ID NO: 939081 - RNA, 22 nt, Human
acacguacacgcgcgcgcacac

SEQ ID NO: 939082 - RNA, 28 nt, Human
accagccuugcccacccguccuuccccc

SEQ ID NO: 939083 - RNA, 18 nt, Human
acccagaagaaaacaggg

SEQ ID NO: 939084 - RNA, 18 nt, Human
acccguccuucccccacc

SEQ ID NO: 939085 - RNA, 22 nt, Human
agccacauggccuggaggcccc

SEQ ID NO: 939086 - RNA, 18 nt, Human
agcguagggagagcuggg

SEQ ID NO: 939087 - RNA, 22 nt, Human
aggaggcugaggcgccugaggu

SEQ ID NO: 939088 - RNA, 24 nt, Human
aggccccagagcuggacugaggug

SEQ ID NO: 939089 - RNA, 18 nt, Human
aggcggcggauguggggc

SEQ ID NO: 939090 - RNA, 22 nt, Human
agggagagagcgccacacagcg

SEQ ID NO: 939091 - RNA, 23 nt, Human
auguggggccacacguacacgcg

SEQ ID NO: 939092 - RNA, 20 nt, Human
caaaggcgcucagggcgcgg

SEQ ID NO: 939093 - RNA, 24 nt, Human
caaguuuacacugauuuacaccca

SEQ ID NO: 939094 - RNA, 22 nt, Human
cacacacgcagcggguggccag

SEQ ID NO: 939095 - RNA, 19 nt, Human
cacacagcggucaucucag

SEQ ID NO: 939096 - RNA, 23 nt, Human
cacagcagggcucaccccacacc

SEQ ID NO: 939097 - RNA, 23 nt, Human
cacaucuggcugggcaauggccc

SEQ ID NO: 939098 - RNA, 24 nt, Human
caccacaaggaggccacagcaggg

SEQ ID NO: 939099 - RNA, 18 nt, Human
cacccaaggcuuucccca

SEQ ID NO: 939100 - RNA, 18 nt, Human
cacccaaggcuuucccca

SEQ ID NO: 939101 - RNA, 23 nt, Human
cacccagaagaaaacaggguucc

SEQ ID NO: 939102 - RNA, 21 nt, Human
caccccacaccgcugcacaga

SEQ ID NO: 939103 - RNA, 20 nt, Human
caccugggagccagaggggc

SEQ ID NO: 939104 - RNA, 25 nt, Human
cacgcgcgcgcacacacacgcagcg

SEQ ID NO: 939105 - RNA, 21 nt, Human
cacugucggcugugggaccug

SEQ ID NO: 939106 - RNA, 20 nt, Human
cagaccccgagaagcacagg

SEQ ID NO: 939107 - RNA, 18 nt, Human
cagcguagggagagcugg

SEQ ID NO: 939108 - RNA, 21 nt, Human
cagcguagggagagcugggga

SEQ ID NO: 939109 - RNA, 19 nt, Human
cagcugcacgaggguuccc

SEQ ID NO: 939110 - RNA, 20 nt, Human
cagggcgcggcggcgggcgg

SEQ ID NO: 939111 - RNA, 22 nt, Human
cagggcugggaagcucugggcc

SEQ ID NO: 939112 - RNA, 22 nt, Human
cccacaccgcugcacagagagg

SEQ ID NO: 939113 - RNA, 22 nt, Human
cccagaagaaaacaggguuccc

SEQ ID NO: 939114 - RNA, 19 nt, Human
ccccacaccgcugcacaga

SEQ ID NO: 939115 - RNA, 25 nt, Human
ccccagaggcuccugcccggccccc

SEQ ID NO: 939116 - RNA, 19 nt, Human
ccccagggguuacugcagc

SEQ ID NO: 939117 - RNA, 22 nt, Human
cccccaccaccaucacccgagg

SEQ ID NO: 939118 - RNA, 21 nt, Human
ccccgggcccugggacuuccc

SEQ ID NO: 939119 - RNA, 22 nt, Human
cccggucuuuggcggccccagc

SEQ ID NO: 939120 - RNA, 18 nt, Human
cccuccugcucugcugug

SEQ ID NO: 939121 - RNA, 24 nt, Human
cccucugccccuuuggcagccccg

SEQ ID NO: 939122 - RNA, 20 nt, Human
cccuuucucccucuccucuc

SEQ ID NO: 939123 - RNA, 21 nt, Human
cccuuucucccucuccucucc

SEQ ID NO: 939124 - RNA, 19 nt, Human
ccguccuucccccaccacc

SEQ ID NO: 939125 - RNA, 23 nt, Human
ccuccaaguuuacacugauuuac

SEQ ID NO: 939126 - RNA, 18 nt, Human
ccuggaggccccagagcu

SEQ ID NO: 939127 - RNA, 20 nt, Human
ccuggaggccccagagcugg

SEQ ID NO: 939128 - RNA, 21 nt, Human
ccugggacuucccuuucuccc

SEQ ID NO: 939129 - RNA, 23 nt, Human
ccuguggagaagcagcaccuggg

SEQ ID NO: 939130 - RNA, 22 nt, Human
ccuugcccacccguccuucccc

SEQ ID NO: 939131 - RNA, 26 nt, Human
cgaggaggccgggggacgggggccgg

SEQ ID NO: 939132 - RNA, 27 nt, Human
cgcgcgcgcacacacacgcagcgggug

SEQ ID NO: 939133 - RNA, 20 nt, Human
cgcucagggcgcggcggcgg

SEQ ID NO: 939134 - RNA, 21 nt, Human
cgcucgggcccugcucugucc

SEQ ID NO: 939135 - RNA, 24 nt, Human
cggcggcgcggcgggcgcaggccc

SEQ ID NO: 939136 - RNA, 18 nt, Human
cggcucaacaugggugac

SEQ ID NO: 939137 - RNA, 24 nt, Human
cgggggacgggggccgaggaggcc

SEQ ID NO: 939138 - RNA, 18 nt, Human
cgggggccgaggaggccg

SEQ ID NO: 939139 - RNA, 18 nt, Human
cgggggccgaggaggccg

SEQ ID NO: 939140 - RNA, 23 nt, Human
cucauccucuguggaccccgggc

SEQ ID NO: 939141 - RNA, 23 nt, Human
cugggcccacccgggaaugcugg

SEQ ID NO: 939142 - RNA, 20 nt, Human
cuucccugcccucucccucc

SEQ ID NO: 939143 - RNA, 26 nt, Human
cuucgcaccgcgccucagcugcccuc

SEQ ID NO: 939144 - RNA, 18 nt, Human
gaagaaaacaggguuccc

SEQ ID NO: 939145 - RNA, 18 nt, Human
gagaagcagcaccuggga

SEQ ID NO: 939146 - RNA, 23 nt, Human
gagcggcucaacaugggugacac

SEQ ID NO: 939147 - RNA, 23 nt, Human
gccacauggccuggaggccccag

SEQ ID NO: 939148 - RNA, 18 nt, Human
gcccacccguccuucccc

SEQ ID NO: 939149 - RNA, 22 nt, Human
gccucagcugcccucggcccgg

SEQ ID NO: 939150 - RNA, 19 nt, Human
gccugggaagugcgugggg

SEQ ID NO: 939151 - RNA, 25 nt, Human
gccuugcccacccguccuuccccca

SEQ ID NO: 939152 - RNA, 20 nt, Human
gcgcgcgcggggcgcccggg

SEQ ID NO: 939153 - RNA, 19 nt, Human
gcgcggcggcgggcgcggg

SEQ ID NO: 939154 - RNA, 22 nt, Human
gcgcgggcgggcgcgcgcgggg

SEQ ID NO: 939155 - RNA, 20 nt, Human
gcugcccucggcccggcggc

SEQ ID NO: 939156 - RNA, 24 nt, Human
gcuggcgcucgggcccugcucugu

SEQ ID NO: 939157 - RNA, 23 nt, Human
gcugugggaccugcuggucuugg

SEQ ID NO: 939158 - RNA, 21 nt, Human
ggaacagccacauggccugga

SEQ ID NO: 939159 - RNA, 19 nt, Human
ggacggcccugccacaacc

SEQ ID NO: 939160 - RNA, 26 nt, Human
ggacgggggccgaggaggccggggga

SEQ ID NO: 939161 - RNA, 21 nt, Human
ggacugggccgugggaacagc

SEQ ID NO: 939162 - RNA, 18 nt, Human
ggcauccacccugcccag

SEQ ID NO: 939163 - RNA, 25 nt, Human
ggccacacguacacgcgcgcgcaca

SEQ ID NO: 939164 - RNA, 18 nt, Human
ggcccggcggcgcggcgg

SEQ ID NO: 939165 - RNA, 26 nt, Human
ggccugggaagugcguggggagggug

SEQ ID NO: 939166 - RNA, 18 nt, Human
ggcgcggcggcgggcgcg

SEQ ID NO: 939167 - RNA, 22 nt, Human
ggcgcggcggcgggcgcgggca

SEQ ID NO: 939168 - RNA, 20 nt, Human
gggcgcaggcccauggcggc

SEQ ID NO: 939169 - RNA, 22 nt, Human
ggggaacgcaccagccuugccc

SEQ ID NO: 939170 - RNA, 19 nt, Human
ggguucccugcaugcucug

SEQ ID NO: 939171 - RNA, 22 nt, Human
ggguuggggcaggcccgcgguc

SEQ ID NO: 939172 - RNA, 18 nt, Human
ggucaucucagguccuga

SEQ ID NO: 939173 - RNA, 21 nt, Human
ggucuuuggcggccccagcuc

SEQ ID NO: 939174 - RNA, 20 nt, Human
gguggccagucuuggugaug

SEQ ID NO: 939175 - RNA, 18 nt, Human
guggagaagcagcaccug

SEQ ID NO: 939176 - RNA, 24 nt, Human
uaaggaggcugaggcgccugaggu

SEQ ID NO: 939177 - RNA, 23 nt, Human
uauauauauauuucauguguaua

SEQ ID NO: 939178 - RNA, 24 nt, Human
uauuaaaaaauugaucaaccuuca

SEQ ID NO: 939179 - RNA, 24 nt, Human
uauuucauguguauacacagucga

SEQ ID NO: 939180 - RNA, 18 nt, Human
ucaaucuauaaaaaauac

SEQ ID NO: 939181 - RNA, 20 nt, Human
ucaggagcggcucaacaugg

SEQ ID NO: 939182 - RNA, 19 nt, Human
ucauggccagcuugacuca

SEQ ID NO: 939183 - RNA, 19 nt, Human
uccaccacccucugccccu

SEQ ID NO: 939184 - RNA, 20 nt, Human
uccaggguguuggagucccg

SEQ ID NO: 939185 - RNA, 18 nt, Human
uccccaaauguacaauaa

SEQ ID NO: 939186 - RNA, 18 nt, Human
ucccucuccucuccacca

SEQ ID NO: 939187 - RNA, 18 nt, Human
ucccugcaugcucugggc

SEQ ID NO: 939188 - RNA, 23 nt, Human
uccgaggugagggucugggagga

SEQ ID NO: 939189 - RNA, 20 nt, Human
ucgcaccgcgccucagcugc

SEQ ID NO: 939190 - RNA, 23 nt, Human
ucgcaccgcgccucagcugcccu

SEQ ID NO: 939191 - RNA, 19 nt, Human
ucgcccaucuucgcaccgc

SEQ ID NO: 939192 - RNA, 23 nt, Human
ucuaagugagacacacccagaag

SEQ ID NO: 939193 - RNA, 20 nt, Human
ucucccucuccucuccacca

SEQ ID NO: 939194 - RNA, 24 nt, Human
ucuccucuccaccacccucugccc

SEQ ID NO: 939195 - RNA, 23 nt, Human
ugaaaguauuaaaaaauugauca

SEQ ID NO: 939196 - RNA, 23 nt, Human
ugacaccgcugugccuggggugc

SEQ ID NO: 939197 - RNA, 19 nt, Human
ugagacacacccagaagaa

SEQ ID NO: 939198 - RNA, 22 nt, Human
ugagacacacccagaagaaaaa

SEQ ID NO: 939199 - RNA, 24 nt, Human
ugauuuacacccaaggcuuucccc

SEQ ID NO: 939200 - RNA, 18 nt, Human
ugcacagagaggcucucc

SEQ ID NO: 939201 - RNA, 20 nt, Human
ugcaugcucugggcacuguc

SEQ ID NO: 939202 - RNA, 25 nt, Human
ugcuggggcuggcgcucgggcccug

SEQ ID NO: 939203 - RNA, 18 nt, Human
ugcuggggguuggggcag

SEQ ID NO: 939204 - RNA, 20 nt, Human
uggaaggcggcggauguggg

SEQ ID NO: 939205 - RNA, 20 nt, Human
uggcagccccggucuuuggc

SEQ ID NO: 939206 - RNA, 21 nt, Human
uggccagucuuggugaugggg

SEQ ID NO: 939207 - RNA, 20 nt, Human
uggccuggaggccccagagc

SEQ ID NO: 939208 - RNA, 23 nt, Human
uggccugggaagugcguggggag

SEQ ID NO: 939209 - RNA, 19 nt, Human
uggcgggggacgggggccg

SEQ ID NO: 939210 - RNA, 18 nt, Human
ugggaagugcguggggag

SEQ ID NO: 939211 - RNA, 22 nt, Human
ugggagccagaggggccugugg

SEQ ID NO: 939212 - RNA, 23 nt, Human
uggggaggguguggccuuuagga

SEQ ID NO: 939213 - RNA, 20 nt, Human
uggggcaggcccgcgguccu

SEQ ID NO: 939214 - RNA, 21 nt, Human
uggguggcuuaggcagcagca

SEQ ID NO: 939215 - RNA, 19 nt, Human
uggucuuggcuccucaugg

SEQ ID NO: 939216 - RNA, 22 nt, Human
uguggagaagcagcaccuggga

SEQ ID NO: 939217 - RNA, 21 nt, Human
uguuggagucccgaauccagc

SEQ ID NO: 939218 - RNA, 21 nt, Human
uuggggcaggcccgcgguccu

SEQ ID NO: 939219 - RNA, 18 nt, Human
aagaagagaucgagagcu

SEQ ID NO: 939220 - RNA, 25 nt, Human
aagaagagaucgagagcugggguuu

SEQ ID NO: 939221 - RNA, 21 nt, Human
acagcgcaggggccacaggga

SEQ ID NO: 939222 - RNA, 18 nt, Human
acggggacggggcaacag

SEQ ID NO: 939223 - RNA, 23 nt, Human
agcgcaggggccacagggagaag

SEQ ID NO: 939224 - RNA, 22 nt, Human
agcgggugggcgcugagagccc

SEQ ID NO: 939225 - RNA, 21 nt, Human
aggggagagggggggacgggc

SEQ ID NO: 939226 - RNA, 21 nt, Human
agucggccaaggaaaagggga

SEQ ID NO: 939227 - RNA, 23 nt, Human
cagaggugggaggccugugcgag

SEQ ID NO: 939228 - RNA, 21 nt, Human
cagcagggaggggccagagga

SEQ ID NO: 939229 - RNA, 19 nt, Human
cagccccaccacaaacacc

SEQ ID NO: 939230 - RNA, 20 nt, Human
cagggagggccgagagggcg

SEQ ID NO: 939231 - RNA, 21 nt, Human
caggggccacagggagaagaa

SEQ ID NO: 939232 - RNA, 19 nt, Human
ccagaccagauggggagac

SEQ ID NO: 939233 - RNA, 20 nt, Human
ccagccccguccauccugcc

SEQ ID NO: 939234 - RNA, 20 nt, Human
ccgccugccccggcccccgc

SEQ ID NO: 939235 - RNA, 23 nt, Human
ccguggcgggggcgggcggagga

SEQ ID NO: 939236 - RNA, 18 nt, Human
ccugccgcccuccccacc

SEQ ID NO: 939237 - RNA, 22 nt, Human
ccugccgcccuccccaccccgc

SEQ ID NO: 939238 - RNA, 22 nt, Human
ccuguccuuccugggccccggc

SEQ ID NO: 939239 - RNA, 18 nt, Human
ccugugcgagcugcugug

SEQ ID NO: 939240 - RNA, 19 nt, Human
cgcccguccuccucgccuc

SEQ ID NO: 939241 - RNA, 21 nt, Human
cgccguccgcccguccuccuc

SEQ ID NO: 939242 - RNA, 19 nt, Human
cgcugccugguucuucggg

SEQ ID NO: 939243 - RNA, 20 nt, Human
cggccacagagggacagcag

SEQ ID NO: 939244 - RNA, 23 nt, Human
cgggugggcgcugagagcccggg

SEQ ID NO: 939245 - RNA, 19 nt, Human
cgugcacgcacgcugggug

SEQ ID NO: 939246 - RNA, 22 nt, Human
cguggcgggggcgggcggagga

SEQ ID NO: 939247 - RNA, 22 nt, Human
gagcugcugugugcggaggagc

SEQ ID NO: 939248 - RNA, 18 nt, Human
gcagggaggggccagagg

SEQ ID NO: 939249 - RNA, 22 nt, Human
gccccaccacaaacacccgacg

SEQ ID NO: 939250 - RNA, 20 nt, Human
ggacagggagggccgagagg

SEQ ID NO: 939251 - RNA, 20 nt, Human
ggagaagaagagaucgagag

SEQ ID NO: 939252 - RNA, 19 nt, Human
ggagacgagacagaggagg

SEQ ID NO: 939253 - RNA, 20 nt, Human
ggagaggggaggggagaggg

SEQ ID NO: 939254 - RNA, 19 nt, Human
ggaggagcgggugggcgcu

SEQ ID NO: 939255 - RNA, 20 nt, Human
ggaggccugugcgagcugcu

SEQ ID NO: 939256 - RNA, 23 nt, Human
ggaggggagaggggagagggggg

SEQ ID NO: 939257 - RNA, 21 nt, Human
ggccacagggagaagaagaga

SEQ ID NO: 939258 - RNA, 21 nt, Human
ggcccggccgugcagagcuca

SEQ ID NO: 939259 - RNA, 20 nt, Human
ggcggggugacggggacggg

SEQ ID NO: 939260 - RNA, 19 nt, Human
gggagaggggagagggggg

SEQ ID NO: 939261 - RNA, 24 nt, Human
ggggacagggagggccgagagggc

SEQ ID NO: 939262 - RNA, 21 nt, Human
ggggagacgagacagaggagg

SEQ ID NO: 939263 - RNA, 20 nt, Human
ggggagagggggggacgggc

SEQ ID NO: 939264 - RNA, 24 nt, Human
ggggagagggggggacgggcuucu

SEQ ID NO: 939265 - RNA, 22 nt, Human
ggggaggggagaggggagaggg

SEQ ID NO: 939266 - RNA, 23 nt, Human
ggggcaacagcgcaggggccaca

SEQ ID NO: 939267 - RNA, 21 nt, Human
ggggguccgccugccccggcc

SEQ ID NO: 939268 - RNA, 22 nt, Human
guccauccugccgcccucccca

SEQ ID NO: 939269 - RNA, 18 nt, Human
gugcaggagaggggaggg

SEQ ID NO: 939270 - RNA, 22 nt, Human
uaacaaaaaccaaaggcuacaa

SEQ ID NO: 939271 - RNA, 26 nt, Human
uagagucggccaaggaaaaggggaga

SEQ ID NO: 939272 - RNA, 23 nt, Human
ucacuugcaaacagguuccagac

SEQ ID NO: 939273 - RNA, 18 nt, Human
uccagaccagauggggag

SEQ ID NO: 939274 - RNA, 22 nt, Human
ucccugcaucaaucaacaggca

SEQ ID NO: 939275 - RNA, 19 nt, Human
uccgcccguccuccucgcc

SEQ ID NO: 939276 - RNA, 18 nt, Human
uccgccugccccggcccc

SEQ ID NO: 939277 - RNA, 19 nt, Human
ucucuacauuaacaaaaac

SEQ ID NO: 939278 - RNA, 21 nt, Human
ugcggaggagcgggugggcgc

SEQ ID NO: 939279 - RNA, 24 nt, Human
ugcugugugcggaggagcgggugg

SEQ ID NO: 939280 - RNA, 23 nt, Human
uucuggguggggacgacgggcug

SEQ ID NO: 939281 - RNA, 20 nt, Human
uuuggcccagagcacgguuc

SEQ ID NO: 939282 - RNA, 21 nt, Human
aaaaacccuauuauaguucag

SEQ ID NO: 939283 - RNA, 23 nt, Human
aaaaagacuucaacauuguacug

SEQ ID NO: 939284 - RNA, 19 nt, Human
aaaaaguuaaacaaagaca

SEQ ID NO: 939285 - RNA, 19 nt, Human
aaaaaguuaaacaaagaca

SEQ ID NO: 939286 - RNA, 22 nt, Human
aaacaaaagcaguuauagaacc

SEQ ID NO: 939287 - RNA, 19 nt, Human
aaacaauaaaacccacugu

SEQ ID NO: 939288 - RNA, 21 nt, Human
aaaccaccaaccaaaaaaaaa

SEQ ID NO: 939289 - RNA, 20 nt, Human
aaagaaauuguacuaccucu

SEQ ID NO: 939290 - RNA, 22 nt, Human
aacacugccagcaccaaggggu

SEQ ID NO: 939291 - RNA, 19 nt, Human
aacagcagaccugugguuc

SEQ ID NO: 939292 - RNA, 24 nt, Human
aacauggucacauauaggucauac

SEQ ID NO: 939293 - RNA, 21 nt, Human
aaccguacagugagacaaagc

SEQ ID NO: 939294 - RNA, 21 nt, Human
aagaacaguuaagaaaaucag

SEQ ID NO: 939295 - RNA, 24 nt, Human
aagaggcaggugacugcacaagca

SEQ ID NO: 939296 - RNA, 21 nt, Human
aaggagaacagcaucagccac

SEQ ID NO: 939297 - RNA, 24 nt, Human
aaggagaacagcaucagccaccaa

SEQ ID NO: 939298 - RNA, 19 nt, Human
aagguauaaaagcuuaaaa

SEQ ID NO: 939299 - RNA, 23 nt, Human
aagguuuuuauuccaaaacaguu

SEQ ID NO: 939300 - RNA, 18 nt, Human
aauuucacagcaauaaac

SEQ ID NO: 939301 - RNA, 20 nt, Human
acacaagaauaaagcugugg

SEQ ID NO: 939302 - RNA, 22 nt, Human
acagaauauaccaaucuacucc

SEQ ID NO: 939303 - RNA, 20 nt, Human
acagaguuuuuucuuuuuuu

SEQ ID NO: 939304 - RNA, 22 nt, Human
acaugaacccucucuauauucc

SEQ ID NO: 939305 - RNA, 24 nt, Human
accaaagccuacuuucugcacauu

SEQ ID NO: 939306 - RNA, 23 nt, Human
accacauguuuacaacccagaag

SEQ ID NO: 939307 - RNA, 21 nt, Human
accaccaaccaaaaaaaaaua

SEQ ID NO: 939308 - RNA, 26 nt, Human
acgcagcgggagagggggcgggggcg

SEQ ID NO: 939309 - RNA, 19 nt, Human
acugucuuaccgaauuuga

SEQ ID NO: 939310 - RNA, 25 nt, Human
agaaggcaucuuucaaaacaaaacu

SEQ ID NO: 939311 - RNA, 20 nt, Human
agaaucuggcucccgguaca

SEQ ID NO: 939312 - RNA, 22 nt, Human
agcacaagcgcugaaacaccuu

SEQ ID NO: 939313 - RNA, 22 nt, Human
agcacgagagagaagauaaaug

SEQ ID NO: 939314 - RNA, 18 nt, Human
agcagaccugugguucug

SEQ ID NO: 939315 - RNA, 20 nt, Human
agccaccaaaugugcugauc

SEQ ID NO: 939316 - RNA, 18 nt, Human
agccacugaaucauaaau

SEQ ID NO: 939317 - RNA, 21 nt, Human
agcgggagagggggcgggggc

SEQ ID NO: 939318 - RNA, 26 nt, Human
aggaaauuuauccaaaacaaaacaaa

SEQ ID NO: 939319 - RNA, 24 nt, Human
aggagcucuuuccagcauaauguc

SEQ ID NO: 939320 - RNA, 23 nt, Human
auaaaacauguuguccaaaaaaa

SEQ ID NO: 939321 - RNA, 20 nt, Human
auccaaaacaaaacaaaagc

SEQ ID NO: 939322 - RNA, 22 nt, Human
auguacuuuuauguuagugucu

SEQ ID NO: 939323 - RNA, 23 nt, Human
auuaaaccguacagugagacaaa

SEQ ID NO: 939324 - RNA, 23 nt, Human
caaaaacaauaaaacccacugua

SEQ ID NO: 939325 - RNA, 27 nt, Human
caaaaacaauaaaacccacuguaacua

SEQ ID NO: 939326 - RNA, 22 nt, Human
caaaacaaaacaaaagcaguua

SEQ ID NO: 939327 - RNA, 24 nt, Human
caaaacaaaacuugauuucuuuug

SEQ ID NO: 939328 - RNA, 25 nt, Human
caaaacaaaagcaguuauagaaccc

SEQ ID NO: 939329 - RNA, 26 nt, Human
caaaacaaaagcaguuauagaacccc

SEQ ID NO: 939330 - RNA, 25 nt, Human
caacagacagaggugaaaggucaaa

SEQ ID NO: 939331 - RNA, 24 nt, Human
caacaugacauaaaacagccccuc

SEQ ID NO: 939332 - RNA, 22 nt, Human
caaccucaagaggcaggugacu

SEQ ID NO: 939333 - RNA, 22 nt, Human
caagaggcaggugacugcacaa

SEQ ID NO: 939334 - RNA, 23 nt, Human
cacaagcgcugaaacaccccccu

SEQ ID NO: 939335 - RNA, 19 nt, Human
cacaugcauaugauagaau

SEQ ID NO: 939336 - RNA, 27 nt, Human
caccugaagaaaaacccuauuauaguu

SEQ ID NO: 939337 - RNA, 19 nt, Human
cacugaaucauaaaugcaa

SEQ ID NO: 939338 - RNA, 18 nt, Human
cagaaaauaaugcaacca

SEQ ID NO: 939339 - RNA, 19 nt, Human
cagcagaccugugguucug

SEQ ID NO: 939340 - RNA, 18 nt, Human
caggccgagaggugcaga

SEQ ID NO: 939341 - RNA, 22 nt, Human
cauauaggucauacuguacaaa

SEQ ID NO: 939342 - RNA, 19 nt, Human
ccaaaacaaaacaaaagca

SEQ ID NO: 939343 - RNA, 21 nt, Human
ccaaaacuacugucuuaccga

SEQ ID NO: 939344 - RNA, 21 nt, Human
ccaagggcaaugagcaaccuc

SEQ ID NO: 939345 - RNA, 22 nt, Human
ccagcauaauguccccaaacac

SEQ ID NO: 939346 - RNA, 21 nt, Human
ccaguaaucaauuuauuuucu

SEQ ID NO: 939347 - RNA, 20 nt, Human
cccaaacacugccagcacca

SEQ ID NO: 939348 - RNA, 18 nt, Human
cgaccgaggcgccggcag

SEQ ID NO: 939349 - RNA, 22 nt, Human
cgaccgaggcgccggcagguac

SEQ ID NO: 939350 - RNA, 20 nt, Human
cggcagcaguagcggcagua

SEQ ID NO: 939351 - RNA, 23 nt, Human
cgggagagggggcgggggcgguc

SEQ ID NO: 939352 - RNA, 21 nt, Human
cguguaaaccaccaaccaaaa

SEQ ID NO: 939353 - RNA, 24 nt, Human
cuccagaaaucuuauuuuuuaaaa

SEQ ID NO: 939354 - RNA, 18 nt, Human
gaagguaauuauuugguc

SEQ ID NO: 939355 - RNA, 21 nt, Human
gacacaauuuucugggccugu

SEQ ID NO: 939356 - RNA, 20 nt, Human
gaggugcagacgcgccggcc

SEQ ID NO: 939357 - RNA, 24 nt, Human
gcagaccugugguucuggucccag

SEQ ID NO: 939358 - RNA, 21 nt, Human
ggaagguaauuauuuggucuu

SEQ ID NO: 939359 - RNA, 21 nt, Human
ggagaacagcaucagccacca

SEQ ID NO: 939360 - RNA, 23 nt, Human
ggcgccggcagguacacuggcag

SEQ ID NO: 939361 - RNA, 20 nt, Human
gggagagggggcgggggcgg

SEQ ID NO: 939362 - RNA, 21 nt, Human
gggcaaaaaaguuccccaaaa

SEQ ID NO: 939363 - RNA, 19 nt, Human
ggugaaaggucaaaugagg

SEQ ID NO: 939364 - RNA, 18 nt, Human
uaaaaaaagauaaagcua

SEQ ID NO: 939365 - RNA, 22 nt, Human
uaaaaaguuaaacaaagacaaa

SEQ ID NO: 939366 - RNA, 23 nt, Human
uaaaacagccccucacacuguga

SEQ ID NO: 939367 - RNA, 19 nt, Human
uaaaaugccacaugaaccc

SEQ ID NO: 939368 - RNA, 21 nt, Human
uaaaaugccacaugaacccuc

SEQ ID NO: 939369 - RNA, 19 nt, Human
uaaauauacacacacacca

SEQ ID NO: 939370 - RNA, 27 nt, Human
uaaauauacacacacaccagcagguca

SEQ ID NO: 939371 - RNA, 21 nt, Human
uaaauccuucagucacaaaaa

SEQ ID NO: 939372 - RNA, 22 nt, Human
uaacauggucacauauagguca

SEQ ID NO: 939373 - RNA, 20 nt, Human
uaagaaaaaugccacccaca

SEQ ID NO: 939374 - RNA, 22 nt, Human
uaagauaucaccaaauuaaacc

SEQ ID NO: 939375 - RNA, 18 nt, Human
uaaggcaagaaugcagcc

SEQ ID NO: 939376 - RNA, 20 nt, Human
uaaggcaagaaugcagccug

SEQ ID NO: 939377 - RNA, 23 nt, Human
uacacacacaccagcaggucaug

SEQ ID NO: 939378 - RNA, 19 nt, Human
uacacugaaaaggguugac

SEQ ID NO: 939379 - RNA, 19 nt, Human
uaccaucagaaguaauuuc

SEQ ID NO: 939380 - RNA, 22 nt, Human
uagaaucuggcucccgguacag

SEQ ID NO: 939381 - RNA, 23 nt, Human
uagcaaaaugcuaaaaggccugg

SEQ ID NO: 939382 - RNA, 23 nt, Human
uagugucuguaaagagggauuua

SEQ ID NO: 939383 - RNA, 23 nt, Human
uauaaaagcuuaaaaugugcaau

SEQ ID NO: 939384 - RNA, 21 nt, Human
uauggacagugcugcaauaaa

SEQ ID NO: 939385 - RNA, 24 nt, Human
uauuaauacacaguaaguucuaga

SEQ ID NO: 939386 - RNA, 19 nt, Human
uauuuggucuuuucuucug

SEQ ID NO: 939387 - RNA, 22 nt, Human
ucacacugugaacacagggaua

SEQ ID NO: 939388 - RNA, 19 nt, Human
ucacuguaagucuuuaaca

SEQ ID NO: 939389 - RNA, 21 nt, Human
uccaaaacaaaacaaaagcag

SEQ ID NO: 939390 - RNA, 24 nt, Human
uccaaaacaguuauuuggcuagac

SEQ ID NO: 939391 - RNA, 19 nt, Human
uccaaagaaauuguacuac

SEQ ID NO: 939392 - RNA, 23 nt, Human
uccaaagaaauuguacuaccucu

SEQ ID NO: 939393 - RNA, 20 nt, Human
uccacaaauuaaccaaagcc

SEQ ID NO: 939394 - RNA, 22 nt, Human
uccacaaauuaaccaaagccua

SEQ ID NO: 939395 - RNA, 24 nt, Human
uccauaaaaaagacuucaacauug

SEQ ID NO: 939396 - RNA, 23 nt, Human
ucuagaaggcaucuuucaaaaca

SEQ ID NO: 939397 - RNA, 19 nt, Human
ucuuuucucuaaaaugcca

SEQ ID NO: 939398 - RNA, 21 nt, Human
ucuuuuguauuuacauuuuuu

SEQ ID NO: 939399 - RNA, 24 nt, Human
ugaaacaccuuuagaaacacuuuc

SEQ ID NO: 939400 - RNA, 19 nt, Human
ugaaagugacaauuuauua

SEQ ID NO: 939401 - RNA, 21 nt, Human
ugaagaguacagcagucugaa

SEQ ID NO: 939402 - RNA, 23 nt, Human
ugaauaaauccuucagucacaaa

SEQ ID NO: 939403 - RNA, 23 nt, Human
ugaccauuccaagaagauaaagg

SEQ ID NO: 939404 - RNA, 20 nt, Human
ugacuauacaauacucuggu

SEQ ID NO: 939405 - RNA, 22 nt, Human
ugacuauacaauacucugguac

SEQ ID NO: 939406 - RNA, 22 nt, Human
ugagacaaagccuugccaaagg

SEQ ID NO: 939407 - RNA, 18 nt, Human
ugcaaagauggaacagaa

SEQ ID NO: 939408 - RNA, 19 nt, Human
ugcaauaaaaaaaaucaac

SEQ ID NO: 939409 - RNA, 19 nt, Human
ugcacauuccaguuuuggc

SEQ ID NO: 939410 - RNA, 22 nt, Human
ugccacccacacaacaggaaau

SEQ ID NO: 939411 - RNA, 26 nt, Human
ugcugguggcugggcagcuuuccggg

SEQ ID NO: 939412 - RNA, 27 nt, Human
ugcugguggcugggcagcuuuccgggc

SEQ ID NO: 939413 - RNA, 20 nt, Human
ugggaagaaaggcuuaagau

SEQ ID NO: 939414 - RNA, 22 nt, Human
ugggacacaauuuucugggccu

SEQ ID NO: 939415 - RNA, 22 nt, Human
ugggcaaaaaaguuccccaaaa

SEQ ID NO: 939416 - RNA, 18 nt, Human
ugguuuguuuguuuuguu

SEQ ID NO: 939417 - RNA, 18 nt, Human
ugugguucugacugucca

SEQ ID NO: 939418 - RNA, 23 nt, Human
uguuagugucuguaaagagggau

SEQ ID NO: 939419 - RNA, 23 nt, Human
uuaauagcauuuuguuacaucaa

SEQ ID NO: 939420 - RNA, 20 nt, Human
uuacaauaugacaaucugcu

SEQ ID NO: 939421 - RNA, 22 nt, Human
uucacuguaggguuaaaaaugc

SEQ ID NO: 939422 - RNA, 18 nt, Human
uucagaaucugaccauuc

SEQ ID NO: 939423 - RNA, 19 nt, Human
uucccacaugaagaggaau

SEQ ID NO: 939424 - RNA, 23 nt, Human
uucugggccuguguugaaugagg

SEQ ID NO: 939425 - RNA, 25 nt, Human
uugcugguggcugggcagcuuuccg

SEQ ID NO: 939426 - RNA, 27 nt, Human
uugcugguggcugggcagcuuuccggg

SEQ ID NO: 939427 - RNA, 18 nt, Human
uugugaacugcaguugug

SEQ ID NO: 939428 - RNA, 20 nt, Human
uuguuuuguuuuuguaaaua

SEQ ID NO: 939429 - RNA, 25 nt, Human
uuuaaaaucccuuaacagcagaccu

SEQ ID NO: 939430 - RNA, 23 nt, Human
uuucacagcaauaaacuuauugg

SEQ ID NO: 939431 - RNA, 18 nt, Human
uuugugugaaauggaagg

SEQ ID NO: 939432 - RNA, 22 nt, Human
aaagcaggugacccgggagcac

SEQ ID NO: 939433 - RNA, 21 nt, Human
aagcaggugggcccaggcucc

SEQ ID NO: 939434 - RNA, 19 nt, Human
acgccagaucuuccucugg

SEQ ID NO: 939435 - RNA, 21 nt, Human
acuggcugugggaagugguuu

SEQ ID NO: 939436 - RNA, 20 nt, Human
acuuccaggaacaucuaggg

SEQ ID NO: 939437 - RNA, 22 nt, Human
agaagccaucccuggcugagcc

SEQ ID NO: 939438 - RNA, 25 nt, Human
agaagccaucccuggcugagcccug

SEQ ID NO: 939439 - RNA, 20 nt, Human
agagaaaagaauauuccggu

SEQ ID NO: 939440 - RNA, 24 nt, Human
agaggucaagagcagcagccucgg

SEQ ID NO: 939441 - RNA, 22 nt, Human
aggaaaaacugcauacgcagua

SEQ ID NO: 939442 - RNA, 21 nt, Human
aggugacccgggagcaccugc

SEQ ID NO: 939443 - RNA, 24 nt, Human
aucuuccucuggcaguucccacug

SEQ ID NO: 939444 - RNA, 24 nt, Human
augguaucaguggggauagggcac

SEQ ID NO: 939445 - RNA, 21 nt, Human
caacagcccagaagagaaaag

SEQ ID NO: 939446 - RNA, 21 nt, Human
caaccccccagaagcaggugg

SEQ ID NO: 939447 - RNA, 24 nt, Human
caaccccccagaagcaggugggcc

SEQ ID NO: 939448 - RNA, 22 nt, Human
caccacauugccagccgggaga

SEQ ID NO: 939449 - RNA, 24 nt, Human
cacuugaaaaaccaacagcccaga

SEQ ID NO: 939450 - RNA, 21 nt, Human
cagaaacucagcuucaccaca

SEQ ID NO: 939451 - RNA, 27 nt, Human
cagaagagaaaagaauauuccggucag

SEQ ID NO: 939452 - RNA, 23 nt, Human
cagagcaaugcccacuggacccc

SEQ ID NO: 939453 - RNA, 24 nt, Human
cagagcaaugcccacuggacccca

SEQ ID NO: 939454 - RNA, 26 nt, Human
cagaggcaacugaguuuuuuuuuuuu

SEQ ID NO: 939455 - RNA, 19 nt, Human
caggugggcccaggcucca

SEQ ID NO: 939456 - RNA, 23 nt, Human
cauuccaguccugcauuuccugg

SEQ ID NO: 939457 - RNA, 19 nt, Human
cauuggacagaaacucagc

SEQ ID NO: 939458 - RNA, 20 nt, Human
cauuggacagaaacucagcu

SEQ ID NO: 939459 - RNA, 21 nt, Human
ccaccaccuccaucuggccug

SEQ ID NO: 939460 - RNA, 23 nt, Human
ccaccuccaucuggccugcuccc

SEQ ID NO: 939461 - RNA, 22 nt, Human
ccacugcccccagcugcccuuc

SEQ ID NO: 939462 - RNA, 25 nt, Human
ccacugcccccagcugcccuuccca

SEQ ID NO: 939463 - RNA, 18 nt, Human
ccagcugcccuucccagg

SEQ ID NO: 939464 - RNA, 23 nt, Human
ccagguggaacaggcacaggcau

SEQ ID NO: 939465 - RNA, 21 nt, Human
ccaguccacagcguugcuacc

SEQ ID NO: 939466 - RNA, 23 nt, Human
cccaccccacagucagucaucgc

SEQ ID NO: 939467 - RNA, 23 nt, Human
cccacugucagcuagaagccauc

SEQ ID NO: 939468 - RNA, 21 nt, Human
cccagcugcccuucccagggg

SEQ ID NO: 939469 - RNA, 22 nt, Human
cccaggggcaacuucaccaaga

SEQ ID NO: 939470 - RNA, 19 nt, Human
ccccagaagcaggugggcc

SEQ ID NO: 939471 - RNA, 23 nt, Human
ccccagcgccaaggucaggccuc

SEQ ID NO: 939472 - RNA, 23 nt, Human
cccccagaagcaggugggcccag

SEQ ID NO: 939473 - RNA, 20 nt, Human
ccccccagaagcaggugggc

SEQ ID NO: 939474 - RNA, 26 nt, Human
cccgggagcaccugcgcgcugccgga

SEQ ID NO: 939475 - RNA, 19 nt, Human
ccgggguuucacuuccagg

SEQ ID NO: 939476 - RNA, 21 nt, Human
ccuccaucuggccugcucccc

SEQ ID NO: 939477 - RNA, 21 nt, Human
ccuggcacccaacuggagccc

SEQ ID NO: 939478 - RNA, 19 nt, Human
ccuuccuuccucucugucc

SEQ ID NO: 939479 - RNA, 23 nt, Human
cgcagagcagaggucaagagcag

SEQ ID NO: 939480 - RNA, 20 nt, Human
cgggagcaccugcgcgcugc

SEQ ID NO: 939481 - RNA, 20 nt, Human
cucccacugucagcuagaag

SEQ ID NO: 939482 - RNA, 24 nt, Human
cuccucccagaagguuucagggca

SEQ ID NO: 939483 - RNA, 22 nt, Human
cuggagcccgcuuuucagcuuu

SEQ ID NO: 939484 - RNA, 18 nt, Human
cuggcaccaccaccucca

SEQ ID NO: 939485 - RNA, 20 nt, Human
cuggccugcuccccaacccc

SEQ ID NO: 939486 - RNA, 26 nt, Human
cuucccaccgucgcugugcugcgggg

SEQ ID NO: 939487 - RNA, 23 nt, Human
cuuuuccaauccuuccuuccucu

SEQ ID NO: 939488 - RNA, 20 nt, Human
gaaaaaccaacagcccagaa

SEQ ID NO: 939489 - RNA, 19 nt, Human
gaauccaccuagagcuggc

SEQ ID NO: 939490 - RNA, 20 nt, Human
gacaggaggagccucuacuc

SEQ ID NO: 939491 - RNA, 20 nt, Human
gaguuuuuuuuuuuuuuuuu

SEQ ID NO: 939492 - RNA, 26 nt, Human
gcaacugaguuuuuuuuuuuuuuuuu

SEQ ID NO: 939493 - RNA, 18 nt, Human
gcacuugaaaaaccaaca

SEQ ID NO: 939494 - RNA, 24 nt, Human
ggaaaacagccgcagagcagaggu

SEQ ID NO: 939495 - RNA, 22 nt, Human
ggaccagagcaaugcccacugg

SEQ ID NO: 939496 - RNA, 21 nt, Human
ggagcaacccagcauugacag

SEQ ID NO: 939497 - RNA, 21 nt, Human
gggcaggaggcuggaccucaa

SEQ ID NO: 939498 - RNA, 19 nt, Human
ggggacuuuuccaauccuu

SEQ ID NO: 939499 - RNA, 22 nt, Human
gugggcccaggcuccaggccag

SEQ ID NO: 939500 - RNA, 19 nt, Human
ucacauuccaguccugcau

SEQ ID NO: 939501 - RNA, 26 nt, Human
ucacuuccaggaucucacuuuggcca

SEQ ID NO: 939502 - RNA, 21 nt, Human
ucacuugcagggagcugaaga

SEQ ID NO: 939503 - RNA, 25 nt, Human
uccacagcguugcuaccugucuccg

SEQ ID NO: 939504 - RNA, 27 nt, Human
uccacaggcaggacaggaccggggucc

SEQ ID NO: 939505 - RNA, 18 nt, Human
uccaggccagugccccca

SEQ ID NO: 939506 - RNA, 18 nt, Human
ucccacuggcugugggaa

SEQ ID NO: 939507 - RNA, 19 nt, Human
uccccaaccccccagaagc

SEQ ID NO: 939508 - RNA, 22 nt, Human
uccccaaccccccagaagcagg

SEQ ID NO: 939509 - RNA, 23 nt, Human
ucccuccacaggcaggacaggac

SEQ ID NO: 939510 - RNA, 25 nt, Human
ucuggccugcuccccaaccccccag

SEQ ID NO: 939511 - RNA, 23 nt, Human
ugaaaaaccaacagcccagaaga

SEQ ID NO: 939512 - RNA, 19 nt, Human
ugaagagccugucaucacc

SEQ ID NO: 939513 - RNA, 19 nt, Human
ugacgccagaucuuccucu

SEQ ID NO: 939514 - RNA, 25 nt, Human
ugaggcagggcaggaggcuggaccu

SEQ ID NO: 939515 - RNA, 23 nt, Human
ugagggggccaccguccaggugg

SEQ ID NO: 939516 - RNA, 21 nt, Human
ugcacuugaaaaaccaacagc

SEQ ID NO: 939517 - RNA, 19 nt, Human
uggaaaacagccgcagagc

SEQ ID NO: 939518 - RNA, 18 nt, Human
uggaagggaacuggcgcc

SEQ ID NO: 939519 - RNA, 23 nt, Human
uggacagaaacucagcuucacca

SEQ ID NO: 939520 - RNA, 22 nt, Human
uggaccucaaagcaggugaccc

SEQ ID NO: 939521 - RNA, 19 nt, Human
uggccugcuccccaacccc

SEQ ID NO: 939522 - RNA, 21 nt, Human
uggccugcuccccaacccccc

SEQ ID NO: 939523 - RNA, 19 nt, Human
uggcgccacugcccccagc

SEQ ID NO: 939524 - RNA, 21 nt, Human
uggcugagcccugcacuggcc

SEQ ID NO: 939525 - RNA, 19 nt, Human
uguccagaggcugccaggc

SEQ ID NO: 939526 - RNA, 23 nt, Human
ugucucagaaucuuccugcucau

SEQ ID NO: 939527 - RNA, 22 nt, Human
uguugcacuugaaaaaccaaca

SEQ ID NO: 939528 - RNA, 21 nt, Human
uuaauuuuuggaggaaaaacu

SEQ ID NO: 939529 - RNA, 20 nt, Human
uuccccacagcccccaggag

SEQ ID NO: 939530 - RNA, 24 nt, Human
uuccccaggcccggucacuugcag

SEQ ID NO: 939531 - RNA, 19 nt, Human
uucccuccacaggcaggac

SEQ ID NO: 939532 - RNA, 18 nt, Human
uuccuuggagcuguaugg

SEQ ID NO: 939533 - RNA, 23 nt, Human
aaagggaggaggugcuagcagag

SEQ ID NO: 939534 - RNA, 20 nt, Human
aaaggggcacggugggcagg

SEQ ID NO: 939535 - RNA, 18 nt, Human
aaccugggagcggggggc

SEQ ID NO: 939536 - RNA, 19 nt, Human
aaggugcccccuccugucc

SEQ ID NO: 939537 - RNA, 24 nt, Human
aauacaagcuggagggcagggcac

SEQ ID NO: 939538 - RNA, 22 nt, Human
acaaaggggcacggugggcagg

SEQ ID NO: 939539 - RNA, 23 nt, Human
acaccccaaagccacagacucaa

SEQ ID NO: 939540 - RNA, 19 nt, Human
acaggcaagagacagcacg

SEQ ID NO: 939541 - RNA, 22 nt, Human
acccacauuccccagagaagua

SEQ ID NO: 939542 - RNA, 23 nt, Human
agaagagcccucguuccaaagaa

SEQ ID NO: 939543 - RNA, 23 nt, Human
agaaggagauggggagcccagga

SEQ ID NO: 939544 - RNA, 22 nt, Human
agagugggugagcagagaggcc

SEQ ID NO: 939545 - RNA, 24 nt, Human
agcagagaggcccccaauccugga

SEQ ID NO: 939546 - RNA, 21 nt, Human
agccucuggcacggugggccu

SEQ ID NO: 939547 - RNA, 18 nt, Human
agcggcaggggaugaggg

SEQ ID NO: 939548 - RNA, 21 nt, Human
agcuggacggcucgagcuggg

SEQ ID NO: 939549 - RNA, 24 nt, Human
aggaagaagaaggagagaacccag

SEQ ID NO: 939550 - RNA, 21 nt, Human
aggcaagagacagcacgaggg

SEQ ID NO: 939551 - RNA, 21 nt, Human
aggcaguggggagaggaaagg

SEQ ID NO: 939552 - RNA, 19 nt, Human
agggagaggaggcaguggg

SEQ ID NO: 939553 - RNA, 19 nt, Human
agggcacaggugggacagg

SEQ ID NO: 939554 - RNA, 20 nt, Human
agggggcagcccagggacuu

SEQ ID NO: 939555 - RNA, 21 nt, Human
aucccagguccuggauccccu

SEQ ID NO: 939556 - RNA, 21 nt, Human
cacaggcccugaguguccucc

SEQ ID NO: 939557 - RNA, 21 nt, Human
caccagaggggaaccugggag

SEQ ID NO: 939558 - RNA, 22 nt, Human
caccccaaagccacagacucaa

SEQ ID NO: 939559 - RNA, 18 nt, Human
cagagggcggcaggagca

SEQ ID NO: 939560 - RNA, 20 nt, Human
cagcaggaagaagaaggaga

SEQ ID NO: 939561 - RNA, 25 nt, Human
cagcaggaagaagaaggagagaacc

SEQ ID NO: 939562 - RNA, 19 nt, Human
cagcaggcagaugggccag

SEQ ID NO: 939563 - RNA, 22 nt, Human
cagcauacaugggggugggagg

SEQ ID NO: 939564 - RNA, 19 nt, Human
cagcccagggacuuaaaua

SEQ ID NO: 939565 - RNA, 24 nt, Human
cagcccagggacuuaaauacaagc

SEQ ID NO: 939566 - RNA, 22 nt, Human
caggaagcagcugugccagagg

SEQ ID NO: 939567 - RNA, 20 nt, Human
caggcccugaguguccuccc

SEQ ID NO: 939568 - RNA, 20 nt, Human
caggcucaagacacaggccc

SEQ ID NO: 939569 - RNA, 19 nt, Human
cagggagaccaaagacuug

SEQ ID NO: 939570 - RNA, 21 nt, Human
caucuuggaaagucaccuaga

SEQ ID NO: 939571 - RNA, 21 nt, Human
ccagaaggagauggggagccc

SEQ ID NO: 939572 - RNA, 19 nt, Human
ccaggacaccccaaagcca

SEQ ID NO: 939573 - RNA, 18 nt, Human
ccagggcaguagaggccg

SEQ ID NO: 939574 - RNA, 21 nt, Human
cccaauccuggauggaaccca

SEQ ID NO: 939575 - RNA, 20 nt, Human
ccccaaagccacagacucaa

SEQ ID NO: 939576 - RNA, 24 nt, Human
cccccaauccuggauggaacccac

SEQ ID NO: 939577 - RNA, 22 nt, Human
cccgcccuagauauacucagau

SEQ ID NO: 939578 - RNA, 20 nt, Human
ccgccugacauggggacaaa

SEQ ID NO: 939579 - RNA, 23 nt, Human
ccuccugucccacuccaugugcc

SEQ ID NO: 939580 - RNA, 20 nt, Human
ccugagguccagcccagggc

SEQ ID NO: 939581 - RNA, 19 nt, Human
ccuggccacauuccucgcc

SEQ ID NO: 939582 - RNA, 21 nt, Human
ccuggccacauuccucgcccu

SEQ ID NO: 939583 - RNA, 18 nt, Human
ccuuagggacccugacag

SEQ ID NO: 939584 - RNA, 21 nt, Human
cuccgcccugccuggccacag

SEQ ID NO: 939585 - RNA, 22 nt, Human
cugcagccagggcaguagaggc

SEQ ID NO: 939586 - RNA, 20 nt, Human
cugcuacccgcccacccgcc

SEQ ID NO: 939587 - RNA, 23 nt, Human
cugcuacccgcccacccgcccua

SEQ ID NO: 939588 - RNA, 19 nt, Human
cuggacggcucgagcuggg

SEQ ID NO: 939589 - RNA, 22 nt, Human
cuggagggcagggcacaggugg

SEQ ID NO: 939590 - RNA, 20 nt, Human
cugucccacuccaugugccc

SEQ ID NO: 939591 - RNA, 21 nt, Human
cugucccacuccaugugcccc

SEQ ID NO: 939592 - RNA, 23 nt, Human
cuucucagggagaccaaagacuu

SEQ ID NO: 939593 - RNA, 21 nt, Human
cuugcaaaaacccucagcuca

SEQ ID NO: 939594 - RNA, 24 nt, Human
cuugcaaaaacccucagcucaccc

SEQ ID NO: 939595 - RNA, 22 nt, Human
gacuaggauccugggugcagag

SEQ ID NO: 939596 - RNA, 20 nt, Human
gagagaacccagugcagcau

SEQ ID NO: 939597 - RNA, 20 nt, Human
gaggugcuagcagagugagg

SEQ ID NO: 939598 - RNA, 23 nt, Human
gauccugggugcagaguggguga

SEQ ID NO: 939599 - RNA, 21 nt, Human
gcacaggugggacaggcaaga

SEQ ID NO: 939600 - RNA, 21 nt, Human
gcagcccagggacuuaaauac

SEQ ID NO: 939601 - RNA, 27 nt, Human
gcaggacagcaggaagaagaaggagag

SEQ ID NO: 939602 - RNA, 18 nt, Human
gcaggagcagucucccuc

SEQ ID NO: 939603 - RNA, 18 nt, Human
gccacauuccucgcccug

SEQ ID NO: 939604 - RNA, 19 nt, Human
gcggcaggggaugagggcc

SEQ ID NO: 939605 - RNA, 23 nt, Human
gcggggggcaccccaagggggca

SEQ ID NO: 939606 - RNA, 18 nt, Human
ggaaccugggagcggggg

SEQ ID NO: 939607 - RNA, 24 nt, Human
ggagaggaaagggugggcugcugg

SEQ ID NO: 939608 - RNA, 20 nt, Human
ggcacggugggcaggcagcg

SEQ ID NO: 939609 - RNA, 28 nt, Human
ggcaggacagcaggaagaagaaggagaa

SEQ ID NO: 939610 - RNA, 21 nt, Human
ggccggggagacccucaguuc

SEQ ID NO: 939611 - RNA, 19 nt, Human
gggaaagggaggaggugcu

SEQ ID NO: 939612 - RNA, 18 nt, Human
gggcaccccaagggggca

SEQ ID NO: 939613 - RNA, 20 nt, Human
gggcacggugggcaggcagc

SEQ ID NO: 939614 - RNA, 23 nt, Human
gggcaggggacuaggauccuggg

SEQ ID NO: 939615 - RNA, 20 nt, Human
gggcucagggcagcaggcag

SEQ ID NO: 939616 - RNA, 22 nt, Human
ggggagcccaggacaccccaaa

SEQ ID NO: 939617 - RNA, 22 nt, Human
ggugcccccuccugucccacuc

SEQ ID NO: 939618 - RNA, 22 nt, Human
guccagcccagggcccuggauc

SEQ ID NO: 939619 - RNA, 21 nt, Human
uaccuuggggaaagggaggag

SEQ ID NO: 939620 - RNA, 19 nt, Human
uaggaagggagaggaggca

SEQ ID NO: 939621 - RNA, 20 nt, Human
uaggaagggagaggaggcag

SEQ ID NO: 939622 - RNA, 19 nt, Human
uccaucuuuccccaagugg

SEQ ID NO: 939623 - RNA, 21 nt, Human
uccaucuuuccccaaguggcu

SEQ ID NO: 939624 - RNA, 18 nt, Human
ucuuuuuuuuuuuuuuuu

SEQ ID NO: 939625 - RNA, 25 nt, Human
ugacaccagaggggaaccugggaag

SEQ ID NO: 939626 - RNA, 22 nt, Human
ugacauggggacaaaggggcac

SEQ ID NO: 939627 - RNA, 23 nt, Human
ugagcagagaggcccccaauccu

SEQ ID NO: 939628 - RNA, 24 nt, Human
uggaucccagguccuggauccccu

SEQ ID NO: 939629 - RNA, 19 nt, Human
uggccacaggcccugagug

SEQ ID NO: 939630 - RNA, 19 nt, Human
uggccuccaugccuguccu

SEQ ID NO: 939631 - RNA, 23 nt, Human
ugggagcggggggcaccccaagg

SEQ ID NO: 939632 - RNA, 19 nt, Human
ugggagggacaccgacaga

SEQ ID NO: 939633 - RNA, 22 nt, Human
ugggcaggacagcaggaagaag

SEQ ID NO: 939634 - RNA, 19 nt, Human
ugggcugcugggccccugu

SEQ ID NO: 939635 - RNA, 18 nt, Human
ugggugagcagagaggcc

SEQ ID NO: 939636 - RNA, 18 nt, Human
uguaggaagggagaggag

SEQ ID NO: 939637 - RNA, 22 nt, Human
uguaggaagggagaggaggcag

SEQ ID NO: 939638 - RNA, 19 nt, Human
uuccaaagaaaggugugua

SEQ ID NO: 939639 - RNA, 20 nt, Human
uuccaaagaaagguguguag

SEQ ID NO: 939640 - RNA, 21 nt, Human
uuccaaagaaagguguguagg

SEQ ID NO: 939641 - RNA, 24 nt, Human
uucccuggugggcuccagagacgg

SEQ ID NO: 939642 - RNA, 24 nt, Human
uuccucgcccugggcacugacugc

SEQ ID NO: 939643 - RNA, 23 nt, Human
uugcuuucuugcaggaagcagcu

SEQ ID NO: 939644 - RNA, 27 nt, Human
uuuuuuuuuuuuuuuuuuuccuugggg

SEQ ID NO: 939645 - RNA, 25 nt, Human
uuuuuuuuuuuuuuuuuuucuuuuu

SEQ ID NO: 939646 - RNA, 20 nt, Human
acacggcuccuccucccgcu

SEQ ID NO: 939647 - RNA, 21 nt, Human
acgaacugacacccgcagagc

SEQ ID NO: 939648 - RNA, 20 nt, Human
agcuagacaguaaaaacaga

SEQ ID NO: 939649 - RNA, 24 nt, Human
aggaagccggacgaacugacaccc

SEQ ID NO: 939650 - RNA, 22 nt, Human
augaauacaaucuccaaaaucu

SEQ ID NO: 939651 - RNA, 24 nt, Human
augaauacaaucuccaaaaucugu

SEQ ID NO: 939652 - RNA, 19 nt, Human
caaaugcaaauagauauga

SEQ ID NO: 939653 - RNA, 25 nt, Human
caaaugcaaauagauaugaauacaa

SEQ ID NO: 939654 - RNA, 22 nt, Human
cacaagacaacauuuaacaaaa

SEQ ID NO: 939655 - RNA, 20 nt, Human
caguucguaguuaagggcac

SEQ ID NO: 939656 - RNA, 21 nt, Human
ccaaccccggugccgcucagc

SEQ ID NO: 939657 - RNA, 21 nt, Human
cccgcagagccgagggagaca

SEQ ID NO: 939658 - RNA, 19 nt, Human
cccgccgccgccgcugcug

SEQ ID NO: 939659 - RNA, 20 nt, Human
ccgcccgccgccgccgcugc

SEQ ID NO: 939660 - RNA, 23 nt, Human
ccgcccgccgccgccgcugcugc

SEQ ID NO: 939661 - RNA, 19 nt, Human
ccgccgccgccgcugcugc

SEQ ID NO: 939662 - RNA, 25 nt, Human
ccgccgcugcugcugucagccgccg

SEQ ID NO: 939663 - RNA, 18 nt, Human
ccgcucagugccagggca

SEQ ID NO: 939664 - RNA, 18 nt, Human
ccgcugcugcuccuccuc

SEQ ID NO: 939665 - RNA, 20 nt, Human
ccgcugcugcugucagccgc

SEQ ID NO: 939666 - RNA, 19 nt, Human
ccucccgcugcugcuccuc

SEQ ID NO: 939667 - RNA, 20 nt, Human
ccucccgcugcugcuccucc

SEQ ID NO: 939668 - RNA, 23 nt, Human
ccuccucccgcugcugcuccucc

SEQ ID NO: 939669 - RNA, 19 nt, Human
ccuccuccgcgccccaacc

SEQ ID NO: 939670 - RNA, 22 nt, Human
cgccccaaccccggugccgcuc

SEQ ID NO: 939671 - RNA, 19 nt, Human
cgccgcccgccgccgccgc

SEQ ID NO: 939672 - RNA, 19 nt, Human
cgccgcccgccgccgccgc

SEQ ID NO: 939673 - RNA, 26 nt, Human
cgcugcugcuccuccuccgcgcccca

SEQ ID NO: 939674 - RNA, 21 nt, Human
cgggagugaggggcugugagg

SEQ ID NO: 939675 - RNA, 20 nt, Human
cucccgcugcugcuccuccu

SEQ ID NO: 939676 - RNA, 21 nt, Human
cuccucccgcugcugcuccuu

SEQ ID NO: 939677 - RNA, 22 nt, Human
cugacacccgcagagccgaggg

SEQ ID NO: 939678 - RNA, 18 nt, Human
cugcugcuccuccuccgc

SEQ ID NO: 939679 - RNA, 20 nt, Human
gaacugacacccgcagagcc

SEQ ID NO: 939680 - RNA, 25 nt, Human
gaccuagaaaucaaaugcaaauaga

SEQ ID NO: 939681 - RNA, 20 nt, Human
gggcagcuagacaguaaaaa

SEQ ID NO: 939682 - RNA, 24 nt, Human
uaacaaaaauaaucacaucaauug

SEQ ID NO: 939683 - RNA, 19 nt, Human
uaguuucaugucucagcug

SEQ ID NO: 939684 - RNA, 18 nt, Human
uccgcgccccaaccccgg

SEQ ID NO: 939685 - RNA, 21 nt, Human
uccuccgcgccccaaccccgg

SEQ ID NO: 939686 - RNA, 18 nt, Human
uccuccucccgcugcugc

SEQ ID NO: 939687 - RNA, 24 nt, Human
uccuccucccgcugcugcuccucc

SEQ ID NO: 939688 - RNA, 22 nt, Human
ugccagggcacacggcuccucc

SEQ ID NO: 939689 - RNA, 22 nt, Human
ugccgcucagccucgaaacgcc

SEQ ID NO: 939690 - RNA, 23 nt, Human
aagacaacucacagugaagagaa

SEQ ID NO: 939691 - RNA, 21 nt, Human
aaguuguuccaaaaauccucu

SEQ ID NO: 939692 - RNA, 25 nt, Human
accuccccaccccucugacagagac

SEQ ID NO: 939693 - RNA, 18 nt, Human
agaacccccagcgccccc

SEQ ID NO: 939694 - RNA, 21 nt, Human
agacugaggagaccacacacg

SEQ ID NO: 939695 - RNA, 26 nt, Human
agggugcugaaacggucagaggugca

SEQ ID NO: 939696 - RNA, 22 nt, Human
aguaccaagugggaggaccaaa

SEQ ID NO: 939697 - RNA, 25 nt, Human
auaaagcaucaagauacaaguacca

SEQ ID NO: 939698 - RNA, 22 nt, Human
caaagacaacucacagugaaga

SEQ ID NO: 939699 - RNA, 23 nt, Human
caagugggaggaccaaagacaac

SEQ ID NO: 939700 - RNA, 25 nt, Human
cacagcuugccuggucagaccccuu

SEQ ID NO: 939701 - RNA, 23 nt, Human
cacagucugaguccaggaggccc

SEQ ID NO: 939702 - RNA, 26 nt, Human
cauugcugcaaucaguauaaaaacaa

SEQ ID NO: 939703 - RNA, 19 nt, Human
ccagcgcccccgcgcccuc

SEQ ID NO: 939704 - RNA, 20 nt, Human
ccccggacucgccgggaccc

SEQ ID NO: 939705 - RNA, 20 nt, Human
ccccucugacagagacugag

SEQ ID NO: 939706 - RNA, 23 nt, Human
ccccucugacagagacugaggag

SEQ ID NO: 939707 - RNA, 24 nt, Human
cccguaagaacccccagcgccccc

SEQ ID NO: 939708 - RNA, 21 nt, Human
ccgaggcuggccggcucgugc

SEQ ID NO: 939709 - RNA, 19 nt, Human
ccgcgcccucuccccgagg

SEQ ID NO: 939710 - RNA, 23 nt, Human
cgcgcccgggaaggagcugggug

SEQ ID NO: 939711 - RNA, 19 nt, Human
cgggaaggagcugggugca

SEQ ID NO: 939712 - RNA, 22 nt, Human
cucgugcgcccugggcgcagcu

SEQ ID NO: 939713 - RNA, 22 nt, Human
cucugcagauugggcuuugcag

SEQ ID NO: 939714 - RNA, 18 nt, Human
gaacccccagcgcccccg

SEQ ID NO: 939715 - RNA, 19 nt, Human
gacugaggagaccacacac

SEQ ID NO: 939716 - RNA, 19 nt, Human
gauuccuguuucccaccuc

SEQ ID NO: 939717 - RNA, 22 nt, Human
gcgcccugggcgcagcuggagg

SEQ ID NO: 939718 - RNA, 21 nt, Human
gcgcgcccgggaaggagcugg

SEQ ID NO: 939719 - RNA, 26 nt, Human
ggaccagugccaggcagcggggcaga

SEQ ID NO: 939720 - RNA, 23 nt, Human
ggagaccacacacguugaccucc

SEQ ID NO: 939721 - RNA, 21 nt, Human
ggccguugguggcuggcugca

SEQ ID NO: 939722 - RNA, 18 nt, Human
gggaaggagcugggugca

SEQ ID NO: 939723 - RNA, 18 nt, Human
gggaaggagcugggugca

SEQ ID NO: 939724 - RNA, 23 nt, Human
ggugcugaaacggucagaggugc

SEQ ID NO: 939725 - RNA, 18 nt, Human
uaaaaacaaaguuauucc

SEQ ID NO: 939726 - RNA, 20 nt, Human
ucauuuccacuccaacauuc

SEQ ID NO: 939727 - RNA, 23 nt, Human
uccccaccccucugacagagacu

SEQ ID NO: 939728 - RNA, 21 nt, Human
ucugacagagacugaggagac

SEQ ID NO: 939729 - RNA, 18 nt, Human
ucugaguccaggaggccc

SEQ ID NO: 939730 - RNA, 22 nt, Human
ugaaacggucagaggugcaggu

SEQ ID NO: 939731 - RNA, 23 nt, Human
ugaaacggucagaggugcaggug

SEQ ID NO: 939732 - RNA, 18 nt, Human
ugaagagaaacgcuugag

SEQ ID NO: 939733 - RNA, 22 nt, Human
ugcaaaggaccagugccaggca

SEQ ID NO: 939734 - RNA, 20 nt, Human
ugcaagggcaagggggccgu

SEQ ID NO: 939735 - RNA, 21 nt, Human
ugcaagggcaagggggccguu

SEQ ID NO: 939736 - RNA, 20 nt, Human
ugcgcccugggcgcagcugg

SEQ ID NO: 939737 - RNA, 21 nt, Human
uguuucccaccuccccacccc

SEQ ID NO: 939738 - RNA, 18 nt, Human
uucccaccuccccacccc

SEQ ID NO: 939739 - RNA, 21 nt, Human
uuuuuuuuuuaaguuguucca

SEQ ID NO: 939740 - RNA, 25 nt, Human
uuuuuuuuuuuuuuuuuuuuuaagg

SEQ ID NO: 939741 - RNA, 25 nt, Human
aaaaaaaaacaaaaaaaaaacaaaa

SEQ ID NO: 939742 - RNA, 21 nt, Human
aaaaaaaacaaaaaaaaacau

SEQ ID NO: 939743 - RNA, 24 nt, Human
aaaaaaacaaaaaaaaacaaaaaa

SEQ ID NO: 939744 - RNA, 25 nt, Human
aaaaaaacaaaaaaaaacauuugua

SEQ ID NO: 939745 - RNA, 28 nt, Human
aaaaaacccaaaaggcaaaugcuacugc

SEQ ID NO: 939746 - RNA, 19 nt, Human
aaaaauauguaaaaaggcc

SEQ ID NO: 939747 - RNA, 20 nt, Human
aaaaugaaagcuauugcaga

SEQ ID NO: 939748 - RNA, 20 nt, Human
aaauagaacuugcucacaaa

SEQ ID NO: 939749 - RNA, 26 nt, Human
aacaaacaaaaaacccaaaaggcaaa

SEQ ID NO: 939750 - RNA, 22 nt, Human
aacccaucucuuauaaagccua

SEQ ID NO: 939751 - RNA, 19 nt, Human
aaccuggugaaaccccguc

SEQ ID NO: 939752 - RNA, 20 nt, Human
aaccuggugaaaccccgucu

SEQ ID NO: 939753 - RNA, 21 nt, Human
aaccuggugaaaccccgucuc

SEQ ID NO: 939754 - RNA, 24 nt, Human
aaguccgagaaugaagggccccag

SEQ ID NO: 939755 - RNA, 24 nt, Human
aauggcgugaaccugggaggugga

SEQ ID NO: 939756 - RNA, 26 nt, Human
acaaaaaacccaaaaggcaaaugcua

SEQ ID NO: 939757 - RNA, 24 nt, Human
acagaacauucuguguucaucucu

SEQ ID NO: 939758 - RNA, 20 nt, Human
acagagcgagacuccgucuc

SEQ ID NO: 939759 - RNA, 23 nt, Human
acagagcgagacuccgucucaaa

SEQ ID NO: 939760 - RNA, 24 nt, Human
acagagcgagacuccgucucaaaa

SEQ ID NO: 939761 - RNA, 24 nt, Human
accacaaaauacaaagggcugcaa

SEQ ID NO: 939762 - RNA, 24 nt, Human
accccgucucuacuaaaaauacaa

SEQ ID NO: 939763 - RNA, 22 nt, Human
agaaaaaaaaaucuaaugaggg

SEQ ID NO: 939764 - RNA, 27 nt, Human
agacagaagugaaggggagcuaugauc

SEQ ID NO: 939765 - RNA, 24 nt, Human
agcacuuugggaggccgaggcggg

SEQ ID NO: 939766 - RNA, 24 nt, Human
agccgcggcagcgccuucacagcc

SEQ ID NO: 939767 - RNA, 24 nt, Human
agccugggugacagagcgagacuc

SEQ ID NO: 939768 - RNA, 23 nt, Human
aggcaaaaauaugugacaacagc

SEQ ID NO: 939769 - RNA, 21 nt, Human
aggcaggagaauggcgugaac

SEQ ID NO: 939770 - RNA, 22 nt, Human
aggcaggagaauggcgugaacc

SEQ ID NO: 939771 - RNA, 24 nt, Human
aggcaggagaauggcgugaaccug

SEQ ID NO: 939772 - RNA, 21 nt, Human
aggccgaggcgggcggaucac

SEQ ID NO: 939773 - RNA, 22 nt, Human
aggccgggcacgguggcucacg

SEQ ID NO: 939774 - RNA, 24 nt, Human
aggcgggcggaucacaaggucagg

SEQ ID NO: 939775 - RNA, 19 nt, Human
aggcugaggcaggagaaug

SEQ ID NO: 939776 - RNA, 24 nt, Human
agguggagcuugcagugagccgag

SEQ ID NO: 939777 - RNA, 24 nt, Human
agugcacuccagccugggugacag

SEQ ID NO: 939778 - RNA, 26 nt, Human
auaaagccuaugagaaaaugaaagcu

SEQ ID NO: 939779 - RNA, 23 nt, Human
auaacaaacaaaaaacccaaaag

SEQ ID NO: 939780 - RNA, 24 nt, Human
aucaagccagugcacuccagccug

SEQ ID NO: 939781 - RNA, 21 nt, Human
aucucuuccucugcucauacc

SEQ ID NO: 939782 - RNA, 20 nt, Human
augaaaauuuaaacacgcca

SEQ ID NO: 939783 - RNA, 18 nt, Human
augaagacuuuaaguagg

SEQ ID NO: 939784 - RNA, 19 nt, Human
auucuaaagcaaaaucagc

SEQ ID NO: 939785 - RNA, 25 nt, Human
caaaaaaaaacaaaaaaaaacaaaa

SEQ ID NO: 939786 - RNA, 21 nt, Human
cacagaggcaaaaauauguga

SEQ ID NO: 939787 - RNA, 18 nt, Human
cacagccacggccggcuc

SEQ ID NO: 939788 - RNA, 18 nt, Human
caccgccccggccccgcc

SEQ ID NO: 939789 - RNA, 24 nt, Human
cacgccuguaaucccagcacuuug

SEQ ID NO: 939790 - RNA, 22 nt, Human
cacuccagccugggugacagag

SEQ ID NO: 939791 - RNA, 23 nt, Human
cacuccagccugggugacagagc

SEQ ID NO: 939792 - RNA, 24 nt, Human
cacuccagccugggugacagagcg

SEQ ID NO: 939793 - RNA, 24 nt, Human
cagcacuuugggaggccgaggcgg

SEQ ID NO: 939794 - RNA, 21 nt, Human
cagcccccaccgccccggccc

SEQ ID NO: 939795 - RNA, 24 nt, Human
cagcuacucgggaggcugaggcag

SEQ ID NO: 939796 - RNA, 18 nt, Human
cagugagccgagaucaag

SEQ ID NO: 939797 - RNA, 22 nt, Human
cagugcacuccagccuggguga

SEQ ID NO: 939798 - RNA, 23 nt, Human
cagugcacuccagccugggugac

SEQ ID NO: 939799 - RNA, 24 nt, Human
cagugcacuccagccugggugaca

SEQ ID NO: 939800 - RNA, 25 nt, Human
cagugcacuccagccugggugacag

SEQ ID NO: 939801 - RNA, 21 nt, Human
cauucuguguucaucucuggc

SEQ ID NO: 939802 - RNA, 21 nt, Human
ccacgcccuccucgggcgagg

SEQ ID NO: 939803 - RNA, 21 nt, Human
ccagugcacuccagccugggu

SEQ ID NO: 939804 - RNA, 21 nt, Human
ccagugcacuccagccugggu

SEQ ID NO: 939805 - RNA, 22 nt, Human
ccagugcacuccagccugggug

SEQ ID NO: 939806 - RNA, 23 nt, Human
ccagugcacuccagccuggguga

SEQ ID NO: 939807 - RNA, 24 nt, Human
ccagugcacuccagccugggugac

SEQ ID NO: 939808 - RNA, 19 nt, Human
cccaccacgucaggcaccg

SEQ ID NO: 939809 - RNA, 18 nt, Human
ccccaccgccccggcccc

SEQ ID NO: 939810 - RNA, 18 nt, Human
cccgagcccgagugucgc

SEQ ID NO: 939811 - RNA, 24 nt, Human
cccucccgacagccgcggcagcgc

SEQ ID NO: 939812 - RNA, 23 nt, Human
ccgacagccgcggcagcgccuuc

SEQ ID NO: 939813 - RNA, 18 nt, Human
ccggaggaaaagcgaaga

SEQ ID NO: 939814 - RNA, 21 nt, Human
ccuauagucccagcuacucgg

SEQ ID NO: 939815 - RNA, 23 nt, Human
ccuggcuaaccuggugaaacccc

SEQ ID NO: 939816 - RNA, 24 nt, Human
ccuggcuaaccuggugaaaccccg

SEQ ID NO: 939817 - RNA, 22 nt, Human
ccugggugacagagcgagacuc

SEQ ID NO: 939818 - RNA, 22 nt, Human
ccuguaaucccagcacuuuggg

SEQ ID NO: 939819 - RNA, 24 nt, Human
cgagaccauccuggcuaaccuggu

SEQ ID NO: 939820 - RNA, 20 nt, Human
cgccccggccccgccgaccc

SEQ ID NO: 939821 - RNA, 23 nt, Human
cgccuauagucccagcuacucgg

SEQ ID NO: 939822 - RNA, 24 nt, Human
cgccuauagucccagcuacucggg

SEQ ID NO: 939823 - RNA, 23 nt, Human
cgccuguaaucccagcacuuugg

SEQ ID NO: 939824 - RNA, 26 nt, Human
cgcgccgcccucccgacagccgcggc

SEQ ID NO: 939825 - RNA, 21 nt, Human
cgggcgcuguccccacgcccu

SEQ ID NO: 939826 - RNA, 24 nt, Human
cguggugggcgccuauagucccag

SEQ ID NO: 939827 - RNA, 22 nt, Human
cuaaagcaaaaucagcagaagu

SEQ ID NO: 939828 - RNA, 20 nt, Human
cuauugcagaagugaaauuc

SEQ ID NO: 939829 - RNA, 22 nt, Human
cucacgccuguaaucccagcac

SEQ ID NO: 939830 - RNA, 24 nt, Human
cucacgccuguaaucccagcacuu

SEQ ID NO: 939831 - RNA, 21 nt, Human
cucagcccccaccgccccggc

SEQ ID NO: 939832 - RNA, 22 nt, Human
cucauaccacugaacccaucuc

SEQ ID NO: 939833 - RNA, 18 nt, Human
cuccgucucaaaaaaaaa

SEQ ID NO: 939834 - RNA, 23 nt, Human
cuuaugcuuaagaaaaaaaaauc

SEQ ID NO: 939835 - RNA, 19 nt, Human
cuugcagugagccgagauc

SEQ ID NO: 939836 - RNA, 20 nt, Human
gaccauccuggcuaaccugg

SEQ ID NO: 939837 - RNA, 18 nt, Human
gagcuugcagugagccga

SEQ ID NO: 939838 - RNA, 22 nt, Human
gagcuugcagugagccgagauc

SEQ ID NO: 939839 - RNA, 24 nt, Human
gaggcgggcggaucacaaggucag

SEQ ID NO: 939840 - RNA, 24 nt, Human
gcacuccagccugggugacagagc

SEQ ID NO: 939841 - RNA, 19 nt, Human
gccagugcacuccagccug

SEQ ID NO: 939842 - RNA, 23 nt, Human
gccuauagucccagcuacucggg

SEQ ID NO: 939843 - RNA, 24 nt, Human
gcuaaccuggugaaaccccgucuc

SEQ ID NO: 939844 - RNA, 22 nt, Human
gcugaggcaggagaauggcgug

SEQ ID NO: 939845 - RNA, 18 nt, Human
ggagcuugcagugagccg

SEQ ID NO: 939846 - RNA, 24 nt, Human
ggagcuugcagugagccgagauca

SEQ ID NO: 939847 - RNA, 21 nt, Human
ggcucacgccuguaaucccag

SEQ ID NO: 939848 - RNA, 24 nt, Human
gggcacgguggcucacgccuguaa

SEQ ID NO: 939849 - RNA, 24 nt, Human
gggcggaucacaaggucaggagau

SEQ ID NO: 939850 - RNA, 23 nt, Human
gguggcucacgccuguaauccca

SEQ ID NO: 939851 - RNA, 24 nt, Human
gguggcucacgccuguaaucccag

SEQ ID NO: 939852 - RNA, 22 nt, Human
uaaaagugcugccucaggaaca

SEQ ID NO: 939853 - RNA, 21 nt, Human
uaacaaacaaaaaacccaaaa

SEQ ID NO: 939854 - RNA, 22 nt, Human
uaaccuggugaaaccccgucuc

SEQ ID NO: 939855 - RNA, 24 nt, Human
uaaccuggugaaaccccgucucua

SEQ ID NO: 939856 - RNA, 22 nt, Human
uaagacagaagugaaggggagc

SEQ ID NO: 939857 - RNA, 20 nt, Human
uaagguaaccauucuaaagc

SEQ ID NO: 939858 - RNA, 21 nt, Human
uaauaacaaacaaaaaaccca

SEQ ID NO: 939859 - RNA, 21 nt, Human
uaauucuauaauuccauuggu

SEQ ID NO: 939860 - RNA, 21 nt, Human
uacaaucuguguuccuucugc

SEQ ID NO: 939861 - RNA, 24 nt, Human
uagccgggcgucguggugggcgcc

SEQ ID NO: 939862 - RNA, 23 nt, Human
uauuguauauauuuuugcaccuu

SEQ ID NO: 939863 - RNA, 20 nt, Human
ucaaaaaagcuaggcauaau

SEQ ID NO: 939864 - RNA, 18 nt, Human
ucacaaggucaggagauc

SEQ ID NO: 939865 - RNA, 24 nt, Human
ucacaaggucaggagaucgagacc

SEQ ID NO: 939866 - RNA, 23 nt, Human
uccagccugggugacagagcgag

SEQ ID NO: 939867 - RNA, 24 nt, Human
uccagccugggugacagagcgaga

SEQ ID NO: 939868 - RNA, 19 nt, Human
ucccucucugccucccucu

SEQ ID NO: 939869 - RNA, 25 nt, Human
ucgcgccgcccucccgacagccgcg

SEQ ID NO: 939870 - RNA, 24 nt, Human
ucucaaaaaaaaacaaaaaaaaac

SEQ ID NO: 939871 - RNA, 22 nt, Human
ucucuacuaaaaauacaaaaaa

SEQ ID NO: 939872 - RNA, 21 nt, Human
ucucuggucacaaacuccacu

SEQ ID NO: 939873 - RNA, 21 nt, Human
ucugcgagcagugccugauuc

SEQ ID NO: 939874 - RNA, 19 nt, Human
ucugcucauaccacugaac

SEQ ID NO: 939875 - RNA, 21 nt, Human
ugaaagaauauaaaugaagac

SEQ ID NO: 939876 - RNA, 24 nt, Human
ugaaccugggagguggagcuugca

SEQ ID NO: 939877 - RNA, 21 nt, Human
ugaacucacagaggcaaaaau

SEQ ID NO: 939878 - RNA, 27 nt, Human
ugagaaaaugaaagcuauugcagaagu

SEQ ID NO: 939879 - RNA, 24 nt, Human
ugaggcaggagaauggcgugaacc

SEQ ID NO: 939880 - RNA, 25 nt, Human
ugaggcaggagaauggcgugaaccu

SEQ ID NO: 939881 - RNA, 20 nt, Human
ugcacuccagccugggugac

SEQ ID NO: 939882 - RNA, 20 nt, Human
ugcuaauuaaaaacaaaaac

SEQ ID NO: 939883 - RNA, 22 nt, Human
uggcucacgccuguaaucccag

SEQ ID NO: 939884 - RNA, 24 nt, Human
uggcucacgccuguaaucccagca

SEQ ID NO: 939885 - RNA, 19 nt, Human
ugggaggccgaggcgggcg

SEQ ID NO: 939886 - RNA, 24 nt, Human
ugggaggccgaggcgggcggauca

SEQ ID NO: 939887 - RNA, 29 nt, Human
ugggagguggagcuugcagugacaacggu

SEQ ID NO: 939888 - RNA, 24 nt, Human
ugggagguggagcuugcagugagc

SEQ ID NO: 939889 - RNA, 24 nt, Human
uguaaaagcagauaaaauauuuaa

SEQ ID NO: 939890 - RNA, 20 nt, Human
uguaugaaaauuuaaacacg

SEQ ID NO: 939891 - RNA, 20 nt, Human
ugucuuuuaauuucuuaggc

SEQ ID NO: 939892 - RNA, 24 nt, Human
uguucacuauaucugcauuacaug

SEQ ID NO: 939893 - RNA, 21 nt, Human
uuaaaauacuguuaauucuau

SEQ ID NO: 939894 - RNA, 22 nt, Human
uuagaagugauacaauuucaac

SEQ ID NO: 939895 - RNA, 24 nt, Human
uuagccgggcgucguggugggcgc

SEQ ID NO: 939896 - RNA, 25 nt, Human
uuagccgggcgucguggugggcgcc

SEQ ID NO: 939897 - RNA, 22 nt, Human
uuaugcuuaagaaaaaaaaauc

SEQ ID NO: 939898 - RNA, 18 nt, Human
uugcagugagccgagauc

SEQ ID NO: 939899 - RNA, 21 nt, Human
uugcagugagccgagaucaag

SEQ ID NO: 939900 - RNA, 25 nt, Human
uugggaggccgaggcgggcggauca

SEQ ID NO: 939901 - RNA, 21 nt, Human
uuuaaguucagucuuaugcuu

SEQ ID NO: 939902 - RNA, 20 nt, Human
aacuuaauccuaccauccau

SEQ ID NO: 939903 - RNA, 22 nt, Human
aagugcuaauuuucccuuuaca

SEQ ID NO: 939904 - RNA, 23 nt, Human
aaugacuugagguuggagcuuaa

SEQ ID NO: 939905 - RNA, 21 nt, Human
aauuguccucccuacacuuaa

SEQ ID NO: 939906 - RNA, 19 nt, Human
acaacucccucuaacagug

SEQ ID NO: 939907 - RNA, 20 nt, Human
agaggcugaaaacugggcag

SEQ ID NO: 939908 - RNA, 21 nt, Human
aggaugagcuaggcaucugcu

SEQ ID NO: 939909 - RNA, 23 nt, Human
aucaagucugagaggcugagguu

SEQ ID NO: 939910 - RNA, 19 nt, Human
caccaucuugaucaugaga

SEQ ID NO: 939911 - RNA, 19 nt, Human
cacggcccagccccggucc

SEQ ID NO: 939912 - RNA, 24 nt, Human
cagaggcaggggaaaaauaaagga

SEQ ID NO: 939913 - RNA, 20 nt, Human
cagccgggacgccgccgcgg

SEQ ID NO: 939914 - RNA, 20 nt, Human
cagugguaacagaaaccaag

SEQ ID NO: 939915 - RNA, 21 nt, Human
cauaauagaaguucacagacu

SEQ ID NO: 939916 - RNA, 21 nt, Human
cauugcugcagucuuuggaga

SEQ ID NO: 939917 - RNA, 18 nt, Human
ccgcccguccuccggccg

SEQ ID NO: 939918 - RNA, 22 nt, Human
ccgccgcacggcccagccccgg

SEQ ID NO: 939919 - RNA, 18 nt, Human
ccgcugccgccgcacggc

SEQ ID NO: 939920 - RNA, 19 nt, Human
ccgggagccgccgccgccg

SEQ ID NO: 939921 - RNA, 22 nt, Human
ccuaaguugagaagggagaggc

SEQ ID NO: 939922 - RNA, 24 nt, Human
ccuauaaauaacccauuuuagcuu

SEQ ID NO: 939923 - RNA, 19 nt, Human
ccucuaacagugguaacag

SEQ ID NO: 939924 - RNA, 25 nt, Human
cgccgcccuaaguugagaagggaga

SEQ ID NO: 939925 - RNA, 18 nt, Human
cgccgcugccgccgcacg

SEQ ID NO: 939926 - RNA, 19 nt, Human
cgcgggcccgccgccgccc

SEQ ID NO: 939927 - RNA, 20 nt, Human
cgcgggcccgccgccgcccu

SEQ ID NO: 939928 - RNA, 19 nt, Human
cggagaagacucaagacug

SEQ ID NO: 939929 - RNA, 21 nt, Human
cuuccgggagccgccgccgcc

SEQ ID NO: 939930 - RNA, 24 nt, Human
gaagggaaggcagagaaaccuuua

SEQ ID NO: 939931 - RNA, 18 nt, Human
gcaagacugggugcgaga

SEQ ID NO: 939932 - RNA, 19 nt, Human
gccgcacggcccagccccg

SEQ ID NO: 939933 - RNA, 22 nt, Human
gccgccgccgccgccaucuugg

SEQ ID NO: 939934 - RNA, 24 nt, Human
gggaaaaauaaaggaaacagaaag

SEQ ID NO: 939935 - RNA, 25 nt, Human
gggaaaaauaaaggaaaccgguacc

SEQ ID NO: 939936 - RNA, 23 nt, Human
gggaaggcagagaaaccuuuaaa

SEQ ID NO: 939937 - RNA, 19 nt, Human
gguaacagaaaccaaggaa

SEQ ID NO: 939938 - RNA, 19 nt, Human
gugcucuauaccuuuauac

SEQ ID NO: 939939 - RNA, 25 nt, Human
guugagaagggagaggccaggccca

SEQ ID NO: 939940 - RNA, 22 nt, Human
uaaauaacccauuuuagcuuca

SEQ ID NO: 939941 - RNA, 23 nt, Human
uaaaugacuugagguuggagcuu

SEQ ID NO: 939942 - RNA, 26 nt, Human
uaacagaaaccaaggaaauuauaauc

SEQ ID NO: 939943 - RNA, 19 nt, Human
uaagaaccacaaaagugcu

SEQ ID NO: 939944 - RNA, 22 nt, Human
uaagaaccacaaaagugcuaau

SEQ ID NO: 939945 - RNA, 26 nt, Human
uaagaggcugaaaacugggcaacuaa

SEQ ID NO: 939946 - RNA, 23 nt, Human
uaaguugagaagggagaggccag

SEQ ID NO: 939947 - RNA, 24 nt, Human
uaaucuuuaagcaauggccccaua

SEQ ID NO: 939948 - RNA, 19 nt, Human
uauaccuuuauacaauacc

SEQ ID NO: 939949 - RNA, 19 nt, Human
ucaggcuaguaaggacuag

SEQ ID NO: 939950 - RNA, 25 nt, Human
uccccuggcgccgcugccgccgcac

SEQ ID NO: 939951 - RNA, 18 nt, Human
ucccugagggaaaagagu

SEQ ID NO: 939952 - RNA, 21 nt, Human
ucccuuaagaaccacaaaagu

SEQ ID NO: 939953 - RNA, 23 nt, Human
uccuguuaacuuucaggaccacc

SEQ ID NO: 939954 - RNA, 23 nt, Human
uccuuuucagcaaggucaaaagc

SEQ ID NO: 939955 - RNA, 24 nt, Human
ucuugaucaugagagcuuauuuaa

SEQ ID NO: 939956 - RNA, 24 nt, Human
ugaaaacugguggcagggacccca

SEQ ID NO: 939957 - RNA, 18 nt, Human
ugacagcauuuauaccac

SEQ ID NO: 939958 - RNA, 19 nt, Human
ugagaagggagaggccagg

SEQ ID NO: 939959 - RNA, 22 nt, Human
ugagaagggagaggccaggccc

SEQ ID NO: 939960 - RNA, 22 nt, Human
ugagguuggagcuuaaucuuuu

SEQ ID NO: 939961 - RNA, 21 nt, Human
uggaaugucaaaugaaacuua

SEQ ID NO: 939962 - RNA, 23 nt, Human
uggcagagaugaaaucauuucca

SEQ ID NO: 939963 - RNA, 23 nt, Human
uggccccauaaauauagacuaca

SEQ ID NO: 939964 - RNA, 22 nt, Human
ugggaggcggguggguagaagg

SEQ ID NO: 939965 - RNA, 21 nt, Human
uggugggaggcggguggguag

SEQ ID NO: 939966 - RNA, 20 nt, Human
uuauauguuccuuuucagca

SEQ ID NO: 939967 - RNA, 21 nt, Human
uucagcaaggucaaaagccaa

SEQ ID NO: 939968 - RNA, 23 nt, Human
uuccacucuucuuccuuuuuaaa

SEQ ID NO: 939969 - RNA, 20 nt, Human
aagaccccaagccucggggc

SEQ ID NO: 939970 - RNA, 19 nt, Human
aagcccagaaaggagcugg

SEQ ID NO: 939971 - RNA, 21 nt, Human
aagccucagaccccgacccca

SEQ ID NO: 939972 - RNA, 24 nt, Human
aaggagcuggguccagcccuuacc

SEQ ID NO: 939973 - RNA, 22 nt, Human
aaugcugucuccguuccauggg

SEQ ID NO: 939974 - RNA, 21 nt, Human
accggccccccacucccccgc

SEQ ID NO: 939975 - RNA, 25 nt, Human
acgcgcugcccgcucaugcucccgg

SEQ ID NO: 939976 - RNA, 18 nt, Human
acuacccaagcccagaaa

SEQ ID NO: 939977 - RNA, 20 nt, Human
agaaguagggguuuggcuuc

SEQ ID NO: 939978 - RNA, 24 nt, Human
agccuuaucccuccucaugcccac

SEQ ID NO: 939979 - RNA, 18 nt, Human
aggcaaaccccgaucucc

SEQ ID NO: 939980 - RNA, 18 nt, Human
aggcagcgcccaagccuc

SEQ ID NO: 939981 - RNA, 22 nt, Human
agugaugacaacagcuguagaa

SEQ ID NO: 939982 - RNA, 19 nt, Human
caagcccagaaaggagcug

SEQ ID NO: 939983 - RNA, 21 nt, Human
caagcccagaaaggagcuggg

SEQ ID NO: 939984 - RNA, 19 nt, Human
caccaccuugacguccacg

SEQ ID NO: 939985 - RNA, 21 nt, Human
caccaggcuagucuugcccac

SEQ ID NO: 939986 - RNA, 20 nt, Human
cacugacguaauccucugcc

SEQ ID NO: 939987 - RNA, 26 nt, Human
cagaaaggagcuggguccagcccuua

SEQ ID NO: 939988 - RNA, 24 nt, Human
cagauuaccggccccccacucccc

SEQ ID NO: 939989 - RNA, 22 nt, Human
cagcacaggcaggcgccacucu

SEQ ID NO: 939990 - RNA, 24 nt, Human
cagccuuaucccuccucaugccca

SEQ ID NO: 939991 - RNA, 18 nt, Human
cagcgccccgugugcccc

SEQ ID NO: 939992 - RNA, 21 nt, Human
ccaagcccagaaaggagcugg

SEQ ID NO: 939993 - RNA, 24 nt, Human
ccaccaggcuagucuugcccacgu

SEQ ID NO: 939994 - RNA, 22 nt, Human
ccagcaucaccaccuugacguc

SEQ ID NO: 939995 - RNA, 18 nt, Human
ccaggccaggugagugcu

SEQ ID NO: 939996 - RNA, 19 nt, Human
cccaagccucagaccccga

SEQ ID NO: 939997 - RNA, 23 nt, Human
cccacagucagcccaaugcuguc

SEQ ID NO: 939998 - RNA, 24 nt, Human
cccaccgugccuggccccuccgga

SEQ ID NO: 939999 - RNA, 20 nt, Human
ccccaagccucggggcggcc

SEQ ID NO: 940000 - RNA, 25 nt, Human
cccccacucccccgcccaccgugcc

SEQ ID NO: 940001 - RNA, 22 nt, Human
ccgaccccaaacggcgccaacc

SEQ ID NO: 940002 - RNA, 23 nt, Human
ccgaccccaaacggcgccaaccu

SEQ ID NO: 940003 - RNA, 18 nt, Human
ccggccccccacuccccc

SEQ ID NO: 940004 - RNA, 24 nt, Human
ccgugugcccccgcuguucggccc

SEQ ID NO: 940005 - RNA, 22 nt, Human
ccucaacagcgcagcacgccgc

SEQ ID NO: 940006 - RNA, 20 nt, Human
ccucagaccccgaccccaaa

SEQ ID NO: 940007 - RNA, 19 nt, Human
cgaccccaaacggcgccaa

SEQ ID NO: 940008 - RNA, 22 nt, Human
cgaccccaaacggcgccaaccu

SEQ ID NO: 940009 - RNA, 26 nt, Human
cgccaaccuacgacuccagacagcgc

SEQ ID NO: 940010 - RNA, 21 nt, Human
cggccccccacucccccgccc

SEQ ID NO: 940011 - RNA, 22 nt, Human
cgggaggcaaaccccgaucucc

SEQ ID NO: 940012 - RNA, 22 nt, Human
cgucaggguccugagcggggac

SEQ ID NO: 940013 - RNA, 18 nt, Human
cuaaagccucauaccuga

SEQ ID NO: 940014 - RNA, 30 nt, Human
cucagaccccgaccccaaacggcgccaacc

SEQ ID NO: 940015 - RNA, 20 nt, Human
cucccggggccgcuucagcc

SEQ ID NO: 940016 - RNA, 22 nt, Human
cuccuugcccagcaucaccacc

SEQ ID NO: 940017 - RNA, 21 nt, Human
cuggggucucccgcaacccgg

SEQ ID NO: 940018 - RNA, 23 nt, Human
cuggguccagcccuuacggggaa

SEQ ID NO: 940019 - RNA, 19 nt, Human
gacucagugaugacaacag

SEQ ID NO: 940020 - RNA, 21 nt, Human
gagcucguccacacucuggcc

SEQ ID NO: 940021 - RNA, 19 nt, Human
gcagcgccccgugugcccc

SEQ ID NO: 940022 - RNA, 23 nt, Human
gcccacguacuccuugcccagca

SEQ ID NO: 940023 - RNA, 24 nt, Human
gcccaggcagcgcccaagccucag

SEQ ID NO: 940024 - RNA, 22 nt, Human
gccgauuauccuucgaagaccc

SEQ ID NO: 940025 - RNA, 22 nt, Human
gcuccguucuggcugggaaucc

SEQ ID NO: 940026 - RNA, 22 nt, Human
ggcagaagccugggguccaaau

SEQ ID NO: 940027 - RNA, 19 nt, Human
gggagggcuagcaguucag

SEQ ID NO: 940028 - RNA, 18 nt, Human
guccacacucuggccugu

SEQ ID NO: 940029 - RNA, 22 nt, Human
guccugagcggggacgggaggc

SEQ ID NO: 940030 - RNA, 26 nt, Human
gugcuguccagggcagaagccugggg

SEQ ID NO: 940031 - RNA, 23 nt, Human
uaaacagacaaaagggagggcug

SEQ ID NO: 940032 - RNA, 21 nt, Human
uacccaagcccagaaaggagc

SEQ ID NO: 940033 - RNA, 21 nt, Human
uaccggccccccacucccccg

SEQ ID NO: 940034 - RNA, 24 nt, Human
uagaaguagggguuuggcuucugg

SEQ ID NO: 940035 - RNA, 18 nt, Human
ucaccuggaaggcagcca

SEQ ID NO: 940036 - RNA, 19 nt, Human
ucagaccccgaccccaaac

SEQ ID NO: 940037 - RNA, 24 nt, Human
uccaaaucagccuuaucccuccuc

SEQ ID NO: 940038 - RNA, 18 nt, Human
uccaccaggcuagucuug

SEQ ID NO: 940039 - RNA, 19 nt, Human
uccacgcccuuguccucug

SEQ ID NO: 940040 - RNA, 20 nt, Human
uccagggcagaagccugggg

SEQ ID NO: 940041 - RNA, 26 nt, Human
ucccaaccgaaccuggggucucccgc

SEQ ID NO: 940042 - RNA, 25 nt, Human
ucggcccaggcagcgcccaagccuc

SEQ ID NO: 940043 - RNA, 19 nt, Human
ucgggcucgagcucuggcc

SEQ ID NO: 940044 - RNA, 21 nt, Human
ugacaacagcuguagaaguag

SEQ ID NO: 940045 - RNA, 24 nt, Human
ugacaacagcuguagaaguagggg

SEQ ID NO: 940046 - RNA, 21 nt, Human
ugagaauuagauaaacagaca

SEQ ID NO: 940047 - RNA, 19 nt, Human
ugcacuucggcagcgcccc

SEQ ID NO: 940048 - RNA, 22 nt, Human
ugcccccgcuguucggccccgg

SEQ ID NO: 940049 - RNA, 25 nt, Human
ugccuggccccuccggaugcacuca

SEQ ID NO: 940050 - RNA, 18 nt, Human
uggcugggaaucccaacc

SEQ ID NO: 940051 - RNA, 19 nt, Human
uggcuucuggcccagaucc

SEQ ID NO: 940052 - RNA, 21 nt, Human
ugggccagcacaggcaggcgc

SEQ ID NO: 940053 - RNA, 18 nt, Human
uucuggaagagcucgucc

SEQ ID NO: 940054 - RNA, 22 nt, Human
aaaaagccagugggggcaggug

SEQ ID NO: 940055 - RNA, 19 nt, Human
aaagggcaaggaaaggucc

SEQ ID NO: 940056 - RNA, 21 nt, Human
aaagguccuggggcugaagug

SEQ ID NO: 940057 - RNA, 25 nt, Human
acccugagggugcugugaacaggga

SEQ ID NO: 940058 - RNA, 27 nt, Human
acccugagggugcugugaacagggaac

SEQ ID NO: 940059 - RNA, 23 nt, Human
accuuaagacccugagggugcug

SEQ ID NO: 940060 - RNA, 23 nt, Human
aggaaagguccuggggcugaagu

SEQ ID NO: 940061 - RNA, 22 nt, Human
agggaggaucagcucuggcagg

SEQ ID NO: 940062 - RNA, 22 nt, Human
aggggacuucugcagccagagg

SEQ ID NO: 940063 - RNA, 18 nt, Human
agggugcugugaacaggg

SEQ ID NO: 940064 - RNA, 21 nt, Human
auauaaaacagcuuuauuuga

SEQ ID NO: 940065 - RNA, 18 nt, Human
caaaaagccagugggggc

SEQ ID NO: 940066 - RNA, 18 nt, Human
caaaaagccagugggggc

SEQ ID NO: 940067 - RNA, 22 nt, Human
caaaagaucugguccugccccu

SEQ ID NO: 940068 - RNA, 23 nt, Human
caaggggcaccaaaaagccagug

SEQ ID NO: 940069 - RNA, 18 nt, Human
cagccagagggauuggga

SEQ ID NO: 940070 - RNA, 23 nt, Human
ccuagggaggaucagcucuggca

SEQ ID NO: 940071 - RNA, 18 nt, Human
ccugagggugcugugaac

SEQ ID NO: 940072 - RNA, 20 nt, Human
ccugccccuccucucauugg

SEQ ID NO: 940073 - RNA, 23 nt, Human
ccuuaagacccugagggugcugu

SEQ ID NO: 940074 - RNA, 19 nt, Human
cucaaugcccucaacccuc

SEQ ID NO: 940075 - RNA, 20 nt, Human
gaaagguccuggggcugaag

SEQ ID NO: 940076 - RNA, 24 nt, Human
gaacagucugauaucuggaaccaa

SEQ ID NO: 940077 - RNA, 19 nt, Human
gaccuuaagacccugaggg

SEQ ID NO: 940078 - RNA, 18 nt, Human
gcauggagggugcaggug

SEQ ID NO: 940079 - RNA, 18 nt, Human
ggaaccaaagggcaagga

SEQ ID NO: 940080 - RNA, 22 nt, Human
ggggacuucugcagccagaggg

SEQ ID NO: 940081 - RNA, 20 nt, Human
uaaaagagguauuugugaua

SEQ ID NO: 940082 - RNA, 20 nt, Human
ucaacccucagcucucaaaa

SEQ ID NO: 940083 - RNA, 22 nt, Human
ucucaaaagaucugguccugcc

SEQ ID NO: 940084 - RNA, 21 nt, Human
ucugcagccagagggauuggg

SEQ ID NO: 940085 - RNA, 24 nt, Human
ucuggaaccaaagggcaaggaaag

SEQ ID NO: 940086 - RNA, 18 nt, Human
uggacagauaaaagaggu

SEQ ID NO: 940087 - RNA, 18 nt, Human
uggcaggugggggugcug

SEQ ID NO: 940088 - RNA, 18 nt, Human
aaacaaauugaguaucca

SEQ ID NO: 940089 - RNA, 20 nt, Human
aagaaaaaacaaauugagua

SEQ ID NO: 940090 - RNA, 28 nt, Human
aauauaagaaguaaauccaauauuuuag

SEQ ID NO: 940091 - RNA, 21 nt, Human
auacucauuuucucuauaaga

SEQ ID NO: 940092 - RNA, 23 nt, Human
aucacauugggaaaucuuugauc

SEQ ID NO: 940093 - RNA, 21 nt, Human
caacaauugugugguuuguca

SEQ ID NO: 940094 - RNA, 23 nt, Human
cagagagguuuccuuccccuucc

SEQ ID NO: 940095 - RNA, 22 nt, Human
cccaagcccuggaacucccggg

SEQ ID NO: 940096 - RNA, 25 nt, Human
ccuuuagugccuacccuuuucuuca

SEQ ID NO: 940097 - RNA, 19 nt, Human
cgggagagcaggugucaga

SEQ ID NO: 940098 - RNA, 18 nt, Human
cuugauguucaguuucua

SEQ ID NO: 940099 - RNA, 23 nt, Human
cuuuagugccuacccuuuucuuc

SEQ ID NO: 940100 - RNA, 21 nt, Human
gcagaaaaagaaagacaugcc

SEQ ID NO: 940101 - RNA, 20 nt, Human
gcccuggaacucccgggcuc

SEQ ID NO: 940102 - RNA, 23 nt, Human
gcccuggaacucccgggcuccac

SEQ ID NO: 940103 - RNA, 20 nt, Human
ggugucagauuucagagagg

SEQ ID NO: 940104 - RNA, 20 nt, Human
gugucagauuucagagaggu

SEQ ID NO: 940105 - RNA, 23 nt, Human
uagaaauucuucuuucuguguuc

SEQ ID NO: 940106 - RNA, 21 nt, Human
uagaauucuucauuguguauc

SEQ ID NO: 940107 - RNA, 20 nt, Human
uagccaaauagaauucuuca

SEQ ID NO: 940108 - RNA, 21 nt, Human
uagcuaguacauuuuccccaa

SEQ ID NO: 940109 - RNA, 25 nt, Human
ucccaagcccuggaacucccgggcu

SEQ ID NO: 940110 - RNA, 27 nt, Human
ucccaagcccuggaacucccgggcucc

SEQ ID NO: 940111 - RNA, 21 nt, Human
ucuucuuucuguguucucccu

SEQ ID NO: 940112 - RNA, 18 nt, Human
ugaaagggccucagggau

SEQ ID NO: 940113 - RNA, 23 nt, Human
ugacagguaacuuguucugauuu

SEQ ID NO: 940114 - RNA, 19 nt, Human
uggaacucccgggcuccac

SEQ ID NO: 940115 - RNA, 23 nt, Human
ugggguucuugauguucaguuuc

SEQ ID NO: 940116 - RNA, 27 nt, Human
uggugggguucuugauguucaguuucu

SEQ ID NO: 940117 - RNA, 19 nt, Human
uuuuuuuuuuuuggaaccu

SEQ ID NO: 940118 - RNA, 24 nt, Human
uuuuuuuuuuuuuuuuggaaccuu

SEQ ID NO: 940119 - RNA, 24 nt, Human
uuuuuuuuuuuuuuuuuggaaccu

SEQ ID NO: 940120 - RNA, 28 nt, Human
uuuuuuuuuuuuuuuuuuuuuuuggggg

SEQ ID NO: 940121 - RNA, 20 nt, Human
aaaaagcaaaucuuaacuua

SEQ ID NO: 940122 - RNA, 23 nt, Human
aaaaggaaaaaaaaagacauacu

SEQ ID NO: 940123 - RNA, 21 nt, Human
aacaauaaagcuacuuaagug

SEQ ID NO: 940124 - RNA, 23 nt, Human
aaccccacuacggcacucaccuu

SEQ ID NO: 940125 - RNA, 26 nt, Human
aauaaacaguaaaacaucuguauuaa

SEQ ID NO: 940126 - RNA, 24 nt, Human
accacgcccugcccccuccacccc

SEQ ID NO: 940127 - RNA, 21 nt, Human
acccauucuuccuccucaagc

SEQ ID NO: 940128 - RNA, 24 nt, Human
acucaccuuaccucaccacgcccu

SEQ ID NO: 940129 - RNA, 22 nt, Human
agacauacuuuucccauaaaau

SEQ ID NO: 940130 - RNA, 28 nt, Human
aggaaaaaaaaagacauacuuuucccaa

SEQ ID NO: 940131 - RNA, 19 nt, Human
caacagcagaaccucuggg

SEQ ID NO: 940132 - RNA, 19 nt, Human
cacgcccugcccccuccac

SEQ ID NO: 940133 - RNA, 21 nt, Human
cacgcccugcccccuccaccc

SEQ ID NO: 940134 - RNA, 18 nt, Human
cacggucauccuccucug

SEQ ID NO: 940135 - RNA, 21 nt, Human
cagaaccucugggaaaggaac

SEQ ID NO: 940136 - RNA, 19 nt, Human
cccccuccaccccacugcg

SEQ ID NO: 940137 - RNA, 21 nt, Human
cccuccaccccacugcggccg

SEQ ID NO: 940138 - RNA, 22 nt, Human
ccucaccacgcccugcccccuc

SEQ ID NO: 940139 - RNA, 24 nt, Human
ccucaccacgcccugcccccucca

SEQ ID NO: 940140 - RNA, 20 nt, Human
cgcccugcccccuccacccc

SEQ ID NO: 940141 - RNA, 22 nt, Human
cgcccugcccccuccaccccac

SEQ ID NO: 940142 - RNA, 20 nt, Human
gaacucccagguggcagccc

SEQ ID NO: 940143 - RNA, 18 nt, Human
gacaacaaaggcauuuuc

SEQ ID NO: 940144 - RNA, 24 nt, Human
gcaaaaagcaaaucuuaacuuaca

SEQ ID NO: 940145 - RNA, 18 nt, Human
gcccccuccaccccacug

SEQ ID NO: 940146 - RNA, 20 nt, Human
gcccugcccccuccacccca

SEQ ID NO: 940147 - RNA, 19 nt, Human
gccuuuuuuuuuuuuuuuu

SEQ ID NO: 940148 - RNA, 24 nt, Human
gcugcauuuuacacaucucugauu

SEQ ID NO: 940149 - RNA, 23 nt, Human
ggcuccagggaaccccacuacgg

SEQ ID NO: 940150 - RNA, 22 nt, Human
guauccagaacucccagguggc

SEQ ID NO: 940151 - RNA, 18 nt, Human
uaaaauuccaggucuuac

SEQ ID NO: 940152 - RNA, 25 nt, Human
uaagaacauaaucuaaauuauaacc

SEQ ID NO: 940153 - RNA, 23 nt, Human
uccucaagcacggucauccuccu

SEQ ID NO: 940154 - RNA, 25 nt, Human
ugaauuagaaauaaacaguaaaaca

SEQ ID NO: 940155 - RNA, 22 nt, Human
ugacaacaaaggcauuuucuca

SEQ ID NO: 940156 - RNA, 21 nt, Human
ugauggcaacagcagaaccuc

SEQ ID NO: 940157 - RNA, 21 nt, Human
ugcaacuuggcaaaaagcaaa

SEQ ID NO: 940158 - RNA, 19 nt, Human
uggauacaacuuugcaacu

SEQ ID NO: 940159 - RNA, 22 nt, Human
uggcaaguacaacagguuaagg

SEQ ID NO: 940160 - RNA, 20 nt, Human
uggcagcccagugugggauu

SEQ ID NO: 940161 - RNA, 20 nt, Human
uuagaaauaaacaguaaaac

SEQ ID NO: 940162 - RNA, 24 nt, Human
uucccauaaaauuccaggucuuac

SEQ ID NO: 940163 - RNA, 19 nt, Human
uugaauuacaacaacauuu

SEQ ID NO: 940164 - RNA, 21 nt, Human
uuuuuuuuuuuuuuuuuuaca

SEQ ID NO: 940165 - RNA, 22 nt, Human
aagugcaggcgcccaguggugc

SEQ ID NO: 940166 - RNA, 23 nt, Human
agucuggcccccugcccggccuc

SEQ ID NO: 940167 - RNA, 21 nt, Human
auggcaacaaugacaaaagcc

SEQ ID NO: 940168 - RNA, 20 nt, Human
caagagaagcagaagccaua

SEQ ID NO: 940169 - RNA, 20 nt, Human
cacaggacccagaacccgcc

SEQ ID NO: 940170 - RNA, 23 nt, Human
cagggauacuucucccaaaguuc

SEQ ID NO: 940171 - RNA, 24 nt, Human
cagggauacuucucccaaaguucc

SEQ ID NO: 940172 - RNA, 20 nt, Human
ccgccgcgcccccggcggcc

SEQ ID NO: 940173 - RNA, 23 nt, Human
ccgccgcgcccgcugacgccgcc

SEQ ID NO: 940174 - RNA, 24 nt, Human
ccgccgcgcccgcugacgccgccu

SEQ ID NO: 940175 - RNA, 18 nt, Human
ccgcgcccccggcggccg

SEQ ID NO: 940176 - RNA, 19 nt, Human
ccggccucgcgcucugccg

SEQ ID NO: 940177 - RNA, 23 nt, Human
ccggcggccgcggaaacuccccc

SEQ ID NO: 940178 - RNA, 23 nt, Human
ccuccgccgcgcccgcugacgcc

SEQ ID NO: 940179 - RNA, 20 nt, Human
cgacuccgagucuggccccc

SEQ ID NO: 940180 - RNA, 19 nt, Human
cgccagugcucgcggcccc

SEQ ID NO: 940181 - RNA, 23 nt, Human
cgccucgacuccgagucuggccc

SEQ ID NO: 940182 - RNA, 19 nt, Human
cuccgagucuggcccccug

SEQ ID NO: 940183 - RNA, 22 nt, Human
gagcugaggcacacacaagaga

SEQ ID NO: 940184 - RNA, 18 nt, Human
gccgcgcccgcugacgcc

SEQ ID NO: 940185 - RNA, 18 nt, Human
gcggcugucgggcgcgcc

SEQ ID NO: 940186 - RNA, 22 nt, Human
uaagugcaggcgcccaguggug

SEQ ID NO: 940187 - RNA, 19 nt, Human
ugaccggucacaggaccca

SEQ ID NO: 940188 - RNA, 19 nt, Human
ugaggcacacacaagagaa

SEQ ID NO: 940189 - RNA, 19 nt, Human
uggcaacaaugacaaaagc

SEQ ID NO: 940190 - RNA, 22 nt, Human
uggcaacaaugacaaaagccua

SEQ ID NO: 940191 - RNA, 23 nt, Human
uggcaacaaugacaaaagccuaa

SEQ ID NO: 940192 - RNA, 18 nt, Human
uggugcugccuuuugaag

SEQ ID NO: 940193 - RNA, 22 nt, Human
uuggaagccuuaccaaauccug

SEQ ID NO: 940194 - RNA, 23 nt, Human
uuggaagccuuaccaaauccuga

SEQ ID NO: 940195 - RNA, 20 nt, Human
uuugaagugccacauguggg

SEQ ID NO: 940196 - RNA, 21 nt, Human
uuuuuuuuuuuuuugcaggua

SEQ ID NO: 940197 - RNA, 18 nt, Human
uuuuuuuuuuuuuuuuug

SEQ ID NO: 940198 - RNA, 21 nt, Human
uuuuuuuuuuuuuuuuugcag

SEQ ID NO: 940199 - RNA, 22 nt, Human
uuuuuuuuuuuuuuuuugcagg

SEQ ID NO: 940200 - RNA, 23 nt, Human
uuuuuuuuuuuuuuuuugcaggu

SEQ ID NO: 940201 - RNA, 19 nt, Human
aaaaaaaaaaaaaaaaaga

SEQ ID NO: 940202 - RNA, 23 nt, Human
aaaaaaaaaaaaaaaagaaagaa

SEQ ID NO: 940203 - RNA, 22 nt, Human
aaaaagaaauaaaguuacucuu

SEQ ID NO: 940204 - RNA, 18 nt, Human
aaaaucagcugggugugg

SEQ ID NO: 940205 - RNA, 19 nt, Human
aaaaucugacuuauuuuug

SEQ ID NO: 940206 - RNA, 19 nt, Human
aaacaaaaaaaguacucug

SEQ ID NO: 940207 - RNA, 21 nt, Human
aacauaccaauaauaacaaaa

SEQ ID NO: 940208 - RNA, 20 nt, Human
aacauagcaagaccccgucu

SEQ ID NO: 940209 - RNA, 19 nt, Human
aacauggugaaaccccauc

SEQ ID NO: 940210 - RNA, 20 nt, Human
aacauggugaaaccccaucu

SEQ ID NO: 940211 - RNA, 23 nt, Human
aacauggugaaaccccaucuaua

SEQ ID NO: 940212 - RNA, 20 nt, Human
aacucggcugggugcaguga

SEQ ID NO: 940213 - RNA, 18 nt, Human
aagaaagaaacucaaaua

SEQ ID NO: 940214 - RNA, 22 nt, Human
aagaaagaaacucaaauaacuc

SEQ ID NO: 940215 - RNA, 20 nt, Human
aagcugaggcggguggauca

SEQ ID NO: 940216 - RNA, 18 nt, Human
aaggacagcaaucuauca

SEQ ID NO: 940217 - RNA, 24 nt, Human
aaucacuugaaccugggaggcgga

SEQ ID NO: 940218 - RNA, 19 nt, Human
acaaagaaaggccagaugc

SEQ ID NO: 940219 - RNA, 24 nt, Human
acagagcgagacuccaucucaaaa

SEQ ID NO: 940220 - RNA, 18 nt, Human
accuucccgccccgcccu

SEQ ID NO: 940221 - RNA, 18 nt, Human
acgccacugcacuccagc

SEQ ID NO: 940222 - RNA, 28 nt, Human
acuccaucucaaaaaaaaaaaaaaaaaa

SEQ ID NO: 940223 - RNA, 18 nt, Human
acugcacuccagccugga

SEQ ID NO: 940224 - RNA, 23 nt, Human
acugcacuccagccuggagacag

SEQ ID NO: 940225 - RNA, 20 nt, Human
agauauugaaagcuuuaacc

SEQ ID NO: 940226 - RNA, 20 nt, Human
agcacuuugggaagcugagg

SEQ ID NO: 940227 - RNA, 18 nt, Human
agccugcagagaggcugg

SEQ ID NO: 940228 - RNA, 24 nt, Human
agccuggacaacauagcaagaccc

SEQ ID NO: 940229 - RNA, 23 nt, Human
agcugggugugguagugcacgcc

SEQ ID NO: 940230 - RNA, 21 nt, Human
aggagccaccgcccaccagcc

SEQ ID NO: 940231 - RNA, 18 nt, Human
aggauuuaguaagaaagc

SEQ ID NO: 940232 - RNA, 22 nt, Human
aggcaggagaaucacuugaacc

SEQ ID NO: 940233 - RNA, 24 nt, Human
aggcaggagaaucacuugaaccug

SEQ ID NO: 940234 - RNA, 21 nt, Human
aggcggagguugcagugagcc

SEQ ID NO: 940235 - RNA, 24 nt, Human
aggcggagguugcagugagccgag

SEQ ID NO: 940236 - RNA, 24 nt, Human
aggcggguggaucaugaggucaag

SEQ ID NO: 940237 - RNA, 22 nt, Human
aggcgugggaccugucgggggc

SEQ ID NO: 940238 - RNA, 24 nt, Human
aggcugaggcaggagaaucacuug

SEQ ID NO: 940239 - RNA, 24 nt, Human
aggcugaggugggaggauugcuug

SEQ ID NO: 940240 - RNA, 19 nt, Human
agguguggcacccgcccgc

SEQ ID NO: 940241 - RNA, 23 nt, Human
aguacuggggaggcugagguggg

SEQ ID NO: 940242 - RNA, 24 nt, Human
agugacucacaccuguaaucccag

SEQ ID NO: 940243 - RNA, 21 nt, Human
agugcacgccuguaaucccag

SEQ ID NO: 940244 - RNA, 19 nt, Human
aguuaaaaaauaaguccuu

SEQ ID NO: 940245 - RNA, 20 nt, Human
auagcaauuagaguugugcc

SEQ ID NO: 940246 - RNA, 21 nt, Human
auccuggccaacauggugaaa

SEQ ID NO: 940247 - RNA, 24 nt, Human
augacgccacugcacuccagccug

SEQ ID NO: 940248 - RNA, 21 nt, Human
auguuuuuuaaaaauaaaaac

SEQ ID NO: 940249 - RNA, 24 nt, Human
caacauagcaagaccccgucucua

SEQ ID NO: 940250 - RNA, 21 nt, Human
caacauggugaaaccccaucu

SEQ ID NO: 940251 - RNA, 23 nt, Human
caagagauaccauaugggauaca

SEQ ID NO: 940252 - RNA, 24 nt, Human
cacaccuguaaucccagcacuuug

SEQ ID NO: 940253 - RNA, 31 nt, Human
cacacgccaggcgucacucgggcuggcgccc

SEQ ID NO: 940254 - RNA, 21 nt, Human
caccugaaaaccaacuuuucc

SEQ ID NO: 940255 - RNA, 19 nt, Human
caccuguaaucccagcacu

SEQ ID NO: 940256 - RNA, 24 nt, Human
caccuguaaucccagcacuuuggg

SEQ ID NO: 940257 - RNA, 18 nt, Human
cacgccuguaaucccagc

SEQ ID NO: 940258 - RNA, 19 nt, Human
cacgccuguaaucccagcu

SEQ ID NO: 940259 - RNA, 22 nt, Human
cacuccagccuggagacagagc

SEQ ID NO: 940260 - RNA, 23 nt, Human
cacuccagccuggagacagagcg

SEQ ID NO: 940261 - RNA, 18 nt, Human
cacugcacuccagccugg

SEQ ID NO: 940262 - RNA, 19 nt, Human
cacugcacuccagccugga

SEQ ID NO: 940263 - RNA, 23 nt, Human
cacugcacuccagccuggagaca

SEQ ID NO: 940264 - RNA, 21 nt, Human
cacuugaaccugggaggcgga

SEQ ID NO: 940265 - RNA, 24 nt, Human
cagcacuuugggaagcugaggcgg

SEQ ID NO: 940266 - RNA, 19 nt, Human
cagcgcccugacugaccca

SEQ ID NO: 940267 - RNA, 24 nt, Human
cagcuacucgggaggcugaggcag

SEQ ID NO: 940268 - RNA, 21 nt, Human
caggagccaccgcccaccagc

SEQ ID NO: 940269 - RNA, 18 nt, Human
caggcgugggaccugucg

SEQ ID NO: 940270 - RNA, 25 nt, Human
cauagcaagaccccgucucuaugaa

SEQ ID NO: 940271 - RNA, 30 nt, Human
cauagcaagaccccgucucuaugaaaaaag

SEQ ID NO: 940272 - RNA, 18 nt, Human
ccaaaauaaaauauaaag

SEQ ID NO: 940273 - RNA, 22 nt, Human
ccaccgcaagagcgcgcgccca

SEQ ID NO: 940274 - RNA, 23 nt, Human
ccacguccaagguucccgcccuc

SEQ ID NO: 940275 - RNA, 19 nt, Human
ccacugcacuccagccugg

SEQ ID NO: 940276 - RNA, 20 nt, Human
ccacugcacuccagccugga

SEQ ID NO: 940277 - RNA, 21 nt, Human
ccacugcacuccagccuggag

SEQ ID NO: 940278 - RNA, 23 nt, Human
ccacugcacuccagccuggagac

SEQ ID NO: 940279 - RNA, 20 nt, Human
cccccaaguuacaacucuuc

SEQ ID NO: 940280 - RNA, 19 nt, Human
cccgcacagguguggcacc

SEQ ID NO: 940281 - RNA, 19 nt, Human
cccugacugacccagcccc

SEQ ID NO: 940282 - RNA, 22 nt, Human
ccgccccaaacugaggcggagg

SEQ ID NO: 940283 - RNA, 19 nt, Human
ccuacagucccaguacugg

SEQ ID NO: 940284 - RNA, 23 nt, Human
ccugcagagaggcugggcccagc

SEQ ID NO: 940285 - RNA, 22 nt, Human
ccugcgcaccuucccgccccgc

SEQ ID NO: 940286 - RNA, 23 nt, Human
ccuggacaacauagcaagacccc

SEQ ID NO: 940287 - RNA, 21 nt, Human
ccuggagacagagcgagacuc

SEQ ID NO: 940288 - RNA, 22 nt, Human
ccuggccaacauggugaaaccc

SEQ ID NO: 940289 - RNA, 23 nt, Human
ccuggccaacauggugaaacccc

SEQ ID NO: 940290 - RNA, 24 nt, Human
ccuggccaacauggugaaacccca

SEQ ID NO: 940291 - RNA, 19 nt, Human
ccugggaggcggagguugc

SEQ ID NO: 940292 - RNA, 21 nt, Human
ccuguaaucccagcuacucgg

SEQ ID NO: 940293 - RNA, 21 nt, Human
ccuucacaccuacaauccaaa

SEQ ID NO: 940294 - RNA, 24 nt, Human
cgagaccauccuggccaacauggu

SEQ ID NO: 940295 - RNA, 23 nt, Human
cgagacuccaucucaaaaaaaaa

SEQ ID NO: 940296 - RNA, 25 nt, Human
cgccacugcacuccagccuggagac

SEQ ID NO: 940297 - RNA, 19 nt, Human
cgccccgcccuugcccgca

SEQ ID NO: 940298 - RNA, 23 nt, Human
cgccuguaaucccagcuacucgg

SEQ ID NO: 940299 - RNA, 24 nt, Human
cgccuguaaucccagcuacucggg

SEQ ID NO: 940300 - RNA, 19 nt, Human
cggaggaaaggagacacag

SEQ ID NO: 940301 - RNA, 24 nt, Human
cgggaggcugaggcaggagaauca

SEQ ID NO: 940302 - RNA, 19 nt, Human
cgggggcuucacggcagcg

SEQ ID NO: 940303 - RNA, 23 nt, Human
cucaaaaaaaaaaaaaaaaaaaa

SEQ ID NO: 940304 - RNA, 22 nt, Human
cucaaggccagccuggacaaca

SEQ ID NO: 940305 - RNA, 22 nt, Human
cucacaccuguaaucccagcac

SEQ ID NO: 940306 - RNA, 24 nt, Human
cucacaccuguaaucccagcacuu

SEQ ID NO: 940307 - RNA, 19 nt, Human
cuccaucucaaaaaaaaaa

SEQ ID NO: 940308 - RNA, 21 nt, Human
cugaaaauacuguaguacaau

SEQ ID NO: 940309 - RNA, 23 nt, Human
cuggccaacauggugaaacccca

SEQ ID NO: 940310 - RNA, 21 nt, Human
gacccauuauaguugagauua

SEQ ID NO: 940311 - RNA, 23 nt, Human
gagaaucacuugaaccugggagg

SEQ ID NO: 940312 - RNA, 23 nt, Human
gagaugacgccacugcacuccag

SEQ ID NO: 940313 - RNA, 21 nt, Human
gaggcggguggaucaugaggu

SEQ ID NO: 940314 - RNA, 24 nt, Human
gaggugggaggauugcuugagccc

SEQ ID NO: 940315 - RNA, 21 nt, Human
gagguugcagugagccgagau

SEQ ID NO: 940316 - RNA, 23 nt, Human
gcacuccagccuggagacagagc

SEQ ID NO: 940317 - RNA, 19 nt, Human
gcagcgcggaaggccagcc

SEQ ID NO: 940318 - RNA, 23 nt, Human
gcaggagaaucacuugaaccugg

SEQ ID NO: 940319 - RNA, 20 nt, Human
gcaugauuaagaaaacauga

SEQ ID NO: 940320 - RNA, 22 nt, Human
gccaacauggugaaaccccauc

SEQ ID NO: 940321 - RNA, 22 nt, Human
gccaggcgucacucgggcuggc

SEQ ID NO: 940322 - RNA, 22 nt, Human
gcccaggagcucaaggccagcc

SEQ ID NO: 940323 - RNA, 24 nt, Human
gcgugacaaugacaaacagcaaag

SEQ ID NO: 940324 - RNA, 18 nt, Human
ggagguugcagugagccg

SEQ ID NO: 940325 - RNA, 20 nt, Human
ggagguugcagugagccgag

SEQ ID NO: 940326 - RNA, 22 nt, Human
ggagguugcagugagccgagau

SEQ ID NO: 940327 - RNA, 23 nt, Human
ggagguugcagugagccgagaug

SEQ ID NO: 940328 - RNA, 21 nt, Human
ggcugggugcagugacucaca

SEQ ID NO: 940329 - RNA, 21 nt, Human
gggaggcugaggugggaggau

SEQ ID NO: 940330 - RNA, 24 nt, Human
gggugcagugacucacaccuguaa

SEQ ID NO: 940331 - RNA, 24 nt, Human
gguagugcacgccuguaaucccag

SEQ ID NO: 940332 - RNA, 23 nt, Human
ggugugguagugcacgccuguaa

SEQ ID NO: 940333 - RNA, 20 nt, Human
gugacaaugacaaacagcaa

SEQ ID NO: 940334 - RNA, 18 nt, Human
gugcagugacucacaccu

SEQ ID NO: 940335 - RNA, 20 nt, Human
guguguccuaaaccuuuaac

SEQ ID NO: 940336 - RNA, 18 nt, Human
guuaaaaaauaaguccuu

SEQ ID NO: 940337 - RNA, 24 nt, Human
guugcagugagccgagaugacgcc

SEQ ID NO: 940338 - RNA, 18 nt, Human
guuuauugaacuucuugg

SEQ ID NO: 940339 - RNA, 18 nt, Human
uaaaacaaauuguuacaa

SEQ ID NO: 940340 - RNA, 22 nt, Human
uaaacaaaaaucuuaaacuaga

SEQ ID NO: 940341 - RNA, 18 nt, Human
uaaauucaaaauaaaagu

SEQ ID NO: 940342 - RNA, 22 nt, Human
uaagaaaacaugaucucccuaa

SEQ ID NO: 940343 - RNA, 20 nt, Human
uaagcugguuuauugaacuu

SEQ ID NO: 940344 - RNA, 21 nt, Human
uaaguagauacaaaauacaaa

SEQ ID NO: 940345 - RNA, 23 nt, Human
uaccaaaauaaaauauaaagcac

SEQ ID NO: 940346 - RNA, 19 nt, Human
uaccuaggcaggcguggga

SEQ ID NO: 940347 - RNA, 20 nt, Human
uagaaaaucaaacaucuaga

SEQ ID NO: 940348 - RNA, 23 nt, Human
uaggcaggcgugggaccugucgg

SEQ ID NO: 940349 - RNA, 23 nt, Human
uaugacacaauacuauuacagaa

SEQ ID NO: 940350 - RNA, 23 nt, Human
ucaaaaaaaaaaaaaaaaaaaaa

SEQ ID NO: 940351 - RNA, 24 nt, Human
ucaaauuaagacuuuuccaaaaca

SEQ ID NO: 940352 - RNA, 20 nt, Human
ucacggcagcgcggaaggcc

SEQ ID NO: 940353 - RNA, 24 nt, Human
ucacuugaaccugggaggcggagg

SEQ ID NO: 940354 - RNA, 25 nt, Human
ucacuugaaccugggaggcggaggu

SEQ ID NO: 940355 - RNA, 20 nt, Human
ucagcugggugugguagugc

SEQ ID NO: 940356 - RNA, 24 nt, Human
ucagcugggugugguagugcacgc

SEQ ID NO: 940357 - RNA, 24 nt, Human
ucaugaggucaagagaucgagacc

SEQ ID NO: 940358 - RNA, 19 nt, Human
ucauuuggcuuaauuuccu

SEQ ID NO: 940359 - RNA, 21 nt, Human
uccacaacaaaauuacuuaga

SEQ ID NO: 940360 - RNA, 22 nt, Human
uccagccuggagacagagcgag

SEQ ID NO: 940361 - RNA, 23 nt, Human
uccagccuggagacagagcgaga

SEQ ID NO: 940362 - RNA, 23 nt, Human
uccaucucaaaaaaaaaaaaaaa

SEQ ID NO: 940363 - RNA, 21 nt, Human
ucccaggagccaccgcccacc

SEQ ID NO: 940364 - RNA, 19 nt, Human
uccuguguuagcuagaagc

SEQ ID NO: 940365 - RNA, 25 nt, Human
ucgggaggcugaggcaggagaauca

SEQ ID NO: 940366 - RNA, 26 nt, Human
ucucaaauuaagacuuuuccaaaaca

SEQ ID NO: 940367 - RNA, 25 nt, Human
ugaaaaaacaaaaaaaguacucugg

SEQ ID NO: 940368 - RNA, 19 nt, Human
ugaaaccccaucuauacua

SEQ ID NO: 940369 - RNA, 24 nt, Human
ugaaccugggaggcggagguugca

SEQ ID NO: 940370 - RNA, 20 nt, Human
ugacaaacagcaaaguguca

SEQ ID NO: 940371 - RNA, 24 nt, Human
ugacaaugacaaacagcaaagugu

SEQ ID NO: 940372 - RNA, 22 nt, Human
ugacccagccccgccacgucca

SEQ ID NO: 940373 - RNA, 24 nt, Human
ugacucacaccuguaaucccagca

SEQ ID NO: 940374 - RNA, 23 nt, Human
ugagcccaggagcucaaggccag

SEQ ID NO: 940375 - RNA, 20 nt, Human
ugaggcaggagaaucacuug

SEQ ID NO: 940376 - RNA, 24 nt, Human
ugaggcaggagaaucacuugaacc

SEQ ID NO: 940377 - RNA, 25 nt, Human
ugaggcaggagaaucacuugaaccu

SEQ ID NO: 940378 - RNA, 19 nt, Human
ugaggcggguggaucauga

SEQ ID NO: 940379 - RNA, 24 nt, Human
ugaggcggguggaucaugagguca

SEQ ID NO: 940380 - RNA, 20 nt, Human
ugaggugggaggauugcuug

SEQ ID NO: 940381 - RNA, 23 nt, Human
ugaggugggaggauugcuugagc

SEQ ID NO: 940382 - RNA, 24 nt, Human
ugaggugggaggauugcuugagcc

SEQ ID NO: 940383 - RNA, 22 nt, Human
ugcuuucaguuaguuuuucacu

SEQ ID NO: 940384 - RNA, 24 nt, Human
ugcuuucaguuaguuuuucacugu

SEQ ID NO: 940385 - RNA, 23 nt, Human
uggaaguugauuuguuaacuugg

SEQ ID NO: 940386 - RNA, 24 nt, Human
uggccaacauggugaaaccccauc

SEQ ID NO: 940387 - RNA, 26 nt, Human
uggcuaagcugguuuauugaacuucu

SEQ ID NO: 940388 - RNA, 24 nt, Human
ugggaagcugaggcggguggauca

SEQ ID NO: 940389 - RNA, 29 nt, Human
ugggaggcggagguugcagugacaacggu

SEQ ID NO: 940390 - RNA, 24 nt, Human
ugggaggcggagguugcagugagc

SEQ ID NO: 940391 - RNA, 24 nt, Human
ugguagugcacgccuguaauccca

SEQ ID NO: 940392 - RNA, 21 nt, Human
uuacaaaugagauacaaauau

SEQ ID NO: 940393 - RNA, 19 nt, Human
uuacuuagauuucaugagg

SEQ ID NO: 940394 - RNA, 24 nt, Human
uuaguaauuaguuguuagauagcu

SEQ ID NO: 940395 - RNA, 21 nt, Human
uuauaguuaaauuauccaggu

SEQ ID NO: 940396 - RNA, 24 nt, Human
uucaugaggaaacauguauuugca

SEQ ID NO: 940397 - RNA, 24 nt, Human
uucucaaauuaagacuuuuccaaa

SEQ ID NO: 940398 - RNA, 19 nt, Human
uugaaagcuuuaaccccau

SEQ ID NO: 940399 - RNA, 23 nt, Human
uugaaauuaguaaaggcuaagaa

SEQ ID NO: 940400 - RNA, 24 nt, Human
uugaaccugggaggcggagguugc

SEQ ID NO: 940401 - RNA, 18 nt, Human
uugcagugagccgagaug

SEQ ID NO: 940402 - RNA, 20 nt, Human
uugcagugagccgagaugac

SEQ ID NO: 940403 - RNA, 24 nt, Human
uugcuugagcccaggagcucaagg

SEQ ID NO: 940404 - RNA, 25 nt, Human
uugggaagcugaggcggguggauca

SEQ ID NO: 940405 - RNA, 19 nt, Human
uuugaagcuuccuucauug

SEQ ID NO: 940406 - RNA, 21 nt, Human
aagcauccucaaacacaaagg

SEQ ID NO: 940407 - RNA, 18 nt, Human
acagagacacucucccuc

SEQ ID NO: 940408 - RNA, 19 nt, Human
acuacaacucggggccacg

SEQ ID NO: 940409 - RNA, 18 nt, Human
agucagugcaaaugucca

SEQ ID NO: 940410 - RNA, 19 nt, Human
caaacacaaagggcccagc

SEQ ID NO: 940411 - RNA, 25 nt, Human
cacaaagggcccagcaggcugagca

SEQ ID NO: 940412 - RNA, 21 nt, Human
caguccccugaggaguagggg

SEQ ID NO: 940413 - RNA, 19 nt, Human
ccacggggacccuacggga

SEQ ID NO: 940414 - RNA, 22 nt, Human
cccagcaggcugagcaaaagaa

SEQ ID NO: 940415 - RNA, 21 nt, Human
cccgacgaucacccgcggccg

SEQ ID NO: 940416 - RNA, 18 nt, Human
cccugagaaggcgccgag

SEQ ID NO: 940417 - RNA, 19 nt, Human
cccuggacaguccccugag

SEQ ID NO: 940418 - RNA, 19 nt, Human
ccuagggcugggcagucuc

SEQ ID NO: 940419 - RNA, 19 nt, Human
ccucugugggaauacugcc

SEQ ID NO: 940420 - RNA, 21 nt, Human
cgcccuggacaguccccugag

SEQ ID NO: 940421 - RNA, 21 nt, Human
cguggagacccgacgaucacc

SEQ ID NO: 940422 - RNA, 21 nt, Human
cucacuaccacugggcgcccu

SEQ ID NO: 940423 - RNA, 22 nt, Human
cuuuggcacggugccugggggc

SEQ ID NO: 940424 - RNA, 19 nt, Human
gaacagagacacucucccu

SEQ ID NO: 940425 - RNA, 21 nt, Human
gaacagagacacucucccuca

SEQ ID NO: 940426 - RNA, 19 nt, Human
gaguagggggcauccaguc

SEQ ID NO: 940427 - RNA, 19 nt, Human
gaucccagcuaccccucug

SEQ ID NO: 940428 - RNA, 18 nt, Human
ggcuggaaucauuaagca

SEQ ID NO: 940429 - RNA, 18 nt, Human
uaccacugggcgcccugg

SEQ ID NO: 940430 - RNA, 20 nt, Human
ucaaacacaaagggcccagc

SEQ ID NO: 940431 - RNA, 23 nt, Human
ucacuaccacugggcgcccugga

SEQ ID NO: 940432 - RNA, 19 nt, Human
ucagugcaaauguccaggg

SEQ ID NO: 940433 - RNA, 23 nt, Human
ucccagcuaccccucugugggaa

SEQ ID NO: 940434 - RNA, 24 nt, Human
uccgcgucagcgacccgggcgcgu

SEQ ID NO: 940435 - RNA, 20 nt, Human
uccucaaacacaaagggccc

SEQ ID NO: 940436 - RNA, 22 nt, Human
ucucggagacgccagccgaauu

SEQ ID NO: 940437 - RNA, 23 nt, Human
ucucugaacagucuccucagccc

SEQ ID NO: 940438 - RNA, 20 nt, Human
uggaaucauuaagcauccuc

SEQ ID NO: 940439 - RNA, 18 nt, Human
uggcacggugccuggggg

SEQ ID NO: 940440 - RNA, 22 nt, Human
uguccaggggucaagcucugga

SEQ ID NO: 940441 - RNA, 18 nt, Human
aaaagccagagcaggacg

SEQ ID NO: 940442 - RNA, 27 nt, Human
aaauaauccucccauagccccccugcc

SEQ ID NO: 940443 - RNA, 19 nt, Human
aagaugggcuggggagggg

SEQ ID NO: 940444 - RNA, 21 nt, Human
aaugagcaacgcggagcccac

SEQ ID NO: 940445 - RNA, 18 nt, Human
aauggcuguggggacagg

SEQ ID NO: 940446 - RNA, 21 nt, Human
acacugucaugaccaaaauca

SEQ ID NO: 940447 - RNA, 25 nt, Human
acaucagguccacuaggacgucggu

SEQ ID NO: 940448 - RNA, 19 nt, Human
accccaucccguggcucca

SEQ ID NO: 940449 - RNA, 21 nt, Human
acgaaacugagacuguccccc

SEQ ID NO: 940450 - RNA, 22 nt, Human
acgcggagcccacuccacuggc

SEQ ID NO: 940451 - RNA, 18 nt, Human
acuugaucccuguagugg

SEQ ID NO: 940452 - RNA, 20 nt, Human
agaaagcccaagaguccagc

SEQ ID NO: 940453 - RNA, 20 nt, Human
agaaggcaaaagccagagca

SEQ ID NO: 940454 - RNA, 23 nt, Human
agaggccagcaugccccccgccc

SEQ ID NO: 940455 - RNA, 22 nt, Human
agcaggcuggcaucaagaaggc

SEQ ID NO: 940456 - RNA, 21 nt, Human
agccccaggcaccgugcaucc

SEQ ID NO: 940457 - RNA, 19 nt, Human
agcccugcagcccccucca

SEQ ID NO: 940458 - RNA, 20 nt, Human
agcucccagaauggcugugg

SEQ ID NO: 940459 - RNA, 22 nt, Human
aggaaccccccucuuauugcuu

SEQ ID NO: 940460 - RNA, 19 nt, Human
aggcaaaagccagagcagg

SEQ ID NO: 940461 - RNA, 21 nt, Human
aggcaaaagccagagcaggac

SEQ ID NO: 940462 - RNA, 22 nt, Human
aggcaaaagccagagcaggacg

SEQ ID NO: 940463 - RNA, 18 nt, Human
aggcacacugucaugacc

SEQ ID NO: 940464 - RNA, 19 nt, Human
aggcaggacaagaaaucug

SEQ ID NO: 940465 - RNA, 19 nt, Human
aggcaggacaagaaaucug

SEQ ID NO: 940466 - RNA, 20 nt, Human
aggcuggcaucaagaaggca

SEQ ID NO: 940467 - RNA, 19 nt, Human
agggugggaggccccuucu

SEQ ID NO: 940468 - RNA, 18 nt, Human
aguguagacuccugaccu

SEQ ID NO: 940469 - RNA, 22 nt, Human
augagguguccgggcugggggu

SEQ ID NO: 940470 - RNA, 22 nt, Human
caaaagccagagcaggacgugg

SEQ ID NO: 940471 - RNA, 22 nt, Human
caaccaggacagucccaaggac

SEQ ID NO: 940472 - RNA, 21 nt, Human
caacgcggagcccacuccacu

SEQ ID NO: 940473 - RNA, 19 nt, Human
caagcacacccucgcuggc

SEQ ID NO: 940474 - RNA, 23 nt, Human
cacacugucaugaccaaaaucac

SEQ ID NO: 940475 - RNA, 24 nt, Human
cacaggcccuggagaaggggcaag

SEQ ID NO: 940476 - RNA, 23 nt, Human
caccaguagggaagggcgggcug

SEQ ID NO: 940477 - RNA, 23 nt, Human
cacccccaccccauaacccccau

SEQ ID NO: 940478 - RNA, 27 nt, Human
cacccccaccccauaacccccauucau

SEQ ID NO: 940479 - RNA, 20 nt, Human
cacccuccuucccaggccca

SEQ ID NO: 940480 - RNA, 19 nt, Human
caccgugcauccucagggc

SEQ ID NO: 940481 - RNA, 24 nt, Human
cacuccccacagugccugaggcug

SEQ ID NO: 940482 - RNA, 28 nt, Human
cagaagccaugggggcuucccccgaggg

SEQ ID NO: 940483 - RNA, 22 nt, Human
cagcacccuccuucccaggccc

SEQ ID NO: 940484 - RNA, 23 nt, Human
cagcccccuccacagcacccucc

SEQ ID NO: 940485 - RNA, 21 nt, Human
cagcccugaguccccaccccc

SEQ ID NO: 940486 - RNA, 24 nt, Human
cagcucccagaauggcugugggga

SEQ ID NO: 940487 - RNA, 18 nt, Human
cagcucccuucgggcugc

SEQ ID NO: 940488 - RNA, 18 nt, Human
caggacagucccaaggaa

SEQ ID NO: 940489 - RNA, 21 nt, Human
caggcgccuuggccggggagg

SEQ ID NO: 940490 - RNA, 18 nt, Human
caguaagaugggcugggg

SEQ ID NO: 940491 - RNA, 20 nt, Human
caguagggaagggcgggcug

SEQ ID NO: 940492 - RNA, 18 nt, Human
cagucccaaggacggaga

SEQ ID NO: 940493 - RNA, 20 nt, Human
caucaagaaggcaaaagccc

SEQ ID NO: 940494 - RNA, 22 nt, Human
cauccucagggcccguggccaa

SEQ ID NO: 940495 - RNA, 19 nt, Human
caugaccaaaaucacccca

SEQ ID NO: 940496 - RNA, 23 nt, Human
ccaggaaauccucuugcuaccuu

SEQ ID NO: 940497 - RNA, 19 nt, Human
ccaggacagucccaaggac

SEQ ID NO: 940498 - RNA, 19 nt, Human
ccaggcgccuuggccgggg

SEQ ID NO: 940499 - RNA, 21 nt, Human
ccaugggggcuucuagccugg

SEQ ID NO: 940500 - RNA, 19 nt, Human
cccaagaguccagccccac

SEQ ID NO: 940501 - RNA, 20 nt, Human
cccaaggacggagaccccgc

SEQ ID NO: 940502 - RNA, 18 nt, Human
cccacagugccugaggcu

SEQ ID NO: 940503 - RNA, 21 nt, Human
cccacccccaccccauaaccc

SEQ ID NO: 940504 - RNA, 24 nt, Human
cccacccccaccccauaaccccca

SEQ ID NO: 940505 - RNA, 26 nt, Human
cccacccccaccccauaacccccauu

SEQ ID NO: 940506 - RNA, 21 nt, Human
cccauagccccccugccagcc

SEQ ID NO: 940507 - RNA, 24 nt, Human
cccauccacagugcuaacauggaa

SEQ ID NO: 940508 - RNA, 23 nt, Human
ccccaccccaucccguggcucca

SEQ ID NO: 940509 - RNA, 24 nt, Human
ccccaccccaucccguggcuccaa

SEQ ID NO: 940510 - RNA, 18 nt, Human
ccccagccauuccuuccc

SEQ ID NO: 940511 - RNA, 19 nt, Human
ccccagcucccagaauggc

SEQ ID NO: 940512 - RNA, 18 nt, Human
ccccaggaaccccccucu

SEQ ID NO: 940513 - RNA, 22 nt, Human
cccccaccccaucccguggcuc

SEQ ID NO: 940514 - RNA, 19 nt, Human
cccccgaggaaccuccgug

SEQ ID NO: 940515 - RNA, 19 nt, Human
cccccugccagccccaucu

SEQ ID NO: 940516 - RNA, 22 nt, Human
ccccuucuccgcucccaccaag

SEQ ID NO: 940517 - RNA, 22 nt, Human
cccugaguccccacccccaccc

SEQ ID NO: 940518 - RNA, 23 nt, Human
ccgcuucugcuccugccgccccc

SEQ ID NO: 940519 - RNA, 24 nt, Human
ccggcagcggcggauccacuuccc

SEQ ID NO: 940520 - RNA, 21 nt, Human
ccggggaggagggggcaccag

SEQ ID NO: 940521 - RNA, 19 nt, Human
ccucagggcccguggccaa

SEQ ID NO: 940522 - RNA, 23 nt, Human
ccugcagcccccuccacagcacc

SEQ ID NO: 940523 - RNA, 27 nt, Human
ccugcagcccccuccacagcacccucc

SEQ ID NO: 940524 - RNA, 26 nt, Human
ccugccaccucuguggaacugcaggg

SEQ ID NO: 940525 - RNA, 21 nt, Human
ccuugagaccagguuccccag

SEQ ID NO: 940526 - RNA, 22 nt, Human
ccuuggccggggaggagggggc

SEQ ID NO: 940527 - RNA, 22 nt, Human
cgaaacugagacugucccccga

SEQ ID NO: 940528 - RNA, 19 nt, Human
cgcgauccgcagcucccuu

SEQ ID NO: 940529 - RNA, 23 nt, Human
cggcagcggcggauccacuuccc

SEQ ID NO: 940530 - RNA, 19 nt, Human
cggugcgcgcgggcgggcg

SEQ ID NO: 940531 - RNA, 23 nt, Human
cgugcauccucagggcccguggc

SEQ ID NO: 940532 - RNA, 22 nt, Human
cucagaggccagcaugcccccc

SEQ ID NO: 940533 - RNA, 21 nt, Human
cucccauagccccccugccag

SEQ ID NO: 940534 - RNA, 20 nt, Human
cuccccacagugccugaggc

SEQ ID NO: 940535 - RNA, 18 nt, Human
cucccccaccccaucccg

SEQ ID NO: 940536 - RNA, 19 nt, Human
cucccuggaaaucgccuag

SEQ ID NO: 940537 - RNA, 23 nt, Human
cuccgcucccaccaagaaagccc

SEQ ID NO: 940538 - RNA, 20 nt, Human
cucgccagguccaggcgccu

SEQ ID NO: 940539 - RNA, 22 nt, Human
cucgcgauccgcagcucccuuc

SEQ ID NO: 940540 - RNA, 22 nt, Human
cucugcacgaaccuaccccgac

SEQ ID NO: 940541 - RNA, 18 nt, Human
cugcuccugccgcccccg

SEQ ID NO: 940542 - RNA, 23 nt, Human
cugcuccugccgcccccgccccc

SEQ ID NO: 940543 - RNA, 18 nt, Human
cuuggccggggaggaggg

SEQ ID NO: 940544 - RNA, 19 nt, Human
cuuggccggggaggagggg

SEQ ID NO: 940545 - RNA, 23 nt, Human
gaaggcaggacaagaaaucuguu

SEQ ID NO: 940546 - RNA, 20 nt, Human
gaagggagcuggcacaggcc

SEQ ID NO: 940547 - RNA, 24 nt, Human
gacaggaauuucacaucaggucca

SEQ ID NO: 940548 - RNA, 18 nt, Human
gagaauucuuuaaauaac

SEQ ID NO: 940549 - RNA, 22 nt, Human
gagaccagguuccccagcuccc

SEQ ID NO: 940550 - RNA, 19 nt, Human
gaguccccacccccacccc

SEQ ID NO: 940551 - RNA, 19 nt, Human
gauacaaaaacauggagag

SEQ ID NO: 940552 - RNA, 23 nt, Human
gcacgaaacugagacuguccccc

SEQ ID NO: 940553 - RNA, 21 nt, Human
gcacgggcuggccgcagacgc

SEQ ID NO: 940554 - RNA, 19 nt, Human
gcagcccccuccacagcac

SEQ ID NO: 940555 - RNA, 24 nt, Human
gcaggaagccauucauuuuuuucu

SEQ ID NO: 940556 - RNA, 22 nt, Human
gcaugcacuccccacagugccu

SEQ ID NO: 940557 - RNA, 18 nt, Human
gccagaagccaugggggc

SEQ ID NO: 940558 - RNA, 23 nt, Human
gcccaccggcacaggagccccag

SEQ ID NO: 940559 - RNA, 27 nt, Human
gcccugcagcccccuccacagcacccu

SEQ ID NO: 940560 - RNA, 20 nt, Human
gcccuggagaaggggcaaga

SEQ ID NO: 940561 - RNA, 23 nt, Human
gccugcuggucagcccugcagcc

SEQ ID NO: 940562 - RNA, 20 nt, Human
gcgccuuggccggggaggag

SEQ ID NO: 940563 - RNA, 23 nt, Human
gcgggcgggggcggugcgcgcgg

SEQ ID NO: 940564 - RNA, 23 nt, Human
gcucccccaccccaucccguggc

SEQ ID NO: 940565 - RNA, 18 nt, Human
ggagccccaggcaccgug

SEQ ID NO: 940566 - RNA, 20 nt, Human
ggagcucagaggcaucuaga

SEQ ID NO: 940567 - RNA, 22 nt, Human
ggaggggaaugagguguccggg

SEQ ID NO: 940568 - RNA, 23 nt, Human
ggagggggcaccaguagggaagg

SEQ ID NO: 940569 - RNA, 19 nt, Human
ggagggucuguugcagcag

SEQ ID NO: 940570 - RNA, 20 nt, Human
ggcacaggagccccaggcac

SEQ ID NO: 940571 - RNA, 22 nt, Human
ggccucgcgauccgcagcuccc

SEQ ID NO: 940572 - RNA, 24 nt, Human
gggcaccaguagggaagggcgggc

SEQ ID NO: 940573 - RNA, 24 nt, Human
gggcggugcgcgcgggcgggcggg

SEQ ID NO: 940574 - RNA, 20 nt, Human
gggcuggggaggggcgcggg

SEQ ID NO: 940575 - RNA, 20 nt, Human
gggcuggggaggggcgcggg

SEQ ID NO: 940576 - RNA, 18 nt, Human
ggggaggggcgcggggag

SEQ ID NO: 940577 - RNA, 27 nt, Human
gguuguucuccagggcacuggggcgug

SEQ ID NO: 940578 - RNA, 21 nt, Human
gucagcccugcagcccccucc

SEQ ID NO: 940579 - RNA, 23 nt, Human
guccagcccugaguccccacccc

SEQ ID NO: 940580 - RNA, 18 nt, Human
gucccaaggacggagacc

SEQ ID NO: 940581 - RNA, 18 nt, Human
guccccacccccacccca

SEQ ID NO: 940582 - RNA, 20 nt, Human
gugggaggggaaugaggugu

SEQ ID NO: 940583 - RNA, 20 nt, Human
gugggguggccucaacuuuu

SEQ ID NO: 940584 - RNA, 21 nt, Human
uaccuggggcugauguccagc

SEQ ID NO: 940585 - RNA, 27 nt, Human
uagccugggcuggaagcccccaggaac

SEQ ID NO: 940586 - RNA, 23 nt, Human
uaggacagugaccagggccuguc

SEQ ID NO: 940587 - RNA, 24 nt, Human
ucaagaaggcaaaagccagagcag

SEQ ID NO: 940588 - RNA, 21 nt, Human
ucagaggccagcaugcccccc

SEQ ID NO: 940589 - RNA, 22 nt, Human
ucagggcccguggccaaccagg

SEQ ID NO: 940590 - RNA, 20 nt, Human
ucagggcccguggccaaccg

SEQ ID NO: 940591 - RNA, 22 nt, Human
ucagggcucucccuggaaaucg

SEQ ID NO: 940592 - RNA, 28 nt, Human
uccacagcacccuccuucccaggcccau

SEQ ID NO: 940593 - RNA, 20 nt, Human
uccacuaggacgucggucca

SEQ ID NO: 940594 - RNA, 20 nt, Human
uccagggcacuggggcgugu

SEQ ID NO: 940595 - RNA, 18 nt, Human
ucccaccaagaaagccca

SEQ ID NO: 940596 - RNA, 19 nt, Human
ucccaggcccauggggcuc

SEQ ID NO: 940597 - RNA, 23 nt, Human
uccccacccccaccccauaaccc

SEQ ID NO: 940598 - RNA, 24 nt, Human
uccccacccccaccccauaacccc

SEQ ID NO: 940599 - RNA, 21 nt, Human
uccggcagcggcggauccacu

SEQ ID NO: 940600 - RNA, 19 nt, Human
uccgggcugggggucgggg

SEQ ID NO: 940601 - RNA, 22 nt, Human
uccgugggccucgggcuggggg

SEQ ID NO: 940602 - RNA, 21 nt, Human
uccucccauagccccccugcc

SEQ ID NO: 940603 - RNA, 18 nt, Human
ucgguucuucccagguca

SEQ ID NO: 940604 - RNA, 22 nt, Human
ucuaaaaacaguggacacaagu

SEQ ID NO: 940605 - RNA, 25 nt, Human
ucugcuccugccgcccccgcccccg

SEQ ID NO: 940606 - RNA, 18 nt, Human
ugaaaagugguguuuguu

SEQ ID NO: 940607 - RNA, 19 nt, Human
ugaacucgguucuucccag

SEQ ID NO: 940608 - RNA, 24 nt, Human
ugagaagccauggcugcccugggu

SEQ ID NO: 940609 - RNA, 21 nt, Human
ugaucuguuaaaauaauccuc

SEQ ID NO: 940610 - RNA, 19 nt, Human
ugauuuggcuucauuuucu

SEQ ID NO: 940611 - RNA, 18 nt, Human
ugccagaagccauggggg

SEQ ID NO: 940612 - RNA, 19 nt, Human
ugccagccccaucucugca

SEQ ID NO: 940613 - RNA, 21 nt, Human
uggagcucagaggcaucuaga

SEQ ID NO: 940614 - RNA, 21 nt, Human
uggcacgggcuggccgcagac

SEQ ID NO: 940615 - RNA, 20 nt, Human
uggcacucgaggagggcggg

SEQ ID NO: 940616 - RNA, 23 nt, Human
ugggacaggcacacugucaugac

SEQ ID NO: 940617 - RNA, 21 nt, Human
ugggaggggaaugaggugucc

SEQ ID NO: 940618 - RNA, 19 nt, Human
uggggaggggcgcggggag

SEQ ID NO: 940619 - RNA, 21 nt, Human
uggggaggggcgcggggaggg

SEQ ID NO: 940620 - RNA, 24 nt, Human
ugggggucggggagcagucaucaa

SEQ ID NO: 940621 - RNA, 19 nt, Human
uguagugggaggggaauga

SEQ ID NO: 940622 - RNA, 18 nt, Human
uguccagcugccagaagc

SEQ ID NO: 940623 - RNA, 23 nt, Human
ugugcagcggggacagaggcuga

SEQ ID NO: 940624 - RNA, 20 nt, Human
uguugaacucgguucuuccc

SEQ ID NO: 940625 - RNA, 26 nt, Human
uuggaacugaaaccuguugguguaaa

SEQ ID NO: 940626 - RNA, 19 nt, Human
uuggccaaagggcaagacc

SEQ ID NO: 940627 - RNA, 21 nt, Human
aacaaaaauggacauaaaacu

SEQ ID NO: 940628 - RNA, 20 nt, Human
aacauuucaaacauuuggug

SEQ ID NO: 940629 - RNA, 26 nt, Human
aagaauggagguaauuucaagaaaaa

SEQ ID NO: 940630 - RNA, 24 nt, Human
aagcagagguugcagggagccaag

SEQ ID NO: 940631 - RNA, 25 nt, Human
aagcagagguugcagggagccaaga

SEQ ID NO: 940632 - RNA, 19 nt, Human
aagguacugacaaucaccu

SEQ ID NO: 940633 - RNA, 24 nt, Human
aaucaccugaacccaggaagcaga

SEQ ID NO: 940634 - RNA, 20 nt, Human
aauuuuguucuucuugucua

SEQ ID NO: 940635 - RNA, 20 nt, Human
acaaaacaagacccugucuc

SEQ ID NO: 940636 - RNA, 24 nt, Human
acaccguaacagcaaaacaugugc

SEQ ID NO: 940637 - RNA, 18 nt, Human
acugcacuccagccuggg

SEQ ID NO: 940638 - RNA, 23 nt, Human
acugcacuccagccugggugaca

SEQ ID NO: 940639 - RNA, 24 nt, Human
agagguugcagggagccaagauug

SEQ ID NO: 940640 - RNA, 20 nt, Human
agauuguuuacucugcaggu

SEQ ID NO: 940641 - RNA, 24 nt, Human
agccugggugacaaaacaagaccc

SEQ ID NO: 940642 - RNA, 21 nt, Human
aggaguuggagaccagccugg

SEQ ID NO: 940643 - RNA, 21 nt, Human
aggcaaaauuaagggaggaca

SEQ ID NO: 940644 - RNA, 18 nt, Human
aggccgaggggggcgaau

SEQ ID NO: 940645 - RNA, 23 nt, Human
agguacugacaaucaccugaacc

SEQ ID NO: 940646 - RNA, 22 nt, Human
aguccaggcacggcagcucaug

SEQ ID NO: 940647 - RNA, 24 nt, Human
auugccccacugcacuccagccug

SEQ ID NO: 940648 - RNA, 18 nt, Human
caaaacaugugcugcuga

SEQ ID NO: 940649 - RNA, 26 nt, Human
caaaauacccaaucuaguaguguaac

SEQ ID NO: 940650 - RNA, 18 nt, Human
cacuccagccugggugac

SEQ ID NO: 940651 - RNA, 19 nt, Human
cacuccagccugggugaca

SEQ ID NO: 940652 - RNA, 19 nt, Human
cacugcacuccagccuggg

SEQ ID NO: 940653 - RNA, 19 nt, Human
cacugcacuccagccuggg

SEQ ID NO: 940654 - RNA, 22 nt, Human
cacugcacuccagccuggguga

SEQ ID NO: 940655 - RNA, 23 nt, Human
cacugcacuccagccugggugac

SEQ ID NO: 940656 - RNA, 24 nt, Human
cacugcacuccagccugggugaca

SEQ ID NO: 940657 - RNA, 25 nt, Human
cacugcacuccagccugggugacaa

SEQ ID NO: 940658 - RNA, 26 nt, Human
cacugcacuccagccugggugacaaa

SEQ ID NO: 940659 - RNA, 21 nt, Human
cagcaaaacaugugcugcuga

SEQ ID NO: 940660 - RNA, 19 nt, Human
cagcacuuuggaggccgag

SEQ ID NO: 940661 - RNA, 24 nt, Human
caucugcaguuccagcuacucagg

SEQ ID NO: 940662 - RNA, 18 nt, Human
ccacugcacuccagccug

SEQ ID NO: 940663 - RNA, 20 nt, Human
ccacugcacuccagccuggg

SEQ ID NO: 940664 - RNA, 20 nt, Human
ccacugcacuccagccuggg

SEQ ID NO: 940665 - RNA, 20 nt, Human
ccacugcacuccagccuggg

SEQ ID NO: 940666 - RNA, 21 nt, Human
ccacugcacuccagccugggu

SEQ ID NO: 940667 - RNA, 21 nt, Human
ccacugcacuccagccugggu

SEQ ID NO: 940668 - RNA, 24 nt, Human
ccacugcacuccagccugggugac

SEQ ID NO: 940669 - RNA, 24 nt, Human
cccacugcacuccagccuggguga

SEQ ID NO: 940670 - RNA, 20 nt, Human
ccccacugcacuccagccug

SEQ ID NO: 940671 - RNA, 26 nt, Human
ccccacugcacuccagccugggugac

SEQ ID NO: 940672 - RNA, 19 nt, Human
cccugucucaaaaaaaaaa

SEQ ID NO: 940673 - RNA, 20 nt, Human
ccuauaauuccagcacuuug

SEQ ID NO: 940674 - RNA, 19 nt, Human
ccugaacugacacccaauc

SEQ ID NO: 940675 - RNA, 20 nt, Human
ccugaacugacacccaaucu

SEQ ID NO: 940676 - RNA, 24 nt, Human
cuaaauacgaacaguacaccguaa

SEQ ID NO: 940677 - RNA, 18 nt, Human
cucaggaggcugagguaa

SEQ ID NO: 940678 - RNA, 24 nt, Human
cucaugccuauaauuccagcacuu

SEQ ID NO: 940679 - RNA, 21 nt, Human
cugcaguuccagcuacucagg

SEQ ID NO: 940680 - RNA, 18 nt, Human
gagguugcagggagccaa

SEQ ID NO: 940681 - RNA, 23 nt, Human
gcagcucaugccuauaauuccag

SEQ ID NO: 940682 - RNA, 22 nt, Human
gcgaggaguuggagaccagccu

SEQ ID NO: 940683 - RNA, 20 nt, Human
ggaggacaaacauuuccaga

SEQ ID NO: 940684 - RNA, 21 nt, Human
gggaggacaaacauuuccaga

SEQ ID NO: 940685 - RNA, 27 nt, Human
uaacucaagagaauguaauuccugaua

SEQ ID NO: 940686 - RNA, 22 nt, Human
uaaggaacugcuauuuacgucc

SEQ ID NO: 940687 - RNA, 23 nt, Human
uaaggaacugcuauuuacguccu

SEQ ID NO: 940688 - RNA, 22 nt, Human
ucaugccuauaauuccagcacu

SEQ ID NO: 940689 - RNA, 24 nt, Human
uccagagaauggggaaaaaaccug

SEQ ID NO: 940690 - RNA, 24 nt, Human
uccagccugggugacaaaacaaga

SEQ ID NO: 940691 - RNA, 25 nt, Human
ucucaaaaaaaaaaagcaacauuuc

SEQ ID NO: 940692 - RNA, 21 nt, Human
ucugcaguuccagcuacucag

SEQ ID NO: 940693 - RNA, 22 nt, Human
ugacaaaacaagacccugucuc

SEQ ID NO: 940694 - RNA, 22 nt, Human
ugagauuguuuacucugcaggu

SEQ ID NO: 940695 - RNA, 23 nt, Human
ugccccacugcacuccagccugg

SEQ ID NO: 940696 - RNA, 23 nt, Human
ugccuauaauuccagcacuuugg

SEQ ID NO: 940697 - RNA, 22 nt, Human
uggaggccgaggggggcgaauu

SEQ ID NO: 940698 - RNA, 19 nt, Human
uggcgcacaucugcaguuc

SEQ ID NO: 940699 - RNA, 18 nt, Human
uuagccgggcaugguggc

SEQ ID NO: 940700 - RNA, 24 nt, Human
uucaauugacuauauaugcacaaa

SEQ ID NO: 940701 - RNA, 19 nt, Human
aaguagagggucugcaggg

SEQ ID NO: 940702 - RNA, 25 nt, Human
accaucccaccuuggaauccagaaa

SEQ ID NO: 940703 - RNA, 19 nt, Human
agaaagaggcgccgccuuc

SEQ ID NO: 940704 - RNA, 28 nt, Human
agaaagagugggacgugucacccauggc

SEQ ID NO: 940705 - RNA, 19 nt, Human
agagccggagugcuagggg

SEQ ID NO: 940706 - RNA, 18 nt, Human
agccagcagccugcagcc

SEQ ID NO: 940707 - RNA, 19 nt, Human
agccgcagaagccagcagc

SEQ ID NO: 940708 - RNA, 19 nt, Human
aggagaggggugggugggg

SEQ ID NO: 940709 - RNA, 22 nt, Human
aggcaccacggaugccccucca

SEQ ID NO: 940710 - RNA, 19 nt, Human
aggcaggagaggggugggu

SEQ ID NO: 940711 - RNA, 23 nt, Human
aggcaggagaggggugggugggg

SEQ ID NO: 940712 - RNA, 26 nt, Human
aggcaggagagggguggguggggggu

SEQ ID NO: 940713 - RNA, 21 nt, Human
agggaggccccagccccaggc

SEQ ID NO: 940714 - RNA, 23 nt, Human
aggggugggugggggguuggggg

SEQ ID NO: 940715 - RNA, 24 nt, Human
aggggugggugggggguugggggc

SEQ ID NO: 940716 - RNA, 21 nt, Human
agugucccugggccucugccu

SEQ ID NO: 940717 - RNA, 20 nt, Human
augguccgcagccucccacc

SEQ ID NO: 940718 - RNA, 21 nt, Human
cacagucccugccgaggcagg

SEQ ID NO: 940719 - RNA, 19 nt, Human
cacccauggccacccucaa

SEQ ID NO: 940720 - RNA, 21 nt, Human
cacccuggaaagcagcaaggg

SEQ ID NO: 940721 - RNA, 18 nt, Human
caccggggcugccugagg

SEQ ID NO: 940722 - RNA, 20 nt, Human
cagaagagaccuggaaaaug

SEQ ID NO: 940723 - RNA, 21 nt, Human
cagcaagcucaugcacgucag

SEQ ID NO: 940724 - RNA, 18 nt, Human
caggcucagagaccagcc

SEQ ID NO: 940725 - RNA, 18 nt, Human
caggcuccuggcucugag

SEQ ID NO: 940726 - RNA, 19 nt, Human
caguggcagggucgugggu

SEQ ID NO: 940727 - RNA, 23 nt, Human
cagugucccugggccucugccug

SEQ ID NO: 940728 - RNA, 21 nt, Human
ccacacugugcgaggaagaug

SEQ ID NO: 940729 - RNA, 22 nt, Human
ccacggaugccccuccaucaga

SEQ ID NO: 940730 - RNA, 21 nt, Human
ccaggcuccuggcucugaggu

SEQ ID NO: 940731 - RNA, 21 nt, Human
cccagccccaggcuccuggcc

SEQ ID NO: 940732 - RNA, 28 nt, Human
cccauggccacccucaacacacccugga

SEQ ID NO: 940733 - RNA, 23 nt, Human
cccaugguccgcagccucccacc

SEQ ID NO: 940734 - RNA, 23 nt, Human
ccccagccccaggcuccuggcuc

SEQ ID NO: 940735 - RNA, 22 nt, Human
ccccaugguccgcagccuccca

SEQ ID NO: 940736 - RNA, 18 nt, Human
ccgcagaagccagcagcc

SEQ ID NO: 940737 - RNA, 26 nt, Human
ccuccugggacagggagaccugaaau

SEQ ID NO: 940738 - RNA, 21 nt, Human
ccuggaaagcagcaagcucau

SEQ ID NO: 940739 - RNA, 25 nt, Human
ccuggccgcgaccccgaccccgcag

SEQ ID NO: 940740 - RNA, 23 nt, Human
cgaccccgaccccgcagccgcag

SEQ ID NO: 940741 - RNA, 19 nt, Human
cgguggcugggaacguugc

SEQ ID NO: 940742 - RNA, 20 nt, Human
cgucagugucccugggccuc

SEQ ID NO: 940743 - RNA, 19 nt, Human
cuaaacagcuaaacagggc

SEQ ID NO: 940744 - RNA, 18 nt, Human
cucacgccucgaucacag

SEQ ID NO: 940745 - RNA, 20 nt, Human
cuuggaaggcacuucugggg

SEQ ID NO: 940746 - RNA, 24 nt, Human
cuuggcccuggccgcgaccccgac

SEQ ID NO: 940747 - RNA, 19 nt, Human
gaaccuggcagccacggcg

SEQ ID NO: 940748 - RNA, 21 nt, Human
gagaggggugggugggggguu

SEQ ID NO: 940749 - RNA, 23 nt, Human
gagauaaccacuguggcucacgc

SEQ ID NO: 940750 - RNA, 21 nt, Human
gagggucugcaggggucaaag

SEQ ID NO: 940751 - RNA, 27 nt, Human
gaucaccaucccaccuuggaauccaga

SEQ ID NO: 940752 - RNA, 20 nt, Human
gcacgucagugucccugggc

SEQ ID NO: 940753 - RNA, 22 nt, Human
gcaggagagggguggguggggg

SEQ ID NO: 940754 - RNA, 20 nt, Human
gccccagccccaggcuccug

SEQ ID NO: 940755 - RNA, 19 nt, Human
gcccuggccgcgaccccga

SEQ ID NO: 940756 - RNA, 22 nt, Human
gccgccuucccuggaugaacuc

SEQ ID NO: 940757 - RNA, 22 nt, Human
gccgcgaccccgaccccgcagc

SEQ ID NO: 940758 - RNA, 18 nt, Human
ggaggccccagccccagg

SEQ ID NO: 940759 - RNA, 21 nt, Human
gggaagcuuggaaggcacuuc

SEQ ID NO: 940760 - RNA, 21 nt, Human
gggaauaucaguccugcccaa

SEQ ID NO: 940761 - RNA, 19 nt, Human
gggccgggugggcugcgcu

SEQ ID NO: 940762 - RNA, 18 nt, Human
ggggaagcuuggaaggca

SEQ ID NO: 940763 - RNA, 22 nt, Human
gggggcgccgccugcagggguu

SEQ ID NO: 940764 - RNA, 22 nt, Human
gggugggugggggguugggggc

SEQ ID NO: 940765 - RNA, 24 nt, Human
guagggggcgccgccugcaggggu

SEQ ID NO: 940766 - RNA, 19 nt, Human
guccugcucggaugcggag

SEQ ID NO: 940767 - RNA, 26 nt, Human
uaaaacacaaccagcuagucgucccg

SEQ ID NO: 940768 - RNA, 19 nt, Human
uaaccacuguggcucacgc

SEQ ID NO: 940769 - RNA, 21 nt, Human
uaagcuagaaggcaccacgga

SEQ ID NO: 940770 - RNA, 19 nt, Human
uaaugugguccauaguucc

SEQ ID NO: 940771 - RNA, 24 nt, Human
uaauuaacuucuggccgaaagccc

SEQ ID NO: 940772 - RNA, 23 nt, Human
uacaaugggaaaaggcugcuuca

SEQ ID NO: 940773 - RNA, 20 nt, Human
ucacccauggccacccucaa

SEQ ID NO: 940774 - RNA, 19 nt, Human
ucacuucaggaucagagau

SEQ ID NO: 940775 - RNA, 21 nt, Human
ucagagaccagccugcaggac

SEQ ID NO: 940776 - RNA, 23 nt, Human
ucagagauguggugaacacagca

SEQ ID NO: 940777 - RNA, 19 nt, Human
uccagaaaguucguggggg

SEQ ID NO: 940778 - RNA, 18 nt, Human
uccaucagaaagaguggg

SEQ ID NO: 940779 - RNA, 21 nt, Human
ucccugaagccgggggguuga

SEQ ID NO: 940780 - RNA, 20 nt, Human
ucccugccgaggcaggagag

SEQ ID NO: 940781 - RNA, 22 nt, Human
ucuacaaugggaaaaggcugcu

SEQ ID NO: 940782 - RNA, 20 nt, Human
ugacaggagggaagggauug

SEQ ID NO: 940783 - RNA, 23 nt, Human
ugaguccccaugguccgcagccu

SEQ ID NO: 940784 - RNA, 18 nt, Human
ugcaggagucggggagca

SEQ ID NO: 940785 - RNA, 21 nt, Human
ugcccugagcuuggagauaac

SEQ ID NO: 940786 - RNA, 18 nt, Human
ugcggaggggccgggugg

SEQ ID NO: 940787 - RNA, 23 nt, Human
ugcuagggguugggcgaaucucu

SEQ ID NO: 940788 - RNA, 26 nt, Human
ugcuagggguugggcgaaucucuggu

SEQ ID NO: 940789 - RNA, 24 nt, Human
ugcuuaaaacacaaccagcuaaac

SEQ ID NO: 940790 - RNA, 20 nt, Human
uggaaggcacuucugggguc

SEQ ID NO: 940791 - RNA, 18 nt, Human
uggcagggucguggguga

SEQ ID NO: 940792 - RNA, 20 nt, Human
uggcagggucgugggugaug

SEQ ID NO: 940793 - RNA, 21 nt, Human
uggcagggucgugggugaugu

SEQ ID NO: 940794 - RNA, 21 nt, Human
uggccacccucaacacacccu

SEQ ID NO: 940795 - RNA, 22 nt, Human
uggccgcgaccccgaccccgca

SEQ ID NO: 940796 - RNA, 21 nt, Human
ugggaaaaggcugcuucaaug

SEQ ID NO: 940797 - RNA, 24 nt, Human
uggggucccugaagccgggggguu

SEQ ID NO: 940798 - RNA, 21 nt, Human
uguggaucuugggggaagcuu

SEQ ID NO: 940799 - RNA, 19 nt, Human
uucccuggaugaacuccaa

SEQ ID NO: 940800 - RNA, 18 nt, Human
uucuggggucccugaagc

SEQ ID NO: 940801 - RNA, 23 nt, Human
uuggcccuggccgcgaccccgac

SEQ ID NO: 940802 - RNA, 21 nt, Human
uuuuuuuuuugcgguggcugg

SEQ ID NO: 940803 - RNA, 18 nt, Human
uuuuuuuuuuuuuugcgg

SEQ ID NO: 940804 - RNA, 18 nt, Human
uuuuuuuuuuuuuugcgg

SEQ ID NO: 940805 - RNA, 21 nt, Human
uuuuuuuuuuuuuuuuugcgg

SEQ ID NO: 940806 - RNA, 22 nt, Human
uuuuuuuuuuuuuuuuugcggu

SEQ ID NO: 940807 - RNA, 25 nt, Human
uuuuuuuuuuuuuuuuuugcggugg

SEQ ID NO: 940808 - RNA, 27 nt, Human
uuuuuuuuuuuuuuuuuuuuuuugggg

SEQ ID NO: 940809 - RNA, 23 nt, Human
aaaaauaacaggguuugcacagc

SEQ ID NO: 940810 - RNA, 18 nt, Human
aaacgacacagcucaagc

SEQ ID NO: 940811 - RNA, 22 nt, Human
aagcaaaauaguguguuaaaau

SEQ ID NO: 940812 - RNA, 22 nt, Human
aagcuaccaccaaaauauccag

SEQ ID NO: 940813 - RNA, 27 nt, Human
aauacaaaagcaaaauaguguguuaaa

SEQ ID NO: 940814 - RNA, 27 nt, Human
acaaaaagagaacgcaugcuguacagc

SEQ ID NO: 940815 - RNA, 26 nt, Human
acagcucaagcccauccucgcugccc

SEQ ID NO: 940816 - RNA, 18 nt, Human
acagggcccucuccagga

SEQ ID NO: 940817 - RNA, 19 nt, Human
acaggguuugcacagcucu

SEQ ID NO: 940818 - RNA, 22 nt, Human
acccagccagcaaccacaaaaa

SEQ ID NO: 940819 - RNA, 22 nt, Human
acuaaaauacaaaagcaaaaua

SEQ ID NO: 940820 - RNA, 19 nt, Human
agaaaaauaaguaagacaa

SEQ ID NO: 940821 - RNA, 21 nt, Human
agacacaagacaucuugagcu

SEQ ID NO: 940822 - RNA, 21 nt, Human
agagaaggggagggagacgau

SEQ ID NO: 940823 - RNA, 20 nt, Human
aggcaagguuuaugcuucag

SEQ ID NO: 940824 - RNA, 18 nt, Human
aggcuuucuccuagaaua

SEQ ID NO: 940825 - RNA, 20 nt, Human
aggguuugcacagcucuauu

SEQ ID NO: 940826 - RNA, 24 nt, Human
aucugcaugacagucucuagguac

SEQ ID NO: 940827 - RNA, 23 nt, Human
auuuuaggccuaaaaauaagauu

SEQ ID NO: 940828 - RNA, 22 nt, Human
caaaagaaaaauaaguaagaca

SEQ ID NO: 940829 - RNA, 21 nt, Human
caagcagaggccaucuagcca

SEQ ID NO: 940830 - RNA, 20 nt, Human
cacagcucaagcuuggugcu

SEQ ID NO: 940831 - RNA, 22 nt, Human
cagguucucccugguaccuucc

SEQ ID NO: 940832 - RNA, 21 nt, Human
ccaggaccucccagguucucc

SEQ ID NO: 940833 - RNA, 23 nt, Human
cccaccacccccccauauacaaa

SEQ ID NO: 940834 - RNA, 23 nt, Human
ccccaccacccccccauauacaa

SEQ ID NO: 940835 - RNA, 27 nt, Human
ccccaccacccccccauauacaaaggc

SEQ ID NO: 940836 - RNA, 18 nt, Human
ccccccaccaccccccca

SEQ ID NO: 940837 - RNA, 21 nt, Human
ccccccauauacaaaggccau

SEQ ID NO: 940838 - RNA, 20 nt, Human
cccugguaccuucccucccu

SEQ ID NO: 940839 - RNA, 22 nt, Human
cgacacagcucaagcuuggugc

SEQ ID NO: 940840 - RNA, 18 nt, Human
cguccugccagugugagg

SEQ ID NO: 940841 - RNA, 18 nt, Human
cuccuagaauauccaaaa

SEQ ID NO: 940842 - RNA, 20 nt, Human
cucuagggcagaaaucucuc

SEQ ID NO: 940843 - RNA, 25 nt, Human
gaagucuuuccgaugcugguuugau

SEQ ID NO: 940844 - RNA, 21 nt, Human
gcccauccucgcugcccccuc

SEQ ID NO: 940845 - RNA, 20 nt, Human
ggacagggcccucuccagga

SEQ ID NO: 940846 - RNA, 20 nt, Human
ggcagaaaucucucaacagc

SEQ ID NO: 940847 - RNA, 23 nt, Human
uaaauacaguacccagccagcaa

SEQ ID NO: 940848 - RNA, 18 nt, Human
uaacuaaaauacaaaagc

SEQ ID NO: 940849 - RNA, 22 nt, Human
uaagauuaccaagcagaggcca

SEQ ID NO: 940850 - RNA, 21 nt, Human
uaauuuuuuaaaauuacacag

SEQ ID NO: 940851 - RNA, 23 nt, Human
uacaagaaagaugaccaccaggu

SEQ ID NO: 940852 - RNA, 19 nt, Human
uagaauauccaaaaugcuc

SEQ ID NO: 940853 - RNA, 21 nt, Human
uagacagaaugucauguagua

SEQ ID NO: 940854 - RNA, 21 nt, Human
uaguauuuuaaaaacacagau

SEQ ID NO: 940855 - RNA, 19 nt, Human
ucacaugacagauauaaaa

SEQ ID NO: 940856 - RNA, 21 nt, Human
ucagggccauaacuuccaugg

SEQ ID NO: 940857 - RNA, 26 nt, Human
uccccccaccacccccccauauacaa

SEQ ID NO: 940858 - RNA, 18 nt, Human
ucccugguaccuucccuc

SEQ ID NO: 940859 - RNA, 22 nt, Human
ucccugguaccuucccucccuc

SEQ ID NO: 940860 - RNA, 19 nt, Human
ucuagguaccaagacugua

SEQ ID NO: 940861 - RNA, 22 nt, Human
ucucucaacagcucaagcccau

SEQ ID NO: 940862 - RNA, 18 nt, Human
ugacagauauaaaacuaa

SEQ ID NO: 940863 - RNA, 20 nt, Human
ugaugucauccucacacggg

SEQ ID NO: 940864 - RNA, 21 nt, Human
ugauuccugaucacccaacug

SEQ ID NO: 940865 - RNA, 22 nt, Human
ugcacagaccacgaaugcagcc

SEQ ID NO: 940866 - RNA, 20 nt, Human
ugcccccuccacgaaacgac

SEQ ID NO: 940867 - RNA, 19 nt, Human
ugcuauucucuacuucauu

SEQ ID NO: 940868 - RNA, 21 nt, Human
ugggacuagaagcuaccacca

SEQ ID NO: 940869 - RNA, 20 nt, Human
uggugcugggaagucuuucc

SEQ ID NO: 940870 - RNA, 18 nt, Human
uguccccccaccaccccc

SEQ ID NO: 940871 - RNA, 28 nt, Human
uuaccaagcagaggccaucuagccacac

SEQ ID NO: 940872 - RNA, 19 nt, Human
uuagguuacaguuacauga

SEQ ID NO: 940873 - RNA, 22 nt, Human
uuuaucagaaguaauacauuua

SEQ ID NO: 940874 - RNA, 20 nt, Human
uuucagggccauaacuucca

SEQ ID NO: 940875 - RNA, 25 nt, Human
aaaggaagggaggaagcgggggagg

SEQ ID NO: 940876 - RNA, 26 nt, Human
aaagugccccaguccuuccagcgguu

SEQ ID NO: 940877 - RNA, 18 nt, Human
aagagaggggggucuugc

SEQ ID NO: 940878 - RNA, 18 nt, Human
aagggaggaagcggggga

SEQ ID NO: 940879 - RNA, 28 nt, Human
aagugccccaguccuuccagcgguuuug

SEQ ID NO: 940880 - RNA, 20 nt, Human
acaagccagcaacaaggcac

SEQ ID NO: 940881 - RNA, 20 nt, Human
acaaggcacaggauggccac

SEQ ID NO: 940882 - RNA, 20 nt, Human
acccacagcugaaaacaggc

SEQ ID NO: 940883 - RNA, 19 nt, Human
agacaagccagcaacaagg

SEQ ID NO: 940884 - RNA, 23 nt, Human
aggaagggaggaagcgggggagg

SEQ ID NO: 940885 - RNA, 20 nt, Human
aggagcacagggcugagacg

SEQ ID NO: 940886 - RNA, 22 nt, Human
aggauggccacaagggggugcu

SEQ ID NO: 940887 - RNA, 22 nt, Human
aggcaguucuggggacugggga

SEQ ID NO: 940888 - RNA, 21 nt, Human
agggaaggugacaagggaggc

SEQ ID NO: 940889 - RNA, 19 nt, Human
agggaggaagcgggggagg

SEQ ID NO: 940890 - RNA, 26 nt, Human
agggaggaagcgggggaggggucuug

SEQ ID NO: 940891 - RNA, 22 nt, Human
agggaggaagggggaaaggaag

SEQ ID NO: 940892 - RNA, 24 nt, Human
agggggaaaggaagggaggaagcg

SEQ ID NO: 940893 - RNA, 18 nt, Human
agggggagggaggaaggg

SEQ ID NO: 940894 - RNA, 19 nt, Human
agggggagggaggaagggg

SEQ ID NO: 940895 - RNA, 21 nt, Human
agguccugccugcccacccag

SEQ ID NO: 940896 - RNA, 18 nt, Human
aguggggaagagaggggg

SEQ ID NO: 940897 - RNA, 19 nt, Human
caaagaaggaaauccggac

SEQ ID NO: 940898 - RNA, 18 nt, Human
cacccaggccccacaugc

SEQ ID NO: 940899 - RNA, 19 nt, Human
cacccaggccccacaugcc

SEQ ID NO: 940900 - RNA, 19 nt, Human
caccgccugucagcccugc

SEQ ID NO: 940901 - RNA, 18 nt, Human
ccacagcugaaaacaggc

SEQ ID NO: 940902 - RNA, 20 nt, Human
ccaccgggaacaaggcacag

SEQ ID NO: 940903 - RNA, 20 nt, Human
ccagaacagucccuuucuga

SEQ ID NO: 940904 - RNA, 24 nt, Human
ccagggcgcgugucugcauggcca

SEQ ID NO: 940905 - RNA, 20 nt, Human
cccaagggcugaggcccccc

SEQ ID NO: 940906 - RNA, 27 nt, Human
cccacagcugaaaacaggccggggucc

SEQ ID NO: 940907 - RNA, 23 nt, Human
cccaccgccugucagcccugccc

SEQ ID NO: 940908 - RNA, 25 nt, Human
ccccacaugccagggcgcgugucug

SEQ ID NO: 940909 - RNA, 25 nt, Human
ccccaccgccugucagcccugcccg

SEQ ID NO: 940910 - RNA, 20 nt, Human
cccggcgccucggggcgccc

SEQ ID NO: 940911 - RNA, 20 nt, Human
ccgccgccgacuccgccagg

SEQ ID NO: 940912 - RNA, 21 nt, Human
ccgccgcguccucccagcgcc

SEQ ID NO: 940913 - RNA, 24 nt, Human
ccucccagcgccgcguccccgccc

SEQ ID NO: 940914 - RNA, 23 nt, Human
ccucuggcucagggcuggcuccc

SEQ ID NO: 940915 - RNA, 20 nt, Human
ccugagugggcucugauggg

SEQ ID NO: 940916 - RNA, 18 nt, Human
ccuggugguggcagaacc

SEQ ID NO: 940917 - RNA, 20 nt, Human
cgcccaggcguccguuccca

SEQ ID NO: 940918 - RNA, 18 nt, Human
cgugggugaucugaagcc

SEQ ID NO: 940919 - RNA, 22 nt, Human
cugcccacccaggccccacaug

SEQ ID NO: 940920 - RNA, 21 nt, Human
gaaauccuccuggugguggca

SEQ ID NO: 940921 - RNA, 21 nt, Human
gaagggaggaagcgggggagg

SEQ ID NO: 940922 - RNA, 19 nt, Human
gagccgccccaccgccugu

SEQ ID NO: 940923 - RNA, 18 nt, Human
gauccagccacccagaac

SEQ ID NO: 940924 - RNA, 21 nt, Human
gccuuuaugaagggggaggga

SEQ ID NO: 940925 - RNA, 19 nt, Human
gcuauggaggcccugccag

SEQ ID NO: 940926 - RNA, 23 nt, Human
gcuauggaggcccugccagcccc

SEQ ID NO: 940927 - RNA, 22 nt, Human
ggacuggggagggggcgcuggc

SEQ ID NO: 940928 - RNA, 22 nt, Human
ggacuggggagggggcgcuggc

SEQ ID NO: 940929 - RNA, 24 nt, Human
ggagauccagccacccagaacagu

SEQ ID NO: 940930 - RNA, 20 nt, Human
ggagcuccgaacgcuggucc

SEQ ID NO: 940931 - RNA, 20 nt, Human
ggaggccaccgggaacaagg

SEQ ID NO: 940932 - RNA, 23 nt, Human
ggagggaggaagggggaaaggaa

SEQ ID NO: 940933 - RNA, 22 nt, Human
ggcagaaagugccccaguccuu

SEQ ID NO: 940934 - RNA, 19 nt, Human
ggccacaagggggugcugc

SEQ ID NO: 940935 - RNA, 21 nt, Human
ggccacccacagcugaaaaca

SEQ ID NO: 940936 - RNA, 21 nt, Human
ggcgcuggcugccucaggugu

SEQ ID NO: 940937 - RNA, 19 nt, Human
ggggaaaggaagggaggaa

SEQ ID NO: 940938 - RNA, 21 nt, Human
ggggugcugcuggcccagggc

SEQ ID NO: 940939 - RNA, 18 nt, Human
gggugggagggcccaggu

SEQ ID NO: 940940 - RNA, 21 nt, Human
gugcugcuggcccagggcuug

SEQ ID NO: 940941 - RNA, 20 nt, Human
uacccuggagauccagccac

SEQ ID NO: 940942 - RNA, 23 nt, Human
uauggaggcccugccagccccuc

SEQ ID NO: 940943 - RNA, 21 nt, Human
uccaaagaaggaaauccggac

SEQ ID NO: 940944 - RNA, 18 nt, Human
uccagccacccagaacag

SEQ ID NO: 940945 - RNA, 23 nt, Human
uccauccauucugccucuggcuc

SEQ ID NO: 940946 - RNA, 22 nt, Human
uccauucugccucuggcucagg

SEQ ID NO: 940947 - RNA, 24 nt, Human
ucccaagggcugaggccccccgag

SEQ ID NO: 940948 - RNA, 18 nt, Human
ucccagcgccgcgucccc

SEQ ID NO: 940949 - RNA, 21 nt, Human
ucuugaaauccuccugguggu

SEQ ID NO: 940950 - RNA, 24 nt, Human
ugccagccccuccuaguaguccaa

SEQ ID NO: 940951 - RNA, 18 nt, Human
ugccccaguccuuccagc

SEQ ID NO: 940952 - RNA, 23 nt, Human
ugccucuggcucagggcuggcuc

SEQ ID NO: 940953 - RNA, 20 nt, Human
ugccugcccacccaggcccc

SEQ ID NO: 940954 - RNA, 25 nt, Human
ugcucugucucagagcuccccuuca

SEQ ID NO: 940955 - RNA, 23 nt, Human
uggaggcccugccagccccuccu

SEQ ID NO: 940956 - RNA, 21 nt, Human
uggccacaagggggugcugcu

SEQ ID NO: 940957 - RNA, 18 nt, Human
uggcccagggcuuggcag

SEQ ID NO: 940958 - RNA, 20 nt, Human
uggcucagggcuggcuccag

SEQ ID NO: 940959 - RNA, 22 nt, Human
uggcuccaggcccccgucuccc

SEQ ID NO: 940960 - RNA, 20 nt, Human
uggggacuggggagggggcg

SEQ ID NO: 940961 - RNA, 22 nt, Human
uggggagggggcgcuggcugcc

SEQ ID NO: 940962 - RNA, 22 nt, Human
uggggcaauucugugcuaugga

SEQ ID NO: 940963 - RNA, 22 nt, Human
ugucucagagcuccccuucagg

SEQ ID NO: 940964 - RNA, 21 nt, Human
ugucugcauggccacccacag

SEQ ID NO: 940965 - RNA, 20 nt, Human
uucuggggacuggggagggg

SEQ ID NO: 940966 - RNA, 22 nt, Human
uucugggguggguguuugcucu

SEQ ID NO: 940967 - RNA, 22 nt, Human
uuuuuuuuuuuuuuuuuaccaa

SEQ ID NO: 940968 - RNA, 20 nt, Human
aaaagaaaaagaugcaaaag

SEQ ID NO: 940969 - RNA, 19 nt, Human
aaaaggaaaaaaugagaaa

SEQ ID NO: 940970 - RNA, 21 nt, Human
aaagcgaaaugaggugguggc

SEQ ID NO: 940971 - RNA, 23 nt, Human
aaagcgaaaugaggugguggcuu

SEQ ID NO: 940972 - RNA, 20 nt, Human
aaccagaguuuuuccuggag

SEQ ID NO: 940973 - RNA, 18 nt, Human
aacgugaauaaaggauaa

SEQ ID NO: 940974 - RNA, 22 nt, Human
aagaaaaagaugcaaaagaaaa

SEQ ID NO: 940975 - RNA, 21 nt, Human
aagaacuccuucacccacguc

SEQ ID NO: 940976 - RNA, 22 nt, Human
aagcagcaugguucccgugaga

SEQ ID NO: 940977 - RNA, 23 nt, Human
aagcagcaugguucccgugagaa

SEQ ID NO: 940978 - RNA, 23 nt, Human
aaguaguucagugcagguuacuu

SEQ ID NO: 940979 - RNA, 25 nt, Human
aaucuuuuuaaaaaggaaaaaauga

SEQ ID NO: 940980 - RNA, 24 nt, Human
aauguagaaaaaaaccgaaaaaga

SEQ ID NO: 940981 - RNA, 23 nt, Human
acacauucccaagcagcaugguu

SEQ ID NO: 940982 - RNA, 19 nt, Human
accaaauacaucaaggaaa

SEQ ID NO: 940983 - RNA, 24 nt, Human
accaucuaaauauccuuuuaucac

SEQ ID NO: 940984 - RNA, 21 nt, Human
acccacgucacacuuucuccu

SEQ ID NO: 940985 - RNA, 20 nt, Human
acucuguggccaugccgggu

SEQ ID NO: 940986 - RNA, 19 nt, Human
agaaaaugcauucuagcuc

SEQ ID NO: 940987 - RNA, 24 nt, Human
agaaaucacaauccugagccagug

SEQ ID NO: 940988 - RNA, 22 nt, Human
agaaggcaucacacacauuccc

SEQ ID NO: 940989 - RNA, 22 nt, Human
agagaaaaaaaaaaccuuuaga

SEQ ID NO: 940990 - RNA, 18 nt, Human
agaucacagaaaucacaa

SEQ ID NO: 940991 - RNA, 24 nt, Human
agcccaucuucuaaaagggggugc

SEQ ID NO: 940992 - RNA, 23 nt, Human
agcgauuccagcuuguuuccuuu

SEQ ID NO: 940993 - RNA, 19 nt, Human
agggguuguggaguggggg

SEQ ID NO: 940994 - RNA, 19 nt, Human
auaaaaucaugaggaucca

SEQ ID NO: 940995 - RNA, 21 nt, Human
auaaauauaagagccaagauc

SEQ ID NO: 940996 - RNA, 19 nt, Human
augacuccugucuucuguc

SEQ ID NO: 940997 - RNA, 23 nt, Human
caacagguacaaagaugguuaaa

SEQ ID NO: 940998 - RNA, 20 nt, Human
caagccccaagggauagagg

SEQ ID NO: 940999 - RNA, 19 nt, Human
caaggagcaaaugagaaaa

SEQ ID NO: 941000 - RNA, 25 nt, Human
cagcaugguucccgugagaaacuga

SEQ ID NO: 941001 - RNA, 24 nt, Human
cagccaaucuagaaaauaaaauca

SEQ ID NO: 941002 - RNA, 20 nt, Human
cauggcucaauaagaacucc

SEQ ID NO: 941003 - RNA, 26 nt, Human
ccaacaccuaagcuucugccugagcc

SEQ ID NO: 941004 - RNA, 24 nt, Human
ccaauccugccacuuaccugggaa

SEQ ID NO: 941005 - RNA, 20 nt, Human
ccaucagugaaggguuuuag

SEQ ID NO: 941006 - RNA, 18 nt, Human
ccaucuucuaaaaggggg

SEQ ID NO: 941007 - RNA, 23 nt, Human
cccaagggauagauguuuacaaa

SEQ ID NO: 941008 - RNA, 21 nt, Human
ccccgcacucccgccugagcc

SEQ ID NO: 941009 - RNA, 23 nt, Human
ccccgcacucccgccugagccag

SEQ ID NO: 941010 - RNA, 21 nt, Human
cccuaugcuguguaugacgcu

SEQ ID NO: 941011 - RNA, 22 nt, Human
ccgcacucccgccugagccagg

SEQ ID NO: 941012 - RNA, 19 nt, Human
ccucauuccaauccugcca

SEQ ID NO: 941013 - RNA, 20 nt, Human
ccugagcccacucaccacuu

SEQ ID NO: 941014 - RNA, 18 nt, Human
ccuguagccaguccaccu

SEQ ID NO: 941015 - RNA, 19 nt, Human
ccugucccaaggccaacac

SEQ ID NO: 941016 - RNA, 18 nt, Human
cgccugagccaggcccgc

SEQ ID NO: 941017 - RNA, 20 nt, Human
cuaggacauggauuuugcua

SEQ ID NO: 941018 - RNA, 22 nt, Human
cucauacggucccacacccagu

SEQ ID NO: 941019 - RNA, 23 nt, Human
cuguacuauuucuuccucccaug

SEQ ID NO: 941020 - RNA, 22 nt, Human
cuucugccugagcccacucacc

SEQ ID NO: 941021 - RNA, 22 nt, Human
cuuuuuaaaaaggaaaaaauga

SEQ ID NO: 941022 - RNA, 24 nt, Human
gaaccaugccuuuuggauuauguc

SEQ ID NO: 941023 - RNA, 24 nt, Human
gaacuccuucacccacgucacacu

SEQ ID NO: 941024 - RNA, 25 nt, Human
gaacuccuucacccacgucacacuu

SEQ ID NO: 941025 - RNA, 22 nt, Human
gaucauaaucaucgguaccuug

SEQ ID NO: 941026 - RNA, 24 nt, Human
gcaucacacacauucccaagcagc

SEQ ID NO: 941027 - RNA, 18 nt, Human
gcccuggaagcccaucuu

SEQ ID NO: 941028 - RNA, 20 nt, Human
gccgggccuguucccaaaaa

SEQ ID NO: 941029 - RNA, 22 nt, Human
gcucaauaagaacuccuucacc

SEQ ID NO: 941030 - RNA, 22 nt, Human
ggaaggacggguaugggauagg

SEQ ID NO: 941031 - RNA, 22 nt, Human
ggagcaaaugagaaaaccuguu

SEQ ID NO: 941032 - RNA, 19 nt, Human
gguaugggauaggaaaggg

SEQ ID NO: 941033 - RNA, 22 nt, Human
guacagcuccuauaacaaaaua

SEQ ID NO: 941034 - RNA, 20 nt, Human
uaacaaaauaacaaaacuga

SEQ ID NO: 941035 - RNA, 21 nt, Human
uaaccagaguuuuuccuggag

SEQ ID NO: 941036 - RNA, 21 nt, Human
uaacuacaacagguacaaaga

SEQ ID NO: 941037 - RNA, 20 nt, Human
uaagcuucugccugagccca

SEQ ID NO: 941038 - RNA, 20 nt, Human
uaagugugaacugucugugc

SEQ ID NO: 941039 - RNA, 25 nt, Human
uacuauuucuuccucccauggcuca

SEQ ID NO: 941040 - RNA, 24 nt, Human
uaggaaacugauucagcgauuguu

SEQ ID NO: 941041 - RNA, 19 nt, Human
uaugcuguguaugacgcuu

SEQ ID NO: 941042 - RNA, 21 nt, Human
uauuuuguucuuuugcuuuca

SEQ ID NO: 941043 - RNA, 22 nt, Human
ucacauguccaaaauagccagg

SEQ ID NO: 941044 - RNA, 19 nt, Human
ucacccagagggguugugg

SEQ ID NO: 941045 - RNA, 19 nt, Human
ucagaacaguugucuuugg

SEQ ID NO: 941046 - RNA, 22 nt, Human
ucauaaauaauauucacccaac

SEQ ID NO: 941047 - RNA, 22 nt, Human
uccagcuuguuuccuuuuggug

SEQ ID NO: 941048 - RNA, 18 nt, Human
ucccaaggccaacaccua

SEQ ID NO: 941049 - RNA, 23 nt, Human
uccucccauggcucaauaagaac

SEQ ID NO: 941050 - RNA, 24 nt, Human
ucucauaaauaauauucacccaac

SEQ ID NO: 941051 - RNA, 18 nt, Human
ucuucuaaaagggggugc

SEQ ID NO: 941052 - RNA, 18 nt, Human
ugagaaaaccuguugaga

SEQ ID NO: 941053 - RNA, 19 nt, Human
ugagaaaaggcaaacucag

SEQ ID NO: 941054 - RNA, 26 nt, Human
ugagauagaacugacuguaucauccu

SEQ ID NO: 941055 - RNA, 21 nt, Human
ugagccagugcucuccucaua

SEQ ID NO: 941056 - RNA, 20 nt, Human
ugaggugguggcuuugaugg

SEQ ID NO: 941057 - RNA, 24 nt, Human
ugauuggaauaaugaucauaauca

SEQ ID NO: 941058 - RNA, 19 nt, Human
ugcaaaagaaaaagaugca

SEQ ID NO: 941059 - RNA, 18 nt, Human
ugcaaaagaaaaaggcuc

SEQ ID NO: 941060 - RNA, 20 nt, Human
ugcaaaagaaaaaggcucug

SEQ ID NO: 941061 - RNA, 18 nt, Human
ugcagguuacuuuccuuc

SEQ ID NO: 941062 - RNA, 19 nt, Human
ugcaugcauccaucaguga

SEQ ID NO: 941063 - RNA, 22 nt, Human
ugccgggccuguucccaaaaac

SEQ ID NO: 941064 - RNA, 22 nt, Human
ugccugagcccacucaccacuu

SEQ ID NO: 941065 - RNA, 20 nt, Human
ugcuggccccgcacucccgc

SEQ ID NO: 941066 - RNA, 19 nt, Human
uggaggaaaaaauuuucac

SEQ ID NO: 941067 - RNA, 18 nt, Human
ugggaaggugacuuaggc

SEQ ID NO: 941068 - RNA, 18 nt, Human
ugggauaggaaagggacu

SEQ ID NO: 941069 - RNA, 20 nt, Human
ugggauaggaaagggacuaa

SEQ ID NO: 941070 - RNA, 24 nt, Human
uguggccaugccggguuuaggagu

SEQ ID NO: 941071 - RNA, 23 nt, Human
uuaaaaaggaaaaaaugagaaac

SEQ ID NO: 941072 - RNA, 22 nt, Human
uuaccgagcugucccaaggagc

SEQ ID NO: 941073 - RNA, 18 nt, Human
uuaucugugagauagaac

SEQ ID NO: 941074 - RNA, 18 nt, Human
uucacaggugaagaaacg

SEQ ID NO: 941075 - RNA, 22 nt, Human
uucccaagcagcaugguucccg

SEQ ID NO: 941076 - RNA, 22 nt, Human
uugaacagccguuaggauaaag

SEQ ID NO: 941077 - RNA, 20 nt, Human
uugauuaucugugagauaga

SEQ ID NO: 941078 - RNA, 23 nt, Human
uugcuuucagaacaguugucuuu

SEQ ID NO: 941079 - RNA, 19 nt, Human
uuggauuaugucaaaggaa

SEQ ID NO: 941080 - RNA, 19 nt, Human
uuggauuaugucaaaggaa

SEQ ID NO: 941081 - RNA, 18 nt, Human
uuucagaacaguugucuu

SEQ ID NO: 941082 - RNA, 18 nt, Human
uuuccuggagcgauucca

SEQ ID NO: 941083 - RNA, 21 nt, Human
uuucuugaaucuacaaugcga

SEQ ID NO: 941084 - RNA, 23 nt, Human
aaaaagaccccucucguaauauc

SEQ ID NO: 941085 - RNA, 18 nt, Human
aaacaagagcuucaugca

SEQ ID NO: 941086 - RNA, 18 nt, Human
agaggaaccgggaucuga

SEQ ID NO: 941087 - RNA, 23 nt, Human
cacaucgaaaacaagagcuucau

SEQ ID NO: 941088 - RNA, 21 nt, Human
cauuuucuucccuuagcuuca

SEQ ID NO: 941089 - RNA, 20 nt, Human
cccccacccaugcccggccu

SEQ ID NO: 941090 - RNA, 18 nt, Human
ccgagcuucuccuggaga

SEQ ID NO: 941091 - RNA, 22 nt, Human
cgcccccacccaugcccggccu

SEQ ID NO: 941092 - RNA, 23 nt, Human
cgcccccacccaugcccggccug

SEQ ID NO: 941093 - RNA, 23 nt, Human
cuagcaaaaacuuuaucaaaucc

SEQ ID NO: 941094 - RNA, 24 nt, Human
uaaaguaacauucagaauuucaug

SEQ ID NO: 941095 - RNA, 21 nt, Human
uaaguguuuucacuucauucu

SEQ ID NO: 941096 - RNA, 24 nt, Human
uacaaaaaacuguagauuuacaga

SEQ ID NO: 941097 - RNA, 22 nt, Human
ugagaaacauuuuccuaaauaa

SEQ ID NO: 941098 - RNA, 24 nt, Human
ugagaaacauuuuccuaaauaagu

SEQ ID NO: 941099 - RNA, 20 nt, Human
ugcaaucaugauaaaguaac

SEQ ID NO: 941100 - RNA, 27 nt, Human
uuaucccgcugccauugcuucucaaau

SEQ ID NO: 941101 - RNA, 18 nt, Human
uuuggcauuuucuucccu

SEQ ID NO: 941102 - RNA, 19 nt, Human
aaccaggaauggcggagug

SEQ ID NO: 941103 - RNA, 23 nt, Human
aaccucacaggagagcugcagcu

SEQ ID NO: 941104 - RNA, 23 nt, Human
aagaacgguucggagagaaccag

SEQ ID NO: 941105 - RNA, 22 nt, Human
acacccaggcuucccugaaggc

SEQ ID NO: 941106 - RNA, 21 nt, Human
accggcccugucugcuccccc

SEQ ID NO: 941107 - RNA, 22 nt, Human
accuccuuucuccccucuccug

SEQ ID NO: 941108 - RNA, 26 nt, Human
agcgacagaagcugccgagaacagga

SEQ ID NO: 941109 - RNA, 25 nt, Human
agcugcagcuguggggaccccaggg

SEQ ID NO: 941110 - RNA, 19 nt, Human
agguagaggugagcaccag

SEQ ID NO: 941111 - RNA, 18 nt, Human
aguccacuggugcccagu

SEQ ID NO: 941112 - RNA, 21 nt, Human
caacaaaaaugugggcugcca

SEQ ID NO: 941113 - RNA, 18 nt, Human
caagcccaggcagcuggg

SEQ ID NO: 941114 - RNA, 22 nt, Human
caccagcagcccagccgcgccc

SEQ ID NO: 941115 - RNA, 22 nt, Human
cacccuccaucccgugggagcc

SEQ ID NO: 941116 - RNA, 18 nt, Human
caccgggccacacccagg

SEQ ID NO: 941117 - RNA, 21 nt, Human
caccuccuuucuccccucucc

SEQ ID NO: 941118 - RNA, 19 nt, Human
cacuggguggaggagcggc

SEQ ID NO: 941119 - RNA, 19 nt, Human
cagaagcacuggguggagg

SEQ ID NO: 941120 - RNA, 19 nt, Human
cagaggggcugcuggggca

SEQ ID NO: 941121 - RNA, 19 nt, Human
cagcccagccgcgcccccu

SEQ ID NO: 941122 - RNA, 21 nt, Human
cagugucuuugggggcugugg

SEQ ID NO: 941123 - RNA, 21 nt, Human
ccaagauucccggaagcacca

SEQ ID NO: 941124 - RNA, 19 nt, Human
ccacacccaggcuucccug

SEQ ID NO: 941125 - RNA, 23 nt, Human
cccaggaacgggccauggggcga

SEQ ID NO: 941126 - RNA, 19 nt, Human
cccccuccucccgccugcc

SEQ ID NO: 941127 - RNA, 18 nt, Human
cccggcucaggugugagg

SEQ ID NO: 941128 - RNA, 23 nt, Human
ccgaggcccccagguggacgugg

SEQ ID NO: 941129 - RNA, 18 nt, Human
ccgcgcccccuccucccg

SEQ ID NO: 941130 - RNA, 20 nt, Human
ccgcggaguccaccacgggg

SEQ ID NO: 941131 - RNA, 21 nt, Human
ccggaagcaccagcagcccag

SEQ ID NO: 941132 - RNA, 20 nt, Human
ccggucacccaagcuuccag

SEQ ID NO: 941133 - RNA, 22 nt, Human
ccuccaucccgugggagccagg

SEQ ID NO: 941134 - RNA, 20 nt, Human
ccuccuuucuccccucuccu

SEQ ID NO: 941135 - RNA, 18 nt, Human
ccucugggcagccccgcc

SEQ ID NO: 941136 - RNA, 22 nt, Human
ccucugggcagccccgccacuc

SEQ ID NO: 941137 - RNA, 24 nt, Human
ccugucugcucccccggccucugg

SEQ ID NO: 941138 - RNA, 21 nt, Human
cgaggugguuccaggcacguc

SEQ ID NO: 941139 - RNA, 22 nt, Human
cgcugcccaucaaguauuccua

SEQ ID NO: 941140 - RNA, 24 nt, Human
cggaagcaccagcagcccagccgc

SEQ ID NO: 941141 - RNA, 18 nt, Human
cggccucugggcagcccc

SEQ ID NO: 941142 - RNA, 19 nt, Human
cgugcagaggggcugcugg

SEQ ID NO: 941143 - RNA, 23 nt, Human
cgugcaugcuccuccucgcaccc

SEQ ID NO: 941144 - RNA, 23 nt, Human
cucccccggccucugggcagccc

SEQ ID NO: 941145 - RNA, 25 nt, Human
cucuauauaaauaagaaaggccaac

SEQ ID NO: 941146 - RNA, 19 nt, Human
cugcacucuccaggguggg

SEQ ID NO: 941147 - RNA, 18 nt, Human
cugcagcuguggggaccc

SEQ ID NO: 941148 - RNA, 20 nt, Human
cuuccagagggagcaccggc

SEQ ID NO: 941149 - RNA, 23 nt, Human
gaagcuggagcaggaggccagug

SEQ ID NO: 941150 - RNA, 18 nt, Human
gaccaagauucccggaag

SEQ ID NO: 941151 - RNA, 18 nt, Human
gaccauccagguccucaa

SEQ ID NO: 941152 - RNA, 20 nt, Human
gagcaccagugcugugggca

SEQ ID NO: 941153 - RNA, 24 nt, Human
gagcugcagcuguggggaccccag

SEQ ID NO: 941154 - RNA, 21 nt, Human
gcaccagcagcccagccgcgc

SEQ ID NO: 941155 - RNA, 21 nt, Human
gcagcuguggggaccccaggg

SEQ ID NO: 941156 - RNA, 23 nt, Human
gccgcggaguccaccacgggggg

SEQ ID NO: 941157 - RNA, 22 nt, Human
gccuagccucccgaggccccca

SEQ ID NO: 941158 - RNA, 24 nt, Human
gcucccccggccucugggcagccc

SEQ ID NO: 941159 - RNA, 22 nt, Human
ggaccacacccuccaucccgug

SEQ ID NO: 941160 - RNA, 19 nt, Human
ggaggagcggccaauggcu

SEQ ID NO: 941161 - RNA, 19 nt, Human
gggcgaguccacuggugcc

SEQ ID NO: 941162 - RNA, 20 nt, Human
gggggcuguggcagggccgc

SEQ ID NO: 941163 - RNA, 19 nt, Human
gguccugggucccgggagg

SEQ ID NO: 941164 - RNA, 21 nt, Human
gguggaggagcggccaauggc

SEQ ID NO: 941165 - RNA, 26 nt, Human
gugcaccaccaccgggccacacccag

SEQ ID NO: 941166 - RNA, 19 nt, Human
gugucuuugggggcugugg

SEQ ID NO: 941167 - RNA, 18 nt, Human
guuccaggcacgucccua

SEQ ID NO: 941168 - RNA, 19 nt, Human
uaaauaagaaaggccaacc

SEQ ID NO: 941169 - RNA, 25 nt, Human
uaagaaaggccaaccaggcuccccg

SEQ ID NO: 941170 - RNA, 24 nt, Human
uacauuuacuguacaaagaacggu

SEQ ID NO: 941171 - RNA, 25 nt, Human
uagaggugagcaccagugcuguggg

SEQ ID NO: 941172 - RNA, 19 nt, Human
uagccucccgaggcccccu

SEQ ID NO: 941173 - RNA, 21 nt, Human
uccacguaggcggcacuggcc

SEQ ID NO: 941174 - RNA, 19 nt, Human
ucccccggccucugggcag

SEQ ID NO: 941175 - RNA, 18 nt, Human
ucccgggagggcuccuuc

SEQ ID NO: 941176 - RNA, 23 nt, Human
uccugagugcugcuugggcucug

SEQ ID NO: 941177 - RNA, 21 nt, Human
uccuggcaucugcacaggcgg

SEQ ID NO: 941178 - RNA, 21 nt, Human
uccugggucccgggagggcuc

SEQ ID NO: 941179 - RNA, 23 nt, Human
uccugggucccgggagggcuccu

SEQ ID NO: 941180 - RNA, 24 nt, Human
uccugggucccgggagggcuccuu

SEQ ID NO: 941181 - RNA, 22 nt, Human
uccuuucuccccucuccugagu

SEQ ID NO: 941182 - RNA, 18 nt, Human
ucuccagggugggcgaga

SEQ ID NO: 941183 - RNA, 22 nt, Human
ucugaccacaggaccacacccu

SEQ ID NO: 941184 - RNA, 23 nt, Human
ucuuugggggcuguggcagggcc

SEQ ID NO: 941185 - RNA, 22 nt, Human
ugcagaggggcugcuggggcag

SEQ ID NO: 941186 - RNA, 21 nt, Human
ugcaggaccauccagguccuc

SEQ ID NO: 941187 - RNA, 19 nt, Human
ugccgcacggccugaggac

SEQ ID NO: 941188 - RNA, 22 nt, Human
ugccgcggaguccaccacgggg

SEQ ID NO: 941189 - RNA, 18 nt, Human
ugccugggguucccuuac

SEQ ID NO: 941190 - RNA, 22 nt, Human
ugcuggccaugucgugccgcac

SEQ ID NO: 941191 - RNA, 22 nt, Human
uggacgaggugguuccaggcac

SEQ ID NO: 941192 - RNA, 19 nt, Human
uggcagggccgccugccug

SEQ ID NO: 941193 - RNA, 22 nt, Human
uggcaucugcacaggcggcccc

SEQ ID NO: 941194 - RNA, 19 nt, Human
ugggaagcaugugccgcgg

SEQ ID NO: 941195 - RNA, 19 nt, Human
uggggagggauuuggggag

SEQ ID NO: 941196 - RNA, 25 nt, Human
uggggccaggacagggaagcuggaa

SEQ ID NO: 941197 - RNA, 21 nt, Human
uggggcgaguccacuggugcc

SEQ ID NO: 941198 - RNA, 18 nt, Human
ugggggcuguggcagggc

SEQ ID NO: 941199 - RNA, 19 nt, Human
ugggggcuguggcagggcc

SEQ ID NO: 941200 - RNA, 20 nt, Human
ugggucccgggagggcuccu

SEQ ID NO: 941201 - RNA, 24 nt, Human
ugguaguucaugcaggccacggcc

SEQ ID NO: 941202 - RNA, 18 nt, Human
ugguuccaggcacguccc

SEQ ID NO: 941203 - RNA, 20 nt, Human
uucacaggaugccuugccau

SEQ ID NO: 941204 - RNA, 22 nt, Human
uuguucauaaucccaaacaagg

SEQ ID NO: 941205 - RNA, 19 nt, Human
uuugaggaggggccuagcc

SEQ ID NO: 941206 - RNA, 19 nt, Human
aaacaaggacuacgauaua

SEQ ID NO: 941207 - RNA, 24 nt, Human
aaagugcugggauuacaggcauga

SEQ ID NO: 941208 - RNA, 20 nt, Human
aacagguacuagcaacagca

SEQ ID NO: 941209 - RNA, 19 nt, Human
aagugcugggauuacaggc

SEQ ID NO: 941210 - RNA, 21 nt, Human
aagugcugggauuacaggcau

SEQ ID NO: 941211 - RNA, 26 nt, Human
aagugcugggauuacaggcaugagcc

SEQ ID NO: 941212 - RNA, 22 nt, Human
accgcgcccagcccacaugugc

SEQ ID NO: 941213 - RNA, 18 nt, Human
acgggguuucuccauguu

SEQ ID NO: 941214 - RNA, 20 nt, Human
acgggguuucuccauguugg

SEQ ID NO: 941215 - RNA, 24 nt, Human
acgggguuucuccauguuggucag

SEQ ID NO: 941216 - RNA, 19 nt, Human
acucacaucaacagcucac

SEQ ID NO: 941217 - RNA, 22 nt, Human
acuuuuauuuuagauucaggga

SEQ ID NO: 941218 - RNA, 22 nt, Human
acuuuucguugcccaggcugga

SEQ ID NO: 941219 - RNA, 24 nt, Human
acuuuucguugcccaggcuggagu

SEQ ID NO: 941220 - RNA, 23 nt, Human
agcccuuguuccucuucaccucc

SEQ ID NO: 941221 - RNA, 18 nt, Human
agcuccugaccuucaguc

SEQ ID NO: 941222 - RNA, 22 nt, Human
aggccagggaagggggacaggu

SEQ ID NO: 941223 - RNA, 21 nt, Human
aggccccaccaggccagggaa

SEQ ID NO: 941224 - RNA, 23 nt, Human
agggguuuuuuugucguuguuuu

SEQ ID NO: 941225 - RNA, 18 nt, Human
agggugggugcuggacag

SEQ ID NO: 941226 - RNA, 24 nt, Human
aggugauccgccugccucagccuc

SEQ ID NO: 941227 - RNA, 22 nt, Human
aguagagacgggguuucuccau

SEQ ID NO: 941228 - RNA, 21 nt, Human
aguagcugggauuacaggcau

SEQ ID NO: 941229 - RNA, 20 nt, Human
agugcaauggcgcgaucucg

SEQ ID NO: 941230 - RNA, 24 nt, Human
agugcaauggcgcgaucucggcuc

SEQ ID NO: 941231 - RNA, 18 nt, Human
agugcugggauuacaggc

SEQ ID NO: 941232 - RNA, 24 nt, Human
auucacuccacuauagcuccugac

SEQ ID NO: 941233 - RNA, 24 nt, Human
caaagugcugggauuacaggcaug

SEQ ID NO: 941234 - RNA, 21 nt, Human
caacagcucacaucauccuca

SEQ ID NO: 941235 - RNA, 23 nt, Human
caaccuccaccucccagguucaa

SEQ ID NO: 941236 - RNA, 22 nt, Human
caagcaauucuccugccucagc

SEQ ID NO: 941237 - RNA, 22 nt, Human
caccaggccagggaagggggac

SEQ ID NO: 941238 - RNA, 25 nt, Human
cacccucugacucauucacuccacu

SEQ ID NO: 941239 - RNA, 21 nt, Human
caccgcaaccuccaccuccca

SEQ ID NO: 941240 - RNA, 21 nt, Human
caccgcaaccuccaccuccca

SEQ ID NO: 941241 - RNA, 20 nt, Human
cagcagggccagauggggag

SEQ ID NO: 941242 - RNA, 23 nt, Human
cagcagguacgggauucccccuu

SEQ ID NO: 941243 - RNA, 21 nt, Human
caggccccaccaggccaggga

SEQ ID NO: 941244 - RNA, 23 nt, Human
cagguacuagcaacagcagggcc

SEQ ID NO: 941245 - RNA, 22 nt, Human
caggugauccgccugccucagc

SEQ ID NO: 941246 - RNA, 22 nt, Human
cagguggcaacguagcuucucc

SEQ ID NO: 941247 - RNA, 21 nt, Human
cagucuugccccaaagccagg

SEQ ID NO: 941248 - RNA, 23 nt, Human
ccaaagugcugggauuacaggca

SEQ ID NO: 941249 - RNA, 24 nt, Human
ccaaagugcugggauuacaggcau

SEQ ID NO: 941250 - RNA, 27 nt, Human
ccaccucccagguucaagcaauucuuu

SEQ ID NO: 941251 - RNA, 18 nt, Human
ccaggccagggaaggggg

SEQ ID NO: 941252 - RNA, 21 nt, Human
ccagggcagguuaggacacgg

SEQ ID NO: 941253 - RNA, 19 nt, Human
ccauguuggucaggcuggu

SEQ ID NO: 941254 - RNA, 22 nt, Human
ccauguuggucaggcuggucuc

SEQ ID NO: 941255 - RNA, 24 nt, Human
cccaaagugcugggauuacaggca

SEQ ID NO: 941256 - RNA, 21 nt, Human
cccaccaggccagggaagggg

SEQ ID NO: 941257 - RNA, 18 nt, Human
cccaggcuggagugcaau

SEQ ID NO: 941258 - RNA, 22 nt, Human
cccaggcuggagugcaauggcg

SEQ ID NO: 941259 - RNA, 23 nt, Human
cccagguucaagcaauucuccug

SEQ ID NO: 941260 - RNA, 19 nt, Human
ccccaaagccaggccccac

SEQ ID NO: 941261 - RNA, 23 nt, Human
cccccuucccccguggcucaguc

SEQ ID NO: 941262 - RNA, 23 nt, Human
ccccguggcucagucuugccccc

SEQ ID NO: 941263 - RNA, 18 nt, Human
cccgaccucaggugaucc

SEQ ID NO: 941264 - RNA, 21 nt, Human
cccgaccucaggugauccgcc

SEQ ID NO: 941265 - RNA, 23 nt, Human
cccgaccucaggugauccgccug

SEQ ID NO: 941266 - RNA, 23 nt, Human
cccgaguagcugggauuacaggc

SEQ ID NO: 941267 - RNA, 24 nt, Human
cccgaguagcugggauuacaggca

SEQ ID NO: 941268 - RNA, 26 nt, Human
cccguggcucagucuugccccaaagc

SEQ ID NO: 941269 - RNA, 20 nt, Human
cccucugacucauucacucc

SEQ ID NO: 941270 - RNA, 21 nt, Human
cccuuguuccucuucaccucc

SEQ ID NO: 941271 - RNA, 22 nt, Human
cccuuguuccucuucaccuccu

SEQ ID NO: 941272 - RNA, 23 nt, Human
ccgaguagcugggauuacaggca

SEQ ID NO: 941273 - RNA, 24 nt, Human
ccgaguagcugggauuacaggcau

SEQ ID NO: 941274 - RNA, 23 nt, Human
ccgcaaccuccaccucccagguu

SEQ ID NO: 941275 - RNA, 24 nt, Human
ccgcaaccuccaccucccagguuc

SEQ ID NO: 941276 - RNA, 26 nt, Human
ccgccugccucagccucccaaagugc

SEQ ID NO: 941277 - RNA, 24 nt, Human
ccucccagguucaagcaauucucc

SEQ ID NO: 941278 - RNA, 18 nt, Human
ccuccuaccacccucuga

SEQ ID NO: 941279 - RNA, 21 nt, Human
ccucuucaccuccuaccaccc

SEQ ID NO: 941280 - RNA, 24 nt, Human
ccugccucagccucccaaagugcu

SEQ ID NO: 941281 - RNA, 18 nt, Human
ccugggccccagcagggc

SEQ ID NO: 941282 - RNA, 18 nt, Human
cgaccucaggugauccgc

SEQ ID NO: 941283 - RNA, 20 nt, Human
cguugcccaggcuggagugc

SEQ ID NO: 941284 - RNA, 24 nt, Human
cuaauucuguauuuuuaguagaga

SEQ ID NO: 941285 - RNA, 26 nt, Human
cuaauucuguauuuuuaguagagacg

SEQ ID NO: 941286 - RNA, 24 nt, Human
cucaccgcaaccuccaccucccag

SEQ ID NO: 941287 - RNA, 24 nt, Human
cucagccucccgaguagcugggau

SEQ ID NO: 941288 - RNA, 23 nt, Human
cucaggugauccgccugccucag

SEQ ID NO: 941289 - RNA, 20 nt, Human
cuccagguaauaaauaacag

SEQ ID NO: 941290 - RNA, 24 nt, Human
cuccauguuggucaggcuggucuc

SEQ ID NO: 941291 - RNA, 26 nt, Human
cucccgaccucaggugauccgccugc

SEQ ID NO: 941292 - RNA, 24 nt, Human
cugccucagccucccaaagugcug

SEQ ID NO: 941293 - RNA, 23 nt, Human
cugccucagccucccgaguagcu

SEQ ID NO: 941294 - RNA, 23 nt, Human
cuguauuuuuaguagagacgggg

SEQ ID NO: 941295 - RNA, 19 nt, Human
cuuuucguugcccaggcug

SEQ ID NO: 941296 - RNA, 19 nt, Human
cuuuucguugcccaggcug

SEQ ID NO: 941297 - RNA, 21 nt, Human
cuuuucguugcccaggcugga

SEQ ID NO: 941298 - RNA, 24 nt, Human
cuuuucguugcccaggcuggagug

SEQ ID NO: 941299 - RNA, 23 nt, Human
gaccucaggugauccgccugccu

SEQ ID NO: 941300 - RNA, 24 nt, Human
gaccucaggugauccgccugccuc

SEQ ID NO: 941301 - RNA, 23 nt, Human
gagacgggguuucuccauguugg

SEQ ID NO: 941302 - RNA, 24 nt, Human
gagacgggguuucuccauguuggu

SEQ ID NO: 941303 - RNA, 19 nt, Human
gagggagguagacuaaaaa

SEQ ID NO: 941304 - RNA, 24 nt, Human
gaguagcugggauuacaggcaugc

SEQ ID NO: 941305 - RNA, 18 nt, Human
gauuacaggcaugagcca

SEQ ID NO: 941306 - RNA, 20 nt, Human
gauuacaggcaugagccacc

SEQ ID NO: 941307 - RNA, 22 nt, Human
gauuacaggcaugagccaccgc

SEQ ID NO: 941308 - RNA, 18 nt, Human
gauuacaggcaugcgcca

SEQ ID NO: 941309 - RNA, 22 nt, Human
gccaagacagaggaagcagcag

SEQ ID NO: 941310 - RNA, 21 nt, Human
gccccaaagccaggccccacc

SEQ ID NO: 941311 - RNA, 20 nt, Human
gccucagccucccgaguagc

SEQ ID NO: 941312 - RNA, 20 nt, Human
gcgcccagcccacaugugca

SEQ ID NO: 941313 - RNA, 19 nt, Human
gcuggagugcaauggcgcg

SEQ ID NO: 941314 - RNA, 23 nt, Human
gcuggucucaaacucccgaccuc

SEQ ID NO: 941315 - RNA, 21 nt, Human
ggaagggggacagguggcaac

SEQ ID NO: 941316 - RNA, 22 nt, Human
ggauuacaggcaugagccaccg

SEQ ID NO: 941317 - RNA, 19 nt, Human
ggauuacaggcaugcgcca

SEQ ID NO: 941318 - RNA, 23 nt, Human
ggcagaagugagauucaaaccua

SEQ ID NO: 941319 - RNA, 18 nt, Human
ggcugguccuggagaaca

SEQ ID NO: 941320 - RNA, 21 nt, Human
gggacagguggcaacguagcu

SEQ ID NO: 941321 - RNA, 19 nt, Human
gggccagggcagguuagga

SEQ ID NO: 941322 - RNA, 26 nt, Human
gggcuccagagucccagaucuuagcu

SEQ ID NO: 941323 - RNA, 20 nt, Human
ggggccagggcagguuagga

SEQ ID NO: 941324 - RNA, 24 nt, Human
gggguagggugggugcuggacagg

SEQ ID NO: 941325 - RNA, 23 nt, Human
gggguuucuccauguuggucagg

SEQ ID NO: 941326 - RNA, 22 nt, Human
ggguuucuccauguuggucagg

SEQ ID NO: 941327 - RNA, 19 nt, Human
gguaauaaauaacagguac

SEQ ID NO: 941328 - RNA, 24 nt, Human
ggugauccgccugccucagccucc

SEQ ID NO: 941329 - RNA, 24 nt, Human
gguuaggacacggccucucagagc

SEQ ID NO: 941330 - RNA, 23 nt, Human
guagagacgggguuucuccaugu

SEQ ID NO: 941331 - RNA, 18 nt, Human
guagcugggauuacaggc

SEQ ID NO: 941332 - RNA, 20 nt, Human
guagcugggauuacaggcau

SEQ ID NO: 941333 - RNA, 21 nt, Human
guaguacuugccaugugccag

SEQ ID NO: 941334 - RNA, 19 nt, Human
gucucaggcuuugggagcu

SEQ ID NO: 941335 - RNA, 18 nt, Human
gugauccgccugccucag

SEQ ID NO: 941336 - RNA, 24 nt, Human
gugauccgccugccucagccuccc

SEQ ID NO: 941337 - RNA, 24 nt, Human
uaacugacuugcccaaagugacac

SEQ ID NO: 941338 - RNA, 24 nt, Human
uacaggcaugagccaccgcgccca

SEQ ID NO: 941339 - RNA, 24 nt, Human
uacaggcaugcgccaccacacuca

SEQ ID NO: 941340 - RNA, 18 nt, Human
uacuugccaugugccagg

SEQ ID NO: 941341 - RNA, 21 nt, Human
uagccaagacagaggaagcag

SEQ ID NO: 941342 - RNA, 20 nt, Human
uagcuccugaccuucagucu

SEQ ID NO: 941343 - RNA, 24 nt, Human
uaguagagacgggguuucuccaug

SEQ ID NO: 941344 - RNA, 22 nt, Human
uauguaguacuugccaugugcc

SEQ ID NO: 941345 - RNA, 20 nt, Human
ucaacuuuuauuuuagauuc

SEQ ID NO: 941346 - RNA, 24 nt, Human
ucaacuuuuauuuuagauucaggg

SEQ ID NO: 941347 - RNA, 24 nt, Human
ucaccgcaaccuccaccucccagg

SEQ ID NO: 941348 - RNA, 27 nt, Human
ucaccgcaaccuccaccucccagguuc

SEQ ID NO: 941349 - RNA, 23 nt, Human
ucaccuccuaccacccucugacu

SEQ ID NO: 941350 - RNA, 24 nt, Human
ucaccuccuaccacccucugacuc

SEQ ID NO: 941351 - RNA, 24 nt, Human
ucacuuuucguugcccaggcugga

SEQ ID NO: 941352 - RNA, 20 nt, Human
ucagccucccgaguagcugg

SEQ ID NO: 941353 - RNA, 22 nt, Human
ucaggugauccgccugccucag

SEQ ID NO: 941354 - RNA, 18 nt, Human
ucauccucaggaaaacuc

SEQ ID NO: 941355 - RNA, 24 nt, Human
ucccaaagugcugggauuacaggc

SEQ ID NO: 941356 - RNA, 21 nt, Human
ucccagguucaagcaauucuc

SEQ ID NO: 941357 - RNA, 24 nt, Human
ucccagguucaagcaauucuccug

SEQ ID NO: 941358 - RNA, 22 nt, Human
ucccccguggcucagucuugcc

SEQ ID NO: 941359 - RNA, 26 nt, Human
ucccccuucccccguggcucagucuu

SEQ ID NO: 941360 - RNA, 24 nt, Human
ucccgaguagcugggauuacaggc

SEQ ID NO: 941361 - RNA, 24 nt, Human
uccggggccagggcagguuaggac

SEQ ID NO: 941362 - RNA, 20 nt, Human
ucucaggcuuugggagcucu

SEQ ID NO: 941363 - RNA, 24 nt, Human
ucuccugccucagccucccgagua

SEQ ID NO: 941364 - RNA, 22 nt, Human
ucuugggauaugguuagggguu

SEQ ID NO: 941365 - RNA, 20 nt, Human
ugaaaaugacaagcugguuc

SEQ ID NO: 941366 - RNA, 19 nt, Human
ugacucauucacuccacua

SEQ ID NO: 941367 - RNA, 21 nt, Human
ugagccaccgcgcccagccca

SEQ ID NO: 941368 - RNA, 18 nt, Human
ugcccaggcuggagugca

SEQ ID NO: 941369 - RNA, 21 nt, Human
ugcccaggcuggagugcaaug

SEQ ID NO: 941370 - RNA, 21 nt, Human
ugcccaggcuggagugcaaug

SEQ ID NO: 941371 - RNA, 24 nt, Human
ugccucagccucccaaagugcugg

SEQ ID NO: 941372 - RNA, 24 nt, Human
ugccucagccucccgaguagcugg

SEQ ID NO: 941373 - RNA, 23 nt, Human
ugcuuuauggggguagggugggu

SEQ ID NO: 941374 - RNA, 23 nt, Human
uggagugcaauggcgcgaucucg

SEQ ID NO: 941375 - RNA, 24 nt, Human
uggagugcaauggcgcgaucucgg

SEQ ID NO: 941376 - RNA, 18 nt, Human
ugggauuacaggcaugag

SEQ ID NO: 941377 - RNA, 19 nt, Human
ugggauuacaggcaugagc

SEQ ID NO: 941378 - RNA, 21 nt, Human
ugggauuacaggcaugagcca

SEQ ID NO: 941379 - RNA, 22 nt, Human
ugggauuacaggcaugagccac

SEQ ID NO: 941380 - RNA, 23 nt, Human
ugggauuacaggcaugagccacc

SEQ ID NO: 941381 - RNA, 24 nt, Human
ugggauuacaggcaugagccaccg

SEQ ID NO: 941382 - RNA, 24 nt, Human
ugggauuacaggcaugagccaccg

SEQ ID NO: 941383 - RNA, 26 nt, Human
ugggauuacaggcaugagccaccgcg

SEQ ID NO: 941384 - RNA, 18 nt, Human
ugggauuacaggcaugcg

SEQ ID NO: 941385 - RNA, 21 nt, Human
ugggauuacaggcaugcgcca

SEQ ID NO: 941386 - RNA, 22 nt, Human
ugggauuacaggcaugcgccac

SEQ ID NO: 941387 - RNA, 24 nt, Human
ugggauuacaggcaugcgccacca

SEQ ID NO: 941388 - RNA, 21 nt, Human
uggucaggcuggucucaaacu

SEQ ID NO: 941389 - RNA, 19 nt, Human
uggucucaaacucccgacc

SEQ ID NO: 941390 - RNA, 18 nt, Human
uuaguagagacgggguuu

SEQ ID NO: 941391 - RNA, 24 nt, Human
uuaguagagacgggguuucuccau

SEQ ID NO: 941392 - RNA, 21 nt, Human
uucaagcaauucuccugccuc

SEQ ID NO: 941393 - RNA, 24 nt, Human
uucaagcaauucuccugccucagc

SEQ ID NO: 941394 - RNA, 23 nt, Human
uucagggaguacaugugcagggg

SEQ ID NO: 941395 - RNA, 22 nt, Human
uucccugaaaaugacaagcugg

SEQ ID NO: 941396 - RNA, 18 nt, Human
uucguugcccaggcugga

SEQ ID NO: 941397 - RNA, 22 nt, Human
uucguugcccaggcuggagugc

SEQ ID NO: 941398 - RNA, 24 nt, Human
uucguugcccaggcuggagugcaa

SEQ ID NO: 941399 - RNA, 19 nt, Human
uucuguauuuuuaguagag

SEQ ID NO: 941400 - RNA, 20 nt, Human
uucuguauuuuuaguagaga

SEQ ID NO: 941401 - RNA, 19 nt, Human
uuucacuuuucguugccca

SEQ ID NO: 941402 - RNA, 21 nt, Human
uuucuccauguuggucaggcu

SEQ ID NO: 941403 - RNA, 18 nt, Human
uuuucguugcccaggcug

SEQ ID NO: 941404 - RNA, 22 nt, Human
uuuuuaguagagacgggguuuc

SEQ ID NO: 941405 - RNA, 24 nt, Human
uuuuuguuuuuuugagacagaguu

SEQ ID NO: 941406 - RNA, 18 nt, Human
uuuuuuuuuuuuuuuuug

SEQ ID NO: 941407 - RNA, 19 nt, Human
uuuuuuuuuuuuuuuuugu

SEQ ID NO: 941408 - RNA, 20 nt, Human
acuguugcucuaaagaugag

SEQ ID NO: 941409 - RNA, 18 nt, Human
agaggaacgcuaaggcug

SEQ ID NO: 941410 - RNA, 19 nt, Human
ccgccgccgccgccgccca

SEQ ID NO: 941411 - RNA, 22 nt, Human
ccugugccgcacagucuucucc

SEQ ID NO: 941412 - RNA, 24 nt, Human
cgccacagccgcgggcagagacgg

SEQ ID NO: 941413 - RNA, 18 nt, Human
cgccgccacagccgcggg

SEQ ID NO: 941414 - RNA, 18 nt, Human
cuggcggaggaggcguca

SEQ ID NO: 941415 - RNA, 22 nt, Human
gagcggggaugggcggggaagc

SEQ ID NO: 941416 - RNA, 18 nt, Human
ggacccgaccgccgaccu

SEQ ID NO: 941417 - RNA, 21 nt, Human
ggagcggggaugggcggggaa

SEQ ID NO: 941418 - RNA, 20 nt, Human
ggauccgccggcgccgccac

SEQ ID NO: 941419 - RNA, 24 nt, Human
gggagcggggaugggcggggaagc

SEQ ID NO: 941420 - RNA, 18 nt, Human
ggggaugggcggggaagc

SEQ ID NO: 941421 - RNA, 20 nt, Human
uaaaaacccaaagugcaggc

SEQ ID NO: 941422 - RNA, 22 nt, Human
uaaggcuggauccgccggcgcc

SEQ ID NO: 941423 - RNA, 24 nt, Human
ucaaccgagccgccgccgccgccg

SEQ ID NO: 941424 - RNA, 22 nt, Human
uccgccggcgccgccacagccg

SEQ ID NO: 941425 - RNA, 24 nt, Human
uccgccggcgccgccacagccgcg

SEQ ID NO: 941426 - RNA, 20 nt, Human
uccugggcucccgcgggcuc

SEQ ID NO: 941427 - RNA, 24 nt, Human
ugacuucucuuucuucaguuaaga

SEQ ID NO: 941428 - RNA, 22 nt, Human
ugcuguuuccugugccgcacag

SEQ ID NO: 941429 - RNA, 18 nt, Human
uguugugacuucucuuuc

SEQ ID NO: 941430 - RNA, 21 nt, Human
uguuugcuguuuccugugccg

SEQ ID NO: 941431 - RNA, 22 nt, Human
uucuccagucuuccuuuuguug

SEQ ID NO: 941432 - RNA, 24 nt, Human
aaaauccucccaucuugauaacuc

SEQ ID NO: 941433 - RNA, 18 nt, Human
aaagcgaaggagcaggga

SEQ ID NO: 941434 - RNA, 24 nt, Human
aacucgguucccuccccccuuagg

SEQ ID NO: 941435 - RNA, 19 nt, Human
acccuacuccuaaagacag

SEQ ID NO: 941436 - RNA, 20 nt, Human
acuccccagcugcgucccgg

SEQ ID NO: 941437 - RNA, 21 nt, Human
acuccuaaagacagagagaaa

SEQ ID NO: 941438 - RNA, 21 nt, Human
acuccuaaagacagagagaaa

SEQ ID NO: 941439 - RNA, 21 nt, Human
agaaaagaaaaauccucccau

SEQ ID NO: 941440 - RNA, 23 nt, Human
agcgaaggagcagggaggggaga

SEQ ID NO: 941441 - RNA, 25 nt, Human
agcuagccaauaggaagcaacacaa

SEQ ID NO: 941442 - RNA, 22 nt, Human
aggaaaaagcgaaggagcaggg

SEQ ID NO: 941443 - RNA, 19 nt, Human
aggagcagggaggggagag

SEQ ID NO: 941444 - RNA, 20 nt, Human
aggcggaggaaggcuggggc

SEQ ID NO: 941445 - RNA, 26 nt, Human
aggcggaggcggaggaagggggaccc

SEQ ID NO: 941446 - RNA, 22 nt, Human
aggcggccggcggugcgggagc

SEQ ID NO: 941447 - RNA, 24 nt, Human
aucccacccuacuccuaaagacag

SEQ ID NO: 941448 - RNA, 25 nt, Human
auuuuaacaguuuuuggcaaucuua

SEQ ID NO: 941449 - RNA, 20 nt, Human
cagccucccuccccauccca

SEQ ID NO: 941450 - RNA, 22 nt, Human
ccacccuacuccuaaagacaga

SEQ ID NO: 941451 - RNA, 19 nt, Human
ccccaucccacccuacucc

SEQ ID NO: 941452 - RNA, 22 nt, Human
cccggcugcggcugcguguccg

SEQ ID NO: 941453 - RNA, 21 nt, Human
cccggucccggcugcggcugc

SEQ ID NO: 941454 - RNA, 25 nt, Human
cccuccccaucccacccuacuccua

SEQ ID NO: 941455 - RNA, 20 nt, Human
ccggggccgggagaggagga

SEQ ID NO: 941456 - RNA, 21 nt, Human
cgcgcucuuuacgcccgaggc

SEQ ID NO: 941457 - RNA, 25 nt, Human
cugaugcccagccucccuccccauc

SEQ ID NO: 941458 - RNA, 21 nt, Human
cuugauaacucgguucccucc

SEQ ID NO: 941459 - RNA, 21 nt, Human
gaaaaagcgaaggagcaggga

SEQ ID NO: 941460 - RNA, 19 nt, Human
gccucccuccccaucccac

SEQ ID NO: 941461 - RNA, 20 nt, Human
gccucccuccccaucccacc

SEQ ID NO: 941462 - RNA, 19 nt, Human
gcugcugcggucggcacug

SEQ ID NO: 941463 - RNA, 21 nt, Human
ggagagaggcgcgggcggagc

SEQ ID NO: 941464 - RNA, 20 nt, Human
ggagaguaggagggcgaggg

SEQ ID NO: 941465 - RNA, 18 nt, Human
ggagcagggaggggagag

SEQ ID NO: 941466 - RNA, 19 nt, Human
ggaggaaggcuggggcugg

SEQ ID NO: 941467 - RNA, 20 nt, Human
ggaggagagagaggcggagg

SEQ ID NO: 941468 - RNA, 22 nt, Human
ggaggagagagaggcggaggcg

SEQ ID NO: 941469 - RNA, 25 nt, Human
ggaggaggaggagagagaggcggaa

SEQ ID NO: 941470 - RNA, 20 nt, Human
gggaagccacaggucggcuc

SEQ ID NO: 941471 - RNA, 23 nt, Human
gggcugcugcggucggcacuggc

SEQ ID NO: 941472 - RNA, 20 nt, Human
ggggccgggagaggaggagg

SEQ ID NO: 941473 - RNA, 19 nt, Human
uaaagacagagagaaaaga

SEQ ID NO: 941474 - RNA, 22 nt, Human
uacaauauauuacaaccaaacc

SEQ ID NO: 941475 - RNA, 19 nt, Human
uaggagggcgaggggaggc

SEQ ID NO: 941476 - RNA, 21 nt, Human
uccccagcugcgucccggucc

SEQ ID NO: 941477 - RNA, 20 nt, Human
ucccuccccaucccacccua

SEQ ID NO: 941478 - RNA, 21 nt, Human
ucccugacuccccagcugcgu

SEQ ID NO: 941479 - RNA, 20 nt, Human
ugacuccccagcugcguccc

SEQ ID NO: 941480 - RNA, 20 nt, Human
ugcgcgcgucccugacuccc

SEQ ID NO: 941481 - RNA, 21 nt, Human
ugcggucggcacuggcugcgg

SEQ ID NO: 941482 - RNA, 18 nt, Human
uggcagccggggccggga

SEQ ID NO: 941483 - RNA, 19 nt, Human
uggcagccggggccgggag

SEQ ID NO: 941484 - RNA, 20 nt, Human
uggcugcgcgcgucccugac

SEQ ID NO: 941485 - RNA, 23 nt, Human
ugucaugggaagccacaggucgg

SEQ ID NO: 941486 - RNA, 24 nt, Human
ugugaucccugaugcccagccucc

SEQ ID NO: 941487 - RNA, 26 nt, Human
aaaaaaagcaaagaaauaucgccaaa

SEQ ID NO: 941488 - RNA, 24 nt, Human
aaaaaagcaaagaaauaucgccaa

SEQ ID NO: 941489 - RNA, 23 nt, Human
aaaaugcuaaaaaauaaggcaua

SEQ ID NO: 941490 - RNA, 22 nt, Human
aaagaaaacccaagcaaaaucu

SEQ ID NO: 941491 - RNA, 21 nt, Human
aaagaaauaucgccaaagaaa

SEQ ID NO: 941492 - RNA, 19 nt, Human
aaauaaugaagacgcugac

SEQ ID NO: 941493 - RNA, 20 nt, Human
aacauuaaaaaagaaaaaaa

SEQ ID NO: 941494 - RNA, 22 nt, Human
aagcaaagaaauaucgccaaag

SEQ ID NO: 941495 - RNA, 26 nt, Human
aagcaaagaaauaucgccaaagaaaa

SEQ ID NO: 941496 - RNA, 18 nt, Human
aagggagaggugagaaga

SEQ ID NO: 941497 - RNA, 22 nt, Human
aagugggaaguggaggaggaag

SEQ ID NO: 941498 - RNA, 25 nt, Human
aaguuuucuuccugcaaacaauguu

SEQ ID NO: 941499 - RNA, 24 nt, Human
aauaagugggaaguggaggaggaa

SEQ ID NO: 941500 - RNA, 20 nt, Human
aauuccagugggcuuggucg

SEQ ID NO: 941501 - RNA, 22 nt, Human
acaucuaaaaauggaaaguugu

SEQ ID NO: 941502 - RNA, 22 nt, Human
accuuaaaaaaugcuaaaaaau

SEQ ID NO: 941503 - RNA, 23 nt, Human
acuuuuguugucuuuucaucuuu

SEQ ID NO: 941504 - RNA, 21 nt, Human
agaaagaaaacccaagcaaaa

SEQ ID NO: 941505 - RNA, 22 nt, Human
agaaguaaauacuaaaaaccug

SEQ ID NO: 941506 - RNA, 24 nt, Human
agaaguaaauacuaaaaaccuguu

SEQ ID NO: 941507 - RNA, 18 nt, Human
agacggaggguggcggag

SEQ ID NO: 941508 - RNA, 23 nt, Human
agaggaaagagaggggacuaagg

SEQ ID NO: 941509 - RNA, 25 nt, Human
agcaaagaaauaucgccaaagaaaa

SEQ ID NO: 941510 - RNA, 22 nt, Human
agcccagagaccucccggaccg

SEQ ID NO: 941511 - RNA, 18 nt, Human
agccgccgccgccgcagc

SEQ ID NO: 941512 - RNA, 21 nt, Human
agcucuaaauagauucaacga

SEQ ID NO: 941513 - RNA, 22 nt, Human
aggaagaggaaagagaggggac

SEQ ID NO: 941514 - RNA, 21 nt, Human
aggaaguggggggaggcuagg

SEQ ID NO: 941515 - RNA, 21 nt, Human
aggagcccggcuggagaagcc

SEQ ID NO: 941516 - RNA, 23 nt, Human
aggaggcuuuucucauucaagcc

SEQ ID NO: 941517 - RNA, 21 nt, Human
agggaacgggguaagggagag

SEQ ID NO: 941518 - RNA, 18 nt, Human
agggagaggugagaagag

SEQ ID NO: 941519 - RNA, 21 nt, Human
aucuaaaaauggaaaguuguu

SEQ ID NO: 941520 - RNA, 23 nt, Human
auuaucuuaccaugaagaaguaa

SEQ ID NO: 941521 - RNA, 19 nt, Human
auuuuuuuaagaaagaaaa

SEQ ID NO: 941522 - RNA, 18 nt, Human
caaaaccagccugaaaga

SEQ ID NO: 941523 - RNA, 22 nt, Human
caaaaccagccugaaagaccca

SEQ ID NO: 941524 - RNA, 23 nt, Human
caaaccaaaaccagccugaaaga

SEQ ID NO: 941525 - RNA, 22 nt, Human
caaauguccugagcaaaguuuu

SEQ ID NO: 941526 - RNA, 21 nt, Human
caaccuuaaaaaaugcuaaaa

SEQ ID NO: 941527 - RNA, 20 nt, Human
caagcaaaaucuauugcuua

SEQ ID NO: 941528 - RNA, 18 nt, Human
cacuuuauaacuccaucc

SEQ ID NO: 941529 - RNA, 20 nt, Human
cacuuuauaacuccauccca

SEQ ID NO: 941530 - RNA, 21 nt, Human
cagaguagccgagcacggagc

SEQ ID NO: 941531 - RNA, 21 nt, Human
cagccgccgccgccgcagccc

SEQ ID NO: 941532 - RNA, 19 nt, Human
cagccgccgccgccucccg

SEQ ID NO: 941533 - RNA, 20 nt, Human
cagccgccgccgccucccgg

SEQ ID NO: 941534 - RNA, 18 nt, Human
cagccugaaagacccaac

SEQ ID NO: 941535 - RNA, 23 nt, Human
caugaagaaguaaauacuaaaaa

SEQ ID NO: 941536 - RNA, 22 nt, Human
ccaaccuuaaaaaaugcuaaaa

SEQ ID NO: 941537 - RNA, 21 nt, Human
ccacagacuggcagccgccgc

SEQ ID NO: 941538 - RNA, 22 nt, Human
ccaugaagaaguaaauacuaaa

SEQ ID NO: 941539 - RNA, 20 nt, Human
cccaaccugcugagugcccc

SEQ ID NO: 941540 - RNA, 21 nt, Human
cccaaccuuaaaaaaugcuaa

SEQ ID NO: 941541 - RNA, 26 nt, Human
cccgcggcugggaagggaaggagggc

SEQ ID NO: 941542 - RNA, 18 nt, Human
ccgccgccgccucccggc

SEQ ID NO: 941543 - RNA, 21 nt, Human
ccgucuuccgucuucaauuuu

SEQ ID NO: 941544 - RNA, 25 nt, Human
ccucagcccagagaccucccggacc

SEQ ID NO: 941545 - RNA, 26 nt, Human
ccucccggaccgaugcuccuccagcc

SEQ ID NO: 941546 - RNA, 24 nt, Human
cgagcggaagggcgggcgccgagc

SEQ ID NO: 941547 - RNA, 23 nt, Human
cggcagaguagccgagcacggag

SEQ ID NO: 941548 - RNA, 21 nt, Human
cggcucagagaccugcgggag

SEQ ID NO: 941549 - RNA, 22 nt, Human
cucaaauguccugagcaaaguu

SEQ ID NO: 941550 - RNA, 21 nt, Human
cucccagagucuaauaaagca

SEQ ID NO: 941551 - RNA, 19 nt, Human
cugcugcuuugccaucucu

SEQ ID NO: 941552 - RNA, 24 nt, Human
cuucccaaggcuagggccguuccc

SEQ ID NO: 941553 - RNA, 24 nt, Human
cuugguccacagccuacagcaagu

SEQ ID NO: 941554 - RNA, 21 nt, Human
cuugguuacuuuucucuccca

SEQ ID NO: 941555 - RNA, 21 nt, Human
gaaacaucuaaaaauggaaag

SEQ ID NO: 941556 - RNA, 23 nt, Human
gaaauacauauugccauggugaa

SEQ ID NO: 941557 - RNA, 24 nt, Human
gaccauuuguguuagucagaaaua

SEQ ID NO: 941558 - RNA, 18 nt, Human
gacugcugcuuugccauc

SEQ ID NO: 941559 - RNA, 20 nt, Human
gagagagacggaggguggcg

SEQ ID NO: 941560 - RNA, 18 nt, Human
gaggaaguggggggaggc

SEQ ID NO: 941561 - RNA, 22 nt, Human
gaggagcccggcuggagaagcc

SEQ ID NO: 941562 - RNA, 18 nt, Human
gcccggcuggagaagccc

SEQ ID NO: 941563 - RNA, 19 nt, Human
gccgagcucucugugcccc

SEQ ID NO: 941564 - RNA, 18 nt, Human
gccgccucagcccagaga

SEQ ID NO: 941565 - RNA, 18 nt, Human
gccggcugacgaaaaagg

SEQ ID NO: 941566 - RNA, 19 nt, Human
gcuuacacagcagucucac

SEQ ID NO: 941567 - RNA, 22 nt, Human
gcuuuggcuucccaaggcuagg

SEQ ID NO: 941568 - RNA, 20 nt, Human
ggaagggaaggagggcggug

SEQ ID NO: 941569 - RNA, 21 nt, Human
ggaaguggaggaggaagagga

SEQ ID NO: 941570 - RNA, 19 nt, Human
ggagcugucgccgccucag

SEQ ID NO: 941571 - RNA, 24 nt, Human
ggaggaggaagaggaaagagaggg

SEQ ID NO: 941572 - RNA, 19 nt, Human
ggcagaguagccgagcacg

SEQ ID NO: 941573 - RNA, 19 nt, Human
gggaaggagggcggugucg

SEQ ID NO: 941574 - RNA, 19 nt, Human
gggaagggaaggagggcgg

SEQ ID NO: 941575 - RNA, 22 nt, Human
gggaaguggaggaggaagagga

SEQ ID NO: 941576 - RNA, 22 nt, Human
gguucuuuugcugguaagcuuu

SEQ ID NO: 941577 - RNA, 25 nt, Human
gugaagcucuaaauagauucaacga

SEQ ID NO: 941578 - RNA, 23 nt, Human
guggaggagcccggcuggagaag

SEQ ID NO: 941579 - RNA, 18 nt, Human
uaaaaaaaaaaagcaaag

SEQ ID NO: 941580 - RNA, 24 nt, Human
uaaaaaagaaaaaaauguuaagaa

SEQ ID NO: 941581 - RNA, 25 nt, Human
uacacagcagucucacaauaacuag

SEQ ID NO: 941582 - RNA, 22 nt, Human
uaccugaucugccucuaggggc

SEQ ID NO: 941583 - RNA, 19 nt, Human
uacuuuuuaaacaaacaga

SEQ ID NO: 941584 - RNA, 24 nt, Human
uaguaaagauuaaaagggcacagu

SEQ ID NO: 941585 - RNA, 19 nt, Human
uauccgggaucucucacgc

SEQ ID NO: 941586 - RNA, 24 nt, Human
ucacgcgcggcgcuucggcuuccc

SEQ ID NO: 941587 - RNA, 20 nt, Human
ucagcccagagaccucccgg

SEQ ID NO: 941588 - RNA, 21 nt, Human
uccagccggcugacgaaaaag

SEQ ID NO: 941589 - RNA, 19 nt, Human
ucccagagucuaauaaagc

SEQ ID NO: 941590 - RNA, 18 nt, Human
uccgcacccggcucagag

SEQ ID NO: 941591 - RNA, 25 nt, Human
uccuuccgcacccggcucagagacc

SEQ ID NO: 941592 - RNA, 21 nt, Human
ucucacgcgcggcgcuucggc

SEQ ID NO: 941593 - RNA, 18 nt, Human
ucuccuuucccucuacua

SEQ ID NO: 941594 - RNA, 18 nt, Human
ucucuuguuuguuuugag

SEQ ID NO: 941595 - RNA, 20 nt, Human
ucugaagcacuugguuacuu

SEQ ID NO: 941596 - RNA, 20 nt, Human
ugcugcuuugccaucucuug

SEQ ID NO: 941597 - RNA, 25 nt, Human
uggaaaguuguuaaaaaaaaaaagc

SEQ ID NO: 941598 - RNA, 22 nt, Human
uggaacuagaggagcugucgcc

SEQ ID NO: 941599 - RNA, 21 nt, Human
uggcagccgccgccgccuccc

SEQ ID NO: 941600 - RNA, 18 nt, Human
uggcggagcccaaaccgc

SEQ ID NO: 941601 - RNA, 19 nt, Human
ugggaagggaaggagggcg

SEQ ID NO: 941602 - RNA, 20 nt, Human
ugggaaguggaggaggaaga

SEQ ID NO: 941603 - RNA, 21 nt, Human
ugggcuuggucggacugcugc

SEQ ID NO: 941604 - RNA, 24 nt, Human
uguguuaaguaacguuuacaacaa

SEQ ID NO: 941605 - RNA, 26 nt, Human
uguuaaaaaaaaaaagcaaagaaaua

SEQ ID NO: 941606 - RNA, 22 nt, Human
uuaaaaaaaaaaagcaaagaaa

SEQ ID NO: 941607 - RNA, 30 nt, Human
uuccccagccgccgccgccgcagcccaacu

SEQ ID NO: 941608 - RNA, 19 nt, Human
uucugaagcacuugguuac

SEQ ID NO: 941609 - RNA, 21 nt, Human
uugaagaugcaccaggaggcu

SEQ ID NO: 941610 - RNA, 21 nt, Human
uugcugguaagcuuuagauau

SEQ ID NO: 941611 - RNA, 22 nt, Human
uuugaagaugcaccaggaggcu

SEQ ID NO: 941612 - RNA, 18 nt, Human
uuugaccucaaauguccu

SEQ ID NO: 941613 - RNA, 22 nt, Human
uuuuaaaaccuugggagaaaua

SEQ ID NO: 941614 - RNA, 23 nt, Human
uuuuaagggaaauacauauugcc

SEQ ID NO: 941615 - RNA, 20 nt, Human
agaugauacacugcugcaaa

SEQ ID NO: 941616 - RNA, 23 nt, Human
ccaagaguggaugugucccuucu

SEQ ID NO: 941617 - RNA, 24 nt, Human
cccaccaacuaaugaagcagcaac

SEQ ID NO: 941618 - RNA, 21 nt, Human
cgcuaauucucuucuccaucc

SEQ ID NO: 941619 - RNA, 22 nt, Human
guuagaaugcaucaacaaucua

SEQ ID NO: 941620 - RNA, 19 nt, Human
uaaggugccauuauugagu

SEQ ID NO: 941621 - RNA, 18 nt, Human
uaguagaugauacacugc

SEQ ID NO: 941622 - RNA, 18 nt, Human
uccaagaguggauguguc

SEQ ID NO: 941623 - RNA, 19 nt, Human
uccaagaguggaugugucc

SEQ ID NO: 941624 - RNA, 18 nt, Human
ugauacacugcugcaaac

SEQ ID NO: 941625 - RNA, 19 nt, Human
ugugucccuucucccacca

SEQ ID NO: 941626 - RNA, 22 nt, Human
uuaaucucaaaagcuucaagaa

SEQ ID NO: 941627 - RNA, 19 nt, Human
uuaguagaugauacacugc

SEQ ID NO: 941628 - RNA, 24 nt, Human
uuuauaaauguaaggugccauuau

SEQ ID NO: 941629 - RNA, 18 nt, Human
uuucauuuauuagcucug

SEQ ID NO: 941630 - RNA, 20 nt, Human
aaggaaacaggagagggccg

SEQ ID NO: 941631 - RNA, 19 nt, Human
aauauuuuccuuuuuuucc

SEQ ID NO: 941632 - RNA, 23 nt, Human
aggaaacaggagagggccgcggg

SEQ ID NO: 941633 - RNA, 22 nt, Human
aggggcacaguuauucuuacac

SEQ ID NO: 941634 - RNA, 20 nt, Human
caccagaagggaaggaguuu

SEQ ID NO: 941635 - RNA, 18 nt, Human
caccgucacugcuccugc

SEQ ID NO: 941636 - RNA, 22 nt, Human
caguggguuuuugucacaauuu

SEQ ID NO: 941637 - RNA, 19 nt, Human
cugcuccugcugccuccuc

SEQ ID NO: 941638 - RNA, 18 nt, Human
gcgugccgggaauccggc

SEQ ID NO: 941639 - RNA, 19 nt, Human
ggaaacaggagagggccgc

SEQ ID NO: 941640 - RNA, 18 nt, Human
ggaaggaaacaggagagg

SEQ ID NO: 941641 - RNA, 25 nt, Human
ggaguuuguaaccaagagaacccag

SEQ ID NO: 941642 - RNA, 23 nt, Human
uaaccaagagaacccaguggguu

SEQ ID NO: 941643 - RNA, 21 nt, Human
uagggugccaacacaauggga

SEQ ID NO: 941644 - RNA, 21 nt, Human
ucaaucuacacuucaauuuga

SEQ ID NO: 941645 - RNA, 20 nt, Human
ucacugcuccugcugccucc

SEQ ID NO: 941646 - RNA, 21 nt, Human
ucuacacuucaauuugaaagg

SEQ ID NO: 941647 - RNA, 18 nt, Human
ucuuucuuuuuagggugc

SEQ ID NO: 941648 - RNA, 27 nt, Human
ugcuccugcugccuccucguccucaau

SEQ ID NO: 941649 - RNA, 22 nt, Human
ugggaaggaaacaggagagggc

SEQ ID NO: 941650 - RNA, 18 nt, Human
uggguuuuugucacaauu

SEQ ID NO: 941651 - RNA, 22 nt, Human
ugugcacucuuagaggggcaca

SEQ ID NO: 941652 - RNA, 19 nt, Human
ugugugcgugugugugcac

SEQ ID NO: 941653 - RNA, 21 nt, Human
ugugugcgugugugugcacuc

SEQ ID NO: 941654 - RNA, 20 nt, Human
uuuuuuccuguuguuguuuu

SEQ ID NO: 941655 - RNA, 29 nt, Human
cagcaaaucucauccccacguggcaguuc

SEQ ID NO: 941656 - RNA, 20 nt, Human
cuguccccaaaguccagagc

SEQ ID NO: 941657 - RNA, 22 nt, Human
gcuggcuucacgugggcgggac

SEQ ID NO: 941658 - RNA, 20 nt, Human
guccagagcucaguuaggcu

SEQ ID NO: 941659 - RNA, 20 nt, Human
uaauaaaaauguggguuuua

SEQ ID NO: 941660 - RNA, 20 nt, Human
uccccgcagcagccgccgcu

SEQ ID NO: 941661 - RNA, 22 nt, Human
ugacagcuguccccaaagucca

SEQ ID NO: 941662 - RNA, 19 nt, Human
aggcaugggcagggguggg

SEQ ID NO: 941663 - RNA, 18 nt, Human
aggccggcaggucccaga

SEQ ID NO: 941664 - RNA, 19 nt, Human
cacccauaacagcuuuauu

SEQ ID NO: 941665 - RNA, 24 nt, Human
caggacaggcaugggcaggggugg

SEQ ID NO: 941666 - RNA, 24 nt, Human
cgugcaggacaggcaugggcaggg

SEQ ID NO: 941667 - RNA, 23 nt, Human
cugaaugacacccauaacagcuu

SEQ ID NO: 941668 - RNA, 21 nt, Human
gacaggcaugggcaggggugg

SEQ ID NO: 941669 - RNA, 22 nt, Human
gacggcgcugugggcccgagca

SEQ ID NO: 941670 - RNA, 22 nt, Human
ggacaggcaugggcaggggugg

SEQ ID NO: 941671 - RNA, 22 nt, Human
ggcgcugugggcccgagcagca

SEQ ID NO: 941672 - RNA, 19 nt, Human
gggcagggguggggcagcu

SEQ ID NO: 941673 - RNA, 20 nt, Human
ggggcagcuggcccgggagg

SEQ ID NO: 941674 - RNA, 22 nt, Human
gggguggggcagcuggcccggg

SEQ ID NO: 941675 - RNA, 19 nt, Human
uggcccgggaggccggcag

SEQ ID NO: 941676 - RNA, 24 nt, Human
uuuuuuuuuuccugaaugacaccc

SEQ ID NO: 941677 - RNA, 18 nt, Human
uuuuuuuuuuuuuuccug

SEQ ID NO: 941678 - RNA, 21 nt, Human
aaaagacaucagugguucuua

SEQ ID NO: 941679 - RNA, 20 nt, Human
aaaaucacuugggcccaggu

SEQ ID NO: 941680 - RNA, 27 nt, Human
aaaaugccaugcacagcagacaccauu

SEQ ID NO: 941681 - RNA, 20 nt, Human
aaaauuauuccaaacugugg

SEQ ID NO: 941682 - RNA, 18 nt, Human
aaacaccucucaggccac

SEQ ID NO: 941683 - RNA, 19 nt, Human
aaacagcaauuuuaugugg

SEQ ID NO: 941684 - RNA, 23 nt, Human
aaaugaaucuguaucaguaacuc

SEQ ID NO: 941685 - RNA, 20 nt, Human
aacaaacaccucucaggcca

SEQ ID NO: 941686 - RNA, 22 nt, Human
aaccaaagaagggcaaguuuug

SEQ ID NO: 941687 - RNA, 25 nt, Human
aaccaaagaagggcaaguuuuguac

SEQ ID NO: 941688 - RNA, 20 nt, Human
aagaagaaucaucaauggua

SEQ ID NO: 941689 - RNA, 25 nt, Human
aagaagggcaaguuuuguacuaaaa

SEQ ID NO: 941690 - RNA, 19 nt, Human
aagagggacggauugugaa

SEQ ID NO: 941691 - RNA, 18 nt, Human
aagauacuggaaaagcaa

SEQ ID NO: 941692 - RNA, 24 nt, Human
aagcacauagaaaauuaaaccaaa

SEQ ID NO: 941693 - RNA, 23 nt, Human
acaccuaaaagcacauagaaaau

SEQ ID NO: 941694 - RNA, 22 nt, Human
accaugcacaggguggccccac

SEQ ID NO: 941695 - RNA, 18 nt, Human
agacaaaauuugcacaca

SEQ ID NO: 941696 - RNA, 18 nt, Human
agcugacucagugaacug

SEQ ID NO: 941697 - RNA, 22 nt, Human
agcugccugugugaagugacgu

SEQ ID NO: 941698 - RNA, 18 nt, Human
aggcccauucauucccgc

SEQ ID NO: 941699 - RNA, 22 nt, Human
aggguggccccacaacaaacac

SEQ ID NO: 941700 - RNA, 19 nt, Human
auaaaauggugcuaaaggc

SEQ ID NO: 941701 - RNA, 20 nt, Human
augcaguuuauugaacaaac

SEQ ID NO: 941702 - RNA, 18 nt, Human
caaauaaaauggugcuaa

SEQ ID NO: 941703 - RNA, 23 nt, Human
caagagaaccuuucucagcugcc

SEQ ID NO: 941704 - RNA, 18 nt, Human
cacaacaaacaccucuca

SEQ ID NO: 941705 - RNA, 22 nt, Human
caccauauuaaccaccaggagg

SEQ ID NO: 941706 - RNA, 22 nt, Human
cacugugcauugagugcaagau

SEQ ID NO: 941707 - RNA, 21 nt, Human
cagcuuuugugggaaguugau

SEQ ID NO: 941708 - RNA, 22 nt, Human
cauucuagaucccaaucaguug

SEQ ID NO: 941709 - RNA, 18 nt, Human
ccaaacuguggaagagug

SEQ ID NO: 941710 - RNA, 19 nt, Human
ccaccgcucgcccgcuucg

SEQ ID NO: 941711 - RNA, 21 nt, Human
cccacaacaaacaccucucag

SEQ ID NO: 941712 - RNA, 21 nt, Human
ccccacaacaaacaccucuca

SEQ ID NO: 941713 - RNA, 24 nt, Human
ccuugcaucucacagcugagggac

SEQ ID NO: 941714 - RNA, 19 nt, Human
cgacuacauuaaacagcaa

SEQ ID NO: 941715 - RNA, 20 nt, Human
cucaccaucagaggcccauu

SEQ ID NO: 941716 - RNA, 18 nt, Human
cucuauauaaggcaagag

SEQ ID NO: 941717 - RNA, 27 nt, Human
gaccccgucaccucucaccaucagagg

SEQ ID NO: 941718 - RNA, 21 nt, Human
gacuauauagaaccucaaagu

SEQ ID NO: 941719 - RNA, 21 nt, Human
ggaaaaacgaaacaaucccca

SEQ ID NO: 941720 - RNA, 18 nt, Human
ggaugucacugaauggaa

SEQ ID NO: 941721 - RNA, 22 nt, Human
guacuaaaaucacuugggccca

SEQ ID NO: 941722 - RNA, 19 nt, Human
guaguaagggcuaccuaca

SEQ ID NO: 941723 - RNA, 18 nt, Human
gucagcuuuugugggaag

SEQ ID NO: 941724 - RNA, 19 nt, Human
uaaaauggugcuaaaggca

SEQ ID NO: 941725 - RNA, 29 nt, Human
uaagagacccaaaaaagucaggggagucc

SEQ ID NO: 941726 - RNA, 21 nt, Human
uaagcuagaagcauaguuuaa

SEQ ID NO: 941727 - RNA, 23 nt, Human
uaccaaaaccacagugaaugcca

SEQ ID NO: 941728 - RNA, 26 nt, Human
uaccagaagaauucgaccaauaugag

SEQ ID NO: 941729 - RNA, 24 nt, Human
uagaagguuccacugagauaagaa

SEQ ID NO: 941730 - RNA, 25 nt, Human
uaggaaaaacgaaacaauccccaua

SEQ ID NO: 941731 - RNA, 22 nt, Human
uaggcucaaauaaauacucucc

SEQ ID NO: 941732 - RNA, 24 nt, Human
uauaaaauuauuccaaacugugga

SEQ ID NO: 941733 - RNA, 20 nt, Human
uauguaagagacccaaaaag

SEQ ID NO: 941734 - RNA, 19 nt, Human
uauuauggaggcugcaagg

SEQ ID NO: 941735 - RNA, 18 nt, Human
ucacacugugcauugagu

SEQ ID NO: 941736 - RNA, 27 nt, Human
ucagaaaacaugucuagacguuugcaa

SEQ ID NO: 941737 - RNA, 21 nt, Human
ucauuuguuuaauccuuuaaa

SEQ ID NO: 941738 - RNA, 26 nt, Human
ucucacagcugagggaccccgucacc

SEQ ID NO: 941739 - RNA, 27 nt, Human
ucucaggccacuaauaugaauaguccc

SEQ ID NO: 941740 - RNA, 21 nt, Human
ucugcaauuuugggcuccauc

SEQ ID NO: 941741 - RNA, 23 nt, Human
ugaagaacucaauagagauuugc

SEQ ID NO: 941742 - RNA, 23 nt, Human
ugacuauauagaaccucaaaguu

SEQ ID NO: 941743 - RNA, 23 nt, Human
ugacuuaagagaaauagaagccu

SEQ ID NO: 941744 - RNA, 21 nt, Human
ugauaaagaauuccguuccaa

SEQ ID NO: 941745 - RNA, 22 nt, Human
ugauaguaacuuaucaccuucu

SEQ ID NO: 941746 - RNA, 20 nt, Human
ugcccuggggccucaugcac

SEQ ID NO: 941747 - RNA, 19 nt, Human
ugcucugacauuuauaagc

SEQ ID NO: 941748 - RNA, 19 nt, Human
uggccccacaacaaacacc

SEQ ID NO: 941749 - RNA, 22 nt, Human
uguacuaaaaucacuugggccc

SEQ ID NO: 941750 - RNA, 22 nt, Human
uuaaaaaaugcucugacauuua

SEQ ID NO: 941751 - RNA, 18 nt, Human
uuaaagucuuccaucgac

SEQ ID NO: 941752 - RNA, 23 nt, Human
uucauuuguuuaauccuuuaaaa

SEQ ID NO: 941753 - RNA, 22 nt, Human
uuccaaaggaauuaagaccgca

SEQ ID NO: 941754 - RNA, 19 nt, Human
uuccacugagauaagaaaa

SEQ ID NO: 941755 - RNA, 27 nt, Human
uuucacagcucuagcgggggugcuacu

SEQ ID NO: 941756 - RNA, 22 nt, Human
uuuucuugaacauacacuuugu

SEQ ID NO: 941757 - RNA, 18 nt, Human
uuuuuuuuuuggaagagg

SEQ ID NO: 941758 - RNA, 21 nt, Human
aacagucaaugacugcagaac

SEQ ID NO: 941759 - RNA, 18 nt, Human
aacuguucaguguuucuu

SEQ ID NO: 941760 - RNA, 21 nt, Human
aagcuuguaauggaagugaaa

SEQ ID NO: 941761 - RNA, 24 nt, Human
aaugguaggaaguaaggcaaauac

SEQ ID NO: 941762 - RNA, 25 nt, Human
acaggagaccccugauuaacaacaa

SEQ ID NO: 941763 - RNA, 23 nt, Human
acccagguuggagugcaguggug

SEQ ID NO: 941764 - RNA, 24 nt, Human
agcgauucuccugccucagccucc

SEQ ID NO: 941765 - RNA, 20 nt, Human
aggaaagugguuguagagug

SEQ ID NO: 941766 - RNA, 25 nt, Human
agguuggagugcaguggugcgaucu

SEQ ID NO: 941767 - RNA, 20 nt, Human
agugcaguggugcgaucucg

SEQ ID NO: 941768 - RNA, 23 nt, Human
agugcaguggugcgaucucggcu

SEQ ID NO: 941769 - RNA, 24 nt, Human
agugcaguggugcgaucucggcuc

SEQ ID NO: 941770 - RNA, 21 nt, Human
augcugcuuuaaggaaguaag

SEQ ID NO: 941771 - RNA, 25 nt, Human
auggaacccauggauauggagggcu

SEQ ID NO: 941772 - RNA, 21 nt, Human
caaaaaaccacuauuaaaaug

SEQ ID NO: 941773 - RNA, 19 nt, Human
caaaagaucacaggaacuu

SEQ ID NO: 941774 - RNA, 20 nt, Human
caaccucugcuucccggguu

SEQ ID NO: 941775 - RNA, 22 nt, Human
caagcgauucuccugccucagc

SEQ ID NO: 941776 - RNA, 23 nt, Human
caaugacugcagaacuuucuggc

SEQ ID NO: 941777 - RNA, 22 nt, Human
cacacaccaagcacaggagacc

SEQ ID NO: 941778 - RNA, 24 nt, Human
cacccagguuggagugcaguggug

SEQ ID NO: 941779 - RNA, 23 nt, Human
cacugcaaccucugcuucccggg

SEQ ID NO: 941780 - RNA, 19 nt, Human
cagcagcuccuuccaggcg

SEQ ID NO: 941781 - RNA, 18 nt, Human
ccccacacaccaagcaca

SEQ ID NO: 941782 - RNA, 19 nt, Human
ccccacacaccaagcacag

SEQ ID NO: 941783 - RNA, 20 nt, Human
cccggguucaagcgauucuc

SEQ ID NO: 941784 - RNA, 23 nt, Human
cccggguucaagcgauucuccug

SEQ ID NO: 941785 - RNA, 24 nt, Human
cucacugcaaccucugcuucccgg

SEQ ID NO: 941786 - RNA, 24 nt, Human
cugcaaccucugcuucccggguuc

SEQ ID NO: 941787 - RNA, 20 nt, Human
cugccucagccuccccagua

SEQ ID NO: 941788 - RNA, 24 nt, Human
cuucccggguucaagcgauucucc

SEQ ID NO: 941789 - RNA, 24 nt, Human
cuugcucugucacccagguuggag

SEQ ID NO: 941790 - RNA, 21 nt, Human
gaaguaaggauagaacucagg

SEQ ID NO: 941791 - RNA, 21 nt, Human
gaucacaggaacuucaagaga

SEQ ID NO: 941792 - RNA, 24 nt, Human
gcgauucuccugccucagccuccc

SEQ ID NO: 941793 - RNA, 19 nt, Human
gcucugucacccagguugg

SEQ ID NO: 941794 - RNA, 21 nt, Human
ggcggcugcgcggucucgggc

SEQ ID NO: 941795 - RNA, 21 nt, Human
gguauaaccaaaggucccacu

SEQ ID NO: 941796 - RNA, 19 nt, Human
uaaaaccuccuucuccuaa

SEQ ID NO: 941797 - RNA, 25 nt, Human
uaauaagcuuucaucucuuuuauuc

SEQ ID NO: 941798 - RNA, 18 nt, Human
uagagugauuuaaucacu

SEQ ID NO: 941799 - RNA, 22 nt, Human
ucacccagguuggagugcagug

SEQ ID NO: 941800 - RNA, 20 nt, Human
ucaccugccuuccuacccca

SEQ ID NO: 941801 - RNA, 24 nt, Human
ucacugcaaccucugcuucccggg

SEQ ID NO: 941802 - RNA, 18 nt, Human
ucaguaacuacagguaua

SEQ ID NO: 941803 - RNA, 24 nt, Human
ucaguaacuacagguauaaccaaa

SEQ ID NO: 941804 - RNA, 20 nt, Human
uccagcagcuccuuccaggc

SEQ ID NO: 941805 - RNA, 21 nt, Human
uccagcagcuccuuccaggcg

SEQ ID NO: 941806 - RNA, 20 nt, Human
uccauguugguugaauccac

SEQ ID NO: 941807 - RNA, 20 nt, Human
uccccaguauuugcaaacuu

SEQ ID NO: 941808 - RNA, 21 nt, Human
ucccggguucaagcgauucuc

SEQ ID NO: 941809 - RNA, 24 nt, Human
ucccggguucaagcgauucuccug

SEQ ID NO: 941810 - RNA, 21 nt, Human
ucccucggccuguccagcagc

SEQ ID NO: 941811 - RNA, 25 nt, Human
uccuaagugauuuuccauaaucugc

SEQ ID NO: 941812 - RNA, 24 nt, Human
ucggccuguccagcagcuccuucc

SEQ ID NO: 941813 - RNA, 27 nt, Human
ucuccugccucagccuccccaguauuu

SEQ ID NO: 941814 - RNA, 24 nt, Human
ucugucacccagguuggagugcag

SEQ ID NO: 941815 - RNA, 23 nt, Human
ucuugcucugucacccagguugg

SEQ ID NO: 941816 - RNA, 24 nt, Human
ucuugcucugucacccagguugga

SEQ ID NO: 941817 - RNA, 22 nt, Human
ugagauggagucuugcucuguc

SEQ ID NO: 941818 - RNA, 22 nt, Human
ugcaguggugcgaucucggcuc

SEQ ID NO: 941819 - RNA, 19 nt, Human
ugccucagccuccccagua

SEQ ID NO: 941820 - RNA, 24 nt, Human
ugcucugucacccagguuggagug

SEQ ID NO: 941821 - RNA, 19 nt, Human
uggagucuugcucugucac

SEQ ID NO: 941822 - RNA, 23 nt, Human
uggagugcaguggugcgaucucg

SEQ ID NO: 941823 - RNA, 24 nt, Human
uggagugcaguggugcgaucucgg

SEQ ID NO: 941824 - RNA, 19 nt, Human
uggauauggagggcugacc

SEQ ID NO: 941825 - RNA, 19 nt, Human
ugugaauaauaagcuuuca

SEQ ID NO: 941826 - RNA, 18 nt, Human
uucaaaagaucacaggaa

SEQ ID NO: 941827 - RNA, 21 nt, Human
uucaagcgauucuccugccuc

SEQ ID NO: 941828 - RNA, 23 nt, Human
uucaagcgauucuccugccucag

SEQ ID NO: 941829 - RNA, 24 nt, Human
uucaagcgauucuccugccucagc

SEQ ID NO: 941830 - RNA, 21 nt, Human
uucggagaaucuucaacagaa

SEQ ID NO: 941831 - RNA, 21 nt, Human
uugagauggagucuugcucug

SEQ ID NO: 941832 - RNA, 24 nt, Human
uugcucugucacccagguuggagu

SEQ ID NO: 941833 - RNA, 23 nt, Human
uuugcaaacuugugaauaauaag

SEQ ID NO: 941834 - RNA, 19 nt, Human
aagagcggcugcuagagac

SEQ ID NO: 941835 - RNA, 18 nt, Human
acgaucugcuccagcucg

SEQ ID NO: 941836 - RNA, 21 nt, Human
agcacagcccuacccagaggg

SEQ ID NO: 941837 - RNA, 26 nt, Human
agccccucagcacagcccuacccagg

SEQ ID NO: 941838 - RNA, 19 nt, Human
cagccccucagcacagccc

SEQ ID NO: 941839 - RNA, 20 nt, Human
cagccccucagcacagcccu

SEQ ID NO: 941840 - RNA, 19 nt, Human
ccccgcccagccccucagc

SEQ ID NO: 941841 - RNA, 23 nt, Human
ccccgcccagccccucagcacag

SEQ ID NO: 941842 - RNA, 23 nt, Human
cgagcccggcccuucugggccgg

SEQ ID NO: 941843 - RNA, 25 nt, Human
cgcccagccccucagcacagcccua

SEQ ID NO: 941844 - RNA, 23 nt, Human
cggcucgaggccugacacggcag

SEQ ID NO: 941845 - RNA, 22 nt, Human
cgggcccugggcuggccuggga

SEQ ID NO: 941846 - RNA, 18 nt, Human
cuccccgcccagccccuc

SEQ ID NO: 941847 - RNA, 20 nt, Human
gcaggggagggcuccaggug

SEQ ID NO: 941848 - RNA, 24 nt, Human
gcggacacggccugugcuccccgc

SEQ ID NO: 941849 - RNA, 22 nt, Human
gcuucgggcccugggcuggccu

SEQ ID NO: 941850 - RNA, 20 nt, Human
ggacacggccugugcucccc

SEQ ID NO: 941851 - RNA, 19 nt, Human
ggcaggggagggcuccagg

SEQ ID NO: 941852 - RNA, 20 nt, Human
ggccugugcuccccgcccag

SEQ ID NO: 941853 - RNA, 21 nt, Human
ggcugaucucaagggucagug

SEQ ID NO: 941854 - RNA, 21 nt, Human
uccccgcccagccccucagca

SEQ ID NO: 941855 - RNA, 22 nt, Human
ucccgcgagccguacccagagg

SEQ ID NO: 941856 - RNA, 20 nt, Human
ugaccgagcccggcccuucu

SEQ ID NO: 941857 - RNA, 18 nt, Human
uggccugggacgggaagg

SEQ ID NO: 941858 - RNA, 24 nt, Human
ugggcaggggagggcuccaggugg

SEQ ID NO: 941859 - RNA, 18 nt, Human
ugggggcgggugggcagg

SEQ ID NO: 941860 - RNA, 18 nt, Human
uucaaggaaggacgaucc

SEQ ID NO: 941861 - RNA, 24 nt, Human
uucgggcccugggcuggccuggga

SEQ ID NO: 941862 - RNA, 18 nt, Human
aaaagcucccaacaauga

SEQ ID NO: 941863 - RNA, 27 nt, Human
aaacuggcuuugaccccaaaugaaccc

SEQ ID NO: 941864 - RNA, 22 nt, Human
aaagaugucucaucuaaaagcu

SEQ ID NO: 941865 - RNA, 19 nt, Human
aacaauaacccccuucccc

SEQ ID NO: 941866 - RNA, 19 nt, Human
aacaauaacccccuucccc

SEQ ID NO: 941867 - RNA, 19 nt, Human
aacccccuuccccaaaaag

SEQ ID NO: 941868 - RNA, 24 nt, Human
aacccccuuccccaaaaagaauca

SEQ ID NO: 941869 - RNA, 26 nt, Human
aacccccuuccccaaaaagaaucaca

SEQ ID NO: 941870 - RNA, 24 nt, Human
aagaaaaagcucacaucuaucuag

SEQ ID NO: 941871 - RNA, 20 nt, Human
aaucauccaaaucaaagcua

SEQ ID NO: 941872 - RNA, 23 nt, Human
aauuaaacuugaguaaaagccug

SEQ ID NO: 941873 - RNA, 21 nt, Human
acccugagacaagcuaaucuu

SEQ ID NO: 941874 - RNA, 19 nt, Human
acuucccacccugagacaa

SEQ ID NO: 941875 - RNA, 19 nt, Human
acuugaggagaaggaaggg

SEQ ID NO: 941876 - RNA, 21 nt, Human
agacaagcuaaucuuaucaga

SEQ ID NO: 941877 - RNA, 19 nt, Human
agcagcauuuggcuuuaag

SEQ ID NO: 941878 - RNA, 18 nt, Human
agccaaaggaacaauaac

SEQ ID NO: 941879 - RNA, 23 nt, Human
agccaaaggaacaauaacccccu

SEQ ID NO: 941880 - RNA, 23 nt, Human
agucaaugcugggaaguaacagg

SEQ ID NO: 941881 - RNA, 24 nt, Human
aucccauuuuuaugaaagcuccau

SEQ ID NO: 941882 - RNA, 27 nt, Human
caaaggaacaauaacccccuuccccaa

SEQ ID NO: 941883 - RNA, 19 nt, Human
caaagugcugauauuaugu

SEQ ID NO: 941884 - RNA, 19 nt, Human
caacgucaauugaaaauag

SEQ ID NO: 941885 - RNA, 22 nt, Human
cagagcagaguacagauguguc

SEQ ID NO: 941886 - RNA, 21 nt, Human
cagcauccaaagugcaaagaa

SEQ ID NO: 941887 - RNA, 24 nt, Human
cagcauccaaagugcaaagaaaaa

SEQ ID NO: 941888 - RNA, 23 nt, Human
cauucagucagccuggccccacc

SEQ ID NO: 941889 - RNA, 23 nt, Human
ccauacuaacccuucuaccccug

SEQ ID NO: 941890 - RNA, 18 nt, Human
cccaaaaagaaucacaac

SEQ ID NO: 941891 - RNA, 25 nt, Human
cccaaaaagaaucacaaccaauucc

SEQ ID NO: 941892 - RNA, 24 nt, Human
cccaucacuaguucuguccucaau

SEQ ID NO: 941893 - RNA, 20 nt, Human
cccugcccucccacuuccca

SEQ ID NO: 941894 - RNA, 21 nt, Human
cccugcccucccacuucccac

SEQ ID NO: 941895 - RNA, 20 nt, Human
ccucccacuucccacccuga

SEQ ID NO: 941896 - RNA, 19 nt, Human
ccucuggucuaauccuuuc

SEQ ID NO: 941897 - RNA, 21 nt, Human
ccuuauagccuacucuuuauu

SEQ ID NO: 941898 - RNA, 23 nt, Human
ccuuuagaaguugggcuccacug

SEQ ID NO: 941899 - RNA, 22 nt, Human
cucaugaauacuuguuuauuuc

SEQ ID NO: 941900 - RNA, 22 nt, Human
gaacccaaaguucagccagcgg

SEQ ID NO: 941901 - RNA, 20 nt, Human
gaguuguacuuucacauuua

SEQ ID NO: 941902 - RNA, 22 nt, Human
gcggcacaucagagauaaauac

SEQ ID NO: 941903 - RNA, 24 nt, Human
gcugggucacauuuucacccucau

SEQ ID NO: 941904 - RNA, 19 nt, Human
gugcaaagaaaaaaugacu

SEQ ID NO: 941905 - RNA, 26 nt, Human
uaaaagaaaaacuggcuuugacccca

SEQ ID NO: 941906 - RNA, 24 nt, Human
uaaaucacuuaaauuccaugacuc

SEQ ID NO: 941907 - RNA, 24 nt, Human
uaagaauaauuuuaacagaagaaa

SEQ ID NO: 941908 - RNA, 23 nt, Human
uaagggucaauacgaagucaaac

SEQ ID NO: 941909 - RNA, 22 nt, Human
ucaauuuuaaaagaaaaacugg

SEQ ID NO: 941910 - RNA, 19 nt, Human
ucagccuggccccaccugg

SEQ ID NO: 941911 - RNA, 18 nt, Human
uccaaagugcaaagaaaa

SEQ ID NO: 941912 - RNA, 24 nt, Human
uccaaagugcaaagaaaaaaugac

SEQ ID NO: 941913 - RNA, 21 nt, Human
uccaugacucauccuauucaa

SEQ ID NO: 941914 - RNA, 20 nt, Human
ucccaacaaugaccagcaca

SEQ ID NO: 941915 - RNA, 18 nt, Human
ucuaccccuggaaagaug

SEQ ID NO: 941916 - RNA, 21 nt, Human
ucuaugagcagcauuuggcuu

SEQ ID NO: 941917 - RNA, 21 nt, Human
ucuggucuaauccuuucuuuu

SEQ ID NO: 941918 - RNA, 21 nt, Human
ugagacaagcuaaucuuauca

SEQ ID NO: 941919 - RNA, 19 nt, Human
ugaguaaaagccuggagaa

SEQ ID NO: 941920 - RNA, 22 nt, Human
ugaguaaaagccuggagaaugc

SEQ ID NO: 941921 - RNA, 20 nt, Human
ugaguacaggaggcugcaga

SEQ ID NO: 941922 - RNA, 20 nt, Human
ugcaaagaaaaaaugacugu

SEQ ID NO: 941923 - RNA, 20 nt, Human
ugcccugcccucccacuucc

SEQ ID NO: 941924 - RNA, 22 nt, Human
ugcccugcccucccacuuccca

SEQ ID NO: 941925 - RNA, 23 nt, Human
uggcuuuaagccaaaggaacaau

SEQ ID NO: 941926 - RNA, 23 nt, Human
uggcuuugaccccaaaugaaccc

SEQ ID NO: 941927 - RNA, 23 nt, Human
ugggaaaaauuucagcauccaaa

SEQ ID NO: 941928 - RNA, 18 nt, Human
uguaauuuuccugcuggg

SEQ ID NO: 941929 - RNA, 21 nt, Human
uguuaguugggaugccaaagg

SEQ ID NO: 941930 - RNA, 24 nt, Human
uuagaaggaggcauccuaaauccu

SEQ ID NO: 941931 - RNA, 19 nt, Human
uugaccuuuagaaguuggg

SEQ ID NO: 941932 - RNA, 20 nt, Human
uuuuccaaauauuaucccaa

SEQ ID NO: 941933 - RNA, 25 nt, Human
aaaacuccuggcucaagcgauccaa

SEQ ID NO: 941934 - RNA, 21 nt, Human
aaagauacuucauaccccucc

SEQ ID NO: 941935 - RNA, 19 nt, Human
aaagugcugggaguacagg

SEQ ID NO: 941936 - RNA, 22 nt, Human
aaccaaacccuuacacaagauc

SEQ ID NO: 941937 - RNA, 18 nt, Human
aacccagaugaguugcag

SEQ ID NO: 941938 - RNA, 21 nt, Human
aagaaaacacacagagauuaa

SEQ ID NO: 941939 - RNA, 22 nt, Human
aagacaccacacuggccugaaa

SEQ ID NO: 941940 - RNA, 24 nt, Human
aagacaccacacuggccugaaaug

SEQ ID NO: 941941 - RNA, 27 nt, Human
aagauacuucauaccccuccuccaaaa

SEQ ID NO: 941942 - RNA, 24 nt, Human
aagcgauccaccugccucggccuc

SEQ ID NO: 941943 - RNA, 25 nt, Human
aagcgauccaccugccucggccucc

SEQ ID NO: 941944 - RNA, 19 nt, Human
aaggcaccaugucaaagau

SEQ ID NO: 941945 - RNA, 20 nt, Human
acacuacagaaggaauaaac

SEQ ID NO: 941946 - RNA, 19 nt, Human
acaggcgcaagacaccaca

SEQ ID NO: 941947 - RNA, 20 nt, Human
accccuccuccaaaaccaaa

SEQ ID NO: 941948 - RNA, 20 nt, Human
accugucuccuguuuauacc

SEQ ID NO: 941949 - RNA, 25 nt, Human
acucugucacccuggcuggaaugca

SEQ ID NO: 941950 - RNA, 19 nt, Human
acuucauaccccuccucca

SEQ ID NO: 941951 - RNA, 20 nt, Human
agaaaaaaagaaucugugca

SEQ ID NO: 941952 - RNA, 25 nt, Human
agaaaacacacagagauuaauacac

SEQ ID NO: 941953 - RNA, 27 nt, Human
agaaaacacacagagauuaauacacua

SEQ ID NO: 941954 - RNA, 18 nt, Human
agcggcuuucagaauucc

SEQ ID NO: 941955 - RNA, 21 nt, Human
aggcauuuuauuuuaccauua

SEQ ID NO: 941956 - RNA, 19 nt, Human
aguagcugggacuacaggc

SEQ ID NO: 941957 - RNA, 23 nt, Human
aguagcugggacuacaggcacgu

SEQ ID NO: 941958 - RNA, 18 nt, Human
auaccccuccuccaaaac

SEQ ID NO: 941959 - RNA, 19 nt, Human
auaccccuccuccaaaacc

SEQ ID NO: 941960 - RNA, 20 nt, Human
augggauuucaccaucuugg

SEQ ID NO: 941961 - RNA, 19 nt, Human
caaaaccaaagaaaacaca

SEQ ID NO: 941962 - RNA, 20 nt, Human
caaaaccaaagaaaacacac

SEQ ID NO: 941963 - RNA, 24 nt, Human
caaagugcugggaguacaggcgca

SEQ ID NO: 941964 - RNA, 23 nt, Human
cacaagacuccauaaccaaaccc

SEQ ID NO: 941965 - RNA, 25 nt, Human
cacaaucaaaucuguuuacuugccc

SEQ ID NO: 941966 - RNA, 23 nt, Human
cacacagagauuaauacacuaca

SEQ ID NO: 941967 - RNA, 23 nt, Human
caccugccucggccucccaaagu

SEQ ID NO: 941968 - RNA, 25 nt, Human
cagaaaaaaagaaucugugcagacc

SEQ ID NO: 941969 - RNA, 19 nt, Human
cagcaggccccgcgcuccg

SEQ ID NO: 941970 - RNA, 20 nt, Human
cagccuucugcgcacaaccc

SEQ ID NO: 941971 - RNA, 19 nt, Human
cagcggcuuucagaauucc

SEQ ID NO: 941972 - RNA, 20 nt, Human
cagcggcuuucagaauuccc

SEQ ID NO: 941973 - RNA, 26 nt, Human
caggaagaggccuguagagaacccca

SEQ ID NO: 941974 - RNA, 24 nt, Human
cauaaccaaacccuuacacaagau

SEQ ID NO: 941975 - RNA, 19 nt, Human
cauaagauuguccaguaga

SEQ ID NO: 941976 - RNA, 23 nt, Human
cauaccccuccuccaaaaccaaa

SEQ ID NO: 941977 - RNA, 20 nt, Human
ccaaaaccaaagaaaacaca

SEQ ID NO: 941978 - RNA, 19 nt, Human
ccaaagugcugggaguaca

SEQ ID NO: 941979 - RNA, 19 nt, Human
ccaaagugcugggaguaca

SEQ ID NO: 941980 - RNA, 21 nt, Human
ccaacgccccuggcuuacgcu

SEQ ID NO: 941981 - RNA, 24 nt, Human
ccaccuuccaggcuuaagugauuc

SEQ ID NO: 941982 - RNA, 21 nt, Human
ccagcggcuuucagaauuccc

SEQ ID NO: 941983 - RNA, 21 nt, Human
cccaagucauuccuaaggcac

SEQ ID NO: 941984 - RNA, 23 nt, Human
cccagggagcagugcacucucau

SEQ ID NO: 941985 - RNA, 18 nt, Human
cccccaacgccccuggcu

SEQ ID NO: 941986 - RNA, 21 nt, Human
ccgcacggcccccaacgcccc

SEQ ID NO: 941987 - RNA, 20 nt, Human
ccuggcucaagcgauccacc

SEQ ID NO: 941988 - RNA, 19 nt, Human
ccugucuccuguuuauacc

SEQ ID NO: 941989 - RNA, 24 nt, Human
ccuuccaggcuuaagugauucucc

SEQ ID NO: 941990 - RNA, 23 nt, Human
cgcagcgcuccucucuccagcag

SEQ ID NO: 941991 - RNA, 21 nt, Human
cgcgcccgacccgcacggccc

SEQ ID NO: 941992 - RNA, 25 nt, Human
cggaagcuuuauccuggcagucaca

SEQ ID NO: 941993 - RNA, 23 nt, Human
cgggcguggcacgcgcccgaccc

SEQ ID NO: 941994 - RNA, 21 nt, Human
cuaaggcaccaugucaaagau

SEQ ID NO: 941995 - RNA, 21 nt, Human
cucaagcgauccaccugccuc

SEQ ID NO: 941996 - RNA, 20 nt, Human
cuccaaaaccaaagaaaacc

SEQ ID NO: 941997 - RNA, 23 nt, Human
cugccucggccucccaaagugcu

SEQ ID NO: 941998 - RNA, 22 nt, Human
cuggccgcugcgcgcgguccgc

SEQ ID NO: 941999 - RNA, 23 nt, Human
cuuaagugauucucccaccucag

SEQ ID NO: 942000 - RNA, 25 nt, Human
cuuaagugauucucccaccucaggc

SEQ ID NO: 942001 - RNA, 19 nt, Human
cuuuaguucucuuggaaac

SEQ ID NO: 942002 - RNA, 20 nt, Human
gaguagcugggacuacaggc

SEQ ID NO: 942003 - RNA, 27 nt, Human
gaguagcugggacuacaggcacgugua

SEQ ID NO: 942004 - RNA, 21 nt, Human
gaucauucagacagacaacuu

SEQ ID NO: 942005 - RNA, 22 nt, Human
gaucauucagacagacaacuua

SEQ ID NO: 942006 - RNA, 24 nt, Human
gcaaugaaagaccaagcagguaga

SEQ ID NO: 942007 - RNA, 24 nt, Human
gccuaguagguuuggcacaagacu

SEQ ID NO: 942008 - RNA, 24 nt, Human
gcgauccaccugccucggccuccc

SEQ ID NO: 942009 - RNA, 23 nt, Human
gcgcaagacaccacacuggccug

SEQ ID NO: 942010 - RNA, 24 nt, Human
gcucaagcgauccaccugccucgg

SEQ ID NO: 942011 - RNA, 19 nt, Human
ggcacaagacuccauaacc

SEQ ID NO: 942012 - RNA, 23 nt, Human
ggcucaagcgauccaccugccuc

SEQ ID NO: 942013 - RNA, 18 nt, Human
gggauuucaccaucuugg

SEQ ID NO: 942014 - RNA, 21 nt, Human
gggcguggcacgcgcccgacc

SEQ ID NO: 942015 - RNA, 21 nt, Human
guagagaugggauuucaccau

SEQ ID NO: 942016 - RNA, 22 nt, Human
guagauggugaagggcuaaugg

SEQ ID NO: 942017 - RNA, 21 nt, Human
gucaaagauacuucauacccc

SEQ ID NO: 942018 - RNA, 23 nt, Human
uaaccaaacccuuacacaagauc

SEQ ID NO: 942019 - RNA, 26 nt, Human
uaagacucuaggauuaucuugaguua

SEQ ID NO: 942020 - RNA, 18 nt, Human
uaagugauucucccaccu

SEQ ID NO: 942021 - RNA, 20 nt, Human
uaagugauucucccaccuca

SEQ ID NO: 942022 - RNA, 19 nt, Human
uaauacacuacagaaggaa

SEQ ID NO: 942023 - RNA, 24 nt, Human
uacagaaggaauaaacauuuuaga

SEQ ID NO: 942024 - RNA, 21 nt, Human
uaccccuccuccaaaaccaaa

SEQ ID NO: 942025 - RNA, 21 nt, Human
uacugacagaaaaaaagaauc

SEQ ID NO: 942026 - RNA, 22 nt, Human
uaguagguuuggcacaagacuc

SEQ ID NO: 942027 - RNA, 24 nt, Human
uauagaguagcugggacuacaggc

SEQ ID NO: 942028 - RNA, 23 nt, Human
ucaaagauacuucauaccccucc

SEQ ID NO: 942029 - RNA, 21 nt, Human
ucacaacaggaagaggccugu

SEQ ID NO: 942030 - RNA, 24 nt, Human
ucacugcaacuuccaccuuccagg

SEQ ID NO: 942031 - RNA, 20 nt, Human
ucagacagacaacuuaaaaa

SEQ ID NO: 942032 - RNA, 19 nt, Human
ucauaccccuccuccaaaa

SEQ ID NO: 942033 - RNA, 21 nt, Human
ucauaccccuccuccaaaacc

SEQ ID NO: 942034 - RNA, 20 nt, Human
uccaaaaccaaagaaaacac

SEQ ID NO: 942035 - RNA, 22 nt, Human
uccaaaaccaaagaaaacacac

SEQ ID NO: 942036 - RNA, 25 nt, Human
uccaaaaccaaagaaaacacacaga

SEQ ID NO: 942037 - RNA, 18 nt, Human
uccagauuaaguucugca

SEQ ID NO: 942038 - RNA, 20 nt, Human
uccauaaccaaacccuuaca

SEQ ID NO: 942039 - RNA, 24 nt, Human
ucccaaagugcugggaguacaggc

SEQ ID NO: 942040 - RNA, 21 nt, Human
uccgcagcgcuccucucucca

SEQ ID NO: 942041 - RNA, 18 nt, Human
ucggccucccaaagugcu

SEQ ID NO: 942042 - RNA, 22 nt, Human
ucucacucugucacccuggcug

SEQ ID NO: 942043 - RNA, 24 nt, Human
ucucacucugucacccuggcugga

SEQ ID NO: 942044 - RNA, 22 nt, Human
ugaaaugcuuuaagacucuagg

SEQ ID NO: 942045 - RNA, 24 nt, Human
ugaaaugcuuuaagacucuaggau

SEQ ID NO: 942046 - RNA, 18 nt, Human
ugaguugcaguucccagc

SEQ ID NO: 942047 - RNA, 22 nt, Human
ugccccagccuucugcgcacaa

SEQ ID NO: 942048 - RNA, 21 nt, Human
ugccucggccucccaaagugc

SEQ ID NO: 942049 - RNA, 24 nt, Human
ugccucggccucccaaagugcugg

SEQ ID NO: 942050 - RNA, 22 nt, Human
ugcugggaguacaggcgcaaga

SEQ ID NO: 942051 - RNA, 24 nt, Human
ugcugggaguacaggcgcaagaca

SEQ ID NO: 942052 - RNA, 23 nt, Human
uggcacaagacuccauaaccaaa

SEQ ID NO: 942053 - RNA, 24 nt, Human
ugggauuucaccaucuuggccaag

SEQ ID NO: 942054 - RNA, 18 nt, Human
uuaauacacuacagaagg

SEQ ID NO: 942055 - RNA, 25 nt, Human
uuagggcucggucucuggccgcugc

SEQ ID NO: 942056 - RNA, 18 nt, Human
uuagucuuagcaaugaaa

SEQ ID NO: 942057 - RNA, 23 nt, Human
uuccaggcuuaagugauucuccc

SEQ ID NO: 942058 - RNA, 23 nt, Human
uucucuuggaaacauaagauugu

SEQ ID NO: 942059 - RNA, 26 nt, Human
uuguagagaugggauuucaccaucuu

SEQ ID NO: 942060 - RNA, 21 nt, Human
uuucaccaucuuggccaagcu

SEQ ID NO: 942061 - RNA, 24 nt, Human
uuuguagagaugggauuucaccau

SEQ ID NO: 942062 - RNA, 24 nt, Human
uuuuuuguagagaugggauuucac

SEQ ID NO: 942063 - RNA, 22 nt, Human
aaaacacuucccacuuaaucaa

SEQ ID NO: 942064 - RNA, 21 nt, Human
aaacaaaaccgcacaugcccu

SEQ ID NO: 942065 - RNA, 22 nt, Human
aaacaaaaccgcacaugcccuc

SEQ ID NO: 942066 - RNA, 26 nt, Human
aaccgcacaugcccucauauucccca

SEQ ID NO: 942067 - RNA, 22 nt, Human
aaucucacgcccagaaaacaaa

SEQ ID NO: 942068 - RNA, 18 nt, Human
acaguuucuggaaugcau

SEQ ID NO: 942069 - RNA, 23 nt, Human
acuuuaagaagcacuggaaggua

SEQ ID NO: 942070 - RNA, 18 nt, Human
agacagucuuaccuagaa

SEQ ID NO: 942071 - RNA, 19 nt, Human
aggcaggacuccggaacuc

SEQ ID NO: 942072 - RNA, 19 nt, Human
augcaaagccucggccgug

SEQ ID NO: 942073 - RNA, 19 nt, Human
caaaaccgcacaugcccuc

SEQ ID NO: 942074 - RNA, 22 nt, Human
caagcuucugggcugucuuccu

SEQ ID NO: 942075 - RNA, 19 nt, Human
cauccucccuucaccgcac

SEQ ID NO: 942076 - RNA, 18 nt, Human
ccaacuccgccauccucc

SEQ ID NO: 942077 - RNA, 18 nt, Human
ccaucccucccuccaucc

SEQ ID NO: 942078 - RNA, 23 nt, Human
cccucccuccauccuggccccgg

SEQ ID NO: 942079 - RNA, 22 nt, Human
ccgcacaugcccucauauuccc

SEQ ID NO: 942080 - RNA, 21 nt, Human
ccuccauccuggccccggcuc

SEQ ID NO: 942081 - RNA, 22 nt, Human
ccucuccgggacucuaaaaauc

SEQ ID NO: 942082 - RNA, 19 nt, Human
cgcggcuaacccucgcccc

SEQ ID NO: 942083 - RNA, 18 nt, Human
cuuucuccaucccucccu

SEQ ID NO: 942084 - RNA, 24 nt, Human
cuuucuccaucccucccuccaucc

SEQ ID NO: 942085 - RNA, 22 nt, Human
gcagcuuucuccaucccucccu

SEQ ID NO: 942086 - RNA, 18 nt, Human
ggcagcuuucuccauccc

SEQ ID NO: 942087 - RNA, 20 nt, Human
gggaaccgcaaaagguacca

SEQ ID NO: 942088 - RNA, 22 nt, Human
gggaaccgcaaaagguaccaac

SEQ ID NO: 942089 - RNA, 21 nt, Human
gggucugaggcaggacuccgg

SEQ ID NO: 942090 - RNA, 19 nt, Human
gggugggcagcuuucucca

SEQ ID NO: 942091 - RNA, 24 nt, Human
gucagcgggugggcagcuuucucc

SEQ ID NO: 942092 - RNA, 23 nt, Human
uaagaguccuucagcggaggcuc

SEQ ID NO: 942093 - RNA, 19 nt, Human
uaaucaacagguuuuccuc

SEQ ID NO: 942094 - RNA, 20 nt, Human
uaccaacuccgccauccucc

SEQ ID NO: 942095 - RNA, 18 nt, Human
uagcaagcuucugggcug

SEQ ID NO: 942096 - RNA, 24 nt, Human
ucaaaacacuucccacuuaaucaa

SEQ ID NO: 942097 - RNA, 25 nt, Human
ucaacagguuuuccucuuaaaaucc

SEQ ID NO: 942098 - RNA, 24 nt, Human
ucaagacagucuuaccuagaacaa

SEQ ID NO: 942099 - RNA, 21 nt, Human
ucccacuuaaucaacagguuu

SEQ ID NO: 942100 - RNA, 18 nt, Human
ucugaggcaggacuccgg

SEQ ID NO: 942101 - RNA, 18 nt, Human
ugaauagcaagcuucugg

SEQ ID NO: 942102 - RNA, 23 nt, Human
ugggaaccgcaaaagguaccaac

SEQ ID NO: 942103 - RNA, 21 nt, Human
aaaauacagcacggggcucac

SEQ ID NO: 942104 - RNA, 24 nt, Human
acagacgcuuuuccaauauucucu

SEQ ID NO: 942105 - RNA, 20 nt, Human
acagcacggggcucacagac

SEQ ID NO: 942106 - RNA, 23 nt, Human
accucaacccccuuaguuacaga

SEQ ID NO: 942107 - RNA, 19 nt, Human
acgccugggcucucagcug

SEQ ID NO: 942108 - RNA, 22 nt, Human
agaaaucccaggagcccgaagc

SEQ ID NO: 942109 - RNA, 22 nt, Human
agcccgaagccuccuuaagccu

SEQ ID NO: 942110 - RNA, 24 nt, Human
aggcagaguggagagaaacaacuc

SEQ ID NO: 942111 - RNA, 21 nt, Human
cagacgcuuuuccaauauucu

SEQ ID NO: 942112 - RNA, 18 nt, Human
ccaacaaggcugggaccc

SEQ ID NO: 942113 - RNA, 21 nt, Human
ccaacaaggcugggacccaaa

SEQ ID NO: 942114 - RNA, 21 nt, Human
cccuuaguuacagaaaaacuc

SEQ ID NO: 942115 - RNA, 24 nt, Human
ccgcggacgccugggcucucagcu

SEQ ID NO: 942116 - RNA, 24 nt, Human
ccuccuuaagccugcgguagaaac

SEQ ID NO: 942117 - RNA, 24 nt, Human
cgcaaucuaacgucuacaauaacc

SEQ ID NO: 942118 - RNA, 18 nt, Human
cuccagggguugaaaucc

SEQ ID NO: 942119 - RNA, 22 nt, Human
cucuggcugagccagagucucc

SEQ ID NO: 942120 - RNA, 21 nt, Human
cugcugaacaaugacaucguu

SEQ ID NO: 942121 - RNA, 18 nt, Human
gagggccaggagcgcgga

SEQ ID NO: 942122 - RNA, 23 nt, Human
gcaaucuaacgucuacaauaacc

SEQ ID NO: 942123 - RNA, 22 nt, Human
uacaauaaccucaacccccuua

SEQ ID NO: 942124 - RNA, 22 nt, Human
uacagagaugaggcagagugga

SEQ ID NO: 942125 - RNA, 22 nt, Human
uauuacaaaauacagcacgggg

SEQ ID NO: 942126 - RNA, 25 nt, Human
uccauggcugacaacccaacaaggc

SEQ ID NO: 942127 - RNA, 25 nt, Human
uccuuaagccugcgguagaaacugc

SEQ ID NO: 942128 - RNA, 24 nt, Human
ucuacaauaaccucaacccccuua

SEQ ID NO: 942129 - RNA, 21 nt, Human
ucucagcugcugaacaaugac

SEQ ID NO: 942130 - RNA, 18 nt, Human
uggcugagccagagucuc

SEQ ID NO: 942131 - RNA, 25 nt, Human
aagcacacgacauuaugaauauuaa

SEQ ID NO: 942132 - RNA, 22 nt, Human
aagcagcacacacuucaaagcc

SEQ ID NO: 942133 - RNA, 24 nt, Human
aagcagcacacacuucaaagccca

SEQ ID NO: 942134 - RNA, 20 nt, Human
aagcucuacuggguagcuga

SEQ ID NO: 942135 - RNA, 28 nt, Human
aggcaggagagucgagagcgcgaacccg

SEQ ID NO: 942136 - RNA, 22 nt, Human
auaaaugcauuuuaauaccuug

SEQ ID NO: 942137 - RNA, 20 nt, Human
aucugauacggaauacagga

SEQ ID NO: 942138 - RNA, 23 nt, Human
cauuaugaauauuaaaaauaaag

SEQ ID NO: 942139 - RNA, 19 nt, Human
ccgcuccgccgcgcagcug

SEQ ID NO: 942140 - RNA, 21 nt, Human
ccuacacgcagcgccgaggga

SEQ ID NO: 942141 - RNA, 20 nt, Human
cgagagcgcgaacccggggc

SEQ ID NO: 942142 - RNA, 21 nt, Human
cgggagauacgcucgcuuucc

SEQ ID NO: 942143 - RNA, 20 nt, Human
cgggagggagccgccucgug

SEQ ID NO: 942144 - RNA, 25 nt, Human
cugucaguggcaacggcucgggaga

SEQ ID NO: 942145 - RNA, 21 nt, Human
cuucaagcucuacuggguagc

SEQ ID NO: 942146 - RNA, 22 nt, Human
gagggaggggucgggggcugcc

SEQ ID NO: 942147 - RNA, 21 nt, Human
gcaaacaaaaaaggcaauuca

SEQ ID NO: 942148 - RNA, 20 nt, Human
gcggacugggccugagggcg

SEQ ID NO: 942149 - RNA, 19 nt, Human
gcucuuacucagaugggag

SEQ ID NO: 942150 - RNA, 18 nt, Human
ggagaaagaugaaaggag

SEQ ID NO: 942151 - RNA, 25 nt, Human
gggaagcggggagaaagaugaaagg

SEQ ID NO: 942152 - RNA, 18 nt, Human
gggcgcggccuacacgca

SEQ ID NO: 942153 - RNA, 21 nt, Human
gguaaugagaacacacacgaa

SEQ ID NO: 942154 - RNA, 28 nt, Human
guaaugagaacacacacgaaccaccuac

SEQ ID NO: 942155 - RNA, 22 nt, Human
uaagcagcacacacuucaaagc

SEQ ID NO: 942156 - RNA, 20 nt, Human
uacaggaagauacugguaaa

SEQ ID NO: 942157 - RNA, 21 nt, Human
ucaguggcaacggcucgggag

SEQ ID NO: 942158 - RNA, 23 nt, Human
ucuacuggguagcugaguaaaua

SEQ ID NO: 942159 - RNA, 22 nt, Human
ugagaacacacacgaaccaccu

SEQ ID NO: 942160 - RNA, 21 nt, Human
ugaguaaauagcguccaaugu

SEQ ID NO: 942161 - RNA, 20 nt, Human
ugaugugcauaucuaucaua

SEQ ID NO: 942162 - RNA, 25 nt, Human
uuuuuugaauuuauaaaugcauuuu

SEQ ID NO: 942163 - RNA, 24 nt, Human
uuuuuuuuuuuuuuuuuugaauuu

SEQ ID NO: 942164 - RNA, 20 nt, Human
uuuuuuuuuuuuuuuuuugg

SEQ ID NO: 942165 - RNA, 22 nt, Human
aaagagcugacccaugccguag

SEQ ID NO: 942166 - RNA, 24 nt, Human
aaagagcugacccaugccguaggc

SEQ ID NO: 942167 - RNA, 18 nt, Human
aaaucuucaguacucuuc

SEQ ID NO: 942168 - RNA, 20 nt, Human
aagagagguggguuaggggu

SEQ ID NO: 942169 - RNA, 18 nt, Human
agaaagagcugacccaug

SEQ ID NO: 942170 - RNA, 20 nt, Human
agaaagagcugacccaugcc

SEQ ID NO: 942171 - RNA, 19 nt, Human
aggcggagguggcagaaag

SEQ ID NO: 942172 - RNA, 19 nt, Human
caaaguaagaguuggagaa

SEQ ID NO: 942173 - RNA, 23 nt, Human
caggcccccaaggucuggaaagg

SEQ ID NO: 942174 - RNA, 22 nt, Human
cccaaggucuggaaacccaaaa

SEQ ID NO: 942175 - RNA, 19 nt, Human
ccccaaggucuggaaaccc

SEQ ID NO: 942176 - RNA, 23 nt, Human
ccgcaaagaggugaggaccgcga

SEQ ID NO: 942177 - RNA, 18 nt, Human
ccucaggccugcucuauu

SEQ ID NO: 942178 - RNA, 25 nt, Human
cucgaaccuggccucaaggcacggc

SEQ ID NO: 942179 - RNA, 21 nt, Human
cugcucuauucuugccuccgc

SEQ ID NO: 942180 - RNA, 21 nt, Human
gcugacccaugccguaggcac

SEQ ID NO: 942181 - RNA, 21 nt, Human
gggggccgcuuuccccacggu

SEQ ID NO: 942182 - RNA, 20 nt, Human
uaccuuuaucucucgaaccu

SEQ ID NO: 942183 - RNA, 18 nt, Human
ucaacugccuauucucau

SEQ ID NO: 942184 - RNA, 21 nt, Human
ucacccgcaaagaggugagga

SEQ ID NO: 942185 - RNA, 20 nt, Human
uccccgaguuugccucaggc

SEQ ID NO: 942186 - RNA, 22 nt, Human
ucuggaaacccaaaagguaacu

SEQ ID NO: 942187 - RNA, 23 nt, Human
ugccucaggcccccaaggucugg

SEQ ID NO: 942188 - RNA, 19 nt, Human
uggaaacccaaaagguaac

SEQ ID NO: 942189 - RNA, 24 nt, Human
uggcagaaagagcugacccaugcc

SEQ ID NO: 942190 - RNA, 24 nt, Human
uggguuagggguucguccccgagu

SEQ ID NO: 942191 - RNA, 23 nt, Human
uuguuguuuguuuguuuucuuuu

SEQ ID NO: 942192 - RNA, 20 nt, Human
uuguuuguuuguuuucuuuu

SEQ ID NO: 942193 - RNA, 24 nt, Human
uuuguuuguuuucuuuuucacccc

SEQ ID NO: 942194 - RNA, 19 nt, Human
uuuguuuucuuuuucaccc

SEQ ID NO: 942195 - RNA, 27 nt, Human
caaaagacauuccugaaaccggggccc

SEQ ID NO: 942196 - RNA, 23 nt, Human
cagcagccucauggauaaggucu

SEQ ID NO: 942197 - RNA, 19 nt, Human
gggggucccgggguggggg

SEQ ID NO: 942198 - RNA, 22 nt, Human
uaaaagagaagaucaagagggu

SEQ ID NO: 942199 - RNA, 27 nt, Human
ucaaugguaugugucccaaucuccuuc

SEQ ID NO: 942200 - RNA, 22 nt, Human
ucccaaucuccuucuuccucuu

SEQ ID NO: 942201 - RNA, 21 nt, Human
ucccggggugggggccggccu

SEQ ID NO: 942202 - RNA, 19 nt, Human
ugguaugugucccaaucuc

SEQ ID NO: 942203 - RNA, 24 nt, Human
ugucccaaucuccuucuuccucuu

SEQ ID NO: 942204 - RNA, 22 nt, Human
uuuuuuaacaacaaaucaaugg

SEQ ID NO: 942205 - RNA, 24 nt, Human
aaaaaaaaaaaaaaauuagccggg

SEQ ID NO: 942206 - RNA, 19 nt, Human
aaaaaaaaaaaaaauuagc

SEQ ID NO: 942207 - RNA, 18 nt, Human
aaaacagagggagagguc

SEQ ID NO: 942208 - RNA, 26 nt, Human
aaaaggaagugguuuccuguccccag

SEQ ID NO: 942209 - RNA, 27 nt, Human
aaaaggaagugguuuccuguccccagu

SEQ ID NO: 942210 - RNA, 21 nt, Human
aacaugguaagaacccugucu

SEQ ID NO: 942211 - RNA, 21 nt, Human
aaccagugcugugugaaggca

SEQ ID NO: 942212 - RNA, 24 nt, Human
aaucgcuugaacccaggaggcgga

SEQ ID NO: 942213 - RNA, 22 nt, Human
acccaacacucccucuccacaa

SEQ ID NO: 942214 - RNA, 24 nt, Human
acccugucucuacuaaaaauacaa

SEQ ID NO: 942215 - RNA, 28 nt, Human
agaaaacuccagcaggcaaguagaaucc

SEQ ID NO: 942216 - RNA, 18 nt, Human
agacagagcuuggugggg

SEQ ID NO: 942217 - RNA, 21 nt, Human
agaccaauguuucccacccag

SEQ ID NO: 942218 - RNA, 25 nt, Human
agagaaccgguggcaaggaccacca

SEQ ID NO: 942219 - RNA, 18 nt, Human
agaucaggaguuugagac

SEQ ID NO: 942220 - RNA, 18 nt, Human
agauccugagaguuuccu

SEQ ID NO: 942221 - RNA, 28 nt, Human
agcaaaaaacagagggagaggggacccc

SEQ ID NO: 942222 - RNA, 21 nt, Human
agcccuucccagaccucccaa

SEQ ID NO: 942223 - RNA, 23 nt, Human
agccgggcgugguggcacacgcc

SEQ ID NO: 942224 - RNA, 28 nt, Human
agccuccagcacuggugucagcagcccu

SEQ ID NO: 942225 - RNA, 25 nt, Human
agccuggccaacaugguaagaaccc

SEQ ID NO: 942226 - RNA, 26 nt, Human
aggaagacacccaacacucccucucc

SEQ ID NO: 942227 - RNA, 22 nt, Human
aggacagucaguugcccaaagc

SEQ ID NO: 942228 - RNA, 20 nt, Human
aggaguuugagaccagccug

SEQ ID NO: 942229 - RNA, 23 nt, Human
aggcagcaaaaaacagagggaga

SEQ ID NO: 942230 - RNA, 23 nt, Human
aggcaugggaggcacuuuggaag

SEQ ID NO: 942231 - RNA, 21 nt, Human
aggcggagguugcagugagcc

SEQ ID NO: 942232 - RNA, 24 nt, Human
aggcggagguugcagugagccgag

SEQ ID NO: 942233 - RNA, 22 nt, Human
agguuguguuuuuuuuuuuucu

SEQ ID NO: 942234 - RNA, 26 nt, Human
aguggcucaacacccuguaaucccag

SEQ ID NO: 942235 - RNA, 22 nt, Human
augcaguugggacuugaacuca

SEQ ID NO: 942236 - RNA, 25 nt, Human
caacaugguaagaacccugucucua

SEQ ID NO: 942237 - RNA, 23 nt, Human
caacuuccagggcauacaaccag

SEQ ID NO: 942238 - RNA, 18 nt, Human
caaguuccuugcccucuc

SEQ ID NO: 942239 - RNA, 31 nt, Human
cacaacuuccagggcauacaaccagcacauu

SEQ ID NO: 942240 - RNA, 24 nt, Human
cacaucucuugagaucaggaguuu

SEQ ID NO: 942241 - RNA, 21 nt, Human
caccaccagcagggugagggg

SEQ ID NO: 942242 - RNA, 23 nt, Human
cacccuguaaucccagaacuuug

SEQ ID NO: 942243 - RNA, 19 nt, Human
cacgccugcaaucccagcu

SEQ ID NO: 942244 - RNA, 18 nt, Human
cacugcacuccagccgag

SEQ ID NO: 942245 - RNA, 18 nt, Human
cacugcacuccagccgag

SEQ ID NO: 942246 - RNA, 23 nt, Human
cacugcacuccagccgagacuca

SEQ ID NO: 942247 - RNA, 19 nt, Human
cagaacuuugggaggccgg

SEQ ID NO: 942248 - RNA, 25 nt, Human
cagaacuuugggaggccggaggcag

SEQ ID NO: 942249 - RNA, 22 nt, Human
cagaccccaagacugcugggag

SEQ ID NO: 942250 - RNA, 22 nt, Human
cagcagugacucccaggaauau

SEQ ID NO: 942251 - RNA, 18 nt, Human
cauacaaccagcacauga

SEQ ID NO: 942252 - RNA, 22 nt, Human
caucucaggcagaaaacuccag

SEQ ID NO: 942253 - RNA, 24 nt, Human
caucucuugagaucaggaguuuga

SEQ ID NO: 942254 - RNA, 24 nt, Human
cauuauuggcugagucagaguggc

SEQ ID NO: 942255 - RNA, 19 nt, Human
ccacugcacuccagccgag

SEQ ID NO: 942256 - RNA, 19 nt, Human
ccacugcacuccagccgag

SEQ ID NO: 942257 - RNA, 21 nt, Human
ccacugcacuccagccgagac

SEQ ID NO: 942258 - RNA, 22 nt, Human
ccaggaggcggagguugcagug

SEQ ID NO: 942259 - RNA, 23 nt, Human
ccaguggugugguggcccauccc

SEQ ID NO: 942260 - RNA, 19 nt, Human
cccaaagccaugcaguugg

SEQ ID NO: 942261 - RNA, 22 nt, Human
cccacccagaccccaagacugc

SEQ ID NO: 942262 - RNA, 19 nt, Human
cccaggaagacacccaaca

SEQ ID NO: 942263 - RNA, 20 nt, Human
ccccagugauuuccagcccu

SEQ ID NO: 942264 - RNA, 23 nt, Human
cccuccuucuucccuggacuucc

SEQ ID NO: 942265 - RNA, 23 nt, Human
cccuguaaucccagaacuuuggg

SEQ ID NO: 942266 - RNA, 24 nt, Human
ccuaccuuauuguaaucucaccac

SEQ ID NO: 942267 - RNA, 21 nt, Human
ccugcaaucccagcuacucgg

SEQ ID NO: 942268 - RNA, 23 nt, Human
ccuggccaacaugguaagaaccc

SEQ ID NO: 942269 - RNA, 25 nt, Human
ccuggccaacaugguaagaacccug

SEQ ID NO: 942270 - RNA, 23 nt, Human
cgccugcaaucccagcuacucgg

SEQ ID NO: 942271 - RNA, 27 nt, Human
cggaaggccgaggcacaggaaucgcuu

SEQ ID NO: 942272 - RNA, 26 nt, Human
cggcugggcagguggcuggcuugcug

SEQ ID NO: 942273 - RNA, 20 nt, Human
cgugguggcacacgccugca

SEQ ID NO: 942274 - RNA, 21 nt, Human
cucagaaaccuccuucuaucc

SEQ ID NO: 942275 - RNA, 22 nt, Human
cugguagagaccaauguuuccc

SEQ ID NO: 942276 - RNA, 18 nt, Human
cuugcccucucugggcua

SEQ ID NO: 942277 - RNA, 23 nt, Human
cuugcccucucugggcuacacuu

SEQ ID NO: 942278 - RNA, 21 nt, Human
gaacaagagcccaucagagga

SEQ ID NO: 942279 - RNA, 22 nt, Human
gaagacacccaacacucccucu

SEQ ID NO: 942280 - RNA, 21 nt, Human
gaggcggagguugcagugagc

SEQ ID NO: 942281 - RNA, 23 nt, Human
gagguugcagugagccgagauug

SEQ ID NO: 942282 - RNA, 22 nt, Human
gcacuggugucagcagccccuc

SEQ ID NO: 942283 - RNA, 25 nt, Human
gccaacaugguaagaacccugucuc

SEQ ID NO: 942284 - RNA, 22 nt, Human
gcuggggcccuccuucuucccu

SEQ ID NO: 942285 - RNA, 22 nt, Human
ggaacaagagcccaucagagga

SEQ ID NO: 942286 - RNA, 25 nt, Human
ggaagacacccaacacucccucucc

SEQ ID NO: 942287 - RNA, 18 nt, Human
ggaggcaggccacaucuc

SEQ ID NO: 942288 - RNA, 22 nt, Human
ggagguugcagugagccgagau

SEQ ID NO: 942289 - RNA, 24 nt, Human
ggagguugcagugagccgagauug

SEQ ID NO: 942290 - RNA, 20 nt, Human
gggagagauggugucagcag

SEQ ID NO: 942291 - RNA, 24 nt, Human
gggcgugguggcacacgccugcaa

SEQ ID NO: 942292 - RNA, 18 nt, Human
ggggagagguggggcagg

SEQ ID NO: 942293 - RNA, 18 nt, Human
ggggcggccgaagguugu

SEQ ID NO: 942294 - RNA, 24 nt, Human
gguggcacacgccugcaaucccag

SEQ ID NO: 942295 - RNA, 20 nt, Human
guagagaccaauguuuccca

SEQ ID NO: 942296 - RNA, 19 nt, Human
guugcagugagccgagauu

SEQ ID NO: 942297 - RNA, 20 nt, Human
uaaggcuggggcccuccuuc

SEQ ID NO: 942298 - RNA, 24 nt, Human
uaaggcuggggcccuccuucuucc

SEQ ID NO: 942299 - RNA, 24 nt, Human
uacaaaaaaaaaaaaaaaaaaaaa

SEQ ID NO: 942300 - RNA, 24 nt, Human
uacacugccaucuccacauuaccu

SEQ ID NO: 942301 - RNA, 25 nt, Human
uacacugccaucuccacauuaccuc

SEQ ID NO: 942302 - RNA, 23 nt, Human
uaccgaaagggaaucugggccuc

SEQ ID NO: 942303 - RNA, 24 nt, Human
uagccggaacaagagcccaucaga

SEQ ID NO: 942304 - RNA, 22 nt, Human
uagccgggcgugguggcacacg

SEQ ID NO: 942305 - RNA, 19 nt, Human
uccagcaggcaaguagaau

SEQ ID NO: 942306 - RNA, 18 nt, Human
uccccaggaagacaccca

SEQ ID NO: 942307 - RNA, 21 nt, Human
uccuagccggaacaagagccc

SEQ ID NO: 942308 - RNA, 24 nt, Human
ucgcuugaacccaggaggcggagg

SEQ ID NO: 942309 - RNA, 23 nt, Human
ucucuacuaaaaauacaaaaaaa

SEQ ID NO: 942310 - RNA, 23 nt, Human
ucucuugagaucaggaguuugag

SEQ ID NO: 942311 - RNA, 24 nt, Human
ucuugagaucaggaguuugagacc

SEQ ID NO: 942312 - RNA, 19 nt, Human
ugacaguaaagcaggugga

SEQ ID NO: 942313 - RNA, 23 nt, Human
ugagaccagccuggccaacaugg

SEQ ID NO: 942314 - RNA, 24 nt, Human
ugagaccagccuggccaacauggu

SEQ ID NO: 942315 - RNA, 22 nt, Human
ugagccgagauugcaccacugc

SEQ ID NO: 942316 - RNA, 18 nt, Human
ugagguagauacacugcc

SEQ ID NO: 942317 - RNA, 19 nt, Human
ugagguagauacacugcca

SEQ ID NO: 942318 - RNA, 20 nt, Human
ugauggugguaggcauggga

SEQ ID NO: 942319 - RNA, 25 nt, Human
ugauuuccagcccuucccagaccuc

SEQ ID NO: 942320 - RNA, 20 nt, Human
ugcccaaagccaugcaguug

SEQ ID NO: 942321 - RNA, 21 nt, Human
ugccuggcgcuuuacaugccu

SEQ ID NO: 942322 - RNA, 19 nt, Human
uggagacagagcuuggugg

SEQ ID NO: 942323 - RNA, 21 nt, Human
uggcaaggaccaccaccagca

SEQ ID NO: 942324 - RNA, 25 nt, Human
uggccaacaugguaagaacccuguc

SEQ ID NO: 942325 - RNA, 23 nt, Human
ugggagagauggugucagcagug

SEQ ID NO: 942326 - RNA, 21 nt, Human
ugggaggccggaggcaggcca

SEQ ID NO: 942327 - RNA, 25 nt, Human
ugguaggcaugggaggcacuuugga

SEQ ID NO: 942328 - RNA, 23 nt, Human
uggugucagcagugacucccagg

SEQ ID NO: 942329 - RNA, 18 nt, Human
uguaaucucaccacugcu

SEQ ID NO: 942330 - RNA, 27 nt, Human
ugucuuacucauucugacaguaaagca

SEQ ID NO: 942331 - RNA, 18 nt, Human
uuagccgggcgugguggc

SEQ ID NO: 942332 - RNA, 19 nt, Human
uuagccgggcgugguggca

SEQ ID NO: 942333 - RNA, 24 nt, Human
uuagccgggcgugguggcacacgc

SEQ ID NO: 942334 - RNA, 23 nt, Human
uucccuggacuuccaggagaaca

SEQ ID NO: 942335 - RNA, 24 nt, Human
uugaacccaggaggcggagguugc

SEQ ID NO: 942336 - RNA, 18 nt, Human
uugcagugagccgagauu

SEQ ID NO: 942337 - RNA, 19 nt, Human
uugcagugagccgagauug

SEQ ID NO: 942338 - RNA, 20 nt, Human
uugcagugagccgagauugc

SEQ ID NO: 942339 - RNA, 22 nt, Human
uugcagugagccgagauugcac

SEQ ID NO: 942340 - RNA, 26 nt, Human
uuuaaugauuucuucucugucuuacu

SEQ ID NO: 942341 - RNA, 22 nt, Human
uuuccuguccccagugauuucc

SEQ ID NO: 942342 - RNA, 25 nt, Human
uuuuuuuuuuggagacagagcuugg

SEQ ID NO: 942343 - RNA, 24 nt, Human
uuuuuuuuuuuuggagacagagcu

SEQ ID NO: 942344 - RNA, 18 nt, Human
uuuuuuuuuuuuuuuuug

SEQ ID NO: 942345 - RNA, 21 nt, Human
aagcaggugccuggggaaugc

SEQ ID NO: 942346 - RNA, 24 nt, Human
aagcguggacagagcugaggacac

SEQ ID NO: 942347 - RNA, 24 nt, Human
agccccuuacccggcaaaggcccg

SEQ ID NO: 942348 - RNA, 19 nt, Human
aggccagauauaauacaca

SEQ ID NO: 942349 - RNA, 19 nt, Human
auauauguauauguauaca

SEQ ID NO: 942350 - RNA, 21 nt, Human
cacggcggcgacacacgggag

SEQ ID NO: 942351 - RNA, 21 nt, Human
cacuauauaacgaggccagau

SEQ ID NO: 942352 - RNA, 21 nt, Human
cggcaaaggcccgguuggggc

SEQ ID NO: 942353 - RNA, 22 nt, Human
cuggcccgggccggugguggcu

SEQ ID NO: 942354 - RNA, 21 nt, Human
cuucauauauauuauauauau

SEQ ID NO: 942355 - RNA, 24 nt, Human
cuucauauauauuauauauaugua

SEQ ID NO: 942356 - RNA, 19 nt, Human
gaagcguggacagagcuga

SEQ ID NO: 942357 - RNA, 18 nt, Human
gaggacacggacggacag

SEQ ID NO: 942358 - RNA, 19 nt, Human
gcccugggcugggggcugc

SEQ ID NO: 942359 - RNA, 20 nt, Human
gcguggacaaguggcgucgc

SEQ ID NO: 942360 - RNA, 24 nt, Human
ggcucuguugcgggcgcacgacgc

SEQ ID NO: 942361 - RNA, 19 nt, Human
guauauguauacauauaua

SEQ ID NO: 942362 - RNA, 23 nt, Human
gugguggcugcguggacaagugg

SEQ ID NO: 942363 - RNA, 20 nt, Human
guucccaacauauauacauu

SEQ ID NO: 942364 - RNA, 21 nt, Human
uaagaacacuagucgucuuaa

SEQ ID NO: 942365 - RNA, 23 nt, Human
uaauuuaugcuucuaucuucccu

SEQ ID NO: 942366 - RNA, 22 nt, Human
uauauauauguauauguauaca

SEQ ID NO: 942367 - RNA, 23 nt, Human
uauauauauguauauguauacau

SEQ ID NO: 942368 - RNA, 25 nt, Human
uauauauuauauauauguauaugua

SEQ ID NO: 942369 - RNA, 21 nt, Human
uauauguauacauauauauac

SEQ ID NO: 942370 - RNA, 22 nt, Human
uauauguauacauauauauaca

SEQ ID NO: 942371 - RNA, 24 nt, Human
uauauguauacauauauauacacu

SEQ ID NO: 942372 - RNA, 24 nt, Human
uauauguauauguauacauauaua

SEQ ID NO: 942373 - RNA, 22 nt, Human
uauguauauguauacauauaua

SEQ ID NO: 942374 - RNA, 24 nt, Human
uauguauauguauacauauauaua

SEQ ID NO: 942375 - RNA, 18 nt, Human
uccucaagcaggugccug

SEQ ID NO: 942376 - RNA, 21 nt, Human
ugaggacacggacggacaggc

SEQ ID NO: 942377 - RNA, 20 nt, Human
uggcagggacuggcccgggc

SEQ ID NO: 942378 - RNA, 23 nt, Human
uggcagggacuggcccgggccgg

SEQ ID NO: 942379 - RNA, 24 nt, Human
ugguggcugcguggacaaguggcc

SEQ ID NO: 942380 - RNA, 19 nt, Human
uguauacauauauauacac

SEQ ID NO: 942381 - RNA, 25 nt, Human
uguauacauauauauacacuauaua

SEQ ID NO: 942382 - RNA, 21 nt, Human
uguauauguauacauauauau

SEQ ID NO: 942383 - RNA, 19 nt, Human
ugugaagcaauauacuaau

SEQ ID NO: 942384 - RNA, 30 nt, Human
uuuuacagucauauguacaggaaguugcuu

SEQ ID NO: 942385 - RNA, 22 nt, Human
aaagggaggcauugggagugau

SEQ ID NO: 942386 - RNA, 27 nt, Human
aaagggccuguggggugggcaccugcc

SEQ ID NO: 942387 - RNA, 18 nt, Human
aaguucccuccaagccac

SEQ ID NO: 942388 - RNA, 18 nt, Human
aaguugagaggggagaag

SEQ ID NO: 942389 - RNA, 18 nt, Human
accagccacagcuguggu

SEQ ID NO: 942390 - RNA, 23 nt, Human
acugacccauuuuaacuggcccc

SEQ ID NO: 942391 - RNA, 28 nt, Human
agacagccucagggaaggggggaacgcc

SEQ ID NO: 942392 - RNA, 19 nt, Human
agagucugagccaacucag

SEQ ID NO: 942393 - RNA, 19 nt, Human
agggguggugcuaaucugg

SEQ ID NO: 942394 - RNA, 24 nt, Human
auguccaaaugggggugugggugg

SEQ ID NO: 942395 - RNA, 18 nt, Human
caaggggaggccaguugu

SEQ ID NO: 942396 - RNA, 18 nt, Human
cagcagcaguguccaggg

SEQ ID NO: 942397 - RNA, 21 nt, Human
caggaaagggccuguggggug

SEQ ID NO: 942398 - RNA, 20 nt, Human
caggugaaggggugaguaug

SEQ ID NO: 942399 - RNA, 23 nt, Human
cauaaggccagccacugugccag

SEQ ID NO: 942400 - RNA, 23 nt, Human
caucucugcuucaaugaacucgg

SEQ ID NO: 942401 - RNA, 20 nt, Human
ccaacccaagagugagaggg

SEQ ID NO: 942402 - RNA, 18 nt, Human
ccagagcauccuaaucua

SEQ ID NO: 942403 - RNA, 22 nt, Human
ccaggaauaccagagcauccua

SEQ ID NO: 942404 - RNA, 22 nt, Human
cccauagcauccaacccaagag

SEQ ID NO: 942405 - RNA, 18 nt, Human
cccuagaguggaggaacc

SEQ ID NO: 942406 - RNA, 23 nt, Human
ccugucaagccccaggucucagc

SEQ ID NO: 942407 - RNA, 27 nt, Human
ccuguggggugggcaccugcccucucu

SEQ ID NO: 942408 - RNA, 21 nt, Human
cucacauuuuauugagaacag

SEQ ID NO: 942409 - RNA, 22 nt, Human
cuccaugguccaggaaagggcc

SEQ ID NO: 942410 - RNA, 19 nt, Human
cuggaagacuucaauguua

SEQ ID NO: 942411 - RNA, 23 nt, Human
cuggaagacuucaauguuagucu

SEQ ID NO: 942412 - RNA, 20 nt, Human
cuggcagggucuagggcagg

SEQ ID NO: 942413 - RNA, 22 nt, Human
cuguggagacccuaaagaugga

SEQ ID NO: 942414 - RNA, 19 nt, Human
cuguuaggcccuggcccug

SEQ ID NO: 942415 - RNA, 23 nt, Human
gaaagggccuguggggugggcac

SEQ ID NO: 942416 - RNA, 19 nt, Human
gaaguucccuccaagccac

SEQ ID NO: 942417 - RNA, 20 nt, Human
gaaguucccuccaagccacu

SEQ ID NO: 942418 - RNA, 18 nt, Human
gaauggggaaagcaggca

SEQ ID NO: 942419 - RNA, 24 nt, Human
gagaacagugggcaggggggccgg

SEQ ID NO: 942420 - RNA, 19 nt, Human
gcaccugcccucucuggga

SEQ ID NO: 942421 - RNA, 19 nt, Human
gcagcaggcuccuccagga

SEQ ID NO: 942422 - RNA, 22 nt, Human
ggaaagggaggcauugggagug

SEQ ID NO: 942423 - RNA, 24 nt, Human
ggcagggcccuuucugggcagggc

SEQ ID NO: 942424 - RNA, 20 nt, Human
gggaagcaggugugagaaag

SEQ ID NO: 942425 - RNA, 19 nt, Human
gggcaugaggucugguggg

SEQ ID NO: 942426 - RNA, 23 nt, Human
gggcaugaggucugguggggguu

SEQ ID NO: 942427 - RNA, 23 nt, Human
gggccgaggggaagaaacacugu

SEQ ID NO: 942428 - RNA, 19 nt, Human
ggggggcugggagaggagu

SEQ ID NO: 942429 - RNA, 24 nt, Human
ggggguaggaggggacaagacagg

SEQ ID NO: 942430 - RNA, 23 nt, Human
gggguaggaggggacaagacagg

SEQ ID NO: 942431 - RNA, 21 nt, Human
gggguggugcuaaucuggggg

SEQ ID NO: 942432 - RNA, 22 nt, Human
gggguuggggccagagauccag

SEQ ID NO: 942433 - RNA, 22 nt, Human
ggguaaggggccagacagguuu

SEQ ID NO: 942434 - RNA, 26 nt, Human
ggguaggaggggacaagacagggcua

SEQ ID NO: 942435 - RNA, 24 nt, Human
ggguggugcuaaucuggggguagg

SEQ ID NO: 942436 - RNA, 18 nt, Human
ggguuggggccagagauc

SEQ ID NO: 942437 - RNA, 24 nt, Human
ggugugagaaagggugaugaccca

SEQ ID NO: 942438 - RNA, 18 nt, Human
gugaaggggugaguaugg

SEQ ID NO: 942439 - RNA, 20 nt, Human
uaaggggccagacagguuuc

SEQ ID NO: 942440 - RNA, 19 nt, Human
uaaucuggggguaggaggg

SEQ ID NO: 942441 - RNA, 22 nt, Human
uaggcccuggcccugauuccag

SEQ ID NO: 942442 - RNA, 24 nt, Human
ucaagccccaggucucagccaugc

SEQ ID NO: 942443 - RNA, 20 nt, Human
ucagggaaggggcucaggau

SEQ ID NO: 942444 - RNA, 20 nt, Human
uccaggaaagggccuguggg

SEQ ID NO: 942445 - RNA, 22 nt, Human
uccagggcaugaggucuggugg

SEQ ID NO: 942446 - RNA, 19 nt, Human
uccaugguccaggaaaggg

SEQ ID NO: 942447 - RNA, 21 nt, Human
ucccauagcauccaacccaag

SEQ ID NO: 942448 - RNA, 19 nt, Human
ucccuccaagccacuucuc

SEQ ID NO: 942449 - RNA, 23 nt, Human
ucccuccugaggaaggcagaggc

SEQ ID NO: 942450 - RNA, 19 nt, Human
ucgagguuucuggaagacu

SEQ ID NO: 942451 - RNA, 20 nt, Human
ucuaaggagcgcaggccugu

SEQ ID NO: 942452 - RNA, 23 nt, Human
ucucgaaguaucuagcccagcuc

SEQ ID NO: 942453 - RNA, 20 nt, Human
ucugagccaacucagcagca

SEQ ID NO: 942454 - RNA, 21 nt, Human
ucugggggaagagcccccuuu

SEQ ID NO: 942455 - RNA, 23 nt, Human
ugagaggcaaggcacgagucugg

SEQ ID NO: 942456 - RNA, 19 nt, Human
ugagaggggagaagccuca

SEQ ID NO: 942457 - RNA, 25 nt, Human
ugagagggguggugcuaaucugggg

SEQ ID NO: 942458 - RNA, 26 nt, Human
ugagagggguggugcuaaucuggggg

SEQ ID NO: 942459 - RNA, 18 nt, Human
ugagccaacucagcagca

SEQ ID NO: 942460 - RNA, 19 nt, Human
ugagccaacucagcagcag

SEQ ID NO: 942461 - RNA, 20 nt, Human
ugaggccaggagagccccuc

SEQ ID NO: 942462 - RNA, 24 nt, Human
ugcagcaggcuccuccaggaaagg

SEQ ID NO: 942463 - RNA, 21 nt, Human
ugcccagauccuccugcccgc

SEQ ID NO: 942464 - RNA, 19 nt, Human
ugcccgccucugcuugcug

SEQ ID NO: 942465 - RNA, 18 nt, Human
uggagauugaggccagga

SEQ ID NO: 942466 - RNA, 21 nt, Human
uggaggaaccucaaggggagg

SEQ ID NO: 942467 - RNA, 20 nt, Human
ugggaucccucagcaggaga

SEQ ID NO: 942468 - RNA, 21 nt, Human
ugggggaaguaaucccccugg

SEQ ID NO: 942469 - RNA, 18 nt, Human
uggggguguggguggggg

SEQ ID NO: 942470 - RNA, 19 nt, Human
uggggguguggguggggga

SEQ ID NO: 942471 - RNA, 18 nt, Human
uggggguuggggccagag

SEQ ID NO: 942472 - RNA, 23 nt, Human
uggggguuggggccagagaucca

SEQ ID NO: 942473 - RNA, 20 nt, Human
uggguaaggggccagacagg

SEQ ID NO: 942474 - RNA, 24 nt, Human
ugggugggggaaguaaucccccug

SEQ ID NO: 942475 - RNA, 21 nt, Human
ugguggggguuggggccagag

SEQ ID NO: 942476 - RNA, 23 nt, Human
ugguggggguuggggccagagau

SEQ ID NO: 942477 - RNA, 18 nt, Human
ugugaaaggcucagugcc

SEQ ID NO: 942478 - RNA, 22 nt, Human
uguggggugggcaccugcccuc

SEQ ID NO: 942479 - RNA, 23 nt, Human
uucuuuuaccccucaaaagaaau

SEQ ID NO: 942480 - RNA, 19 nt, Human
uugugaaaggcucagugcc

SEQ ID NO: 942481 - RNA, 21 nt, Human
uuuauugagaacagugggcag

SEQ ID NO: 942482 - RNA, 18 nt, Human
uuuucuggcagggucuag

SEQ ID NO: 942483 - RNA, 22 nt, Human
aaauggccaguacagaaggggc

SEQ ID NO: 942484 - RNA, 19 nt, Human
aagaggcucuggccugcuc

SEQ ID NO: 942485 - RNA, 20 nt, Human
aagcaaaagaggcucuggcc

SEQ ID NO: 942486 - RNA, 19 nt, Human
aaggccccaaggaccuugc

SEQ ID NO: 942487 - RNA, 21 nt, Human
aaguggcccucgaagaaaggu

SEQ ID NO: 942488 - RNA, 25 nt, Human
acagcacaugagggucuggggucug

SEQ ID NO: 942489 - RNA, 18 nt, Human
agagcaggaagaggggcu

SEQ ID NO: 942490 - RNA, 21 nt, Human
agcagaagccccaucccagga

SEQ ID NO: 942491 - RNA, 24 nt, Human
agcucacuccccaucuugccccug

SEQ ID NO: 942492 - RNA, 20 nt, Human
aggaagcaaaagaggcucug

SEQ ID NO: 942493 - RNA, 18 nt, Human
aggaaugugggagaggcc

SEQ ID NO: 942494 - RNA, 21 nt, Human
aggcagaggucuuggcuuccu

SEQ ID NO: 942495 - RNA, 19 nt, Human
aggcaggaggcagcucugg

SEQ ID NO: 942496 - RNA, 21 nt, Human
aggcaggaggcagcucugggg

SEQ ID NO: 942497 - RNA, 23 nt, Human
aggcaggggacaaaaugucaggu

SEQ ID NO: 942498 - RNA, 19 nt, Human
agggagaacaccaccagga

SEQ ID NO: 942499 - RNA, 22 nt, Human
aggucgcucgggcucauggggg

SEQ ID NO: 942500 - RNA, 24 nt, Human
agugccaggcaggaggcagcucug

SEQ ID NO: 942501 - RNA, 19 nt, Human
augcagggagaacaccacc

SEQ ID NO: 942502 - RNA, 20 nt, Human
augccgcagucuccuugagu

SEQ ID NO: 942503 - RNA, 18 nt, Human
auucacugcuccuucucc

SEQ ID NO: 942504 - RNA, 23 nt, Human
caaaugccaaagugcacugagga

SEQ ID NO: 942505 - RNA, 21 nt, Human
cacagcacaugagggucuggg

SEQ ID NO: 942506 - RNA, 18 nt, Human
cacaggcuuggcccuggc

SEQ ID NO: 942507 - RNA, 20 nt, Human
caccgugcaaaugccaaagu

SEQ ID NO: 942508 - RNA, 20 nt, Human
cacuggccugggcuccugac

SEQ ID NO: 942509 - RNA, 23 nt, Human
cagaaggggccaggcacacagca

SEQ ID NO: 942510 - RNA, 23 nt, Human
cagagaggaaccagcuggaccug

SEQ ID NO: 942511 - RNA, 19 nt, Human
cagcucacuccccaucuug

SEQ ID NO: 942512 - RNA, 20 nt, Human
cagcucacuccccaucuugc

SEQ ID NO: 942513 - RNA, 20 nt, Human
caggagcaaagccagcaacu

SEQ ID NO: 942514 - RNA, 23 nt, Human
caggagcuaggcgaggcuuugcg

SEQ ID NO: 942515 - RNA, 18 nt, Human
caggaggggaguguggcg

SEQ ID NO: 942516 - RNA, 19 nt, Human
caguacagaaggggccagg

SEQ ID NO: 942517 - RNA, 23 nt, Human
cauaagcaucguggacguaugug

SEQ ID NO: 942518 - RNA, 19 nt, Human
cauagccugucuccuccag

SEQ ID NO: 942519 - RNA, 21 nt, Human
ccaggaggggaguguggcggc

SEQ ID NO: 942520 - RNA, 21 nt, Human
ccaggccccaucucacuggcc

SEQ ID NO: 942521 - RNA, 20 nt, Human
ccaggugcuguggaccugcu

SEQ ID NO: 942522 - RNA, 23 nt, Human
ccaguacagaaggggccaggcac

SEQ ID NO: 942523 - RNA, 24 nt, Human
ccaguacagaaggggccaggcaca

SEQ ID NO: 942524 - RNA, 21 nt, Human
cccaggugcuguggaccugcu

SEQ ID NO: 942525 - RNA, 21 nt, Human
ccccaaggaccuugcugccuu

SEQ ID NO: 942526 - RNA, 19 nt, Human
ccccugagcucccuggcuc

SEQ ID NO: 942527 - RNA, 26 nt, Human
ccccuggaguugagucacaggcuugg

SEQ ID NO: 942528 - RNA, 18 nt, Human
ccccuggucucugaccuc

SEQ ID NO: 942529 - RNA, 27 nt, Human
cccgccaggcucaggggccuggaguca

SEQ ID NO: 942530 - RNA, 19 nt, Human
cccggccuccccuggucuc

SEQ ID NO: 942531 - RNA, 18 nt, Human
cccguccacaccaacacc

SEQ ID NO: 942532 - RNA, 20 nt, Human
cccuccuggcugcagcugca

SEQ ID NO: 942533 - RNA, 18 nt, Human
cccugagcucccuggcuc

SEQ ID NO: 942534 - RNA, 24 nt, Human
ccggccuccccuggucucugaccu

SEQ ID NO: 942535 - RNA, 25 nt, Human
ccgugcaaaugccaaagugcacuga

SEQ ID NO: 942536 - RNA, 19 nt, Human
ccucgaagaaaggucgcuc

SEQ ID NO: 942537 - RNA, 22 nt, Human
ccucuuggcaaccugugccugg

SEQ ID NO: 942538 - RNA, 25 nt, Human
ccugagcucccuggcuccccagaag

SEQ ID NO: 942539 - RNA, 18 nt, Human
ccugggcccgcuccccuc

SEQ ID NO: 942540 - RNA, 21 nt, Human
ccuuggcaccuggcaugccca

SEQ ID NO: 942541 - RNA, 20 nt, Human
cucccaccgcccuggugcug

SEQ ID NO: 942542 - RNA, 20 nt, Human
cuccuccaagaaggccccaa

SEQ ID NO: 942543 - RNA, 24 nt, Human
cuccuccaagaaggccccaaggac

SEQ ID NO: 942544 - RNA, 21 nt, Human
cuccugggcccgcuccccucc

SEQ ID NO: 942545 - RNA, 18 nt, Human
cugcccaggugcugugga

SEQ ID NO: 942546 - RNA, 20 nt, Human
cugcgccccguccacaccaa

SEQ ID NO: 942547 - RNA, 21 nt, Human
cuggcuccugggcccgcuccc

SEQ ID NO: 942548 - RNA, 22 nt, Human
cuuggcccuggccacaaauggc

SEQ ID NO: 942549 - RNA, 18 nt, Human
gaaagccggaauccagga

SEQ ID NO: 942550 - RNA, 21 nt, Human
gaagcaaaagaggcucuggcc

SEQ ID NO: 942551 - RNA, 24 nt, Human
gagcaggaagaggggcuuccccga

SEQ ID NO: 942552 - RNA, 22 nt, Human
gagcugcacuccuggaacaggc

SEQ ID NO: 942553 - RNA, 18 nt, Human
gcagaggucuuggcuucc

SEQ ID NO: 942554 - RNA, 23 nt, Human
gccaaagugcacugaggagaggg

SEQ ID NO: 942555 - RNA, 24 nt, Human
gccaguacagaaggggccaggcac

SEQ ID NO: 942556 - RNA, 20 nt, Human
gccggaauccaggaagcugg

SEQ ID NO: 942557 - RNA, 18 nt, Human
gccgggugggguggcagc

SEQ ID NO: 942558 - RNA, 24 nt, Human
gccuggcuccugggcccgcucccc

SEQ ID NO: 942559 - RNA, 22 nt, Human
gcuguggaccugcugagacggg

SEQ ID NO: 942560 - RNA, 25 nt, Human
ggagaacaccaccaggacuggcugc

SEQ ID NO: 942561 - RNA, 22 nt, Human
ggagaucugcgccccguccaca

SEQ ID NO: 942562 - RNA, 24 nt, Human
gggccaagccauguaggcagggga

SEQ ID NO: 942563 - RNA, 18 nt, Human
gggcccgcuccccuccug

SEQ ID NO: 942564 - RNA, 21 nt, Human
ggucagaggccagccccagga

SEQ ID NO: 942565 - RNA, 20 nt, Human
uaccuaaugugacacagaca

SEQ ID NO: 942566 - RNA, 19 nt, Human
uaggguguccucauagcuc

SEQ ID NO: 942567 - RNA, 22 nt, Human
ucacaggcuuggcccuggcccc

SEQ ID NO: 942568 - RNA, 18 nt, Human
ucacuggccugggcuccu

SEQ ID NO: 942569 - RNA, 23 nt, Human
ucagcucacuccccaucuugccc

SEQ ID NO: 942570 - RNA, 23 nt, Human
uccaggccccaucucacuggccu

SEQ ID NO: 942571 - RNA, 27 nt, Human
ucccccgcggggaggaaugugggagag

SEQ ID NO: 942572 - RNA, 25 nt, Human
ucgaagaaaggucgcucgggcucau

SEQ ID NO: 942573 - RNA, 23 nt, Human
ucggugaaguaggggucuuccuc

SEQ ID NO: 942574 - RNA, 22 nt, Human
ucuccuccaggaaggcagaggu

SEQ ID NO: 942575 - RNA, 19 nt, Human
ucucugaccucugcccagg

SEQ ID NO: 942576 - RNA, 19 nt, Human
ugaaguaggggucuuccuc

SEQ ID NO: 942577 - RNA, 24 nt, Human
ugacacagacaaggcuccaggccc

SEQ ID NO: 942578 - RNA, 21 nt, Human
ugagcucccuggcuccccaga

SEQ ID NO: 942579 - RNA, 23 nt, Human
ugaggagaggggagggucuguga

SEQ ID NO: 942580 - RNA, 22 nt, Human
ugagucacaggcuuggcccugg

SEQ ID NO: 942581 - RNA, 24 nt, Human
ugagugagcccgggagcagaagcc

SEQ ID NO: 942582 - RNA, 20 nt, Human
ugccaugaggcggcugggag

SEQ ID NO: 942583 - RNA, 23 nt, Human
ugcccaggugcuguggaccugcu

SEQ ID NO: 942584 - RNA, 21 nt, Human
ugccccuggaguugagucaca

SEQ ID NO: 942585 - RNA, 19 nt, Human
ugccuggcgccgcccgugu

SEQ ID NO: 942586 - RNA, 18 nt, Human
ugccugggccgcagccac

SEQ ID NO: 942587 - RNA, 22 nt, Human
uggcagcccagccacggagggc

SEQ ID NO: 942588 - RNA, 23 nt, Human
uggcagcccagccacggagggca

SEQ ID NO: 942589 - RNA, 22 nt, Human
uggcgccgcccguguauuccug

SEQ ID NO: 942590 - RNA, 22 nt, Human
uggcggcagugccaggcaggag

SEQ ID NO: 942591 - RNA, 21 nt, Human
uggcuccugggcccgcucccc

SEQ ID NO: 942592 - RNA, 19 nt, Human
uggcugcagcugcaccaag

SEQ ID NO: 942593 - RNA, 19 nt, Human
uggggguccaaaggugugg

SEQ ID NO: 942594 - RNA, 23 nt, Human
uggggguccaaaggugugggggu

SEQ ID NO: 942595 - RNA, 25 nt, Human
uggggguccaaagguguggggguca

SEQ ID NO: 942596 - RNA, 24 nt, Human
uguccccugagcucccuggcuccc

SEQ ID NO: 942597 - RNA, 18 nt, Human
uguggcggcagugccagg

SEQ ID NO: 942598 - RNA, 18 nt, Human
ugugggggucagaggcca

SEQ ID NO: 942599 - RNA, 23 nt, Human
uucacugcuccuucuccaugggc

SEQ ID NO: 942600 - RNA, 22 nt, Human
uuugugcacccacaugugcacg

SEQ ID NO: 942601 - RNA, 20 nt, Human
uuuuuuuuuuuuuuuuccac

SEQ ID NO: 942602 - RNA, 22 nt, Human
aaaacaccagcaaaggcuauaa

SEQ ID NO: 942603 - RNA, 19 nt, Human
aaacacgccccccuccccc

SEQ ID NO: 942604 - RNA, 21 nt, Human
aaacacgccccccuccccccc

SEQ ID NO: 942605 - RNA, 23 nt, Human
aaaccgaugaccccuggcccccg

SEQ ID NO: 942606 - RNA, 19 nt, Human
aacagaacaaaaaccccuu

SEQ ID NO: 942607 - RNA, 19 nt, Human
aacaugccugugggccggg

SEQ ID NO: 942608 - RNA, 20 nt, Human
aaccgaugaccccuggcccc

SEQ ID NO: 942609 - RNA, 22 nt, Human
aacgcaagaagcaagaacuccu

SEQ ID NO: 942610 - RNA, 24 nt, Human
aacgggacaaaggaagaaaagggg

SEQ ID NO: 942611 - RNA, 21 nt, Human
aagcagggaggcaggguuaca

SEQ ID NO: 942612 - RNA, 18 nt, Human
aagccagauggagcaaag

SEQ ID NO: 942613 - RNA, 18 nt, Human
aagccgcaucagcgugug

SEQ ID NO: 942614 - RNA, 22 nt, Human
aagcgguggagggaaggccaga

SEQ ID NO: 942615 - RNA, 21 nt, Human
aagggcgcaaagaauuuacag

SEQ ID NO: 942616 - RNA, 24 nt, Human
aaucaccugugaucaugauaucaa

SEQ ID NO: 942617 - RNA, 20 nt, Human
aaugcuauaaccaacaggau

SEQ ID NO: 942618 - RNA, 19 nt, Human
acaaaggaagaaaaggggc

SEQ ID NO: 942619 - RNA, 28 nt, Human
acagaggagagcuggggaccacccacaa

SEQ ID NO: 942620 - RNA, 24 nt, Human
acauguccauggccugggcugcag

SEQ ID NO: 942621 - RNA, 24 nt, Human
accacccacagcggacgggagagc

SEQ ID NO: 942622 - RNA, 23 nt, Human
acccuaaaaauacacagguggca

SEQ ID NO: 942623 - RNA, 22 nt, Human
acccugauaagaaccagaauga

SEQ ID NO: 942624 - RNA, 21 nt, Human
agaaacacgccccccuccccc

SEQ ID NO: 942625 - RNA, 22 nt, Human
agacugcaggcuguaggcacca

SEQ ID NO: 942626 - RNA, 26 nt, Human
agagagacagacguggagaacucaca

SEQ ID NO: 942627 - RNA, 18 nt, Human
agaggagagcuggggacc

SEQ ID NO: 942628 - RNA, 22 nt, Human
agaggccucguuuuugcugagg

SEQ ID NO: 942629 - RNA, 20 nt, Human
agagugguaagccagaugga

SEQ ID NO: 942630 - RNA, 22 nt, Human
agcaggaauggcagacccccuc

SEQ ID NO: 942631 - RNA, 24 nt, Human
agcaggaguuugggugagauugug

SEQ ID NO: 942632 - RNA, 20 nt, Human
agcagggaggcaggguuaca

SEQ ID NO: 942633 - RNA, 24 nt, Human
agcccagagaugguugcaggaggu

SEQ ID NO: 942634 - RNA, 23 nt, Human
agcuugcugguggaggcuugcug

SEQ ID NO: 942635 - RNA, 23 nt, Human
aggcaccacgcacgguucagagc

SEQ ID NO: 942636 - RNA, 19 nt, Human
aggcugcacuggugggugu

SEQ ID NO: 942637 - RNA, 18 nt, Human
aggcuggcagccaagggc

SEQ ID NO: 942638 - RNA, 21 nt, Human
aggggcuggacagacaccauu

SEQ ID NO: 942639 - RNA, 22 nt, Human
aggugaguggccucgggggguu

SEQ ID NO: 942640 - RNA, 19 nt, Human
aggugcccggggccugggc

SEQ ID NO: 942641 - RNA, 24 nt, Human
aguauagaaaugucuagcaauagu

SEQ ID NO: 942642 - RNA, 25 nt, Human
auaaagcuucaaaccaagaagaugg

SEQ ID NO: 942643 - RNA, 19 nt, Human
aucacaauuaguuuuuuga

SEQ ID NO: 942644 - RNA, 22 nt, Human
aucacuuugguuggguguacac

SEQ ID NO: 942645 - RNA, 25 nt, Human
caaaauaaaaacaauacacauucca

SEQ ID NO: 942646 - RNA, 21 nt, Human
caaaauaaccacaugaacacc

SEQ ID NO: 942647 - RNA, 22 nt, Human
caaaccgaugaccccuggcccc

SEQ ID NO: 942648 - RNA, 22 nt, Human
caaagcgguggagggaaggcca

SEQ ID NO: 942649 - RNA, 24 nt, Human
caaccuggggcuugcucccgcccc

SEQ ID NO: 942650 - RNA, 18 nt, Human
caacgcaagaagcaagaa

SEQ ID NO: 942651 - RNA, 21 nt, Human
cacagaccagccugaaacaaa

SEQ ID NO: 942652 - RNA, 22 nt, Human
cacagccuuccuggugcacugg

SEQ ID NO: 942653 - RNA, 19 nt, Human
caccacgcacgguucagag

SEQ ID NO: 942654 - RNA, 20 nt, Human
caccacgcacgguucagagc

SEQ ID NO: 942655 - RNA, 21 nt, Human
caccagcaaaggcuauaacca

SEQ ID NO: 942656 - RNA, 21 nt, Human
caccucccucacacccuggcc

SEQ ID NO: 942657 - RNA, 19 nt, Human
cacgccccccuccccccca

SEQ ID NO: 942658 - RNA, 22 nt, Human
cagaaacacgccccccuccccc

SEQ ID NO: 942659 - RNA, 21 nt, Human
cagagcacuccggaagagcuu

SEQ ID NO: 942660 - RNA, 21 nt, Human
cagaggagagcuggggaccac

SEQ ID NO: 942661 - RNA, 22 nt, Human
cagccgcccauucuguucaccc

SEQ ID NO: 942662 - RNA, 18 nt, Human
caggcaggguaggcuggc

SEQ ID NO: 942663 - RNA, 22 nt, Human
caggcccgaggcccgucgggag

SEQ ID NO: 942664 - RNA, 19 nt, Human
cagggaggcaggguuacag

SEQ ID NO: 942665 - RNA, 25 nt, Human
caugaacaccuaauauacagguuuc

SEQ ID NO: 942666 - RNA, 24 nt, Human
cauguccauggccugggcugcagc

SEQ ID NO: 942667 - RNA, 24 nt, Human
ccacacagccuuccuggugcacug

SEQ ID NO: 942668 - RNA, 18 nt, Human
ccacagaggagagcuggg

SEQ ID NO: 942669 - RNA, 26 nt, Human
ccagaaacacgccccccuccccccca

SEQ ID NO: 942670 - RNA, 23 nt, Human
ccagacccacacagccuuccugg

SEQ ID NO: 942671 - RNA, 22 nt, Human
cccaaccaagggcacaaucacu

SEQ ID NO: 942672 - RNA, 18 nt, Human
cccagaaacacgcccccc

SEQ ID NO: 942673 - RNA, 22 nt, Human
cccagagcacuccggaagagcu

SEQ ID NO: 942674 - RNA, 19 nt, Human
cccaugcuggggcccgggg

SEQ ID NO: 942675 - RNA, 21 nt, Human
cccaugcuggggcccgggggc

SEQ ID NO: 942676 - RNA, 24 nt, Human
ccccggaugccucugcaccucccu

SEQ ID NO: 942677 - RNA, 24 nt, Human
cccgaggcccgucgggagcagacc

SEQ ID NO: 942678 - RNA, 23 nt, Human
cccuggcccccgagagacguugu

SEQ ID NO: 942679 - RNA, 27 nt, Human
cccugggcucugguuucuuccgaucgg

SEQ ID NO: 942680 - RNA, 19 nt, Human
ccgccccggaugccucugc

SEQ ID NO: 942681 - RNA, 18 nt, Human
ccgcgccccccaaccaag

SEQ ID NO: 942682 - RNA, 19 nt, Human
ccgcuccuguuugcuucug

SEQ ID NO: 942683 - RNA, 20 nt, Human
ccucagggacguccuggcuc

SEQ ID NO: 942684 - RNA, 24 nt, Human
ccugcaccugucacaaccuggggc

SEQ ID NO: 942685 - RNA, 20 nt, Human
ccugcgcugggcaugggccc

SEQ ID NO: 942686 - RNA, 23 nt, Human
ccugcgcugggcaugggcccaag

SEQ ID NO: 942687 - RNA, 25 nt, Human
cucuaaauagcgggcugcccggucu

SEQ ID NO: 942688 - RNA, 21 nt, Human
cucuuaccgggcugguuccuc

SEQ ID NO: 942689 - RNA, 19 nt, Human
cugcaccugucacaaccug

SEQ ID NO: 942690 - RNA, 18 nt, Human
cuggcagccaagggcagu

SEQ ID NO: 942691 - RNA, 22 nt, Human
cuggcaucacccuaggccaugu

SEQ ID NO: 942692 - RNA, 22 nt, Human
cugggcccugucugagcuugga

SEQ ID NO: 942693 - RNA, 24 nt, Human
cuggggcuugcucccgccccggau

SEQ ID NO: 942694 - RNA, 19 nt, Human
cugguggaggcuugcugga

SEQ ID NO: 942695 - RNA, 23 nt, Human
cugguggaggcuugcuggagagg

SEQ ID NO: 942696 - RNA, 23 nt, Human
cuguccuggguaguugggggagg

SEQ ID NO: 942697 - RNA, 24 nt, Human
cuugcagaggccucguuuuugcug

SEQ ID NO: 942698 - RNA, 19 nt, Human
gaaauccccguuucuuuuc

SEQ ID NO: 942699 - RNA, 21 nt, Human
gaccccagugacgggacaacc

SEQ ID NO: 942700 - RNA, 21 nt, Human
gagagugguaagccagaugga

SEQ ID NO: 942701 - RNA, 20 nt, Human
gagcaggaaagggccccagg

SEQ ID NO: 942702 - RNA, 27 nt, Human
gaggcaggguuacagucucccaagggg

SEQ ID NO: 942703 - RNA, 25 nt, Human
gcaagaagcaagaacuccuaaggaa

SEQ ID NO: 942704 - RNA, 21 nt, Human
gcagcgggggagggcuccccg

SEQ ID NO: 942705 - RNA, 23 nt, Human
gcaggaggugcccggggccuggg

SEQ ID NO: 942706 - RNA, 20 nt, Human
gccccccucccccccaugcc

SEQ ID NO: 942707 - RNA, 18 nt, Human
gcccgggggccuucucag

SEQ ID NO: 942708 - RNA, 20 nt, Human
gcccucuuccccaccagucc

SEQ ID NO: 942709 - RNA, 20 nt, Human
gccgcuccuguuugcuucug

SEQ ID NO: 942710 - RNA, 22 nt, Human
gccugggcugcagccgggggca

SEQ ID NO: 942711 - RNA, 20 nt, Human
gcucagaagauguccuggcc

SEQ ID NO: 942712 - RNA, 19 nt, Human
gcucccagagcacuccgga

SEQ ID NO: 942713 - RNA, 18 nt, Human
gcugcagcgggggagggc

SEQ ID NO: 942714 - RNA, 25 nt, Human
gcuugcagaggccucguuuuugcug

SEQ ID NO: 942715 - RNA, 18 nt, Human
ggacagagggaggggcug

SEQ ID NO: 942716 - RNA, 20 nt, Human
ggaccaggaagcagggaggc

SEQ ID NO: 942717 - RNA, 19 nt, Human
ggagagaaaugguuugcuu

SEQ ID NO: 942718 - RNA, 25 nt, Human
ggagcagaccuguagcuccccggag

SEQ ID NO: 942719 - RNA, 18 nt, Human
ggagggaaggccagaggc

SEQ ID NO: 942720 - RNA, 20 nt, Human
ggaggugcccggggccuggg

SEQ ID NO: 942721 - RNA, 23 nt, Human
ggauggccccgaccggguggccc

SEQ ID NO: 942722 - RNA, 21 nt, Human
ggcagacccccucucaaacac

SEQ ID NO: 942723 - RNA, 23 nt, Human
ggcaggcccagaaacacgccccc

SEQ ID NO: 942724 - RNA, 23 nt, Human
ggcugcagccgggggcagcuugg

SEQ ID NO: 942725 - RNA, 22 nt, Human
ggcugcagcgggggagggcucc

SEQ ID NO: 942726 - RNA, 23 nt, Human
ggcuggcagccaagggcaguguc

SEQ ID NO: 942727 - RNA, 18 nt, Human
ggcuugcagaggccucgu

SEQ ID NO: 942728 - RNA, 21 nt, Human
gggacccaggaaacccgccuc

SEQ ID NO: 942729 - RNA, 24 nt, Human
gggcaggcccagaaacacgccccc

SEQ ID NO: 942730 - RNA, 22 nt, Human
gggcaugggcccaagccaaggg

SEQ ID NO: 942731 - RNA, 19 nt, Human
gggcugcagcgggggaggg

SEQ ID NO: 942732 - RNA, 20 nt, Human
gggcugcagcgggggagggc

SEQ ID NO: 942733 - RNA, 21 nt, Human
ggggcacagaccagccugaaa

SEQ ID NO: 942734 - RNA, 21 nt, Human
ggguaggcuggcagccaaggg

SEQ ID NO: 942735 - RNA, 22 nt, Human
ggguaggcuggcagccaagggc

SEQ ID NO: 942736 - RNA, 24 nt, Human
ggguaggcuggcagccaagggcag

SEQ ID NO: 942737 - RNA, 19 nt, Human
gguaggcuggcagccaagg

SEQ ID NO: 942738 - RNA, 23 nt, Human
ggugcccggggccugggcugcag

SEQ ID NO: 942739 - RNA, 22 nt, Human
gguggcaggacuaguacacuga

SEQ ID NO: 942740 - RNA, 22 nt, Human
ggugggugguggugggugggcu

SEQ ID NO: 942741 - RNA, 19 nt, Human
gguguggaggugggacgug

SEQ ID NO: 942742 - RNA, 18 nt, Human
guagguaaaauaaaaaca

SEQ ID NO: 942743 - RNA, 22 nt, Human
guccauggccugggcugcagcc

SEQ ID NO: 942744 - RNA, 25 nt, Human
guccuuuuucucugcuuucugagug

SEQ ID NO: 942745 - RNA, 20 nt, Human
gucuaccugcaccugucaca

SEQ ID NO: 942746 - RNA, 21 nt, Human
guggaggugggacgugggcuc

SEQ ID NO: 942747 - RNA, 22 nt, Human
guugucuuucccagagguuugu

SEQ ID NO: 942748 - RNA, 21 nt, Human
uaaaaacaccagcaaaggcua

SEQ ID NO: 942749 - RNA, 22 nt, Human
uaaaaacaccagcaaaggcuau

SEQ ID NO: 942750 - RNA, 26 nt, Human
uaaaaacaccagcaaaggcuauaacc

SEQ ID NO: 942751 - RNA, 23 nt, Human
uaaaauaaaaacagaacaaaaac

SEQ ID NO: 942752 - RNA, 23 nt, Human
uaaauacaaaauaaccacaugaa

SEQ ID NO: 942753 - RNA, 18 nt, Human
uaacaugggcaaaugaga

SEQ ID NO: 942754 - RNA, 26 nt, Human
uaauugauuugcauacugaacaacac

SEQ ID NO: 942755 - RNA, 19 nt, Human
uacaaaauaaccacaugaa

SEQ ID NO: 942756 - RNA, 21 nt, Human
uacacugaagcuaaauaguac

SEQ ID NO: 942757 - RNA, 25 nt, Human
uagaagauggaagaaccuuggggac

SEQ ID NO: 942758 - RNA, 21 nt, Human
uagcgggcugcccggucuucc

SEQ ID NO: 942759 - RNA, 24 nt, Human
uagcuuuaaauuguugcuguuuaa

SEQ ID NO: 942760 - RNA, 18 nt, Human
uaggacagagggaagugg

SEQ ID NO: 942761 - RNA, 19 nt, Human
uaggugggguaggaugcag

SEQ ID NO: 942762 - RNA, 22 nt, Human
uaugcccgcgccccccaaccaa

SEQ ID NO: 942763 - RNA, 21 nt, Human
ucagcgugugcccucuuaccg

SEQ ID NO: 942764 - RNA, 18 nt, Human
uccaagagaaaugaaugc

SEQ ID NO: 942765 - RNA, 22 nt, Human
uccaaggcucggggcccaugcu

SEQ ID NO: 942766 - RNA, 18 nt, Human
uccaccugugagcagagu

SEQ ID NO: 942767 - RNA, 20 nt, Human
uccacgcacugcccuugcca

SEQ ID NO: 942768 - RNA, 19 nt, Human
uccagacugcaggcuguag

SEQ ID NO: 942769 - RNA, 21 nt, Human
uccagaguucaggaccaucuc

SEQ ID NO: 942770 - RNA, 22 nt, Human
uccauggccugggcugcagccg

SEQ ID NO: 942771 - RNA, 22 nt, Human
ucccugccagcugacugaggga

SEQ ID NO: 942772 - RNA, 21 nt, Human
ucggggcccaugcuggggccc

SEQ ID NO: 942773 - RNA, 19 nt, Human
ucuccagaguucaggacca

SEQ ID NO: 942774 - RNA, 23 nt, Human
ucuccagaguucaggaccaucuc

SEQ ID NO: 942775 - RNA, 23 nt, Human
ucuccaggugacuucauagcuuu

SEQ ID NO: 942776 - RNA, 22 nt, Human
ucugacacagggcguggccacu

SEQ ID NO: 942777 - RNA, 19 nt, Human
ucugcaccuccccggccuu

SEQ ID NO: 942778 - RNA, 21 nt, Human
ucugcaccucccucacacccu

SEQ ID NO: 942779 - RNA, 23 nt, Human
ucuggaccaggaagcagggaggc

SEQ ID NO: 942780 - RNA, 24 nt, Human
ucuggugcggggcggucugagggc

SEQ ID NO: 942781 - RNA, 21 nt, Human
ugaacaacacgcuauuugaaa

SEQ ID NO: 942782 - RNA, 22 nt, Human
ugaauacauauuuauuagauaa

SEQ ID NO: 942783 - RNA, 24 nt, Human
ugaaucaccugugaucaugauauc

SEQ ID NO: 942784 - RNA, 19 nt, Human
ugagagggcugcagcgggg

SEQ ID NO: 942785 - RNA, 20 nt, Human
ugcccggggccugggcugca

SEQ ID NO: 942786 - RNA, 21 nt, Human
ugcccggggccugggcugcag

SEQ ID NO: 942787 - RNA, 24 nt, Human
ugccugcagguacauacuggugca

SEQ ID NO: 942788 - RNA, 21 nt, Human
ugccugcuggcucccugucca

SEQ ID NO: 942789 - RNA, 21 nt, Human
ugcucccgccccggaugccuc

SEQ ID NO: 942790 - RNA, 24 nt, Human
uggaagaaccuuggggacacugga

SEQ ID NO: 942791 - RNA, 20 nt, Human
uggagagguggcaggagagg

SEQ ID NO: 942792 - RNA, 19 nt, Human
uggagcaaagcgguggagg

SEQ ID NO: 942793 - RNA, 20 nt, Human
uggagcacagggacagaggg

SEQ ID NO: 942794 - RNA, 21 nt, Human
uggagggaaggccagaggcug

SEQ ID NO: 942795 - RNA, 21 nt, Human
uggagggaggcucuggaccag

SEQ ID NO: 942796 - RNA, 18 nt, Human
uggcggcagaaacaugcc

SEQ ID NO: 942797 - RNA, 24 nt, Human
ugggaccccagugacgggacaacc

SEQ ID NO: 942798 - RNA, 19 nt, Human
ugggccgagcuugcuggug

SEQ ID NO: 942799 - RNA, 19 nt, Human
ugggguaucuuggcuuaua

SEQ ID NO: 942800 - RNA, 19 nt, Human
ugggugguggugggugggc

SEQ ID NO: 942801 - RNA, 19 nt, Human
uggguguguuuaugugugu

SEQ ID NO: 942802 - RNA, 25 nt, Human
uggguguguuuauguguguacgugu

SEQ ID NO: 942803 - RNA, 18 nt, Human
uggugcacuggugcaccc

SEQ ID NO: 942804 - RNA, 18 nt, Human
uggugggugguggugggu

SEQ ID NO: 942805 - RNA, 20 nt, Human
ugguggugggugggcugguc

SEQ ID NO: 942806 - RNA, 23 nt, Human
ugguggugggugggcuggucuca

SEQ ID NO: 942807 - RNA, 22 nt, Human
uguccuggguaguugggggagg

SEQ ID NO: 942808 - RNA, 24 nt, Human
uguccuggguaguugggggaggug

SEQ ID NO: 942809 - RNA, 21 nt, Human
ugucuggggcaggcccagaaa

SEQ ID NO: 942810 - RNA, 23 nt, Human
uuacuucaggcugcacugguggg

SEQ ID NO: 942811 - RNA, 19 nt, Human
uuauaggucaggggucaaa

SEQ ID NO: 942812 - RNA, 21 nt, Human
uuauaggucaggggucaaacc

SEQ ID NO: 942813 - RNA, 24 nt, Human
uucaaaccaagaagauggggguga

SEQ ID NO: 942814 - RNA, 22 nt, Human
uucacaaagauauuuacaaaag

SEQ ID NO: 942815 - RNA, 18 nt, Human
uugaaaaaaccucgacaa

SEQ ID NO: 942816 - RNA, 18 nt, Human
uugcugguggaggcuugc

SEQ ID NO: 942817 - RNA, 21 nt, Human
uuggagcaaaguuagaaguug

SEQ ID NO: 942818 - RNA, 23 nt, Human
uuggagguggagccucagggacg

SEQ ID NO: 942819 - RNA, 23 nt, Human
uugguuggguguacaccugcucu

SEQ ID NO: 942820 - RNA, 22 nt, Human
uuuaaaaaaaaagaagacucgg

SEQ ID NO: 942821 - RNA, 19 nt, Human
uuuacagaugggaccccag

SEQ ID NO: 942822 - RNA, 22 nt, Human
uuuacagaugggaccccaguga

SEQ ID NO: 942823 - RNA, 18 nt, Human
uuucugaguguguuuaug

SEQ ID NO: 942824 - RNA, 20 nt, Human
uuugcaagacuagaaaucac

SEQ ID NO: 942825 - RNA, 21 nt, Human
uuugucauugaguccagguau

SEQ ID NO: 942826 - RNA, 18 nt, Human
aaaaagccuguuccacag

SEQ ID NO: 942827 - RNA, 19 nt, Human
aaaaauacagcaacuugau

SEQ ID NO: 942828 - RNA, 20 nt, Human
aacaaaauacuucaccaaaa

SEQ ID NO: 942829 - RNA, 21 nt, Human
aacacugcaugguucugauca

SEQ ID NO: 942830 - RNA, 19 nt, Human
aaccaacacugggaagaca

SEQ ID NO: 942831 - RNA, 21 nt, Human
aacuuacgacuuuuuaaaagu

SEQ ID NO: 942832 - RNA, 18 nt, Human
aaggacccagaaauucag

SEQ ID NO: 942833 - RNA, 24 nt, Human
aaguucucaacacccaagaaaaug

SEQ ID NO: 942834 - RNA, 23 nt, Human
acaacaauguuaccagcuaccaa

SEQ ID NO: 942835 - RNA, 21 nt, Human
acacacacacacacguacagc

SEQ ID NO: 942836 - RNA, 18 nt, Human
acacacacacguacagcc

SEQ ID NO: 942837 - RNA, 22 nt, Human
acagaaaacaagacacaauuua

SEQ ID NO: 942838 - RNA, 18 nt, Human
acagaaucucuucaagua

SEQ ID NO: 942839 - RNA, 22 nt, Human
acugaaugcagagguuggaccg

SEQ ID NO: 942840 - RNA, 18 nt, Human
agaaaaagacagcccagg

SEQ ID NO: 942841 - RNA, 22 nt, Human
agaaaccuauggagcagauacu

SEQ ID NO: 942842 - RNA, 27 nt, Human
agaaauaaucccuucaauggcguuaug

SEQ ID NO: 942843 - RNA, 18 nt, Human
agacaagcagcacuuaac

SEQ ID NO: 942844 - RNA, 22 nt, Human
agacaagcagcacuuaacuccc

SEQ ID NO: 942845 - RNA, 22 nt, Human
agcccugugggcgagcaacccc

SEQ ID NO: 942846 - RNA, 24 nt, Human
agcgggguuuugaggcugcccagg

SEQ ID NO: 942847 - RNA, 21 nt, Human
aggaggaaaguauucuagucu

SEQ ID NO: 942848 - RNA, 21 nt, Human
aggcacaguuagaacaagauu

SEQ ID NO: 942849 - RNA, 20 nt, Human
agggauagaaaauuaccugu

SEQ ID NO: 942850 - RNA, 22 nt, Human
aggggucugcuggagaaaaaga

SEQ ID NO: 942851 - RNA, 19 nt, Human
aguacauaagaaauugaaa

SEQ ID NO: 942852 - RNA, 20 nt, Human
aucuccuguguugcugcugu

SEQ ID NO: 942853 - RNA, 21 nt, Human
augcauguuucuugaagaguu

SEQ ID NO: 942854 - RNA, 22 nt, Human
caaaaagaagaugaacuacuaa

SEQ ID NO: 942855 - RNA, 19 nt, Human
caacacccaagaaaaugca

SEQ ID NO: 942856 - RNA, 25 nt, Human
cacacggucaucaacaauugugccc

SEQ ID NO: 942857 - RNA, 18 nt, Human
cacaggauuuauacucag

SEQ ID NO: 942858 - RNA, 20 nt, Human
cacaggcuuugcccugcggg

SEQ ID NO: 942859 - RNA, 23 nt, Human
caccaaaaaucgaaagaacccca

SEQ ID NO: 942860 - RNA, 20 nt, Human
cacccauaggaacagaaaac

SEQ ID NO: 942861 - RNA, 21 nt, Human
cacuugcuagugcugugaaug

SEQ ID NO: 942862 - RNA, 21 nt, Human
cagaaaacaagacacaauuua

SEQ ID NO: 942863 - RNA, 24 nt, Human
cagaugcagguggugggcccagag

SEQ ID NO: 942864 - RNA, 23 nt, Human
cagauucaauguagguuaaagug

SEQ ID NO: 942865 - RNA, 21 nt, Human
cagcccaggagagugcaacag

SEQ ID NO: 942866 - RNA, 21 nt, Human
cagccuggguucccagaagcc

SEQ ID NO: 942867 - RNA, 22 nt, Human
cagcugcaaggacccagaaauu

SEQ ID NO: 942868 - RNA, 22 nt, Human
cagcuucccgucaugaucagga

SEQ ID NO: 942869 - RNA, 20 nt, Human
cagcuuuagcuccaggacuc

SEQ ID NO: 942870 - RNA, 21 nt, Human
caguuugcagaguggaaaaac

SEQ ID NO: 942871 - RNA, 18 nt, Human
caucaaguaugucaguug

SEQ ID NO: 942872 - RNA, 21 nt, Human
caucacagcugcaaggaccca

SEQ ID NO: 942873 - RNA, 18 nt, Human
cauggcuccugcacagcu

SEQ ID NO: 942874 - RNA, 23 nt, Human
cauucuggcauggugggaagggc

SEQ ID NO: 942875 - RNA, 19 nt, Human
ccacaguuguagacagcuu

SEQ ID NO: 942876 - RNA, 20 nt, Human
ccagcggcagcggcgccuuc

SEQ ID NO: 942877 - RNA, 24 nt, Human
ccagcggcagcggcgccuucgcuu

SEQ ID NO: 942878 - RNA, 18 nt, Human
ccaggacucuuccggcgu

SEQ ID NO: 942879 - RNA, 21 nt, Human
ccaggcgcagcuggagcgcgg

SEQ ID NO: 942880 - RNA, 26 nt, Human
cccagaagccucugaagucaugccac

SEQ ID NO: 942881 - RNA, 25 nt, Human
ccgcaguaggaaccguccgcuccag

SEQ ID NO: 942882 - RNA, 20 nt, Human
ccgccgcuuccucauggccc

SEQ ID NO: 942883 - RNA, 21 nt, Human
ccgccgcuuccucauggcccu

SEQ ID NO: 942884 - RNA, 22 nt, Human
ccgggccggggccgggccaggc

SEQ ID NO: 942885 - RNA, 21 nt, Human
ccugaaauucugagguuuugg

SEQ ID NO: 942886 - RNA, 24 nt, Human
cgcgggccgcaguggcugccgccg

SEQ ID NO: 942887 - RNA, 19 nt, Human
cucacaggguucaaaccaa

SEQ ID NO: 942888 - RNA, 18 nt, Human
cucagguuccacagccuu

SEQ ID NO: 942889 - RNA, 19 nt, Human
cuccaggccacagggagcu

SEQ ID NO: 942890 - RNA, 18 nt, Human
cucucgggccccucucac

SEQ ID NO: 942891 - RNA, 23 nt, Human
cucugggauggugaggccacagg

SEQ ID NO: 942892 - RNA, 21 nt, Human
cugaaaaauacagcaacuuga

SEQ ID NO: 942893 - RNA, 23 nt, Human
cugaucuugaaugacaaaacaug

SEQ ID NO: 942894 - RNA, 22 nt, Human
cugcucucuaccgaaucaaucc

SEQ ID NO: 942895 - RNA, 21 nt, Human
cugcucuucaccaccaggccc

SEQ ID NO: 942896 - RNA, 18 nt, Human
cuggagcgcgggcagacg

SEQ ID NO: 942897 - RNA, 21 nt, Human
cuuggggcuugggaggugggg

SEQ ID NO: 942898 - RNA, 19 nt, Human
gaaaacacauuuaauuuca

SEQ ID NO: 942899 - RNA, 19 nt, Human
gaaacugaccuauuacacu

SEQ ID NO: 942900 - RNA, 19 nt, Human
gagaugaugggggcacagg

SEQ ID NO: 942901 - RNA, 19 nt, Human
gagccuuuugaugccuuuc

SEQ ID NO: 942902 - RNA, 18 nt, Human
gagcuccuaacugaaugc

SEQ ID NO: 942903 - RNA, 21 nt, Human
gaggagggccucaggcccugc

SEQ ID NO: 942904 - RNA, 22 nt, Human
gaggcagcccugugggcgagca

SEQ ID NO: 942905 - RNA, 19 nt, Human
gagggucuacccauggacu

SEQ ID NO: 942906 - RNA, 19 nt, Human
gcacuugggguguaaaaag

SEQ ID NO: 942907 - RNA, 20 nt, Human
gcagaugcagguggugggcc

SEQ ID NO: 942908 - RNA, 21 nt, Human
gcagcacuugcuagugcugug

SEQ ID NO: 942909 - RNA, 28 nt, Human
gcagcccugugggcgagcaaccccaugc

SEQ ID NO: 942910 - RNA, 20 nt, Human
gcccaggggguguacacgcu

SEQ ID NO: 942911 - RNA, 18 nt, Human
gccgcuuccucauggccc

SEQ ID NO: 942912 - RNA, 21 nt, Human
gccuuuugaugccuuucuaga

SEQ ID NO: 942913 - RNA, 23 nt, Human
gcgcagcuggagcgcgggcagac

SEQ ID NO: 942914 - RNA, 23 nt, Human
gcgggguuuugaggcugcccagg

SEQ ID NO: 942915 - RNA, 21 nt, Human
gcucugugccuggcucuucug

SEQ ID NO: 942916 - RNA, 20 nt, Human
ggaagggcgagaagaggagg

SEQ ID NO: 942917 - RNA, 18 nt, Human
ggagggagggggccaaag

SEQ ID NO: 942918 - RNA, 24 nt, Human
ggcaaaagagagugaguuucuucc

SEQ ID NO: 942919 - RNA, 18 nt, Human
ggcacaggcuuugcccug

SEQ ID NO: 942920 - RNA, 25 nt, Human
ggccggggccgggccaggcgcagcu

SEQ ID NO: 942921 - RNA, 19 nt, Human
gggaagggcgagaagagga

SEQ ID NO: 942922 - RNA, 20 nt, Human
gggaagggcgagaagaggag

SEQ ID NO: 942923 - RNA, 19 nt, Human
gggcacaggcuuugcccug

SEQ ID NO: 942924 - RNA, 20 nt, Human
gggcacaggcuuugcccugc

SEQ ID NO: 942925 - RNA, 23 nt, Human
gggccgggccaggcgcagcugga

SEQ ID NO: 942926 - RNA, 18 nt, Human
gggcucacaaaccagaaa

SEQ ID NO: 942927 - RNA, 24 nt, Human
ggucagguccaugagggcagggau

SEQ ID NO: 942928 - RNA, 19 nt, Human
gucacucagcuucccguca

SEQ ID NO: 942929 - RNA, 22 nt, Human
gugcagagcacccggugucaag

SEQ ID NO: 942930 - RNA, 25 nt, Human
gugggcgagcaaccccaugcacuug

SEQ ID NO: 942931 - RNA, 23 nt, Human
uaaaauggacagaugaucucccc

SEQ ID NO: 942932 - RNA, 19 nt, Human
uacaguggugggucuuuug

SEQ ID NO: 942933 - RNA, 20 nt, Human
uacuaagcauuguaaggcuc

SEQ ID NO: 942934 - RNA, 19 nt, Human
uaggaacagaaaacaagac

SEQ ID NO: 942935 - RNA, 21 nt, Human
uaggcuaagagauguuucuga

SEQ ID NO: 942936 - RNA, 23 nt, Human
uagggagggagggggccaaaguc

SEQ ID NO: 942937 - RNA, 21 nt, Human
uauuucaaauuaggcuaagag

SEQ ID NO: 942938 - RNA, 23 nt, Human
ucacagcugcaaggacccagaaa

SEQ ID NO: 942939 - RNA, 20 nt, Human
ucacagguuaguuagcgcug

SEQ ID NO: 942940 - RNA, 20 nt, Human
ucacgagucuugugccaaaa

SEQ ID NO: 942941 - RNA, 18 nt, Human
ucagucuguugagccuuu

SEQ ID NO: 942942 - RNA, 23 nt, Human
ucagucuguugagccuuuugaug

SEQ ID NO: 942943 - RNA, 23 nt, Human
uccacaucuugcacuuucaucca

SEQ ID NO: 942944 - RNA, 18 nt, Human
uccaggacucuuccggcg

SEQ ID NO: 942945 - RNA, 25 nt, Human
uccccggggcuucgcuccuccgcgg

SEQ ID NO: 942946 - RNA, 19 nt, Human
uccggcguggucaagccuc

SEQ ID NO: 942947 - RNA, 18 nt, Human
uccugucucagaagggcu

SEQ ID NO: 942948 - RNA, 20 nt, Human
ucuaccgaaucaauccucca

SEQ ID NO: 942949 - RNA, 19 nt, Human
ucucagaguuaggcuaucc

SEQ ID NO: 942950 - RNA, 20 nt, Human
ucuccaggccacagggagcu

SEQ ID NO: 942951 - RNA, 18 nt, Human
ucucucaccaggcacagg

SEQ ID NO: 942952 - RNA, 19 nt, Human
ucugaccacugccccaaga

SEQ ID NO: 942953 - RNA, 19 nt, Human
ucugcagguaacauaaccu

SEQ ID NO: 942954 - RNA, 20 nt, Human
ucugggccaagcagccucua

SEQ ID NO: 942955 - RNA, 25 nt, Human
ugaaaaauacagcaacuugauacaa

SEQ ID NO: 942956 - RNA, 21 nt, Human
ugaaacauccagcccagaaac

SEQ ID NO: 942957 - RNA, 18 nt, Human
ugaaagaaaagacaaacu

SEQ ID NO: 942958 - RNA, 26 nt, Human
ugaaauuaaaaacagaaaccuaugga

SEQ ID NO: 942959 - RNA, 21 nt, Human
ugaacauuuguacacucugga

SEQ ID NO: 942960 - RNA, 21 nt, Human
ugacaaaacauguucaacuga

SEQ ID NO: 942961 - RNA, 23 nt, Human
ugacagguggaucccacacuggu

SEQ ID NO: 942962 - RNA, 19 nt, Human
ugagaugaugggggcacag

SEQ ID NO: 942963 - RNA, 21 nt, Human
ugagaugaugggggcacaggc

SEQ ID NO: 942964 - RNA, 18 nt, Human
ugcccaggacugcucuuc

SEQ ID NO: 942965 - RNA, 21 nt, Human
ugccuggcccucucugucuca

SEQ ID NO: 942966 - RNA, 19 nt, Human
ugcuagugcugugaaugaa

SEQ ID NO: 942967 - RNA, 19 nt, Human
uggaaaaacccaaggaaaa

SEQ ID NO: 942968 - RNA, 18 nt, Human
uggaauccuuggcgugcc

SEQ ID NO: 942969 - RNA, 21 nt, Human
uggagcagauacugugacagu

SEQ ID NO: 942970 - RNA, 18 nt, Human
uggcauggugggaagggc

SEQ ID NO: 942971 - RNA, 18 nt, Human
uggcauugucauucagcc

SEQ ID NO: 942972 - RNA, 21 nt, Human
uggcuccugcacagcugauca

SEQ ID NO: 942973 - RNA, 21 nt, Human
ugggucuuuuggucguuuuga

SEQ ID NO: 942974 - RNA, 24 nt, Human
uggugccugaaauucugagguuuu

SEQ ID NO: 942975 - RNA, 24 nt, Human
uguaaaaagccuguuccacagcug

SEQ ID NO: 942976 - RNA, 21 nt, Human
ugucaugagagucgcugggga

SEQ ID NO: 942977 - RNA, 19 nt, Human
ugugauucaugugaagagc

SEQ ID NO: 942978 - RNA, 28 nt, Human
uguuccacaucuugcacuuucauccaaa

SEQ ID NO: 942979 - RNA, 19 nt, Human
uuaguccuagggagagagg

SEQ ID NO: 942980 - RNA, 24 nt, Human
uuaguccuagggagagaggugagu

SEQ ID NO: 942981 - RNA, 24 nt, Human
uuaugaacauuuguacacucugga

SEQ ID NO: 942982 - RNA, 20 nt, Human
uucaaaccaacacugggaag

SEQ ID NO: 942983 - RNA, 22 nt, Human
uuccucagguuccacagccuua

SEQ ID NO: 942984 - RNA, 18 nt, Human
uuccugggagaggacgug

SEQ ID NO: 942985 - RNA, 18 nt, Human
uugacccuacucucucau

SEQ ID NO: 942986 - RNA, 22 nt, Human
uuggaaaacacauuuaauuuca

SEQ ID NO: 942987 - RNA, 23 nt, Human
uuggaaaacacauuuaauuucaa

SEQ ID NO: 942988 - RNA, 23 nt, Human
uuggugggccccacccuggcagu

SEQ ID NO: 942989 - RNA, 22 nt, Human
aaaaaacccaagccugggagug

SEQ ID NO: 942990 - RNA, 19 nt, Human
aaaccuauagaaaaaaccc

SEQ ID NO: 942991 - RNA, 18 nt, Human
agacagggagggcucaug

SEQ ID NO: 942992 - RNA, 22 nt, Human
agccugggaguguccuggggag

SEQ ID NO: 942993 - RNA, 19 nt, Human
agcuguuuccuccuuuggg

SEQ ID NO: 942994 - RNA, 21 nt, Human
agggaggaaaagggcggcugc

SEQ ID NO: 942995 - RNA, 18 nt, Human
aguaacuccaccugcaga

SEQ ID NO: 942996 - RNA, 22 nt, Human
aguauggggaaaccccugugcu

SEQ ID NO: 942997 - RNA, 22 nt, Human
caccaguaacaaugaugagcuu

SEQ ID NO: 942998 - RNA, 21 nt, Human
cacuggcugggaugcguuggg

SEQ ID NO: 942999 - RNA, 22 nt, Human
cagggucagcaccaccugccuc

SEQ ID NO: 943000 - RNA, 19 nt, Human
caggguccccucccugugg

SEQ ID NO: 943001 - RNA, 19 nt, Human
caguaacuccaccugcaga

SEQ ID NO: 943002 - RNA, 19 nt, Human
ccaaaccuauagaaaaaac

SEQ ID NO: 943003 - RNA, 18 nt, Human
ccaccaguaacaaugaug

SEQ ID NO: 943004 - RNA, 21 nt, Human
ccaccugccucugggaauagg

SEQ ID NO: 943005 - RNA, 24 nt, Human
ccaguaacaaugaugagcuuagcc

SEQ ID NO: 943006 - RNA, 21 nt, Human
ccaguaacaaugaugagcuuu

SEQ ID NO: 943007 - RNA, 19 nt, Human
cccaccaguaacaaugaug

SEQ ID NO: 943008 - RNA, 21 nt, Human
cccucagcuucucuggguucc

SEQ ID NO: 943009 - RNA, 22 nt, Human
cccucccuguggccccccgcca

SEQ ID NO: 943010 - RNA, 19 nt, Human
ccgcuaccgcccccucagc

SEQ ID NO: 943011 - RNA, 18 nt, Human
ccgcugggggguggcauc

SEQ ID NO: 943012 - RNA, 21 nt, Human
ccucccuguggccccccgcca

SEQ ID NO: 943013 - RNA, 19 nt, Human
ccugcugccagcuuuccuc

SEQ ID NO: 943014 - RNA, 21 nt, Human
cgccugcugccagcuuuccuc

SEQ ID NO: 943015 - RNA, 20 nt, Human
cuacccucuggccugggcag

SEQ ID NO: 943016 - RNA, 20 nt, Human
cuggggcagcgaugcccuuc

SEQ ID NO: 943017 - RNA, 19 nt, Human
gaaaaaacccaagccuggg

SEQ ID NO: 943018 - RNA, 22 nt, Human
gaggaaaagggcggcugcggcg

SEQ ID NO: 943019 - RNA, 20 nt, Human
gaguguccuggggaggggag

SEQ ID NO: 943020 - RNA, 21 nt, Human
gccugggaguguccuggggag

SEQ ID NO: 943021 - RNA, 21 nt, Human
gcgcggcugggaaggaggcgg

SEQ ID NO: 943022 - RNA, 19 nt, Human
gcggcgggaagaggcuggg

SEQ ID NO: 943023 - RNA, 18 nt, Human
gcguugggggaggaggcg

SEQ ID NO: 943024 - RNA, 23 nt, Human
gcucuacccucuggccugggcag

SEQ ID NO: 943025 - RNA, 21 nt, Human
ggaaaccccugugcucuaccc

SEQ ID NO: 943026 - RNA, 19 nt, Human
ggaggaggcgccugcugcc

SEQ ID NO: 943027 - RNA, 21 nt, Human
ggaggggagguaguaugggga

SEQ ID NO: 943028 - RNA, 22 nt, Human
ggaguguccuggggaggggagg

SEQ ID NO: 943029 - RNA, 18 nt, Human
ggcugggaaggaggcggu

SEQ ID NO: 943030 - RNA, 18 nt, Human
gggagggcucauggggaa

SEQ ID NO: 943031 - RNA, 23 nt, Human
gggaguguccuggggaggggagg

SEQ ID NO: 943032 - RNA, 18 nt, Human
gggcacacgcgcgggagu

SEQ ID NO: 943033 - RNA, 22 nt, Human
gggcagugcagacagggagggc

SEQ ID NO: 943034 - RNA, 20 nt, Human
ggggaggaggcgccugcugc

SEQ ID NO: 943035 - RNA, 20 nt, Human
ggucuggaggaagccgcgcg

SEQ ID NO: 943036 - RNA, 19 nt, Human
guggcauccaggguugggu

SEQ ID NO: 943037 - RNA, 18 nt, Human
uaagggagggaggaaaag

SEQ ID NO: 943038 - RNA, 18 nt, Human
uagaaaaaacccaagccu

SEQ ID NO: 943039 - RNA, 18 nt, Human
ucaccugcugguggccau

SEQ ID NO: 943040 - RNA, 26 nt, Human
ucaggguccccucccuguggcccccc

SEQ ID NO: 943041 - RNA, 22 nt, Human
uccaggguugggugcccggcuu

SEQ ID NO: 943042 - RNA, 19 nt, Human
ucgucgccgucgccgccgc

SEQ ID NO: 943043 - RNA, 24 nt, Human
ucgucgccgucgccgccgcuaccg

SEQ ID NO: 943044 - RNA, 24 nt, Human
ucgucgucgucgccgucgccgccg

SEQ ID NO: 943045 - RNA, 18 nt, Human
ucucuggguuccgcugcc

SEQ ID NO: 943046 - RNA, 23 nt, Human
ugcggcgggaagaggcugggcac

SEQ ID NO: 943047 - RNA, 19 nt, Human
ugcugguggccauugcucc

SEQ ID NO: 943048 - RNA, 20 nt, Human
uggcacuggcugggaugcgu

SEQ ID NO: 943049 - RNA, 18 nt, Human
uggcauccaggguugggu

SEQ ID NO: 943050 - RNA, 24 nt, Human
uggcauccaggguugggugcccgg

SEQ ID NO: 943051 - RNA, 23 nt, Human
uggcugggaugcguugggggagg

SEQ ID NO: 943052 - RNA, 21 nt, Human
uguccuggggaggggagguag

SEQ ID NO: 943053 - RNA, 19 nt, Human
uguuuccuccuuuggguua

SEQ ID NO: 943054 - RNA, 23 nt, Human
uuuugggauccaaucucuuuauu

SEQ ID NO: 943055 - RNA, 19 nt, Human
uuuuuuuuuuuugggaucc

SEQ ID NO: 943056 - RNA, 22 nt, Human
aaaaagugcaaaauuuguaauu

SEQ ID NO: 943057 - RNA, 19 nt, Human
aaacaaaaagugcaaaauu

SEQ ID NO: 943058 - RNA, 27 nt, Human
aaacagcuaaauaugcagguccaaaca

SEQ ID NO: 943059 - RNA, 20 nt, Human
aaacugccacauucacuccg

SEQ ID NO: 943060 - RNA, 20 nt, Human
aacauggcauaaaacuuccc

SEQ ID NO: 943061 - RNA, 20 nt, Human
aacauggcauaaaacuuccu

SEQ ID NO: 943062 - RNA, 19 nt, Human
aacuagacuucugacgcug

SEQ ID NO: 943063 - RNA, 21 nt, Human
aagaauucccaaccuccugcc

SEQ ID NO: 943064 - RNA, 24 nt, Human
aagcaucuaacauucaaacaaaaa

SEQ ID NO: 943065 - RNA, 19 nt, Human
aagugcuucccuaggugac

SEQ ID NO: 943066 - RNA, 20 nt, Human
aaugacaguaacaaacaaga

SEQ ID NO: 943067 - RNA, 25 nt, Human
acagcugccuauaaaacuagacuuc

SEQ ID NO: 943068 - RNA, 22 nt, Human
agccgacgccggcgcgagagca

SEQ ID NO: 943069 - RNA, 22 nt, Human
augaagguggagcaaacacugc

SEQ ID NO: 943070 - RNA, 18 nt, Human
auucugauucuaaagaaa

SEQ ID NO: 943071 - RNA, 19 nt, Human
caacuucacacuaagcauc

SEQ ID NO: 943072 - RNA, 21 nt, Human
caccauguaacccuucuaacc

SEQ ID NO: 943073 - RNA, 23 nt, Human
cacucaucuccuucagcauccca

SEQ ID NO: 943074 - RNA, 20 nt, Human
cacuccgaagcccacucauc

SEQ ID NO: 943075 - RNA, 22 nt, Human
ccacagauaaagcacauguucc

SEQ ID NO: 943076 - RNA, 24 nt, Human
cgcggcguuccuuccagaagcgcc

SEQ ID NO: 943077 - RNA, 19 nt, Human
cugauguuccauccuguuu

SEQ ID NO: 943078 - RNA, 22 nt, Human
cugcacuaauauuuacaccaug

SEQ ID NO: 943079 - RNA, 20 nt, Human
cugccauccacugauguucc

SEQ ID NO: 943080 - RNA, 26 nt, Human
cuuaaaauaucuauuugauauguaca

SEQ ID NO: 943081 - RNA, 22 nt, Human
gauuacuuuugccauaaaagaa

SEQ ID NO: 943082 - RNA, 18 nt, Human
gccgacgccggcgcgaga

SEQ ID NO: 943083 - RNA, 19 nt, Human
gccggcgcgagagcagggg

SEQ ID NO: 943084 - RNA, 25 nt, Human
gcugcaccgcugacaucacaggaca

SEQ ID NO: 943085 - RNA, 19 nt, Human
gcuugcguaucaacuucac

SEQ ID NO: 943086 - RNA, 22 nt, Human
uaaaacuagacuucugacgcug

SEQ ID NO: 943087 - RNA, 18 nt, Human
uaaaagcaaggcaauuca

SEQ ID NO: 943088 - RNA, 18 nt, Human
uaacagcaagaauuccca

SEQ ID NO: 943089 - RNA, 21 nt, Human
uaacauggcauaaaacuuccc

SEQ ID NO: 943090 - RNA, 18 nt, Human
uaauaaugagguggcaca

SEQ ID NO: 943091 - RNA, 19 nt, Human
uaauuauuuuuaacagcaa

SEQ ID NO: 943092 - RNA, 21 nt, Human
uagauaauaaugagguggcac

SEQ ID NO: 943093 - RNA, 18 nt, Human
uauaaaacuagacuucug

SEQ ID NO: 943094 - RNA, 21 nt, Human
ucccaaccuccugccauccac

SEQ ID NO: 943095 - RNA, 21 nt, Human
ucccuacuuuagugguuucca

SEQ ID NO: 943096 - RNA, 23 nt, Human
ucccuaggugacccuaccuagcc

SEQ ID NO: 943097 - RNA, 18 nt, Human
uccgcgcccguccgacug

SEQ ID NO: 943098 - RNA, 18 nt, Human
ugaauauugugaugugac

SEQ ID NO: 943099 - RNA, 18 nt, Human
ugacaguaacaaacaaga

SEQ ID NO: 943100 - RNA, 21 nt, Human
ugacauggcucaaauguacaa

SEQ ID NO: 943101 - RNA, 19 nt, Human
ugauauguacaaaccacau

SEQ ID NO: 943102 - RNA, 19 nt, Human
ugauucuaaagaaaaggaa

SEQ ID NO: 943103 - RNA, 24 nt, Human
ugggaaugacaguaacaaacaaga

SEQ ID NO: 943104 - RNA, 21 nt, Human
uguacaaaaauaaacauaggg

SEQ ID NO: 943105 - RNA, 24 nt, Human
uguuccauccuguuugagguucua

SEQ ID NO: 943106 - RNA, 22 nt, Human
uuagcuuaacugcacuaauauu

SEQ ID NO: 943107 - RNA, 19 nt, Human
uucuaaagaaaaggaaugg

SEQ ID NO: 943108 - RNA, 23 nt, Human
uucuacauuaaaacaugauuacu

SEQ ID NO: 943109 - RNA, 25 nt, Human
aagaauaaaaacaaaccgaaaaaga

SEQ ID NO: 943110 - RNA, 20 nt, Human
acaaaccgaaaaagaggggc

SEQ ID NO: 943111 - RNA, 24 nt, Human
acaaaccgaaaaagaggggcaggg

SEQ ID NO: 943112 - RNA, 18 nt, Human
acucguagcuccuucccu

SEQ ID NO: 943113 - RNA, 24 nt, Human
agaauaaaaacaaaccgaaaaaga

SEQ ID NO: 943114 - RNA, 22 nt, Human
cccgcccgcccgcucuucccuc

SEQ ID NO: 943115 - RNA, 23 nt, Human
cccgcccgcucuucccuccgccc

SEQ ID NO: 943116 - RNA, 22 nt, Human
cccgcucuucccuccgccccac

SEQ ID NO: 943117 - RNA, 23 nt, Human
cccuccgccccacgacccgaacc

SEQ ID NO: 943118 - RNA, 20 nt, Human
ccgcucuucccuccgcccca

SEQ ID NO: 943119 - RNA, 21 nt, Human
ccucccgcccgcccgcucuuc

SEQ ID NO: 943120 - RNA, 21 nt, Human
ccuccgccccacgacccgaac

SEQ ID NO: 943121 - RNA, 24 nt, Human
cgcggcggcggcggcggcucggcu

SEQ ID NO: 943122 - RNA, 21 nt, Human
cuccgccccacgacccgaacc

SEQ ID NO: 943123 - RNA, 19 nt, Human
gccccacgacccgaaccuc

SEQ ID NO: 943124 - RNA, 20 nt, Human
gcccgcccgcucuucccucc

SEQ ID NO: 943125 - RNA, 19 nt, Human
gcggcggcggcggcggcuc

SEQ ID NO: 943126 - RNA, 20 nt, Human
gcgucuggcgccggcgccuu

SEQ ID NO: 943127 - RNA, 22 nt, Human
ggcggcggcggcggcucggcug

SEQ ID NO: 943128 - RNA, 21 nt, Human
gggggcgcggcggcggcggcg

SEQ ID NO: 943129 - RNA, 21 nt, Human
ucccuuguaaaaaugaaagaa

SEQ ID NO: 943130 - RNA, 22 nt, Human
ucccuuguaaaaaugaaagaau

SEQ ID NO: 943131 - RNA, 18 nt, Human
ucgcuggcuccgcggccu

SEQ ID NO: 943132 - RNA, 19 nt, Human
ucgcuggcuccgcggccuc

SEQ ID NO: 943133 - RNA, 25 nt, Human
ucggcggcuacucguagcuccuucc

SEQ ID NO: 943134 - RNA, 24 nt, Human
aaaaacaguaagagcagaagccgg

SEQ ID NO: 943135 - RNA, 22 nt, Human
aaccgaugcaaugguugccaca

SEQ ID NO: 943136 - RNA, 19 nt, Human
aagcugcaugugauugcac

SEQ ID NO: 943137 - RNA, 24 nt, Human
aagcuuaaucaccaagacagaaug

SEQ ID NO: 943138 - RNA, 22 nt, Human
aauaaaaacaguaagagcagaa

SEQ ID NO: 943139 - RNA, 18 nt, Human
acccaggccauaagcagc

SEQ ID NO: 943140 - RNA, 21 nt, Human
agcagcuugccugacuucagg

SEQ ID NO: 943141 - RNA, 20 nt, Human
agcauuggccaccaaaaaua

SEQ ID NO: 943142 - RNA, 20 nt, Human
augaaagaacuucaucuaca

SEQ ID NO: 943143 - RNA, 21 nt, Human
augaaguuggauugcagugcu

SEQ ID NO: 943144 - RNA, 20 nt, Human
auuacaacugggugguuacu

SEQ ID NO: 943145 - RNA, 21 nt, Human
caaaauaucugauacuuuggu

SEQ ID NO: 943146 - RNA, 26 nt, Human
caaccgaugcaaugguugccacaaaa

SEQ ID NO: 943147 - RNA, 25 nt, Human
caauaauuuuuccucucagaagcuu

SEQ ID NO: 943148 - RNA, 21 nt, Human
cacccaggccauaagcagcag

SEQ ID NO: 943149 - RNA, 19 nt, Human
caugacacccaggccauaa

SEQ ID NO: 943150 - RNA, 22 nt, Human
ccauaaaucuucaggagucugu

SEQ ID NO: 943151 - RNA, 22 nt, Human
ccauuaauuuuuucuucugcaa

SEQ ID NO: 943152 - RNA, 21 nt, Human
cugggggucauuaucuuccga

SEQ ID NO: 943153 - RNA, 20 nt, Human
cuuccugcuguucaucauca

SEQ ID NO: 943154 - RNA, 23 nt, Human
cuuccugcuguucaucaucaagu

SEQ ID NO: 943155 - RNA, 20 nt, Human
gaaugauuuggggcagucuu

SEQ ID NO: 943156 - RNA, 22 nt, Human
gcccuuacccuuagaugaggau

SEQ ID NO: 943157 - RNA, 22 nt, Human
gcucgauaaccagggaaagcua

SEQ ID NO: 943158 - RNA, 21 nt, Human
gguaaaaucuuuuccuuauaa

SEQ ID NO: 943159 - RNA, 20 nt, Human
guaguacaggcuggagcccu

SEQ ID NO: 943160 - RNA, 19 nt, Human
gucccauuaauuuuuucuu

SEQ ID NO: 943161 - RNA, 20 nt, Human
uaaaaacaguaagagcagaa

SEQ ID NO: 943162 - RNA, 22 nt, Human
uaaaaacaguaagagcagaagc

SEQ ID NO: 943163 - RNA, 24 nt, Human
uaaaaacaguaagagcagaagcug

SEQ ID NO: 943164 - RNA, 20 nt, Human
uaacagagcuggaaucacug

SEQ ID NO: 943165 - RNA, 22 nt, Human
uaauaugggacaaauuuuucuu

SEQ ID NO: 943166 - RNA, 18 nt, Human
uaaugugugcaaaauauc

SEQ ID NO: 943167 - RNA, 21 nt, Human
uagcaacuccuguaaggcuuc

SEQ ID NO: 943168 - RNA, 21 nt, Human
uagccauggccuacuugaaca

SEQ ID NO: 943169 - RNA, 18 nt, Human
uaggaaugauuuggggca

SEQ ID NO: 943170 - RNA, 22 nt, Human
uauaaacaucacauucauccuc

SEQ ID NO: 943171 - RNA, 18 nt, Human
uccaaguguaguacaggc

SEQ ID NO: 943172 - RNA, 19 nt, Human
ucccuagugcugagauaca

SEQ ID NO: 943173 - RNA, 20 nt, Human
uccuguaaggcuuccugcug

SEQ ID NO: 943174 - RNA, 20 nt, Human
ucuacauauuuaaaugaagu

SEQ ID NO: 943175 - RNA, 23 nt, Human
ucugcaaccgaugcaaugguugc

SEQ ID NO: 943176 - RNA, 21 nt, Human
ucugcaauuauucugauuauu

SEQ ID NO: 943177 - RNA, 27 nt, Human
ucuguacuugaggcacgaccggggucc

SEQ ID NO: 943178 - RNA, 24 nt, Human
ucuucuauuguaucugcaaccgau

SEQ ID NO: 943179 - RNA, 24 nt, Human
ugaaagaacuucaucuacauuuac

SEQ ID NO: 943180 - RNA, 21 nt, Human
ugacauuuuuuuuuuguuuug

SEQ ID NO: 943181 - RNA, 23 nt, Human
ugagauacacauuccaaccauaa

SEQ ID NO: 943182 - RNA, 24 nt, Human
ugagauacacauuccaaccauaaa

SEQ ID NO: 943183 - RNA, 20 nt, Human
ugcacacuuaauaacuuuua

SEQ ID NO: 943184 - RNA, 23 nt, Human
ugcacaguccccacugucugccu

SEQ ID NO: 943185 - RNA, 23 nt, Human
ugcagagacaucucaaccuuuug

SEQ ID NO: 943186 - RNA, 23 nt, Human
ugccaugacacccaggccauaag

SEQ ID NO: 943187 - RNA, 27 nt, Human
ugccaugacacccaggccauaagcagc

SEQ ID NO: 943188 - RNA, 23 nt, Human
uggaaauugggugcaaaaucugu

SEQ ID NO: 943189 - RNA, 20 nt, Human
uggagcccuuacccuuagau

SEQ ID NO: 943190 - RNA, 18 nt, Human
uggccaccaaaaauaguc

SEQ ID NO: 943191 - RNA, 20 nt, Human
ugggugcaaaaucuguagcc

SEQ ID NO: 943192 - RNA, 26 nt, Human
uguucaucaucaaguugagauacaca

SEQ ID NO: 943193 - RNA, 24 nt, Human
uuaauagucccauuaauuuuuucu

SEQ ID NO: 943194 - RNA, 24 nt, Human
uuagcaacuccuguaaggcuuccu

SEQ ID NO: 943195 - RNA, 18 nt, Human
uuccucucagaagcuuga

SEQ ID NO: 943196 - RNA, 21 nt, Human
uuggaauuauuuggaccaauu

SEQ ID NO: 943197 - RNA, 20 nt, Human
uuggccaccaaaaauagucu

SEQ ID NO: 943198 - RNA, 21 nt, Human
uuucaccauacuauccaaaua

SEQ ID NO: 943199 - RNA, 21 nt, Human
uuuggucagaauauaaacauc

SEQ ID NO: 943200 - RNA, 20 nt, Human
uuuuaccacagugggacagc

SEQ ID NO: 943201 - RNA, 18 nt, Human
uuuugcaugguacguaac

SEQ ID NO: 943202 - RNA, 23 nt, Human
uuuuucaccauacuauccaaaua

SEQ ID NO: 943203 - RNA, 22 nt, Human
caccccccgccaccgucgccac

SEQ ID NO: 943204 - RNA, 18 nt, Human
caccugcggccacuugcu

SEQ ID NO: 943205 - RNA, 24 nt, Human
ccaccccccgccaccgucgccacc

SEQ ID NO: 943206 - RNA, 21 nt, Human
cccaccccccgccaccgucgc

SEQ ID NO: 943207 - RNA, 18 nt, Human
ccccccgccaccgucgcc

SEQ ID NO: 943208 - RNA, 21 nt, Human
cccccgccaccgucgccaccu

SEQ ID NO: 943209 - RNA, 21 nt, Human
ccccgccaccgucgccaccug

SEQ ID NO: 943210 - RNA, 19 nt, Human
ccccggaacaguaggccgg

SEQ ID NO: 943211 - RNA, 20 nt, Human
ccccggaacaguaggccgga

SEQ ID NO: 943212 - RNA, 20 nt, Human
ccuggauuaccucacacccc

SEQ ID NO: 943213 - RNA, 25 nt, Human
cgaccccuggauuaccucacacccc

SEQ ID NO: 943214 - RNA, 21 nt, Human
cucacaccccaccccccgcca

SEQ ID NO: 943215 - RNA, 21 nt, Human
cucacaccccaccccccgcca

SEQ ID NO: 943216 - RNA, 24 nt, Human
ggccggacugcagcuuuaguuuuc

SEQ ID NO: 943217 - RNA, 21 nt, Human
gucgccaccugcggccacuug

SEQ ID NO: 943218 - RNA, 23 nt, Human
uaccucacaccccaccccccgcc

SEQ ID NO: 943219 - RNA, 24 nt, Human
uaccucacaccccaccccccgcca

SEQ ID NO: 943220 - RNA, 22 nt, Human
ucagccuccucuuccgcgaccc

SEQ ID NO: 943221 - RNA, 20 nt, Human
uccccgggugggggcucccg

SEQ ID NO: 943222 - RNA, 18 nt, Human
ucucagccuccucuuccg

SEQ ID NO: 943223 - RNA, 20 nt, Human
uuaccucacaccccaccccc

SEQ ID NO: 943224 - RNA, 19 nt, Human
uuuugacccucucagccuc

SEQ ID NO: 943225 - RNA, 27 nt, Human
aaaaaaaaacaaaaaaacaacaacaaa

SEQ ID NO: 943226 - RNA, 22 nt, Human
aaaaaaaaacagagaaaccuca

SEQ ID NO: 943227 - RNA, 23 nt, Human
aaaaaaaaacagagaaaccucaa

SEQ ID NO: 943228 - RNA, 24 nt, Human
aaaaaaaacaaaaaaacaacaaca

SEQ ID NO: 943229 - RNA, 22 nt, Human
aaaaaaaacagagaaaccucaa

SEQ ID NO: 943230 - RNA, 27 nt, Human
aaaaaaaacagagaaaccucaaucaua

SEQ ID NO: 943231 - RNA, 19 nt, Human
aaaaaaacagagaaaccuc

SEQ ID NO: 943232 - RNA, 24 nt, Human
aaaaaacaaaaaaacaacaacaaa

SEQ ID NO: 943233 - RNA, 26 nt, Human
aaaaaacaaaaaaacaacaacaaaaa

SEQ ID NO: 943234 - RNA, 25 nt, Human
aaaaaacaacaacaaaaaaaaacac

SEQ ID NO: 943235 - RNA, 24 nt, Human
aaaaacaacaacaaaaaaaaacac

SEQ ID NO: 943236 - RNA, 23 nt, Human
aaaaacagaaucuuacaaaugug

SEQ ID NO: 943237 - RNA, 22 nt, Human
aaaaacauuugagaaagaacaa

SEQ ID NO: 943238 - RNA, 21 nt, Human
aaaaauuuuugaaugacaaaa

SEQ ID NO: 943239 - RNA, 24 nt, Human
aaaacaaaaaaacaacaacaaaaa

SEQ ID NO: 943240 - RNA, 26 nt, Human
aaaacaaaaaaacaacaacaaaaaag

SEQ ID NO: 943241 - RNA, 26 nt, Human
aaaagaaaaaacauuugagaaagaag

SEQ ID NO: 943242 - RNA, 18 nt, Human
aaacagaacaaaguucca

SEQ ID NO: 943243 - RNA, 21 nt, Human
aaacagaaucuuacaaaugug

SEQ ID NO: 943244 - RNA, 19 nt, Human
aaacuuagaagugccaaca

SEQ ID NO: 943245 - RNA, 19 nt, Human
aaaguagucuccugccuuu

SEQ ID NO: 943246 - RNA, 18 nt, Human
aacaaaaaaacaacaaca

SEQ ID NO: 943247 - RNA, 22 nt, Human
aacaaaaaaacaacaacaaaaa

SEQ ID NO: 943248 - RNA, 18 nt, Human
aacaaaaguacuuuauau

SEQ ID NO: 943249 - RNA, 19 nt, Human
aacacagugaaacccuguc

SEQ ID NO: 943250 - RNA, 20 nt, Human
aacacagugaaacccugucu

SEQ ID NO: 943251 - RNA, 21 nt, Human
aacacagugaaacccugucuc

SEQ ID NO: 943252 - RNA, 24 nt, Human
aacuguauuuuucaaauagccuag

SEQ ID NO: 943253 - RNA, 22 nt, Human
aauuauuuugcugacauuagaa

SEQ ID NO: 943254 - RNA, 23 nt, Human
acaaauuuuuuaaaagaaaagaa

SEQ ID NO: 943255 - RNA, 20 nt, Human
acagagcgagacuccaucuc

SEQ ID NO: 943256 - RNA, 22 nt, Human
accacuguacuccagcuugggc

SEQ ID NO: 943257 - RNA, 24 nt, Human
accacuguacuccagcuugggcga

SEQ ID NO: 943258 - RNA, 24 nt, Human
acccugucucuacuaaaaauacaa

SEQ ID NO: 943259 - RNA, 24 nt, Human
acuccauaacuuuuacugaaauaa

SEQ ID NO: 943260 - RNA, 22 nt, Human
acuccaucuccaaaaaaaaaca

SEQ ID NO: 943261 - RNA, 24 nt, Human
acuguacuccagcuugggcgacag

SEQ ID NO: 943262 - RNA, 26 nt, Human
acuguacuccagcuugggcgacagag

SEQ ID NO: 943263 - RNA, 22 nt, Human
agaaaagaaaaacauuacucau

SEQ ID NO: 943264 - RNA, 19 nt, Human
agagaacagcaaaugcaga

SEQ ID NO: 943265 - RNA, 19 nt, Human
agagauaaaaaaugugucc

SEQ ID NO: 943266 - RNA, 18 nt, Human
agaggaaggaauaggaug

SEQ ID NO: 943267 - RNA, 18 nt, Human
agaguauagagguaaaaa

SEQ ID NO: 943268 - RNA, 24 nt, Human
agcacuuugggaggcugaggcagg

SEQ ID NO: 943269 - RNA, 23 nt, Human
agccaggcgugguggugggugcc

SEQ ID NO: 943270 - RNA, 24 nt, Human
agccuguaaucccagcacuuuggg

SEQ ID NO: 943271 - RNA, 24 nt, Human
agcuugggcgacagagcgagacuc

SEQ ID NO: 943272 - RNA, 24 nt, Human
aggagcaguggcucaagccuguaa

SEQ ID NO: 943273 - RNA, 22 nt, Human
aggcaaagaaauuaacagucau

SEQ ID NO: 943274 - RNA, 19 nt, Human
aggcagagcuugcagugag

SEQ ID NO: 943275 - RNA, 22 nt, Human
aggcagaucaugaggucaggag

SEQ ID NO: 943276 - RNA, 18 nt, Human
aggcaggagaauggugug

SEQ ID NO: 943277 - RNA, 22 nt, Human
aggcaggagaauggugugaacc

SEQ ID NO: 943278 - RNA, 24 nt, Human
aggcaggagaauggugugaaccug

SEQ ID NO: 943279 - RNA, 24 nt, Human
aggcaggcagaucaugaggucagg

SEQ ID NO: 943280 - RNA, 21 nt, Human
aggcugaggcaggcagaucau

SEQ ID NO: 943281 - RNA, 19 nt, Human
agggaugacuucauuuacc

SEQ ID NO: 943282 - RNA, 24 nt, Human
agguacugaaaauuauccaauacu

SEQ ID NO: 943283 - RNA, 19 nt, Human
agguugaggcaggagaaug

SEQ ID NO: 943284 - RNA, 21 nt, Human
aguaaaaaaaaaaaaaaaaaa

SEQ ID NO: 943285 - RNA, 23 nt, Human
aguauuagaggcaguaguuagga

SEQ ID NO: 943286 - RNA, 18 nt, Human
agucccagccauucggga

SEQ ID NO: 943287 - RNA, 24 nt, Human
aguggcucaagccuguaaucccag

SEQ ID NO: 943288 - RNA, 25 nt, Human
aguuauggagucuugaguucuaaga

SEQ ID NO: 943289 - RNA, 25 nt, Human
auagagguaaaaaaaaaaacagaga

SEQ ID NO: 943290 - RNA, 18 nt, Human
auagaggucaagagaugg

SEQ ID NO: 943291 - RNA, 27 nt, Human
auagaggucaagagauggaaucaaaga

SEQ ID NO: 943292 - RNA, 23 nt, Human
aucaagaagagaguuuugguucu

SEQ ID NO: 943293 - RNA, 24 nt, Human
auugcaccacuguacuccagcuug

SEQ ID NO: 943294 - RNA, 27 nt, Human
caaaaaguuaccagaauuuuagcaaua

SEQ ID NO: 943295 - RNA, 24 nt, Human
caagaccauccuggcuaacacagu

SEQ ID NO: 943296 - RNA, 21 nt, Human
caaggauugcgcagguacuga

SEQ ID NO: 943297 - RNA, 19 nt, Human
cacuguacuccagcuuggg

SEQ ID NO: 943298 - RNA, 20 nt, Human
cacuguacuccagcuugggc

SEQ ID NO: 943299 - RNA, 21 nt, Human
cacuguacuccagcuugggcg

SEQ ID NO: 943300 - RNA, 22 nt, Human
cacuguacuccagcuugggcga

SEQ ID NO: 943301 - RNA, 23 nt, Human
cacuguacuccagcuugggcgac

SEQ ID NO: 943302 - RNA, 24 nt, Human
cacuguacuccagcuugggcgaca

SEQ ID NO: 943303 - RNA, 24 nt, Human
cagcacuuugggaggcugaggcag

SEQ ID NO: 943304 - RNA, 25 nt, Human
cagcacuuugggaggcugaggcagg

SEQ ID NO: 943305 - RNA, 24 nt, Human
cagccauucgggagguugaggcag

SEQ ID NO: 943306 - RNA, 18 nt, Human
cagcuuacuggggaaagu

SEQ ID NO: 943307 - RNA, 22 nt, Human
caggcagaucaugaggucagga

SEQ ID NO: 943308 - RNA, 22 nt, Human
caggugacauuagagaaaaaga

SEQ ID NO: 943309 - RNA, 20 nt, Human
caguaguuaggaauagauac

SEQ ID NO: 943310 - RNA, 18 nt, Human
caguguccaccaaagucu

SEQ ID NO: 943311 - RNA, 23 nt, Human
caucaaaauaauucacuucaaca

SEQ ID NO: 943312 - RNA, 20 nt, Human
ccacuguacuccagcuuggg

SEQ ID NO: 943313 - RNA, 20 nt, Human
ccacuguacuccagcuuggg

SEQ ID NO: 943314 - RNA, 21 nt, Human
ccacuguacuccagcuugggc

SEQ ID NO: 943315 - RNA, 21 nt, Human
ccacuguacuccagcuugggc

SEQ ID NO: 943316 - RNA, 23 nt, Human
ccacuguacuccagcuugggcga

SEQ ID NO: 943317 - RNA, 24 nt, Human
ccacuguacuccagcuugggcgac

SEQ ID NO: 943318 - RNA, 20 nt, Human
ccagaagcaaaaggaguugg

SEQ ID NO: 943319 - RNA, 19 nt, Human
ccaggagcaguggcucaag

SEQ ID NO: 943320 - RNA, 19 nt, Human
ccaggagcaguggcucaag

SEQ ID NO: 943321 - RNA, 22 nt, Human
ccaucuccaaaaaaaaacaaaa

SEQ ID NO: 943322 - RNA, 20 nt, Human
cccauuauacuuccauuuug

SEQ ID NO: 943323 - RNA, 22 nt, Human
ccuccagguaggaagaacaaag

SEQ ID NO: 943324 - RNA, 21 nt, Human
ccugcaagcaucugauuuuac

SEQ ID NO: 943325 - RNA, 22 nt, Human
ccuggcuaacacagugaaaccc

SEQ ID NO: 943326 - RNA, 24 nt, Human
ccuggcuaacacagugaaacccug

SEQ ID NO: 943327 - RNA, 20 nt, Human
ccuguaaucccagcacuuug

SEQ ID NO: 943328 - RNA, 22 nt, Human
ccuguagucccagccauucggg

SEQ ID NO: 943329 - RNA, 24 nt, Human
cgagacuccaucuccaaaaaaaaa

SEQ ID NO: 943330 - RNA, 24 nt, Human
cgauauguuuuccaagugaauaua

SEQ ID NO: 943331 - RNA, 26 nt, Human
cgcggccgcgucgacguaccaauacc

SEQ ID NO: 943332 - RNA, 19 nt, Human
cuaaaaauacaaaaaguua

SEQ ID NO: 943333 - RNA, 20 nt, Human
cuagaaaauuguccccccac

SEQ ID NO: 943334 - RNA, 24 nt, Human
cucaagccuguaaucccagcacuu

SEQ ID NO: 943335 - RNA, 23 nt, Human
cuccaaaaaaaaacaaaaaaaca

SEQ ID NO: 943336 - RNA, 25 nt, Human
cuccaaaaaaaaacaaaaaaacaac

SEQ ID NO: 943337 - RNA, 18 nt, Human
cugaagcaggagcauuca

SEQ ID NO: 943338 - RNA, 23 nt, Human
cugaccucagagaaauauaacac

SEQ ID NO: 943339 - RNA, 24 nt, Human
cugaccucagagaaauauaacaca

SEQ ID NO: 943340 - RNA, 18 nt, Human
cuggcuaacacagugaaa

SEQ ID NO: 943341 - RNA, 24 nt, Human
cuggcuaacacagugaaacccugu

SEQ ID NO: 943342 - RNA, 18 nt, Human
gaaaauguugacucagau

SEQ ID NO: 943343 - RNA, 19 nt, Human
gaaacccugucucuacuaa

SEQ ID NO: 943344 - RNA, 20 nt, Human
gaaccugggaggcagagcuu

SEQ ID NO: 943345 - RNA, 21 nt, Human
gacccauaacuccauaacuuu

SEQ ID NO: 943346 - RNA, 23 nt, Human
gagauugcaccacuguacuccag

SEQ ID NO: 943347 - RNA, 25 nt, Human
gcggccgcgucgacguaccaauacc

SEQ ID NO: 943348 - RNA, 24 nt, Human
gcuaacacagugaaacccugucuc

SEQ ID NO: 943349 - RNA, 23 nt, Human
ggcaggcagaucaugaggucagg

SEQ ID NO: 943350 - RNA, 21 nt, Human
ggcuucaauuugaagccuaag

SEQ ID NO: 943351 - RNA, 25 nt, Human
guaaaaaaaaaaaaaaaaaaccggu

SEQ ID NO: 943352 - RNA, 26 nt, Human
guaaaaaaaaaaaaaaaaaaccgguu

SEQ ID NO: 943353 - RNA, 18 nt, Human
guaaauauuaacacugcu

SEQ ID NO: 943354 - RNA, 24 nt, Human
guacuccagcuugggcgacagagc

SEQ ID NO: 943355 - RNA, 25 nt, Human
guuauuugagcaggacccuucuguu

SEQ ID NO: 943356 - RNA, 22 nt, Human
guuuacuucuugcuuaguggag

SEQ ID NO: 943357 - RNA, 28 nt, Human
uaaaaagagacauaagaguauagaggua

SEQ ID NO: 943358 - RNA, 22 nt, Human
uaaacacaguauacaaaagccu

SEQ ID NO: 943359 - RNA, 25 nt, Human
uaaacagaacaaaguuccaaccuac

SEQ ID NO: 943360 - RNA, 23 nt, Human
uaaacagaagccuaucuuuugaa

SEQ ID NO: 943361 - RNA, 21 nt, Human
uaaagugccaaaguucugucu

SEQ ID NO: 943362 - RNA, 22 nt, Human
uaacaaguuaguaauuaguauu

SEQ ID NO: 943363 - RNA, 21 nt, Human
uaacacagugaaacccugucu

SEQ ID NO: 943364 - RNA, 22 nt, Human
uaacacagugaaacccugucuc

SEQ ID NO: 943365 - RNA, 24 nt, Human
uaacacagugaaacccugucucua

SEQ ID NO: 943366 - RNA, 24 nt, Human
uaacauacaaaaaguaaaacuuag

SEQ ID NO: 943367 - RNA, 18 nt, Human
uaccuuaauauagucugg

SEQ ID NO: 943368 - RNA, 22 nt, Human
uacuccagcuugggcgacagag

SEQ ID NO: 943369 - RNA, 24 nt, Human
uacuccagcuugggcgacagagcg

SEQ ID NO: 943370 - RNA, 21 nt, Human
uacuggauguuggccaggagc

SEQ ID NO: 943371 - RNA, 18 nt, Human
uagaaaaucaaauccuuc

SEQ ID NO: 943372 - RNA, 22 nt, Human
uagagaaaacagaaguacuuac

SEQ ID NO: 943373 - RNA, 26 nt, Human
uagagguaaaaaaaaaaacagagaaa

SEQ ID NO: 943374 - RNA, 21 nt, Human
uagcauuaguaacaaguuagu

SEQ ID NO: 943375 - RNA, 19 nt, Human
uaguaaaaaaaaaaaaaaa

SEQ ID NO: 943376 - RNA, 26 nt, Human
uaguaguaaaaaaaaaaaaaaaaaac

SEQ ID NO: 943377 - RNA, 21 nt, Human
uauagagguaaaaaaaaaaac

SEQ ID NO: 943378 - RNA, 20 nt, Human
ucaacaucuaauuucucagg

SEQ ID NO: 943379 - RNA, 21 nt, Human
ucacucaaugcuccuuugaaa

SEQ ID NO: 943380 - RNA, 18 nt, Human
ucacuggcucaacuguau

SEQ ID NO: 943381 - RNA, 18 nt, Human
ucaugaggucaggagauc

SEQ ID NO: 943382 - RNA, 24 nt, Human
ucaugaggucaggagaucaagacc

SEQ ID NO: 943383 - RNA, 22 nt, Human
ucauggaauauucaagguacaa

SEQ ID NO: 943384 - RNA, 24 nt, Human
ucauuugaagacaaacaggguuac

SEQ ID NO: 943385 - RNA, 18 nt, Human
uccagcuugggcgacaga

SEQ ID NO: 943386 - RNA, 23 nt, Human
uccagcuugggcgacagagcgag

SEQ ID NO: 943387 - RNA, 24 nt, Human
uccagcuugggcgacagagcgaga

SEQ ID NO: 943388 - RNA, 21 nt, Human
uccagguaggaagaacaaaga

SEQ ID NO: 943389 - RNA, 23 nt, Human
uccagguaggaagaacaaagaaa

SEQ ID NO: 943390 - RNA, 19 nt, Human
uccaucuccaaaaaaaaac

SEQ ID NO: 943391 - RNA, 23 nt, Human
ucuccugccuuuagcugaaaauc

SEQ ID NO: 943392 - RNA, 21 nt, Human
ucucuacuaaaaauacaaaaa

SEQ ID NO: 943393 - RNA, 19 nt, Human
ucugcucugucaccaccug

SEQ ID NO: 943394 - RNA, 20 nt, Human
ucugcucugucaccaccugg

SEQ ID NO: 943395 - RNA, 24 nt, Human
ugaaauaccacucaugcauuuguu

SEQ ID NO: 943396 - RNA, 18 nt, Human
ugacucagauguuuuucc

SEQ ID NO: 943397 - RNA, 21 nt, Human
ugagagaacagcaaaugcaga

SEQ ID NO: 943398 - RNA, 19 nt, Human
ugaggaagacagaaaacaa

SEQ ID NO: 943399 - RNA, 21 nt, Human
ugaggaagacagaaaacaaug

SEQ ID NO: 943400 - RNA, 23 nt, Human
ugaggcaggagaauggugugaac

SEQ ID NO: 943401 - RNA, 24 nt, Human
ugaggcaggagaauggugugaacc

SEQ ID NO: 943402 - RNA, 25 nt, Human
ugaggcaggagaauggugugaaccu

SEQ ID NO: 943403 - RNA, 18 nt, Human
ugaggcaggcagaucaug

SEQ ID NO: 943404 - RNA, 24 nt, Human
ugaggcaggcagaucaugagguca

SEQ ID NO: 943405 - RNA, 18 nt, Human
ugagguaucgagccaaaa

SEQ ID NO: 943406 - RNA, 19 nt, Human
ugauuuaaauaaaagaaaa

SEQ ID NO: 943407 - RNA, 22 nt, Human
ugcaccacuguacuccagcuug

SEQ ID NO: 943408 - RNA, 23 nt, Human
ugccuguagucccagccauucgg

SEQ ID NO: 943409 - RNA, 24 nt, Human
ugccuguagucccagccauucggg

SEQ ID NO: 943410 - RNA, 22 nt, Human
ugcuauaaaaagagacauaaga

SEQ ID NO: 943411 - RNA, 19 nt, Human
ugcugggaccucacagugu

SEQ ID NO: 943412 - RNA, 19 nt, Human
ugcuucaacuguuacaggc

SEQ ID NO: 943413 - RNA, 20 nt, Human
ugcuucaacuguuacaggcc

SEQ ID NO: 943414 - RNA, 22 nt, Human
uggcucaagccuguaaucccag

SEQ ID NO: 943415 - RNA, 24 nt, Human
uggcucaagccuguaaucccagca

SEQ ID NO: 943416 - RNA, 26 nt, Human
uggcugaccucagagaaauauaacac

SEQ ID NO: 943417 - RNA, 20 nt, Human
ugggaggcugaggcaggcag

SEQ ID NO: 943418 - RNA, 24 nt, Human
ugggaggcugaggcaggcagauca

SEQ ID NO: 943419 - RNA, 20 nt, Human
ugggcgacagagcgagacuc

SEQ ID NO: 943420 - RNA, 18 nt, Human
uggggguggacuggggga

SEQ ID NO: 943421 - RNA, 24 nt, Human
ugguggugggugccuguaguccca

SEQ ID NO: 943422 - RNA, 19 nt, Human
uguagaaaaucaaauccuu

SEQ ID NO: 943423 - RNA, 21 nt, Human
uguagaaaaucaaauccuuca

SEQ ID NO: 943424 - RNA, 20 nt, Human
uguguaaacacaguauacaa

SEQ ID NO: 943425 - RNA, 21 nt, Human
uguuucaacaucuaauuucuc

SEQ ID NO: 943426 - RNA, 22 nt, Human
uuaaaugcucauuaaaaacuug

SEQ ID NO: 943427 - RNA, 20 nt, Human
uuagaagacacagccucaag

SEQ ID NO: 943428 - RNA, 20 nt, Human
uuagaugcuucaacuguuac

SEQ ID NO: 943429 - RNA, 21 nt, Human
uuagccaggcguggugguggg

SEQ ID NO: 943430 - RNA, 24 nt, Human
uuaggcuccuucucuaaauccuga

SEQ ID NO: 943431 - RNA, 19 nt, Human
uucaacaaaugguaauuac

SEQ ID NO: 943432 - RNA, 21 nt, Human
uucugcucugucaccaccugg

SEQ ID NO: 943433 - RNA, 22 nt, Human
uucugcucugucaccaccuggg

SEQ ID NO: 943434 - RNA, 23 nt, Human
uugcaccacuguacuccagcuug

SEQ ID NO: 943435 - RNA, 23 nt, Human
uugcugggaccucacaguguucu

SEQ ID NO: 943436 - RNA, 25 nt, Human
uugggaggcugaggcaggcagauca

SEQ ID NO: 943437 - RNA, 21 nt, Human
uuuauccuaagcgauauguuu

SEQ ID NO: 943438 - RNA, 21 nt, Human
uuuuccaaaaauauuaaccaa

SEQ ID NO: 943439 - RNA, 23 nt, Human
aaaaaaaaaaaaaaaagaaagaa

SEQ ID NO: 943440 - RNA, 24 nt, Human
aaaaaaauacuaccauucuccccc

SEQ ID NO: 943441 - RNA, 19 nt, Human
aaaaaacaaaaacaaaagg

SEQ ID NO: 943442 - RNA, 23 nt, Human
aaaaaauacuaccauucuccccc

SEQ ID NO: 943443 - RNA, 25 nt, Human
aaaaauaauaugaaaggggagccgg

SEQ ID NO: 943444 - RNA, 24 nt, Human
aaaagaaagaaaauagaaaaaaaa

SEQ ID NO: 943445 - RNA, 24 nt, Human
aaaagggaaacaaauucauugcaa

SEQ ID NO: 943446 - RNA, 22 nt, Human
aaacaaaaggcuaaacuuaaaa

SEQ ID NO: 943447 - RNA, 18 nt, Human
aaagaaagaaaauagaaa

SEQ ID NO: 943448 - RNA, 21 nt, Human
aacagguaauuaaaaaauuua

SEQ ID NO: 943449 - RNA, 22 nt, Human
aaccaaaaaacaaaaacaaaag

SEQ ID NO: 943450 - RNA, 22 nt, Human
aagaaagaaaauagaaaaaaaa

SEQ ID NO: 943451 - RNA, 21 nt, Human
aagcaaaaaaaagggaaacaa

SEQ ID NO: 943452 - RNA, 32 nt, Human
acacauacacacacacaccauaguacacacgg

SEQ ID NO: 943453 - RNA, 22 nt, Human
agaaagaaaauagaaaaaaaaa

SEQ ID NO: 943454 - RNA, 27 nt, Human
agaaagaaaauagaaaaaaagggaccc

SEQ ID NO: 943455 - RNA, 22 nt, Human
agacauccucagaaucgcaauc

SEQ ID NO: 943456 - RNA, 19 nt, Human
agguaaacaaaauagauuu

SEQ ID NO: 943457 - RNA, 20 nt, Human
agucuuuguacuguauuuuu

SEQ ID NO: 943458 - RNA, 21 nt, Human
aguucagaugugcaauacuuc

SEQ ID NO: 943459 - RNA, 26 nt, Human
auacacacacacaccauaguacacag

SEQ ID NO: 943460 - RNA, 25 nt, Human
caaaaacaaaaggcuaaacuuaaaa

SEQ ID NO: 943461 - RNA, 21 nt, Human
caaaaucagggagaaacguac

SEQ ID NO: 943462 - RNA, 20 nt, Human
caaagcaagaaauaaaucac

SEQ ID NO: 943463 - RNA, 24 nt, Human
caaagcaagaaauaaaucacauuu

SEQ ID NO: 943464 - RNA, 18 nt, Human
caaccaaaaaacaaaaac

SEQ ID NO: 943465 - RNA, 23 nt, Human
caaccaaaaaacaaaaacaaaag

SEQ ID NO: 943466 - RNA, 19 nt, Human
caagaauccaacuuugcau

SEQ ID NO: 943467 - RNA, 20 nt, Human
caagacacccuggccaaugc

SEQ ID NO: 943468 - RNA, 21 nt, Human
cacacacacaccacacacaua

SEQ ID NO: 943469 - RNA, 23 nt, Human
cacacacacaccacacacauaca

SEQ ID NO: 943470 - RNA, 22 nt, Human
cacagcugauaaaaaaaaaaaa

SEQ ID NO: 943471 - RNA, 23 nt, Human
caccacacacauacacacacaca

SEQ ID NO: 943472 - RNA, 26 nt, Human
caccacacacauacacacacacaccc

SEQ ID NO: 943473 - RNA, 25 nt, Human
cacccuucccccccauuuuuuuucc

SEQ ID NO: 943474 - RNA, 22 nt, Human
caccuucucucccuccuuuuca

SEQ ID NO: 943475 - RNA, 23 nt, Human
cagcagacacuuucuggcacccc

SEQ ID NO: 943476 - RNA, 22 nt, Human
cagcuacuccuggaaaagaagg

SEQ ID NO: 943477 - RNA, 27 nt, Human
caggaccggacacccccucgggcacag

SEQ ID NO: 943478 - RNA, 22 nt, Human
ccaaaaaaaaaaaaaaaaaaaa

SEQ ID NO: 943479 - RNA, 23 nt, Human
ccaaaaaaaaaaaaaaaaaaaaa

SEQ ID NO: 943480 - RNA, 23 nt, Human
ccaaaaucagggagaaacguaca

SEQ ID NO: 943481 - RNA, 23 nt, Human
ccaaccaaaaaacaaaaacaaaa

SEQ ID NO: 943482 - RNA, 21 nt, Human
ccacacacauacacacacaca

SEQ ID NO: 943483 - RNA, 26 nt, Human
ccacacacauacacacacacaccaua

SEQ ID NO: 943484 - RNA, 24 nt, Human
cccccucgggcacaggguggaggc

SEQ ID NO: 943485 - RNA, 23 nt, Human
cccuuugauacaguagguaaaca

SEQ ID NO: 943486 - RNA, 23 nt, Human
cgaaaaugugcagaucuguaaca

SEQ ID NO: 943487 - RNA, 20 nt, Human
cgccgcgccugccgcggccc

SEQ ID NO: 943488 - RNA, 24 nt, Human
cggcuguugaccaaaaaaaaaaaa

SEQ ID NO: 943489 - RNA, 20 nt, Human
cucaaagcaagaaauaaauc

SEQ ID NO: 943490 - RNA, 21 nt, Human
cucccccagacuccccuuuga

SEQ ID NO: 943491 - RNA, 18 nt, Human
cucccuccuuuucaucca

SEQ ID NO: 943492 - RNA, 23 nt, Human
cuccuggaaaagaaggaaaaaaa

SEQ ID NO: 943493 - RNA, 22 nt, Human
cugccaaccaaaaaacaaaaac

SEQ ID NO: 943494 - RNA, 22 nt, Human
cugccgcggccccgucggggcu

SEQ ID NO: 943495 - RNA, 20 nt, Human
cugcuccuucauaugguucu

SEQ ID NO: 943496 - RNA, 21 nt, Human
cuggacuucucuuccccuucc

SEQ ID NO: 943497 - RNA, 19 nt, Human
cuuccucuccuccugcucc

SEQ ID NO: 943498 - RNA, 21 nt, Human
cuuggcggcuggacuucucuu

SEQ ID NO: 943499 - RNA, 21 nt, Human
gaaaauaauaaagaaauucac

SEQ ID NO: 943500 - RNA, 19 nt, Human
gaaauaugcaucaaccaag

SEQ ID NO: 943501 - RNA, 20 nt, Human
gaacccgaucuuaauuucca

SEQ ID NO: 943502 - RNA, 22 nt, Human
gaacccgaucuuaauuuccagc

SEQ ID NO: 943503 - RNA, 21 nt, Human
gaauagcagauucugggauau

SEQ ID NO: 943504 - RNA, 19 nt, Human
gagcuaaauaccugaaaau

SEQ ID NO: 943505 - RNA, 20 nt, Human
gcacaggguggaggcagggg

SEQ ID NO: 943506 - RNA, 20 nt, Human
gccaaccaaaaaacaaaaac

SEQ ID NO: 943507 - RNA, 18 nt, Human
gcccugaaucacauuuac

SEQ ID NO: 943508 - RNA, 19 nt, Human
gccgcggccccgucggggc

SEQ ID NO: 943509 - RNA, 28 nt, Human
gcuguugaccaaaaaaaaaaaaaaaaaa

SEQ ID NO: 943510 - RNA, 20 nt, Human
gggaaggcugggcuuggcgg

SEQ ID NO: 943511 - RNA, 23 nt, Human
ggguggaggcaggggacgccggc

SEQ ID NO: 943512 - RNA, 19 nt, Human
guacacacgaaaaugugca

SEQ ID NO: 943513 - RNA, 18 nt, Human
gugcgcagagcgcggccg

SEQ ID NO: 943514 - RNA, 19 nt, Human
uaaaacacacacacaccac

SEQ ID NO: 943515 - RNA, 18 nt, Human
uaaaaucgguuacugcca

SEQ ID NO: 943516 - RNA, 27 nt, Human
uaaacaaaaugaagcaaaaaaaaggga

SEQ ID NO: 943517 - RNA, 21 nt, Human
uaacaagaauccaacuuugca

SEQ ID NO: 943518 - RNA, 22 nt, Human
uagaaaaaaaaaaaaaaaaacc

SEQ ID NO: 943519 - RNA, 20 nt, Human
ucacuaaacaacaggcccua

SEQ ID NO: 943520 - RNA, 21 nt, Human
ucagucaugggguugcccuuc

SEQ ID NO: 943521 - RNA, 20 nt, Human
uccaacuuugcauagacauc

SEQ ID NO: 943522 - RNA, 21 nt, Human
uccacaaauaucagcagacac

SEQ ID NO: 943523 - RNA, 25 nt, Human
ucccaagacacccuggccaaugcaa

SEQ ID NO: 943524 - RNA, 21 nt, Human
ucgccgcgccugccgcggccc

SEQ ID NO: 943525 - RNA, 22 nt, Human
ucugcagacacaggggugcugg

SEQ ID NO: 943526 - RNA, 20 nt, Human
ucuuccucuccuccugcucc

SEQ ID NO: 943527 - RNA, 23 nt, Human
ugaagagacaaugauuaaacgca

SEQ ID NO: 943528 - RNA, 20 nt, Human
ugcagaucuguaacauuuuu

SEQ ID NO: 943529 - RNA, 22 nt, Human
ugccaaccaaaaaacaaaaaca

SEQ ID NO: 943530 - RNA, 27 nt, Human
ugccaaccaaaaaacaaaaacaaaagg

SEQ ID NO: 943531 - RNA, 22 nt, Human
uggaacagcugaguuuugaagg

SEQ ID NO: 943532 - RNA, 20 nt, Human
uggaacuagaaaaacggcug

SEQ ID NO: 943533 - RNA, 19 nt, Human
uggcagaaaaggaacccga

SEQ ID NO: 943534 - RNA, 18 nt, Human
uggugggugucaagcugc

SEQ ID NO: 943535 - RNA, 24 nt, Human
uguugaccaaaaaaaaaaaaaaaa

SEQ ID NO: 943536 - RNA, 22 nt, Human
uuaaaacuuggaacuagaaaaa

SEQ ID NO: 943537 - RNA, 18 nt, Human
uuaaaagucuuaaaauga

SEQ ID NO: 943538 - RNA, 23 nt, Human
uuacugccaaccaaaaaacaaaa

SEQ ID NO: 943539 - RNA, 23 nt, Human
uugaaggcacucugcagacacag

SEQ ID NO: 943540 - RNA, 23 nt, Human
uugaccaaaaaaaaaaaaaaaaa

SEQ ID NO: 943541 - RNA, 21 nt, Human
uugcuucuggaggaacacccu

SEQ ID NO: 943542 - RNA, 22 nt, Human
uuucauccacccuuccccccca

SEQ ID NO: 943543 - RNA, 21 nt, Human
uuugugcgcagagcgcggccg

SEQ ID NO: 943544 - RNA, 20 nt, Human
uuuuccaggcugaaacuuuu

SEQ ID NO: 943545 - RNA, 22 nt, Human
uuuugugcgcagagcgcggccg

SEQ ID NO: 943546 - RNA, 19 nt, Human
cccacgcagcgcuagaccg

SEQ ID NO: 943547 - RNA, 19 nt, Human
ucuauacauacaaaguaca

SEQ ID NO: 943548 - RNA, 18 nt, Human
uuuuuuuuuuuuuuuuug

SEQ ID NO: 943549 - RNA, 21 nt, Human
agagcagcuuuauuaucaugg

SEQ ID NO: 943550 - RNA, 21 nt, Human
cacccgcagcgguccuggagg

SEQ ID NO: 943551 - RNA, 18 nt, Human
ccacccgcagcgguccug

SEQ ID NO: 943552 - RNA, 23 nt, Human
ccacccgcagcgguccuggaggc

SEQ ID NO: 943553 - RNA, 22 nt, Human
cccugcgccuggaggucucccc

SEQ ID NO: 943554 - RNA, 18 nt, Human
cccuggccguccuucccu

SEQ ID NO: 943555 - RNA, 20 nt, Human
ccuggaggcaccacgcagcu

SEQ ID NO: 943556 - RNA, 24 nt, Human
cgccuggaggucuccccugaccgu

SEQ ID NO: 943557 - RNA, 26 nt, Human
cgccuggaggucuccccugaccgucc

SEQ ID NO: 943558 - RNA, 23 nt, Human
cguccuucccugcgccuggaggu

SEQ ID NO: 943559 - RNA, 25 nt, Human
cugcgccuggaggucuccccugacc

SEQ ID NO: 943560 - RNA, 24 nt, Human
cuggggauagaacggguuccucuc

SEQ ID NO: 943561 - RNA, 18 nt, Human
ggggauagaacggguucc

SEQ ID NO: 943562 - RNA, 21 nt, Human
gggggcuggggucuuccacug

SEQ ID NO: 943563 - RNA, 18 nt, Human
uagaacggguuccucucc

SEQ ID NO: 943564 - RNA, 25 nt, Human
uccuucccugcgccuggaggucucc

SEQ ID NO: 943565 - RNA, 21 nt, Human
ugggggcuggggucuuccacu

SEQ ID NO: 943566 - RNA, 21 nt, Human
uuuugggagagcagcuuuauu

SEQ ID NO: 943567 - RNA, 24 nt, Human
uuuuuuuuuuuugggagagcagcu

SEQ ID NO: 943568 - RNA, 24 nt, Human
uuuuuuuuuuuuuuuuuuuuuggg

SEQ ID NO: 943569 - RNA, 21 nt, Human
aaaauagcaauaaucaaaaag

SEQ ID NO: 943570 - RNA, 23 nt, Human
aaacagugaauccccaaaucaga

SEQ ID NO: 943571 - RNA, 18 nt, Human
aacagcuuuugucugugu

SEQ ID NO: 943572 - RNA, 19 nt, Human
aaguagcaacauucuguaa

SEQ ID NO: 943573 - RNA, 23 nt, Human
aauagcaauaaucaaaaagguaa

SEQ ID NO: 943574 - RNA, 26 nt, Human
acuuuacuuccuguaacaacugcagu

SEQ ID NO: 943575 - RNA, 25 nt, Human
agagaagacucccaucugcuguaga

SEQ ID NO: 943576 - RNA, 19 nt, Human
aguuuugaugcaacagcuu

SEQ ID NO: 943577 - RNA, 28 nt, Human
ccugaaaaauccuucucacaauguccuu

SEQ ID NO: 943578 - RNA, 27 nt, Human
ccugugcucgcuuuccugcucucuccc

SEQ ID NO: 943579 - RNA, 22 nt, Human
cgccuuaugcccugaaagacaa

SEQ ID NO: 943580 - RNA, 20 nt, Human
cuaaaagagaagacucccau

SEQ ID NO: 943581 - RNA, 21 nt, Human
cucacaauguccuauugcacu

SEQ ID NO: 943582 - RNA, 26 nt, Human
cucgcuuuccugcucucucccuuuuu

SEQ ID NO: 943583 - RNA, 19 nt, Human
cuguccaaccagaaccagu

SEQ ID NO: 943584 - RNA, 24 nt, Human
gaauaaauuauuguuuuguaugga

SEQ ID NO: 943585 - RNA, 22 nt, Human
gaggaaaaagaacacccuuuau

SEQ ID NO: 943586 - RNA, 21 nt, Human
ggaguuucugggugugcuaac

SEQ ID NO: 943587 - RNA, 23 nt, Human
gggaaaagcauugaccuuggaag

SEQ ID NO: 943588 - RNA, 21 nt, Human
gucucuaccuacugaacuaca

SEQ ID NO: 943589 - RNA, 21 nt, Human
uaaaaauagcaauaaucaaaa

SEQ ID NO: 943590 - RNA, 21 nt, Human
uaaaaauagcaauaaucaaaa

SEQ ID NO: 943591 - RNA, 22 nt, Human
uaaaaauagcaauaaucaaaaa

SEQ ID NO: 943592 - RNA, 19 nt, Human
uaaacuaguagaugaaucc

SEQ ID NO: 943593 - RNA, 18 nt, Human
uaaucaaaaagguaaucu

SEQ ID NO: 943594 - RNA, 21 nt, Human
uagaaauuacuccuaaagucc

SEQ ID NO: 943595 - RNA, 21 nt, Human
uaggagagugggucaauuucc

SEQ ID NO: 943596 - RNA, 20 nt, Human
ucaaaacacuuuguauacug

SEQ ID NO: 943597 - RNA, 19 nt, Human
ucagaaacucaaaacacuu

SEQ ID NO: 943598 - RNA, 23 nt, Human
uccucugaaacagugaaucccca

SEQ ID NO: 943599 - RNA, 24 nt, Human
uccucugaaacagugaauccccaa

SEQ ID NO: 943600 - RNA, 21 nt, Human
ucucuaccuacugaacuacag

SEQ ID NO: 943601 - RNA, 21 nt, Human
ucugcuguagacagaggaaau

SEQ ID NO: 943602 - RNA, 24 nt, Human
ugaaaaauccuucucacaaugucc

SEQ ID NO: 943603 - RNA, 23 nt, Human
ugaaacagugaauccccaaauca

SEQ ID NO: 943604 - RNA, 22 nt, Human
ugcucucucccuuuuugcucuc

SEQ ID NO: 943605 - RNA, 22 nt, Human
ugggguuaaaaacaaaaagccc

SEQ ID NO: 943606 - RNA, 22 nt, Human
uuacuuccuguaacaacugcag

SEQ ID NO: 943607 - RNA, 24 nt, Human
uucccuauguacauagagaugugg

SEQ ID NO: 943608 - RNA, 19 nt, Human
uuuuuuuuuuuuuuucuaa

SEQ ID NO: 943609 - RNA, 18 nt, Human
aaaaaaaagcaguccugg

SEQ ID NO: 943610 - RNA, 21 nt, Human
aaccaccaaggagcuguggac

SEQ ID NO: 943611 - RNA, 24 nt, Human
aagcgccgggagcugcggggagcu

SEQ ID NO: 943612 - RNA, 22 nt, Human
acacagaguccacuggcucaau

SEQ ID NO: 943613 - RNA, 20 nt, Human
acacagugaacccagcaccc

SEQ ID NO: 943614 - RNA, 21 nt, Human
acagugaacccagcacccagu

SEQ ID NO: 943615 - RNA, 19 nt, Human
acagugggcaucuggggcc

SEQ ID NO: 943616 - RNA, 20 nt, Human
accuggucugcucagaaggc

SEQ ID NO: 943617 - RNA, 20 nt, Human
acggagauccaugguggcgg

SEQ ID NO: 943618 - RNA, 18 nt, Human
agaaagacccaauagaag

SEQ ID NO: 943619 - RNA, 20 nt, Human
agaggcaggguuggagcugc

SEQ ID NO: 943620 - RNA, 19 nt, Human
agaguccacuggcucaaug

SEQ ID NO: 943621 - RNA, 23 nt, Human
agaugucccaaagcccugaaggc

SEQ ID NO: 943622 - RNA, 23 nt, Human
agcuguggacaagcggacucagg

SEQ ID NO: 943623 - RNA, 18 nt, Human
aggcaggguuggagcugc

SEQ ID NO: 943624 - RNA, 18 nt, Human
aggcaguggguggggaag

SEQ ID NO: 943625 - RNA, 21 nt, Human
aggcaguggguggggaagggg

SEQ ID NO: 943626 - RNA, 23 nt, Human
aggccagcgcccgggggccucca

SEQ ID NO: 943627 - RNA, 18 nt, Human
aggcucaguucugggucc

SEQ ID NO: 943628 - RNA, 21 nt, Human
aggcuggggugcaggugcagg

SEQ ID NO: 943629 - RNA, 18 nt, Human
agggaccuaggagaggag

SEQ ID NO: 943630 - RNA, 19 nt, Human
agggaccuaggagaggagg

SEQ ID NO: 943631 - RNA, 22 nt, Human
aggggacagaggcaggguugga

SEQ ID NO: 943632 - RNA, 19 nt, Human
aggugcuuaauaaaugcuu

SEQ ID NO: 943633 - RNA, 24 nt, Human
aucaagagagggagcacaucgugg

SEQ ID NO: 943634 - RNA, 24 nt, Human
aucccgggcacaaggagaagaccc

SEQ ID NO: 943635 - RNA, 22 nt, Human
aucugaacugggugagggccug

SEQ ID NO: 943636 - RNA, 20 nt, Human
caagaugucccaaagcccuu

SEQ ID NO: 943637 - RNA, 21 nt, Human
caagccccgccccagcaucuu

SEQ ID NO: 943638 - RNA, 19 nt, Human
caagguaccuggucugcuc

SEQ ID NO: 943639 - RNA, 20 nt, Human
cacagugggcaucuggggcc

SEQ ID NO: 943640 - RNA, 20 nt, Human
caccaugccugaguacaugg

SEQ ID NO: 943641 - RNA, 20 nt, Human
caccgcugugugugcagaag

SEQ ID NO: 943642 - RNA, 21 nt, Human
cacgaaaacagcugcaaccac

SEQ ID NO: 943643 - RNA, 22 nt, Human
cacggcucagagagcugccugg

SEQ ID NO: 943644 - RNA, 19 nt, Human
cacugcgcggggauccucc

SEQ ID NO: 943645 - RNA, 22 nt, Human
cacuggccaagccccgccccag

SEQ ID NO: 943646 - RNA, 20 nt, Human
cagcaggggcgggcagaggc

SEQ ID NO: 943647 - RNA, 19 nt, Human
cagcugcaaccacaacaaa

SEQ ID NO: 943648 - RNA, 20 nt, Human
caggcgcagcugggggccaa

SEQ ID NO: 943649 - RNA, 24 nt, Human
caguucugggucccagcugcuccu

SEQ ID NO: 943650 - RNA, 20 nt, Human
caucguguccccuccgaguc

SEQ ID NO: 943651 - RNA, 21 nt, Human
caucuggccuucuguguccuu

SEQ ID NO: 943652 - RNA, 18 nt, Human
caugguggcggggcugug

SEQ ID NO: 943653 - RNA, 18 nt, Human
cauguguacaucugugug

SEQ ID NO: 943654 - RNA, 21 nt, Human
ccacaacaaagcacaacuguc

SEQ ID NO: 943655 - RNA, 19 nt, Human
ccacacaccggugcagcca

SEQ ID NO: 943656 - RNA, 19 nt, Human
ccaggcucaguucuggguc

SEQ ID NO: 943657 - RNA, 19 nt, Human
cccacagaggagaugaaac

SEQ ID NO: 943658 - RNA, 23 nt, Human
cccacuuuuauugauaguguaca

SEQ ID NO: 943659 - RNA, 24 nt, Human
cccagcauagcccaaucccgggca

SEQ ID NO: 943660 - RNA, 19 nt, Human
ccccgccccagcaucccuc

SEQ ID NO: 943661 - RNA, 19 nt, Human
ccccgccuccccaccgcug

SEQ ID NO: 943662 - RNA, 18 nt, Human
cccugaaggccccagggc

SEQ ID NO: 943663 - RNA, 19 nt, Human
cccugagcuuuucugucgg

SEQ ID NO: 943664 - RNA, 24 nt, Human
cccugcgcugcucgggacgccggg

SEQ ID NO: 943665 - RNA, 18 nt, Human
ccgggagcugcggggagc

SEQ ID NO: 943666 - RNA, 21 nt, Human
ccucccugaaggcacuggcca

SEQ ID NO: 943667 - RNA, 19 nt, Human
ccuggaagcgccgggagcu

SEQ ID NO: 943668 - RNA, 18 nt, Human
ccuggccaaggagggagu

SEQ ID NO: 943669 - RNA, 20 nt, Human
cgggcugggcgcggccgggc

SEQ ID NO: 943670 - RNA, 18 nt, Human
cggggcugggaauggcgg

SEQ ID NO: 943671 - RNA, 25 nt, Human
cucagaaagacccaauagaagauca

SEQ ID NO: 943672 - RNA, 18 nt, Human
cucgggacgccgggcugg

SEQ ID NO: 943673 - RNA, 21 nt, Human
cucugaaccucagaaagaccc

SEQ ID NO: 943674 - RNA, 20 nt, Human
cugaaccucagaaagaccca

SEQ ID NO: 943675 - RNA, 24 nt, Human
cugaaccucagaaagacccaauag

SEQ ID NO: 943676 - RNA, 19 nt, Human
cugaauuugcuaggggaca

SEQ ID NO: 943677 - RNA, 22 nt, Human
cugcaaccacaacaaagcacaa

SEQ ID NO: 943678 - RNA, 25 nt, Human
cugcaaccacaacaaagcacaacca

SEQ ID NO: 943679 - RNA, 22 nt, Human
cugcccaccccacgcuugugca

SEQ ID NO: 943680 - RNA, 22 nt, Human
cugccggggccucgguggggag

SEQ ID NO: 943681 - RNA, 24 nt, Human
cugggaauggcgggccgggccucu

SEQ ID NO: 943682 - RNA, 21 nt, Human
cugggucccagcugcuccucc

SEQ ID NO: 943683 - RNA, 20 nt, Human
cugugugaccuggaggaagu

SEQ ID NO: 943684 - RNA, 19 nt, Human
cuuugagcacagacgcagg

SEQ ID NO: 943685 - RNA, 19 nt, Human
gaaaacagcugcaaccaca

SEQ ID NO: 943686 - RNA, 21 nt, Human
gaaaacagcugcaaccacaac

SEQ ID NO: 943687 - RNA, 26 nt, Human
gaaggcagacgaaugugcggaggcca

SEQ ID NO: 943688 - RNA, 18 nt, Human
gaaggccccaggggccaa

SEQ ID NO: 943689 - RNA, 24 nt, Human
gaaggugguggggcagcaggggcg

SEQ ID NO: 943690 - RNA, 20 nt, Human
gaaguucucccagcugccac

SEQ ID NO: 943691 - RNA, 23 nt, Human
gaaguucucccagcugccacccu

SEQ ID NO: 943692 - RNA, 19 nt, Human
gaguacauggugguaccca

SEQ ID NO: 943693 - RNA, 19 nt, Human
gcagccugguucuaggugg

SEQ ID NO: 943694 - RNA, 19 nt, Human
gccaacuugugugugugcu

SEQ ID NO: 943695 - RNA, 18 nt, Human
gcgcggccgggcaaggag

SEQ ID NO: 943696 - RNA, 21 nt, Human
gcgggcagaggccaggacugg

SEQ ID NO: 943697 - RNA, 21 nt, Human
gcuaggggacaaagguggggc

SEQ ID NO: 943698 - RNA, 19 nt, Human
gcucgggacgccgggcugg

SEQ ID NO: 943699 - RNA, 19 nt, Human
ggacaagaugucccaaagc

SEQ ID NO: 943700 - RNA, 21 nt, Human
ggagggaccuaggagaggagg

SEQ ID NO: 943701 - RNA, 18 nt, Human
ggagggggugcagaggca

SEQ ID NO: 943702 - RNA, 18 nt, Human
ggcagcaggggcgggcag

SEQ ID NO: 943703 - RNA, 22 nt, Human
ggcugggagagaaguucuccca

SEQ ID NO: 943704 - RNA, 22 nt, Human
gggcagaggccaggacugggga

SEQ ID NO: 943705 - RNA, 20 nt, Human
gggccucuggcacggcucag

SEQ ID NO: 943706 - RNA, 20 nt, Human
gggcgcggccgggcaaggag

SEQ ID NO: 943707 - RNA, 18 nt, Human
gggcugggagagaaguuc

SEQ ID NO: 943708 - RNA, 26 nt, Human
ggggaaggggacagaggcaggguugg

SEQ ID NO: 943709 - RNA, 19 nt, Human
ggggcagcaggggcgggca

SEQ ID NO: 943710 - RNA, 18 nt, Human
ggggcugugccuggguga

SEQ ID NO: 943711 - RNA, 24 nt, Human
gggggugggagggggugcagaggc

SEQ ID NO: 943712 - RNA, 18 nt, Human
ggugcagaggcagcugaa

SEQ ID NO: 943713 - RNA, 21 nt, Human
gguggggaaggggacagaggc

SEQ ID NO: 943714 - RNA, 18 nt, Human
ggugguggggcagcaggg

SEQ ID NO: 943715 - RNA, 19 nt, Human
ggugguggggcagcagggg

SEQ ID NO: 943716 - RNA, 18 nt, Human
gguguuaugccaggagag

SEQ ID NO: 943717 - RNA, 21 nt, Human
guagagggcagccugguucua

SEQ ID NO: 943718 - RNA, 24 nt, Human
guggggcagcaggggcgggcagag

SEQ ID NO: 943719 - RNA, 24 nt, Human
guggguggggaaggggacagaggc

SEQ ID NO: 943720 - RNA, 20 nt, Human
guguguacuuguauauacau

SEQ ID NO: 943721 - RNA, 23 nt, Human
uaaaaaaaagcaguccuggccug

SEQ ID NO: 943722 - RNA, 23 nt, Human
uaagagcugaugacaagggccuu

SEQ ID NO: 943723 - RNA, 19 nt, Human
uaagguuccuuagggcccu

SEQ ID NO: 943724 - RNA, 20 nt, Human
uacacggagauccauggugg

SEQ ID NO: 943725 - RNA, 21 nt, Human
uagcuugcuucugccacccac

SEQ ID NO: 943726 - RNA, 21 nt, Human
uauauacaugggcauggugua

SEQ ID NO: 943727 - RNA, 21 nt, Human
uauauacaugggcauggugua

SEQ ID NO: 943728 - RNA, 20 nt, Human
ucccaaagcccugaaggccc

SEQ ID NO: 943729 - RNA, 21 nt, Human
ucccaaagcccugaaggcccc

SEQ ID NO: 943730 - RNA, 23 nt, Human
ucccagcugccacccaaaccaag

SEQ ID NO: 943731 - RNA, 24 nt, Human
ucccagcugccacccaaaccaagc

SEQ ID NO: 943732 - RNA, 20 nt, Human
ucccagcugcuccuccccgc

SEQ ID NO: 943733 - RNA, 21 nt, Human
ucccaggcucaguucuggguc

SEQ ID NO: 943734 - RNA, 19 nt, Human
uccuaggacacagugaacc

SEQ ID NO: 943735 - RNA, 19 nt, Human
uccuccccgccuccccacc

SEQ ID NO: 943736 - RNA, 18 nt, Human
ucuaaguggugggcgugg

SEQ ID NO: 943737 - RNA, 21 nt, Human
ucuagggagaggguugaggac

SEQ ID NO: 943738 - RNA, 18 nt, Human
ugaaaccaccaaggagcu

SEQ ID NO: 943739 - RNA, 20 nt, Human
ugaaccucagaaagacccaa

SEQ ID NO: 943740 - RNA, 18 nt, Human
ugaaggccccaggggcca

SEQ ID NO: 943741 - RNA, 21 nt, Human
ugacgcagcaauccucacccc

SEQ ID NO: 943742 - RNA, 19 nt, Human
ugagaaggcagacgaaugu

SEQ ID NO: 943743 - RNA, 20 nt, Human
ugagcacagacgcaggcagg

SEQ ID NO: 943744 - RNA, 25 nt, Human
ugcagaaggugguggggcagcaggg

SEQ ID NO: 943745 - RNA, 23 nt, Human
ugccaggagagaggagaccuuuc

SEQ ID NO: 943746 - RNA, 18 nt, Human
ugccggggccucgguggg

SEQ ID NO: 943747 - RNA, 19 nt, Human
ugcucaucguguccccucc

SEQ ID NO: 943748 - RNA, 19 nt, Human
ugcugugugaccuggagga

SEQ ID NO: 943749 - RNA, 21 nt, Human
uggaucugaacugggugaggg

SEQ ID NO: 943750 - RNA, 22 nt, Human
uggccacgcccccuucagacac

SEQ ID NO: 943751 - RNA, 19 nt, Human
uggcggggcugugccuggg

SEQ ID NO: 943752 - RNA, 21 nt, Human
ugggagcagaggaggaaggcg

SEQ ID NO: 943753 - RNA, 20 nt, Human
ugggagcauuaaaaaaaagc

SEQ ID NO: 943754 - RNA, 18 nt, Human
ugggagggggugcagagg

SEQ ID NO: 943755 - RNA, 22 nt, Human
ugggagggggugcagaggcagc

SEQ ID NO: 943756 - RNA, 21 nt, Human
ugggugagggccuggccaagg

SEQ ID NO: 943757 - RNA, 18 nt, Human
ugguggggcagcaggggc

SEQ ID NO: 943758 - RNA, 20 nt, Human
ugguggggcagcaggggcgg

SEQ ID NO: 943759 - RNA, 23 nt, Human
ugguuuauggguucaaaacccac

SEQ ID NO: 943760 - RNA, 23 nt, Human
ugucaggcgcagcugggggccaa

SEQ ID NO: 943761 - RNA, 30 nt, Human
ugucccaaagcccugaaggccccaggggcc

SEQ ID NO: 943762 - RNA, 19 nt, Human
ugugaacaagacugcugcc

SEQ ID NO: 943763 - RNA, 18 nt, Human
ugugcagaaggugguggg

SEQ ID NO: 943764 - RNA, 18 nt, Human
ugugcagaaggugguggg

SEQ ID NO: 943765 - RNA, 18 nt, Human
ugugcagaaggugguggg

SEQ ID NO: 943766 - RNA, 19 nt, Human
ugugcagaagguggugggg

SEQ ID NO: 943767 - RNA, 20 nt, Human
ugugcagaaggugguggggc

SEQ ID NO: 943768 - RNA, 18 nt, Human
uguguacaucugugugua

SEQ ID NO: 943769 - RNA, 18 nt, Human
uguguacuuguauauaca

SEQ ID NO: 943770 - RNA, 20 nt, Human
uguguacuuguauauacaug

SEQ ID NO: 943771 - RNA, 20 nt, Human
uguguacuuguauauacaug

SEQ ID NO: 943772 - RNA, 20 nt, Human
uguguguacaucugugugua

SEQ ID NO: 943773 - RNA, 23 nt, Human
uucucaucuggccuucugugucc

SEQ ID NO: 943774 - RNA, 18 nt, Human
uucucccagcugccaccc

SEQ ID NO: 943775 - RNA, 19 nt, Human
uucugggucccagcugcuc

SEQ ID NO: 943776 - RNA, 18 nt, Human
uucugucggaucccuccc

SEQ ID NO: 943777 - RNA, 24 nt, Human
uucuguguccuuuucauccugagg

SEQ ID NO: 943778 - RNA, 21 nt, Human
uugaggcugcagagauguguc

SEQ ID NO: 943779 - RNA, 22 nt, Human
uugugugugugcuggggguggg

SEQ ID NO: 943780 - RNA, 18 nt, Human
uuuuuuuuuuuuuuuuug

SEQ ID NO: 943781 - RNA, 18 nt, Human
aaaauccagugaaaccaa

SEQ ID NO: 943782 - RNA, 22 nt, Human
agaaguaaaauccagugaaacc

SEQ ID NO: 943783 - RNA, 18 nt, Human
cgggagcagcuggucugg

SEQ ID NO: 943784 - RNA, 18 nt, Human
gaagcacauacugaagaa

SEQ ID NO: 943785 - RNA, 19 nt, Human
uccagugaaaccaaacgaa

SEQ ID NO: 943786 - RNA, 19 nt, Human
uccccgggagcagcugguc

SEQ ID NO: 943787 - RNA, 19 nt, Human
uggucugggucugggcaca

SEQ ID NO: 943788 - RNA, 19 nt, Human
aaagcuccccacccaccuc

SEQ ID NO: 943789 - RNA, 21 nt, Human
aaggagccuggcuucgugcug

SEQ ID NO: 943790 - RNA, 19 nt, Human
accucagccagccacuguc

SEQ ID NO: 943791 - RNA, 20 nt, Human
accugcuuuguuaaaauggc

SEQ ID NO: 943792 - RNA, 23 nt, Human
accuucccacccaagucugaagc

SEQ ID NO: 943793 - RNA, 18 nt, Human
acuagcaucucccaucug

SEQ ID NO: 943794 - RNA, 20 nt, Human
aggcaaggcauacacaauuc

SEQ ID NO: 943795 - RNA, 21 nt, Human
auagccaucuuucaccuuccc

SEQ ID NO: 943796 - RNA, 19 nt, Human
cagcugccucuccaaaagg

SEQ ID NO: 943797 - RNA, 18 nt, Human
caggggcaaggccagauc

SEQ ID NO: 943798 - RNA, 21 nt, Human
caucccguggacucaggggcu

SEQ ID NO: 943799 - RNA, 21 nt, Human
caugcuguagacugaaauugc

SEQ ID NO: 943800 - RNA, 18 nt, Human
cauggauccuugucccug

SEQ ID NO: 943801 - RNA, 19 nt, Human
cccacagcacuugguggcc

SEQ ID NO: 943802 - RNA, 21 nt, Human
cccacccaccucagccagcca

SEQ ID NO: 943803 - RNA, 18 nt, Human
ccccacagcacuuggugg

SEQ ID NO: 943804 - RNA, 20 nt, Human
ccccacccaccucagccagc

SEQ ID NO: 943805 - RNA, 24 nt, Human
cuagcaucucccaucugacauucc

SEQ ID NO: 943806 - RNA, 25 nt, Human
cuagcaucucccaucugacauuccc

SEQ ID NO: 943807 - RNA, 21 nt, Human
cucaaggaaaagcuccccacc

SEQ ID NO: 943808 - RNA, 22 nt, Human
cucucuggagacagaauuccag

SEQ ID NO: 943809 - RNA, 19 nt, Human
cugaaacccaugauucccc

SEQ ID NO: 943810 - RNA, 19 nt, Human
gcgugcaccuuuuugcagc

SEQ ID NO: 943811 - RNA, 24 nt, Human
ggcgugcaccuuuuugcagcugcc

SEQ ID NO: 943812 - RNA, 21 nt, Human
gggcgugcaccuuuuugcagc

SEQ ID NO: 943813 - RNA, 20 nt, Human
gucuggaauccucuggggca

SEQ ID NO: 943814 - RNA, 20 nt, Human
uagccaucuuucaccuuccc

SEQ ID NO: 943815 - RNA, 23 nt, Human
ucacaggucuuuuucauggaucc

SEQ ID NO: 943816 - RNA, 23 nt, Human
ucacauagaaauauuuagaaugc

SEQ ID NO: 943817 - RNA, 23 nt, Human
uccaaaagggcuggcuucuuagg

SEQ ID NO: 943818 - RNA, 24 nt, Human
ucucuggagacagaauuccagucu

SEQ ID NO: 943819 - RNA, 19 nt, Human
ucugucuuugacccaaaca

SEQ ID NO: 943820 - RNA, 26 nt, Human
ucuuucaccuucccacccaagucuga

SEQ ID NO: 943821 - RNA, 28 nt, Human
uggaauccucuggggcacagccuacugc

SEQ ID NO: 943822 - RNA, 18 nt, Human
uggacucaggggcaaggc

SEQ ID NO: 943823 - RNA, 23 nt, Human
uggcuucuuaggaccaacagucu

SEQ ID NO: 943824 - RNA, 26 nt, Human
uguuucauucuuucuuuccuauccca

SEQ ID NO: 943825 - RNA, 28 nt, Human
uuauaccaaaaggaaauguaauggaacc

SEQ ID NO: 943826 - RNA, 18 nt, Human
uucauggauccuuguccc

SEQ ID NO: 943827 - RNA, 21 nt, Human
uugacccaaacagcuggguuu

SEQ ID NO: 943828 - RNA, 19 nt, Human
uugguggccuucuguucca

SEQ ID NO: 943829 - RNA, 21 nt, Human
aaacguagcuccgcagguccu

SEQ ID NO: 943830 - RNA, 18 nt, Human
aaauucugcagcuggugg

SEQ ID NO: 943831 - RNA, 18 nt, Human
aacacagcccgcacuccc

SEQ ID NO: 943832 - RNA, 21 nt, Human
aagaggaacugccccucccca

SEQ ID NO: 943833 - RNA, 19 nt, Human
accagcugcuccacaugcc

SEQ ID NO: 943834 - RNA, 22 nt, Human
agaaagcucauagaucucgucu

SEQ ID NO: 943835 - RNA, 24 nt, Human
agaaaucccuguucuccuggaguu

SEQ ID NO: 943836 - RNA, 18 nt, Human
agacauucaggcaucaga

SEQ ID NO: 943837 - RNA, 19 nt, Human
agagguuguucagcuuggg

SEQ ID NO: 943838 - RNA, 23 nt, Human
agcugguggagccugugccacgu

SEQ ID NO: 943839 - RNA, 21 nt, Human
agcuguaggaccucucucugu

SEQ ID NO: 943840 - RNA, 22 nt, Human
aggagaccaagagaugucuagg

SEQ ID NO: 943841 - RNA, 19 nt, Human
aggcagccggaagcccgcg

SEQ ID NO: 943842 - RNA, 20 nt, Human
agggaagaggggggcacagg

SEQ ID NO: 943843 - RNA, 19 nt, Human
agggccuuggugcugucag

SEQ ID NO: 943844 - RNA, 18 nt, Human
agggggaggguggcaggc

SEQ ID NO: 943845 - RNA, 23 nt, Human
agguagagguuguucagcuuggg

SEQ ID NO: 943846 - RNA, 19 nt, Human
agguaggugaggugcugag

SEQ ID NO: 943847 - RNA, 24 nt, Human
aguguuuguggcaacacagcccgc

SEQ ID NO: 943848 - RNA, 20 nt, Human
auggcgcuggcccggagcag

SEQ ID NO: 943849 - RNA, 22 nt, Human
augggaguccuugagucuggag

SEQ ID NO: 943850 - RNA, 24 nt, Human
augguggguccaucaccgggcagg

SEQ ID NO: 943851 - RNA, 21 nt, Human
cacugugacacaggcccccug

SEQ ID NO: 943852 - RNA, 18 nt, Human
cagauccucauuggcgcu

SEQ ID NO: 943853 - RNA, 23 nt, Human
cagcccaggugcggcgguagcgg

SEQ ID NO: 943854 - RNA, 19 nt, Human
cagccccuagggagcuggg

SEQ ID NO: 943855 - RNA, 22 nt, Human
cagcugguggagccugugccac

SEQ ID NO: 943856 - RNA, 25 nt, Human
caggcgccuaccaccugccagcccu

SEQ ID NO: 943857 - RNA, 23 nt, Human
caggggaccguaucuguuuccca

SEQ ID NO: 943858 - RNA, 21 nt, Human
caggggcccacuccaccacca

SEQ ID NO: 943859 - RNA, 24 nt, Human
caguguuuguggcaacacagcccg

SEQ ID NO: 943860 - RNA, 21 nt, Human
caguugagggcuuggggauau

SEQ ID NO: 943861 - RNA, 18 nt, Human
cauaauucuugaacacag

SEQ ID NO: 943862 - RNA, 23 nt, Human
caucaccugcacccagcgggaca

SEQ ID NO: 943863 - RNA, 20 nt, Human
ccagcccaggugcggcggua

SEQ ID NO: 943864 - RNA, 23 nt, Human
cccacuccaccaccagaggugca

SEQ ID NO: 943865 - RNA, 18 nt, Human
cccaggaagggugugggg

SEQ ID NO: 943866 - RNA, 26 nt, Human
cccaguacaggcagccggaagcccgc

SEQ ID NO: 943867 - RNA, 21 nt, Human
ccccacccacccucaggccag

SEQ ID NO: 943868 - RNA, 23 nt, Human
ccccagaggaagccacugcagcu

SEQ ID NO: 943869 - RNA, 24 nt, Human
ccccuccccacccacccucaggcc

SEQ ID NO: 943870 - RNA, 20 nt, Human
cccgcgcagccagcccaggu

SEQ ID NO: 943871 - RNA, 18 nt, Human
cccuccccacccacccuc

SEQ ID NO: 943872 - RNA, 21 nt, Human
cccugggacugaaugggcccc

SEQ ID NO: 943873 - RNA, 22 nt, Human
cccuuggagggccaccagcucc

SEQ ID NO: 943874 - RNA, 20 nt, Human
ccgaaggccccccuccccca

SEQ ID NO: 943875 - RNA, 21 nt, Human
ccgcgcagccagcccaggugc

SEQ ID NO: 943876 - RNA, 19 nt, Human
ccuacggagcccuccaggg

SEQ ID NO: 943877 - RNA, 21 nt, Human
ccuacggagcccuccagggcc

SEQ ID NO: 943878 - RNA, 22 nt, Human
ccuccccacccacccucaggcc

SEQ ID NO: 943879 - RNA, 23 nt, Human
ccucguacugagcccugcaaaac

SEQ ID NO: 943880 - RNA, 25 nt, Human
ccuguccggcuugggugucacacca

SEQ ID NO: 943881 - RNA, 22 nt, Human
ccuugagucuggagauggcacu

SEQ ID NO: 943882 - RNA, 19 nt, Human
ccuugcccaggacuccagc

SEQ ID NO: 943883 - RNA, 24 nt, Human
cgaaggccccccucccccacacgg

SEQ ID NO: 943884 - RNA, 19 nt, Human
cgagagucgcucaaagucc

SEQ ID NO: 943885 - RNA, 19 nt, Human
cgccuaccaccugccagcc

SEQ ID NO: 943886 - RNA, 29 nt, Human
cgcucaaaguccuccugagagauuguucc

SEQ ID NO: 943887 - RNA, 19 nt, Human
cgcugcaggguggaugcug

SEQ ID NO: 943888 - RNA, 21 nt, Human
cgcugcaggguggaugcugcc

SEQ ID NO: 943889 - RNA, 18 nt, Human
cguagcuccgcagguccu

SEQ ID NO: 943890 - RNA, 18 nt, Human
cguggggugaggaggccg

SEQ ID NO: 943891 - RNA, 18 nt, Human
cucaaaguccuccugaga

SEQ ID NO: 943892 - RNA, 23 nt, Human
cuccaaguggucgaaaagcaagg

SEQ ID NO: 943893 - RNA, 19 nt, Human
cuuguccagcaccugugca

SEQ ID NO: 943894 - RNA, 18 nt, Human
gaaagaggaacugccccu

SEQ ID NO: 943895 - RNA, 20 nt, Human
gaagaggcuggggagagacc

SEQ ID NO: 943896 - RNA, 20 nt, Human
gaagaggggggcacagggcu

SEQ ID NO: 943897 - RNA, 19 nt, Human
gaagggaaaauugcccgag

SEQ ID NO: 943898 - RNA, 20 nt, Human
gaaugaacuuguccagcacc

SEQ ID NO: 943899 - RNA, 21 nt, Human
gagaccuacggagcccuccag

SEQ ID NO: 943900 - RNA, 21 nt, Human
gaggaagagaggagaccaaga

SEQ ID NO: 943901 - RNA, 20 nt, Human
gaggaggccgggggucuugc

SEQ ID NO: 943902 - RNA, 19 nt, Human
gaggguggcaggcucuugg

SEQ ID NO: 943903 - RNA, 18 nt, Human
gauggcgcuggcccggag

SEQ ID NO: 943904 - RNA, 20 nt, Human
gcagccggaagcccgcgcag

SEQ ID NO: 943905 - RNA, 18 nt, Human
gcccacuccaccaccaga

SEQ ID NO: 943906 - RNA, 23 nt, Human
gcccacuccaccaccagaggugc

SEQ ID NO: 943907 - RNA, 21 nt, Human
gcccaguacaggcagccggaa

SEQ ID NO: 943908 - RNA, 18 nt, Human
gccuaccaccugccagcc

SEQ ID NO: 943909 - RNA, 21 nt, Human
gccucguacugagcccugcaa

SEQ ID NO: 943910 - RNA, 19 nt, Human
gcggccgucaggcaaccug

SEQ ID NO: 943911 - RNA, 20 nt, Human
gcgugggggugggugaagcc

SEQ ID NO: 943912 - RNA, 25 nt, Human
gcucagcaccaucaccugcacccag

SEQ ID NO: 943913 - RNA, 22 nt, Human
gcucaggcugggggccaagagg

SEQ ID NO: 943914 - RNA, 20 nt, Human
gcugcaggguggaugcugcc

SEQ ID NO: 943915 - RNA, 21 nt, Human
gcugggggccaagaggggcag

SEQ ID NO: 943916 - RNA, 18 nt, Human
gcuguaggggcccgggac

SEQ ID NO: 943917 - RNA, 21 nt, Human
gcuuuuugcccaggccugggc

SEQ ID NO: 943918 - RNA, 18 nt, Human
ggaaggguguggggauuc

SEQ ID NO: 943919 - RNA, 19 nt, Human
ggacaacgcggcucccggg

SEQ ID NO: 943920 - RNA, 18 nt, Human
ggacucaggacugacugg

SEQ ID NO: 943921 - RNA, 19 nt, Human
ggagauggcagaauggcga

SEQ ID NO: 943922 - RNA, 24 nt, Human
ggcccacuccaccaccagaggugc

SEQ ID NO: 943923 - RNA, 20 nt, Human
ggcccggagcagguacccug

SEQ ID NO: 943924 - RNA, 22 nt, Human
ggccugggcugcucauugggag

SEQ ID NO: 943925 - RNA, 22 nt, Human
ggcugggggccaagaggggcag

SEQ ID NO: 943926 - RNA, 21 nt, Human
gggaagaggggggcacagggc

SEQ ID NO: 943927 - RNA, 18 nt, Human
gggacugaaugggccccu

SEQ ID NO: 943928 - RNA, 19 nt, Human
gggcagggaagaggggggc

SEQ ID NO: 943929 - RNA, 21 nt, Human
gggccaccagcuccugcagcc

SEQ ID NO: 943930 - RNA, 18 nt, Human
ggggaaggaagaggcugg

SEQ ID NO: 943931 - RNA, 22 nt, Human
ggggagcugguguggaugggac

SEQ ID NO: 943932 - RNA, 22 nt, Human
ggggaggguggcaggcucuugg

SEQ ID NO: 943933 - RNA, 21 nt, Human
gggguuugugaagggguuggg

SEQ ID NO: 943934 - RNA, 22 nt, Human
ggguaaggagacauucaggcau

SEQ ID NO: 943935 - RNA, 24 nt, Human
ggguauuggaguggcucacaguug

SEQ ID NO: 943936 - RNA, 24 nt, Human
gguggguccaucaccgggcagggg

SEQ ID NO: 943937 - RNA, 18 nt, Human
gugaagggguuggggggg

SEQ ID NO: 943938 - RNA, 22 nt, Human
gugacccuguccggcuugggug

SEQ ID NO: 943939 - RNA, 21 nt, Human
guggcaggcucuugggacaac

SEQ ID NO: 943940 - RNA, 19 nt, Human
gugucacaccaggggccca

SEQ ID NO: 943941 - RNA, 21 nt, Human
guguuuguggcaacacagccc

SEQ ID NO: 943942 - RNA, 27 nt, Human
guugcugagaccuacggagcccuccaa

SEQ ID NO: 943943 - RNA, 18 nt, Human
uaccuucaccuggucucu

SEQ ID NO: 943944 - RNA, 19 nt, Human
uaggggcccgggacggcuc

SEQ ID NO: 943945 - RNA, 22 nt, Human
uauagcacaucuauccugugcc

SEQ ID NO: 943946 - RNA, 21 nt, Human
uauccugugccgugggcaugg

SEQ ID NO: 943947 - RNA, 22 nt, Human
ucacaguugagggcuuggggau

SEQ ID NO: 943948 - RNA, 21 nt, Human
ucagcguguugaaauucugca

SEQ ID NO: 943949 - RNA, 23 nt, Human
ucaggcugggggccaagaggggc

SEQ ID NO: 943950 - RNA, 20 nt, Human
uccaccagcugcuccacaug

SEQ ID NO: 943951 - RNA, 18 nt, Human
uccaggagggccuuggug

SEQ ID NO: 943952 - RNA, 20 nt, Human
ucccgggcauaagaaagcuc

SEQ ID NO: 943953 - RNA, 24 nt, Human
ucccugggacugaaugggccccug

SEQ ID NO: 943954 - RNA, 19 nt, Human
uccucggagccacagcugg

SEQ ID NO: 943955 - RNA, 25 nt, Human
ucggagccacagcuggcauggggga

SEQ ID NO: 943956 - RNA, 21 nt, Human
ucguacugagcccugcaaaac

SEQ ID NO: 943957 - RNA, 19 nt, Human
ucugcagcugguggagccu

SEQ ID NO: 943958 - RNA, 24 nt, Human
ucugcagcugguggagccugugcc

SEQ ID NO: 943959 - RNA, 18 nt, Human
ucugcucccugggacuga

SEQ ID NO: 943960 - RNA, 21 nt, Human
ucugucaggcgccuaccaccu

SEQ ID NO: 943961 - RNA, 20 nt, Human
ucuguuucccaggaagggug

SEQ ID NO: 943962 - RNA, 24 nt, Human
ugaaugaacuuguccagcaccugu

SEQ ID NO: 943963 - RNA, 23 nt, Human
ugagaccuacggagcccuccagg

SEQ ID NO: 943964 - RNA, 22 nt, Human
ugaggaagagaggagaccaaga

SEQ ID NO: 943965 - RNA, 24 nt, Human
ugcaaaacguagcuccgcaggucc

SEQ ID NO: 943966 - RNA, 19 nt, Human
ugcaggaaggccaggccca

SEQ ID NO: 943967 - RNA, 20 nt, Human
ugcagggacaccagguccuu

SEQ ID NO: 943968 - RNA, 20 nt, Human
ugccaucagcguguugaaau

SEQ ID NO: 943969 - RNA, 18 nt, Human
uggaaggugugcaggaag

SEQ ID NO: 943970 - RNA, 22 nt, Human
uggcaggcucuugggacaacgc

SEQ ID NO: 943971 - RNA, 23 nt, Human
uggcaggcucuugggacaacgcg

SEQ ID NO: 943972 - RNA, 19 nt, Human
uggcgaagcuggcacccag

SEQ ID NO: 943973 - RNA, 21 nt, Human
uggcgauggggcagggaagag

SEQ ID NO: 943974 - RNA, 18 nt, Human
uggggcagggaagagggg

SEQ ID NO: 943975 - RNA, 23 nt, Human
ugggggaagggagugaggaagag

SEQ ID NO: 943976 - RNA, 23 nt, Human
uggggggccagggccaccagggc

SEQ ID NO: 943977 - RNA, 22 nt, Human
ugggggugggugaagcccaugg

SEQ ID NO: 943978 - RNA, 28 nt, Human
ugggguuugugaagggguuggggggguc

SEQ ID NO: 943979 - RNA, 23 nt, Human
uggguaaggagacauucaggcau

SEQ ID NO: 943980 - RNA, 19 nt, Human
uggucgaaaagcaaggaca

SEQ ID NO: 943981 - RNA, 24 nt, Human
ugguguggaugggacaggagcucc

SEQ ID NO: 943982 - RNA, 20 nt, Human
uguaggggcccgggacggcu

SEQ ID NO: 943983 - RNA, 23 nt, Human
ugugccgugggcauggguaagga

SEQ ID NO: 943984 - RNA, 20 nt, Human
uguggggauucagucugggu

SEQ ID NO: 943985 - RNA, 19 nt, Human
ugugggggccaagucaggg

SEQ ID NO: 943986 - RNA, 19 nt, Human
uguugaaauucugcagcug

SEQ ID NO: 943987 - RNA, 19 nt, Human
uguugggguuugugaaggg

SEQ ID NO: 943988 - RNA, 22 nt, Human
uguugggguuugugaagggguu

SEQ ID NO: 943989 - RNA, 24 nt, Human
uucccaggaaggguguggggauuc

SEQ ID NO: 943990 - RNA, 18 nt, Human
uugagggcuuggggauau

SEQ ID NO: 943991 - RNA, 21 nt, Human
uugcgcuuuuugcccaggccu

SEQ ID NO: 943992 - RNA, 23 nt, Human
uuguugugggaggcaaggagcuc

SEQ ID NO: 943993 - RNA, 22 nt, Human
aaaacccuuggcgaaaugccag

SEQ ID NO: 943994 - RNA, 21 nt, Human
aaaauaaaaauuaccagaaga

SEQ ID NO: 943995 - RNA, 19 nt, Human
aaacaacccaaauggugaa

SEQ ID NO: 943996 - RNA, 21 nt, Human
aaacacaaggggcgcuucaac

SEQ ID NO: 943997 - RNA, 22 nt, Human
aaacaucagccuggaaacaggu

SEQ ID NO: 943998 - RNA, 23 nt, Human
aaacgucuccaccaaaaaagucc

SEQ ID NO: 943999 - RNA, 20 nt, Human
aaagagcuucccugaacccc

SEQ ID NO: 944000 - RNA, 24 nt, Human
aacagaaccagacucugucucaaa

SEQ ID NO: 944001 - RNA, 25 nt, Human
aaccagacucugucucaaaaaaaaa

SEQ ID NO: 944002 - RNA, 29 nt, Human
aacccaaauggugaaccuggagaacccuu

SEQ ID NO: 944003 - RNA, 24 nt, Human
aaccccaccucuacuaaaaccacc

SEQ ID NO: 944004 - RNA, 21 nt, Human
aagacuccaaagguaaacuga

SEQ ID NO: 944005 - RNA, 20 nt, Human
aagcaagacuuugugcaaaa

SEQ ID NO: 944006 - RNA, 20 nt, Human
aagcuuccugauaggagucc

SEQ ID NO: 944007 - RNA, 23 nt, Human
aaggaagcgccauagagacaggc

SEQ ID NO: 944008 - RNA, 20 nt, Human
aaggagggcagggguccagg

SEQ ID NO: 944009 - RNA, 20 nt, Human
aagugccuagcuuccugggg

SEQ ID NO: 944010 - RNA, 21 nt, Human
aauaccacucagaucaguggc

SEQ ID NO: 944011 - RNA, 24 nt, Human
aaucacuugaaccccagaggcgga

SEQ ID NO: 944012 - RNA, 18 nt, Human
aaugugaccuugugcuua

SEQ ID NO: 944013 - RNA, 18 nt, Human
aaugugugcugcuauauc

SEQ ID NO: 944014 - RNA, 18 nt, Human
acacagacagacgugugg

SEQ ID NO: 944015 - RNA, 22 nt, Human
acacaggaucuucucugucucc

SEQ ID NO: 944016 - RNA, 26 nt, Human
acaccagaaacaucagccuggaaaca

SEQ ID NO: 944017 - RNA, 24 nt, Human
acagaaccagacucugucucaaaa

SEQ ID NO: 944018 - RNA, 22 nt, Human
acaggagaaucacuugaacccc

SEQ ID NO: 944019 - RNA, 25 nt, Human
acaggaucuucucugucuccuaaag

SEQ ID NO: 944020 - RNA, 20 nt, Human
accccacacucaguagcaag

SEQ ID NO: 944021 - RNA, 23 nt, Human
accuuguaacauaagccccuccc

SEQ ID NO: 944022 - RNA, 21 nt, Human
accuuugaugacaugaagaug

SEQ ID NO: 944023 - RNA, 24 nt, Human
acucaguagcaagaugaggcuuca

SEQ ID NO: 944024 - RNA, 21 nt, Human
acuccaugccccacagggcug

SEQ ID NO: 944025 - RNA, 23 nt, Human
acucccacaaaucggucgaagag

SEQ ID NO: 944026 - RNA, 18 nt, Human
acugcacuccagccuggg

SEQ ID NO: 944027 - RNA, 24 nt, Human
acugcacuccagccugggaaacag

SEQ ID NO: 944028 - RNA, 24 nt, Human
agaaacgcuagcaauuacacacca

SEQ ID NO: 944029 - RNA, 22 nt, Human
agaagcccuucugggcuuccac

SEQ ID NO: 944030 - RNA, 18 nt, Human
agacaggagaaucacuug

SEQ ID NO: 944031 - RNA, 23 nt, Human
agacaggagaaucacuugaaccc

SEQ ID NO: 944032 - RNA, 19 nt, Human
agacaggcugucagcuggg

SEQ ID NO: 944033 - RNA, 19 nt, Human
agacuguucuugcccuuuu

SEQ ID NO: 944034 - RNA, 23 nt, Human
agagaaacacacaggaucuucuc

SEQ ID NO: 944035 - RNA, 25 nt, Human
agagaugggcagugccucuaccccc

SEQ ID NO: 944036 - RNA, 18 nt, Human
agaucaaaaucuugaccc

SEQ ID NO: 944037 - RNA, 24 nt, Human
agccuggccaagauggugaaaccc

SEQ ID NO: 944038 - RNA, 24 nt, Human
agccugggaaacagaaccagacuc

SEQ ID NO: 944039 - RNA, 21 nt, Human
agcuagugguuaguaguuugc

SEQ ID NO: 944040 - RNA, 21 nt, Human
aggagggugcccagggcagaa

SEQ ID NO: 944041 - RNA, 24 nt, Human
aggcggauguugcagugagcugag

SEQ ID NO: 944042 - RNA, 24 nt, Human
aggcggguggaucacgaggucagg

SEQ ID NO: 944043 - RNA, 24 nt, Human
aggcugagacaggagaaucacuug

SEQ ID NO: 944044 - RNA, 23 nt, Human
aguggcucacgccuguaauccca

SEQ ID NO: 944045 - RNA, 24 nt, Human
aucccaccacugcacuccagccug

SEQ ID NO: 944046 - RNA, 22 nt, Human
auucuguggagagaagguggag

SEQ ID NO: 944047 - RNA, 24 nt, Human
caacacuuugggaggccuaggcgg

SEQ ID NO: 944048 - RNA, 21 nt, Human
caagaugaggcuucauucuug

SEQ ID NO: 944049 - RNA, 19 nt, Human
caauuacacaccagaaaca

SEQ ID NO: 944050 - RNA, 24 nt, Human
cacacaggaucuucucugucuccu

SEQ ID NO: 944051 - RNA, 23 nt, Human
cacaccagaaacaucagccugga

SEQ ID NO: 944052 - RNA, 22 nt, Human
caccaaccaggggcuguccuuu

SEQ ID NO: 944053 - RNA, 22 nt, Human
caccaggcccuggccacacuag

SEQ ID NO: 944054 - RNA, 24 nt, Human
caccuucccucucaugugaucacc

SEQ ID NO: 944055 - RNA, 24 nt, Human
cacgccuguaaucccaacacuuug

SEQ ID NO: 944056 - RNA, 26 nt, Human
cacuagcuggucagcacuguguacgc

SEQ ID NO: 944057 - RNA, 18 nt, Human
cacugcacuccagccugg

SEQ ID NO: 944058 - RNA, 19 nt, Human
cacugcacuccagccuggg

SEQ ID NO: 944059 - RNA, 19 nt, Human
cacugcacuccagccuggg

SEQ ID NO: 944060 - RNA, 24 nt, Human
cacugcacuccagccugggaaaca

SEQ ID NO: 944061 - RNA, 22 nt, Human
cagcugccugucaagcuuccug

SEQ ID NO: 944062 - RNA, 21 nt, Human
cagcuugcagaagcccuucug

SEQ ID NO: 944063 - RNA, 24 nt, Human
caggaucuucucugucuccuaaag

SEQ ID NO: 944064 - RNA, 19 nt, Human
cagggcagaaacgucucca

SEQ ID NO: 944065 - RNA, 25 nt, Human
cagguaggcacauggacacguacca

SEQ ID NO: 944066 - RNA, 20 nt, Human
cagugagcugagaucccacc

SEQ ID NO: 944067 - RNA, 21 nt, Human
cauagccaggcacccaggucc

SEQ ID NO: 944068 - RNA, 23 nt, Human
ccaacauauaaacaacccaaaug

SEQ ID NO: 944069 - RNA, 21 nt, Human
ccaacuaaggcccugaacauu

SEQ ID NO: 944070 - RNA, 23 nt, Human
ccacagcugugagccuucucaag

SEQ ID NO: 944071 - RNA, 18 nt, Human
ccacagggcuggugcugc

SEQ ID NO: 944072 - RNA, 20 nt, Human
ccacagggcuggugcugcug

SEQ ID NO: 944073 - RNA, 27 nt, Human
ccaccacugcacuccagccugggaaac

SEQ ID NO: 944074 - RNA, 19 nt, Human
ccacugcacuccagccugg

SEQ ID NO: 944075 - RNA, 20 nt, Human
ccacugcacuccagccuggg

SEQ ID NO: 944076 - RNA, 24 nt, Human
ccacugcacuccagccugggaaac

SEQ ID NO: 944077 - RNA, 21 nt, Human
ccagcuucaagugcaggaaga

SEQ ID NO: 944078 - RNA, 19 nt, Human
ccauggaggcagagaugga

SEQ ID NO: 944079 - RNA, 24 nt, Human
cccaagauaauccccacccccugc

SEQ ID NO: 944080 - RNA, 19 nt, Human
cccaccucuacuaaaacca

SEQ ID NO: 944081 - RNA, 26 nt, Human
cccaugcaccuucaccagguggccua

SEQ ID NO: 944082 - RNA, 22 nt, Human
ccccaagauaauccccaccccc

SEQ ID NO: 944083 - RNA, 24 nt, Human
ccccagccugccguagacacagcc

SEQ ID NO: 944084 - RNA, 27 nt, Human
ccccaugcaccuucaccagguggccua

SEQ ID NO: 944085 - RNA, 24 nt, Human
cccugccauuuaagucaucaccuu

SEQ ID NO: 944086 - RNA, 19 nt, Human
cccuugcugaggcccuguc

SEQ ID NO: 944087 - RNA, 21 nt, Human
ccgaggccucagcauuuuucu

SEQ ID NO: 944088 - RNA, 19 nt, Human
ccuaaagguagccauggag

SEQ ID NO: 944089 - RNA, 19 nt, Human
ccugaaacuuccuggccac

SEQ ID NO: 944090 - RNA, 21 nt, Human
ccugaaacuuccuggccacca

SEQ ID NO: 944091 - RNA, 24 nt, Human
ccuggccaagauggugaaacccca

SEQ ID NO: 944092 - RNA, 21 nt, Human
ccuguaauuccagcuacuugg

SEQ ID NO: 944093 - RNA, 22 nt, Human
ccuguaauuccagcuacuuggg

SEQ ID NO: 944094 - RNA, 21 nt, Human
ccuugccuucgccuuucuucc

SEQ ID NO: 944095 - RNA, 18 nt, Human
cgaagcaagacuuugugc

SEQ ID NO: 944096 - RNA, 24 nt, Human
cgccuguaaucccaacacuuuggg

SEQ ID NO: 944097 - RNA, 24 nt, Human
cggaaggagaggcuauauccccag

SEQ ID NO: 944098 - RNA, 25 nt, Human
cuaaaaccacacaaaaaaauuagcc

SEQ ID NO: 944099 - RNA, 21 nt, Human
cuaaagguagccauggaggca

SEQ ID NO: 944100 - RNA, 24 nt, Human
cuaggcggguggaucacgagguca

SEQ ID NO: 944101 - RNA, 22 nt, Human
cucacgccuguaaucccaacac

SEQ ID NO: 944102 - RNA, 24 nt, Human
cucacgccuguaaucccaacacuu

SEQ ID NO: 944103 - RNA, 23 nt, Human
cuccccaagauaauccccacccc

SEQ ID NO: 944104 - RNA, 18 nt, Human
cucccuggcacuugagag

SEQ ID NO: 944105 - RNA, 19 nt, Human
cucugucucaaaaaaaaaa

SEQ ID NO: 944106 - RNA, 19 nt, Human
cugaaccccacacucagua

SEQ ID NO: 944107 - RNA, 21 nt, Human
cugaaccccacacucaguagc

SEQ ID NO: 944108 - RNA, 22 nt, Human
cugaaccccacacucaguagca

SEQ ID NO: 944109 - RNA, 21 nt, Human
cugcacugaugcccagcugcc

SEQ ID NO: 944110 - RNA, 19 nt, Human
cugcauuacguggaagugu

SEQ ID NO: 944111 - RNA, 27 nt, Human
cuggccaagauggugaaaccccaccuc

SEQ ID NO: 944112 - RNA, 23 nt, Human
cuggggugcccagauccccucgu

SEQ ID NO: 944113 - RNA, 20 nt, Human
cuguaagacacugaaauugc

SEQ ID NO: 944114 - RNA, 19 nt, Human
cuuauaagccagaaaucgc

SEQ ID NO: 944115 - RNA, 21 nt, Human
cuuccaccuccugaccuccca

SEQ ID NO: 944116 - RNA, 20 nt, Human
cuugccuucgccuuucuucc

SEQ ID NO: 944117 - RNA, 23 nt, Human
cuugccuucgccuuucuuccucc

SEQ ID NO: 944118 - RNA, 19 nt, Human
gaagguggagaagagaugg

SEQ ID NO: 944119 - RNA, 20 nt, Human
gacaccacauucucugugcu

SEQ ID NO: 944120 - RNA, 21 nt, Human
gagcagaaaaaaggagggcag

SEQ ID NO: 944121 - RNA, 21 nt, Human
gaucacagagaaugugaccuu

SEQ ID NO: 944122 - RNA, 22 nt, Human
gaucacgaggucaggaguucaa

SEQ ID NO: 944123 - RNA, 24 nt, Human
gaucacgaggucaggaguucaaga

SEQ ID NO: 944124 - RNA, 22 nt, Human
gauguugcagugagcugagauc

SEQ ID NO: 944125 - RNA, 19 nt, Human
gcacugaugcccagcugcc

SEQ ID NO: 944126 - RNA, 24 nt, Human
gccaagauggugaaaccccaccuc

SEQ ID NO: 944127 - RNA, 18 nt, Human
gcggauguugcagugagc

SEQ ID NO: 944128 - RNA, 21 nt, Human
gcugcucccuggcacuugaga

SEQ ID NO: 944129 - RNA, 20 nt, Human
gcuuggccggagcuggggag

SEQ ID NO: 944130 - RNA, 24 nt, Human
ggaaacaggucugcgaucugcagg

SEQ ID NO: 944131 - RNA, 18 nt, Human
ggaaagaauggucuugac

SEQ ID NO: 944132 - RNA, 20 nt, Human
ggaaauucuucucccaaguc

SEQ ID NO: 944133 - RNA, 23 nt, Human
ggaagacuccaaagguaaacuga

SEQ ID NO: 944134 - RNA, 18 nt, Human
ggauguugcagugagcug

SEQ ID NO: 944135 - RNA, 23 nt, Human
ggauguugcagugagcugagauc

SEQ ID NO: 944136 - RNA, 23 nt, Human
ggcacaguggcucacgccuguaa

SEQ ID NO: 944137 - RNA, 18 nt, Human
ggcaggagggugcccagg

SEQ ID NO: 944138 - RNA, 23 nt, Human
ggccaagauggugaaaccccacc

SEQ ID NO: 944139 - RNA, 21 nt, Human
ggcgggucccuguaauuccag

SEQ ID NO: 944140 - RNA, 21 nt, Human
ggcugggcacaguggcucacg

SEQ ID NO: 944141 - RNA, 18 nt, Human
gggcacaguggcucacgc

SEQ ID NO: 944142 - RNA, 21 nt, Human
gggcaggagggugcccagggc

SEQ ID NO: 944143 - RNA, 21 nt, Human
gggggucuuaugggcaauggc

SEQ ID NO: 944144 - RNA, 23 nt, Human
gguggaucacgaggucaggaguu

SEQ ID NO: 944145 - RNA, 24 nt, Human
gguggcgggucccuguaauuccag

SEQ ID NO: 944146 - RNA, 22 nt, Human
guccgcuguccucucuuuucuc

SEQ ID NO: 944147 - RNA, 21 nt, Human
guccucucuuuucucucgcuc

SEQ ID NO: 944148 - RNA, 20 nt, Human
gucucaaaaaaaaaaaaaag

SEQ ID NO: 944149 - RNA, 19 nt, Human
gugagcagaaaaaaggagg

SEQ ID NO: 944150 - RNA, 22 nt, Human
gugaucuggccaacuggacaug

SEQ ID NO: 944151 - RNA, 23 nt, Human
guggaucacgaggucaggaguuc

SEQ ID NO: 944152 - RNA, 19 nt, Human
guugcagugagcugagauc

SEQ ID NO: 944153 - RNA, 20 nt, Human
uaaaacaaucaacguuucca

SEQ ID NO: 944154 - RNA, 21 nt, Human
uaaaacacaaggggcgcuuca

SEQ ID NO: 944155 - RNA, 21 nt, Human
uaaacacagacagacgugugg

SEQ ID NO: 944156 - RNA, 19 nt, Human
uaagaauacuucacaaggc

SEQ ID NO: 944157 - RNA, 21 nt, Human
uaagaauacuucacaaggcua

SEQ ID NO: 944158 - RNA, 22 nt, Human
uaagaauacuucacaaggcuaa

SEQ ID NO: 944159 - RNA, 21 nt, Human
uaauccccacccccugccauu

SEQ ID NO: 944160 - RNA, 24 nt, Human
uacuaaaaccacacaaaaaaauua

SEQ ID NO: 944161 - RNA, 23 nt, Human
uacuggggccaacuaaggcccug

SEQ ID NO: 944162 - RNA, 18 nt, Human
uagaacaucacauauguc

SEQ ID NO: 944163 - RNA, 22 nt, Human
uagcaaaugauggcuuggccgg

SEQ ID NO: 944164 - RNA, 24 nt, Human
uagccaggcacccagguccaagca

SEQ ID NO: 944165 - RNA, 21 nt, Human
uagccgggcgugguggcgggu

SEQ ID NO: 944166 - RNA, 20 nt, Human
uagugcuagugcaaaucaaa

SEQ ID NO: 944167 - RNA, 18 nt, Human
uaguuugcuuuguggaaa

SEQ ID NO: 944168 - RNA, 19 nt, Human
ucaaaacugcaagaccaug

SEQ ID NO: 944169 - RNA, 19 nt, Human
ucaccagguggccuaaaga

SEQ ID NO: 944170 - RNA, 21 nt, Human
ucacgaggucaggaguucaag

SEQ ID NO: 944171 - RNA, 24 nt, Human
ucacgaggucaggaguucaagacc

SEQ ID NO: 944172 - RNA, 19 nt, Human
ucagaucaguggcuccucu

SEQ ID NO: 944173 - RNA, 19 nt, Human
ucaggagcuccugaucuug

SEQ ID NO: 944174 - RNA, 23 nt, Human
ucaggagcuccugaucuugcuug

SEQ ID NO: 944175 - RNA, 21 nt, Human
uccacacacaaggugagggca

SEQ ID NO: 944176 - RNA, 18 nt, Human
uccaccaucccagccaga

SEQ ID NO: 944177 - RNA, 23 nt, Human
uccaccuuccuuuggaggcacca

SEQ ID NO: 944178 - RNA, 22 nt, Human
uccaguguaaaaauacgugggc

SEQ ID NO: 944179 - RNA, 21 nt, Human
ucccagcuguaacaaaggaag

SEQ ID NO: 944180 - RNA, 18 nt, Human
ucccagggcacagacugu

SEQ ID NO: 944181 - RNA, 21 nt, Human
uccccaucuaacacuaucgua

SEQ ID NO: 944182 - RNA, 18 nt, Human
ucccgguggcuacucuuu

SEQ ID NO: 944183 - RNA, 23 nt, Human
ucccgguggcuacucuuugucuu

SEQ ID NO: 944184 - RNA, 21 nt, Human
ucccuguaauuccagcuacuu

SEQ ID NO: 944185 - RNA, 23 nt, Human
ucccuguaauuccagcuacuugg

SEQ ID NO: 944186 - RNA, 24 nt, Human
ucccuguaauuccagcuacuuggg

SEQ ID NO: 944187 - RNA, 21 nt, Human
uccugaucuugcuuggucaau

SEQ ID NO: 944188 - RNA, 20 nt, Human
ucuccugucuccuaucucau

SEQ ID NO: 944189 - RNA, 22 nt, Human
ucucuuuucaucggaaggagag

SEQ ID NO: 944190 - RNA, 20 nt, Human
ucucuuuucucucgcucuuc

SEQ ID NO: 944191 - RNA, 22 nt, Human
ucugucucaaaaaaaaaaaaaa

SEQ ID NO: 944192 - RNA, 19 nt, Human
ucugucucccuccucaaac

SEQ ID NO: 944193 - RNA, 20 nt, Human
ucuuccuuucucuuuucauc

SEQ ID NO: 944194 - RNA, 21 nt, Human
ucuuccuuucucuuuucaucg

SEQ ID NO: 944195 - RNA, 19 nt, Human
ucuuugucuucuuacccca

SEQ ID NO: 944196 - RNA, 18 nt, Human
ugaaaaugugugcugcua

SEQ ID NO: 944197 - RNA, 19 nt, Human
ugaaaccccaccucuacua

SEQ ID NO: 944198 - RNA, 20 nt, Human
ugacaccacauucucugugc

SEQ ID NO: 944199 - RNA, 19 nt, Human
ugacugcaaacaucgcccc

SEQ ID NO: 944200 - RNA, 24 nt, Human
ugagacaggagaaucacuugaacc

SEQ ID NO: 944201 - RNA, 22 nt, Human
ugagaucccaccacugcacucc

SEQ ID NO: 944202 - RNA, 24 nt, Human
ugagaucccaccacugcacuccag

SEQ ID NO: 944203 - RNA, 19 nt, Human
ugagcagaaaaaaggaggg

SEQ ID NO: 944204 - RNA, 22 nt, Human
ugagcagaaaaaaggagggcag

SEQ ID NO: 944205 - RNA, 23 nt, Human
ugaggcuucauucuuggaaugca

SEQ ID NO: 944206 - RNA, 25 nt, Human
ugauaccagugagaaaaucugcucc

SEQ ID NO: 944207 - RNA, 23 nt, Human
ugaucacagagaaugugaccuug

SEQ ID NO: 944208 - RNA, 21 nt, Human
ugaucuccugucuccuaucuc

SEQ ID NO: 944209 - RNA, 21 nt, Human
ugaucuggccaacuggacaug

SEQ ID NO: 944210 - RNA, 24 nt, Human
ugcacacacauguacacacacaca

SEQ ID NO: 944211 - RNA, 19 nt, Human
ugccaggggccgcaugcca

SEQ ID NO: 944212 - RNA, 19 nt, Human
ugcccagauccccucguuc

SEQ ID NO: 944213 - RNA, 22 nt, Human
ugcccagcucugcaaacauucu

SEQ ID NO: 944214 - RNA, 22 nt, Human
uggaaaaaaaacccaacccuau

SEQ ID NO: 944215 - RNA, 18 nt, Human
uggaaagugaucuggcca

SEQ ID NO: 944216 - RNA, 19 nt, Human
uggagagaagguggagaag

SEQ ID NO: 944217 - RNA, 21 nt, Human
uggaggcagagauggaggcag

SEQ ID NO: 944218 - RNA, 22 nt, Human
uggaucacgaggucaggaguuc

SEQ ID NO: 944219 - RNA, 22 nt, Human
uggccaccaggccaccaggccc

SEQ ID NO: 944220 - RNA, 19 nt, Human
uggccggagcuggggaggu

SEQ ID NO: 944221 - RNA, 21 nt, Human
uggcgguuccuggggugccca

SEQ ID NO: 944222 - RNA, 21 nt, Human
uggcucacgccuguaauccca

SEQ ID NO: 944223 - RNA, 24 nt, Human
uggcucacgccuguaaucccaaca

SEQ ID NO: 944224 - RNA, 19 nt, Human
uggcugggcacaguggcuc

SEQ ID NO: 944225 - RNA, 19 nt, Human
uggcuuggccggagcuggg

SEQ ID NO: 944226 - RNA, 24 nt, Human
ugggaggccuaggcggguggauca

SEQ ID NO: 944227 - RNA, 24 nt, Human
ugggaggcugagacaggagaauca

SEQ ID NO: 944228 - RNA, 20 nt, Human
ugggggugguggggagacag

SEQ ID NO: 944229 - RNA, 23 nt, Human
ugggugacuaauauccagaaauc

SEQ ID NO: 944230 - RNA, 22 nt, Human
uggugagggaagagaggauugu

SEQ ID NO: 944231 - RNA, 24 nt, Human
ugguggcgggucccuguaauucca

SEQ ID NO: 944232 - RNA, 22 nt, Human
uguaaguucagaaccaaacguu

SEQ ID NO: 944233 - RNA, 21 nt, Human
uguggagagaagguggagaag

SEQ ID NO: 944234 - RNA, 18 nt, Human
uguugcagugagcugaga

SEQ ID NO: 944235 - RNA, 23 nt, Human
uguuugcauucacagaacuguuc

SEQ ID NO: 944236 - RNA, 18 nt, Human
uuagccgggcgugguggc

SEQ ID NO: 944237 - RNA, 22 nt, Human
uuauaacuaaaaucaaaagucc

SEQ ID NO: 944238 - RNA, 21 nt, Human
uucagaaccaaacguugaauc

SEQ ID NO: 944239 - RNA, 25 nt, Human
uucccugaaccccacacucaguagc

SEQ ID NO: 944240 - RNA, 18 nt, Human
uuccuggccaccaggcca

SEQ ID NO: 944241 - RNA, 18 nt, Human
uucuaggcauacagggag

SEQ ID NO: 944242 - RNA, 24 nt, Human
uucucccaaguccuccaaggagaa

SEQ ID NO: 944243 - RNA, 21 nt, Human
uucuucaccaauacguacagg

SEQ ID NO: 944244 - RNA, 19 nt, Human
uugcagugagcugagaucc

SEQ ID NO: 944245 - RNA, 22 nt, Human
uugcagugagcugagaucccac

SEQ ID NO: 944246 - RNA, 20 nt, Human
uugcagugagcugagauccg

SEQ ID NO: 944247 - RNA, 25 nt, Human
uugggaggcugagacaggagaauca

SEQ ID NO: 944248 - RNA, 19 nt, Human
uuguaacauaagccccucc

SEQ ID NO: 944249 - RNA, 21 nt, Human
uugugagcagaaaaaaggagg

SEQ ID NO: 944250 - RNA, 23 nt, Human
uugugcaucuugugcucaguuaa

SEQ ID NO: 944251 - RNA, 22 nt, Human
uuuuggcugggcacaguggcuc

SEQ ID NO: 944252 - RNA, 23 nt, Human
aaaaccccaagccacaccaagaa

SEQ ID NO: 944253 - RNA, 18 nt, Human
aaacaggaagccuaaaaa

SEQ ID NO: 944254 - RNA, 19 nt, Human
aaacaggaagccuaaaaac

SEQ ID NO: 944255 - RNA, 21 nt, Human
aagccacaccaagaaaaauga

SEQ ID NO: 944256 - RNA, 23 nt, Human
acagacaaccucauagcuggugc

SEQ ID NO: 944257 - RNA, 19 nt, Human
agagaggggagggcggggu

SEQ ID NO: 944258 - RNA, 20 nt, Human
aggaagccuaaaaaccccaa

SEQ ID NO: 944259 - RNA, 18 nt, Human
aggagggagaacagaggg

SEQ ID NO: 944260 - RNA, 25 nt, Human
auaaaacaggaagccuaaaaacccc

SEQ ID NO: 944261 - RNA, 19 nt, Human
ccaagccacaccaagaaaa

SEQ ID NO: 944262 - RNA, 23 nt, Human
ccacaccaagaaaaaugagagag

SEQ ID NO: 944263 - RNA, 21 nt, Human
ccccaagccacaccaagaaaa

SEQ ID NO: 944264 - RNA, 18 nt, Human
cccuuugauggcuugggu

SEQ ID NO: 944265 - RNA, 19 nt, Human
ccuaaaaaccccaagccac

SEQ ID NO: 944266 - RNA, 24 nt, Human
ccuaaaaaccccaagccacaccaa

SEQ ID NO: 944267 - RNA, 19 nt, Human
ccucauagcuggugcaccu

SEQ ID NO: 944268 - RNA, 24 nt, Human
cuaaaaaccccaagccacaccaag

SEQ ID NO: 944269 - RNA, 21 nt, Human
gcggagggaacuuaaugcaca

SEQ ID NO: 944270 - RNA, 24 nt, Human
ggagaacagaggguggaaggcaag

SEQ ID NO: 944271 - RNA, 19 nt, Human
uaaaaaccccaagccacac

SEQ ID NO: 944272 - RNA, 22 nt, Human
uaaaaaccccaagccacaccaa

SEQ ID NO: 944273 - RNA, 21 nt, Human
uaaaacaggaagccuaaaaac

SEQ ID NO: 944274 - RNA, 19 nt, Human
uacagacaaccucauagcu

SEQ ID NO: 944275 - RNA, 19 nt, Human
uacaggcccuuugauggcu

SEQ ID NO: 944276 - RNA, 20 nt, Human
uagcuggugcaccacacacc

SEQ ID NO: 944277 - RNA, 18 nt, Human
ucauagcuggugcaccac

SEQ ID NO: 944278 - RNA, 21 nt, Human
uccuagguauguacaggcccu

SEQ ID NO: 944279 - RNA, 21 nt, Human
ugagagaggggagggcggggu

SEQ ID NO: 944280 - RNA, 19 nt, Human
uggccgggacaacucaugg

SEQ ID NO: 944281 - RNA, 18 nt, Human
uggugcaccacacacacg

SEQ ID NO: 944282 - RNA, 20 nt, Human
uguuuauuucucaagaugug

SEQ ID NO: 944283 - RNA, 24 nt, Human
uguuuauuucucaagaugugcaca

SEQ ID NO: 944284 - RNA, 21 nt, Human
aaaauaucugcuagaaacuug

SEQ ID NO: 944285 - RNA, 26 nt, Human
aaacaccugauuuuccauuagaaaua

SEQ ID NO: 944286 - RNA, 21 nt, Human
aaccuccagccccgcaggcuc

SEQ ID NO: 944287 - RNA, 21 nt, Human
acaaguuacuggcaaagagaa

SEQ ID NO: 944288 - RNA, 25 nt, Human
auaaacgaacauuaauuguaccaca

SEQ ID NO: 944289 - RNA, 22 nt, Human
auauguaaauacaauuugaauc

SEQ ID NO: 944290 - RNA, 25 nt, Human
auauucauuauauucagagaguuuu

SEQ ID NO: 944291 - RNA, 22 nt, Human
aucuuuguuuuguuuacccagu

SEQ ID NO: 944292 - RNA, 23 nt, Human
augaggcauuuguuaaaaaccca

SEQ ID NO: 944293 - RNA, 23 nt, Human
auuaaaaugacucuaaugccuaa

SEQ ID NO: 944294 - RNA, 19 nt, Human
auuaccauuagauugcauu

SEQ ID NO: 944295 - RNA, 21 nt, Human
caaauaagaaaacugccucuu

SEQ ID NO: 944296 - RNA, 19 nt, Human
caacaaauuuccaagacaa

SEQ ID NO: 944297 - RNA, 22 nt, Human
caaccuccagccccgcaggcuc

SEQ ID NO: 944298 - RNA, 22 nt, Human
caagccuccacccggcccgcgc

SEQ ID NO: 944299 - RNA, 18 nt, Human
cacacccccgcgcccgcc

SEQ ID NO: 944300 - RNA, 23 nt, Human
caccguacagcggcagccugggc

SEQ ID NO: 944301 - RNA, 29 nt, Human
cagcaagaaauggagcgaggagggacccc

SEQ ID NO: 944302 - RNA, 25 nt, Human
cagcgccgccggcuccggggcuccc

SEQ ID NO: 944303 - RNA, 21 nt, Human
caggaacacgaacucucagau

SEQ ID NO: 944304 - RNA, 18 nt, Human
cauugacagcagauaucc

SEQ ID NO: 944305 - RNA, 22 nt, Human
cauuuugccauccuaauacuca

SEQ ID NO: 944306 - RNA, 24 nt, Human
ccagcaagaaauggagcgaggaca

SEQ ID NO: 944307 - RNA, 19 nt, Human
ccaggacacacacgggcca

SEQ ID NO: 944308 - RNA, 19 nt, Human
ccaguaucaggucauauga

SEQ ID NO: 944309 - RNA, 19 nt, Human
ccccucuggccccagcgcc

SEQ ID NO: 944310 - RNA, 27 nt, Human
ccccucuggccccagcgccgccggcuc

SEQ ID NO: 944311 - RNA, 19 nt, Human
ccccuucgccuccgccgcc

SEQ ID NO: 944312 - RNA, 20 nt, Human
ccccuucgccuccgccgcca

SEQ ID NO: 944313 - RNA, 19 nt, Human
cccgagaggccggggcggg

SEQ ID NO: 944314 - RNA, 22 nt, Human
cccggcccgcgcgaacccuggc

SEQ ID NO: 944315 - RNA, 21 nt, Human
cccucgggcucaccguacagc

SEQ ID NO: 944316 - RNA, 21 nt, Human
cccucuggccccagcgccgcc

SEQ ID NO: 944317 - RNA, 27 nt, Human
ccgccaccuccgccaccucccguccgg

SEQ ID NO: 944318 - RNA, 18 nt, Human
ccgccccuucgccuccgc

SEQ ID NO: 944319 - RNA, 25 nt, Human
ccgccgccaccuccgccaccucccg

SEQ ID NO: 944320 - RNA, 18 nt, Human
ccgcgcccgccuaggugc

SEQ ID NO: 944321 - RNA, 21 nt, Human
ccuauggguuaaaaaacaagg

SEQ ID NO: 944322 - RNA, 20 nt, Human
ccuccgccaccucccguccg

SEQ ID NO: 944323 - RNA, 24 nt, Human
ccuccgccgccaccuccgccaccu

SEQ ID NO: 944324 - RNA, 20 nt, Human
ccuccuguccaccucacuaa

SEQ ID NO: 944325 - RNA, 19 nt, Human
ccucugccccacggcuccc

SEQ ID NO: 944326 - RNA, 21 nt, Human
ccugggccaggccgccaggac

SEQ ID NO: 944327 - RNA, 22 nt, Human
cgccaggacacacacgggccag

SEQ ID NO: 944328 - RNA, 23 nt, Human
cgcccgccuaggugcuggcccgg

SEQ ID NO: 944329 - RNA, 21 nt, Human
cgccuaggugcuggcccgggc

SEQ ID NO: 944330 - RNA, 20 nt, Human
cggcagccugggccaggccg

SEQ ID NO: 944331 - RNA, 23 nt, Human
cggcucccgagaggccggggcgg

SEQ ID NO: 944332 - RNA, 18 nt, Human
cgggacccagauccgccu

SEQ ID NO: 944333 - RNA, 24 nt, Human
cucaccaacaauauguccugucuu

SEQ ID NO: 944334 - RNA, 25 nt, Human
cucaccaacaauauguccugucuua

SEQ ID NO: 944335 - RNA, 21 nt, Human
cucauagccucugagaucuuu

SEQ ID NO: 944336 - RNA, 22 nt, Human
cucugccccacggcucccgaga

SEQ ID NO: 944337 - RNA, 21 nt, Human
cuggccugcacacccccgcgc

SEQ ID NO: 944338 - RNA, 23 nt, Human
cuggggcuccgcagccucugccc

SEQ ID NO: 944339 - RNA, 21 nt, Human
cuucuggggcuccgcagccuc

SEQ ID NO: 944340 - RNA, 19 nt, Human
gaggggcccgggccgggcc

SEQ ID NO: 944341 - RNA, 20 nt, Human
gaggggcccgggccgggccu

SEQ ID NO: 944342 - RNA, 21 nt, Human
gagguccccuccuguccaccu

SEQ ID NO: 944343 - RNA, 22 nt, Human
gauccgccucccucgggcucac

SEQ ID NO: 944344 - RNA, 19 nt, Human
gccuccgccgccaccuccg

SEQ ID NO: 944345 - RNA, 19 nt, Human
gcucccgagaggccggggc

SEQ ID NO: 944346 - RNA, 19 nt, Human
ggccaggcccgcgucccgc

SEQ ID NO: 944347 - RNA, 20 nt, Human
ggcucaccguacagcggcag

SEQ ID NO: 944348 - RNA, 23 nt, Human
guaucaggucauaugaccacuau

SEQ ID NO: 944349 - RNA, 23 nt, Human
guuaaguaagucccuuucaaucc

SEQ ID NO: 944350 - RNA, 24 nt, Human
uaaaaaacaaggguggugugagaa

SEQ ID NO: 944351 - RNA, 23 nt, Human
uaagacaugauaaaaaacggcca

SEQ ID NO: 944352 - RNA, 19 nt, Human
uaauacauuuugccauccu

SEQ ID NO: 944353 - RNA, 21 nt, Human
uaccaaacagaaguuugugaa

SEQ ID NO: 944354 - RNA, 20 nt, Human
uagccucugagaucuuuccu

SEQ ID NO: 944355 - RNA, 22 nt, Human
uauauaaauuaguguccgauga

SEQ ID NO: 944356 - RNA, 22 nt, Human
uaugaccacuauaaaacaaggg

SEQ ID NO: 944357 - RNA, 21 nt, Human
uaugaccacuauaaaacaagu

SEQ ID NO: 944358 - RNA, 25 nt, Human
uauuuauaaaacuucacuccuauau

SEQ ID NO: 944359 - RNA, 21 nt, Human
ucaaccuccagccccgcaggc

SEQ ID NO: 944360 - RNA, 23 nt, Human
uccagcaagaaauggagcgagga

SEQ ID NO: 944361 - RNA, 22 nt, Human
uccagccccgcaggcuccgcga

SEQ ID NO: 944362 - RNA, 20 nt, Human
ucccgaggggcccgggccgg

SEQ ID NO: 944363 - RNA, 22 nt, Human
ucccgggacccagauccgccuc

SEQ ID NO: 944364 - RNA, 24 nt, Human
ucccguccggccccucuggccccc

SEQ ID NO: 944365 - RNA, 26 nt, Human
ucccucgggcucaccguacagcggca

SEQ ID NO: 944366 - RNA, 19 nt, Human
uccgcagccucugccccac

SEQ ID NO: 944367 - RNA, 21 nt, Human
uccgccgccaccuccgccacc

SEQ ID NO: 944368 - RNA, 22 nt, Human
uccgccucccucgggcucaccg

SEQ ID NO: 944369 - RNA, 21 nt, Human
uccggccccucuggccccagc

SEQ ID NO: 944370 - RNA, 20 nt, Human
ucgccuccgccgccaccucc

SEQ ID NO: 944371 - RNA, 25 nt, Human
ucuugcugaaggcuuuggagcucau

SEQ ID NO: 944372 - RNA, 24 nt, Human
ugacuugugaauauuaagccaccu

SEQ ID NO: 944373 - RNA, 25 nt, Human
ugacuugugaauauuaagccaccuu

SEQ ID NO: 944374 - RNA, 24 nt, Human
ugaggcauuuguuaaaaacccauu

SEQ ID NO: 944375 - RNA, 24 nt, Human
ugcaugccagauuacuuuucuaca

SEQ ID NO: 944376 - RNA, 21 nt, Human
ugcauuccuggaacacaaucu

SEQ ID NO: 944377 - RNA, 22 nt, Human
ugccccacggcucccgagaggc

SEQ ID NO: 944378 - RNA, 21 nt, Human
ugcuaagaucauaaacgaaca

SEQ ID NO: 944379 - RNA, 18 nt, Human
uggcugguagacccuucu

SEQ ID NO: 944380 - RNA, 21 nt, Human
ugguagacccuucuggggcuc

SEQ ID NO: 944381 - RNA, 18 nt, Human
uggugugagagcugggga

SEQ ID NO: 944382 - RNA, 27 nt, Human
uguuaaaaacccauuuguaaauuccuc

SEQ ID NO: 944383 - RNA, 21 nt, Human
uuaaauauuaucucaccaaca

SEQ ID NO: 944384 - RNA, 22 nt, Human
uuaaauauuaucucaccaacaa

SEQ ID NO: 944385 - RNA, 21 nt, Human
uucauuuuauacaaugaagau

SEQ ID NO: 944386 - RNA, 22 nt, Human
uuccaaauuauguauguauagu

SEQ ID NO: 944387 - RNA, 21 nt, Human
uucccgggacccagauccgcc

SEQ ID NO: 944388 - RNA, 24 nt, Human
aaaaaaaacgauaaugaaaaaaaa

SEQ ID NO: 944389 - RNA, 30 nt, Human
aaaaauaaaaaaaacgauaaugaaaaaaaa

SEQ ID NO: 944390 - RNA, 24 nt, Human
aacgaaaaacaaaaguaaagagga

SEQ ID NO: 944391 - RNA, 22 nt, Human
aacucugaaauuacauagaaaa

SEQ ID NO: 944392 - RNA, 24 nt, Human
aagaaaaaagaagagagaggggca

SEQ ID NO: 944393 - RNA, 27 nt, Human
aagaaaaaagaagagagaggggcauag

SEQ ID NO: 944394 - RNA, 21 nt, Human
aagaagagagaggggcauaga

SEQ ID NO: 944395 - RNA, 23 nt, Human
aaugaaaaaaaacacaacauaaa

SEQ ID NO: 944396 - RNA, 18 nt, Human
acaacauaaacccccuac

SEQ ID NO: 944397 - RNA, 23 nt, Human
acaacauaaacccccuacucacc

SEQ ID NO: 944398 - RNA, 22 nt, Human
acgauaaugaaaaaaaacacaa

SEQ ID NO: 944399 - RNA, 23 nt, Human
acgauaaugaaaaaaaacacaac

SEQ ID NO: 944400 - RNA, 24 nt, Human
acucugaaauuacauagaaaaaag

SEQ ID NO: 944401 - RNA, 19 nt, Human
agcaguaacuauucagcug

SEQ ID NO: 944402 - RNA, 20 nt, Human
aggauauacuuagcaauguc

SEQ ID NO: 944403 - RNA, 24 nt, Human
agugcuucacaaaaauaaaaaaaa

SEQ ID NO: 944404 - RNA, 19 nt, Human
aucuucgcagucgcuagaa

SEQ ID NO: 944405 - RNA, 22 nt, Human
auuacaacuguaguuuucaguc

SEQ ID NO: 944406 - RNA, 23 nt, Human
auuacaacuguaguuuucaguca

SEQ ID NO: 944407 - RNA, 30 nt, Human
caacaaacgaaaaacaaaaguaaagaggaa

SEQ ID NO: 944408 - RNA, 21 nt, Human
caagaaaaaagaagagagaaa

SEQ ID NO: 944409 - RNA, 22 nt, Human
caaguugcaagauaauaccuua

SEQ ID NO: 944410 - RNA, 18 nt, Human
caccugaaagcuuuauua

SEQ ID NO: 944411 - RNA, 21 nt, Human
cagccuggaaaaguauacagg

SEQ ID NO: 944412 - RNA, 22 nt, Human
cgaaaaacaaaaguaaagagga

SEQ ID NO: 944413 - RNA, 21 nt, Human
cuaucuucgcagucgcuagaa

SEQ ID NO: 944414 - RNA, 21 nt, Human
gaaaaacaaaaguaaagagga

SEQ ID NO: 944415 - RNA, 18 nt, Human
gcaggcugcuuaaccuuc

SEQ ID NO: 944416 - RNA, 26 nt, Human
gucagcuccagaguccuccuccccuc

SEQ ID NO: 944417 - RNA, 28 nt, Human
uaaaaaaaacgauaaugaaaaaaaacac

SEQ ID NO: 944418 - RNA, 22 nt, Human
uaaaaaauacauaaaaauacaa

SEQ ID NO: 944419 - RNA, 19 nt, Human
uaaacccccuacucaccaa

SEQ ID NO: 944420 - RNA, 21 nt, Human
uaaauagcaagugcuucacaa

SEQ ID NO: 944421 - RNA, 20 nt, Human
uaagauaguccacugaaaaa

SEQ ID NO: 944422 - RNA, 24 nt, Human
uaagauaguccacugaaaacuuau

SEQ ID NO: 944423 - RNA, 24 nt, Human
uacauagaaaaaagacaaaauauu

SEQ ID NO: 944424 - RNA, 22 nt, Human
uaguuuucagucaacuacacuu

SEQ ID NO: 944425 - RNA, 18 nt, Human
uauucagcuggguaauau

SEQ ID NO: 944426 - RNA, 24 nt, Human
uauuuugucccauuuacaccuuca

SEQ ID NO: 944427 - RNA, 24 nt, Human
ucaaaccaguugagugcuuucugu

SEQ ID NO: 944428 - RNA, 21 nt, Human
ucugaaauuacauagaaaaaa

SEQ ID NO: 944429 - RNA, 23 nt, Human
ugaaaaaaaacacaacauaaacc

SEQ ID NO: 944430 - RNA, 19 nt, Human
ugcuaagugcccuuuguuc

SEQ ID NO: 944431 - RNA, 19 nt, Human
uggaagacuuauuacaacu

SEQ ID NO: 944432 - RNA, 20 nt, Human
ugucaagggauaagauaguc

SEQ ID NO: 944433 - RNA, 18 nt, Human
ugucccauuuacaccuuc

SEQ ID NO: 944434 - RNA, 24 nt, Human
uucuguaacaccugaaagcuuuau

SEQ ID NO: 944435 - RNA, 21 nt, Human
aaaaaaaaaaaaaaaaccaac

SEQ ID NO: 944436 - RNA, 26 nt, Human
aaaaaaaaaaccaacaacaaaaaaga

SEQ ID NO: 944437 - RNA, 23 nt, Human
aaaaaaaaccaacaacaaaaaaa

SEQ ID NO: 944438 - RNA, 20 nt, Human
aaaagcaacucuuaucaagg

SEQ ID NO: 944439 - RNA, 21 nt, Human
aaacuaguggucaaggacuaa

SEQ ID NO: 944440 - RNA, 22 nt, Human
aacaugaaaacagcucaagaaa

SEQ ID NO: 944441 - RNA, 22 nt, Human
aacuccuaaaaaaaaaaagcaa

SEQ ID NO: 944442 - RNA, 23 nt, Human
aagcaacucuuaucaaggauuaa

SEQ ID NO: 944443 - RNA, 19 nt, Human
aagucugucucaaaaccag

SEQ ID NO: 944444 - RNA, 23 nt, Human
acaaaaaaaaaaacaccauuuca

SEQ ID NO: 944445 - RNA, 21 nt, Human
acacuaacgagcaaaaauaua

SEQ ID NO: 944446 - RNA, 23 nt, Human
acagacaggaaauaaacaacaug

SEQ ID NO: 944447 - RNA, 21 nt, Human
acaggaaauaaacaacaugaa

SEQ ID NO: 944448 - RNA, 24 nt, Human
acaggaaauaaacaacaugaaaac

SEQ ID NO: 944449 - RNA, 23 nt, Human
acugucagguaaaaacauacauc

SEQ ID NO: 944450 - RNA, 22 nt, Human
agacaggaaauaaacaacauga

SEQ ID NO: 944451 - RNA, 22 nt, Human
aggaaauaaacaacaugaaaac

SEQ ID NO: 944452 - RNA, 19 nt, Human
caacaaaaaaaaaaacacc

SEQ ID NO: 944453 - RNA, 30 nt, Human
caacaaaaaaaaaaacaccauuucacagaa

SEQ ID NO: 944454 - RNA, 25 nt, Human
caagaaauacacuaacgagcaaaaa

SEQ ID NO: 944455 - RNA, 24 nt, Human
cagacaggaaauaaacaacaugaa

SEQ ID NO: 944456 - RNA, 23 nt, Human
cagcucaagaaauacacuaacga

SEQ ID NO: 944457 - RNA, 20 nt, Human
cauggcucagacaccuaccc

SEQ ID NO: 944458 - RNA, 22 nt, Human
ccaaaauggagauggcaucaaa

SEQ ID NO: 944459 - RNA, 25 nt, Human
ccaaguuaaaaaaaaaaaaaaaaaa

SEQ ID NO: 944460 - RNA, 24 nt, Human
cccccuauuaauauuuagaaaaac

SEQ ID NO: 944461 - RNA, 23 nt, Human
cccccuauuuccugaauaaaagu

SEQ ID NO: 944462 - RNA, 19 nt, Human
ccugaauaaaagugacauc

SEQ ID NO: 944463 - RNA, 25 nt, Human
cuaacuccuaaaaaaaaaaagcaac

SEQ ID NO: 944464 - RNA, 26 nt, Human
cuagaaaauuccugaagaaaauuuca

SEQ ID NO: 944465 - RNA, 23 nt, Human
cucccccuauuuccugaauaaaa

SEQ ID NO: 944466 - RNA, 27 nt, Human
cuccuaaaaaaaaaaagcaacucuuau

SEQ ID NO: 944467 - RNA, 24 nt, Human
cuguagcuacuuuagaccuggguu

SEQ ID NO: 944468 - RNA, 24 nt, Human
gaaaacagcucaagaaauacacua

SEQ ID NO: 944469 - RNA, 25 nt, Human
gaaaacagcucaagaaauacacuaa

SEQ ID NO: 944470 - RNA, 18 nt, Human
gagaagaaaaaaggggag

SEQ ID NO: 944471 - RNA, 21 nt, Human
gcaggcgagccgggggaaucc

SEQ ID NO: 944472 - RNA, 19 nt, Human
gcauccuggaaagucaggu

SEQ ID NO: 944473 - RNA, 22 nt, Human
ggcaggcgagccgggggaaucc

SEQ ID NO: 944474 - RNA, 24 nt, Human
gguuacuagaaaauuccugaagaa

SEQ ID NO: 944475 - RNA, 23 nt, Human
uaacaggccugcuggugaaacaa

SEQ ID NO: 944476 - RNA, 20 nt, Human
uaacugaagaaaccaagagg

SEQ ID NO: 944477 - RNA, 19 nt, Human
uaagaagaaaaauaaucac

SEQ ID NO: 944478 - RNA, 22 nt, Human
uacaaguuauugauucacucuu

SEQ ID NO: 944479 - RNA, 22 nt, Human
uagcauaagaagaaaaauaauc

SEQ ID NO: 944480 - RNA, 23 nt, Human
uauauggggaaagaggaacgugu

SEQ ID NO: 944481 - RNA, 24 nt, Human
ucccaaguuaaaaaaaaaaaaaaa

SEQ ID NO: 944482 - RNA, 26 nt, Human
ucccaaguuaaaaaaaaaaaaaaaaa

SEQ ID NO: 944483 - RNA, 27 nt, Human
ucccaaguuaaaaaaaaaaaaaaaaaa

SEQ ID NO: 944484 - RNA, 22 nt, Human
ucucaaaaccaguguuaaauca

SEQ ID NO: 944485 - RNA, 21 nt, Human
ugaaaacagcucaagaaauac

SEQ ID NO: 944486 - RNA, 18 nt, Human
ugaauaaaagugacaucu

SEQ ID NO: 944487 - RNA, 22 nt, Human
uggcucagacaccuaccucauu

SEQ ID NO: 944488 - RNA, 24 nt, Human
uggcucuauuccuuacucacucua

SEQ ID NO: 944489 - RNA, 25 nt, Human
uggucccaaguuaaaaaaaaaaaaa

SEQ ID NO: 944490 - RNA, 22 nt, Human
uuaaaugagucugaaaaacuug

SEQ ID NO: 944491 - RNA, 21 nt, Human
uucacagacaggaaauaaaca

SEQ ID NO: 944492 - RNA, 22 nt, Human
uugcgggaggggcggggaggcu

SEQ ID NO: 944493 - RNA, 24 nt, Human
uugcgggaggggcggggaggcugc

SEQ ID NO: 944494 - RNA, 22 nt, Human
aaugacccaaggcucauugggg

SEQ ID NO: 944495 - RNA, 25 nt, Human
aucauuguaaauauuuucagccauu

SEQ ID NO: 944496 - RNA, 19 nt, Human
aucuucugcaucuucugcu

SEQ ID NO: 944497 - RNA, 23 nt, Human
caaaggcaauacccugcuacuug

SEQ ID NO: 944498 - RNA, 21 nt, Human
cauuguaaauauuuucagcca

SEQ ID NO: 944499 - RNA, 18 nt, Human
ccagcuaaaaucugaaau

SEQ ID NO: 944500 - RNA, 18 nt, Human
cccacacauucaggcggc

SEQ ID NO: 944501 - RNA, 21 nt, Human
ccuccaugaauaaacaggagu

SEQ ID NO: 944502 - RNA, 28 nt, Human
cgcaacagcucacuugaaagugcuagaa

SEQ ID NO: 944503 - RNA, 23 nt, Human
cugcaaagccaaucaagaagugu

SEQ ID NO: 944504 - RNA, 23 nt, Human
gaaagugcuagaaucagaggaua

SEQ ID NO: 944505 - RNA, 21 nt, Human
uaaagaagccauaagccaccc

SEQ ID NO: 944506 - RNA, 20 nt, Human
uaaguuacgcagaucccaua

SEQ ID NO: 944507 - RNA, 24 nt, Human
uagcauuacauucaacagaaacau

SEQ ID NO: 944508 - RNA, 22 nt, Human
ucauugggguuccagcuaaaau

SEQ ID NO: 944509 - RNA, 23 nt, Human
ucauuguaaauauuuucagccau

SEQ ID NO: 944510 - RNA, 20 nt, Human
uccagauuuuauauucuuca

SEQ ID NO: 944511 - RNA, 26 nt, Human
ucuucugcugauuguucuuccccaau

SEQ ID NO: 944512 - RNA, 20 nt, Human
ugagcaaaugacccaaggcu

SEQ ID NO: 944513 - RNA, 20 nt, Human
uguggagaccaguggaccug

SEQ ID NO: 944514 - RNA, 20 nt, Human
uugaagccagaauaguuuca

SEQ ID NO: 944515 - RNA, 21 nt, Human
uuuaagauccuugucccucca

SEQ ID NO: 944516 - RNA, 21 nt, Human
uuuuaaguuacgcagauccca

SEQ ID NO: 944517 - RNA, 26 nt, Human
aaaaauaggaaacuugauuuagacaa

SEQ ID NO: 944518 - RNA, 22 nt, Human
aaaagacaagauagccaugaca

SEQ ID NO: 944519 - RNA, 23 nt, Human
aacaugcaaaagaaacauccaag

SEQ ID NO: 944520 - RNA, 18 nt, Human
aggcaaaaauugaacagc

SEQ ID NO: 944521 - RNA, 19 nt, Human
agugguuaauucccaacug

SEQ ID NO: 944522 - RNA, 21 nt, Human
auaaauacacaauuguauaaa

SEQ ID NO: 944523 - RNA, 25 nt, Human
aucaauguguucaauaagugacuuu

SEQ ID NO: 944524 - RNA, 27 nt, Human
auugaauugagugguuaauucccaacu

SEQ ID NO: 944525 - RNA, 20 nt, Human
caacugaguugcaugacucu

SEQ ID NO: 944526 - RNA, 19 nt, Human
caaggcaaaaauugaacag

SEQ ID NO: 944527 - RNA, 23 nt, Human
caauuguauaaaaagggaaugau

SEQ ID NO: 944528 - RNA, 22 nt, Human
cacuuuauaaaauaaaccugaa

SEQ ID NO: 944529 - RNA, 18 nt, Human
cauuaggaacaauaugca

SEQ ID NO: 944530 - RNA, 21 nt, Human
cauuaggaacaauaugcaauc

SEQ ID NO: 944531 - RNA, 21 nt, Human
cauugaaucccagccuauuug

SEQ ID NO: 944532 - RNA, 21 nt, Human
cuaggcaacaugcaaaagaaa

SEQ ID NO: 944533 - RNA, 18 nt, Human
gcaucucaaaccuugcua

SEQ ID NO: 944534 - RNA, 24 nt, Human
uaaaagaaagggguacuaaugccu

SEQ ID NO: 944535 - RNA, 21 nt, Human
uaauacacacugacauagcca

SEQ ID NO: 944536 - RNA, 18 nt, Human
uaauaugugagaagagga

SEQ ID NO: 944537 - RNA, 18 nt, Human
uacacacugacauagcca

SEQ ID NO: 944538 - RNA, 20 nt, Human
uauaaacaaaaaugcccaaa

SEQ ID NO: 944539 - RNA, 22 nt, Human
uauaggggauaaucaaagggaa

SEQ ID NO: 944540 - RNA, 19 nt, Human
uauauauauucaucacucu

SEQ ID NO: 944541 - RNA, 25 nt, Human
uauucuauuuacuugcucauuuuca

SEQ ID NO: 944542 - RNA, 22 nt, Human
ucaaaagacaagauagccauga

SEQ ID NO: 944543 - RNA, 20 nt, Human
ucaauguguucaauaaguga

SEQ ID NO: 944544 - RNA, 22 nt, Human
ugccaaugggucaaaaauauca

SEQ ID NO: 944545 - RNA, 18 nt, Human
ugcuagcaaaagagguga

SEQ ID NO: 944546 - RNA, 27 nt, Human
uggcucagaaacaacauauuuagguac

SEQ ID NO: 944547 - RNA, 21 nt, Human
ugggucaaaaauaucaugaca

SEQ ID NO: 944548 - RNA, 19 nt, Human
uucaaaagacaagauagcc

SEQ ID NO: 944549 - RNA, 23 nt, Human
uucaucacucuaguuuguaauga

SEQ ID NO: 944550 - RNA, 21 nt, Human
uuuggugaaauuucaucauug

SEQ ID NO: 944551 - RNA, 21 nt, Human
uuuuuuuuuuuuuuuuucauu

SEQ ID NO: 944552 - RNA, 24 nt, Human
aaaaaaccaacaaaacaguucugc

SEQ ID NO: 944553 - RNA, 23 nt, Human
aaaaaccuagauauaacacuuuc

SEQ ID NO: 944554 - RNA, 25 nt, Human
aaaggcucugguagauaaaggacuc

SEQ ID NO: 944555 - RNA, 22 nt, Human
aacaaucuggaugcauuaauca

SEQ ID NO: 944556 - RNA, 18 nt, Human
aaccaaucuagacuccuu

SEQ ID NO: 944557 - RNA, 24 nt, Human
aagaagcaauaaagguacauacaa

SEQ ID NO: 944558 - RNA, 20 nt, Human
aagagcacccucaaugaguu

SEQ ID NO: 944559 - RNA, 21 nt, Human
aagcagcaaccuucugaagca

SEQ ID NO: 944560 - RNA, 19 nt, Human
aagucaauccugugggcaa

SEQ ID NO: 944561 - RNA, 18 nt, Human
acaaaacaguucugcuca

SEQ ID NO: 944562 - RNA, 19 nt, Human
acaaaacaguucugcucau

SEQ ID NO: 944563 - RNA, 22 nt, Human
acaaaaccaaucuagacuccuu

SEQ ID NO: 944564 - RNA, 22 nt, Human
accauccaaacaacaugaacaa

SEQ ID NO: 944565 - RNA, 23 nt, Human
acccagaccccgaauuacccccc

SEQ ID NO: 944566 - RNA, 18 nt, Human
agacaaacaaagcagcaa

SEQ ID NO: 944567 - RNA, 21 nt, Human
agcugcgcggcaccagaaccc

SEQ ID NO: 944568 - RNA, 22 nt, Human
agucuuauuccacacaguuuua

SEQ ID NO: 944569 - RNA, 21 nt, Human
auaccauccaaacaacaugaa

SEQ ID NO: 944570 - RNA, 22 nt, Human
caaagcagcaaccuucugaagc

SEQ ID NO: 944571 - RNA, 19 nt, Human
caacaaaacaguucugcuc

SEQ ID NO: 944572 - RNA, 24 nt, Human
caacuucaguuuuaaaaaccuaga

SEQ ID NO: 944573 - RNA, 21 nt, Human
caaugaguucuacugacauuu

SEQ ID NO: 944574 - RNA, 18 nt, Human
caauuagacaaacaaagc

SEQ ID NO: 944575 - RNA, 19 nt, Human
cacauaaucgggacaggag

SEQ ID NO: 944576 - RNA, 24 nt, Human
cagaacccagaccccgaauuaccc

SEQ ID NO: 944577 - RNA, 20 nt, Human
cagaccccgaauuacccccc

SEQ ID NO: 944578 - RNA, 21 nt, Human
cagccccagcccgaacggcuu

SEQ ID NO: 944579 - RNA, 23 nt, Human
cagguucuaaccuggaaauacua

SEQ ID NO: 944580 - RNA, 23 nt, Human
ccagaacccagaccccgaauuac

SEQ ID NO: 944581 - RNA, 26 nt, Human
ccagcccgaacggcuucccggagccc

SEQ ID NO: 944582 - RNA, 19 nt, Human
cccccgcgcgagugccucc

SEQ ID NO: 944583 - RNA, 22 nt, Human
cccgaauuaccccccgcgcgag

SEQ ID NO: 944584 - RNA, 24 nt, Human
cccgcgcgagugccuccgccccgc

SEQ ID NO: 944585 - RNA, 21 nt, Human
cccggagcccaacgcagccac

SEQ ID NO: 944586 - RNA, 21 nt, Human
ccgcgcgagugccuccgcccc

SEQ ID NO: 944587 - RNA, 18 nt, Human
ccgcggccgacagcccca

SEQ ID NO: 944588 - RNA, 21 nt, Human
cgaacggcuucccggagccca

SEQ ID NO: 944589 - RNA, 23 nt, Human
cgagugccuccgccccgcggccg

SEQ ID NO: 944590 - RNA, 30 nt, Human
cgcugaaaccacacacaccugauaaaacaa

SEQ ID NO: 944591 - RNA, 20 nt, Human
cggcaccagaacccagaccc

SEQ ID NO: 944592 - RNA, 25 nt, Human
cuccgccccgcggccgacagcccca

SEQ ID NO: 944593 - RNA, 23 nt, Human
cucugguagauaaaggacuccau

SEQ ID NO: 944594 - RNA, 20 nt, Human
gaagaucuacccuauaaaaa

SEQ ID NO: 944595 - RNA, 20 nt, Human
gagcccaacgcagccaccac

SEQ ID NO: 944596 - RNA, 20 nt, Human
gauaccauccaaacaacaug

SEQ ID NO: 944597 - RNA, 23 nt, Human
gcaauaaagguacauacaaugaa

SEQ ID NO: 944598 - RNA, 20 nt, Human
gcccgaacggcuucccggag

SEQ ID NO: 944599 - RNA, 24 nt, Human
gcggcaccagaacccagaccccga

SEQ ID NO: 944600 - RNA, 22 nt, Human
guacauacaaugaaucuguaua

SEQ ID NO: 944601 - RNA, 22 nt, Human
uaaaacaaaaccaaucuagacu

SEQ ID NO: 944602 - RNA, 19 nt, Human
uaacaaagcaaaucugucc

SEQ ID NO: 944603 - RNA, 19 nt, Human
uaacaagaaguagaggcca

SEQ ID NO: 944604 - RNA, 22 nt, Human
uaacaagaaguagaggccaagu

SEQ ID NO: 944605 - RNA, 18 nt, Human
uaaccuaaaucguggcgg

SEQ ID NO: 944606 - RNA, 25 nt, Human
uaagaagcaauaaagguacauacaa

SEQ ID NO: 944607 - RNA, 22 nt, Human
uacagcaaggacccuuaagaag

SEQ ID NO: 944608 - RNA, 21 nt, Human
uacauacaaugaaucuguaua

SEQ ID NO: 944609 - RNA, 25 nt, Human
uagcuuuacuguaacauacagcaau

SEQ ID NO: 944610 - RNA, 24 nt, Human
uauggaaaccaagcuauaugcaau

SEQ ID NO: 944611 - RNA, 19 nt, Human
ucagcagcuggcaagagca

SEQ ID NO: 944612 - RNA, 21 nt, Human
uccuuaacaagaaguagaggc

SEQ ID NO: 944613 - RNA, 22 nt, Human
ucgauaccauccaaacaacaug

SEQ ID NO: 944614 - RNA, 20 nt, Human
ucgggacaggaggaaauuga

SEQ ID NO: 944615 - RNA, 25 nt, Human
ucuauacuacuacugcuaacaaaga

SEQ ID NO: 944616 - RNA, 23 nt, Human
ugaacaauuuuuaaacugacuaa

SEQ ID NO: 944617 - RNA, 19 nt, Human
ugagucaauuagacaaaca

SEQ ID NO: 944618 - RNA, 26 nt, Human
ugccuccgccccgcggccgacagccc

SEQ ID NO: 944619 - RNA, 21 nt, Human
uggcaaaagucuuauuccaca

SEQ ID NO: 944620 - RNA, 23 nt, Human
ugugacauuagaaaucaaaguuu

SEQ ID NO: 944621 - RNA, 21 nt, Human
uguucucuccagauagcuuua

SEQ ID NO: 944622 - RNA, 21 nt, Human
uuagacaaacaaagcagcaac

SEQ ID NO: 944623 - RNA, 21 nt, Human
uuaguccauaugaaaaggacu

SEQ ID NO: 944624 - RNA, 23 nt, Human
uucugcucauuuacaaaugaguc

SEQ ID NO: 944625 - RNA, 21 nt, Human
uuucugguuuucgauaccauc

SEQ ID NO: 944626 - RNA, 23 nt, Human
aaaaaaauaaaaacauaaaagaa

SEQ ID NO: 944627 - RNA, 26 nt, Human
aaaccgcagaucuagagccaguagca

SEQ ID NO: 944628 - RNA, 20 nt, Human
aaggcgccggcgaccucagc

SEQ ID NO: 944629 - RNA, 23 nt, Human
acccuacccaccucuuuucuccc

SEQ ID NO: 944630 - RNA, 23 nt, Human
accucuuuucucccucccucccu

SEQ ID NO: 944631 - RNA, 23 nt, Human
acucagucucaacagucuacaga

SEQ ID NO: 944632 - RNA, 23 nt, Human
agacaggaggcaggguagagggg

SEQ ID NO: 944633 - RNA, 18 nt, Human
agccaggaaaaaaauaaa

SEQ ID NO: 944634 - RNA, 21 nt, Human
agcugacccuuuccuggccuc

SEQ ID NO: 944635 - RNA, 26 nt, Human
aggaaaaaaauaaaaacauaaaagaa

SEQ ID NO: 944636 - RNA, 21 nt, Human
aggcaagacguccgaacgacc

SEQ ID NO: 944637 - RNA, 19 nt, Human
aggcgccggcgaccucagc

SEQ ID NO: 944638 - RNA, 25 nt, Human
caccucuuuucucccucccucccug

SEQ ID NO: 944639 - RNA, 19 nt, Human
cagucaggguacccuggac

SEQ ID NO: 944640 - RNA, 19 nt, Human
caucuaaaaagaaaaaggc

SEQ ID NO: 944641 - RNA, 22 nt, Human
caucuaaaaagaaaaaggcgcc

SEQ ID NO: 944642 - RNA, 24 nt, Human
caucuccuggggaaggcccacaug

SEQ ID NO: 944643 - RNA, 19 nt, Human
ccaggaaaaaaauaaaaac

SEQ ID NO: 944644 - RNA, 22 nt, Human
ccauacaaaagggaaaaaaaau

SEQ ID NO: 944645 - RNA, 20 nt, Human
cccaccucuuuucucccucc

SEQ ID NO: 944646 - RNA, 23 nt, Human
cccuuuccuggccuccuucccau

SEQ ID NO: 944647 - RNA, 22 nt, Human
ccgaacacuuaacaggaucauc

SEQ ID NO: 944648 - RNA, 24 nt, Human
ccucagcugcagguugcuucccca

SEQ ID NO: 944649 - RNA, 19 nt, Human
cuccuucccaucuaaaaag

SEQ ID NO: 944650 - RNA, 22 nt, Human
cugcugaggcgaaggaacaaag

SEQ ID NO: 944651 - RNA, 25 nt, Human
gacccuuuccuggccuccuucccau

SEQ ID NO: 944652 - RNA, 22 nt, Human
gaucuguaacccuacccaccuc

SEQ ID NO: 944653 - RNA, 20 nt, Human
gcgcacaaaaauaaaaggga

SEQ ID NO: 944654 - RNA, 19 nt, Human
gggcaugaaaaaccacaac

SEQ ID NO: 944655 - RNA, 20 nt, Human
gggcaugaaaaaccacaacc

SEQ ID NO: 944656 - RNA, 22 nt, Human
guagagggcaugaaaaaccaca

SEQ ID NO: 944657 - RNA, 18 nt, Human
uaguccauacaaaaggga

SEQ ID NO: 944658 - RNA, 18 nt, Human
uauaaccuggaucuguaa

SEQ ID NO: 944659 - RNA, 23 nt, Human
uccccauccagacgaccuuaaau

SEQ ID NO: 944660 - RNA, 18 nt, Human
ugaaaaaccacaaccagg

SEQ ID NO: 944661 - RNA, 24 nt, Human
uggcacagcuuggcacauaggaaa

SEQ ID NO: 944662 - RNA, 21 nt, Human
ugggccagaguaguuauaacc

SEQ ID NO: 944663 - RNA, 20 nt, Human
uggggaaggcccacauggua

SEQ ID NO: 944664 - RNA, 20 nt, Human
uggggaagugggacugugcc

SEQ ID NO: 944665 - RNA, 21 nt, Human
uggggagauggggaaguggga

SEQ ID NO: 944666 - RNA, 21 nt, Human
uucccaucuaaaaagaaaaag

SEQ ID NO: 944667 - RNA, 20 nt, Human
uuuguaguccauacaaaagg

SEQ ID NO: 944668 - RNA, 25 nt, Human
aaagacaucacaacaaaugacagag

SEQ ID NO: 944669 - RNA, 19 nt, Human
aaaggagccagauuuggca

SEQ ID NO: 944670 - RNA, 20 nt, Human
aaggagagaccgaagcagca

SEQ ID NO: 944671 - RNA, 20 nt, Human
aaggagccagauuuggcaac

SEQ ID NO: 944672 - RNA, 20 nt, Human
aaggugggagggagaacccu

SEQ ID NO: 944673 - RNA, 18 nt, Human
accacuucuugugcuccu

SEQ ID NO: 944674 - RNA, 24 nt, Human
accacuucuugugcuccuugucau

SEQ ID NO: 944675 - RNA, 23 nt, Human
acccuaagaucuauuaacagcac

SEQ ID NO: 944676 - RNA, 19 nt, Human
acuggaguauaaacaaucc

SEQ ID NO: 944677 - RNA, 21 nt, Human
aggaaugugaggggcugaugg

SEQ ID NO: 944678 - RNA, 21 nt, Human
augacagagguggcuuuggug

SEQ ID NO: 944679 - RNA, 22 nt, Human
caacaaaugacagagguggcuu

SEQ ID NO: 944680 - RNA, 24 nt, Human
caacuagacugaaaaucuuccaaa

SEQ ID NO: 944681 - RNA, 25 nt, Human
caagaaaagacaucacaacaaauga

SEQ ID NO: 944682 - RNA, 18 nt, Human
caccaggcaacccacaua

SEQ ID NO: 944683 - RNA, 21 nt, Human
caccuacagcaucucaaaccc

SEQ ID NO: 944684 - RNA, 18 nt, Human
cacuauguacacuggagu

SEQ ID NO: 944685 - RNA, 22 nt, Human
cacuguccucuccggucuguuc

SEQ ID NO: 944686 - RNA, 19 nt, Human
caucucucucucucucucu

SEQ ID NO: 944687 - RNA, 18 nt, Human
ccaagaaaagacaucaca

SEQ ID NO: 944688 - RNA, 21 nt, Human
ccaagaaaagacaucacaaca

SEQ ID NO: 944689 - RNA, 23 nt, Human
ccauucaccaggcaacccacaua

SEQ ID NO: 944690 - RNA, 18 nt, Human
ccccagaaccuccaacaa

SEQ ID NO: 944691 - RNA, 23 nt, Human
cgccccagaaccuccaacaaggu

SEQ ID NO: 944692 - RNA, 18 nt, Human
cucucucucucucucucu

SEQ ID NO: 944693 - RNA, 18 nt, Human
cuugucaucucucucucu

SEQ ID NO: 944694 - RNA, 21 nt, Human
gcagcaguagcgguucugcgc

SEQ ID NO: 944695 - RNA, 25 nt, Human
gccaagaaaagacaucacaacaaau

SEQ ID NO: 944696 - RNA, 21 nt, Human
gccccagaaccuccaacaagg

SEQ ID NO: 944697 - RNA, 20 nt, Human
gcuacauuacacuauguacc

SEQ ID NO: 944698 - RNA, 21 nt, Human
gcugauggaccacaacauagg

SEQ ID NO: 944699 - RNA, 21 nt, Human
uacacaaaauggcgccuccgc

SEQ ID NO: 944700 - RNA, 22 nt, Human
uacagcaucucaaaccccuagg

SEQ ID NO: 944701 - RNA, 25 nt, Human
uagacugaaaaucuuccaaaauucu

SEQ ID NO: 944702 - RNA, 22 nt, Human
uauacacaaggcuuuugccaag

SEQ ID NO: 944703 - RNA, 24 nt, Human
uccaaaagguucaaauuuuauuuu

SEQ ID NO: 944704 - RNA, 22 nt, Human
ugccaagaaaagacaucacaac

SEQ ID NO: 944705 - RNA, 24 nt, Human
ugccaagaaaagacaucacaacaa

SEQ ID NO: 944706 - RNA, 22 nt, Human
uggcuuuggugucacauaccac

SEQ ID NO: 944707 - RNA, 21 nt, Human
uuagcacacagcuccaaaagg

SEQ ID NO: 944708 - RNA, 23 nt, Human
uuuuuuuuuuuuuuuucucaagg

SEQ ID NO: 944709 - RNA, 25 nt, Human
aaaaauuuauaaagaaaugugacaa

SEQ ID NO: 944710 - RNA, 25 nt, Human
aaaacaguaucuuaauacaagcuuu

SEQ ID NO: 944711 - RNA, 21 nt, Human
aaacaaaaaaacaaccuguac

SEQ ID NO: 944712 - RNA, 19 nt, Human
aaacucuuucaaagguuca

SEQ ID NO: 944713 - RNA, 27 nt, Human
aaagggccuaaaaugacccuauaaaaa

SEQ ID NO: 944714 - RNA, 21 nt, Human
aaauaucugcuuuaucauaca

SEQ ID NO: 944715 - RNA, 22 nt, Human
acaaaugcugugguauuaaaaa

SEQ ID NO: 944716 - RNA, 24 nt, Human
auaaaaacaauguccuuuuaacau

SEQ ID NO: 944717 - RNA, 26 nt, Human
caaaaaaacaaccuguacaaucucuu

SEQ ID NO: 944718 - RNA, 21 nt, Human
caacuucacccccuccuaaag

SEQ ID NO: 944719 - RNA, 22 nt, Human
cauacaacuucacccccuccua

SEQ ID NO: 944720 - RNA, 26 nt, Human
ccaaacuuuaccaauaagccuucuca

SEQ ID NO: 944721 - RNA, 24 nt, Human
ccccaaacuuuaccaauaagccuu

SEQ ID NO: 944722 - RNA, 23 nt, Human
ccuaaaaugacccuauaaaaaca

SEQ ID NO: 944723 - RNA, 22 nt, Human
ccuuuuauuuuuucaguauauu

SEQ ID NO: 944724 - RNA, 24 nt, Human
cucuguacaguuuuucaacaaaau

SEQ ID NO: 944725 - RNA, 23 nt, Human
cuuuaccaauaagccuucucaaa

SEQ ID NO: 944726 - RNA, 24 nt, Human
gcuuuaaaaaaauuuauaaagaaa

SEQ ID NO: 944727 - RNA, 25 nt, Human
gggcacuuugaaaauguuaaaguuu

SEQ ID NO: 944728 - RNA, 23 nt, Human
guagcacuuucuuuugcauaaaa

SEQ ID NO: 944729 - RNA, 21 nt, Human
gugucuuuguacacagucugg

SEQ ID NO: 944730 - RNA, 26 nt, Human
uaaaacccugaggugaaagguuauua

SEQ ID NO: 944731 - RNA, 25 nt, Human
uaaaauaucugcuuuaucauacaac

SEQ ID NO: 944732 - RNA, 22 nt, Human
uaagaaguuaagcaaugccuuu

SEQ ID NO: 944733 - RNA, 23 nt, Human
uaagauuaaacucuuucaaaggu

SEQ ID NO: 944734 - RNA, 24 nt, Human
uaagcaaugccuuuauccccaaac

SEQ ID NO: 944735 - RNA, 18 nt, Human
uacaacuucacccccucc

SEQ ID NO: 944736 - RNA, 21 nt, Human
uaccaguagccauuuuagacu

SEQ ID NO: 944737 - RNA, 18 nt, Human
uagaauguuaguaaagug

SEQ ID NO: 944738 - RNA, 18 nt, Human
uagacugucaaccuggau

SEQ ID NO: 944739 - RNA, 24 nt, Human
uaggguaaagcucaagagcauguc

SEQ ID NO: 944740 - RNA, 24 nt, Human
uauguguaaaucuacacauguaug

SEQ ID NO: 944741 - RNA, 22 nt, Human
ucacccccuccuaaagugucua

SEQ ID NO: 944742 - RNA, 24 nt, Human
uccccaaacuuuaccaauaagccu

SEQ ID NO: 944743 - RNA, 21 nt, Human
uguaaagcugcucuguacagu

SEQ ID NO: 944744 - RNA, 18 nt, Human
ugucuaaaaugauuagga

SEQ ID NO: 944745 - RNA, 18 nt, Human
ugugguauuaaaaaggau

SEQ ID NO: 944746 - RNA, 21 nt, Human
uguguaaaucuacacauguau

SEQ ID NO: 944747 - RNA, 21 nt, Human
uuaccaauaagccuucucaaa

SEQ ID NO: 944748 - RNA, 22 nt, Human
uucaaagguucaaacaaaaaaa

SEQ ID NO: 944749 - RNA, 18 nt, Human
uucaacuaggguaaagcu

SEQ ID NO: 944750 - RNA, 22 nt, Human
uucauuuuguauuaaacuguag

SEQ ID NO: 944751 - RNA, 27 nt, Human
uuuauaaacaauucuguaaugaaauga

SEQ ID NO: 944752 - RNA, 24 nt, Human
uuuccauaucaacuuagucaaagg

SEQ ID NO: 944753 - RNA, 24 nt, Human
uuuuucaacaaaugaacuuuuaua

SEQ ID NO: 944754 - RNA, 19 nt, Human
aaaaaaagaaaaaaaugca

SEQ ID NO: 944755 - RNA, 19 nt, Human
aaaaagaaaaaaaugcaca

SEQ ID NO: 944756 - RNA, 22 nt, Human
aaaaaugcacaaucuuuggaac

SEQ ID NO: 944757 - RNA, 25 nt, Human
aaagaaaaaaaugcacaaucuuugg

SEQ ID NO: 944758 - RNA, 20 nt, Human
aaaggaaaaauacauauuca

SEQ ID NO: 944759 - RNA, 19 nt, Human
aaccagaauugccugucaa

SEQ ID NO: 944760 - RNA, 23 nt, Human
aagcagccgugcuggggcacacc

SEQ ID NO: 944761 - RNA, 19 nt, Human
aagcgucuuuuuaauucuc

SEQ ID NO: 944762 - RNA, 21 nt, Human
acagcuuucuuuuccaccccc

SEQ ID NO: 944763 - RNA, 20 nt, Human
acaguuuaaaaaaaaaaaga

SEQ ID NO: 944764 - RNA, 27 nt, Human
accacaguuuaaaaaaaaaaagaaaaa

SEQ ID NO: 944765 - RNA, 21 nt, Human
accguuuuccuuccuuuuucu

SEQ ID NO: 944766 - RNA, 18 nt, Human
agaaaaaaaugcacaauc

SEQ ID NO: 944767 - RNA, 18 nt, Human
agaccagaaacucagaag

SEQ ID NO: 944768 - RNA, 21 nt, Human
agaucucuuccacuucugcuu

SEQ ID NO: 944769 - RNA, 23 nt, Human
aggaaaaauacauauucaaagaa

SEQ ID NO: 944770 - RNA, 22 nt, Human
auagaguuccucuacuaguaaa

SEQ ID NO: 944771 - RNA, 21 nt, Human
cacagccaaccagaauugccu

SEQ ID NO: 944772 - RNA, 23 nt, Human
cacagcuuucuuuuccacccccc

SEQ ID NO: 944773 - RNA, 20 nt, Human
ccaccccccuccccccccaa

SEQ ID NO: 944774 - RNA, 23 nt, Human
ccaccccccuccccccccaaucu

SEQ ID NO: 944775 - RNA, 19 nt, Human
ccccccuccccccccaauc

SEQ ID NO: 944776 - RNA, 20 nt, Human
ccuccuugacugccucuucc

SEQ ID NO: 944777 - RNA, 18 nt, Human
ccuuccuccuugacugcc

SEQ ID NO: 944778 - RNA, 22 nt, Human
cuagaagaauauccuguugcag

SEQ ID NO: 944779 - RNA, 21 nt, Human
cuauagaguuccucuacuagu

SEQ ID NO: 944780 - RNA, 23 nt, Human
cuccuaaugucucuccuuccucc

SEQ ID NO: 944781 - RNA, 18 nt, Human
cuggggcacaccuccaca

SEQ ID NO: 944782 - RNA, 20 nt, Human
cugucugcugauuucugauc

SEQ ID NO: 944783 - RNA, 23 nt, Human
cuuccuccuugacugccucuucc

SEQ ID NO: 944784 - RNA, 27 nt, Human
cuuuuccaccccccuccccccccaauc

SEQ ID NO: 944785 - RNA, 22 nt, Human
gcacggacauacagacauggaa

SEQ ID NO: 944786 - RNA, 22 nt, Human
gcuuucuuuuccaccccccucc

SEQ ID NO: 944787 - RNA, 19 nt, Human
ggcuccuaaugucucuccu

SEQ ID NO: 944788 - RNA, 23 nt, Human
uaaaaaaaaaaagaaaaaaaugc

SEQ ID NO: 944789 - RNA, 19 nt, Human
uaagcacggacauacagac

SEQ ID NO: 944790 - RNA, 19 nt, Human
uagccaggccucaugaacu

SEQ ID NO: 944791 - RNA, 27 nt, Human
uauccuguugcagaaagaucucuucca

SEQ ID NO: 944792 - RNA, 24 nt, Human
uauuuuuuuuuuuuuuuaccacag

SEQ ID NO: 944793 - RNA, 19 nt, Human
uccaccccccucccccccc

SEQ ID NO: 944794 - RNA, 21 nt, Human
uccacuucugcuuguccccca

SEQ ID NO: 944795 - RNA, 22 nt, Human
uccuaaugucucuccuuccucc

SEQ ID NO: 944796 - RNA, 20 nt, Human
ucuagcuauuuaaggguggg

SEQ ID NO: 944797 - RNA, 25 nt, Human
ucuccuuccuccuugacugccucuu

SEQ ID NO: 944798 - RNA, 19 nt, Human
ucugucugcugauuucuga

SEQ ID NO: 944799 - RNA, 25 nt, Human
ucuuuuccaccccccucccccccca

SEQ ID NO: 944800 - RNA, 20 nt, Human
ugaucagaugcauuuaucgg

SEQ ID NO: 944801 - RNA, 20 nt, Human
uggaacaaaagaauuaaagg

SEQ ID NO: 944802 - RNA, 22 nt, Human
uggaacaaaagaauuaaaggca

SEQ ID NO: 944803 - RNA, 21 nt, Human
uggggggcugucccauuugca

SEQ ID NO: 944804 - RNA, 21 nt, Human
ugucaaagaccagaaacucag

SEQ ID NO: 944805 - RNA, 22 nt, Human
ugucccccagucauucagcacc

SEQ ID NO: 944806 - RNA, 24 nt, Human
uuccaccccccuccccccccaauc

SEQ ID NO: 944807 - RNA, 18 nt, Human
uuccagccacagccaacc

SEQ ID NO: 944808 - RNA, 20 nt, Human
uuguuuguuuguuuguuuuu

SEQ ID NO: 944809 - RNA, 18 nt, Human
uuuguaagcacaaauucc

SEQ ID NO: 944810 - RNA, 22 nt, Human
aaaaauccaugauuguucagcc

SEQ ID NO: 944811 - RNA, 23 nt, Human
aaacuuggcuugcagauacuggg

SEQ ID NO: 944812 - RNA, 19 nt, Human
agggagcugccgugcaggg

SEQ ID NO: 944813 - RNA, 21 nt, Human
caucugcuguuuccacacuuc

SEQ ID NO: 944814 - RNA, 21 nt, Human
cuuugcccaugaagcuggaag

SEQ ID NO: 944815 - RNA, 19 nt, Human
gucaauaauuuccuaaagc

SEQ ID NO: 944816 - RNA, 19 nt, Human
uaagaacaccuuucuguac

SEQ ID NO: 944817 - RNA, 23 nt, Human
ucacuugguauucccgaaugccu

SEQ ID NO: 944818 - RNA, 23 nt, Human
uccaaacuuggcuugcagauacu

SEQ ID NO: 944819 - RNA, 18 nt, Human
ucuguucuucacucuucc

SEQ ID NO: 944820 - RNA, 22 nt, Human
ugcccaugaagcuggaagggag

SEQ ID NO: 944821 - RNA, 18 nt, Human
uggaagggagcugccgug

SEQ ID NO: 944822 - RNA, 20 nt, Human
uggcccacuagaaacagcaa

SEQ ID NO: 944823 - RNA, 18 nt, Human
uuuuucuggcccacuaga

SEQ ID NO: 944824 - RNA, 24 nt, Human
acaaaaaaagugaugguuccccca

SEQ ID NO: 944825 - RNA, 19 nt, Human
agcaauaguaaagggcagg

SEQ ID NO: 944826 - RNA, 19 nt, Human
aggcuccaucagcaauagu

SEQ ID NO: 944827 - RNA, 23 nt, Human
cacacaaaaaaagugaugguucc

SEQ ID NO: 944828 - RNA, 18 nt, Human
cccccaggcuccaucagc

SEQ ID NO: 944829 - RNA, 24 nt, Human
guagagauuucuuuuuccaggccc

SEQ ID NO: 944830 - RNA, 19 nt, Human
ucccccaggcuccaucagc

SEQ ID NO: 944831 - RNA, 28 nt, Human
ugaguaucuccaagaauucauuucuuuu

SEQ ID NO: 944832 - RNA, 22 nt, Human
uucauuucuauucaguaaagau

SEQ ID NO: 944833 - RNA, 22 nt, Human
uucccccaggcuccaucagcaa

SEQ ID NO: 944834 - RNA, 21 nt, Human
auaaagcugcagccacaagug

SEQ ID NO: 944835 - RNA, 19 nt, Human
caaacccggcgggcggccg

SEQ ID NO: 944836 - RNA, 18 nt, Human
cacgcuguguggcucucu

SEQ ID NO: 944837 - RNA, 18 nt, Human
cgcuguguggcucucucc

SEQ ID NO: 944838 - RNA, 21 nt, Human
gcagccacaagugggcucugc

SEQ ID NO: 944839 - RNA, 24 nt, Human
gcugcagccacaagugggcucugc

SEQ ID NO: 944840 - RNA, 18 nt, Human
ucuccagccacgaguccu

SEQ ID NO: 944841 - RNA, 18 nt, Human
ugcaauauaauuuggcau

SEQ ID NO: 944842 - RNA, 21 nt, Human
uggcauaaagcugcagccaca

SEQ ID NO: 944843 - RNA, 23 nt, Human
uguggacagguuuauugaagcug

SEQ ID NO: 944844 - RNA, 21 nt, Human
uucauuguggacagguuuauu

SEQ ID NO: 944845 - RNA, 23 nt, Human
uugaagcugagcaguuuccccau

SEQ ID NO: 944846 - RNA, 21 nt, Human
uuuuuuuuuuuuuuuuucauu

SEQ ID NO: 944847 - RNA, 19 nt, Human
aaacagaugugugauagag

SEQ ID NO: 944848 - RNA, 24 nt, Human
aaagugcugggaugacaggcguga

SEQ ID NO: 944849 - RNA, 26 nt, Human
aagaaggaaggaaggaaggaagcaaa

SEQ ID NO: 944850 - RNA, 22 nt, Human
aagaggaggaggaggagcgggg

SEQ ID NO: 944851 - RNA, 20 nt, Human
aaggguuuuucaagccagca

SEQ ID NO: 944852 - RNA, 24 nt, Human
aagugauccgccugccucagccuc

SEQ ID NO: 944853 - RNA, 18 nt, Human
accauguuggcugggcug

SEQ ID NO: 944854 - RNA, 20 nt, Human
accauguuggcugggcuggu

SEQ ID NO: 944855 - RNA, 23 nt, Human
accauguuggcugggcuggucuc

SEQ ID NO: 944856 - RNA, 19 nt, Human
agaggaggaggaggagcgg

SEQ ID NO: 944857 - RNA, 21 nt, Human
agaggaggaggaggagcgggg

SEQ ID NO: 944858 - RNA, 19 nt, Human
agccauugcugaaggguau

SEQ ID NO: 944859 - RNA, 18 nt, Human
aggaagaggaggaggagg

SEQ ID NO: 944860 - RNA, 18 nt, Human
aggaagaggaggaggagg

SEQ ID NO: 944861 - RNA, 19 nt, Human
aggaaggaagaaggaagga

SEQ ID NO: 944862 - RNA, 24 nt, Human
aggaaggaaggaagcaaaggaugg

SEQ ID NO: 944863 - RNA, 18 nt, Human
aggaggaagaggaggagg

SEQ ID NO: 944864 - RNA, 19 nt, Human
aggaggaggaggaagagga

SEQ ID NO: 944865 - RNA, 20 nt, Human
aggaggaggaggagcggggc

SEQ ID NO: 944866 - RNA, 22 nt, Human
aggaggaggaggaggaagagga

SEQ ID NO: 944867 - RNA, 21 nt, Human
aggaguaagcgcggagaguug

SEQ ID NO: 944868 - RNA, 18 nt, Human
agggagagacggggcagg

SEQ ID NO: 944869 - RNA, 23 nt, Human
agggcuggggcgcggggcugggc

SEQ ID NO: 944870 - RNA, 26 nt, Human
agggcuggggcgcggggcugggcgag

SEQ ID NO: 944871 - RNA, 23 nt, Human
aguagccauugcugaaggguaua

SEQ ID NO: 944872 - RNA, 24 nt, Human
caaagugcugggaugacaggcgug

SEQ ID NO: 944873 - RNA, 22 nt, Human
caagugauccgccugccucagc

SEQ ID NO: 944874 - RNA, 19 nt, Human
caggcaggcucugggaagu

SEQ ID NO: 944875 - RNA, 24 nt, Human
caucaagugauccgccugccucag

SEQ ID NO: 944876 - RNA, 22 nt, Human
ccaaagugcugggaugacaggc

SEQ ID NO: 944877 - RNA, 24 nt, Human
ccaaagugcugggaugacaggcgu

SEQ ID NO: 944878 - RNA, 23 nt, Human
cccacaagacagauugcagccgc

SEQ ID NO: 944879 - RNA, 22 nt, Human
cccacuggagccuuccccgggc

SEQ ID NO: 944880 - RNA, 18 nt, Human
ccccgggcgccggggcuc

SEQ ID NO: 944881 - RNA, 26 nt, Human
ccgccugccucagccucccaaagugc

SEQ ID NO: 944882 - RNA, 24 nt, Human
ccugccucagccucccaaagugcu

SEQ ID NO: 944883 - RNA, 22 nt, Human
cgagaaaaacagaugugugaua

SEQ ID NO: 944884 - RNA, 21 nt, Human
cgccggggcucccucgggcgg

SEQ ID NO: 944885 - RNA, 26 nt, Human
cgccggggcucccucgggcgggcgcc

SEQ ID NO: 944886 - RNA, 20 nt, Human
cgggcucggguugggcuggg

SEQ ID NO: 944887 - RNA, 19 nt, Human
cugcagccgcuggaaggag

SEQ ID NO: 944888 - RNA, 24 nt, Human
cugccucagccucccaaagugcug

SEQ ID NO: 944889 - RNA, 19 nt, Human
cugggaccauguuggcugg

SEQ ID NO: 944890 - RNA, 22 nt, Human
cugggcuggucucacacuucug

SEQ ID NO: 944891 - RNA, 20 nt, Human
cugucaucaagugauccgcc

SEQ ID NO: 944892 - RNA, 20 nt, Human
cuguggggcuggagcuggag

SEQ ID NO: 944893 - RNA, 19 nt, Human
gaagaggaggaggaggagc

SEQ ID NO: 944894 - RNA, 19 nt, Human
gaccauguuggcugggcug

SEQ ID NO: 944895 - RNA, 21 nt, Human
gauccgccugccucagccucc

SEQ ID NO: 944896 - RNA, 18 nt, Human
gcaauuguucguccuucu

SEQ ID NO: 944897 - RNA, 20 nt, Human
gcagccgcuggaaggagggg

SEQ ID NO: 944898 - RNA, 18 nt, Human
gccccgggagggcgaccu

SEQ ID NO: 944899 - RNA, 24 nt, Human
gcgggagccaggggaggaaggaag

SEQ ID NO: 944900 - RNA, 18 nt, Human
gcgggcuguggggcugga

SEQ ID NO: 944901 - RNA, 19 nt, Human
gcgggcuguggggcuggag

SEQ ID NO: 944902 - RNA, 21 nt, Human
ggacccgagagccgcugagua

SEQ ID NO: 944903 - RNA, 18 nt, Human
ggagagacggggcagggc

SEQ ID NO: 944904 - RNA, 23 nt, Human
ggagaguuggggcugggggcugc

SEQ ID NO: 944905 - RNA, 18 nt, Human
ggaggaggaagaggagga

SEQ ID NO: 944906 - RNA, 18 nt, Human
ggaggaggaggaagagga

SEQ ID NO: 944907 - RNA, 23 nt, Human
ggcaaggguuuuucaagccagca

SEQ ID NO: 944908 - RNA, 21 nt, Human
ggcuggggcgcggggcugggc

SEQ ID NO: 944909 - RNA, 24 nt, Human
gggcaaggguuuuucaagccagca

SEQ ID NO: 944910 - RNA, 21 nt, Human
gggcagggcuggggcgcgggg

SEQ ID NO: 944911 - RNA, 21 nt, Human
gggcagggcuggggcgcgggg

SEQ ID NO: 944912 - RNA, 23 nt, Human
gggcgcgggccggcagcggggaa

SEQ ID NO: 944913 - RNA, 18 nt, Human
gggcggaggagcgcgggc

SEQ ID NO: 944914 - RNA, 20 nt, Human
gggcugggggcugcagccgc

SEQ ID NO: 944915 - RNA, 18 nt, Human
gggcuguggggcuggagc

SEQ ID NO: 944916 - RNA, 20 nt, Human
ggugccuagagaggaggagg

SEQ ID NO: 944917 - RNA, 24 nt, Human
gucaucaagugauccgccugccuc

SEQ ID NO: 944918 - RNA, 18 nt, Human
gugauccgccugccucag

SEQ ID NO: 944919 - RNA, 24 nt, Human
gugauccgccugccucagccuccc

SEQ ID NO: 944920 - RNA, 19 nt, Human
uagagaacaguagccacca

SEQ ID NO: 944921 - RNA, 22 nt, Human
ucaagugauccgccugccucag

SEQ ID NO: 944922 - RNA, 24 nt, Human
ucccaaagugcugggaugacaggc

SEQ ID NO: 944923 - RNA, 19 nt, Human
uccccgggcgccggggcuc

SEQ ID NO: 944924 - RNA, 18 nt, Human
ucgccgggccgggcaggg

SEQ ID NO: 944925 - RNA, 23 nt, Human
ucuaguagccauugcugaagggu

SEQ ID NO: 944926 - RNA, 24 nt, Human
ugccucagccucccaaagugcugg

SEQ ID NO: 944927 - RNA, 24 nt, Human
uggcugggcuggucucacacuucu

SEQ ID NO: 944928 - RNA, 19 nt, Human
ugggaugacaggcgugagg

SEQ ID NO: 944929 - RNA, 22 nt, Human
ugggaugacaggcgugaggcac

SEQ ID NO: 944930 - RNA, 22 nt, Human
ugggaugacaggcgugaggcac

SEQ ID NO: 944931 - RNA, 24 nt, Human
ugggaugacaggcgugaggcacug

SEQ ID NO: 944932 - RNA, 22 nt, Human
uggggcucccgcggcgagucug

SEQ ID NO: 944933 - RNA, 22 nt, Human
uggggcuggagcuggagccggg

SEQ ID NO: 944934 - RNA, 24 nt, Human
uggggcugggggcugcagccgcug

SEQ ID NO: 944935 - RNA, 21 nt, Human
uguucguccuucuaguagcca

SEQ ID NO: 944936 - RNA, 19 nt, Human
cagccacccccaaguacau

SEQ ID NO: 944937 - RNA, 22 nt, Human
cguaaaagaacuaauauuugca

SEQ ID NO: 944938 - RNA, 24 nt, Human
uaaaagaacuaauauuugcaaaga

SEQ ID NO: 944939 - RNA, 27 nt, Human
uagccaggagcagccacccccaaguac

SEQ ID NO: 944940 - RNA, 18 nt, Human
uggaaagcaaaagaauca

SEQ ID NO: 944941 - RNA, 29 nt, Human
aaaaaaaaaaaaaaaagccaccacaaaga

SEQ ID NO: 944942 - RNA, 18 nt, Human
aaaaacacacacccagag

SEQ ID NO: 944943 - RNA, 25 nt, Human
aaaacacacacccagaguugcauuc

SEQ ID NO: 944944 - RNA, 22 nt, Human
aaacauggagcacgaaagacaa

SEQ ID NO: 944945 - RNA, 20 nt, Human
aaguguggagcacagagacc

SEQ ID NO: 944946 - RNA, 18 nt, Human
aauucuguauuggaaacu

SEQ ID NO: 944947 - RNA, 19 nt, Human
acccugaaaugggaacaaa

SEQ ID NO: 944948 - RNA, 24 nt, Human
acccugaaaugggaacaaaggagg

SEQ ID NO: 944949 - RNA, 18 nt, Human
agccccucccacccccuc

SEQ ID NO: 944950 - RNA, 23 nt, Human
aggacaccagccccucccacccc

SEQ ID NO: 944951 - RNA, 18 nt, Human
aggggagugggaacuagc

SEQ ID NO: 944952 - RNA, 25 nt, Human
aucuucccugaggccccagugguca

SEQ ID NO: 944953 - RNA, 24 nt, Human
auggagcacgaaagacaagugugg

SEQ ID NO: 944954 - RNA, 26 nt, Human
caaacaauccaaaaaaaaaaaaaaaa

SEQ ID NO: 944955 - RNA, 19 nt, Human
caaggugcaagaggcagag

SEQ ID NO: 944956 - RNA, 28 nt, Human
cacacacacacaugcaagacaguuugug

SEQ ID NO: 944957 - RNA, 23 nt, Human
cacugcuucgagcccccacaaaa

SEQ ID NO: 944958 - RNA, 25 nt, Human
cagacacacacacacaugcaagaca

SEQ ID NO: 944959 - RNA, 18 nt, Human
cagccccucccacccccu

SEQ ID NO: 944960 - RNA, 21 nt, Human
caggaggcugcugagacuggg

SEQ ID NO: 944961 - RNA, 24 nt, Human
caucugccaaguacggauccuaac

SEQ ID NO: 944962 - RNA, 27 nt, Human
ccaaaaaaaaaaaaaaaagccaccaca

SEQ ID NO: 944963 - RNA, 21 nt, Human
ccacaaaaacacacacccaga

SEQ ID NO: 944964 - RNA, 22 nt, Human
ccagacacacacacacaugcaa

SEQ ID NO: 944965 - RNA, 22 nt, Human
cccacaaaaacacacacccaga

SEQ ID NO: 944966 - RNA, 21 nt, Human
cccacaaaaacacacacccuc

SEQ ID NO: 944967 - RNA, 23 nt, Human
cccacccccucaaggugcaagag

SEQ ID NO: 944968 - RNA, 23 nt, Human
ccccacaaaaacacacacccaga

SEQ ID NO: 944969 - RNA, 18 nt, Human
cccuguuguggccucaaa

SEQ ID NO: 944970 - RNA, 24 nt, Human
ccggccugguuaugaaaucaggag

SEQ ID NO: 944971 - RNA, 20 nt, Human
ccugccgaggaagugggguu

SEQ ID NO: 944972 - RNA, 20 nt, Human
cucaaguuccucuaagccuu

SEQ ID NO: 944973 - RNA, 20 nt, Human
gagcccccacaaaaacacac

SEQ ID NO: 944974 - RNA, 19 nt, Human
gaucaugggaagugaucug

SEQ ID NO: 944975 - RNA, 24 nt, Human
gcuucgagcccccacaaaaacaca

SEQ ID NO: 944976 - RNA, 28 nt, Human
gguaaccagacacacacacacaugcagu

SEQ ID NO: 944977 - RNA, 24 nt, Human
guaaccagacacacacacacaugc

SEQ ID NO: 944978 - RNA, 18 nt, Human
guggccucaaacagugaa

SEQ ID NO: 944979 - RNA, 21 nt, Human
uauuggaaacugcucagcugc

SEQ ID NO: 944980 - RNA, 19 nt, Human
ucagggccucaguuuccua

SEQ ID NO: 944981 - RNA, 21 nt, Human
ucaucugccaaguacggaucc

SEQ ID NO: 944982 - RNA, 25 nt, Human
uccaaaaaaaaaaaaaaaagccacc

SEQ ID NO: 944983 - RNA, 21 nt, Human
ucccugucauccuucgacagg

SEQ ID NO: 944984 - RNA, 21 nt, Human
ucucagggccucaguuuccua

SEQ ID NO: 944985 - RNA, 19 nt, Human
uggaagaaauguguaagug

SEQ ID NO: 944986 - RNA, 22 nt, Human
uggauucgaaguagggaacccc

SEQ ID NO: 944987 - RNA, 22 nt, Human
ugggaagugaucugaaugaguc

SEQ ID NO: 944988 - RNA, 23 nt, Human
uucaaacauggagcacgaaagac

SEQ ID NO: 944989 - RNA, 25 nt, Human
uucacagaaggucgggguaaccaga

SEQ ID NO: 944990 - RNA, 20 nt, Human
uuuguggaacccugaaaugg

SEQ ID NO: 944991 - RNA, 24 nt, Human
aaaaaacaaagcagaaaaaaacac

SEQ ID NO: 944992 - RNA, 20 nt, Human
aaaacaaagcagaaaaaaac

SEQ ID NO: 944993 - RNA, 21 nt, Human
aaacagcaaacugaaaaaaca

SEQ ID NO: 944994 - RNA, 28 nt, Human
aagcagaaaaaaacacaguuccauccaa

SEQ ID NO: 944995 - RNA, 18 nt, Human
acaaagcagaaaaaaaca

SEQ ID NO: 944996 - RNA, 21 nt, Human
acaaagcagaaaaaaacacag

SEQ ID NO: 944997 - RNA, 25 nt, Human
acaaagcagaaaaaaacacaguucc

SEQ ID NO: 944998 - RNA, 20 nt, Human
acugaaaaaacaaagcagaa

SEQ ID NO: 944999 - RNA, 21 nt, Human
auggcuacagaaacagcaaac

SEQ ID NO: 945000 - RNA, 19 nt, Human
caaacugaaaaaacaaagc

SEQ ID NO: 945001 - RNA, 24 nt, Human
cacagaauacaauauggcuacaga

SEQ ID NO: 945002 - RNA, 19 nt, Human
cacaguuccauccaauuug

SEQ ID NO: 945003 - RNA, 19 nt, Human
cagaaaaaaacacaguucc

SEQ ID NO: 945004 - RNA, 19 nt, Human
cagaaacagcaaacugaaa

SEQ ID NO: 945005 - RNA, 19 nt, Human
cagaaacagcaaacugaaa

SEQ ID NO: 945006 - RNA, 23 nt, Human
cugaaaaaacaaagcagaaaaaa

SEQ ID NO: 945007 - RNA, 18 nt, Human
gcuacagaaacagcaaac

SEQ ID NO: 945008 - RNA, 27 nt, Human
ggcuacagaaacagcaaacugaaaaaa

SEQ ID NO: 945009 - RNA, 21 nt, Human
uaagcuugauggaagaagucu

SEQ ID NO: 945010 - RNA, 19 nt, Human
uacaauauggcuacagaaa

SEQ ID NO: 945011 - RNA, 24 nt, Human
uacagaaacagcaaacugaaaaaa

SEQ ID NO: 945012 - RNA, 21 nt, Human
ugaaaaaacaaagcagaaaaa

SEQ ID NO: 945013 - RNA, 26 nt, Human
ugaaaaaacaaagcagaaaaaaaagg

SEQ ID NO: 945014 - RNA, 26 nt, Human
ugaaaaaacaaagcagaaaaaaacac

SEQ ID NO: 945015 - RNA, 18 nt, Human
uggcuacagaaacagcaa

SEQ ID NO: 945016 - RNA, 23 nt, Human
uggcuacagaaacagcaaacuga

SEQ ID NO: 945017 - RNA, 21 nt, Human
aagaauagcuauccuucauac

SEQ ID NO: 945018 - RNA, 19 nt, Human
agagauucucuguuuucaa

SEQ ID NO: 945019 - RNA, 24 nt, Human
agagccguuucccucugugccucc

SEQ ID NO: 945020 - RNA, 22 nt, Human
ccuccgccucgucccugccaug

SEQ ID NO: 945021 - RNA, 19 nt, Human
ccuccucgggcugcgagag

SEQ ID NO: 945022 - RNA, 18 nt, Human
ccucgaccgccgccgccg

SEQ ID NO: 945023 - RNA, 21 nt, Human
ccucgaccgccgccgccgccc

SEQ ID NO: 945024 - RNA, 24 nt, Human
ccuucauacaauacuagguuuuau

SEQ ID NO: 945025 - RNA, 26 nt, Human
cuagugaugacuguagugugccuuuu

SEQ ID NO: 945026 - RNA, 20 nt, Human
cuccgcgccugacccuccuc

SEQ ID NO: 945027 - RNA, 21 nt, Human
cuccucgaccgccgccgccgc

SEQ ID NO: 945028 - RNA, 20 nt, Human
gcuuagaaagcagaauugcc

SEQ ID NO: 945029 - RNA, 24 nt, Human
uaacugaaauguauauaaaaauaa

SEQ ID NO: 945030 - RNA, 22 nt, Human
uacucagcuugggucauauuca

SEQ ID NO: 945031 - RNA, 18 nt, Human
uagaaagcagaauugccu

SEQ ID NO: 945032 - RNA, 18 nt, Human
ucagguuugcuaaaugcu

SEQ ID NO: 945033 - RNA, 22 nt, Human
ucccucugugccucccucggaa

SEQ ID NO: 945034 - RNA, 22 nt, Human
uccucgaccgccgccgccgccc

SEQ ID NO: 945035 - RNA, 19 nt, Human
ucuggcuuaacuccucgcc

SEQ ID NO: 945036 - RNA, 20 nt, Human
ugccaugggagcuccucgac

SEQ ID NO: 945037 - RNA, 18 nt, Human
ugcuuagaaagcagaauu

SEQ ID NO: 945038 - RNA, 24 nt, Human
aaaaaggaacauggaaaauuccac

SEQ ID NO: 945039 - RNA, 20 nt, Human
aaaagauccaaauuagaggu

SEQ ID NO: 945040 - RNA, 25 nt, Human
aaacaaaaagauccaaauuagaggu

SEQ ID NO: 945041 - RNA, 26 nt, Human
aaacaccccagagauggggccugagc

SEQ ID NO: 945042 - RNA, 20 nt, Human
aaaggaacauggaaaauucc

SEQ ID NO: 945043 - RNA, 23 nt, Human
aagugaguuguguggcucagccu

SEQ ID NO: 945044 - RNA, 18 nt, Human
accugggccauaacggag

SEQ ID NO: 945045 - RNA, 20 nt, Human
agcuaaaccuucugacuacc

SEQ ID NO: 945046 - RNA, 21 nt, Human
agcuaaaccuucugacuacca

SEQ ID NO: 945047 - RNA, 24 nt, Human
aggcaggcuuagcagcuaagggag

SEQ ID NO: 945048 - RNA, 22 nt, Human
auccaaauuagagguaaaaagg

SEQ ID NO: 945049 - RNA, 21 nt, Human
caaaaacaaaaagauccaaau

SEQ ID NO: 945050 - RNA, 23 nt, Human
cacacgcuguagaccacggccag

SEQ ID NO: 945051 - RNA, 18 nt, Human
cacgcacccucgcucacc

SEQ ID NO: 945052 - RNA, 23 nt, Human
cacgcuguagaccacggccagug

SEQ ID NO: 945053 - RNA, 21 nt, Human
cagcagcugcaggauaugggc

SEQ ID NO: 945054 - RNA, 22 nt, Human
cagcagcugcaggauaugggcu

SEQ ID NO: 945055 - RNA, 19 nt, Human
cagcuaagggaggcugggg

SEQ ID NO: 945056 - RNA, 20 nt, Human
caggcgcaauaccugcccug

SEQ ID NO: 945057 - RNA, 23 nt, Human
caggcgcaauaccugcccugggc

SEQ ID NO: 945058 - RNA, 22 nt, Human
cauggccugcaugaugcuggag

SEQ ID NO: 945059 - RNA, 19 nt, Human
ccaagcaggcgcaauaccu

SEQ ID NO: 945060 - RNA, 23 nt, Human
ccacacgcuguagaccacggcca

SEQ ID NO: 945061 - RNA, 22 nt, Human
ccacacucaccucacccuuaac

SEQ ID NO: 945062 - RNA, 20 nt, Human
ccaucccaccccugggcaag

SEQ ID NO: 945063 - RNA, 21 nt, Human
cccaaaaaccugggcuggguc

SEQ ID NO: 945064 - RNA, 24 nt, Human
cccagccuaggccugucugcuggc

SEQ ID NO: 945065 - RNA, 21 nt, Human
ccccagccuaggccugucugc

SEQ ID NO: 945066 - RNA, 23 nt, Human
cccccaaacaccccagagauggg

SEQ ID NO: 945067 - RNA, 26 nt, Human
ccccugggcaaggcaggcuuagcagc

SEQ ID NO: 945068 - RNA, 19 nt, Human
cccgcccgcaccgcguucg

SEQ ID NO: 945069 - RNA, 22 nt, Human
cccugcugcagcagcugcagga

SEQ ID NO: 945070 - RNA, 19 nt, Human
ccgccgcgcaccacgcacc

SEQ ID NO: 945071 - RNA, 22 nt, Human
ccgcgcaccacgcacccucgcu

SEQ ID NO: 945072 - RNA, 22 nt, Human
ccugacccccaaacaccccaga

SEQ ID NO: 945073 - RNA, 22 nt, Human
ccugcucccugacccccaaaca

SEQ ID NO: 945074 - RNA, 21 nt, Human
ccugcugcuccuugagcgcca

SEQ ID NO: 945075 - RNA, 24 nt, Human
cugcagcagcugcaggauaugggc

SEQ ID NO: 945076 - RNA, 25 nt, Human
cugcagcagcugcaggauaugggcu

SEQ ID NO: 945077 - RNA, 23 nt, Human
cugggcccagcuaaaccuucuga

SEQ ID NO: 945078 - RNA, 19 nt, Human
cuucagugccaucccaccc

SEQ ID NO: 945079 - RNA, 23 nt, Human
gaccacggccagugcucccuggu

SEQ ID NO: 945080 - RNA, 21 nt, Human
ggguacaggugugccagcagc

SEQ ID NO: 945081 - RNA, 24 nt, Human
ggucagcagcugucagcgccugcu

SEQ ID NO: 945082 - RNA, 19 nt, Human
uaccugcccugggcccagc

SEQ ID NO: 945083 - RNA, 18 nt, Human
ucagcgccugcuggaagg

SEQ ID NO: 945084 - RNA, 21 nt, Human
ucagggucaugcuccaggcau

SEQ ID NO: 945085 - RNA, 21 nt, Human
ucagugccaucccaccccugg

SEQ ID NO: 945086 - RNA, 19 nt, Human
uccaaauuagagguaaaaa

SEQ ID NO: 945087 - RNA, 21 nt, Human
ucccugacccccaaacacccc

SEQ ID NO: 945088 - RNA, 22 nt, Human
ucguuccgccgccgccgcgcac

SEQ ID NO: 945089 - RNA, 21 nt, Human
ugaaaaagcuuuuggcgcacc

SEQ ID NO: 945090 - RNA, 22 nt, Human
ugacccccaaacaccccagaga

SEQ ID NO: 945091 - RNA, 18 nt, Human
ugagcgccacacucaccu

SEQ ID NO: 945092 - RNA, 23 nt, Human
ugagggaaaggagcacaggcugg

SEQ ID NO: 945093 - RNA, 23 nt, Human
ugcagcagcugcaggauaugggc

SEQ ID NO: 945094 - RNA, 18 nt, Human
ugccaaggucagaugcca

SEQ ID NO: 945095 - RNA, 23 nt, Human
ugccccagccuaggccugucugc

SEQ ID NO: 945096 - RNA, 24 nt, Human
ugcggcgggcgccccgcccgcacc

SEQ ID NO: 945097 - RNA, 24 nt, Human
ugggagagcgggcaggguggcugc

SEQ ID NO: 945098 - RNA, 19 nt, Human
ugggcuugcugggccuggc

SEQ ID NO: 945099 - RNA, 22 nt, Human
uguguggcucagccugcaggaa

SEQ ID NO: 945100 - RNA, 24 nt, Human
uguuuuucaaaaacaaaaagaucc

SEQ ID NO: 945101 - RNA, 20 nt, Human
uuucacacacauacagcacc

SEQ ID NO: 945102 - RNA, 21 nt, Human
gagaauagaagaauuuaagaa

SEQ ID NO: 945103 - RNA, 22 nt, Human
guaccuuuuaauuugcuccugg

SEQ ID NO: 945104 - RNA, 22 nt, Human
aaaaaauucaggaaacacagaa

SEQ ID NO: 945105 - RNA, 20 nt, Human
aaaacauuucagccaagacu

SEQ ID NO: 945106 - RNA, 22 nt, Human
aaacaaguaaacccgucccaga

SEQ ID NO: 945107 - RNA, 23 nt, Human
aaacugaagucacgcuaaccuua

SEQ ID NO: 945108 - RNA, 23 nt, Human
accacacagauauaaaacuaugg

SEQ ID NO: 945109 - RNA, 28 nt, Human
aucacccuguucaaaaacaaguaaaccc

SEQ ID NO: 945110 - RNA, 20 nt, Human
augcagggggcacgugcucc

SEQ ID NO: 945111 - RNA, 21 nt, Human
caaauugagagaacucucuga

SEQ ID NO: 945112 - RNA, 22 nt, Human
caccauauaaaaaauucaggaa

SEQ ID NO: 945113 - RNA, 26 nt, Human
caccauauaaaaaauucaggaaacca

SEQ ID NO: 945114 - RNA, 22 nt, Human
caucacccuguucaaaaacaag

SEQ ID NO: 945115 - RNA, 22 nt, Human
cccaucacccuguucaaaaaca

SEQ ID NO: 945116 - RNA, 19 nt, Human
cccucuucacucuacucaa

SEQ ID NO: 945117 - RNA, 23 nt, Human
cuccccucuucacucuacucaag

SEQ ID NO: 945118 - RNA, 21 nt, Human
gaaaugcaacuguucguugug

SEQ ID NO: 945119 - RNA, 23 nt, Human
gacacagcucugccuguugcaaa

SEQ ID NO: 945120 - RNA, 23 nt, Human
gcucugacgcacagcacugcugu

SEQ ID NO: 945121 - RNA, 22 nt, Human
guccaggcaagccuguccucag

SEQ ID NO: 945122 - RNA, 20 nt, Human
gucccagagccucuccaggg

SEQ ID NO: 945123 - RNA, 19 nt, Human
uaaauaaaacauuucagcc

SEQ ID NO: 945124 - RNA, 23 nt, Human
uaaauaaaacauuucagccaaga

SEQ ID NO: 945125 - RNA, 25 nt, Human
uacaauacuauuaaugucacaaacu

SEQ ID NO: 945126 - RNA, 23 nt, Human
uagugucauccuuagucaaaacu

SEQ ID NO: 945127 - RNA, 20 nt, Human
uauauauuuauauauauaua

SEQ ID NO: 945128 - RNA, 20 nt, Human
uaugccucccaaacaauauu

SEQ ID NO: 945129 - RNA, 22 nt, Human
ucccgugccgguacaaaacacc

SEQ ID NO: 945130 - RNA, 18 nt, Human
uccucagcuggcucugac

SEQ ID NO: 945131 - RNA, 23 nt, Human
ucugaaaugcaacuguucguugu

SEQ ID NO: 945132 - RNA, 20 nt, Human
ugagagaacucucugaaaug

SEQ ID NO: 945133 - RNA, 21 nt, Human
ugcgucaucaagagaaagaga

SEQ ID NO: 945134 - RNA, 18 nt, Human
uggcugggcuggcugggc

SEQ ID NO: 945135 - RNA, 18 nt, Human
uggcugggcuggcugggc

SEQ ID NO: 945136 - RNA, 23 nt, Human
uggcugggcuggcugggcuggcu

SEQ ID NO: 945137 - RNA, 23 nt, Human
ugugugcagauuugcaguccaga

SEQ ID NO: 945138 - RNA, 25 nt, Human
aaaaaaaaacaacaacaacaaauga

SEQ ID NO: 945139 - RNA, 21 nt, Human
aaacaacaacaacaaaugaaa

SEQ ID NO: 945140 - RNA, 22 nt, Human
aacaaaugaaaauauaaaaccc

SEQ ID NO: 945141 - RNA, 18 nt, Human
acacugaaaggucgaagg

SEQ ID NO: 945142 - RNA, 24 nt, Human
cacacugaaaggucgaaggaacau

SEQ ID NO: 945143 - RNA, 20 nt, Human
cccaugagauauuuauauaa

SEQ ID NO: 945144 - RNA, 19 nt, Human
cuuaaaaaaaaacaacaac

SEQ ID NO: 945145 - RNA, 22 nt, Human
uaaaaccccaugagauauuuau

SEQ ID NO: 945146 - RNA, 18 nt, Human
ugaaaauauaaaacccca

SEQ ID NO: 945147 - RNA, 24 nt, Human
uugagugacaaagcagucuuuuuc

SEQ ID NO: 945148 - RNA, 19 nt, Human
aaaaaaaagaaaaagaaaa

SEQ ID NO: 945149 - RNA, 19 nt, Human
aaaaaaccaaaacucaacc

SEQ ID NO: 945150 - RNA, 24 nt, Human
aaaaaaccaaaacucaaccaaaua

SEQ ID NO: 945151 - RNA, 26 nt, Human
aaaaaagaaaaagaaaaaaccaaaag

SEQ ID NO: 945152 - RNA, 22 nt, Human
aaaaaccaaaacucaaccaaau

SEQ ID NO: 945153 - RNA, 23 nt, Human
aaaagaaaaagaaaaaaccaaaa

SEQ ID NO: 945154 - RNA, 18 nt, Human
aacaaagccauccauugc

SEQ ID NO: 945155 - RNA, 22 nt, Human
aacaaagccauccauugcauga

SEQ ID NO: 945156 - RNA, 19 nt, Human
aagcucagggcagcucaug

SEQ ID NO: 945157 - RNA, 24 nt, Human
aagguaccgcucauccccuccuug

SEQ ID NO: 945158 - RNA, 18 nt, Human
acccaggacacucucccu

SEQ ID NO: 945159 - RNA, 21 nt, Human
agagaaggacagccuguagua

SEQ ID NO: 945160 - RNA, 19 nt, Human
agagaggauagcaaggggg

SEQ ID NO: 945161 - RNA, 20 nt, Human
agagggcauucuggcugggg

SEQ ID NO: 945162 - RNA, 19 nt, Human
agcacuuugccaguugauu

SEQ ID NO: 945163 - RNA, 18 nt, Human
aggagugguacuuguggu

SEQ ID NO: 945164 - RNA, 18 nt, Human
aggcugcccccaccagcc

SEQ ID NO: 945165 - RNA, 23 nt, Human
auagcaacauuauuuucaaacac

SEQ ID NO: 945166 - RNA, 26 nt, Human
auaguggauuccagaguuuacacccc

SEQ ID NO: 945167 - RNA, 22 nt, Human
aucuucaaaguaagaagcaacc

SEQ ID NO: 945168 - RNA, 20 nt, Human
augguaauuaacauauuuuu

SEQ ID NO: 945169 - RNA, 21 nt, Human
auuaaacuguaagaauacaau

SEQ ID NO: 945170 - RNA, 26 nt, Human
auuuuuggaaaaaaaaagaaaaagaa

SEQ ID NO: 945171 - RNA, 24 nt, Human
caaccaaauaggugauagcaacau

SEQ ID NO: 945172 - RNA, 22 nt, Human
caaccugaaucccaacuugaaa

SEQ ID NO: 945173 - RNA, 21 nt, Human
caaggcaggucaaccacagcc

SEQ ID NO: 945174 - RNA, 18 nt, Human
cacccaggacacucuccc

SEQ ID NO: 945175 - RNA, 19 nt, Human
caccuccccaacgaccaaa

SEQ ID NO: 945176 - RNA, 19 nt, Human
caccuccccaacgaccaaa

SEQ ID NO: 945177 - RNA, 21 nt, Human
cacucggucugcguauccagg

SEQ ID NO: 945178 - RNA, 21 nt, Human
cacucggucugcguauccagg

SEQ ID NO: 945179 - RNA, 19 nt, Human
cagagcuguguguccucug

SEQ ID NO: 945180 - RNA, 27 nt, Human
caggaaaaugccucaaccugaauccca

SEQ ID NO: 945181 - RNA, 21 nt, Human
ccaacgaccaaagcucagggc

SEQ ID NO: 945182 - RNA, 23 nt, Human
ccacauguccucuucgccccuca

SEQ ID NO: 945183 - RNA, 20 nt, Human
ccaccagccugagaaggagu

SEQ ID NO: 945184 - RNA, 20 nt, Human
cccaccagccugagaaggag

SEQ ID NO: 945185 - RNA, 18 nt, Human
ccccaaggcaggucaacc

SEQ ID NO: 945186 - RNA, 24 nt, Human
ccccaaggcaggucaaccacagcc

SEQ ID NO: 945187 - RNA, 22 nt, Human
ccccuaugacagcauuuuaccc

SEQ ID NO: 945188 - RNA, 20 nt, Human
ccccugagacugcugccccu

SEQ ID NO: 945189 - RNA, 21 nt, Human
ccccugagacugcugccccua

SEQ ID NO: 945190 - RNA, 18 nt, Human
cuaggaaacaaaagugau

SEQ ID NO: 945191 - RNA, 21 nt, Human
cuccauuugagccaccucccc

SEQ ID NO: 945192 - RNA, 24 nt, Human
cuccauuugagccaccuccccaac

SEQ ID NO: 945193 - RNA, 24 nt, Human
cugaaucccaacuugaaauacuaa

SEQ ID NO: 945194 - RNA, 24 nt, Human
cuucgccccucagcccugcucccc

SEQ ID NO: 945195 - RNA, 18 nt, Human
gaaaggaaauacagauca

SEQ ID NO: 945196 - RNA, 20 nt, Human
gaaggacagccuguaguaca

SEQ ID NO: 945197 - RNA, 24 nt, Human
gaguuggucuuuagagcuucuucu

SEQ ID NO: 945198 - RNA, 20 nt, Human
gcaggaaaaugccucaaccu

SEQ ID NO: 945199 - RNA, 18 nt, Human
gcaugaaggaugcccaaa

SEQ ID NO: 945200 - RNA, 22 nt, Human
gccagagaggauagcaaggggg

SEQ ID NO: 945201 - RNA, 20 nt, Human
gccucgucugccccaggcac

SEQ ID NO: 945202 - RNA, 23 nt, Human
gcucauggccauggcuuaucacu

SEQ ID NO: 945203 - RNA, 18 nt, Human
ggaaaaaaaaagaaaaag

SEQ ID NO: 945204 - RNA, 19 nt, Human
ggccauggcuuaucacuuu

SEQ ID NO: 945205 - RNA, 20 nt, Human
ggucucccaagguaccgcuc

SEQ ID NO: 945206 - RNA, 19 nt, Human
guaagaagcaaccacucuu

SEQ ID NO: 945207 - RNA, 23 nt, Human
gucuugaggggcaaaaagcuuuu

SEQ ID NO: 945208 - RNA, 25 nt, Human
guguagcuguuuuggaaagaagggc

SEQ ID NO: 945209 - RNA, 22 nt, Human
uaaguugaacacuuaacuuuaa

SEQ ID NO: 945210 - RNA, 20 nt, Human
uagcaaaaaaccuaacuugg

SEQ ID NO: 945211 - RNA, 21 nt, Human
uagcuguuuuggaaagaaggg

SEQ ID NO: 945212 - RNA, 24 nt, Human
ucaaccacagccgcuggcuccauu

SEQ ID NO: 945213 - RNA, 21 nt, Human
ucagcccugcuccccaaggca

SEQ ID NO: 945214 - RNA, 18 nt, Human
ucagggcagcucauggcc

SEQ ID NO: 945215 - RNA, 19 nt, Human
uccccaacgaccaaagcuc

SEQ ID NO: 945216 - RNA, 27 nt, Human
uccccacaagagggaagagacaaaggc

SEQ ID NO: 945217 - RNA, 18 nt, Human
ucuacauuaggugguaca

SEQ ID NO: 945218 - RNA, 19 nt, Human
ucuccagauauauuccacu

SEQ ID NO: 945219 - RNA, 19 nt, Human
ucucccaagguaccgcuca

SEQ ID NO: 945220 - RNA, 21 nt, Human
ucucuucuaggaaacaaaagu

SEQ ID NO: 945221 - RNA, 22 nt, Human
ucuugaggggcaaaaagcuuuu

SEQ ID NO: 945222 - RNA, 23 nt, Human
ugaaaauucuaguccagauaaca

SEQ ID NO: 945223 - RNA, 20 nt, Human
ugaaguauaacaacuuuggc

SEQ ID NO: 945224 - RNA, 19 nt, Human
uggaaaaaaaaagaaaaag

SEQ ID NO: 945225 - RNA, 20 nt, Human
uggaaaaaaaaagaaaaaga

SEQ ID NO: 945226 - RNA, 18 nt, Human
uggaaagaagggcacugg

SEQ ID NO: 945227 - RNA, 23 nt, Human
uggauuccagaguuuacaccccc

SEQ ID NO: 945228 - RNA, 19 nt, Human
uggcugacacccaggacac

SEQ ID NO: 945229 - RNA, 21 nt, Human
uucuucuuuuggucaacaaag

SEQ ID NO: 945230 - RNA, 22 nt, Human
uuggaaagaagggcacuggagg

SEQ ID NO: 945231 - RNA, 22 nt, Human
uugggcacaauagugcuggaug

SEQ ID NO: 945232 - RNA, 22 nt, Human
uuucuuguagaauagcuucuac

SEQ ID NO: 945233 - RNA, 18 nt, Human
acuguaaaugcuggggac

SEQ ID NO: 945234 - RNA, 24 nt, Human
cacaccaagcaggcaaagccuaaa

SEQ ID NO: 945235 - RNA, 19 nt, Human
caccaagcaggcaaagccu

SEQ ID NO: 945236 - RNA, 20 nt, Human
caccagcgauggugggacuc

SEQ ID NO: 945237 - RNA, 26 nt, Human
ccaccagcgauggugggacucccuuu

SEQ ID NO: 945238 - RNA, 20 nt, Human
ccuaaauacagggcaggacu

SEQ ID NO: 945239 - RNA, 21 nt, Human
gagcagggacccugggauacc

SEQ ID NO: 945240 - RNA, 20 nt, Human
gugauguaccauuccagccc

SEQ ID NO: 945241 - RNA, 19 nt, Human
uacaucacaccaagcaggc

SEQ ID NO: 945242 - RNA, 20 nt, Human
ugaaaaggagauguguucuu

SEQ ID NO: 945243 - RNA, 21 nt, Human
ugaaaaggagauguguucuug

SEQ ID NO: 945244 - RNA, 19 nt, Human
ugggauaccaccagcgaug

SEQ ID NO: 945245 - RNA, 21 nt, Human
acagggaaaacgcgacaggug

SEQ ID NO: 945246 - RNA, 19 nt, Human
caccgugggaaaugccccu

SEQ ID NO: 945247 - RNA, 22 nt, Human
gaaaugccccuccgccagcucu

SEQ ID NO: 945248 - RNA, 20 nt, Human
gcaacacagggaaaacgcga

SEQ ID NO: 945249 - RNA, 27 nt, Human
gcguggggugggcagagcaugcuggga

SEQ ID NO: 945250 - RNA, 24 nt, Human
aaguaauaaaaauuuauugagaau

SEQ ID NO: 945251 - RNA, 21 nt, Human
aaucacugagaaaucacgcac

SEQ ID NO: 945252 - RNA, 19 nt, Human
agaaaucacgcacuguccc

SEQ ID NO: 945253 - RNA, 24 nt, Human
aggccggcggcacuggaggucaga

SEQ ID NO: 945254 - RNA, 22 nt, Human
agggagggaacaacacuguagg

SEQ ID NO: 945255 - RNA, 23 nt, Human
agggagggaacaacacuguagga

SEQ ID NO: 945256 - RNA, 27 nt, Human
agggguucagggaaccggugugggggg

SEQ ID NO: 945257 - RNA, 20 nt, Human
agucuucagucuuccuuaau

SEQ ID NO: 945258 - RNA, 20 nt, Human
aucacgcacuguccccaaca

SEQ ID NO: 945259 - RNA, 24 nt, Human
cacgcacuguccccaacagcccca

SEQ ID NO: 945260 - RNA, 22 nt, Human
cagccuugagggagggaacaac

SEQ ID NO: 945261 - RNA, 20 nt, Human
ccaguuaacacagggaggag

SEQ ID NO: 945262 - RNA, 22 nt, Human
ccucaaaaacuggagaagcaga

SEQ ID NO: 945263 - RNA, 22 nt, Human
cggugugggggaccaucgcaug

SEQ ID NO: 945264 - RNA, 18 nt, Human
gcacuguccccaacagcc

SEQ ID NO: 945265 - RNA, 21 nt, Human
gccucuaccccgcuccggcuu

SEQ ID NO: 945266 - RNA, 21 nt, Human
gucagaagggggugccggccc

SEQ ID NO: 945267 - RNA, 21 nt, Human
ucacgcacuguccccaacagc

SEQ ID NO: 945268 - RNA, 25 nt, Human
ucagaagggggugccggcccgccuc

SEQ ID NO: 945269 - RNA, 23 nt, Human
ucagggaaccggugugggggacc

SEQ ID NO: 945270 - RNA, 21 nt, Human
uccacuuccucugggggugga

SEQ ID NO: 945271 - RNA, 24 nt, Human
uccucuggggguggaguucuugac

SEQ ID NO: 945272 - RNA, 23 nt, Human
ucugaucuugaggccggcggcac

SEQ ID NO: 945273 - RNA, 22 nt, Human
ugccggcccgccucuaccccgc

SEQ ID NO: 945274 - RNA, 19 nt, Human
ugcuggaccccuggcuggc

SEQ ID NO: 945275 - RNA, 22 nt, Human
uggaccccuggcuggcuccuuc

SEQ ID NO: 945276 - RNA, 23 nt, Human
uggagaagcagauccacuuccuc

SEQ ID NO: 945277 - RNA, 25 nt, Human
uguccccaacagccccaguuaacac

SEQ ID NO: 945278 - RNA, 23 nt, Human
uuuuuuuuuuuuuuuuuuucagg

SEQ ID NO: 945279 - RNA, 23 nt, Human
aaaaggccagacagcucacugca

SEQ ID NO: 945280 - RNA, 27 nt, Human
aaaaggccagacagcucacugcacugc

SEQ ID NO: 945281 - RNA, 21 nt, Human
aagcuuuauguuaaaguauga

SEQ ID NO: 945282 - RNA, 19 nt, Human
cacugcacugccaggcugc

SEQ ID NO: 945283 - RNA, 25 nt, Human
ccagacagcucacugcacugccagg

SEQ ID NO: 945284 - RNA, 22 nt, Human
cguacauucucuuugcagcaua

SEQ ID NO: 945285 - RNA, 19 nt, Human
cuacaaaauuuaagucuuu

SEQ ID NO: 945286 - RNA, 23 nt, Human
cucacugcacugccaggcugcac

SEQ ID NO: 945287 - RNA, 20 nt, Human
uaaccaaggaucaaggacaa

SEQ ID NO: 945288 - RNA, 21 nt, Human
ucaauccguacauucucuuug

SEQ ID NO: 945289 - RNA, 22 nt, Human
ucacugcacugccaggcugcac

SEQ ID NO: 945290 - RNA, 18 nt, Human
uuaaaguaugaacagcau

SEQ ID NO: 945291 - RNA, 24 nt, Human
uuuaaacaagccuaagaagguaag

SEQ ID NO: 945292 - RNA, 18 nt, Human
uuuuuuuuuuuuuuuuug

SEQ ID NO: 945293 - RNA, 19 nt, Human
uuuuuuuuuuuuuuuuugc

SEQ ID NO: 945294 - RNA, 24 nt, Human
uuuuuuuuuuuuuuuuugcauuaa

SEQ ID NO: 945295 - RNA, 19 nt, Human
accagauccccguucggau

SEQ ID NO: 945296 - RNA, 24 nt, Human
acccagugaggcacgacgugguuu

SEQ ID NO: 945297 - RNA, 26 nt, Human
acccagugaggcacgacgugguuuac

SEQ ID NO: 945298 - RNA, 20 nt, Human
agacuucuggguuggguucc

SEQ ID NO: 945299 - RNA, 19 nt, Human
agguuggagaugcagagcu

SEQ ID NO: 945300 - RNA, 18 nt, Human
cacauucagaaaugaggu

SEQ ID NO: 945301 - RNA, 22 nt, Human
cacccucgauuccaccagaucc

SEQ ID NO: 945302 - RNA, 24 nt, Human
cagagcuccaaggggacguccggg

SEQ ID NO: 945303 - RNA, 21 nt, Human
caggagaugggcgccccucuu

SEQ ID NO: 945304 - RNA, 23 nt, Human
caggccccugggccuugcacugg

SEQ ID NO: 945305 - RNA, 21 nt, Human
ccccugggccuugcacuggcu

SEQ ID NO: 945306 - RNA, 23 nt, Human
cccucgauuccaccagauccccg

SEQ ID NO: 945307 - RNA, 23 nt, Human
cgguguccuccacagcaggccuc

SEQ ID NO: 945308 - RNA, 23 nt, Human
gagggagcacgguguccuccaca

SEQ ID NO: 945309 - RNA, 25 nt, Human
gccggaauccagagcaggucccggu

SEQ ID NO: 945310 - RNA, 18 nt, Human
ggaauccagagcaggucc

SEQ ID NO: 945311 - RNA, 22 nt, Human
ggcuugggcggccgcggugugg

SEQ ID NO: 945312 - RNA, 20 nt, Human
uaagcaggacccagugaggc

SEQ ID NO: 945313 - RNA, 26 nt, Human
uccaccagauccccguucggaucuga

SEQ ID NO: 945314 - RNA, 21 nt, Human
uccagguuggagaugcagagc

SEQ ID NO: 945315 - RNA, 19 nt, Human
ucccucuggucuuucaccc

SEQ ID NO: 945316 - RNA, 19 nt, Human
uccgggccggaauccagag

SEQ ID NO: 945317 - RNA, 21 nt, Human
ucggaauucuuuagggcacag

SEQ ID NO: 945318 - RNA, 23 nt, Human
ucugagucggaauucuuuagggc

SEQ ID NO: 945319 - RNA, 20 nt, Human
ucuggguuggguuccagguu

SEQ ID NO: 945320 - RNA, 24 nt, Human
ugagagcaagaaggcuggaaaugc

SEQ ID NO: 945321 - RNA, 25 nt, Human
ugagagcaagaaggcuggaaaugca

SEQ ID NO: 945322 - RNA, 20 nt, Human
aaaaaagccaguguaguagg

SEQ ID NO: 945323 - RNA, 24 nt, Human
aaaaacaagcaggaguugaguggc

SEQ ID NO: 945324 - RNA, 18 nt, Human
aacuccuggguucuccuu

SEQ ID NO: 945325 - RNA, 21 nt, Human
aagcaggaguugaguggcugg

SEQ ID NO: 945326 - RNA, 22 nt, Human
aagcugaaggggucuagaagcu

SEQ ID NO: 945327 - RNA, 18 nt, Human
aaggauacuguggaaagg

SEQ ID NO: 945328 - RNA, 22 nt, Human
acccugaggauguagcuagugc

SEQ ID NO: 945329 - RNA, 18 nt, Human
acuucuuauggccaaaga

SEQ ID NO: 945330 - RNA, 22 nt, Human
agaagccacuacugggccaaug

SEQ ID NO: 945331 - RNA, 21 nt, Human
agacagccagagacaggggag

SEQ ID NO: 945332 - RNA, 19 nt, Human
agagcuagaagccacuacu

SEQ ID NO: 945333 - RNA, 25 nt, Human
aguuagcagaaucuugauucuugcu

SEQ ID NO: 945334 - RNA, 18 nt, Human
caaagacccagcuguuuc

SEQ ID NO: 945335 - RNA, 18 nt, Human
caagcaggaguugagugg

SEQ ID NO: 945336 - RNA, 22 nt, Human
cacuacugggccaaugcuaaag

SEQ ID NO: 945337 - RNA, 28 nt, Human
ccuauggccaaaggaaaaaccggggucc

SEQ ID NO: 945338 - RNA, 20 nt, Human
ccucugaaauaaugagcaga

SEQ ID NO: 945339 - RNA, 20 nt, Human
cgcuucuuugaaacuccugg

SEQ ID NO: 945340 - RNA, 20 nt, Human
cuaaaaaagccaguguagua

SEQ ID NO: 945341 - RNA, 27 nt, Human
cuaaaguuucugucucuaagccuaaaa

SEQ ID NO: 945342 - RNA, 27 nt, Human
cuacugggccaaugcuaaaguuucugu

SEQ ID NO: 945343 - RNA, 20 nt, Human
cuccugaguuucuuccuucu

SEQ ID NO: 945344 - RNA, 22 nt, Human
cugaaggggucuagaagcuuac

SEQ ID NO: 945345 - RNA, 23 nt, Human
cugcucgagacagccagagacag

SEQ ID NO: 945346 - RNA, 21 nt, Human
cuguggaaagggauggcgggg

SEQ ID NO: 945347 - RNA, 23 nt, Human
cuguuuggcaaccaagacucuaa

SEQ ID NO: 945348 - RNA, 21 nt, Human
gaguugaguggcugggguggg

SEQ ID NO: 945349 - RNA, 20 nt, Human
gccaaaggaaaaacaagcag

SEQ ID NO: 945350 - RNA, 21 nt, Human
ggaguugaguggcuggggugg

SEQ ID NO: 945351 - RNA, 24 nt, Human
ggaguugaguggcugggguggggu

SEQ ID NO: 945352 - RNA, 18 nt, Human
gggaggagggaagaagga

SEQ ID NO: 945353 - RNA, 22 nt, Human
guaaaccuuccuauggccaaag

SEQ ID NO: 945354 - RNA, 18 nt, Human
guaguagggcccuuauca

SEQ ID NO: 945355 - RNA, 19 nt, Human
uacacaaugguuuauuaaa

SEQ ID NO: 945356 - RNA, 21 nt, Human
uacccugaggauguagcuagu

SEQ ID NO: 945357 - RNA, 18 nt, Human
uagcagaaaggaagagga

SEQ ID NO: 945358 - RNA, 22 nt, Human
uagccaggcuagcagaaaggaa

SEQ ID NO: 945359 - RNA, 20 nt, Human
ucuaagccuaaaaaagccag

SEQ ID NO: 945360 - RNA, 22 nt, Human
ucuaagggccccugccuucuuc

SEQ ID NO: 945361 - RNA, 18 nt, Human
ucuccaguggucccaguc

SEQ ID NO: 945362 - RNA, 22 nt, Human
ugcucgagacagccagagacag

SEQ ID NO: 945363 - RNA, 21 nt, Human
uggcugggguggggugcaggc

SEQ ID NO: 945364 - RNA, 22 nt, Human
ugggguggggugcaggcaaugg

SEQ ID NO: 945365 - RNA, 20 nt, Human
uuacuccugaguuucuuccu

SEQ ID NO: 945366 - RNA, 19 nt, Human
uugaguggcuggggugggg

SEQ ID NO: 945367 - RNA, 19 nt, Human
aaguuuguuuuuauuuuuc

SEQ ID NO: 945368 - RNA, 27 nt, Human
agguacugaagaucagcgaugcaaacu

SEQ ID NO: 945369 - RNA, 18 nt, Human
auggucugaacugaguug

SEQ ID NO: 945370 - RNA, 27 nt, Human
caaacucauuagggaggagauggucug

SEQ ID NO: 945371 - RNA, 21 nt, Human
cuuagcggcagugaaucucuu

SEQ ID NO: 945372 - RNA, 18 nt, Human
gggcucuagagacugaga

SEQ ID NO: 945373 - RNA, 19 nt, Human
gugaagguacugaagauca

SEQ ID NO: 945374 - RNA, 19 nt, Human
ucugaacugaguuggagac

SEQ ID NO: 945375 - RNA, 20 nt, Human
ugcuuaaggagcaaaucagc

SEQ ID NO: 945376 - RNA, 24 nt, Human
ugguaagugccuugucccggggcg

SEQ ID NO: 945377 - RNA, 25 nt, Human
uucuagacauccauuuuucagcuuc

SEQ ID NO: 945378 - RNA, 18 nt, Human
acaaccaaccuacccccc

SEQ ID NO: 945379 - RNA, 18 nt, Human
accucccuccccacccag

SEQ ID NO: 945380 - RNA, 22 nt, Human
accucccuccccacccagugcc

SEQ ID NO: 945381 - RNA, 21 nt, Human
auuccuuuuuuuuuuuuugag

SEQ ID NO: 945382 - RNA, 22 nt, Human
caaccuaccccccaccuucaag

SEQ ID NO: 945383 - RNA, 19 nt, Human
caccucccuccccacccag

SEQ ID NO: 945384 - RNA, 23 nt, Human
caccucccuccccacccagugcc

SEQ ID NO: 945385 - RNA, 21 nt, Human
cacggcuccuccaccucccuc

SEQ ID NO: 945386 - RNA, 22 nt, Human
cacggcuccuccaccucccucc

SEQ ID NO: 945387 - RNA, 18 nt, Human
cauccugguugggauugc

SEQ ID NO: 945388 - RNA, 26 nt, Human
caucuuuauugggaagacucugaaca

SEQ ID NO: 945389 - RNA, 21 nt, Human
cccacauguggggacagaggc

SEQ ID NO: 945390 - RNA, 22 nt, Human
ccuacuggagaaggugccccca

SEQ ID NO: 945391 - RNA, 18 nt, Human
cuccaccucccuccccac

SEQ ID NO: 945392 - RNA, 20 nt, Human
cuccccacccagugccccuc

SEQ ID NO: 945393 - RNA, 18 nt, Human
cucccuccccacccagug

SEQ ID NO: 945394 - RNA, 22 nt, Human
cugaacaaccaaccuacccccc

SEQ ID NO: 945395 - RNA, 22 nt, Human
gaacaaccaaccuaccccccac

SEQ ID NO: 945396 - RNA, 20 nt, Human
gaauuccuuuuuuuuuuuuu

SEQ ID NO: 945397 - RNA, 23 nt, Human
gagcuucucgccaaggcugaaua

SEQ ID NO: 945398 - RNA, 23 nt, Human
gcacggcuccuccaccucccucc

SEQ ID NO: 945399 - RNA, 20 nt, Human
gcacgggagccaugucccuu

SEQ ID NO: 945400 - RNA, 23 nt, Human
gcccggggcugcggggcgcgggg

SEQ ID NO: 945401 - RNA, 18 nt, Human
gcggggcgcggggccggg

SEQ ID NO: 945402 - RNA, 27 nt, Human
ggaagacucugaacaaccaaccuaccc

SEQ ID NO: 945403 - RNA, 25 nt, Human
ggagcuucucgccaaggcugaauau

SEQ ID NO: 945404 - RNA, 18 nt, Human
ggcuccuccaccucccuc

SEQ ID NO: 945405 - RNA, 21 nt, Human
gggaagacucugaacaaccaa

SEQ ID NO: 945406 - RNA, 20 nt, Human
gggagggagggccaggaauc

SEQ ID NO: 945407 - RNA, 20 nt, Human
gggcccgggcggccgggagg

SEQ ID NO: 945408 - RNA, 18 nt, Human
ucccuuuuccucuccgga

SEQ ID NO: 945409 - RNA, 21 nt, Human
uccggacucaguuuccucauc

SEQ ID NO: 945410 - RNA, 21 nt, Human
uccuccaccucccuccccacc

SEQ ID NO: 945411 - RNA, 21 nt, Human
ucugaacaaccaaccuacccc

SEQ ID NO: 945412 - RNA, 22 nt, Human
ugaacaaccaaccuacccccca

SEQ ID NO: 945413 - RNA, 23 nt, Human
ugaacaaccaaccuaccccccac

SEQ ID NO: 945414 - RNA, 23 nt, Human
ugcaacggagcuucucgccaagg

SEQ ID NO: 945415 - RNA, 24 nt, Human
uuccuuuuuuuuuuuuugaggcuc

SEQ ID NO: 945416 - RNA, 27 nt, Human
aaaaagacacccaccacguaaaaaacu

SEQ ID NO: 945417 - RNA, 21 nt, Human
acuuugugcccagcuuggggc

SEQ ID NO: 945418 - RNA, 20 nt, Human
agacacccaccacguaaaaa

SEQ ID NO: 945419 - RNA, 23 nt, Human
aggaagauuuuuuuacaaaaaga

SEQ ID NO: 945420 - RNA, 19 nt, Human
aggguuucugaggguuggc

SEQ ID NO: 945421 - RNA, 19 nt, Human
caaaaagacacccaccacg

SEQ ID NO: 945422 - RNA, 19 nt, Human
caaguguagaugggagggc

SEQ ID NO: 945423 - RNA, 21 nt, Human
cagaaugcaccucagugaccc

SEQ ID NO: 945424 - RNA, 21 nt, Human
cagguaacggcgccuuugccc

SEQ ID NO: 945425 - RNA, 22 nt, Human
ccagaaugcaccucagugaccc

SEQ ID NO: 945426 - RNA, 19 nt, Human
ccccaucgucugucugucc

SEQ ID NO: 945427 - RNA, 22 nt, Human
cccgcaguggcgucccuggagc

SEQ ID NO: 945428 - RNA, 20 nt, Human
cccuggagcccagaaugcac

SEQ ID NO: 945429 - RNA, 20 nt, Human
ccucuuguucagaugggagu

SEQ ID NO: 945430 - RNA, 22 nt, Human
ccugacgcccaggccagcaggc

SEQ ID NO: 945431 - RNA, 21 nt, Human
cgcccugacgcccaggccagc

SEQ ID NO: 945432 - RNA, 24 nt, Human
cuagguuuucuggccucaggcucu

SEQ ID NO: 945433 - RNA, 24 nt, Human
cucagugacccgccaacucucaga

SEQ ID NO: 945434 - RNA, 23 nt, Human
cuccagcggcuggaugcuccagg

SEQ ID NO: 945435 - RNA, 18 nt, Human
cugcuguauggcuucuuc

SEQ ID NO: 945436 - RNA, 18 nt, Human
cugguuuauugugagggu

SEQ ID NO: 945437 - RNA, 24 nt, Human
gagcugcuguauggcuucuuccag

SEQ ID NO: 945438 - RNA, 23 nt, Human
gccucaggcucugcauaaaccuc

SEQ ID NO: 945439 - RNA, 20 nt, Human
gcuucuuccuucuuuccuuc

SEQ ID NO: 945440 - RNA, 24 nt, Human
ggaguaggaggugccucagcuucu

SEQ ID NO: 945441 - RNA, 23 nt, Human
ggcagaaagucccuagguuuucu

SEQ ID NO: 945442 - RNA, 22 nt, Human
guaaaaaacuacuuugugccca

SEQ ID NO: 945443 - RNA, 20 nt, Human
uauugugaggguuucugagg

SEQ ID NO: 945444 - RNA, 24 nt, Human
uccaaguacuuuauugaugcgccc

SEQ ID NO: 945445 - RNA, 19 nt, Human
ucccgggaucccccaggcu

SEQ ID NO: 945446 - RNA, 18 nt, Human
ucccuagguuuucuggcc

SEQ ID NO: 945447 - RNA, 19 nt, Human
ucgcuuucccgggaucccc

SEQ ID NO: 945448 - RNA, 21 nt, Human
ugaugagcugcuguauggcuu

SEQ ID NO: 945449 - RNA, 21 nt, Human
ugccucagcuucuuggggcag

SEQ ID NO: 945450 - RNA, 22 nt, Human
ugcuguauggcuucuuccagau

SEQ ID NO: 945451 - RNA, 26 nt, Human
ugcuucuuccuucuuuccuucugaaa

SEQ ID NO: 945452 - RNA, 21 nt, Human
ugcuuugagcugcuucuuucu

SEQ ID NO: 945453 - RNA, 25 nt, Human
uggaagagccgagauggagaggucu

SEQ ID NO: 945454 - RNA, 25 nt, Human
uggagcccagaaugcaccucagaac

SEQ ID NO: 945455 - RNA, 24 nt, Human
uggccagagcccagggacaaggaa

SEQ ID NO: 945456 - RNA, 21 nt, Human
ugggagggcaguagguggaga

SEQ ID NO: 945457 - RNA, 18 nt, Human
uucuuggggcagaaaguc

SEQ ID NO: 945458 - RNA, 25 nt, Human
uuugcuucuuccuucuuuccuucug

SEQ ID NO: 945459 - RNA, 25 nt, Human
uuuuuuuuuuugagcacaaaacugg

SEQ ID NO: 945460 - RNA, 23 nt, Human
uuuuuuuuuuuuuuuuuuuuggg

SEQ ID NO: 945461 - RNA, 22 nt, Human
aaaaaaaaaaacaaaacaaaaa

SEQ ID NO: 945462 - RNA, 21 nt, Human
aaaaaaaacaaaacaaaaaca

SEQ ID NO: 945463 - RNA, 23 nt, Human
aaaaacaaaacaaaaacaaaagc

SEQ ID NO: 945464 - RNA, 22 nt, Human
aaaacaaaacaaaaacaaaagc

SEQ ID NO: 945465 - RNA, 26 nt, Human
aaacaaaaaaaaaaacaaaacaaaaa

SEQ ID NO: 945466 - RNA, 18 nt, Human
aaacaaaaacaaaagcaa

SEQ ID NO: 945467 - RNA, 19 nt, Human
aaacaaauuccuaaacaaa

SEQ ID NO: 945468 - RNA, 20 nt, Human
aaacaaauuccuaaacaaaa

SEQ ID NO: 945469 - RNA, 19 nt, Human
aaacagacuaaggacccuc

SEQ ID NO: 945470 - RNA, 22 nt, Human
aacaaaacaaaaacaaaagcaa

SEQ ID NO: 945471 - RNA, 18 nt, Human
aaccaaagacagcugucc

SEQ ID NO: 945472 - RNA, 27 nt, Human
aaccacaacaucagauacaggaccuuc

SEQ ID NO: 945473 - RNA, 28 nt, Human
aaccacaacaucagauacaggaccuucu

SEQ ID NO: 945474 - RNA, 20 nt, Human
aagaaaaaaugcaaaauagc

SEQ ID NO: 945475 - RNA, 18 nt, Human
acaaaaaaaaaaacaaaa

SEQ ID NO: 945476 - RNA, 19 nt, Human
acaaaaaaaaaaacaaaac

SEQ ID NO: 945477 - RNA, 26 nt, Human
acaaaaacaaaagcaaaauaaaagcu

SEQ ID NO: 945478 - RNA, 21 nt, Human
acaaaacaaaaacaaaagcaa

SEQ ID NO: 945479 - RNA, 25 nt, Human
acaaaacaaaaacaaaagcaaaaua

SEQ ID NO: 945480 - RNA, 26 nt, Human
acaaaacaaaaacaaaagcaaaauaa

SEQ ID NO: 945481 - RNA, 21 nt, Human
acaccauuaccaucacaaccc

SEQ ID NO: 945482 - RNA, 18 nt, Human
acccguuucuucucuggc

SEQ ID NO: 945483 - RNA, 22 nt, Human
agaggcuguaaacccaugaagg

SEQ ID NO: 945484 - RNA, 18 nt, Human
agauuucugaagcuggug

SEQ ID NO: 945485 - RNA, 20 nt, Human
agauuucugaagcuggugaa

SEQ ID NO: 945486 - RNA, 18 nt, Human
aggcaauuuuauagcacu

SEQ ID NO: 945487 - RNA, 21 nt, Human
aggcaauuuuauagcacugaa

SEQ ID NO: 945488 - RNA, 23 nt, Human
auauucucauccacuucuuguug

SEQ ID NO: 945489 - RNA, 23 nt, Human
auucucaagagaagauuaacccu

SEQ ID NO: 945490 - RNA, 25 nt, Human
caaaaaaaaaaacaaaacaaaaaca

SEQ ID NO: 945491 - RNA, 20 nt, Human
caaaauaaaagcucuacuug

SEQ ID NO: 945492 - RNA, 20 nt, Human
caaaggucagauuucugaag

SEQ ID NO: 945493 - RNA, 20 nt, Human
caaauuccuaaacaaaagcc

SEQ ID NO: 945494 - RNA, 21 nt, Human
caacaaaauauucucauccac

SEQ ID NO: 945495 - RNA, 28 nt, Human
cauuuuguuguccugcauguaaguuuua

SEQ ID NO: 945496 - RNA, 24 nt, Human
ccacaccauuaccaucacaacccu

SEQ ID NO: 945497 - RNA, 19 nt, Human
ccacauuuuucuuuuaccu

SEQ ID NO: 945498 - RNA, 25 nt, Human
ccaucugaauuaaugcucucuguau

SEQ ID NO: 945499 - RNA, 20 nt, Human
cccacaccauuaccaucaca

SEQ ID NO: 945500 - RNA, 21 nt, Human
cccagcaccaacuccagcgcu

SEQ ID NO: 945501 - RNA, 20 nt, Human
ccgguguuggcagaggcugg

SEQ ID NO: 945502 - RNA, 25 nt, Human
ccuaagaaauuaacagauugucaga

SEQ ID NO: 945503 - RNA, 24 nt, Human
ccuaaugaaaugacacgugcugcu

SEQ ID NO: 945504 - RNA, 21 nt, Human
ccuccuggccccagccugucc

SEQ ID NO: 945505 - RNA, 30 nt, Human
ccucuugaaacaaauuccuaaacaaaagcu

SEQ ID NO: 945506 - RNA, 23 nt, Human
ccuggagcccccaaauguaucuu

SEQ ID NO: 945507 - RNA, 22 nt, Human
cggccgggcugagagugggggc

SEQ ID NO: 945508 - RNA, 23 nt, Human
cuacgccugcuggaaagcaaacc

SEQ ID NO: 945509 - RNA, 19 nt, Human
cucccucaucccuuguucc

SEQ ID NO: 945510 - RNA, 19 nt, Human
cucuggcucaaucaucucc

SEQ ID NO: 945511 - RNA, 19 nt, Human
cugaaacucaaaucaaguu

SEQ ID NO: 945512 - RNA, 21 nt, Human
cugcccgauuaaaaacagucc

SEQ ID NO: 945513 - RNA, 19 nt, Human
cuggccccagccuguccca

SEQ ID NO: 945514 - RNA, 19 nt, Human
cuuccaacgugggauguuc

SEQ ID NO: 945515 - RNA, 19 nt, Human
cuugggcugguaucacuuu

SEQ ID NO: 945516 - RNA, 22 nt, Human
gaaggaggcgagagggaaaagg

SEQ ID NO: 945517 - RNA, 20 nt, Human
gacccaggacaaucucgagc

SEQ ID NO: 945518 - RNA, 18 nt, Human
gagcccccaaauguaucu

SEQ ID NO: 945519 - RNA, 24 nt, Human
gauuaacccucgcgagauuuccau

SEQ ID NO: 945520 - RNA, 19 nt, Human
gccccagccugucccaggu

SEQ ID NO: 945521 - RNA, 20 nt, Human
gcgcggccgggcugagagug

SEQ ID NO: 945522 - RNA, 21 nt, Human
ggaaagcaaaccaaagacagc

SEQ ID NO: 945523 - RNA, 24 nt, Human
gggaaaacaaaaaaaaaaacaaaa

SEQ ID NO: 945524 - RNA, 18 nt, Human
gggaaaaggccauccgcg

SEQ ID NO: 945525 - RNA, 18 nt, Human
ggguuucccagcaccaac

SEQ ID NO: 945526 - RNA, 24 nt, Human
ggucagauuucugaagcuggugaa

SEQ ID NO: 945527 - RNA, 25 nt, Human
guccuggagcccccaaauguaucuu

SEQ ID NO: 945528 - RNA, 24 nt, Human
gugggggcggggcggaaggaggcg

SEQ ID NO: 945529 - RNA, 22 nt, Human
guucuugggcugguaucacuuu

SEQ ID NO: 945530 - RNA, 23 nt, Human
uaaacaaaagccuuccuggugga

SEQ ID NO: 945531 - RNA, 20 nt, Human
uaaacccaugaaggucaaca

SEQ ID NO: 945532 - RNA, 20 nt, Human
uagaagauuuuccugcuugc

SEQ ID NO: 945533 - RNA, 22 nt, Human
ucaaaucaaguuuaaagcucaa

SEQ ID NO: 945534 - RNA, 22 nt, Human
ucaaaucaaguuuaaagcucaa

SEQ ID NO: 945535 - RNA, 24 nt, Human
ucaaaucaaguuuaaagcucaagu

SEQ ID NO: 945536 - RNA, 24 nt, Human
ucaaucaucuccuucacgcucucc

SEQ ID NO: 945537 - RNA, 23 nt, Human
ucccuuguuccucuugaaacaaa

SEQ ID NO: 945538 - RNA, 20 nt, Human
uccuggccccagccuguccc

SEQ ID NO: 945539 - RNA, 21 nt, Human
ugacccaggacaaucagcgcg

SEQ ID NO: 945540 - RNA, 19 nt, Human
ugacccaggacaaucucga

SEQ ID NO: 945541 - RNA, 21 nt, Human
ugcagaaacugaaacauggua

SEQ ID NO: 945542 - RNA, 24 nt, Human
uggaaagcaaaccaaagacagcug

SEQ ID NO: 945543 - RNA, 25 nt, Human
uggaagcgucggcuuguuccggaga

SEQ ID NO: 945544 - RNA, 27 nt, Human
uggauaucuuucaucauuuuguugucc

SEQ ID NO: 945545 - RNA, 21 nt, Human
ugggggaaaacaaaaaaaaaa

SEQ ID NO: 945546 - RNA, 22 nt, Human
ugggggaaaacaaaaaaaaaaa

SEQ ID NO: 945547 - RNA, 23 nt, Human
ugggggcggggcggaaggaggcg

SEQ ID NO: 945548 - RNA, 21 nt, Human
uggugaagauugggcagcauu

SEQ ID NO: 945549 - RNA, 24 nt, Human
uguuguccuucguucguuuucugu

SEQ ID NO: 945550 - RNA, 18 nt, Human
uguuuagagacagaggcu

SEQ ID NO: 945551 - RNA, 23 nt, Human
uguuuuuuauuuaaaucuacaug

SEQ ID NO: 945552 - RNA, 18 nt, Human
uuaaaucuacaugcagaa

SEQ ID NO: 945553 - RNA, 20 nt, Human
uuaacagauugucagaaaca

SEQ ID NO: 945554 - RNA, 20 nt, Human
uucucauccacuucuuguug

SEQ ID NO: 945555 - RNA, 21 nt, Human
uucugccuccuggccccagcc

SEQ ID NO: 945556 - RNA, 20 nt, Human
uuucccagcaccaacuccag

SEQ ID NO: 945557 - RNA, 21 nt, Human
uuucucccucaucccuuguuc

SEQ ID NO: 945558 - RNA, 22 nt, Human
uuucucccucaucccuuguucc

SEQ ID NO: 945559 - RNA, 26 nt, Human
uuuucaaugauacuuacaaugggcuc

SEQ ID NO: 945560 - RNA, 26 nt, Human
aaaaagucaaaacggugucacggaug

SEQ ID NO: 945561 - RNA, 18 nt, Human
aaaagaaacaacucaccc

SEQ ID NO: 945562 - RNA, 19 nt, Human
aaacaaaaagucaaaacgg

SEQ ID NO: 945563 - RNA, 20 nt, Human
aaacaaaaagucaaaacggu

SEQ ID NO: 945564 - RNA, 21 nt, Human
aacacaaaaccucuuaaaacg

SEQ ID NO: 945565 - RNA, 24 nt, Human
aagcaaacaaacacaaaaccucuu

SEQ ID NO: 945566 - RNA, 25 nt, Human
aagcaaacaaacacaaaaccucuua

SEQ ID NO: 945567 - RNA, 26 nt, Human
aagcaaacaaacacaaaaccucuuaa

SEQ ID NO: 945568 - RNA, 23 nt, Human
acacaaaaccucuuaaaacggca

SEQ ID NO: 945569 - RNA, 21 nt, Human
agaaaaaaacaaaaagucaaa

SEQ ID NO: 945570 - RNA, 22 nt, Human
agcaaagugggcaggcguggga

SEQ ID NO: 945571 - RNA, 18 nt, Human
agcuacgaguucuauucu

SEQ ID NO: 945572 - RNA, 19 nt, Human
aggccgaagucgagagaaa

SEQ ID NO: 945573 - RNA, 21 nt, Human
aggcucccccuccccccaccc

SEQ ID NO: 945574 - RNA, 24 nt, Human
aguaaguagcagcuuccaaaguuc

SEQ ID NO: 945575 - RNA, 22 nt, Human
auucgcaggcucccccuccccc

SEQ ID NO: 945576 - RNA, 27 nt, Human
auucgcaggcucccccuccccccaccc

SEQ ID NO: 945577 - RNA, 21 nt, Human
caaacaaacacaaaaccucuu

SEQ ID NO: 945578 - RNA, 21 nt, Human
caaggcgaucagugccgcugg

SEQ ID NO: 945579 - RNA, 23 nt, Human
cacccggacacggauuugugaga

SEQ ID NO: 945580 - RNA, 20 nt, Human
cagaaaaagacuuaucaaaa

SEQ ID NO: 945581 - RNA, 19 nt, Human
cagagucugggcgcucucc

SEQ ID NO: 945582 - RNA, 23 nt, Human
cagcuuccaaaguucugcgcccu

SEQ ID NO: 945583 - RNA, 19 nt, Human
caggcaggcaaacaggcca

SEQ ID NO: 945584 - RNA, 24 nt, Human
caggcucccccuccccccaccccu

SEQ ID NO: 945585 - RNA, 24 nt, Human
ccaccugcgggugagaacaagggc

SEQ ID NO: 945586 - RNA, 21 nt, Human
cccaugagucugcugcguggc

SEQ ID NO: 945587 - RNA, 19 nt, Human
ccccagagcuuggcccacc

SEQ ID NO: 945588 - RNA, 24 nt, Human
cccccuccccccaccccuucuucc

SEQ ID NO: 945589 - RNA, 19 nt, Human
ccccuccagggcagggggg

SEQ ID NO: 945590 - RNA, 18 nt, Human
ccccugcccgcccucucc

SEQ ID NO: 945591 - RNA, 23 nt, Human
ccccugcccgcccucuccaccug

SEQ ID NO: 945592 - RNA, 19 nt, Human
ccgcccucuccaccugccc

SEQ ID NO: 945593 - RNA, 20 nt, Human
ccgcccucuccaccugcccc

SEQ ID NO: 945594 - RNA, 18 nt, Human
ccuccagggcaggggggg

SEQ ID NO: 945595 - RNA, 24 nt, Human
ccuccccccaccccuucuucccac

SEQ ID NO: 945596 - RNA, 19 nt, Human
ccugcccgcccucuccacc

SEQ ID NO: 945597 - RNA, 18 nt, Human
cgacugccaggcaugagg

SEQ ID NO: 945598 - RNA, 21 nt, Human
cgcaggcucccccucccccca

SEQ ID NO: 945599 - RNA, 25 nt, Human
cgccucccaaaagacccagugggaa

SEQ ID NO: 945600 - RNA, 27 nt, Human
cuaaucgcccucuucuugccacuuucu

SEQ ID NO: 945601 - RNA, 22 nt, Human
cuccccccaccccuucuuccca

SEQ ID NO: 945602 - RNA, 24 nt, Human
cuccccccaccccuucuucccaca

SEQ ID NO: 945603 - RNA, 21 nt, Human
cuggggcagaaaaagacuuau

SEQ ID NO: 945604 - RNA, 26 nt, Human
cugggucucuccccugcccgcccucu

SEQ ID NO: 945605 - RNA, 19 nt, Human
cugggucuuugucccaggg

SEQ ID NO: 945606 - RNA, 21 nt, Human
cuucccacaaugacaaaacug

SEQ ID NO: 945607 - RNA, 21 nt, Human
cuucgcaccgucggucucccc

SEQ ID NO: 945608 - RNA, 19 nt, Human
cuucuugccacuuucugcu

SEQ ID NO: 945609 - RNA, 22 nt, Human
gagcacuuuuguggcguaaacc

SEQ ID NO: 945610 - RNA, 21 nt, Human
gagcgguugccgcgggggcag

SEQ ID NO: 945611 - RNA, 24 nt, Human
gaggacuuucagagggcgagggag

SEQ ID NO: 945612 - RNA, 21 nt, Human
gcaggcgugggagcgguugcc

SEQ ID NO: 945613 - RNA, 18 nt, Human
gccacuuucugcugaguu

SEQ ID NO: 945614 - RNA, 20 nt, Human
gcccgcccucuccaccugcc

SEQ ID NO: 945615 - RNA, 19 nt, Human
gcccucuccaccugccccc

SEQ ID NO: 945616 - RNA, 21 nt, Human
ggccacuggggcagaaaaaga

SEQ ID NO: 945617 - RNA, 18 nt, Human
gggcacagccgggcuagc

SEQ ID NO: 945618 - RNA, 19 nt, Human
gggugagaacaagggccuu

SEQ ID NO: 945619 - RNA, 18 nt, Human
gugagaccccaugagucu

SEQ ID NO: 945620 - RNA, 22 nt, Human
guuaaauaagaaaaaaacaaaa

SEQ ID NO: 945621 - RNA, 24 nt, Human
uaaaagaaacaacucaccccguuc

SEQ ID NO: 945622 - RNA, 22 nt, Human
uaaaccgugcagucacgagcua

SEQ ID NO: 945623 - RNA, 19 nt, Human
uaagaaaaaaacaaaaagu

SEQ ID NO: 945624 - RNA, 22 nt, Human
uaagaaaaaaacaaaaagucaa

SEQ ID NO: 945625 - RNA, 21 nt, Human
uccaaguaaguagcagcuucc

SEQ ID NO: 945626 - RNA, 26 nt, Human
uccagggcagggggggagcaggagaa

SEQ ID NO: 945627 - RNA, 19 nt, Human
uccccccaccccuucuucc

SEQ ID NO: 945628 - RNA, 22 nt, Human
uccccccaccccuucuucccac

SEQ ID NO: 945629 - RNA, 18 nt, Human
ucccccuccccccacccc

SEQ ID NO: 945630 - RNA, 20 nt, Human
uccccugcccgcccucucca

SEQ ID NO: 945631 - RNA, 20 nt, Human
ucuauucugggucuuugucc

SEQ ID NO: 945632 - RNA, 21 nt, Human
ucuucuugccacuuucugcug

SEQ ID NO: 945633 - RNA, 21 nt, Human
ugggaaaugcacuaaaagaaa

SEQ ID NO: 945634 - RNA, 18 nt, Human
ugggagcgcacccggaca

SEQ ID NO: 945635 - RNA, 22 nt, Human
uucgcaggcucccccucccccc

SEQ ID NO: 945636 - RNA, 19 nt, Human
uugccgcgggggcagaggg

SEQ ID NO: 945637 - RNA, 20 nt, Human
uuuaucgccccuccccucca

SEQ ID NO: 945638 - RNA, 20 nt, Human
uuuuuuuuuuuuuuuuuaac

SEQ ID NO: 945639 - RNA, 21 nt, Human
aacccaaaaccacuuaaaaac

SEQ ID NO: 945640 - RNA, 23 nt, Human
ccaaauuggcuuugaacccaaaa

SEQ ID NO: 945641 - RNA, 19 nt, Human
cggcccggaacagcuccag

SEQ ID NO: 945642 - RNA, 19 nt, Human
ggcaaaacagaaucauaaa

SEQ ID NO: 945643 - RNA, 23 nt, Human
ucggcagcugcgcggcccggaac

SEQ ID NO: 945644 - RNA, 23 nt, Human
aaacacuuaacgucacugaaaaa

SEQ ID NO: 945645 - RNA, 20 nt, Human
aagaaccaaguuuugaguca

SEQ ID NO: 945646 - RNA, 22 nt, Human
aagcgccaguuucuucuagaac

SEQ ID NO: 945647 - RNA, 19 nt, Human
caaaucauugaagcuccuu

SEQ ID NO: 945648 - RNA, 23 nt, Human
cacacaguuacuugacaaucacc

SEQ ID NO: 945649 - RNA, 25 nt, Human
cacgcaggaaucaggcuagaucauc

SEQ ID NO: 945650 - RNA, 19 nt, Human
cccacacaguuacuugaca

SEQ ID NO: 945651 - RNA, 19 nt, Human
ccgccugcagcugacuaga

SEQ ID NO: 945652 - RNA, 19 nt, Human
ccucuguaccuucucuucc

SEQ ID NO: 945653 - RNA, 19 nt, Human
ccuugccggcauccuccuu

SEQ ID NO: 945654 - RNA, 19 nt, Human
cgcagcuccgcuacggccg

SEQ ID NO: 945655 - RNA, 23 nt, Human
cgcccuugcucccaugggcucca

SEQ ID NO: 945656 - RNA, 19 nt, Human
cggcauccuccuugccucu

SEQ ID NO: 945657 - RNA, 18 nt, Human
cucgggcucuguggagug

SEQ ID NO: 945658 - RNA, 19 nt, Human
cuguaccuucucuucccau

SEQ ID NO: 945659 - RNA, 21 nt, Human
cuugcaacacgugaggcagcc

SEQ ID NO: 945660 - RNA, 18 nt, Human
gaaggaggacggcggggc

SEQ ID NO: 945661 - RNA, 22 nt, Human
gagaaacacuuaacgucacuga

SEQ ID NO: 945662 - RNA, 21 nt, Human
gccuggcuucccgccugcagc

SEQ ID NO: 945663 - RNA, 21 nt, Human
gcuggcaccaccugcggcugc

SEQ ID NO: 945664 - RNA, 18 nt, Human
ggaauuaggaaacuggca

SEQ ID NO: 945665 - RNA, 22 nt, Human
ggagcggcccguuccucccucg

SEQ ID NO: 945666 - RNA, 23 nt, Human
guggaguggcuggcaccaccugc

SEQ ID NO: 945667 - RNA, 18 nt, Human
gugugaacgggauguacc

SEQ ID NO: 945668 - RNA, 27 nt, Human
uaacgucacugaaaaagaaauccaugc

SEQ ID NO: 945669 - RNA, 18 nt, Human
ucagucccgcuucuagcu

SEQ ID NO: 945670 - RNA, 20 nt, Human
ucccaugggcuccacccgcc

SEQ ID NO: 945671 - RNA, 19 nt, Human
ucccaugugugaacgggau

SEQ ID NO: 945672 - RNA, 25 nt, Human
ucuccagugagauggaauuaggaaa

SEQ ID NO: 945673 - RNA, 18 nt, Human
ugaaaaagaaauccaugg

SEQ ID NO: 945674 - RNA, 21 nt, Human
ugccugcccaccuggcacagc

SEQ ID NO: 945675 - RNA, 18 nt, Human
uggcggggagcggcccgu

SEQ ID NO: 945676 - RNA, 22 nt, Human
uggcucaaaacuguucuugcaa

SEQ ID NO: 945677 - RNA, 21 nt, Human
uuccucccucgcaggccuugc

SEQ ID NO: 945678 - RNA, 18 nt, Human
aaagauauauauuuucua

SEQ ID NO: 945679 - RNA, 21 nt, Human
aaagcacugaguaaaucuuuu

SEQ ID NO: 945680 - RNA, 22 nt, Human
aagagucuguuuuagacacauu

SEQ ID NO: 945681 - RNA, 22 nt, Human
aagcaggaaaggaagaagggac

SEQ ID NO: 945682 - RNA, 23 nt, Human
aagcccucccacacugcgcagcc

SEQ ID NO: 945683 - RNA, 18 nt, Human
aagugccaguggcccggc

SEQ ID NO: 945684 - RNA, 23 nt, Human
aaugccgcuaacgcuuacaaauu

SEQ ID NO: 945685 - RNA, 19 nt, Human
acaagagucuguuuuagac

SEQ ID NO: 945686 - RNA, 24 nt, Human
acacucuccaggccaggagagcua

SEQ ID NO: 945687 - RNA, 18 nt, Human
acuaaaauaaaguaccca

SEQ ID NO: 945688 - RNA, 20 nt, Human
acuaaaauaaaguacccaaa

SEQ ID NO: 945689 - RNA, 22 nt, Human
agaagcaagugccaguggcccg

SEQ ID NO: 945690 - RNA, 24 nt, Human
agacauuucucagaauccaaacaa

SEQ ID NO: 945691 - RNA, 20 nt, Human
agaguuccuucuauuuccuu

SEQ ID NO: 945692 - RNA, 22 nt, Human
agcaagugccaguggcccggcg

SEQ ID NO: 945693 - RNA, 25 nt, Human
aggaaggagaguuaggguguaauga

SEQ ID NO: 945694 - RNA, 23 nt, Human
aguugcugggcugcggucguggg

SEQ ID NO: 945695 - RNA, 20 nt, Human
augaaucagaggcuaauuuu

SEQ ID NO: 945696 - RNA, 25 nt, Human
caaccuauuagaggccagaaacaau

SEQ ID NO: 945697 - RNA, 20 nt, Human
caaguuguccaaaugcauug

SEQ ID NO: 945698 - RNA, 21 nt, Human
caauaaagucaggguuuggug

SEQ ID NO: 945699 - RNA, 21 nt, Human
caauagaucauugagagaacc

SEQ ID NO: 945700 - RNA, 24 nt, Human
cacugcgcagcccaggcuucaggu

SEQ ID NO: 945701 - RNA, 18 nt, Human
cagaaaauccucacuuca

SEQ ID NO: 945702 - RNA, 22 nt, Human
cagaaacaaugggaagcccaga

SEQ ID NO: 945703 - RNA, 21 nt, Human
cagaaucucuggugauuacau

SEQ ID NO: 945704 - RNA, 24 nt, Human
cagaugucucuaauucuacaucuu

SEQ ID NO: 945705 - RNA, 22 nt, Human
cauuagaguguaucuuauucaa

SEQ ID NO: 945706 - RNA, 22 nt, Human
ccaaccuauuagaggccagaaa

SEQ ID NO: 945707 - RNA, 19 nt, Human
ccacacugcgcagcccagg

SEQ ID NO: 945708 - RNA, 23 nt, Human
ccucacuucaaacagaaacuaga

SEQ ID NO: 945709 - RNA, 21 nt, Human
ccucugcaaguucggaauggg

SEQ ID NO: 945710 - RNA, 18 nt, Human
ccuucuauuuccuguucc

SEQ ID NO: 945711 - RNA, 23 nt, Human
cgcgaagcccucccacacugcgc

SEQ ID NO: 945712 - RNA, 18 nt, Human
cuaaaacuucccaaccua

SEQ ID NO: 945713 - RNA, 23 nt, Human
cuaauucuacaucuucuacuagc

SEQ ID NO: 945714 - RNA, 23 nt, Human
cuacgguccucugcaaguucgga

SEQ ID NO: 945715 - RNA, 25 nt, Human
cuucagguugcguuugcgaguugcu

SEQ ID NO: 945716 - RNA, 19 nt, Human
gaaaggggaacagaagggg

SEQ ID NO: 945717 - RNA, 25 nt, Human
gaaaugaauucucuguuauagugaa

SEQ ID NO: 945718 - RNA, 19 nt, Human
gaacagaaggggaagagug

SEQ ID NO: 945719 - RNA, 20 nt, Human
gaagcccucccacacugcgc

SEQ ID NO: 945720 - RNA, 18 nt, Human
gacuugaugaaaaaaggc

SEQ ID NO: 945721 - RNA, 24 nt, Human
gcaaaaacuucaaccuacuuaaag

SEQ ID NO: 945722 - RNA, 21 nt, Human
gcacugaaauugcauaaaaca

SEQ ID NO: 945723 - RNA, 24 nt, Human
gcuacgguccucugcaaguucgga

SEQ ID NO: 945724 - RNA, 24 nt, Human
gcugcggucgugggugggacucgc

SEQ ID NO: 945725 - RNA, 20 nt, Human
gggcugcggucguggguggg

SEQ ID NO: 945726 - RNA, 18 nt, Human
gugaauuuuguguccuau

SEQ ID NO: 945727 - RNA, 24 nt, Human
guuacaucaaguuguccaaaugca

SEQ ID NO: 945728 - RNA, 18 nt, Human
uaaaauaaaguacccaaa

SEQ ID NO: 945729 - RNA, 23 nt, Human
uaaaauaaaguacccaaaucuug

SEQ ID NO: 945730 - RNA, 18 nt, Human
uaaauacauacauaugua

SEQ ID NO: 945731 - RNA, 21 nt, Human
uaacauaaaccagucauuuca

SEQ ID NO: 945732 - RNA, 18 nt, Human
uagauaauucagaaaauc

SEQ ID NO: 945733 - RNA, 24 nt, Human
uagcacugaaauugcauaaaacac

SEQ ID NO: 945734 - RNA, 26 nt, Human
uagcacugaaauugcauaaaacacgc

SEQ ID NO: 945735 - RNA, 23 nt, Human
uagcucagcuucuucuccugugu

SEQ ID NO: 945736 - RNA, 20 nt, Human
uauacauauaucuaugcauu

SEQ ID NO: 945737 - RNA, 19 nt, Human
uauaucacccugacuugau

SEQ ID NO: 945738 - RNA, 28 nt, Human
uaugcauuuauaaauacauacauauggu

SEQ ID NO: 945739 - RNA, 24 nt, Human
uauuguuugagccaaggaaggaga

SEQ ID NO: 945740 - RNA, 21 nt, Human
ucaaacagaaacuagaguucc

SEQ ID NO: 945741 - RNA, 20 nt, Human
ucaagcaggaaaggaagaaa

SEQ ID NO: 945742 - RNA, 24 nt, Human
ucagaauccaaacaaagaaugcaa

SEQ ID NO: 945743 - RNA, 19 nt, Human
uccaaaauaucaaaauaag

SEQ ID NO: 945744 - RNA, 22 nt, Human
ucccaaccuauuagaggccaga

SEQ ID NO: 945745 - RNA, 20 nt, Human
uccucacuucaaacagaaac

SEQ ID NO: 945746 - RNA, 19 nt, Human
uccuucuauuuccuguucc

SEQ ID NO: 945747 - RNA, 20 nt, Human
ucuccuguguuuuuacugua

SEQ ID NO: 945748 - RNA, 22 nt, Human
ucucuaauucuacaucuucuac

SEQ ID NO: 945749 - RNA, 18 nt, Human
ugaaaggggaacagaagg

SEQ ID NO: 945750 - RNA, 19 nt, Human
ugacuugaugaaaaaaggc

SEQ ID NO: 945751 - RNA, 19 nt, Human
ugagaagaugcuugaacug

SEQ ID NO: 945752 - RNA, 23 nt, Human
ugagaagaugcuugaacugaaga

SEQ ID NO: 945753 - RNA, 18 nt, Human
ugcaaaaacuucaaccua

SEQ ID NO: 945754 - RNA, 20 nt, Human
ugcaaaaacuucaaccuacu

SEQ ID NO: 945755 - RNA, 21 nt, Human
ugccuuugcaaaaacuucaac

SEQ ID NO: 945756 - RNA, 20 nt, Human
ugcgaguugcugggcugcgg

SEQ ID NO: 945757 - RNA, 21 nt, Human
ugcuugaacugaagaacaaaa

SEQ ID NO: 945758 - RNA, 22 nt, Human
ugggaagcccagacauuucuca

SEQ ID NO: 945759 - RNA, 19 nt, Human
ugggugggacucgccgcag

SEQ ID NO: 945760 - RNA, 21 nt, Human
uuaaagcaaggugaagaugcc

SEQ ID NO: 945761 - RNA, 21 nt, Human
uuacuguaccuggcucaaagu

SEQ ID NO: 945762 - RNA, 24 nt, Human
uuccuguuccaauagcucagcuuc

SEQ ID NO: 945763 - RNA, 25 nt, Human
uuucugaauucuccuaagugaguua

SEQ ID NO: 945764 - RNA, 20 nt, Human
uuuuugguuccagucuuugg

SEQ ID NO: 945765 - RNA, 22 nt, Human
uuuuuuuuuuuuuuuuugacag

SEQ ID NO: 945766 - RNA, 27 nt, Human
uuuuuuuuuuuuuuuuuuuuuuugggg

SEQ ID NO: 945767 - RNA, 22 nt, Human
aaaaagaaagacaugauuuuaa

SEQ ID NO: 945768 - RNA, 18 nt, Human
aaaaguagccaggcaggc

SEQ ID NO: 945769 - RNA, 25 nt, Human
aaacagcgcaacguguacacucgga

SEQ ID NO: 945770 - RNA, 22 nt, Human
acagggcgcaaugcagaggcaa

SEQ ID NO: 945771 - RNA, 20 nt, Human
agcacauacucucgagcuug

SEQ ID NO: 945772 - RNA, 24 nt, Human
agcuccuucacucccuccuuguca

SEQ ID NO: 945773 - RNA, 22 nt, Human
agcuugcuguuccagacgcugg

SEQ ID NO: 945774 - RNA, 23 nt, Human
aggccuccguguuaauacagucg

SEQ ID NO: 945775 - RNA, 18 nt, Human
agguucccgguccgccuc

SEQ ID NO: 945776 - RNA, 23 nt, Human
caaacagcgcaacguguacacuc

SEQ ID NO: 945777 - RNA, 19 nt, Human
cagcacauacucucgagcu

SEQ ID NO: 945778 - RNA, 23 nt, Human
cagcgcaccguguagcgcacuuc

SEQ ID NO: 945779 - RNA, 18 nt, Human
caggagagcugagugacg

SEQ ID NO: 945780 - RNA, 20 nt, Human
caggggcacaggagagcuga

SEQ ID NO: 945781 - RNA, 24 nt, Human
ccagcgaggggcguggcucuuggg

SEQ ID NO: 945782 - RNA, 24 nt, Human
ccccgcccagcccgccuaggguga

SEQ ID NO: 945783 - RNA, 20 nt, Human
ccuggucaucugccagcggg

SEQ ID NO: 945784 - RNA, 21 nt, Human
cgacagcacagagcuacaauc

SEQ ID NO: 945785 - RNA, 20 nt, Human
cgcacagacuacacgcacac

SEQ ID NO: 945786 - RNA, 25 nt, Human
cgcacagcccuuggcaagcaccacg

SEQ ID NO: 945787 - RNA, 23 nt, Human
cgcaggggcacaggagagcugag

SEQ ID NO: 945788 - RNA, 23 nt, Human
cgccuagggugagacgcaggggc

SEQ ID NO: 945789 - RNA, 28 nt, Human
cuccgaggccgcggugguggggcaaauc

SEQ ID NO: 945790 - RNA, 25 nt, Human
cuccgcacagcccuuggcaagcacc

SEQ ID NO: 945791 - RNA, 19 nt, Human
gagugacggccgauacccc

SEQ ID NO: 945792 - RNA, 24 nt, Human
gcaaugcagaggcaacggagccac

SEQ ID NO: 945793 - RNA, 18 nt, Human
gcagccuggccugccucu

SEQ ID NO: 945794 - RNA, 21 nt, Human
gccugccccgcccagcccgcc

SEQ ID NO: 945795 - RNA, 21 nt, Human
gcgguggugggaggacuuggc

SEQ ID NO: 945796 - RNA, 20 nt, Human
gcucuggggcgccagcgagg

SEQ ID NO: 945797 - RNA, 20 nt, Human
gcucuugggguggugcagcc

SEQ ID NO: 945798 - RNA, 21 nt, Human
gggcuuguuuuuaacuuucuc

SEQ ID NO: 945799 - RNA, 19 nt, Human
guccuggucaucugccagc

SEQ ID NO: 945800 - RNA, 24 nt, Human
uaauacagucguacacucuauaac

SEQ ID NO: 945801 - RNA, 23 nt, Human
uaggggucccucucgcagagccu

SEQ ID NO: 945802 - RNA, 21 nt, Human
uaucuggccacggcccaggcc

SEQ ID NO: 945803 - RNA, 22 nt, Human
ucucgagcuugcuguuccagac

SEQ ID NO: 945804 - RNA, 24 nt, Human
ucugcagcugcugagguucccggu

SEQ ID NO: 945805 - RNA, 18 nt, Human
ugagacgcaggggcacag

SEQ ID NO: 945806 - RNA, 23 nt, Human
ugcaaacuccuaucuggccacgg

SEQ ID NO: 945807 - RNA, 18 nt, Human
ugccagcgggguuccugc

SEQ ID NO: 945808 - RNA, 21 nt, Human
uggcaagcaccacggcucugg

SEQ ID NO: 945809 - RNA, 22 nt, Human
ugggaggacuuggcgggaacua

SEQ ID NO: 945810 - RNA, 23 nt, Human
uggggcgccagcgaggggcgugg

SEQ ID NO: 945811 - RNA, 19 nt, Human
ugggguggugcagccuggc

SEQ ID NO: 945812 - RNA, 22 nt, Human
ugguaggggucccucucgcaga

SEQ ID NO: 945813 - RNA, 22 nt, Human
ugucacauuagcccaguuucuc

SEQ ID NO: 945814 - RNA, 19 nt, Human
ugucaggcaccagagacug

SEQ ID NO: 945815 - RNA, 22 nt, Human
uguggagaacaaaggaggccug

SEQ ID NO: 945816 - RNA, 24 nt, Human
uguuccagacgcugguacagcugg

SEQ ID NO: 945817 - RNA, 21 nt, Human
aaacaaaaccgcaggcagcgg

SEQ ID NO: 945818 - RNA, 22 nt, Human
aacagaaacaaaaccgcaggcc

SEQ ID NO: 945819 - RNA, 20 nt, Human
aacauggagaaaccccgucu

SEQ ID NO: 945820 - RNA, 21 nt, Human
aacauggagaaaccccgucuc

SEQ ID NO: 945821 - RNA, 24 nt, Human
aagcaaucuuccugccuuggccuc

SEQ ID NO: 945822 - RNA, 25 nt, Human
aagcaaucuuccugccuuggccucc

SEQ ID NO: 945823 - RNA, 25 nt, Human
aagcaguccuccugcuucagccucc

SEQ ID NO: 945824 - RNA, 18 nt, Human
aagcgacacagucuugca

SEQ ID NO: 945825 - RNA, 24 nt, Human
aaucgcuugaacccaggaggugga

SEQ ID NO: 945826 - RNA, 21 nt, Human
acacacagaccauucccgauc

SEQ ID NO: 945827 - RNA, 24 nt, Human
acacuggccagaauccccaguccc

SEQ ID NO: 945828 - RNA, 24 nt, Human
accccgucucuacuaaaaauacaa

SEQ ID NO: 945829 - RNA, 19 nt, Human
acuacaggugcgugccacc

SEQ ID NO: 945830 - RNA, 18 nt, Human
agacccgaagagagacag

SEQ ID NO: 945831 - RNA, 21 nt, Human
agacccgaagagagacaggcg

SEQ ID NO: 945832 - RNA, 19 nt, Human
agcugauaacacacagacc

SEQ ID NO: 945833 - RNA, 21 nt, Human
agcugggcgugguggcacaug

SEQ ID NO: 945834 - RNA, 19 nt, Human
aggcagcggguggggggag

SEQ ID NO: 945835 - RNA, 20 nt, Human
aggcagcggguggggggagc

SEQ ID NO: 945836 - RNA, 23 nt, Human
aggcaggagaaucgcuugaaccc

SEQ ID NO: 945837 - RNA, 24 nt, Human
aggcaggagaaucgcuugaaccca

SEQ ID NO: 945838 - RNA, 22 nt, Human
aggcagguggauuaccugaggg

SEQ ID NO: 945839 - RNA, 22 nt, Human
aggcagguggauuaccugaggu

SEQ ID NO: 945840 - RNA, 20 nt, Human
aggcugaggcaggagaaucg

SEQ ID NO: 945841 - RNA, 24 nt, Human
aggcugaggcaggagaaucgcuug

SEQ ID NO: 945842 - RNA, 18 nt, Human
aggcuggagugcaguggc

SEQ ID NO: 945843 - RNA, 18 nt, Human
aguaguugggacuacagg

SEQ ID NO: 945844 - RNA, 22 nt, Human
aguccuccugcuucagccuccc

SEQ ID NO: 945845 - RNA, 20 nt, Human
agugcaguggcucaaucacg

SEQ ID NO: 945846 - RNA, 23 nt, Human
agugcaguggcucaaucacggcu

SEQ ID NO: 945847 - RNA, 24 nt, Human
auugcacuccagccugggcaacaa

SEQ ID NO: 945848 - RNA, 19 nt, Human
caaaauuagcugggcgugg

SEQ ID NO: 945849 - RNA, 24 nt, Human
caacauggagaaaccccgucucua

SEQ ID NO: 945850 - RNA, 22 nt, Human
caagcaguccuccugcuucagc

SEQ ID NO: 945851 - RNA, 27 nt, Human
caagcaguccuccugcuucagccuccc

SEQ ID NO: 945852 - RNA, 24 nt, Human
caaggcagguggauuaccugaggu

SEQ ID NO: 945853 - RNA, 20 nt, Human
cacacagaccauucccgauc

SEQ ID NO: 945854 - RNA, 20 nt, Human
cacaugucuguaaucccagc

SEQ ID NO: 945855 - RNA, 24 nt, Human
caccaacauuauagcauuauuacu

SEQ ID NO: 945856 - RNA, 24 nt, Human
cacuccagccugggcaacaagagc

SEQ ID NO: 945857 - RNA, 23 nt, Human
cacuguggccgaggcuggagugc

SEQ ID NO: 945858 - RNA, 24 nt, Human
cagccugaccaacauggagaaacc

SEQ ID NO: 945859 - RNA, 19 nt, Human
cagcggguggggggagcug

SEQ ID NO: 945860 - RNA, 20 nt, Human
cagcggguggggggagcugg

SEQ ID NO: 945861 - RNA, 24 nt, Human
cagcuacucgggaggcugaggcag

SEQ ID NO: 945862 - RNA, 19 nt, Human
cagcugauaacacacagac

SEQ ID NO: 945863 - RNA, 18 nt, Human
cauugcacuccagccugg

SEQ ID NO: 945864 - RNA, 19 nt, Human
cauugcacuccagccuggg

SEQ ID NO: 945865 - RNA, 21 nt, Human
cauugcacuccagccugggca

SEQ ID NO: 945866 - RNA, 24 nt, Human
cauugcacuccagccugggcaaca

SEQ ID NO: 945867 - RNA, 20 nt, Human
ccaccacacuuggcuaauuu

SEQ ID NO: 945868 - RNA, 20 nt, Human
ccauugcacuccagccuggg

SEQ ID NO: 945869 - RNA, 21 nt, Human
ccauugcacuccagccugggc

SEQ ID NO: 945870 - RNA, 23 nt, Human
ccauugcacuccagccugggcaa

SEQ ID NO: 945871 - RNA, 24 nt, Human
ccauugcacuccagccugggcaac

SEQ ID NO: 945872 - RNA, 23 nt, Human
ccccgcugcgcccaagggcccga

SEQ ID NO: 945873 - RNA, 23 nt, Human
cccgagacccgaagagagacagg

SEQ ID NO: 945874 - RNA, 23 nt, Human
cccgaguaguugggacuacaggu

SEQ ID NO: 945875 - RNA, 24 nt, Human
cccgaguaguugggacuacaggug

SEQ ID NO: 945876 - RNA, 22 nt, Human
ccuauaauuggggggccaaggc

SEQ ID NO: 945877 - RNA, 19 nt, Human
ccuccugcuucagccuccc

SEQ ID NO: 945878 - RNA, 23 nt, Human
ccugaccaacauggagaaacccc

SEQ ID NO: 945879 - RNA, 24 nt, Human
ccugaccaacauggagaaaccccg

SEQ ID NO: 945880 - RNA, 22 nt, Human
ccugaggucgggaauucgagac

SEQ ID NO: 945881 - RNA, 18 nt, Human
ccuguguugcccaggcug

SEQ ID NO: 945882 - RNA, 20 nt, Human
ccuguguugcccaggcuggu

SEQ ID NO: 945883 - RNA, 24 nt, Human
ccuguguugcccaggcuggucucg

SEQ ID NO: 945884 - RNA, 19 nt, Human
cgcaggcagcggguggggg

SEQ ID NO: 945885 - RNA, 24 nt, Human
cgcgcgccccgcugcgcccaaggg

SEQ ID NO: 945886 - RNA, 24 nt, Human
cggggucuuccuguguugcccagg

SEQ ID NO: 945887 - RNA, 24 nt, Human
cggguggggggagcuggagguugg

SEQ ID NO: 945888 - RNA, 20 nt, Human
cucagcucaagcaguccucc

SEQ ID NO: 945889 - RNA, 19 nt, Human
cuccgucucaaaaaaaaaa

SEQ ID NO: 945890 - RNA, 25 nt, Human
cuccugggcugaagcaaucuuccug

SEQ ID NO: 945891 - RNA, 19 nt, Human
cugccuuggccucccagag

SEQ ID NO: 945892 - RNA, 22 nt, Human
cugcgcccaagggcccgagacc

SEQ ID NO: 945893 - RNA, 21 nt, Human
cugcuucagccucccgaguag

SEQ ID NO: 945894 - RNA, 23 nt, Human
cuggccagaauccccagucccca

SEQ ID NO: 945895 - RNA, 22 nt, Human
cugggcugaagcaaucuuccug

SEQ ID NO: 945896 - RNA, 21 nt, Human
cuguaaucccagcuacucggg

SEQ ID NO: 945897 - RNA, 22 nt, Human
cuuccugccuuggccucccaga

SEQ ID NO: 945898 - RNA, 23 nt, Human
gaacuccugggcugaagcaaucu

SEQ ID NO: 945899 - RNA, 21 nt, Human
gagaaaccccgucucuacuaa

SEQ ID NO: 945900 - RNA, 23 nt, Human
gagaaucgcuugaacccaggagg

SEQ ID NO: 945901 - RNA, 23 nt, Human
gagaccagccugaccaacaugga

SEQ ID NO: 945902 - RNA, 23 nt, Human
gagacggggucuuccuguguugc

SEQ ID NO: 945903 - RNA, 18 nt, Human
gauuaccugaggucggga

SEQ ID NO: 945904 - RNA, 24 nt, Human
gauuaccugaggucgggaauucga

SEQ ID NO: 945905 - RNA, 20 nt, Human
gcagcggguggggggagcug

SEQ ID NO: 945906 - RNA, 21 nt, Human
gcagcggguggggggagcugg

SEQ ID NO: 945907 - RNA, 22 nt, Human
gcaggagaaucgcuugaaccca

SEQ ID NO: 945908 - RNA, 19 nt, Human
gccauugcacuccagccug

SEQ ID NO: 945909 - RNA, 22 nt, Human
gccauugcacuccagccugggc

SEQ ID NO: 945910 - RNA, 24 nt, Human
gccauugcacuccagccugggcaa

SEQ ID NO: 945911 - RNA, 19 nt, Human
gcucaaucacggcucacug

SEQ ID NO: 945912 - RNA, 25 nt, Human
gcuggagugcaguggcucaaucacg

SEQ ID NO: 945913 - RNA, 24 nt, Human
ggagguugugccauugcacuccag

SEQ ID NO: 945914 - RNA, 21 nt, Human
ggcacaugucuguaaucccag

SEQ ID NO: 945915 - RNA, 19 nt, Human
ggcuggagugcaguggcuc

SEQ ID NO: 945916 - RNA, 23 nt, Human
ggggccaaggcagguggauuacc

SEQ ID NO: 945917 - RNA, 22 nt, Human
gggucuuccuguguugcccagg

SEQ ID NO: 945918 - RNA, 20 nt, Human
ggguggggggagcuggaggu

SEQ ID NO: 945919 - RNA, 19 nt, Human
gguaauguccaguuccuug

SEQ ID NO: 945920 - RNA, 24 nt, Human
gguggcacaugucuguaaucccag

SEQ ID NO: 945921 - RNA, 18 nt, Human
guagagacggggucuucc

SEQ ID NO: 945922 - RNA, 21 nt, Human
guagagacggggucuuccugu

SEQ ID NO: 945923 - RNA, 23 nt, Human
guggcacaugucuguaaucccag

SEQ ID NO: 945924 - RNA, 18 nt, Human
uaaaaauacaaaauuagc

SEQ ID NO: 945925 - RNA, 19 nt, Human
uaaaaauacaaaauuagcu

SEQ ID NO: 945926 - RNA, 25 nt, Human
uaaauucuacacaugaaggcaaacg

SEQ ID NO: 945927 - RNA, 25 nt, Human
uaauuuuuauguuuuuuugguagag

SEQ ID NO: 945928 - RNA, 26 nt, Human
uaauuuuuauguuuuuuugguagaga

SEQ ID NO: 945929 - RNA, 18 nt, Human
uacacaugaaggcaaacg

SEQ ID NO: 945930 - RNA, 21 nt, Human
uacaggugcgugccaccacac

SEQ ID NO: 945931 - RNA, 22 nt, Human
uagcugggcgugguggcacaug

SEQ ID NO: 945932 - RNA, 19 nt, Human
ucacuguaaccuuggacuc

SEQ ID NO: 945933 - RNA, 23 nt, Human
ucagccucccgaguaguugggac

SEQ ID NO: 945934 - RNA, 23 nt, Human
ucccgaguaguugggacuacagg

SEQ ID NO: 945935 - RNA, 24 nt, Human
uccuguguugcccaggcuggucuc

SEQ ID NO: 945936 - RNA, 24 nt, Human
ucgcuugaacccaggagguggagg

SEQ ID NO: 945937 - RNA, 24 nt, Human
ucgggaggcugaggcaggagaauc

SEQ ID NO: 945938 - RNA, 21 nt, Human
ucucgaacuccugggcugaag

SEQ ID NO: 945939 - RNA, 22 nt, Human
ucucuacuaaaaauacaaaauu

SEQ ID NO: 945940 - RNA, 21 nt, Human
ucuguaaucccagcuacucgg

SEQ ID NO: 945941 - RNA, 19 nt, Human
ucuuccuguguugcccagg

SEQ ID NO: 945942 - RNA, 23 nt, Human
ucuuccuguguugcccaggcugg

SEQ ID NO: 945943 - RNA, 24 nt, Human
ucuuccuguguugcccaggcuggu

SEQ ID NO: 945944 - RNA, 23 nt, Human
ugaagcaaucuuccugccuuggc

SEQ ID NO: 945945 - RNA, 20 nt, Human
ugacagaaauuacacuggcc

SEQ ID NO: 945946 - RNA, 20 nt, Human
ugaggcaggagaaucgcuug

SEQ ID NO: 945947 - RNA, 24 nt, Human
ugaggcaggagaaucgcuugaacc

SEQ ID NO: 945948 - RNA, 25 nt, Human
ugaggcaggagaaucgcuugaaccc

SEQ ID NO: 945949 - RNA, 24 nt, Human
ugagguaauguccaguuccuugcc

SEQ ID NO: 945950 - RNA, 19 nt, Human
ugcacuccagccugggcaa

SEQ ID NO: 945951 - RNA, 22 nt, Human
ugcacuccagccugggcaacaa

SEQ ID NO: 945952 - RNA, 24 nt, Human
ugcauaacaacaguaaauucuaca

SEQ ID NO: 945953 - RNA, 24 nt, Human
ugccauugcacuccagccugggca

SEQ ID NO: 945954 - RNA, 24 nt, Human
ugcccaggcuggucucgaacuccu

SEQ ID NO: 945955 - RNA, 28 nt, Human
ugcccaggcuggucucgaacuccugggc

SEQ ID NO: 945956 - RNA, 21 nt, Human
ugccuuggccucccagagggu

SEQ ID NO: 945957 - RNA, 20 nt, Human
ugcuucagccucccgaguag

SEQ ID NO: 945958 - RNA, 18 nt, Human
uggaauugcagaugugag

SEQ ID NO: 945959 - RNA, 21 nt, Human
uggaauugcagaugugaggua

SEQ ID NO: 945960 - RNA, 24 nt, Human
uggagugcaguggcucaaucacgg

SEQ ID NO: 945961 - RNA, 24 nt, Human
uggauuaccugaggucgggaauuc

SEQ ID NO: 945962 - RNA, 21 nt, Human
uggcacaugucuguaauccca

SEQ ID NO: 945963 - RNA, 21 nt, Human
uggccagaauccccagucccc

SEQ ID NO: 945964 - RNA, 21 nt, Human
ugggacuacaggugcgugcca

SEQ ID NO: 945965 - RNA, 22 nt, Human
ugggacuacaggugcgugccac

SEQ ID NO: 945966 - RNA, 24 nt, Human
ugggacuacaggugcgugccacca

SEQ ID NO: 945967 - RNA, 22 nt, Human
ugguagagacggggucuuccug

SEQ ID NO: 945968 - RNA, 23 nt, Human
ugguagagacggggucuuccugu

SEQ ID NO: 945969 - RNA, 24 nt, Human
ugguggcacaugucuguaauccca

SEQ ID NO: 945970 - RNA, 23 nt, Human
ugucuguaaucccagcuacucgg

SEQ ID NO: 945971 - RNA, 24 nt, Human
ugucuguaaucccagcuacucggg

SEQ ID NO: 945972 - RNA, 21 nt, Human
uguggccgaggcuggagugca

SEQ ID NO: 945973 - RNA, 22 nt, Human
uguggcucacaccuauaauugg

SEQ ID NO: 945974 - RNA, 24 nt, Human
uguguugcccaggcuggucucgaa

SEQ ID NO: 945975 - RNA, 22 nt, Human
uguugcccaggcuggucucgaa

SEQ ID NO: 945976 - RNA, 18 nt, Human
uuagcugggcgugguggc

SEQ ID NO: 945977 - RNA, 20 nt, Human
uuagcugggcgugguggcac

SEQ ID NO: 945978 - RNA, 21 nt, Human
uuagcugggcgugguggcaca

SEQ ID NO: 945979 - RNA, 24 nt, Human
uucccgaucccagaggugcauuuc

SEQ ID NO: 945980 - RNA, 23 nt, Human
uugaaaauauaauuugcauaaca

SEQ ID NO: 945981 - RNA, 24 nt, Human
uugaacccaggagguggagguugu

SEQ ID NO: 945982 - RNA, 23 nt, Human
uugguagagacggggucuuccug

SEQ ID NO: 945983 - RNA, 23 nt, Human
uugugccauugcacuccagccug

SEQ ID NO: 945984 - RNA, 23 nt, Human
uuucaggauucauucuauuucau

SEQ ID NO: 945985 - RNA, 24 nt, Human
uuuuauguuuuuuugguagagacg

SEQ ID NO: 945986 - RNA, 22 nt, Human
uuuuuaagcgacacagucuugc

SEQ ID NO: 945987 - RNA, 19 nt, Human
uuuuugguagagacggggu

SEQ ID NO: 945988 - RNA, 18 nt, Human
uuuuuugguagagacggg

SEQ ID NO: 945989 - RNA, 25 nt, Human
aacacaauuauuuacaugcaauacu

SEQ ID NO: 945990 - RNA, 18 nt, Human
accccgcgcgcgcuccgc

SEQ ID NO: 945991 - RNA, 24 nt, Human
cacuuauggcacagcuaucagaga

SEQ ID NO: 945992 - RNA, 20 nt, Human
ccaccaugcccgggcccggc

SEQ ID NO: 945993 - RNA, 23 nt, Human
ccacgcucgcggcaaccaacccc

SEQ ID NO: 945994 - RNA, 18 nt, Human
cccgcgcgcgcuccgcgg

SEQ ID NO: 945995 - RNA, 20 nt, Human
cccgcgcgcgcuccgcggug

SEQ ID NO: 945996 - RNA, 22 nt, Human
cccgggcccggcggccuucucc

SEQ ID NO: 945997 - RNA, 24 nt, Human
ccgccagugcccucgccagggacc

SEQ ID NO: 945998 - RNA, 22 nt, Human
ccgcugagcagcgccgcggucc

SEQ ID NO: 945999 - RNA, 19 nt, Human
ccuucuccggccuugcgga

SEQ ID NO: 946000 - RNA, 20 nt, Human
cgccagggaccagggaggag

SEQ ID NO: 946001 - RNA, 19 nt, Human
cgcggcaaccaaccccgcg

SEQ ID NO: 946002 - RNA, 22 nt, Human
cgcgguccacgcucccccacgc

SEQ ID NO: 946003 - RNA, 24 nt, Human
cucccccacgcucgcggcaaccaa

SEQ ID NO: 946004 - RNA, 19 nt, Human
cuccggccuugcggacccc

SEQ ID NO: 946005 - RNA, 22 nt, Human
cuccggccuugcggaccccggc

SEQ ID NO: 946006 - RNA, 20 nt, Human
gaaaagaaauguacaaaaca

SEQ ID NO: 946007 - RNA, 24 nt, Human
gcacagcuaucagagagcaucagg

SEQ ID NO: 946008 - RNA, 19 nt, Human
gccgccgccagugcccucg

SEQ ID NO: 946009 - RNA, 18 nt, Human
ggaaggcagccccaccgc

SEQ ID NO: 946010 - RNA, 18 nt, Human
ggcccggcggccuucucc

SEQ ID NO: 946011 - RNA, 23 nt, Human
gggcccggcggccuucuccggcc

SEQ ID NO: 946012 - RNA, 19 nt, Human
uauuaaacaacuguaaaca

SEQ ID NO: 946013 - RNA, 22 nt, Human
ugaaaagaaauguacaaaacac

SEQ ID NO: 946014 - RNA, 22 nt, Human
uguaaacacuucacuguaaaaa

SEQ ID NO: 946015 - RNA, 25 nt, Human
uguaaacacuucacuguaaaaaucc

SEQ ID NO: 946016 - RNA, 19 nt, Human
uguaaauagaaucuaugcu

SEQ ID NO: 946017 - RNA, 22 nt, Human
uguaaauagaaucuaugcuaca

SEQ ID NO: 946018 - RNA, 23 nt, Human
uucuccggccuugcggaccccgg

SEQ ID NO: 946019 - RNA, 24 nt, Human
aaacuauuauuuuuaaagggcuuu

SEQ ID NO: 946020 - RNA, 21 nt, Human
acccauagcugguccaggugc

SEQ ID NO: 946021 - RNA, 23 nt, Human
cacagaacuacccauagcugguc

SEQ ID NO: 946022 - RNA, 21 nt, Human
cagaacuacccauagcugguc

SEQ ID NO: 946023 - RNA, 21 nt, Human
cagagcccucaguggggcucu

SEQ ID NO: 946024 - RNA, 22 nt, Human
cauuucagacuucgaaugguca

SEQ ID NO: 946025 - RNA, 20 nt, Human
ccgcccuuuuuuuuuuuuuc

SEQ ID NO: 946026 - RNA, 24 nt, Human
ccuuuuuuuuuuuuuuuacuauaa

SEQ ID NO: 946027 - RNA, 22 nt, Human
cgcugcagagcccucagugggg

SEQ ID NO: 946028 - RNA, 23 nt, Human
cugauugaugguccgcccuuuuu

SEQ ID NO: 946029 - RNA, 27 nt, Human
gaugguccgcccuuuuuuuuuuuuuuu

SEQ ID NO: 946030 - RNA, 23 nt, Human
gggguugcugucacuccgcugca

SEQ ID NO: 946031 - RNA, 19 nt, Human
gguccgcccuuuuuuuuuu

SEQ ID NO: 946032 - RNA, 21 nt, Human
guccaggugccucgggugucc

SEQ ID NO: 946033 - RNA, 21 nt, Human
uaaaaaugaaacucccccccc

SEQ ID NO: 946034 - RNA, 22 nt, Human
uagcugguccaggugccucggg

SEQ ID NO: 946035 - RNA, 21 nt, Human
ucucuggugccucaucuuugg

SEQ ID NO: 946036 - RNA, 24 nt, Human
ucucuggugccucaucuuuggggu

SEQ ID NO: 946037 - RNA, 18 nt, Human
ugccucggguguccaggc

SEQ ID NO: 946038 - RNA, 19 nt, Human
ugcugucacuccgcugcag

SEQ ID NO: 946039 - RNA, 25 nt, Human
ugguccgcccuuuuuuuuuuuuuuu

SEQ ID NO: 946040 - RNA, 18 nt, Human
uggugccucaucuuuggg

SEQ ID NO: 946041 - RNA, 25 nt, Human
uguuccacccacagaacuacccauu

SEQ ID NO: 946042 - RNA, 23 nt, Human
uuucuugcugcgugcugauugau

SEQ ID NO: 946043 - RNA, 21 nt, Human
aaaauacauacacccauucca

SEQ ID NO: 946044 - RNA, 19 nt, Human
aaagagagagagagaggga

SEQ ID NO: 946045 - RNA, 24 nt, Human
aagaaaacaaaacauugacauuaa

SEQ ID NO: 946046 - RNA, 24 nt, Human
aagcauauggguuugaaaaucaga

SEQ ID NO: 946047 - RNA, 19 nt, Human
aauaagccagugcugaacc

SEQ ID NO: 946048 - RNA, 23 nt, Human
agagaauuuucccccuuacauca

SEQ ID NO: 946049 - RNA, 18 nt, Human
agagggagagggagacac

SEQ ID NO: 946050 - RNA, 23 nt, Human
agagggagagggagacacucgca

SEQ ID NO: 946051 - RNA, 20 nt, Human
agcccuuugcuuuaucagga

SEQ ID NO: 946052 - RNA, 18 nt, Human
aggaagaggaggaggagg

SEQ ID NO: 946053 - RNA, 18 nt, Human
aggaagaggaggaggagg

SEQ ID NO: 946054 - RNA, 28 nt, Human
aggaagaggaggaggaggaggagaggag

SEQ ID NO: 946055 - RNA, 18 nt, Human
aggaggaagaggaggagg

SEQ ID NO: 946056 - RNA, 19 nt, Human
aggaggaggaggaagagga

SEQ ID NO: 946057 - RNA, 18 nt, Human
aguggccuuggcugugga

SEQ ID NO: 946058 - RNA, 21 nt, Human
caccaagacuaacaaucaaca

SEQ ID NO: 946059 - RNA, 21 nt, Human
cagcacagauagaauuugaca

SEQ ID NO: 946060 - RNA, 22 nt, Human
cagucgccaggacuacggugac

SEQ ID NO: 946061 - RNA, 21 nt, Human
cagugguucucaaguuuuucu

SEQ ID NO: 946062 - RNA, 25 nt, Human
caugauauaauccacaauuuuagaa

SEQ ID NO: 946063 - RNA, 24 nt, Human
cauuaccauuuuuauccuucuaaa

SEQ ID NO: 946064 - RNA, 22 nt, Human
cauuuaaccuuucugugccuua

SEQ ID NO: 946065 - RNA, 21 nt, Human
cauuucacaacuccaaaaagu

SEQ ID NO: 946066 - RNA, 24 nt, Human
ccaagacuaacaaucaacaauaaa

SEQ ID NO: 946067 - RNA, 21 nt, Human
cccuuacaucauuagugguua

SEQ ID NO: 946068 - RNA, 18 nt, Human
cccuuugcuuuaucagga

SEQ ID NO: 946069 - RNA, 23 nt, Human
ccuccugcauucaauauaacaaa

SEQ ID NO: 946070 - RNA, 19 nt, Human
cuaccauaaaaugccagaa

SEQ ID NO: 946071 - RNA, 18 nt, Human
cuacccccgccuccugca

SEQ ID NO: 946072 - RNA, 19 nt, Human
cucauuauauuaaccagcc

SEQ ID NO: 946073 - RNA, 24 nt, Human
cugaaacuaagggaaaaaauucau

SEQ ID NO: 946074 - RNA, 24 nt, Human
gagcaccaaucuuuuucccacuua

SEQ ID NO: 946075 - RNA, 21 nt, Human
gagggagagggagacacucgc

SEQ ID NO: 946076 - RNA, 22 nt, Human
gagggagagggagacacucgca

SEQ ID NO: 946077 - RNA, 21 nt, Human
ggagaugguggugguggggag

SEQ ID NO: 946078 - RNA, 18 nt, Human
ggaggaggaagaggagga

SEQ ID NO: 946079 - RNA, 18 nt, Human
ggaggaggaggaagagga

SEQ ID NO: 946080 - RNA, 22 nt, Human
ggaggaggaggaggagaggagu

SEQ ID NO: 946081 - RNA, 22 nt, Human
gggaggaggaggaggaagagga

SEQ ID NO: 946082 - RNA, 23 nt, Human
ggggaggaggaggaggaagagga

SEQ ID NO: 946083 - RNA, 26 nt, Human
gggugauggagauggugguggugggg

SEQ ID NO: 946084 - RNA, 24 nt, Human
ggugguggggaggaggaggaggaa

SEQ ID NO: 946085 - RNA, 23 nt, Human
gguggugguggggaggaggagga

SEQ ID NO: 946086 - RNA, 20 nt, Human
guccaaaaaauguuaguuau

SEQ ID NO: 946087 - RNA, 20 nt, Human
gugguggggaggaggaggag

SEQ ID NO: 946088 - RNA, 18 nt, Human
guuguuggugggugaugg

SEQ ID NO: 946089 - RNA, 24 nt, Human
uaaauuuucaacuuaagcccaaua

SEQ ID NO: 946090 - RNA, 28 nt, Human
uaacucacaaaagagagagagagaggga

SEQ ID NO: 946091 - RNA, 24 nt, Human
uaagaagcaaauaauuuguuuacg

SEQ ID NO: 946092 - RNA, 22 nt, Human
uaagcuggaaaaauacgcuuua

SEQ ID NO: 946093 - RNA, 22 nt, Human
uaagcuggaaaaauacgcuuua

SEQ ID NO: 946094 - RNA, 22 nt, Human
uacacaugaaaucauacaccaa

SEQ ID NO: 946095 - RNA, 22 nt, Human
uaccauaaaaugccagaaugac

SEQ ID NO: 946096 - RNA, 22 nt, Human
uagaacguaucucaaagacuug

SEQ ID NO: 946097 - RNA, 24 nt, Human
uagaaucauuuacuuuguucuugg

SEQ ID NO: 946098 - RNA, 22 nt, Human
uagcuuaaaagugaacaugucu

SEQ ID NO: 946099 - RNA, 21 nt, Human
uauaaacuacccccgccuccu

SEQ ID NO: 946100 - RNA, 18 nt, Human
uauaagaaaacaaaacau

SEQ ID NO: 946101 - RNA, 20 nt, Human
uauaagaaaacaaaacauug

SEQ ID NO: 946102 - RNA, 20 nt, Human
uauauaagcacauacacaua

SEQ ID NO: 946103 - RNA, 21 nt, Human
uauccuucuaaaauagaauca

SEQ ID NO: 946104 - RNA, 18 nt, Human
ucauuauauuaaccagcc

SEQ ID NO: 946105 - RNA, 24 nt, Human
uccaaaaaguuaauguucagcaca

SEQ ID NO: 946106 - RNA, 23 nt, Human
ucuacaaaauacauauuuaaucc

SEQ ID NO: 946107 - RNA, 20 nt, Human
ucucuaccauaaaaugccag

SEQ ID NO: 946108 - RNA, 23 nt, Human
ugaaaucauacaccaagacuaac

SEQ ID NO: 946109 - RNA, 24 nt, Human
ugcuauaacucacaaaagagagag

SEQ ID NO: 946110 - RNA, 23 nt, Human
ugcuuuaucaggagcaccaaucu

SEQ ID NO: 946111 - RNA, 18 nt, Human
uggccuuggcuguggauu

SEQ ID NO: 946112 - RNA, 23 nt, Human
uggugguggggaggaggaggagg

SEQ ID NO: 946113 - RNA, 19 nt, Human
uguaaaaaacauagaacug

SEQ ID NO: 946114 - RNA, 18 nt, Human
ugugguguuguugguggg

SEQ ID NO: 946115 - RNA, 24 nt, Human
uguucagcacagauagaauuugac

SEQ ID NO: 946116 - RNA, 22 nt, Human
uuaaauuuucaacuuaagccca

SEQ ID NO: 946117 - RNA, 18 nt, Human
uuccauuguauucccagc

SEQ ID NO: 946118 - RNA, 20 nt, Human
uuccauuguauucccagccc

SEQ ID NO: 946119 - RNA, 23 nt, Human
uuguauucccagcccuuugcuuu

SEQ ID NO: 946120 - RNA, 22 nt, Human
uuuauccuucuaaaauagaauc

SEQ ID NO: 946121 - RNA, 23 nt, Human
uuucccacuuaaaauauuuuuca

SEQ ID NO: 946122 - RNA, 18 nt, Human
uuuuuuuuuuuuuuuuug

SEQ ID NO: 946123 - RNA, 18 nt, Human
aacaaaccucacaaauua

SEQ ID NO: 946124 - RNA, 22 nt, Human
aacccucuccugccuuuugcug

SEQ ID NO: 946125 - RNA, 24 nt, Human
aagaaccagucuccuacaaaccuc

SEQ ID NO: 946126 - RNA, 25 nt, Human
aagcaauucucccaccucagccucc

SEQ ID NO: 946127 - RNA, 19 nt, Human
aagcccaggaagccagcag

SEQ ID NO: 946128 - RNA, 18 nt, Human
aaggcacagaauggccug

SEQ ID NO: 946129 - RNA, 19 nt, Human
aaguagcugggacuacagg

SEQ ID NO: 946130 - RNA, 20 nt, Human
aaguagcugggacuacaggu

SEQ ID NO: 946131 - RNA, 18 nt, Human
aaguuaaaguuuguucca

SEQ ID NO: 946132 - RNA, 18 nt, Human
aaugcaguggugcgaucg

SEQ ID NO: 946133 - RNA, 23 nt, Human
aaugcaguggugcgaucguagcu

SEQ ID NO: 946134 - RNA, 22 nt, Human
acaaaaacccucuccugccuuu

SEQ ID NO: 946135 - RNA, 24 nt, Human
acaaagcaaagucauggaacagag

SEQ ID NO: 946136 - RNA, 24 nt, Human
acacaaagcaaagucauggaacag

SEQ ID NO: 946137 - RNA, 24 nt, Human
acacaguauaguauaggcucaaag

SEQ ID NO: 946138 - RNA, 18 nt, Human
acagaaagaaaaccuaua

SEQ ID NO: 946139 - RNA, 19 nt, Human
acagaauguguaccaauga

SEQ ID NO: 946140 - RNA, 18 nt, Human
accaccaggaagaaggga

SEQ ID NO: 946141 - RNA, 22 nt, Human
accagucuccuacaaaccucaa

SEQ ID NO: 946142 - RNA, 23 nt, Human
accucagccucccaaguagcugg

SEQ ID NO: 946143 - RNA, 23 nt, Human
accucuuccuucccucaagacag

SEQ ID NO: 946144 - RNA, 22 nt, Human
acuauguugcccaggcuggcag

SEQ ID NO: 946145 - RNA, 21 nt, Human
agaaaaucuagaguuuccaga

SEQ ID NO: 946146 - RNA, 28 nt, Human
agaaagaaaaccuauauuaaucucuaac

SEQ ID NO: 946147 - RNA, 23 nt, Human
agaacagaccucuuccuucccuc

SEQ ID NO: 946148 - RNA, 22 nt, Human
agaagaaccagucuccuacaaa

SEQ ID NO: 946149 - RNA, 18 nt, Human
agacaaggucucacugua

SEQ ID NO: 946150 - RNA, 26 nt, Human
agacagauggcaaggugaaugcucuu

SEQ ID NO: 946151 - RNA, 22 nt, Human
agcuccugggcucaagcaauuc

SEQ ID NO: 946152 - RNA, 21 nt, Human
aggaagaagggaugugcagaa

SEQ ID NO: 946153 - RNA, 22 nt, Human
agggaugugcagaacacgucug

SEQ ID NO: 946154 - RNA, 23 nt, Human
aguagcugggacuacagguguga

SEQ ID NO: 946155 - RNA, 18 nt, Human
aguauccauccuucaaga

SEQ ID NO: 946156 - RNA, 19 nt, Human
auagaacuuaaaaaaaaaa

SEQ ID NO: 946157 - RNA, 27 nt, Human
aucauaugcuuaauuugccaacuugaa

SEQ ID NO: 946158 - RNA, 25 nt, Human
caaaaaauucuccaaaaguacaaua

SEQ ID NO: 946159 - RNA, 24 nt, Human
caagaacacaaaccagauucuguc

SEQ ID NO: 946160 - RNA, 27 nt, Human
caagcaauucucccaccucagccuccc

SEQ ID NO: 946161 - RNA, 30 nt, Human
caauacagaacagaccucuuccuucccucu

SEQ ID NO: 946162 - RNA, 21 nt, Human
cacaaagcaaagucauggaac

SEQ ID NO: 946163 - RNA, 20 nt, Human
cacaacuguacagauaaaac

SEQ ID NO: 946164 - RNA, 18 nt, Human
cacuauguugcccaggcu

SEQ ID NO: 946165 - RNA, 19 nt, Human
cacuauguugcccaggcug

SEQ ID NO: 946166 - RNA, 21 nt, Human
cacuauguugcccaggcuggc

SEQ ID NO: 946167 - RNA, 22 nt, Human
cacuauguugcccaggcuggca

SEQ ID NO: 946168 - RNA, 28 nt, Human
cagaaaaaugccuacaaaaaauucucca

SEQ ID NO: 946169 - RNA, 22 nt, Human
cagaaacccagucccacugacu

SEQ ID NO: 946170 - RNA, 20 nt, Human
cagaacagaccucuuccuuc

SEQ ID NO: 946171 - RNA, 25 nt, Human
cagaacaguugcugaaacauccgaa

SEQ ID NO: 946172 - RNA, 26 nt, Human
caggaaaaucaguagcuuacuagaag

SEQ ID NO: 946173 - RNA, 19 nt, Human
caguggcgacacacaggag

SEQ ID NO: 946174 - RNA, 19 nt, Human
cauaacugccuucccaccu

SEQ ID NO: 946175 - RNA, 26 nt, Human
cauacacaguauaguauaggcucaaa

SEQ ID NO: 946176 - RNA, 23 nt, Human
cauaucuugcacaacuguacaga

SEQ ID NO: 946177 - RNA, 22 nt, Human
ccaacuugaaaacagcagcaua

SEQ ID NO: 946178 - RNA, 20 nt, Human
ccagcagcuguggccucucc

SEQ ID NO: 946179 - RNA, 22 nt, Human
cccaaguagcugggacuacagg

SEQ ID NO: 946180 - RNA, 23 nt, Human
cccaaguagcugggacuacaggu

SEQ ID NO: 946181 - RNA, 23 nt, Human
cccaccucagccucccaaguagc

SEQ ID NO: 946182 - RNA, 22 nt, Human
cccacugacuuuuaguaagucc

SEQ ID NO: 946183 - RNA, 24 nt, Human
cucaagcaauucucccaccucagc

SEQ ID NO: 946184 - RNA, 20 nt, Human
cucacaaauuacuacaaauc

SEQ ID NO: 946185 - RNA, 24 nt, Human
cucagccccuuucugucucucucc

SEQ ID NO: 946186 - RNA, 24 nt, Human
cucagccucccaaguagcugggac

SEQ ID NO: 946187 - RNA, 21 nt, Human
cucauagaacuuaaaaaaaaa

SEQ ID NO: 946188 - RNA, 18 nt, Human
cuccuggcucccugccgg

SEQ ID NO: 946189 - RNA, 21 nt, Human
cuccugggcucaagcaauucu

SEQ ID NO: 946190 - RNA, 23 nt, Human
cuccugggcucaagcaauucucc

SEQ ID NO: 946191 - RNA, 19 nt, Human
cuggugcuccaggaaauag

SEQ ID NO: 946192 - RNA, 22 nt, Human
cuuaaaaaaaaaacaaaaaccc

SEQ ID NO: 946193 - RNA, 19 nt, Human
cuuggcuacagaaacccag

SEQ ID NO: 946194 - RNA, 18 nt, Human
gacuacaggugugagcca

SEQ ID NO: 946195 - RNA, 18 nt, Human
gacuacaggugugagcca

SEQ ID NO: 946196 - RNA, 24 nt, Human
gcagaaagcccuuucuucaaacau

SEQ ID NO: 946197 - RNA, 21 nt, Human
ggaaccgugaaagucacuuuc

SEQ ID NO: 946198 - RNA, 24 nt, Human
ggacuacaggugugagccaagaug

SEQ ID NO: 946199 - RNA, 22 nt, Human
gggaugguaccaccaggaagaa

SEQ ID NO: 946200 - RNA, 22 nt, Human
ggugcauuuuauaauacagaaa

SEQ ID NO: 946201 - RNA, 24 nt, Human
gguggcaguggcgacacacaggag

SEQ ID NO: 946202 - RNA, 19 nt, Human
uaaaguuuguuccauccag

SEQ ID NO: 946203 - RNA, 21 nt, Human
uaaauauggaugccuaugaua

SEQ ID NO: 946204 - RNA, 21 nt, Human
uaaauuaugugcccauccaag

SEQ ID NO: 946205 - RNA, 25 nt, Human
uaaauuaugugcccauccccugaag

SEQ ID NO: 946206 - RNA, 21 nt, Human
uaaggcaauacagaacagacc

SEQ ID NO: 946207 - RNA, 21 nt, Human
uacaaaccucaaucaacuuaa

SEQ ID NO: 946208 - RNA, 22 nt, Human
uacaguacaaugacaagacaga

SEQ ID NO: 946209 - RNA, 22 nt, Human
uacuacaaaucugacagaaaaa

SEQ ID NO: 946210 - RNA, 21 nt, Human
uagaagaaccagucuccuaca

SEQ ID NO: 946211 - RNA, 19 nt, Human
uagaaugcaguggugcgau

SEQ ID NO: 946212 - RNA, 28 nt, Human
uagcuccugggcucaagcaauucucccu

SEQ ID NO: 946213 - RNA, 21 nt, Human
uaguuuugggauuuuaucaua

SEQ ID NO: 946214 - RNA, 20 nt, Human
uauagagauaaagucuucug

SEQ ID NO: 946215 - RNA, 22 nt, Human
uauccauccuucaagacuaaag

SEQ ID NO: 946216 - RNA, 18 nt, Human
uauguugcccaggcuggc

SEQ ID NO: 946217 - RNA, 20 nt, Human
uauguugcccaggcuggcag

SEQ ID NO: 946218 - RNA, 21 nt, Human
uauguugcccaggcuggcaga

SEQ ID NO: 946219 - RNA, 24 nt, Human
ucaacugucauaacugccuuccca

SEQ ID NO: 946220 - RNA, 29 nt, Human
ucaaugccauaaauccacauucucauaga

SEQ ID NO: 946221 - RNA, 18 nt, Human
ucagccucccaaguagcu

SEQ ID NO: 946222 - RNA, 20 nt, Human
ucagccucccaaguagcugg

SEQ ID NO: 946223 - RNA, 24 nt, Human
uccaagaacacaaaccagauucug

SEQ ID NO: 946224 - RNA, 21 nt, Human
uccauccuucaagacuaaaga

SEQ ID NO: 946225 - RNA, 23 nt, Human
ucccaaguagcugggacuacagg

SEQ ID NO: 946226 - RNA, 21 nt, Human
uccugggcucaagcaauucuc

SEQ ID NO: 946227 - RNA, 23 nt, Human
uccugggcucaagcaauucuccc

SEQ ID NO: 946228 - RNA, 24 nt, Human
uccugggcucaagcaauucuccca

SEQ ID NO: 946229 - RNA, 21 nt, Human
ucuacagaaacagucaagucu

SEQ ID NO: 946230 - RNA, 18 nt, Human
ucucacuauguugcccag

SEQ ID NO: 946231 - RNA, 19 nt, Human
ucucacuauguugcccagg

SEQ ID NO: 946232 - RNA, 23 nt, Human
ucucacuauguugcccaggcugg

SEQ ID NO: 946233 - RNA, 25 nt, Human
ucucacuauguugcccaggcuggca

SEQ ID NO: 946234 - RNA, 24 nt, Human
ucucacuguaucacuaaggcuaga

SEQ ID NO: 946235 - RNA, 20 nt, Human
ucuccaguauccauccuucc

SEQ ID NO: 946236 - RNA, 23 nt, Human
ucucccaccucagccucccaagu

SEQ ID NO: 946237 - RNA, 26 nt, Human
ucucccaccucagccucccaaguagc

SEQ ID NO: 946238 - RNA, 21 nt, Human
ucuccuggcucccugccggug

SEQ ID NO: 946239 - RNA, 25 nt, Human
ucugucucagccccuuucugucucu

SEQ ID NO: 946240 - RNA, 21 nt, Human
ucugucucucuccuggcuccc

SEQ ID NO: 946241 - RNA, 18 nt, Human
ucuuuuuuugagacaagg

SEQ ID NO: 946242 - RNA, 24 nt, Human
ugaagucucacuauguugcccagg

SEQ ID NO: 946243 - RNA, 20 nt, Human
ugacagauguggguaugaca

SEQ ID NO: 946244 - RNA, 19 nt, Human
ugagacaaggucucacugu

SEQ ID NO: 946245 - RNA, 22 nt, Human
ugcaguggugcgaucguagcuc

SEQ ID NO: 946246 - RNA, 20 nt, Human
ugcauuuuauaauacagaaa

SEQ ID NO: 946247 - RNA, 18 nt, Human
ugcuccaggaaauaggga

SEQ ID NO: 946248 - RNA, 22 nt, Human
uggaacagagggaaaaggcaca

SEQ ID NO: 946249 - RNA, 20 nt, Human
uggagauugugggagaagaa

SEQ ID NO: 946250 - RNA, 21 nt, Human
uggcaguggcgacacacagga

SEQ ID NO: 946251 - RNA, 18 nt, Human
ugggacuacaggugugag

SEQ ID NO: 946252 - RNA, 19 nt, Human
ugggacuacaggugugagc

SEQ ID NO: 946253 - RNA, 20 nt, Human
ugggacuacaggugugagcc

SEQ ID NO: 946254 - RNA, 21 nt, Human
ugggacuacaggugugagcca

SEQ ID NO: 946255 - RNA, 21 nt, Human
ugggacuacaggugugagcca

SEQ ID NO: 946256 - RNA, 27 nt, Human
ugggacuacaggugugagccaagaugu

SEQ ID NO: 946257 - RNA, 23 nt, Human
uguaccaaugaauaaaugaauac

SEQ ID NO: 946258 - RNA, 24 nt, Human
uguaucacuaaggcuagaaugcag

SEQ ID NO: 946259 - RNA, 22 nt, Human
ugucuggcuuuuugugugugug

SEQ ID NO: 946260 - RNA, 21 nt, Human
ugugcccauccaagaacacaa

SEQ ID NO: 946261 - RNA, 22 nt, Human
uuaaucucuaacaaaccucaca

SEQ ID NO: 946262 - RNA, 21 nt, Human
uugaaaacagcagcauacaga

SEQ ID NO: 946263 - RNA, 23 nt, Human
uuuauuuccacacauacacagua

SEQ ID NO: 946264 - RNA, 18 nt, Human
uuugagugugaaaccauu

SEQ ID NO: 946265 - RNA, 23 nt, Human
uuuucuuuuuuugagacaagguc

SEQ ID NO: 946266 - RNA, 26 nt, Human
uuuucuuuuuuugagacaaggucuca

SEQ ID NO: 946267 - RNA, 23 nt, Human
agaaaugggaucaagggcugauu

SEQ ID NO: 946268 - RNA, 24 nt, Human
agcuauguuuuaagagaaaauaca

SEQ ID NO: 946269 - RNA, 20 nt, Human
auuuuaaggugagccugaga

SEQ ID NO: 946270 - RNA, 21 nt, Human
cagccggggcuauucgggggc

SEQ ID NO: 946271 - RNA, 27 nt, Human
cccuucggcgcugcgcuccagccgcgc

SEQ ID NO: 946272 - RNA, 20 nt, Human
ccucuggcagcagauucuag

SEQ ID NO: 946273 - RNA, 19 nt, Human
cugcgcuccagccgcgccg

SEQ ID NO: 946274 - RNA, 23 nt, Human
cuuacugcuauuuccaacuauau

SEQ ID NO: 946275 - RNA, 23 nt, Human
gagguucaguucaaauuuuauuu

SEQ ID NO: 946276 - RNA, 24 nt, Human
gcagcagauucuaguagcugauuu

SEQ ID NO: 946277 - RNA, 22 nt, Human
gccuuggguccugcgagguggc

SEQ ID NO: 946278 - RNA, 24 nt, Human
gcgcugcgcuccagccgcgccggu

SEQ ID NO: 946279 - RNA, 19 nt, Human
ggcccggcgcgcguggccu

SEQ ID NO: 946280 - RNA, 23 nt, Human
ggccuuggguccugcgagguggc

SEQ ID NO: 946281 - RNA, 25 nt, Human
guggcagccggggcuauucgggggc

SEQ ID NO: 946282 - RNA, 21 nt, Human
uaaggugagccugagaguggc

SEQ ID NO: 946283 - RNA, 30 nt, Human
uagcagguccucggaacuuucugaagcuuu

SEQ ID NO: 946284 - RNA, 22 nt, Human
uaugcugcaagcagguaaacaa

SEQ ID NO: 946285 - RNA, 21 nt, Human
uauuauaaugggaaagcuuac

SEQ ID NO: 946286 - RNA, 19 nt, Human
ucggcgcugcgcuccagcc

SEQ ID NO: 946287 - RNA, 19 nt, Human
ucugaagcuucucccuuau

SEQ ID NO: 946288 - RNA, 20 nt, Human
ugucuaaauugcccagaaau

SEQ ID NO: 946289 - RNA, 18 nt, Human
uuaaauuacaggaaagcu

SEQ ID NO: 946290 - RNA, 23 nt, Human
uuagcagguccucggaacuuucu

SEQ ID NO: 946291 - RNA, 19 nt, Human
aacuugauagccacaugcc

SEQ ID NO: 946292 - RNA, 21 nt, Human
aaguuaaucuuaagagacuga

SEQ ID NO: 946293 - RNA, 23 nt, Human
acauucaaaaaaaugugcacaaa

SEQ ID NO: 946294 - RNA, 26 nt, Human
acugcugaaauaucauugaagaggaa

SEQ ID NO: 946295 - RNA, 18 nt, Human
agaaaaagagagcaagaa

SEQ ID NO: 946296 - RNA, 26 nt, Human
agacaggaaguagucaaaggggaccc

SEQ ID NO: 946297 - RNA, 21 nt, Human
caucgggcuagcacaaaccuc

SEQ ID NO: 946298 - RNA, 20 nt, Human
cccaaggcucucaagccacc

SEQ ID NO: 946299 - RNA, 21 nt, Human
ccccaaggcucucaagccacc

SEQ ID NO: 946300 - RNA, 19 nt, Human
ccccucccccugcuuccca

SEQ ID NO: 946301 - RNA, 23 nt, Human
ccccugccccucccccugcuucc

SEQ ID NO: 946302 - RNA, 22 nt, Human
cccugccccucccccugcuucc

SEQ ID NO: 946303 - RNA, 23 nt, Human
ccuaauuuccccaaggcucucaa

SEQ ID NO: 946304 - RNA, 21 nt, Human
cuagcacaaaccucuugaagg

SEQ ID NO: 946305 - RNA, 24 nt, Human
cugauggcuucccaccuuccuuca

SEQ ID NO: 946306 - RNA, 20 nt, Human
cugcgguaucaucuuugauu

SEQ ID NO: 946307 - RNA, 20 nt, Human
gauccuguccucuugccuuc

SEQ ID NO: 946308 - RNA, 22 nt, Human
gcccugcgguaucaucuuugau

SEQ ID NO: 946309 - RNA, 27 nt, Human
ggaaauuauaaagggcagccgguaccc

SEQ ID NO: 946310 - RNA, 24 nt, Human
gggaaacugcugaaauaucauuga

SEQ ID NO: 946311 - RNA, 21 nt, Human
gucccaauaugguagagaggg

SEQ ID NO: 946312 - RNA, 19 nt, Human
uaagugcccgguggaggca

SEQ ID NO: 946313 - RNA, 23 nt, Human
uauaaagggcagcaauaaucaag

SEQ ID NO: 946314 - RNA, 18 nt, Human
uauuuuaucuuccugcuc

SEQ ID NO: 946315 - RNA, 18 nt, Human
ucucugaauuuguccugg

SEQ ID NO: 946316 - RNA, 21 nt, Human
ucugauggcuucccaccuucc

SEQ ID NO: 946317 - RNA, 22 nt, Human
ugaaauaucauugaagaggaaa

SEQ ID NO: 946318 - RNA, 25 nt, Human
ugaagaggaaauuauaaagggcagc

SEQ ID NO: 946319 - RNA, 22 nt, Human
ugagccccugccccucccccug

SEQ ID NO: 946320 - RNA, 18 nt, Human
ugauggcuucccaccuuc

SEQ ID NO: 946321 - RNA, 19 nt, Human
ugcuaaauagagccaugua

SEQ ID NO: 946322 - RNA, 19 nt, Human
ugcugugucuugagagauc

SEQ ID NO: 946323 - RNA, 20 nt, Human
ugggagaugagccugggacg

SEQ ID NO: 946324 - RNA, 18 nt, Human
ugguagagaggggcuggg

SEQ ID NO: 946325 - RNA, 22 nt, Human
ugugcacaaaacuaggaccaag

SEQ ID NO: 946326 - RNA, 19 nt, Human
uucugagccccugccccuc

SEQ ID NO: 946327 - RNA, 21 nt, Human
uugaagggucccaauauggua

SEQ ID NO: 946328 - RNA, 18 nt, Human
uugcuaaauagagccaug

SEQ ID NO: 946329 - RNA, 21 nt, Human
uugcucuagaauauuguucug

SEQ ID NO: 946330 - RNA, 19 nt, Human
acaaagcaaugauaaaccc

SEQ ID NO: 946331 - RNA, 21 nt, Human
agcaaugauaaacccggcacg

SEQ ID NO: 946332 - RNA, 24 nt, Human
caaagcaaugauaaacccggcacg

SEQ ID NO: 946333 - RNA, 19 nt, Human
ucaguccuuacaaauaaca

SEQ ID NO: 946334 - RNA, 19 nt, Human
ugaaggguuuuguacauuu

SEQ ID NO: 946335 - RNA, 22 nt, Human
aacccccucccugggaauccac

SEQ ID NO: 946336 - RNA, 21 nt, Human
aaggaagacuugggcagggag

SEQ ID NO: 946337 - RNA, 20 nt, Human
acagcggagaggcucuugga

SEQ ID NO: 946338 - RNA, 24 nt, Human
acccaagcugagccaaugaacccc

SEQ ID NO: 946339 - RNA, 18 nt, Human
accgcccuaccgccgaga

SEQ ID NO: 946340 - RNA, 20 nt, Human
accuucacccagucuggggg

SEQ ID NO: 946341 - RNA, 18 nt, Human
agaugcggcaucugcgcc

SEQ ID NO: 946342 - RNA, 23 nt, Human
agcccccaggaccugggccaaga

SEQ ID NO: 946343 - RNA, 23 nt, Human
caaugaacccccucccugggaau

SEQ ID NO: 946344 - RNA, 20 nt, Human
cacccagucugggggacugg

SEQ ID NO: 946345 - RNA, 21 nt, Human
cacggcacucucuuggguccu

SEQ ID NO: 946346 - RNA, 21 nt, Human
cagagccagggcccaaggguc

SEQ ID NO: 946347 - RNA, 24 nt, Human
cagcagcccccaggaccugggcca

SEQ ID NO: 946348 - RNA, 22 nt, Human
cagcccccaggaccugggccaa

SEQ ID NO: 946349 - RNA, 22 nt, Human
cagcuguaccuucacccagucu

SEQ ID NO: 946350 - RNA, 18 nt, Human
cagggcccaagggucuuu

SEQ ID NO: 946351 - RNA, 28 nt, Human
cagguaacaggcucugcccccugaaagg

SEQ ID NO: 946352 - RNA, 22 nt, Human
cagugcuggacugaagaccaga

SEQ ID NO: 946353 - RNA, 18 nt, Human
ccacagaagacugggccc

SEQ ID NO: 946354 - RNA, 19 nt, Human
cccacagaagacugggccc

SEQ ID NO: 946355 - RNA, 23 nt, Human
cccaggaccugggccaagacggg

SEQ ID NO: 946356 - RNA, 23 nt, Human
ccccacagaagacugggcccccu

SEQ ID NO: 946357 - RNA, 25 nt, Human
cccccaggaccugggccaagacggg

SEQ ID NO: 946358 - RNA, 19 nt, Human
cccccucccugggaauccc

SEQ ID NO: 946359 - RNA, 25 nt, Human
ccgaaaggagccagcuguaccuuca

SEQ ID NO: 946360 - RNA, 23 nt, Human
ccgagaccugcauguccgcgucu

SEQ ID NO: 946361 - RNA, 20 nt, Human
ccucccugggaauccacacc

SEQ ID NO: 946362 - RNA, 23 nt, Human
cgucaguggggugacaaugucag

SEQ ID NO: 946363 - RNA, 20 nt, Human
cgucuugugacgggugugug

SEQ ID NO: 946364 - RNA, 18 nt, Human
cucacacugggcgacagc

SEQ ID NO: 946365 - RNA, 22 nt, Human
cucccuguggccuuggucucac

SEQ ID NO: 946366 - RNA, 18 nt, Human
cucgcaccuuccucagau

SEQ ID NO: 946367 - RNA, 20 nt, Human
cugcgcccgggggcggccgg

SEQ ID NO: 946368 - RNA, 18 nt, Human
cuggacccauuccuucug

SEQ ID NO: 946369 - RNA, 20 nt, Human
cuggugcuggguucagcagc

SEQ ID NO: 946370 - RNA, 20 nt, Human
cugugcaccccacagaagac

SEQ ID NO: 946371 - RNA, 19 nt, Human
gagccagcccuaugggugg

SEQ ID NO: 946372 - RNA, 20 nt, Human
gcccgggggcggccgggggg

SEQ ID NO: 946373 - RNA, 19 nt, Human
gccggggggcggcgcgggg

SEQ ID NO: 946374 - RNA, 19 nt, Human
gcgcggggccggcggccau

SEQ ID NO: 946375 - RNA, 22 nt, Human
ggaaagcaggugccggcgcacc

SEQ ID NO: 946376 - RNA, 24 nt, Human
ggagcaaggccagcucacgaagga

SEQ ID NO: 946377 - RNA, 21 nt, Human
ggcaaggauccacccuaugga

SEQ ID NO: 946378 - RNA, 18 nt, Human
ggcgcagcuccggaaggc

SEQ ID NO: 946379 - RNA, 22 nt, Human
gggacuagaguggcagaugggc

SEQ ID NO: 946380 - RNA, 20 nt, Human
gggauggggagcaaggccag

SEQ ID NO: 946381 - RNA, 21 nt, Human
gggcagggaggaucagggacg

SEQ ID NO: 946382 - RNA, 19 nt, Human
gggcgacagcggagaggcu

SEQ ID NO: 946383 - RNA, 22 nt, Human
gggggcggcgcggggccggcgg

SEQ ID NO: 946384 - RNA, 23 nt, Human
ggguccucuuccaggcucacacu

SEQ ID NO: 946385 - RNA, 22 nt, Human
ggugugugggaagccgcccgcc

SEQ ID NO: 946386 - RNA, 19 nt, Human
gucuugugacgggugugug

SEQ ID NO: 946387 - RNA, 24 nt, Human
gugcuggacugaagaccagagaag

SEQ ID NO: 946388 - RNA, 21 nt, Human
uaacaggcucugcccugaccc

SEQ ID NO: 946389 - RNA, 18 nt, Human
uagagauggggaugggca

SEQ ID NO: 946390 - RNA, 22 nt, Human
uaggcgcagcuccggaaggcag

SEQ ID NO: 946391 - RNA, 22 nt, Human
ucagagccagggcccaaggguc

SEQ ID NO: 946392 - RNA, 20 nt, Human
ucagaugcggcaucugcgcc

SEQ ID NO: 946393 - RNA, 18 nt, Human
ucccugggaauccacacc

SEQ ID NO: 946394 - RNA, 21 nt, Human
uccucuuccaggcucacacug

SEQ ID NO: 946395 - RNA, 23 nt, Human
uccuucugggcagggagggcuuc

SEQ ID NO: 946396 - RNA, 25 nt, Human
ucgucaguggggugacaaugucaga

SEQ ID NO: 946397 - RNA, 20 nt, Human
ucucuuggguccucuuccag

SEQ ID NO: 946398 - RNA, 22 nt, Human
ucugcgcccgggggcggccggg

SEQ ID NO: 946399 - RNA, 27 nt, Human
ucugcgcccgggggcggccggggggcg

SEQ ID NO: 946400 - RNA, 20 nt, Human
ugacaaugucagaguugucu

SEQ ID NO: 946401 - RNA, 21 nt, Human
ugacccaagcugagccaauga

SEQ ID NO: 946402 - RNA, 20 nt, Human
ugagcugcagggacuagagu

SEQ ID NO: 946403 - RNA, 18 nt, Human
ugaggcacuugggggaug

SEQ ID NO: 946404 - RNA, 23 nt, Human
ugcauucacgcaggacguugagc

SEQ ID NO: 946405 - RNA, 18 nt, Human
ugcuggagggagggaggc

SEQ ID NO: 946406 - RNA, 22 nt, Human
uggacccauuccuucugggcag

SEQ ID NO: 946407 - RNA, 19 nt, Human
ugugcaucuugcuuccggg

SEQ ID NO: 946408 - RNA, 19 nt, Human
uuucucagagccagggccc

SEQ ID NO: 946409 - RNA, 21 nt, Human
aaacccccaggccucacccag

SEQ ID NO: 946410 - RNA, 18 nt, Human
aaccagcaggugaggagg

SEQ ID NO: 946411 - RNA, 18 nt, Human
acagaaacacuaaaaacg

SEQ ID NO: 946412 - RNA, 19 nt, Human
acucccgagcacccacacc

SEQ ID NO: 946413 - RNA, 21 nt, Human
agacagaaacacuaaaaacga

SEQ ID NO: 946414 - RNA, 23 nt, Human
agacagaaacacuaaaaacgauc

SEQ ID NO: 946415 - RNA, 18 nt, Human
aggaagcccccaaccagc

SEQ ID NO: 946416 - RNA, 22 nt, Human
auccuguucaccuucacacuca

SEQ ID NO: 946417 - RNA, 24 nt, Human
augagcuuccaagaccaagagcac

SEQ ID NO: 946418 - RNA, 18 nt, Human
caccagcaaacaguggca

SEQ ID NO: 946419 - RNA, 22 nt, Human
cacgcuuacggggccaaggugg

SEQ ID NO: 946420 - RNA, 23 nt, Human
cacggagaccaccagcaaacagu

SEQ ID NO: 946421 - RNA, 20 nt, Human
cacugccacguaucauuccu

SEQ ID NO: 946422 - RNA, 24 nt, Human
cacugccacguaucauuccugcaa

SEQ ID NO: 946423 - RNA, 23 nt, Human
cagcgggcuucacuuccucacuc

SEQ ID NO: 946424 - RNA, 19 nt, Human
caguggcagccgggggccc

SEQ ID NO: 946425 - RNA, 25 nt, Human
cauccuguucaccuucacacucacu

SEQ ID NO: 946426 - RNA, 18 nt, Human
ccacacgagccccuccuu

SEQ ID NO: 946427 - RNA, 18 nt, Human
ccccaggccucacccagg

SEQ ID NO: 946428 - RNA, 23 nt, Human
cccccaaccagcaggugaggagg

SEQ ID NO: 946429 - RNA, 25 nt, Human
cccccaggccucacccaggguguuc

SEQ ID NO: 946430 - RNA, 25 nt, Human
cccgcggucagagagcgcugcugac

SEQ ID NO: 946431 - RNA, 21 nt, Human
cccgugacacccgcggucaga

SEQ ID NO: 946432 - RNA, 22 nt, Human
ccgagcacccacaccaccugcu

SEQ ID NO: 946433 - RNA, 19 nt, Human
ccucucaggacaccaggau

SEQ ID NO: 946434 - RNA, 21 nt, Human
ccugacagacacuggccuggg

SEQ ID NO: 946435 - RNA, 26 nt, Human
ccugcaagagccucucaggacaccag

SEQ ID NO: 946436 - RNA, 19 nt, Human
ccuggggccacacgagccc

SEQ ID NO: 946437 - RNA, 18 nt, Human
cggucagagagcgcugcu

SEQ ID NO: 946438 - RNA, 21 nt, Human
cucccgagcacccacaccacc

SEQ ID NO: 946439 - RNA, 21 nt, Human
cugccaggccauccuguucac

SEQ ID NO: 946440 - RNA, 22 nt, Human
cugcuuccuuugagaaaugccc

SEQ ID NO: 946441 - RNA, 18 nt, Human
gaagcccccaaccagcag

SEQ ID NO: 946442 - RNA, 22 nt, Human
gagcagaccacgcuuacggggc

SEQ ID NO: 946443 - RNA, 24 nt, Human
gccauccuguucaccuucacacuc

SEQ ID NO: 946444 - RNA, 21 nt, Human
gccuggggccacacgagcccc

SEQ ID NO: 946445 - RNA, 18 nt, Human
ggaagcccccaaccagca

SEQ ID NO: 946446 - RNA, 20 nt, Human
uccacucccgagcacccaca

SEQ ID NO: 946447 - RNA, 19 nt, Human
ugacgucaccuccacuccc

SEQ ID NO: 946448 - RNA, 23 nt, Human
ugacuggaagcugagcagaccac

SEQ ID NO: 946449 - RNA, 21 nt, Human
ugagacagaaacacuaaaaac

SEQ ID NO: 946450 - RNA, 23 nt, Human
uggaagcugagcagaccacgcuu

SEQ ID NO: 946451 - RNA, 19 nt, Human
uucacacucacugaauccc

SEQ ID NO: 946452 - RNA, 26 nt, Human
uuuucggaaacccccaggccucaccc

SEQ ID NO: 946453 - RNA, 23 nt, Human
aaaaggcagcguuagaauaucau

SEQ ID NO: 946454 - RNA, 27 nt, Human
acucuauagaacauucaugcuagaaag

SEQ ID NO: 946455 - RNA, 22 nt, Human
agaaacacaauucauauaacaa

SEQ ID NO: 946456 - RNA, 22 nt, Human
aggaaaaaacaucucaaaauau

SEQ ID NO: 946457 - RNA, 22 nt, Human
aucaaacccaccacuuucaaua

SEQ ID NO: 946458 - RNA, 18 nt, Human
caagagcaaaugaagaaa

SEQ ID NO: 946459 - RNA, 24 nt, Human
caccaugcuaaauuugaucuccuc

SEQ ID NO: 946460 - RNA, 22 nt, Human
ccaugcuaaauuugaucuccuc

SEQ ID NO: 946461 - RNA, 19 nt, Human
cucuaaaaugagaagagaa

SEQ ID NO: 946462 - RNA, 21 nt, Human
gaugcaagagcaaaugaagaa

SEQ ID NO: 946463 - RNA, 22 nt, Human
gaugcaagagcaaaugaagaaa

SEQ ID NO: 946464 - RNA, 24 nt, Human
ggaaaaaacaucucaaaauauaga

SEQ ID NO: 946465 - RNA, 22 nt, Human
guaaggaaaaaacaucucaaaa

SEQ ID NO: 946466 - RNA, 21 nt, Human
uaaacaaugaucauuuuuuuc

SEQ ID NO: 946467 - RNA, 20 nt, Human
uaaggaaaaaacaucucaaa

SEQ ID NO: 946468 - RNA, 23 nt, Human
uagaacauucaugcuagaaacac

SEQ ID NO: 946469 - RNA, 24 nt, Human
uagaauaucaucaagcuucaaaua

SEQ ID NO: 946470 - RNA, 22 nt, Human
uagcaauguagaugcaagagca

SEQ ID NO: 946471 - RNA, 22 nt, Human
uauagaacauucaugcuagaaa

SEQ ID NO: 946472 - RNA, 25 nt, Human
ucugaagaacaccuuuuugauuuuc

SEQ ID NO: 946473 - RNA, 26 nt, Human
ucugaagaacaccuuuuugauuuucu

SEQ ID NO: 946474 - RNA, 18 nt, Human
ugagaagagaaaaggcag

SEQ ID NO: 946475 - RNA, 23 nt, Human
uguaaggaaaaaacaucucaaaa

SEQ ID NO: 946476 - RNA, 19 nt, Human
uguuauaagaauucuagau

SEQ ID NO: 946477 - RNA, 23 nt, Human
uucccagaguaaaaggauuuuac

SEQ ID NO: 946478 - RNA, 20 nt, Human
uuuaaacuuuugaguuguag

SEQ ID NO: 946479 - RNA, 23 nt, Human
uuuauuuguacuguguuucugau

SEQ ID NO: 946480 - RNA, 21 nt, Human
uuucccagaguaaaaggauuu

SEQ ID NO: 946481 - RNA, 19 nt, Human
uuuguacuguguuucugau

SEQ ID NO: 946482 - RNA, 21 nt, Human
uuuuauagauaaaaugucucu

SEQ ID NO: 946483 - RNA, 19 nt, Human
uuuuguggguuucuaaaua

SEQ ID NO: 946484 - RNA, 24 nt, Human
uuuuguggguuucuaaauaaaaag

SEQ ID NO: 946485 - RNA, 21 nt, Human
aaaacuggagagccagucuuu

SEQ ID NO: 946486 - RNA, 18 nt, Human
aaccagaggaauccccau

SEQ ID NO: 946487 - RNA, 24 nt, Human
acagagauaaauagcucuuuuuca

SEQ ID NO: 946488 - RNA, 21 nt, Human
auaaaaauggagacaaagacc

SEQ ID NO: 946489 - RNA, 26 nt, Human
auuuuacuuugcacaugcagucucug

SEQ ID NO: 946490 - RNA, 18 nt, Human
cauaggacuacaaauaca

SEQ ID NO: 946491 - RNA, 20 nt, Human
cauauugcacaaaaguccuu

SEQ ID NO: 946492 - RNA, 18 nt, Human
ccucuagcggagccgguu

SEQ ID NO: 946493 - RNA, 19 nt, Human
cgccuggaggugugggcag

SEQ ID NO: 946494 - RNA, 19 nt, Human
cggcucgguccucuagcgg

SEQ ID NO: 946495 - RNA, 23 nt, Human
cuccuguaaugaaaaugccacag

SEQ ID NO: 946496 - RNA, 22 nt, Human
cuggauuaaauauuacaacaac

SEQ ID NO: 946497 - RNA, 31 nt, Human
cuucuucccuuuuuuuuuuuuuuuguuuuuu

SEQ ID NO: 946498 - RNA, 19 nt, Human
gucuuagauuauguuaaaa

SEQ ID NO: 946499 - RNA, 26 nt, Human
uaaacucuccuguaaugaaaaugcca

SEQ ID NO: 946500 - RNA, 19 nt, Human
uacaguauuggacaucuga

SEQ ID NO: 946501 - RNA, 18 nt, Human
uacuucaggacccaguug

SEQ ID NO: 946502 - RNA, 18 nt, Human
uacuucaggacccaguug

SEQ ID NO: 946503 - RNA, 18 nt, Human
uagaauguugaauaccau

SEQ ID NO: 946504 - RNA, 24 nt, Human
uauuucccaucucagcccuccaaa

SEQ ID NO: 946505 - RNA, 21 nt, Human
ucacaguagccugaggaaugc

SEQ ID NO: 946506 - RNA, 18 nt, Human
ucagcacccagcgggcga

SEQ ID NO: 946507 - RNA, 21 nt, Human
uccaaacuuaaccauggaaac

SEQ ID NO: 946508 - RNA, 21 nt, Human
ucuggagauacacgaggagac

SEQ ID NO: 946509 - RNA, 22 nt, Human
ucugucuuagauuauguuaaaa

SEQ ID NO: 946510 - RNA, 20 nt, Human
ugaggaaugcuaaacuguag

SEQ ID NO: 946511 - RNA, 26 nt, Human
ugauaaaaauggagacaaagaccaua

SEQ ID NO: 946512 - RNA, 21 nt, Human
ugauuugucauugagauagga

SEQ ID NO: 946513 - RNA, 22 nt, Human
ugcacaugcagucucuggagau

SEQ ID NO: 946514 - RNA, 21 nt, Human
uguacagaaauauuggcuuca

SEQ ID NO: 946515 - RNA, 18 nt, Human
ugucauugagauaggaua

SEQ ID NO: 946516 - RNA, 24 nt, Human
uuaaaaaugcagaaccauggccga

SEQ ID NO: 946517 - RNA, 19 nt, Human
uucccaucucagcccucca

SEQ ID NO: 946518 - RNA, 19 nt, Human
uuggacaucugauauauac

SEQ ID NO: 946519 - RNA, 24 nt, Human
uuuuuuuuuuuguuuuuugcuuuu

SEQ ID NO: 946520 - RNA, 22 nt, Human
uuuuuuuuuuuuuaaaacugga

SEQ ID NO: 946521 - RNA, 29 nt, Human
uuuuuuuuuuuuuuguuuuuugcuuuuag

SEQ ID NO: 946522 - RNA, 33 nt, Human
aaaaaaagagaacauucauuaugaaaaaugcug

SEQ ID NO: 946523 - RNA, 22 nt, Human
aaaaaagaagucaagagcugcg

SEQ ID NO: 946524 - RNA, 19 nt, Human
aaaaagaagucaagagcug

SEQ ID NO: 946525 - RNA, 22 nt, Human
aaacaugcgauauguuagaagc

SEQ ID NO: 946526 - RNA, 24 nt, Human
aaauaucucuuuaaaacagugacc

SEQ ID NO: 946527 - RNA, 19 nt, Human
aagcagauguauaaguuug

SEQ ID NO: 946528 - RNA, 21 nt, Human
aaguuccguagagaugaaugu

SEQ ID NO: 946529 - RNA, 23 nt, Human
aaucgcuagggccuuagacuccu

SEQ ID NO: 946530 - RNA, 23 nt, Human
augaaccaauguggcagaugccc

SEQ ID NO: 946531 - RNA, 21 nt, Human
caaagccuaaugcauggcauu

SEQ ID NO: 946532 - RNA, 24 nt, Human
caacagaaguacuuuguauaacug

SEQ ID NO: 946533 - RNA, 25 nt, Human
caauucuaaagggccaaacaugaga

SEQ ID NO: 946534 - RNA, 28 nt, Human
cagaccauguaacacacauuaaaaauua

SEQ ID NO: 946535 - RNA, 18 nt, Human
cauauacauaguagaaua

SEQ ID NO: 946536 - RNA, 21 nt, Human
ccaaaucuuaacauaaacaug

SEQ ID NO: 946537 - RNA, 23 nt, Human
ccaauucuaaagggccaaacaug

SEQ ID NO: 946538 - RNA, 23 nt, Human
cuaauuuauuacauccuucccua

SEQ ID NO: 946539 - RNA, 30 nt, Human
cuaccuggagauaugcaaaaucuggucauu

SEQ ID NO: 946540 - RNA, 23 nt, Human
cuggcagauacuguauguauuuu

SEQ ID NO: 946541 - RNA, 22 nt, Human
cuuaacaagaauauaaucaaug

SEQ ID NO: 946542 - RNA, 24 nt, Human
gaaccaauguggcagaugcccaaa

SEQ ID NO: 946543 - RNA, 20 nt, Human
gacuccuugcuucuuccccu

SEQ ID NO: 946544 - RNA, 21 nt, Human
gcagauacuguauguauuuug

SEQ ID NO: 946545 - RNA, 19 nt, Human
ggccaaacaugagacgucc

SEQ ID NO: 946546 - RNA, 22 nt, Human
gucauaaaaaugagcaaaauca

SEQ ID NO: 946547 - RNA, 27 nt, Human
uaaaaaguuaucacaacucuuacagua

SEQ ID NO: 946548 - RNA, 25 nt, Human
uaaaaaugagcaaaaucaauuuucu

SEQ ID NO: 946549 - RNA, 25 nt, Human
uaauacuauuccauacauauacaua

SEQ ID NO: 946550 - RNA, 23 nt, Human
uaaucaaugagauaacacuuucu

SEQ ID NO: 946551 - RNA, 21 nt, Human
uaauuuauuacauccuucccu

SEQ ID NO: 946552 - RNA, 19 nt, Human
uacaaaaaagaagucaaga

SEQ ID NO: 946553 - RNA, 25 nt, Human
uacauaguagaauaaaaaguuauca

SEQ ID NO: 946554 - RNA, 23 nt, Human
uaccaaaaaaaagagaacauuca

SEQ ID NO: 946555 - RNA, 20 nt, Human
uaguagcaaguuuucuuagc

SEQ ID NO: 946556 - RNA, 20 nt, Human
uauuaccaaaaaaaagagaa

SEQ ID NO: 946557 - RNA, 26 nt, Human
uauuacuacaaaugaucuaaaguuuu

SEQ ID NO: 946558 - RNA, 23 nt, Human
ucagagcuuuuauugucagauaa

SEQ ID NO: 946559 - RNA, 22 nt, Human
uccugggaaaaaccuucucugg

SEQ ID NO: 946560 - RNA, 23 nt, Human
ucugauuauaaauggaaugacau

SEQ ID NO: 946561 - RNA, 22 nt, Human
ugaaccaauguggcagaugccc

SEQ ID NO: 946562 - RNA, 24 nt, Human
ugaaugugucuucacaaaaguucc

SEQ ID NO: 946563 - RNA, 21 nt, Human
ugcgauauguuagaagcagau

SEQ ID NO: 946564 - RNA, 19 nt, Human
ugcuucuuccccucaucuc

SEQ ID NO: 946565 - RNA, 19 nt, Human
ugggaaaaaccuucucugg

SEQ ID NO: 946566 - RNA, 21 nt, Human
uguggcagaugcccaaaucgc

SEQ ID NO: 946567 - RNA, 23 nt, Human
uuccuguugcuggcuuauaacua

SEQ ID NO: 946568 - RNA, 20 nt, Human
uugcuggcuuauaacuagag

SEQ ID NO: 946569 - RNA, 20 nt, Human
uuuacagaauauacuggcag

SEQ ID NO: 946570 - RNA, 25 nt, Human
uuuauauaacacauauuaugcugcu

SEQ ID NO: 946571 - RNA, 19 nt, Human
uuucugaauaugaaccaau

SEQ ID NO: 946572 - RNA, 24 nt, Human
uuuuguacugccuuuugauuaaga

SEQ ID NO: 946573 - RNA, 23 nt, Human
acacagcacuccccacugggucu

SEQ ID NO: 946574 - RNA, 20 nt, Human
acccucaccacagccugggg

SEQ ID NO: 946575 - RNA, 19 nt, Human
agacccaggagacacagca

SEQ ID NO: 946576 - RNA, 21 nt, Human
agccaggagcacugggccagc

SEQ ID NO: 946577 - RNA, 24 nt, Human
aggcggggugggggcaggaggggc

SEQ ID NO: 946578 - RNA, 25 nt, Human
aggcggggugggggcaggaggggcc

SEQ ID NO: 946579 - RNA, 18 nt, Human
aggggccagguugggucu

SEQ ID NO: 946580 - RNA, 23 nt, Human
aggggccagguugggucugggcc

SEQ ID NO: 946581 - RNA, 21 nt, Human
caagagcccccagccaggagc

SEQ ID NO: 946582 - RNA, 22 nt, Human
cagcagcagggacucaagucag

SEQ ID NO: 946583 - RNA, 20 nt, Human
cagcauggcuccugggggga

SEQ ID NO: 946584 - RNA, 18 nt, Human
cagccaggagcacugggc

SEQ ID NO: 946585 - RNA, 22 nt, Human
caggagacacagcacuccccac

SEQ ID NO: 946586 - RNA, 18 nt, Human
caggagcccccgaucggc

SEQ ID NO: 946587 - RNA, 24 nt, Human
caggagggacucuggagggcagua

SEQ ID NO: 946588 - RNA, 22 nt, Human
caggcaugugcccugacagccc

SEQ ID NO: 946589 - RNA, 18 nt, Human
caguagcgccaggagccc

SEQ ID NO: 946590 - RNA, 23 nt, Human
ccaacaccugaagggaacccaga

SEQ ID NO: 946591 - RNA, 22 nt, Human
cccacugggucuaggaccgucu

SEQ ID NO: 946592 - RNA, 20 nt, Human
ccccacccuggcugccgaaa

SEQ ID NO: 946593 - RNA, 24 nt, Human
cccgcccugcaccuggaggcccgc

SEQ ID NO: 946594 - RNA, 19 nt, Human
cccugccgacaccaacacc

SEQ ID NO: 946595 - RNA, 22 nt, Human
ccgggggcgcagcgccuccccu

SEQ ID NO: 946596 - RNA, 21 nt, Human
ccugacagcccugccgacacc

SEQ ID NO: 946597 - RNA, 22 nt, Human
ccuggaguuccugcuuggccac

SEQ ID NO: 946598 - RNA, 22 nt, Human
cgacaccaacaccugaagggaa

SEQ ID NO: 946599 - RNA, 19 nt, Human
cggggugggggcaggaggg

SEQ ID NO: 946600 - RNA, 22 nt, Human
cucucagacccucaccacagcc

SEQ ID NO: 946601 - RNA, 21 nt, Human
cugcaccuggaggcccgcccu

SEQ ID NO: 946602 - RNA, 19 nt, Human
cugcaccuggaguuccugc

SEQ ID NO: 946603 - RNA, 22 nt, Human
cugccgaaaggggggcgugcac

SEQ ID NO: 946604 - RNA, 22 nt, Human
cugggccccacccuggcugccg

SEQ ID NO: 946605 - RNA, 22 nt, Human
cuguuccccaccaaaggcuugu

SEQ ID NO: 946606 - RNA, 21 nt, Human
gaggggccagguugggucugg

SEQ ID NO: 946607 - RNA, 21 nt, Human
gaguucuguguuugauucugg

SEQ ID NO: 946608 - RNA, 22 nt, Human
gauucugggguacagacagcuc

SEQ ID NO: 946609 - RNA, 18 nt, Human
gcagacccaggagacaca

SEQ ID NO: 946610 - RNA, 21 nt, Human
gcagacccaggagacacagca

SEQ ID NO: 946611 - RNA, 20 nt, Human
gcgcagcgccuccccuacag

SEQ ID NO: 946612 - RNA, 24 nt, Human
gcggcggggucugugcugcugggg

SEQ ID NO: 946613 - RNA, 20 nt, Human
gcggggugggggcaggaggg

SEQ ID NO: 946614 - RNA, 23 nt, Human
gcggggugggggcaggaggggcc

SEQ ID NO: 946615 - RNA, 20 nt, Human
ggacucaagucagacggcag

SEQ ID NO: 946616 - RNA, 26 nt, Human
ggagacacagcacuccccacuggguc

SEQ ID NO: 946617 - RNA, 19 nt, Human
ggagggacucuggagggca

SEQ ID NO: 946618 - RNA, 19 nt, Human
ggcaggagggacucuggag

SEQ ID NO: 946619 - RNA, 21 nt, Human
gggcaggaggggccagguugg

SEQ ID NO: 946620 - RNA, 20 nt, Human
gggccccacccuggcugccg

SEQ ID NO: 946621 - RNA, 19 nt, Human
gggggcaggaggggccagg

SEQ ID NO: 946622 - RNA, 21 nt, Human
gggggucagcgacccaaaggc

SEQ ID NO: 946623 - RNA, 21 nt, Human
ggggugggggcaggaggggcc

SEQ ID NO: 946624 - RNA, 21 nt, Human
gggucugggccccacccuggc

SEQ ID NO: 946625 - RNA, 22 nt, Human
ggugggggcaggaggggccagg

SEQ ID NO: 946626 - RNA, 23 nt, Human
gguucuguuccccaccaaaggcu

SEQ ID NO: 946627 - RNA, 24 nt, Human
uaaaacagaaauuggguccugcca

SEQ ID NO: 946628 - RNA, 23 nt, Human
uacacgaugcggagguucuguuc

SEQ ID NO: 946629 - RNA, 23 nt, Human
uccagcauggcuccuggggggac

SEQ ID NO: 946630 - RNA, 22 nt, Human
ugaacauauaaaacagaaauug

SEQ ID NO: 946631 - RNA, 19 nt, Human
ugcacugcagcagcaggga

SEQ ID NO: 946632 - RNA, 19 nt, Human
ugcccugacagcccugccg

SEQ ID NO: 946633 - RNA, 23 nt, Human
uggccacgggugggcagacccag

SEQ ID NO: 946634 - RNA, 20 nt, Human
uggcuccuggggggaccccu

SEQ ID NO: 946635 - RNA, 20 nt, Human
ugggccccacccuggcugcc

SEQ ID NO: 946636 - RNA, 19 nt, Human
uggggaccccagccggcca

SEQ ID NO: 946637 - RNA, 25 nt, Human
uggggaggaggccccagcgaggcuc

SEQ ID NO: 946638 - RNA, 21 nt, Human
ugggggcaggaggggccaggu

SEQ ID NO: 946639 - RNA, 19 nt, Human
ugucuggggcccauuggcu

SEQ ID NO: 946640 - RNA, 20 nt, Human
ugucuggggcccauuggcug

SEQ ID NO: 946641 - RNA, 20 nt, Human
uguuccccaccaaaggcuug

SEQ ID NO: 946642 - RNA, 20 nt, Human
uugggucugggccccacccu

SEQ ID NO: 946643 - RNA, 25 nt, Human
uuuccagguuuaaaguucaugaaca

SEQ ID NO: 946644 - RNA, 23 nt, Human
uuuuuuuuuuuuuuuuuugcuuu

SEQ ID NO: 946645 - RNA, 25 nt, Human
uuuuuuuuuuuuuuuuuugcuuuaa

SEQ ID NO: 946646 - RNA, 20 nt, Human
uuuuuuuuuuuuuuuuuugg

SEQ ID NO: 946647 - RNA, 24 nt, Human
aaaaguaucacuaaagguggcugg

SEQ ID NO: 946648 - RNA, 24 nt, Human
aaaccgagcuugcuggacagaaga

SEQ ID NO: 946649 - RNA, 23 nt, Human
aacaccugaaugucuuuucuuug

SEQ ID NO: 946650 - RNA, 19 nt, Human
acacgcacacauaugucuc

SEQ ID NO: 946651 - RNA, 23 nt, Human
acgcacacauaugucuccauaca

SEQ ID NO: 946652 - RNA, 23 nt, Human
agugguucccuuugcucugugga

SEQ ID NO: 946653 - RNA, 24 nt, Human
agugguucccuuugcucuguggau

SEQ ID NO: 946654 - RNA, 25 nt, Human
aucccuuuauuuuuuuuuuuaaaag

SEQ ID NO: 946655 - RNA, 21 nt, Human
augaacugugaauuugggucc

SEQ ID NO: 946656 - RNA, 21 nt, Human
caaccucuaaauucccugugc

SEQ ID NO: 946657 - RNA, 20 nt, Human
cacugguaagugacguauuc

SEQ ID NO: 946658 - RNA, 20 nt, Human
cagaagaugcuacaaccucu

SEQ ID NO: 946659 - RNA, 18 nt, Human
cagagcacagugcuuucc

SEQ ID NO: 946660 - RNA, 21 nt, Human
cagagcacagugcuuuccauu

SEQ ID NO: 946661 - RNA, 27 nt, Human
cauccacacgcacacauaugucuccau

SEQ ID NO: 946662 - RNA, 22 nt, Human
cuccgggcagcagggagccuuc

SEQ ID NO: 946663 - RNA, 18 nt, Human
gaacaugaccaaguuaug

SEQ ID NO: 946664 - RNA, 21 nt, Human
gagaaacaccugaaugucuuu

SEQ ID NO: 946665 - RNA, 21 nt, Human
gauguaccugcuccgggcagc

SEQ ID NO: 946666 - RNA, 28 nt, Human
uaagugacguauucaaaccccugaaagg

SEQ ID NO: 946667 - RNA, 27 nt, Human
uaauaacaguaacucuuuucaacaaaa

SEQ ID NO: 946668 - RNA, 28 nt, Human
uacauacauacauacauacuguaagauc

SEQ ID NO: 946669 - RNA, 21 nt, Human
uacauacuguaagaucaagua

SEQ ID NO: 946670 - RNA, 22 nt, Human
uagcagucuguugaaggaauca

SEQ ID NO: 946671 - RNA, 28 nt, Human
uccauacauacauacauacauacuguag

SEQ ID NO: 946672 - RNA, 18 nt, Human
ucccugugcuaguuguag

SEQ ID NO: 946673 - RNA, 18 nt, Human
uccgggcagcagggagcc

SEQ ID NO: 946674 - RNA, 22 nt, Human
ucuacaacagccauaucccuuu

SEQ ID NO: 946675 - RNA, 24 nt, Human
ugaaggaaucaucuguuauuagaa

SEQ ID NO: 946676 - RNA, 24 nt, Human
uggaaauaugcuuauuugacaguu

SEQ ID NO: 946677 - RNA, 20 nt, Human
uucuguguagccuuggccac

SEQ ID NO: 946678 - RNA, 19 nt, Human
uuuaaagaaugaaaaugcc

SEQ ID NO: 946679 - RNA, 20 nt, Human
uuuuuuuuuuuaaaaguauc

SEQ ID NO: 946680 - RNA, 20 nt, Human
uuuuuuuuuuuuuuuuuugg

SEQ ID NO: 946681 - RNA, 18 nt, Human
aagcaggaaagaaaugcg

SEQ ID NO: 946682 - RNA, 24 nt, Human
aagcaggaaagaaaugcggcagga

SEQ ID NO: 946683 - RNA, 22 nt, Human
cagcuuggaauucgcaagcagg

SEQ ID NO: 946684 - RNA, 23 nt, Human
caucccucucccuucaggugaga

SEQ ID NO: 946685 - RNA, 19 nt, Human
gaggagcuguggcuucggc

SEQ ID NO: 946686 - RNA, 20 nt, Human
ugcggcaggaggagcugugg

SEQ ID NO: 946687 - RNA, 19 nt, Human
uucgcaagcaggaaagagg

SEQ ID NO: 946688 - RNA, 19 nt, Human
aaagaaggaaaaaaagaaa

SEQ ID NO: 946689 - RNA, 18 nt, Human
aagaaggaaaaaaagaaa

SEQ ID NO: 946690 - RNA, 21 nt, Human
aaggagaaagaaagcagacaa

SEQ ID NO: 946691 - RNA, 24 nt, Human
acagagaagggaucaacuuuaaua

SEQ ID NO: 946692 - RNA, 21 nt, Human
acccaaaacuugguccacacu

SEQ ID NO: 946693 - RNA, 18 nt, Human
accgccacccucgccucg

SEQ ID NO: 946694 - RNA, 20 nt, Human
agaaggagaaagaaagcaga

SEQ ID NO: 946695 - RNA, 18 nt, Human
cacacucaagauacaaga

SEQ ID NO: 946696 - RNA, 20 nt, Human
cauaguagaaggagaaagaa

SEQ ID NO: 946697 - RNA, 21 nt, Human
ccccgcggcgucuccccuccc

SEQ ID NO: 946698 - RNA, 23 nt, Human
ccccugggccgccucgcuggcuc

SEQ ID NO: 946699 - RNA, 22 nt, Human
cccugggccgccucgcuggcuc

SEQ ID NO: 946700 - RNA, 26 nt, Human
ccgccacccucgccucgccgccgccc

SEQ ID NO: 946701 - RNA, 22 nt, Human
ccgccacucgcgcccgcucccc

SEQ ID NO: 946702 - RNA, 19 nt, Human
ccgcuucuucucccgggga

SEQ ID NO: 946703 - RNA, 22 nt, Human
ccuccgcuucuucucccgggga

SEQ ID NO: 946704 - RNA, 21 nt, Human
ccucgcuggcucucucccucc

SEQ ID NO: 946705 - RNA, 19 nt, Human
cgccccggcucuagcugcu

SEQ ID NO: 946706 - RNA, 21 nt, Human
cuccgccaaggucacggcccc

SEQ ID NO: 946707 - RNA, 18 nt, Human
cucgcuggcucucucccu

SEQ ID NO: 946708 - RNA, 21 nt, Human
cuugaacuuguuaaaaaggaa

SEQ ID NO: 946709 - RNA, 20 nt, Human
cuuugagagagagagagaga

SEQ ID NO: 946710 - RNA, 26 nt, Human
gcaacaucuuguucuaauguccucuu

SEQ ID NO: 946711 - RNA, 22 nt, Human
gcgggcugggugcaggcggugu

SEQ ID NO: 946712 - RNA, 18 nt, Human
gcugggugcaggcggugu

SEQ ID NO: 946713 - RNA, 20 nt, Human
ggcggcaagcggagcagcga

SEQ ID NO: 946714 - RNA, 21 nt, Human
guccacacucaagauacaaga

SEQ ID NO: 946715 - RNA, 22 nt, Human
ucacggccccgcggcgucuccc

SEQ ID NO: 946716 - RNA, 22 nt, Human
ucagugaacugugugucuaacu

SEQ ID NO: 946717 - RNA, 20 nt, Human
ucgccgccgcccgugcacag

SEQ ID NO: 946718 - RNA, 18 nt, Human
ucgcuggcucucucccuc

SEQ ID NO: 946719 - RNA, 18 nt, Human
ucucccuccuccgcuucu

SEQ ID NO: 946720 - RNA, 21 nt, Human
ucucccuccuccgcuucuucu

SEQ ID NO: 946721 - RNA, 25 nt, Human
ugagagagagagagagagaaagaag

SEQ ID NO: 946722 - RNA, 21 nt, Human
ugcccuccuccgccaagguca

SEQ ID NO: 946723 - RNA, 18 nt, Human
uggaauggaggcauugag

SEQ ID NO: 946724 - RNA, 28 nt, Human
uggaguaaaagguguuucuuccuagagg

SEQ ID NO: 946725 - RNA, 24 nt, Human
ugugcagugacuccagucugcauu

SEQ ID NO: 946726 - RNA, 18 nt, Human
uugagacggaagagucca

SEQ ID NO: 946727 - RNA, 19 nt, Human
uuggugaaaugaaacuuuc

SEQ ID NO: 946728 - RNA, 21 nt, Human
uuuuuuuuuuuuuuuugacag

SEQ ID NO: 946729 - RNA, 18 nt, Human
caagcguggucccugaac

SEQ ID NO: 946730 - RNA, 23 nt, Human
cagcaaguggaggggaaagccgg

SEQ ID NO: 946731 - RNA, 28 nt, Human
ggaggggaaagccggugauuccgucggg

SEQ ID NO: 946732 - RNA, 18 nt, Human
uagaauaugaucuuggca

SEQ ID NO: 946733 - RNA, 21 nt, Human
uccaggaguucccuucugagg

SEQ ID NO: 946734 - RNA, 19 nt, Human
ugcuucaguuccagaagga

SEQ ID NO: 946735 - RNA, 22 nt, Human
uggaggggaaagccggugauuu

SEQ ID NO: 946736 - RNA, 19 nt, Human
aaacaaaugccagcuguac

SEQ ID NO: 946737 - RNA, 19 nt, Human
aagacaagagucuauaaaa

SEQ ID NO: 946738 - RNA, 20 nt, Human
aagcaccugggcuaagcccc

SEQ ID NO: 946739 - RNA, 23 nt, Human
aagcaccugggcuaagcccccaa

SEQ ID NO: 946740 - RNA, 22 nt, Human
accccaagggaggaaguagggg

SEQ ID NO: 946741 - RNA, 18 nt, Human
acccuaagggcagaaaaa

SEQ ID NO: 946742 - RNA, 23 nt, Human
acgaagcaccugggcuaagcccc

SEQ ID NO: 946743 - RNA, 21 nt, Human
acuucgauucagaagggaggg

SEQ ID NO: 946744 - RNA, 21 nt, Human
agagaagggggucuggggcuu

SEQ ID NO: 946745 - RNA, 24 nt, Human
agcaccaccacccccacacucugc

SEQ ID NO: 946746 - RNA, 18 nt, Human
agcaugccccccgucccc

SEQ ID NO: 946747 - RNA, 19 nt, Human
agccagauucccugccucc

SEQ ID NO: 946748 - RNA, 22 nt, Human
aggcaugaagcugaaggugagg

SEQ ID NO: 946749 - RNA, 19 nt, Human
auccccugaccugcaugga

SEQ ID NO: 946750 - RNA, 19 nt, Human
cacccagcccugccccugc

SEQ ID NO: 946751 - RNA, 21 nt, Human
cacccccacacucugcaagag

SEQ ID NO: 946752 - RNA, 25 nt, Human
caccugggcuaagcccccaagggag

SEQ ID NO: 946753 - RNA, 19 nt, Human
cacucccccccucccccca

SEQ ID NO: 946754 - RNA, 18 nt, Human
cagauucccugccucccu

SEQ ID NO: 946755 - RNA, 21 nt, Human
cagcaccaccacccccacacu

SEQ ID NO: 946756 - RNA, 19 nt, Human
cagcaugccccccgucccc

SEQ ID NO: 946757 - RNA, 21 nt, Human
cagcuuuccuuccucuggagc

SEQ ID NO: 946758 - RNA, 21 nt, Human
cagggaccccucccauccccu

SEQ ID NO: 946759 - RNA, 21 nt, Human
caugaggccagcaugcccccc

SEQ ID NO: 946760 - RNA, 24 nt, Human
caugggcuaugcaaagaugagguu

SEQ ID NO: 946761 - RNA, 19 nt, Human
ccaccacccccacacucug

SEQ ID NO: 946762 - RNA, 21 nt, Human
ccagcaugccccccguccccc

SEQ ID NO: 946763 - RNA, 19 nt, Human
ccaucugaaaaacucaugu

SEQ ID NO: 946764 - RNA, 18 nt, Human
ccauuccugucuccuucc

SEQ ID NO: 946765 - RNA, 27 nt, Human
cccagcccugccccugcagccgguucc

SEQ ID NO: 946766 - RNA, 21 nt, Human
ccccaagggagcugccgcucc

SEQ ID NO: 946767 - RNA, 24 nt, Human
ccccacccagcccugccccugcag

SEQ ID NO: 946768 - RNA, 22 nt, Human
cccccaagcccaugaggccagc

SEQ ID NO: 946769 - RNA, 21 nt, Human
cccccaagggagcugccgcuc

SEQ ID NO: 946770 - RNA, 23 nt, Human
cccccaauuccaaagacaagagu

SEQ ID NO: 946771 - RNA, 27 nt, Human
cccccaauuccaaagacaagagucuau

SEQ ID NO: 946772 - RNA, 19 nt, Human
ccccccaauuccaaagaca

SEQ ID NO: 946773 - RNA, 23 nt, Human
cccccccuccccccaauuccaaa

SEQ ID NO: 946774 - RNA, 23 nt, Human
cccgugccucugcaccccaaggg

SEQ ID NO: 946775 - RNA, 24 nt, Human
ccucaugccgggccuggcuccuuc

SEQ ID NO: 946776 - RNA, 21 nt, Human
ccuccaaaaucuagugccugg

SEQ ID NO: 946777 - RNA, 24 nt, Human
ccuccaaaaucuagugccuggcuu

SEQ ID NO: 946778 - RNA, 25 nt, Human
ccucccauccccugaccugcaugga

SEQ ID NO: 946779 - RNA, 21 nt, Human
cgaagcaccugggcuaagccc

SEQ ID NO: 946780 - RNA, 23 nt, Human
cguggccaucugaaaaacucaug

SEQ ID NO: 946781 - RNA, 19 nt, Human
cuccacuuccccacucucc

SEQ ID NO: 946782 - RNA, 21 nt, Human
cucccuuggacccuggggacu

SEQ ID NO: 946783 - RNA, 23 nt, Human
cucuccguugcugccuccuuaga

SEQ ID NO: 946784 - RNA, 20 nt, Human
cugggguagucgcccccucc

SEQ ID NO: 946785 - RNA, 21 nt, Human
gagcggggggggcacuggggu

SEQ ID NO: 946786 - RNA, 28 nt, Human
gauugaaacacucccccccuccccccaa

SEQ ID NO: 946787 - RNA, 21 nt, Human
gcaccaccacccccacacucu

SEQ ID NO: 946788 - RNA, 21 nt, Human
gcagcaccaccacccccacac

SEQ ID NO: 946789 - RNA, 20 nt, Human
gccccugcacuuccgauugc

SEQ ID NO: 946790 - RNA, 22 nt, Human
gcccugccccugcagcaccacc

SEQ ID NO: 946791 - RNA, 22 nt, Human
gcuguacuacccuaagggcaga

SEQ ID NO: 946792 - RNA, 18 nt, Human
ggaagggaagggcucagg

SEQ ID NO: 946793 - RNA, 21 nt, Human
ggagcggggggggcacugggg

SEQ ID NO: 946794 - RNA, 22 nt, Human
ggagcggggggggcacuggggu

SEQ ID NO: 946795 - RNA, 25 nt, Human
ggcagaaaaagucuggugaccccca

SEQ ID NO: 946796 - RNA, 20 nt, Human
gggaagggaagggcucaggg

SEQ ID NO: 946797 - RNA, 21 nt, Human
gggaccccucccauccccuga

SEQ ID NO: 946798 - RNA, 22 nt, Human
gggcuaagcccccaagggagcu

SEQ ID NO: 946799 - RNA, 21 nt, Human
gggggucuggggcuucucccu

SEQ ID NO: 946800 - RNA, 22 nt, Human
gucuccuuccaagcccucaccg

SEQ ID NO: 946801 - RNA, 22 nt, Human
guguggaagaggcaugaagcug

SEQ ID NO: 946802 - RNA, 22 nt, Human
uaaacacagaacauauaacaga

SEQ ID NO: 946803 - RNA, 25 nt, Human
uaggcccccaagcccaugaggccag

SEQ ID NO: 946804 - RNA, 24 nt, Human
uauuauauuuuucauuaauaaaua

SEQ ID NO: 946805 - RNA, 22 nt, Human
ucagggaccccucccauccccu

SEQ ID NO: 946806 - RNA, 18 nt, Human
ucagguccucaugccggg

SEQ ID NO: 946807 - RNA, 25 nt, Human
ucauccucccucuccccgugccucu

SEQ ID NO: 946808 - RNA, 22 nt, Human
uccccccaauuccaaagacaag

SEQ ID NO: 946809 - RNA, 21 nt, Human
ucccccccuccccccaauucc

SEQ ID NO: 946810 - RNA, 18 nt, Human
ucccugccucccuccaac

SEQ ID NO: 946811 - RNA, 22 nt, Human
ucuccguugcugccuccuuaga

SEQ ID NO: 946812 - RNA, 18 nt, Human
ugaaacacucccccccuc

SEQ ID NO: 946813 - RNA, 22 nt, Human
ugaaacacucccccccuccccc

SEQ ID NO: 946814 - RNA, 18 nt, Human
ugaagcugaaggugaggc

SEQ ID NO: 946815 - RNA, 23 nt, Human
ugcaaagaugagguuuccuucuc

SEQ ID NO: 946816 - RNA, 22 nt, Human
ugcauggaaacgcuguguggaa

SEQ ID NO: 946817 - RNA, 18 nt, Human
ugccucugcaccccaagg

SEQ ID NO: 946818 - RNA, 18 nt, Human
uggaagaggcaugaagcu

SEQ ID NO: 946819 - RNA, 24 nt, Human
uggaagaggcaugaagcugaaggu

SEQ ID NO: 946820 - RNA, 25 nt, Human
uggaagaggcaugaagcugaaggug

SEQ ID NO: 946821 - RNA, 21 nt, Human
uggcuugggguaugaugguuc

SEQ ID NO: 946822 - RNA, 23 nt, Human
uguccuaaauugucucauccucc

SEQ ID NO: 946823 - RNA, 22 nt, Human
ugucucauccucccucuccccg

SEQ ID NO: 946824 - RNA, 19 nt, Human
ugucuccccccuccaauuu

SEQ ID NO: 946825 - RNA, 18 nt, Human
uguguggaagaggcauga

SEQ ID NO: 946826 - RNA, 20 nt, Human
uguguggaagaggcaugaag

SEQ ID NO: 946827 - RNA, 21 nt, Human
uuccaaagacaagagucuaua

SEQ ID NO: 946828 - RNA, 25 nt, Human
uugucucauccucccucuccccgug

SEQ ID NO: 946829 - RNA, 22 nt, Human
uuucuuuuuuuuuuuuuucuuu

SEQ ID NO: 946830 - RNA, 23 nt, Human
aaaaaacacacaacaaaccacca

SEQ ID NO: 946831 - RNA, 22 nt, Human
aaagaaacaaaauaacagacua

SEQ ID NO: 946832 - RNA, 19 nt, Human
aacagaaugagccccaccc

SEQ ID NO: 946833 - RNA, 21 nt, Human
aagugaaguuggccacaggug

SEQ ID NO: 946834 - RNA, 18 nt, Human
aaugacugacugccucac

SEQ ID NO: 946835 - RNA, 21 nt, Human
aaugacugacugccucacgaa

SEQ ID NO: 946836 - RNA, 22 nt, Human
acagcuggacuuacccugaagc

SEQ ID NO: 946837 - RNA, 18 nt, Human
accagcacuuaacauggc

SEQ ID NO: 946838 - RNA, 22 nt, Human
acucuggcuugcuggaagugaa

SEQ ID NO: 946839 - RNA, 20 nt, Human
acuuugggagauuucagucc

SEQ ID NO: 946840 - RNA, 19 nt, Human
agaagccugaggaagccug

SEQ ID NO: 946841 - RNA, 23 nt, Human
agaaguggguggucugccuuagc

SEQ ID NO: 946842 - RNA, 23 nt, Human
agaaugagccccacccccugcca

SEQ ID NO: 946843 - RNA, 20 nt, Human
agcacuuaacauggcaaaua

SEQ ID NO: 946844 - RNA, 18 nt, Human
agguguggagcuguggcc

SEQ ID NO: 946845 - RNA, 21 nt, Human
aucuugucuccuuucuccuuc

SEQ ID NO: 946846 - RNA, 22 nt, Human
aucuugucuccuuucuccuucc

SEQ ID NO: 946847 - RNA, 19 nt, Human
augcucucuguguguguau

SEQ ID NO: 946848 - RNA, 19 nt, Human
auugauggugagcuugugc

SEQ ID NO: 946849 - RNA, 22 nt, Human
auugauggugagcuugugcuuu

SEQ ID NO: 946850 - RNA, 18 nt, Human
auuucaacuaugacuacu

SEQ ID NO: 946851 - RNA, 23 nt, Human
caacagaaugagccccacccccu

SEQ ID NO: 946852 - RNA, 23 nt, Human
caagggccggggggagcgggggg

SEQ ID NO: 946853 - RNA, 21 nt, Human
caagucagugaagaaucugca

SEQ ID NO: 946854 - RNA, 19 nt, Human
cacaaaggcagcauggcac

SEQ ID NO: 946855 - RNA, 24 nt, Human
cacacaacaaaccaccaugguuaa

SEQ ID NO: 946856 - RNA, 18 nt, Human
cagaaguggguggucugc

SEQ ID NO: 946857 - RNA, 23 nt, Human
cagaaugagccccacccccugcc

SEQ ID NO: 946858 - RNA, 21 nt, Human
cagcagcagccacggcugcgc

SEQ ID NO: 946859 - RNA, 21 nt, Human
cagcaucaaccaaaugaacca

SEQ ID NO: 946860 - RNA, 26 nt, Human
cagcaucaaccaaaugaaccagccac

SEQ ID NO: 946861 - RNA, 20 nt, Human
cagcauggcacugccucgcc

SEQ ID NO: 946862 - RNA, 20 nt, Human
caggagggaguccagggacc

SEQ ID NO: 946863 - RNA, 20 nt, Human
caucccauggcaggugugga

SEQ ID NO: 946864 - RNA, 23 nt, Human
caucccauggcagguguggagcu

SEQ ID NO: 946865 - RNA, 20 nt, Human
cauggcacugccucgcccug

SEQ ID NO: 946866 - RNA, 20 nt, Human
caugucaauucuuccacauc

SEQ ID NO: 946867 - RNA, 19 nt, Human
cauuauauuuuggcaagau

SEQ ID NO: 946868 - RNA, 18 nt, Human
ccaaaugaaccagccacu

SEQ ID NO: 946869 - RNA, 23 nt, Human
ccaacagaaugagccccaccccc

SEQ ID NO: 946870 - RNA, 18 nt, Human
cccauggcagguguggag

SEQ ID NO: 946871 - RNA, 22 nt, Human
cccauggcagguguggagcugu

SEQ ID NO: 946872 - RNA, 23 nt, Human
ccccugcgcgcggcgcgccgccc

SEQ ID NO: 946873 - RNA, 18 nt, Human
cccgccacucagcagcag

SEQ ID NO: 946874 - RNA, 22 nt, Human
cccggcgccguggccgcucuuc

SEQ ID NO: 946875 - RNA, 23 nt, Human
ccuaagaucuucuaucugguguu

SEQ ID NO: 946876 - RNA, 22 nt, Human
ccuucaagggccggggggagcg

SEQ ID NO: 946877 - RNA, 19 nt, Human
ccuugcccaucucaauuca

SEQ ID NO: 946878 - RNA, 18 nt, Human
ccuuucacaacaaaagga

SEQ ID NO: 946879 - RNA, 20 nt, Human
cgaaaccugaacuaugucgg

SEQ ID NO: 946880 - RNA, 22 nt, Human
cgcgcggucgcgggugugcggg

SEQ ID NO: 946881 - RNA, 22 nt, Human
cuaacaaagauaaaugcacaaa

SEQ ID NO: 946882 - RNA, 24 nt, Human
cucacaauagcaccauuuccuaga

SEQ ID NO: 946883 - RNA, 20 nt, Human
cucauugaaaacucaucuuc

SEQ ID NO: 946884 - RNA, 20 nt, Human
cugcgcgcggcgcgccgccc

SEQ ID NO: 946885 - RNA, 22 nt, Human
cuguggccuugaaaugcucucu

SEQ ID NO: 946886 - RNA, 22 nt, Human
cuugcuggaagugaagaacaga

SEQ ID NO: 946887 - RNA, 18 nt, Human
gaaauaaaaaacacacaa

SEQ ID NO: 946888 - RNA, 24 nt, Human
gaagaucagugcccgaaaccugaa

SEQ ID NO: 946889 - RNA, 19 nt, Human
gagaacgcaggcgcccagc

SEQ ID NO: 946890 - RNA, 20 nt, Human
gagcuuugguuguaaaauuu

SEQ ID NO: 946891 - RNA, 18 nt, Human
gagggaguccagggaccu

SEQ ID NO: 946892 - RNA, 21 nt, Human
gccccuuuccacccgcagccc

SEQ ID NO: 946893 - RNA, 24 nt, Human
gccguggccgcucuucccaguccc

SEQ ID NO: 946894 - RNA, 18 nt, Human
gcgcgcggcgcgccgccc

SEQ ID NO: 946895 - RNA, 20 nt, Human
gcugcgcgcggucgcgggug

SEQ ID NO: 946896 - RNA, 24 nt, Human
gcuuugguuguaaaauuucaacua

SEQ ID NO: 946897 - RNA, 24 nt, Human
ggagaacgcaggcgcccagccucc

SEQ ID NO: 946898 - RNA, 19 nt, Human
ggccauaaucagcaucaac

SEQ ID NO: 946899 - RNA, 19 nt, Human
ggccggggggagcgggggg

SEQ ID NO: 946900 - RNA, 19 nt, Human
ggcucgccccuuuccaccc

SEQ ID NO: 946901 - RNA, 18 nt, Human
ggggggcccccgccacuc

SEQ ID NO: 946902 - RNA, 18 nt, Human
gugaagaaucugcaugca

SEQ ID NO: 946903 - RNA, 22 nt, Human
gugagaagccugaggaagccug

SEQ ID NO: 946904 - RNA, 20 nt, Human
uaaaaaacacacaacaaacc

SEQ ID NO: 946905 - RNA, 21 nt, Human
uaaaaaacacacaacaaacca

SEQ ID NO: 946906 - RNA, 22 nt, Human
uaaaaaacacacaacaaaccac

SEQ ID NO: 946907 - RNA, 24 nt, Human
uaaaaaacacacaacaaaccacca

SEQ ID NO: 946908 - RNA, 24 nt, Human
uaaaaagaaacaaaauaacagacu

SEQ ID NO: 946909 - RNA, 24 nt, Human
uaaaaagaaacaaaauaacagacu

SEQ ID NO: 946910 - RNA, 24 nt, Human
uaaaugcacaaaaguggaggaaga

SEQ ID NO: 946911 - RNA, 18 nt, Human
uaacaaagauaaaugcac

SEQ ID NO: 946912 - RNA, 19 nt, Human
uaacaaagauaaaugcaca

SEQ ID NO: 946913 - RNA, 19 nt, Human
uaacacugaaaacucagaa

SEQ ID NO: 946914 - RNA, 20 nt, Human
uaacacugaaaacucagaau

SEQ ID NO: 946915 - RNA, 21 nt, Human
uaagaucuucuaucugguguu

SEQ ID NO: 946916 - RNA, 27 nt, Human
uaauuaccagcacuuaacauggcaaau

SEQ ID NO: 946917 - RNA, 22 nt, Human
uaccccaaguucauuuauacau

SEQ ID NO: 946918 - RNA, 22 nt, Human
uagccuacuucugcagcaacau

SEQ ID NO: 946919 - RNA, 18 nt, Human
uauaguagugcuuugaaa

SEQ ID NO: 946920 - RNA, 19 nt, Human
ucaacaaaauacaacagac

SEQ ID NO: 946921 - RNA, 20 nt, Human
ucaacaguccuuggcauugg

SEQ ID NO: 946922 - RNA, 23 nt, Human
ucagcaucaaccaaaugaaccag

SEQ ID NO: 946923 - RNA, 27 nt, Human
ucaguccccuccuuccuuucacaacaa

SEQ ID NO: 946924 - RNA, 18 nt, Human
ucauugaaaacucaucuu

SEQ ID NO: 946925 - RNA, 18 nt, Human
uccaucuucugaaaagcu

SEQ ID NO: 946926 - RNA, 25 nt, Human
ucccagucccgggcgagaggggcuc

SEQ ID NO: 946927 - RNA, 19 nt, Human
ucgcccugccgccucgccc

SEQ ID NO: 946928 - RNA, 23 nt, Human
ucuccgccuucaagggccggggg

SEQ ID NO: 946929 - RNA, 19 nt, Human
ucuggaaucagaaacauga

SEQ ID NO: 946930 - RNA, 23 nt, Human
ucuggaaucagaaacaugaaagc

SEQ ID NO: 946931 - RNA, 18 nt, Human
ucuguguguguaugugug

SEQ ID NO: 946932 - RNA, 18 nt, Human
ucuuuugucaugacaagg

SEQ ID NO: 946933 - RNA, 21 nt, Human
ugacugccucacgaaagcucc

SEQ ID NO: 946934 - RNA, 22 nt, Human
ugagaagccugaggaagccugu

SEQ ID NO: 946935 - RNA, 24 nt, Human
ugauccuaacaaagauaaaugcac

SEQ ID NO: 946936 - RNA, 18 nt, Human
ugauggugagcuugugcu

SEQ ID NO: 946937 - RNA, 24 nt, Human
ugcacaaaaguggaggaagaucag

SEQ ID NO: 946938 - RNA, 22 nt, Human
ugccacauuaacaucccauggc

SEQ ID NO: 946939 - RNA, 20 nt, Human
ugcccuggauaaugcuggga

SEQ ID NO: 946940 - RNA, 22 nt, Human
ugccuuagccuacuucugcagc

SEQ ID NO: 946941 - RNA, 22 nt, Human
ugcucucuguguguguaugugu

SEQ ID NO: 946942 - RNA, 18 nt, Human
uggaaucagaaacaugaa

SEQ ID NO: 946943 - RNA, 21 nt, Human
uggaaucagaaacaugaaagc

SEQ ID NO: 946944 - RNA, 23 nt, Human
uggaaucagaaacaugaaagcug

SEQ ID NO: 946945 - RNA, 25 nt, Human
uggaaucagaaacaugaaagcugaa

SEQ ID NO: 946946 - RNA, 20 nt, Human
ugggcaaagagaaucacagg

SEQ ID NO: 946947 - RNA, 28 nt, Human
ugguaucuuauguauucaggacccaagu

SEQ ID NO: 946948 - RNA, 19 nt, Human
uggugagcuugugcuuuga

SEQ ID NO: 946949 - RNA, 25 nt, Human
uguaaacccuaauacagcaauccga

SEQ ID NO: 946950 - RNA, 18 nt, Human
uguguguguaugugugug

SEQ ID NO: 946951 - RNA, 19 nt, Human
uguguguguaugugugugc

SEQ ID NO: 946952 - RNA, 23 nt, Human
uguguguguaugugugugcugua

SEQ ID NO: 946953 - RNA, 22 nt, Human
uuagauuccuuuccguguagga

SEQ ID NO: 946954 - RNA, 18 nt, Human
uucaagucagugaagaau

SEQ ID NO: 946955 - RNA, 22 nt, Human
uucaagucagugaagaaucugc

SEQ ID NO: 946956 - RNA, 24 nt, Human
uucugcagcaacaugaauuuuccc

SEQ ID NO: 946957 - RNA, 27 nt, Human
uugguuucuguuuuuuguuuuuuuucu

SEQ ID NO: 946958 - RNA, 22 nt, Human
uuuaacacugaaaacucagaau

SEQ ID NO: 946959 - RNA, 20 nt, Human
uuuaaggaaugcagugagag

SEQ ID NO: 946960 - RNA, 20 nt, Human
uuucaguccccuccuuccuu

SEQ ID NO: 946961 - RNA, 24 nt, Human
uuuggacucaacugucucauuucc

SEQ ID NO: 946962 - RNA, 23 nt, Human
aaaaacacccaccauaagcacuc

SEQ ID NO: 946963 - RNA, 22 nt, Human
aaacggaaaggggcaauugugg

SEQ ID NO: 946964 - RNA, 21 nt, Human
aaagcagugccacccagaggc

SEQ ID NO: 946965 - RNA, 26 nt, Human
aacacaucucuuccugcugagcacgc

SEQ ID NO: 946966 - RNA, 23 nt, Human
aaccaagacacacagagaagccc

SEQ ID NO: 946967 - RNA, 23 nt, Human
aaccagcguuuuccuggagccca

SEQ ID NO: 946968 - RNA, 24 nt, Human
aaccucuggucauuaggacccguc

SEQ ID NO: 946969 - RNA, 22 nt, Human
aagcaagagucuggugccauuu

SEQ ID NO: 946970 - RNA, 22 nt, Human
aagcaguugucucccguccugc

SEQ ID NO: 946971 - RNA, 22 nt, Human
aagcccuggaggcugggaggcu

SEQ ID NO: 946972 - RNA, 20 nt, Human
aauuucuacccugacuucuc

SEQ ID NO: 946973 - RNA, 19 nt, Human
acaaaacaaaugcaacacu

SEQ ID NO: 946974 - RNA, 25 nt, Human
acaaaacaaaugcaacacucaaguc

SEQ ID NO: 946975 - RNA, 18 nt, Human
acagcucucggggaaugg

SEQ ID NO: 946976 - RNA, 20 nt, Human
acagggacaccaauguuggc

SEQ ID NO: 946977 - RNA, 21 nt, Human
accccaggauguagaagccuu

SEQ ID NO: 946978 - RNA, 21 nt, Human
acgugggcccccuggucccug

SEQ ID NO: 946979 - RNA, 20 nt, Human
acucugcuuuuccuccugcu

SEQ ID NO: 946980 - RNA, 27 nt, Human
agaggacagaguguuuggucucaccag

SEQ ID NO: 946981 - RNA, 22 nt, Human
agccagcuggcagggucagggc

SEQ ID NO: 946982 - RNA, 21 nt, Human
agcccacagccccacugccuc

SEQ ID NO: 946983 - RNA, 21 nt, Human
agccccgagaccaaaccccuc

SEQ ID NO: 946984 - RNA, 19 nt, Human
aggagggggugagggagaa

SEQ ID NO: 946985 - RNA, 22 nt, Human
aggcagccacaguccuggaggg

SEQ ID NO: 946986 - RNA, 23 nt, Human
aggcggauggggacaacagcagc

SEQ ID NO: 946987 - RNA, 21 nt, Human
agggagccugcagucuccaga

SEQ ID NO: 946988 - RNA, 21 nt, Human
aggguaaaggagggggugagg

SEQ ID NO: 946989 - RNA, 22 nt, Human
aggguaaaggagggggugaggg

SEQ ID NO: 946990 - RNA, 23 nt, Human
agugccgaguccuuuccugaaag

SEQ ID NO: 946991 - RNA, 23 nt, Human
auaccuccuuccccucucucucc

SEQ ID NO: 946992 - RNA, 29 nt, Human
aucccaggccuaaccagcguuuuccugac

SEQ ID NO: 946993 - RNA, 20 nt, Human
caaaacaaaugcaacacuca

SEQ ID NO: 946994 - RNA, 25 nt, Human
caaacccagagauaaaaugccaggg

SEQ ID NO: 946995 - RNA, 20 nt, Human
cacccucuggguccugguua

SEQ ID NO: 946996 - RNA, 19 nt, Human
cacugccuccuggcucugc

SEQ ID NO: 946997 - RNA, 24 nt, Human
cacugccuccuggcucugccccuc

SEQ ID NO: 946998 - RNA, 27 nt, Human
cagagcagcaaccaagacacacagaga

SEQ ID NO: 946999 - RNA, 25 nt, Human
cagcaaccaagacacacagagaagc

SEQ ID NO: 947000 - RNA, 19 nt, Human
cagcaguaauaaggcugug

SEQ ID NO: 947001 - RNA, 19 nt, Human
cagcccucuagaggccagg

SEQ ID NO: 947002 - RNA, 23 nt, Human
caggccccuguguugcccucgga

SEQ ID NO: 947003 - RNA, 18 nt, Human
caggggucccuccgcgcc

SEQ ID NO: 947004 - RNA, 22 nt, Human
caggucugugccagcacagccc

SEQ ID NO: 947005 - RNA, 26 nt, Human
cagucuccagaugggcaaaagcaaca

SEQ ID NO: 947006 - RNA, 24 nt, Human
ccaaaccccucuuugccgccagcc

SEQ ID NO: 947007 - RNA, 20 nt, Human
ccaaccuccccuccuccugu

SEQ ID NO: 947008 - RNA, 22 nt, Human
ccaacucugcuuuuccuccugc

SEQ ID NO: 947009 - RNA, 24 nt, Human
ccacagccccacugccuccuggcu

SEQ ID NO: 947010 - RNA, 21 nt, Human
ccacauuccuccagccccgcc

SEQ ID NO: 947011 - RNA, 19 nt, Human
ccagcaguaauaaggcugu

SEQ ID NO: 947012 - RNA, 21 nt, Human
ccagcaguaauaaggcugugu

SEQ ID NO: 947013 - RNA, 19 nt, Human
ccagggcucuucgcuccuc

SEQ ID NO: 947014 - RNA, 22 nt, Human
cccacagccucccaggagaguu

SEQ ID NO: 947015 - RNA, 26 nt, Human
cccacagccucccaggagaguucucu

SEQ ID NO: 947016 - RNA, 20 nt, Human
cccacauuccuccagccccg

SEQ ID NO: 947017 - RNA, 21 nt, Human
cccagaggcaggggagggccc

SEQ ID NO: 947018 - RNA, 20 nt, Human
cccagcugcugccccauggg

SEQ ID NO: 947019 - RNA, 20 nt, Human
ccccaaccuccccuccuccu

SEQ ID NO: 947020 - RNA, 19 nt, Human
ccccaccaggguacccagg

SEQ ID NO: 947021 - RNA, 21 nt, Human
ccccacgcuguccaucuuccc

SEQ ID NO: 947022 - RNA, 21 nt, Human
ccccacugccuccuggcucug

SEQ ID NO: 947023 - RNA, 19 nt, Human
ccccagggccaggcccucu

SEQ ID NO: 947024 - RNA, 24 nt, Human
ccccaggguuagagccgcuugucc

SEQ ID NO: 947025 - RNA, 20 nt, Human
cccccaaccuccccuccucc

SEQ ID NO: 947026 - RNA, 21 nt, Human
cccccacauuccuccagcccc

SEQ ID NO: 947027 - RNA, 19 nt, Human
ccccgagaccaaaccccuc

SEQ ID NO: 947028 - RNA, 18 nt, Human
ccccucucucuccugccu

SEQ ID NO: 947029 - RNA, 19 nt, Human
ccccucuuugccgccagcc

SEQ ID NO: 947030 - RNA, 20 nt, Human
cccucuagaggccaggcccc

SEQ ID NO: 947031 - RNA, 20 nt, Human
cccuggaggacccgcucucc

SEQ ID NO: 947032 - RNA, 20 nt, Human
ccgccgcgcugcugcugggc

SEQ ID NO: 947033 - RNA, 20 nt, Human
ccgccgcgcugcugcugggc

SEQ ID NO: 947034 - RNA, 22 nt, Human
ccgccgcgcugcugcugggcuc

SEQ ID NO: 947035 - RNA, 19 nt, Human
ccggcgccgccgcgcugcu

SEQ ID NO: 947036 - RNA, 24 nt, Human
ccuacuuccuucuccaccuguccc

SEQ ID NO: 947037 - RNA, 23 nt, Human
ccuccgcgccugcaaguugggac

SEQ ID NO: 947038 - RNA, 18 nt, Human
ccuccugcuccauucucc

SEQ ID NO: 947039 - RNA, 19 nt, Human
ccuccuuccccucucucuc

SEQ ID NO: 947040 - RNA, 18 nt, Human
ccucuagaggccaggccc

SEQ ID NO: 947041 - RNA, 23 nt, Human
ccugcauccccaccaggguaccc

SEQ ID NO: 947042 - RNA, 23 nt, Human
ccuggacaacauggccgccccca

SEQ ID NO: 947043 - RNA, 21 nt, Human
ccuggagcccaccccagggcc

SEQ ID NO: 947044 - RNA, 18 nt, Human
ccuggaggccguggaggg

SEQ ID NO: 947045 - RNA, 18 nt, Human
ccuggaggcugggaggcu

SEQ ID NO: 947046 - RNA, 20 nt, Human
ccugguuacgugggcccccu

SEQ ID NO: 947047 - RNA, 18 nt, Human
ccuuccucccuccccucu

SEQ ID NO: 947048 - RNA, 27 nt, Human
ccuuccuuccucccuccccucuguuuu

SEQ ID NO: 947049 - RNA, 21 nt, Human
cgacuccccagaguuuaaaga

SEQ ID NO: 947050 - RNA, 21 nt, Human
cgacuccugagcucugagccc

SEQ ID NO: 947051 - RNA, 25 nt, Human
cgagaccaaaccccucuuugccgcc

SEQ ID NO: 947052 - RNA, 21 nt, Human
cgcugcugcugggcuccagcc

SEQ ID NO: 947053 - RNA, 22 nt, Human
cgcuucaggcaccuaggagacc

SEQ ID NO: 947054 - RNA, 19 nt, Human
cggccuucccugcaucccc

SEQ ID NO: 947055 - RNA, 20 nt, Human
cgggacaccacuacauguga

SEQ ID NO: 947056 - RNA, 22 nt, Human
cgugcacucauuccuacuuccu

SEQ ID NO: 947057 - RNA, 19 nt, Human
cucacuuggagcccugggc

SEQ ID NO: 947058 - RNA, 20 nt, Human
cuccagccccgcccuccucc

SEQ ID NO: 947059 - RNA, 20 nt, Human
cuccugagcucugagcccac

SEQ ID NO: 947060 - RNA, 24 nt, Human
cucuccuauggcuuccuacagccc

SEQ ID NO: 947061 - RNA, 20 nt, Human
cucuccugccugcuccuccc

SEQ ID NO: 947062 - RNA, 22 nt, Human
cucucucuccugccugcuccuc

SEQ ID NO: 947063 - RNA, 19 nt, Human
cugccuccuggcucugccc

SEQ ID NO: 947064 - RNA, 20 nt, Human
cugccuccuggcucugcccc

SEQ ID NO: 947065 - RNA, 19 nt, Human
cugcuccucccucugggga

SEQ ID NO: 947066 - RNA, 20 nt, Human
cugcugagcacgcucauuuu

SEQ ID NO: 947067 - RNA, 20 nt, Human
cugcugccccaugggggcug

SEQ ID NO: 947068 - RNA, 23 nt, Human
cugcugggcuccagccucccggc

SEQ ID NO: 947069 - RNA, 21 nt, Human
cugguuccgacagcucucggg

SEQ ID NO: 947070 - RNA, 19 nt, Human
cuuccugcugagcacgcuc

SEQ ID NO: 947071 - RNA, 18 nt, Human
gaccaaaccccucuuugc

SEQ ID NO: 947072 - RNA, 23 nt, Human
gacccgcucucccuuucguccac

SEQ ID NO: 947073 - RNA, 21 nt, Human
gaccuauuucccguuccccuu

SEQ ID NO: 947074 - RNA, 20 nt, Human
gaggcagccacaguccugga

SEQ ID NO: 947075 - RNA, 18 nt, Human
gagggauagaggacagag

SEQ ID NO: 947076 - RNA, 18 nt, Human
gaucacuucugcuugcug

SEQ ID NO: 947077 - RNA, 23 nt, Human
gcaaccuaaaucuucaccuccuc

SEQ ID NO: 947078 - RNA, 23 nt, Human
gccagcccgggccccucaaucac

SEQ ID NO: 947079 - RNA, 23 nt, Human
gcccgggccccucaaucaccagc

SEQ ID NO: 947080 - RNA, 24 nt, Human
gcccgggccccucaaucaccagcc

SEQ ID NO: 947081 - RNA, 20 nt, Human
gcccugcccaugggcuucug

SEQ ID NO: 947082 - RNA, 21 nt, Human
gcccugggcugcgcugagcug

SEQ ID NO: 947083 - RNA, 21 nt, Human
gccuggacaacauggccgccc

SEQ ID NO: 947084 - RNA, 18 nt, Human
gcucacccacagccuccc

SEQ ID NO: 947085 - RNA, 19 nt, Human
gcucagcuccucucuggcu

SEQ ID NO: 947086 - RNA, 20 nt, Human
gcugcugcugggcuccagcc

SEQ ID NO: 947087 - RNA, 21 nt, Human
gcugcugggcuccagccuccc

SEQ ID NO: 947088 - RNA, 18 nt, Human
gcuggcagggucagggcc

SEQ ID NO: 947089 - RNA, 23 nt, Human
ggacaacagcagcagggucagaa

SEQ ID NO: 947090 - RNA, 19 nt, Human
ggagggggugagggagaag

SEQ ID NO: 947091 - RNA, 23 nt, Human
ggaggugcuccggguucccccuu

SEQ ID NO: 947092 - RNA, 19 nt, Human
ggcaaaagcaagagucugg

SEQ ID NO: 947093 - RNA, 21 nt, Human
ggcccccuggucccuguaagg

SEQ ID NO: 947094 - RNA, 28 nt, Human
ggcugagccacgguggcugguaagaaga

SEQ ID NO: 947095 - RNA, 18 nt, Human
gggccccucaaucaccag

SEQ ID NO: 947096 - RNA, 18 nt, Human
gggcuucugggccucacu

SEQ ID NO: 947097 - RNA, 21 nt, Human
ggggcuuuuucugauuuucau

SEQ ID NO: 947098 - RNA, 25 nt, Human
ggggggccggcccuguuucucaggg

SEQ ID NO: 947099 - RNA, 18 nt, Human
ggguaaaggaggggguga

SEQ ID NO: 947100 - RNA, 22 nt, Human
ggguuagaaaacggaaaggggc

SEQ ID NO: 947101 - RNA, 18 nt, Human
guccuggaggggccuggg

SEQ ID NO: 947102 - RNA, 18 nt, Human
gugagggagaaguuucuu

SEQ ID NO: 947103 - RNA, 22 nt, Human
gugccgaguccuuuccugaaag

SEQ ID NO: 947104 - RNA, 18 nt, Human
guuacgugggcccccugg

SEQ ID NO: 947105 - RNA, 20 nt, Human
uaagccccgagaccaaaccc

SEQ ID NO: 947106 - RNA, 22 nt, Human
uaagccccgagaccaaaccccu

SEQ ID NO: 947107 - RNA, 18 nt, Human
uagaacaucucucucagg

SEQ ID NO: 947108 - RNA, 26 nt, Human
uagaaguggaggugcuccgacaacgg

SEQ ID NO: 947109 - RNA, 25 nt, Human
uagaccaacucugcuuuuccuccug

SEQ ID NO: 947110 - RNA, 20 nt, Human
uagcgugaggaacacaucuc

SEQ ID NO: 947111 - RNA, 22 nt, Human
uagcgugaggaacacaucucuu

SEQ ID NO: 947112 - RNA, 24 nt, Human
ucaaacccagagauaaaaugccag

SEQ ID NO: 947113 - RNA, 21 nt, Human
ucagcuagaacaucucucuca

SEQ ID NO: 947114 - RNA, 22 nt, Human
ucagcuagaacaucucucucag

SEQ ID NO: 947115 - RNA, 18 nt, Human
uccaucuucccuagaagu

SEQ ID NO: 947116 - RNA, 18 nt, Human
ucccaggccuaaccagcg

SEQ ID NO: 947117 - RNA, 23 nt, Human
ucccaggccuaaccagcguuuuc

SEQ ID NO: 947118 - RNA, 23 nt, Human
ucccccuucguccccccagcccu

SEQ ID NO: 947119 - RNA, 26 nt, Human
ucccuggccagagcagcaaccaagac

SEQ ID NO: 947120 - RNA, 24 nt, Human
uccuccagccgccuggucucucuu

SEQ ID NO: 947121 - RNA, 22 nt, Human
uccuggaggggccugggccugg

SEQ ID NO: 947122 - RNA, 18 nt, Human
uccuggggacugggauuc

SEQ ID NO: 947123 - RNA, 23 nt, Human
ucgggguuagaaaacggaaaggg

SEQ ID NO: 947124 - RNA, 19 nt, Human
ucucccgccccccaaccuc

SEQ ID NO: 947125 - RNA, 20 nt, Human
ucucccucuucuccuucccc

SEQ ID NO: 947126 - RNA, 19 nt, Human
ucugaggguaaggaaggga

SEQ ID NO: 947127 - RNA, 19 nt, Human
ugaaaugucaggggucccu

SEQ ID NO: 947128 - RNA, 18 nt, Human
ugaaggcggauggggaca

SEQ ID NO: 947129 - RNA, 19 nt, Human
ugacaggaaaccagggcug

SEQ ID NO: 947130 - RNA, 20 nt, Human
ugaccuguguccccauucuc

SEQ ID NO: 947131 - RNA, 22 nt, Human
ugagcucugagcccacagcccc

SEQ ID NO: 947132 - RNA, 20 nt, Human
ugagcugcagggaggccgag

SEQ ID NO: 947133 - RNA, 25 nt, Human
ugaggguaaggaagggagccugcag

SEQ ID NO: 947134 - RNA, 18 nt, Human
ugaguaggcuucgugugg

SEQ ID NO: 947135 - RNA, 22 nt, Human
ugagugacaggaaaccagggcu

SEQ ID NO: 947136 - RNA, 25 nt, Human
ugagugacaggaaaccagggcugug

SEQ ID NO: 947137 - RNA, 25 nt, Human
ugaugcggaagagcagaggggugaa

SEQ ID NO: 947138 - RNA, 22 nt, Human
ugccagggcucuucgcuccucc

SEQ ID NO: 947139 - RNA, 20 nt, Human
ugccugcuccucccucuggu

SEQ ID NO: 947140 - RNA, 20 nt, Human
ugcggaagagcagaggggug

SEQ ID NO: 947141 - RNA, 23 nt, Human
ugcugcugggcuccagccucccg

SEQ ID NO: 947142 - RNA, 25 nt, Human
ugcugggaguggggcugccucccug

SEQ ID NO: 947143 - RNA, 23 nt, Human
ugcuuugggucuggggaccucug

SEQ ID NO: 947144 - RNA, 24 nt, Human
uggaggccguggaggggaggcagc

SEQ ID NO: 947145 - RNA, 18 nt, Human
uggcaggauacaggccuu

SEQ ID NO: 947146 - RNA, 23 nt, Human
uggcccagcugcugccccauggg

SEQ ID NO: 947147 - RNA, 22 nt, Human
uggccuccuggggguguuuccu

SEQ ID NO: 947148 - RNA, 18 nt, Human
ugggacgacgccggcgcc

SEQ ID NO: 947149 - RNA, 18 nt, Human
uggggcugccucccuggc

SEQ ID NO: 947150 - RNA, 23 nt, Human
ugguaagaagagcuccacccucu

SEQ ID NO: 947151 - RNA, 21 nt, Human
ugucucccgccccccaaccuc

SEQ ID NO: 947152 - RNA, 18 nt, Human
uuacgugggcccccuggu

SEQ ID NO: 947153 - RNA, 26 nt, Human
uuccuacuuccuucuccaccuguccc

SEQ ID NO: 947154 - RNA, 22 nt, Human
uuccugaauccgacuccccaga

SEQ ID NO: 947155 - RNA, 22 nt, Human
uucuccaccugucccagcugcu

SEQ ID NO: 947156 - RNA, 18 nt, Human
uugggucuggggaccucu

SEQ ID NO: 947157 - RNA, 19 nt, Human
uugguuuuuguuuuuugcu

SEQ ID NO: 947158 - RNA, 18 nt, Human
uugucauugguuuuuguu

SEQ ID NO: 947159 - RNA, 19 nt, Human
uuuaagccccgagaccaaa

SEQ ID NO: 947160 - RNA, 18 nt, Human
uuucauucuuuggaggga

SEQ ID NO: 947161 - RNA, 20 nt, Human
uuucucugccccggccuucc

SEQ ID NO: 947162 - RNA, 24 nt, Human
uuugguuaccaucuccaaaucuga

SEQ ID NO: 947163 - RNA, 22 nt, Human
uuuucauucuuuggagggauag

SEQ ID NO: 947164 - RNA, 24 nt, Human
aaaaaagaaauguaguguauaaaa

SEQ ID NO: 947165 - RNA, 19 nt, Human
aaaaugcugggauuacagg

SEQ ID NO: 947166 - RNA, 24 nt, Human
aaaaugcugggauuacaggccuga

SEQ ID NO: 947167 - RNA, 25 nt, Human
aaacagcugcaaaacagcuuugcau

SEQ ID NO: 947168 - RNA, 22 nt, Human
aaagaaagaaacuaucagucug

SEQ ID NO: 947169 - RNA, 26 nt, Human
aaaugcugggauuacaggccugagcc

SEQ ID NO: 947170 - RNA, 22 nt, Human
aacagcugcaaaacagcuuugc

SEQ ID NO: 947171 - RNA, 18 nt, Human
aacucaugaccucaaguu

SEQ ID NO: 947172 - RNA, 22 nt, Human
aagaaagccagcccugccuagg

SEQ ID NO: 947173 - RNA, 18 nt, Human
aagcagguauuuuuuuua

SEQ ID NO: 947174 - RNA, 24 nt, Human
aaugcugggauuacaggccugagc

SEQ ID NO: 947175 - RNA, 18 nt, Human
aauuuuugaaaagucgga

SEQ ID NO: 947176 - RNA, 19 nt, Human
acccaggcuggagugcagu

SEQ ID NO: 947177 - RNA, 23 nt, Human
acccaggcuggagugcaguggug

SEQ ID NO: 947178 - RNA, 25 nt, Human
accgcaguccccucuccgccgcgcc

SEQ ID NO: 947179 - RNA, 19 nt, Human
accuccccaaaggcgggaa

SEQ ID NO: 947180 - RNA, 20 nt, Human
acgggguuucacuguuuugg

SEQ ID NO: 947181 - RNA, 24 nt, Human
acgggguuucacuguuuuggccag

SEQ ID NO: 947182 - RNA, 24 nt, Human
acuguuuuggccaggcugguuucg

SEQ ID NO: 947183 - RNA, 23 nt, Human
agcaacaggacaucuuuaaggga

SEQ ID NO: 947184 - RNA, 23 nt, Human
agccagcgagcgagccggggacc

SEQ ID NO: 947185 - RNA, 22 nt, Human
agccggggaccagggcgggcua

SEQ ID NO: 947186 - RNA, 25 nt, Human
aggcuggagugcaguggugcgaucu

SEQ ID NO: 947187 - RNA, 23 nt, Human
agggcgggcuagcgggcggggga

SEQ ID NO: 947188 - RNA, 18 nt, Human
aguagcugggauuacagg

SEQ ID NO: 947189 - RNA, 20 nt, Human
agugcaguggugcgaucucg

SEQ ID NO: 947190 - RNA, 23 nt, Human
agugcaguggugcgaucucggcu

SEQ ID NO: 947191 - RNA, 24 nt, Human
agugcaguggugcgaucucggcuc

SEQ ID NO: 947192 - RNA, 21 nt, Human
auccccggccgcgucccccuc

SEQ ID NO: 947193 - RNA, 20 nt, Human
auccgcucauccccggccgc

SEQ ID NO: 947194 - RNA, 19 nt, Human
auuacaggugugcgccacc

SEQ ID NO: 947195 - RNA, 18 nt, Human
caaaaggagauaaagugg

SEQ ID NO: 947196 - RNA, 24 nt, Human
caaaaugcugggauuacaggccug

SEQ ID NO: 947197 - RNA, 22 nt, Human
caacacaacacauuucucccuu

SEQ ID NO: 947198 - RNA, 22 nt, Human
caacaggacaucuuuaagggaa

SEQ ID NO: 947199 - RNA, 23 nt, Human
caacuuccaccucccagguucaa

SEQ ID NO: 947200 - RNA, 22 nt, Human
caagcgauuuuccugccucagc

SEQ ID NO: 947201 - RNA, 19 nt, Human
caagguggcaguggaggcc

SEQ ID NO: 947202 - RNA, 21 nt, Human
caagucuuugacuuacauccu

SEQ ID NO: 947203 - RNA, 21 nt, Human
cacccaggcuggagugcagug

SEQ ID NO: 947204 - RNA, 22 nt, Human
cacccgcaauccgcucaucccc

SEQ ID NO: 947205 - RNA, 23 nt, Human
cacuauguucucuucccuccggu

SEQ ID NO: 947206 - RNA, 21 nt, Human
cacugcaacuuccaccuccca

SEQ ID NO: 947207 - RNA, 21 nt, Human
cacuguuuuggccaggcuggu

SEQ ID NO: 947208 - RNA, 24 nt, Human
cacuguuuuggccaggcugguuuc

SEQ ID NO: 947209 - RNA, 28 nt, Human
cagcacaaaaugaaaucauggggcccuu

SEQ ID NO: 947210 - RNA, 20 nt, Human
cagcuuccugaguagcuggg

SEQ ID NO: 947211 - RNA, 18 nt, Human
cagggagugcccgggaac

SEQ ID NO: 947212 - RNA, 22 nt, Human
ccaaaaugcugggauuacaggc

SEQ ID NO: 947213 - RNA, 24 nt, Human
ccaaaaugcugggauuacaggccu

SEQ ID NO: 947214 - RNA, 24 nt, Human
ccaccucccagguucaagcgauuu

SEQ ID NO: 947215 - RNA, 20 nt, Human
cccagguucaagcgauuuuc

SEQ ID NO: 947216 - RNA, 23 nt, Human
cccagguucaagcgauuuuccug

SEQ ID NO: 947217 - RNA, 24 nt, Human
ccccaaaggcgggaaucuucacuu

SEQ ID NO: 947218 - RNA, 23 nt, Human
cccccucgcgcgccuccaccgcg

SEQ ID NO: 947219 - RNA, 24 nt, Human
cccgccuacucagauugccaaaag

SEQ ID NO: 947220 - RNA, 19 nt, Human
cccucgcgcgccuccaccg

SEQ ID NO: 947221 - RNA, 19 nt, Human
cccugggugguccagaccu

SEQ ID NO: 947222 - RNA, 24 nt, Human
ccucccagguucaagcgauuuucc

SEQ ID NO: 947223 - RNA, 22 nt, Human
ccugaguagcugggauuacagg

SEQ ID NO: 947224 - RNA, 23 nt, Human
ccugaguagcugggauuacaggu

SEQ ID NO: 947225 - RNA, 24 nt, Human
ccugaguagcugggauuacaggug

SEQ ID NO: 947226 - RNA, 19 nt, Human
ccugccuagguuccccgcc

SEQ ID NO: 947227 - RNA, 24 nt, Human
ccugccucagcuuccugaguagcu

SEQ ID NO: 947228 - RNA, 18 nt, Human
ccugugcugcuacacaag

SEQ ID NO: 947229 - RNA, 20 nt, Human
ccuucucuucccuuuauauc

SEQ ID NO: 947230 - RNA, 20 nt, Human
ccuuuuucugcuuucagaga

SEQ ID NO: 947231 - RNA, 21 nt, Human
cgacucggagaaaagcagcgg

SEQ ID NO: 947232 - RNA, 20 nt, Human
cgagccggggaccagggcgg

SEQ ID NO: 947233 - RNA, 21 nt, Human
cgcgucccccucgcgcgccuc

SEQ ID NO: 947234 - RNA, 24 nt, Human
cgcucuugucacccaggcuggagu

SEQ ID NO: 947235 - RNA, 21 nt, Human
cggagaaaagcagcggcucac

SEQ ID NO: 947236 - RNA, 24 nt, Human
cgggguuucacuguuuuggccagg

SEQ ID NO: 947237 - RNA, 20 nt, Human
cuaagugugggcccugugcu

SEQ ID NO: 947238 - RNA, 24 nt, Human
cucacugcaacuuccaccucccag

SEQ ID NO: 947239 - RNA, 20 nt, Human
cucagcacaaaaugaaauca

SEQ ID NO: 947240 - RNA, 24 nt, Human
cucagcuuccugaguagcugggau

SEQ ID NO: 947241 - RNA, 21 nt, Human
cucuugucacccaggcuggag

SEQ ID NO: 947242 - RNA, 21 nt, Human
cugaguagcugggauuacagg

SEQ ID NO: 947243 - RNA, 24 nt, Human
cugaguagcugggauuacaggugu

SEQ ID NO: 947244 - RNA, 23 nt, Human
cugcaacuuccaccucccagguu

SEQ ID NO: 947245 - RNA, 24 nt, Human
cugcaacuuccaccucccagguuc

SEQ ID NO: 947246 - RNA, 28 nt, Human
cuggcuaauuuuguauuuuuaguagaga

SEQ ID NO: 947247 - RNA, 24 nt, Human
cugggugguccagaccuccccaaa

SEQ ID NO: 947248 - RNA, 23 nt, Human
cuguuuuaaagcuaagacaacac

SEQ ID NO: 947249 - RNA, 20 nt, Human
cuugagccaacuucgguagc

SEQ ID NO: 947250 - RNA, 21 nt, Human
cuugccagccaagguggcagu

SEQ ID NO: 947251 - RNA, 24 nt, Human
cuugccucagccucccaaaaugcu

SEQ ID NO: 947252 - RNA, 24 nt, Human
cuugucacccaggcuggagugcag

SEQ ID NO: 947253 - RNA, 21 nt, Human
gaacaucgccgggcgcgggac

SEQ ID NO: 947254 - RNA, 23 nt, Human
gaagaauuuuacuggaaccugga

SEQ ID NO: 947255 - RNA, 24 nt, Human
gaccucaaguuauccacuugccuc

SEQ ID NO: 947256 - RNA, 26 nt, Human
gaccucaaguuauccacuugccucag

SEQ ID NO: 947257 - RNA, 23 nt, Human
gacgcagcugaccgcaguccccc

SEQ ID NO: 947258 - RNA, 21 nt, Human
gagauaaaguggcucaauugg

SEQ ID NO: 947259 - RNA, 19 nt, Human
gaguagcugggauuacagg

SEQ ID NO: 947260 - RNA, 24 nt, Human
gaguagcugggauuacaggugugc

SEQ ID NO: 947261 - RNA, 18 nt, Human
gauuacaggccugagcca

SEQ ID NO: 947262 - RNA, 21 nt, Human
gauuacaggccugagccacca

SEQ ID NO: 947263 - RNA, 24 nt, Human
gauuacaggccugagccaccaugc

SEQ ID NO: 947264 - RNA, 18 nt, Human
gauuacaggugugcgcca

SEQ ID NO: 947265 - RNA, 21 nt, Human
gauuuuccugccucagcuucc

SEQ ID NO: 947266 - RNA, 22 nt, Human
gccgcacagccccaaguggacg

SEQ ID NO: 947267 - RNA, 21 nt, Human
gccgcgucccccucgcgcgcc

SEQ ID NO: 947268 - RNA, 24 nt, Human
gccucagcuuccugaguagcuggg

SEQ ID NO: 947269 - RNA, 21 nt, Human
gccuuuuucugcuuucagaga

SEQ ID NO: 947270 - RNA, 23 nt, Human
gcgauuuuccugccucagcuucc

SEQ ID NO: 947271 - RNA, 21 nt, Human
gcuagcgggcgggggauaagc

SEQ ID NO: 947272 - RNA, 21 nt, Human
gcucaauuggguuguccagau

SEQ ID NO: 947273 - RNA, 28 nt, Human
ggaccagggcgggcuagcgggcggggga

SEQ ID NO: 947274 - RNA, 21 nt, Human
ggaggcccugggugguccaga

SEQ ID NO: 947275 - RNA, 23 nt, Human
ggaguuucgcucuugucacccag

SEQ ID NO: 947276 - RNA, 24 nt, Human
ggauuacaggccugagccaccaug

SEQ ID NO: 947277 - RNA, 18 nt, Human
gggcgggcuagcgggcgg

SEQ ID NO: 947278 - RNA, 19 nt, Human
ggggcccuucuucaaacau

SEQ ID NO: 947279 - RNA, 23 nt, Human
gggguuucacuguuuuggccagg

SEQ ID NO: 947280 - RNA, 22 nt, Human
ggugagccuccuucucuucccu

SEQ ID NO: 947281 - RNA, 18 nt, Human
guagcugggauuacaggu

SEQ ID NO: 947282 - RNA, 19 nt, Human
guauuaaaguuaggcuggu

SEQ ID NO: 947283 - RNA, 24 nt, Human
guuauccacuugccucagccuccc

SEQ ID NO: 947284 - RNA, 24 nt, Human
uaaagcuaagacaacacaacacau

SEQ ID NO: 947285 - RNA, 30 nt, Human
uaacacuaaaaacaaauucuugagccaacc

SEQ ID NO: 947286 - RNA, 22 nt, Human
uaacugagaggggucuaaauau

SEQ ID NO: 947287 - RNA, 24 nt, Human
uaagcauuucuuaacugagagggg

SEQ ID NO: 947288 - RNA, 21 nt, Human
uacagaaugaucaagaaagua

SEQ ID NO: 947289 - RNA, 22 nt, Human
uacaggccugagccaccaugcc

SEQ ID NO: 947290 - RNA, 20 nt, Human
uacaggugugcgccaccaca

SEQ ID NO: 947291 - RNA, 19 nt, Human
uagcgggcgggggauaagc

SEQ ID NO: 947292 - RNA, 20 nt, Human
uaguagagacgggguuucac

SEQ ID NO: 947293 - RNA, 22 nt, Human
uaguagagacgggguuucacug

SEQ ID NO: 947294 - RNA, 26 nt, Human
uaguagagacgggguuucacuguuuu

SEQ ID NO: 947295 - RNA, 22 nt, Human
uaucacuaaagcaacaggacau

SEQ ID NO: 947296 - RNA, 18 nt, Human
uaugaaagaaagaaacua

SEQ ID NO: 947297 - RNA, 24 nt, Human
ucaaauuuuugaaaagucggaaaa

SEQ ID NO: 947298 - RNA, 24 nt, Human
ucacccaggcuggagugcaguggu

SEQ ID NO: 947299 - RNA, 24 nt, Human
ucacugcaacuuccaccucccagg

SEQ ID NO: 947300 - RNA, 25 nt, Human
ucacugcaacuuccaccucccaggu

SEQ ID NO: 947301 - RNA, 20 nt, Human
ucagcuuccugaguagcugg

SEQ ID NO: 947302 - RNA, 20 nt, Human
uccaaauggccggcaaauuu

SEQ ID NO: 947303 - RNA, 24 nt, Human
uccacuugccucagccucccaaaa

SEQ ID NO: 947304 - RNA, 24 nt, Human
uccaguagugacuuacagaugaaa

SEQ ID NO: 947305 - RNA, 24 nt, Human
ucccaaaaugcugggauuacaggc

SEQ ID NO: 947306 - RNA, 18 nt, Human
ucccagguucaagcgauu

SEQ ID NO: 947307 - RNA, 24 nt, Human
ucccagguucaagcgauuuuccug

SEQ ID NO: 947308 - RNA, 24 nt, Human
uccugaguagcugggauuacaggu

SEQ ID NO: 947309 - RNA, 22 nt, Human
ucgcucuugucacccaggcugg

SEQ ID NO: 947310 - RNA, 23 nt, Human
ucgcucuugucacccaggcugga

SEQ ID NO: 947311 - RNA, 22 nt, Human
ucucccuugccagccaaggugg

SEQ ID NO: 947312 - RNA, 18 nt, Human
ucuugucacccaggcugg

SEQ ID NO: 947313 - RNA, 19 nt, Human
ucuuugaacuuacugugua

SEQ ID NO: 947314 - RNA, 21 nt, Human
ugaaaagucggaaaaacugug

SEQ ID NO: 947315 - RNA, 25 nt, Human
ugaaagaaagaaacuaucagucugu

SEQ ID NO: 947316 - RNA, 22 nt, Human
ugaaagccuuaguuuuagccua

SEQ ID NO: 947317 - RNA, 24 nt, Human
ugaaaucauggggcccuucuucaa

SEQ ID NO: 947318 - RNA, 20 nt, Human
ugaccucaaguuauccacuu

SEQ ID NO: 947319 - RNA, 27 nt, Human
ugaccucaaguuauccacuugccucag

SEQ ID NO: 947320 - RNA, 26 nt, Human
ugagaggggucuaaauaucacuaaag

SEQ ID NO: 947321 - RNA, 18 nt, Human
ugauaugaaagaaagaaa

SEQ ID NO: 947322 - RNA, 22 nt, Human
ugcaguggugcgaucucggcuc

SEQ ID NO: 947323 - RNA, 21 nt, Human
ugcccgggaacaucgccgggc

SEQ ID NO: 947324 - RNA, 24 nt, Human
ugccucagccucccaaaaugcugg

SEQ ID NO: 947325 - RNA, 24 nt, Human
ugccucagcuuccugaguagcugg

SEQ ID NO: 947326 - RNA, 20 nt, Human
uggacgcagcugaccgcagu

SEQ ID NO: 947327 - RNA, 24 nt, Human
uggaggcccuggguggucgguagc

SEQ ID NO: 947328 - RNA, 23 nt, Human
uggagugcaguggugcgaucucg

SEQ ID NO: 947329 - RNA, 24 nt, Human
uggagugcaguggugcgaucucgg

SEQ ID NO: 947330 - RNA, 24 nt, Human
uggccaggcugguuucgaacucau

SEQ ID NO: 947331 - RNA, 29 nt, Human
uggcuaauuuuguauuuuuaguagagacg

SEQ ID NO: 947332 - RNA, 18 nt, Human
ugggauuacaggccugag

SEQ ID NO: 947333 - RNA, 21 nt, Human
ugggauuacaggccugagcca

SEQ ID NO: 947334 - RNA, 22 nt, Human
ugggauuacaggccugagccac

SEQ ID NO: 947335 - RNA, 24 nt, Human
ugggauuacaggccugagccacca

SEQ ID NO: 947336 - RNA, 25 nt, Human
ugggauuacaggccugagccaccau

SEQ ID NO: 947337 - RNA, 18 nt, Human
ugggauuacaggugugcg

SEQ ID NO: 947338 - RNA, 21 nt, Human
ugggauuacaggugugcgcca

SEQ ID NO: 947339 - RNA, 22 nt, Human
ugggauuacaggugugcgccac

SEQ ID NO: 947340 - RNA, 24 nt, Human
ugggauuacaggugugcgccacca

SEQ ID NO: 947341 - RNA, 25 nt, Human
ugggauuacaggugugcgccaccac

SEQ ID NO: 947342 - RNA, 21 nt, Human
uguauuuuuaguagagacggg

SEQ ID NO: 947343 - RNA, 22 nt, Human
ugugaacaucuuuauacaugug

SEQ ID NO: 947344 - RNA, 21 nt, Human
ugugauaugaaagaaagaaac

SEQ ID NO: 947345 - RNA, 21 nt, Human
uuaaagcuaagacaacacaac

SEQ ID NO: 947346 - RNA, 19 nt, Human
uuaaucagacaugauuaaa

SEQ ID NO: 947347 - RNA, 21 nt, Human
uuaguagagacgggguuucac

SEQ ID NO: 947348 - RNA, 21 nt, Human
uuaguagagacgggguuucac

SEQ ID NO: 947349 - RNA, 22 nt, Human
uuaguagagacgggguuucacu

SEQ ID NO: 947350 - RNA, 24 nt, Human
uuaguagagacgggguuucacugu

SEQ ID NO: 947351 - RNA, 18 nt, Human
uuagucacucuuaccaac

SEQ ID NO: 947352 - RNA, 21 nt, Human
uucaagcgauuuuccugccuc

SEQ ID NO: 947353 - RNA, 23 nt, Human
uucaagcgauuuuccugccucag

SEQ ID NO: 947354 - RNA, 24 nt, Human
uucaagcgauuuuccugccucagc

SEQ ID NO: 947355 - RNA, 18 nt, Human
uucauaauaauaaaaaag

SEQ ID NO: 947356 - RNA, 24 nt, Human
uucgcucuugucacccaggcugga

SEQ ID NO: 947357 - RNA, 21 nt, Human
uucggucagaagaauuuuacu

SEQ ID NO: 947358 - RNA, 24 nt, Human
uucucuauacaugugauaugaaag

SEQ ID NO: 947359 - RNA, 19 nt, Human
uucucugugaacaucuuua

SEQ ID NO: 947360 - RNA, 22 nt, Human
uucuugagccaacuucgguagc

SEQ ID NO: 947361 - RNA, 20 nt, Human
uugaaaagucggaaaaacug

SEQ ID NO: 947362 - RNA, 24 nt, Human
uugccucagccucccaaaaugcug

SEQ ID NO: 947363 - RNA, 23 nt, Human
uuguauuuuuaguagagacgggg

SEQ ID NO: 947364 - RNA, 23 nt, Human
uuucacuguuuuggccaggcugu

SEQ ID NO: 947365 - RNA, 24 nt, Human
uuucgcucuugucacccaggcugg

SEQ ID NO: 947366 - RNA, 22 nt, Human
uuugagcaagaaaacauaggau

SEQ ID NO: 947367 - RNA, 19 nt, Human
uuuuguauuuuuaguagag

SEQ ID NO: 947368 - RNA, 20 nt, Human
uuuuguauuuuuaguagaga

SEQ ID NO: 947369 - RNA, 24 nt, Human
uuuuuaguagagacgggguuucac

SEQ ID NO: 947370 - RNA, 20 nt, Human
aaaaaaaaaacaaacaggag

SEQ ID NO: 947371 - RNA, 24 nt, Human
aaaaaaacaaacaggagaacccaa

SEQ ID NO: 947372 - RNA, 24 nt, Human
aaaaaaacaaacaggagaacccaa

SEQ ID NO: 947373 - RNA, 24 nt, Human
aaaaaaagaaagaaaaccgcacaa

SEQ ID NO: 947374 - RNA, 25 nt, Human
aaaaaacaaacaggagaacccaaaa

SEQ ID NO: 947375 - RNA, 24 nt, Human
aaaaaagaaagaaaaccgcacaag

SEQ ID NO: 947376 - RNA, 25 nt, Human
aaacaaaaaguaaaacacagggacc

SEQ ID NO: 947377 - RNA, 18 nt, Human
aaacaaacaggagaaccc

SEQ ID NO: 947378 - RNA, 18 nt, Human
aaacaaacaggagaaccc

SEQ ID NO: 947379 - RNA, 23 nt, Human
aaacaaacaggagaacccaaaau

SEQ ID NO: 947380 - RNA, 27 nt, Human
aaagaaaaaaagaaagaaaaccgcaca

SEQ ID NO: 947381 - RNA, 18 nt, Human
aaaugcuaaaauagccaa

SEQ ID NO: 947382 - RNA, 23 nt, Human
aaauguaauuagaacagccacag

SEQ ID NO: 947383 - RNA, 20 nt, Human
aacugggaaaucuaaaaauc

SEQ ID NO: 947384 - RNA, 18 nt, Human
aagaaagaaaaccgcaca

SEQ ID NO: 947385 - RNA, 21 nt, Human
aagaaagaaaaccgcacaaga

SEQ ID NO: 947386 - RNA, 22 nt, Human
aagaguuacauuggaggaaugg

SEQ ID NO: 947387 - RNA, 24 nt, Human
aagcacagaucuaauggccauacc

SEQ ID NO: 947388 - RNA, 23 nt, Human
aaguauuuagcacaaugcuuggu

SEQ ID NO: 947389 - RNA, 24 nt, Human
aagucauucucuauggggcgggac

SEQ ID NO: 947390 - RNA, 21 nt, Human
aagugauagaaguuauguacu

SEQ ID NO: 947391 - RNA, 21 nt, Human
acauuagagaagccacauuaa

SEQ ID NO: 947392 - RNA, 18 nt, Human
acuuaauaaacauuuggg

SEQ ID NO: 947393 - RNA, 24 nt, Human
agaagucacuuugaaaugcuaaaa

SEQ ID NO: 947394 - RNA, 18 nt, Human
agcaccggggagcggggg

SEQ ID NO: 947395 - RNA, 24 nt, Human
agcuuguuuaaagugcagaaaucu

SEQ ID NO: 947396 - RNA, 22 nt, Human
aggugggagaaauggccugcuu

SEQ ID NO: 947397 - RNA, 21 nt, Human
auguaauuagaacagccacag

SEQ ID NO: 947398 - RNA, 22 nt, Human
caaagaaacuacauuagagaag

SEQ ID NO: 947399 - RNA, 22 nt, Human
caaagagcagagauaaaaagca

SEQ ID NO: 947400 - RNA, 20 nt, Human
caagcagcgaccccucaagg

SEQ ID NO: 947401 - RNA, 18 nt, Human
caauagcuagaauauugc

SEQ ID NO: 947402 - RNA, 20 nt, Human
cacauuaaaaaaaaagcuuc

SEQ ID NO: 947403 - RNA, 24 nt, Human
caggcccugauuuauaaaaacaag

SEQ ID NO: 947404 - RNA, 18 nt, Human
cauagaagucacuuugaa

SEQ ID NO: 947405 - RNA, 20 nt, Human
cauagaagucacuuugaaau

SEQ ID NO: 947406 - RNA, 24 nt, Human
cauguccaucaguagcucccaaac

SEQ ID NO: 947407 - RNA, 18 nt, Human
cauuggaggaauggagaa

SEQ ID NO: 947408 - RNA, 18 nt, Human
ccaaaaugaagggaaaaa

SEQ ID NO: 947409 - RNA, 20 nt, Human
ccaucaguagcucccaaacu

SEQ ID NO: 947410 - RNA, 18 nt, Human
ccccugggauaagagccc

SEQ ID NO: 947411 - RNA, 22 nt, Human
ccgcgcggugggcgugcgcgug

SEQ ID NO: 947412 - RNA, 22 nt, Human
ccucaagcagcgaccccucaag

SEQ ID NO: 947413 - RNA, 19 nt, Human
ccuugaggguguggaacug

SEQ ID NO: 947414 - RNA, 22 nt, Human
cgggggaagccgcgcggugggc

SEQ ID NO: 947415 - RNA, 22 nt, Human
cgugcgcgugcgcgugcgcgcg

SEQ ID NO: 947416 - RNA, 23 nt, Human
cucaaaauguaauuagaacagcc

SEQ ID NO: 947417 - RNA, 19 nt, Human
cucuccucagcaccgggga

SEQ ID NO: 947418 - RNA, 19 nt, Human
cugaaauucuugaguaaag

SEQ ID NO: 947419 - RNA, 23 nt, Human
cugcaccccaugccaauuaaguc

SEQ ID NO: 947420 - RNA, 20 nt, Human
gagaacccaaaaugaaggga

SEQ ID NO: 947421 - RNA, 20 nt, Human
gagcagagauaaaaagcaca

SEQ ID NO: 947422 - RNA, 20 nt, Human
gcauagaaaaaagaucugga

SEQ ID NO: 947423 - RNA, 22 nt, Human
gcggugggcgugcgcgugcgcg

SEQ ID NO: 947424 - RNA, 21 nt, Human
ggagaacccaaaaugaaggga

SEQ ID NO: 947425 - RNA, 21 nt, Human
ggcccugauuuauaaaaacaa

SEQ ID NO: 947426 - RNA, 22 nt, Human
ggcgugcgcgugcgcgugcgcg

SEQ ID NO: 947427 - RNA, 22 nt, Human
guaaaacacauacacauacaua

SEQ ID NO: 947428 - RNA, 23 nt, Human
guaaaacacauacacauacauaa

SEQ ID NO: 947429 - RNA, 19 nt, Human
uaaaaaaaaaacaaacagg

SEQ ID NO: 947430 - RNA, 23 nt, Human
uaaaaaaaaagcuucauagaagu

SEQ ID NO: 947431 - RNA, 22 nt, Human
uaaaaacuccauucagaacaga

SEQ ID NO: 947432 - RNA, 22 nt, Human
uaaaacugaaagcagugcuuaa

SEQ ID NO: 947433 - RNA, 23 nt, Human
uaagagcuuaacuaucaauaaug

SEQ ID NO: 947434 - RNA, 26 nt, Human
uaaguaacauccgaauuaaaaagucc

SEQ ID NO: 947435 - RNA, 18 nt, Human
uaccuugaggguguggaa

SEQ ID NO: 947436 - RNA, 21 nt, Human
uagaacagccacagcauccuc

SEQ ID NO: 947437 - RNA, 19 nt, Human
uagaauauccuaaaauauc

SEQ ID NO: 947438 - RNA, 23 nt, Human
uagaauauugcuauuucucaaug

SEQ ID NO: 947439 - RNA, 23 nt, Human
uagccaaguuugaggaacaaugc

SEQ ID NO: 947440 - RNA, 24 nt, Human
uauuccauuuauacuuacuuuuca

SEQ ID NO: 947441 - RNA, 18 nt, Human
ucaaaacaucuguaacua

SEQ ID NO: 947442 - RNA, 18 nt, Human
ucacuagagaugacaaac

SEQ ID NO: 947443 - RNA, 21 nt, Human
uccaucaguagcucccaaacu

SEQ ID NO: 947444 - RNA, 22 nt, Human
ucggaucgcucucuccucagca

SEQ ID NO: 947445 - RNA, 23 nt, Human
ucugaaauucuugaguaaaggag

SEQ ID NO: 947446 - RNA, 22 nt, Human
ucuguaacuaaaaagugcuguc

SEQ ID NO: 947447 - RNA, 23 nt, Human
ugaaaaaaacaacauucugaaaa

SEQ ID NO: 947448 - RNA, 20 nt, Human
ugaagggaaaaacuuagagc

SEQ ID NO: 947449 - RNA, 20 nt, Human
ugaugccuggacugcacccc

SEQ ID NO: 947450 - RNA, 19 nt, Human
ugcgcgugcgcgugcgcgc

SEQ ID NO: 947451 - RNA, 18 nt, Human
uggaguaucuacaugaaa

SEQ ID NO: 947452 - RNA, 25 nt, Human
uggggcgggacccagacauccaugu

SEQ ID NO: 947453 - RNA, 19 nt, Human
ugucugauuacgcauagaa

SEQ ID NO: 947454 - RNA, 22 nt, Human
uguguagucgguaaucaaagaa

SEQ ID NO: 947455 - RNA, 22 nt, Human
uuaaaaagaaaaaaagaaagaa

SEQ ID NO: 947456 - RNA, 23 nt, Human
uucaaaacuaguacacugaaacc

SEQ ID NO: 947457 - RNA, 19 nt, Human
uuuguuuaucauuucuccc

SEQ ID NO: 947458 - RNA, 24 nt, Human
uuuuccauuuguuuaucauuucuc

SEQ ID NO: 947459 - RNA, 21 nt, Human
aaaaaaaaaaaaaagaacagu

SEQ ID NO: 947460 - RNA, 18 nt, Human
aaacuagaauaauguucg

SEQ ID NO: 947461 - RNA, 26 nt, Human
aaagaacaguacauuucugucuacaa

SEQ ID NO: 947462 - RNA, 20 nt, Human
aaagagguucgccugccccu

SEQ ID NO: 947463 - RNA, 20 nt, Human
acacaggucauucagcuuua

SEQ ID NO: 947464 - RNA, 19 nt, Human
acagagccagcagucacca

SEQ ID NO: 947465 - RNA, 25 nt, Human
agcaagucugaaggagcgcagccuc

SEQ ID NO: 947466 - RNA, 19 nt, Human
agcagggacaaaagcuucc

SEQ ID NO: 947467 - RNA, 18 nt, Human
agggcugggaaagggcuu

SEQ ID NO: 947468 - RNA, 19 nt, Human
agguagcagagaguaggcg

SEQ ID NO: 947469 - RNA, 19 nt, Human
aggugcugcccgcauuaac

SEQ ID NO: 947470 - RNA, 20 nt, Human
agugguggagggcugggaaa

SEQ ID NO: 947471 - RNA, 21 nt, Human
caaagaaagagguucgccugc

SEQ ID NO: 947472 - RNA, 21 nt, Human
cagcagggacaaaagcuuccu

SEQ ID NO: 947473 - RNA, 21 nt, Human
cagugaggcccuccuuugucc

SEQ ID NO: 947474 - RNA, 21 nt, Human
ccacugaaagcuuuucacugu

SEQ ID NO: 947475 - RNA, 26 nt, Human
cccgcauuaacagcagggacaaaagc

SEQ ID NO: 947476 - RNA, 23 nt, Human
ccgggcagggcgggggacagccu

SEQ ID NO: 947477 - RNA, 21 nt, Human
ccuccagguucuccuugggcc

SEQ ID NO: 947478 - RNA, 22 nt, Human
ccuccuaauacauaagaaugaa

SEQ ID NO: 947479 - RNA, 18 nt, Human
cgcauuuuauuaaauaga

SEQ ID NO: 947480 - RNA, 19 nt, Human
cgugcagaaggccaggucc

SEQ ID NO: 947481 - RNA, 23 nt, Human
gcggcgguggcggcggcggcccu

SEQ ID NO: 947482 - RNA, 21 nt, Human
gcgguggcggcggcggcccgc

SEQ ID NO: 947483 - RNA, 18 nt, Human
ggaauacucucuccacuc

SEQ ID NO: 947484 - RNA, 19 nt, Human
ggcggcgguggcggcggcg

SEQ ID NO: 947485 - RNA, 19 nt, Human
ggcggcgguggcggcggcg

SEQ ID NO: 947486 - RNA, 19 nt, Human
gggccgggcagggcggggg

SEQ ID NO: 947487 - RNA, 18 nt, Human
uaacagcagggacaaaag

SEQ ID NO: 947488 - RNA, 22 nt, Human
uaagaaugaacguccagguagc

SEQ ID NO: 947489 - RNA, 19 nt, Human
uacaaaaugauucugcagc

SEQ ID NO: 947490 - RNA, 21 nt, Human
uccacucgccaggguggaagu

SEQ ID NO: 947491 - RNA, 21 nt, Human
uccaguuugaugaggugacag

SEQ ID NO: 947492 - RNA, 21 nt, Human
uccuccacugaaagcuuuuca

SEQ ID NO: 947493 - RNA, 26 nt, Human
ugccccugcuccacucgccagggugg

SEQ ID NO: 947494 - RNA, 18 nt, Human
uggccuccagguucuccu

SEQ ID NO: 947495 - RNA, 22 nt, Human
uggcggcggcggcccgcggggc

SEQ ID NO: 947496 - RNA, 22 nt, Human
uuaaaaaaaaaaaaaagaacag

SEQ ID NO: 947497 - RNA, 24 nt, Human
uuccaaguugcuguaggugcugcc

SEQ ID NO: 947498 - RNA, 22 nt, Human
uucccauguaaagaaagccaac

SEQ ID NO: 947499 - RNA, 19 nt, Human
uugcuguaggugcugcccg

SEQ ID NO: 947500 - RNA, 19 nt, Human
uuguccuccacugaaagcu

SEQ ID NO: 947501 - RNA, 23 nt, Human
uuguuuaaaaaaaaaaaaaagaa

SEQ ID NO: 947502 - RNA, 18 nt, Human
uuuagugguggccuccag

SEQ ID NO: 947503 - RNA, 23 nt, Human
aagcgauccaugauuauacccaa

SEQ ID NO: 947504 - RNA, 20 nt, Human
agcaggagggcguggcgagc

SEQ ID NO: 947505 - RNA, 20 nt, Human
caagcgauccaugauuauac

SEQ ID NO: 947506 - RNA, 22 nt, Human
ccuguagcugaagauugaggac

SEQ ID NO: 947507 - RNA, 20 nt, Human
ggcguggcgagcggggaaag

SEQ ID NO: 947508 - RNA, 22 nt, Human
guggcgagcggggaaagcaggg

SEQ ID NO: 947509 - RNA, 22 nt, Human
uccacucaaaguuacucauucc

SEQ ID NO: 947510 - RNA, 24 nt, Human
ugaggaaaugaggccggacggagg

SEQ ID NO: 947511 - RNA, 30 nt, Human
ugauuauacccacuauguuuguuucuucuu

SEQ ID NO: 947512 - RNA, 21 nt, Human
aaaaugccagaaaaaccugga

SEQ ID NO: 947513 - RNA, 24 nt, Human
aaacaaacgcauaugacauuuuac

SEQ ID NO: 947514 - RNA, 23 nt, Human
aaacagcacaaauguacguuacu

SEQ ID NO: 947515 - RNA, 19 nt, Human
aaaccuggaacagaaaaug

SEQ ID NO: 947516 - RNA, 19 nt, Human
aaagaaacauaauauccug

SEQ ID NO: 947517 - RNA, 20 nt, Human
aagcaggcgugggagcaggg

SEQ ID NO: 947518 - RNA, 25 nt, Human
acaccacgagguaaacgccgggacc

SEQ ID NO: 947519 - RNA, 18 nt, Human
acagacgaugugugcagc

SEQ ID NO: 947520 - RNA, 19 nt, Human
accaccacccccaacccgc

SEQ ID NO: 947521 - RNA, 18 nt, Human
accccaccaccaccccca

SEQ ID NO: 947522 - RNA, 20 nt, Human
accccaccaccacccccaac

SEQ ID NO: 947523 - RNA, 18 nt, Human
acucugaggagaggggug

SEQ ID NO: 947524 - RNA, 20 nt, Human
acucugaggagaggggugga

SEQ ID NO: 947525 - RNA, 19 nt, Human
acugcacccagagccuagg

SEQ ID NO: 947526 - RNA, 20 nt, Human
acugcacccagagccuagga

SEQ ID NO: 947527 - RNA, 23 nt, Human
agaaaaugccagaaaaaccugga

SEQ ID NO: 947528 - RNA, 21 nt, Human
agacaggagggagccucuugg

SEQ ID NO: 947529 - RNA, 22 nt, Human
agacggcccgcggcggccccgg

SEQ ID NO: 947530 - RNA, 23 nt, Human
agagaggaaggggaagaaaaggg

SEQ ID NO: 947531 - RNA, 19 nt, Human
agaggaaggggaagaaaag

SEQ ID NO: 947532 - RNA, 22 nt, Human
agaggaaggggaagaaaagggg

SEQ ID NO: 947533 - RNA, 23 nt, Human
agaggaaggggaagaaaagggga

SEQ ID NO: 947534 - RNA, 21 nt, Human
aggaaaugggucucgugcuga

SEQ ID NO: 947535 - RNA, 18 nt, Human
aggaaggggaagaaaagg

SEQ ID NO: 947536 - RNA, 18 nt, Human
aggaaggggaagaaaagg

SEQ ID NO: 947537 - RNA, 21 nt, Human
aggagggagccucuuggaggg

SEQ ID NO: 947538 - RNA, 23 nt, Human
aggcaaacacaccacgagguaaa

SEQ ID NO: 947539 - RNA, 19 nt, Human
agggagccucuuggagggc

SEQ ID NO: 947540 - RNA, 25 nt, Human
caaggcaaacacaccacgagguaaa

SEQ ID NO: 947541 - RNA, 21 nt, Human
cacaaaauugaaaacagcaca

SEQ ID NO: 947542 - RNA, 26 nt, Human
cacccaggcuguggccccuucagggc

SEQ ID NO: 947543 - RNA, 26 nt, Human
cacucaaucacccucuccaggggagc

SEQ ID NO: 947544 - RNA, 19 nt, Human
cagaaaaugccagaaaaac

SEQ ID NO: 947545 - RNA, 20 nt, Human
cagcaccccaccaccacccc

SEQ ID NO: 947546 - RNA, 19 nt, Human
cagccggggcaugaaaggc

SEQ ID NO: 947547 - RNA, 21 nt, Human
cagggcagcaugguacccguc

SEQ ID NO: 947548 - RNA, 19 nt, Human
ccacccaggcuguggcccc

SEQ ID NO: 947549 - RNA, 23 nt, Human
cccaccaccacccccaacccgcu

SEQ ID NO: 947550 - RNA, 19 nt, Human
cccaggucauaccuccugu

SEQ ID NO: 947551 - RNA, 24 nt, Human
ccccaccaccacccccaacccggu

SEQ ID NO: 947552 - RNA, 18 nt, Human
cccccaacccgcuagugc

SEQ ID NO: 947553 - RNA, 23 nt, Human
ccccgugcagaguuugugccucc

SEQ ID NO: 947554 - RNA, 22 nt, Human
ccgcacgcagcaucccagaccu

SEQ ID NO: 947555 - RNA, 18 nt, Human
ccgcagccggagccugag

SEQ ID NO: 947556 - RNA, 21 nt, Human
ccggugaucuccacacucaau

SEQ ID NO: 947557 - RNA, 19 nt, Human
ccugaggcugccagcaccc

SEQ ID NO: 947558 - RNA, 20 nt, Human
cgacccggagucuaggacac

SEQ ID NO: 947559 - RNA, 24 nt, Human
cgagcagggaccuuaagaagcagg

SEQ ID NO: 947560 - RNA, 19 nt, Human
cuaagacuuucccugaccc

SEQ ID NO: 947561 - RNA, 22 nt, Human
cuaagcagauacuacuguacuc

SEQ ID NO: 947562 - RNA, 23 nt, Human
cuacugcacccagagccuaggac

SEQ ID NO: 947563 - RNA, 26 nt, Human
cucacuacugcacccagaagguuuuc

SEQ ID NO: 947564 - RNA, 23 nt, Human
cuccacacucaaucacccucucc

SEQ ID NO: 947565 - RNA, 23 nt, Human
cucccucaucucuuaguucucag

SEQ ID NO: 947566 - RNA, 22 nt, Human
cuccugaggcugccagcacccc

SEQ ID NO: 947567 - RNA, 18 nt, Human
cucugggcucgcuaaaua

SEQ ID NO: 947568 - RNA, 21 nt, Human
cugaccccacccaggucauac

SEQ ID NO: 947569 - RNA, 20 nt, Human
cugccagcaccccaccacca

SEQ ID NO: 947570 - RNA, 23 nt, Human
cugccagcaccccaccaccaccc

SEQ ID NO: 947571 - RNA, 22 nt, Human
cuggagccgcagccggagccug

SEQ ID NO: 947572 - RNA, 20 nt, Human
cugggcucgcuaaauaggca

SEQ ID NO: 947573 - RNA, 24 nt, Human
gaaaaaagaaacauaauauccuga

SEQ ID NO: 947574 - RNA, 20 nt, Human
gaaaaugccagaaaaaccug

SEQ ID NO: 947575 - RNA, 23 nt, Human
gacuggcaaaaaugaaaaaagaa

SEQ ID NO: 947576 - RNA, 23 nt, Human
gagagaggaaggggaagaaaagg

SEQ ID NO: 947577 - RNA, 22 nt, Human
gagaggaaggggaagaaaaggg

SEQ ID NO: 947578 - RNA, 20 nt, Human
gagccgcagccggagccuga

SEQ ID NO: 947579 - RNA, 19 nt, Human
gagccugagccggacucug

SEQ ID NO: 947580 - RNA, 24 nt, Human
gccacagaggccuuucucgccccc

SEQ ID NO: 947581 - RNA, 18 nt, Human
gccagaaaaaccuggaac

SEQ ID NO: 947582 - RNA, 20 nt, Human
ggaacagaaaaugccagaaa

SEQ ID NO: 947583 - RNA, 20 nt, Human
ggaagaaaccuggaacagaa

SEQ ID NO: 947584 - RNA, 18 nt, Human
ggaggagaauaaagugcu

SEQ ID NO: 947585 - RNA, 23 nt, Human
ggaggagaauaaagugcucgugg

SEQ ID NO: 947586 - RNA, 21 nt, Human
ggccgagcagggaccuuaaga

SEQ ID NO: 947587 - RNA, 21 nt, Human
gggagagaggaaggggaagaa

SEQ ID NO: 947588 - RNA, 24 nt, Human
gucugccuuccacccaggcugugg

SEQ ID NO: 947589 - RNA, 25 nt, Human
guggagcagaggagcuuuauuagag

SEQ ID NO: 947590 - RNA, 21 nt, Human
uaaaacaaacgcauaugacca

SEQ ID NO: 947591 - RNA, 18 nt, Human
uaagacuuucccugaccc

SEQ ID NO: 947592 - RNA, 22 nt, Human
uacugcacccagagccuaggac

SEQ ID NO: 947593 - RNA, 22 nt, Human
uagcacaaaauugaaaacagca

SEQ ID NO: 947594 - RNA, 21 nt, Human
ucaagguggagcagaggagcu

SEQ ID NO: 947595 - RNA, 23 nt, Human
ucuccacacucaaucacccucuc

SEQ ID NO: 947596 - RNA, 20 nt, Human
ucuccaggggagcgaucgcu

SEQ ID NO: 947597 - RNA, 19 nt, Human
ucuuuucuuucuaaaccuu

SEQ ID NO: 947598 - RNA, 18 nt, Human
ugaaaacagcacaaaugu

SEQ ID NO: 947599 - RNA, 20 nt, Human
ugaaaacagcacaaauguaa

SEQ ID NO: 947600 - RNA, 20 nt, Human
ugaggagagggguggaagcc

SEQ ID NO: 947601 - RNA, 26 nt, Human
ugaggagagggguggaagccgggacu

SEQ ID NO: 947602 - RNA, 29 nt, Human
ugcagccggggcaugaaaggcccaaggcc

SEQ ID NO: 947603 - RNA, 18 nt, Human
ugccagcaccccaccacc

SEQ ID NO: 947604 - RNA, 25 nt, Human
ugcccugggcaaguguucuuuucuu

SEQ ID NO: 947605 - RNA, 26 nt, Human
ugccucccucaucucuuaguucucaa

SEQ ID NO: 947606 - RNA, 22 nt, Human
uggaacagaaaaugccagaaaa

SEQ ID NO: 947607 - RNA, 21 nt, Human
uggcaaaaaugaaaaaagaaa

SEQ ID NO: 947608 - RNA, 22 nt, Human
uugcacacacaguucccccgug

SEQ ID NO: 947609 - RNA, 21 nt, Human
aaacaguuccgccccaggaag

SEQ ID NO: 947610 - RNA, 22 nt, Human
aagcgauaaggguagggaggaa

SEQ ID NO: 947611 - RNA, 26 nt, Human
acccccccaccccacccuccacuggg

SEQ ID NO: 947612 - RNA, 19 nt, Human
agaggcuuagggcugcgac

SEQ ID NO: 947613 - RNA, 22 nt, Human
agggcugcgacccccccacccc

SEQ ID NO: 947614 - RNA, 23 nt, Human
cacauccuuccacagccagaccc

SEQ ID NO: 947615 - RNA, 18 nt, Human
cagccaacuuccagccag

SEQ ID NO: 947616 - RNA, 22 nt, Human
caggccgucugcacaaagcccu

SEQ ID NO: 947617 - RNA, 21 nt, Human
cauccuuccacagccagaccc

SEQ ID NO: 947618 - RNA, 18 nt, Human
cauuugaggccacacauc

SEQ ID NO: 947619 - RNA, 19 nt, Human
ccccagaggcucgguacag

SEQ ID NO: 947620 - RNA, 18 nt, Human
cccccaccccacccucca

SEQ ID NO: 947621 - RNA, 25 nt, Human
cccccaccccacccuccacugggac

SEQ ID NO: 947622 - RNA, 18 nt, Human
ccccccaccccacccucc

SEQ ID NO: 947623 - RNA, 25 nt, Human
ccccccaccccacccuccacuggga

SEQ ID NO: 947624 - RNA, 22 nt, Human
cccccccaccccacccuccacu

SEQ ID NO: 947625 - RNA, 23 nt, Human
cccccccaccccacccuccacug

SEQ ID NO: 947626 - RNA, 23 nt, Human
ccccuggcgagggcugugaaggc

SEQ ID NO: 947627 - RNA, 19 nt, Human
cccuaggucgccugggcuc

SEQ ID NO: 947628 - RNA, 18 nt, Human
ccugcccugaugcaggcc

SEQ ID NO: 947629 - RNA, 19 nt, Human
ccugggcucuguccuuucc

SEQ ID NO: 947630 - RNA, 22 nt, Human
cgacccccccaccccacccucc

SEQ ID NO: 947631 - RNA, 23 nt, Human
cgacccccccaccccacccucca

SEQ ID NO: 947632 - RNA, 23 nt, Human
cgucugcacaaagcccugggagc

SEQ ID NO: 947633 - RNA, 25 nt, Human
cugcgacccccccaccccacccucc

SEQ ID NO: 947634 - RNA, 19 nt, Human
cugcgacccccccaccccc

SEQ ID NO: 947635 - RNA, 25 nt, Human
cugggacggggaaaagcgaaacaac

SEQ ID NO: 947636 - RNA, 23 nt, Human
gacccccccaccccacccuccac

SEQ ID NO: 947637 - RNA, 20 nt, Human
gaggcggccuuuuuuuuuuu

SEQ ID NO: 947638 - RNA, 26 nt, Human
gcccuaggucgccugggcucuguccu

SEQ ID NO: 947639 - RNA, 21 nt, Human
gccugggcucuguccuuucca

SEQ ID NO: 947640 - RNA, 22 nt, Human
gcggccuuuuuuuuuuuuuuuu

SEQ ID NO: 947641 - RNA, 24 nt, Human
ggcggccuuuuuuuuuuuuuuuuu

SEQ ID NO: 947642 - RNA, 18 nt, Human
ggcugcgacccccccacc

SEQ ID NO: 947643 - RNA, 22 nt, Human
gguacagagacguagagaggga

SEQ ID NO: 947644 - RNA, 22 nt, Human
gguagggagauagugcccuagg

SEQ ID NO: 947645 - RNA, 19 nt, Human
uagggcggugugggcgggg

SEQ ID NO: 947646 - RNA, 18 nt, Human
ucccagaggcuuagggcu

SEQ ID NO: 947647 - RNA, 19 nt, Human
uggccgaggcggccuuuuu

SEQ ID NO: 947648 - RNA, 19 nt, Human
ugggcgggguagaagcgau

SEQ ID NO: 947649 - RNA, 23 nt, Human
ugggcucuguccuuuccaccccc

SEQ ID NO: 947650 - RNA, 22 nt, Human
ugggcugagaccccguccugcc

SEQ ID NO: 947651 - RNA, 23 nt, Human
uuuuuuuuuuuuuuguauuacgg

SEQ ID NO: 947652 - RNA, 25 nt, Human
uuuuuuuuuuuuuuuguauuacggg

SEQ ID NO: 947653 - RNA, 18 nt, Human
uuuuuuuuuuuuuuuuug

SEQ ID NO: 947654 - RNA, 23 nt, Human
uuuuuuuuuuuuuuuuuuguauu

SEQ ID NO: 947655 - RNA, 19 nt, Human
aagcagaaugcuacauaug

SEQ ID NO: 947656 - RNA, 23 nt, Human
accuacaggcagauauuuaaaga

SEQ ID NO: 947657 - RNA, 21 nt, Human
agagagcgugaggaacucaaa

SEQ ID NO: 947658 - RNA, 19 nt, Human
agcugauugacaaaaucca

SEQ ID NO: 947659 - RNA, 19 nt, Human
cccgagggaccggaggaaa

SEQ ID NO: 947660 - RNA, 22 nt, Human
cgagguaagaaccaucagcguc

SEQ ID NO: 947661 - RNA, 21 nt, Human
cggaggaaaaaaagaaggaga

SEQ ID NO: 947662 - RNA, 24 nt, Human
cgucgggcuggcugcugguccucc

SEQ ID NO: 947663 - RNA, 18 nt, Human
cgugucaggugcuugcuc

SEQ ID NO: 947664 - RNA, 23 nt, Human
cucuaaaacugugucaaagcaaa

SEQ ID NO: 947665 - RNA, 22 nt, Human
gcagagcuugcuuuuaccuaca

SEQ ID NO: 947666 - RNA, 18 nt, Human
ggaaaaaaagaaggagaa

SEQ ID NO: 947667 - RNA, 18 nt, Human
uaaagagagagagacaca

SEQ ID NO: 947668 - RNA, 18 nt, Human
uaaagagagagagacaca

SEQ ID NO: 947669 - RNA, 24 nt, Human
uauuuaaagagagagagacacauu

SEQ ID NO: 947670 - RNA, 21 nt, Human
ugaggaacucaaaagcaaaga

SEQ ID NO: 947671 - RNA, 23 nt, Human
ugauugacaaaauccauccaacu

SEQ ID NO: 947672 - RNA, 18 nt, Human
uuuuuuuuuuuuuuuuug

SEQ ID NO: 947673 - RNA, 21 nt, Human
uuuuuuuuuuuuuuuuugagg

SEQ ID NO: 947674 - RNA, 21 nt, Human
aaacaaguaucagacaaaggu

SEQ ID NO: 947675 - RNA, 18 nt, Human
acaggacagggcccuggg

SEQ ID NO: 947676 - RNA, 23 nt, Human
acagggcccuggguggggcuugc

SEQ ID NO: 947677 - RNA, 18 nt, Human
agacaaaggugguggcag

SEQ ID NO: 947678 - RNA, 20 nt, Human
aggcaaggcacgcacauccc

SEQ ID NO: 947679 - RNA, 21 nt, Human
aggcacgcacauccccaguga

SEQ ID NO: 947680 - RNA, 20 nt, Human
cagcaggcucagggucuccc

SEQ ID NO: 947681 - RNA, 25 nt, Human
cccccagcuucccuggaaacaagua

SEQ ID NO: 947682 - RNA, 19 nt, Human
ccgaaugacccuucuggcc

SEQ ID NO: 947683 - RNA, 23 nt, Human
cuucaggaagagaauccaguccc

SEQ ID NO: 947684 - RNA, 19 nt, Human
gcaguucccccagcuuccc

SEQ ID NO: 947685 - RNA, 19 nt, Human
ucagacaaaggugguggca

SEQ ID NO: 947686 - RNA, 23 nt, Human
ucagggucucccgccccgaauga

SEQ ID NO: 947687 - RNA, 22 nt, Human
ucaucuuuauuccaguuccuca

SEQ ID NO: 947688 - RNA, 23 nt, Human
uccaguuccucagauguggcagu

SEQ ID NO: 947689 - RNA, 25 nt, Human
ucccuggaaacaaguaucagacaaa

SEQ ID NO: 947690 - RNA, 25 nt, Human
uggaaacaaguaucagacaaaggug

SEQ ID NO: 947691 - RNA, 21 nt, Human
uuuauuccaguuccucagaug

SEQ ID NO: 947692 - RNA, 21 nt, Human
aaggcccuguuuucccugagg

SEQ ID NO: 947693 - RNA, 21 nt, Human
acccugaguggcacggggagc

SEQ ID NO: 947694 - RNA, 26 nt, Human
acccugaguggcacggggagcagcug

SEQ ID NO: 947695 - RNA, 18 nt, Human
agaccgaggauggggugg

SEQ ID NO: 947696 - RNA, 18 nt, Human
agaugcuggguccacccu

SEQ ID NO: 947697 - RNA, 21 nt, Human
aggcaguggcggggcggggac

SEQ ID NO: 947698 - RNA, 19 nt, Human
aggugcuccugagaugcug

SEQ ID NO: 947699 - RNA, 19 nt, Human
aguggcggggcggggaccu

SEQ ID NO: 947700 - RNA, 19 nt, Human
aucgcuggcuuucaccucu

SEQ ID NO: 947701 - RNA, 19 nt, Human
auggaauggcccauguccc

SEQ ID NO: 947702 - RNA, 18 nt, Human
cacccugaguggcacggg

SEQ ID NO: 947703 - RNA, 21 nt, Human
cagagcucagcguucucuaag

SEQ ID NO: 947704 - RNA, 19 nt, Human
ccacacgauggcuccugca

SEQ ID NO: 947705 - RNA, 23 nt, Human
ccccucugccgccauccccggac

SEQ ID NO: 947706 - RNA, 21 nt, Human
cccucugccgccauccccgga

SEQ ID NO: 947707 - RNA, 20 nt, Human
cccugagggggcccaggccu

SEQ ID NO: 947708 - RNA, 23 nt, Human
ccucucggaaacgcggcgucugg

SEQ ID NO: 947709 - RNA, 18 nt, Human
ccuuggggaggcaggcug

SEQ ID NO: 947710 - RNA, 19 nt, Human
cgggcacagagcugcgggg

SEQ ID NO: 947711 - RNA, 23 nt, Human
cucauggggaauggccugaggag

SEQ ID NO: 947712 - RNA, 21 nt, Human
cucuggugcagggguggaggc

SEQ ID NO: 947713 - RNA, 23 nt, Human
cugaggcggggcugggcuugucc

SEQ ID NO: 947714 - RNA, 21 nt, Human
cugccccuggcuucaucgcuu

SEQ ID NO: 947715 - RNA, 23 nt, Human
cugggaggggcagugggaagguu

SEQ ID NO: 947716 - RNA, 22 nt, Human
cugggcacgucauggaauggcc

SEQ ID NO: 947717 - RNA, 18 nt, Human
cuugccgggcacagagcu

SEQ ID NO: 947718 - RNA, 21 nt, Human
gagccucaguuucccuuuccg

SEQ ID NO: 947719 - RNA, 19 nt, Human
gagcuggccgugcuuggcg

SEQ ID NO: 947720 - RNA, 21 nt, Human
gaggcaggcugagcugguccc

SEQ ID NO: 947721 - RNA, 20 nt, Human
gauggcuccugcaaucugcc

SEQ ID NO: 947722 - RNA, 19 nt, Human
gcagugggaagguucuucu

SEQ ID NO: 947723 - RNA, 20 nt, Human
gccaguccuggggaaacuaa

SEQ ID NO: 947724 - RNA, 24 nt, Human
gccugggcacgucauggaauggcc

SEQ ID NO: 947725 - RNA, 22 nt, Human
gcgcccuggcgugugucuagcu

SEQ ID NO: 947726 - RNA, 21 nt, Human
gcuuggcgcccuggcgugugu

SEQ ID NO: 947727 - RNA, 20 nt, Human
ggagcagcuguggccggugc

SEQ ID NO: 947728 - RNA, 19 nt, Human
ggccggugcuccuuccuag

SEQ ID NO: 947729 - RNA, 19 nt, Human
gggaggggcagugggaagg

SEQ ID NO: 947730 - RNA, 22 nt, Human
gggaggggcagugggaagguuc

SEQ ID NO: 947731 - RNA, 23 nt, Human
gggcggggaccugcugcaaggga

SEQ ID NO: 947732 - RNA, 19 nt, Human
gggcugggcuuguccaugg

SEQ ID NO: 947733 - RNA, 19 nt, Human
ggggcgggacuggggguug

SEQ ID NO: 947734 - RNA, 19 nt, Human
ggggcugggcuuguccaug

SEQ ID NO: 947735 - RNA, 24 nt, Human
ggggguuguuuggcuguccugggc

SEQ ID NO: 947736 - RNA, 24 nt, Human
gggucgaggccaguugucgagaga

SEQ ID NO: 947737 - RNA, 24 nt, Human
gggugggugugggggacucauggg

SEQ ID NO: 947738 - RNA, 20 nt, Human
gucugggaggggcaguggga

SEQ ID NO: 947739 - RNA, 21 nt, Human
gugcagggguggaggccuguc

SEQ ID NO: 947740 - RNA, 19 nt, Human
gugggggacucauggggaa

SEQ ID NO: 947741 - RNA, 18 nt, Human
uaagagcaggcucuggug

SEQ ID NO: 947742 - RNA, 20 nt, Human
uccccacacgauggcuccug

SEQ ID NO: 947743 - RNA, 24 nt, Human
ucccccucugccgccauccccgga

SEQ ID NO: 947744 - RNA, 25 nt, Human
ucccccucugccgccauccccggac

SEQ ID NO: 947745 - RNA, 20 nt, Human
ucccugaggcggggcugggc

SEQ ID NO: 947746 - RNA, 23 nt, Human
ucccugaggcggggcugggguac

SEQ ID NO: 947747 - RNA, 19 nt, Human
ucccugagggggcccaggc

SEQ ID NO: 947748 - RNA, 21 nt, Human
ucccugagggggcccaggccu

SEQ ID NO: 947749 - RNA, 25 nt, Human
ucccugagggggcccaggccugcag

SEQ ID NO: 947750 - RNA, 22 nt, Human
ucccuuggggaggcaggcugag

SEQ ID NO: 947751 - RNA, 18 nt, Human
uccguuuuuuccuggggg

SEQ ID NO: 947752 - RNA, 18 nt, Human
uccuguagggaaaggccc

SEQ ID NO: 947753 - RNA, 24 nt, Human
ucugcugcguggacgucgcggucg

SEQ ID NO: 947754 - RNA, 25 nt, Human
ucuucgcaggcaguggcggggcggg

SEQ ID NO: 947755 - RNA, 21 nt, Human
ugagccucaguuucccuuucc

SEQ ID NO: 947756 - RNA, 21 nt, Human
ugcaagggacuggaggcugcc

SEQ ID NO: 947757 - RNA, 19 nt, Human
ugccccuggcuucaucgcu

SEQ ID NO: 947758 - RNA, 24 nt, Human
ugcugcguggacgucgcggucgga

SEQ ID NO: 947759 - RNA, 26 nt, Human
uggccugggcacgucauggaauggcc

SEQ ID NO: 947760 - RNA, 20 nt, Human
uggcuccugcaaucugccuc

SEQ ID NO: 947761 - RNA, 24 nt, Human
ugggaggggcagugggaagguucu

SEQ ID NO: 947762 - RNA, 18 nt, Human
ugggagggucgaggccag

SEQ ID NO: 947763 - RNA, 24 nt, Human
ugggagucucucgcaggucaucau

SEQ ID NO: 947764 - RNA, 19 nt, Human
uggggaaacuaagcucggg

SEQ ID NO: 947765 - RNA, 23 nt, Human
uggggaggcaggcugagcugguc

SEQ ID NO: 947766 - RNA, 24 nt, Human
uggggaggcaggcugagcuggucc

SEQ ID NO: 947767 - RNA, 19 nt, Human
uggggggcgggacuggggg

SEQ ID NO: 947768 - RNA, 22 nt, Human
ugggggugaggggaggcgcccc

SEQ ID NO: 947769 - RNA, 18 nt, Human
ugggguggguguggggga

SEQ ID NO: 947770 - RNA, 20 nt, Human
uggggugggugugggggacu

SEQ ID NO: 947771 - RNA, 21 nt, Human
uggggugggugugggggacuc

SEQ ID NO: 947772 - RNA, 26 nt, Human
uggggugggugugggggacucauggg

SEQ ID NO: 947773 - RNA, 20 nt, Human
uggucuucuaaggacacccu

SEQ ID NO: 947774 - RNA, 19 nt, Human
uggugcagggguggaggcc

SEQ ID NO: 947775 - RNA, 21 nt, Human
uguccugggcagcucuggcau

SEQ ID NO: 947776 - RNA, 21 nt, Human
uugccgggcacagagcugcgg

SEQ ID NO: 947777 - RNA, 19 nt, Human
uugcuccgugcucucccgg

SEQ ID NO: 947778 - RNA, 20 nt, Human
uuucacaacuguccugcgac

SEQ ID NO: 947779 - RNA, 21 nt, Human
uuuuuuuuuuucaaaagggcu

SEQ ID NO: 947780 - RNA, 21 nt, Human
uuuuuuuuuuuuucaaaaggg

SEQ ID NO: 947781 - RNA, 24 nt, Human
uuuuuuuuuuuuuuuucaaaaggg

SEQ ID NO: 947782 - RNA, 19 nt, Human
aaaauucaugucaaaaagg

SEQ ID NO: 947783 - RNA, 18 nt, Human
aaacaugcccaucagcac

SEQ ID NO: 947784 - RNA, 23 nt, Human
aaaccaaauaccaugucagaaaa

SEQ ID NO: 947785 - RNA, 20 nt, Human
aaaggaagaggggaauggag

SEQ ID NO: 947786 - RNA, 21 nt, Human
aaaguaacagauacccaaaac

SEQ ID NO: 947787 - RNA, 21 nt, Human
aacaugcccaucagcacaaaa

SEQ ID NO: 947788 - RNA, 22 nt, Human
aacuggacaugguggauaaauu

SEQ ID NO: 947789 - RNA, 22 nt, Human
aagccuucaaguucaacaaucc

SEQ ID NO: 947790 - RNA, 24 nt, Human
aagcgacaauaaagccggcggagc

SEQ ID NO: 947791 - RNA, 20 nt, Human
aauaaagaggcaaacaagaa

SEQ ID NO: 947792 - RNA, 21 nt, Human
accaaauaccaugucagaaaa

SEQ ID NO: 947793 - RNA, 20 nt, Human
acccaaaaccaaauaccaug

SEQ ID NO: 947794 - RNA, 18 nt, Human
acgccgccgccggcuucg

SEQ ID NO: 947795 - RNA, 23 nt, Human
acgccgccgccggcuucgcaggc

SEQ ID NO: 947796 - RNA, 18 nt, Human
agaagggggcgggcggcg

SEQ ID NO: 947797 - RNA, 23 nt, Human
agauacccaaaaccaaauacccc

SEQ ID NO: 947798 - RNA, 21 nt, Human
agauauccuuccuccgcgcgc

SEQ ID NO: 947799 - RNA, 20 nt, Human
aggcuuugacccuacaguuu

SEQ ID NO: 947800 - RNA, 27 nt, Human
aguaaccauuuaucagauuagagcagc

SEQ ID NO: 947801 - RNA, 20 nt, Human
auaguacacuggcaaaaaua

SEQ ID NO: 947802 - RNA, 28 nt, Human
augcagcauccuugaggagucgaaacuc

SEQ ID NO: 947803 - RNA, 21 nt, Human
caaaguaacagauacccaaaa

SEQ ID NO: 947804 - RNA, 22 nt, Human
caaauaggacugagguauagua

SEQ ID NO: 947805 - RNA, 24 nt, Human
cagaaaauaucauauaguaaccau

SEQ ID NO: 947806 - RNA, 21 nt, Human
ccaaacuggacaugguggaua

SEQ ID NO: 947807 - RNA, 21 nt, Human
ccaaaguaacagauacccaaa

SEQ ID NO: 947808 - RNA, 23 nt, Human
ccaaaguaacagauacccaaaac

SEQ ID NO: 947809 - RNA, 23 nt, Human
ccauuuaucagauuagagcagca

SEQ ID NO: 947810 - RNA, 18 nt, Human
ccccucacugaaaaucug

SEQ ID NO: 947811 - RNA, 23 nt, Human
ccccucuuuaaagccgcgcgcgc

SEQ ID NO: 947812 - RNA, 23 nt, Human
cccggcagcccggcucgcgcucg

SEQ ID NO: 947813 - RNA, 26 nt, Human
cccuccgcugcccccucuuuaaagcc

SEQ ID NO: 947814 - RNA, 20 nt, Human
cccucugucucgcccccgcc

SEQ ID NO: 947815 - RNA, 28 nt, Human
ccgccgccgccgccgcccggugccccgg

SEQ ID NO: 947816 - RNA, 21 nt, Human
ccgccgcgcuccgggcagcgu

SEQ ID NO: 947817 - RNA, 23 nt, Human
ccgccgcgcuccgggcagcgucc

SEQ ID NO: 947818 - RNA, 18 nt, Human
ccgcgcgcgcacacaccg

SEQ ID NO: 947819 - RNA, 21 nt, Human
ccgcugccgcugccgcugccg

SEQ ID NO: 947820 - RNA, 22 nt, Human
ccuccacccccgccccgccgcg

SEQ ID NO: 947821 - RNA, 22 nt, Human
ccugagugguuugauggacaga

SEQ ID NO: 947822 - RNA, 19 nt, Human
cgagcgaggccuucgaagu

SEQ ID NO: 947823 - RNA, 19 nt, Human
cgccacauaacgaagcgac

SEQ ID NO: 947824 - RNA, 26 nt, Human
cgcccccgcccccggcguuccggucu

SEQ ID NO: 947825 - RNA, 22 nt, Human
cgcccucucgcccggcagcccg

SEQ ID NO: 947826 - RNA, 24 nt, Human
cgcccucucgcccggcagcccggc

SEQ ID NO: 947827 - RNA, 19 nt, Human
cgccgccgccgccgccgcc

SEQ ID NO: 947828 - RNA, 20 nt, Human
cgccgccgccgccgccgccc

SEQ ID NO: 947829 - RNA, 22 nt, Human
cgcgccgccgccgccgccgccc

SEQ ID NO: 947830 - RNA, 20 nt, Human
cggggagacccuccgcugcc

SEQ ID NO: 947831 - RNA, 24 nt, Human
cgggucugcugcacgcguccgcug

SEQ ID NO: 947832 - RNA, 20 nt, Human
cuaguacaaacuagccugag

SEQ ID NO: 947833 - RNA, 21 nt, Human
cucccgggucugcugcacgcg

SEQ ID NO: 947834 - RNA, 21 nt, Human
cucgcggggcucggccucgcc

SEQ ID NO: 947835 - RNA, 24 nt, Human
cucggccucgcccucucgcccggc

SEQ ID NO: 947836 - RNA, 23 nt, Human
cucguccuccacccccgccccgc

SEQ ID NO: 947837 - RNA, 19 nt, Human
cugcccccucuuuaaagcc

SEQ ID NO: 947838 - RNA, 22 nt, Human
cugccgcugccgggccgacgcc

SEQ ID NO: 947839 - RNA, 25 nt, Human
cugccgggccgacgccuccgaccgc

SEQ ID NO: 947840 - RNA, 22 nt, Human
cuggcaaaaauaaagaggcaaa

SEQ ID NO: 947841 - RNA, 21 nt, Human
gaaaaagccccucacugaaaa

SEQ ID NO: 947842 - RNA, 21 nt, Human
gaccgcucucucguccuccac

SEQ ID NO: 947843 - RNA, 20 nt, Human
gagcagcggagugcggggag

SEQ ID NO: 947844 - RNA, 26 nt, Human
gagccugcagcgagcgaggccuucga

SEQ ID NO: 947845 - RNA, 20 nt, Human
gagugguuugauggacagag

SEQ ID NO: 947846 - RNA, 25 nt, Human
gcagcagaagaaaguuacuucuaaa

SEQ ID NO: 947847 - RNA, 20 nt, Human
gccaaaguaacagauaccca

SEQ ID NO: 947848 - RNA, 22 nt, Human
gccccgccgcgcuccgggcagc

SEQ ID NO: 947849 - RNA, 21 nt, Human
gcccucucgcccggcagcccg

SEQ ID NO: 947850 - RNA, 18 nt, Human
gcuaaccaaacuggacau

SEQ ID NO: 947851 - RNA, 21 nt, Human
gcucgcgcacggccucgggcc

SEQ ID NO: 947852 - RNA, 20 nt, Human
guggauaaauuauaaaacaa

SEQ ID NO: 947853 - RNA, 23 nt, Human
uaaaaauagaaacaaaacucuac

SEQ ID NO: 947854 - RNA, 23 nt, Human
uaaaguagcacaugaauguaagc

SEQ ID NO: 947855 - RNA, 18 nt, Human
uaacagauacccaaaacc

SEQ ID NO: 947856 - RNA, 21 nt, Human
uaacagauacccaaaaccaaa

SEQ ID NO: 947857 - RNA, 24 nt, Human
uaacagauacccaaaaccaaauac

SEQ ID NO: 947858 - RNA, 20 nt, Human
uaacgaagcgacaauaaagc

SEQ ID NO: 947859 - RNA, 28 nt, Human
uaacgaagcgacaauaaagccggcggag

SEQ ID NO: 947860 - RNA, 19 nt, Human
uaagacuagaagagacuug

SEQ ID NO: 947861 - RNA, 22 nt, Human
uacacuggcaaaaauaaagagg

SEQ ID NO: 947862 - RNA, 20 nt, Human
ucaaguucaacaauccaaau

SEQ ID NO: 947863 - RNA, 23 nt, Human
ucauaacaucauucuucauuugu

SEQ ID NO: 947864 - RNA, 19 nt, Human
ucauucuucauuugugaag

SEQ ID NO: 947865 - RNA, 22 nt, Human
ucccgggucugcugcacgcguc

SEQ ID NO: 947866 - RNA, 21 nt, Human
uccgcugccgcugccgcugcc

SEQ ID NO: 947867 - RNA, 18 nt, Human
ugcaaauauaaaaaaaaa

SEQ ID NO: 947868 - RNA, 19 nt, Human
ugccaaaguaacagauacc

SEQ ID NO: 947869 - RNA, 22 nt, Human
ugccccggcucgcgcacggccu

SEQ ID NO: 947870 - RNA, 18 nt, Human
ugcggggagacccuccgc

SEQ ID NO: 947871 - RNA, 19 nt, Human
uggacagagugauuggguc

SEQ ID NO: 947872 - RNA, 21 nt, Human
uggacagagugauugggucaa

SEQ ID NO: 947873 - RNA, 24 nt, Human
uggcaaaaauaaagaggcaaacaa

SEQ ID NO: 947874 - RNA, 25 nt, Human
uggcaaaaauaaagaggcaaacaag

SEQ ID NO: 947875 - RNA, 23 nt, Human
ugucaaaaaggaagaggggaaug

SEQ ID NO: 947876 - RNA, 21 nt, Human
ugucucgcccccgcccccggc

SEQ ID NO: 947877 - RNA, 18 nt, Human
aaauucagaaaugcuucc

SEQ ID NO: 947878 - RNA, 18 nt, Human
aacccuugcagaaaacac

SEQ ID NO: 947879 - RNA, 20 nt, Human
aaccuggccaagcuacccgg

SEQ ID NO: 947880 - RNA, 18 nt, Human
aagaagaaaugguuggug

SEQ ID NO: 947881 - RNA, 26 nt, Human
agaaaacacugaugcccaacacacug

SEQ ID NO: 947882 - RNA, 19 nt, Human
agacuugaaaugccauuga

SEQ ID NO: 947883 - RNA, 19 nt, Human
caaguuccaaggggcuggg

SEQ ID NO: 947884 - RNA, 23 nt, Human
cacaacccuugcagaaaacacug

SEQ ID NO: 947885 - RNA, 21 nt, Human
cacaaccuggccaagcuaccc

SEQ ID NO: 947886 - RNA, 21 nt, Human
cagcuccacuuggcaaauaau

SEQ ID NO: 947887 - RNA, 20 nt, Human
caggcucagcggcccggucc

SEQ ID NO: 947888 - RNA, 21 nt, Human
cccgucgcgccgcccgggccg

SEQ ID NO: 947889 - RNA, 18 nt, Human
ccgcccgggccgggccug

SEQ ID NO: 947890 - RNA, 25 nt, Human
ccgucgcgccgcccgggccgggccu

SEQ ID NO: 947891 - RNA, 19 nt, Human
ccucccgucgcgccgcccg

SEQ ID NO: 947892 - RNA, 18 nt, Human
ccuggggcgcgcgggcug

SEQ ID NO: 947893 - RNA, 18 nt, Human
ccugugcuguaaucaaga

SEQ ID NO: 947894 - RNA, 19 nt, Human
cugcgguuccucacaaccu

SEQ ID NO: 947895 - RNA, 19 nt, Human
cuugcagaaaacacugaug

SEQ ID NO: 947896 - RNA, 19 nt, Human
gccgcccgggccgggccug

SEQ ID NO: 947897 - RNA, 20 nt, Human
gcgggcugagccaaagggua

SEQ ID NO: 947898 - RNA, 25 nt, Human
ggcggcugcaggcucagcggcccgg

SEQ ID NO: 947899 - RNA, 22 nt, Human
gggcggcugcaggcucagcggc

SEQ ID NO: 947900 - RNA, 19 nt, Human
ggucuuccaaguuccaagg

SEQ ID NO: 947901 - RNA, 21 nt, Human
gucgcgccgcccgggccgggc

SEQ ID NO: 947902 - RNA, 18 nt, Human
uaaaugacagcuccacuu

SEQ ID NO: 947903 - RNA, 22 nt, Human
uaaaugacagcuccacuuggca

SEQ ID NO: 947904 - RNA, 22 nt, Human
ucacaacccuugcagaaaacac

SEQ ID NO: 947905 - RNA, 23 nt, Human
uccaaguuccaaggggcuggggu

SEQ ID NO: 947906 - RNA, 23 nt, Human
ucuacacccgauggagaaucgag

SEQ ID NO: 947907 - RNA, 23 nt, Human
ucuuccaaguuccaaggggcugg

SEQ ID NO: 947908 - RNA, 18 nt, Human
uggggcgcgcgggcugag

SEQ ID NO: 947909 - RNA, 19 nt, Human
uggggcgcgcgggcugagc

SEQ ID NO: 947910 - RNA, 24 nt, Human
ugugcuauggaccacgcacauaca

SEQ ID NO: 947911 - RNA, 18 nt, Human
uuaaaugacagcuccacu

SEQ ID NO: 947912 - RNA, 22 nt, Human
uuccccaacgaucaaguuccug

SEQ ID NO: 947913 - RNA, 25 nt, Human
aaacucaccagcaacuuccccucag

SEQ ID NO: 947914 - RNA, 20 nt, Human
aacagaacaaggcccaauag

SEQ ID NO: 947915 - RNA, 24 nt, Human
aacuuccccucagcuggcccucca

SEQ ID NO: 947916 - RNA, 24 nt, Human
aagcagaggccaggugucauaugg

SEQ ID NO: 947917 - RNA, 20 nt, Human
aaggaaggauuucuaacaau

SEQ ID NO: 947918 - RNA, 22 nt, Human
acacagugcugcugacagccag

SEQ ID NO: 947919 - RNA, 18 nt, Human
acaguaaaagacaggggc

SEQ ID NO: 947920 - RNA, 21 nt, Human
accacgaaggaccccagcccu

SEQ ID NO: 947921 - RNA, 21 nt, Human
acccagcucacuccccgcauc

SEQ ID NO: 947922 - RNA, 19 nt, Human
acggagccuuagcacacac

SEQ ID NO: 947923 - RNA, 24 nt, Human
acuuccccucagcuggcccuccau

SEQ ID NO: 947924 - RNA, 20 nt, Human
agacaagagccuggacacag

SEQ ID NO: 947925 - RNA, 22 nt, Human
agcucacuccccgcaucuucca

SEQ ID NO: 947926 - RNA, 19 nt, Human
aggcaggcacccccagccc

SEQ ID NO: 947927 - RNA, 27 nt, Human
aggggaagggagagguaagaguggcuu

SEQ ID NO: 947928 - RNA, 22 nt, Human
auccccucuaggauucccauug

SEQ ID NO: 947929 - RNA, 22 nt, Human
caacucugagaagcuggacaaa

SEQ ID NO: 947930 - RNA, 19 nt, Human
cacagcaacucugagaagc

SEQ ID NO: 947931 - RNA, 18 nt, Human
cagacaagagccuggaca

SEQ ID NO: 947932 - RNA, 21 nt, Human
cagacgggucucuccaagucu

SEQ ID NO: 947933 - RNA, 18 nt, Human
cagagggcuguaaggggc

SEQ ID NO: 947934 - RNA, 23 nt, Human
cagccaacacggccccgcccacc

SEQ ID NO: 947935 - RNA, 24 nt, Human
ccaagucugggugccuacgcaggg

SEQ ID NO: 947936 - RNA, 19 nt, Human
ccacccagcucacuccccg

SEQ ID NO: 947937 - RNA, 18 nt, Human
ccacgccugcuuccaaaa

SEQ ID NO: 947938 - RNA, 22 nt, Human
ccagcccacugcgacucccacc

SEQ ID NO: 947939 - RNA, 22 nt, Human
cccccagcccacugcgacuccc

SEQ ID NO: 947940 - RNA, 22 nt, Human
cccgcaucuuccauccccucua

SEQ ID NO: 947941 - RNA, 22 nt, Human
cccuacagugccuuaugcugcc

SEQ ID NO: 947942 - RNA, 24 nt, Human
cccuccaucaccaaugcggcaguc

SEQ ID NO: 947943 - RNA, 20 nt, Human
ccgugacaugcugagcugug

SEQ ID NO: 947944 - RNA, 19 nt, Human
ccucuagccagagggcugu

SEQ ID NO: 947945 - RNA, 27 nt, Human
ccucugcagaaaauguggccacugcuc

SEQ ID NO: 947946 - RNA, 21 nt, Human
ccucuugcugcuggcaaaggc

SEQ ID NO: 947947 - RNA, 21 nt, Human
ccuuaugcugcccucucccug

SEQ ID NO: 947948 - RNA, 22 nt, Human
ccuuaugcugcccucucccugu

SEQ ID NO: 947949 - RNA, 25 nt, Human
cucccaccacgaaggaccccagccc

SEQ ID NO: 947950 - RNA, 18 nt, Human
cuggaggccggcgucccu

SEQ ID NO: 947951 - RNA, 20 nt, Human
cuugcugcuggcaaaggccc

SEQ ID NO: 947952 - RNA, 18 nt, Human
gaaggaggggcugcggug

SEQ ID NO: 947953 - RNA, 24 nt, Human
gaaguuccugucaccuaagugcuc

SEQ ID NO: 947954 - RNA, 20 nt, Human
gaguaaaugccuugggaucu

SEQ ID NO: 947955 - RNA, 20 nt, Human
gcaggugggaggggaaggga

SEQ ID NO: 947956 - RNA, 18 nt, Human
gccucaggaggugcggaa

SEQ ID NO: 947957 - RNA, 21 nt, Human
gccugcuuccaaaaaugaucu

SEQ ID NO: 947958 - RNA, 19 nt, Human
gccuuaugcugcccucucc

SEQ ID NO: 947959 - RNA, 19 nt, Human
gcugagcuguggaaggagc

SEQ ID NO: 947960 - RNA, 18 nt, Human
ggaagggagagguaagag

SEQ ID NO: 947961 - RNA, 19 nt, Human
ggaccccagcccucucuca

SEQ ID NO: 947962 - RNA, 22 nt, Human
ggaguaaaugccuugggaucug

SEQ ID NO: 947963 - RNA, 22 nt, Human
ggauucccauuguccccuacuc

SEQ ID NO: 947964 - RNA, 18 nt, Human
ggcaggugggaggggaag

SEQ ID NO: 947965 - RNA, 20 nt, Human
ggccagcagguucuccaagc

SEQ ID NO: 947966 - RNA, 21 nt, Human
ggguucccuggccaccggggu

SEQ ID NO: 947967 - RNA, 19 nt, Human
gguucccuggccaccgggg

SEQ ID NO: 947968 - RNA, 18 nt, Human
guuccagagaacagaaca

SEQ ID NO: 947969 - RNA, 18 nt, Human
uaaagcgagacagaccaa

SEQ ID NO: 947970 - RNA, 24 nt, Human
uaacaauuagaaucauccagggcc

SEQ ID NO: 947971 - RNA, 18 nt, Human
uaaguaacuuacaguaaa

SEQ ID NO: 947972 - RNA, 21 nt, Human
uaagugcucaagcagaggccg

SEQ ID NO: 947973 - RNA, 24 nt, Human
uaccagaggauggagggcuuccuu

SEQ ID NO: 947974 - RNA, 24 nt, Human
uccaagcuguaucuagcccagagc

SEQ ID NO: 947975 - RNA, 23 nt, Human
uccccucagcuggcccuccauca

SEQ ID NO: 947976 - RNA, 21 nt, Human
ucccugugucugcuguuuccu

SEQ ID NO: 947977 - RNA, 25 nt, Human
ucuaacaauuagaaucauccagggc

SEQ ID NO: 947978 - RNA, 20 nt, Human
ucuagcccagagcauucauu

SEQ ID NO: 947979 - RNA, 21 nt, Human
ucuccaagucugggugccuac

SEQ ID NO: 947980 - RNA, 20 nt, Human
ucucgcuagcagggcccacc

SEQ ID NO: 947981 - RNA, 21 nt, Human
ucucucagccaacacggcccc

SEQ ID NO: 947982 - RNA, 21 nt, Human
ucucucgcuagcagggcccac

SEQ ID NO: 947983 - RNA, 19 nt, Human
ucuuugggaaggaagagga

SEQ ID NO: 947984 - RNA, 18 nt, Human
ugacaugcugagcugugg

SEQ ID NO: 947985 - RNA, 19 nt, Human
ugaccucucucgcuagcag

SEQ ID NO: 947986 - RNA, 22 nt, Human
ugcuggcaaaggcccaaguucu

SEQ ID NO: 947987 - RNA, 18 nt, Human
uggaaggagcgaaggagg

SEQ ID NO: 947988 - RNA, 20 nt, Human
uggaaggagcgaaggagggg

SEQ ID NO: 947989 - RNA, 23 nt, Human
uggaaggagcgaaggaggggcug

SEQ ID NO: 947990 - RNA, 19 nt, Human
uggaaguggguucccuggc

SEQ ID NO: 947991 - RNA, 18 nt, Human
ugggaggggcgacagaua

SEQ ID NO: 947992 - RNA, 24 nt, Human
uggguucccuggccaccgggguug

SEQ ID NO: 947993 - RNA, 18 nt, Human
uguccccuacuccagcac

SEQ ID NO: 947994 - RNA, 21 nt, Human
uuagcacacaccagcuggagg

SEQ ID NO: 947995 - RNA, 27 nt, Human
uuuuuuuuuucuaaaaccaaauguuua

SEQ ID NO: 947996 - RNA, 23 nt, Human
cccacgccagccgcugcuucucc

SEQ ID NO: 947997 - RNA, 26 nt, Human
cccugcacgagcgaggccggcaagac

SEQ ID NO: 947998 - RNA, 25 nt, Human
ccgggugugcccccugcugcggcgg

SEQ ID NO: 947999 - RNA, 21 nt, Human
cgcccagauacgccccugcac

SEQ ID NO: 948000 - RNA, 19 nt, Human
cgcccauuccccggauggc

SEQ ID NO: 948001 - RNA, 21 nt, Human
cgcccauuccccggauggcca

SEQ ID NO: 948002 - RNA, 24 nt, Human
cgcgcucaggcgcccagauacgcc

SEQ ID NO: 948003 - RNA, 23 nt, Human
cgcucaggcgcccagauacgccc

SEQ ID NO: 948004 - RNA, 22 nt, Human
cggcucccaaggcucccacgcc

SEQ ID NO: 948005 - RNA, 20 nt, Human
cgggugugcccccugcugcg

SEQ ID NO: 948006 - RNA, 23 nt, Human
uccccggauggcccacgccagcc

SEQ ID NO: 948007 - RNA, 20 nt, Human
ucuccgaaccagagcugacc

SEQ ID NO: 948008 - RNA, 23 nt, Human
aaacaaauacacaggauuugguc

SEQ ID NO: 948009 - RNA, 20 nt, Human
aaauccuucccaugcccucc

SEQ ID NO: 948010 - RNA, 19 nt, Human
aagaaacgcccaccaggcc

SEQ ID NO: 948011 - RNA, 23 nt, Human
aagccaaaaaaccacauaaguac

SEQ ID NO: 948012 - RNA, 23 nt, Human
agcaauuuaaucuuuuuguuuug

SEQ ID NO: 948013 - RNA, 19 nt, Human
cacccucaguccaagggcu

SEQ ID NO: 948014 - RNA, 20 nt, Human
caggggcggcgcggaggcgg

SEQ ID NO: 948015 - RNA, 19 nt, Human
ccaagcccgcaggggcggc

SEQ ID NO: 948016 - RNA, 19 nt, Human
ccccauuucccuccucucc

SEQ ID NO: 948017 - RNA, 20 nt, Human
ccccgccgcccccggcgccg

SEQ ID NO: 948018 - RNA, 20 nt, Human
ccugccaagcccgcaggggc

SEQ ID NO: 948019 - RNA, 21 nt, Human
ccuucccaugcccucccccca

SEQ ID NO: 948020 - RNA, 24 nt, Human
cgcagugcgggcgcgccgggcgcc

SEQ ID NO: 948021 - RNA, 22 nt, Human
cgcgccgggcgccugccaagcc

SEQ ID NO: 948022 - RNA, 22 nt, Human
cggccgagucuccggcgggaaa

SEQ ID NO: 948023 - RNA, 19 nt, Human
cggcuggcucggcgcgggg

SEQ ID NO: 948024 - RNA, 22 nt, Human
cgguaacaauauaucgguguua

SEQ ID NO: 948025 - RNA, 22 nt, Human
cguuugggguuccccgccgccc

SEQ ID NO: 948026 - RNA, 27 nt, Human
cuccccccaauuuuaaauaaauuaaaa

SEQ ID NO: 948027 - RNA, 19 nt, Human
cucggcggccccaucucgg

SEQ ID NO: 948028 - RNA, 18 nt, Human
gcagugcgggcgcgccgg

SEQ ID NO: 948029 - RNA, 19 nt, Human
gcgccugccaagcccgcag

SEQ ID NO: 948030 - RNA, 23 nt, Human
gcgcgcggacacaggacggacac

SEQ ID NO: 948031 - RNA, 21 nt, Human
gcgggcgcgccgggcgccugc

SEQ ID NO: 948032 - RNA, 23 nt, Human
gcggggaaggagucgggcagggg

SEQ ID NO: 948033 - RNA, 20 nt, Human
ggaaggagucgggcaggggg

SEQ ID NO: 948034 - RNA, 21 nt, Human
ggcagggggaugcaauagagg

SEQ ID NO: 948035 - RNA, 18 nt, Human
ggcgguugcauggcgagc

SEQ ID NO: 948036 - RNA, 23 nt, Human
gggcagggggaugcaauagaggg

SEQ ID NO: 948037 - RNA, 21 nt, Human
gguaacaauauaucgguguua

SEQ ID NO: 948038 - RNA, 18 nt, Human
uaaaagccaaaaaaccac

SEQ ID NO: 948039 - RNA, 25 nt, Human
ucagcgguaacaauauaucgguguu

SEQ ID NO: 948040 - RNA, 22 nt, Human
ucccacccucaguccaagggcu

SEQ ID NO: 948041 - RNA, 18 nt, Human
ucccaugcccucccccca

SEQ ID NO: 948042 - RNA, 18 nt, Human
ugcaauagaggggaaagg

SEQ ID NO: 948043 - RNA, 20 nt, Human
ugcaauagaggggaaagggc

SEQ ID NO: 948044 - RNA, 18 nt, Human
ugcggcgggcgccuacgc

SEQ ID NO: 948045 - RNA, 23 nt, Human
uugggguuccccgccgcccccgg

SEQ ID NO: 948046 - RNA, 21 nt, Human
aaccagcucaucuccagcccc

SEQ ID NO: 948047 - RNA, 19 nt, Human
aagcagaaauaauuuccaa

SEQ ID NO: 948048 - RNA, 18 nt, Human
acagcuucagcggccuca

SEQ ID NO: 948049 - RNA, 21 nt, Human
auacagauguugauuuacucu

SEQ ID NO: 948050 - RNA, 18 nt, Human
auauauguauauauagaa

SEQ ID NO: 948051 - RNA, 23 nt, Human
caaacaaauaguaaaacaacaua

SEQ ID NO: 948052 - RNA, 20 nt, Human
cagcggccucagcucagcuc

SEQ ID NO: 948053 - RNA, 20 nt, Human
cuacagcuucagcggccuca

SEQ ID NO: 948054 - RNA, 18 nt, Human
cuccagccccauccaucu

SEQ ID NO: 948055 - RNA, 22 nt, Human
cugugccccaaggccaaaccag

SEQ ID NO: 948056 - RNA, 21 nt, Human
cuucagcggccucagcucagc

SEQ ID NO: 948057 - RNA, 21 nt, Human
gaaaaaaaaauucugcaagga

SEQ ID NO: 948058 - RNA, 20 nt, Human
uaaauugguaacagugcuua

SEQ ID NO: 948059 - RNA, 21 nt, Human
uaccgcacggcagcaucagca

SEQ ID NO: 948060 - RNA, 19 nt, Human
uauauagaaaaaaaaauuc

SEQ ID NO: 948061 - RNA, 24 nt, Human
ucauccuuuauuuugaucaaaaca

SEQ ID NO: 948062 - RNA, 18 nt, Human
ucuccagccccauccauc

SEQ ID NO: 948063 - RNA, 19 nt, Human
ucugcaaggacauaugcua

SEQ ID NO: 948064 - RNA, 20 nt, Human
ugccccaaggccaaaccagc

SEQ ID NO: 948065 - RNA, 20 nt, Human
ugccuccagagacaaugauu

SEQ ID NO: 948066 - RNA, 18 nt, Human
aaaagcagacagugcucc

SEQ ID NO: 948067 - RNA, 21 nt, Human
acugcagguuacuggacugcu

SEQ ID NO: 948068 - RNA, 24 nt, Human
acugcaguucacagauaaacacuu

SEQ ID NO: 948069 - RNA, 18 nt, Human
agccaccucacaagccga

SEQ ID NO: 948070 - RNA, 18 nt, Human
aguucacagauaaacacu

SEQ ID NO: 948071 - RNA, 21 nt, Human
aucauacuuaacuaagagaca

SEQ ID NO: 948072 - RNA, 23 nt, Human
cagacagugcuccacuggguuaa

SEQ ID NO: 948073 - RNA, 21 nt, Human
caguucacagauaaacacuuc

SEQ ID NO: 948074 - RNA, 21 nt, Human
ccacuggguuaauaaaucaua

SEQ ID NO: 948075 - RNA, 18 nt, Human
ccuggguugccccgagga

SEQ ID NO: 948076 - RNA, 25 nt, Human
cgcccugcugcuccuacuggucaau

SEQ ID NO: 948077 - RNA, 22 nt, Human
cugcugcuccuacuggucagug

SEQ ID NO: 948078 - RNA, 21 nt, Human
guuaagugaaagagcaagcac

SEQ ID NO: 948079 - RNA, 26 nt, Human
uaacuaagagacaauacuuuaaauac

SEQ ID NO: 948080 - RNA, 21 nt, Human
uaccacaucauuaaaaacucc

SEQ ID NO: 948081 - RNA, 19 nt, Human
uggaacaccacagccgguc

SEQ ID NO: 948082 - RNA, 20 nt, Human
uucacagauaaacacuucac

SEQ ID NO: 948083 - RNA, 23 nt, Human
uuuuuugguagaacaaauucuaa

SEQ ID NO: 948084 - RNA, 24 nt, Human
uuuuuuuuugguagaacaaauucu

SEQ ID NO: 948085 - RNA, 22 nt, Human
aaaaauggagcacugaagagaa

SEQ ID NO: 948086 - RNA, 20 nt, Human
aaacuccaaacuccagccuc

SEQ ID NO: 948087 - RNA, 23 nt, Human
acccgggauccucucucuuugca

SEQ ID NO: 948088 - RNA, 19 nt, Human
accugcccugggggcuguc

SEQ ID NO: 948089 - RNA, 21 nt, Human
agaccucuggauccuuauucc

SEQ ID NO: 948090 - RNA, 26 nt, Human
agagaaacagaguuuggaccccugau

SEQ ID NO: 948091 - RNA, 23 nt, Human
agccuccaagcgggucaaacucc

SEQ ID NO: 948092 - RNA, 19 nt, Human
cacugaagagaaacagagu

SEQ ID NO: 948093 - RNA, 25 nt, Human
cagugacccuuccuccuauaugccc

SEQ ID NO: 948094 - RNA, 24 nt, Human
ccggagacagcagugacccuuccu

SEQ ID NO: 948095 - RNA, 25 nt, Human
ccuccuauaugcccgcugcugagag

SEQ ID NO: 948096 - RNA, 21 nt, Human
cugaacgagaccucuggaucc

SEQ ID NO: 948097 - RNA, 18 nt, Human
cugcugagagagccucca

SEQ ID NO: 948098 - RNA, 21 nt, Human
gauccucucucuuugcagcca

SEQ ID NO: 948099 - RNA, 18 nt, Human
ggagcacugaagagaaac

SEQ ID NO: 948100 - RNA, 19 nt, Human
uacccgggauccucucucu

SEQ ID NO: 948101 - RNA, 24 nt, Human
uacccgggauccucucucuuugca

SEQ ID NO: 948102 - RNA, 20 nt, Human
ucuaaggcacuaggaggugg

SEQ ID NO: 948103 - RNA, 19 nt, Human
ugaagagaaacagaguuug

SEQ ID NO: 948104 - RNA, 18 nt, Human
ugcccugggggcugucag

SEQ ID NO: 948105 - RNA, 19 nt, Human
ugcccugggggcugucagu

SEQ ID NO: 948106 - RNA, 24 nt, Human
ugguaaacaaaagcuuuauuauuu

SEQ ID NO: 948107 - RNA, 23 nt, Human
uuaaaaaaauggagcacugaaga

SEQ ID NO: 948108 - RNA, 24 nt, Human
uuuuuugguaaacaaaagcuuuau

SEQ ID NO: 948109 - RNA, 18 nt, Human
uuuuuuuuuuuuuuuuug

SEQ ID NO: 948110 - RNA, 18 nt, Human
uuuuuuuuuuuuuuuuug

SEQ ID NO: 948111 - RNA, 21 nt, Human
aaacaccacacugagcucaga

SEQ ID NO: 948112 - RNA, 18 nt, Human
aaagagcccguuccaaac

SEQ ID NO: 948113 - RNA, 22 nt, Human
aaagagcccguuccaaaccugc

SEQ ID NO: 948114 - RNA, 21 nt, Human
aaccccugugcaccaaacacc

SEQ ID NO: 948115 - RNA, 25 nt, Human
aaccccugugcaccaaacaccacac

SEQ ID NO: 948116 - RNA, 22 nt, Human
aaugccucugcccgacgguggg

SEQ ID NO: 948117 - RNA, 23 nt, Human
acagagcagugaggggcagagga

SEQ ID NO: 948118 - RNA, 19 nt, Human
accaaacaccacacugagc

SEQ ID NO: 948119 - RNA, 23 nt, Human
accuaagccuggagaaagagccc

SEQ ID NO: 948120 - RNA, 18 nt, Human
acgcccacgccaagacca

SEQ ID NO: 948121 - RNA, 20 nt, Human
acucgagcccagcagggacc

SEQ ID NO: 948122 - RNA, 22 nt, Human
agccaggagcccagguuguggc

SEQ ID NO: 948123 - RNA, 26 nt, Human
agcccagaacggcccuucccagcccc

SEQ ID NO: 948124 - RNA, 18 nt, Human
agccuaucccaaaaccug

SEQ ID NO: 948125 - RNA, 18 nt, Human
aggcagagugacaaugca

SEQ ID NO: 948126 - RNA, 19 nt, Human
aggcggugacguggcagag

SEQ ID NO: 948127 - RNA, 22 nt, Human
agggaccauuaggucucgggag

SEQ ID NO: 948128 - RNA, 18 nt, Human
aggguagguugggggcag

SEQ ID NO: 948129 - RNA, 21 nt, Human
agguuguggcaugggggacag

SEQ ID NO: 948130 - RNA, 23 nt, Human
augcugccuggcaccucgaggcc

SEQ ID NO: 948131 - RNA, 20 nt, Human
auuuggagucccuggagccc

SEQ ID NO: 948132 - RNA, 27 nt, Human
caaccccugugcaccaaacaccacacu

SEQ ID NO: 948133 - RNA, 21 nt, Human
caccaaacaccacacugagcu

SEQ ID NO: 948134 - RNA, 25 nt, Human
cacccccugccccagccccacggcu

SEQ ID NO: 948135 - RNA, 18 nt, Human
caccugugaucacggcug

SEQ ID NO: 948136 - RNA, 21 nt, Human
cacugagcucagaauccgggc

SEQ ID NO: 948137 - RNA, 19 nt, Human
cagagcagugaggggcaga

SEQ ID NO: 948138 - RNA, 23 nt, Human
cagauccuccccacagacccucc

SEQ ID NO: 948139 - RNA, 19 nt, Human
cagcacuaccaggcccggc

SEQ ID NO: 948140 - RNA, 24 nt, Human
cagcacuaccaggcccggcagcca

SEQ ID NO: 948141 - RNA, 19 nt, Human
caggcccggcagccagguc

SEQ ID NO: 948142 - RNA, 24 nt, Human
caguccccagggcgucagcugggg

SEQ ID NO: 948143 - RNA, 24 nt, Human
caucagucccacggccgcggugcg

SEQ ID NO: 948144 - RNA, 26 nt, Human
ccacgcccacgccaagaccaaccugc

SEQ ID NO: 948145 - RNA, 20 nt, Human
ccaggccaggugagcccaga

SEQ ID NO: 948146 - RNA, 19 nt, Human
ccaggcccccgaugccgug

SEQ ID NO: 948147 - RNA, 20 nt, Human
cccacagacccuccccucca

SEQ ID NO: 948148 - RNA, 20 nt, Human
cccacagauccuccccacag

SEQ ID NO: 948149 - RNA, 20 nt, Human
cccacgcccacgccaagacc

SEQ ID NO: 948150 - RNA, 28 nt, Human
cccacgcccacgccaagaccaaccugcu

SEQ ID NO: 948151 - RNA, 23 nt, Human
cccaggccaggugagcccagaac

SEQ ID NO: 948152 - RNA, 20 nt, Human
ccccacagacccuccccucc

SEQ ID NO: 948153 - RNA, 21 nt, Human
ccccacagacccuccccucca

SEQ ID NO: 948154 - RNA, 21 nt, Human
ccccacagauccuccccacag

SEQ ID NO: 948155 - RNA, 19 nt, Human
ccccaccucagcccuuccu

SEQ ID NO: 948156 - RNA, 27 nt, Human
ccccaccucagcccuuccucgcaggcc

SEQ ID NO: 948157 - RNA, 25 nt, Human
cccccagcccagcauacagagguac

SEQ ID NO: 948158 - RNA, 22 nt, Human
cccccugccccagccccacggc

SEQ ID NO: 948159 - RNA, 22 nt, Human
ccccugccccagccccacggcu

SEQ ID NO: 948160 - RNA, 21 nt, Human
cccgcaucagucccacggccg

SEQ ID NO: 948161 - RNA, 23 nt, Human
cccgcaucagucccacggccgcg

SEQ ID NO: 948162 - RNA, 20 nt, Human
cccgcgccccgcacaggccc

SEQ ID NO: 948163 - RNA, 23 nt, Human
cccgcgcgcuggcgacccagaga

SEQ ID NO: 948164 - RNA, 19 nt, Human
cccugccccagccccacgg

SEQ ID NO: 948165 - RNA, 22 nt, Human
cccuggagcccugcuguagccc

SEQ ID NO: 948166 - RNA, 20 nt, Human
ccgagccacgcgugggugcg

SEQ ID NO: 948167 - RNA, 19 nt, Human
ccgccccacccgggcuccg

SEQ ID NO: 948168 - RNA, 22 nt, Human
ccgcgcccacgcccacgccaag

SEQ ID NO: 948169 - RNA, 19 nt, Human
ccgcgccccgcacaggccc

SEQ ID NO: 948170 - RNA, 18 nt, Human
ccggccccaccucagccc

SEQ ID NO: 948171 - RNA, 22 nt, Human
ccggcgccggcuccagccgcgc

SEQ ID NO: 948172 - RNA, 20 nt, Human
ccgggcuccggugcgaagcc

SEQ ID NO: 948173 - RNA, 19 nt, Human
ccguaaaacugacgccccu

SEQ ID NO: 948174 - RNA, 21 nt, Human
cgacccagagacccuggaagc

SEQ ID NO: 948175 - RNA, 23 nt, Human
cgcaccgccccacccgggcuccg

SEQ ID NO: 948176 - RNA, 19 nt, Human
cgcaggccuggccggggca

SEQ ID NO: 948177 - RNA, 22 nt, Human
cgcaguccgcgcagacccgcgc

SEQ ID NO: 948178 - RNA, 23 nt, Human
cgccaagaccaaccugcugccgg

SEQ ID NO: 948179 - RNA, 20 nt, Human
cgcccccugccggccccacc

SEQ ID NO: 948180 - RNA, 23 nt, Human
cgcuugagagccggaagcuguuc

SEQ ID NO: 948181 - RNA, 25 nt, Human
cggaagcuguuccaggaggagggag

SEQ ID NO: 948182 - RNA, 19 nt, Human
cgggccugcagacucgagc

SEQ ID NO: 948183 - RNA, 18 nt, Human
cggugacguggcagagcu

SEQ ID NO: 948184 - RNA, 24 nt, Human
cucccaagcuggggucccggaggc

SEQ ID NO: 948185 - RNA, 22 nt, Human
cucccaggccaggugagcccag

SEQ ID NO: 948186 - RNA, 23 nt, Human
cucccgcgcccacgcccacgcca

SEQ ID NO: 948187 - RNA, 23 nt, Human
cucgcaggccuggccggggcaac

SEQ ID NO: 948188 - RNA, 20 nt, Human
cucgcuccccgcaguccgcg

SEQ ID NO: 948189 - RNA, 18 nt, Human
cugccccacagauccucc

SEQ ID NO: 948190 - RNA, 23 nt, Human
cuggggucccggaggcagaguga

SEQ ID NO: 948191 - RNA, 23 nt, Human
cuuggccauggccccugaccaac

SEQ ID NO: 948192 - RNA, 19 nt, Human
gaccauuaggucucgggag

SEQ ID NO: 948193 - RNA, 21 nt, Human
gacccagagacccuggaagcu

SEQ ID NO: 948194 - RNA, 20 nt, Human
gacgcucgcucgcccaucuc

SEQ ID NO: 948195 - RNA, 21 nt, Human
gacguggcagagcugccagca

SEQ ID NO: 948196 - RNA, 20 nt, Human
gagcagacgcucgcucgccc

SEQ ID NO: 948197 - RNA, 18 nt, Human
gagcccugcuguagccag

SEQ ID NO: 948198 - RNA, 19 nt, Human
gagcugccagcaggggccc

SEQ ID NO: 948199 - RNA, 19 nt, Human
gaggagggaggggccucgg

SEQ ID NO: 948200 - RNA, 22 nt, Human
gcacagagcagugaggggcaga

SEQ ID NO: 948201 - RNA, 18 nt, Human
gcacaggcccggugggca

SEQ ID NO: 948202 - RNA, 19 nt, Human
gcagcugacacccccugcc

SEQ ID NO: 948203 - RNA, 22 nt, Human
gcccacgcccacgccaagacca

SEQ ID NO: 948204 - RNA, 21 nt, Human
gcccccgaugccgugcccggc

SEQ ID NO: 948205 - RNA, 21 nt, Human
gcugcagcacuaccaggcccg

SEQ ID NO: 948206 - RNA, 20 nt, Human
ggcagagagggaaccacugg

SEQ ID NO: 948207 - RNA, 20 nt, Human
ggcaggaaggcccucgggau

SEQ ID NO: 948208 - RNA, 18 nt, Human
ggcaggccgacccuggcu

SEQ ID NO: 948209 - RNA, 18 nt, Human
ggcagggccuuggccaug

SEQ ID NO: 948210 - RNA, 21 nt, Human
ggccggccugccgagccacgc

SEQ ID NO: 948211 - RNA, 21 nt, Human
ggccugcagacucgagcccag

SEQ ID NO: 948212 - RNA, 24 nt, Human
gggacagaggaggugggaccuggc

SEQ ID NO: 948213 - RNA, 19 nt, Human
gggcagagagggaaccacu

SEQ ID NO: 948214 - RNA, 18 nt, Human
gggcaggccgacccuggc

SEQ ID NO: 948215 - RNA, 21 nt, Human
gggcccaagagacugcagcag

SEQ ID NO: 948216 - RNA, 20 nt, Human
ggggcggggaggggcugcag

SEQ ID NO: 948217 - RNA, 18 nt, Human
gggggcaguagcucacca

SEQ ID NO: 948218 - RNA, 23 nt, Human
ggguuagggcuggggccuccucg

SEQ ID NO: 948219 - RNA, 20 nt, Human
gugagcacguggugcgcccc

SEQ ID NO: 948220 - RNA, 18 nt, Human
gugcguggcagggccuug

SEQ ID NO: 948221 - RNA, 24 nt, Human
uacagagguacccgcaccgcccca

SEQ ID NO: 948222 - RNA, 21 nt, Human
uacugugcaccugcauccuca

SEQ ID NO: 948223 - RNA, 18 nt, Human
ucagccugcuccgggcug

SEQ ID NO: 948224 - RNA, 18 nt, Human
ucagucccacggccgcgg

SEQ ID NO: 948225 - RNA, 27 nt, Human
uccaaaccugccccacagauccucccc

SEQ ID NO: 948226 - RNA, 18 nt, Human
uccaggaggagggagggg

SEQ ID NO: 948227 - RNA, 23 nt, Human
ucccaaaaccuggcccugccucu

SEQ ID NO: 948228 - RNA, 27 nt, Human
ucccacggccgcggugcggucgucacc

SEQ ID NO: 948229 - RNA, 19 nt, Human
uccccacagacccuccccu

SEQ ID NO: 948230 - RNA, 18 nt, Human
uccccgagaucagucccc

SEQ ID NO: 948231 - RNA, 19 nt, Human
uccccgagaucagucccca

SEQ ID NO: 948232 - RNA, 23 nt, Human
ucccgcgcccacgcccacgccaa

SEQ ID NO: 948233 - RNA, 21 nt, Human
ucccgcugugcagcugacacc

SEQ ID NO: 948234 - RNA, 23 nt, Human
uccguaaaacugacgccccuggg

SEQ ID NO: 948235 - RNA, 19 nt, Human
ucgguuucucccggggcau

SEQ ID NO: 948236 - RNA, 23 nt, Human
ucugcccgcagcgcggguuaggg

SEQ ID NO: 948237 - RNA, 20 nt, Human
ugaccaaccccugugcacca

SEQ ID NO: 948238 - RNA, 18 nt, Human
ugacguggcagagcugcc

SEQ ID NO: 948239 - RNA, 24 nt, Human
ugagcccagaacggcccuucccag

SEQ ID NO: 948240 - RNA, 21 nt, Human
ugaguccguaaaacugacgcc

SEQ ID NO: 948241 - RNA, 18 nt, Human
ugcagcacuaccaggccc

SEQ ID NO: 948242 - RNA, 26 nt, Human
ugcagcagguuggugcucacaguggg

SEQ ID NO: 948243 - RNA, 22 nt, Human
ugcaguccaggcccccgaugcc

SEQ ID NO: 948244 - RNA, 19 nt, Human
ugccucugcccgacggugg

SEQ ID NO: 948245 - RNA, 22 nt, Human
ugccucugcccgacgguggggg

SEQ ID NO: 948246 - RNA, 23 nt, Human
ugcgcccccagcccagcauacag

SEQ ID NO: 948247 - RNA, 23 nt, Human
ugcuccgggcugaccugaagggc

SEQ ID NO: 948248 - RNA, 19 nt, Human
uggagucccuggagcccug

SEQ ID NO: 948249 - RNA, 22 nt, Human
uggagucccuggagcccugcug

SEQ ID NO: 948250 - RNA, 21 nt, Human
uggcagacccacagcucccaa

SEQ ID NO: 948251 - RNA, 18 nt, Human
uggccccugaccaacccc

SEQ ID NO: 948252 - RNA, 19 nt, Human
uggccccugaccaaccccu

SEQ ID NO: 948253 - RNA, 18 nt, Human
uggggagucaaggaguca

SEQ ID NO: 948254 - RNA, 20 nt, Human
ugggggacagaggagguggg

SEQ ID NO: 948255 - RNA, 21 nt, Human
ugggggcaguagcucaccagg

SEQ ID NO: 948256 - RNA, 23 nt, Human
ugugaucacggcugccuggcgcc

SEQ ID NO: 948257 - RNA, 21 nt, Human
ugugggagccaggcaggcggu

SEQ ID NO: 948258 - RNA, 22 nt, Human
uuaggucucgggaggaggcagc

SEQ ID NO: 948259 - RNA, 19 nt, Human
uuccugaggugaccuugag

SEQ ID NO: 948260 - RNA, 21 nt, Human
aaaagaacuuguugccaaagu

SEQ ID NO: 948261 - RNA, 19 nt, Human
aaacaaaugaacaacuagg

SEQ ID NO: 948262 - RNA, 19 nt, Human
aaccuacaagagaaguaga

SEQ ID NO: 948263 - RNA, 21 nt, Human
aaguagauuuuuuuaaagugc

SEQ ID NO: 948264 - RNA, 21 nt, Human
aaguauucagacaguuaccuu

SEQ ID NO: 948265 - RNA, 18 nt, Human
acggaaccagggcagggg

SEQ ID NO: 948266 - RNA, 24 nt, Human
agaaguagauuuuuuuaaagugcc

SEQ ID NO: 948267 - RNA, 18 nt, Human
agauuuuuuuaaagugcc

SEQ ID NO: 948268 - RNA, 20 nt, Human
agccgcaaaaccuacaagag

SEQ ID NO: 948269 - RNA, 21 nt, Human
caaauaccacggguaagggua

SEQ ID NO: 948270 - RNA, 22 nt, Human
caaauaccacggguaaggguaa

SEQ ID NO: 948271 - RNA, 23 nt, Human
cacaauaucacagcuggcacaaa

SEQ ID NO: 948272 - RNA, 22 nt, Human
cacagcuggcacaaaacugccu

SEQ ID NO: 948273 - RNA, 19 nt, Human
cacugcaucauaaaggcaa

SEQ ID NO: 948274 - RNA, 20 nt, Human
cagagaauucacaaaacaag

SEQ ID NO: 948275 - RNA, 20 nt, Human
caugacgggcccgcgggccu

SEQ ID NO: 948276 - RNA, 19 nt, Human
ccgcaaaaccuacaagaga

SEQ ID NO: 948277 - RNA, 21 nt, Human
ccuuuaaaaugugaaagcaag

SEQ ID NO: 948278 - RNA, 18 nt, Human
cgcaacggaaccagggca

SEQ ID NO: 948279 - RNA, 24 nt, Human
cuccaugacgggcccgcgggccuc

SEQ ID NO: 948280 - RNA, 20 nt, Human
gcauaugaacaguauucuuu

SEQ ID NO: 948281 - RNA, 22 nt, Human
ggcaggggccggggccgaaggg

SEQ ID NO: 948282 - RNA, 22 nt, Human
gggccggggccgaagggggcga

SEQ ID NO: 948283 - RNA, 25 nt, Human
gggccggggccgaagggggcgaggg

SEQ ID NO: 948284 - RNA, 18 nt, Human
gggcgaggggucgggggg

SEQ ID NO: 948285 - RNA, 21 nt, Human
uaagaguguugacaguauuca

SEQ ID NO: 948286 - RNA, 24 nt, Human
uaagaguguugacaguauucagag

SEQ ID NO: 948287 - RNA, 23 nt, Human
uaauucauguagcuuucuuccuu

SEQ ID NO: 948288 - RNA, 19 nt, Human
uagccgcaaaaccuacaag

SEQ ID NO: 948289 - RNA, 22 nt, Human
ucagaggggcgagguuucuuga

SEQ ID NO: 948290 - RNA, 21 nt, Human
ucauaaaguuuuuacuuggaa

SEQ ID NO: 948291 - RNA, 21 nt, Human
ugagaccaaguuucauaaagu

SEQ ID NO: 948292 - RNA, 19 nt, Human
ugguaugcacaauaucaca

SEQ ID NO: 948293 - RNA, 18 nt, Human
uuaaaauuuucuuuaaaa

SEQ ID NO: 948294 - RNA, 20 nt, Human
uuaauucauguagcuuucuu

SEQ ID NO: 948295 - RNA, 21 nt, Human
uuccaaagaaauuuucccaua

SEQ ID NO: 948296 - RNA, 24 nt, Human
uuugaaauuuuaaaauuuucuuua

SEQ ID NO: 948297 - RNA, 18 nt, Human
uuuuuuuuuuuuuuuuug

SEQ ID NO: 948298 - RNA, 26 nt, Human
aaacagcuggaaaccauaugcuacag

SEQ ID NO: 948299 - RNA, 21 nt, Human
aaccagaugaagauccguguc

SEQ ID NO: 948300 - RNA, 22 nt, Human
aaucccuacaacaaaaaccaag

SEQ ID NO: 948301 - RNA, 23 nt, Human
acugggccccuccugggcaaugg

SEQ ID NO: 948302 - RNA, 22 nt, Human
agaaacagcuggaaaccauaug

SEQ ID NO: 948303 - RNA, 24 nt, Human
agcacaccuggaauauaaaaaaca

SEQ ID NO: 948304 - RNA, 18 nt, Human
aggcacauucuuccucca

SEQ ID NO: 948305 - RNA, 20 nt, Human
aggcugaggaagcacagcug

SEQ ID NO: 948306 - RNA, 23 nt, Human
augguggugguggcggcgacacc

SEQ ID NO: 948307 - RNA, 24 nt, Human
caaaaaccaaggcucaaggaggug

SEQ ID NO: 948308 - RNA, 24 nt, Human
caaaacagccauaugacagagggc

SEQ ID NO: 948309 - RNA, 19 nt, Human
cagaaagaacaguaacaga

SEQ ID NO: 948310 - RNA, 22 nt, Human
cauggugacugggccccuccug

SEQ ID NO: 948311 - RNA, 20 nt, Human
ccauaugacagagggcugag

SEQ ID NO: 948312 - RNA, 21 nt, Human
ccaucccucacauauaaauac

SEQ ID NO: 948313 - RNA, 18 nt, Human
cgaugguggugguggcgg

SEQ ID NO: 948314 - RNA, 22 nt, Human
cggcucgggcugccuccagcag

SEQ ID NO: 948315 - RNA, 23 nt, Human
cuacaacaaaaaccaaggcucaa

SEQ ID NO: 948316 - RNA, 20 nt, Human
cucauggugacugggccccu

SEQ ID NO: 948317 - RNA, 22 nt, Human
cugaacugcagcuaugagacug

SEQ ID NO: 948318 - RNA, 21 nt, Human
cuggaauauaaaaaacauccc

SEQ ID NO: 948319 - RNA, 21 nt, Human
cuuggagccccgcagccaucc

SEQ ID NO: 948320 - RNA, 23 nt, Human
gacgcgggacucgugacuccgau

SEQ ID NO: 948321 - RNA, 18 nt, Human
gacggcggcggcucgggc

SEQ ID NO: 948322 - RNA, 22 nt, Human
gaggaagcacagcugaacugca

SEQ ID NO: 948323 - RNA, 21 nt, Human
gcaauggcaaugccacuggag

SEQ ID NO: 948324 - RNA, 20 nt, Human
ggcagcuucugcuuugucug

SEQ ID NO: 948325 - RNA, 19 nt, Human
ggccuuaucuugugauggu

SEQ ID NO: 948326 - RNA, 22 nt, Human
ggcucgggcugccuccagcagc

SEQ ID NO: 948327 - RNA, 19 nt, Human
ggcugaggaagcacagcug

SEQ ID NO: 948328 - RNA, 18 nt, Human
gggcugccuccagcagcc

SEQ ID NO: 948329 - RNA, 24 nt, Human
guggcagcuucugcuuugucugua

SEQ ID NO: 948330 - RNA, 24 nt, Human
guggcggcgacaccgacggcggcg

SEQ ID NO: 948331 - RNA, 18 nt, Human
guggugguggcggcgaca

SEQ ID NO: 948332 - RNA, 25 nt, Human
uaaauagucuaauacaccaauuucu

SEQ ID NO: 948333 - RNA, 21 nt, Human
uaaucccuacaacaaaaacca

SEQ ID NO: 948334 - RNA, 22 nt, Human
uaaucccuacaacaaaaaccaa

SEQ ID NO: 948335 - RNA, 18 nt, Human
uagcacugcaggacucau

SEQ ID NO: 948336 - RNA, 19 nt, Human
uagcacugcaggacucaug

SEQ ID NO: 948337 - RNA, 21 nt, Human
uaggcugaggaagcacagcug

SEQ ID NO: 948338 - RNA, 22 nt, Human
uaggcugaggaagcacagcuga

SEQ ID NO: 948339 - RNA, 19 nt, Human
uccguggcagcuucugcuu

SEQ ID NO: 948340 - RNA, 22 nt, Human
uccuccagguaaggcaagggag

SEQ ID NO: 948341 - RNA, 20 nt, Human
ugacugggccccuccugggc

SEQ ID NO: 948342 - RNA, 21 nt, Human
ugaggagauuuaaugucuuua

SEQ ID NO: 948343 - RNA, 25 nt, Human
ugcagaaagaacaguaacagacucc

SEQ ID NO: 948344 - RNA, 21 nt, Human
ugggcaauggcaaugccacug

SEQ ID NO: 948345 - RNA, 19 nt, Human
ugguggugguggcggcgac

SEQ ID NO: 948346 - RNA, 19 nt, Human
uucaaaggaacaaaacacc

SEQ ID NO: 948347 - RNA, 19 nt, Human
uucacagaaaauuaagcaa

SEQ ID NO: 948348 - RNA, 24 nt, Human
aaaaaagcagccaauauccaugua

SEQ ID NO: 948349 - RNA, 23 nt, Human
aaccauaauuggguuuagcauuu

SEQ ID NO: 948350 - RNA, 24 nt, Human
acugcagccacugucaauuuccug

SEQ ID NO: 948351 - RNA, 20 nt, Human
agccacugucaauuuccugg

SEQ ID NO: 948352 - RNA, 19 nt, Human
agccugaaaccuaugauca

SEQ ID NO: 948353 - RNA, 18 nt, Human
auaaaaggcaacauuugu

SEQ ID NO: 948354 - RNA, 24 nt, Human
aucaucccaaauauacacaaauua

SEQ ID NO: 948355 - RNA, 27 nt, Human
caagacacgcuguguaccaccuuacag

SEQ ID NO: 948356 - RNA, 21 nt, Human
cagccacugucaauuuccugg

SEQ ID NO: 948357 - RNA, 23 nt, Human
ccauaauauaauuuuacaucaua

SEQ ID NO: 948358 - RNA, 20 nt, Human
cuaacacuugucacaucuca

SEQ ID NO: 948359 - RNA, 23 nt, Human
uaaaaaaagcagccaauauccau

SEQ ID NO: 948360 - RNA, 21 nt, Human
uaaaagauuauucuaaaugcu

SEQ ID NO: 948361 - RNA, 19 nt, Human
uaauucuguucuggaggag

SEQ ID NO: 948362 - RNA, 20 nt, Human
uagcuccuaaauaucauccc

SEQ ID NO: 948363 - RNA, 21 nt, Human
uagcuccuaaauaucaucccu

SEQ ID NO: 948364 - RNA, 24 nt, Human
uauccauguaaacaguacauugug

SEQ ID NO: 948365 - RNA, 21 nt, Human
ucaauacugcagccacuguca

SEQ ID NO: 948366 - RNA, 26 nt, Human
uccuaaauaucaucccaaauauacac

SEQ ID NO: 948367 - RNA, 21 nt, Human
ucuguucuggaggaguuucuu

SEQ ID NO: 948368 - RNA, 22 nt, Human
uguaaaauuugauugauagcuc

SEQ ID NO: 948369 - RNA, 22 nt, Human
uuagcauuuucuccuaaaauuu

SEQ ID NO: 948370 - RNA, 19 nt, Human
uuucaaggcaaacaucaag

SEQ ID NO: 948371 - RNA, 24 nt, Human
aaacagcuucccaagaaaacaucc

SEQ ID NO: 948372 - RNA, 19 nt, Human
aaagaagcuucccagcucu

SEQ ID NO: 948373 - RNA, 23 nt, Human
aaauauaagcuacauacaauaua

SEQ ID NO: 948374 - RNA, 19 nt, Human
aacaguuaccaggaucacc

SEQ ID NO: 948375 - RNA, 22 nt, Human
aaggaccaaaacagcuucccaa

SEQ ID NO: 948376 - RNA, 20 nt, Human
aagucaauuuauagaugcuu

SEQ ID NO: 948377 - RNA, 24 nt, Human
aaucaucaaaaucauuucagcaaa

SEQ ID NO: 948378 - RNA, 25 nt, Human
aauugcuccccaacaguuagcucaa

SEQ ID NO: 948379 - RNA, 21 nt, Human
acauacaauauaaaccuagag

SEQ ID NO: 948380 - RNA, 21 nt, Human
acaugacaacucaccuagagc

SEQ ID NO: 948381 - RNA, 21 nt, Human
accaaauugcuccccaacagu

SEQ ID NO: 948382 - RNA, 19 nt, Human
acccacaugacaacucacc

SEQ ID NO: 948383 - RNA, 24 nt, Human
accccaacccagcccugagacacc

SEQ ID NO: 948384 - RNA, 19 nt, Human
accugagcaucaacuccca

SEQ ID NO: 948385 - RNA, 24 nt, Human
accuuguccaucuugcugcugucc

SEQ ID NO: 948386 - RNA, 20 nt, Human
acuuuggaccccaacccagc

SEQ ID NO: 948387 - RNA, 18 nt, Human
agaagacacuuuaaaagc

SEQ ID NO: 948388 - RNA, 22 nt, Human
agacaucucccuucccugcaaa

SEQ ID NO: 948389 - RNA, 20 nt, Human
aguuaaaaaaaauacaauga

SEQ ID NO: 948390 - RNA, 21 nt, Human
auggcgguauccaucuccaug

SEQ ID NO: 948391 - RNA, 21 nt, Human
caaaacagcuucccaagaaaa

SEQ ID NO: 948392 - RNA, 22 nt, Human
caacuaccaaauugcuccccaa

SEQ ID NO: 948393 - RNA, 21 nt, Human
caacucaccuagagccaaaag

SEQ ID NO: 948394 - RNA, 18 nt, Human
caagaaaacauccgaaaa

SEQ ID NO: 948395 - RNA, 24 nt, Human
caagaaaacauccgaaaauuccuu

SEQ ID NO: 948396 - RNA, 18 nt, Human
caaguuaaaaaaaauaca

SEQ ID NO: 948397 - RNA, 22 nt, Human
caaguuaaaaaaaauacaauga

SEQ ID NO: 948398 - RNA, 22 nt, Human
cacaaaagucaaaguuuguaua

SEQ ID NO: 948399 - RNA, 19 nt, Human
caccuagagccaaaagaag

SEQ ID NO: 948400 - RNA, 22 nt, Human
caccuuuucccuucaauccuug

SEQ ID NO: 948401 - RNA, 22 nt, Human
cagcucuccacuaagggcaggg

SEQ ID NO: 948402 - RNA, 18 nt, Human
caggaucaccuuuucccu

SEQ ID NO: 948403 - RNA, 19 nt, Human
caucuugcucucacgauua

SEQ ID NO: 948404 - RNA, 19 nt, Human
caucuugcugcuguccacu

SEQ ID NO: 948405 - RNA, 22 nt, Human
caugacaacucaccuagagcca

SEQ ID NO: 948406 - RNA, 23 nt, Human
caugucuguucuccccgugccga

SEQ ID NO: 948407 - RNA, 25 nt, Human
ccaucuccauggcgaccaccaucuc

SEQ ID NO: 948408 - RNA, 18 nt, Human
ccaugucuguucuccccg

SEQ ID NO: 948409 - RNA, 19 nt, Human
cccaacccagcccugagac

SEQ ID NO: 948410 - RNA, 26 nt, Human
cccaacccagcccugagaccgguucc

SEQ ID NO: 948411 - RNA, 24 nt, Human
cccacaugacaacucaccuagagc

SEQ ID NO: 948412 - RNA, 20 nt, Human
ccccaacccagcccugagac

SEQ ID NO: 948413 - RNA, 22 nt, Human
ccccaugccggccugcgcuucc

SEQ ID NO: 948414 - RNA, 20 nt, Human
ccuacaugucucagggcuga

SEQ ID NO: 948415 - RNA, 22 nt, Human
ccugagacaccuaguuaccaaa

SEQ ID NO: 948416 - RNA, 23 nt, Human
ccugagacaccuaguuaccaaag

SEQ ID NO: 948417 - RNA, 20 nt, Human
ccuuguccaucuugcugcug

SEQ ID NO: 948418 - RNA, 21 nt, Human
cgguucuccccaugccggccu

SEQ ID NO: 948419 - RNA, 22 nt, Human
cucaacuuacccacaugacaac

SEQ ID NO: 948420 - RNA, 18 nt, Human
cugcugcuuucuggaugg

SEQ ID NO: 948421 - RNA, 20 nt, Human
cuuacacuuuggaccccaac

SEQ ID NO: 948422 - RNA, 18 nt, Human
gaaucagacaucucccuu

SEQ ID NO: 948423 - RNA, 19 nt, Human
gcugcuuucuggauggcgg

SEQ ID NO: 948424 - RNA, 22 nt, Human
gcuggaugcaaaccuggcuggg

SEQ ID NO: 948425 - RNA, 24 nt, Human
ggaccaaaacagcuucccaagaaa

SEQ ID NO: 948426 - RNA, 20 nt, Human
guaugacggcugcugcuuuc

SEQ ID NO: 948427 - RNA, 23 nt, Human
uaaaaaauauaagcuacauacaa

SEQ ID NO: 948428 - RNA, 20 nt, Human
uacaaugagauagaagacac

SEQ ID NO: 948429 - RNA, 18 nt, Human
uaccaaauugcuccccaa

SEQ ID NO: 948430 - RNA, 21 nt, Human
uagaaucagacaucucccuuc

SEQ ID NO: 948431 - RNA, 20 nt, Human
uagcaauaccaucucaaacc

SEQ ID NO: 948432 - RNA, 26 nt, Human
uaguaaaaaauauaagcuacauacaa

SEQ ID NO: 948433 - RNA, 23 nt, Human
ucaacuuacccacaugacaacuc

SEQ ID NO: 948434 - RNA, 19 nt, Human
ucaauccuuguggcuucug

SEQ ID NO: 948435 - RNA, 21 nt, Human
ucagagccugggucugaaagg

SEQ ID NO: 948436 - RNA, 22 nt, Human
ucauuggggcaaguuaaaaaaa

SEQ ID NO: 948437 - RNA, 22 nt, Human
uccaaggaccaaaacagcuucc

SEQ ID NO: 948438 - RNA, 21 nt, Human
uccaucuccauggcgaccacc

SEQ ID NO: 948439 - RNA, 19 nt, Human
uccaucuugcugcuguccc

SEQ ID NO: 948440 - RNA, 20 nt, Human
ucccaagauaaccucaacuu

SEQ ID NO: 948441 - RNA, 19 nt, Human
uccgaaaauuccuucugau

SEQ ID NO: 948442 - RNA, 22 nt, Human
ucuuuccugcuuuccccauucc

SEQ ID NO: 948443 - RNA, 18 nt, Human
ugaaagguguuuccuaca

SEQ ID NO: 948444 - RNA, 23 nt, Human
ugcugcuguccacuuuggguucc

SEQ ID NO: 948445 - RNA, 18 nt, Human
uguccaucuugcugcugu

SEQ ID NO: 948446 - RNA, 23 nt, Human
ugucuuaucugucuugcugucca

SEQ ID NO: 948447 - RNA, 18 nt, Human
uuaaaagcuucuuuccug

SEQ ID NO: 948448 - RNA, 25 nt, Human
uuaaauuuagcaauaccaucucaaa

SEQ ID NO: 948449 - RNA, 23 nt, Human
uuaccaggaucaccuuuucccuu

SEQ ID NO: 948450 - RNA, 21 nt, Human
uuccccauuccgaccaucauu

SEQ ID NO: 948451 - RNA, 21 nt, Human
uucccuucaauccuuguggcu

SEQ ID NO: 948452 - RNA, 19 nt, Human
uugcugcuguccacuuugg

SEQ ID NO: 948453 - RNA, 18 nt, Human
uugcuguccaccuugucc

SEQ ID NO: 948454 - RNA, 20 nt, Human
aaaagcaaccuauaaaaggc

SEQ ID NO: 948455 - RNA, 23 nt, Human
aagcaaccuauaaaaggcucucg

SEQ ID NO: 948456 - RNA, 20 nt, Human
acaggaucuauuccacauag

SEQ ID NO: 948457 - RNA, 22 nt, Human
acuccacacuugcaugcccucc

SEQ ID NO: 948458 - RNA, 22 nt, Human
agacaacagucacaguuacuga

SEQ ID NO: 948459 - RNA, 19 nt, Human
agcaaagccaggcuacuac

SEQ ID NO: 948460 - RNA, 18 nt, Human
agucacaguuacugagca

SEQ ID NO: 948461 - RNA, 22 nt, Human
auuucuguauccuucacauccc

SEQ ID NO: 948462 - RNA, 20 nt, Human
cacagauggaaaaacaggau

SEQ ID NO: 948463 - RNA, 20 nt, Human
cauccagcuaaaaacagauc

SEQ ID NO: 948464 - RNA, 22 nt, Human
ccacagagaauauaagcucaga

SEQ ID NO: 948465 - RNA, 22 nt, Human
cgggaaaagcaaccuauaaaag

SEQ ID NO: 948466 - RNA, 18 nt, Human
gagcaaguaaauacucca

SEQ ID NO: 948467 - RNA, 22 nt, Human
gccgucagagcaaagccaggcu

SEQ ID NO: 948468 - RNA, 20 nt, Human
gucacaguuacugagcaagu

SEQ ID NO: 948469 - RNA, 21 nt, Human
uaaagagcaaaauaaaaggaa

SEQ ID NO: 948470 - RNA, 19 nt, Human
uagaagaaaaaucuaauac

SEQ ID NO: 948471 - RNA, 19 nt, Human
uagggucacaaucugggac

SEQ ID NO: 948472 - RNA, 20 nt, Human
uccguuaaauagaagaaaaa

SEQ ID NO: 948473 - RNA, 19 nt, Human
ucuaacucuuccacuagau

SEQ ID NO: 948474 - RNA, 22 nt, Human
ucucgggccgcgagaucgccgu

SEQ ID NO: 948475 - RNA, 18 nt, Human
ucuguauccuucacaucc

SEQ ID NO: 948476 - RNA, 20 nt, Human
ugauauggguugauucacag

SEQ ID NO: 948477 - RNA, 27 nt, Human
ugauucacagucauuucuguauccuuu

SEQ ID NO: 948478 - RNA, 19 nt, Human
ugcacauucaccaaaguca

SEQ ID NO: 948479 - RNA, 24 nt, Human
uggaaaaacaggaucuauuccaca

SEQ ID NO: 948480 - RNA, 21 nt, Human
ugggacacagauggaaaaaca

SEQ ID NO: 948481 - RNA, 25 nt, Human
ugucacaucuuccacagagaauaua

SEQ ID NO: 948482 - RNA, 24 nt, Human
uuaaagagcaaaauaaaaggaagu

SEQ ID NO: 948483 - RNA, 21 nt, Human
uuccacuagauuaucagcucc

SEQ ID NO: 948484 - RNA, 20 nt, Human
uugaugauauggguugauuu

SEQ ID NO: 948485 - RNA, 23 nt, Human
uuuaaagagcaaaauaaaaggaa

SEQ ID NO: 948486 - RNA, 21 nt, Human
uuuuuuuuuuuuacuaguaaa

SEQ ID NO: 948487 - RNA, 22 nt, Human
uuuuuuuuuuuuuuuuuacuag

SEQ ID NO: 948488 - RNA, 23 nt, Human
uuuuuuuuuuuuuuuuuuacuag

SEQ ID NO: 948489 - RNA, 24 nt, Human
aacagaauauuuccaaaacuuggg

SEQ ID NO: 948490 - RNA, 21 nt, Human
acccacagcgaccccagcucc

SEQ ID NO: 948491 - RNA, 20 nt, Human
acccgggccccucggagcuc

SEQ ID NO: 948492 - RNA, 23 nt, Human
cagcugccgcuccggcucccacu

SEQ ID NO: 948493 - RNA, 22 nt, Human
cccacgaccacggucagucgcc

SEQ ID NO: 948494 - RNA, 19 nt, Human
ccccucggagcuccccuuc

SEQ ID NO: 948495 - RNA, 18 nt, Human
ccgccgcgcucccuccgc

SEQ ID NO: 948496 - RNA, 21 nt, Human
ccgccgcgcucccuccgcugc

SEQ ID NO: 948497 - RNA, 18 nt, Human
ccgcgcucccuccgcugc

SEQ ID NO: 948498 - RNA, 22 nt, Human
ccugcggagagaacgcugccag

SEQ ID NO: 948499 - RNA, 20 nt, Human
cgacccgggccccucggagc

SEQ ID NO: 948500 - RNA, 23 nt, Human
cggagcccugggacggccuaaac

SEQ ID NO: 948501 - RNA, 23 nt, Human
cuucgcgacccacagcgacccca

SEQ ID NO: 948502 - RNA, 19 nt, Human
gacccacagcgaccccagc

SEQ ID NO: 948503 - RNA, 18 nt, Human
gaccugcggagagaacgc

SEQ ID NO: 948504 - RNA, 21 nt, Human
gagaacgcugccagcugccgc

SEQ ID NO: 948505 - RNA, 21 nt, Human
gcugcagcagcggccaccggg

SEQ ID NO: 948506 - RNA, 20 nt, Human
gucuccgagcccccgcgccg

SEQ ID NO: 948507 - RNA, 19 nt, Human
ucccaccugcugcccgagg

SEQ ID NO: 948508 - RNA, 20 nt, Human
ucccaccugcugcccgagga

SEQ ID NO: 948509 - RNA, 22 nt, Human
ucccacuucccaccugcugccc

SEQ ID NO: 948510 - RNA, 22 nt, Human
ucgcgacccacagcgaccccag

SEQ ID NO: 948511 - RNA, 22 nt, Human
ucgcgggccccgcgccgggcuc

SEQ ID NO: 948512 - RNA, 20 nt, Human
ucgugcaccaagcgcgcacg

SEQ ID NO: 948513 - RNA, 26 nt, Human
ugcugcccgaggaagacuuccgggag

SEQ ID NO: 948514 - RNA, 24 nt, Human
uggcgacccgggccccucggagcu

SEQ ID NO: 948515 - RNA, 20 nt, Human
uugugaauuucucuugcuuu

SEQ ID NO: 948516 - RNA, 20 nt, Human
acagccccaagagaugaggg

SEQ ID NO: 948517 - RNA, 21 nt, Human
agagugucagcuucagccucc

SEQ ID NO: 948518 - RNA, 20 nt, Human
aggggaagagaaugcucugg

SEQ ID NO: 948519 - RNA, 22 nt, Human
agugucagcuucagccucccag

SEQ ID NO: 948520 - RNA, 23 nt, Human
cagcagaggcugaaccagggaac

SEQ ID NO: 948521 - RNA, 19 nt, Human
cagccaaagagcaagccag

SEQ ID NO: 948522 - RNA, 22 nt, Human
ccccaagagaugaggggaagag

SEQ ID NO: 948523 - RNA, 18 nt, Human
ccucuguaacagugacuu

SEQ ID NO: 948524 - RNA, 21 nt, Human
ccucuguaacagugacuucuu

SEQ ID NO: 948525 - RNA, 21 nt, Human
gggaauugaaggucagccaaa

SEQ ID NO: 948526 - RNA, 21 nt, Human
ucccagcagaggcugaaccag

SEQ ID NO: 948527 - RNA, 19 nt, Human
uccuucaugagugaacucu

SEQ ID NO: 948528 - RNA, 25 nt, Human
ugagugaacucuuaccuaguccacc

SEQ ID NO: 948529 - RNA, 19 nt, Human
ugguucggagcccuggaga

SEQ ID NO: 948530 - RNA, 20 nt, Human
ugucagcuucagccucccag

SEQ ID NO: 948531 - RNA, 20 nt, Human
uuauugcagccaacacaggg

SEQ ID NO: 948532 - RNA, 21 nt, Human
uugcagccaacacaggguaac

SEQ ID NO: 948533 - RNA, 20 nt, Human
aaaaagacgagcagaccugg

SEQ ID NO: 948534 - RNA, 23 nt, Human
aaaaagacgagcagaccuggugu

SEQ ID NO: 948535 - RNA, 26 nt, Human
aacccaaagaaauguaccucccgagg

SEQ ID NO: 948536 - RNA, 20 nt, Human
aacccugaggaggcgagucc

SEQ ID NO: 948537 - RNA, 26 nt, Human
aagcaaauauaaaacacaaaaaagac

SEQ ID NO: 948538 - RNA, 22 nt, Human
agaaaaccuggaaaccgucuaa

SEQ ID NO: 948539 - RNA, 24 nt, Human
agcagcgcgcccaggcuccugugc

SEQ ID NO: 948540 - RNA, 18 nt, Human
agcgucaccugggagaaa

SEQ ID NO: 948541 - RNA, 20 nt, Human
augaagcaggugacuuaggg

SEQ ID NO: 948542 - RNA, 25 nt, Human
caacaccaugagcgcuggggacgga

SEQ ID NO: 948543 - RNA, 21 nt, Human
cacaaaaaagacgagcagacc

SEQ ID NO: 948544 - RNA, 19 nt, Human
caccugggagaaaaccugg

SEQ ID NO: 948545 - RNA, 23 nt, Human
caggucaggacguuucacagcag

SEQ ID NO: 948546 - RNA, 21 nt, Human
cuggggcuggcugggcuucug

SEQ ID NO: 948547 - RNA, 23 nt, Human
cuugguuuccucacugucaugug

SEQ ID NO: 948548 - RNA, 21 nt, Human
gcacuggagucuggggcuggc

SEQ ID NO: 948549 - RNA, 19 nt, Human
gcagaaucuaaaaaaaccc

SEQ ID NO: 948550 - RNA, 21 nt, Human
gcagcacagggaacccugagg

SEQ ID NO: 948551 - RNA, 18 nt, Human
gcuggcugggcuucuggc

SEQ ID NO: 948552 - RNA, 23 nt, Human
gcugggccggcugucaccgccag

SEQ ID NO: 948553 - RNA, 19 nt, Human
ggacagcucugcggugugu

SEQ ID NO: 948554 - RNA, 24 nt, Human
ggcugucaccgccagcugaggcgc

SEQ ID NO: 948555 - RNA, 19 nt, Human
gggcgucucuagaaaccca

SEQ ID NO: 948556 - RNA, 23 nt, Human
ggucaggacguuucacagcagcg

SEQ ID NO: 948557 - RNA, 22 nt, Human
guccuguacucccacucgugcc

SEQ ID NO: 948558 - RNA, 23 nt, Human
uauaaaacacaaaaaagacgagc

SEQ ID NO: 948559 - RNA, 25 nt, Human
uccucugucgccggaugggcucgac

SEQ ID NO: 948560 - RNA, 20 nt, Human
ugaagcaggugacuuagggg

SEQ ID NO: 948561 - RNA, 19 nt, Human
ugccuggacagcucugcgg

SEQ ID NO: 948562 - RNA, 20 nt, Human
ugggccggcugucaccgcca

SEQ ID NO: 948563 - RNA, 22 nt, Human
ugguggcgccacgcugggccgg

SEQ ID NO: 948564 - RNA, 23 nt, Human
ugugugguggcgccacgcugggc

SEQ ID NO: 948565 - RNA, 25 nt, Human
uuuuuuuuuugcggacaguaaaccg

SEQ ID NO: 948566 - RNA, 19 nt, Human
uuuuuuuuuuuuuugcgga

SEQ ID NO: 948567 - RNA, 22 nt, Human
uuuuuuuuuuuuuuuuuugcgg

SEQ ID NO: 948568 - RNA, 25 nt, Human
aaaaaaaaacaaaaacaaaaaccag

SEQ ID NO: 948569 - RNA, 23 nt, Human
aaaaaaacaaaaacaaaaaccag

SEQ ID NO: 948570 - RNA, 21 nt, Human
aaaacaaaaacaaaaaccaga

SEQ ID NO: 948571 - RNA, 23 nt, Human
aaacaaaaacaaaaaccagaugg

SEQ ID NO: 948572 - RNA, 24 nt, Human
aaacaaaaacaaaaaccagaugga

SEQ ID NO: 948573 - RNA, 25 nt, Human
aaacaaaaacaaaaaccagauggag

SEQ ID NO: 948574 - RNA, 21 nt, Human
aaacaaaaaccagauggagaa

SEQ ID NO: 948575 - RNA, 18 nt, Human
aacaaaaacaaaaaccag

SEQ ID NO: 948576 - RNA, 24 nt, Human
aaggggaggcgagggagguugcgc

SEQ ID NO: 948577 - RNA, 31 nt, Human
acaaaagcaugggggaaaaaaaaacaaaaaa

SEQ ID NO: 948578 - RNA, 21 nt, Human
agcgggcgcggcggggaccca

SEQ ID NO: 948579 - RNA, 21 nt, Human
agcggggcggcuguugcccuu

SEQ ID NO: 948580 - RNA, 18 nt, Human
aggcaggggagagggcug

SEQ ID NO: 948581 - RNA, 20 nt, Human
aggcaggggagagggcuggc

SEQ ID NO: 948582 - RNA, 20 nt, Human
aggcgguggcggcggcguug

SEQ ID NO: 948583 - RNA, 21 nt, Human
aggcgguggcggcggcguugg

SEQ ID NO: 948584 - RNA, 22 nt, Human
auggcgacauuuuucccuguuu

SEQ ID NO: 948585 - RNA, 22 nt, Human
caacaaauugaauccagcugaa

SEQ ID NO: 948586 - RNA, 18 nt, Human
cagaguaguugacaagca

SEQ ID NO: 948587 - RNA, 24 nt, Human
cagcagccaaacaaaagcaugggg

SEQ ID NO: 948588 - RNA, 22 nt, Human
cauuguggaaacccccuccccc

SEQ ID NO: 948589 - RNA, 21 nt, Human
ccccugggccgaggccgaccu

SEQ ID NO: 948590 - RNA, 19 nt, Human
cccgccgaggcggagcggg

SEQ ID NO: 948591 - RNA, 21 nt, Human
ccggcggcagcggcgaccgag

SEQ ID NO: 948592 - RNA, 26 nt, Human
ccucacauuguggaaacccccucccc

SEQ ID NO: 948593 - RNA, 25 nt, Human
cgacacagcaacggauacucgcccc

SEQ ID NO: 948594 - RNA, 19 nt, Human
cgacggcagucggagcgga

SEQ ID NO: 948595 - RNA, 23 nt, Human
cggagcggggcggcuguugcccu

SEQ ID NO: 948596 - RNA, 19 nt, Human
cggcggcagcggcgaccga

SEQ ID NO: 948597 - RNA, 26 nt, Human
cggcggcagcggcgaccgaggacgag

SEQ ID NO: 948598 - RNA, 21 nt, Human
cgguggcggcggcguuggggg

SEQ ID NO: 948599 - RNA, 23 nt, Human
cguucagggccggcggggguccc

SEQ ID NO: 948600 - RNA, 18 nt, Human
gaagaggcggaggagcug

SEQ ID NO: 948601 - RNA, 19 nt, Human
gccaaacaaaagcaugggg

SEQ ID NO: 948602 - RNA, 22 nt, Human
gcgcggcggggacccaggcuca

SEQ ID NO: 948603 - RNA, 22 nt, Human
gcggggcggaggcugcggggga

SEQ ID NO: 948604 - RNA, 19 nt, Human
gcgguggcggcggcguugg

SEQ ID NO: 948605 - RNA, 19 nt, Human
gcugcugcccgaagaggcg

SEQ ID NO: 948606 - RNA, 21 nt, Human
gcugcugcccgaagaggcgga

SEQ ID NO: 948607 - RNA, 23 nt, Human
ggagcucagcggcaucaacgggg

SEQ ID NO: 948608 - RNA, 18 nt, Human
ggagcuguuggagccgcu

SEQ ID NO: 948609 - RNA, 19 nt, Human
ggcgguggcggcggcguug

SEQ ID NO: 948610 - RNA, 20 nt, Human
ggcuucucaaacuaggaaga

SEQ ID NO: 948611 - RNA, 26 nt, Human
gggccgaggccgaccugcuccgggaa

SEQ ID NO: 948612 - RNA, 18 nt, Human
gggcggaggcugcggggg

SEQ ID NO: 948613 - RNA, 21 nt, Human
gggggucggcggcggcagcgg

SEQ ID NO: 948614 - RNA, 18 nt, Human
ggggucggcggcggcagc

SEQ ID NO: 948615 - RNA, 20 nt, Human
uacagcagccaaacaaaagc

SEQ ID NO: 948616 - RNA, 20 nt, Human
uauuuugguguaaagacagg

SEQ ID NO: 948617 - RNA, 18 nt, Human
ucccgccgcgaggcaggg

SEQ ID NO: 948618 - RNA, 21 nt, Human
ucggagcggagcgggcgcggc

SEQ ID NO: 948619 - RNA, 21 nt, Human
ucggaggcgguggcggcggcg

SEQ ID NO: 948620 - RNA, 22 nt, Human
ucggcggcgacggcagucggag

SEQ ID NO: 948621 - RNA, 23 nt, Human
ugcccgaagaggcggaggagcug

SEQ ID NO: 948622 - RNA, 23 nt, Human
ugcugcugcccgaagaggcggag

SEQ ID NO: 948623 - RNA, 23 nt, Human
uggcggcggcguugggggggugc

SEQ ID NO: 948624 - RNA, 20 nt, Human
uggcguucagggccggcggg

SEQ ID NO: 948625 - RNA, 26 nt, Human
uguaaagacaggaagcuggaaaauac

SEQ ID NO: 948626 - RNA, 24 nt, Human
ugucaauacuuuauuuugguguaa

SEQ ID NO: 948627 - RNA, 20 nt, Human
uuacagcagccaaacaaaag

SEQ ID NO: 948628 - RNA, 23 nt, Human
uucaaacucaaauacuuaaaaau

SEQ ID NO: 948629 - RNA, 19 nt, Human
uucuuguccaugucggagg

SEQ ID NO: 948630 - RNA, 20 nt, Human
uuggguuuagacucgccggc

SEQ ID NO: 948631 - RNA, 25 nt, Human
uuuaaaauuuucuugguucccccuc

SEQ ID NO: 948632 - RNA, 24 nt, Human
aaaaaaagaaaagucugacuauaa

SEQ ID NO: 948633 - RNA, 22 nt, Human
aaaacacaagaauaaaaaaagc

SEQ ID NO: 948634 - RNA, 24 nt, Human
aaaacacaagaauaaaaaaagcaa

SEQ ID NO: 948635 - RNA, 24 nt, Human
aaacaaauacagcugcuguuaaca

SEQ ID NO: 948636 - RNA, 19 nt, Human
aaacagagacugagaugug

SEQ ID NO: 948637 - RNA, 19 nt, Human
aaagaacugugcaaacaag

SEQ ID NO: 948638 - RNA, 22 nt, Human
aacaagcuuaaaacuacuuuuu

SEQ ID NO: 948639 - RNA, 27 nt, Human
aacacaagaauaaaaaaagcaauuauc

SEQ ID NO: 948640 - RNA, 27 nt, Human
aacacaagaauaaaaaaagcaauuauc

SEQ ID NO: 948641 - RNA, 21 nt, Human
aagaaagagaauaaaucaaaa

SEQ ID NO: 948642 - RNA, 23 nt, Human
acaguaaugagagaugcaguauc

SEQ ID NO: 948643 - RNA, 23 nt, Human
accuuaauagaguugguuucuug

SEQ ID NO: 948644 - RNA, 24 nt, Human
accuucaugacacuguguuuugua

SEQ ID NO: 948645 - RNA, 21 nt, Human
acuucaauaaccucagcacua

SEQ ID NO: 948646 - RNA, 21 nt, Human
agaagaaagagaauaaaucaa

SEQ ID NO: 948647 - RNA, 23 nt, Human
agaagaaagagaauaaaucaaaa

SEQ ID NO: 948648 - RNA, 27 nt, Human
agaauaaaaaaagcaauuaucagaaaa

SEQ ID NO: 948649 - RNA, 23 nt, Human
agacaagaggcaaggaggucaga

SEQ ID NO: 948650 - RNA, 24 nt, Human
agacaagaggcaaggaggucagaa

SEQ ID NO: 948651 - RNA, 21 nt, Human
agagaugcaguauccuuuugc

SEQ ID NO: 948652 - RNA, 22 nt, Human
agguggggucggccgacaggcc

SEQ ID NO: 948653 - RNA, 23 nt, Human
auaaacacaugcuaaauggauaa

SEQ ID NO: 948654 - RNA, 24 nt, Human
auaaauaaacugguuuucaagcau

SEQ ID NO: 948655 - RNA, 19 nt, Human
auaauuagauaaaacacau

SEQ ID NO: 948656 - RNA, 19 nt, Human
auuaacaaccaaaauaauu

SEQ ID NO: 948657 - RNA, 20 nt, Human
cacaagaauaaaaaaagcaa

SEQ ID NO: 948658 - RNA, 24 nt, Human
caggauguaauagauaccuuucca

SEQ ID NO: 948659 - RNA, 26 nt, Human
cagugacaaaagaucaaaaccaccaa

SEQ ID NO: 948660 - RNA, 20 nt, Human
cauagagccagccccaacga

SEQ ID NO: 948661 - RNA, 18 nt, Human
caucauggggcucauaag

SEQ ID NO: 948662 - RNA, 25 nt, Human
ccaacgauaauaauacacuauuuaa

SEQ ID NO: 948663 - RNA, 18 nt, Human
cccuggcucuuugggcuc

SEQ ID NO: 948664 - RNA, 20 nt, Human
ccuaaucccuggcucuuugg

SEQ ID NO: 948665 - RNA, 24 nt, Human
cuaugguucaagacaagaggcaag

SEQ ID NO: 948666 - RNA, 20 nt, Human
cuuacaagcuaggagaucac

SEQ ID NO: 948667 - RNA, 18 nt, Human
cuuaugacauacuacauu

SEQ ID NO: 948668 - RNA, 21 nt, Human
gagguggggucggccgacagg

SEQ ID NO: 948669 - RNA, 19 nt, Human
gggaaggggaagagaagaa

SEQ ID NO: 948670 - RNA, 21 nt, Human
ggugcgugaucugggggagga

SEQ ID NO: 948671 - RNA, 20 nt, Human
guucacuugaagucagauaa

SEQ ID NO: 948672 - RNA, 21 nt, Human
uaaaacacauaggaaagggua

SEQ ID NO: 948673 - RNA, 22 nt, Human
uaaaaccuugacccaaaugcca

SEQ ID NO: 948674 - RNA, 24 nt, Human
uaaaauaucacguacuuuuucccc

SEQ ID NO: 948675 - RNA, 22 nt, Human
uaaacacaugcuaaauggauaa

SEQ ID NO: 948676 - RNA, 21 nt, Human
uaacuucaauaaccucagcac

SEQ ID NO: 948677 - RNA, 19 nt, Human
uaauaauaagaaacacuuc

SEQ ID NO: 948678 - RNA, 20 nt, Human
uaauuccuaaucccuggcuc

SEQ ID NO: 948679 - RNA, 21 nt, Human
uacauaugaaaaaauaaacac

SEQ ID NO: 948680 - RNA, 21 nt, Human
uacuagaccaucucuaccucu

SEQ ID NO: 948681 - RNA, 30 nt, Human
uauaaaauaauaauaagaaacacuucugaa

SEQ ID NO: 948682 - RNA, 23 nt, Human
uauacaaauucugcguuugugug

SEQ ID NO: 948683 - RNA, 24 nt, Human
uaucagaaaauauugcacaacuuc

SEQ ID NO: 948684 - RNA, 20 nt, Human
ucaaucucaauaaaucagaa

SEQ ID NO: 948685 - RNA, 22 nt, Human
ucagcacuacaguaaugagaga

SEQ ID NO: 948686 - RNA, 21 nt, Human
ucaguuugcuuacaagcuagg

SEQ ID NO: 948687 - RNA, 20 nt, Human
ucccuggcucuuugggcuca

SEQ ID NO: 948688 - RNA, 24 nt, Human
ucugacuauaauacuugaugacac

SEQ ID NO: 948689 - RNA, 20 nt, Human
ucugcagccauccaggaauu

SEQ ID NO: 948690 - RNA, 21 nt, Human
ugacaaaagaucaaaaccacc

SEQ ID NO: 948691 - RNA, 18 nt, Human
ugacccaaaugccagcaa

SEQ ID NO: 948692 - RNA, 19 nt, Human
ugaggugaaccaauaaguc

SEQ ID NO: 948693 - RNA, 22 nt, Human
ugaucugggggaggagaaagca

SEQ ID NO: 948694 - RNA, 18 nt, Human
ugcaagaaacaaaggaga

SEQ ID NO: 948695 - RNA, 21 nt, Human
ugcaagaaacaaaggagaaau

SEQ ID NO: 948696 - RNA, 23 nt, Human
ugcaagaaacaaaggagaaauuc

SEQ ID NO: 948697 - RNA, 22 nt, Human
ugccagcaacuucagaaaagaa

SEQ ID NO: 948698 - RNA, 22 nt, Human
uggagcaauaacaagaucuaaa

SEQ ID NO: 948699 - RNA, 20 nt, Human
ugguucaagacaagaggcaa

SEQ ID NO: 948700 - RNA, 27 nt, Human
ugguucacuugaagucagauaagagac

SEQ ID NO: 948701 - RNA, 20 nt, Human
uguaauaucacugaggugaa

SEQ ID NO: 948702 - RNA, 21 nt, Human
uuaaaaagaccuaaggcaaug

SEQ ID NO: 948703 - RNA, 23 nt, Human
uuaacaaucuagaaaaaaagaaa

SEQ ID NO: 948704 - RNA, 22 nt, Human
uuaacacuuuacacaauuccua

SEQ ID NO: 948705 - RNA, 23 nt, Human
uuccauuuccaauggaaaaaaag

SEQ ID NO: 948706 - RNA, 20 nt, Human
uugacccaaaugccagcaac

SEQ ID NO: 948707 - RNA, 22 nt, Human
uuuaacuugacuuuccauuauc

SEQ ID NO: 948708 - RNA, 22 nt, Human
uuugucagucagcuagcaggau

SEQ ID NO: 948709 - RNA, 21 nt, Human
uuuuuuagcuguaauaucacu

SEQ ID NO: 948710 - RNA, 28 nt, Human
aaacgcaaaacacuuaaauacugugauc

SEQ ID NO: 948711 - RNA, 23 nt, Human
aacauucaaacuccccucauaca

SEQ ID NO: 948712 - RNA, 27 nt, Human
aaguguugaaaucugcacuaguauaga

SEQ ID NO: 948713 - RNA, 19 nt, Human
acagaacccuuaaggacac

SEQ ID NO: 948714 - RNA, 18 nt, Human
acagcccggaguacuagc

SEQ ID NO: 948715 - RNA, 21 nt, Human
acuuucauuccaaaagaagag

SEQ ID NO: 948716 - RNA, 24 nt, Human
agccgcgucgcugcgggagaaguc

SEQ ID NO: 948717 - RNA, 22 nt, Human
agcugcucaaucaaaucucuac

SEQ ID NO: 948718 - RNA, 18 nt, Human
agcuggguuaguucaugc

SEQ ID NO: 948719 - RNA, 21 nt, Human
auaagucacuuacuuucaaau

SEQ ID NO: 948720 - RNA, 25 nt, Human
auuuuuuuuuuuuuuauguuuuggc

SEQ ID NO: 948721 - RNA, 21 nt, Human
caaacuccccucauacaaggc

SEQ ID NO: 948722 - RNA, 18 nt, Human
caacucaacaacucuagg

SEQ ID NO: 948723 - RNA, 22 nt, Human
cacagcccggaguacuagcagg

SEQ ID NO: 948724 - RNA, 22 nt, Human
cacucucucuuucucucuugaa

SEQ ID NO: 948725 - RNA, 20 nt, Human
cagccgcgucgcugcgggag

SEQ ID NO: 948726 - RNA, 20 nt, Human
ccacucucucuuucucucuu

SEQ ID NO: 948727 - RNA, 22 nt, Human
ccacucucucuuucucucuuga

SEQ ID NO: 948728 - RNA, 26 nt, Human
ccccucauacaaggccauauaaaaau

SEQ ID NO: 948729 - RNA, 19 nt, Human
cuaggucuuaauugcaagc

SEQ ID NO: 948730 - RNA, 22 nt, Human
cucccuaaugauuggcagguca

SEQ ID NO: 948731 - RNA, 22 nt, Human
cugaauauccgcaccgaccccc

SEQ ID NO: 948732 - RNA, 24 nt, Human
gacugcuuuggaacagaaagggaa

SEQ ID NO: 948733 - RNA, 18 nt, Human
ggagaagucccuacccug

SEQ ID NO: 948734 - RNA, 22 nt, Human
ggcagauaaauaccagaucaaa

SEQ ID NO: 948735 - RNA, 26 nt, Human
uaacacuacagaacccuuaaggacac

SEQ ID NO: 948736 - RNA, 19 nt, Human
uacagaacccuuaaggaca

SEQ ID NO: 948737 - RNA, 19 nt, Human
uagguggcuguagcacuga

SEQ ID NO: 948738 - RNA, 23 nt, Human
uauuaagagguauaugaucugag

SEQ ID NO: 948739 - RNA, 25 nt, Human
uccaaaagaagagcugaauugaugc

SEQ ID NO: 948740 - RNA, 25 nt, Human
ucucuacauaacacuauaguaauua

SEQ ID NO: 948741 - RNA, 19 nt, Human
ugaauauccgcaccgaccc

SEQ ID NO: 948742 - RNA, 23 nt, Human
ugagugcuuccgggauacugcug

SEQ ID NO: 948743 - RNA, 23 nt, Human
ugccagaacauauuccaacucaa

SEQ ID NO: 948744 - RNA, 24 nt, Human
ugccagaacauauuccaacucaac

SEQ ID NO: 948745 - RNA, 22 nt, Human
ugcucaaucaaaucucuacaua

SEQ ID NO: 948746 - RNA, 20 nt, Human
ugcuuccgggauacugcugu

SEQ ID NO: 948747 - RNA, 19 nt, Human
uggcagagaaaacugagug

SEQ ID NO: 948748 - RNA, 20 nt, Human
uuggaacagaaagggaaaaa

SEQ ID NO: 948749 - RNA, 20 nt, Human
uuuaaagggaaauaaaccaa

SEQ ID NO: 948750 - RNA, 23 nt, Human
uuucaugacugaauauccgcacc

SEQ ID NO: 948751 - RNA, 22 nt, Human
uuuuauguuuuggcuauacuuu

SEQ ID NO: 948752 - RNA, 18 nt, Human
uuuuuuuuuuuuuuuuug

SEQ ID NO: 948753 - RNA, 21 nt, Human
aaaaaaaaacccuguaaaaac

SEQ ID NO: 948754 - RNA, 23 nt, Human
aaaaaaaacacaagaaacuucag

SEQ ID NO: 948755 - RNA, 21 nt, Human
aaaaaagcacucucaaacgua

SEQ ID NO: 948756 - RNA, 25 nt, Human
aaaaaagcacucucaaacguauacu

SEQ ID NO: 948757 - RNA, 22 nt, Human
aaaaacacaagaaacuucagau

SEQ ID NO: 948758 - RNA, 22 nt, Human
aaaaacaucacauauaauacag

SEQ ID NO: 948759 - RNA, 26 nt, Human
aaaaacaucacauauaauacaggaaa

SEQ ID NO: 948760 - RNA, 24 nt, Human
aaaaagaauggaaaaaaaaaacau

SEQ ID NO: 948761 - RNA, 24 nt, Human
aaaaaggaaaucuuaaauaaaggg

SEQ ID NO: 948762 - RNA, 23 nt, Human
aaacugauguggcaacccaaaau

SEQ ID NO: 948763 - RNA, 23 nt, Human
aagaucuccauaaaaguaaugcc

SEQ ID NO: 948764 - RNA, 23 nt, Human
aagcaguuuuaucacaaaaccag

SEQ ID NO: 948765 - RNA, 24 nt, Human
aagcaguuuuaucacaaaaccagg

SEQ ID NO: 948766 - RNA, 23 nt, Human
aauacagaaacuaugaaaaauuc

SEQ ID NO: 948767 - RNA, 21 nt, Human
aauaucuccauuaucucuggu

SEQ ID NO: 948768 - RNA, 25 nt, Human
acacacacacaaaauacacucaaua

SEQ ID NO: 948769 - RNA, 20 nt, Human
acacauccacacacacacaa

SEQ ID NO: 948770 - RNA, 21 nt, Human
acagaaacuaugaaaaauucc

SEQ ID NO: 948771 - RNA, 18 nt, Human
acagauaaaaacacauac

SEQ ID NO: 948772 - RNA, 18 nt, Human
acagauaaaaacacauac

SEQ ID NO: 948773 - RNA, 19 nt, Human
accaggguuauauucagug

SEQ ID NO: 948774 - RNA, 23 nt, Human
acuacaguuuauauaggaaaacu

SEQ ID NO: 948775 - RNA, 20 nt, Human
acuaccaauuuaauuuuucu

SEQ ID NO: 948776 - RNA, 21 nt, Human
agaaagaaaauugaacaacau

SEQ ID NO: 948777 - RNA, 22 nt, Human
agaaauuccaaaauuacagggg

SEQ ID NO: 948778 - RNA, 21 nt, Human
agaacuaauacaaaaaaaagc

SEQ ID NO: 948779 - RNA, 19 nt, Human
aggaauugaauauauaaaa

SEQ ID NO: 948780 - RNA, 20 nt, Human
aggcuaaagugcaaaauauc

SEQ ID NO: 948781 - RNA, 22 nt, Human
agguacuggaggucuacacccu

SEQ ID NO: 948782 - RNA, 24 nt, Human
auaacucucugcuuaaagacaaaa

SEQ ID NO: 948783 - RNA, 22 nt, Human
auacagaaacuaugaaaaauuc

SEQ ID NO: 948784 - RNA, 25 nt, Human
auggaagaaaauaccaugaaaagaa

SEQ ID NO: 948785 - RNA, 21 nt, Human
auuuuuuuaaaggaaagaaaa

SEQ ID NO: 948786 - RNA, 22 nt, Human
caaaaaaaaaaaaaaaaaaaaa

SEQ ID NO: 948787 - RNA, 23 nt, Human
caaaaaaaagcacucucaaacgu

SEQ ID NO: 948788 - RNA, 26 nt, Human
caaaacacacauccacacacacacaa

SEQ ID NO: 948789 - RNA, 21 nt, Human
caaaggauuacacaaccaaua

SEQ ID NO: 948790 - RNA, 28 nt, Human
caacaaagcuuucuggcucccaaacacc

SEQ ID NO: 948791 - RNA, 19 nt, Human
caaccaauaauuucacuaa

SEQ ID NO: 948792 - RNA, 22 nt, Human
cacacauccacacacacacaaa

SEQ ID NO: 948793 - RNA, 25 nt, Human
cacacauccacacacacacaaaaua

SEQ ID NO: 948794 - RNA, 21 nt, Human
cacuacauauuaaagcagggc

SEQ ID NO: 948795 - RNA, 26 nt, Human
cacucaauacccuaucaaauaccuag

SEQ ID NO: 948796 - RNA, 26 nt, Human
cagauuacaaaaaaaaaaaaaaaaaa

SEQ ID NO: 948797 - RNA, 22 nt, Human
cauggcacagauuacaaaaaaa

SEQ ID NO: 948798 - RNA, 19 nt, Human
ccagaaauuccaaaauuac

SEQ ID NO: 948799 - RNA, 21 nt, Human
ccccaaaacacacauccacac

SEQ ID NO: 948800 - RNA, 25 nt, Human
ccccguaccccaaaacacacaucca

SEQ ID NO: 948801 - RNA, 20 nt, Human
ccgcggacgccggcgccgcc

SEQ ID NO: 948802 - RNA, 26 nt, Human
ccgcggccggagcaagaccggggucc

SEQ ID NO: 948803 - RNA, 19 nt, Human
ccugccccagcccagggcu

SEQ ID NO: 948804 - RNA, 23 nt, Human
cgccgccgcacaauauggcgagc

SEQ ID NO: 948805 - RNA, 21 nt, Human
cggcuccugccccagcccagg

SEQ ID NO: 948806 - RNA, 20 nt, Human
cgggaaggagcgagcgagcg

SEQ ID NO: 948807 - RNA, 21 nt, Human
cuccugccccagcccagggcu

SEQ ID NO: 948808 - RNA, 24 nt, Human
cugaauuacaugccuuaaaauggu

SEQ ID NO: 948809 - RNA, 22 nt, Human
cugguauuuuaauggggaaaaa

SEQ ID NO: 948810 - RNA, 18 nt, Human
cugguugguagugauggc

SEQ ID NO: 948811 - RNA, 20 nt, Human
gaaaaaaaaagucagaauac

SEQ ID NO: 948812 - RNA, 20 nt, Human
gaauguaccuaaccccacug

SEQ ID NO: 948813 - RNA, 20 nt, Human
gagcucgggaaauacaacag

SEQ ID NO: 948814 - RNA, 18 nt, Human
gagggcgggaaggagcga

SEQ ID NO: 948815 - RNA, 19 nt, Human
gcccagggcuccgcuggcc

SEQ ID NO: 948816 - RNA, 22 nt, Human
gcuaaagugcaaaauaucucca

SEQ ID NO: 948817 - RNA, 21 nt, Human
gcuccugccccagcccagggc

SEQ ID NO: 948818 - RNA, 21 nt, Human
gcuggccccaaucugucaaaa

SEQ ID NO: 948819 - RNA, 19 nt, Human
gggaaaaaaaaaaacacaa

SEQ ID NO: 948820 - RNA, 21 nt, Human
gggaaaaagaauggaaaaaaa

SEQ ID NO: 948821 - RNA, 20 nt, Human
guacuggaggucuacacccu

SEQ ID NO: 948822 - RNA, 23 nt, Human
uaaaaaaauuuagaacuaaguac

SEQ ID NO: 948823 - RNA, 19 nt, Human
uaaaagagcgccaaauuua

SEQ ID NO: 948824 - RNA, 23 nt, Human
uaaagcagggcucaagcucuauu

SEQ ID NO: 948825 - RNA, 20 nt, Human
uaaauguggcuauguauaug

SEQ ID NO: 948826 - RNA, 21 nt, Human
uaacauuacaccagaaaagga

SEQ ID NO: 948827 - RNA, 18 nt, Human
uaagaaaaaaauuaggga

SEQ ID NO: 948828 - RNA, 20 nt, Human
uaagaauacagaaacuauga

SEQ ID NO: 948829 - RNA, 25 nt, Human
uaagcacaaagcuuauagucacaaa

SEQ ID NO: 948830 - RNA, 23 nt, Human
uacaaaaaaaagcacucucaaac

SEQ ID NO: 948831 - RNA, 18 nt, Human
uacccaaagccuucacac

SEQ ID NO: 948832 - RNA, 20 nt, Human
uaccccaaaacacacaucca

SEQ ID NO: 948833 - RNA, 22 nt, Human
uaccgggcugaagauuuaaaac

SEQ ID NO: 948834 - RNA, 21 nt, Human
uacuaccaauuuaauuuuucu

SEQ ID NO: 948835 - RNA, 21 nt, Human
uagaaugacuuuacccuacug

SEQ ID NO: 948836 - RNA, 23 nt, Human
uagagucuggagagagaugaaau

SEQ ID NO: 948837 - RNA, 23 nt, Human
uagguauauacuuuuugaaaccc

SEQ ID NO: 948838 - RNA, 23 nt, Human
uaucaaauaccuagaauuauauu

SEQ ID NO: 948839 - RNA, 19 nt, Human
uauugaaaacccuuuaggg

SEQ ID NO: 948840 - RNA, 18 nt, Human
ucaacaaaaucuaagcag

SEQ ID NO: 948841 - RNA, 22 nt, Human
ucaacaaagcuuucuggcuccc

SEQ ID NO: 948842 - RNA, 26 nt, Human
ucacauauaauacaggaaaugaaguu

SEQ ID NO: 948843 - RNA, 19 nt, Human
ucacuacauauuaaagcag

SEQ ID NO: 948844 - RNA, 22 nt, Human
uccacacacacacaaaauacac

SEQ ID NO: 948845 - RNA, 21 nt, Human
uccccguaccccaaaacacac

SEQ ID NO: 948846 - RNA, 25 nt, Human
ucccuuccaaaaaggaaaucuuaaa

SEQ ID NO: 948847 - RNA, 19 nt, Human
uccugggucaaaauggugc

SEQ ID NO: 948848 - RNA, 23 nt, Human
ucgccucuccccguaccccaaaa

SEQ ID NO: 948849 - RNA, 22 nt, Human
ugacagcagaacuaauacaaaa

SEQ ID NO: 948850 - RNA, 21 nt, Human
ugagccuuggguucuucauga

SEQ ID NO: 948851 - RNA, 18 nt, Human
ugccccagcccagggcuc

SEQ ID NO: 948852 - RNA, 21 nt, Human
uggaagaaaauaccaugaaaa

SEQ ID NO: 948853 - RNA, 18 nt, Human
uggcuacaaauaagaaaa

SEQ ID NO: 948854 - RNA, 19 nt, Human
uggcucccaaacacccaau

SEQ ID NO: 948855 - RNA, 21 nt, Human
ugucaucaacaaaaucuaagc

SEQ ID NO: 948856 - RNA, 23 nt, Human
uguggcuacaaauaagaaaaaaa

SEQ ID NO: 948857 - RNA, 20 nt, Human
uuccauaaaaugguaaaaaa

SEQ ID NO: 948858 - RNA, 20 nt, Human
uugugaauguaccuaacccc

SEQ ID NO: 948859 - RNA, 25 nt, Human
uuuaaaggaaagaaaaaaauacuga

SEQ ID NO: 948860 - RNA, 18 nt, Human
uuuacccuacuggcugac

SEQ ID NO: 948861 - RNA, 25 nt, Human
uuugaggggagcaggaaaaggacag

SEQ ID NO: 948862 - RNA, 22 nt, Human
aaaauaaacaaagcugggaggg

SEQ ID NO: 948863 - RNA, 18 nt, Human
aaacaaagcugggaggga

SEQ ID NO: 948864 - RNA, 21 nt, Human
aaagaaaacacugaaaagucu

SEQ ID NO: 948865 - RNA, 19 nt, Human
aaggagagaagagguagag

SEQ ID NO: 948866 - RNA, 19 nt, Human
aaggagagaagagguagag

SEQ ID NO: 948867 - RNA, 19 nt, Human
aauccacauucacaagaag

SEQ ID NO: 948868 - RNA, 25 nt, Human
agaaaacacugaaaagucuaaaagc

SEQ ID NO: 948869 - RNA, 24 nt, Human
agucaaggagagaagagguagagg

SEQ ID NO: 948870 - RNA, 21 nt, Human
augaagaaaacuuugugccca

SEQ ID NO: 948871 - RNA, 18 nt, Human
caaagcugggagggaaga

SEQ ID NO: 948872 - RNA, 19 nt, Human
caacaacccuguaaaaagg

SEQ ID NO: 948873 - RNA, 22 nt, Human
caacaacccuguaaaaaggaga

SEQ ID NO: 948874 - RNA, 21 nt, Human
caacccuguaaaaaggagacu

SEQ ID NO: 948875 - RNA, 19 nt, Human
caagaaauuuaaagacuug

SEQ ID NO: 948876 - RNA, 18 nt, Human
caagcuuguggagaacaa

SEQ ID NO: 948877 - RNA, 21 nt, Human
caaggagagaagagguagagg

SEQ ID NO: 948878 - RNA, 19 nt, Human
cacaaaauaaacaaagcug

SEQ ID NO: 948879 - RNA, 22 nt, Human
cauagcucaccaaguucucucc

SEQ ID NO: 948880 - RNA, 23 nt, Human
ccagcucaguccugacucaaccu

SEQ ID NO: 948881 - RNA, 20 nt, Human
ccagcuccucuucuucucuu

SEQ ID NO: 948882 - RNA, 21 nt, Human
ccagcugaucuuaacaaguua

SEQ ID NO: 948883 - RNA, 19 nt, Human
ccaguccuuucugcuaaag

SEQ ID NO: 948884 - RNA, 19 nt, Human
cccgcggcggagacaaggc

SEQ ID NO: 948885 - RNA, 24 nt, Human
cccgcggcggagacaaggcagaac

SEQ ID NO: 948886 - RNA, 18 nt, Human
ccguaucaaauuuccaga

SEQ ID NO: 948887 - RNA, 18 nt, Human
cuaauucauucugaaacc

SEQ ID NO: 948888 - RNA, 20 nt, Human
cuagucucaagaaauuuaaa

SEQ ID NO: 948889 - RNA, 20 nt, Human
cucaccccugacccgcggcc

SEQ ID NO: 948890 - RNA, 20 nt, Human
gaaaaagaaaacacugaaaa

SEQ ID NO: 948891 - RNA, 22 nt, Human
gaaaaagaaaacacugaaaagu

SEQ ID NO: 948892 - RNA, 19 nt, Human
ggagaacaaaguccuacag

SEQ ID NO: 948893 - RNA, 18 nt, Human
ggagagaagagguagagg

SEQ ID NO: 948894 - RNA, 20 nt, Human
ggcagaagaagacagucguu

SEQ ID NO: 948895 - RNA, 20 nt, Human
guggagaacaaaguccuaca

SEQ ID NO: 948896 - RNA, 19 nt, Human
uaaaaaggagacugagagu

SEQ ID NO: 948897 - RNA, 25 nt, Human
uaaaagcacaaaauaaacaaagcug

SEQ ID NO: 948898 - RNA, 26 nt, Human
uaacuuuaacaagaaagccagcugau

SEQ ID NO: 948899 - RNA, 22 nt, Human
uaaguuccugacuagccagcuc

SEQ ID NO: 948900 - RNA, 22 nt, Human
uacagugggcuggaaaaagaaa

SEQ ID NO: 948901 - RNA, 20 nt, Human
uacccacaagauuucuucac

SEQ ID NO: 948902 - RNA, 20 nt, Human
uacugaagaggagagccugg

SEQ ID NO: 948903 - RNA, 20 nt, Human
uagaagacaaagggucauau

SEQ ID NO: 948904 - RNA, 23 nt, Human
uagaagacaaagggucauauuau

SEQ ID NO: 948905 - RNA, 26 nt, Human
uagccagcuccucuucuucucuugac

SEQ ID NO: 948906 - RNA, 18 nt, Human
ucaaaaauaccaacuuga

SEQ ID NO: 948907 - RNA, 19 nt, Human
ucaaaaauaccaacuugau

SEQ ID NO: 948908 - RNA, 21 nt, Human
ucaaauuuccagaauacccac

SEQ ID NO: 948909 - RNA, 23 nt, Human
ucaaccucuucaaucuuuauuuc

SEQ ID NO: 948910 - RNA, 19 nt, Human
ucacaacaacccuguaaaa

SEQ ID NO: 948911 - RNA, 22 nt, Human
uggaaaaagaaaacacugaaaa

SEQ ID NO: 948912 - RNA, 21 nt, Human
uggaaguaaagucuggaggaa

SEQ ID NO: 948913 - RNA, 19 nt, Human
uggcagaagaagacagucg

SEQ ID NO: 948914 - RNA, 18 nt, Human
ugggcuggaaaaagaaaa

SEQ ID NO: 948915 - RNA, 24 nt, Human
ugggcuggaaaaagaaaacacuga

SEQ ID NO: 948916 - RNA, 22 nt, Human
uggugguuaaugaauaaguucc

SEQ ID NO: 948917 - RNA, 19 nt, Human
uguggagaacaaaguccua

SEQ ID NO: 948918 - RNA, 19 nt, Human
uuagggcugcaaaccaccc

SEQ ID NO: 948919 - RNA, 21 nt, Human
uugcuacacaaaugaagaaaa

SEQ ID NO: 948920 - RNA, 20 nt, Human
uuuuuaaaauaucacucccc

SEQ ID NO: 948921 - RNA, 26 nt, Human
aaaaagccacugcucuuuggagccaa

SEQ ID NO: 948922 - RNA, 22 nt, Human
aaaggccugcauggccuacaga

SEQ ID NO: 948923 - RNA, 23 nt, Human
aagccacugcucuuuggagccaa

SEQ ID NO: 948924 - RNA, 23 nt, Human
acccagacaccuagguucccagu

SEQ ID NO: 948925 - RNA, 24 nt, Human
agacccucaugaaguuucuugagg

SEQ ID NO: 948926 - RNA, 23 nt, Human
agagaaacccauccauccgcagg

SEQ ID NO: 948927 - RNA, 21 nt, Human
agagaagagauggaaggaggg

SEQ ID NO: 948928 - RNA, 24 nt, Human
agagacccucaugaaguuucuuga

SEQ ID NO: 948929 - RNA, 24 nt, Human
agagagcagccauacagacaccac

SEQ ID NO: 948930 - RNA, 19 nt, Human
agagauggaaggaggggga

SEQ ID NO: 948931 - RNA, 22 nt, Human
agauggaaggagggggagaggc

SEQ ID NO: 948932 - RNA, 20 nt, Human
aggagggggagaggccaaag

SEQ ID NO: 948933 - RNA, 21 nt, Human
aggagggggagaggccaaagg

SEQ ID NO: 948934 - RNA, 23 nt, Human
aggagggggagaggccaaagggu

SEQ ID NO: 948935 - RNA, 18 nt, Human
aggccuuuccaagcgcau

SEQ ID NO: 948936 - RNA, 20 nt, Human
agggacaguguggacucagg

SEQ ID NO: 948937 - RNA, 18 nt, Human
agggcaagagagagaaga

SEQ ID NO: 948938 - RNA, 22 nt, Human
auagggcaagagagagaagaga

SEQ ID NO: 948939 - RNA, 27 nt, Human
caaaaagccacugcucuuuggagccaa

SEQ ID NO: 948940 - RNA, 18 nt, Human
caaaggccugcauggccu

SEQ ID NO: 948941 - RNA, 20 nt, Human
cacagcagcuacacuggaac

SEQ ID NO: 948942 - RNA, 23 nt, Human
cacuccucuucucucggcagggg

SEQ ID NO: 948943 - RNA, 20 nt, Human
cacuggaaccacagugcaca

SEQ ID NO: 948944 - RNA, 19 nt, Human
caggagagagaguguaaug

SEQ ID NO: 948945 - RNA, 20 nt, Human
cagggacaguguggacucag

SEQ ID NO: 948946 - RNA, 23 nt, Human
caggugacagccccgcuccgccc

SEQ ID NO: 948947 - RNA, 19 nt, Human
cauacagacaccacaugug

SEQ ID NO: 948948 - RNA, 20 nt, Human
ccacauguguuccuccuggg

SEQ ID NO: 948949 - RNA, 21 nt, Human
ccacugcucuuuggagccaag

SEQ ID NO: 948950 - RNA, 23 nt, Human
ccccugcacaccgcgcccggccg

SEQ ID NO: 948951 - RNA, 22 nt, Human
cccgcggucuccucagcauccc

SEQ ID NO: 948952 - RNA, 21 nt, Human
cccggggccgcgccggacccu

SEQ ID NO: 948953 - RNA, 22 nt, Human
cccggggccgcgccggacccuc

SEQ ID NO: 948954 - RNA, 18 nt, Human
ccgcgcccggccggccga

SEQ ID NO: 948955 - RNA, 22 nt, Human
ccgcgcccggccggccgaggcg

SEQ ID NO: 948956 - RNA, 18 nt, Human
ccgcgucccuccucagcc

SEQ ID NO: 948957 - RNA, 19 nt, Human
ccucaugaaguuucuugag

SEQ ID NO: 948958 - RNA, 19 nt, Human
ccuccuggcuccacacaga

SEQ ID NO: 948959 - RNA, 19 nt, Human
cgcaucucauguuuucagc

SEQ ID NO: 948960 - RNA, 22 nt, Human
cgccucaccccugcacaccgcg

SEQ ID NO: 948961 - RNA, 25 nt, Human
cgcuccgcccuuugugagggacuca

SEQ ID NO: 948962 - RNA, 21 nt, Human
cggacccuccuccgcgucccu

SEQ ID NO: 948963 - RNA, 24 nt, Human
cugaggcaguggcagugggcucac

SEQ ID NO: 948964 - RNA, 26 nt, Human
cugcgacaaaggccugcauggccuac

SEQ ID NO: 948965 - RNA, 20 nt, Human
cuggaaccacagugcacaug

SEQ ID NO: 948966 - RNA, 24 nt, Human
cuggcgcgggcccgcggucuccuc

SEQ ID NO: 948967 - RNA, 21 nt, Human
cugggaagguuugcugcgaca

SEQ ID NO: 948968 - RNA, 21 nt, Human
cuggugcauaggagagggaaa

SEQ ID NO: 948969 - RNA, 19 nt, Human
cugguggcugguugugcug

SEQ ID NO: 948970 - RNA, 21 nt, Human
gagagaagagauggaaggagg

SEQ ID NO: 948971 - RNA, 19 nt, Human
gaggcaaaagaaguggcag

SEQ ID NO: 948972 - RNA, 25 nt, Human
gaggcaguggcagugggcucacagc

SEQ ID NO: 948973 - RNA, 20 nt, Human
gagggggagaggccaaaggg

SEQ ID NO: 948974 - RNA, 23 nt, Human
gagugugugugugugggaggcug

SEQ ID NO: 948975 - RNA, 19 nt, Human
gaucuccaggugacagccc

SEQ ID NO: 948976 - RNA, 18 nt, Human
gccauacagacaccacau

SEQ ID NO: 948977 - RNA, 19 nt, Human
gcuacacuggaaccacagu

SEQ ID NO: 948978 - RNA, 20 nt, Human
gcugguuuuacuuggcucaa

SEQ ID NO: 948979 - RNA, 19 nt, Human
gcuuagaugauuugauagc

SEQ ID NO: 948980 - RNA, 22 nt, Human
ggaaaugauaagaggaaauggc

SEQ ID NO: 948981 - RNA, 18 nt, Human
ggaaggagggggagaggc

SEQ ID NO: 948982 - RNA, 23 nt, Human
ggacaguguggacucagggccca

SEQ ID NO: 948983 - RNA, 21 nt, Human
ggagagagaguguaauggagu

SEQ ID NO: 948984 - RNA, 22 nt, Human
ggagaugaggcuccaggagaga

SEQ ID NO: 948985 - RNA, 19 nt, Human
ggcuugaaagaccugcucu

SEQ ID NO: 948986 - RNA, 23 nt, Human
ggggagaggccaaagggucggca

SEQ ID NO: 948987 - RNA, 19 nt, Human
guagaaagagagauagggc

SEQ ID NO: 948988 - RNA, 28 nt, Human
guagagagcagccauacagacaccacaa

SEQ ID NO: 948989 - RNA, 24 nt, Human
guaugggccauucucaaaaagcca

SEQ ID NO: 948990 - RNA, 19 nt, Human
gucacaagacccagacacc

SEQ ID NO: 948991 - RNA, 19 nt, Human
guguuguaauccugagggg

SEQ ID NO: 948992 - RNA, 22 nt, Human
uacagagaaacccauccauccg

SEQ ID NO: 948993 - RNA, 21 nt, Human
ucacaagacccagacaccuag

SEQ ID NO: 948994 - RNA, 20 nt, Human
ucccgaacccggagcggcuc

SEQ ID NO: 948995 - RNA, 21 nt, Human
ucccggggccgcgccggaccc

SEQ ID NO: 948996 - RNA, 25 nt, Human
ucccugcuggggcucuggacgggcc

SEQ ID NO: 948997 - RNA, 22 nt, Human
ucccuucauccagccgggccag

SEQ ID NO: 948998 - RNA, 22 nt, Human
ucugaggcaguggcagugggcu

SEQ ID NO: 948999 - RNA, 22 nt, Human
ugacagccccgcuccgcccuuu

SEQ ID NO: 949000 - RNA, 18 nt, Human
ugacauggagaugaggcu

SEQ ID NO: 949001 - RNA, 21 nt, Human
ugaggcaaaagaaguggcagc

SEQ ID NO: 949002 - RNA, 18 nt, Human
ugaggcaguggcaguggg

SEQ ID NO: 949003 - RNA, 18 nt, Human
ugagggggaaauggguga

SEQ ID NO: 949004 - RNA, 21 nt, Human
ugcuggggcucuggacgggcc

SEQ ID NO: 949005 - RNA, 21 nt, Human
uggaguuaguaagagacccuc

SEQ ID NO: 949006 - RNA, 18 nt, Human
uggcagugggcucacagc

SEQ ID NO: 949007 - RNA, 21 nt, Human
uggccuuaucaaaggcauaca

SEQ ID NO: 949008 - RNA, 20 nt, Human
ugucaaagugcuuugguugu

SEQ ID NO: 949009 - RNA, 21 nt, Human
ugucacaagacccagacaccu

SEQ ID NO: 949010 - RNA, 18 nt, Human
uguccagcaacagucuga

SEQ ID NO: 949011 - RNA, 19 nt, Human
ugugagggacucacccucc

SEQ ID NO: 949012 - RNA, 23 nt, Human
ugugcugguuuuacuuggcucaa

SEQ ID NO: 949013 - RNA, 23 nt, Human
uucacaguggcucccuucugagg

SEQ ID NO: 949014 - RNA, 26 nt, Human
uucacaguggcucccuucugaggcag

SEQ ID NO: 949015 - RNA, 21 nt, Human
uugguugucacaagacccaga

SEQ ID NO: 949016 - RNA, 22 nt, Human
uugguugucacaagacccagac

SEQ ID NO: 949017 - RNA, 24 nt, Human
uuuuuuuuuuuucugaaguagaaa

SEQ ID NO: 949018 - RNA, 27 nt, Human
uuuuuuuuuuuuuuuuuuuuucugggg

SEQ ID NO: 949019 - RNA, 21 nt, Human
caauucccuguuccccccacc

SEQ ID NO: 949020 - RNA, 21 nt, Human
ccccaauucccuguucccccc

SEQ ID NO: 949021 - RNA, 22 nt, Human
cccuguuccccccaccaagucc

SEQ ID NO: 949022 - RNA, 21 nt, Human
ccucccucccauccccaauuc

SEQ ID NO: 949023 - RNA, 22 nt, Human
gccucccucccauccccaauuc

SEQ ID NO: 949024 - RNA, 24 nt, Human
uagauuccaggcccagggacuccc

SEQ ID NO: 949025 - RNA, 21 nt, Human
uaucuuuauugccucccuccc

SEQ ID NO: 949026 - RNA, 21 nt, Human
uccccaauucccuguuccccc

SEQ ID NO: 949027 - RNA, 21 nt, Human
uuccaggcccagggacucccu

SEQ ID NO: 949028 - RNA, 22 nt, Human
aaaaagucagugccuaugagag

SEQ ID NO: 949029 - RNA, 23 nt, Human
aaguguuuccuggauauuauucc

SEQ ID NO: 949030 - RNA, 19 nt, Human
acugaccaccugcacuguu

SEQ ID NO: 949031 - RNA, 20 nt, Human
acuguuaaagaguaaaggaa

SEQ ID NO: 949032 - RNA, 18 nt, Human
agacaaaagcauagugac

SEQ ID NO: 949033 - RNA, 22 nt, Human
auaauaacaaaaagucagugcc

SEQ ID NO: 949034 - RNA, 23 nt, Human
auccuguucagaggucccuuuca

SEQ ID NO: 949035 - RNA, 23 nt, Human
aucucagccaggcagacagaggg

SEQ ID NO: 949036 - RNA, 24 nt, Human
auguaccacaccuacacacccuuc

SEQ ID NO: 949037 - RNA, 20 nt, Human
auugugugaucaaguguccu

SEQ ID NO: 949038 - RNA, 22 nt, Human
cacacaauagaagauuuguaua

SEQ ID NO: 949039 - RNA, 23 nt, Human
caccuacacacccuucacaacau

SEQ ID NO: 949040 - RNA, 20 nt, Human
cauacacauguaccacaccu

SEQ ID NO: 949041 - RNA, 25 nt, Human
cauacacauguaccacaccuacaca

SEQ ID NO: 949042 - RNA, 22 nt, Human
cauguaccacaccuacacaccc

SEQ ID NO: 949043 - RNA, 23 nt, Human
cauguaccacaccuacacacccu

SEQ ID NO: 949044 - RNA, 18 nt, Human
ccacaccuacacacccuu

SEQ ID NO: 949045 - RNA, 22 nt, Human
ccaccugcacuguuaaagagua

SEQ ID NO: 949046 - RNA, 24 nt, Human
ccaccugcacuguuaaagaguaaa

SEQ ID NO: 949047 - RNA, 21 nt, Human
ccccccaagauguuagauaag

SEQ ID NO: 949048 - RNA, 24 nt, Human
cugcgaguggcuccagcaaguguu

SEQ ID NO: 949049 - RNA, 18 nt, Human
cugcugcucuuuggaaaa

SEQ ID NO: 949050 - RNA, 19 nt, Human
gggcagcaguuggaaugaa

SEQ ID NO: 949051 - RNA, 22 nt, Human
gugacauacacauguaccacaa

SEQ ID NO: 949052 - RNA, 24 nt, Human
uaugagagacaaaagcauagugac

SEQ ID NO: 949053 - RNA, 21 nt, Human
ucaaaauauucuuucccccca

SEQ ID NO: 949054 - RNA, 23 nt, Human
ucacaacauuuuccacacaauag

SEQ ID NO: 949055 - RNA, 21 nt, Human
ucaucuccucgcuguccccaa

SEQ ID NO: 949056 - RNA, 22 nt, Human
ucucagccaggcagacagaggg

SEQ ID NO: 949057 - RNA, 26 nt, Human
ugacauacacauguaccacaccuaca

SEQ ID NO: 949058 - RNA, 24 nt, Human
ugagagacaaaagcauagugacca

SEQ ID NO: 949059 - RNA, 21 nt, Human
ugcacuguuaaagaguaaagg

SEQ ID NO: 949060 - RNA, 19 nt, Human
ugcccacaugcaucucagc

SEQ ID NO: 949061 - RNA, 20 nt, Human
uguaccacaccuacacaccc

SEQ ID NO: 949062 - RNA, 21 nt, Human
uguaccacaccuacacacccu

SEQ ID NO: 949063 - RNA, 24 nt, Human
uguauaagaucaaguuuauuauuu

SEQ ID NO: 949064 - RNA, 20 nt, Human
uuugcagaaauccuguucag

SEQ ID NO: 949065 - RNA, 21 nt, Human
uuugccacuuguuagugacau

SEQ ID NO: 949066 - RNA, 18 nt, Human
ccuagcagcggcuugaaa

SEQ ID NO: 949067 - RNA, 19 nt, Human
cucugcgcagauccucccc

SEQ ID NO: 949068 - RNA, 18 nt, Human
uuuauugagauccucccg

SEQ ID NO: 949069 - RNA, 24 nt, Human
uuugggugaugcugcggucucugc

SEQ ID NO: 949070 - RNA, 21 nt, Human
aaaacauuuggaacuuaagga

SEQ ID NO: 949071 - RNA, 18 nt, Human
accaauagcuuauuuccc

SEQ ID NO: 949072 - RNA, 21 nt, Human
accggaacccagggacgucug

SEQ ID NO: 949073 - RNA, 22 nt, Human
acuuuaaggagugucguucaga

SEQ ID NO: 949074 - RNA, 25 nt, Human
agcggaaaacauuuggaacuuaagg

SEQ ID NO: 949075 - RNA, 22 nt, Human
agcuuauuucccugggaaacag

SEQ ID NO: 949076 - RNA, 19 nt, Human
aggagugucguucagacac

SEQ ID NO: 949077 - RNA, 20 nt, Human
caaaacgaguauuaggaaug

SEQ ID NO: 949078 - RNA, 24 nt, Human
caucacauccuaucaccuuccuuc

SEQ ID NO: 949079 - RNA, 23 nt, Human
ccaaaaugaugguaaacuuuuuu

SEQ ID NO: 949080 - RNA, 20 nt, Human
ccuuccuucuauucuucugc

SEQ ID NO: 949081 - RNA, 22 nt, Human
ccuuccuucuauucuucugcuc

SEQ ID NO: 949082 - RNA, 18 nt, Human
cgacuccuccgcgaacac

SEQ ID NO: 949083 - RNA, 19 nt, Human
cuccgcgaacaccggaacc

SEQ ID NO: 949084 - RNA, 18 nt, Human
cuuggcuaucacaaauuc

SEQ ID NO: 949085 - RNA, 25 nt, Human
gcuauaucuuaaccucaauuuuuag

SEQ ID NO: 949086 - RNA, 21 nt, Human
ggaaaacauuuggaacuuaag

SEQ ID NO: 949087 - RNA, 19 nt, Human
uaacccagaacucaugcag

SEQ ID NO: 949088 - RNA, 21 nt, Human
uagcuauaucuuaaccucaau

SEQ ID NO: 949089 - RNA, 23 nt, Human
ucagacacuagcuauaucuuaac

SEQ ID NO: 949090 - RNA, 21 nt, Human
uccuccgcgaacaccggaacu

SEQ ID NO: 949091 - RNA, 21 nt, Human
uuagcggaaaacauuuggaac

SEQ ID NO: 949092 - RNA, 24 nt, Human
uuuuuuuuuuuuuuuuugauguug

SEQ ID NO: 949093 - RNA, 25 nt, Human
aaaagcuauaccugaaccggggccc

SEQ ID NO: 949094 - RNA, 30 nt, Human
aaacaucugagcaguuuaaguuaaaaauag

SEQ ID NO: 949095 - RNA, 20 nt, Human
aagcccagcugagcccggga

SEQ ID NO: 949096 - RNA, 18 nt, Human
aaguguccucccaagaca

SEQ ID NO: 949097 - RNA, 18 nt, Human
acaauguggaaacuuaca

SEQ ID NO: 949098 - RNA, 27 nt, Human
acacugccgaccuccuucccuaugggc

SEQ ID NO: 949099 - RNA, 19 nt, Human
acuuguggacacugaucuc

SEQ ID NO: 949100 - RNA, 22 nt, Human
agcaacaauguggaaacuuaca

SEQ ID NO: 949101 - RNA, 24 nt, Human
auaaaaagcuauaccugaacaaaa

SEQ ID NO: 949102 - RNA, 20 nt, Human
auggaucuuucuguccccac

SEQ ID NO: 949103 - RNA, 21 nt, Human
auggaucuuucuguccccacu

SEQ ID NO: 949104 - RNA, 18 nt, Human
cacugcucagcauguucc

SEQ ID NO: 949105 - RNA, 21 nt, Human
cagacaggcucacggcaugga

SEQ ID NO: 949106 - RNA, 18 nt, Human
caggauggaucuuucugu

SEQ ID NO: 949107 - RNA, 24 nt, Human
cauggaccaauguuuccacaacuc

SEQ ID NO: 949108 - RNA, 21 nt, Human
cauguggagucuaaggcccug

SEQ ID NO: 949109 - RNA, 21 nt, Human
ccacaggcagacaggcucacg

SEQ ID NO: 949110 - RNA, 24 nt, Human
ccucacacugccgaccuccuuccc

SEQ ID NO: 949111 - RNA, 19 nt, Human
cgacuagagaaugucaguu

SEQ ID NO: 949112 - RNA, 23 nt, Human
gaaacucagcaccauagcagcuc

SEQ ID NO: 949113 - RNA, 22 nt, Human
gcagacaggcucacggcaugga

SEQ ID NO: 949114 - RNA, 20 nt, Human
gcccacauggcgcaaacagg

SEQ ID NO: 949115 - RNA, 19 nt, Human
ggaagcucacguguccaca

SEQ ID NO: 949116 - RNA, 25 nt, Human
gggggucaaguuugggggugacugu

SEQ ID NO: 949117 - RNA, 18 nt, Human
guugggggucaaguuugg

SEQ ID NO: 949118 - RNA, 19 nt, Human
uaaaaagcuauaccugaac

SEQ ID NO: 949119 - RNA, 22 nt, Human
uaaaagaagcuagaugcagccc

SEQ ID NO: 949120 - RNA, 21 nt, Human
uaaaauagcuucagccuuuga

SEQ ID NO: 949121 - RNA, 18 nt, Human
uaauaaggaauuuagcac

SEQ ID NO: 949122 - RNA, 19 nt, Human
uacaaaacaauguaaacug

SEQ ID NO: 949123 - RNA, 18 nt, Human
uagcacugaaaauacacc

SEQ ID NO: 949124 - RNA, 25 nt, Human
uagcuucagccuuugaacauaacuu

SEQ ID NO: 949125 - RNA, 23 nt, Human
uccacaggcagacaggcucacgg

SEQ ID NO: 949126 - RNA, 22 nt, Human
ucgacuagagaaugucaguugu

SEQ ID NO: 949127 - RNA, 22 nt, Human
ugaacauucagaggagccacug

SEQ ID NO: 949128 - RNA, 18 nt, Human
ugaugcccacauggcgca

SEQ ID NO: 949129 - RNA, 24 nt, Human
ugcagaaacagcaacaauguggaa

SEQ ID NO: 949130 - RNA, 21 nt, Human
uggcugaugcccacauggcgc

SEQ ID NO: 949131 - RNA, 22 nt, Human
ugugauaaagcccagcugagcc

SEQ ID NO: 949132 - RNA, 19 nt, Human
uguggagucuaaggcccug

SEQ ID NO: 949133 - RNA, 28 nt, Human
uuagcacacacacuucuaauaaaagaag

SEQ ID NO: 949134 - RNA, 18 nt, Human
uugggggugacuguccug

SEQ ID NO: 949135 - RNA, 22 nt, Human
uuuaaaauauacaugacuaaua

SEQ ID NO: 949136 - RNA, 23 nt, Human
uuuauuccuaaaguuaaaaucag

SEQ ID NO: 949137 - RNA, 24 nt, Human
uuuuuuuuuuuuaaaagcuuuuaa

SEQ ID NO: 949138 - RNA, 24 nt, Human
uuuuuuuuuuuuuaaaagcuuuua

SEQ ID NO: 949139 - RNA, 26 nt, Human
uuuuuuuuuuuuuuuuaaaagcuuuu

SEQ ID NO: 949140 - RNA, 23 nt, Human
uuuuuuuuuuuuuuuuuuaaaag

SEQ ID NO: 949141 - RNA, 21 nt, Human
aagcagcaaggccagagugag

SEQ ID NO: 949142 - RNA, 23 nt, Human
aagcuucagcccaccaaggggca

SEQ ID NO: 949143 - RNA, 19 nt, Human
agagaagcagcaaggccag

SEQ ID NO: 949144 - RNA, 20 nt, Human
agagaagcagcaaggccaga

SEQ ID NO: 949145 - RNA, 19 nt, Human
agcagcaauagcuuccuuc

SEQ ID NO: 949146 - RNA, 25 nt, Human
aggcaggcacuugaaucagagcuca

SEQ ID NO: 949147 - RNA, 23 nt, Human
caauagcuuccuucugcauguuc

SEQ ID NO: 949148 - RNA, 22 nt, Human
cagcaaggccagagugaggucc

SEQ ID NO: 949149 - RNA, 23 nt, Human
ccucagggucugaagcuccuuca

SEQ ID NO: 949150 - RNA, 18 nt, Human
cucagagcaugauggaag

SEQ ID NO: 949151 - RNA, 19 nt, Human
cuccuccaugaagcuucag

SEQ ID NO: 949152 - RNA, 18 nt, Human
cuugaaucagagcucagc

SEQ ID NO: 949153 - RNA, 21 nt, Human
cuuguuuuccuggaaaccuug

SEQ ID NO: 949154 - RNA, 22 nt, Human
gcagcaauagcuuccuucugca

SEQ ID NO: 949155 - RNA, 22 nt, Human
gugagcagcaauagcuuccuuc

SEQ ID NO: 949156 - RNA, 19 nt, Human
uaacacucugaauuuguau

SEQ ID NO: 949157 - RNA, 19 nt, Human
ucagagcucagcaggccca

SEQ ID NO: 949158 - RNA, 19 nt, Human
ucagcaggcccaggauggc

SEQ ID NO: 949159 - RNA, 27 nt, Human
ucagcaggcccaggauggcugcagacu

SEQ ID NO: 949160 - RNA, 22 nt, Human
ucugcauguuccucagggucug

SEQ ID NO: 949161 - RNA, 22 nt, Human
uggaagaaagaaaaguucagga

SEQ ID NO: 949162 - RNA, 22 nt, Human
uggaagaaagaaaaguucagga

SEQ ID NO: 949163 - RNA, 26 nt, Human
uggcaagcuccuccuccaugaagcuu

SEQ ID NO: 949164 - RNA, 21 nt, Human
uucagcccaccaaggggcaga

SEQ ID NO: 949165 - RNA, 19 nt, Human
uuggauggcaagcuccucc

SEQ ID NO: 949166 - RNA, 23 nt, Human
aaaaaaaaaccagguucauggaa

SEQ ID NO: 949167 - RNA, 22 nt, Human
aaaaaaccagguucauggagcc

SEQ ID NO: 949168 - RNA, 22 nt, Human
aaaaaaccagguucauggagcg

SEQ ID NO: 949169 - RNA, 18 nt, Human
aaaaaaccaguguacagu

SEQ ID NO: 949170 - RNA, 22 nt, Human
aaaaaacccacagcugaguuaa

SEQ ID NO: 949171 - RNA, 19 nt, Human
aaaaaaccccauacagcua

SEQ ID NO: 949172 - RNA, 24 nt, Human
aaaaacaaacaagaacccacaaaa

SEQ ID NO: 949173 - RNA, 29 nt, Human
aaaacaaacaagaacccacaaaaaacccc

SEQ ID NO: 949174 - RNA, 22 nt, Human
aaacaaacaagaacccacaaaa

SEQ ID NO: 949175 - RNA, 19 nt, Human
aaacaagaacccacaaaaa

SEQ ID NO: 949176 - RNA, 21 nt, Human
aaacaagaacccacaaaaaac

SEQ ID NO: 949177 - RNA, 22 nt, Human
aaagaucacguccacuguaauc

SEQ ID NO: 949178 - RNA, 19 nt, Human
aaagggagggcuggaagcc

SEQ ID NO: 949179 - RNA, 21 nt, Human
aaaugcuaauauugcuaacug

SEQ ID NO: 949180 - RNA, 20 nt, Human
aacaaugucucgcaaagggc

SEQ ID NO: 949181 - RNA, 24 nt, Human
aacaccaaagaugacaauucaugc

SEQ ID NO: 949182 - RNA, 22 nt, Human
aacagcuuucuaaugaaaaggc

SEQ ID NO: 949183 - RNA, 21 nt, Human
aaccgaccgggccucggcccc

SEQ ID NO: 949184 - RNA, 21 nt, Human
aacugcaggaagaggcagaca

SEQ ID NO: 949185 - RNA, 23 nt, Human
aagaacccacaaaaaacccacag

SEQ ID NO: 949186 - RNA, 25 nt, Human
aagaacccacaaaaaacccacagcu

SEQ ID NO: 949187 - RNA, 21 nt, Human
acaaacaagaacccacaaaaa

SEQ ID NO: 949188 - RNA, 24 nt, Human
acaagaacccacaaaaaacccaca

SEQ ID NO: 949189 - RNA, 24 nt, Human
acacucacacagauacacuuauca

SEQ ID NO: 949190 - RNA, 21 nt, Human
accaccaauaaagagaaggug

SEQ ID NO: 949191 - RNA, 21 nt, Human
acuagacuacaaaucuaaaca

SEQ ID NO: 949192 - RNA, 20 nt, Human
agaaagguccauugacccuu

SEQ ID NO: 949193 - RNA, 21 nt, Human
agacaauguugaauacacuaa

SEQ ID NO: 949194 - RNA, 23 nt, Human
agacuagacuacaaaucuaaaca

SEQ ID NO: 949195 - RNA, 20 nt, Human
aggaagaaggcuuuucucau

SEQ ID NO: 949196 - RNA, 27 nt, Human
aggaagaaggcuuuucuccuccccugg

SEQ ID NO: 949197 - RNA, 24 nt, Human
aggcacugucacugcgcuuccuuc

SEQ ID NO: 949198 - RNA, 21 nt, Human
agggcuggaagccacacagau

SEQ ID NO: 949199 - RNA, 22 nt, Human
agugugcaacagcaaacacaag

SEQ ID NO: 949200 - RNA, 18 nt, Human
auagaguuuucuuaaaac

SEQ ID NO: 949201 - RNA, 20 nt, Human
auagaguuuucuuaaaacaa

SEQ ID NO: 949202 - RNA, 21 nt, Human
aucacacgggccgcgccagga

SEQ ID NO: 949203 - RNA, 19 nt, Human
aucacagguacuuucugua

SEQ ID NO: 949204 - RNA, 24 nt, Human
augccaaaaaacaaacaagaaccc

SEQ ID NO: 949205 - RNA, 21 nt, Human
auuccauucacugggagggaa

SEQ ID NO: 949206 - RNA, 27 nt, Human
auuccauucacugggagggaaggggau

SEQ ID NO: 949207 - RNA, 22 nt, Human
caaaaaacaaacaagaacccac

SEQ ID NO: 949208 - RNA, 24 nt, Human
caaaaaacaaacaagaacccacaa

SEQ ID NO: 949209 - RNA, 25 nt, Human
caaaaaacaaacaagaacccacaaa

SEQ ID NO: 949210 - RNA, 28 nt, Human
caaaaaacaccccugugagccggggccc

SEQ ID NO: 949211 - RNA, 21 nt, Human
caaacaagaacccacaaaaaa

SEQ ID NO: 949212 - RNA, 21 nt, Human
caaaugauuccaaaaaacacc

SEQ ID NO: 949213 - RNA, 22 nt, Human
caacagaauaaaaaaaaaccag

SEQ ID NO: 949214 - RNA, 19 nt, Human
caacccucucaacuccaaa

SEQ ID NO: 949215 - RNA, 25 nt, Human
caagaacccacaaaaaacccacagc

SEQ ID NO: 949216 - RNA, 19 nt, Human
caagggaaaaaaaccagug

SEQ ID NO: 949217 - RNA, 19 nt, Human
caauaaagagaaggugaca

SEQ ID NO: 949218 - RNA, 26 nt, Human
cacaagggaaaaaaaccaguguacag

SEQ ID NO: 949219 - RNA, 23 nt, Human
caccaaagaugacaauucaugcc

SEQ ID NO: 949220 - RNA, 21 nt, Human
cacccaaacuaaauuugugcu

SEQ ID NO: 949221 - RNA, 22 nt, Human
cacccccggaaccccggcucca

SEQ ID NO: 949222 - RNA, 26 nt, Human
cacgcccagagaugacagagucgccu

SEQ ID NO: 949223 - RNA, 23 nt, Human
cacucggaaugaucacacaaaaa

SEQ ID NO: 949224 - RNA, 18 nt, Human
cacugcgcuuccuuccuc

SEQ ID NO: 949225 - RNA, 21 nt, Human
cacugcgcuuccuuccucccg

SEQ ID NO: 949226 - RNA, 18 nt, Human
cacuugggaggagaggga

SEQ ID NO: 949227 - RNA, 23 nt, Human
cagcugccugaagcaaaggaaga

SEQ ID NO: 949228 - RNA, 23 nt, Human
cagcuugugcuauugcaaacaaa

SEQ ID NO: 949229 - RNA, 21 nt, Human
cauaauuaaaacuacacacac

SEQ ID NO: 949230 - RNA, 20 nt, Human
cauccugaaaccaggguuuc

SEQ ID NO: 949231 - RNA, 25 nt, Human
caugccaaaaaacaaacaagaaccc

SEQ ID NO: 949232 - RNA, 21 nt, Human
ccaaaaaacaaacaagaaccc

SEQ ID NO: 949233 - RNA, 25 nt, Human
ccaaaaaacaaacaagaacccacaa

SEQ ID NO: 949234 - RNA, 24 nt, Human
ccaaagaugacaauucaugccaaa

SEQ ID NO: 949235 - RNA, 18 nt, Human
ccacaggagcuugaacac

SEQ ID NO: 949236 - RNA, 21 nt, Human
ccagcccgcggccagcucgcc

SEQ ID NO: 949237 - RNA, 24 nt, Human
ccauccucuccgcccccacgcccc

SEQ ID NO: 949238 - RNA, 19 nt, Human
cccacagcugaguuaagau

SEQ ID NO: 949239 - RNA, 28 nt, Human
cccacgccccaaccgaccgggccucggc

SEQ ID NO: 949240 - RNA, 18 nt, Human
ccccaaccgaccgggccu

SEQ ID NO: 949241 - RNA, 21 nt, Human
ccccacgccccaaccgaccgg

SEQ ID NO: 949242 - RNA, 23 nt, Human
ccccacgccccaaccgaccgggc

SEQ ID NO: 949243 - RNA, 18 nt, Human
cccccggaaccccggcuc

SEQ ID NO: 949244 - RNA, 20 nt, Human
cccccggaaccccggcucca

SEQ ID NO: 949245 - RNA, 20 nt, Human
cccgcggccagcucgccaga

SEQ ID NO: 949246 - RNA, 20 nt, Human
cccugugagcuuucacaauc

SEQ ID NO: 949247 - RNA, 19 nt, Human
ccgcccccacgccccaacc

SEQ ID NO: 949248 - RNA, 23 nt, Human
ccggcaccaucacacgggccgcg

SEQ ID NO: 949249 - RNA, 19 nt, Human
ccuauuuuuuugaggggcu

SEQ ID NO: 949250 - RNA, 21 nt, Human
ccucacccccggaaccccggc

SEQ ID NO: 949251 - RNA, 21 nt, Human
ccuccuauugugacugcucgc

SEQ ID NO: 949252 - RNA, 22 nt, Human
ccugaaaccaggguuucgauga

SEQ ID NO: 949253 - RNA, 18 nt, Human
cgccuaacgccucggagg

SEQ ID NO: 949254 - RNA, 20 nt, Human
cgcggccagcucgccagauc

SEQ ID NO: 949255 - RNA, 21 nt, Human
cggcaaaaugagguaaccaaa

SEQ ID NO: 949256 - RNA, 23 nt, Human
cuaaaagaucacguccacuguaa

SEQ ID NO: 949257 - RNA, 24 nt, Human
cuauaucaucuguagcuaccacuu

SEQ ID NO: 949258 - RNA, 18 nt, Human
cucacaguuucugaaggc

SEQ ID NO: 949259 - RNA, 23 nt, Human
cucacaguuucugaaggcucuau

SEQ ID NO: 949260 - RNA, 25 nt, Human
cucggccccgucccgcaaccgguuc

SEQ ID NO: 949261 - RNA, 19 nt, Human
cugaagcaaaggaagaagg

SEQ ID NO: 949262 - RNA, 23 nt, Human
cuucagaauagacuagacuacaa

SEQ ID NO: 949263 - RNA, 18 nt, Human
gaagcaaaggaagaaggc

SEQ ID NO: 949264 - RNA, 21 nt, Human
gacuagauagaggcaacaaug

SEQ ID NO: 949265 - RNA, 22 nt, Human
gcaacacucggaaugaucacac

SEQ ID NO: 949266 - RNA, 24 nt, Human
gcagacaauguugaauacacuaaa

SEQ ID NO: 949267 - RNA, 23 nt, Human
gccaaaaaacaaacaagaaccca

SEQ ID NO: 949268 - RNA, 18 nt, Human
gccccaaccgaccgggcc

SEQ ID NO: 949269 - RNA, 24 nt, Human
gccccgggagauaucugcgagggg

SEQ ID NO: 949270 - RNA, 21 nt, Human
gccuaacgccucggaggcucc

SEQ ID NO: 949271 - RNA, 23 nt, Human
gcggauccucgcugggccgccgc

SEQ ID NO: 949272 - RNA, 18 nt, Human
ggcgcugucucuuaggac

SEQ ID NO: 949273 - RNA, 20 nt, Human
gggccucggccccgucccgc

SEQ ID NO: 949274 - RNA, 22 nt, Human
ggggguuaaaaaaacaccaaag

SEQ ID NO: 949275 - RNA, 20 nt, Human
guuguauuaaacuuuucuca

SEQ ID NO: 949276 - RNA, 20 nt, Human
uaaaaaaaaccccauacagc

SEQ ID NO: 949277 - RNA, 26 nt, Human
uaaaaaauguacaaacuuuguuaaaa

SEQ ID NO: 949278 - RNA, 22 nt, Human
uaaaagcacaugcuaaaagauc

SEQ ID NO: 949279 - RNA, 24 nt, Human
uaacacugaauggaaaacugacac

SEQ ID NO: 949280 - RNA, 21 nt, Human
uaagucacacagugcaaagaa

SEQ ID NO: 949281 - RNA, 18 nt, Human
uaagugacccacuuagga

SEQ ID NO: 949282 - RNA, 20 nt, Human
uacauuuauuaccaacaacc

SEQ ID NO: 949283 - RNA, 21 nt, Human
uacauuuauuaccaacaaccc

SEQ ID NO: 949284 - RNA, 18 nt, Human
uaccaacaacccucucaa

SEQ ID NO: 949285 - RNA, 21 nt, Human
uaccaacagggggacaaacaa

SEQ ID NO: 949286 - RNA, 18 nt, Human
uagauagaggcaacaaug

SEQ ID NO: 949287 - RNA, 26 nt, Human
uaguaacuuucauaaaaaauguacaa

SEQ ID NO: 949288 - RNA, 19 nt, Human
ucacaagugagucgguaga

SEQ ID NO: 949289 - RNA, 21 nt, Human
ucacccccggaaccccggcuc

SEQ ID NO: 949290 - RNA, 24 nt, Human
ucagugugcaacagcaaacacaag

SEQ ID NO: 949291 - RNA, 25 nt, Human
ucauacauuuauuaccaacaacccu

SEQ ID NO: 949292 - RNA, 22 nt, Human
ucauacgcugcgcauucauuuc

SEQ ID NO: 949293 - RNA, 23 nt, Human
ucauuccauucacugggagggaa

SEQ ID NO: 949294 - RNA, 21 nt, Human
uccgcccccacgccccaaccg

SEQ ID NO: 949295 - RNA, 24 nt, Human
uccucacccccggaaccccggcuc

SEQ ID NO: 949296 - RNA, 18 nt, Human
ucgccagauccgccgucc

SEQ ID NO: 949297 - RNA, 23 nt, Human
ucggaaugaucacacaaaaacca

SEQ ID NO: 949298 - RNA, 19 nt, Human
ucucauacacacguuagcu

SEQ ID NO: 949299 - RNA, 23 nt, Human
ucuccgcccccacgccccaaccg

SEQ ID NO: 949300 - RNA, 18 nt, Human
ucucuuaggacuuggacu

SEQ ID NO: 949301 - RNA, 22 nt, Human
ugaaggaagaacuagacaacuu

SEQ ID NO: 949302 - RNA, 20 nt, Human
ugaauggaaaacugacacag

SEQ ID NO: 949303 - RNA, 24 nt, Human
ugagaaaaugacucagcaaaugau

SEQ ID NO: 949304 - RNA, 18 nt, Human
ugaggaacacccaaacua

SEQ ID NO: 949305 - RNA, 24 nt, Human
ugagguaaccaaauguaccaacag

SEQ ID NO: 949306 - RNA, 23 nt, Human
ugauauaugauauugcaccuucu

SEQ ID NO: 949307 - RNA, 18 nt, Human
ugauccauccugaaacca

SEQ ID NO: 949308 - RNA, 25 nt, Human
ugauuugagaaaaugacucagcaaa

SEQ ID NO: 949309 - RNA, 28 nt, Human
ugcacacacaaaauuaagcuaaagaaaa

SEQ ID NO: 949310 - RNA, 24 nt, Human
ugcacacacucacacagauacacu

SEQ ID NO: 949311 - RNA, 21 nt, Human
ugcacugacaacccuaggggc

SEQ ID NO: 949312 - RNA, 22 nt, Human
ugcauuaaccaugugcauuuuu

SEQ ID NO: 949313 - RNA, 21 nt, Human
ugcccacaggagcuugaacac

SEQ ID NO: 949314 - RNA, 23 nt, Human
ugccugaagcaaaggaagaaggc

SEQ ID NO: 949315 - RNA, 18 nt, Human
ugcgaggggaggcuccgc

SEQ ID NO: 949316 - RNA, 25 nt, Human
uggaaacagcaaguuggagauuuaa

SEQ ID NO: 949317 - RNA, 20 nt, Human
uggaagaaagcuuugaagug

SEQ ID NO: 949318 - RNA, 19 nt, Human
ugggaggagagggaacagg

SEQ ID NO: 949319 - RNA, 19 nt, Human
ugggaggagagggaacagg

SEQ ID NO: 949320 - RNA, 25 nt, Human
uguaaaggaaaaaaaaguaucaaca

SEQ ID NO: 949321 - RNA, 25 nt, Human
uuaaauaacacaccagauuauacau

SEQ ID NO: 949322 - RNA, 20 nt, Human
uuaggcacugucacugcgcu

SEQ ID NO: 949323 - RNA, 30 nt, Human
uucaaaauuauucuaagaggcccaaauuuu

SEQ ID NO: 949324 - RNA, 20 nt, Human
uucaugggacuaguggucuu

SEQ ID NO: 949325 - RNA, 20 nt, Human
uuccaaaaaacaccccugug

SEQ ID NO: 949326 - RNA, 20 nt, Human
uuuggaguuccaaucacacg

SEQ ID NO: 949327 - RNA, 24 nt, Human
uuuggaguuccaaucacacgguua

SEQ ID NO: 949328 - RNA, 21 nt, Human
uuuuuauucaucaggaacagg

SEQ ID NO: 949329 - RNA, 19 nt, Human
aaaccaacuagaugggcag

SEQ ID NO: 949330 - RNA, 18 nt, Human
aacaaggacauggcucac

SEQ ID NO: 949331 - RNA, 21 nt, Human
aauagaaacugaugauguugg

SEQ ID NO: 949332 - RNA, 21 nt, Human
acaggacacaggcucagucac

SEQ ID NO: 949333 - RNA, 21 nt, Human
acgaagcuuggcugaucccau

SEQ ID NO: 949334 - RNA, 19 nt, Human
agcauggcugggcaggcag

SEQ ID NO: 949335 - RNA, 23 nt, Human
aggaaaagauggaacgaagggac

SEQ ID NO: 949336 - RNA, 19 nt, Human
aggagaugggggcacagcc

SEQ ID NO: 949337 - RNA, 20 nt, Human
aggguggggccacuagaccu

SEQ ID NO: 949338 - RNA, 19 nt, Human
aggguuagguccagggacc

SEQ ID NO: 949339 - RNA, 20 nt, Human
aggugacugcagcaaccuua

SEQ ID NO: 949340 - RNA, 18 nt, Human
auggaacgaagcuuggcu

SEQ ID NO: 949341 - RNA, 20 nt, Human
caccagcaggagggucagcc

SEQ ID NO: 949342 - RNA, 20 nt, Human
caccaggaugaaagcagggu

SEQ ID NO: 949343 - RNA, 18 nt, Human
caccuccacuguaguuaa

SEQ ID NO: 949344 - RNA, 20 nt, Human
cagccgauggagcauggcug

SEQ ID NO: 949345 - RNA, 20 nt, Human
caggacagaagcccugccga

SEQ ID NO: 949346 - RNA, 20 nt, Human
caggguccccaaaccaacua

SEQ ID NO: 949347 - RNA, 22 nt, Human
ccaggguccccaaaccaacuag

SEQ ID NO: 949348 - RNA, 22 nt, Human
ccagucucaaacaaggaacaag

SEQ ID NO: 949349 - RNA, 21 nt, Human
cccccaggguccaugguguuc

SEQ ID NO: 949350 - RNA, 24 nt, Human
cccccuaggcugcagcucugaccu

SEQ ID NO: 949351 - RNA, 23 nt, Human
ccccuaggcugcagcucugaccu

SEQ ID NO: 949352 - RNA, 23 nt, Human
cccuaggcugcagcucugaccuu

SEQ ID NO: 949353 - RNA, 26 nt, Human
cccugaggggcgucagacgggaggag

SEQ ID NO: 949354 - RNA, 24 nt, Human
ccucaggccucucaggcagaccuu

SEQ ID NO: 949355 - RNA, 24 nt, Human
ccugcagcuccaacccucuggccu

SEQ ID NO: 949356 - RNA, 21 nt, Human
cggccuggcuacucuggcugc

SEQ ID NO: 949357 - RNA, 23 nt, Human
cgggucccugcagcuccaacccu

SEQ ID NO: 949358 - RNA, 22 nt, Human
cuacucuggcugcaggccgagg

SEQ ID NO: 949359 - RNA, 24 nt, Human
cuccgggcacugcccucacagccg

SEQ ID NO: 949360 - RNA, 19 nt, Human
cuuccuggggccugcagcc

SEQ ID NO: 949361 - RNA, 19 nt, Human
gaccuuuaggaaaagaugg

SEQ ID NO: 949362 - RNA, 25 nt, Human
gagccagaccaagguguccagggaa

SEQ ID NO: 949363 - RNA, 22 nt, Human
gagcuucccaaaggaagcaaga

SEQ ID NO: 949364 - RNA, 21 nt, Human
gcagcaaccuuagagcuuccc

SEQ ID NO: 949365 - RNA, 20 nt, Human
gcaggguccccugaggggcg

SEQ ID NO: 949366 - RNA, 18 nt, Human
gcccccuaggcugcagcc

SEQ ID NO: 949367 - RNA, 18 nt, Human
gccuugggaugcaugagg

SEQ ID NO: 949368 - RNA, 18 nt, Human
gcuccucaggccucucag

SEQ ID NO: 949369 - RNA, 22 nt, Human
ggacauggcucacugguccuca

SEQ ID NO: 949370 - RNA, 22 nt, Human
ggccucucaggcagaccuuuuc

SEQ ID NO: 949371 - RNA, 19 nt, Human
ggccuggcuacucuggcug

SEQ ID NO: 949372 - RNA, 23 nt, Human
gggcaggggcugggcccaugggg

SEQ ID NO: 949373 - RNA, 21 nt, Human
ggggaggagaugggggcacag

SEQ ID NO: 949374 - RNA, 20 nt, Human
gggguggggaggagaugggg

SEQ ID NO: 949375 - RNA, 21 nt, Human
ggguagaucacagccugggga

SEQ ID NO: 949376 - RNA, 25 nt, Human
gggucccugcagcuccaacccucug

SEQ ID NO: 949377 - RNA, 19 nt, Human
ggguggggaggagaugggg

SEQ ID NO: 949378 - RNA, 21 nt, Human
ggguggggaggagaugggggc

SEQ ID NO: 949379 - RNA, 21 nt, Human
guuuauucaucacaauuaaca

SEQ ID NO: 949380 - RNA, 19 nt, Human
uacaagcaucucuagaaca

SEQ ID NO: 949381 - RNA, 18 nt, Human
uagaaacugaugauguug

SEQ ID NO: 949382 - RNA, 26 nt, Human
uagaacagaggcuguggguccaaacc

SEQ ID NO: 949383 - RNA, 18 nt, Human
uagaugggcaggggcugg

SEQ ID NO: 949384 - RNA, 24 nt, Human
uagcaugcaccaggguccccaaac

SEQ ID NO: 949385 - RNA, 21 nt, Human
uagcuggaaugauuggaaguu

SEQ ID NO: 949386 - RNA, 20 nt, Human
ucaaacaaggaacaaggaca

SEQ ID NO: 949387 - RNA, 21 nt, Human
ucacagggugucagggggaag

SEQ ID NO: 949388 - RNA, 23 nt, Human
ucagcccuuggcacaagagccag

SEQ ID NO: 949389 - RNA, 21 nt, Human
ucaggcagaccuuuucuguag

SEQ ID NO: 949390 - RNA, 22 nt, Human
ucauuugugagccaguaggcag

SEQ ID NO: 949391 - RNA, 18 nt, Human
uccacaggacagaagccc

SEQ ID NO: 949392 - RNA, 25 nt, Human
uccaccuccacuguaguuaaggcca

SEQ ID NO: 949393 - RNA, 18 nt, Human
ucccaaaggaagcaagug

SEQ ID NO: 949394 - RNA, 19 nt, Human
ucccugcagcuccaacccu

SEQ ID NO: 949395 - RNA, 24 nt, Human
uccuucagcccuuggcacaagagc

SEQ ID NO: 949396 - RNA, 19 nt, Human
ugaggggcgucagacggga

SEQ ID NO: 949397 - RNA, 20 nt, Human
ugagguggggguaaaugggc

SEQ ID NO: 949398 - RNA, 21 nt, Human
ugagguggggguaaaugggcu

SEQ ID NO: 949399 - RNA, 20 nt, Human
ugcaagaugaggaaggugac

SEQ ID NO: 949400 - RNA, 21 nt, Human
ugcaggguccccugaggggcg

SEQ ID NO: 949401 - RNA, 23 nt, Human
uggaaugauuggaaguuggccca

SEQ ID NO: 949402 - RNA, 24 nt, Human
uggagcauggcugggcaggcagac

SEQ ID NO: 949403 - RNA, 18 nt, Human
uggcagagaaauggagau

SEQ ID NO: 949404 - RNA, 23 nt, Human
ugggcaggggcugggcccauggg

SEQ ID NO: 949405 - RNA, 21 nt, Human
ugggcuccucaggccucucag

SEQ ID NO: 949406 - RNA, 20 nt, Human
uggggguaaaugggcuuggc

SEQ ID NO: 949407 - RNA, 20 nt, Human
ugggguggggaggagauggg

SEQ ID NO: 949408 - RNA, 20 nt, Human
ugggguggggaggagauggg

SEQ ID NO: 949409 - RNA, 26 nt, Human
ugggugaaggaaagucuuccgguccg

SEQ ID NO: 949410 - RNA, 27 nt, Human
ugucccuuccccuccugggaaguucca

SEQ ID NO: 949411 - RNA, 19 nt, Human
uguuccagaguccccugag

SEQ ID NO: 949412 - RNA, 19 nt, Human
uucagcaccugcaagauga

SEQ ID NO: 949413 - RNA, 18 nt, Human
uugguucagcaccugcaa

SEQ ID NO: 949414 - RNA, 23 nt, Human
aaaaacagaagagaacucaaaua

SEQ ID NO: 949415 - RNA, 24 nt, Human
aaaaacagaagagaacucaaauaa

SEQ ID NO: 949416 - RNA, 21 nt, Human
aacaagucuguaucucagagc

SEQ ID NO: 949417 - RNA, 20 nt, Human
aacauggugaaacccugucu

SEQ ID NO: 949418 - RNA, 21 nt, Human
aacauggugaaacccugucuc

SEQ ID NO: 949419 - RNA, 21 nt, Human
aaccagauaaugaaacaaacc

SEQ ID NO: 949420 - RNA, 22 nt, Human
aaccccacacuccuacugccuc

SEQ ID NO: 949421 - RNA, 21 nt, Human
aagaaaaaaucccuaccaucc

SEQ ID NO: 949422 - RNA, 19 nt, Human
aagaaaccaaaaccaagac

SEQ ID NO: 949423 - RNA, 23 nt, Human
aagaaccccacacuccuacugcc

SEQ ID NO: 949424 - RNA, 22 nt, Human
aagaaguuauuaaaucaaggug

SEQ ID NO: 949425 - RNA, 25 nt, Human
aagcaaggaaaaagaccacaugugg

SEQ ID NO: 949426 - RNA, 21 nt, Human
aagcugaccagguaggaaguu

SEQ ID NO: 949427 - RNA, 24 nt, Human
aauccacaaaggacaaaguccccu

SEQ ID NO: 949428 - RNA, 23 nt, Human
aauggcucaugccuguaaucuca

SEQ ID NO: 949429 - RNA, 24 nt, Human
aauggcucaugccuguaaucucag

SEQ ID NO: 949430 - RNA, 22 nt, Human
acaaagaagagguaagccaucc

SEQ ID NO: 949431 - RNA, 19 nt, Human
acaagguaaacagugaccc

SEQ ID NO: 949432 - RNA, 18 nt, Human
acacaguuacuaacagca

SEQ ID NO: 949433 - RNA, 21 nt, Human
acaccaaagcccagcugagca

SEQ ID NO: 949434 - RNA, 24 nt, Human
acaguaacaacaacaacaaauuaa

SEQ ID NO: 949435 - RNA, 21 nt, Human
accaaaaccaagacacaagga

SEQ ID NO: 949436 - RNA, 20 nt, Human
accacaauacaaaguagaca

SEQ ID NO: 949437 - RNA, 23 nt, Human
accagauaugggacaccugccau

SEQ ID NO: 949438 - RNA, 22 nt, Human
acccaaccuauccaaaacaacu

SEQ ID NO: 949439 - RNA, 20 nt, Human
acccaugcaaucuauaaaca

SEQ ID NO: 949440 - RNA, 23 nt, Human
acccugucucuacagaaaaacaa

SEQ ID NO: 949441 - RNA, 23 nt, Human
acuacuguacuccagcuugggca

SEQ ID NO: 949442 - RNA, 24 nt, Human
acuacuguacuccagcuugggcaa

SEQ ID NO: 949443 - RNA, 18 nt, Human
acuguacuccagcuuggg

SEQ ID NO: 949444 - RNA, 19 nt, Human
acuguacuccagcuugggc

SEQ ID NO: 949445 - RNA, 20 nt, Human
acuguacuccagcuugggca

SEQ ID NO: 949446 - RNA, 21 nt, Human
acuguacuccagcuugggcaa

SEQ ID NO: 949447 - RNA, 22 nt, Human
acuguacuccagcuugggcaac

SEQ ID NO: 949448 - RNA, 24 nt, Human
acuguacuccagcuugggcaacag

SEQ ID NO: 949449 - RNA, 25 nt, Human
acuguacuccagcuugggcaacaga

SEQ ID NO: 949450 - RNA, 23 nt, Human
agaauuucaagaccagccuaggc

SEQ ID NO: 949451 - RNA, 18 nt, Human
agagaauccuccagacca

SEQ ID NO: 949452 - RNA, 22 nt, Human
agaugucucuucuuggccaggu

SEQ ID NO: 949453 - RNA, 21 nt, Human
agcagcggagucacggcuaga

SEQ ID NO: 949454 - RNA, 18 nt, Human
agcaggaagggaaggaag

SEQ ID NO: 949455 - RNA, 22 nt, Human
agccuggccaacauggugaaac

SEQ ID NO: 949456 - RNA, 24 nt, Human
agccuggccaacauggugaaaccc

SEQ ID NO: 949457 - RNA, 24 nt, Human
agcuacuugggagguugagguggg

SEQ ID NO: 949458 - RNA, 23 nt, Human
agcugggugugauggcauaugcc

SEQ ID NO: 949459 - RNA, 18 nt, Human
agcuugggcaacagaguc

SEQ ID NO: 949460 - RNA, 24 nt, Human
agcuugggcaacagagucagaucu

SEQ ID NO: 949461 - RNA, 20 nt, Human
aggaagguaaauacaccaaa

SEQ ID NO: 949462 - RNA, 20 nt, Human
aggaauuugagaccagccug

SEQ ID NO: 949463 - RNA, 18 nt, Human
aggcaagugacugagggc

SEQ ID NO: 949464 - RNA, 19 nt, Human
aggcagagucuacgaagua

SEQ ID NO: 949465 - RNA, 19 nt, Human
aggcagguggaucacuuaa

SEQ ID NO: 949466 - RNA, 26 nt, Human
aggcagguggaucacuuaaggucagg

SEQ ID NO: 949467 - RNA, 22 nt, Human
aggcugggcgugguggcucacg

SEQ ID NO: 949468 - RNA, 19 nt, Human
agguagagugagcccuuuc

SEQ ID NO: 949469 - RNA, 24 nt, Human
aggugcaauggcucaugccuguaa

SEQ ID NO: 949470 - RNA, 25 nt, Human
agguggagguugcagugacaacggu

SEQ ID NO: 949471 - RNA, 20 nt, Human
agguggagguugcagugagc

SEQ ID NO: 949472 - RNA, 24 nt, Human
agguggagguugcagugagcugag

SEQ ID NO: 949473 - RNA, 22 nt, Human
agguggaucacuuaaggucagg

SEQ ID NO: 949474 - RNA, 23 nt, Human
aguaaaugauggugcaaauacac

SEQ ID NO: 949475 - RNA, 22 nt, Human
agugggaaguagucgcuguggg

SEQ ID NO: 949476 - RNA, 27 nt, Human
auaaaaccagauaaugaaacaaacccc

SEQ ID NO: 949477 - RNA, 19 nt, Human
auaaacauaccuaggacac

SEQ ID NO: 949478 - RNA, 24 nt, Human
auaaacauaccuaggacaccccau

SEQ ID NO: 949479 - RNA, 21 nt, Human
auaaccagauaugggacaccu

SEQ ID NO: 949480 - RNA, 23 nt, Human
aucaaaacaguaacaacaacaac

SEQ ID NO: 949481 - RNA, 19 nt, Human
augccuguaaucucagcac

SEQ ID NO: 949482 - RNA, 24 nt, Human
auucacuugaagucuaucaucuga

SEQ ID NO: 949483 - RNA, 24 nt, Human
auugcacuacuguacuccagcuug

SEQ ID NO: 949484 - RNA, 20 nt, Human
caaaacacauguauggggaa

SEQ ID NO: 949485 - RNA, 25 nt, Human
caaaauagacacugccuucagaggc

SEQ ID NO: 949486 - RNA, 19 nt, Human
caaagcaaggaaaaagacc

SEQ ID NO: 949487 - RNA, 22 nt, Human
caaagcaaggaaaaagaccaca

SEQ ID NO: 949488 - RNA, 19 nt, Human
caaauuuagcuaaucacug

SEQ ID NO: 949489 - RNA, 24 nt, Human
caacauggugaaacccugucucua

SEQ ID NO: 949490 - RNA, 23 nt, Human
caaccuauccaaaacaacuguca

SEQ ID NO: 949491 - RNA, 18 nt, Human
caaggcagaaaaguuacc

SEQ ID NO: 949492 - RNA, 21 nt, Human
caagguaaacagugacccacc

SEQ ID NO: 949493 - RNA, 19 nt, Human
cacagcacuggggcucagc

SEQ ID NO: 949494 - RNA, 23 nt, Human
cacgccuguaaucccagcauuuu

SEQ ID NO: 949495 - RNA, 28 nt, Human
cacuccuacugccucaacucccauuugu

SEQ ID NO: 949496 - RNA, 24 nt, Human
cagaaaaguaaaugauggugcaaa

SEQ ID NO: 949497 - RNA, 18 nt, Human
cagagcagcggagucacg

SEQ ID NO: 949498 - RNA, 24 nt, Human
cagauaaaauagauuuggaaacau

SEQ ID NO: 949499 - RNA, 18 nt, Human
cagauaaugaaacaaacc

SEQ ID NO: 949500 - RNA, 21 nt, Human
cagcaccgagcgagacccuga

SEQ ID NO: 949501 - RNA, 24 nt, Human
cagcacuuugggaggccaaggugg

SEQ ID NO: 949502 - RNA, 24 nt, Human
cagcagcaagcaggagauacugcu

SEQ ID NO: 949503 - RNA, 21 nt, Human
cagcuacuugggagguugagg

SEQ ID NO: 949504 - RNA, 24 nt, Human
cagcuacuugggagguugaggugg

SEQ ID NO: 949505 - RNA, 21 nt, Human
caggcagcuguaauaaagaaa

SEQ ID NO: 949506 - RNA, 19 nt, Human
caggcuuuuguuugugauc

SEQ ID NO: 949507 - RNA, 24 nt, Human
cagguggaucacuuaaggucagga

SEQ ID NO: 949508 - RNA, 19 nt, Human
caguaacaacaacaacaaa

SEQ ID NO: 949509 - RNA, 20 nt, Human
caugccuguaaucucagcac

SEQ ID NO: 949510 - RNA, 24 nt, Human
caugccuguaaucucagcacuuug

SEQ ID NO: 949511 - RNA, 23 nt, Human
cauucaucugcuuaauaaaacca

SEQ ID NO: 949512 - RNA, 21 nt, Human
ccaaaacaacugucaacggag

SEQ ID NO: 949513 - RNA, 18 nt, Human
ccacacuccuacugccuc

SEQ ID NO: 949514 - RNA, 22 nt, Human
cccaagaaccccacacuccuac

SEQ ID NO: 949515 - RNA, 23 nt, Human
cccaucacugguacauuguuugg

SEQ ID NO: 949516 - RNA, 25 nt, Human
ccccaucgucuucccaagaacccca

SEQ ID NO: 949517 - RNA, 24 nt, Human
ccuccagaccaucucaggcucgca

SEQ ID NO: 949518 - RNA, 23 nt, Human
ccucucaaaauagacacugccuu

SEQ ID NO: 949519 - RNA, 22 nt, Human
ccuggccaacauggugaaaccc

SEQ ID NO: 949520 - RNA, 24 nt, Human
ccuggccaacauggugaaacccug

SEQ ID NO: 949521 - RNA, 21 nt, Human
ccuguagucccagcuacuugg

SEQ ID NO: 949522 - RNA, 21 nt, Human
cgccuacucgaccccgggggc

SEQ ID NO: 949523 - RNA, 19 nt, Human
cggccccaaaucacagcag

SEQ ID NO: 949524 - RNA, 21 nt, Human
cggcuagagagaauccuccag

SEQ ID NO: 949525 - RNA, 20 nt, Human
cuacuguacuccagcuuggg

SEQ ID NO: 949526 - RNA, 21 nt, Human
cuacuguacuccagcuugggc

SEQ ID NO: 949527 - RNA, 24 nt, Human
cuacuguacuccagcuugggcaac

SEQ ID NO: 949528 - RNA, 26 nt, Human
cuaggcagguggaucacuuaagguca

SEQ ID NO: 949529 - RNA, 21 nt, Human
cucacgccuguaaucccagca

SEQ ID NO: 949530 - RNA, 21 nt, Human
cucacgccuguaaucccagca

SEQ ID NO: 949531 - RNA, 24 nt, Human
cucaugccuguaaucucagcacuu

SEQ ID NO: 949532 - RNA, 22 nt, Human
cuccagaccaucucaggcucgc

SEQ ID NO: 949533 - RNA, 19 nt, Human
cuccagcuugggcaacaga

SEQ ID NO: 949534 - RNA, 25 nt, Human
cucugaaugaagcuaacuaggguuc

SEQ ID NO: 949535 - RNA, 23 nt, Human
cugccuucagaggcagccauggg

SEQ ID NO: 949536 - RNA, 21 nt, Human
cuggcagucuuucaaaugccc

SEQ ID NO: 949537 - RNA, 24 nt, Human
cuggccaacauggugaaacccugu

SEQ ID NO: 949538 - RNA, 19 nt, Human
cuugagucugggaggugga

SEQ ID NO: 949539 - RNA, 18 nt, Human
gaagaaaccaaaaccaag

SEQ ID NO: 949540 - RNA, 23 nt, Human
gagaccagccuggccaacauggu

SEQ ID NO: 949541 - RNA, 20 nt, Human
gagagguggagaaaagagag

SEQ ID NO: 949542 - RNA, 19 nt, Human
gagcaggaagggaaggaag

SEQ ID NO: 949543 - RNA, 22 nt, Human
gagcuaccaaucccagacacuc

SEQ ID NO: 949544 - RNA, 23 nt, Human
gagcucaucuguugccacgaucu

SEQ ID NO: 949545 - RNA, 19 nt, Human
gagcugcugguguuuacuu

SEQ ID NO: 949546 - RNA, 18 nt, Human
gagggaugugguacucug

SEQ ID NO: 949547 - RNA, 23 nt, Human
gagguugcagugagcugagauug

SEQ ID NO: 949548 - RNA, 24 nt, Human
gaucacuuaaggucaggaauuuga

SEQ ID NO: 949549 - RNA, 24 nt, Human
gauggcuugagucugggaggugga

SEQ ID NO: 949550 - RNA, 18 nt, Human
gauugcuuuagcccagaa

SEQ ID NO: 949551 - RNA, 23 nt, Human
gcaaagcaaggaaaaagaccaca

SEQ ID NO: 949552 - RNA, 21 nt, Human
gcaguugggugccgugaaucc

SEQ ID NO: 949553 - RNA, 24 nt, Human
gccaacauggugaaacccugucuc

SEQ ID NO: 949554 - RNA, 21 nt, Human
gccgugaauccugguggugcu

SEQ ID NO: 949555 - RNA, 21 nt, Human
gcugggcgugguggcucacgc

SEQ ID NO: 949556 - RNA, 23 nt, Human
gcuguaaagagcaagcaggcagu

SEQ ID NO: 949557 - RNA, 20 nt, Human
gcuugagucugggaggugga

SEQ ID NO: 949558 - RNA, 19 nt, Human
ggaaaggaguuucucccac

SEQ ID NO: 949559 - RNA, 20 nt, Human
ggaauggucagucugugagg

SEQ ID NO: 949560 - RNA, 22 nt, Human
ggagguugaggugggaggaugg

SEQ ID NO: 949561 - RNA, 22 nt, Human
ggagguugcagugagcugagau

SEQ ID NO: 949562 - RNA, 24 nt, Human
ggagguugcagugagcugagauug

SEQ ID NO: 949563 - RNA, 21 nt, Human
ggaugcuguagacaaaggaau

SEQ ID NO: 949564 - RNA, 21 nt, Human
ggccaggugcaauggcucaug

SEQ ID NO: 949565 - RNA, 23 nt, Human
ggcgugguggcucacgccuguaa

SEQ ID NO: 949566 - RNA, 22 nt, Human
ggcucagcuguacuauaguuug

SEQ ID NO: 949567 - RNA, 21 nt, Human
ggcucaugccuguaaucucag

SEQ ID NO: 949568 - RNA, 18 nt, Human
gggaggccaaggugguag

SEQ ID NO: 949569 - RNA, 18 nt, Human
gggagguggagguugcag

SEQ ID NO: 949570 - RNA, 18 nt, Human
gggggaaaugcaggucuu

SEQ ID NO: 949571 - RNA, 25 nt, Human
gggguacacccaaccuauccaaaac

SEQ ID NO: 949572 - RNA, 25 nt, Human
gguauaggcugggcgugguggcuca

SEQ ID NO: 949573 - RNA, 19 nt, Human
gguggagguugcagugagc

SEQ ID NO: 949574 - RNA, 24 nt, Human
gguggcucacgccuguaaucccag

SEQ ID NO: 949575 - RNA, 26 nt, Human
gguucagugucgagauaaacauaccu

SEQ ID NO: 949576 - RNA, 22 nt, Human
guaaagcagcagcaagcaggag

SEQ ID NO: 949577 - RNA, 21 nt, Human
guaaucaugggcagaagaaug

SEQ ID NO: 949578 - RNA, 24 nt, Human
guacuccagcuugggcaacagagu

SEQ ID NO: 949579 - RNA, 19 nt, Human
gugaggcagagucuacgaa

SEQ ID NO: 949580 - RNA, 18 nt, Human
guggggaaagggugagag

SEQ ID NO: 949581 - RNA, 21 nt, Human
guugcagugagcugagauugc

SEQ ID NO: 949582 - RNA, 20 nt, Human
uaaauaacagacagaagcaa

SEQ ID NO: 949583 - RNA, 21 nt, Human
uaacauaaccagauaugggac

SEQ ID NO: 949584 - RNA, 22 nt, Human
uaacuugcccaaggcucacaca

SEQ ID NO: 949585 - RNA, 22 nt, Human
uacaauauguaaacuaaacaca

SEQ ID NO: 949586 - RNA, 23 nt, Human
uacaccaaagcccagcugagcaa

SEQ ID NO: 949587 - RNA, 19 nt, Human
uaccuuuaauuucaaacua

SEQ ID NO: 949588 - RNA, 20 nt, Human
uacuguacuccagcuugggc

SEQ ID NO: 949589 - RNA, 23 nt, Human
uacuguacuccagcuugggcaac

SEQ ID NO: 949590 - RNA, 24 nt, Human
uacuguacuccagcuugggcaaca

SEQ ID NO: 949591 - RNA, 28 nt, Human
uagcccaucacugguacauuguuugggg

SEQ ID NO: 949592 - RNA, 21 nt, Human
uagcucagacaaauaaugcaa

SEQ ID NO: 949593 - RNA, 22 nt, Human
uagcugggugugauggcauaug

SEQ ID NO: 949594 - RNA, 19 nt, Human
uaggauucauaugcuuuuc

SEQ ID NO: 949595 - RNA, 22 nt, Human
uagguucuggcugccucugugc

SEQ ID NO: 949596 - RNA, 20 nt, Human
uaucucagagcaagagacag

SEQ ID NO: 949597 - RNA, 26 nt, Human
ucaaaacaguaacaacaacaacaaag

SEQ ID NO: 949598 - RNA, 20 nt, Human
ucaaacuaugugaacauauu

SEQ ID NO: 949599 - RNA, 24 nt, Human
ucacagaggaggaaaaaguaguga

SEQ ID NO: 949600 - RNA, 21 nt, Human
ucacgccuguaaucccagcau

SEQ ID NO: 949601 - RNA, 21 nt, Human
ucacuugaagucuaucaucug

SEQ ID NO: 949602 - RNA, 22 nt, Human
ucagaacaagcccuugaccuau

SEQ ID NO: 949603 - RNA, 19 nt, Human
ucagagcagcggagucacg

SEQ ID NO: 949604 - RNA, 19 nt, Human
ucaggcucgcacuaccugg

SEQ ID NO: 949605 - RNA, 21 nt, Human
uccacaaaggacaaagucccc

SEQ ID NO: 949606 - RNA, 24 nt, Human
uccagcuugggcaacagagucaga

SEQ ID NO: 949607 - RNA, 18 nt, Human
ucccacaagacuucucag

SEQ ID NO: 949608 - RNA, 23 nt, Human
uccccagagcccugcuguaaaga

SEQ ID NO: 949609 - RNA, 19 nt, Human
ucuacagaaaaacaaaaau

SEQ ID NO: 949610 - RNA, 20 nt, Human
ucucaggcucgcacuaccug

SEQ ID NO: 949611 - RNA, 24 nt, Human
ucuguugccacgaucugcagcuug

SEQ ID NO: 949612 - RNA, 26 nt, Human
ugaagaaaccaaaaccaaggaaaagu

SEQ ID NO: 949613 - RNA, 22 nt, Human
ugaaggaaaguggacagcagag

SEQ ID NO: 949614 - RNA, 18 nt, Human
ugaaguauucacagagcc

SEQ ID NO: 949615 - RNA, 22 nt, Human
ugacauggaacuguugccaaca

SEQ ID NO: 949616 - RNA, 18 nt, Human
ugaccaauggcagauccu

SEQ ID NO: 949617 - RNA, 18 nt, Human
ugaccuucagagcagcgg

SEQ ID NO: 949618 - RNA, 23 nt, Human
ugagaccagccuggccaacaugg

SEQ ID NO: 949619 - RNA, 19 nt, Human
ugagagaacuggagacaag

SEQ ID NO: 949620 - RNA, 20 nt, Human
ugagggcuuccuaacucaag

SEQ ID NO: 949621 - RNA, 22 nt, Human
ugagguggagagauuccaguca

SEQ ID NO: 949622 - RNA, 18 nt, Human
ugaggugggaggauggcc

SEQ ID NO: 949623 - RNA, 21 nt, Human
ugaggugggaggauggcuuga

SEQ ID NO: 949624 - RNA, 22 nt, Human
ugaggugggaggauggcuugag

SEQ ID NO: 949625 - RNA, 18 nt, Human
ugagucugggagguggag

SEQ ID NO: 949626 - RNA, 21 nt, Human
ugaucagggcaauaaugacag

SEQ ID NO: 949627 - RNA, 24 nt, Human
ugauggcauaugccuguaguccca

SEQ ID NO: 949628 - RNA, 21 nt, Human
ugcaaagugcuucauauagcu

SEQ ID NO: 949629 - RNA, 20 nt, Human
ugcaaggcagaaaaguuacc

SEQ ID NO: 949630 - RNA, 22 nt, Human
ugcacuacuguacuccagcuug

SEQ ID NO: 949631 - RNA, 24 nt, Human
ugccuaucacaggcugagcccuuu

SEQ ID NO: 949632 - RNA, 23 nt, Human
ugccuguaaucucagcacuuugg

SEQ ID NO: 949633 - RNA, 23 nt, Human
ugccuguaaucucagcacuuugg

SEQ ID NO: 949634 - RNA, 24 nt, Human
ugccuguaaucucagcacuuuggg

SEQ ID NO: 949635 - RNA, 23 nt, Human
ugccuguagucccagcuacuugg

SEQ ID NO: 949636 - RNA, 24 nt, Human
ugccuguagucccagcuacuuggg

SEQ ID NO: 949637 - RNA, 21 nt, Human
ugccuguguguucaugacguc

SEQ ID NO: 949638 - RNA, 23 nt, Human
uggaucacuuaaggucaggaauu

SEQ ID NO: 949639 - RNA, 24 nt, Human
uggaucacuuaaggucaggaauuu

SEQ ID NO: 949640 - RNA, 27 nt, Human
uggaucacuuaaggucaggaauuugag

SEQ ID NO: 949641 - RNA, 18 nt, Human
uggaugaggugggcaucu

SEQ ID NO: 949642 - RNA, 24 nt, Human
uggccaacauggugaaacccuguc

SEQ ID NO: 949643 - RNA, 24 nt, Human
uggccaggugcaauggcucaugcc

SEQ ID NO: 949644 - RNA, 22 nt, Human
uggcucacgccuguaaucccag

SEQ ID NO: 949645 - RNA, 24 nt, Human
uggcucacgccuguaaucccagca

SEQ ID NO: 949646 - RNA, 24 nt, Human
uggcucaugccuguaaucucagca

SEQ ID NO: 949647 - RNA, 24 nt, Human
uggcuugagucugggagguggagg

SEQ ID NO: 949648 - RNA, 20 nt, Human
ugggagcaggaagggaagga

SEQ ID NO: 949649 - RNA, 19 nt, Human
ugggaggccaaggugguag

SEQ ID NO: 949650 - RNA, 24 nt, Human
ugggaggccaaggugguaggauug

SEQ ID NO: 949651 - RNA, 24 nt, Human
ugggagguggagguugcagugagc

SEQ ID NO: 949652 - RNA, 24 nt, Human
ugguggcucacgccuguaauccca

SEQ ID NO: 949653 - RNA, 21 nt, Human
uguaaagagcaagcaggcagu

SEQ ID NO: 949654 - RNA, 18 nt, Human
uguacaacagcagcuucc

SEQ ID NO: 949655 - RNA, 19 nt, Human
uguggggaaagggugagaa

SEQ ID NO: 949656 - RNA, 21 nt, Human
uguggggaaagggugagaggc

SEQ ID NO: 949657 - RNA, 18 nt, Human
uuagcugggugugauggc

SEQ ID NO: 949658 - RNA, 24 nt, Human
uuagcugggugugauggcauaugc

SEQ ID NO: 949659 - RNA, 21 nt, Human
uucacaaagaagagguaagcc

SEQ ID NO: 949660 - RNA, 22 nt, Human
uucaggcuuuuguuugugauca

SEQ ID NO: 949661 - RNA, 18 nt, Human
uuccuaggauucauaugc

SEQ ID NO: 949662 - RNA, 19 nt, Human
uugaaugccuaucacaggc

SEQ ID NO: 949663 - RNA, 24 nt, Human
uugagucugggagguggagguugc

SEQ ID NO: 949664 - RNA, 23 nt, Human
uugcacuacuguacuccagcuug

SEQ ID NO: 949665 - RNA, 19 nt, Human
uugcagugagcugagauug

SEQ ID NO: 949666 - RNA, 22 nt, Human
uugcagugagcugagauugcac

SEQ ID NO: 949667 - RNA, 19 nt, Human
uugcccaaggcucacacag

SEQ ID NO: 949668 - RNA, 22 nt, Human
uuuguuggagaagcugaaaaag

SEQ ID NO: 949669 - RNA, 18 nt, Human
uuuuguuugugaucaggg

SEQ ID NO: 949670 - RNA, 25 nt, Human
aacaagaaaauaaaacauggucacu

SEQ ID NO: 949671 - RNA, 21 nt, Human
aacauggucacucuuccaucc

SEQ ID NO: 949672 - RNA, 22 nt, Human
aacccagugcuccagagucaca

SEQ ID NO: 949673 - RNA, 24 nt, Human
aagaaaacaagaugaaaagaggug

SEQ ID NO: 949674 - RNA, 24 nt, Human
aagaaaacaagaugaaaagaggug

SEQ ID NO: 949675 - RNA, 20 nt, Human
aagacauauaaauuguucuc

SEQ ID NO: 949676 - RNA, 25 nt, Human
aagaugcuucuuccccucuuuuccc

SEQ ID NO: 949677 - RNA, 20 nt, Human
aagcucccgagcugcaagcc

SEQ ID NO: 949678 - RNA, 19 nt, Human
aagguguguaaagcucccg

SEQ ID NO: 949679 - RNA, 20 nt, Human
aaucucuaaucccuggcuuc

SEQ ID NO: 949680 - RNA, 27 nt, Human
acaauggagacaacccagugcuccaga

SEQ ID NO: 949681 - RNA, 19 nt, Human
accacccgaccccauccca

SEQ ID NO: 949682 - RNA, 18 nt, Human
accaguggcccaccacac

SEQ ID NO: 949683 - RNA, 20 nt, Human
acuucccguaacacccacca

SEQ ID NO: 949684 - RNA, 22 nt, Human
agaaaacaagaugaaaagaggu

SEQ ID NO: 949685 - RNA, 22 nt, Human
agaaaacaagaugaaaagaggu

SEQ ID NO: 949686 - RNA, 21 nt, Human
agagcucuugggucagacaug

SEQ ID NO: 949687 - RNA, 19 nt, Human
agccaauaaaaauaaacaa

SEQ ID NO: 949688 - RNA, 22 nt, Human
agccaggaucuucauacacaua

SEQ ID NO: 949689 - RNA, 18 nt, Human
agccugaguccccaggua

SEQ ID NO: 949690 - RNA, 19 nt, Human
aggaagacaauuucccuag

SEQ ID NO: 949691 - RNA, 18 nt, Human
aggaaggaggcagugagu

SEQ ID NO: 949692 - RNA, 19 nt, Human
aggaggaaggaggcaguga

SEQ ID NO: 949693 - RNA, 19 nt, Human
aggaggcagugaguggcgu

SEQ ID NO: 949694 - RNA, 19 nt, Human
aguccccagguacccuggc

SEQ ID NO: 949695 - RNA, 23 nt, Human
agugacaagaacaagaaaauaaa

SEQ ID NO: 949696 - RNA, 19 nt, Human
aguggcaacaccaggagga

SEQ ID NO: 949697 - RNA, 19 nt, Human
aguguggucccuggguuau

SEQ ID NO: 949698 - RNA, 20 nt, Human
auaaucgccaggacccaugc

SEQ ID NO: 949699 - RNA, 23 nt, Human
auacaauagugacaagaacaaga

SEQ ID NO: 949700 - RNA, 26 nt, Human
caagaacaagaaaauaaaacaugguc

SEQ ID NO: 949701 - RNA, 24 nt, Human
caagagcucuuucagauauagagc

SEQ ID NO: 949702 - RNA, 23 nt, Human
cacacugcuugguucauaguuaa

SEQ ID NO: 949703 - RNA, 23 nt, Human
cacacugcuugguucauaguuaa

SEQ ID NO: 949704 - RNA, 25 nt, Human
cacccucuccuuccaggcugggcua

SEQ ID NO: 949705 - RNA, 18 nt, Human
cagaaagccaucccccac

SEQ ID NO: 949706 - RNA, 19 nt, Human
cagccaguucucugcuguu

SEQ ID NO: 949707 - RNA, 20 nt, Human
cagccugaguccccagguac

SEQ ID NO: 949708 - RNA, 20 nt, Human
caguggccaccacacugcuu

SEQ ID NO: 949709 - RNA, 20 nt, Human
caguuucugagcccacagcu

SEQ ID NO: 949710 - RNA, 23 nt, Human
caucccaucuucuaaagcaguca

SEQ ID NO: 949711 - RNA, 19 nt, Human
cauuggggaaaggacuuga

SEQ ID NO: 949712 - RNA, 20 nt, Human
ccaacuuaugcccuggccuc

SEQ ID NO: 949713 - RNA, 21 nt, Human
ccacugggcauuggggaaagg

SEQ ID NO: 949714 - RNA, 19 nt, Human
ccaggugauucagccaggg

SEQ ID NO: 949715 - RNA, 19 nt, Human
cccaccacacugcuugguu

SEQ ID NO: 949716 - RNA, 23 nt, Human
cccaccacacugcuugguucaua

SEQ ID NO: 949717 - RNA, 23 nt, Human
cccauaaugacaauggagacaac

SEQ ID NO: 949718 - RNA, 20 nt, Human
cccaugcaggcaucuaucuc

SEQ ID NO: 949719 - RNA, 20 nt, Human
ccccacucacccucuccuuc

SEQ ID NO: 949720 - RNA, 22 nt, Human
ccccagguacccuggccaucca

SEQ ID NO: 949721 - RNA, 22 nt, Human
cccccacucacccucuccuucc

SEQ ID NO: 949722 - RNA, 21 nt, Human
ccccucuuuucccuauugacc

SEQ ID NO: 949723 - RNA, 20 nt, Human
ccccuuccccugaacuccca

SEQ ID NO: 949724 - RNA, 18 nt, Human
ccucaaggccacucucuc

SEQ ID NO: 949725 - RNA, 19 nt, Human
ccucaaggccacucucucu

SEQ ID NO: 949726 - RNA, 18 nt, Human
ccugcaccuuaaucucac

SEQ ID NO: 949727 - RNA, 25 nt, Human
ccugcaccuuaaucucacccagaag

SEQ ID NO: 949728 - RNA, 22 nt, Human
cgaccccaucccaucuucuaaa

SEQ ID NO: 949729 - RNA, 18 nt, Human
cuaaucccuggcuucuga

SEQ ID NO: 949730 - RNA, 23 nt, Human
cuauauuuucaagucaccagugg

SEQ ID NO: 949731 - RNA, 22 nt, Human
cucccacuaucucauuucuuga

SEQ ID NO: 949732 - RNA, 18 nt, Human
cuccucccaggagaccca

SEQ ID NO: 949733 - RNA, 22 nt, Human
cucuuccaucccauuucucaga

SEQ ID NO: 949734 - RNA, 22 nt, Human
cuguuuccucuucuuaagaugc

SEQ ID NO: 949735 - RNA, 22 nt, Human
cuguuuccucuucuuaagaugc

SEQ ID NO: 949736 - RNA, 24 nt, Human
cuuaugcccuggccuccuucugga

SEQ ID NO: 949737 - RNA, 19 nt, Human
cuugggccuaagcacgcug

SEQ ID NO: 949738 - RNA, 24 nt, Human
gaacucuaacauuauuggaagaaa

SEQ ID NO: 949739 - RNA, 24 nt, Human
gaacucuaacauuauuggaagaaa

SEQ ID NO: 949740 - RNA, 26 nt, Human
gacaauggagacaacccagugcucca

SEQ ID NO: 949741 - RNA, 25 nt, Human
gcccauaaugacaauggagacaacc

SEQ ID NO: 949742 - RNA, 25 nt, Human
gcuguuuccucuucuuaagaugcuu

SEQ ID NO: 949743 - RNA, 22 nt, Human
ggaagaaaacaagaugaaaaga

SEQ ID NO: 949744 - RNA, 22 nt, Human
ggaagaaaacaagaugaaaaga

SEQ ID NO: 949745 - RNA, 20 nt, Human
gggaaaggacuugaucagua

SEQ ID NO: 949746 - RNA, 20 nt, Human
gggcauuggggaaaggacuu

SEQ ID NO: 949747 - RNA, 18 nt, Human
uaaaauaaucgccaggac

SEQ ID NO: 949748 - RNA, 21 nt, Human
uaaaauaaucgccaggaccca

SEQ ID NO: 949749 - RNA, 21 nt, Human
uaaagcucccgagcugcaagc

SEQ ID NO: 949750 - RNA, 21 nt, Human
uaaucccuggcuucugaucuc

SEQ ID NO: 949751 - RNA, 23 nt, Human
uaaucgccaggacccaugcaggc

SEQ ID NO: 949752 - RNA, 25 nt, Human
uacacugagcagaguaaacagauga

SEQ ID NO: 949753 - RNA, 20 nt, Human
uacgguagucucaauucuuu

SEQ ID NO: 949754 - RNA, 23 nt, Human
ucaaaagacacagcuaaagccaa

SEQ ID NO: 949755 - RNA, 22 nt, Human
ucaccaguggccaccacacugc

SEQ ID NO: 949756 - RNA, 19 nt, Human
ucauaggucauccaacuua

SEQ ID NO: 949757 - RNA, 19 nt, Human
uccaaguccaccaguggcc

SEQ ID NO: 949758 - RNA, 24 nt, Human
uccccagguacccuggccauccac

SEQ ID NO: 949759 - RNA, 19 nt, Human
uccccucuuuucccuauug

SEQ ID NO: 949760 - RNA, 20 nt, Human
ucccuggcuucugaucucca

SEQ ID NO: 949761 - RNA, 22 nt, Human
ucccuggcuucugaucuccacc

SEQ ID NO: 949762 - RNA, 21 nt, Human
uccuuuagaccacccuuuuca

SEQ ID NO: 949763 - RNA, 23 nt, Human
ucuuaagaugcuucuuccccucu

SEQ ID NO: 949764 - RNA, 22 nt, Human
ucuuuauguuucucugucuucc

SEQ ID NO: 949765 - RNA, 20 nt, Human
ugaacaacagaacuucucaa

SEQ ID NO: 949766 - RNA, 22 nt, Human
ugacaggcugguucaagaacca

SEQ ID NO: 949767 - RNA, 18 nt, Human
ugagaugccuuguuuaaa

SEQ ID NO: 949768 - RNA, 18 nt, Human
ugagaugccuuguuuaaa

SEQ ID NO: 949769 - RNA, 23 nt, Human
ugagcagaguaaacagaugaugu

SEQ ID NO: 949770 - RNA, 19 nt, Human
ugcugggguuggacuuccc

SEQ ID NO: 949771 - RNA, 18 nt, Human
uggaagaaaacaagauga

SEQ ID NO: 949772 - RNA, 18 nt, Human
uggaagaaaacaagauga

SEQ ID NO: 949773 - RNA, 21 nt, Human
uggaagaaaacaagaugaaaa

SEQ ID NO: 949774 - RNA, 21 nt, Human
uggaagaaaacaagaugaaaa

SEQ ID NO: 949775 - RNA, 23 nt, Human
uggaagaaaacaagaugaaaaga

SEQ ID NO: 949776 - RNA, 23 nt, Human
uggaagaaaacaagaugaaaaga

SEQ ID NO: 949777 - RNA, 25 nt, Human
uggcuccccuccucccaggagaccc

SEQ ID NO: 949778 - RNA, 24 nt, Human
uggcuucugaucuccaccucuuuu

SEQ ID NO: 949779 - RNA, 22 nt, Human
ugucuucccaagagcucuuuca

SEQ ID NO: 949780 - RNA, 22 nt, Human
uguuaaggagacugucagugaa

SEQ ID NO: 949781 - RNA, 18 nt, Human
uuacacugagcagaguaa

SEQ ID NO: 949782 - RNA, 21 nt, Human
uuaccuagcaguuucugagcc

SEQ ID NO: 949783 - RNA, 19 nt, Human
uuccccugaacucccauaa

SEQ ID NO: 949784 - RNA, 23 nt, Human
uugagaguccucucuucuauccc

SEQ ID NO: 949785 - RNA, 21 nt, Human
uuugugacccauuugcuccca

SEQ ID NO: 949786 - RNA, 21 nt, Human
uuuuuuuuuuuuucacuuaug

SEQ ID NO: 949787 - RNA, 27 nt, Human
uuuuuuuuuuuuuuuuuucacuuaauu

SEQ ID NO: 949788 - RNA, 19 nt, Human
aacauggugacaccccauc

SEQ ID NO: 949789 - RNA, 20 nt, Human
aacauggugacaccccaucu

SEQ ID NO: 949790 - RNA, 21 nt, Human
aacauggugacaccccaucuc

SEQ ID NO: 949791 - RNA, 19 nt, Human
aagcaugcuauccuuuuuu

SEQ ID NO: 949792 - RNA, 18 nt, Human
aagcaugcuaucuuuuca

SEQ ID NO: 949793 - RNA, 25 nt, Human
aagcgauucucccgccucagccucc

SEQ ID NO: 949794 - RNA, 26 nt, Human
aagugauccuccccaucugggccucc

SEQ ID NO: 949795 - RNA, 23 nt, Human
aagugcuaggauuacauacauga

SEQ ID NO: 949796 - RNA, 26 nt, Human
aagugcuaggauuacauacaugagcc

SEQ ID NO: 949797 - RNA, 19 nt, Human
aagugcugggauuacaggc

SEQ ID NO: 949798 - RNA, 19 nt, Human
aagugcugggauuacaggc

SEQ ID NO: 949799 - RNA, 23 nt, Human
aagugcugggauuacaggcguga

SEQ ID NO: 949800 - RNA, 26 nt, Human
aagugcugggauuacaggcgugagcc

SEQ ID NO: 949801 - RNA, 18 nt, Human
acagagacagcucuauca

SEQ ID NO: 949802 - RNA, 18 nt, Human
acagagcagcuucacccc

SEQ ID NO: 949803 - RNA, 20 nt, Human
acaggguuucaccaucuugg

SEQ ID NO: 949804 - RNA, 24 nt, Human
acaggguuucaccaucuuggccag

SEQ ID NO: 949805 - RNA, 22 nt, Human
accauguuggccaggcuggucu

SEQ ID NO: 949806 - RNA, 18 nt, Human
acccucccaucuuccucu

SEQ ID NO: 949807 - RNA, 21 nt, Human
accucagccuacugagaagcu

SEQ ID NO: 949808 - RNA, 19 nt, Human
acgggguuucaccgugcug

SEQ ID NO: 949809 - RNA, 20 nt, Human
acgggguuucaccgugcugg

SEQ ID NO: 949810 - RNA, 24 nt, Human
acgggguuucaccgugcuggccag

SEQ ID NO: 949811 - RNA, 20 nt, Human
agaagcuggggccacaggug

SEQ ID NO: 949812 - RNA, 21 nt, Human
agaggcugggugugguggcuc

SEQ ID NO: 949813 - RNA, 20 nt, Human
agcacuuugggaggcugagg

SEQ ID NO: 949814 - RNA, 21 nt, Human
agcagagacgggguuucaccg

SEQ ID NO: 949815 - RNA, 18 nt, Human
agccuccagaguagcugg

SEQ ID NO: 949816 - RNA, 24 nt, Human
agccuggccaacauggugacaccc

SEQ ID NO: 949817 - RNA, 24 nt, Human
agcgauucucccgccucagccucc

SEQ ID NO: 949818 - RNA, 20 nt, Human
agcugggugugguggcacac

SEQ ID NO: 949819 - RNA, 20 nt, Human
aggcugggugugguggcuca

SEQ ID NO: 949820 - RNA, 22 nt, Human
aggcugggugugguggcucaca

SEQ ID NO: 949821 - RNA, 25 nt, Human
agggauauagaggcuggguguggug

SEQ ID NO: 949822 - RNA, 19 nt, Human
agguggagguugcagugag

SEQ ID NO: 949823 - RNA, 20 nt, Human
agguggagguugcagugagc

SEQ ID NO: 949824 - RNA, 24 nt, Human
agguggagguugcagugagcugag

SEQ ID NO: 949825 - RNA, 20 nt, Human
aggugugcaccaucaugacc

SEQ ID NO: 949826 - RNA, 22 nt, Human
aguagagacaggguuucaccau

SEQ ID NO: 949827 - RNA, 22 nt, Human
aguagagaugggguuucaccau

SEQ ID NO: 949828 - RNA, 19 nt, Human
aguagcugggacuacaggc

SEQ ID NO: 949829 - RNA, 21 nt, Human
aguagcugggacuacaggcau

SEQ ID NO: 949830 - RNA, 25 nt, Human
aguagcugggacuacaggcaugagc

SEQ ID NO: 949831 - RNA, 21 nt, Human
agugcaauggcgcaaucucag

SEQ ID NO: 949832 - RNA, 18 nt, Human
agugcugggauuacaggc

SEQ ID NO: 949833 - RNA, 24 nt, Human
auagaggcugggugugguggcuca

SEQ ID NO: 949834 - RNA, 24 nt, Human
auggcucacuguaggcuugaccuc

SEQ ID NO: 949835 - RNA, 18 nt, Human
augggguuucaccauguu

SEQ ID NO: 949836 - RNA, 22 nt, Human
augggguuucaccauguuggcc

SEQ ID NO: 949837 - RNA, 24 nt, Human
augggguuucaccauguuggccag

SEQ ID NO: 949838 - RNA, 25 nt, Human
auugugccccugcacuccagccuug

SEQ ID NO: 949839 - RNA, 23 nt, Human
caaacuccugaccucgugaucca

SEQ ID NO: 949840 - RNA, 24 nt, Human
cacaccuauaaucccagcacuuug

SEQ ID NO: 949841 - RNA, 23 nt, Human
cacagggccgcugccagauguuc

SEQ ID NO: 949842 - RNA, 21 nt, Human
caccacaaccuccgccucccg

SEQ ID NO: 949843 - RNA, 19 nt, Human
caccacauccggccaaagc

SEQ ID NO: 949844 - RNA, 25 nt, Human
caccacgcccagucaauuuugcacc

SEQ ID NO: 949845 - RNA, 24 nt, Human
caccaucuuggccaggcuaaucuc

SEQ ID NO: 949846 - RNA, 21 nt, Human
caccauguuggccaggcuggu

SEQ ID NO: 949847 - RNA, 23 nt, Human
caccauguuggccaggcuggucu

SEQ ID NO: 949848 - RNA, 24 nt, Human
caccauguuggccaggcuggucuu

SEQ ID NO: 949849 - RNA, 27 nt, Human
caccauguuggccaggcuggucuugaa

SEQ ID NO: 949850 - RNA, 19 nt, Human
caccccccggcugcccagg

SEQ ID NO: 949851 - RNA, 21 nt, Human
caccgugcuggccaggcugau

SEQ ID NO: 949852 - RNA, 24 nt, Human
caccgugcuggccaggcugaucuc

SEQ ID NO: 949853 - RNA, 19 nt, Human
caccuauaaucccagcacu

SEQ ID NO: 949854 - RNA, 24 nt, Human
caccuauaaucccagcacuuuggg

SEQ ID NO: 949855 - RNA, 24 nt, Human
caccucagccuacugagaagcugg

SEQ ID NO: 949856 - RNA, 23 nt, Human
cacuccagccuuggugacagagc

SEQ ID NO: 949857 - RNA, 22 nt, Human
cacuguaggcuugaccucccag

SEQ ID NO: 949858 - RNA, 20 nt, Human
cagagacgggguuucaccgu

SEQ ID NO: 949859 - RNA, 24 nt, Human
cagcacuuugggaggcugaggccg

SEQ ID NO: 949860 - RNA, 24 nt, Human
cagcagagacgggguuucaccgug

SEQ ID NO: 949861 - RNA, 26 nt, Human
cagcagagacgggguuucaccgugcu

SEQ ID NO: 949862 - RNA, 21 nt, Human
cagcuucaccccccggcugcc

SEQ ID NO: 949863 - RNA, 19 nt, Human
caggaggcugagacacgca

SEQ ID NO: 949864 - RNA, 21 nt, Human
caggcuaaucucaaacuccug

SEQ ID NO: 949865 - RNA, 24 nt, Human
caggguuucaccaucuuggccagg

SEQ ID NO: 949866 - RNA, 27 nt, Human
cauacaugagccaccacgccuggccag

SEQ ID NO: 949867 - RNA, 22 nt, Human
caucaugaccagccaauuuauu

SEQ ID NO: 949868 - RNA, 23 nt, Human
caucauguuguccaggcugcacc

SEQ ID NO: 949869 - RNA, 24 nt, Human
cauguuggccaggcuggucuugaa

SEQ ID NO: 949870 - RNA, 21 nt, Human
cauuaauuugaucccaagcag

SEQ ID NO: 949871 - RNA, 22 nt, Human
cauuaggaugcgugcucucuug

SEQ ID NO: 949872 - RNA, 21 nt, Human
cauuucaccguuuaugaagca

SEQ ID NO: 949873 - RNA, 18 nt, Human
ccacaaccuccgccuccc

SEQ ID NO: 949874 - RNA, 23 nt, Human
ccacaaccuccgccucccggguu

SEQ ID NO: 949875 - RNA, 24 nt, Human
ccacaaccuccgccucccggguuc

SEQ ID NO: 949876 - RNA, 22 nt, Human
ccacacucucucaagaaaaagg

SEQ ID NO: 949877 - RNA, 22 nt, Human
ccaccacgccuggccagcucug

SEQ ID NO: 949878 - RNA, 24 nt, Human
ccaccacgccuggccagcucuguc

SEQ ID NO: 949879 - RNA, 21 nt, Human
ccacgcccagucaauuuugca

SEQ ID NO: 949880 - RNA, 20 nt, Human
ccacuaaaaaaauacaaaaa

SEQ ID NO: 949881 - RNA, 24 nt, Human
ccagaguagcugggacuacaggca

SEQ ID NO: 949882 - RNA, 25 nt, Human
ccagaguagcugggacuacaggcau

SEQ ID NO: 949883 - RNA, 20 nt, Human
cccaggcucaagcaauccuc

SEQ ID NO: 949884 - RNA, 18 nt, Human
cccaggcuggagugcaau

SEQ ID NO: 949885 - RNA, 22 nt, Human
cccaggcuggagugcaauggcg

SEQ ID NO: 949886 - RNA, 24 nt, Human
ccccgaagugcugggauuacaggc

SEQ ID NO: 949887 - RNA, 21 nt, Human
ccccugcacuccagccuuggu

SEQ ID NO: 949888 - RNA, 24 nt, Human
cccgaagugcugggauuacaggcg

SEQ ID NO: 949889 - RNA, 23 nt, Human
cccgccucaaccccccgaagugc

SEQ ID NO: 949890 - RNA, 22 nt, Human
cccgcggucccagcugcucagg

SEQ ID NO: 949891 - RNA, 19 nt, Human
cccugcacuccagccuugg

SEQ ID NO: 949892 - RNA, 19 nt, Human
cccugcacuccagccuugg

SEQ ID NO: 949893 - RNA, 20 nt, Human
cccugcacuccagccuuggu

SEQ ID NO: 949894 - RNA, 24 nt, Human
cccugcacuccagccuuggugaca

SEQ ID NO: 949895 - RNA, 24 nt, Human
ccgaagugcugggauuacaggcgu

SEQ ID NO: 949896 - RNA, 24 nt, Human
ccgccucccggguucaagcgauuc

SEQ ID NO: 949897 - RNA, 24 nt, Human
ccucccaccucagccuacugagaa

SEQ ID NO: 949898 - RNA, 24 nt, Human
ccucccggguucaagcgauucucc

SEQ ID NO: 949899 - RNA, 19 nt, Human
ccugaccucgugauccacc

SEQ ID NO: 949900 - RNA, 21 nt, Human
ccugaccucgugauccaccug

SEQ ID NO: 949901 - RNA, 19 nt, Human
ccugcacuccagccuuggg

SEQ ID NO: 949902 - RNA, 19 nt, Human
ccuggccaacauggugaca

SEQ ID NO: 949903 - RNA, 24 nt, Human
ccuggccaacauggugacacccca

SEQ ID NO: 949904 - RNA, 19 nt, Human
ccugggucaagugauccuc

SEQ ID NO: 949905 - RNA, 22 nt, Human
ccuguugucuaggcuggagugc

SEQ ID NO: 949906 - RNA, 23 nt, Human
ccuugcccuguugucuaggcugg

SEQ ID NO: 949907 - RNA, 24 nt, Human
ccuugcccuguugucuaggcugga

SEQ ID NO: 949908 - RNA, 22 nt, Human
cgaagugcuaggauuacauaca

SEQ ID NO: 949909 - RNA, 24 nt, Human
cgaagugcugggauuacaggcgug

SEQ ID NO: 949910 - RNA, 19 nt, Human
cgcaagguggagguugcag

SEQ ID NO: 949911 - RNA, 24 nt, Human
cgcaagguggagguugcagugagc

SEQ ID NO: 949912 - RNA, 24 nt, Human
cgccucagccuccagaguagcugg

SEQ ID NO: 949913 - RNA, 24 nt, Human
cgcucuuguugcccaggcuggagu

SEQ ID NO: 949914 - RNA, 24 nt, Human
cgcugccagauguucacuguaggc

SEQ ID NO: 949915 - RNA, 21 nt, Human
cucaagcaauccucccaccuc

SEQ ID NO: 949916 - RNA, 25 nt, Human
cucaagcaauccucccaccucagcc

SEQ ID NO: 949917 - RNA, 22 nt, Human
cucacaccuauaaucccagcac

SEQ ID NO: 949918 - RNA, 24 nt, Human
cucacaccuauaaucccagcacuu

SEQ ID NO: 949919 - RNA, 24 nt, Human
cucaccacaaccuccgccucccgg

SEQ ID NO: 949920 - RNA, 24 nt, Human
cucagccuccagaguagcugggac

SEQ ID NO: 949921 - RNA, 25 nt, Human
cucccaggcucaagcaauccuccca

SEQ ID NO: 949922 - RNA, 25 nt, Human
cuccugaccucagugaucugcccgc

SEQ ID NO: 949923 - RNA, 24 nt, Human
cuccugaccucgugauccaccugc

SEQ ID NO: 949924 - RNA, 23 nt, Human
cugcacuccagccuuggugacag

SEQ ID NO: 949925 - RNA, 19 nt, Human
cuggucuugaacuccuggg

SEQ ID NO: 949926 - RNA, 19 nt, Human
cuugaacuccugggucaag

SEQ ID NO: 949927 - RNA, 21 nt, Human
cuugcccuguugucuaggcug

SEQ ID NO: 949928 - RNA, 24 nt, Human
cuugcccuguugucuaggcuggag

SEQ ID NO: 949929 - RNA, 24 nt, Human
cuuguugcccaggcuggagugcaa

SEQ ID NO: 949930 - RNA, 20 nt, Human
gaaggaaagacaggccacuc

SEQ ID NO: 949931 - RNA, 24 nt, Human
gaagugcugggauuacaggcguga

SEQ ID NO: 949932 - RNA, 23 nt, Human
gaccucagugaucugcccgccuc

SEQ ID NO: 949933 - RNA, 22 nt, Human
gaccucgugauccaccugccuc

SEQ ID NO: 949934 - RNA, 22 nt, Human
gaccucgugauccaccugccuc

SEQ ID NO: 949935 - RNA, 24 nt, Human
gaccucgugauccaccugccucgg

SEQ ID NO: 949936 - RNA, 21 nt, Human
gacuacaggcaugagccacca

SEQ ID NO: 949937 - RNA, 23 nt, Human
gagaccagccuggccaacauggu

SEQ ID NO: 949938 - RNA, 24 nt, Human
gagacgggguuucaccgugcuggc

SEQ ID NO: 949939 - RNA, 18 nt, Human
gagaugggguuucaccau

SEQ ID NO: 949940 - RNA, 24 nt, Human
gagaugggguuucaccauguuggc

SEQ ID NO: 949941 - RNA, 23 nt, Human
gagauugugccccugcacuccag

SEQ ID NO: 949942 - RNA, 22 nt, Human
gagcacccucccaucuuccucu

SEQ ID NO: 949943 - RNA, 21 nt, Human
gagguugcagugagcugagau

SEQ ID NO: 949944 - RNA, 23 nt, Human
gagguugcagugagcugagauug

SEQ ID NO: 949945 - RNA, 24 nt, Human
gaucucaucauguuguccaggcug

SEQ ID NO: 949946 - RNA, 18 nt, Human
gauuacaggcgugagcca

SEQ ID NO: 949947 - RNA, 21 nt, Human
gauuacaggcgugagccacca

SEQ ID NO: 949948 - RNA, 22 nt, Human
gauuacaggcgugagccaccac

SEQ ID NO: 949949 - RNA, 18 nt, Human
gauuacauacaugagcca

SEQ ID NO: 949950 - RNA, 24 nt, Human
gcacuccagccuuggugacagagc

SEQ ID NO: 949951 - RNA, 22 nt, Human
gcagugagcugagauugugccc

SEQ ID NO: 949952 - RNA, 24 nt, Human
gccaacauggugacaccccaucuc

SEQ ID NO: 949953 - RNA, 21 nt, Human
gccgagaguuugagaccagcc

SEQ ID NO: 949954 - RNA, 23 nt, Human
gccucaaccccccgaagugcugg

SEQ ID NO: 949955 - RNA, 23 nt, Human
gcuaaucucaaacuccugaccuc

SEQ ID NO: 949956 - RNA, 21 nt, Human
gcucacuguaggcuugaccuc

SEQ ID NO: 949957 - RNA, 24 nt, Human
gcucuuguugcccaggcuggagug

SEQ ID NO: 949958 - RNA, 23 nt, Human
gcugaucucguacuccugaccuc

SEQ ID NO: 949959 - RNA, 23 nt, Human
gcugccagauguucacuguaggc

SEQ ID NO: 949960 - RNA, 19 nt, Human
gcuggagugcaauggcgca

SEQ ID NO: 949961 - RNA, 20 nt, Human
gcugggggggugaugagcac

SEQ ID NO: 949962 - RNA, 19 nt, Human
ggacuacaggcaugagcca

SEQ ID NO: 949963 - RNA, 22 nt, Human
ggagguugcagugagcugagau

SEQ ID NO: 949964 - RNA, 24 nt, Human
ggagguugcagugagcugagauug

SEQ ID NO: 949965 - RNA, 24 nt, Human
ggagguugcagugagcuggcuagg

SEQ ID NO: 949966 - RNA, 19 nt, Human
ggauuacaggcgugagcca

SEQ ID NO: 949967 - RNA, 22 nt, Human
ggauuacauacaugagccacca

SEQ ID NO: 949968 - RNA, 20 nt, Human
ggcauuucgguacagagaca

SEQ ID NO: 949969 - RNA, 23 nt, Human
ggccacaggugugcaccaucaug

SEQ ID NO: 949970 - RNA, 21 nt, Human
ggcucacaccuauaaucccag

SEQ ID NO: 949971 - RNA, 18 nt, Human
ggcuggucuugaacuccu

SEQ ID NO: 949972 - RNA, 24 nt, Human
gggauauagaggcuggguguggug

SEQ ID NO: 949973 - RNA, 24 nt, Human
gggccacaggugugcaccaucaug

SEQ ID NO: 949974 - RNA, 24 nt, Human
ggggaucucaucauguuguccagg

SEQ ID NO: 949975 - RNA, 22 nt, Human
gggguuucaccauguuggccag

SEQ ID NO: 949976 - RNA, 23 nt, Human
gggguuucaccgugcuggccagg

SEQ ID NO: 949977 - RNA, 24 nt, Human
gggugugguggcucacaccuauaa

SEQ ID NO: 949978 - RNA, 18 nt, Human
ggguuucaccauguuggc

SEQ ID NO: 949979 - RNA, 22 nt, Human
ggguuucaccgugcuggccagg

SEQ ID NO: 949980 - RNA, 19 nt, Human
gguccucucuggucugcuu

SEQ ID NO: 949981 - RNA, 19 nt, Human
ggugcacagggccgcugcc

SEQ ID NO: 949982 - RNA, 19 nt, Human
gguggagguugcagugagc

SEQ ID NO: 949983 - RNA, 24 nt, Human
gguggcucacaccuauaaucccag

SEQ ID NO: 949984 - RNA, 23 nt, Human
guagagaugggguuucaccaugu

SEQ ID NO: 949985 - RNA, 22 nt, Human
gugauccaccugccucggccuc

SEQ ID NO: 949986 - RNA, 21 nt, Human
gugaucugcccgccucaaccc

SEQ ID NO: 949987 - RNA, 24 nt, Human
guugcagugagcugagauugugcc

SEQ ID NO: 949988 - RNA, 23 nt, Human
uaaaagggauauagaggcugggu

SEQ ID NO: 949989 - RNA, 25 nt, Human
uaauuuuuuuuuauuuuuaguagag

SEQ ID NO: 949990 - RNA, 26 nt, Human
uaauuuuuuuuuauuuuuaguagaga

SEQ ID NO: 949991 - RNA, 24 nt, Human
uacaggcaugagccaccacgccca

SEQ ID NO: 949992 - RNA, 23 nt, Human
uacaggcgugagccaccacaucc

SEQ ID NO: 949993 - RNA, 24 nt, Human
uacauacaugagccaccacgccug

SEQ ID NO: 949994 - RNA, 20 nt, Human
uagagacaggguuucaccau

SEQ ID NO: 949995 - RNA, 22 nt, Human
uagagaugggguuucaccaugu

SEQ ID NO: 949996 - RNA, 19 nt, Human
uagcugggugugguggcac

SEQ ID NO: 949997 - RNA, 22 nt, Human
uaggauuacauacaugagccac

SEQ ID NO: 949998 - RNA, 24 nt, Human
uaggauuacauacaugagccacca

SEQ ID NO: 949999 - RNA, 19 nt, Human
uaguagagacaggguuuca

SEQ ID NO: 950000 - RNA, 26 nt, Human
uaguagagacaggguuucaccaucuu

SEQ ID NO: 950001 - RNA, 24 nt, Human
uaguagagaugggguuucaccaug

SEQ ID NO: 950002 - RNA, 25 nt, Human
uaguagagaugggguuucaccaugu

SEQ ID NO: 950003 - RNA, 24 nt, Human
ucaccacaaccuccgccucccggg

SEQ ID NO: 950004 - RNA, 25 nt, Human
ucaccacaaccuccgccucccgggu

SEQ ID NO: 950005 - RNA, 27 nt, Human
ucaccacaaccuccgccucccggguuc

SEQ ID NO: 950006 - RNA, 20 nt, Human
ucacuguaggcguccagcag

SEQ ID NO: 950007 - RNA, 23 nt, Human
ucacuguaggcuugaccucccag

SEQ ID NO: 950008 - RNA, 24 nt, Human
ucacuguaggcuugaccucccagg

SEQ ID NO: 950009 - RNA, 22 nt, Human
ucagcagagacgggguuucacc

SEQ ID NO: 950010 - RNA, 24 nt, Human
ucagcagagacgggguuucaccgu

SEQ ID NO: 950011 - RNA, 27 nt, Human
ucagugaucugcccgccucaacccccc

SEQ ID NO: 950012 - RNA, 18 nt, Human
uccacuaaaaaaauacaa

SEQ ID NO: 950013 - RNA, 24 nt, Human
uccagaguagcugggacuacaggc

SEQ ID NO: 950014 - RNA, 19 nt, Human
uccaggcugcaccuggcuc

SEQ ID NO: 950015 - RNA, 18 nt, Human
ucccaggcucaagcaauc

SEQ ID NO: 950016 - RNA, 20 nt, Human
ucccaucuuccucuguccag

SEQ ID NO: 950017 - RNA, 21 nt, Human
ucccggguucaagcgauucuc

SEQ ID NO: 950018 - RNA, 24 nt, Human
ucccggguucaagcgauucucccg

SEQ ID NO: 950019 - RNA, 20 nt, Human
ucgaagugcuaggauuacau

SEQ ID NO: 950020 - RNA, 24 nt, Human
ucgaagugcuaggauuacauacau

SEQ ID NO: 950021 - RNA, 22 nt, Human
ucgcucuuguugcccaggcugg

SEQ ID NO: 950022 - RNA, 23 nt, Human
ucgcucuuguugcccaggcugga

SEQ ID NO: 950023 - RNA, 24 nt, Human
ucuacagaagauuguuggguccac

SEQ ID NO: 950024 - RNA, 19 nt, Human
ucuaucagguuuggauugg

SEQ ID NO: 950025 - RNA, 20 nt, Human
ucucauuaggaugcgugcuc

SEQ ID NO: 950026 - RNA, 24 nt, Human
ucucccgccucagccuccagagua

SEQ ID NO: 950027 - RNA, 18 nt, Human
ucucgaagugcuaggauu

SEQ ID NO: 950028 - RNA, 19 nt, Human
ucucgaagugcuaggauua

SEQ ID NO: 950029 - RNA, 20 nt, Human
ucugaaguuugcaguugggg

SEQ ID NO: 950030 - RNA, 21 nt, Human
ucugcccgccucaaccccccg

SEQ ID NO: 950031 - RNA, 20 nt, Human
ucuugaacuccugggucaag

SEQ ID NO: 950032 - RNA, 22 nt, Human
ucuuguugcccaggcuggagug

SEQ ID NO: 950033 - RNA, 24 nt, Human
ugaacuccugggucaagugauccu

SEQ ID NO: 950034 - RNA, 19 nt, Human
ugacaccccaucuccacua

SEQ ID NO: 950035 - RNA, 22 nt, Human
ugacaccccaucuccacuaaaa

SEQ ID NO: 950036 - RNA, 23 nt, Human
ugaccucagugaucugcccgccu

SEQ ID NO: 950037 - RNA, 24 nt, Human
ugaccucccaggcucaagcaaucc

SEQ ID NO: 950038 - RNA, 25 nt, Human
ugaccucccaggcucaagcaauccu

SEQ ID NO: 950039 - RNA, 24 nt, Human
ugagaagcuggggccacaggugug

SEQ ID NO: 950040 - RNA, 23 nt, Human
ugagaccagccuggccaacaugg

SEQ ID NO: 950041 - RNA, 22 nt, Human
ugagauugugccccugcacucc

SEQ ID NO: 950042 - RNA, 21 nt, Human
ugagcacccucccaucuuccu

SEQ ID NO: 950043 - RNA, 21 nt, Human
ugagcugagauugugccccug

SEQ ID NO: 950044 - RNA, 22 nt, Human
ugaguccuugacagagcagcuu

SEQ ID NO: 950045 - RNA, 19 nt, Human
ugcaccaucaugaccagcc

SEQ ID NO: 950046 - RNA, 24 nt, Human
ugcaccuggcucuaucugacgcuc

SEQ ID NO: 950047 - RNA, 18 nt, Human
ugcccaggcuggagugca

SEQ ID NO: 950048 - RNA, 21 nt, Human
ugcccaggcuggagugcaaug

SEQ ID NO: 950049 - RNA, 21 nt, Human
ugcccaggcuggagugcaaug

SEQ ID NO: 950050 - RNA, 21 nt, Human
ugccucggccucucgaagugc

SEQ ID NO: 950051 - RNA, 23 nt, Human
ugccucggccucucgaagugcua

SEQ ID NO: 950052 - RNA, 24 nt, Human
ugcuaggauuacauacaugagcca

SEQ ID NO: 950053 - RNA, 24 nt, Human
ugcugggauuacaggcgugagcca

SEQ ID NO: 950054 - RNA, 18 nt, Human
ugcugggggggugaugag

SEQ ID NO: 950055 - RNA, 18 nt, Human
uggagguugcagugagcu

SEQ ID NO: 950056 - RNA, 20 nt, Human
uggagguugcagugagcuga

SEQ ID NO: 950057 - RNA, 20 nt, Human
uggagguugcagugagcugg

SEQ ID NO: 950058 - RNA, 23 nt, Human
uggagugcaauggcgcaaucuca

SEQ ID NO: 950059 - RNA, 24 nt, Human
uggagugcaauggcgcaaucucag

SEQ ID NO: 950060 - RNA, 19 nt, Human
uggagugcauggugagauc

SEQ ID NO: 950061 - RNA, 24 nt, Human
uggccaggcugaucucguacuccu

SEQ ID NO: 950062 - RNA, 24 nt, Human
uggccaggcuggucuugaacuccu

SEQ ID NO: 950063 - RNA, 24 nt, Human
uggcgcaaucucagcucaccacaa

SEQ ID NO: 950064 - RNA, 24 nt, Human
uggcucacaccuauaaucccagca

SEQ ID NO: 950065 - RNA, 24 nt, Human
uggcucacuguaggcuugaccucc

SEQ ID NO: 950066 - RNA, 18 nt, Human
ugggacuacaggcaugag

SEQ ID NO: 950067 - RNA, 22 nt, Human
ugggacuacaggcaugagccac

SEQ ID NO: 950068 - RNA, 24 nt, Human
ugggacuacaggcaugagccacca

SEQ ID NO: 950069 - RNA, 24 nt, Human
ugggacuacaggcaugagccacca

SEQ ID NO: 950070 - RNA, 20 nt, Human
ugggaggcugaggccgagag

SEQ ID NO: 950071 - RNA, 18 nt, Human
ugggauuacaggcgugag

SEQ ID NO: 950072 - RNA, 19 nt, Human
ugggauuacaggcgugagc

SEQ ID NO: 950073 - RNA, 22 nt, Human
ugggauuacaggcgugagccac

SEQ ID NO: 950074 - RNA, 23 nt, Human
ugggauuacaggcgugagccacc

SEQ ID NO: 950075 - RNA, 24 nt, Human
ugggauuacaggcgugagccacca

SEQ ID NO: 950076 - RNA, 24 nt, Human
ugggguuucaccauguuggccagg

SEQ ID NO: 950077 - RNA, 24 nt, Human
uggugagaucauggcucacuguag

SEQ ID NO: 950078 - RNA, 23 nt, Human
ugucuaggcuggagugcauggug

SEQ ID NO: 950079 - RNA, 24 nt, Human
ugucugaguccuugacagagcagc

SEQ ID NO: 950080 - RNA, 21 nt, Human
ugugguggcacacucccgcgg

SEQ ID NO: 950081 - RNA, 20 nt, Human
uguugcccaggcuggagugc

SEQ ID NO: 950082 - RNA, 18 nt, Human
uuagcugggugugguggc

SEQ ID NO: 950083 - RNA, 20 nt, Human
uuagcugggugugguggcac

SEQ ID NO: 950084 - RNA, 24 nt, Human
uuaguagagacaggguuucaccau

SEQ ID NO: 950085 - RNA, 18 nt, Human
uuaguagagaugggguuu

SEQ ID NO: 950086 - RNA, 22 nt, Human
uuaguagagaugggguuucacc

SEQ ID NO: 950087 - RNA, 24 nt, Human
uuaguagagaugggguuucaccau

SEQ ID NO: 950088 - RNA, 23 nt, Human
uucaagcgauucucccgccucag

SEQ ID NO: 950089 - RNA, 24 nt, Human
uucaagcgauucucccgccucagc

SEQ ID NO: 950090 - RNA, 24 nt, Human
uucgcucuuguugcccaggcugga

SEQ ID NO: 950091 - RNA, 19 nt, Human
uugcagugagcugagauug

SEQ ID NO: 950092 - RNA, 22 nt, Human
uugcagugagcugagauugugc

SEQ ID NO: 950093 - RNA, 19 nt, Human
uuggauuggugcacagggc

SEQ ID NO: 950094 - RNA, 20 nt, Human
uuggauuggugcacagggcc

SEQ ID NO: 950095 - RNA, 18 nt, Human
uugggaggcugaggccga

SEQ ID NO: 950096 - RNA, 21 nt, Human
uugggaggcugaggccgagag

SEQ ID NO: 950097 - RNA, 18 nt, Human
uugguauuuuuaguagag

SEQ ID NO: 950098 - RNA, 21 nt, Human
uuucaccaucuuggccaggcu

SEQ ID NO: 950099 - RNA, 24 nt, Human
uuucaccauguuggccaggcuggu

SEQ ID NO: 950100 - RNA, 21 nt, Human
uuucaccgugcuggccaggcu

SEQ ID NO: 950101 - RNA, 24 nt, Human
uuucgcucuuguugcccaggcugg

SEQ ID NO: 950102 - RNA, 21 nt, Human
uuugguauuuuuaguagagau

SEQ ID NO: 950103 - RNA, 23 nt, Human
uuuuauuuuuaguagagacaggg

SEQ ID NO: 950104 - RNA, 24 nt, Human
uuuuuaguagagacaggguuucac

SEQ ID NO: 950105 - RNA, 24 nt, Human
uuuuuaguagagaugggguuucac

SEQ ID NO: 950106 - RNA, 19 nt, Human
uuuuuuuuagagggccuug

SEQ ID NO: 950107 - RNA, 24 nt, Human
uuuuuuuuauuuuuaguagagaca

SEQ ID NO: 950108 - RNA, 28 nt, Human
uuuuuuuuuauuuuuaguagagacaggg

SEQ ID NO: 950109 - RNA, 20 nt, Human
uuuuuuuuuuuagagggccu

SEQ ID NO: 950110 - RNA, 18 nt, Human
uuuuuuuuuuuuuuccug

SEQ ID NO: 950111 - RNA, 21 nt, Human
aaaaaaaaaaaaaaaaagcac

SEQ ID NO: 950112 - RNA, 23 nt, Human
aaaaaaaaaaaaaaaagcacaag

SEQ ID NO: 950113 - RNA, 26 nt, Human
aaaaaaaaaaagcacaaguaacuaag

SEQ ID NO: 950114 - RNA, 21 nt, Human
aaaaaagaaauacccaaaaga

SEQ ID NO: 950115 - RNA, 22 nt, Human
aaaaaagaaauacccaaaagaa

SEQ ID NO: 950116 - RNA, 25 nt, Human
aaaaaagccaccacucacugggggg

SEQ ID NO: 950117 - RNA, 22 nt, Human
aaaaccaaaacccuaaugcuga

SEQ ID NO: 950118 - RNA, 22 nt, Human
aaaacuauacucccauauuuca

SEQ ID NO: 950119 - RNA, 18 nt, Human
aaacaagauucacaugug

SEQ ID NO: 950120 - RNA, 24 nt, Human
aaacaagauucacaugugccaaaa

SEQ ID NO: 950121 - RNA, 20 nt, Human
aaagaaauacccaaaagaaa

SEQ ID NO: 950122 - RNA, 22 nt, Human
aaagccaccacucacugggaca

SEQ ID NO: 950123 - RNA, 24 nt, Human
aacugcauuauauuaugaaaacaa

SEQ ID NO: 950124 - RNA, 22 nt, Human
aagaaaaaaagccaccacucac

SEQ ID NO: 950125 - RNA, 21 nt, Human
aagcaaaacaagaaaacaaag

SEQ ID NO: 950126 - RNA, 21 nt, Human
aaggaauccaaagaaugcagu

SEQ ID NO: 950127 - RNA, 21 nt, Human
aaggaccuauauaauggaggc

SEQ ID NO: 950128 - RNA, 22 nt, Human
aagguggaaguaugguuuaucc

SEQ ID NO: 950129 - RNA, 20 nt, Human
aauaaaaauggagaaacuaa

SEQ ID NO: 950130 - RNA, 18 nt, Human
aauggaggcagcauucaa

SEQ ID NO: 950131 - RNA, 23 nt, Human
acaaaacaagauucacaugugcc

SEQ ID NO: 950132 - RNA, 21 nt, Human
acuuguaguuuugcccuugca

SEQ ID NO: 950133 - RNA, 19 nt, Human
agaaaacaaaguaugaaag

SEQ ID NO: 950134 - RNA, 20 nt, Human
agaaaauaaaaauggagaaa

SEQ ID NO: 950135 - RNA, 18 nt, Human
agccuggcagcauacacc

SEQ ID NO: 950136 - RNA, 23 nt, Human
aggaaaagaagaaauaauaaaaa

SEQ ID NO: 950137 - RNA, 22 nt, Human
augaaaugaaauccaagaagcu

SEQ ID NO: 950138 - RNA, 23 nt, Human
caaaaaagaaauacccaaaagaa

SEQ ID NO: 950139 - RNA, 25 nt, Human
caaaaaagaaauacccaaaagaaac

SEQ ID NO: 950140 - RNA, 25 nt, Human
caaaacaagauucacaugugccaaa

SEQ ID NO: 950141 - RNA, 19 nt, Human
caaaggccacugaucaaaa

SEQ ID NO: 950142 - RNA, 23 nt, Human
caagaaaacaaaguaugaaagua

SEQ ID NO: 950143 - RNA, 20 nt, Human
caaguguucucacccaaggu

SEQ ID NO: 950144 - RNA, 19 nt, Human
cacccaagucagagagcuc

SEQ ID NO: 950145 - RNA, 22 nt, Human
cagccuggcagcauacacccaa

SEQ ID NO: 950146 - RNA, 21 nt, Human
cauccccauaccaaaaccgga

SEQ ID NO: 950147 - RNA, 18 nt, Human
cccaaaagaaacaaaaac

SEQ ID NO: 950148 - RNA, 24 nt, Human
ccccauaccaaaaccggaugcucc

SEQ ID NO: 950149 - RNA, 22 nt, Human
cccuugcaaagauccaaaaaaa

SEQ ID NO: 950150 - RNA, 22 nt, Human
cccuuuggcaucagaaauccag

SEQ ID NO: 950151 - RNA, 21 nt, Human
ccuaaaaaggcguuuuucccc

SEQ ID NO: 950152 - RNA, 27 nt, Human
cgggcagaaaccgucaagauucauacu

SEQ ID NO: 950153 - RNA, 20 nt, Human
cuggaaggaccuauauaaug

SEQ ID NO: 950154 - RNA, 23 nt, Human
cuggaaggaccuauauaauggag

SEQ ID NO: 950155 - RNA, 23 nt, Human
cuuuuaauuuuaaacccaucauc

SEQ ID NO: 950156 - RNA, 19 nt, Human
gaaacaaaaaccaaaaccc

SEQ ID NO: 950157 - RNA, 21 nt, Human
gaaauccaagaagcuuuaacc

SEQ ID NO: 950158 - RNA, 22 nt, Human
gggcagaaaccgucaagauuca

SEQ ID NO: 950159 - RNA, 19 nt, Human
guggcccaaaggccacuga

SEQ ID NO: 950160 - RNA, 23 nt, Human
uaaacccaucaucagagaacaag

SEQ ID NO: 950161 - RNA, 22 nt, Human
uaaagcaaaacaagaaaacaaa

SEQ ID NO: 950162 - RNA, 23 nt, Human
uaacccuuuggcaucagaaaucc

SEQ ID NO: 950163 - RNA, 22 nt, Human
uacacaaaacaagauucacaug

SEQ ID NO: 950164 - RNA, 23 nt, Human
uacccaaaagaaacaaaaaccaa

SEQ ID NO: 950165 - RNA, 21 nt, Human
uagacugaaggaauccaaaga

SEQ ID NO: 950166 - RNA, 21 nt, Human
uaggcagaaacccagaaaugg

SEQ ID NO: 950167 - RNA, 19 nt, Human
uaugaaaacaaaaggaaaa

SEQ ID NO: 950168 - RNA, 19 nt, Human
uaugaaaguacccagccug

SEQ ID NO: 950169 - RNA, 22 nt, Human
uaugaaaguacccagccuggca

SEQ ID NO: 950170 - RNA, 19 nt, Human
uaugguuuauccugaacau

SEQ ID NO: 950171 - RNA, 19 nt, Human
uaugugggaaaauguaugc

SEQ ID NO: 950172 - RNA, 21 nt, Human
ucaaaaauaaaauaguggcug

SEQ ID NO: 950173 - RNA, 21 nt, Human
ucaagauucauacugcuguuu

SEQ ID NO: 950174 - RNA, 18 nt, Human
ucaaugaaaugaaaucca

SEQ ID NO: 950175 - RNA, 22 nt, Human
ucacacacacaaaaaacuuggc

SEQ ID NO: 950176 - RNA, 20 nt, Human
ucauaaggacucaacaaaaa

SEQ ID NO: 950177 - RNA, 24 nt, Human
uccaaaaaaaaaaaaaaaaagcac

SEQ ID NO: 950178 - RNA, 19 nt, Human
uccuaaggugaaagucacc

SEQ ID NO: 950179 - RNA, 24 nt, Human
ucugccauuaggacgggcagaaac

SEQ ID NO: 950180 - RNA, 19 nt, Human
ugaaaacaaaaggaaaaga

SEQ ID NO: 950181 - RNA, 23 nt, Human
ugaaaaccuguaacaaauuuaaa

SEQ ID NO: 950182 - RNA, 26 nt, Human
ugaaaugaaauccaagaagcuuuaac

SEQ ID NO: 950183 - RNA, 20 nt, Human
ugaacaugaaaaccuguaac

SEQ ID NO: 950184 - RNA, 21 nt, Human
ugccaaaaaagaaauacccaa

SEQ ID NO: 950185 - RNA, 24 nt, Human
ugccaauguggaaagaaaaaaagc

SEQ ID NO: 950186 - RNA, 18 nt, Human
ugcuuauuucuuacaugc

SEQ ID NO: 950187 - RNA, 21 nt, Human
uggaaguaugguuuauccuga

SEQ ID NO: 950188 - RNA, 18 nt, Human
uggagaugacugaguccu

SEQ ID NO: 950189 - RNA, 20 nt, Human
uggcuguauaucaaugaaau

SEQ ID NO: 950190 - RNA, 20 nt, Human
ugggacacccagagaauugg

SEQ ID NO: 950191 - RNA, 20 nt, Human
ugggagaagugaaugugcca

SEQ ID NO: 950192 - RNA, 24 nt, Human
ugugccaauguggaaagaaaaaaa

SEQ ID NO: 950193 - RNA, 20 nt, Human
uguggaaagaaaaaaagcca

SEQ ID NO: 950194 - RNA, 26 nt, Human
uuaaucucaaagaaacauaaguugug

SEQ ID NO: 950195 - RNA, 19 nt, Human
uucucacccaagguggaag

SEQ ID NO: 950196 - RNA, 21 nt, Human
uuuaauuuuaaacccaucauc

SEQ ID NO: 950197 - RNA, 22 nt, Human
aaagcucagccgggcugucgcc

SEQ ID NO: 950198 - RNA, 21 nt, Human
aacacugucgucgucuccacg

SEQ ID NO: 950199 - RNA, 20 nt, Human
aaccuggaguguggagaggc

SEQ ID NO: 950200 - RNA, 22 nt, Human
aagccaucucuccgcuguccca

SEQ ID NO: 950201 - RNA, 22 nt, Human
aauuacaagaaaaaaguugcaa

SEQ ID NO: 950202 - RNA, 22 nt, Human
acucugccaccccggcaggcgg

SEQ ID NO: 950203 - RNA, 22 nt, Human
agaaaaaaguugcaacuucagu

SEQ ID NO: 950204 - RNA, 24 nt, Human
agacaggcaggaaccgucucaggc

SEQ ID NO: 950205 - RNA, 19 nt, Human
agccaggggcugcagaggg

SEQ ID NO: 950206 - RNA, 26 nt, Human
aggcaggagaaggugcaagagggacc

SEQ ID NO: 950207 - RNA, 22 nt, Human
aucauggccuggcagcucuguc

SEQ ID NO: 950208 - RNA, 19 nt, Human
augacuggaaaggggccuu

SEQ ID NO: 950209 - RNA, 23 nt, Human
auucuugguggcggcaguauccg

SEQ ID NO: 950210 - RNA, 26 nt, Human
caaaagcaagucucuccaagucaaaa

SEQ ID NO: 950211 - RNA, 22 nt, Human
caacccccaagacaggcaggaa

SEQ ID NO: 950212 - RNA, 21 nt, Human
caacucacucugccaccccgg

SEQ ID NO: 950213 - RNA, 21 nt, Human
caaguuacaauaaacagucca

SEQ ID NO: 950214 - RNA, 23 nt, Human
caaguuacaauaaacaguccauu

SEQ ID NO: 950215 - RNA, 19 nt, Human
caccucacuaaagcucagc

SEQ ID NO: 950216 - RNA, 24 nt, Human
caccucauguccccuccuccagac

SEQ ID NO: 950217 - RNA, 20 nt, Human
cacggcgcgggcugcagcag

SEQ ID NO: 950218 - RNA, 19 nt, Human
cacggcuggcagaacugcc

SEQ ID NO: 950219 - RNA, 19 nt, Human
cacgggcggaaccaacaaa

SEQ ID NO: 950220 - RNA, 19 nt, Human
cacgugcccugauggagaa

SEQ ID NO: 950221 - RNA, 25 nt, Human
cacucugccaccccggcaggcggca

SEQ ID NO: 950222 - RNA, 24 nt, Human
cagaacauucuaauaaaaauauua

SEQ ID NO: 950223 - RNA, 26 nt, Human
cagacccccacagcccuggaugcccc

SEQ ID NO: 950224 - RNA, 20 nt, Human
cagccgccaggcccgaccac

SEQ ID NO: 950225 - RNA, 19 nt, Human
caggaggccguguccucac

SEQ ID NO: 950226 - RNA, 21 nt, Human
cauggccuggcagcucugucu

SEQ ID NO: 950227 - RNA, 23 nt, Human
cauguccccuccuccagaccccc

SEQ ID NO: 950228 - RNA, 18 nt, Human
ccacugccccccccaggc

SEQ ID NO: 950229 - RNA, 19 nt, Human
ccaggcccgaccacucgcg

SEQ ID NO: 950230 - RNA, 23 nt, Human
ccaggcccgaccacucgcgcgcc

SEQ ID NO: 950231 - RNA, 21 nt, Human
ccccacagcccuggaugcccc

SEQ ID NO: 950232 - RNA, 22 nt, Human
cccccacagcccuggaugcccc

SEQ ID NO: 950233 - RNA, 19 nt, Human
cccccaggcuggcaccacc

SEQ ID NO: 950234 - RNA, 18 nt, Human
ccccccgcugccccccgc

SEQ ID NO: 950235 - RNA, 19 nt, Human
cccccgcugccccccgccc

SEQ ID NO: 950236 - RNA, 23 nt, Human
ccccgccacgaugcagcaguggg

SEQ ID NO: 950237 - RNA, 20 nt, Human
ccccgccgccuacggacccg

SEQ ID NO: 950238 - RNA, 21 nt, Human
ccccgcugccccccgcccucg

SEQ ID NO: 950239 - RNA, 19 nt, Human
ccccuccuccagaccccca

SEQ ID NO: 950240 - RNA, 22 nt, Human
ccccuccuccagacccccacag

SEQ ID NO: 950241 - RNA, 24 nt, Human
cccucaagacacaaugggaccuag

SEQ ID NO: 950242 - RNA, 19 nt, Human
ccgagcugcgccgcgcugc

SEQ ID NO: 950243 - RNA, 21 nt, Human
ccgagcugcgccgcgcugcgc

SEQ ID NO: 950244 - RNA, 23 nt, Human
ccgccaggcccgaccacucgcgc

SEQ ID NO: 950245 - RNA, 19 nt, Human
ccgcgagccggcagacacu

SEQ ID NO: 950246 - RNA, 20 nt, Human
ccgcgcugcgcucccgaccu

SEQ ID NO: 950247 - RNA, 18 nt, Human
ccgugcgcgccgagcugc

SEQ ID NO: 950248 - RNA, 18 nt, Human
ccuagauuaaagagaagc

SEQ ID NO: 950249 - RNA, 18 nt, Human
ccuccaccaacccccaag

SEQ ID NO: 950250 - RNA, 23 nt, Human
ccuccuccagacccccacagccc

SEQ ID NO: 950251 - RNA, 21 nt, Human
cgccgggggcggccaggggcc

SEQ ID NO: 950252 - RNA, 23 nt, Human
cgccgggggcggccaggggccgc

SEQ ID NO: 950253 - RNA, 18 nt, Human
cgccugggagcuccuccg

SEQ ID NO: 950254 - RNA, 21 nt, Human
cgccugggagcuccuccgggc

SEQ ID NO: 950255 - RNA, 19 nt, Human
cgcgccgagcugcgccgcg

SEQ ID NO: 950256 - RNA, 29 nt, Human
cgcgcugcgcucccgaccggcgcugcccc

SEQ ID NO: 950257 - RNA, 19 nt, Human
cgcucagcucccugaggua

SEQ ID NO: 950258 - RNA, 27 nt, Human
cgcugcgcucccgaccggcgcugcccc

SEQ ID NO: 950259 - RNA, 28 nt, Human
cgcugcgcucccgaccggcgcugcccuu

SEQ ID NO: 950260 - RNA, 18 nt, Human
cggcgcgggcugcagcag

SEQ ID NO: 950261 - RNA, 23 nt, Human
cgucuccacgggcggaaccaaca

SEQ ID NO: 950262 - RNA, 19 nt, Human
cuaaagcucagccgggcug

SEQ ID NO: 950263 - RNA, 20 nt, Human
cucaccucauguccccuccu

SEQ ID NO: 950264 - RNA, 23 nt, Human
cuccacccuccaccaacccccaa

SEQ ID NO: 950265 - RNA, 21 nt, Human
cuccagcgggcagagcugagg

SEQ ID NO: 950266 - RNA, 25 nt, Human
cucugucccaggccugcccuggagc

SEQ ID NO: 950267 - RNA, 24 nt, Human
gaagaggcgcacccuucugcacuc

SEQ ID NO: 950268 - RNA, 19 nt, Human
gaaggaaggaaggagagag

SEQ ID NO: 950269 - RNA, 21 nt, Human
gaccccccgcugccccccgcc

SEQ ID NO: 950270 - RNA, 19 nt, Human
gacgggguccugagacaac

SEQ ID NO: 950271 - RNA, 23 nt, Human
gagacaacucacucugccacccc

SEQ ID NO: 950272 - RNA, 18 nt, Human
gaguuggggaaggaagga

SEQ ID NO: 950273 - RNA, 24 nt, Human
gaucacuuccuucuucccuuccac

SEQ ID NO: 950274 - RNA, 22 nt, Human
gcaagaagaggcugccauggug

SEQ ID NO: 950275 - RNA, 25 nt, Human
gcagcagacaguggcccgcacgggc

SEQ ID NO: 950276 - RNA, 19 nt, Human
gccacugccccccccaggc

SEQ ID NO: 950277 - RNA, 19 nt, Human
gcccguccagccgccaggc

SEQ ID NO: 950278 - RNA, 25 nt, Human
gcccuggaugccccauagcagcccu

SEQ ID NO: 950279 - RNA, 22 nt, Human
gccgagcugcgccgcgcugcgc

SEQ ID NO: 950280 - RNA, 24 nt, Human
gccgcgcugcgcucccgaccggcg

SEQ ID NO: 950281 - RNA, 19 nt, Human
gcgcucggggcgcacggcg

SEQ ID NO: 950282 - RNA, 20 nt, Human
gcggaaccaacaaaagcaag

SEQ ID NO: 950283 - RNA, 20 nt, Human
gcggccaggggccgcgggaa

SEQ ID NO: 950284 - RNA, 25 nt, Human
ggagaccccccgcugccccccgccc

SEQ ID NO: 950285 - RNA, 18 nt, Human
ggaguguggagaggcagg

SEQ ID NO: 950286 - RNA, 23 nt, Human
ggauaccucucaccucauguccc

SEQ ID NO: 950287 - RNA, 19 nt, Human
ggcagccaggggcugcaga

SEQ ID NO: 950288 - RNA, 23 nt, Human
ggccaggggccgcgggaagcccg

SEQ ID NO: 950289 - RNA, 20 nt, Human
ggcggaaccaacaaaagcaa

SEQ ID NO: 950290 - RNA, 18 nt, Human
ggcugcagagggucugug

SEQ ID NO: 950291 - RNA, 23 nt, Human
ggcugcgcucauggggggcggcg

SEQ ID NO: 950292 - RNA, 18 nt, Human
gggcagagcugagggcca

SEQ ID NO: 950293 - RNA, 18 nt, Human
gggcgcaggcggaaugcc

SEQ ID NO: 950294 - RNA, 22 nt, Human
gggggcggcggggagcgcgcgg

SEQ ID NO: 950295 - RNA, 18 nt, Human
gugaaggugacaaugcca

SEQ ID NO: 950296 - RNA, 23 nt, Human
uaaagagaagccaucucuccgcu

SEQ ID NO: 950297 - RNA, 22 nt, Human
uagcaaaacaauuacaagaaaa

SEQ ID NO: 950298 - RNA, 24 nt, Human
uagcuaccuuuauucucugagccu

SEQ ID NO: 950299 - RNA, 22 nt, Human
uccaccaacccccaagacaggc

SEQ ID NO: 950300 - RNA, 21 nt, Human
uccacccuccaccaaccccca

SEQ ID NO: 950301 - RNA, 24 nt, Human
uccacccuccaccaacccccaaga

SEQ ID NO: 950302 - RNA, 19 nt, Human
uccagccgccaggcccgac

SEQ ID NO: 950303 - RNA, 23 nt, Human
uccagccgccaggcccgaccacu

SEQ ID NO: 950304 - RNA, 26 nt, Human
ucccaggccugcccuggagcgccugc

SEQ ID NO: 950305 - RNA, 20 nt, Human
ucccgccgugcgcgccgagc

SEQ ID NO: 950306 - RNA, 25 nt, Human
ucucaccucauguccccuccuccag

SEQ ID NO: 950307 - RNA, 26 nt, Human
ucuccacgggcggaaccaacaaaagc

SEQ ID NO: 950308 - RNA, 21 nt, Human
ucugaaauuaucuuaguagca

SEQ ID NO: 950309 - RNA, 19 nt, Human
ugacgggguccugagacaa

SEQ ID NO: 950310 - RNA, 18 nt, Human
ugaggggccuccugucug

SEQ ID NO: 950311 - RNA, 19 nt, Human
ugcaagaagaggcugccau

SEQ ID NO: 950312 - RNA, 21 nt, Human
ugcagagggucugugacaccc

SEQ ID NO: 950313 - RNA, 22 nt, Human
ugcccgagcggucuucggaggc

SEQ ID NO: 950314 - RNA, 18 nt, Human
ugcccuggagcgccugca

SEQ ID NO: 950315 - RNA, 29 nt, Human
ugcccuggagcgccugcacgccggagucg

SEQ ID NO: 950316 - RNA, 19 nt, Human
ugccuccacccuccaccaa

SEQ ID NO: 950317 - RNA, 19 nt, Human
uggaaaggggccuuuggcc

SEQ ID NO: 950318 - RNA, 19 nt, Human
uggaugccccauagcagcc

SEQ ID NO: 950319 - RNA, 21 nt, Human
uggcacacagcagguggugcg

SEQ ID NO: 950320 - RNA, 20 nt, Human
uggccuggcagcucugucug

SEQ ID NO: 950321 - RNA, 21 nt, Human
ugucccaggccugcccuggag

SEQ ID NO: 950322 - RNA, 19 nt, Human
ugucccagggcgcaggcgg

SEQ ID NO: 950323 - RNA, 29 nt, Human
aaaaggcagaacaagagaacagugggcac

SEQ ID NO: 950324 - RNA, 27 nt, Human
aaagaaaaaaagcuauauacauaaggg

SEQ ID NO: 950325 - RNA, 21 nt, Human
aaagaaacuuuuacagauaca

SEQ ID NO: 950326 - RNA, 29 nt, Human
aacauuuuuauuuuuucaagggggggccc

SEQ ID NO: 950327 - RNA, 23 nt, Human
aacccaaaaauauauuucagagc

SEQ ID NO: 950328 - RNA, 19 nt, Human
aaccuauuucugcauuucc

SEQ ID NO: 950329 - RNA, 21 nt, Human
aagaaaaaaagcuauauacau

SEQ ID NO: 950330 - RNA, 25 nt, Human
aagagauugcugcugcugcugcugc

SEQ ID NO: 950331 - RNA, 23 nt, Human
aaucucccuuucuugccaauuga

SEQ ID NO: 950332 - RNA, 25 nt, Human
aaugcaagaugagaugcuaaccaaa

SEQ ID NO: 950333 - RNA, 27 nt, Human
acacaccagaacacauaguauuuacaa

SEQ ID NO: 950334 - RNA, 18 nt, Human
agaaacugcucaaccauc

SEQ ID NO: 950335 - RNA, 20 nt, Human
agacaaaaccuauuucugca

SEQ ID NO: 950336 - RNA, 20 nt, Human
agagcucacagagcuuaaaa

SEQ ID NO: 950337 - RNA, 19 nt, Human
aggccgcggaaccgcccag

SEQ ID NO: 950338 - RNA, 23 nt, Human
aggcuucugaaacauuaaaaaca

SEQ ID NO: 950339 - RNA, 18 nt, Human
augcaaccagacaaaacc

SEQ ID NO: 950340 - RNA, 23 nt, Human
caagaaagaaaaaaagcuauaua

SEQ ID NO: 950341 - RNA, 24 nt, Human
cacacugaaguaacccaaaaauau

SEQ ID NO: 950342 - RNA, 20 nt, Human
cacagagcuuaaaaagagca

SEQ ID NO: 950343 - RNA, 18 nt, Human
cagaaagcacauuuguuc

SEQ ID NO: 950344 - RNA, 24 nt, Human
caguagauccuugccucuuuauuu

SEQ ID NO: 950345 - RNA, 22 nt, Human
caugaacauuuuaaaaggcaga

SEQ ID NO: 950346 - RNA, 23 nt, Human
cauuuguucuccuagagcuauuc

SEQ ID NO: 950347 - RNA, 25 nt, Human
ccaaacagcccuuuagcugucuugu

SEQ ID NO: 950348 - RNA, 21 nt, Human
ccagaacacauaguauuuaca

SEQ ID NO: 950349 - RNA, 21 nt, Human
cccaaaaauauauuucagagc

SEQ ID NO: 950350 - RNA, 18 nt, Human
ccgccgccgccgcuucug

SEQ ID NO: 950351 - RNA, 21 nt, Human
ccuaccagacucucacguuua

SEQ ID NO: 950352 - RNA, 23 nt, Human
cgcuucuguugcuacuguuaagc

SEQ ID NO: 950353 - RNA, 19 nt, Human
cucaagaugaauucucaag

SEQ ID NO: 950354 - RNA, 21 nt, Human
cucaagaugaauucucaagaa

SEQ ID NO: 950355 - RNA, 27 nt, Human
cugcugcugcugccgccgccgccgcuu

SEQ ID NO: 950356 - RNA, 22 nt, Human
cuucuguugcuacuguuaagcc

SEQ ID NO: 950357 - RNA, 19 nt, Human
gaugaauucucaagaaaga

SEQ ID NO: 950358 - RNA, 20 nt, Human
gcugcugccgccgccgccgc

SEQ ID NO: 950359 - RNA, 22 nt, Human
gcugcugcugccgccgccgccg

SEQ ID NO: 950360 - RNA, 22 nt, Human
gcugcugcugcugccgccgccg

SEQ ID NO: 950361 - RNA, 22 nt, Human
ggaagagauugcugcugcugcu

SEQ ID NO: 950362 - RNA, 20 nt, Human
gguaacaggaaauugcauac

SEQ ID NO: 950363 - RNA, 20 nt, Human
uaaaaggcagaacaagagaa

SEQ ID NO: 950364 - RNA, 23 nt, Human
uaaaaggcagaacaagagaacag

SEQ ID NO: 950365 - RNA, 22 nt, Human
uaaauguguauuucagaaacug

SEQ ID NO: 950366 - RNA, 20 nt, Human
uaagccccuaggcccaggcc

SEQ ID NO: 950367 - RNA, 19 nt, Human
uacaaagaaacuuuuacag

SEQ ID NO: 950368 - RNA, 18 nt, Human
uauaugcaaccagacaaa

SEQ ID NO: 950369 - RNA, 21 nt, Human
ucucagacugcuuugccuacc

SEQ ID NO: 950370 - RNA, 23 nt, Human
ucucuaaacgccuguuccggccu

SEQ ID NO: 950371 - RNA, 21 nt, Human
ugcugcugcugcugcugcugc

SEQ ID NO: 950372 - RNA, 21 nt, Human
ugcugcugcugcugcugcugc

SEQ ID NO: 950373 - RNA, 21 nt, Human
ugcuuugccuaccagacucuc

SEQ ID NO: 950374 - RNA, 28 nt, Human
uggaauuuuaagacacaccagaacacau

SEQ ID NO: 950375 - RNA, 21 nt, Human
uguaaaaaguuaggcuucuga

SEQ ID NO: 950376 - RNA, 19 nt, Human
uugccaauugaucagaaug

SEQ ID NO: 950377 - RNA, 18 nt, Human
uugcuacuguuaagcccc

SEQ ID NO: 950378 - RNA, 19 nt, Human
uugucaaacacacugaagu

SEQ ID NO: 950379 - RNA, 20 nt, Human
uuuaaaaggcagaacaagag

SEQ ID NO: 950380 - RNA, 21 nt, Human
aaaaaagaaaaaaaauaaaag

SEQ ID NO: 950381 - RNA, 20 nt, Human
aaaccaacagcacuucugca

SEQ ID NO: 950382 - RNA, 20 nt, Human
aaccaacagcacuucugcag

SEQ ID NO: 950383 - RNA, 22 nt, Human
aaccaacagcacuucugcagcc

SEQ ID NO: 950384 - RNA, 22 nt, Human
aagcaaaaaagaaaaaaaauaa

SEQ ID NO: 950385 - RNA, 28 nt, Human
aagcaaaaaagaaaaaaaauaaaagcaa

SEQ ID NO: 950386 - RNA, 27 nt, Human
aaguacaaacacaaugucaucuaaaau

SEQ ID NO: 950387 - RNA, 20 nt, Human
acaaagguauaaaacucaaa

SEQ ID NO: 950388 - RNA, 23 nt, Human
acaaugaaagcaaaaaagaaaaa

SEQ ID NO: 950389 - RNA, 19 nt, Human
acagaaccacgagcagcaa

SEQ ID NO: 950390 - RNA, 18 nt, Human
acagacagaaccacgagc

SEQ ID NO: 950391 - RNA, 21 nt, Human
accaugaacggcaggcacaac

SEQ ID NO: 950392 - RNA, 24 nt, Human
acgccaaagagcagcaacuccccc

SEQ ID NO: 950393 - RNA, 22 nt, Human
agaaaaaaaauaaaagcaaugu

SEQ ID NO: 950394 - RNA, 22 nt, Human
agaaaccggaaacggaugagcu

SEQ ID NO: 950395 - RNA, 20 nt, Human
agaaccacgagcagcaacua

SEQ ID NO: 950396 - RNA, 22 nt, Human
agacagaaccacgagcagcaac

SEQ ID NO: 950397 - RNA, 18 nt, Human
agcaaaaaagaaaaaaaa

SEQ ID NO: 950398 - RNA, 19 nt, Human
agcaacagcaagggcacgg

SEQ ID NO: 950399 - RNA, 21 nt, Human
agcaucuucccgccgccgcca

SEQ ID NO: 950400 - RNA, 18 nt, Human
agccucacuuuucccugg

SEQ ID NO: 950401 - RNA, 23 nt, Human
agcugcacuaaagccuggggcag

SEQ ID NO: 950402 - RNA, 26 nt, Human
agcugggugggguauaaguuacaggg

SEQ ID NO: 950403 - RNA, 23 nt, Human
agggcagggccuggcguuggggg

SEQ ID NO: 950404 - RNA, 20 nt, Human
agggccccaagggcggaggc

SEQ ID NO: 950405 - RNA, 18 nt, Human
aggucaucggggaaggga

SEQ ID NO: 950406 - RNA, 25 nt, Human
aguacaguggugggguggucaggug

SEQ ID NO: 950407 - RNA, 21 nt, Human
agugguggggugcggugugug

SEQ ID NO: 950408 - RNA, 23 nt, Human
aucuuugagggggugugacccuu

SEQ ID NO: 950409 - RNA, 21 nt, Human
caacaaaguacaaacacaaug

SEQ ID NO: 950410 - RNA, 30 nt, Human
caacacaauucuuccacucuacacaacaag

SEQ ID NO: 950411 - RNA, 22 nt, Human
cacacagcauccaaaccaacag

SEQ ID NO: 950412 - RNA, 22 nt, Human
cacugaacugacucuuagaaac

SEQ ID NO: 950413 - RNA, 18 nt, Human
cagaaccacgagcagcaa

SEQ ID NO: 950414 - RNA, 19 nt, Human
cagaaccacgagcagcaac

SEQ ID NO: 950415 - RNA, 22 nt, Human
cauguugccaagauaaccugaa

SEQ ID NO: 950416 - RNA, 18 nt, Human
ccacgagcagcaacuacc

SEQ ID NO: 950417 - RNA, 21 nt, Human
ccaggccuaacaggguuggca

SEQ ID NO: 950418 - RNA, 23 nt, Human
ccccaagagccucacuuuucccu

SEQ ID NO: 950419 - RNA, 20 nt, Human
cccgccgccgccaccuccuc

SEQ ID NO: 950420 - RNA, 24 nt, Human
ccgccgccaccuccuccugcuuuc

SEQ ID NO: 950421 - RNA, 28 nt, Human
ccgccgccaccuccuccugcuuuccuca

SEQ ID NO: 950422 - RNA, 18 nt, Human
ccugcaaauccugccagg

SEQ ID NO: 950423 - RNA, 22 nt, Human
ccuggcguugggggcuuggguc

SEQ ID NO: 950424 - RNA, 24 nt, Human
cgccaaagagcagcaacucccccg

SEQ ID NO: 950425 - RNA, 20 nt, Human
cgccgaggccggcgccgcuc

SEQ ID NO: 950426 - RNA, 21 nt, Human
cgccgccgccaccuccuccug

SEQ ID NO: 950427 - RNA, 22 nt, Human
cgcuggucugagucccgcgggc

SEQ ID NO: 950428 - RNA, 22 nt, Human
cggacagacagaaccacgagca

SEQ ID NO: 950429 - RNA, 19 nt, Human
cggggcccggcuggcagag

SEQ ID NO: 950430 - RNA, 25 nt, Human
cucacuuuucccugguggcucugcc

SEQ ID NO: 950431 - RNA, 20 nt, Human
cugaacucucacuucuaacu

SEQ ID NO: 950432 - RNA, 22 nt, Human
cugacuguacaaugaaagcaaa

SEQ ID NO: 950433 - RNA, 21 nt, Human
cugccagagucaaggguuugc

SEQ ID NO: 950434 - RNA, 18 nt, Human
cugcccagcaacagcaag

SEQ ID NO: 950435 - RNA, 22 nt, Human
cugccugcaaauccugccagag

SEQ ID NO: 950436 - RNA, 19 nt, Human
cugcugccugcaaauccug

SEQ ID NO: 950437 - RNA, 23 nt, Human
cuucccgccgccgccaccuccuc

SEQ ID NO: 950438 - RNA, 24 nt, Human
cuugacaggcacacagcauccaaa

SEQ ID NO: 950439 - RNA, 23 nt, Human
cuugggucuccggcccggcggga

SEQ ID NO: 950440 - RNA, 18 nt, Human
gacagaaccacgagcagc

SEQ ID NO: 950441 - RNA, 21 nt, Human
gagcagcaucuucccgccgcc

SEQ ID NO: 950442 - RNA, 22 nt, Human
gagggggugugacccuugaggu

SEQ ID NO: 950443 - RNA, 24 nt, Human
gaucuuugagggggugugacccuu

SEQ ID NO: 950444 - RNA, 23 nt, Human
gcaaauccugccagagucaaggg

SEQ ID NO: 950445 - RNA, 23 nt, Human
gcacacagcauccaaaccaacag

SEQ ID NO: 950446 - RNA, 19 nt, Human
gccgccgccaccuccuccu

SEQ ID NO: 950447 - RNA, 22 nt, Human
gccucacuuaucugaacucuca

SEQ ID NO: 950448 - RNA, 22 nt, Human
gccucacuuaucugaacucuca

SEQ ID NO: 950449 - RNA, 21 nt, Human
gcggugugugcaucggugcac

SEQ ID NO: 950450 - RNA, 21 nt, Human
ggacagacagaaccacgagca

SEQ ID NO: 950451 - RNA, 19 nt, Human
ggcagcucccuuuccaaaa

SEQ ID NO: 950452 - RNA, 18 nt, Human
ggcagggccuggcguugg

SEQ ID NO: 950453 - RNA, 24 nt, Human
ggccaggccuaacaggguuggcag

SEQ ID NO: 950454 - RNA, 22 nt, Human
ggccuggccaccaucccagguc

SEQ ID NO: 950455 - RNA, 21 nt, Human
ggcggaggccgcgcuccccgc

SEQ ID NO: 950456 - RNA, 24 nt, Human
ggcuggcagaggggugcugccugc

SEQ ID NO: 950457 - RNA, 19 nt, Human
gggaagggaaaagugugcu

SEQ ID NO: 950458 - RNA, 26 nt, Human
gggcagggccuggcguugggggcuug

SEQ ID NO: 950459 - RNA, 20 nt, Human
gggcccggcuggcagagggg

SEQ ID NO: 950460 - RNA, 23 nt, Human
gggccuggcguugggggcuuggg

SEQ ID NO: 950461 - RNA, 21 nt, Human
guacaaugaaagcaaaaaaga

SEQ ID NO: 950462 - RNA, 25 nt, Human
guacaaugaaagcaaaaaagaaaaa

SEQ ID NO: 950463 - RNA, 21 nt, Human
uaaccugaaagaccaccauga

SEQ ID NO: 950464 - RNA, 22 nt, Human
uaacuugauucugagaaacgau

SEQ ID NO: 950465 - RNA, 22 nt, Human
uaacuugauucugagaaacgau

SEQ ID NO: 950466 - RNA, 21 nt, Human
uacacaacaaaguacaaacac

SEQ ID NO: 950467 - RNA, 20 nt, Human
uaccaugggugagaggaucu

SEQ ID NO: 950468 - RNA, 23 nt, Human
uaucugaacucucacuucuaacu

SEQ ID NO: 950469 - RNA, 23 nt, Human
ucacuuaucugaacucucacuuc

SEQ ID NO: 950470 - RNA, 23 nt, Human
ucacuuaucugaacucucacuuc

SEQ ID NO: 950471 - RNA, 24 nt, Human
ucagaguacagugguggggugcgg

SEQ ID NO: 950472 - RNA, 20 nt, Human
ucccagguaagcagggucaa

SEQ ID NO: 950473 - RNA, 21 nt, Human
ucccgccgccgccaccuccuc

SEQ ID NO: 950474 - RNA, 21 nt, Human
uccggcccggcgggagggccc

SEQ ID NO: 950475 - RNA, 18 nt, Human
uccuccugcuuuccucag

SEQ ID NO: 950476 - RNA, 25 nt, Human
ucuccccuucugagguguucaaagc

SEQ ID NO: 950477 - RNA, 25 nt, Human
ucuccccuucugagguguucaaagc

SEQ ID NO: 950478 - RNA, 23 nt, Human
ucuucccgccgccgccaccuccu

SEQ ID NO: 950479 - RNA, 18 nt, Human
ugaaagaccaccaugaac

SEQ ID NO: 950480 - RNA, 22 nt, Human
ugaaagcaaaaaagaaaaaaaa

SEQ ID NO: 950481 - RNA, 22 nt, Human
ugaacugacucuuagaaaccgg

SEQ ID NO: 950482 - RNA, 18 nt, Human
ugacaaaacugagcuggg

SEQ ID NO: 950483 - RNA, 22 nt, Human
ugacaggcacacagcauccaaa

SEQ ID NO: 950484 - RNA, 21 nt, Human
ugagcugggugggguauaagu

SEQ ID NO: 950485 - RNA, 28 nt, Human
ugagcugggugggguauaaguuacaggg

SEQ ID NO: 950486 - RNA, 20 nt, Human
ugagggggugugacccuuga

SEQ ID NO: 950487 - RNA, 23 nt, Human
ugagggggugugacccuugaggu

SEQ ID NO: 950488 - RNA, 23 nt, Human
ugcaucggugcacggacagacag

SEQ ID NO: 950489 - RNA, 21 nt, Human
ugcgugaugacuccgcagagc

SEQ ID NO: 950490 - RNA, 24 nt, Human
uggggcagcucccuuuccaaaagg

SEQ ID NO: 950491 - RNA, 22 nt, Human
uggggugcggugugugcaucgg

SEQ ID NO: 950492 - RNA, 22 nt, Human
ugggucuccggcccggcgggag

SEQ ID NO: 950493 - RNA, 22 nt, Human
uguacaaugaaagcaaaaaaga

SEQ ID NO: 950494 - RNA, 23 nt, Human
uguugccaagauaaccugaaaga

SEQ ID NO: 950495 - RNA, 19 nt, Human
uuacgccaaagagcagcau

SEQ ID NO: 950496 - RNA, 22 nt, Human
uucccugguggcucugccacug

SEQ ID NO: 950497 - RNA, 22 nt, Human
uucugagaaacgaucccuaauc

SEQ ID NO: 950498 - RNA, 22 nt, Human
uucugagaaacgaucccuaauc

SEQ ID NO: 950499 - RNA, 21 nt, Human
uuuccucagccgccgaggccg

SEQ ID NO: 950500 - RNA, 19 nt, Human
uuuuuuuuuuuuuuuugca

SEQ ID NO: 950501 - RNA, 18 nt, Human
uuuuuuuuuuuuuuuuug

SEQ ID NO: 950502 - RNA, 19 nt, Human
uuuuuuuuuuuuuuuuugc

SEQ ID NO: 950503 - RNA, 22 nt, Human
uuuuuuuuuuuuuuuuugcauu

SEQ ID NO: 950504 - RNA, 27 nt, Human
uuuuuuuuuuuuuuuuuuuuuuugggg

SEQ ID NO: 950505 - RNA, 19 nt, Human
cacaguaggagcugcucaa

SEQ ID NO: 950506 - RNA, 21 nt, Human
caccuguugucacuguccucc

SEQ ID NO: 950507 - RNA, 19 nt, Human
cacuguccuccucuccagg

SEQ ID NO: 950508 - RNA, 24 nt, Human
ccaaaccgaggugaccgucgcacg

SEQ ID NO: 950509 - RNA, 21 nt, Human
ccuguggcuccuuaaggaggc

SEQ ID NO: 950510 - RNA, 21 nt, Human
cgcacgcgccgccgccaccgg

SEQ ID NO: 950511 - RNA, 22 nt, Human
cgcacgcgccgccgccaccggg

SEQ ID NO: 950512 - RNA, 20 nt, Human
cggggccgacgaaucaccug

SEQ ID NO: 950513 - RNA, 21 nt, Human
gacgaaucaccugcccuggga

SEQ ID NO: 950514 - RNA, 18 nt, Human
gcuguuuccagcuggacu

SEQ ID NO: 950515 - RNA, 22 nt, Human
guugucacuguccuccucucca

SEQ ID NO: 950516 - RNA, 23 nt, Human
ucaccuguugucacuguccuccu

SEQ ID NO: 950517 - RNA, 20 nt, Human
uccaggauuccuuuuggggc

SEQ ID NO: 950518 - RNA, 22 nt, Human
ucgcacgcgccgccgccaccgg

SEQ ID NO: 950519 - RNA, 21 nt, Human
uggggccagguaccauccugu

SEQ ID NO: 950520 - RNA, 20 nt, Human
ugucacuguccuccucucca

SEQ ID NO: 950521 - RNA, 20 nt, Human
uuacauuguggaucugggau

SEQ ID NO: 950522 - RNA, 19 nt, Human
aagagaagaacacaaugaa

SEQ ID NO: 950523 - RNA, 21 nt, Human
aauaaaucuacuuacugcgaa

SEQ ID NO: 950524 - RNA, 25 nt, Human
aauaauaugagcagagcuaaaaaga

SEQ ID NO: 950525 - RNA, 24 nt, Human
acaaaagaaauuauauacagagga

SEQ ID NO: 950526 - RNA, 26 nt, Human
accacggauacuuauucuuucuuccu

SEQ ID NO: 950527 - RNA, 24 nt, Human
agaggagaauccuuuucuuccugu

SEQ ID NO: 950528 - RNA, 22 nt, Human
agcagcuuuguaugucuccucu

SEQ ID NO: 950529 - RNA, 21 nt, Human
agcuuuguaugucuccucuca

SEQ ID NO: 950530 - RNA, 19 nt, Human
caacugaaaaccaucuaac

SEQ ID NO: 950531 - RNA, 26 nt, Human
caccauuguuccuuugcaucuuccua

SEQ ID NO: 950532 - RNA, 20 nt, Human
caccccaacugaaaaccauc

SEQ ID NO: 950533 - RNA, 22 nt, Human
cacuguacauguauuagaaaga

SEQ ID NO: 950534 - RNA, 18 nt, Human
ccaucauuauccaaucua

SEQ ID NO: 950535 - RNA, 23 nt, Human
cuggguguccccggggaggcugg

SEQ ID NO: 950536 - RNA, 22 nt, Human
gagcuuaauuacgauaauucag

SEQ ID NO: 950537 - RNA, 18 nt, Human
gaggcuggcacuccagga

SEQ ID NO: 950538 - RNA, 20 nt, Human
gaguuuuguuuucuuucuuu

SEQ ID NO: 950539 - RNA, 19 nt, Human
gauauguguggcugugugu

SEQ ID NO: 950540 - RNA, 18 nt, Human
gggaggcuggcacuccag

SEQ ID NO: 950541 - RNA, 23 nt, Human
ggggaggcuggcacuccaggauu

SEQ ID NO: 950542 - RNA, 23 nt, Human
gguucuggguguccccggggagg

SEQ ID NO: 950543 - RNA, 18 nt, Human
gugugcacuguacaugua

SEQ ID NO: 950544 - RNA, 21 nt, Human
uaaaaagagugagcuugcaua

SEQ ID NO: 950545 - RNA, 23 nt, Human
uaaaaagagugagcuugcauaga

SEQ ID NO: 950546 - RNA, 24 nt, Human
uaaaaagagugagcuugcauagca

SEQ ID NO: 950547 - RNA, 21 nt, Human
uaaauacagcucuugcaaaac

SEQ ID NO: 950548 - RNA, 25 nt, Human
uacaacagaccaauaagaacagaca

SEQ ID NO: 950549 - RNA, 22 nt, Human
uacagccaucauuauccaaucu

SEQ ID NO: 950550 - RNA, 22 nt, Human
uaccugcauacuuuaaugcaua

SEQ ID NO: 950551 - RNA, 18 nt, Human
uagaaagaugaaauaaga

SEQ ID NO: 950552 - RNA, 19 nt, Human
uagcaaugcacaaaagaaa

SEQ ID NO: 950553 - RNA, 22 nt, Human
uauaaacaugcauuuuuuucuc

SEQ ID NO: 950554 - RNA, 21 nt, Human
uauuucuacaccccaacugaa

SEQ ID NO: 950555 - RNA, 22 nt, Human
uccucuugcuuauuguaauucu

SEQ ID NO: 950556 - RNA, 18 nt, Human
ucuuuuuuauauacuccu

SEQ ID NO: 950557 - RNA, 21 nt, Human
ugagcagagcuaaaaagagug

SEQ ID NO: 950558 - RNA, 23 nt, Human
ugcacaaaagaaauuauauacag

SEQ ID NO: 950559 - RNA, 24 nt, Human
ugcaucuuccuauuucuacacccc

SEQ ID NO: 950560 - RNA, 19 nt, Human
uggcguaaacuucacuucu

SEQ ID NO: 950561 - RNA, 22 nt, Human
ugggucaauuacaaugacaggu

SEQ ID NO: 950562 - RNA, 22 nt, Human
uggguguccccggggaggcugg

SEQ ID NO: 950563 - RNA, 23 nt, Human
uguccacuuacaaggucugguuu

SEQ ID NO: 950564 - RNA, 20 nt, Human
ugugggauauguguggcugu

SEQ ID NO: 950565 - RNA, 19 nt, Human
uguuuagagucaucacuuc

SEQ ID NO: 950566 - RNA, 24 nt, Human
uucaaaaugggucaaacguauuuu

SEQ ID NO: 950567 - RNA, 22 nt, Human
uucaauuuccuuauucaaaaug

SEQ ID NO: 950568 - RNA, 19 nt, Human
uuucuuuuuuuaagcaaau

SEQ ID NO: 950569 - RNA, 23 nt, Human
uuuggcuauacauuggguggcgu

SEQ ID NO: 950570 - RNA, 21 nt, Human
uuuuguucguuuccuugggga

SEQ ID NO: 950571 - RNA, 22 nt, Human
aaacacaggccaagacccacac

SEQ ID NO: 950572 - RNA, 21 nt, Human
aaccugguggugggaguggau

SEQ ID NO: 950573 - RNA, 19 nt, Human
agaaacacaggccaagacc

SEQ ID NO: 950574 - RNA, 25 nt, Human
agagaaacacaggccaagacccaca

SEQ ID NO: 950575 - RNA, 23 nt, Human
agcagccacugcuguccuccaca

SEQ ID NO: 950576 - RNA, 21 nt, Human
agggagaacucucuggaggcu

SEQ ID NO: 950577 - RNA, 20 nt, Human
caaucguggagggagaacuc

SEQ ID NO: 950578 - RNA, 19 nt, Human
cacagaggagaaagcagug

SEQ ID NO: 950579 - RNA, 20 nt, Human
caccacagcccaggucuugu

SEQ ID NO: 950580 - RNA, 21 nt, Human
cacugcuguccuccacaaagg

SEQ ID NO: 950581 - RNA, 21 nt, Human
cagcagccacugcuguccucc

SEQ ID NO: 950582 - RNA, 18 nt, Human
cagcaggcagggcugcuc

SEQ ID NO: 950583 - RNA, 19 nt, Human
ccacacaccacagcccagg

SEQ ID NO: 950584 - RNA, 20 nt, Human
cccacacaccacagcccagg

SEQ ID NO: 950585 - RNA, 25 nt, Human
cccagccuugaacccuuuguuuggc

SEQ ID NO: 950586 - RNA, 19 nt, Human
cccagcugcagagaaacac

SEQ ID NO: 950587 - RNA, 18 nt, Human
ccucaggccaaaacaacc

SEQ ID NO: 950588 - RNA, 22 nt, Human
cgcuagacccagccuugaaccc

SEQ ID NO: 950589 - RNA, 22 nt, Human
gaagagcagcaggcagggcugc

SEQ ID NO: 950590 - RNA, 18 nt, Human
gagcagcaggcagggcug

SEQ ID NO: 950591 - RNA, 27 nt, Human
gcucccugagggcuccaggucagcuuu

SEQ ID NO: 950592 - RNA, 23 nt, Human
ggugggggaagagcagcaggcag

SEQ ID NO: 950593 - RNA, 22 nt, Human
guccugcugcucgugccgaauu

SEQ ID NO: 950594 - RNA, 22 nt, Human
gugggaguggauggcacagagg

SEQ ID NO: 950595 - RNA, 25 nt, Human
ucaguggcauucauaauuauuuucu

SEQ ID NO: 950596 - RNA, 24 nt, Human
ucccgucugggaagucucagggac

SEQ ID NO: 950597 - RNA, 23 nt, Human
ucucccagcagccacugcugucc

SEQ ID NO: 950598 - RNA, 21 nt, Human
ucucuggaggcuugggaaggu

SEQ ID NO: 950599 - RNA, 19 nt, Human
ucuuguggguggacaggag

SEQ ID NO: 950600 - RNA, 25 nt, Human
ugaccuacggucucauaccucccuu

SEQ ID NO: 950601 - RNA, 20 nt, Human
ugagguagggccucagugcc

SEQ ID NO: 950602 - RNA, 19 nt, Human
ugccucaguggcauucaua

SEQ ID NO: 950603 - RNA, 23 nt, Human
ugccucaguggcauucauaauua

SEQ ID NO: 950604 - RNA, 23 nt, Human
ugcuccucaggccaaaacaaccu

SEQ ID NO: 950605 - RNA, 19 nt, Human
uggguggacaggagaagug

SEQ ID NO: 950606 - RNA, 18 nt, Human
ugguggugggaguggaug

SEQ ID NO: 950607 - RNA, 20 nt, Human
ugguggugggaguggauggc

SEQ ID NO: 950608 - RNA, 22 nt, Human
uguccuugucccgagcacuuug

SEQ ID NO: 950609 - RNA, 19 nt, Human
uguggguggacaggagaag

SEQ ID NO: 950610 - RNA, 23 nt, Human
uguggguggacaggagaaguggu

SEQ ID NO: 950611 - RNA, 23 nt, Human
uguuuugcucccugagggcucca

SEQ ID NO: 950612 - RNA, 21 nt, Human
uugaacccuuuguuuggcaug

SEQ ID NO: 950613 - RNA, 19 nt, Human
uugcucccugagggcucca

SEQ ID NO: 950614 - RNA, 24 nt, Human
uugggaagguggaccccagcugca

SEQ ID NO: 950615 - RNA, 21 nt, Human
uuucuuaagcucauagugaca

SEQ ID NO: 950616 - RNA, 24 nt, Human
uuuuuuuuuuuuuuucaagucuuu

SEQ ID NO: 950617 - RNA, 24 nt, Human
uuuuuuuuuuuuuuuuuuuucaag

SEQ ID NO: 950618 - RNA, 23 nt, Human
cagaagaaagaagcucaucagau

SEQ ID NO: 950619 - RNA, 20 nt, Human
gaugccagaagaaagaagcu

SEQ ID NO: 950620 - RNA, 22 nt, Human
uuuaggagaaaaucacagaaaa

SEQ ID NO: 950621 - RNA, 22 nt, Human
uuuuuuuucagucuaugucuga

SEQ ID NO: 950622 - RNA, 19 nt, Human
aaaucaggauuacugagac

SEQ ID NO: 950623 - RNA, 21 nt, Human
aagaaaacacauuguuacaaa

SEQ ID NO: 950624 - RNA, 22 nt, Human
aagccuggguucuaaaucagga

SEQ ID NO: 950625 - RNA, 18 nt, Human
aaggacuucuuugcagac

SEQ ID NO: 950626 - RNA, 19 nt, Human
aaguaaggacaaacacacc

SEQ ID NO: 950627 - RNA, 24 nt, Human
acaaaaagccuggguucuaaauca

SEQ ID NO: 950628 - RNA, 18 nt, Human
acauuguuacaaaaagcc

SEQ ID NO: 950629 - RNA, 21 nt, Human
agacaaauagucucaucaaag

SEQ ID NO: 950630 - RNA, 18 nt, Human
agaccaggcagcagucgg

SEQ ID NO: 950631 - RNA, 21 nt, Human
aguaaagauucaucaccuaaa

SEQ ID NO: 950632 - RNA, 19 nt, Human
caagaaaacacauuguuac

SEQ ID NO: 950633 - RNA, 19 nt, Human
cacauuguuacaaaaagcc

SEQ ID NO: 950634 - RNA, 20 nt, Human
cagucggcuuccuccugccc

SEQ ID NO: 950635 - RNA, 23 nt, Human
ccaggcagcagucggcuuccucc

SEQ ID NO: 950636 - RNA, 21 nt, Human
ccaguccuagagacuugaaag

SEQ ID NO: 950637 - RNA, 27 nt, Human
ccuccugccccaacugccggguccuuc

SEQ ID NO: 950638 - RNA, 19 nt, Human
gaccaggcagcagucggcu

SEQ ID NO: 950639 - RNA, 25 nt, Human
ggacaaacacaccaacauauuucuu

SEQ ID NO: 950640 - RNA, 21 nt, Human
guaaagauucaucaccuaaag

SEQ ID NO: 950641 - RNA, 25 nt, Human
uaaaaguaccauaauacagacccau

SEQ ID NO: 950642 - RNA, 18 nt, Human
uaaggacaaacacaccaa

SEQ ID NO: 950643 - RNA, 24 nt, Human
uaguaaagauucaucaccuaaagu

SEQ ID NO: 950644 - RNA, 23 nt, Human
uagucucaucaaaaaagggcuaa

SEQ ID NO: 950645 - RNA, 25 nt, Human
uagucucaucaaaaaagggcuaaaa

SEQ ID NO: 950646 - RNA, 22 nt, Human
ucuaaaucaggauuacugagac

SEQ ID NO: 950647 - RNA, 18 nt, Human
uuaaagcauagaacaauu

SEQ ID NO: 950648 - RNA, 23 nt, Human
uucaucaccuaaagugguaagcu

SEQ ID NO: 950649 - RNA, 22 nt, Human
uuuggauaucugaaauauaaac

SEQ ID NO: 950650 - RNA, 25 nt, Human
aaacccucucugagccugaguuucc

SEQ ID NO: 950651 - RNA, 22 nt, Human
aagaaagcagggagaggauggg

SEQ ID NO: 950652 - RNA, 21 nt, Human
aagcaggagguaauggcaugg

SEQ ID NO: 950653 - RNA, 18 nt, Human
acacagacaggcuguggg

SEQ ID NO: 950654 - RNA, 18 nt, Human
acagacacagacaggcug

SEQ ID NO: 950655 - RNA, 23 nt, Human
acagauccuuacuuaggacacca

SEQ ID NO: 950656 - RNA, 18 nt, Human
accucaaguccugcccag

SEQ ID NO: 950657 - RNA, 18 nt, Human
accucagagguaaagaaa

SEQ ID NO: 950658 - RNA, 19 nt, Human
acucacacaggcuuacaca

SEQ ID NO: 950659 - RNA, 24 nt, Human
agacaggcugugggggaaaccaga

SEQ ID NO: 950660 - RNA, 19 nt, Human
agaggacagacacagacag

SEQ ID NO: 950661 - RNA, 18 nt, Human
agcacuauuuggucccug

SEQ ID NO: 950662 - RNA, 20 nt, Human
agcagggagaggaugggcaa

SEQ ID NO: 950663 - RNA, 21 nt, Human
aggacaccaccucccagccac

SEQ ID NO: 950664 - RNA, 24 nt, Human
aggaggauuuaagaacacagaggg

SEQ ID NO: 950665 - RNA, 18 nt, Human
aggcaaagagugagcagg

SEQ ID NO: 950666 - RNA, 22 nt, Human
agggagaggaugggcaaauagg

SEQ ID NO: 950667 - RNA, 18 nt, Human
aguaaugaaggaguggga

SEQ ID NO: 950668 - RNA, 23 nt, Human
agugagcaggaacagguucccuc

SEQ ID NO: 950669 - RNA, 22 nt, Human
auaggaacagcuccggucugca

SEQ ID NO: 950670 - RNA, 23 nt, Human
auccaaccucagagguaaagaaa

SEQ ID NO: 950671 - RNA, 25 nt, Human
auccacagggagaauccaaccucag

SEQ ID NO: 950672 - RNA, 22 nt, Human
augagaaggagaaggcaaagag

SEQ ID NO: 950673 - RNA, 20 nt, Human
augguuccagucccaacacc

SEQ ID NO: 950674 - RNA, 18 nt, Human
caaacacacccucugcuc

SEQ ID NO: 950675 - RNA, 24 nt, Human
cacacaacucacacaggcuuacac

SEQ ID NO: 950676 - RNA, 23 nt, Human
cacacacucuccuaggcaaacac

SEQ ID NO: 950677 - RNA, 21 nt, Human
cacacagcugcccacacacac

SEQ ID NO: 950678 - RNA, 20 nt, Human
cacacaggcuuacacacagc

SEQ ID NO: 950679 - RNA, 23 nt, Human
cacacauauauaagacacaggaa

SEQ ID NO: 950680 - RNA, 19 nt, Human
cacacccaccccaguuguu

SEQ ID NO: 950681 - RNA, 23 nt, Human
cacaccccaaauccaugcaacca

SEQ ID NO: 950682 - RNA, 22 nt, Human
cacagccugauaaggaagcagg

SEQ ID NO: 950683 - RNA, 18 nt, Human
cacccaccccaguuguua

SEQ ID NO: 950684 - RNA, 22 nt, Human
caccccaaauccaugcaaccau

SEQ ID NO: 950685 - RNA, 24 nt, Human
caccccaguuguuagcccaaggau

SEQ ID NO: 950686 - RNA, 19 nt, Human
caccugcucacacccaccc

SEQ ID NO: 950687 - RNA, 24 nt, Human
cacuacaugcaugcaguguccaug

SEQ ID NO: 950688 - RNA, 19 nt, Human
cagaauuauucccaggaga

SEQ ID NO: 950689 - RNA, 19 nt, Human
cagcugcccacacacacuc

SEQ ID NO: 950690 - RNA, 24 nt, Human
caggcacauuagguggaaaaaccc

SEQ ID NO: 950691 - RNA, 23 nt, Human
caguaggaagauacuaucuuccu

SEQ ID NO: 950692 - RNA, 24 nt, Human
cauagcacaccccaaauccaugca

SEQ ID NO: 950693 - RNA, 23 nt, Human
caucuuggcagggaauccucacu

SEQ ID NO: 950694 - RNA, 22 nt, Human
ccacagggagaauccaaccuca

SEQ ID NO: 950695 - RNA, 24 nt, Human
ccacugcuucugggaugacuccug

SEQ ID NO: 950696 - RNA, 22 nt, Human
cccacacacacucuccuaggca

SEQ ID NO: 950697 - RNA, 25 nt, Human
cccacggugacaaugcacccaggag

SEQ ID NO: 950698 - RNA, 19 nt, Human
cccagaauuaacacacagc

SEQ ID NO: 950699 - RNA, 21 nt, Human
ccccagaaucaaucacuccuc

SEQ ID NO: 950700 - RNA, 21 nt, Human
cccucugcucuaaguacaggg

SEQ ID NO: 950701 - RNA, 24 nt, Human
ccucauagcacaccccaaauccau

SEQ ID NO: 950702 - RNA, 19 nt, Human
ccuccaggccauuuccacc

SEQ ID NO: 950703 - RNA, 19 nt, Human
ccucucugagccugaguuu

SEQ ID NO: 950704 - RNA, 24 nt, Human
ccuuauuggguagcuacccauggu

SEQ ID NO: 950705 - RNA, 23 nt, Human
cuacugaccggacgguccuuccu

SEQ ID NO: 950706 - RNA, 25 nt, Human
cucacuuuccucccugaugaucgcc

SEQ ID NO: 950707 - RNA, 24 nt, Human
cucaugcacaccuuugcacaccuc

SEQ ID NO: 950708 - RNA, 21 nt, Human
cuccugguuucucucugccuu

SEQ ID NO: 950709 - RNA, 18 nt, Human
cucuccgcaccccagaau

SEQ ID NO: 950710 - RNA, 24 nt, Human
cucuccuaggcaaacacacccucc

SEQ ID NO: 950711 - RNA, 18 nt, Human
cugcaacauauuauucug

SEQ ID NO: 950712 - RNA, 20 nt, Human
cugcuucugggaugacuccu

SEQ ID NO: 950713 - RNA, 21 nt, Human
cuuccuacugggcugugcccc

SEQ ID NO: 950714 - RNA, 20 nt, Human
gaacauacacacaacucacc

SEQ ID NO: 950715 - RNA, 19 nt, Human
gaaggagaaggcaaagagu

SEQ ID NO: 950716 - RNA, 19 nt, Human
gagaaggagaaggcaaaga

SEQ ID NO: 950717 - RNA, 20 nt, Human
gagaaggagaaggcaaagag

SEQ ID NO: 950718 - RNA, 19 nt, Human
gagcaggaacagguucccu

SEQ ID NO: 950719 - RNA, 19 nt, Human
gaggaugggcaaauaggaa

SEQ ID NO: 950720 - RNA, 19 nt, Human
gaggcuccuuccaccugcu

SEQ ID NO: 950721 - RNA, 22 nt, Human
gcaguguccaugaaggagcaca

SEQ ID NO: 950722 - RNA, 23 nt, Human
gcccacacacacucuccuaggca

SEQ ID NO: 950723 - RNA, 20 nt, Human
gcccuagaggcuuggacccu

SEQ ID NO: 950724 - RNA, 20 nt, Human
gcuuacacacagcugcccac

SEQ ID NO: 950725 - RNA, 19 nt, Human
gguaaagaaagcagggaga

SEQ ID NO: 950726 - RNA, 21 nt, Human
gucaaacugucucuacaaagc

SEQ ID NO: 950727 - RNA, 21 nt, Human
uacugggcugugccccuagac

SEQ ID NO: 950728 - RNA, 24 nt, Human
uagcccaaggauggcccuagaggc

SEQ ID NO: 950729 - RNA, 21 nt, Human
uaggaagauacuaucuuccua

SEQ ID NO: 950730 - RNA, 21 nt, Human
uaugcccacuacaugcaugca

SEQ ID NO: 950731 - RNA, 19 nt, Human
ucaaacugucucuacaaag

SEQ ID NO: 950732 - RNA, 24 nt, Human
ucacacaggcuuacacacagcugc

SEQ ID NO: 950733 - RNA, 18 nt, Human
ucauccucuccgcacccc

SEQ ID NO: 950734 - RNA, 22 nt, Human
ucauccucuccgcaccccagaa

SEQ ID NO: 950735 - RNA, 22 nt, Human
uccaugaaggagcacacacaua

SEQ ID NO: 950736 - RNA, 20 nt, Human
uccaugcaaccaugcaucca

SEQ ID NO: 950737 - RNA, 30 nt, Human
ucccaacaccacguguacagggaucuucag

SEQ ID NO: 950738 - RNA, 19 nt, Human
ucccaaggauaacaccacc

SEQ ID NO: 950739 - RNA, 20 nt, Human
ucccagccacugcuucuggg

SEQ ID NO: 950740 - RNA, 20 nt, Human
ucccuguuuuucagcugcgu

SEQ ID NO: 950741 - RNA, 23 nt, Human
uccucauccucuccgcaccccag

SEQ ID NO: 950742 - RNA, 24 nt, Human
ucuacaaagcuccgauaccaagca

SEQ ID NO: 950743 - RNA, 18 nt, Human
ucuccagagagcagaauu

SEQ ID NO: 950744 - RNA, 23 nt, Human
ucugcaacauauuauucuggccc

SEQ ID NO: 950745 - RNA, 18 nt, Human
ugaaggagugggauuggu

SEQ ID NO: 950746 - RNA, 19 nt, Human
ugaaggagugggauuggug

SEQ ID NO: 950747 - RNA, 20 nt, Human
ugaccggacgguccuuccuu

SEQ ID NO: 950748 - RNA, 21 nt, Human
ugccuacugaccggacggucc

SEQ ID NO: 950749 - RNA, 21 nt, Human
ugcuauaauaguuuuuugggg

SEQ ID NO: 950750 - RNA, 22 nt, Human
uggcagggaauccucacuuucc

SEQ ID NO: 950751 - RNA, 22 nt, Human
uggccacccacggugacaaugc

SEQ ID NO: 950752 - RNA, 18 nt, Human
uggccaggaguaaugaag

SEQ ID NO: 950753 - RNA, 18 nt, Human
ugugguaggcagggaagc

SEQ ID NO: 950754 - RNA, 24 nt, Human
uuaacacacagccugauaaggaag

SEQ ID NO: 950755 - RNA, 22 nt, Human
uucagacaggaggauuuaagaa

SEQ ID NO: 950756 - RNA, 18 nt, Human
uuccucauccucuccgca

SEQ ID NO: 950757 - RNA, 23 nt, Human
uuccucauccucuccgcacccca

SEQ ID NO: 950758 - RNA, 27 nt, Human
uuggggcagaaggauugcaggauccac

SEQ ID NO: 950759 - RNA, 19 nt, Human
uuuuuuuuuuuuuuuuuaa

SEQ ID NO: 950760 - RNA, 24 nt, Human
aaauugcugggauuacaggcauga

SEQ ID NO: 950761 - RNA, 22 nt, Human
aacacccuccccuuuuucucug

SEQ ID NO: 950762 - RNA, 24 nt, Human
aacagcagccauggccuguccccc

SEQ ID NO: 950763 - RNA, 27 nt, Human
aagcgaaaagacagagaaaggggaccc

SEQ ID NO: 950764 - RNA, 20 nt, Human
aaggaccuguccaaggcugc

SEQ ID NO: 950765 - RNA, 20 nt, Human
aagucuuugagggaaagaga

SEQ ID NO: 950766 - RNA, 22 nt, Human
acagcacagcagcuauccacag

SEQ ID NO: 950767 - RNA, 19 nt, Human
acaggcacccgccaccacg

SEQ ID NO: 950768 - RNA, 18 nt, Human
accaugagugcuacaaag

SEQ ID NO: 950769 - RNA, 21 nt, Human
acccacugccugaggucauuu

SEQ ID NO: 950770 - RNA, 24 nt, Human
acccaggcugcagugcaauggugu

SEQ ID NO: 950771 - RNA, 22 nt, Human
acccugccccuaacucuucaac

SEQ ID NO: 950772 - RNA, 20 nt, Human
acggcauggaaaugucagcc

SEQ ID NO: 950773 - RNA, 19 nt, Human
acucaggacagcacagcag

SEQ ID NO: 950774 - RNA, 18 nt, Human
acucuguagcccaggcug

SEQ ID NO: 950775 - RNA, 22 nt, Human
acucuguagcccaggcuggagu

SEQ ID NO: 950776 - RNA, 20 nt, Human
acugcaaacugugccuccug

SEQ ID NO: 950777 - RNA, 22 nt, Human
acuggggggggccuggugccag

SEQ ID NO: 950778 - RNA, 23 nt, Human
agaaagccucaaagucuaccuga

SEQ ID NO: 950779 - RNA, 20 nt, Human
agaagcaugccaccaugccc

SEQ ID NO: 950780 - RNA, 24 nt, Human
agacagagaaaggcagggugggga

SEQ ID NO: 950781 - RNA, 22 nt, Human
agagaaggaagccaaggcucug

SEQ ID NO: 950782 - RNA, 19 nt, Human
agagaugggguuucaccgu

SEQ ID NO: 950783 - RNA, 21 nt, Human
agagugcugggauuauaggug

SEQ ID NO: 950784 - RNA, 24 nt, Human
agagugcugggauuauagguguga

SEQ ID NO: 950785 - RNA, 18 nt, Human
agccuccagacuagcugg

SEQ ID NO: 950786 - RNA, 18 nt, Human
agcuccgccuccuggguu

SEQ ID NO: 950787 - RNA, 23 nt, Human
aggaagccaaggcucugaggggu

SEQ ID NO: 950788 - RNA, 21 nt, Human
aggaaggcgugugggaccagg

SEQ ID NO: 950789 - RNA, 25 nt, Human
aggcaggguggggaagaggaagaca

SEQ ID NO: 950790 - RNA, 28 nt, Human
aggcaggguggggaagaggaagacauuu

SEQ ID NO: 950791 - RNA, 25 nt, Human
aggcuggagugcaguggcacgaucu

SEQ ID NO: 950792 - RNA, 20 nt, Human
agggaggcggaggccccugg

SEQ ID NO: 950793 - RNA, 24 nt, Human
agggaugggguuucauuauguugg

SEQ ID NO: 950794 - RNA, 21 nt, Human
aggugcacaugugaaaugacc

SEQ ID NO: 950795 - RNA, 21 nt, Human
aggugugagccaccgcgccca

SEQ ID NO: 950796 - RNA, 18 nt, Human
aguagcugggauuacaga

SEQ ID NO: 950797 - RNA, 21 nt, Human
agugcaauggugugaucucag

SEQ ID NO: 950798 - RNA, 24 nt, Human
agugcaauggugugaucucagcuc

SEQ ID NO: 950799 - RNA, 21 nt, Human
agugcaguggcacgaucucag

SEQ ID NO: 950800 - RNA, 23 nt, Human
agugcaguggcacgaucucagcu

SEQ ID NO: 950801 - RNA, 24 nt, Human
agugcaguggcacgaucucagcuc

SEQ ID NO: 950802 - RNA, 22 nt, Human
agugcugggauuauagguguga

SEQ ID NO: 950803 - RNA, 20 nt, Human
aguguaauggcgcgaucucg

SEQ ID NO: 950804 - RNA, 24 nt, Human
aguguaauggcgcgaucucggcuc

SEQ ID NO: 950805 - RNA, 20 nt, Human
aguucccacacuccaaccuc

SEQ ID NO: 950806 - RNA, 23 nt, Human
auauuuuuuuucuuugagaugga

SEQ ID NO: 950807 - RNA, 19 nt, Human
auccacccgccuuggccuc

SEQ ID NO: 950808 - RNA, 24 nt, Human
auccugaccucgugauccacccgc

SEQ ID NO: 950809 - RNA, 24 nt, Human
augauccacccgccuuggccuccc

SEQ ID NO: 950810 - RNA, 19 nt, Human
augcuaagacugagcuucu

SEQ ID NO: 950811 - RNA, 20 nt, Human
augggguuucaccauguuag

SEQ ID NO: 950812 - RNA, 24 nt, Human
augggguuucaccauguuagccag

SEQ ID NO: 950813 - RNA, 25 nt, Human
augggguuucaccauguuagccagg

SEQ ID NO: 950814 - RNA, 18 nt, Human
augggguuucaccguguu

SEQ ID NO: 950815 - RNA, 20 nt, Human
augggguuucaccguguuag

SEQ ID NO: 950816 - RNA, 24 nt, Human
augggguuucaccguguuagccag

SEQ ID NO: 950817 - RNA, 24 nt, Human
augggguuucauuauguuggccag

SEQ ID NO: 950818 - RNA, 23 nt, Human
augguggagaaccuacagggacc

SEQ ID NO: 950819 - RNA, 19 nt, Human
auguuggccaggcuggucu

SEQ ID NO: 950820 - RNA, 18 nt, Human
auucuccugccucagccu

SEQ ID NO: 950821 - RNA, 22 nt, Human
caacacccugcaccuccuuccc

SEQ ID NO: 950822 - RNA, 21 nt, Human
caacagcagccauggccuguc

SEQ ID NO: 950823 - RNA, 21 nt, Human
caacaguucccacacuccaac

SEQ ID NO: 950824 - RNA, 21 nt, Human
caacucaggacagcacagcag

SEQ ID NO: 950825 - RNA, 22 nt, Human
caagugauucuccugccucagc

SEQ ID NO: 950826 - RNA, 19 nt, Human
caagugauucucuaaucuc

SEQ ID NO: 950827 - RNA, 22 nt, Human
caagugauucucuaaucucggc

SEQ ID NO: 950828 - RNA, 18 nt, Human
cacagacacugucuugca

SEQ ID NO: 950829 - RNA, 19 nt, Human
caccaacacccugcaccuc

SEQ ID NO: 950830 - RNA, 20 nt, Human
caccacccugcccucaugug

SEQ ID NO: 950831 - RNA, 24 nt, Human
caccaugcccggcuaauuuuugua

SEQ ID NO: 950832 - RNA, 18 nt, Human
caccauguuagccagguu

SEQ ID NO: 950833 - RNA, 22 nt, Human
caccauguuagccagguugauc

SEQ ID NO: 950834 - RNA, 24 nt, Human
caccauguuagccagguugaucuc

SEQ ID NO: 950835 - RNA, 20 nt, Human
cacccgccucggccucccag

SEQ ID NO: 950836 - RNA, 23 nt, Human
cacccugcaccuccuucccacac

SEQ ID NO: 950837 - RNA, 24 nt, Human
caccguguuagccaggauggucuc

SEQ ID NO: 950838 - RNA, 23 nt, Human
caccuccuucccacaccugagcc

SEQ ID NO: 950839 - RNA, 24 nt, Human
caccucggccucccaaauugcugg

SEQ ID NO: 950840 - RNA, 19 nt, Human
caccugguaugugccaggc

SEQ ID NO: 950841 - RNA, 18 nt, Human
caccuucucagcccuccu

SEQ ID NO: 950842 - RNA, 19 nt, Human
cacgccagcccaggccagc

SEQ ID NO: 950843 - RNA, 24 nt, Human
cacucuguagcccaggcuggagug

SEQ ID NO: 950844 - RNA, 23 nt, Human
cacugcaaacugugccuccuggg

SEQ ID NO: 950845 - RNA, 18 nt, Human
cacuggccccguccccuc

SEQ ID NO: 950846 - RNA, 21 nt, Human
cagaagcaugccaccaugccc

SEQ ID NO: 950847 - RNA, 23 nt, Human
cagagcccaggcuauuccgagcc

SEQ ID NO: 950848 - RNA, 22 nt, Human
cagagugcugggauuauaggug

SEQ ID NO: 950849 - RNA, 24 nt, Human
cagagugcugggauuauaggugug

SEQ ID NO: 950850 - RNA, 19 nt, Human
cagcaucucacacccacug

SEQ ID NO: 950851 - RNA, 18 nt, Human
cagccacaggaccagcag

SEQ ID NO: 950852 - RNA, 20 nt, Human
cagccauggccuguccccaa

SEQ ID NO: 950853 - RNA, 21 nt, Human
caggaaauguggggcaggagg

SEQ ID NO: 950854 - RNA, 26 nt, Human
caggaccagcagccacaggaccagca

SEQ ID NO: 950855 - RNA, 20 nt, Human
caggcugggaggucccugag

SEQ ID NO: 950856 - RNA, 20 nt, Human
cagggaugggguuucauuau

SEQ ID NO: 950857 - RNA, 20 nt, Human
cagguuaucaagcacuuucc

SEQ ID NO: 950858 - RNA, 21 nt, Human
cagguugaucucaaacuccug

SEQ ID NO: 950859 - RNA, 22 nt, Human
cagugcucaauaaauaccuucc

SEQ ID NO: 950860 - RNA, 22 nt, Human
cauaaagucuuugagggaaaga

SEQ ID NO: 950861 - RNA, 18 nt, Human
cauacccaaccccaagcu

SEQ ID NO: 950862 - RNA, 22 nt, Human
caugccauucuccugccucagc

SEQ ID NO: 950863 - RNA, 20 nt, Human
cauguugggcaaacugaguu

SEQ ID NO: 950864 - RNA, 19 nt, Human
cauuauguuggccaggcug

SEQ ID NO: 950865 - RNA, 24 nt, Human
cauuauguuggccaggcuggucuu

SEQ ID NO: 950866 - RNA, 23 nt, Human
ccaaauugcugggauuacaggca

SEQ ID NO: 950867 - RNA, 24 nt, Human
ccaaauugcugggauuacaggcau

SEQ ID NO: 950868 - RNA, 26 nt, Human
ccaacacccugcaccuccuucccaca

SEQ ID NO: 950869 - RNA, 20 nt, Human
ccaaccaaggcugccuuggg

SEQ ID NO: 950870 - RNA, 25 nt, Human
ccaaccccaagcucagugcuuggcc

SEQ ID NO: 950871 - RNA, 18 nt, Human
ccaaugugcugggauuac

SEQ ID NO: 950872 - RNA, 24 nt, Human
ccaaugugcugggauuacuggcgu

SEQ ID NO: 950873 - RNA, 20 nt, Human
ccaccgcgcccagcuaauuu

SEQ ID NO: 950874 - RNA, 21 nt, Human
ccacuagccuuccuuucucag

SEQ ID NO: 950875 - RNA, 21 nt, Human
ccacugcauuuccugcugggu

SEQ ID NO: 950876 - RNA, 24 nt, Human
ccagacuagcugggacuacaggca

SEQ ID NO: 950877 - RNA, 21 nt, Human
ccagagugcugggauuauagg

SEQ ID NO: 950878 - RNA, 24 nt, Human
ccagagugcugggauuauaggugu

SEQ ID NO: 950879 - RNA, 20 nt, Human
ccaggacccccagcucugcc

SEQ ID NO: 950880 - RNA, 24 nt, Human
cccaaauugcugggauuacaggca

SEQ ID NO: 950881 - RNA, 19 nt, Human
cccacaaaauggcagguac

SEQ ID NO: 950882 - RNA, 21 nt, Human
cccacacuccaaccuccaggc

SEQ ID NO: 950883 - RNA, 22 nt, Human
cccacacuccaaccuccaggcu

SEQ ID NO: 950884 - RNA, 21 nt, Human
cccacacucugagcuccucca

SEQ ID NO: 950885 - RNA, 21 nt, Human
cccacgaugccagggacagcu

SEQ ID NO: 950886 - RNA, 20 nt, Human
cccagacuguguccuggcca

SEQ ID NO: 950887 - RNA, 22 nt, Human
ccccugcaaaagagaaggaagc

SEQ ID NO: 950888 - RNA, 19 nt, Human
cccguccccuccccacucu

SEQ ID NO: 950889 - RNA, 19 nt, Human
cccucgguccaggcgcccu

SEQ ID NO: 950890 - RNA, 20 nt, Human
cccuguccugaacacccucc

SEQ ID NO: 950891 - RNA, 25 nt, Human
ccucacccccccugggaugagccag

SEQ ID NO: 950892 - RNA, 18 nt, Human
ccucauguguccuagggc

SEQ ID NO: 950893 - RNA, 24 nt, Human
ccuccuggguucaagugauucucc

SEQ ID NO: 950894 - RNA, 18 nt, Human
ccugaacacccuccccuu

SEQ ID NO: 950895 - RNA, 20 nt, Human
ccugaccucgugauccaccc

SEQ ID NO: 950896 - RNA, 22 nt, Human
ccugacuucaaaugauccaccc

SEQ ID NO: 950897 - RNA, 19 nt, Human
ccugaguagcugggauuac

SEQ ID NO: 950898 - RNA, 22 nt, Human
ccugccaggcucacuguuccug

SEQ ID NO: 950899 - RNA, 19 nt, Human
ccugccucacccccccugg

SEQ ID NO: 950900 - RNA, 24 nt, Human
ccugccucagccucccaaguagcu

SEQ ID NO: 950901 - RNA, 18 nt, Human
ccugcuagauccugccca

SEQ ID NO: 950902 - RNA, 23 nt, Human
ccuggguucaagugauucuccuc

SEQ ID NO: 950903 - RNA, 23 nt, Human
ccuggguucaagugauucuccug

SEQ ID NO: 950904 - RNA, 19 nt, Human
ccuuggcccuggagagcug

SEQ ID NO: 950905 - RNA, 20 nt, Human
cgaaaagacagagaaaggca

SEQ ID NO: 950906 - RNA, 24 nt, Human
cgccucggccucccagagugcugg

SEQ ID NO: 950907 - RNA, 20 nt, Human
cggccuccugaguagcuggg

SEQ ID NO: 950908 - RNA, 24 nt, Human
cgugagccaccgugcccggccugu

SEQ ID NO: 950909 - RNA, 24 nt, Human
cucacugcaaacugugccuccugg

SEQ ID NO: 950910 - RNA, 24 nt, Human
cucacuguaagcuccgccuccugg

SEQ ID NO: 950911 - RNA, 21 nt, Human
cucagcccuccugcccaugcc

SEQ ID NO: 950912 - RNA, 18 nt, Human
cucagugcuuggcccaua

SEQ ID NO: 950913 - RNA, 19 nt, Human
cucauguguccuagggcac

SEQ ID NO: 950914 - RNA, 24 nt, Human
cucauucugucucucaggcuggag

SEQ ID NO: 950915 - RNA, 21 nt, Human
cuccuccaggccucagggccu

SEQ ID NO: 950916 - RNA, 22 nt, Human
cuccugccucagccuccagacu

SEQ ID NO: 950917 - RNA, 20 nt, Human
cuccuggguucaagugauuc

SEQ ID NO: 950918 - RNA, 21 nt, Human
cuccuggguucaagugauucu

SEQ ID NO: 950919 - RNA, 21 nt, Human
cuccuggguucaugccauucu

SEQ ID NO: 950920 - RNA, 20 nt, Human
cuccuucccacaccugagcc

SEQ ID NO: 950921 - RNA, 19 nt, Human
cucgcugaagcccuuucca

SEQ ID NO: 950922 - RNA, 19 nt, Human
cucggccuccugaguagcu

SEQ ID NO: 950923 - RNA, 24 nt, Human
cucggccuccugaguagcugggau

SEQ ID NO: 950924 - RNA, 23 nt, Human
cucuccgccgggcugcgcucccc

SEQ ID NO: 950925 - RNA, 20 nt, Human
cugcagacuaagcaaggcuu

SEQ ID NO: 950926 - RNA, 26 nt, Human
cugcagccugcauuuacuugugucug

SEQ ID NO: 950927 - RNA, 23 nt, Human
cugccucagccuccagacuagcu

SEQ ID NO: 950928 - RNA, 22 nt, Human
cuggaacuguacacucccccau

SEQ ID NO: 950929 - RNA, 20 nt, Human
cuggccccguccccucccca

SEQ ID NO: 950930 - RNA, 21 nt, Human
cugggauuauaggugugagcc

SEQ ID NO: 950931 - RNA, 20 nt, Human
cuuugugcaggcugugcucc

SEQ ID NO: 950932 - RNA, 19 nt, Human
gaaaagacagagaaaggca

SEQ ID NO: 950933 - RNA, 22 nt, Human
gaaaggcaggguggggaagagg

SEQ ID NO: 950934 - RNA, 18 nt, Human
gacacuggccccgucccc

SEQ ID NO: 950935 - RNA, 23 nt, Human
gacagagaaaggcagggugggga

SEQ ID NO: 950936 - RNA, 22 nt, Human
gacccccagcucugccuuggug

SEQ ID NO: 950937 - RNA, 22 nt, Human
gaccucgugauccacccgccuc

SEQ ID NO: 950938 - RNA, 22 nt, Human
gaccucgugauccacccgccuc

SEQ ID NO: 950939 - RNA, 24 nt, Human
gaccucgugauccacccgccucgg

SEQ ID NO: 950940 - RNA, 24 nt, Human
gacuucaaaugauccacccgccuu

SEQ ID NO: 950941 - RNA, 18 nt, Human
gagaaaaaaggcaacaca

SEQ ID NO: 950942 - RNA, 20 nt, Human
gagaugggguuucaccaugu

SEQ ID NO: 950943 - RNA, 24 nt, Human
gagaugggguuucaccauguuagc

SEQ ID NO: 950944 - RNA, 24 nt, Human
gagaugggguuucaccguguuagc

SEQ ID NO: 950945 - RNA, 18 nt, Human
gagccaccaugccugacc

SEQ ID NO: 950946 - RNA, 25 nt, Human
gaggaacuggucuugugaucugggg

SEQ ID NO: 950947 - RNA, 22 nt, Human
gaugggguuucauuauguuggc

SEQ ID NO: 950948 - RNA, 18 nt, Human
gauuacagaagcaugcca

SEQ ID NO: 950949 - RNA, 18 nt, Human
gauuacaggcaugagcca

SEQ ID NO: 950950 - RNA, 21 nt, Human
gauuacaggcaugagccacca

SEQ ID NO: 950951 - RNA, 24 nt, Human
gauuacaggcaugagccaccaugc

SEQ ID NO: 950952 - RNA, 18 nt, Human
gauuacuggcgugagcca

SEQ ID NO: 950953 - RNA, 21 nt, Human
gauuacuggcgugagccaccg

SEQ ID NO: 950954 - RNA, 24 nt, Human
gauuacuggcgugagccaccgugc

SEQ ID NO: 950955 - RNA, 18 nt, Human
gauuauaggugugagcca

SEQ ID NO: 950956 - RNA, 22 nt, Human
gauuauaggugugagccaccgc

SEQ ID NO: 950957 - RNA, 22 nt, Human
gauuauaggugugagccaccgc

SEQ ID NO: 950958 - RNA, 21 nt, Human
gauucuccugccucagccucc

SEQ ID NO: 950959 - RNA, 22 nt, Human
gauugcagggaugggugaacag

SEQ ID NO: 950960 - RNA, 22 nt, Human
gcacaugugugugcucacaugg

SEQ ID NO: 950961 - RNA, 22 nt, Human
gcagggaugggguuucauuaug

SEQ ID NO: 950962 - RNA, 19 nt, Human
gcccaggcuggagugcagu

SEQ ID NO: 950963 - RNA, 23 nt, Human
gcccaggcuggagugcaguggca

SEQ ID NO: 950964 - RNA, 21 nt, Human
gcccauauuugcuguggcccc

SEQ ID NO: 950965 - RNA, 18 nt, Human
gcccauggcucccaggcc

SEQ ID NO: 950966 - RNA, 22 nt, Human
gcccggcuaauuuuuguauuuu

SEQ ID NO: 950967 - RNA, 21 nt, Human
gcccugcugggagcuuucaca

SEQ ID NO: 950968 - RNA, 18 nt, Human
gccgggcugcgcuccccg

SEQ ID NO: 950969 - RNA, 20 nt, Human
gccugcugcugccucgcugu

SEQ ID NO: 950970 - RNA, 23 nt, Human
gccuggcuaauuuuuuguauuuu

SEQ ID NO: 950971 - RNA, 18 nt, Human
gccuguccccacauccug

SEQ ID NO: 950972 - RNA, 22 nt, Human
gccuugguguugguuccuccca

SEQ ID NO: 950973 - RNA, 19 nt, Human
gcugcagggcccaguuggg

SEQ ID NO: 950974 - RNA, 19 nt, Human
gcuggagugcaguggcacg

SEQ ID NO: 950975 - RNA, 21 nt, Human
ggagagcaggauggguuacgg

SEQ ID NO: 950976 - RNA, 21 nt, Human
ggagcaccugguaugugccag

SEQ ID NO: 950977 - RNA, 24 nt, Human
ggaggagggaggccugcugcugcc

SEQ ID NO: 950978 - RNA, 24 nt, Human
ggauggucucgauauccugaccuc

SEQ ID NO: 950979 - RNA, 24 nt, Human
ggauuacaggcaugagccaccaug

SEQ ID NO: 950980 - RNA, 19 nt, Human
ggccaggggcucuggcugg

SEQ ID NO: 950981 - RNA, 18 nt, Human
ggcccaggggccugaacc

SEQ ID NO: 950982 - RNA, 19 nt, Human
ggcccugccucaccccccc

SEQ ID NO: 950983 - RNA, 18 nt, Human
ggccuuggcccuggagag

SEQ ID NO: 950984 - RNA, 22 nt, Human
ggcgugagccaccgugcccggc

SEQ ID NO: 950985 - RNA, 19 nt, Human
ggcucuggcugggacacca

SEQ ID NO: 950986 - RNA, 31 nt, Human
ggcugcagugcaauggugugaucucagcucc

SEQ ID NO: 950987 - RNA, 20 nt, Human
ggcugccccucccaagcaga

SEQ ID NO: 950988 - RNA, 19 nt, Human
ggcuggugagaaaaaaggc

SEQ ID NO: 950989 - RNA, 18 nt, Human
gggaccaggcugcccaga

SEQ ID NO: 950990 - RNA, 22 nt, Human
gggagagcaggauggguuacgg

SEQ ID NO: 950991 - RNA, 20 nt, Human
gggaggaguccccaacucag

SEQ ID NO: 950992 - RNA, 23 nt, Human
gggaugggguuucauuauguugg

SEQ ID NO: 950993 - RNA, 21 nt, Human
gggcaggaggcagaaggaagg

SEQ ID NO: 950994 - RNA, 22 nt, Human
gggguuucaccauguuagccag

SEQ ID NO: 950995 - RNA, 23 nt, Human
gggguuucaccauguuagccagg

SEQ ID NO: 950996 - RNA, 22 nt, Human
gggguuucaccguguuagccag

SEQ ID NO: 950997 - RNA, 22 nt, Human
gggguuucauuauguuggccag

SEQ ID NO: 950998 - RNA, 22 nt, Human
ggguuucaccguguuagccagg

SEQ ID NO: 950999 - RNA, 18 nt, Human
ggguuucauuauguuggc

SEQ ID NO: 951000 - RNA, 22 nt, Human
ggguuucauuauguuggccagg

SEQ ID NO: 951001 - RNA, 23 nt, Human
guagagaugggguuucaccaugu

SEQ ID NO: 951002 - RNA, 21 nt, Human
gucacccaggcugcagugcaa

SEQ ID NO: 951003 - RNA, 27 nt, Human
guccugaacacccuccccuuuuucucu

SEQ ID NO: 951004 - RNA, 23 nt, Human
gugaucacccaccucggccuccc

SEQ ID NO: 951005 - RNA, 24 nt, Human
gugauccacccgccucggccuccc

SEQ ID NO: 951006 - RNA, 26 nt, Human
gugauucucccugcuagauccugccc

SEQ ID NO: 951007 - RNA, 24 nt, Human
gugauucuccugccucagccuccc

SEQ ID NO: 951008 - RNA, 22 nt, Human
gugcacaagugucuuggcccuu

SEQ ID NO: 951009 - RNA, 21 nt, Human
gugcugggauuacuggcguga

SEQ ID NO: 951010 - RNA, 25 nt, Human
guuugugcaugugcacaugugugug

SEQ ID NO: 951011 - RNA, 18 nt, Human
uaacucuucaaccuuccg

SEQ ID NO: 951012 - RNA, 20 nt, Human
uaaucucggccuccugagua

SEQ ID NO: 951013 - RNA, 25 nt, Human
uaauuuuugaauuuuuuaguagaga

SEQ ID NO: 951014 - RNA, 24 nt, Human
uaauuuuuguauuuuuggcaggga

SEQ ID NO: 951015 - RNA, 24 nt, Human
uaauuuuuuguauuuuuaguagag

SEQ ID NO: 951016 - RNA, 23 nt, Human
uacaggcacaugccaccaugccc

SEQ ID NO: 951017 - RNA, 22 nt, Human
uacaggcacccgccaccacgcc

SEQ ID NO: 951018 - RNA, 22 nt, Human
uacaggcaugagccaccaugcc

SEQ ID NO: 951019 - RNA, 22 nt, Human
uacccaaccccaagcucagugc

SEQ ID NO: 951020 - RNA, 23 nt, Human
uaccugcaccaacacccugcacc

SEQ ID NO: 951021 - RNA, 24 nt, Human
uacuggcgugagccaccgugcccg

SEQ ID NO: 951022 - RNA, 22 nt, Human
uagagaugggguuucaccaugu

SEQ ID NO: 951023 - RNA, 26 nt, Human
uagagcccucccuaaccaugccccuc

SEQ ID NO: 951024 - RNA, 18 nt, Human
uagcccaggcuggagugc

SEQ ID NO: 951025 - RNA, 21 nt, Human
uaguagagaugggguuucacc

SEQ ID NO: 951026 - RNA, 24 nt, Human
uaguagagaugggguuucaccaug

SEQ ID NO: 951027 - RNA, 24 nt, Human
uaguagagaugggguuucaccgug

SEQ ID NO: 951028 - RNA, 20 nt, Human
uaucucuucugcagacgccc

SEQ ID NO: 951029 - RNA, 19 nt, Human
uauguuggccaggcugguc

SEQ ID NO: 951030 - RNA, 23 nt, Human
uauguuggccaggcuggucuuua

SEQ ID NO: 951031 - RNA, 26 nt, Human
uauuuuuuuucuuugagauggagucu

SEQ ID NO: 951032 - RNA, 19 nt, Human
ucaagugauucuccugccu

SEQ ID NO: 951033 - RNA, 25 nt, Human
ucacauacccaaccccaagcucagu

SEQ ID NO: 951034 - RNA, 23 nt, Human
ucacccaccucggccucccaaau

SEQ ID NO: 951035 - RNA, 24 nt, Human
ucaccguguuagccaggauggucu

SEQ ID NO: 951036 - RNA, 24 nt, Human
ucacugcaaacugugccuccuggg

SEQ ID NO: 951037 - RNA, 18 nt, Human
ucacuguaagcuccgccu

SEQ ID NO: 951038 - RNA, 22 nt, Human
ucacuguaagcuccgccuccug

SEQ ID NO: 951039 - RNA, 23 nt, Human
ucacuguaagcuccgccuccugg

SEQ ID NO: 951040 - RNA, 24 nt, Human
ucacuguaagcuccgccuccuggg

SEQ ID NO: 951041 - RNA, 20 nt, Human
ucagccucccaaguagcugg

SEQ ID NO: 951042 - RNA, 19 nt, Human
ucagcucacuguaagcucc

SEQ ID NO: 951043 - RNA, 19 nt, Human
ucauuacaaccuccgacuc

SEQ ID NO: 951044 - RNA, 22 nt, Human
ucauuauguuggccaggcuggu

SEQ ID NO: 951045 - RNA, 22 nt, Human
uccacccgccucggccucccag

SEQ ID NO: 951046 - RNA, 24 nt, Human
uccagacuagcugggacuacaggc

SEQ ID NO: 951047 - RNA, 24 nt, Human
ucccaaauugcugggauuacaggc

SEQ ID NO: 951048 - RNA, 24 nt, Human
ucccaagcagagucacugagccag

SEQ ID NO: 951049 - RNA, 24 nt, Human
ucccaaguagcuggaacuacaggc

SEQ ID NO: 951050 - RNA, 24 nt, Human
ucccaaugugcugggauuacuggc

SEQ ID NO: 951051 - RNA, 23 nt, Human
ucccagagugcugggauuauagg

SEQ ID NO: 951052 - RNA, 23 nt, Human
ucccagucucaauggcccagguc

SEQ ID NO: 951053 - RNA, 21 nt, Human
uccccauacucugccuucaca

SEQ ID NO: 951054 - RNA, 19 nt, Human
ucccugagggcaaggacgc

SEQ ID NO: 951055 - RNA, 22 nt, Human
ucccugccaacagcagccaugg

SEQ ID NO: 951056 - RNA, 18 nt, Human
ucccugcuagauccugcc

SEQ ID NO: 951057 - RNA, 22 nt, Human
ucccuguccugaacacccuccc

SEQ ID NO: 951058 - RNA, 20 nt, Human
ucccugugggcacagccugg

SEQ ID NO: 951059 - RNA, 23 nt, Human
ucccuuaauguacaagguggcag

SEQ ID NO: 951060 - RNA, 27 nt, Human
ucccuuguucccguugagggauggucc

SEQ ID NO: 951061 - RNA, 18 nt, Human
uccucccacacucugagc

SEQ ID NO: 951062 - RNA, 18 nt, Human
uccugacuucaaaugauc

SEQ ID NO: 951063 - RNA, 18 nt, Human
uccugaguagcugggauu

SEQ ID NO: 951064 - RNA, 21 nt, Human
uccuggguucaagugauucuc

SEQ ID NO: 951065 - RNA, 24 nt, Human
uccuggguucaagugauucuccug

SEQ ID NO: 951066 - RNA, 24 nt, Human
uccuggguucaugccauucuccug

SEQ ID NO: 951067 - RNA, 20 nt, Human
uccuucccacaccugagccu

SEQ ID NO: 951068 - RNA, 23 nt, Human
ucggccuccugaguagcugggau

SEQ ID NO: 951069 - RNA, 23 nt, Human
ucuauaacccccacaaaauggcc

SEQ ID NO: 951070 - RNA, 23 nt, Human
ucucacucuguagcccaggcugg

SEQ ID NO: 951071 - RNA, 24 nt, Human
ucucacucuguagcccaggcugga

SEQ ID NO: 951072 - RNA, 23 nt, Human
ucucacuuuccagaaagccucaa

SEQ ID NO: 951073 - RNA, 23 nt, Human
ucucaggcuggaguguaauggcg

SEQ ID NO: 951074 - RNA, 23 nt, Human
ucucauucugucucucaggcugg

SEQ ID NO: 951075 - RNA, 24 nt, Human
ucucauucugucucucaggcugga

SEQ ID NO: 951076 - RNA, 21 nt, Human
ucucccugcuagauccugccc

SEQ ID NO: 951077 - RNA, 22 nt, Human
ucucguuuggucacccaggcug

SEQ ID NO: 951078 - RNA, 23 nt, Human
ucucucaggcuggaguguaaugg

SEQ ID NO: 951079 - RNA, 20 nt, Human
ucuggaggagggaggccugc

SEQ ID NO: 951080 - RNA, 24 nt, Human
ucuguagcccaggcuggagugcag

SEQ ID NO: 951081 - RNA, 18 nt, Human
ucugucucucaggcugga

SEQ ID NO: 951082 - RNA, 24 nt, Human
ucugucucucaggcuggaguguaa

SEQ ID NO: 951083 - RNA, 18 nt, Human
ucugucucuuuugcugcu

SEQ ID NO: 951084 - RNA, 20 nt, Human
ugaaaagcgaaaagacagag

SEQ ID NO: 951085 - RNA, 23 nt, Human
ugaacacccuccccuuuuucucu

SEQ ID NO: 951086 - RNA, 21 nt, Human
ugaaggaccuguccaaggcug

SEQ ID NO: 951087 - RNA, 19 nt, Human
ugaauauauauauauauau

SEQ ID NO: 951088 - RNA, 21 nt, Human
ugacuucaaaugauccacccg

SEQ ID NO: 951089 - RNA, 22 nt, Human
ugacuucaaaugauccacccgc

SEQ ID NO: 951090 - RNA, 25 nt, Human
ugagaaaaaaggcaacacagcagga

SEQ ID NO: 951091 - RNA, 24 nt, Human
ugagccaccgugcccggccugugu

SEQ ID NO: 951092 - RNA, 23 nt, Human
ugagccagggagagcaggauggg

SEQ ID NO: 951093 - RNA, 20 nt, Human
ugaggcagggucugaacugg

SEQ ID NO: 951094 - RNA, 21 nt, Human
ugaggcagggucugaacuggu

SEQ ID NO: 951095 - RNA, 23 nt, Human
ugaggcccuggguggccccaccc

SEQ ID NO: 951096 - RNA, 21 nt, Human
ugagggaaagagagguaccag

SEQ ID NO: 951097 - RNA, 20 nt, Human
ugagggcaggaaacagauuu

SEQ ID NO: 951098 - RNA, 23 nt, Human
ugagugccauuucccccucucca

SEQ ID NO: 951099 - RNA, 18 nt, Human
ugaguucaugaggcaggg

SEQ ID NO: 951100 - RNA, 19 nt, Human
ugcacacccugccccuaac

SEQ ID NO: 951101 - RNA, 19 nt, Human
ugcaggcugugcuccuggu

SEQ ID NO: 951102 - RNA, 24 nt, Human
ugcagggcccaguugggcucuucc

SEQ ID NO: 951103 - RNA, 19 nt, Human
ugcagugcaauggugugau

SEQ ID NO: 951104 - RNA, 23 nt, Human
ugcagugcaauggugugaucuca

SEQ ID NO: 951105 - RNA, 26 nt, Human
ugccaggcccugccucacccccccug

SEQ ID NO: 951106 - RNA, 19 nt, Human
ugccagggacagcucuugc

SEQ ID NO: 951107 - RNA, 19 nt, Human
ugccauagagcacauggca

SEQ ID NO: 951108 - RNA, 19 nt, Human
ugccauuucccccucucca

SEQ ID NO: 951109 - RNA, 21 nt, Human
ugcccagacuguguccuggcc

SEQ ID NO: 951110 - RNA, 24 nt, Human
ugcccggcuaauuuuuguauuuuu

SEQ ID NO: 951111 - RNA, 24 nt, Human
ugccucagccuccagacuagcugg

SEQ ID NO: 951112 - RNA, 24 nt, Human
ugccucagccucccaaguagcugg

SEQ ID NO: 951113 - RNA, 22 nt, Human
ugccuccuggguucaagugauu

SEQ ID NO: 951114 - RNA, 22 nt, Human
ugcgcuccccgcgggccugcga

SEQ ID NO: 951115 - RNA, 19 nt, Human
ugcuacaaaggcagaucau

SEQ ID NO: 951116 - RNA, 23 nt, Human
ugcuacaaaggcagaucaucaac

SEQ ID NO: 951117 - RNA, 24 nt, Human
uggaacuacaggcacaugccacca

SEQ ID NO: 951118 - RNA, 23 nt, Human
uggaacucacagcccuccuugca

SEQ ID NO: 951119 - RNA, 19 nt, Human
uggaaugaaugaaagaaag

SEQ ID NO: 951120 - RNA, 21 nt, Human
uggaggaccagacuccaccac

SEQ ID NO: 951121 - RNA, 23 nt, Human
uggagugcaguggcacgaucuca

SEQ ID NO: 951122 - RNA, 24 nt, Human
uggagugcaguggcacgaucucag

SEQ ID NO: 951123 - RNA, 24 nt, Human
uggaguguaauggcgcgaucucgg

SEQ ID NO: 951124 - RNA, 18 nt, Human
uggcaaaugugugcacuu

SEQ ID NO: 951125 - RNA, 20 nt, Human
uggcacgaucucagcucacu

SEQ ID NO: 951126 - RNA, 24 nt, Human
uggcacgaucucagcucacuguaa

SEQ ID NO: 951127 - RNA, 24 nt, Human
uggcacuccuucuggugacaucug

SEQ ID NO: 951128 - RNA, 24 nt, Human
uggcagggaugggguuucauuaug

SEQ ID NO: 951129 - RNA, 21 nt, Human
uggccaggcuggucuuuaacu

SEQ ID NO: 951130 - RNA, 20 nt, Human
uggcccuggagagcugggca

SEQ ID NO: 951131 - RNA, 26 nt, Human
uggccuguccccacauccugcccccg

SEQ ID NO: 951132 - RNA, 18 nt, Human
ugggaccaggcugcccag

SEQ ID NO: 951133 - RNA, 21 nt, Human
ugggacuacaggcacccgcca

SEQ ID NO: 951134 - RNA, 22 nt, Human
ugggacuacaggcacccgccac

SEQ ID NO: 951135 - RNA, 24 nt, Human
ugggacuacaggcacccgccacca

SEQ ID NO: 951136 - RNA, 22 nt, Human
ugggauuacagaagcaugccac

SEQ ID NO: 951137 - RNA, 24 nt, Human
ugggauuacagaagcaugccacca

SEQ ID NO: 951138 - RNA, 18 nt, Human
ugggauuacaggcaugag

SEQ ID NO: 951139 - RNA, 22 nt, Human
ugggauuacaggcaugagccac

SEQ ID NO: 951140 - RNA, 23 nt, Human
ugggauuacaggcaugagccacc

SEQ ID NO: 951141 - RNA, 24 nt, Human
ugggauuacaggcaugagccacca

SEQ ID NO: 951142 - RNA, 25 nt, Human
ugggauuacaggcaugagccaccau

SEQ ID NO: 951143 - RNA, 18 nt, Human
ugggauuacuggcgugag

SEQ ID NO: 951144 - RNA, 22 nt, Human
ugggauuacuggcgugagccac

SEQ ID NO: 951145 - RNA, 23 nt, Human
ugggauuacuggcgugagccacc

SEQ ID NO: 951146 - RNA, 23 nt, Human
ugggauuacuggcgugagccacc

SEQ ID NO: 951147 - RNA, 24 nt, Human
ugggauuacuggcgugagccaccg

SEQ ID NO: 951148 - RNA, 19 nt, Human
ugggauuauaggugugagc

SEQ ID NO: 951149 - RNA, 22 nt, Human
ugggauuauaggugugagccac

SEQ ID NO: 951150 - RNA, 23 nt, Human
ugggauuauaggugugagccacc

SEQ ID NO: 951151 - RNA, 24 nt, Human
ugggauuauaggugugagccaccg

SEQ ID NO: 951152 - RNA, 21 nt, Human
ugggcuucuuagagcccuccc

SEQ ID NO: 951153 - RNA, 22 nt, Human
uggggaagaggaagacauuuga

SEQ ID NO: 951154 - RNA, 24 nt, Human
ugggguuucaccauguuagccagg

SEQ ID NO: 951155 - RNA, 24 nt, Human
ugggguuucaccguguuagccagg

SEQ ID NO: 951156 - RNA, 24 nt, Human
ugggguuucauuauguuggccagg

SEQ ID NO: 951157 - RNA, 23 nt, Human
uggguucaagugauucuccugcc

SEQ ID NO: 951158 - RNA, 24 nt, Human
uggguucaagugauucuccugccu

SEQ ID NO: 951159 - RNA, 18 nt, Human
uggucacccaggcugcag

SEQ ID NO: 951160 - RNA, 24 nt, Human
uggugugaucucagcucauuacaa

SEQ ID NO: 951161 - RNA, 21 nt, Human
uguauuuuuaguagagauggg

SEQ ID NO: 951162 - RNA, 21 nt, Human
uguccuggccaggguucaaga

SEQ ID NO: 951163 - RNA, 22 nt, Human
ugugcacaugugugugcucaca

SEQ ID NO: 951164 - RNA, 21 nt, Human
ugugcaugugcacaugugugu

SEQ ID NO: 951165 - RNA, 24 nt, Human
ugugccuccuggguucaagugauu

SEQ ID NO: 951166 - RNA, 22 nt, Human
uguggggcaggaggcagaagga

SEQ ID NO: 951167 - RNA, 18 nt, Human
uuaguagagaugggguuu

SEQ ID NO: 951168 - RNA, 18 nt, Human
uuaguagagaugggguuu

SEQ ID NO: 951169 - RNA, 22 nt, Human
uuaguagagaugggguuucacc

SEQ ID NO: 951170 - RNA, 22 nt, Human
uuaguagagaugggguuucacc

SEQ ID NO: 951171 - RNA, 24 nt, Human
uuaguagagaugggguuucaccau

SEQ ID NO: 951172 - RNA, 24 nt, Human
uuaguagagaugggguuucaccgu

SEQ ID NO: 951173 - RNA, 24 nt, Human
uucaaaugauccacccgccuuggc

SEQ ID NO: 951174 - RNA, 21 nt, Human
uucaagugauucuccugccuc

SEQ ID NO: 951175 - RNA, 23 nt, Human
uucaagugauucuccugccucag

SEQ ID NO: 951176 - RNA, 24 nt, Human
uucaagugauucuccugccucagc

SEQ ID NO: 951177 - RNA, 19 nt, Human
uucaagugauucucuaauc

SEQ ID NO: 951178 - RNA, 23 nt, Human
uucaagugauucucuaaucucgg

SEQ ID NO: 951179 - RNA, 19 nt, Human
uucaugccauucuccugcc

SEQ ID NO: 951180 - RNA, 25 nt, Human
uucccacacuccaaccuccaggcug

SEQ ID NO: 951181 - RNA, 21 nt, Human
uucugucucucaggcuggagu

SEQ ID NO: 951182 - RNA, 23 nt, Human
uugagggaugguccgcauuucag

SEQ ID NO: 951183 - RNA, 23 nt, Human
uugcggccuuggcccuggagagc

SEQ ID NO: 951184 - RNA, 20 nt, Human
uugcugcuuagccuuugugc

SEQ ID NO: 951185 - RNA, 18 nt, Human
uugcuguggcccccuggc

SEQ ID NO: 951186 - RNA, 24 nt, Human
uuggcagggaugggguuucauuau

SEQ ID NO: 951187 - RNA, 23 nt, Human
uuguauuuuuaguagagaugggg

SEQ ID NO: 951188 - RNA, 23 nt, Human
uuguauuuuuggcagggaugggg

SEQ ID NO: 951189 - RNA, 19 nt, Human
uuucaccauguuagccagg

SEQ ID NO: 951190 - RNA, 19 nt, Human
uuucaccguguuagccagg

SEQ ID NO: 951191 - RNA, 24 nt, Human
uuucauuauguuggccaggcuggu

SEQ ID NO: 951192 - RNA, 22 nt, Human
uuuuauuuuucagauggagucu

SEQ ID NO: 951193 - RNA, 24 nt, Human
uuuuuaguagagaugggguuucac

SEQ ID NO: 951194 - RNA, 24 nt, Human
uuuuuaguagagaugggguuucac

SEQ ID NO: 951195 - RNA, 22 nt, Human
uuuuucucugaguccuucacag

SEQ ID NO: 951196 - RNA, 21 nt, Human
uuuuugaauuuuuuaguagag

SEQ ID NO: 951197 - RNA, 24 nt, Human
uuuuugaauuuuuuaguagagaug

SEQ ID NO: 951198 - RNA, 24 nt, Human
uuuuuggcagggaugggguuucau

SEQ ID NO: 951199 - RNA, 21 nt, Human
uuuuuguauuuuuaguagaga

SEQ ID NO: 951200 - RNA, 18 nt, Human
uuuuuguauuuuuggcag

SEQ ID NO: 951201 - RNA, 23 nt, Human
uuuuuguauuuuuggcagggaug

SEQ ID NO: 951202 - RNA, 23 nt, Human
uuuuuuaguagagaugggguuuc

SEQ ID NO: 951203 - RNA, 24 nt, Human
uuuuuuguauuuuuaguagagaug

SEQ ID NO: 951204 - RNA, 18 nt, Human
acauagguuggucccugc

SEQ ID NO: 951205 - RNA, 21 nt, Human
agcagaccauucagccaagaa

SEQ ID NO: 951206 - RNA, 18 nt, Human
agcgggggcccuggaagu

SEQ ID NO: 951207 - RNA, 22 nt, Human
agcugcccuuugacagugacau

SEQ ID NO: 951208 - RNA, 19 nt, Human
aggagggaggacguacuuu

SEQ ID NO: 951209 - RNA, 24 nt, Human
aggcgucaggggcucucugaagcc

SEQ ID NO: 951210 - RNA, 21 nt, Human
agggcaggaaugcugagggcu

SEQ ID NO: 951211 - RNA, 22 nt, Human
agggcaggaaugcugagggcuc

SEQ ID NO: 951212 - RNA, 21 nt, Human
aggggaugggggugggaccaa

SEQ ID NO: 951213 - RNA, 23 nt, Human
aggggcuagcaugaagguccagg

SEQ ID NO: 951214 - RNA, 19 nt, Human
augaaaagaagcaccugga

SEQ ID NO: 951215 - RNA, 19 nt, Human
caccuggaaagggcagugc

SEQ ID NO: 951216 - RNA, 25 nt, Human
cacucucauucccaucaggugaggg

SEQ ID NO: 951217 - RNA, 18 nt, Human
cagcagaccauucagcca

SEQ ID NO: 951218 - RNA, 25 nt, Human
cagccaagaagcaagcuccccacac

SEQ ID NO: 951219 - RNA, 18 nt, Human
cagggcaggaaugcugag

SEQ ID NO: 951220 - RNA, 19 nt, Human
caguauguuggggugggag

SEQ ID NO: 951221 - RNA, 24 nt, Human
cagugucccuucucuaggcccaag

SEQ ID NO: 951222 - RNA, 23 nt, Human
cauucagccaagaagcaagcucc

SEQ ID NO: 951223 - RNA, 22 nt, Human
ccagcagaccauucagccaaga

SEQ ID NO: 951224 - RNA, 18 nt, Human
cccaaggccacagggccc

SEQ ID NO: 951225 - RNA, 23 nt, Human
ccccaggaacaguucuccucccu

SEQ ID NO: 951226 - RNA, 20 nt, Human
cccuugugauugaaaguaaa

SEQ ID NO: 951227 - RNA, 18 nt, Human
ccucuugucuguuuacca

SEQ ID NO: 951228 - RNA, 22 nt, Human
ccucuuuaggaguuauaggagu

SEQ ID NO: 951229 - RNA, 27 nt, Human
ccuggcugagagcuggaggagcucauu

SEQ ID NO: 951230 - RNA, 22 nt, Human
ccuucuucacagggccucauca

SEQ ID NO: 951231 - RNA, 24 nt, Human
ccuugggccccaggaacaguucuc

SEQ ID NO: 951232 - RNA, 18 nt, Human
cgucuguauauccugucc

SEQ ID NO: 951233 - RNA, 24 nt, Human
cuaggcccaaggccacagggcccc

SEQ ID NO: 951234 - RNA, 21 nt, Human
cuccccacacucucauuccca

SEQ ID NO: 951235 - RNA, 18 nt, Human
cuccuggcugagagcugg

SEQ ID NO: 951236 - RNA, 23 nt, Human
cugaagccugaacuggggaguag

SEQ ID NO: 951237 - RNA, 23 nt, Human
cugccauguuccugcaggcguca

SEQ ID NO: 951238 - RNA, 20 nt, Human
cugcccccgucuguauaucc

SEQ ID NO: 951239 - RNA, 20 nt, Human
cugcccccgucuguauaucc

SEQ ID NO: 951240 - RNA, 19 nt, Human
cugggcaucgaggagugcc

SEQ ID NO: 951241 - RNA, 23 nt, Human
gaaacaguauguuggggugggag

SEQ ID NO: 951242 - RNA, 21 nt, Human
gaacuggggaguaggaaaggu

SEQ ID NO: 951243 - RNA, 19 nt, Human
gaagcaccuggaaagggca

SEQ ID NO: 951244 - RNA, 20 nt, Human
gagacagcgggggcccugga

SEQ ID NO: 951245 - RNA, 19 nt, Human
gagcauggggcaugguggu

SEQ ID NO: 951246 - RNA, 23 nt, Human
gagcauggggcaugguggugggg

SEQ ID NO: 951247 - RNA, 21 nt, Human
gaggagugccaggcaucuacc

SEQ ID NO: 951248 - RNA, 19 nt, Human
gaucaggaaacaguauguu

SEQ ID NO: 951249 - RNA, 19 nt, Human
gaugaugaagacacucaga

SEQ ID NO: 951250 - RNA, 19 nt, Human
gcaccuggaaagggcagug

SEQ ID NO: 951251 - RNA, 24 nt, Human
gcagaccauucagccaagaagcaa

SEQ ID NO: 951252 - RNA, 18 nt, Human
gcaugguggugggggugg

SEQ ID NO: 951253 - RNA, 20 nt, Human
gccccaggaacaguucuccu

SEQ ID NO: 951254 - RNA, 18 nt, Human
gcucacagcucucuaccu

SEQ ID NO: 951255 - RNA, 24 nt, Human
gcuggagucagguggggcuggggc

SEQ ID NO: 951256 - RNA, 19 nt, Human
gcuggggcucacagcucuc

SEQ ID NO: 951257 - RNA, 26 nt, Human
ggaaugcagaaccagguucaggggag

SEQ ID NO: 951258 - RNA, 19 nt, Human
ggagucagguggggcuggg

SEQ ID NO: 951259 - RNA, 21 nt, Human
ggccacagggcccagguaacc

SEQ ID NO: 951260 - RNA, 18 nt, Human
ggcuggugggaagaggca

SEQ ID NO: 951261 - RNA, 20 nt, Human
gggaagaggcagcaaggagg

SEQ ID NO: 951262 - RNA, 22 nt, Human
gggcaugguggugggggugggg

SEQ ID NO: 951263 - RNA, 21 nt, Human
gggcuggggcucacagcucuc

SEQ ID NO: 951264 - RNA, 19 nt, Human
ggggcucucugaagccuga

SEQ ID NO: 951265 - RNA, 21 nt, Human
ggggugggaggagcucugagc

SEQ ID NO: 951266 - RNA, 24 nt, Human
ggggugggaggagcucugagcugg

SEQ ID NO: 951267 - RNA, 23 nt, Human
gggugggaggagcucugagcugg

SEQ ID NO: 951268 - RNA, 20 nt, Human
gguggggaagcacagucugg

SEQ ID NO: 951269 - RNA, 19 nt, Human
gugcuggagucaggugggg

SEQ ID NO: 951270 - RNA, 22 nt, Human
uagcagaugaugaagacacuca

SEQ ID NO: 951271 - RNA, 18 nt, Human
uagcaugaagguccaggc

SEQ ID NO: 951272 - RNA, 19 nt, Human
uagcaugaagguccagggc

SEQ ID NO: 951273 - RNA, 22 nt, Human
uauauggagcuccccaccgaag

SEQ ID NO: 951274 - RNA, 19 nt, Human
uauccagcucuaagcccuc

SEQ ID NO: 951275 - RNA, 18 nt, Human
uauccugucccuucuuca

SEQ ID NO: 951276 - RNA, 18 nt, Human
ucacugggcaucgaggag

SEQ ID NO: 951277 - RNA, 23 nt, Human
ucaucauaacugucuccagcugc

SEQ ID NO: 951278 - RNA, 22 nt, Human
uccagcucuaagcccucccaag

SEQ ID NO: 951279 - RNA, 20 nt, Human
uccagggcaggaaugcugag

SEQ ID NO: 951280 - RNA, 23 nt, Human
uccaguuucuuccuuccuugggg

SEQ ID NO: 951281 - RNA, 21 nt, Human
uccuggcugagagcuggaggc

SEQ ID NO: 951282 - RNA, 23 nt, Human
ucuaagcccucccaagaaaugag

SEQ ID NO: 951283 - RNA, 25 nt, Human
ucucacuuccuugccauccugggag

SEQ ID NO: 951284 - RNA, 25 nt, Human
ucuccuaacuuccuaccuuguuaaa

SEQ ID NO: 951285 - RNA, 22 nt, Human
ugaggaagcaguuccuaauuuc

SEQ ID NO: 951286 - RNA, 23 nt, Human
ugaggaagcaguuccuaauuucc

SEQ ID NO: 951287 - RNA, 21 nt, Human
ugagggcucuucagccugggc

SEQ ID NO: 951288 - RNA, 19 nt, Human
ugccaggcaucuacugcuc

SEQ ID NO: 951289 - RNA, 20 nt, Human
ugcuggagucagguggggcu

SEQ ID NO: 951290 - RNA, 25 nt, Human
uggcugagagcuggaggcuggccau

SEQ ID NO: 951291 - RNA, 18 nt, Human
ugggccccaggaacaguu

SEQ ID NO: 951292 - RNA, 21 nt, Human
uggggcucaggcccuucucag

SEQ ID NO: 951293 - RNA, 22 nt, Human
uggggugggaggagcucugagc

SEQ ID NO: 951294 - RNA, 18 nt, Human
ugguggggguggggaagc

SEQ ID NO: 951295 - RNA, 21 nt, Human
uggugguggggguggggaagc

SEQ ID NO: 951296 - RNA, 21 nt, Human
uggugguggggguggggaagc

SEQ ID NO: 951297 - RNA, 24 nt, Human
uggugguggggguggggaagcaca

SEQ ID NO: 951298 - RNA, 23 nt, Human
ugucuccagcugcccccgucugu

SEQ ID NO: 951299 - RNA, 22 nt, Human
uuccuugccauccugggaggug

SEQ ID NO: 951300 - RNA, 23 nt, Human
uuccuugggguuggggaccuccu

SEQ ID NO: 951301 - RNA, 26 nt, Human
uuccuugggguuggggaccuccuggc

SEQ ID NO: 951302 - RNA, 19 nt, Human
uuggggaccuccuggcuga

SEQ ID NO: 951303 - RNA, 21 nt, Human
uuuuuuuuuuuuuuuucccaa

SEQ ID NO: 951304 - RNA, 24 nt, Human
uuuuuuuuuuuuuuuuucccaagg

SEQ ID NO: 951305 - RNA, 21 nt, Human
auagagacgggguuucaccau

SEQ ID NO: 951306 - RNA, 22 nt, Human
auagagacgggguuucaccaug

SEQ ID NO: 951307 - RNA, 18 nt, Human
gagacgggguuucaccau

SEQ ID NO: 951308 - RNA, 21 nt, Human
uagagacgggguuucaccaug

SEQ ID NO: 951309 - RNA, 23 nt, Human
uauagagacgggguuucaccaug

SEQ ID NO: 951310 - RNA, 23 nt, Human
uuauagagacgggguuucaccau

SEQ ID NO: 951311 - RNA, 24 nt, Human
uuauagagacgggguuucaccaug

SEQ ID NO: 951312 - RNA, 24 nt, Human
uuuauagagacgggguuucaccau

SEQ ID NO: 951313 - RNA, 23 nt, Human
uuuuuauagagacgggguuucac

SEQ ID NO: 951314 - RNA, 30 nt, Human
uuuuuuuuuuuuauagagacgggguuucaa

SEQ ID NO: 951315 - RNA, 28 nt, Human
uuuuuuuuuuuuuuuauagagacggggg

SEQ ID NO: 951316 - RNA, 18 nt, Human
aaaacaacagaaacaaga

SEQ ID NO: 951317 - RNA, 19 nt, Human
aaaauacaaaucaagucug

SEQ ID NO: 951318 - RNA, 23 nt, Human
aaagugguuuugauauuuuggua

SEQ ID NO: 951319 - RNA, 20 nt, Human
ccggccggcaaggaaagggu

SEQ ID NO: 951320 - RNA, 22 nt, Human
cggccggcaaggaaagggugau

SEQ ID NO: 951321 - RNA, 19 nt, Human
cugccgcccguccaccucg

SEQ ID NO: 951322 - RNA, 25 nt, Human
gccgaagugccggccggcaaggaaa

SEQ ID NO: 951323 - RNA, 19 nt, Human
ggcgcuugacugccgcccg

SEQ ID NO: 951324 - RNA, 20 nt, Human
ucaaagugguuuugauauuu

SEQ ID NO: 951325 - RNA, 21 nt, Human
uccaaaacaacagaaacaaga

SEQ ID NO: 951326 - RNA, 23 nt, Human
ugagugggcaaauucugaaauuc

SEQ ID NO: 951327 - RNA, 18 nt, Human
uguccaaaacaacagaaa

SEQ ID NO: 951328 - RNA, 19 nt, Human
uguccaaauguucagaagc

SEQ ID NO: 951329 - RNA, 19 nt, Human
cccccagaucuucugagga

SEQ ID NO: 951330 - RNA, 21 nt, Human
uauuuugcuuuccaucccccc

SEQ ID NO: 951331 - RNA, 19 nt, Human
aagagcacucauuugccac

SEQ ID NO: 951332 - RNA, 25 nt, Human
aggguggaguuuaguuucugugaau

SEQ ID NO: 951333 - RNA, 19 nt, Human
cagcgcagcagggacacgg

SEQ ID NO: 951334 - RNA, 26 nt, Human
ccacuuccucuuggaucauuauaaga

SEQ ID NO: 951335 - RNA, 22 nt, Human
cggggaccaugcaagcuguaau

SEQ ID NO: 951336 - RNA, 23 nt, Human
cucauuugccacuuccucuugga

SEQ ID NO: 951337 - RNA, 24 nt, Human
guuucugugaauuuugcuucugau

SEQ ID NO: 951338 - RNA, 21 nt, Human
ucucucagcgcagcagggacu

SEQ ID NO: 951339 - RNA, 20 nt, Human
uggagucccaaggguggagu

SEQ ID NO: 951340 - RNA, 24 nt, Human
uguuguggagucccaaggguggag

SEQ ID NO: 951341 - RNA, 21 nt, Human
uuuuguuguuguuguuguugu

SEQ ID NO: 951342 - RNA, 20 nt, Human
aaagaguauucugucaaaag

SEQ ID NO: 951343 - RNA, 26 nt, Human
uaugaaaucagcaaaugccauuuuga

SEQ ID NO: 951344 - RNA, 19 nt, Human
ucagcaaaauccaauauca

SEQ ID NO: 951345 - RNA, 26 nt, Human
uccagacgugaaagguuuaugaaauu

SEQ ID NO: 951346 - RNA, 23 nt, Human
ugaaagguuuaugaaaucagcaa

SEQ ID NO: 951347 - RNA, 20 nt, Human
uuuuuuuuuuuuuuuugcca

SEQ ID NO: 951348 - RNA, 22 nt, Human
uuuuuuuuuuuuuuuuugccau

SEQ ID NO: 951349 - RNA, 27 nt, Human
uuuuuuuuuuuuuuuuuuuuuuugggg

SEQ ID NO: 951350 - RNA, 26 nt, Human
aaaagcucagcggaggugccacugcc

SEQ ID NO: 951351 - RNA, 19 nt, Human
aaacucggaccagccagug

SEQ ID NO: 951352 - RNA, 21 nt, Human
aaagauugaugaugagcccaa

SEQ ID NO: 951353 - RNA, 19 nt, Human
aaaugccuccgugcccacc

SEQ ID NO: 951354 - RNA, 22 nt, Human
aaccccauccccauugcuccau

SEQ ID NO: 951355 - RNA, 26 nt, Human
aaccccauccccauugcuccaucccc

SEQ ID NO: 951356 - RNA, 19 nt, Human
aacucggaccagccaguga

SEQ ID NO: 951357 - RNA, 19 nt, Human
aagagagacagagagacug

SEQ ID NO: 951358 - RNA, 26 nt, Human
aagagucaaugaaacagagucaaggg

SEQ ID NO: 951359 - RNA, 20 nt, Human
aaggagaaaggcuggaggcu

SEQ ID NO: 951360 - RNA, 21 nt, Human
aaggagaaaggcuggaggcuu

SEQ ID NO: 951361 - RNA, 19 nt, Human
aagggaagaaaggcaggga

SEQ ID NO: 951362 - RNA, 24 nt, Human
acauguguguguucaaggcuagga

SEQ ID NO: 951363 - RNA, 19 nt, Human
agaaagagagaaucuacua

SEQ ID NO: 951364 - RNA, 27 nt, Human
agaaaggagaaaggcuggaggcuuugg

SEQ ID NO: 951365 - RNA, 27 nt, Human
agacagagagacagacaaaggggaccc

SEQ ID NO: 951366 - RNA, 23 nt, Human
agagagagaaaggcaaagggaag

SEQ ID NO: 951367 - RNA, 23 nt, Human
agagaugugauuuggggaaagug

SEQ ID NO: 951368 - RNA, 19 nt, Human
agagggaggaggagaaaag

SEQ ID NO: 951369 - RNA, 23 nt, Human
agaggggagaggcugagaaagag

SEQ ID NO: 951370 - RNA, 18 nt, Human
agaggggcuguauucaga

SEQ ID NO: 951371 - RNA, 23 nt, Human
agcaggcugggggggacccggga

SEQ ID NO: 951372 - RNA, 18 nt, Human
agcaucaggcuugggcga

SEQ ID NO: 951373 - RNA, 22 nt, Human
agcggagaaaggagaaaggcug

SEQ ID NO: 951374 - RNA, 19 nt, Human
aggaaagauggcagccagg

SEQ ID NO: 951375 - RNA, 19 nt, Human
aggagaggggagaggcuga

SEQ ID NO: 951376 - RNA, 22 nt, Human
aggcagggagagaaaggagagg

SEQ ID NO: 951377 - RNA, 23 nt, Human
aggcagggagagaaaggagaggg

SEQ ID NO: 951378 - RNA, 18 nt, Human
aggcagggaggugguuac

SEQ ID NO: 951379 - RNA, 22 nt, Human
aggcauagagaagagagaucag

SEQ ID NO: 951380 - RNA, 22 nt, Human
aggcuggaggcuuuggcugagg

SEQ ID NO: 951381 - RNA, 20 nt, Human
aggcugggggggacccggga

SEQ ID NO: 951382 - RNA, 23 nt, Human
aggggcacugugagcuugcugca

SEQ ID NO: 951383 - RNA, 23 nt, Human
aggugguuacauuugucggggac

SEQ ID NO: 951384 - RNA, 20 nt, Human
caacuccucccuucccugcc

SEQ ID NO: 951385 - RNA, 18 nt, Human
caccggaggacgugugug

SEQ ID NO: 951386 - RNA, 23 nt, Human
caggcuggugagagcaagggggu

SEQ ID NO: 951387 - RNA, 23 nt, Human
cagggaggagggagucuuuggca

SEQ ID NO: 951388 - RNA, 23 nt, Human
cagucuguuuuccuggcaaucag

SEQ ID NO: 951389 - RNA, 23 nt, Human
caguggacaagggacaguggcuc

SEQ ID NO: 951390 - RNA, 22 nt, Human
caguggcucccucagacugucc

SEQ ID NO: 951391 - RNA, 26 nt, Human
caucagggaggagggagucuuuggca

SEQ ID NO: 951392 - RNA, 18 nt, Human
cccaaugcuucucucaca

SEQ ID NO: 951393 - RNA, 19 nt, Human
ccccaaccccauccccauu

SEQ ID NO: 951394 - RNA, 18 nt, Human
cccuucucccuuccuuuc

SEQ ID NO: 951395 - RNA, 18 nt, Human
ccuccacauggaugaagg

SEQ ID NO: 951396 - RNA, 19 nt, Human
cucccaugaauugugcagg

SEQ ID NO: 951397 - RNA, 18 nt, Human
cucucucucucucucucc

SEQ ID NO: 951398 - RNA, 18 nt, Human
cucucucucucucucucu

SEQ ID NO: 951399 - RNA, 18 nt, Human
cucucucucucucucucu

SEQ ID NO: 951400 - RNA, 18 nt, Human
cucucucucucucucucu

SEQ ID NO: 951401 - RNA, 18 nt, Human
cucucucucucucucucu

SEQ ID NO: 951402 - RNA, 18 nt, Human
cucucucucucucucucu

SEQ ID NO: 951403 - RNA, 18 nt, Human
cucucucucucucucucu

SEQ ID NO: 951404 - RNA, 18 nt, Human
cucucucucucucucucu

SEQ ID NO: 951405 - RNA, 18 nt, Human
cucucucucucucucucu

SEQ ID NO: 951406 - RNA, 18 nt, Human
cucucucucucucucucu

SEQ ID NO: 951407 - RNA, 18 nt, Human
cucucucucucucucucu

SEQ ID NO: 951408 - RNA, 18 nt, Human
cucucucucucucucucu

SEQ ID NO: 951409 - RNA, 18 nt, Human
cucucucucucucucucu

SEQ ID NO: 951410 - RNA, 18 nt, Human
cucucucucucucucucu

SEQ ID NO: 951411 - RNA, 18 nt, Human
cucucucucucucucucu

SEQ ID NO: 951412 - RNA, 18 nt, Human
cucucucucucucucucu

SEQ ID NO: 951413 - RNA, 18 nt, Human
cucucucucucucucucu

SEQ ID NO: 951414 - RNA, 18 nt, Human
cucucucucucucucucu

SEQ ID NO: 951415 - RNA, 18 nt, Human
cucucucucucucucucu

SEQ ID NO: 951416 - RNA, 18 nt, Human
cucucucucucucucucu

SEQ ID NO: 951417 - RNA, 18 nt, Human
cucucucucucucucucu

SEQ ID NO: 951418 - RNA, 18 nt, Human
cucucucucucucucucu

SEQ ID NO: 951419 - RNA, 23 nt, Human
cugauuccagcgccuacaccagc

SEQ ID NO: 951420 - RNA, 23 nt, Human
cuuuggcaucaggccugucucuu

SEQ ID NO: 951421 - RNA, 24 nt, Human
cuuuguaaacgucuccccaacccc

SEQ ID NO: 951422 - RNA, 19 nt, Human
gagaggcugagaaagagag

SEQ ID NO: 951423 - RNA, 21 nt, Human
gauugaugaugagcccaaagc

SEQ ID NO: 951424 - RNA, 18 nt, Human
gcagggagagaaaggaga

SEQ ID NO: 951425 - RNA, 19 nt, Human
gccccuggugaauucugug

SEQ ID NO: 951426 - RNA, 19 nt, Human
gcggagaaaacucggacca

SEQ ID NO: 951427 - RNA, 18 nt, Human
ggagaggggagaggcuga

SEQ ID NO: 951428 - RNA, 19 nt, Human
ggcauugaagauugccuga

SEQ ID NO: 951429 - RNA, 21 nt, Human
ggcauuggggaggaggguagc

SEQ ID NO: 951430 - RNA, 19 nt, Human
ggcucagggagaucagcag

SEQ ID NO: 951431 - RNA, 18 nt, Human
gggaaagugagaguuuga

SEQ ID NO: 951432 - RNA, 21 nt, Human
gggcacccagacuaggggcac

SEQ ID NO: 951433 - RNA, 23 nt, Human
ggguagaaagacgcuaaguccca

SEQ ID NO: 951434 - RNA, 24 nt, Human
gggugugugugugugugugugugg

SEQ ID NO: 951435 - RNA, 19 nt, Human
ggugcggugggcagcuaga

SEQ ID NO: 951436 - RNA, 21 nt, Human
ggugugugugugugugugugu

SEQ ID NO: 951437 - RNA, 20 nt, Human
gguuacauuugucggggaca

SEQ ID NO: 951438 - RNA, 21 nt, Human
guguguguguguguguacaug

SEQ ID NO: 951439 - RNA, 20 nt, Human
gugugugugugugugugugu

SEQ ID NO: 951440 - RNA, 19 nt, Human
guuuuccuggcaaucaggg

SEQ ID NO: 951441 - RNA, 23 nt, Human
uaaacgucuccccaaccccaucc

SEQ ID NO: 951442 - RNA, 23 nt, Human
uaaaugaugaagaaccuuuguaa

SEQ ID NO: 951443 - RNA, 22 nt, Human
uauacagagacacaacacaggg

SEQ ID NO: 951444 - RNA, 19 nt, Human
ucaagggcauuggggagga

SEQ ID NO: 951445 - RNA, 21 nt, Human
ucacaaagaaagaugcugggu

SEQ ID NO: 951446 - RNA, 18 nt, Human
ucagagcccacaucccag

SEQ ID NO: 951447 - RNA, 18 nt, Human
uccaucccagggaugaga

SEQ ID NO: 951448 - RNA, 23 nt, Human
ucccaugaauugugcagggagcu

SEQ ID NO: 951449 - RNA, 19 nt, Human
ucccucagacuguccucca

SEQ ID NO: 951450 - RNA, 19 nt, Human
uccucccuucccugccggg

SEQ ID NO: 951451 - RNA, 19 nt, Human
ucuccccaaccccaucccc

SEQ ID NO: 951452 - RNA, 19 nt, Human
ucucucucucccuucuccc

SEQ ID NO: 951453 - RNA, 23 nt, Human
ucuuuggcagcagugcccaacgu

SEQ ID NO: 951454 - RNA, 20 nt, Human
ugacugggagugauuuucau

SEQ ID NO: 951455 - RNA, 23 nt, Human
ugacuugguuuaaaagcucagcg

SEQ ID NO: 951456 - RNA, 25 nt, Human
ugacuugguuuaaaagcucagcggg

SEQ ID NO: 951457 - RNA, 18 nt, Human
ugagaaagagagaaucua

SEQ ID NO: 951458 - RNA, 19 nt, Human
ugagaaagagagaaucuac

SEQ ID NO: 951459 - RNA, 19 nt, Human
ugagaaagagagaaucuac

SEQ ID NO: 951460 - RNA, 19 nt, Human
ugagagcaagggggugagg

SEQ ID NO: 951461 - RNA, 20 nt, Human
ugagagcaagggggugaggc

SEQ ID NO: 951462 - RNA, 24 nt, Human
ugagagcaagggggugaggcuagg

SEQ ID NO: 951463 - RNA, 23 nt, Human
ugaggcuuccucagacccauggc

SEQ ID NO: 951464 - RNA, 24 nt, Human
ugccacugccagaagcggagaaaa

SEQ ID NO: 951465 - RNA, 20 nt, Human
ugccccaaugcuucucucac

SEQ ID NO: 951466 - RNA, 21 nt, Human
ugcuuuagagagagagaaagg

SEQ ID NO: 951467 - RNA, 23 nt, Human
uggaagggaaagaagagggagga

SEQ ID NO: 951468 - RNA, 20 nt, Human
uggaaucucagguuugggcc

SEQ ID NO: 951469 - RNA, 20 nt, Human
uggcagccaggaagcuguug

SEQ ID NO: 951470 - RNA, 18 nt, Human
uggccaccuuggggaagg

SEQ ID NO: 951471 - RNA, 22 nt, Human
ugggcagcuagagcaggcuggg

SEQ ID NO: 951472 - RNA, 20 nt, Human
uggugagggaggugggcuga

SEQ ID NO: 951473 - RNA, 23 nt, Human
uguccgggucugcugacaacugg

SEQ ID NO: 951474 - RNA, 20 nt, Human
ugucguuuguuuuuguuuug

SEQ ID NO: 951475 - RNA, 21 nt, Human
uguggugagggaggugggcug

SEQ ID NO: 951476 - RNA, 19 nt, Human
uguguguguacaugugugu

SEQ ID NO: 951477 - RNA, 20 nt, Human
uguguguguacaugugugug

SEQ ID NO: 951478 - RNA, 21 nt, Human
uguguguguacaugugugugu

SEQ ID NO: 951479 - RNA, 21 nt, Human
uguguguguguacaugugugu

SEQ ID NO: 951480 - RNA, 21 nt, Human
uguguguguguacaugugugu

SEQ ID NO: 951481 - RNA, 22 nt, Human
uguguguguguacaugugugug

SEQ ID NO: 951482 - RNA, 23 nt, Human
uguguguguguguacaugugugu

SEQ ID NO: 951483 - RNA, 19 nt, Human
uguguguguguguguacau

SEQ ID NO: 951484 - RNA, 19 nt, Human
uguguguguguguguacau

SEQ ID NO: 951485 - RNA, 18 nt, Human
ugugugugugugugugug

SEQ ID NO: 951486 - RNA, 18 nt, Human
ugugugugugugugugug

SEQ ID NO: 951487 - RNA, 18 nt, Human
ugugugugugugugugug

SEQ ID NO: 951488 - RNA, 18 nt, Human
ugugugugugugugugug

SEQ ID NO: 951489 - RNA, 18 nt, Human
ugugugugugugugugug

SEQ ID NO: 951490 - RNA, 18 nt, Human
ugugugugugugugugug

SEQ ID NO: 951491 - RNA, 23 nt, Human
uguguguguguguguguguacau

SEQ ID NO: 951492 - RNA, 21 nt, Human
ugugugugugugugugugugu

SEQ ID NO: 951493 - RNA, 21 nt, Human
ugugugugugugugugugugu

SEQ ID NO: 951494 - RNA, 21 nt, Human
ugugugugugugugugugugu

SEQ ID NO: 951495 - RNA, 21 nt, Human
ugugugugugugugugugugu

SEQ ID NO: 951496 - RNA, 21 nt, Human
ugugugugugugugugugugu

SEQ ID NO: 951497 - RNA, 21 nt, Human
ugugugugugugugugugugu

SEQ ID NO: 951498 - RNA, 21 nt, Human
ugugugugugugugugugugu

SEQ ID NO: 951499 - RNA, 21 nt, Human
ugugugugugugugugugugu

SEQ ID NO: 951500 - RNA, 21 nt, Human
ugugugugugugugugugugu

SEQ ID NO: 951501 - RNA, 22 nt, Human
ugugugugugugugugugugua

SEQ ID NO: 951502 - RNA, 22 nt, Human
ugugugugugugugugugugug

SEQ ID NO: 951503 - RNA, 22 nt, Human
ugugugugugugugugugugug

SEQ ID NO: 951504 - RNA, 22 nt, Human
ugugugugugugugugugugug

SEQ ID NO: 951505 - RNA, 22 nt, Human
ugugugugugugugugugugug

SEQ ID NO: 951506 - RNA, 19 nt, Human
uguucauuuaccuaagagc

SEQ ID NO: 951507 - RNA, 25 nt, Human
uuagaaaaugguuauucaaggcaag

SEQ ID NO: 951508 - RNA, 18 nt, Human
uuccauagccaugauauu

SEQ ID NO: 951509 - RNA, 21 nt, Human
uuccuggucaggcuggugaga

SEQ ID NO: 951510 - RNA, 18 nt, Human
uucuguagagaaugucag

SEQ ID NO: 951511 - RNA, 19 nt, Human
uugcuaggaagcacacagg

SEQ ID NO: 951512 - RNA, 20 nt, Human
uugucguuuguuuuuguuuu

SEQ ID NO: 951513 - RNA, 20 nt, Human
uugugcagggagcugagggu

SEQ ID NO: 951514 - RNA, 30 nt, Human
uugugcaugcaccggaggacguguguguag

SEQ ID NO: 951515 - RNA, 20 nt, Human
uuuugcuguuguuuuugcgg

SEQ ID NO: 951516 - RNA, 21 nt, Human
aaacucaauauucagaagcuu

SEQ ID NO: 951517 - RNA, 21 nt, Human
aaccugcaaacaauauaaaga

SEQ ID NO: 951518 - RNA, 21 nt, Human
aauaacaaaggaacagagaaa

SEQ ID NO: 951519 - RNA, 23 nt, Human
aauaacaaaggaacagagaaaaa

SEQ ID NO: 951520 - RNA, 22 nt, Human
accuuggcugugggcuggagac

SEQ ID NO: 951521 - RNA, 25 nt, Human
agaaaaauauuaauaacaaaaagaa

SEQ ID NO: 951522 - RNA, 25 nt, Human
agagaaaaauauuaauaacaaaaag

SEQ ID NO: 951523 - RNA, 27 nt, Human
agagaaaaauauuaauaacaaaaagaa

SEQ ID NO: 951524 - RNA, 24 nt, Human
agcagacucaagucaaagguuuua

SEQ ID NO: 951525 - RNA, 26 nt, Human
agcaggaauaugaagaaacccccaga

SEQ ID NO: 951526 - RNA, 25 nt, Human
aggaacagagaaaaauauuaauaac

SEQ ID NO: 951527 - RNA, 19 nt, Human
aggaauaugaagaaacccc

SEQ ID NO: 951528 - RNA, 21 nt, Human
aggaauaugaagaaaccccca

SEQ ID NO: 951529 - RNA, 19 nt, Human
aggcaucaggagaucacug

SEQ ID NO: 951530 - RNA, 20 nt, Human
auaacaaaggaacagagaaa

SEQ ID NO: 951531 - RNA, 22 nt, Human
auacaguuuaccucauuuuuuu

SEQ ID NO: 951532 - RNA, 21 nt, Human
auuucucagcaaacucaauau

SEQ ID NO: 951533 - RNA, 22 nt, Human
caaaccaugcaaguaauaacaa

SEQ ID NO: 951534 - RNA, 30 nt, Human
caacagcaggaauaugaagaaacccccagg

SEQ ID NO: 951535 - RNA, 18 nt, Human
cacgugggaacccgggag

SEQ ID NO: 951536 - RNA, 24 nt, Human
cagcaaacucaauauucagaagcu

SEQ ID NO: 951537 - RNA, 22 nt, Human
caggaauaugaagaaaccccca

SEQ ID NO: 951538 - RNA, 21 nt, Human
caggagaucacugcugguggg

SEQ ID NO: 951539 - RNA, 25 nt, Human
cauuccauaccauaccgcuccacug

SEQ ID NO: 951540 - RNA, 22 nt, Human
ccaaaccaugcaaguaauaaca

SEQ ID NO: 951541 - RNA, 21 nt, Human
ccacucuuccccccacccccc

SEQ ID NO: 951542 - RNA, 27 nt, Human
ccauaccgcuccacuccacaguuuuau

SEQ ID NO: 951543 - RNA, 19 nt, Human
cccaccccccaccacaagu

SEQ ID NO: 951544 - RNA, 24 nt, Human
cccaccccccaccacaaguugucc

SEQ ID NO: 951545 - RNA, 25 nt, Human
cccaccccccaccacaaguugucca

SEQ ID NO: 951546 - RNA, 24 nt, Human
ccccccaccacaaguuguccaggc

SEQ ID NO: 951547 - RNA, 20 nt, Human
ccccccaccccccaccacaa

SEQ ID NO: 951548 - RNA, 22 nt, Human
cccccucccacucuucccccca

SEQ ID NO: 951549 - RNA, 20 nt, Human
cccgggcagcggggccaaga

SEQ ID NO: 951550 - RNA, 19 nt, Human
cccucccgggcagcggggc

SEQ ID NO: 951551 - RNA, 21 nt, Human
ccgcuccacuccacaguuuua

SEQ ID NO: 951552 - RNA, 25 nt, Human
ccucccacucuuccccccacccccc

SEQ ID NO: 951553 - RNA, 19 nt, Human
ccucccgggcagcggggcc

SEQ ID NO: 951554 - RNA, 22 nt, Human
cgcgcccccggcccucccgggc

SEQ ID NO: 951555 - RNA, 24 nt, Human
cucacaauaaaaacuaacuaaaaa

SEQ ID NO: 951556 - RNA, 25 nt, Human
cuggauuuaacucccccucccacuc

SEQ ID NO: 951557 - RNA, 23 nt, Human
cuguucccuccuccgccggaggc

SEQ ID NO: 951558 - RNA, 23 nt, Human
cuuuaccagcagacucaagucaa

SEQ ID NO: 951559 - RNA, 19 nt, Human
gaagggcccggggcgcugc

SEQ ID NO: 951560 - RNA, 24 nt, Human
gagaaaaauauuaauaacaaaaag

SEQ ID NO: 951561 - RNA, 24 nt, Human
gaugcuguuggaguccccgcagcu

SEQ ID NO: 951562 - RNA, 18 nt, Human
ggaguccccgcagcuggu

SEQ ID NO: 951563 - RNA, 20 nt, Human
ggugcugaagggcccggggc

SEQ ID NO: 951564 - RNA, 24 nt, Human
gugcacgccccggcagccgcacgu

SEQ ID NO: 951565 - RNA, 21 nt, Human
uaaaaaaacaaaguacuucac

SEQ ID NO: 951566 - RNA, 21 nt, Human
uaaaccugcaaacaauauaaa

SEQ ID NO: 951567 - RNA, 21 nt, Human
uaacaaaaagaaaaucauuaa

SEQ ID NO: 951568 - RNA, 24 nt, Human
uaacaaaggaacagagaaaaauau

SEQ ID NO: 951569 - RNA, 26 nt, Human
uaacaacauuuucucccugacagcuu

SEQ ID NO: 951570 - RNA, 21 nt, Human
uaacaauacuucauaagacug

SEQ ID NO: 951571 - RNA, 26 nt, Human
uaacucccccucccacucuucccccc

SEQ ID NO: 951572 - RNA, 19 nt, Human
uagagggugcugaagggcc

SEQ ID NO: 951573 - RNA, 25 nt, Human
uauguuuauauuucucuuuuuaaaa

SEQ ID NO: 951574 - RNA, 19 nt, Human
ucacugcuggugggccccu

SEQ ID NO: 951575 - RNA, 18 nt, Human
ucaggagaucacugcugg

SEQ ID NO: 951576 - RNA, 22 nt, Human
uccaggcagagauacauuaagg

SEQ ID NO: 951577 - RNA, 21 nt, Human
ucccacucuuccccccacccc

SEQ ID NO: 951578 - RNA, 19 nt, Human
ucccagacugugcacgccc

SEQ ID NO: 951579 - RNA, 20 nt, Human
ucccagacugugcacgcccc

SEQ ID NO: 951580 - RNA, 22 nt, Human
ucccagcuguucccuccuccgc

SEQ ID NO: 951581 - RNA, 21 nt, Human
uccccccaccccccaccacaa

SEQ ID NO: 951582 - RNA, 23 nt, Human
ucccccucccacucuucccccca

SEQ ID NO: 951583 - RNA, 19 nt, Human
ucucccugacagcuuacau

SEQ ID NO: 951584 - RNA, 23 nt, Human
ucucccugacagcuuacauucca

SEQ ID NO: 951585 - RNA, 20 nt, Human
ugaagaaacccccagaucuu

SEQ ID NO: 951586 - RNA, 23 nt, Human
ugcugaagggcccggggcgcugc

SEQ ID NO: 951587 - RNA, 18 nt, Human
uggcaagcauuucugguc

SEQ ID NO: 951588 - RNA, 20 nt, Human
ugggccccucacuuuaccag

SEQ ID NO: 951589 - RNA, 20 nt, Human
uguuggaguccccgcagcug

SEQ ID NO: 951590 - RNA, 24 nt, Human
uuaacucccccucccacucuuccc

SEQ ID NO: 951591 - RNA, 19 nt, Human
uuccaagucauuccauacc

SEQ ID NO: 951592 - RNA, 19 nt, Human
uuccccccaccccccacca

SEQ ID NO: 951593 - RNA, 22 nt, Human
uucccuccuccgccggaggccg

SEQ ID NO: 951594 - RNA, 26 nt, Human
uuuaaaaagacauuuaauaacaauac

SEQ ID NO: 951595 - RNA, 21 nt, Human
uuucacagcagugcuuuggca

SEQ ID NO: 951596 - RNA, 22 nt, Human
uuuuuuuuuuuuuuuuuuuggc

SEQ ID NO: 951597 - RNA, 28 nt, Human
uuuuuuuuuuuuuuuuuuuuuuuggggg

SEQ ID NO: 951598 - RNA, 22 nt, Human
accagcauggcccaaggagaca

SEQ ID NO: 951599 - RNA, 20 nt, Human
cagaccagcauggcccaagg

SEQ ID NO: 951600 - RNA, 18 nt, Human
ucagaccagcauggccca

SEQ ID NO: 951601 - RNA, 19 nt, Human
uggcccaaggagacaguac

SEQ ID NO: 951602 - RNA, 22 nt, Human
uuauauacguugccccucgucc

SEQ ID NO: 951603 - RNA, 22 nt, Human
uuuuuuuuuuuuuugccaguaa

SEQ ID NO: 951604 - RNA, 18 nt, Human
uuuuuuuuuuuuuuuuug

SEQ ID NO: 951605 - RNA, 23 nt, Human
uuuuuuuuuuuuuuuuugccagu

SEQ ID NO: 951606 - RNA, 28 nt, Human
caaaugauccuuuauugaaauguuuucc

SEQ ID NO: 951607 - RNA, 19 nt, Human
gaaguugcaccuuggccuc

SEQ ID NO: 951608 - RNA, 25 nt, Human
aaagaaaaaacacaaguccacucug

SEQ ID NO: 951609 - RNA, 22 nt, Human
aaagcauuauccagggcuugga

SEQ ID NO: 951610 - RNA, 18 nt, Human
aaagugcugggauuacag

SEQ ID NO: 951611 - RNA, 24 nt, Human
aaagugcugggauuacagcuguga

SEQ ID NO: 951612 - RNA, 20 nt, Human
aacagugcuucaacacagaa

SEQ ID NO: 951613 - RNA, 20 nt, Human
aacagugcuucaacacagaa

SEQ ID NO: 951614 - RNA, 20 nt, Human
aagaagaaggggcccaucca

SEQ ID NO: 951615 - RNA, 24 nt, Human
acaccacguggagacccagcauga

SEQ ID NO: 951616 - RNA, 24 nt, Human
acaccacguggagacccagcauga

SEQ ID NO: 951617 - RNA, 19 nt, Human
agaaaaccguuuuacauca

SEQ ID NO: 951618 - RNA, 20 nt, Human
agccaaccucaaagugcugg

SEQ ID NO: 951619 - RNA, 19 nt, Human
aggggagcgagugagaggc

SEQ ID NO: 951620 - RNA, 24 nt, Human
agugcugggauuacagcugugagc

SEQ ID NO: 951621 - RNA, 19 nt, Human
auccagggcuuggacuguc

SEQ ID NO: 951622 - RNA, 24 nt, Human
auccuguucugcggcuuccuuggc

SEQ ID NO: 951623 - RNA, 23 nt, Human
auuauccagggcuuggacugucu

SEQ ID NO: 951624 - RNA, 23 nt, Human
auuauccagggcuuggacugucu

SEQ ID NO: 951625 - RNA, 19 nt, Human
caaagugcugggauuacag

SEQ ID NO: 951626 - RNA, 24 nt, Human
caaagugcugggauuacagcugug

SEQ ID NO: 951627 - RNA, 21 nt, Human
caacagugcuucaacacagaa

SEQ ID NO: 951628 - RNA, 19 nt, Human
cacccccccgggccuccgc

SEQ ID NO: 951629 - RNA, 19 nt, Human
cacuaaccaaacaaccaac

SEQ ID NO: 951630 - RNA, 19 nt, Human
cacuaaccaaacaaccaac

SEQ ID NO: 951631 - RNA, 24 nt, Human
cagccaaccucaaagugcugggau

SEQ ID NO: 951632 - RNA, 19 nt, Human
cagcugugagcaccagccc

SEQ ID NO: 951633 - RNA, 20 nt, Human
caucccaggcccaguuguuc

SEQ ID NO: 951634 - RNA, 20 nt, Human
caucccaggcccaguuguuc

SEQ ID NO: 951635 - RNA, 18 nt, Human
cauguuggccaggcuggu

SEQ ID NO: 951636 - RNA, 20 nt, Human
cauguuggccaggcuggucu

SEQ ID NO: 951637 - RNA, 24 nt, Human
cauguuggccaggcuggucuugaa

SEQ ID NO: 951638 - RNA, 19 nt, Human
ccagggcuuggacugucuu

SEQ ID NO: 951639 - RNA, 19 nt, Human
ccagggcuuggacugucuu

SEQ ID NO: 951640 - RNA, 19 nt, Human
cccaaauccccuggcagga

SEQ ID NO: 951641 - RNA, 19 nt, Human
cccaaauccccuggcagga

SEQ ID NO: 951642 - RNA, 18 nt, Human
cccccgggccuccgcccc

SEQ ID NO: 951643 - RNA, 21 nt, Human
cccccgggccuccgccccgaa

SEQ ID NO: 951644 - RNA, 23 nt, Human
ccccgggccuccgccccgaaccc

SEQ ID NO: 951645 - RNA, 24 nt, Human
ccccgggccuccgccccgaacccu

SEQ ID NO: 951646 - RNA, 25 nt, Human
ccgauggcgcuggaugaugcccaaa

SEQ ID NO: 951647 - RNA, 21 nt, Human
ccgccccgaacccuccagacu

SEQ ID NO: 951648 - RNA, 22 nt, Human
ccucaaagugcugggauuacag

SEQ ID NO: 951649 - RNA, 22 nt, Human
cgaacgcugucugcgaagaaga

SEQ ID NO: 951650 - RNA, 22 nt, Human
cgccccgaacccuccagacugg

SEQ ID NO: 951651 - RNA, 22 nt, Human
cgcgcacccccccgggccuccg

SEQ ID NO: 951652 - RNA, 24 nt, Human
cggaccccgggcgcgcgcaccccc

SEQ ID NO: 951653 - RNA, 19 nt, Human
cggucagcuggguggccag

SEQ ID NO: 951654 - RNA, 25 nt, Human
cguuuuacaucagucacuaaccaaa

SEQ ID NO: 951655 - RNA, 25 nt, Human
cguuuuacaucagucacuaaccaaa

SEQ ID NO: 951656 - RNA, 19 nt, Human
cugccgacugauuccaagu

SEQ ID NO: 951657 - RNA, 19 nt, Human
cugccgacugauuccaagu

SEQ ID NO: 951658 - RNA, 21 nt, Human
cugugagcaccagcccaaccu

SEQ ID NO: 951659 - RNA, 25 nt, Human
cuuggacugucuuucaagaaagccc

SEQ ID NO: 951660 - RNA, 25 nt, Human
cuuggacugucuuucaagaaagccc

SEQ ID NO: 951661 - RNA, 20 nt, Human
gaaacacaccacguggagac

SEQ ID NO: 951662 - RNA, 20 nt, Human
gaaacacaccacguggagac

SEQ ID NO: 951663 - RNA, 19 nt, Human
gaagagccgggcguuggca

SEQ ID NO: 951664 - RNA, 24 nt, Human
gacauguuggccaggcuggucuug

SEQ ID NO: 951665 - RNA, 18 nt, Human
gacgagaggggagcgagu

SEQ ID NO: 951666 - RNA, 21 nt, Human
gauuacagcugugagcaccag

SEQ ID NO: 951667 - RNA, 21 nt, Human
gcccaaccuugccucuuuaaa

SEQ ID NO: 951668 - RNA, 21 nt, Human
gcccaguuguucccacgaaac

SEQ ID NO: 951669 - RNA, 21 nt, Human
gcccaguuguucccacgaaac

SEQ ID NO: 951670 - RNA, 24 nt, Human
gccucuguaaccuccccacaagaa

SEQ ID NO: 951671 - RNA, 24 nt, Human
gccucuguaaccuccccacaagaa

SEQ ID NO: 951672 - RNA, 20 nt, Human
gcgccuagagcccgggcagc

SEQ ID NO: 951673 - RNA, 22 nt, Human
ggauuacagcugugagcaccag

SEQ ID NO: 951674 - RNA, 18 nt, Human
ggcccugcggcugcggac

SEQ ID NO: 951675 - RNA, 18 nt, Human
ggcuggucuugaacuccc

SEQ ID NO: 951676 - RNA, 19 nt, Human
gggccuccgccccgaaccc

SEQ ID NO: 951677 - RNA, 22 nt, Human
gggccuccgccccgaacccucc

SEQ ID NO: 951678 - RNA, 18 nt, Human
gggcgcgcgcaccccccc

SEQ ID NO: 951679 - RNA, 18 nt, Human
guaaagcauuauccaggg

SEQ ID NO: 951680 - RNA, 18 nt, Human
guaaagcauuauccaggg

SEQ ID NO: 951681 - RNA, 24 nt, Human
guaaagcauuauccagggcuugga

SEQ ID NO: 951682 - RNA, 23 nt, Human
gugagcaccagcccaaccuugcc

SEQ ID NO: 951683 - RNA, 19 nt, Human
guucccacgaaacacacca

SEQ ID NO: 951684 - RNA, 19 nt, Human
guucccacgaaacacacca

SEQ ID NO: 951685 - RNA, 18 nt, Human
uaaccaaacaaccaacag

SEQ ID NO: 951686 - RNA, 18 nt, Human
uaaccaaacaaccaacag

SEQ ID NO: 951687 - RNA, 22 nt, Human
uacagcugugagcaccagccca

SEQ ID NO: 951688 - RNA, 25 nt, Human
uacggcccugcggcuccugcgcagg

SEQ ID NO: 951689 - RNA, 25 nt, Human
uacggcccugcggcuccugcgcagg

SEQ ID NO: 951690 - RNA, 24 nt, Human
ucaaagugcugggauuacagcugu

SEQ ID NO: 951691 - RNA, 19 nt, Human
ucaacacagaaaguaaagc

SEQ ID NO: 951692 - RNA, 19 nt, Human
ucaacacagaaaguaaagc

SEQ ID NO: 951693 - RNA, 19 nt, Human
ucaagaaagccccaaaucc

SEQ ID NO: 951694 - RNA, 24 nt, Human
ucagugaugacucgagcuuucucc

SEQ ID NO: 951695 - RNA, 23 nt, Human
ucccgcguuggcugaagcgccag

SEQ ID NO: 951696 - RNA, 18 nt, Human
uccuguucugcggcuucc

SEQ ID NO: 951697 - RNA, 23 nt, Human
uccuuggcucuuuuugcccguau

SEQ ID NO: 951698 - RNA, 19 nt, Human
ucugcggcuuccuuggcuc

SEQ ID NO: 951699 - RNA, 24 nt, Human
ucugcggcuuccuuggcucuuuuu

SEQ ID NO: 951700 - RNA, 22 nt, Human
ucuuccucagugaugacucgag

SEQ ID NO: 951701 - RNA, 22 nt, Human
ucuugaacucccagccaaccuc

SEQ ID NO: 951702 - RNA, 24 nt, Human
ugacauguuggccaggcuggucuu

SEQ ID NO: 951703 - RNA, 19 nt, Human
ugaccgguccggucagcug

SEQ ID NO: 951704 - RNA, 19 nt, Human
ugacucgagcuuucuccuu

SEQ ID NO: 951705 - RNA, 22 nt, Human
ugagcaccagcccaaccuugcc

SEQ ID NO: 951706 - RNA, 18 nt, Human
ugauuccaaguccccagg

SEQ ID NO: 951707 - RNA, 24 nt, Human
uggacugucuuucaagaaagcccc

SEQ ID NO: 951708 - RNA, 24 nt, Human
uggacugucuuucaagaaagcccc

SEQ ID NO: 951709 - RNA, 23 nt, Human
uggccaggcuggucuugaacucc

SEQ ID NO: 951710 - RNA, 18 nt, Human
ugggauuacagcugugag

SEQ ID NO: 951711 - RNA, 21 nt, Human
ugggauuacagcugugagcac

SEQ ID NO: 951712 - RNA, 23 nt, Human
ugggauuacagcugugagcacca

SEQ ID NO: 951713 - RNA, 25 nt, Human
uuuaaaaagaaaaaacacaagucca

SEQ ID NO: 951714 - RNA, 22 nt, Human
uuucaagaaagccccaaauccc

SEQ ID NO: 951715 - RNA, 25 nt, Human
uuuuuuuuuuuuuuuuuuuucaugg

SEQ ID NO: 951716 - RNA, 20 nt, Human
aagacccuuuccuugcuccc

SEQ ID NO: 951717 - RNA, 25 nt, Human
acugguugcucuuccuauuggucau

SEQ ID NO: 951718 - RNA, 19 nt, Human
caaaauacaggugaggagc

SEQ ID NO: 951719 - RNA, 20 nt, Human
caaaauacaggugaggagca

SEQ ID NO: 951720 - RNA, 21 nt, Human
cacaauucuccgagugcuuuc

SEQ ID NO: 951721 - RNA, 21 nt, Human
ccccaagugcuugcacauucu

SEQ ID NO: 951722 - RNA, 25 nt, Human
cucauaguaacugguugcucuuccu

SEQ ID NO: 951723 - RNA, 18 nt, Human
cuggacugcugcugcccc

SEQ ID NO: 951724 - RNA, 19 nt, Human
cuggacugcugcugccccu

SEQ ID NO: 951725 - RNA, 23 nt, Human
gcaacaauggaggaagggcaggc

SEQ ID NO: 951726 - RNA, 22 nt, Human
ggagcaugggcgaugccuguaa

SEQ ID NO: 951727 - RNA, 24 nt, Human
ggcaacaauggaggaagggcaggc

SEQ ID NO: 951728 - RNA, 28 nt, Human
ggcaacaauggaggaagggccgguaccc

SEQ ID NO: 951729 - RNA, 21 nt, Human
ggugaggagcaugggcgaugc

SEQ ID NO: 951730 - RNA, 21 nt, Human
uaacugguugcucuuccuauu

SEQ ID NO: 951731 - RNA, 21 nt, Human
uacccuguguacaacagcaag

SEQ ID NO: 951732 - RNA, 21 nt, Human
uagaaauacccuguguacaac

SEQ ID NO: 951733 - RNA, 22 nt, Human
uagaaauacccuguguacaaca

SEQ ID NO: 951734 - RNA, 21 nt, Human
uagggcccuccaaucagucuu

SEQ ID NO: 951735 - RNA, 22 nt, Human
uagggcccuccaaucagucuuc

SEQ ID NO: 951736 - RNA, 19 nt, Human
ucaagcaacuucgggaggc

SEQ ID NO: 951737 - RNA, 19 nt, Human
uccagggcaacaauggagg

SEQ ID NO: 951738 - RNA, 19 nt, Human
ucccagggcugccuguggc

SEQ ID NO: 951739 - RNA, 22 nt, Human
ucccagggcugccuguggcacc

SEQ ID NO: 951740 - RNA, 18 nt, Human
uccuaugucccagggcug

SEQ ID NO: 951741 - RNA, 20 nt, Human
ucggcagccgcuuggaaaag

SEQ ID NO: 951742 - RNA, 18 nt, Human
uggcaccuggacugcugc

SEQ ID NO: 951743 - RNA, 22 nt, Human
uguguacaacagcaagcucaug

SEQ ID NO: 951744 - RNA, 25 nt, Human
uuuuuuuuucuuuaaaagcaauuua

SEQ ID NO: 951745 - RNA, 23 nt, Human
uuuuuuuuuuuuuucuuuaaaag

SEQ ID NO: 951746 - RNA, 25 nt, Human
uuuuuuuuuuuuuuuuuucuuuaaa

SEQ ID NO: 951747 - RNA, 19 nt, Human
aggcgagaaggaagaagac

SEQ ID NO: 951748 - RNA, 18 nt, Human
ccuaacucuagccucaac

SEQ ID NO: 951749 - RNA, 22 nt, Human
ccuaacucuagccucaacaggc

SEQ ID NO: 951750 - RNA, 19 nt, Human
cucuagccucaacaggcuu

SEQ ID NO: 951751 - RNA, 22 nt, Human
uaacucuagccucaacaggcuu

SEQ ID NO: 951752 - RNA, 18 nt, Human
ucaacaggcuuuaaaucc

SEQ ID NO: 951753 - RNA, 23 nt, Human
uuaaauacauuugucaacagguc

SEQ ID NO: 951754 - RNA, 28 nt, Human
uuaaauacauuugucaacaggucaaaaa

SEQ ID NO: 951755 - RNA, 18 nt, Human
uuuuuuuuuuuuuuuuug

SEQ ID NO: 951756 - RNA, 21 nt, Human
aaacaggaaaugaaauguucc

SEQ ID NO: 951757 - RNA, 23 nt, Human
aaacaggaaaugaaauguuccag

SEQ ID NO: 951758 - RNA, 24 nt, Human
aaacaggaaaugaaauguuccaga

SEQ ID NO: 951759 - RNA, 21 nt, Human
aaagaaacacacccuagccuc

SEQ ID NO: 951760 - RNA, 20 nt, Human
acccuagccucaaaaucucc

SEQ ID NO: 951761 - RNA, 24 nt, Human
cacacccuagccucaaaaucuccu

SEQ ID NO: 951762 - RNA, 24 nt, Human
cagaggcacagguaacaaaacagg

SEQ ID NO: 951763 - RNA, 22 nt, Human
cccuccggcuacuagcugccuc

SEQ ID NO: 951764 - RNA, 21 nt, Human
ccuccggcuacuagcugccuc

SEQ ID NO: 951765 - RNA, 18 nt, Human
gaggcacagguaacaaaa

SEQ ID NO: 951766 - RNA, 20 nt, Human
uaacaaaacaggaaaugaaa

SEQ ID NO: 951767 - RNA, 19 nt, Human
uccgaaaaguucgaaagaa

SEQ ID NO: 951768 - RNA, 19 nt, Human
ugaaauguuccagacauuc

SEQ ID NO: 951769 - RNA, 19 nt, Human
ugccucagacccugagugc

SEQ ID NO: 951770 - RNA, 18 nt, Human
accacccgggccuacagc

SEQ ID NO: 951771 - RNA, 20 nt, Human
cgggccuacagcaaaaagga

SEQ ID NO: 951772 - RNA, 19 nt, Human
uacagcaaaaaggaaagaa

SEQ ID NO: 951773 - RNA, 24 nt, Human
uuuuuuuuuuuuuuuuuuuucuuu

SEQ ID NO: 951774 - RNA, 26 nt, Human
uuuuuuuuuuuuuuuuuuuuuucuuu

SEQ ID NO: 951775 - RNA, 23 nt, Human
cagcguccaaguuggaaaggaag

SEQ ID NO: 951776 - RNA, 22 nt, Human
gcaauuuuauaacuuuauuuga

SEQ ID NO: 951777 - RNA, 20 nt, Human
aaacagaaaacgugcacaug

SEQ ID NO: 951778 - RNA, 21 nt, Human
aacagaaaacgugcacaugag

SEQ ID NO: 951779 - RNA, 18 nt, Human
aaggaagaugccagaugg

SEQ ID NO: 951780 - RNA, 23 nt, Human
ccaccuccguaggcagcgccgag

SEQ ID NO: 951781 - RNA, 20 nt, Human
cgagaaggagauggcugcca

SEQ ID NO: 951782 - RNA, 20 nt, Human
gaagaugccagauggcaguu

SEQ ID NO: 951783 - RNA, 23 nt, Human
uccguaggcagcgccgaggaaga

SEQ ID NO: 951784 - RNA, 18 nt, Human
aaacauguaccagauaua

SEQ ID NO: 951785 - RNA, 19 nt, Human
aagcagacgucacuggaug

SEQ ID NO: 951786 - RNA, 22 nt, Human
caacguccccggaagaggaaga

SEQ ID NO: 951787 - RNA, 24 nt, Human
caagcagacgucacuggaugcaaa

SEQ ID NO: 951788 - RNA, 19 nt, Human
cagacaacguccccggaag

SEQ ID NO: 951789 - RNA, 20 nt, Human
cagauauauaucagagcucc

SEQ ID NO: 951790 - RNA, 21 nt, Human
cagcucaaaggacugcuucug

SEQ ID NO: 951791 - RNA, 21 nt, Human
ccugcagacaacguccccgga

SEQ ID NO: 951792 - RNA, 23 nt, Human
cucaagcugaggugagguagcuc

SEQ ID NO: 951793 - RNA, 19 nt, Human
gaaaacaggauuuugcagc

SEQ ID NO: 951794 - RNA, 18 nt, Human
gaugcaaaacuggaaaga

SEQ ID NO: 951795 - RNA, 18 nt, Human
gugccugcagacaacguc

SEQ ID NO: 951796 - RNA, 18 nt, Human
ucaagaugccaagcagac

SEQ ID NO: 951797 - RNA, 20 nt, Human
uccccggaagaggaagaaaa

SEQ ID NO: 951798 - RNA, 21 nt, Human
ucucucaagcugaggugaggu

SEQ ID NO: 951799 - RNA, 23 nt, Human
ucucugggggaaaacaggauuuu

SEQ ID NO: 951800 - RNA, 20 nt, Human
ucugagugccccuacaccag

SEQ ID NO: 951801 - RNA, 21 nt, Human
ugagagcucuaggcuuccuca

SEQ ID NO: 951802 - RNA, 21 nt, Human
ugagugccccuacaccagcuc

SEQ ID NO: 951803 - RNA, 22 nt, Human
ugagugccccuacaccagcuca

SEQ ID NO: 951804 - RNA, 20 nt, Human
ugccugcagacaacgucccc

SEQ ID NO: 951805 - RNA, 21 nt, Human
uggacagcgucuuuucauuuu

SEQ ID NO: 951806 - RNA, 22 nt, Human
aagccgccaacgccgccgcccg

SEQ ID NO: 951807 - RNA, 19 nt, Human
ccagcugugcuuuauugac

SEQ ID NO: 951808 - RNA, 22 nt, Human
aagcuguucuuuauuucaggga

SEQ ID NO: 951809 - RNA, 18 nt, Human
agaggacccgggaguccg

SEQ ID NO: 951810 - RNA, 19 nt, Human
agcgacggggagaaggggc

SEQ ID NO: 951811 - RNA, 29 nt, Human
cacaaccaaccauccuccaaccugcacag

SEQ ID NO: 951812 - RNA, 20 nt, Human
cagggagagggcaggggagg

SEQ ID NO: 951813 - RNA, 21 nt, Human
ccacaaccaaccauccuccaa

SEQ ID NO: 951814 - RNA, 23 nt, Human
cccagagccccgcgucccggcuc

SEQ ID NO: 951815 - RNA, 21 nt, Human
ccuccaaccugcacagaggac

SEQ ID NO: 951816 - RNA, 24 nt, Human
ccuccaaccugcacagaggacccg

SEQ ID NO: 951817 - RNA, 25 nt, Human
cgaggcccagagccccgcgucccgg

SEQ ID NO: 951818 - RNA, 19 nt, Human
cggggagaaggggcggagg

SEQ ID NO: 951819 - RNA, 23 nt, Human
gccacaaccaaccauccuccaac

SEQ ID NO: 951820 - RNA, 18 nt, Human
gcccagagccccgcgucc

SEQ ID NO: 951821 - RNA, 21 nt, Human
gccucgcucgccacaaccaac

SEQ ID NO: 951822 - RNA, 22 nt, Human
ggacccgggaguccggauggcg

SEQ ID NO: 951823 - RNA, 18 nt, Human
ggagagggcaggggaggg

SEQ ID NO: 951824 - RNA, 18 nt, Human
gggagagggcaggggagg

SEQ ID NO: 951825 - RNA, 22 nt, Human
ucagccucgcucgccacaacca

SEQ ID NO: 951826 - RNA, 22 nt, Human
ugcacagaggacccgggagucc

SEQ ID NO: 951827 - RNA, 21 nt, Human
ugucaagcuguucuuuauuuc

SEQ ID NO: 951828 - RNA, 23 nt, Human
uuuuuuuuuuuuuuuuuuccugu

SEQ ID NO: 951829 - RNA, 27 nt, Human
uuuuuuuuuuuuuuuuuuuuccugggg

SEQ ID NO: 951830 - RNA, 24 nt, Human
uuuuuuuuuuuuuuuuuuuuuccu

SEQ ID NO: 951831 - RNA, 21 nt, Human
auaggccagugaugucucaaa

SEQ ID NO: 951832 - RNA, 19 nt, Human
ccuagguccgagcccagaa

SEQ ID NO: 951833 - RNA, 20 nt, Human
cgaccuagguccgagcccag

SEQ ID NO: 951834 - RNA, 18 nt, Human
uuuuuuuuuuuuuuuuug

SEQ ID NO: 951835 - RNA, 20 nt, Human
uuuuuuuuuuuuuuuuuguu

SEQ ID NO: 951836 - RNA, 19 nt, Human
aacacaccacgauggcgga

SEQ ID NO: 951837 - RNA, 19 nt, Human
aacacgucgaaaucuccag

SEQ ID NO: 951838 - RNA, 20 nt, Human
acugaauccagccaaccaac

SEQ ID NO: 951839 - RNA, 18 nt, Human
agaaaggaagaggaggga

SEQ ID NO: 951840 - RNA, 22 nt, Human
agacagcauaaauaugugugcc

SEQ ID NO: 951841 - RNA, 20 nt, Human
aggaagaggagggaagcugg

SEQ ID NO: 951842 - RNA, 21 nt, Human
ccagauaguggugacauuuuc

SEQ ID NO: 951843 - RNA, 19 nt, Human
cgauggcggagaaaggaag

SEQ ID NO: 951844 - RNA, 21 nt, Human
cugaauccagccaaccaacgu

SEQ ID NO: 951845 - RNA, 25 nt, Human
gcggagaaaggaagaggagggaagc

SEQ ID NO: 951846 - RNA, 19 nt, Human
ggagaaaggaagaggaggg

SEQ ID NO: 951847 - RNA, 24 nt, Human
ggcgagcagcggagucaagaacac

SEQ ID NO: 951848 - RNA, 20 nt, Human
ugugugccaucucaugugca

SEQ ID NO: 951849 - RNA, 20 nt, Human
aaacagaaaaaaauauuccc

SEQ ID NO: 951850 - RNA, 21 nt, Human
acagagcauacagaaaaacag

SEQ ID NO: 951851 - RNA, 19 nt, Human
acagagucaaccacacacc

SEQ ID NO: 951852 - RNA, 26 nt, Human
acccgcuccgucguccugacgccccc

SEQ ID NO: 951853 - RNA, 20 nt, Human
agcacagagcauacagaaaa

SEQ ID NO: 951854 - RNA, 23 nt, Human
auacagaaaaacagaaaaaaaua

SEQ ID NO: 951855 - RNA, 18 nt, Human
caaccacacaccacuuuu

SEQ ID NO: 951856 - RNA, 27 nt, Human
cagagcauacagaaaaacagaaaaaaa

SEQ ID NO: 951857 - RNA, 21 nt, Human
cauacagaaaaacagaaaaaa

SEQ ID NO: 951858 - RNA, 21 nt, Human
ccagguaguggugacauuuuc

SEQ ID NO: 951859 - RNA, 26 nt, Human
cccgcuccgucguccugacgcccccg

SEQ ID NO: 951860 - RNA, 19 nt, Human
cccggccuagcugcagcca

SEQ ID NO: 951861 - RNA, 19 nt, Human
ccucaggucugcgugucac

SEQ ID NO: 951862 - RNA, 21 nt, Human
cgagaaacagagucaaccaca

SEQ ID NO: 951863 - RNA, 23 nt, Human
cugaauccacccuacuagcacug

SEQ ID NO: 951864 - RNA, 22 nt, Human
gagcauacagaaaaacagaaaa

SEQ ID NO: 951865 - RNA, 24 nt, Human
gcccuggccucugcuuuuuuccca

SEQ ID NO: 951866 - RNA, 26 nt, Human
ggccuggggcgcgggcggaaaaggcc

SEQ ID NO: 951867 - RNA, 23 nt, Human
gggccuggggcgcgggcggaaaa

SEQ ID NO: 951868 - RNA, 18 nt, Human
uacagcauaaauaugugu

SEQ ID NO: 951869 - RNA, 23 nt, Human
ugaauccacccuacuagcacaga

SEQ ID NO: 951870 - RNA, 20 nt, Human
ugugcaacuguccagguagu

SEQ ID NO: 951871 - RNA, 20 nt, Human
ugugugccaucucaugugca

SEQ ID NO: 951872 - RNA, 24 nt, Human
uuacugaauccacccuacuagcac

SEQ ID NO: 951873 - RNA, 20 nt, Human
uugucgcaggggccuuggug

SEQ ID NO: 951874 - RNA, 28 nt, Human
uuuuuuuuuuuuuuuuuuuuuuuggggg

SEQ ID NO: 951875 - RNA, 22 nt, Human
aaacauaaaacuccggucuccc

SEQ ID NO: 951876 - RNA, 26 nt, Human
cagcgcucugagaccucgcaggaaga

SEQ ID NO: 951877 - RNA, 21 nt, Human
ccagcucugugugaauuacuc

SEQ ID NO: 951878 - RNA, 19 nt, Human
cccugaaggucaggaaggg

SEQ ID NO: 951879 - RNA, 22 nt, Human
uuuuuuuuuuuuuuuugcucaa

SEQ ID NO: 951880 - RNA, 18 nt, Human
uuuuuuuuuuuuuuuuug

SEQ ID NO: 951881 - RNA, 20 nt, Human
uuuuuuuuuuuuuuuuugcu

SEQ ID NO: 951882 - RNA, 19 nt, Human
aaacagcggaagaggugau

SEQ ID NO: 951883 - RNA, 20 nt, Human
aacuuguaccagcaucccca

SEQ ID NO: 951884 - RNA, 24 nt, Human
augagcaaggugggucucagaggu

SEQ ID NO: 951885 - RNA, 23 nt, Human
caaauaaacacagaaauagucca

SEQ ID NO: 951886 - RNA, 26 nt, Human
cagcgucuggcauuccauguuucugc

SEQ ID NO: 951887 - RNA, 22 nt, Human
cgcagagguuuccaaaaaaaug

SEQ ID NO: 951888 - RNA, 19 nt, Human
gacaguagcaugcaguccc

SEQ ID NO: 951889 - RNA, 21 nt, Human
gaggaccaacaugggcauuuu

SEQ ID NO: 951890 - RNA, 23 nt, Human
uaccagcauccccagcgucuggc

SEQ ID NO: 951891 - RNA, 21 nt, Human
uagcaugcagucccacaacuu

SEQ ID NO: 951892 - RNA, 20 nt, Human
ugagacaagcucuagacagu

SEQ ID NO: 951893 - RNA, 19 nt, Human
ugucacagguccagggcag

SEQ ID NO: 951894 - RNA, 19 nt, Human
uuccaaaaaaauggcgcua

SEQ ID NO: 951895 - RNA, 22 nt, Human
aaaaaacaaaggggcaggagga

SEQ ID NO: 951896 - RNA, 22 nt, Human
aaaaaacaaaggggcaggagga

SEQ ID NO: 951897 - RNA, 23 nt, Human
aaaaaacaucuuauaauugcaga

SEQ ID NO: 951898 - RNA, 20 nt, Human
aaaaagcaaaaaacaaaggg

SEQ ID NO: 951899 - RNA, 20 nt, Human
aaaaagcaaaaaacaaaggg

SEQ ID NO: 951900 - RNA, 22 nt, Human
aaaaagcaaaaaacaaaggggc

SEQ ID NO: 951901 - RNA, 22 nt, Human
aaaaagcaaaaaacaaaggggc

SEQ ID NO: 951902 - RNA, 24 nt, Human
aaaacaaaaacucaacagcaacca

SEQ ID NO: 951903 - RNA, 21 nt, Human
aaaagcuauuuuaauagacac

SEQ ID NO: 951904 - RNA, 24 nt, Human
aaaauguugggauuaguggcguga

SEQ ID NO: 951905 - RNA, 20 nt, Human
aaaauuacauuacagcuugc

SEQ ID NO: 951906 - RNA, 20 nt, Human
aaaauuacauuacagcuugc

SEQ ID NO: 951907 - RNA, 21 nt, Human
aaacaaaaacucaacagcaac

SEQ ID NO: 951908 - RNA, 21 nt, Human
aaacaaaaacucaacagcaac

SEQ ID NO: 951909 - RNA, 23 nt, Human
aaacaaaaacucaacagcaacca

SEQ ID NO: 951910 - RNA, 26 nt, Human
aaacaaaaacucaacagcaaccaaaa

SEQ ID NO: 951911 - RNA, 26 nt, Human
aaacaaaaacucaacagcaaccaaaa

SEQ ID NO: 951912 - RNA, 21 nt, Human
aaacaucuuauaauugcagaa

SEQ ID NO: 951913 - RNA, 19 nt, Human
aaacggcaauccaucguca

SEQ ID NO: 951914 - RNA, 22 nt, Human
aaagaucuguuguacaacaugg

SEQ ID NO: 951915 - RNA, 22 nt, Human
aaagaucuguuguacaacaugg

SEQ ID NO: 951916 - RNA, 22 nt, Human
aaagcugguaaaaaacacugua

SEQ ID NO: 951917 - RNA, 22 nt, Human
aaagcugguaaaaaacacugua

SEQ ID NO: 951918 - RNA, 21 nt, Human
aaaggaagccccaggacucug

SEQ ID NO: 951919 - RNA, 24 nt, Human
aaaguguugggauuauggguguga

SEQ ID NO: 951920 - RNA, 22 nt, Human
aacaaaaacucaacagcaacca

SEQ ID NO: 951921 - RNA, 22 nt, Human
aacaaaaacucaacagcaacca

SEQ ID NO: 951922 - RNA, 23 nt, Human
aacaaaaacucaacagcaaccaa

SEQ ID NO: 951923 - RNA, 23 nt, Human
aacaaaaacucaacagcaaccaa

SEQ ID NO: 951924 - RNA, 23 nt, Human
aacacaaaguccagaaucuugua

SEQ ID NO: 951925 - RNA, 24 nt, Human
aacauaaaagcagaaaaaagccaa

SEQ ID NO: 951926 - RNA, 21 nt, Human
aaccaaaaagcaaaaaacaaa

SEQ ID NO: 951927 - RNA, 26 nt, Human
aaccaaaaagcaaaaaacaaaggggc

SEQ ID NO: 951928 - RNA, 26 nt, Human
aaccaaaaagcaaaaaacaaaggggc

SEQ ID NO: 951929 - RNA, 18 nt, Human
aagaguuccuggugugug

SEQ ID NO: 951930 - RNA, 25 nt, Human
aagcaauccucccaccucagccucc

SEQ ID NO: 951931 - RNA, 25 nt, Human
aagcagaaaaaagccaaguaugggg

SEQ ID NO: 951932 - RNA, 21 nt, Human
aaggaacaauccuggguacag

SEQ ID NO: 951933 - RNA, 18 nt, Human
aaggagacuugucaccgu

SEQ ID NO: 951934 - RNA, 18 nt, Human
aaggagacuugucaccgu

SEQ ID NO: 951935 - RNA, 22 nt, Human
aaguagcugggacuacaggggu

SEQ ID NO: 951936 - RNA, 24 nt, Human
aaguagcugggacuacaggggugu

SEQ ID NO: 951937 - RNA, 26 nt, Human
aaguagcugggacuacaggggugugc

SEQ ID NO: 951938 - RNA, 19 nt, Human
aauauugcaugaucccacu

SEQ ID NO: 951939 - RNA, 19 nt, Human
aauauugcaugaucccacu

SEQ ID NO: 951940 - RNA, 20 nt, Human
acaaaacaaaaacucaacag

SEQ ID NO: 951941 - RNA, 19 nt, Human
acaagaaagaaaacauaag

SEQ ID NO: 951942 - RNA, 21 nt, Human
acagcaacgauggcauugguc

SEQ ID NO: 951943 - RNA, 19 nt, Human
acccaggcuggagugcagu

SEQ ID NO: 951944 - RNA, 21 nt, Human
acccggugugaggacuuccug

SEQ ID NO: 951945 - RNA, 23 nt, Human
accucagccuccugaguagcugg

SEQ ID NO: 951946 - RNA, 22 nt, Human
accucagccucucaaauagcag

SEQ ID NO: 951947 - RNA, 22 nt, Human
accucagccucucaaauagcag

SEQ ID NO: 951948 - RNA, 19 nt, Human
acggcaauccaucgucauc

SEQ ID NO: 951949 - RNA, 18 nt, Human
acugcagccucgaccucu

SEQ ID NO: 951950 - RNA, 21 nt, Human
acuguacacaagaaagaaaac

SEQ ID NO: 951951 - RNA, 21 nt, Human
acuguacacaagaaagaaaac

SEQ ID NO: 951952 - RNA, 23 nt, Human
acuugaauuccuggguucaagca

SEQ ID NO: 951953 - RNA, 25 nt, Human
agaaaaaaguuauaauggccaaaga

SEQ ID NO: 951954 - RNA, 26 nt, Human
agaaaaaaguuauaauggccaaagaa

SEQ ID NO: 951955 - RNA, 18 nt, Human
agaaagaaaacauaagug

SEQ ID NO: 951956 - RNA, 21 nt, Human
agaaagaaaacauaaguggca

SEQ ID NO: 951957 - RNA, 20 nt, Human
agaauggaacaacuuaaaua

SEQ ID NO: 951958 - RNA, 23 nt, Human
agcaaccaaaaagcaaaaaacaa

SEQ ID NO: 951959 - RNA, 23 nt, Human
agcaaccaaaaagcaaaaaacaa

SEQ ID NO: 951960 - RNA, 20 nt, Human
agcacuuucggaggccgagg

SEQ ID NO: 951961 - RNA, 24 nt, Human
agcacuuucggaggccgagguggg

SEQ ID NO: 951962 - RNA, 24 nt, Human
agcacuuucggaggccgagguggg

SEQ ID NO: 951963 - RNA, 21 nt, Human
agccacaacacaaaguccaga

SEQ ID NO: 951964 - RNA, 19 nt, Human
agccacugcgcccauccug

SEQ ID NO: 951965 - RNA, 23 nt, Human
agccagucacaggacaaauauug

SEQ ID NO: 951966 - RNA, 23 nt, Human
agccagucacaggacaaauauug

SEQ ID NO: 951967 - RNA, 21 nt, Human
agcuugucagccacaacacaa

SEQ ID NO: 951968 - RNA, 19 nt, Human
aggaagccccaggacucug

SEQ ID NO: 951969 - RNA, 25 nt, Human
aggaauucuuuucucucucaacacc

SEQ ID NO: 951970 - RNA, 24 nt, Human
aggcacaguggcucacaccuguaa

SEQ ID NO: 951971 - RNA, 24 nt, Human
aggcacaguggcucacaccuguaa

SEQ ID NO: 951972 - RNA, 21 nt, Human
aggccgagguggguggaucac

SEQ ID NO: 951973 - RNA, 21 nt, Human
aggccgagguggguggaucac

SEQ ID NO: 951974 - RNA, 25 nt, Human
aggcuggagugcaguggcacaaucu

SEQ ID NO: 951975 - RNA, 23 nt, Human
agguggguggaucacuugagguc

SEQ ID NO: 951976 - RNA, 23 nt, Human
agguggguggaucacuugagguc

SEQ ID NO: 951977 - RNA, 21 nt, Human
aggugguucaucaggccacag

SEQ ID NO: 951978 - RNA, 19 nt, Human
agguuugaugccaaacacc

SEQ ID NO: 951979 - RNA, 23 nt, Human
aguagcuggaacuacaggcaugu

SEQ ID NO: 951980 - RNA, 20 nt, Human
agugcaguggcacaaucuug

SEQ ID NO: 951981 - RNA, 24 nt, Human
agugcaguggcacaaucuuggcuc

SEQ ID NO: 951982 - RNA, 24 nt, Human
aguggcucacaccuguaauccuag

SEQ ID NO: 951983 - RNA, 24 nt, Human
aguggcucacaccuguaauccuag

SEQ ID NO: 951984 - RNA, 20 nt, Human
agugugguggcacaaucuug

SEQ ID NO: 951985 - RNA, 24 nt, Human
agugugguggcacaaucuuggcuc

SEQ ID NO: 951986 - RNA, 24 nt, Human
aguguugggauuaugggugugagc

SEQ ID NO: 951987 - RNA, 20 nt, Human
auaauggccaaagaauggaa

SEQ ID NO: 951988 - RNA, 20 nt, Human
auaauggccaaagaauggaa

SEQ ID NO: 951989 - RNA, 19 nt, Human
aucacuugaggucaggguc

SEQ ID NO: 951990 - RNA, 22 nt, Human
aucuuauuucacuaugcuaagu

SEQ ID NO: 951991 - RNA, 22 nt, Human
aucuuauuucacuaugcuaagu

SEQ ID NO: 951992 - RNA, 20 nt, Human
augcacucuccuuuggcuaa

SEQ ID NO: 951993 - RNA, 23 nt, Human
augggcaaagccucguucccaag

SEQ ID NO: 951994 - RNA, 23 nt, Human
augugccaccacaccaggcuaau

SEQ ID NO: 951995 - RNA, 25 nt, Human
caaaaagcaaaaaacaaaggggcag

SEQ ID NO: 951996 - RNA, 23 nt, Human
caaaacaaaaacucaacagcaac

SEQ ID NO: 951997 - RNA, 23 nt, Human
caaaacaaaaacucaacagcaac

SEQ ID NO: 951998 - RNA, 27 nt, Human
caaaacaaaaacucaacagcaaccaaa

SEQ ID NO: 951999 - RNA, 27 nt, Human
caaaacaaaaacucaacagcaaccaaa

SEQ ID NO: 952000 - RNA, 23 nt, Human
caaagaauggaacaacuuaaaua

SEQ ID NO: 952001 - RNA, 19 nt, Human
caaaguccagaaucuugua

SEQ ID NO: 952002 - RNA, 24 nt, Human
caaaguguugggauuaugggugug

SEQ ID NO: 952003 - RNA, 20 nt, Human
caaaugauccucccaccuca

SEQ ID NO: 952004 - RNA, 22 nt, Human
caacagcaaccaaaaagcaaaa

SEQ ID NO: 952005 - RNA, 22 nt, Human
caacagcaaccaaaaagcaaaa

SEQ ID NO: 952006 - RNA, 28 nt, Human
caacagcaaccaaaaagcaaaaaacaaa

SEQ ID NO: 952007 - RNA, 21 nt, Human
caacgauggcauuggucccaa

SEQ ID NO: 952008 - RNA, 27 nt, Human
caagcaauccucccaccucagccuccc

SEQ ID NO: 952009 - RNA, 19 nt, Human
cacaacacaaaguccagaa

SEQ ID NO: 952010 - RNA, 21 nt, Human
cacaagugauugcuccugccu

SEQ ID NO: 952011 - RNA, 23 nt, Human
cacaccuguaauccuagcacuuu

SEQ ID NO: 952012 - RNA, 23 nt, Human
cacaccuguaauccuagcacuuu

SEQ ID NO: 952013 - RNA, 22 nt, Human
caccaugccuggcuuccaaaau

SEQ ID NO: 952014 - RNA, 22 nt, Human
caccaugccuggcuuccaaaau

SEQ ID NO: 952015 - RNA, 24 nt, Human
caccaugccuggcuuccaaaaugg

SEQ ID NO: 952016 - RNA, 24 nt, Human
caccaugccuggcuuccaaaaugg

SEQ ID NO: 952017 - RNA, 22 nt, Human
caccggaggccaggcacagugg

SEQ ID NO: 952018 - RNA, 22 nt, Human
caccggaggccaggcacagugg

SEQ ID NO: 952019 - RNA, 24 nt, Human
caccucagccucccaaguagcugg

SEQ ID NO: 952020 - RNA, 18 nt, Human
caccuguaauccuagcac

SEQ ID NO: 952021 - RNA, 18 nt, Human
caccuguaauccuagcac

SEQ ID NO: 952022 - RNA, 23 nt, Human
caccuguaauccuagcacuuucg

SEQ ID NO: 952023 - RNA, 24 nt, Human
caccuguaauccuagcacuuucgg

SEQ ID NO: 952024 - RNA, 21 nt, Human
caccuuaaaaugacgaagaga

SEQ ID NO: 952025 - RNA, 24 nt, Human
cacucuacacacugcuaugaaagc

SEQ ID NO: 952026 - RNA, 24 nt, Human
cacucuacacacugcuaugaaagc

SEQ ID NO: 952027 - RNA, 18 nt, Human
cacugcagccucgaccuc

SEQ ID NO: 952028 - RNA, 22 nt, Human
cacugccugcugagagcagggu

SEQ ID NO: 952029 - RNA, 22 nt, Human
cacugccugcugagagcagggu

SEQ ID NO: 952030 - RNA, 18 nt, Human
cacugcuaugaaagcaga

SEQ ID NO: 952031 - RNA, 18 nt, Human
cacugcuaugaaagcaga

SEQ ID NO: 952032 - RNA, 20 nt, Human
cacuguaugaucggugggga

SEQ ID NO: 952033 - RNA, 21 nt, Human
cagcaggacaggguagcacuc

SEQ ID NO: 952034 - RNA, 19 nt, Human
cagccuccugaguagcugg

SEQ ID NO: 952035 - RNA, 23 nt, Human
cagccucgaccucuuggguucaa

SEQ ID NO: 952036 - RNA, 23 nt, Human
cagcuugucagccacaacacaaa

SEQ ID NO: 952037 - RNA, 23 nt, Human
caggcaugugccaccacaccagg

SEQ ID NO: 952038 - RNA, 24 nt, Human
cagggucucauucugucgcccagg

SEQ ID NO: 952039 - RNA, 24 nt, Human
cagggucuuccuauauuacccagg

SEQ ID NO: 952040 - RNA, 24 nt, Human
cagggucuuccuauauuacccagg

SEQ ID NO: 952041 - RNA, 22 nt, Human
cauagccaguguaagaaaucac

SEQ ID NO: 952042 - RNA, 24 nt, Human
caugugccaccacaccaggcuaau

SEQ ID NO: 952043 - RNA, 24 nt, Human
cauguugcccagauuggacuugaa

SEQ ID NO: 952044 - RNA, 24 nt, Human
cauucugucgcccaggcuggagug

SEQ ID NO: 952045 - RNA, 19 nt, Human
ccaaaaggucaacaucaag

SEQ ID NO: 952046 - RNA, 19 nt, Human
ccaaaaggucaacaucaag

SEQ ID NO: 952047 - RNA, 21 nt, Human
ccaaaguguugggauuauggg

SEQ ID NO: 952048 - RNA, 21 nt, Human
ccaaaguguugggauuauggg

SEQ ID NO: 952049 - RNA, 24 nt, Human
ccaaaguguugggauuaugggugu

SEQ ID NO: 952050 - RNA, 20 nt, Human
ccacaacacaaaguccagaa

SEQ ID NO: 952051 - RNA, 23 nt, Human
ccaccucagccuccugaguagcu

SEQ ID NO: 952052 - RNA, 19 nt, Human
ccaggcucaggagauucuc

SEQ ID NO: 952053 - RNA, 22 nt, Human
ccaggcucaggagauucuccca

SEQ ID NO: 952054 - RNA, 23 nt, Human
cccaaguagcugggacuacaggg

SEQ ID NO: 952055 - RNA, 23 nt, Human
cccaccucagccucccaaguagc

SEQ ID NO: 952056 - RNA, 23 nt, Human
cccaccucagccuccugaguagc

SEQ ID NO: 952057 - RNA, 18 nt, Human
ccccaggacucuggcagc

SEQ ID NO: 952058 - RNA, 18 nt, Human
ccccucugugcacgcagc

SEQ ID NO: 952059 - RNA, 19 nt, Human
ccuauauuacccaggcugu

SEQ ID NO: 952060 - RNA, 19 nt, Human
ccuauauuacccaggcugu

SEQ ID NO: 952061 - RNA, 23 nt, Human
ccucccaccucagccucccaagu

SEQ ID NO: 952062 - RNA, 26 nt, Human
ccucccaccucagccucucaaauagc

SEQ ID NO: 952063 - RNA, 26 nt, Human
ccucccaccucagccucucaaauagc

SEQ ID NO: 952064 - RNA, 18 nt, Human
ccucgaccucuuggguuc

SEQ ID NO: 952065 - RNA, 21 nt, Human
ccucuuggguucaagcaaucc

SEQ ID NO: 952066 - RNA, 20 nt, Human
ccuggguacagacuugguuu

SEQ ID NO: 952067 - RNA, 18 nt, Human
ccuggguucaagcaaucu

SEQ ID NO: 952068 - RNA, 24 nt, Human
ccuuccaggcucaggagauucucc

SEQ ID NO: 952069 - RNA, 25 nt, Human
cgaccucuuggguucaagcaauccu

SEQ ID NO: 952070 - RNA, 24 nt, Human
cgagguggguggaucacuugaggu

SEQ ID NO: 952071 - RNA, 24 nt, Human
cgagguggguggaucacuugaggu

SEQ ID NO: 952072 - RNA, 26 nt, Human
cgagguggguggaucacuugagguca

SEQ ID NO: 952073 - RNA, 24 nt, Human
cuaaaauguugggauuaguggcgu

SEQ ID NO: 952074 - RNA, 24 nt, Human
cucaaaugauccucccaccucagc

SEQ ID NO: 952075 - RNA, 24 nt, Human
cucaaaugauccucccaccucagc

SEQ ID NO: 952076 - RNA, 24 nt, Human
cucaacagcaaccaaaaagcaaaa

SEQ ID NO: 952077 - RNA, 24 nt, Human
cucacaccuguaauccuagcacuu

SEQ ID NO: 952078 - RNA, 24 nt, Human
cucacaccuguaauccuagcacuu

SEQ ID NO: 952079 - RNA, 20 nt, Human
cucacugcagccucgaccuc

SEQ ID NO: 952080 - RNA, 24 nt, Human
cucacugcagccucgaccucuugg

SEQ ID NO: 952081 - RNA, 24 nt, Human
cucagccucccaaguagcugggac

SEQ ID NO: 952082 - RNA, 24 nt, Human
cucauucugucgcccaggcuggag

SEQ ID NO: 952083 - RNA, 22 nt, Human
cuccguacugcaguuuugcucc

SEQ ID NO: 952084 - RNA, 24 nt, Human
cugcucugucacccaggcuggagu

SEQ ID NO: 952085 - RNA, 18 nt, Human
cuguaauagucaaacuca

SEQ ID NO: 952086 - RNA, 18 nt, Human
cuguaauagucaaacuca

SEQ ID NO: 952087 - RNA, 21 nt, Human
cuguggugguccucaucuugg

SEQ ID NO: 952088 - RNA, 23 nt, Human
cuguggugguccucaucuuggca

SEQ ID NO: 952089 - RNA, 18 nt, Human
cuuaaaaugacgaagaga

SEQ ID NO: 952090 - RNA, 22 nt, Human
cuuggcucacugcagccucgac

SEQ ID NO: 952091 - RNA, 26 nt, Human
gaccaucugaaccaaacucaggaagu

SEQ ID NO: 952092 - RNA, 26 nt, Human
gaccuuccaggcucagggguguccga

SEQ ID NO: 952093 - RNA, 21 nt, Human
gacuauagaugcacagcacca

SEQ ID NO: 952094 - RNA, 21 nt, Human
gacuauagaugcacagcacca

SEQ ID NO: 952095 - RNA, 20 nt, Human
gagcugggguuuccccaugu

SEQ ID NO: 952096 - RNA, 18 nt, Human
gaggaauucuuuucucuc

SEQ ID NO: 952097 - RNA, 23 nt, Human
gagguggguggaucacuugaggu

SEQ ID NO: 952098 - RNA, 23 nt, Human
gagguggguggaucacuugaggu

SEQ ID NO: 952099 - RNA, 25 nt, Human
gagguggguggaucacuugagguca

SEQ ID NO: 952100 - RNA, 20 nt, Human
gaguaaccugguaaugauau

SEQ ID NO: 952101 - RNA, 20 nt, Human
gaguaaccugguaaugauau

SEQ ID NO: 952102 - RNA, 25 nt, Human
gaguagcuggaacuacaggcaugug

SEQ ID NO: 952103 - RNA, 18 nt, Human
gaucacuugaggucaggg

SEQ ID NO: 952104 - RNA, 18 nt, Human
gaucacuugaggucaggg

SEQ ID NO: 952105 - RNA, 23 nt, Human
gaucacuugaggucagggucuuc

SEQ ID NO: 952106 - RNA, 23 nt, Human
gaucacuugaggucagggucuuu

SEQ ID NO: 952107 - RNA, 24 nt, Human
gaucacuugaggucagggucuuua

SEQ ID NO: 952108 - RNA, 18 nt, Human
gauuaguggcgugagcca

SEQ ID NO: 952109 - RNA, 22 nt, Human
gauuaguggcgugagccacugc

SEQ ID NO: 952110 - RNA, 18 nt, Human
gauuaugggugugagcca

SEQ ID NO: 952111 - RNA, 21 nt, Human
gauuaugggugugagccacca

SEQ ID NO: 952112 - RNA, 22 nt, Human
gauuaugggugugagccaccac

SEQ ID NO: 952113 - RNA, 18 nt, Human
gcaaccaaaaagcaaaaa

SEQ ID NO: 952114 - RNA, 22 nt, Human
gcagaaaaaagccaaguaugga

SEQ ID NO: 952115 - RNA, 22 nt, Human
gcagaaaaaagccaaguaugga

SEQ ID NO: 952116 - RNA, 21 nt, Human
gcagccugcguacuguggugg

SEQ ID NO: 952117 - RNA, 21 nt, Human
gcaggguguagggaaccuggg

SEQ ID NO: 952118 - RNA, 21 nt, Human
gcaggguguagggaaccuggg

SEQ ID NO: 952119 - RNA, 22 nt, Human
gccaaagaauggaacaacuuaa

SEQ ID NO: 952120 - RNA, 21 nt, Human
gccaaagauaagucaccagaa

SEQ ID NO: 952121 - RNA, 21 nt, Human
gccaaagauaagucaccagaa

SEQ ID NO: 952122 - RNA, 20 nt, Human
gcccaggcuggaguguggug

SEQ ID NO: 952123 - RNA, 27 nt, Human
gccuggagcaagauccuucuccuacgg

SEQ ID NO: 952124 - RNA, 21 nt, Human
gcgaugccuggagcaagaucc

SEQ ID NO: 952125 - RNA, 20 nt, Human
gcuaaagcaaagagcuuucg

SEQ ID NO: 952126 - RNA, 21 nt, Human
gcuagucuagaacucccaggc

SEQ ID NO: 952127 - RNA, 21 nt, Human
gcucacugcagccucgaccuc

SEQ ID NO: 952128 - RNA, 25 nt, Human
gcucugucacccaggcuggagugca

SEQ ID NO: 952129 - RNA, 19 nt, Human
gcuggagugcaguggcaca

SEQ ID NO: 952130 - RNA, 21 nt, Human
ggaaagaguuccuggugugug

SEQ ID NO: 952131 - RNA, 18 nt, Human
ggacuacaggggugugcc

SEQ ID NO: 952132 - RNA, 23 nt, Human
ggagacuugucaccguaugcucu

SEQ ID NO: 952133 - RNA, 23 nt, Human
ggagacuugucaccguaugcucu

SEQ ID NO: 952134 - RNA, 24 nt, Human
ggagauucucccaccucagccucc

SEQ ID NO: 952135 - RNA, 24 nt, Human
ggaggccaggcacaguggcucaca

SEQ ID NO: 952136 - RNA, 24 nt, Human
ggaggccaggcacaguggcucaca

SEQ ID NO: 952137 - RNA, 21 nt, Human
ggaggccgagguggguggauc

SEQ ID NO: 952138 - RNA, 21 nt, Human
ggaggccgagguggguggauc

SEQ ID NO: 952139 - RNA, 23 nt, Human
ggguguagggaaccugggguugg

SEQ ID NO: 952140 - RNA, 23 nt, Human
ggguguagggaaccugggguugg

SEQ ID NO: 952141 - RNA, 21 nt, Human
gguggaucacuugaggucagg

SEQ ID NO: 952142 - RNA, 21 nt, Human
gguggaucacuugaggucagg

SEQ ID NO: 952143 - RNA, 20 nt, Human
ggugugagccaccacaccca

SEQ ID NO: 952144 - RNA, 18 nt, Human
guagcugggacuacaggg

SEQ ID NO: 952145 - RNA, 20 nt, Human
gucagggucuucaagacagg

SEQ ID NO: 952146 - RNA, 23 nt, Human
guccagaaucuuguaggaggcca

SEQ ID NO: 952147 - RNA, 24 nt, Human
gugagccaccacacccagccuuuu

SEQ ID NO: 952148 - RNA, 22 nt, Human
guuccaauuagcucuucuuugc

SEQ ID NO: 952149 - RNA, 22 nt, Human
uaaaaaggaacaauccugggua

SEQ ID NO: 952150 - RNA, 20 nt, Human
uaaaagcagaaaaaagccaa

SEQ ID NO: 952151 - RNA, 21 nt, Human
uaaaauuacauuacagcuugc

SEQ ID NO: 952152 - RNA, 21 nt, Human
uaaaauuacauuacagcuugc

SEQ ID NO: 952153 - RNA, 20 nt, Human
uaacuccagcaaaaacuuca

SEQ ID NO: 952154 - RNA, 21 nt, Human
uaagaaaucacagcaacgaug

SEQ ID NO: 952155 - RNA, 21 nt, Human
uaagugagaaguggaaagccc

SEQ ID NO: 952156 - RNA, 21 nt, Human
uacaggggugugccacuaugc

SEQ ID NO: 952157 - RNA, 23 nt, Human
uacaggggugugccacuaugcuu

SEQ ID NO: 952158 - RNA, 20 nt, Human
uaccacagaagacaaaacaa

SEQ ID NO: 952159 - RNA, 20 nt, Human
uaccacagaagacaaaacaa

SEQ ID NO: 952160 - RNA, 21 nt, Human
uaccacagaagacaaaacaaa

SEQ ID NO: 952161 - RNA, 21 nt, Human
uaccacagaagacaaaacaaa

SEQ ID NO: 952162 - RNA, 18 nt, Human
uacccaucuggcauuggu

SEQ ID NO: 952163 - RNA, 19 nt, Human
uacccugauuguggugaug

SEQ ID NO: 952164 - RNA, 19 nt, Human
uacccugauuguggugaug

SEQ ID NO: 952165 - RNA, 19 nt, Human
uaccgaaaaacauaaggca

SEQ ID NO: 952166 - RNA, 20 nt, Human
uaccgaaaaacauaaggcac

SEQ ID NO: 952167 - RNA, 18 nt, Human
uacuugguuuucaggucu

SEQ ID NO: 952168 - RNA, 18 nt, Human
uacuugguuuucaggucu

SEQ ID NO: 952169 - RNA, 23 nt, Human
uagaacucccaggcacaagugau

SEQ ID NO: 952170 - RNA, 22 nt, Human
uagagacaggguccugcucugu

SEQ ID NO: 952171 - RNA, 24 nt, Human
uagcacuuucggaggccgaggugg

SEQ ID NO: 952172 - RNA, 24 nt, Human
uagcacuuucggaggccgaggugg

SEQ ID NO: 952173 - RNA, 25 nt, Human
uagcagggacuauagaugcacagca

SEQ ID NO: 952174 - RNA, 18 nt, Human
uaguuaaucuaccagaga

SEQ ID NO: 952175 - RNA, 18 nt, Human
uaguuaaucuaccagaga

SEQ ID NO: 952176 - RNA, 18 nt, Human
uauaauuagugacagacc

SEQ ID NO: 952177 - RNA, 22 nt, Human
uauacaagaugaucuauuauca

SEQ ID NO: 952178 - RNA, 23 nt, Human
uauauuacccaggcuguccuuga

SEQ ID NO: 952179 - RNA, 24 nt, Human
uauauuacccaggcuguccuugaa

SEQ ID NO: 952180 - RNA, 24 nt, Human
uauauuacccaggcuguccuugaa

SEQ ID NO: 952181 - RNA, 21 nt, Human
ucaacauaaaagcagaaaaaa

SEQ ID NO: 952182 - RNA, 22 nt, Human
ucacccaggcuggagugcagug

SEQ ID NO: 952183 - RNA, 23 nt, Human
ucacugcagccucgaccucuugg

SEQ ID NO: 952184 - RNA, 23 nt, Human
ucacugcagccucgaccucuugg

SEQ ID NO: 952185 - RNA, 24 nt, Human
ucacugcagccucgaccucuuggg

SEQ ID NO: 952186 - RNA, 19 nt, Human
ucacugccugcugagagca

SEQ ID NO: 952187 - RNA, 19 nt, Human
ucacugccugcugagagca

SEQ ID NO: 952188 - RNA, 19 nt, Human
ucagcaggcuguguggaaa

SEQ ID NO: 952189 - RNA, 20 nt, Human
ucagccucccaaguagcugg

SEQ ID NO: 952190 - RNA, 23 nt, Human
ucagccuccugaguagcuggaac

SEQ ID NO: 952191 - RNA, 24 nt, Human
ucauucugucgcccaggcuggagu

SEQ ID NO: 952192 - RNA, 25 nt, Human
ucccaaguagcugggacuacagggg

SEQ ID NO: 952193 - RNA, 20 nt, Human
uccuaaaauguugggauuag

SEQ ID NO: 952194 - RNA, 24 nt, Human
uccuaaaauguugggauuaguggc

SEQ ID NO: 952195 - RNA, 23 nt, Human
uccucaaagauagcgacauucau

SEQ ID NO: 952196 - RNA, 27 nt, Human
uccucccaccucagccucccaaguagc

SEQ ID NO: 952197 - RNA, 24 nt, Human
uccugaguagcuggaacuacaggc

SEQ ID NO: 952198 - RNA, 23 nt, Human
uccugcucugucacccaggcugg

SEQ ID NO: 952199 - RNA, 24 nt, Human
uccugcucugucacccaggcugga

SEQ ID NO: 952200 - RNA, 20 nt, Human
uccuggguacagacuugguu

SEQ ID NO: 952201 - RNA, 21 nt, Human
uccuggguacagacuugguuu

SEQ ID NO: 952202 - RNA, 18 nt, Human
uccuggguucaagcaauc

SEQ ID NO: 952203 - RNA, 19 nt, Human
uccuggguucaagcaaucu

SEQ ID NO: 952204 - RNA, 20 nt, Human
uccuggguucaagcaaucug

SEQ ID NO: 952205 - RNA, 24 nt, Human
ucgcccaggcuggagugugguggc

SEQ ID NO: 952206 - RNA, 20 nt, Human
ucgguacacgccggacgcca

SEQ ID NO: 952207 - RNA, 24 nt, Human
ucuaccagagagauucagaaaccu

SEQ ID NO: 952208 - RNA, 24 nt, Human
ucuaccagagagauucagaaaccu

SEQ ID NO: 952209 - RNA, 23 nt, Human
ucucauucugucgcccaggcugg

SEQ ID NO: 952210 - RNA, 24 nt, Human
ucucauucugucgcccaggcugga

SEQ ID NO: 952211 - RNA, 24 nt, Human
ucucccaccucagccuccugagua

SEQ ID NO: 952212 - RNA, 24 nt, Human
ucugucacccaggcuggagugcag

SEQ ID NO: 952213 - RNA, 22 nt, Human
ucugucgcccaggcuggagugu

SEQ ID NO: 952214 - RNA, 24 nt, Human
ucugucgcccaggcuggagugugg

SEQ ID NO: 952215 - RNA, 24 nt, Human
ucuuggguucaagcaauccuccca

SEQ ID NO: 952216 - RNA, 24 nt, Human
ugaaagcagaucaacauaaaagca

SEQ ID NO: 952217 - RNA, 24 nt, Human
ugaaagcagaucaauauaaaagca

SEQ ID NO: 952218 - RNA, 20 nt, Human
ugaaaugauagauuuuucug

SEQ ID NO: 952219 - RNA, 19 nt, Human
ugacacucacugccugcug

SEQ ID NO: 952220 - RNA, 19 nt, Human
ugacacucacugccugcug

SEQ ID NO: 952221 - RNA, 28 nt, Human
ugacagaccaucugaaccaaacucagga

SEQ ID NO: 952222 - RNA, 21 nt, Human
ugagaagacaugaacuuuuug

SEQ ID NO: 952223 - RNA, 21 nt, Human
ugagaagacaugaacuuuuug

SEQ ID NO: 952224 - RNA, 19 nt, Human
ugagccaccacacccagcc

SEQ ID NO: 952225 - RNA, 24 nt, Human
ugaguuaaguguucuuaccacaga

SEQ ID NO: 952226 - RNA, 22 nt, Human
ugcacgggacaaaggaagcccc

SEQ ID NO: 952227 - RNA, 22 nt, Human
ugcaguggcacaaucuuggcuc

SEQ ID NO: 952228 - RNA, 23 nt, Human
ugcccaaugcuaaguucugcaca

SEQ ID NO: 952229 - RNA, 25 nt, Human
ugccuggagcaagauccuuauccac

SEQ ID NO: 952230 - RNA, 26 nt, Human
ugcuaugaaagcagaucaacauaaaa

SEQ ID NO: 952231 - RNA, 24 nt, Human
ugcucugucacccaggcuggagug

SEQ ID NO: 952232 - RNA, 22 nt, Human
ugcuuacccaucuggcauuggu

SEQ ID NO: 952233 - RNA, 21 nt, Human
uggaaaggagacuugucaccg

SEQ ID NO: 952234 - RNA, 21 nt, Human
uggaaaggagacuugucaccg

SEQ ID NO: 952235 - RNA, 21 nt, Human
uggaacuacaggcaugugcca

SEQ ID NO: 952236 - RNA, 24 nt, Human
uggaacuacaggcaugugccacca

SEQ ID NO: 952237 - RNA, 23 nt, Human
uggagugcaguggcacaaucuug

SEQ ID NO: 952238 - RNA, 24 nt, Human
uggagugcaguggcacaaucuugg

SEQ ID NO: 952239 - RNA, 24 nt, Human
uggagugugguggcacaaucuugg

SEQ ID NO: 952240 - RNA, 22 nt, Human
uggaucacuugaggucaggguc

SEQ ID NO: 952241 - RNA, 22 nt, Human
uggaucacuugaggucaggguc

SEQ ID NO: 952242 - RNA, 20 nt, Human
uggcacaaucuuggcucacu

SEQ ID NO: 952243 - RNA, 23 nt, Human
uggcacaaucuuggcucacugca

SEQ ID NO: 952244 - RNA, 24 nt, Human
uggcagcagccugcguacuguggu

SEQ ID NO: 952245 - RNA, 23 nt, Human
uggcaucuuccauaucauagcca

SEQ ID NO: 952246 - RNA, 24 nt, Human
uggccaaagaauggaacaacuuaa

SEQ ID NO: 952247 - RNA, 22 nt, Human
uggccaaagauaagucaccaga

SEQ ID NO: 952248 - RNA, 22 nt, Human
uggccaaagauaagucaccaga

SEQ ID NO: 952249 - RNA, 19 nt, Human
uggcucacaccuguaaucc

SEQ ID NO: 952250 - RNA, 19 nt, Human
uggcucacaccuguaaucc

SEQ ID NO: 952251 - RNA, 19 nt, Human
uggcucacaccuguaaucc

SEQ ID NO: 952252 - RNA, 24 nt, Human
uggcucacaccuguaauccuagca

SEQ ID NO: 952253 - RNA, 24 nt, Human
uggcucacaccuguaauccuagca

SEQ ID NO: 952254 - RNA, 24 nt, Human
uggcucacugcagccucgaccucu

SEQ ID NO: 952255 - RNA, 24 nt, Human
uggcuuccaaaauggaugaaucuu

SEQ ID NO: 952256 - RNA, 24 nt, Human
uggcuuccaaaauggaugaaucuu

SEQ ID NO: 952257 - RNA, 22 nt, Human
ugggacuacaggggugugccac

SEQ ID NO: 952258 - RNA, 22 nt, Human
ugggacuacaggggugugccac

SEQ ID NO: 952259 - RNA, 24 nt, Human
ugggacuacaggggugugccacua

SEQ ID NO: 952260 - RNA, 22 nt, Human
ugggauuaguggcgugagccac

SEQ ID NO: 952261 - RNA, 22 nt, Human
ugggauuaguggcgugagccac

SEQ ID NO: 952262 - RNA, 24 nt, Human
ugggauuaguggcgugagccacug

SEQ ID NO: 952263 - RNA, 18 nt, Human
ugggauuaugggugugag

SEQ ID NO: 952264 - RNA, 19 nt, Human
ugggauuaugggugugagc

SEQ ID NO: 952265 - RNA, 22 nt, Human
ugggauuaugggugugagccac

SEQ ID NO: 952266 - RNA, 23 nt, Human
ugggauuaugggugugagccacc

SEQ ID NO: 952267 - RNA, 24 nt, Human
ugggauuaugggugugagccacca

SEQ ID NO: 952268 - RNA, 18 nt, Human
ugggguuuccccauguug

SEQ ID NO: 952269 - RNA, 21 nt, Human
uggguucaagcaauccuccca

SEQ ID NO: 952270 - RNA, 24 nt, Human
uguaauacggaucuccguacugca

SEQ ID NO: 952271 - RNA, 22 nt, Human
ugugguggcacaaucuuggcuc

SEQ ID NO: 952272 - RNA, 25 nt, Human
ugugguggcacaaucuuggcucaac

SEQ ID NO: 952273 - RNA, 20 nt, Human
uguggugguccucaucuugg

SEQ ID NO: 952274 - RNA, 22 nt, Human
uguggugguccucaucuuggca

SEQ ID NO: 952275 - RNA, 18 nt, Human
uguucaacagguauaaag

SEQ ID NO: 952276 - RNA, 19 nt, Human
uguuuguuuuuacuucaac

SEQ ID NO: 952277 - RNA, 19 nt, Human
uguuuguuuuuacuucaac

SEQ ID NO: 952278 - RNA, 21 nt, Human
uuaaacaacauccaguuucac

SEQ ID NO: 952279 - RNA, 22 nt, Human
uuaaauauguaacaacuguacu

SEQ ID NO: 952280 - RNA, 22 nt, Human
uuaaauauguaacaacuguacu

SEQ ID NO: 952281 - RNA, 21 nt, Human
uuauaauggccaaagauaagu

SEQ ID NO: 952282 - RNA, 21 nt, Human
uuauaauggccaaagauaagu

SEQ ID NO: 952283 - RNA, 21 nt, Human
uucaagcaauccucccaccuc

SEQ ID NO: 952284 - RNA, 24 nt, Human
uucaagcaauccucccaccucagc

SEQ ID NO: 952285 - RNA, 20 nt, Human
uucacuuugauguucauagc

SEQ ID NO: 952286 - RNA, 22 nt, Human
uucagcuacaaaauaccgaaaa

SEQ ID NO: 952287 - RNA, 18 nt, Human
uucauauuuugagaagac

SEQ ID NO: 952288 - RNA, 18 nt, Human
uucauauuuugagaagac

SEQ ID NO: 952289 - RNA, 21 nt, Human
uuccuggguucaagcaaucug

SEQ ID NO: 952290 - RNA, 18 nt, Human
uugcccagauuggacuug

SEQ ID NO: 952291 - RNA, 21 nt, Human
uugggauuaugggugugagcc

SEQ ID NO: 952292 - RNA, 19 nt, Human
uuguaaaaauccucaucaa

SEQ ID NO: 952293 - RNA, 24 nt, Human
uuuccccauguugcccagauugga

SEQ ID NO: 952294 - RNA, 22 nt, Human
uuuuuuguagagaugaagucuc

SEQ ID NO: 952295 - RNA, 24 nt, Human
uuuuuuuguagagaugaagucucg

SEQ ID NO: 952296 - RNA, 23 nt, Human
aaaaaacaaaaaacaaacaaaaa

SEQ ID NO: 952297 - RNA, 24 nt, Human
aaaaaacaaaaaacaaacaaaaaa

SEQ ID NO: 952298 - RNA, 21 nt, Human
aaaaaacccaggcagauaaug

SEQ ID NO: 952299 - RNA, 21 nt, Human
aaaacaaaaaacaaacaaaaa

SEQ ID NO: 952300 - RNA, 23 nt, Human
aaaacaaacaaaaaacccaggca

SEQ ID NO: 952301 - RNA, 19 nt, Human
aaaacaucuauuucaggau

SEQ ID NO: 952302 - RNA, 25 nt, Human
aaacaaaaaacaaacaaaaaaccca

SEQ ID NO: 952303 - RNA, 21 nt, Human
aaacaaacaaaaaacccaggc

SEQ ID NO: 952304 - RNA, 24 nt, Human
aaagugccaggauuacaggcauga

SEQ ID NO: 952305 - RNA, 24 nt, Human
aaagugggcauuugaacaacccuc

SEQ ID NO: 952306 - RNA, 20 nt, Human
aacaugcaggcaccaaaaaa

SEQ ID NO: 952307 - RNA, 26 nt, Human
aagugccaggauuacaggcaugagcc

SEQ ID NO: 952308 - RNA, 24 nt, Human
accauguuggccaggcuggucuug

SEQ ID NO: 952309 - RNA, 22 nt, Human
acuucugcagaagcuaaaacaa

SEQ ID NO: 952310 - RNA, 20 nt, Human
agaaauacacagccuggccc

SEQ ID NO: 952311 - RNA, 23 nt, Human
aggauuacaggcaugagccaccg

SEQ ID NO: 952312 - RNA, 25 nt, Human
aggauuacaggcaugagccaccggg

SEQ ID NO: 952313 - RNA, 20 nt, Human
aggcagauaaugaaauccug

SEQ ID NO: 952314 - RNA, 21 nt, Human
aggcaugagccaccgggccca

SEQ ID NO: 952315 - RNA, 18 nt, Human
aggcccuccuaaguucag

SEQ ID NO: 952316 - RNA, 24 nt, Human
auaaauaugagaguggaugaacgu

SEQ ID NO: 952317 - RNA, 18 nt, Human
augggguuucaccauguu

SEQ ID NO: 952318 - RNA, 22 nt, Human
augggguuucaccauguuggcc

SEQ ID NO: 952319 - RNA, 24 nt, Human
augggguuucaccauguuggccag

SEQ ID NO: 952320 - RNA, 19 nt, Human
caaaauggaagacuauuca

SEQ ID NO: 952321 - RNA, 24 nt, Human
caaacaaaaaacccaggcagauaa

SEQ ID NO: 952322 - RNA, 24 nt, Human
caaagugccaggauuacaggcaug

SEQ ID NO: 952323 - RNA, 21 nt, Human
caccauguuggccaggcuggu

SEQ ID NO: 952324 - RNA, 24 nt, Human
caccauguuggccaggcuggucuu

SEQ ID NO: 952325 - RNA, 31 nt, Human
caccauguuggccaggcuggucuuggacucc

SEQ ID NO: 952326 - RNA, 21 nt, Human
cagacagacuguccuccgaag

SEQ ID NO: 952327 - RNA, 24 nt, Human
cagacagacuguccuccgaagccc

SEQ ID NO: 952328 - RNA, 18 nt, Human
cagcagccacagcugggc

SEQ ID NO: 952329 - RNA, 21 nt, Human
caggauuacaggcaugagcca

SEQ ID NO: 952330 - RNA, 25 nt, Human
caucuuuaaaacaucuauuucagga

SEQ ID NO: 952331 - RNA, 27 nt, Human
caugacacugcaauaauagcaaugaac

SEQ ID NO: 952332 - RNA, 23 nt, Human
cauguuggccaggcuggucuugg

SEQ ID NO: 952333 - RNA, 24 nt, Human
cauguuggccaggcuggucuugga

SEQ ID NO: 952334 - RNA, 24 nt, Human
ccaaagugccaggauuacaggcau

SEQ ID NO: 952335 - RNA, 20 nt, Human
ccaccgggcccagccuacuu

SEQ ID NO: 952336 - RNA, 21 nt, Human
ccaggcagauaaugaaauccu

SEQ ID NO: 952337 - RNA, 23 nt, Human
ccccuaacuaagaugggcuucug

SEQ ID NO: 952338 - RNA, 21 nt, Human
ccgaagcccaccccaccaaag

SEQ ID NO: 952339 - RNA, 20 nt, Human
ccuccgaagcccaccccacc

SEQ ID NO: 952340 - RNA, 18 nt, Human
ccugaccucaagugaucc

SEQ ID NO: 952341 - RNA, 21 nt, Human
ccugaccucaagugauccgcc

SEQ ID NO: 952342 - RNA, 23 nt, Human
ccugaccucaagugauccgccug

SEQ ID NO: 952343 - RNA, 23 nt, Human
cgccugaccagacuccuauucgc

SEQ ID NO: 952344 - RNA, 21 nt, Human
cucaagugauccgccugccgc

SEQ ID NO: 952345 - RNA, 26 nt, Human
cuccugaccucaagugauccgccugc

SEQ ID NO: 952346 - RNA, 20 nt, Human
cucuuuaacaacagcauugg

SEQ ID NO: 952347 - RNA, 22 nt, Human
cuggaaccauaacuuuaaccca

SEQ ID NO: 952348 - RNA, 21 nt, Human
cuucugggccuaucaaccauu

SEQ ID NO: 952349 - RNA, 22 nt, Human
cuucuugaauuaaaaaacaaaa

SEQ ID NO: 952350 - RNA, 21 nt, Human
cuuuacguuuggcuucuccuc

SEQ ID NO: 952351 - RNA, 31 nt, Human
gaccagacuccuauucgccgcaaggacccgg

SEQ ID NO: 952352 - RNA, 22 nt, Human
gaccucaagugauccgccugcc

SEQ ID NO: 952353 - RNA, 21 nt, Human
gacgccugaccagacuccuau

SEQ ID NO: 952354 - RNA, 20 nt, Human
gagaugggguuucaccaugu

SEQ ID NO: 952355 - RNA, 24 nt, Human
gagaugggguuucaccauguuggc

SEQ ID NO: 952356 - RNA, 20 nt, Human
gagcagcaauuccccauagg

SEQ ID NO: 952357 - RNA, 18 nt, Human
gauuacaggcaugagcca

SEQ ID NO: 952358 - RNA, 20 nt, Human
gauuacaggcaugagccacc

SEQ ID NO: 952359 - RNA, 21 nt, Human
gauuacaggcaugagccaccg

SEQ ID NO: 952360 - RNA, 25 nt, Human
gcaaagucuucauucaaaugcaaag

SEQ ID NO: 952361 - RNA, 25 nt, Human
gcagcagccacagcugaccccuugg

SEQ ID NO: 952362 - RNA, 20 nt, Human
gcugcagggucagcacuggc

SEQ ID NO: 952363 - RNA, 23 nt, Human
gcuggucuuggacuccugaccuc

SEQ ID NO: 952364 - RNA, 20 nt, Human
ggaacaucuucagcacccuc

SEQ ID NO: 952365 - RNA, 22 nt, Human
ggauuacaggcaugagccaccg

SEQ ID NO: 952366 - RNA, 23 nt, Human
ggcauuuuaguuccuaggagagc

SEQ ID NO: 952367 - RNA, 24 nt, Human
ggcuggucuuggacuccugaccuc

SEQ ID NO: 952368 - RNA, 22 nt, Human
gggguuucaccauguuggccag

SEQ ID NO: 952369 - RNA, 18 nt, Human
ggguuucaccauguuggc

SEQ ID NO: 952370 - RNA, 22 nt, Human
gguagagaugggguuucaccau

SEQ ID NO: 952371 - RNA, 23 nt, Human
gguagagaugggguuucaccaug

SEQ ID NO: 952372 - RNA, 21 nt, Human
guagagaugggguuucaccau

SEQ ID NO: 952373 - RNA, 22 nt, Human
guagagaugggguuucaccaug

SEQ ID NO: 952374 - RNA, 23 nt, Human
guagagaugggguuucaccaugu

SEQ ID NO: 952375 - RNA, 19 nt, Human
gucugcaugaagcauaagg

SEQ ID NO: 952376 - RNA, 24 nt, Human
gugauccgccugccgcagccuccc

SEQ ID NO: 952377 - RNA, 23 nt, Human
gugauggcuggaaauuaguggga

SEQ ID NO: 952378 - RNA, 18 nt, Human
guucagcgcggucuccaa

SEQ ID NO: 952379 - RNA, 23 nt, Human
uaaaaaacaaaaaacaaacaaaa

SEQ ID NO: 952380 - RNA, 26 nt, Human
uaaaaaacaaaaaacaaacaaaaaac

SEQ ID NO: 952381 - RNA, 21 nt, Human
uaauagcaaugaaccgcuuca

SEQ ID NO: 952382 - RNA, 24 nt, Human
uacaggcaugagccaccgggccca

SEQ ID NO: 952383 - RNA, 22 nt, Human
uagagaugggguuucaccaugu

SEQ ID NO: 952384 - RNA, 25 nt, Human
ucaagagcuuuuagccugcuucagu

SEQ ID NO: 952385 - RNA, 21 nt, Human
ucaggauuuggaagcuucugg

SEQ ID NO: 952386 - RNA, 29 nt, Human
ucagucuucaaacaugcaggcaccaaaaa

SEQ ID NO: 952387 - RNA, 20 nt, Human
uccaacuuugaugugcauau

SEQ ID NO: 952388 - RNA, 21 nt, Human
uccauaacagucuuuuuacuu

SEQ ID NO: 952389 - RNA, 24 nt, Human
ucccaaagugccaggauuacaggc

SEQ ID NO: 952390 - RNA, 21 nt, Human
ucuuggacuccugaccucaag

SEQ ID NO: 952391 - RNA, 24 nt, Human
ugaacaacccucuuccugcucccu

SEQ ID NO: 952392 - RNA, 20 nt, Human
ugaccagacuccuauucgcc

SEQ ID NO: 952393 - RNA, 18 nt, Human
ugaccucaagugauccgc

SEQ ID NO: 952394 - RNA, 22 nt, Human
ugcauacacucaagucugcaug

SEQ ID NO: 952395 - RNA, 24 nt, Human
ugccgcagccucccaaagugccag

SEQ ID NO: 952396 - RNA, 24 nt, Human
uggccaggcuggucuuggacuccu

SEQ ID NO: 952397 - RNA, 24 nt, Human
ugggguuucaccauguuggccagg

SEQ ID NO: 952398 - RNA, 27 nt, Human
uguguuuugcaaagucuucauucaaau

SEQ ID NO: 952399 - RNA, 24 nt, Human
uuucaccauguuggccaggcuggu

SEQ ID NO: 952400 - RNA, 24 nt, Human
uuuccaaaauggaagacuauucau

SEQ ID NO: 952401 - RNA, 24 nt, Human
uuuccagugcugaucacacccacu

SEQ ID NO: 952402 - RNA, 18 nt, Human
uuuggaagcuucuggaac

SEQ ID NO: 952403 - RNA, 21 nt, Human
aaacuuuauugaaaaacugac

SEQ ID NO: 952404 - RNA, 22 nt, Human
aauuauggaauuuaugauaagg

SEQ ID NO: 952405 - RNA, 23 nt, Human
agacaacacaaaauuaaaauuca

SEQ ID NO: 952406 - RNA, 20 nt, Human
caaaaccaaauguaauuaca

SEQ ID NO: 952407 - RNA, 19 nt, Human
caagcugcaagcgaucugc

SEQ ID NO: 952408 - RNA, 21 nt, Human
ccuaccagaccucccagccca

SEQ ID NO: 952409 - RNA, 21 nt, Human
ccucccagcccacacagcuag

SEQ ID NO: 952410 - RNA, 24 nt, Human
cucagcccuaccagaccucccagc

SEQ ID NO: 952411 - RNA, 19 nt, Human
cuugcaagcucagcccuac

SEQ ID NO: 952412 - RNA, 18 nt, Human
uuugcccauaaucaaaac

SEQ ID NO: 952413 - RNA, 19 nt, Human
uuuuuuuuuuuuuugccca

SEQ ID NO: 952414 - RNA, 18 nt, Human
uuuuuuuuuuuuuuuuug

SEQ ID NO: 952415 - RNA, 21 nt, Human
uuuuuuuuuuuuuuuuugccc

SEQ ID NO: 952416 - RNA, 25 nt, Human
uuuuuuuuuuuuuuuuugcccauaa

SEQ ID NO: 952417 - RNA, 20 nt, Human
aaaccccacuccccagcagg

SEQ ID NO: 952418 - RNA, 21 nt, Human
acagacaguccauaaagugac

SEQ ID NO: 952419 - RNA, 21 nt, Human
acccccaaggccccaccccca

SEQ ID NO: 952420 - RNA, 24 nt, Human
accuaucuccuuccuuagccccaa

SEQ ID NO: 952421 - RNA, 22 nt, Human
acggggccucaggggagaacag

SEQ ID NO: 952422 - RNA, 21 nt, Human
agccccaacaggggagaagcc

SEQ ID NO: 952423 - RNA, 20 nt, Human
aggcagugaccauggaugcc

SEQ ID NO: 952424 - RNA, 23 nt, Human
aggcaguguccugggagagggcc

SEQ ID NO: 952425 - RNA, 24 nt, Human
agggaagggggucacagugguggg

SEQ ID NO: 952426 - RNA, 21 nt, Human
agggggucacaguggugggga

SEQ ID NO: 952427 - RNA, 24 nt, Human
caaggccccacccccagccaggag

SEQ ID NO: 952428 - RNA, 20 nt, Human
cacccccagccaggaguagc

SEQ ID NO: 952429 - RNA, 23 nt, Human
cagacccccaaggccccaccccc

SEQ ID NO: 952430 - RNA, 18 nt, Human
cagcaggcccccccuucc

SEQ ID NO: 952431 - RNA, 24 nt, Human
cagugaccauggaugcccagccca

SEQ ID NO: 952432 - RNA, 22 nt, Human
caguguccugggagagggcccc

SEQ ID NO: 952433 - RNA, 22 nt, Human
cccaaaccccacuccccagcag

SEQ ID NO: 952434 - RNA, 24 nt, Human
cccagacccccaaggccccacccc

SEQ ID NO: 952435 - RNA, 21 nt, Human
cccagcccagacccccaaggc

SEQ ID NO: 952436 - RNA, 21 nt, Human
ccccaaaccccacuccccagc

SEQ ID NO: 952437 - RNA, 19 nt, Human
ccccaaggccccaccccca

SEQ ID NO: 952438 - RNA, 24 nt, Human
ccccacccccagccaggaguagcu

SEQ ID NO: 952439 - RNA, 20 nt, Human
ccccacuccccagcaggccc

SEQ ID NO: 952440 - RNA, 18 nt, Human
ccccagcaggcccccccu

SEQ ID NO: 952441 - RNA, 19 nt, Human
ccccagcaggcccccccuu

SEQ ID NO: 952442 - RNA, 19 nt, Human
cccccaaaccccacucccc

SEQ ID NO: 952443 - RNA, 20 nt, Human
ccccccaaaccccacucccc

SEQ ID NO: 952444 - RNA, 23 nt, Human
ccccccaaaccccacuccccagc

SEQ ID NO: 952445 - RNA, 26 nt, Human
ccccccaaaccccacuccccagcagg

SEQ ID NO: 952446 - RNA, 19 nt, Human
ccccucccaggaacggggc

SEQ ID NO: 952447 - RNA, 21 nt, Human
ccccuggaggggccuucugcc

SEQ ID NO: 952448 - RNA, 23 nt, Human
ccuaucuccuuccuuagccccaa

SEQ ID NO: 952449 - RNA, 18 nt, Human
ccucaggggagaacaggg

SEQ ID NO: 952450 - RNA, 22 nt, Human
ccuucccugcaacucuaucugg

SEQ ID NO: 952451 - RNA, 21 nt, Human
cgcaggcagaggccuccggga

SEQ ID NO: 952452 - RNA, 21 nt, Human
cgcuggggcccgcgcggcucg

SEQ ID NO: 952453 - RNA, 23 nt, Human
cgggagugagccgggcucccagg

SEQ ID NO: 952454 - RNA, 21 nt, Human
cgggcucccaggucacagccc

SEQ ID NO: 952455 - RNA, 23 nt, Human
cgggcucccaggucacagccccu

SEQ ID NO: 952456 - RNA, 18 nt, Human
cugugccaaagaggaagg

SEQ ID NO: 952457 - RNA, 26 nt, Human
cuuagccccaacaggggagaagcaga

SEQ ID NO: 952458 - RNA, 23 nt, Human
gacuuuuauuuuaaagucaaagg

SEQ ID NO: 952459 - RNA, 25 nt, Human
gagcagucccccuggaggggccuuc

SEQ ID NO: 952460 - RNA, 20 nt, Human
gaggggcucuuuccuguugg

SEQ ID NO: 952461 - RNA, 18 nt, Human
gccccccaaaccccacuc

SEQ ID NO: 952462 - RNA, 21 nt, Human
ggccccccaaaccccacuccc

SEQ ID NO: 952463 - RNA, 19 nt, Human
gggaguggggugggguagg

SEQ ID NO: 952464 - RNA, 21 nt, Human
ggggccuucugcccagaagag

SEQ ID NO: 952465 - RNA, 21 nt, Human
uacuucugcucugucugggag

SEQ ID NO: 952466 - RNA, 27 nt, Human
uaggagccaccuaucuccuuccuuagc

SEQ ID NO: 952467 - RNA, 19 nt, Human
uaucugguaagacauaaaa

SEQ ID NO: 952468 - RNA, 23 nt, Human
ucagagggucccccagggccucu

SEQ ID NO: 952469 - RNA, 24 nt, Human
ucccccagggccucuccuucagua

SEQ ID NO: 952470 - RNA, 19 nt, Human
uccuucaguacccccaaca

SEQ ID NO: 952471 - RNA, 18 nt, Human
ucgcuggggcccgcgcgg

SEQ ID NO: 952472 - RNA, 20 nt, Human
ucugcucugucugggagugg

SEQ ID NO: 952473 - RNA, 21 nt, Human
ugagaagauggccuccucuuu

SEQ ID NO: 952474 - RNA, 20 nt, Human
ugagggaagggggucacagu

SEQ ID NO: 952475 - RNA, 22 nt, Human
ugagggaagggggucacagugg

SEQ ID NO: 952476 - RNA, 18 nt, Human
ugcaacucuaucugguaa

SEQ ID NO: 952477 - RNA, 23 nt, Human
ugccaaagaggaaggggugggug

SEQ ID NO: 952478 - RNA, 24 nt, Human
ugcucugucugggagugggguggg

SEQ ID NO: 952479 - RNA, 25 nt, Human
ugcucugucugggaguggggugggg

SEQ ID NO: 952480 - RNA, 21 nt, Human
uggcugggcugaggcagugac

SEQ ID NO: 952481 - RNA, 23 nt, Human
ugggagagggccccccaaacccc

SEQ ID NO: 952482 - RNA, 20 nt, Human
ugggaguggggugggguagg

SEQ ID NO: 952483 - RNA, 26 nt, Human
ugggggaggggcucuuuccuguugga

SEQ ID NO: 952484 - RNA, 23 nt, Human
ugguaagacauaaaaaauucucu

SEQ ID NO: 952485 - RNA, 21 nt, Human
uuggagcagucccccuggagg

SEQ ID NO: 952486 - RNA, 25 nt, Human
aaaccccagguccaccccaaucccu

SEQ ID NO: 952487 - RNA, 21 nt, Human
aaagaccugauuggcaguuuc

SEQ ID NO: 952488 - RNA, 26 nt, Human
aagcuugcaugcuaauuuguccuuag

SEQ ID NO: 952489 - RNA, 20 nt, Human
acugacuuacauccucuuca

SEQ ID NO: 952490 - RNA, 23 nt, Human
agaaacagaaguugucuggcuuu

SEQ ID NO: 952491 - RNA, 18 nt, Human
auuucuuuucagcagcuu

SEQ ID NO: 952492 - RNA, 23 nt, Human
caaacgagccacagcuguguuaa

SEQ ID NO: 952493 - RNA, 20 nt, Human
caacaugaaaauccuugaua

SEQ ID NO: 952494 - RNA, 24 nt, Human
cacaucucccucuccaccuuuuug

SEQ ID NO: 952495 - RNA, 24 nt, Human
caccaagagaagaaacagaaguug

SEQ ID NO: 952496 - RNA, 21 nt, Human
cagagcaacauccuacccuua

SEQ ID NO: 952497 - RNA, 22 nt, Human
cagcaugucauacauuaaugcu

SEQ ID NO: 952498 - RNA, 22 nt, Human
cagguccaccccaaucccucaa

SEQ ID NO: 952499 - RNA, 24 nt, Human
caucucccucuccaccuuuuugcc

SEQ ID NO: 952500 - RNA, 20 nt, Human
ccagaaagaccugauuggca

SEQ ID NO: 952501 - RNA, 25 nt, Human
ccucuucagauugcaacagagguug

SEQ ID NO: 952502 - RNA, 24 nt, Human
ccuucuucacacaucagacucaca

SEQ ID NO: 952503 - RNA, 20 nt, Human
cucacacaucucccucucca

SEQ ID NO: 952504 - RNA, 20 nt, Human
cuucccauuuugccugggaa

SEQ ID NO: 952505 - RNA, 20 nt, Human
cuuuuuaagcagaucucugg

SEQ ID NO: 952506 - RNA, 21 nt, Human
gagcaacauccuacccuuaau

SEQ ID NO: 952507 - RNA, 21 nt, Human
gagucaucaacaugaaaaucc

SEQ ID NO: 952508 - RNA, 20 nt, Human
ggaugcucacacaucucccu

SEQ ID NO: 952509 - RNA, 20 nt, Human
uaaaagggggcuccaccuuu

SEQ ID NO: 952510 - RNA, 18 nt, Human
uaaaccccagguccaccc

SEQ ID NO: 952511 - RNA, 19 nt, Human
uaaaccccagguccacccc

SEQ ID NO: 952512 - RNA, 19 nt, Human
uaaaccccagguccacccc

SEQ ID NO: 952513 - RNA, 25 nt, Human
ucagcagcuuuuuaagcagaucucu

SEQ ID NO: 952514 - RNA, 21 nt, Human
ucauuugcauuuuauuauuuc

SEQ ID NO: 952515 - RNA, 21 nt, Human
uccaccccaaucccucaaacg

SEQ ID NO: 952516 - RNA, 19 nt, Human
uccaccuuuuugccuuaaa

SEQ ID NO: 952517 - RNA, 24 nt, Human
uccaccuuuuugccuuaaauucau

SEQ ID NO: 952518 - RNA, 26 nt, Human
ucuccagcguccccaggaccagcuca

SEQ ID NO: 952519 - RNA, 19 nt, Human
ucuccccaguaaauggggg

SEQ ID NO: 952520 - RNA, 19 nt, Human
ugaaaauaaaccccagguc

SEQ ID NO: 952521 - RNA, 27 nt, Human
ugaaaauaaaccccagguccaccccaa

SEQ ID NO: 952522 - RNA, 20 nt, Human
ugaacuucuccagcgucccc

SEQ ID NO: 952523 - RNA, 18 nt, Human
ugaccaagcuugcaugcu

SEQ ID NO: 952524 - RNA, 22 nt, Human
ugagcugaaucaaaaaucuauu

SEQ ID NO: 952525 - RNA, 22 nt, Human
ugagguagggaggcaaauugag

SEQ ID NO: 952526 - RNA, 23 nt, Human
ugauugauuuuuuaaaauccacg

SEQ ID NO: 952527 - RNA, 24 nt, Human
ugauuggcaguuucacugagaguu

SEQ ID NO: 952528 - RNA, 22 nt, Human
ugcaggaugcucacacaucucc

SEQ ID NO: 952529 - RNA, 20 nt, Human
ugggaaaaguuugaccaagc

SEQ ID NO: 952530 - RNA, 22 nt, Human
uggguuacugaaaauaaacccc

SEQ ID NO: 952531 - RNA, 23 nt, Human
ugucauacauuaaugcucccaaa

SEQ ID NO: 952532 - RNA, 23 nt, Human
uucagcagcuuuuuaagcagauc

SEQ ID NO: 952533 - RNA, 23 nt, Human
uucauaaugagcugaaucaaaaa

SEQ ID NO: 952534 - RNA, 23 nt, Human
uucuugugugagguagggaggca

SEQ ID NO: 952535 - RNA, 19 nt, Human
acaccccacccccagacac

SEQ ID NO: 952536 - RNA, 19 nt, Human
acccccaggucucuggaac

SEQ ID NO: 952537 - RNA, 18 nt, Human
agacacacacuuucauac

SEQ ID NO: 952538 - RNA, 23 nt, Human
agacacacccccaggucucugga

SEQ ID NO: 952539 - RNA, 21 nt, Human
aggucucuggaacuggcccag

SEQ ID NO: 952540 - RNA, 21 nt, Human
auacgcacucacaccccaccc

SEQ ID NO: 952541 - RNA, 22 nt, Human
caccccacccccagacacaccc

SEQ ID NO: 952542 - RNA, 23 nt, Human
caccccacccccagacacacccc

SEQ ID NO: 952543 - RNA, 22 nt, Human
caguugagcgcgggguguggcc

SEQ ID NO: 952544 - RNA, 19 nt, Human
ccagacacacccccagguc

SEQ ID NO: 952545 - RNA, 20 nt, Human
cccacccccagacacacccc

SEQ ID NO: 952546 - RNA, 27 nt, Human
ccccacccccagacacacccccagguc

SEQ ID NO: 952547 - RNA, 23 nt, Human
cccccagacacacccccaggucu

SEQ ID NO: 952548 - RNA, 26 nt, Human
cccccagacacacccccaggucucug

SEQ ID NO: 952549 - RNA, 20 nt, Human
cccccaggucucuggaacug

SEQ ID NO: 952550 - RNA, 23 nt, Human
cccccaggucucuggaacuggcc

SEQ ID NO: 952551 - RNA, 22 nt, Human
ccgcagggacagggcucaaggg

SEQ ID NO: 952552 - RNA, 18 nt, Human
cgcacucacaccccaccc

SEQ ID NO: 952553 - RNA, 20 nt, Human
cgcacucacaccccaccccc

SEQ ID NO: 952554 - RNA, 24 nt, Human
cgggagcaguugagcgcggggugu

SEQ ID NO: 952555 - RNA, 22 nt, Human
cucaagggcuacccucaccccc

SEQ ID NO: 952556 - RNA, 20 nt, Human
cucacaccccacccccagac

SEQ ID NO: 952557 - RNA, 21 nt, Human
cucacaccccacccccagaca

SEQ ID NO: 952558 - RNA, 19 nt, Human
cugcugcucucacagccgc

SEQ ID NO: 952559 - RNA, 23 nt, Human
gagcgcgggguguggcgggcggc

SEQ ID NO: 952560 - RNA, 23 nt, Human
gcacucacaccccacccccagac

SEQ ID NO: 952561 - RNA, 20 nt, Human
ggcuacccucacccccaccc

SEQ ID NO: 952562 - RNA, 22 nt, Human
uacccucacccccacccggcuu

SEQ ID NO: 952563 - RNA, 29 nt, Human
uacgcacucacaccccacccccagacacc

SEQ ID NO: 952564 - RNA, 18 nt, Human
ucacaccccacccccaga

SEQ ID NO: 952565 - RNA, 18 nt, Human
uccugcugcucucacagc

SEQ ID NO: 952566 - RNA, 19 nt, Human
uggcccaggguccugcugc

SEQ ID NO: 952567 - RNA, 23 nt, Human
acagaauaugagggaacaagcag

SEQ ID NO: 952568 - RNA, 18 nt, Human
accacauucaacauacau

SEQ ID NO: 952569 - RNA, 21 nt, Human
acucccuucccuuuuuuguug

SEQ ID NO: 952570 - RNA, 19 nt, Human
agaucagaaugugugaaga

SEQ ID NO: 952571 - RNA, 18 nt, Human
aguacaaagcugacaaca

SEQ ID NO: 952572 - RNA, 23 nt, Human
cacuucuagcuuccuaucagagg

SEQ ID NO: 952573 - RNA, 24 nt, Human
ccacggcggcgccucagcugcaca

SEQ ID NO: 952574 - RNA, 19 nt, Human
ccgccgccacccgcccggg

SEQ ID NO: 952575 - RNA, 21 nt, Human
ccgccgccucugccgccgccg

SEQ ID NO: 952576 - RNA, 18 nt, Human
ccucccgccgccucugcc

SEQ ID NO: 952577 - RNA, 21 nt, Human
ccucugccgccgccgccaccc

SEQ ID NO: 952578 - RNA, 21 nt, Human
cgccucugccgccgccgccac

SEQ ID NO: 952579 - RNA, 22 nt, Human
gaacaagcagagggugcagaaa

SEQ ID NO: 952580 - RNA, 23 nt, Human
gcaguaucaacaaagaguacaaa

SEQ ID NO: 952581 - RNA, 19 nt, Human
gcgcgguccagguucccca

SEQ ID NO: 952582 - RNA, 20 nt, Human
ggaaauaagcacucccuucc

SEQ ID NO: 952583 - RNA, 19 nt, Human
ggaacucuuucaguuggcu

SEQ ID NO: 952584 - RNA, 20 nt, Human
ggaagaacagaauaugaggg

SEQ ID NO: 952585 - RNA, 22 nt, Human
gggggcgguggcuccaaggcgg

SEQ ID NO: 952586 - RNA, 22 nt, Human
gguggcuccaaggcggcuccac

SEQ ID NO: 952587 - RNA, 21 nt, Human
gugcuggagaugccugucaca

SEQ ID NO: 952588 - RNA, 21 nt, Human
uaacagccccuggcacaauua

SEQ ID NO: 952589 - RNA, 22 nt, Human
uaaguaacugugagucagaggu

SEQ ID NO: 952590 - RNA, 23 nt, Human
uaauuuaaucauauaaaccaaga

SEQ ID NO: 952591 - RNA, 23 nt, Human
uaauuuaaucauauaaaccaauc

SEQ ID NO: 952592 - RNA, 21 nt, Human
uacaacucaucugcaacacca

SEQ ID NO: 952593 - RNA, 19 nt, Human
uacagcaucaggguacagg

SEQ ID NO: 952594 - RNA, 19 nt, Human
ucaacaaagaguacaaagc

SEQ ID NO: 952595 - RNA, 22 nt, Human
uccccaacgcagcggcgaaggc

SEQ ID NO: 952596 - RNA, 21 nt, Human
ugacaacauggagugucuucu

SEQ ID NO: 952597 - RNA, 22 nt, Human
ugagggaacaagcagagggugc

SEQ ID NO: 952598 - RNA, 22 nt, Human
ugagucagaggugccucagugc

SEQ ID NO: 952599 - RNA, 19 nt, Human
ugccauguaaagguccuuc

SEQ ID NO: 952600 - RNA, 21 nt, Human
uggagugucuucuuacagaaa

SEQ ID NO: 952601 - RNA, 22 nt, Human
uggcuccaaggcggcuccacgg

SEQ ID NO: 952602 - RNA, 22 nt, Human
uguauauaacagccccuggcac

SEQ ID NO: 952603 - RNA, 18 nt, Human
uguguauauauguauaua

SEQ ID NO: 952604 - RNA, 27 nt, Human
uguucucuuuuagccauuuccccccca

SEQ ID NO: 952605 - RNA, 22 nt, Human
uuaaucauauaaaccaauccug

SEQ ID NO: 952606 - RNA, 20 nt, Human
uucaccauguuuauuugaua

SEQ ID NO: 952607 - RNA, 19 nt, Human
uucucgcuuuuaaguuuca

SEQ ID NO: 952608 - RNA, 21 nt, Human
uuguguauauauguauauaac

SEQ ID NO: 952609 - RNA, 23 nt, Human
uuuuuuuuuuuuuuuuaauguuu

SEQ ID NO: 952610 - RNA, 20 nt, Human
aaaaaaacccagucuucaga

SEQ ID NO: 952611 - RNA, 19 nt, Human
aaacaagcaaauccuucca

SEQ ID NO: 952612 - RNA, 21 nt, Human
aaacaagcaaauccuuccaaa

SEQ ID NO: 952613 - RNA, 19 nt, Human
aaacagcaacccguaaaac

SEQ ID NO: 952614 - RNA, 18 nt, Human
aacaaaaaaaacccaguc

SEQ ID NO: 952615 - RNA, 20 nt, Human
aacccauguuaaaacagcaa

SEQ ID NO: 952616 - RNA, 25 nt, Human
aagaaaaccacccauauccaaaacu

SEQ ID NO: 952617 - RNA, 21 nt, Human
aaguaaacaaaaaaguacaca

SEQ ID NO: 952618 - RNA, 21 nt, Human
aaguacacauguaagaaacaa

SEQ ID NO: 952619 - RNA, 22 nt, Human
aagugaugcagaucaaaacuga

SEQ ID NO: 952620 - RNA, 24 nt, Human
aaguuccagauuaaccaugucauu

SEQ ID NO: 952621 - RNA, 24 nt, Human
aauuacaucuaccuggaccuccau

SEQ ID NO: 952622 - RNA, 22 nt, Human
acaacaacaacaaaaaaaaccc

SEQ ID NO: 952623 - RNA, 22 nt, Human
accaaacccggaaaagaaaacc

SEQ ID NO: 952624 - RNA, 24 nt, Human
accuggaagugccacagccgaggc

SEQ ID NO: 952625 - RNA, 18 nt, Human
acucugugucccagacca

SEQ ID NO: 952626 - RNA, 23 nt, Human
agaaaaccacccauauccaaaac

SEQ ID NO: 952627 - RNA, 23 nt, Human
agaaggugaacaauguagccaaa

SEQ ID NO: 952628 - RNA, 18 nt, Human
aggcuuuagagaaggauu

SEQ ID NO: 952629 - RNA, 23 nt, Human
aggcuuuagagaaggauuccgac

SEQ ID NO: 952630 - RNA, 22 nt, Human
auggccaccaaggagcaguucu

SEQ ID NO: 952631 - RNA, 23 nt, Human
auggccaccaaggagcaguucua

SEQ ID NO: 952632 - RNA, 25 nt, Human
caaaacuuuaaagcaauaaaaauuu

SEQ ID NO: 952633 - RNA, 22 nt, Human
caaacccggaaaagaaaaccac

SEQ ID NO: 952634 - RNA, 24 nt, Human
caaaugucacaucucagucacaaa

SEQ ID NO: 952635 - RNA, 20 nt, Human
caacccacaaagaccccacu

SEQ ID NO: 952636 - RNA, 25 nt, Human
caacccguaaaacagucugcugccc

SEQ ID NO: 952637 - RNA, 19 nt, Human
cacaaguaaacaaaaaagu

SEQ ID NO: 952638 - RNA, 24 nt, Human
cauacaaagcccuggaaaagagga

SEQ ID NO: 952639 - RNA, 21 nt, Human
caugauagucuucauuuuguc

SEQ ID NO: 952640 - RNA, 24 nt, Human
ccaaacccggaaaagaaaaccacc

SEQ ID NO: 952641 - RNA, 23 nt, Human
ccaagccgaaugugcgaugcaca

SEQ ID NO: 952642 - RNA, 25 nt, Human
ccacagccgaggcaggccggggucc

SEQ ID NO: 952643 - RNA, 21 nt, Human
ccauggaucugacaaaaaccc

SEQ ID NO: 952644 - RNA, 24 nt, Human
cccacaaagaccccacuuacuacu

SEQ ID NO: 952645 - RNA, 27 nt, Human
cccauguuaaaacagcaacccguaaaa

SEQ ID NO: 952646 - RNA, 24 nt, Human
cgaaccuggaagugccacagccga

SEQ ID NO: 952647 - RNA, 24 nt, Human
cuccaacucugugucccagaccuu

SEQ ID NO: 952648 - RNA, 20 nt, Human
cugauucuguuucccuauau

SEQ ID NO: 952649 - RNA, 19 nt, Human
cuggagaucuucagugcca

SEQ ID NO: 952650 - RNA, 20 nt, Human
gaaggugaacaauguagccc

SEQ ID NO: 952651 - RNA, 28 nt, Human
gacaaaaacccauguuaaaacagcaacc

SEQ ID NO: 952652 - RNA, 23 nt, Human
gaccauggaucugacaaaaaccc

SEQ ID NO: 952653 - RNA, 24 nt, Human
gaccauggaucugacaaaaaccca

SEQ ID NO: 952654 - RNA, 18 nt, Human
gagcaguucuagaucuaa

SEQ ID NO: 952655 - RNA, 20 nt, Human
gagcaguucuagaucuaagg

SEQ ID NO: 952656 - RNA, 19 nt, Human
ggaaaagaaaaccacccau

SEQ ID NO: 952657 - RNA, 21 nt, Human
ggaaaagaaaaccacccauau

SEQ ID NO: 952658 - RNA, 24 nt, Human
ggccgcaguuuuuuuuuuuuuuuu

SEQ ID NO: 952659 - RNA, 19 nt, Human
ggggaacaacaacaacaaa

SEQ ID NO: 952660 - RNA, 22 nt, Human
gucaaaaagcuguuaacacaaa

SEQ ID NO: 952661 - RNA, 21 nt, Human
uaaaacagcaacccguaaaac

SEQ ID NO: 952662 - RNA, 22 nt, Human
uaaaacagcaacccguaaaaca

SEQ ID NO: 952663 - RNA, 27 nt, Human
uaaagggaauaagcuugguccgaaagg

SEQ ID NO: 952664 - RNA, 22 nt, Human
uaaaguucucaaauuacuuucc

SEQ ID NO: 952665 - RNA, 21 nt, Human
uaagaaacaaagugaaaaugc

SEQ ID NO: 952666 - RNA, 22 nt, Human
uaaggggaacaacaacaacaaa

SEQ ID NO: 952667 - RNA, 23 nt, Human
uacaaaaagaggcuuuagagaag

SEQ ID NO: 952668 - RNA, 21 nt, Human
uacacauguaagaaacaaagu

SEQ ID NO: 952669 - RNA, 18 nt, Human
uauccaaaacuuuaaagc

SEQ ID NO: 952670 - RNA, 19 nt, Human
uauccaaaacuuuaaagca

SEQ ID NO: 952671 - RNA, 25 nt, Human
uauuuuccaaaaaaguauuuacaga

SEQ ID NO: 952672 - RNA, 25 nt, Human
ucaaugcccaauggcacaagcuggg

SEQ ID NO: 952673 - RNA, 24 nt, Human
ucacaaguaaacaaaaaaguacac

SEQ ID NO: 952674 - RNA, 24 nt, Human
ucagaugcuugauucagucgaacc

SEQ ID NO: 952675 - RNA, 20 nt, Human
uccaacucugugucccagac

SEQ ID NO: 952676 - RNA, 23 nt, Human
uccaccaaacccggaaaagaaaa

SEQ ID NO: 952677 - RNA, 19 nt, Human
ucccaacccacaaagaccc

SEQ ID NO: 952678 - RNA, 20 nt, Human
ucccuaugggcuuuuauugg

SEQ ID NO: 952679 - RNA, 18 nt, Human
ucgaaccuggaagugcca

SEQ ID NO: 952680 - RNA, 18 nt, Human
ucucaaauuacuuuccac

SEQ ID NO: 952681 - RNA, 20 nt, Human
ucugucuucucuacacuccc

SEQ ID NO: 952682 - RNA, 22 nt, Human
ucuucccuaugggcuuuuauug

SEQ ID NO: 952683 - RNA, 21 nt, Human
ugacaaaaacccauguuaaaa

SEQ ID NO: 952684 - RNA, 20 nt, Human
ugacaagugauggggaaucc

SEQ ID NO: 952685 - RNA, 21 nt, Human
ugagggcaugacaagugaugg

SEQ ID NO: 952686 - RNA, 18 nt, Human
ugagguaccuuuuauugg

SEQ ID NO: 952687 - RNA, 22 nt, Human
ugcggccgcaguuuuuuuuuuu

SEQ ID NO: 952688 - RNA, 24 nt, Human
uggauuuuuuuucacaaacuccuu

SEQ ID NO: 952689 - RNA, 24 nt, Human
uguacauauuaaacaagcaaaucc

SEQ ID NO: 952690 - RNA, 24 nt, Human
ugucaaaaagcuguuaacacaaaa

SEQ ID NO: 952691 - RNA, 24 nt, Human
ugucgggccagcucucagcuuucc

SEQ ID NO: 952692 - RNA, 23 nt, Human
ugugagcaaaaccguacaccaaa

SEQ ID NO: 952693 - RNA, 19 nt, Human
ugugcgaugcacacagcca

SEQ ID NO: 952694 - RNA, 21 nt, Human
ugugucaaaaagcuguuaaca

SEQ ID NO: 952695 - RNA, 22 nt, Human
uuccaccaaacccggaaaagaa

SEQ ID NO: 952696 - RNA, 19 nt, Human
uucccaacccacaaagacc

SEQ ID NO: 952697 - RNA, 23 nt, Human
aaacagaccauuuggaggucagg

SEQ ID NO: 952698 - RNA, 26 nt, Human
aaauagcugggacuacaggugcacac

SEQ ID NO: 952699 - RNA, 20 nt, Human
aagcaggccugugggcugga

SEQ ID NO: 952700 - RNA, 25 nt, Human
aagugauucucccaccucagccucc

SEQ ID NO: 952701 - RNA, 19 nt, Human
aagugcugggauuauaggc

SEQ ID NO: 952702 - RNA, 19 nt, Human
aagugcugggauuauaggc

SEQ ID NO: 952703 - RNA, 23 nt, Human
aagugcugggauuauaggcguga

SEQ ID NO: 952704 - RNA, 26 nt, Human
aagugcugggauuauaggcgugagcc

SEQ ID NO: 952705 - RNA, 19 nt, Human
acaaggaacacgcaacaga

SEQ ID NO: 952706 - RNA, 24 nt, Human
accacacaucacagucuucacucc

SEQ ID NO: 952707 - RNA, 19 nt, Human
accauuuggaggucaggga

SEQ ID NO: 952708 - RNA, 25 nt, Human
accucagccucccaaauagcuggga

SEQ ID NO: 952709 - RNA, 24 nt, Human
accuuguuggccaggcuggucucg

SEQ ID NO: 952710 - RNA, 20 nt, Human
agaaagcaggccugugggcu

SEQ ID NO: 952711 - RNA, 22 nt, Human
aggccaaaacagaccauuugga

SEQ ID NO: 952712 - RNA, 23 nt, Human
aggcgugagccaccgugccuggc

SEQ ID NO: 952713 - RNA, 24 nt, Human
aggugaucugcccgccuuggccuc

SEQ ID NO: 952714 - RNA, 21 nt, Human
agguucaagugauucucccac

SEQ ID NO: 952715 - RNA, 20 nt, Human
aguagagaugggguuucacc

SEQ ID NO: 952716 - RNA, 24 nt, Human
agugauucucccaccucagccucc

SEQ ID NO: 952717 - RNA, 19 nt, Human
aucugccacccaggcuugg

SEQ ID NO: 952718 - RNA, 18 nt, Human
augggguuucaccuuguu

SEQ ID NO: 952719 - RNA, 24 nt, Human
augggguuucaccuuguuggccag

SEQ ID NO: 952720 - RNA, 23 nt, Human
caaaacagaccauuuggagguca

SEQ ID NO: 952721 - RNA, 22 nt, Human
caacagaaaaucagauuccaac

SEQ ID NO: 952722 - RNA, 20 nt, Human
caaggaacacgcaacagaaa

SEQ ID NO: 952723 - RNA, 23 nt, Human
caagucacucuccaagcaggaca

SEQ ID NO: 952724 - RNA, 22 nt, Human
caagugauucucccaccucagc

SEQ ID NO: 952725 - RNA, 27 nt, Human
caagugauucucccaccucagccuccc

SEQ ID NO: 952726 - RNA, 19 nt, Human
cacaccaccacaccuggcu

SEQ ID NO: 952727 - RNA, 21 nt, Human
caccuuguuggccaggcuggu

SEQ ID NO: 952728 - RNA, 24 nt, Human
caccuuguuggccaggcuggucuc

SEQ ID NO: 952729 - RNA, 22 nt, Human
cacgcaacagaaaaucagauuc

SEQ ID NO: 952730 - RNA, 21 nt, Human
cacugcaaccuccgccuccca

SEQ ID NO: 952731 - RNA, 21 nt, Human
cacugugcacuuugaaagagc

SEQ ID NO: 952732 - RNA, 19 nt, Human
cacuuugaaagagcugaag

SEQ ID NO: 952733 - RNA, 21 nt, Human
cagaacauucacuguauuauc

SEQ ID NO: 952734 - RNA, 21 nt, Human
caggugcacaccaccacaccu

SEQ ID NO: 952735 - RNA, 22 nt, Human
cccaaauagcugggacuacagg

SEQ ID NO: 952736 - RNA, 22 nt, Human
cccagguucaagugauucuccc

SEQ ID NO: 952737 - RNA, 24 nt, Human
ccgccucccagguucaagugauuc

SEQ ID NO: 952738 - RNA, 18 nt, Human
ccuaagugcugggauuau

SEQ ID NO: 952739 - RNA, 24 nt, Human
ccuaagugcugggauuauaggcgu

SEQ ID NO: 952740 - RNA, 24 nt, Human
ccucccagguucaagugauucucc

SEQ ID NO: 952741 - RNA, 20 nt, Human
cgcaacagaaaaucagauuc

SEQ ID NO: 952742 - RNA, 22 nt, Human
cgccucccagguucaagugauu

SEQ ID NO: 952743 - RNA, 24 nt, Human
cuaagugcugggauuauaggcgug

SEQ ID NO: 952744 - RNA, 23 nt, Human
cuaauuuuuuguauuuuuaguag

SEQ ID NO: 952745 - RNA, 24 nt, Human
cucacugcaaccuccgccucccag

SEQ ID NO: 952746 - RNA, 24 nt, Human
cucccaaauagcugggacuacagg

SEQ ID NO: 952747 - RNA, 18 nt, Human
cucccagguucaagugau

SEQ ID NO: 952748 - RNA, 24 nt, Human
cucgcucugucacccaggcuggag

SEQ ID NO: 952749 - RNA, 20 nt, Human
cucugucacccaggcuggag

SEQ ID NO: 952750 - RNA, 23 nt, Human
cugcaaccuccgccucccagguu

SEQ ID NO: 952751 - RNA, 21 nt, Human
cuggaggccgucacagggccg

SEQ ID NO: 952752 - RNA, 19 nt, Human
cugucacccaggcuggagu

SEQ ID NO: 952753 - RNA, 23 nt, Human
cuuauuuucuucauguuuaucug

SEQ ID NO: 952754 - RNA, 24 nt, Human
cuuuuaacucugaaucauccacaa

SEQ ID NO: 952755 - RNA, 20 nt, Human
gaccauuuggaggucaggga

SEQ ID NO: 952756 - RNA, 23 nt, Human
gaccucaggugaucugcccgccu

SEQ ID NO: 952757 - RNA, 24 nt, Human
gagaugggguuucaccuuguuggc

SEQ ID NO: 952758 - RNA, 18 nt, Human
gauuauaggcgugagcca

SEQ ID NO: 952759 - RNA, 21 nt, Human
gauuauaggcgugagccaccg

SEQ ID NO: 952760 - RNA, 24 nt, Human
gauuauaggcgugagccaccgugc

SEQ ID NO: 952761 - RNA, 22 nt, Human
gcaaccuccgccucccagguuc

SEQ ID NO: 952762 - RNA, 25 nt, Human
gcccgguguggacauaaucacaucu

SEQ ID NO: 952763 - RNA, 20 nt, Human
gcgauuucagcucacugcaa

SEQ ID NO: 952764 - RNA, 25 nt, Human
gcucugucacccaggcuggagugug

SEQ ID NO: 952765 - RNA, 18 nt, Human
gcuuguuuuuuuuuuucu

SEQ ID NO: 952766 - RNA, 22 nt, Human
gggcuggaggccgucacagggc

SEQ ID NO: 952767 - RNA, 18 nt, Human
gggguuucaccuuguugg

SEQ ID NO: 952768 - RNA, 22 nt, Human
gggguuucaccuuguuggccag

SEQ ID NO: 952769 - RNA, 19 nt, Human
ggucucgaacuauugaccu

SEQ ID NO: 952770 - RNA, 24 nt, Human
gugauucucccaccucagccuccc

SEQ ID NO: 952771 - RNA, 20 nt, Human
gugcacuuugaaagagcuga

SEQ ID NO: 952772 - RNA, 18 nt, Human
guggaagacaaaggauuc

SEQ ID NO: 952773 - RNA, 19 nt, Human
guggaagacaaaggauucu

SEQ ID NO: 952774 - RNA, 24 nt, Human
uaagugcugggauuauaggcguga

SEQ ID NO: 952775 - RNA, 24 nt, Human
uaauuuuuuguauuuuuaguagag

SEQ ID NO: 952776 - RNA, 22 nt, Human
uacaggugcacaccaccacacc

SEQ ID NO: 952777 - RNA, 19 nt, Human
uaguagagaugggguuuca

SEQ ID NO: 952778 - RNA, 24 nt, Human
uaguagagaugggguuucaccuug

SEQ ID NO: 952779 - RNA, 26 nt, Human
uaguagagaugggguuucaccuuguu

SEQ ID NO: 952780 - RNA, 23 nt, Human
uauaggcgugagccaccgugccu

SEQ ID NO: 952781 - RNA, 21 nt, Human
ucacccaggcuggaguguggu

SEQ ID NO: 952782 - RNA, 19 nt, Human
ucacugcaaccuccgccuc

SEQ ID NO: 952783 - RNA, 24 nt, Human
ucacugcaaccuccgccucccagg

SEQ ID NO: 952784 - RNA, 25 nt, Human
ucacugcaaccuccgccucccaggu

SEQ ID NO: 952785 - RNA, 27 nt, Human
ucacugcaaccuccgccucccagguuc

SEQ ID NO: 952786 - RNA, 18 nt, Human
ucagccucccaaauagcu

SEQ ID NO: 952787 - RNA, 20 nt, Human
ucagccucccaaauagcugg

SEQ ID NO: 952788 - RNA, 27 nt, Human
ucagcucacugcaaccuccgccuccca

SEQ ID NO: 952789 - RNA, 21 nt, Human
uccaagcaggacagauuaagg

SEQ ID NO: 952790 - RNA, 24 nt, Human
ucccaaauagcugggacuacaggu

SEQ ID NO: 952791 - RNA, 21 nt, Human
ucccagguucaagugauucuc

SEQ ID NO: 952792 - RNA, 23 nt, Human
ucccagguucaagugauucuccc

SEQ ID NO: 952793 - RNA, 20 nt, Human
ucccagucuccauuuuucuu

SEQ ID NO: 952794 - RNA, 24 nt, Human
ucccuaagugcugggauuauaggc

SEQ ID NO: 952795 - RNA, 24 nt, Human
ucuauggcuacaaggaaccggggc

SEQ ID NO: 952796 - RNA, 20 nt, Human
ucuccaagcaggacagauua

SEQ ID NO: 952797 - RNA, 23 nt, Human
ucucccaccucagccucccaaau

SEQ ID NO: 952798 - RNA, 26 nt, Human
ucucccaccucagccucccaaauagc

SEQ ID NO: 952799 - RNA, 19 nt, Human
ucucgcucugucacccagg

SEQ ID NO: 952800 - RNA, 23 nt, Human
ucucgcucugucacccaggcugg

SEQ ID NO: 952801 - RNA, 24 nt, Human
ucucgcucugucacccaggcugga

SEQ ID NO: 952802 - RNA, 18 nt, Human
ugaccucaggugaucugc

SEQ ID NO: 952803 - RNA, 20 nt, Human
ugaccucaggugaucugccc

SEQ ID NO: 952804 - RNA, 22 nt, Human
ugaccucaggugaucugcccgc

SEQ ID NO: 952805 - RNA, 24 nt, Human
ugaccucaggugaucugcccgccu

SEQ ID NO: 952806 - RNA, 20 nt, Human
ugaguggaagacaaaggauu

SEQ ID NO: 952807 - RNA, 21 nt, Human
ugaguggaagacaaaggauuc

SEQ ID NO: 952808 - RNA, 20 nt, Human
ugauucucccaccucagccu

SEQ ID NO: 952809 - RNA, 19 nt, Human
ugcugagccacauaugggg

SEQ ID NO: 952810 - RNA, 21 nt, Human
ugcugagccacauauggggac

SEQ ID NO: 952811 - RNA, 18 nt, Human
uggaggccgucacagggc

SEQ ID NO: 952812 - RNA, 24 nt, Human
uggccaggcuggucucgaacuauu

SEQ ID NO: 952813 - RNA, 19 nt, Human
uggccugcuugguuaacuu

SEQ ID NO: 952814 - RNA, 24 nt, Human
ugggacuacaggugcacaccacca

SEQ ID NO: 952815 - RNA, 18 nt, Human
ugggauuauaggcgugag

SEQ ID NO: 952816 - RNA, 21 nt, Human
ugggauuauaggcgugagcca

SEQ ID NO: 952817 - RNA, 22 nt, Human
ugggauuauaggcgugagccac

SEQ ID NO: 952818 - RNA, 23 nt, Human
ugggauuauaggcgugagccacc

SEQ ID NO: 952819 - RNA, 23 nt, Human
ugggauuauaggcgugagccacc

SEQ ID NO: 952820 - RNA, 24 nt, Human
ugggauuauaggcgugagccaccg

SEQ ID NO: 952821 - RNA, 24 nt, Human
ugggguuucaccuuguuggccagg

SEQ ID NO: 952822 - RNA, 21 nt, Human
uguauuuuuaguagagauggg

SEQ ID NO: 952823 - RNA, 19 nt, Human
ugucacccaggcuggagug

SEQ ID NO: 952824 - RNA, 24 nt, Human
ugugcacuuugaaagagcugaaac

SEQ ID NO: 952825 - RNA, 19 nt, Human
uguuuuuuuuuuucuuuga

SEQ ID NO: 952826 - RNA, 24 nt, Human
uuaguagagaugggguuucaccuu

SEQ ID NO: 952827 - RNA, 25 nt, Human
uuaguagagaugggguuucaccuug

SEQ ID NO: 952828 - RNA, 23 nt, Human
uucaagugauucucccaccucag

SEQ ID NO: 952829 - RNA, 24 nt, Human
uucaagugauucucccaccucagc

SEQ ID NO: 952830 - RNA, 19 nt, Human
uuccaggaugggagcccau

SEQ ID NO: 952831 - RNA, 20 nt, Human
uucuucagcgagaacucugg

SEQ ID NO: 952832 - RNA, 20 nt, Human
uuggaggucagggaugccau

SEQ ID NO: 952833 - RNA, 22 nt, Human
uuucaccuuguuggccaggcug

SEQ ID NO: 952834 - RNA, 23 nt, Human
uuucaccuuguuggccaggcugu

SEQ ID NO: 952835 - RNA, 24 nt, Human
uuuuuaguagagaugggguuucac

SEQ ID NO: 952836 - RNA, 21 nt, Human
uuuuuguauuuuuaguagaga

SEQ ID NO: 952837 - RNA, 24 nt, Human
uuuuuuguauuuuuaguagagaug

SEQ ID NO: 952838 - RNA, 25 nt, Human
uuuuuuuucuuugaaacacagucuc

SEQ ID NO: 952839 - RNA, 20 nt, Human
uuuuuuuuuuuuuuucucac

SEQ ID NO: 952840 - RNA, 23 nt, Human
augauuuugcaaugauuuucucu

SEQ ID NO: 952841 - RNA, 24 nt, Human
auuuugcaaugauuuucucuccca

SEQ ID NO: 952842 - RNA, 18 nt, Human
caaaagcgugggugaaaa

SEQ ID NO: 952843 - RNA, 22 nt, Human
caacugaccuguaaaaaagucc

SEQ ID NO: 952844 - RNA, 21 nt, Human
caccugaaaaaacccauaguu

SEQ ID NO: 952845 - RNA, 23 nt, Human
ccaguaacuuauaaaaauacuuu

SEQ ID NO: 952846 - RNA, 23 nt, Human
cccauaguuuuuugccucaacug

SEQ ID NO: 952847 - RNA, 19 nt, Human
gcgggcuccaccaaacacc

SEQ ID NO: 952848 - RNA, 25 nt, Human
guaaacuuuauuguaccgaacaaaa

SEQ ID NO: 952849 - RNA, 26 nt, Human
ucucccacaaaagcgugggugaaaac

SEQ ID NO: 952850 - RNA, 22 nt, Human
ugaccuguaaaaaaguccaccu

SEQ ID NO: 952851 - RNA, 22 nt, Human
ugcaaugauuuucucucccaca

SEQ ID NO: 952852 - RNA, 23 nt, Human
ugcaaugauuuucucucccacaa

SEQ ID NO: 952853 - RNA, 22 nt, Human
caaggccuccccacaggagccc

SEQ ID NO: 952854 - RNA, 18 nt, Human
cccccaggccugggggcu

SEQ ID NO: 952855 - RNA, 19 nt, Human
cugugcccccaggccuggg

SEQ ID NO: 952856 - RNA, 19 nt, Human
ggcaaggcugggcugcugg

SEQ ID NO: 952857 - RNA, 21 nt, Human
ggccugggggcugucacaggc

SEQ ID NO: 952858 - RNA, 19 nt, Human
gguuugcuucaggcuguag

SEQ ID NO: 952859 - RNA, 23 nt, Human
uagggggugaguggguggaggca

SEQ ID NO: 952860 - RNA, 18 nt, Human
ucagagaggcaaggcugg

SEQ ID NO: 952861 - RNA, 20 nt, Human
ucugugcccccaggccuggg

SEQ ID NO: 952862 - RNA, 22 nt, Human
ugaguggguggaggcaauggga

SEQ ID NO: 952863 - RNA, 19 nt, Human
ugcaggcucaaggagccca

SEQ ID NO: 952864 - RNA, 20 nt, Human
uguagggggugagugggugg

SEQ ID NO: 952865 - RNA, 19 nt, Human
uuuuuuuuuuuuuuuuuaa

SEQ ID NO: 952866 - RNA, 25 nt, Human
aaaagaaaaaaaaaggcuguuuaag

SEQ ID NO: 952867 - RNA, 24 nt, Human
agaaaaaaaaaggcuguuuaagaa

SEQ ID NO: 952868 - RNA, 27 nt, Human
caaauaaguucuuaaucuccaaagucu

SEQ ID NO: 952869 - RNA, 19 nt, Human
cagacggguccgacaguua

SEQ ID NO: 952870 - RNA, 23 nt, Human
cagcauaaccacgugccucgugc

SEQ ID NO: 952871 - RNA, 24 nt, Human
cagcauaaccacgugccucgugcc

SEQ ID NO: 952872 - RNA, 24 nt, Human
cagcugaaguuacuuuuccuacag

SEQ ID NO: 952873 - RNA, 21 nt, Human
cauaaccacgugccucgugcc

SEQ ID NO: 952874 - RNA, 23 nt, Human
ccaaauuauuucccuaauucuua

SEQ ID NO: 952875 - RNA, 23 nt, Human
cccccgcacucccgcucugauac

SEQ ID NO: 952876 - RNA, 18 nt, Human
ccguauaauugccuagaa

SEQ ID NO: 952877 - RNA, 19 nt, Human
cgcuuuggggcugcagcug

SEQ ID NO: 952878 - RNA, 18 nt, Human
cggcccaaacuccggcag

SEQ ID NO: 952879 - RNA, 22 nt, Human
cggcucggcucacucgcuuugg

SEQ ID NO: 952880 - RNA, 20 nt, Human
cuccaaagucucgguugugg

SEQ ID NO: 952881 - RNA, 19 nt, Human
uaagaauagaacucauucc

SEQ ID NO: 952882 - RNA, 24 nt, Human
uaagucucugaaauauggccaacu

SEQ ID NO: 952883 - RNA, 24 nt, Human
uaaguucuuaaucuccaaagucuc

SEQ ID NO: 952884 - RNA, 28 nt, Human
ucaaugaaggcagcggccagguccuucu

SEQ ID NO: 952885 - RNA, 19 nt, Human
uccaacauuaaaaagaaaa

SEQ ID NO: 952886 - RNA, 25 nt, Human
uccaacauuaaaaagaaaaaaaaag

SEQ ID NO: 952887 - RNA, 22 nt, Human
ucccuuuaaacucaaugaaggc

SEQ ID NO: 952888 - RNA, 19 nt, Human
uccggcagcauaaccacgu

SEQ ID NO: 952889 - RNA, 18 nt, Human
ucgcuuuggggcugcagc

SEQ ID NO: 952890 - RNA, 18 nt, Human
ucuccaaagucucgguug

SEQ ID NO: 952891 - RNA, 18 nt, Human
ugaaacuguuuguuuucu

SEQ ID NO: 952892 - RNA, 21 nt, Human
ugcaguccaacacuuacauac

SEQ ID NO: 952893 - RNA, 19 nt, Human
uguuuucuuucccuccccc

SEQ ID NO: 952894 - RNA, 19 nt, Human
uuaaaaagaaaaaaaaagg

SEQ ID NO: 952895 - RNA, 22 nt, Human
uuaaauccucaaauaaguucuu

SEQ ID NO: 952896 - RNA, 19 nt, Human
uuuaaaacagucacuugcc

SEQ ID NO: 952897 - RNA, 21 nt, Human
uuuuuuuuuuuuuaaaaguca

SEQ ID NO: 952898 - RNA, 23 nt, Human
uuuuuuuuuuuuuuuuuuaaaag

SEQ ID NO: 952899 - RNA, 23 nt, Human
aauauaauccaugcuaacuaccu

SEQ ID NO: 952900 - RNA, 24 nt, Human
acccguggagggcgcggggagcgg

SEQ ID NO: 952901 - RNA, 18 nt, Human
agggggccguuacccgug

SEQ ID NO: 952902 - RNA, 24 nt, Human
cacagaucucuaggagaaaggcuu

SEQ ID NO: 952903 - RNA, 18 nt, Human
caugcuaacuaccucuaa

SEQ ID NO: 952904 - RNA, 22 nt, Human
cccguggagggcgcggggagcg

SEQ ID NO: 952905 - RNA, 22 nt, Human
cccguggagggcgcggggagcg

SEQ ID NO: 952906 - RNA, 20 nt, Human
cgagagagggggccguuacc

SEQ ID NO: 952907 - RNA, 19 nt, Human
cgccaggaggcacagaucu

SEQ ID NO: 952908 - RNA, 20 nt, Human
gaaaggcuugcagacaagga

SEQ ID NO: 952909 - RNA, 20 nt, Human
gagaaaggcuugcagacaag

SEQ ID NO: 952910 - RNA, 18 nt, Human
gagagccaccugucgaca

SEQ ID NO: 952911 - RNA, 21 nt, Human
ucccugcccucuggggacagg

SEQ ID NO: 952912 - RNA, 23 nt, Human
ucgccaggaggcacagaucucua

SEQ ID NO: 952913 - RNA, 24 nt, Human
ugccuuccuuuucuaucccugccc

SEQ ID NO: 952914 - RNA, 19 nt, Human
uuuuuuuuuuuuuuuuuaa

SEQ ID NO: 952915 - RNA, 24 nt, Human
aaauacaacauaauuucuauaacc

SEQ ID NO: 952916 - RNA, 20 nt, Human
acuaaauacaacauaauuuc

SEQ ID NO: 952917 - RNA, 18 nt, Human
cacgugcuccugcucuuc

SEQ ID NO: 952918 - RNA, 22 nt, Human
cagccaggcucccagcucuguu

SEQ ID NO: 952919 - RNA, 19 nt, Human
ccccgcgauaacacgcccc

SEQ ID NO: 952920 - RNA, 25 nt, Human
ccccuggcagccaggcucccagcuc

SEQ ID NO: 952921 - RNA, 23 nt, Human
ccugcggggcaacgguggcuguc

SEQ ID NO: 952922 - RNA, 23 nt, Human
cucccaggcugcccccgcgauaa

SEQ ID NO: 952923 - RNA, 21 nt, Human
gcagccaggcucccagcucug

SEQ ID NO: 952924 - RNA, 20 nt, Human
gccaggcucccagcucuguu

SEQ ID NO: 952925 - RNA, 22 nt, Human
gccccuggcagccaggcuccca

SEQ ID NO: 952926 - RNA, 19 nt, Human
gcugcccccgcgauaacac

SEQ ID NO: 952927 - RNA, 20 nt, Human
guggcuguccuuggcccggc

SEQ ID NO: 952928 - RNA, 25 nt, Human
uaaauacaacauaauuucuauaacc

SEQ ID NO: 952929 - RNA, 19 nt, Human
uaacacgccccuggcagcc

SEQ ID NO: 952930 - RNA, 19 nt, Human
uccugccgcggcgcagcag

SEQ ID NO: 952931 - RNA, 23 nt, Human
ucuuccaggguguccucggcugu

SEQ ID NO: 952932 - RNA, 18 nt, Human
ugaggggacucgcacauc

SEQ ID NO: 952933 - RNA, 20 nt, Human
ugccgcggcgcagcagcgcu

SEQ ID NO: 952934 - RNA, 26 nt, Human
ugcuccugcucuuccaggguguccuc

SEQ ID NO: 952935 - RNA, 24 nt, Human
uuccaggguguccucggcuguuuc

SEQ ID NO: 952936 - RNA, 21 nt, Human
aaggggagagggaaaagugag

SEQ ID NO: 952937 - RNA, 27 nt, Human
acgccggagccagacaugaguuggaaa

SEQ ID NO: 952938 - RNA, 21 nt, Human
agaaggccgagaggacgaggg

SEQ ID NO: 952939 - RNA, 19 nt, Human
agagcaaguacugcagcag

SEQ ID NO: 952940 - RNA, 21 nt, Human
agauggcccgaucuccggagc

SEQ ID NO: 952941 - RNA, 20 nt, Human
agcugauuggucagugcagc

SEQ ID NO: 952942 - RNA, 20 nt, Human
aggacgaggggugggguucu

SEQ ID NO: 952943 - RNA, 22 nt, Human
aggagggacagacaucucaaaa

SEQ ID NO: 952944 - RNA, 20 nt, Human
caaggggagcugauugguca

SEQ ID NO: 952945 - RNA, 18 nt, Human
cagacugcaggaaggacc

SEQ ID NO: 952946 - RNA, 20 nt, Human
caggaaaaauggugaucaga

SEQ ID NO: 952947 - RNA, 24 nt, Human
caugaguuggaaaacuaauuugcu

SEQ ID NO: 952948 - RNA, 22 nt, Human
ccacauucucuccgccucucgg

SEQ ID NO: 952949 - RNA, 23 nt, Human
ccacauucucuccgccucucggg

SEQ ID NO: 952950 - RNA, 25 nt, Human
ccgagaggacgaggggugggguucu

SEQ ID NO: 952951 - RNA, 19 nt, Human
cgaggggugggguucuggg

SEQ ID NO: 952952 - RNA, 23 nt, Human
cggggguggguuaggagaguggg

SEQ ID NO: 952953 - RNA, 21 nt, Human
cuccggagccuaggccucucu

SEQ ID NO: 952954 - RNA, 23 nt, Human
cuggcgacuuuauucaaagggga

SEQ ID NO: 952955 - RNA, 26 nt, Human
gaagugcucccacauucucuccgccu

SEQ ID NO: 952956 - RNA, 21 nt, Human
gacgaggggugggguucuggg

SEQ ID NO: 952957 - RNA, 22 nt, Human
gacugcaggaaggaccuuccag

SEQ ID NO: 952958 - RNA, 20 nt, Human
gcggggcugggggaaggguc

SEQ ID NO: 952959 - RNA, 20 nt, Human
ggcugggggaagggucgcuc

SEQ ID NO: 952960 - RNA, 24 nt, Human
gggugggguucuggguguccugag

SEQ ID NO: 952961 - RNA, 23 nt, Human
ggguguccugaggggcggggcug

SEQ ID NO: 952962 - RNA, 22 nt, Human
ggugaucagacugcaggaagga

SEQ ID NO: 952963 - RNA, 23 nt, Human
ggugggguucuggguguccugag

SEQ ID NO: 952964 - RNA, 20 nt, Human
gguucuggguguccugaggg

SEQ ID NO: 952965 - RNA, 18 nt, Human
gugagagaguugggucau

SEQ ID NO: 952966 - RNA, 19 nt, Human
guugggucauuucugggau

SEQ ID NO: 952967 - RNA, 21 nt, Human
uaaccuggagagggguggguc

SEQ ID NO: 952968 - RNA, 18 nt, Human
ucccgagguugaaggccu

SEQ ID NO: 952969 - RNA, 24 nt, Human
ucucuggagcuccagggaggaggg

SEQ ID NO: 952970 - RNA, 23 nt, Human
ugcggcaaaguuagagcaaguac

SEQ ID NO: 952971 - RNA, 19 nt, Human
uggguguccugaggggcgg

SEQ ID NO: 952972 - RNA, 19 nt, Human
uucaaaggggagagggaaa

SEQ ID NO: 952973 - RNA, 22 nt, Human
uucaaaggggagagggaaaagu

SEQ ID NO: 952974 - RNA, 18 nt, Human
uuuuuuuuuuuuuuuuug

SEQ ID NO: 952975 - RNA, 20 nt, Human
uuuuuuuuuuuuuuuuugcu

SEQ ID NO: 952976 - RNA, 24 nt, Human
uuuuuuuuuuuuuuuuugcucuag

SEQ ID NO: 952977 - RNA, 18 nt, Human
aaagaagagacguuggcu

SEQ ID NO: 952978 - RNA, 23 nt, Human
aaccuagaacacuguacuucauc

SEQ ID NO: 952979 - RNA, 18 nt, Human
aagaagcggcgccucucg

SEQ ID NO: 952980 - RNA, 24 nt, Human
acaaagccuccgccagagcgggag

SEQ ID NO: 952981 - RNA, 23 nt, Human
caaagccuccgccagagcgggag

SEQ ID NO: 952982 - RNA, 23 nt, Human
cacccuggggcccagcccgcagc

SEQ ID NO: 952983 - RNA, 20 nt, Human
cagaaaccuugguucaugcc

SEQ ID NO: 952984 - RNA, 18 nt, Human
ccagagcgggagaaagaa

SEQ ID NO: 952985 - RNA, 18 nt, Human
cccuggggcccagcccgc

SEQ ID NO: 952986 - RNA, 24 nt, Human
gaacacuguacuucaucuucaaau

SEQ ID NO: 952987 - RNA, 20 nt, Human
gacaaagccuccgccagagc

SEQ ID NO: 952988 - RNA, 19 nt, Human
gagaaagcggaagaagcgg

SEQ ID NO: 952989 - RNA, 24 nt, Human
gcccgcagcgacaaagccuccgcc

SEQ ID NO: 952990 - RNA, 20 nt, Human
ggcccagcccgcagcgacaa

SEQ ID NO: 952991 - RNA, 25 nt, Human
uagugcaauauaucaaugagguauc

SEQ ID NO: 952992 - RNA, 23 nt, Human
uauccaccaacugauauuucauu

SEQ ID NO: 952993 - RNA, 23 nt, Human
ucucagcaaaccuagaacacugu

SEQ ID NO: 952994 - RNA, 23 nt, Human
ugaaaucagcuaucacacauauc

SEQ ID NO: 952995 - RNA, 23 nt, Human
ugagguaucauuuaagaggcaaa

SEQ ID NO: 952996 - RNA, 23 nt, Human
aaacugaaagaagaauacggaac

SEQ ID NO: 952997 - RNA, 18 nt, Human
agaaacugaaagaagaau

SEQ ID NO: 952998 - RNA, 26 nt, Human
caaauucugccaaaccacgggcuagg

SEQ ID NO: 952999 - RNA, 23 nt, Human
caccccugaauucagucaaauuc

SEQ ID NO: 953000 - RNA, 22 nt, Human
ccgcagugcaugcauuucuucu

SEQ ID NO: 953001 - RNA, 24 nt, Human
ccucacuuucacccccuccacuuc

SEQ ID NO: 953002 - RNA, 20 nt, Human
cgaaaaugaagcuaaucuaa

SEQ ID NO: 953003 - RNA, 20 nt, Human
cucacuuucacccccuccac

SEQ ID NO: 953004 - RNA, 18 nt, Human
guccauucuccucccuca

SEQ ID NO: 953005 - RNA, 24 nt, Human
uauucuguccauucuccucccuca

SEQ ID NO: 953006 - RNA, 19 nt, Human
ucaaauacacuuggacugg

SEQ ID NO: 953007 - RNA, 19 nt, Human
ucccucacuuucacccccu

SEQ ID NO: 953008 - RNA, 23 nt, Human
ucccucacuuucacccccuccac

SEQ ID NO: 953009 - RNA, 20 nt, Human
uuauuccgcucuucgcauau

SEQ ID NO: 953010 - RNA, 25 nt, Human
uucuucuaaguacacaagucuucag

SEQ ID NO: 953011 - RNA, 19 nt, Human
uuuuuuuuuucacuaaacu

SEQ ID NO: 953012 - RNA, 24 nt, Human
uuuuuuuuuuuuuuuuuucacuaa

SEQ ID NO: 953013 - RNA, 24 nt, Human
aaaacaaacaacaaacacacuugg

SEQ ID NO: 953014 - RNA, 19 nt, Human
aaacaaacaacaaacacac

SEQ ID NO: 953015 - RNA, 28 nt, Human
aaacaaacaacaaacacacuuggucccu

SEQ ID NO: 953016 - RNA, 22 nt, Human
aaacaagauacaaaacaaacaa

SEQ ID NO: 953017 - RNA, 18 nt, Human
aacacuauucccccaccu

SEQ ID NO: 953018 - RNA, 24 nt, Human
aaccaccuccacgaccuccgaccu

SEQ ID NO: 953019 - RNA, 21 nt, Human
aagauacaaaacaaacaacaa

SEQ ID NO: 953020 - RNA, 18 nt, Human
aagugaucccugacaccc

SEQ ID NO: 953021 - RNA, 21 nt, Human
aagugaucccugacacccacc

SEQ ID NO: 953022 - RNA, 25 nt, Human
aagugucaaagaucccaagugaucc

SEQ ID NO: 953023 - RNA, 23 nt, Human
acaagauacaaaacaaacaacaa

SEQ ID NO: 953024 - RNA, 23 nt, Human
agaaaaacaagauacaaaacaaa

SEQ ID NO: 953025 - RNA, 19 nt, Human
agucgucucugucuuggag

SEQ ID NO: 953026 - RNA, 18 nt, Human
augcuacacacacaucca

SEQ ID NO: 953027 - RNA, 28 nt, Human
caaaacaaacaacaaacacacuuggucc

SEQ ID NO: 953028 - RNA, 27 nt, Human
caacaaacacacuuggucccuucagac

SEQ ID NO: 953029 - RNA, 22 nt, Human
caaccaccgagagccgcccaga

SEQ ID NO: 953030 - RNA, 22 nt, Human
caagugaucccugacacccacc

SEQ ID NO: 953031 - RNA, 19 nt, Human
cacccugggccaggcuggg

SEQ ID NO: 953032 - RNA, 20 nt, Human
caccuccaccuuagguggcu

SEQ ID NO: 953033 - RNA, 21 nt, Human
caccuccaccuuagguggcug

SEQ ID NO: 953034 - RNA, 21 nt, Human
caccucccccuuggccugcug

SEQ ID NO: 953035 - RNA, 21 nt, Human
cagaaaaacaagauacaaaac

SEQ ID NO: 953036 - RNA, 22 nt, Human
cagccacccgcacacaacucag

SEQ ID NO: 953037 - RNA, 25 nt, Human
cagcccccacccucucagccccucc

SEQ ID NO: 953038 - RNA, 19 nt, Human
cagccccuccccugccagc

SEQ ID NO: 953039 - RNA, 19 nt, Human
cagucccucagcuccugcc

SEQ ID NO: 953040 - RNA, 23 nt, Human
cagucgucucugucuuggagggc

SEQ ID NO: 953041 - RNA, 22 nt, Human
ccaccuccacgaccuccgaccu

SEQ ID NO: 953042 - RNA, 26 nt, Human
ccacgcucgcaccucccccuuggccu

SEQ ID NO: 953043 - RNA, 18 nt, Human
cccaaaaguucagucguc

SEQ ID NO: 953044 - RNA, 23 nt, Human
cccaagugaucccugacacccac

SEQ ID NO: 953045 - RNA, 23 nt, Human
cccacccucucagccccuccccu

SEQ ID NO: 953046 - RNA, 22 nt, Human
cccagacccgucccagguccac

SEQ ID NO: 953047 - RNA, 18 nt, Human
cccagguccacgcucgca

SEQ ID NO: 953048 - RNA, 22 nt, Human
ccccaaaaguucagucgucucu

SEQ ID NO: 953049 - RNA, 18 nt, Human
ccccacccucucagcccc

SEQ ID NO: 953050 - RNA, 20 nt, Human
ccccacccucucagccccuc

SEQ ID NO: 953051 - RNA, 22 nt, Human
cccgcacacaacucaaugagcu

SEQ ID NO: 953052 - RNA, 23 nt, Human
cccucagcuccugccucuagucu

SEQ ID NO: 953053 - RNA, 21 nt, Human
cccugacacccaccccuuccu

SEQ ID NO: 953054 - RNA, 22 nt, Human
cccugccagcucaacucugcag

SEQ ID NO: 953055 - RNA, 23 nt, Human
ccucccggggagggguuccagcc

SEQ ID NO: 953056 - RNA, 22 nt, Human
ccugacacccaccccuuccuac

SEQ ID NO: 953057 - RNA, 22 nt, Human
ccuuagguggcugccucaguuu

SEQ ID NO: 953058 - RNA, 18 nt, Human
cgaccuccccccucccuc

SEQ ID NO: 953059 - RNA, 20 nt, Human
cgaccuccgaccuccccccu

SEQ ID NO: 953060 - RNA, 23 nt, Human
cgaugggggaaggcuuaaacgca

SEQ ID NO: 953061 - RNA, 22 nt, Human
cggggagggguuccagccccca

SEQ ID NO: 953062 - RNA, 21 nt, Human
cucaacucugcaguacacgau

SEQ ID NO: 953063 - RNA, 18 nt, Human
cucagccccuccccugcc

SEQ ID NO: 953064 - RNA, 20 nt, Human
cucgcaccucccccuuggcc

SEQ ID NO: 953065 - RNA, 24 nt, Human
cugccagcucaacucugcaguaca

SEQ ID NO: 953066 - RNA, 22 nt, Human
cuggaagccuuguuggccccua

SEQ ID NO: 953067 - RNA, 20 nt, Human
gauacaaaacaaacaacaag

SEQ ID NO: 953068 - RNA, 24 nt, Human
gccggagcguagaagccgcagcua

SEQ ID NO: 953069 - RNA, 23 nt, Human
gcugccucaguuuuccaaccacu

SEQ ID NO: 953070 - RNA, 23 nt, Human
gcuggaagccuuguuggccccua

SEQ ID NO: 953071 - RNA, 23 nt, Human
ggaaacacuauucccccaccucc

SEQ ID NO: 953072 - RNA, 18 nt, Human
ggagcagcccagcugcuc

SEQ ID NO: 953073 - RNA, 21 nt, Human
ggcacugucggcccccucagg

SEQ ID NO: 953074 - RNA, 26 nt, Human
ggcguuugcugaugaacucagagugc

SEQ ID NO: 953075 - RNA, 22 nt, Human
gguacaugcuacacacacaucc

SEQ ID NO: 953076 - RNA, 22 nt, Human
uaagauacacaaaccaccucca

SEQ ID NO: 953077 - RNA, 19 nt, Human
uaagauagcugccuacaac

SEQ ID NO: 953078 - RNA, 21 nt, Human
uacaaaacaaacaacaaacac

SEQ ID NO: 953079 - RNA, 25 nt, Human
uacacaaaccaccuccacgaccucc

SEQ ID NO: 953080 - RNA, 18 nt, Human
uagauggaagacccagau

SEQ ID NO: 953081 - RNA, 20 nt, Human
ucaguaacaaaaauaauaag

SEQ ID NO: 953082 - RNA, 21 nt, Human
ucagucgucucugucuuggag

SEQ ID NO: 953083 - RNA, 19 nt, Human
uccaccccaaaaguucagu

SEQ ID NO: 953084 - RNA, 22 nt, Human
uccaugcuacaguacugagggg

SEQ ID NO: 953085 - RNA, 21 nt, Human
ucccagguccacgcucgcacc

SEQ ID NO: 953086 - RNA, 24 nt, Human
ucccucagcuccugccuuccucgg

SEQ ID NO: 953087 - RNA, 19 nt, Human
ucccuccggcugcucugag

SEQ ID NO: 953088 - RNA, 21 nt, Human
ucccuccggcugcucugagga

SEQ ID NO: 953089 - RNA, 22 nt, Human
uccgaucagaaaaacaagauac

SEQ ID NO: 953090 - RNA, 24 nt, Human
ucugucuuggagggcacugucggc

SEQ ID NO: 953091 - RNA, 21 nt, Human
ucuuccuucacccugggccag

SEQ ID NO: 953092 - RNA, 18 nt, Human
ugaggacagacgccaggg

SEQ ID NO: 953093 - RNA, 21 nt, Human
ugaucccugacacccaccccu

SEQ ID NO: 953094 - RNA, 21 nt, Human
uggaagccuuguuggccccua

SEQ ID NO: 953095 - RNA, 24 nt, Human
uggaagccuuguuggccccuaagc

SEQ ID NO: 953096 - RNA, 21 nt, Human
uggccccuaagccuuuguucc

SEQ ID NO: 953097 - RNA, 21 nt, Human
ugggaaacacuauucccccac

SEQ ID NO: 953098 - RNA, 21 nt, Human
ugucaguaacaaaaauaauaa

SEQ ID NO: 953099 - RNA, 26 nt, Human
ugucaguaacaaaaauaauaagguac

SEQ ID NO: 953100 - RNA, 19 nt, Human
uucagucgucucugucuug

SEQ ID NO: 953101 - RNA, 23 nt, Human
uuccagcccccacccucucagcc

SEQ ID NO: 953102 - RNA, 19 nt, Human
uucccccaccuccaccuua

SEQ ID NO: 953103 - RNA, 25 nt, Human
uuuuuuguuuuaacaaacauguuua

SEQ ID NO: 953104 - RNA, 18 nt, Human
uuuuuuuuuuuuuuuuug

SEQ ID NO: 953105 - RNA, 22 nt, Human
uuuuuuuuuuuuuuuuuguuuu

SEQ ID NO: 953106 - RNA, 24 nt, Human
uuuuuuuuuuuuuuuuuguuuuaa

SEQ ID NO: 953107 - RNA, 23 nt, Human
aaauaacuguuaaauaggauuuu

SEQ ID NO: 953108 - RNA, 18 nt, Human
aauaaauggcauagaaaa

SEQ ID NO: 953109 - RNA, 19 nt, Human
agagagguagcacgucuuc

SEQ ID NO: 953110 - RNA, 21 nt, Human
aggcacagaaaguugucagcu

SEQ ID NO: 953111 - RNA, 23 nt, Human
caacagaaaggaaaaggcacaga

SEQ ID NO: 953112 - RNA, 19 nt, Human
ucaacagaaaggaaaaggc

SEQ ID NO: 953113 - RNA, 19 nt, Human
ucaugggaaagaaggggau

SEQ ID NO: 953114 - RNA, 23 nt, Human
ucucucaugggaaagaaggggau

SEQ ID NO: 953115 - RNA, 18 nt, Human
ugccacaacuggacggug

SEQ ID NO: 953116 - RNA, 24 nt, Human
ugggaaagaaggggaucaacacuu

SEQ ID NO: 953117 - RNA, 23 nt, Human
uuggaguaucaccaguucucucu

SEQ ID NO: 953118 - RNA, 21 nt, Human
ccugagugcucagcccacagc

SEQ ID NO: 953119 - RNA, 21 nt, Human
cuucagcuuugagaaaacaga

SEQ ID NO: 953120 - RNA, 22 nt, Human
uaaaaaaaagccauaugugaau

SEQ ID NO: 953121 - RNA, 23 nt, Human
uaaaaaaaagccauaugugaaug

SEQ ID NO: 953122 - RNA, 24 nt, Human
uauugguuaaaaaaaagccauaug

SEQ ID NO: 953123 - RNA, 22 nt, Human
caacugcugugcagugcuccug

SEQ ID NO: 953124 - RNA, 22 nt, Human
ccgagcugcucugguucugcug

SEQ ID NO: 953125 - RNA, 20 nt, Human
ccugcuuuucaacuuucucc

SEQ ID NO: 953126 - RNA, 18 nt, Human
cugcauuuaaaggcuuca

SEQ ID NO: 953127 - RNA, 18 nt, Human
cugcucugguucugcugu

SEQ ID NO: 953128 - RNA, 19 nt, Human
cugugcagugcuccugucc

SEQ ID NO: 953129 - RNA, 22 nt, Human
cuucuccuuuuuaggggguggu

SEQ ID NO: 953130 - RNA, 20 nt, Human
cuuucuccuucuucuccuuu

SEQ ID NO: 953131 - RNA, 24 nt, Human
gagcgagucuuuuccuuaaagucu

SEQ ID NO: 953132 - RNA, 21 nt, Human
gcucugguucugcuguucuga

SEQ ID NO: 953133 - RNA, 19 nt, Human
gggaggagcccuugucugu

SEQ ID NO: 953134 - RNA, 22 nt, Human
ggguggugggguggcauacugu

SEQ ID NO: 953135 - RNA, 21 nt, Human
uaaaaaguagauucaggagca

SEQ ID NO: 953136 - RNA, 18 nt, Human
ucccaaaacccuucgucu

SEQ ID NO: 953137 - RNA, 19 nt, Human
uccucacaucgcagaugcu

SEQ ID NO: 953138 - RNA, 23 nt, Human
ucucugaccccgagcugcucugg

SEQ ID NO: 953139 - RNA, 19 nt, Human
ucugcggcagguuucgcuu

SEQ ID NO: 953140 - RNA, 23 nt, Human
ugauuuguuucgcuggucuuugu

SEQ ID NO: 953141 - RNA, 24 nt, Human
ugcagacgcuacaaucccaaaacc

SEQ ID NO: 953142 - RNA, 23 nt, Human
ugcugugcagugcuccuguccac

SEQ ID NO: 953143 - RNA, 20 nt, Human
uguagcauuugcagacugua

SEQ ID NO: 953144 - RNA, 28 nt, Human
uuuucagccggggccuugaggagguccu

SEQ ID NO: 953145 - RNA, 20 nt, Human
ggauacauuuccauguggga

SEQ ID NO: 953146 - RNA, 23 nt, Human
ugaggauacauuuccauguggga

SEQ ID NO: 953147 - RNA, 22 nt, Human
uguguccacggcugcuugugug

SEQ ID NO: 953148 - RNA, 20 nt, Human
uguguggcagguccuauggc

SEQ ID NO: 953149 - RNA, 21 nt, Human
aaaaacagcaaaagccuccaa

SEQ ID NO: 953150 - RNA, 22 nt, Human
aaaaacagcaaaagccuccaac

SEQ ID NO: 953151 - RNA, 20 nt, Human
aaaaacgacaacaacucaag

SEQ ID NO: 953152 - RNA, 22 nt, Human
aaaaagauaagguuacaggcac

SEQ ID NO: 953153 - RNA, 20 nt, Human
aaaaucaguaaaauguaaaa

SEQ ID NO: 953154 - RNA, 24 nt, Human
aaacaaacaaaaaacgacaacaac

SEQ ID NO: 953155 - RNA, 19 nt, Human
aaagcccauucaacucugc

SEQ ID NO: 953156 - RNA, 21 nt, Human
aaagcccauucaacucugcuu

SEQ ID NO: 953157 - RNA, 21 nt, Human
aaagccuccaacugcuacaca

SEQ ID NO: 953158 - RNA, 18 nt, Human
aacauucacaaucuacaa

SEQ ID NO: 953159 - RNA, 19 nt, Human
aacugcucuuuccuuccca

SEQ ID NO: 953160 - RNA, 18 nt, Human
aacuugggccucuccucu

SEQ ID NO: 953161 - RNA, 21 nt, Human
aagauaagcacaaaauuuacc

SEQ ID NO: 953162 - RNA, 18 nt, Human
aagcaguuggcacuaaga

SEQ ID NO: 953163 - RNA, 22 nt, Human
accagguacuaugugagcuauu

SEQ ID NO: 953164 - RNA, 20 nt, Human
accuugaugaaguaaaaaaa

SEQ ID NO: 953165 - RNA, 27 nt, Human
aggcuucaagugagccccgacaggcac

SEQ ID NO: 953166 - RNA, 21 nt, Human
agggaccuuuuaaaaaacagu

SEQ ID NO: 953167 - RNA, 20 nt, Human
agguuacaggcaccacacca

SEQ ID NO: 953168 - RNA, 18 nt, Human
aguagugauaaaaaauaa

SEQ ID NO: 953169 - RNA, 18 nt, Human
aguucagauucuaaagca

SEQ ID NO: 953170 - RNA, 20 nt, Human
auggugugggauuggagagg

SEQ ID NO: 953171 - RNA, 27 nt, Human
caaaaagauaagguuacaggcaccaca

SEQ ID NO: 953172 - RNA, 25 nt, Human
caaaaucaguaaaauguaaaacuuc

SEQ ID NO: 953173 - RNA, 22 nt, Human
caagugagccccgacaggcacc

SEQ ID NO: 953174 - RNA, 23 nt, Human
caccacaccauccaccaaacuga

SEQ ID NO: 953175 - RNA, 21 nt, Human
caccuugaugaaguaaaaaaa

SEQ ID NO: 953176 - RNA, 22 nt, Human
cagagccagcuuauaauaccac

SEQ ID NO: 953177 - RNA, 20 nt, Human
cagaucugccccaaaccacu

SEQ ID NO: 953178 - RNA, 18 nt, Human
caggcaccacaccaucca

SEQ ID NO: 953179 - RNA, 26 nt, Human
caggcaccacaccauccaaccuucag

SEQ ID NO: 953180 - RNA, 18 nt, Human
cagguuaugaaugaaaau

SEQ ID NO: 953181 - RNA, 31 nt, Human
caguuuacauuuaaaaaacaaacaaaaaacc

SEQ ID NO: 953182 - RNA, 21 nt, Human
caucaugaaauaaaacacaaa

SEQ ID NO: 953183 - RNA, 19 nt, Human
ccaaaaaauuuacaaaaac

SEQ ID NO: 953184 - RNA, 23 nt, Human
ccaaauaucugugucuaaacaau

SEQ ID NO: 953185 - RNA, 21 nt, Human
ccacuccauguggaaaauaca

SEQ ID NO: 953186 - RNA, 21 nt, Human
cugaaacuugggccucuccuc

SEQ ID NO: 953187 - RNA, 18 nt, Human
cugcuacacauucucccu

SEQ ID NO: 953188 - RNA, 23 nt, Human
cuuaagccagccuugaagauaag

SEQ ID NO: 953189 - RNA, 19 nt, Human
cuuguggaaaaccagguac

SEQ ID NO: 953190 - RNA, 20 nt, Human
cuuuaaaggugagucacuua

SEQ ID NO: 953191 - RNA, 23 nt, Human
gaacaucaugaaauaaaacacaa

SEQ ID NO: 953192 - RNA, 22 nt, Human
gaagauaagcacaaaauuuacc

SEQ ID NO: 953193 - RNA, 19 nt, Human
uaaaaacagcaaaagccuc

SEQ ID NO: 953194 - RNA, 22 nt, Human
uaaaaagcaguuggcacuaaga

SEQ ID NO: 953195 - RNA, 24 nt, Human
uaaaaagcaguuggcacuaagaua

SEQ ID NO: 953196 - RNA, 22 nt, Human
uaaaaagcaguuggcacuaagg

SEQ ID NO: 953197 - RNA, 18 nt, Human
uaaaaauacauacauaaa

SEQ ID NO: 953198 - RNA, 23 nt, Human
uaaaagugcucacaaacacaaaa

SEQ ID NO: 953199 - RNA, 24 nt, Human
uaaaagugcucacaaacacaaaaa

SEQ ID NO: 953200 - RNA, 22 nt, Human
uaaaauagaucauguacauguu

SEQ ID NO: 953201 - RNA, 19 nt, Human
uaagaauguaccccuaguc

SEQ ID NO: 953202 - RNA, 20 nt, Human
uaagaauguaccccuagucc

SEQ ID NO: 953203 - RNA, 18 nt, Human
uacaauaaaacuacugga

SEQ ID NO: 953204 - RNA, 18 nt, Human
uacacagaaaaucaugcc

SEQ ID NO: 953205 - RNA, 23 nt, Human
uacauaaaauaaaagugcucaca

SEQ ID NO: 953206 - RNA, 21 nt, Human
uaccugcaggccuagcuauuu

SEQ ID NO: 953207 - RNA, 22 nt, Human
uagaaauaugaguucacuuucu

SEQ ID NO: 953208 - RNA, 26 nt, Human
uagaucauguacauguuaauaaacug

SEQ ID NO: 953209 - RNA, 21 nt, Human
uagcuaauuccaaauaucugu

SEQ ID NO: 953210 - RNA, 25 nt, Human
uagcucaccaagaaaaaucuacuac

SEQ ID NO: 953211 - RNA, 24 nt, Human
uauuuuucccgaugugcugcugau

SEQ ID NO: 953212 - RNA, 23 nt, Human
ucaaagacuuaccagacacaaua

SEQ ID NO: 953213 - RNA, 24 nt, Human
uccaaaguaaguauguuuuaaaaa

SEQ ID NO: 953214 - RNA, 22 nt, Human
uccaaauaucugugucuaaaca

SEQ ID NO: 953215 - RNA, 23 nt, Human
uccaaguagcucaccaagaaaaa

SEQ ID NO: 953216 - RNA, 24 nt, Human
uccaccaaacugaggacauuucuu

SEQ ID NO: 953217 - RNA, 24 nt, Human
uccaccaaacugaggacauuucuu

SEQ ID NO: 953218 - RNA, 20 nt, Human
ucccacagcgucacuccaaa

SEQ ID NO: 953219 - RNA, 28 nt, Human
ucccuuauauaccucugaagaugggagu

SEQ ID NO: 953220 - RNA, 23 nt, Human
ucuaaagcauuucuaaggcacgg

SEQ ID NO: 953221 - RNA, 21 nt, Human
ucuaaggcccagcaacaggcc

SEQ ID NO: 953222 - RNA, 24 nt, Human
ucuccuuuuccagagaguaaaaau

SEQ ID NO: 953223 - RNA, 19 nt, Human
ugaagaugggaguaguggc

SEQ ID NO: 953224 - RNA, 19 nt, Human
ugagucagggagaucuuau

SEQ ID NO: 953225 - RNA, 22 nt, Human
ugaguucccacagcgucacucc

SEQ ID NO: 953226 - RNA, 22 nt, Human
ugauggugugggauuggagagg

SEQ ID NO: 953227 - RNA, 20 nt, Human
uggaacaucaugaaauaaaa

SEQ ID NO: 953228 - RNA, 28 nt, Human
uggcugggcuauucgguaaccaucuucu

SEQ ID NO: 953229 - RNA, 23 nt, Human
uuaaaaaacaauuuuauacuuaa

SEQ ID NO: 953230 - RNA, 21 nt, Human
uuaaaaacagcaaaagccucc

SEQ ID NO: 953231 - RNA, 22 nt, Human
uuaaaaacagcaaaagccuccc

SEQ ID NO: 953232 - RNA, 21 nt, Human
uuacauuuaaaaaacaaacaa

SEQ ID NO: 953233 - RNA, 24 nt, Human
uuacuagaaccuggagucugagcc

SEQ ID NO: 953234 - RNA, 26 nt, Human
uucaauacugucauaauauaaaacaa

SEQ ID NO: 953235 - RNA, 18 nt, Human
uucauaaggcuuuuuuaa

SEQ ID NO: 953236 - RNA, 22 nt, Human
uucccagaguagugauaaaaaa

SEQ ID NO: 953237 - RNA, 23 nt, Human
uuccugauggugugggauuggag

SEQ ID NO: 953238 - RNA, 20 nt, Human
uuguauuaucuccuuuucca

SEQ ID NO: 953239 - RNA, 18 nt, Human
uuuagaaagcccauucaa

SEQ ID NO: 953240 - RNA, 20 nt, Human
uuuuuuuuuuaaaauagauc

SEQ ID NO: 953241 - RNA, 18 nt, Human
aaacccggggagaagaca

SEQ ID NO: 953242 - RNA, 21 nt, Human
aacugaccacuccagaagcag

SEQ ID NO: 953243 - RNA, 21 nt, Human
caccaaacccggggagaagac

SEQ ID NO: 953244 - RNA, 21 nt, Human
cagaagcaggccaccaaaccc

SEQ ID NO: 953245 - RNA, 22 nt, Human
cagcagaacugaccacuccaga

SEQ ID NO: 953246 - RNA, 18 nt, Human
cagcuagagcgagcaaga

SEQ ID NO: 953247 - RNA, 19 nt, Human
cguggagauuagcaagccg

SEQ ID NO: 953248 - RNA, 21 nt, Human
cuguauccuuugucuucaaag

SEQ ID NO: 953249 - RNA, 20 nt, Human
gagcgagcaagaggcccugc

SEQ ID NO: 953250 - RNA, 24 nt, Human
uagagcgagcaagaggcccugcug

SEQ ID NO: 953251 - RNA, 22 nt, Human
ucaaaauacaauuuaaggauau

SEQ ID NO: 953252 - RNA, 25 nt, Human
ugaaaguagcuaaauuuuuguaaug

SEQ ID NO: 953253 - RNA, 19 nt, Human
ugaaggguauaaaugaaca

SEQ ID NO: 953254 - RNA, 20 nt, Human
uggagagcugggugucuaca

SEQ ID NO: 953255 - RNA, 23 nt, Human
ugucugaauuucugggcguggag

SEQ ID NO: 953256 - RNA, 20 nt, Human
ugugcagaugagauaagggg

SEQ ID NO: 953257 - RNA, 23 nt, Human
uuauagcuauaaaugacauuacu

SEQ ID NO: 953258 - RNA, 23 nt, Human
uucaaagcauuuuucuggagagc

SEQ ID NO: 953259 - RNA, 22 nt, Human
uuuuuuuuuuuuuugccaguua

SEQ ID NO: 953260 - RNA, 23 nt, Human
uuuuuuuuuuuuuuuuugccagu

SEQ ID NO: 953261 - RNA, 27 nt, Human
uuuuuuuuuuuuuuuuuuuuuuugggg

SEQ ID NO: 953262 - RNA, 21 nt, Human
aaaggggguuuucacuuacac

SEQ ID NO: 953263 - RNA, 19 nt, Human
aacaaauuagaggaccaaa

SEQ ID NO: 953264 - RNA, 20 nt, Human
aagaaacaaaucagcagaac

SEQ ID NO: 953265 - RNA, 21 nt, Human
aagaaacaaaucagcagaaca

SEQ ID NO: 953266 - RNA, 21 nt, Human
aagaagaaaucugaaauggaa

SEQ ID NO: 953267 - RNA, 26 nt, Human
aaggggguuuucacuuacacuuuuug

SEQ ID NO: 953268 - RNA, 18 nt, Human
aauaagaaaaccccaucc

SEQ ID NO: 953269 - RNA, 23 nt, Human
aaucugcggaaaauguccuccuu

SEQ ID NO: 953270 - RNA, 24 nt, Human
aaugauuuaccuuuauccuuaaau

SEQ ID NO: 953271 - RNA, 21 nt, Human
acaaaaaaaaaaaauuacaga

SEQ ID NO: 953272 - RNA, 21 nt, Human
acaaagaaaaauucaaagucc

SEQ ID NO: 953273 - RNA, 21 nt, Human
acaacgaagaaagccccagga

SEQ ID NO: 953274 - RNA, 19 nt, Human
acaagacaaaaaugaaaac

SEQ ID NO: 953275 - RNA, 22 nt, Human
acagggcaacaacaaauuagag

SEQ ID NO: 953276 - RNA, 21 nt, Human
acauaauggaaccacaucagg

SEQ ID NO: 953277 - RNA, 24 nt, Human
agacaaaaaugaaaacaaagggac

SEQ ID NO: 953278 - RNA, 25 nt, Human
agacaaaaaugaaaacaaauaguua

SEQ ID NO: 953279 - RNA, 18 nt, Human
aggcuguguacaguagcu

SEQ ID NO: 953280 - RNA, 20 nt, Human
agggcaacaacaaauuagag

SEQ ID NO: 953281 - RNA, 23 nt, Human
agguguguuuaaaaaaaaaaaaa

SEQ ID NO: 953282 - RNA, 19 nt, Human
agugguaguaggaccacaa

SEQ ID NO: 953283 - RNA, 19 nt, Human
agugguugguaacugccuu

SEQ ID NO: 953284 - RNA, 22 nt, Human
auaaaccuucuacaagacaaaa

SEQ ID NO: 953285 - RNA, 21 nt, Human
auacauuuuuaauauuugaaa

SEQ ID NO: 953286 - RNA, 23 nt, Human
aucuacaacgaagaaagccccag

SEQ ID NO: 953287 - RNA, 21 nt, Human
augauccacauuccuuuaaaa

SEQ ID NO: 953288 - RNA, 19 nt, Human
auguuuguaaaacucucac

SEQ ID NO: 953289 - RNA, 19 nt, Human
auuuacauaauggaaccac

SEQ ID NO: 953290 - RNA, 27 nt, Human
caaaaaaaaaaaauuacagaucucacu

SEQ ID NO: 953291 - RNA, 28 nt, Human
caacaaaaacagugguaguaggaccaca

SEQ ID NO: 953292 - RNA, 22 nt, Human
caacaaauuagaggaccaaaaa

SEQ ID NO: 953293 - RNA, 21 nt, Human
caagaaacaaaucagcagaac

SEQ ID NO: 953294 - RNA, 25 nt, Human
caaugucuucaaagacaaagaaaaa

SEQ ID NO: 953295 - RNA, 23 nt, Human
caauucuauucuuuaguugggaa

SEQ ID NO: 953296 - RNA, 26 nt, Human
cacauugcucacgacacgagaacacc

SEQ ID NO: 953297 - RNA, 22 nt, Human
cacauuuagcuaagaguugucu

SEQ ID NO: 953298 - RNA, 25 nt, Human
caccaaagcaaauuagggaaaagaa

SEQ ID NO: 953299 - RNA, 24 nt, Human
caccuuguacucucuuccagcuca

SEQ ID NO: 953300 - RNA, 23 nt, Human
cagaacaagauuauaucagauag

SEQ ID NO: 953301 - RNA, 21 nt, Human
cagccgcgcugcgcggcgagc

SEQ ID NO: 953302 - RNA, 24 nt, Human
caggaauuucucuaagcacaucau

SEQ ID NO: 953303 - RNA, 23 nt, Human
caugccuucacaagggcuugcca

SEQ ID NO: 953304 - RNA, 20 nt, Human
cauguaaacuuacaaauugc

SEQ ID NO: 953305 - RNA, 18 nt, Human
ccaaagcucacauuaugc

SEQ ID NO: 953306 - RNA, 23 nt, Human
ccaaagcucacauuaugcuuuuu

SEQ ID NO: 953307 - RNA, 19 nt, Human
cccaaaugcuuuccaacca

SEQ ID NO: 953308 - RNA, 23 nt, Human
cccaccaaagcaaauuagggaaa

SEQ ID NO: 953309 - RNA, 20 nt, Human
cccgcucccguucuuucucc

SEQ ID NO: 953310 - RNA, 19 nt, Human
cccgucgcucgccagggag

SEQ ID NO: 953311 - RNA, 18 nt, Human
cccucucucuuucucucc

SEQ ID NO: 953312 - RNA, 19 nt, Human
cccucucucuuucucuccg

SEQ ID NO: 953313 - RNA, 20 nt, Human
cgagcagaauaccuaucaug

SEQ ID NO: 953314 - RNA, 20 nt, Human
cgccagggagacugagugcc

SEQ ID NO: 953315 - RNA, 24 nt, Human
cggaagcaccuuguacucucuucc

SEQ ID NO: 953316 - RNA, 23 nt, Human
cuacaagacaaaaaugaaaacaa

SEQ ID NO: 953317 - RNA, 23 nt, Human
cucacauuaugcuuuuucuaaca

SEQ ID NO: 953318 - RNA, 19 nt, Human
cucacuggaguauucacga

SEQ ID NO: 953319 - RNA, 20 nt, Human
cucccucucucuuucucucc

SEQ ID NO: 953320 - RNA, 23 nt, Human
cucccucucucuuucucuccguu

SEQ ID NO: 953321 - RNA, 19 nt, Human
cucggaguuuucuuucaag

SEQ ID NO: 953322 - RNA, 21 nt, Human
cucguucccuuucacgcuccc

SEQ ID NO: 953323 - RNA, 18 nt, Human
cugaucuacaacgaagaa

SEQ ID NO: 953324 - RNA, 24 nt, Human
cugccuucgcgaccuucugggauc

SEQ ID NO: 953325 - RNA, 21 nt, Human
cuucaucuucuucucgguccc

SEQ ID NO: 953326 - RNA, 24 nt, Human
cuucuuccauuucuauagcauuua

SEQ ID NO: 953327 - RNA, 20 nt, Human
cuucuucuuucuucuucucu

SEQ ID NO: 953328 - RNA, 24 nt, Human
cuuucagcuucuuucucauauucc

SEQ ID NO: 953329 - RNA, 18 nt, Human
cuuucccuuucucguucc

SEQ ID NO: 953330 - RNA, 20 nt, Human
gaaagccccaggaauuucuc

SEQ ID NO: 953331 - RNA, 19 nt, Human
gaaauccuggaaacugcgg

SEQ ID NO: 953332 - RNA, 19 nt, Human
gaagcuuucucggaaaugu

SEQ ID NO: 953333 - RNA, 18 nt, Human
gacacaguggguacuaag

SEQ ID NO: 953334 - RNA, 20 nt, Human
gacacgagaacaccaugcuc

SEQ ID NO: 953335 - RNA, 22 nt, Human
gaguagcuuuuucucuccaauu

SEQ ID NO: 953336 - RNA, 18 nt, Human
gaucucucucucgauccc

SEQ ID NO: 953337 - RNA, 18 nt, Human
gauuucugcccgucgcuc

SEQ ID NO: 953338 - RNA, 21 nt, Human
gcacaggccgcaaauacagcc

SEQ ID NO: 953339 - RNA, 20 nt, Human
gccuuucucguucccuuuca

SEQ ID NO: 953340 - RNA, 19 nt, Human
gcgcggcgagcugauggag

SEQ ID NO: 953341 - RNA, 19 nt, Human
ggaauuucucuaagcacau

SEQ ID NO: 953342 - RNA, 20 nt, Human
ggagugcugggauucccaug

SEQ ID NO: 953343 - RNA, 23 nt, Human
ggagugcugggauucccauggga

SEQ ID NO: 953344 - RNA, 24 nt, Human
gggcauuuagcucacuggaguauu

SEQ ID NO: 953345 - RNA, 24 nt, Human
gggccacuggaaaucugcggaaaa

SEQ ID NO: 953346 - RNA, 20 nt, Human
gggucccuggagguacaggu

SEQ ID NO: 953347 - RNA, 23 nt, Human
ggugagaaucagauuccugugag

SEQ ID NO: 953348 - RNA, 18 nt, Human
gguugguaacugccuuga

SEQ ID NO: 953349 - RNA, 20 nt, Human
guccuccuucuuuuccuucc

SEQ ID NO: 953350 - RNA, 18 nt, Human
gugguugguaacugccuu

SEQ ID NO: 953351 - RNA, 23 nt, Human
guucucuuucccuuucucguucc

SEQ ID NO: 953352 - RNA, 22 nt, Human
uaaaacaagauauaaaccuucu

SEQ ID NO: 953353 - RNA, 24 nt, Human
uaaacacuaaugagccaagguaaa

SEQ ID NO: 953354 - RNA, 23 nt, Human
uaaauaaguacucagacauggga

SEQ ID NO: 953355 - RNA, 23 nt, Human
uaagaaaaccccauccaguuagc

SEQ ID NO: 953356 - RNA, 23 nt, Human
uaagacaguuggagcaggagcca

SEQ ID NO: 953357 - RNA, 19 nt, Human
uaagcagcuucuuucucuc

SEQ ID NO: 953358 - RNA, 23 nt, Human
uaagcagcuucuuucucucggag

SEQ ID NO: 953359 - RNA, 26 nt, Human
uacaaaaaaaaaaaauuacagaucuc

SEQ ID NO: 953360 - RNA, 23 nt, Human
uacaaauugccgagcagaauacc

SEQ ID NO: 953361 - RNA, 19 nt, Human
uacaacgaagaaagcccca

SEQ ID NO: 953362 - RNA, 23 nt, Human
uacaagaaacaaaucagcagaac

SEQ ID NO: 953363 - RNA, 21 nt, Human
uacacauacauucacaaacac

SEQ ID NO: 953364 - RNA, 18 nt, Human
uaccuggugaguauaaag

SEQ ID NO: 953365 - RNA, 19 nt, Human
uacuaagacaguuggagca

SEQ ID NO: 953366 - RNA, 21 nt, Human
uacucccuggugaaauucuga

SEQ ID NO: 953367 - RNA, 20 nt, Human
uaucauguuuguaaaacucu

SEQ ID NO: 953368 - RNA, 22 nt, Human
ucaaaaccaaaccacauuuagc

SEQ ID NO: 953369 - RNA, 30 nt, Human
ucaauagccccuuuaaucaucugaucucuu

SEQ ID NO: 953370 - RNA, 22 nt, Human
ucacugucugucaauuugccua

SEQ ID NO: 953371 - RNA, 22 nt, Human
ucccgaucucggucucucucuu

SEQ ID NO: 953372 - RNA, 21 nt, Human
ucccgcucucguucccuuuca

SEQ ID NO: 953373 - RNA, 20 nt, Human
ucguaugcaucuucuucauc

SEQ ID NO: 953374 - RNA, 25 nt, Human
ucuacaaaaaaaaaaaauuacagau

SEQ ID NO: 953375 - RNA, 22 nt, Human
ucuacaagacaaaaaugaaaac

SEQ ID NO: 953376 - RNA, 22 nt, Human
ucucggaguuuucuuucaaguu

SEQ ID NO: 953377 - RNA, 22 nt, Human
ucucuucuucuuucuucuucuc

SEQ ID NO: 953378 - RNA, 18 nt, Human
ucucuuucucuccguucu

SEQ ID NO: 953379 - RNA, 21 nt, Human
ucugauuucccaauucuuaag

SEQ ID NO: 953380 - RNA, 22 nt, Human
ucuuucuucuucucuuucagcu

SEQ ID NO: 953381 - RNA, 25 nt, Human
ucuuucuucuucucuuucagcuucu

SEQ ID NO: 953382 - RNA, 24 nt, Human
ucuuucuuuuuccuuuuugccuuu

SEQ ID NO: 953383 - RNA, 21 nt, Human
ucuuuuguccggucacggucc

SEQ ID NO: 953384 - RNA, 24 nt, Human
ucuuuuguccggucacggucccua

SEQ ID NO: 953385 - RNA, 18 nt, Human
ugaucaaaagagaguggg

SEQ ID NO: 953386 - RNA, 23 nt, Human
ugcauuaaauacagcucuccagg

SEQ ID NO: 953387 - RNA, 22 nt, Human
ugcgcccaaaugcuuuccaacc

SEQ ID NO: 953388 - RNA, 22 nt, Human
ugcgggggugggaucccuggug

SEQ ID NO: 953389 - RNA, 25 nt, Human
uggaaaagacauucuuacugcagca

SEQ ID NO: 953390 - RNA, 21 nt, Human
uggagcaggagccauaaugcu

SEQ ID NO: 953391 - RNA, 21 nt, Human
uggaguauucacgaauuaaaa

SEQ ID NO: 953392 - RNA, 19 nt, Human
ugggaaacuaauaaccuaa

SEQ ID NO: 953393 - RNA, 21 nt, Human
ugggagugcugggauucccau

SEQ ID NO: 953394 - RNA, 20 nt, Human
ugggaucccuggugggagug

SEQ ID NO: 953395 - RNA, 21 nt, Human
ugggauucccaugggagggcg

SEQ ID NO: 953396 - RNA, 20 nt, Human
uggggucccuggagguacag

SEQ ID NO: 953397 - RNA, 18 nt, Human
uggugggagugcugggau

SEQ ID NO: 953398 - RNA, 19 nt, Human
ugucugaagcuuucucgga

SEQ ID NO: 953399 - RNA, 25 nt, Human
ugugccuuugucuuugcaucaacuu

SEQ ID NO: 953400 - RNA, 23 nt, Human
uguguuuaaaaaaaaaaaaaauc

SEQ ID NO: 953401 - RNA, 19 nt, Human
uuagggaaaagaaagacuu

SEQ ID NO: 953402 - RNA, 18 nt, Human
uuagugacaguuucuggc

SEQ ID NO: 953403 - RNA, 21 nt, Human
uucaaagacaaagaaaaauuc

SEQ ID NO: 953404 - RNA, 23 nt, Human
uucaauagccccuuuaaucaucu

SEQ ID NO: 953405 - RNA, 19 nt, Human
uucucguucccuuucacgc

SEQ ID NO: 953406 - RNA, 23 nt, Human
uuggggucccuggagguacaggu

SEQ ID NO: 953407 - RNA, 23 nt, Human
uuuaaaaaaaaaaaaaauccagu

SEQ ID NO: 953408 - RNA, 26 nt, Human
uuuaaacacuaaugagccaagguaaa

SEQ ID NO: 953409 - RNA, 23 nt, Human
uuucagguuggaacaguaccacu

SEQ ID NO: 953410 - RNA, 21 nt, Human
uuuccaagcugagaguuucau

SEQ ID NO: 953411 - RNA, 20 nt, Human
uuuccuuuuugccuuucucu

SEQ ID NO: 953412 - RNA, 22 nt, Human
uuucucguucccuuucacgcuc

SEQ ID NO: 953413 - RNA, 24 nt, Human
uuucucguucccuuucacgcuccc

SEQ ID NO: 953414 - RNA, 22 nt, Human
uuucuggccuugcauucccauu

SEQ ID NO: 953415 - RNA, 21 nt, Human
uuuucacuuacacuuuuuggu

SEQ ID NO: 953416 - RNA, 21 nt, Human
uuuugucuuuuucucuuucuc

SEQ ID NO: 953417 - RNA, 21 nt, Human
aaaacccuuuccaaugaacag

SEQ ID NO: 953418 - RNA, 23 nt, Human
aaaacccuuuccaaugaacagaa

SEQ ID NO: 953419 - RNA, 20 nt, Human
aaaacgcuaauccccuaagc

SEQ ID NO: 953420 - RNA, 26 nt, Human
aaaacgcuaauccccuaagcaucugc

SEQ ID NO: 953421 - RNA, 18 nt, Human
aaaagccauggaaggauu

SEQ ID NO: 953422 - RNA, 20 nt, Human
aaaccuaauaggugcuggua

SEQ ID NO: 953423 - RNA, 24 nt, Human
aaaguguugggauuauagguguga

SEQ ID NO: 953424 - RNA, 18 nt, Human
aacagaguaaagcucuaa

SEQ ID NO: 953425 - RNA, 23 nt, Human
aagaacacacaggaaugaacuga

SEQ ID NO: 953426 - RNA, 25 nt, Human
aagcucuaaagacaccagacgaacc

SEQ ID NO: 953427 - RNA, 21 nt, Human
aaguguugggauuauaggugu

SEQ ID NO: 953428 - RNA, 26 nt, Human
aaguguugggauuauaggugugagcc

SEQ ID NO: 953429 - RNA, 18 nt, Human
acagcucacugcagccuc

SEQ ID NO: 953430 - RNA, 23 nt, Human
agacaccagacgaaccaauacuu

SEQ ID NO: 953431 - RNA, 22 nt, Human
agcaaagugcucuguaguguau

SEQ ID NO: 953432 - RNA, 20 nt, Human
aggcaugcaccacuaugccc

SEQ ID NO: 953433 - RNA, 24 nt, Human
agggaggcggcggcccgcgggcgg

SEQ ID NO: 953434 - RNA, 18 nt, Human
aggugugagccacugcac

SEQ ID NO: 953435 - RNA, 19 nt, Human
augaaaaacgcuaaucccc

SEQ ID NO: 953436 - RNA, 24 nt, Human
caaaguguugggauuauaggugug

SEQ ID NO: 953437 - RNA, 20 nt, Human
caacagaguaaagcucuaaa

SEQ ID NO: 953438 - RNA, 20 nt, Human
cacaagauuuaacacguaaa

SEQ ID NO: 953439 - RNA, 23 nt, Human
cacaggaaugaacugacaaacag

SEQ ID NO: 953440 - RNA, 22 nt, Human
caccagacgaaccaauacuugu

SEQ ID NO: 953441 - RNA, 20 nt, Human
cacguaaaaaaaaagauagc

SEQ ID NO: 953442 - RNA, 24 nt, Human
cacuaugcccagcuaauuuuugua

SEQ ID NO: 953443 - RNA, 24 nt, Human
cagacuaaauuguuuuugagacac

SEQ ID NO: 953444 - RNA, 24 nt, Human
cagccucaaucucaugggcucaag

SEQ ID NO: 953445 - RNA, 21 nt, Human
caguacaauuaaaauacccca

SEQ ID NO: 953446 - RNA, 22 nt, Human
cauggaaggauucuuauggcua

SEQ ID NO: 953447 - RNA, 20 nt, Human
cauuguauaggcagcagagu

SEQ ID NO: 953448 - RNA, 21 nt, Human
ccaaaguguugggauuauagg

SEQ ID NO: 953449 - RNA, 24 nt, Human
ccaaaguguugggauuauaggugu

SEQ ID NO: 953450 - RNA, 18 nt, Human
ccaagaggugaaaauuuc

SEQ ID NO: 953451 - RNA, 19 nt, Human
cccaagaggugaaaauuuc

SEQ ID NO: 953452 - RNA, 18 nt, Human
ccccgcgcgcccagggag

SEQ ID NO: 953453 - RNA, 22 nt, Human
ccccgcgcgcccagggaggcgg

SEQ ID NO: 953454 - RNA, 24 nt, Human
cccgcgccucggggagcggccggg

SEQ ID NO: 953455 - RNA, 18 nt, Human
ccgcgccgagaagcagcg

SEQ ID NO: 953456 - RNA, 20 nt, Human
ccuccugcguagcuagaaac

SEQ ID NO: 953457 - RNA, 18 nt, Human
cgcccagggaggcggcgg

SEQ ID NO: 953458 - RNA, 23 nt, Human
cguagcuagaaacacaggcaugc

SEQ ID NO: 953459 - RNA, 23 nt, Human
cucaaaacuccuggccucccaaa

SEQ ID NO: 953460 - RNA, 22 nt, Human
cuccuggaauaaauuaaaaccu

SEQ ID NO: 953461 - RNA, 20 nt, Human
cucugucccccaggcuggag

SEQ ID NO: 953462 - RNA, 23 nt, Human
cugcagccucaaucucaugggcu

SEQ ID NO: 953463 - RNA, 19 nt, Human
cuggccccgcgcgcccagg

SEQ ID NO: 953464 - RNA, 19 nt, Human
cuguaaaauuuggaaaucu

SEQ ID NO: 953465 - RNA, 21 nt, Human
gaacaaauuaugaaaaacuac

SEQ ID NO: 953466 - RNA, 24 nt, Human
gaacaguuaagccaucaaaacuaa

SEQ ID NO: 953467 - RNA, 21 nt, Human
gaacgccccggggcacccgac

SEQ ID NO: 953468 - RNA, 23 nt, Human
gaggcggcggcccgcgggcggcg

SEQ ID NO: 953469 - RNA, 18 nt, Human
gauuauaggugugagcca

SEQ ID NO: 953470 - RNA, 22 nt, Human
gauuauaggugugagccacugc

SEQ ID NO: 953471 - RNA, 23 nt, Human
gauuauaggugugagccacugca

SEQ ID NO: 953472 - RNA, 22 nt, Human
gcccagcuaauuuuuguauuuu

SEQ ID NO: 953473 - RNA, 19 nt, Human
gccucggggagcggccggg

SEQ ID NO: 953474 - RNA, 24 nt, Human
gcuggucucaaaacuccuggccuc

SEQ ID NO: 953475 - RNA, 25 nt, Human
gggcagcccugguucuggcccggcg

SEQ ID NO: 953476 - RNA, 21 nt, Human
ggggauuacaggggcagcccu

SEQ ID NO: 953477 - RNA, 22 nt, Human
ggggauuacaggggcagcccug

SEQ ID NO: 953478 - RNA, 19 nt, Human
guaaagcucuaaagacacc

SEQ ID NO: 953479 - RNA, 19 nt, Human
guagaggcagauguuuccc

SEQ ID NO: 953480 - RNA, 19 nt, Human
gucuacccaccccacucca

SEQ ID NO: 953481 - RNA, 24 nt, Human
gucuugcucugucccccaggcugg

SEQ ID NO: 953482 - RNA, 22 nt, Human
uaaagacaccagacgaaccaau

SEQ ID NO: 953483 - RNA, 23 nt, Human
uaaagacaccagacgaaccaaua

SEQ ID NO: 953484 - RNA, 21 nt, Human
uaaagacaccagacgaaccag

SEQ ID NO: 953485 - RNA, 19 nt, Human
uaaauuaaaaccugacuga

SEQ ID NO: 953486 - RNA, 19 nt, Human
uaacacguaaaaaaaaaga

SEQ ID NO: 953487 - RNA, 24 nt, Human
uaagaacacacaggaaugaacuga

SEQ ID NO: 953488 - RNA, 24 nt, Human
uaauuuuuguauuuuuuuguagag

SEQ ID NO: 953489 - RNA, 21 nt, Human
uagaaacacaggcaugcacca

SEQ ID NO: 953490 - RNA, 24 nt, Human
uagaaacacaggcaugcaccacua

SEQ ID NO: 953491 - RNA, 26 nt, Human
uagaaacacaggcaugcaccacuaug

SEQ ID NO: 953492 - RNA, 20 nt, Human
uaggaucaaaugagaauucc

SEQ ID NO: 953493 - RNA, 22 nt, Human
uauaggugugagccacugcacu

SEQ ID NO: 953494 - RNA, 21 nt, Human
uaucaaaguaacgacauaaug

SEQ ID NO: 953495 - RNA, 24 nt, Human
ucacugcagccucaaucucauggg

SEQ ID NO: 953496 - RNA, 24 nt, Human
ucauauuuuuaaauaaaagccaug

SEQ ID NO: 953497 - RNA, 23 nt, Human
ucccaaaguguugggauuauagg

SEQ ID NO: 953498 - RNA, 21 nt, Human
ucccccaggcuggaggucagu

SEQ ID NO: 953499 - RNA, 18 nt, Human
uccugaaaacagcaaaau

SEQ ID NO: 953500 - RNA, 20 nt, Human
uccuggccucccaaaguguu

SEQ ID NO: 953501 - RNA, 19 nt, Human
ucuaaagacaccagacgaa

SEQ ID NO: 953502 - RNA, 23 nt, Human
ucugucccccaggcuggagguca

SEQ ID NO: 953503 - RNA, 19 nt, Human
ucuugcucugucccccagg

SEQ ID NO: 953504 - RNA, 23 nt, Human
ucuugcucugucccccaggcugg

SEQ ID NO: 953505 - RNA, 24 nt, Human
ucuugcucugucccccaggcugga

SEQ ID NO: 953506 - RNA, 22 nt, Human
ugaaaacagcaaaaugaaaccu

SEQ ID NO: 953507 - RNA, 18 nt, Human
ugaaaccuaauaggugcu

SEQ ID NO: 953508 - RNA, 23 nt, Human
ugaacugacaaacagaacaaauu

SEQ ID NO: 953509 - RNA, 26 nt, Human
ugacaaacagaacaaauuaugaaaaa

SEQ ID NO: 953510 - RNA, 18 nt, Human
ugaugcacuucuguaguc

SEQ ID NO: 953511 - RNA, 20 nt, Human
ugcguagcuagaaacacagg

SEQ ID NO: 953512 - RNA, 21 nt, Human
ugcucugucccccaggcugga

SEQ ID NO: 953513 - RNA, 23 nt, Human
uggcacgaucacagcucacugca

SEQ ID NO: 953514 - RNA, 18 nt, Human
ugggauuauaggugugag

SEQ ID NO: 953515 - RNA, 19 nt, Human
ugggauuauaggugugagc

SEQ ID NO: 953516 - RNA, 21 nt, Human
ugggauuauaggugugagcca

SEQ ID NO: 953517 - RNA, 22 nt, Human
ugggauuauaggugugagccac

SEQ ID NO: 953518 - RNA, 22 nt, Human
ugggauuauaggugugagccac

SEQ ID NO: 953519 - RNA, 24 nt, Human
ugggauuauaggugugagccacug

SEQ ID NO: 953520 - RNA, 18 nt, Human
uguggggauuacaggggc

SEQ ID NO: 953521 - RNA, 22 nt, Human
uucaaauaagcaaagugcucug

SEQ ID NO: 953522 - RNA, 21 nt, Human
uucaaguagaauacggggaaa

SEQ ID NO: 953523 - RNA, 18 nt, Human
uuccugaaaacagcaaaa

SEQ ID NO: 953524 - RNA, 21 nt, Human
uuggaaaucuacucagguucc

SEQ ID NO: 953525 - RNA, 21 nt, Human
uugggauuauaggugugagcc

SEQ ID NO: 953526 - RNA, 22 nt, Human
uuuggaaaucuacucagguucc

SEQ ID NO: 953527 - RNA, 21 nt, Human
uuuuuguauuuuuuuguagag

SEQ ID NO: 953528 - RNA, 24 nt, Human
uuuuuguauuuuuuuguagaggca

SEQ ID NO: 953529 - RNA, 19 nt, Human
aaaguacuugccacacacc

SEQ ID NO: 953530 - RNA, 21 nt, Human
aaaguacuugccacacaccag

SEQ ID NO: 953531 - RNA, 20 nt, Human
aacgggacaacagaagccgg

SEQ ID NO: 953532 - RNA, 21 nt, Human
acaggcauaagcauugaugug

SEQ ID NO: 953533 - RNA, 18 nt, Human
accauaggaaaauccucc

SEQ ID NO: 953534 - RNA, 22 nt, Human
accauaggaaaauccuccaccu

SEQ ID NO: 953535 - RNA, 19 nt, Human
agaaaaaaaugaucaaaga

SEQ ID NO: 953536 - RNA, 22 nt, Human
aggaaauggggggaaccauagg

SEQ ID NO: 953537 - RNA, 18 nt, Human
agugacaguguggggcca

SEQ ID NO: 953538 - RNA, 18 nt, Human
aucuagaaaaaaaugauc

SEQ ID NO: 953539 - RNA, 23 nt, Human
cagccacagcccuugggagcaaa

SEQ ID NO: 953540 - RNA, 22 nt, Human
ccagccuguguucagcuacagc

SEQ ID NO: 953541 - RNA, 20 nt, Human
cccgcacaaacgggacaaca

SEQ ID NO: 953542 - RNA, 22 nt, Human
ccggccggacaucuccacuacc

SEQ ID NO: 953543 - RNA, 21 nt, Human
cgcaccucccgcucaggcucc

SEQ ID NO: 953544 - RNA, 22 nt, Human
cgccucaggcucccgcucccga

SEQ ID NO: 953545 - RNA, 20 nt, Human
cgggcaguggcggcuccucc

SEQ ID NO: 953546 - RNA, 19 nt, Human
cucagaauccacucggcca

SEQ ID NO: 953547 - RNA, 18 nt, Human
cucccgcuuagaccggcc

SEQ ID NO: 953548 - RNA, 24 nt, Human
gaaaauccuccaccucuaacagag

SEQ ID NO: 953549 - RNA, 21 nt, Human
gaauguaggcgugagacuuca

SEQ ID NO: 953550 - RNA, 20 nt, Human
gacgcgaccggagcugcccc

SEQ ID NO: 953551 - RNA, 23 nt, Human
gccagccuguguucagcuacagc

SEQ ID NO: 953552 - RNA, 21 nt, Human
gccccgcgacucagacucucg

SEQ ID NO: 953553 - RNA, 23 nt, Human
gccucaggcucccgcucccgauc

SEQ ID NO: 953554 - RNA, 19 nt, Human
gccucgcgcgcgcucgccg

SEQ ID NO: 953555 - RNA, 21 nt, Human
ggaaaauccuccaccucuaac

SEQ ID NO: 953556 - RNA, 19 nt, Human
gggaaccauaggaaaaucc

SEQ ID NO: 953557 - RNA, 20 nt, Human
uaggcgugagacuucaaacc

SEQ ID NO: 953558 - RNA, 21 nt, Human
ucaaugcaugggagaaaggag

SEQ ID NO: 953559 - RNA, 23 nt, Human
ucaggaaauggggggaaccauag

SEQ ID NO: 953560 - RNA, 24 nt, Human
ucccaaggcuugauguuuggaagg

SEQ ID NO: 953561 - RNA, 24 nt, Human
ucccgcuucacgcgcacagggcug

SEQ ID NO: 953562 - RNA, 19 nt, Human
uccucagaauccacucggc

SEQ ID NO: 953563 - RNA, 26 nt, Human
ucucgcucccgcuugacgcgaccgga

SEQ ID NO: 953564 - RNA, 19 nt, Human
ucugcccugcugaagcuag

SEQ ID NO: 953565 - RNA, 22 nt, Human
ugaucaaagaacagcugaguga

SEQ ID NO: 953566 - RNA, 21 nt, Human
ugcccugcugaagcuagaugg

SEQ ID NO: 953567 - RNA, 18 nt, Human
ugggagaaaggagcauca

SEQ ID NO: 953568 - RNA, 19 nt, Human
ugggagcaaagcccuagac

SEQ ID NO: 953569 - RNA, 21 nt, Human
uguggggccaucccaggcaag

SEQ ID NO: 953570 - RNA, 20 nt, Human
uucugcuugcuccaagaauc

SEQ ID NO: 953571 - RNA, 22 nt, Human
uugaugugugagagggagauag

SEQ ID NO: 953572 - RNA, 18 nt, Human
aaaacaagcaaauccuaa

SEQ ID NO: 953573 - RNA, 22 nt, Human
aaacaaaggaccaacauagccc

SEQ ID NO: 953574 - RNA, 21 nt, Human
aaacaagcaaauccuaaagca

SEQ ID NO: 953575 - RNA, 24 nt, Human
aagaacagcacaccaggaugccac

SEQ ID NO: 953576 - RNA, 21 nt, Human
aagcaaauccuaaagcaagua

SEQ ID NO: 953577 - RNA, 20 nt, Human
aagcuccggucccgcucaag

SEQ ID NO: 953578 - RNA, 20 nt, Human
acagcacaccaggaugccac

SEQ ID NO: 953579 - RNA, 19 nt, Human
acagugcuggaacaaagac

SEQ ID NO: 953580 - RNA, 19 nt, Human
acauagcccugaaaugcaa

SEQ ID NO: 953581 - RNA, 20 nt, Human
accaaggaaaauucacaaca

SEQ ID NO: 953582 - RNA, 25 nt, Human
accaaggaaaauucacaacauaugu

SEQ ID NO: 953583 - RNA, 25 nt, Human
acuggugccucaugggccugggccu

SEQ ID NO: 953584 - RNA, 27 nt, Human
agaaaaacaagcaaauccuaaagcaag

SEQ ID NO: 953585 - RNA, 18 nt, Human
agaacagcacaccaggau

SEQ ID NO: 953586 - RNA, 21 nt, Human
agcccugaaaugcaacagccu

SEQ ID NO: 953587 - RNA, 20 nt, Human
aggaaaauucacaacauaug

SEQ ID NO: 953588 - RNA, 27 nt, Human
aggccgggacagcauaaggacagagaa

SEQ ID NO: 953589 - RNA, 23 nt, Human
agggcagaggggugcuuggaagu

SEQ ID NO: 953590 - RNA, 18 nt, Human
aggggacagggaauacag

SEQ ID NO: 953591 - RNA, 18 nt, Human
auaaggacagagaaaggg

SEQ ID NO: 953592 - RNA, 19 nt, Human
caacauaugugaaacacaa

SEQ ID NO: 953593 - RNA, 18 nt, Human
caagaggcucccgagcaa

SEQ ID NO: 953594 - RNA, 19 nt, Human
caagaggcucccgagcaac

SEQ ID NO: 953595 - RNA, 23 nt, Human
caagaggcucccgagcaacagag

SEQ ID NO: 953596 - RNA, 23 nt, Human
caagcaaauccuaaagcaaguaa

SEQ ID NO: 953597 - RNA, 21 nt, Human
cagcauaaggacagagaaagg

SEQ ID NO: 953598 - RNA, 25 nt, Human
caggcuccucccuccuagcccuucu

SEQ ID NO: 953599 - RNA, 21 nt, Human
cauagcccugaaaugcaacag

SEQ ID NO: 953600 - RNA, 21 nt, Human
caucucccacaauuccccaga

SEQ ID NO: 953601 - RNA, 24 nt, Human
cauuccuuuaaaaagaaccaagga

SEQ ID NO: 953602 - RNA, 19 nt, Human
ccaccuguuguuugucagg

SEQ ID NO: 953603 - RNA, 20 nt, Human
cccacaauuccccagagggc

SEQ ID NO: 953604 - RNA, 19 nt, Human
ccccagagggcugcgaggc

SEQ ID NO: 953605 - RNA, 23 nt, Human
cccuugucgagcagcugcuggug

SEQ ID NO: 953606 - RNA, 26 nt, Human
ccuagcccuugaagccccagggaacc

SEQ ID NO: 953607 - RNA, 22 nt, Human
ccucccuccuagcccuugaagc

SEQ ID NO: 953608 - RNA, 21 nt, Human
ccuccuagcccuugaagcccc

SEQ ID NO: 953609 - RNA, 23 nt, Human
ccuccuagcccuugaagccccag

SEQ ID NO: 953610 - RNA, 18 nt, Human
ccuggccuugaaagacaa

SEQ ID NO: 953611 - RNA, 22 nt, Human
cggcccuuaacauccaaagacu

SEQ ID NO: 953612 - RNA, 22 nt, Human
cugcaguuggcaucucuggggc

SEQ ID NO: 953613 - RNA, 22 nt, Human
cugucugaacuuggagcugugc

SEQ ID NO: 953614 - RNA, 20 nt, Human
gacagagaaagggcagaggg

SEQ ID NO: 953615 - RNA, 20 nt, Human
gacagccacccugcgccccu

SEQ ID NO: 953616 - RNA, 24 nt, Human
gagccucaggucugaaaaggcaac

SEQ ID NO: 953617 - RNA, 24 nt, Human
ggaaccuggccuugaaagacaagc

SEQ ID NO: 953618 - RNA, 18 nt, Human
gguuuuccucucuaaggg

SEQ ID NO: 953619 - RNA, 23 nt, Human
guagcaucuccuuucucccaaaa

SEQ ID NO: 953620 - RNA, 20 nt, Human
uacaggugggcaugcugcag

SEQ ID NO: 953621 - RNA, 24 nt, Human
uagcaucuccuuucucccaaaacc

SEQ ID NO: 953622 - RNA, 18 nt, Human
uaggaucaucccauuccc

SEQ ID NO: 953623 - RNA, 24 nt, Human
ucaacuaauccuaaacgaaaacuc

SEQ ID NO: 953624 - RNA, 22 nt, Human
ucacaacauaugugaaacacaa

SEQ ID NO: 953625 - RNA, 20 nt, Human
ucacucaggggagcuggcag

SEQ ID NO: 953626 - RNA, 22 nt, Human
ucacucaggggagcuggcaggc

SEQ ID NO: 953627 - RNA, 24 nt, Human
uccacuggugccucaugggccugg

SEQ ID NO: 953628 - RNA, 21 nt, Human
uccagaggaaaugcauuugcc

SEQ ID NO: 953629 - RNA, 18 nt, Human
ucccaaaacccagcugga

SEQ ID NO: 953630 - RNA, 22 nt, Human
ucccaaaacccagcuggaacuc

SEQ ID NO: 953631 - RNA, 21 nt, Human
ucccucucagaagcuucugaa

SEQ ID NO: 953632 - RNA, 20 nt, Human
ucucccacaauuccccagag

SEQ ID NO: 953633 - RNA, 19 nt, Human
ucucuggggcugccaaauc

SEQ ID NO: 953634 - RNA, 20 nt, Human
ugaaacacaaacagcugugg

SEQ ID NO: 953635 - RNA, 22 nt, Human
ugaacagugcuggaacaaagac

SEQ ID NO: 953636 - RNA, 24 nt, Human
ugaaguggaagaaaaacaagcaaa

SEQ ID NO: 953637 - RNA, 21 nt, Human
ugacaggcagccugaacagug

SEQ ID NO: 953638 - RNA, 18 nt, Human
ugacuugagccgcaugua

SEQ ID NO: 953639 - RNA, 23 nt, Human
ugccucaagcuccggucccgcuc

SEQ ID NO: 953640 - RNA, 20 nt, Human
ugccugucaugguuuuccuc

SEQ ID NO: 953641 - RNA, 24 nt, Human
uggaagaaaaacaagcaaauccua

SEQ ID NO: 953642 - RNA, 22 nt, Human
uggaagugcucaucacucaggg

SEQ ID NO: 953643 - RNA, 18 nt, Human
uggugaugggaagcagca

SEQ ID NO: 953644 - RNA, 18 nt, Human
ugugaaacacaaacagcu

SEQ ID NO: 953645 - RNA, 18 nt, Human
uuccucucuaagggcacc

SEQ ID NO: 953646 - RNA, 22 nt, Human
uuccuuuaaaaagaaccaagga

SEQ ID NO: 953647 - RNA, 19 nt, Human
uucugaaguggaagaaaaa

SEQ ID NO: 953648 - RNA, 23 nt, Human
uugccuggagaugccuucaugaa

SEQ ID NO: 953649 - RNA, 20 nt, Human
uuuaaaaagaaccaaggaaa

SEQ ID NO: 953650 - RNA, 21 nt, Human
aacuaaaaauuugaacagcuc

SEQ ID NO: 953651 - RNA, 19 nt, Human
caaaauagauguacugagc

SEQ ID NO: 953652 - RNA, 19 nt, Human
gauguucacaaaauagaug

SEQ ID NO: 953653 - RNA, 25 nt, Human
uaaauuccauacagugaacuaaaaa

SEQ ID NO: 953654 - RNA, 20 nt, Human
ucaaauagguugacucuaaa

SEQ ID NO: 953655 - RNA, 21 nt, Human
uugaacagcucugugcuggac

SEQ ID NO: 953656 - RNA, 24 nt, Human
uugcucgaccaguaagauguagaa

SEQ ID NO: 953657 - RNA, 20 nt, Human
aaaaaagaaaaaaaauagag

SEQ ID NO: 953658 - RNA, 18 nt, Human
aaacaaagucccaggucu

SEQ ID NO: 953659 - RNA, 24 nt, Human
aaagugcugggauuacaggcauga

SEQ ID NO: 953660 - RNA, 20 nt, Human
aacagagcaaaaccuugucu

SEQ ID NO: 953661 - RNA, 21 nt, Human
aacagagcaaaaccuugucuc

SEQ ID NO: 953662 - RNA, 23 nt, Human
aagaaaaaaaauagaguucagaa

SEQ ID NO: 953663 - RNA, 19 nt, Human
aagcacacaccaccacgcc

SEQ ID NO: 953664 - RNA, 20 nt, Human
aagcacacaccaccacgccc

SEQ ID NO: 953665 - RNA, 22 nt, Human
aagcugggugugguggcacaug

SEQ ID NO: 953666 - RNA, 19 nt, Human
aaguagcugggacuacagg

SEQ ID NO: 953667 - RNA, 20 nt, Human
aaguagcugggacuacaggc

SEQ ID NO: 953668 - RNA, 24 nt, Human
aaguagcugggacuacaggcacac

SEQ ID NO: 953669 - RNA, 24 nt, Human
aagugauccgcccaccuuggccuc

SEQ ID NO: 953670 - RNA, 19 nt, Human
aagugcugggauuacaggc

SEQ ID NO: 953671 - RNA, 21 nt, Human
aagugcugggauuacaggcau

SEQ ID NO: 953672 - RNA, 24 nt, Human
aaguuaccuagcggagccuggagc

SEQ ID NO: 953673 - RNA, 18 nt, Human
aauggaaacaguugcaaa

SEQ ID NO: 953674 - RNA, 23 nt, Human
acaaauccccuugauacagcacc

SEQ ID NO: 953675 - RNA, 22 nt, Human
acaaugucaauuucuaguucca

SEQ ID NO: 953676 - RNA, 21 nt, Human
accaccucgccuggccaagaa

SEQ ID NO: 953677 - RNA, 24 nt, Human
acccaggcuggagugcaauggcgu

SEQ ID NO: 953678 - RNA, 19 nt, Human
accuagcggagccuggagc

SEQ ID NO: 953679 - RNA, 22 nt, Human
accucaagugauccgcccaccu

SEQ ID NO: 953680 - RNA, 21 nt, Human
acuccacugcugggaaaacga

SEQ ID NO: 953681 - RNA, 18 nt, Human
acuccuggccaucaucuc

SEQ ID NO: 953682 - RNA, 18 nt, Human
acucugucacccaggcug

SEQ ID NO: 953683 - RNA, 26 nt, Human
acucugucacccaggcuggagugcaa

SEQ ID NO: 953684 - RNA, 21 nt, Human
acuggccuguaucuucagcac

SEQ ID NO: 953685 - RNA, 20 nt, Human
acuggguuucgccaugcuag

SEQ ID NO: 953686 - RNA, 22 nt, Human
agaaauaaaaugauuuuaacag

SEQ ID NO: 953687 - RNA, 19 nt, Human
agacuggguuucgccaugc

SEQ ID NO: 953688 - RNA, 21 nt, Human
agacuggguuucgccaugcua

SEQ ID NO: 953689 - RNA, 23 nt, Human
agacuggguuucgccaugcuagc

SEQ ID NO: 953690 - RNA, 18 nt, Human
agaggacuauccucaaac

SEQ ID NO: 953691 - RNA, 20 nt, Human
agcaauccuccugccucagc

SEQ ID NO: 953692 - RNA, 24 nt, Human
agcgauucuccugccucagccucc

SEQ ID NO: 953693 - RNA, 23 nt, Human
agcggagccuggagcccacuggg

SEQ ID NO: 953694 - RNA, 21 nt, Human
agcugggauuacaagcacaca

SEQ ID NO: 953695 - RNA, 22 nt, Human
aggcacuacccgggucuggagc

SEQ ID NO: 953696 - RNA, 23 nt, Human
aggcaggagggucgcuugagccc

SEQ ID NO: 953697 - RNA, 21 nt, Human
aggccacuccuggccaucauc

SEQ ID NO: 953698 - RNA, 25 nt, Human
aggcuggagugcaguggccugaucu

SEQ ID NO: 953699 - RNA, 23 nt, Human
aggcuuuaauaauauuaaaaaua

SEQ ID NO: 953700 - RNA, 20 nt, Human
agggaacucuucacgggggc

SEQ ID NO: 953701 - RNA, 23 nt, Human
agggaacucuucacgggggcagg

SEQ ID NO: 953702 - RNA, 21 nt, Human
agggaggcuuaguccggggag

SEQ ID NO: 953703 - RNA, 19 nt, Human
aggggguggggugaucaua

SEQ ID NO: 953704 - RNA, 22 nt, Human
aguagagacuggguuucgccau

SEQ ID NO: 953705 - RNA, 19 nt, Human
aguagcugggauuacaagc

SEQ ID NO: 953706 - RNA, 20 nt, Human
agucccagcuacuugggggg

SEQ ID NO: 953707 - RNA, 20 nt, Human
agugcaauggcgugaucuag

SEQ ID NO: 953708 - RNA, 24 nt, Human
agugcaauggcgugaucuaggcuc

SEQ ID NO: 953709 - RNA, 20 nt, Human
agugcaguggccugaucuug

SEQ ID NO: 953710 - RNA, 24 nt, Human
agugcaguggccugaucuuggcuc

SEQ ID NO: 953711 - RNA, 18 nt, Human
agugcugggauuacaggc

SEQ ID NO: 953712 - RNA, 21 nt, Human
auaaaguacagcugcguuaca

SEQ ID NO: 953713 - RNA, 21 nt, Human
auccuccugccucagccuccc

SEQ ID NO: 953714 - RNA, 18 nt, Human
aucuggcuacacgguggc

SEQ ID NO: 953715 - RNA, 18 nt, Human
auguuugucaaugacaau

SEQ ID NO: 953716 - RNA, 20 nt, Human
caaaaaacaaucaucuguca

SEQ ID NO: 953717 - RNA, 25 nt, Human
caaaaaacaaucaucugucauaaaa

SEQ ID NO: 953718 - RNA, 23 nt, Human
caaaaacaaagucccaggucuga

SEQ ID NO: 953719 - RNA, 23 nt, Human
caaaauuaaagcaugaguuguca

SEQ ID NO: 953720 - RNA, 24 nt, Human
caaagugcugggauuacaggcaug

SEQ ID NO: 953721 - RNA, 22 nt, Human
caacagagcaaaaccuugucuc

SEQ ID NO: 953722 - RNA, 21 nt, Human
caagcacacaccaccacgccc

SEQ ID NO: 953723 - RNA, 22 nt, Human
caagcgauucuccugccucagc

SEQ ID NO: 953724 - RNA, 21 nt, Human
caagguggugcccacuccacu

SEQ ID NO: 953725 - RNA, 23 nt, Human
cacacaccaccacgcccggcuaa

SEQ ID NO: 953726 - RNA, 24 nt, Human
cacaccaccacgcccggcuaauuu

SEQ ID NO: 953727 - RNA, 23 nt, Human
cacucugucacccaggcuggagu

SEQ ID NO: 953728 - RNA, 24 nt, Human
cacucugucacccaggcuggagug

SEQ ID NO: 953729 - RNA, 21 nt, Human
cacugcaaccuccgccuccca

SEQ ID NO: 953730 - RNA, 18 nt, Human
cacugcaaccucugccuc

SEQ ID NO: 953731 - RNA, 21 nt, Human
cacugcaaccucugccucccg

SEQ ID NO: 953732 - RNA, 21 nt, Human
cagaaucucagaguaaaccac

SEQ ID NO: 953733 - RNA, 21 nt, Human
cagacauuccaaguacucuuc

SEQ ID NO: 953734 - RNA, 21 nt, Human
cagagcaaaaccuugucucuu

SEQ ID NO: 953735 - RNA, 18 nt, Human
cagagcucucagaucuuc

SEQ ID NO: 953736 - RNA, 18 nt, Human
cagaguuucgcucuugac

SEQ ID NO: 953737 - RNA, 24 nt, Human
cagcaaaaacaaagucccaggucu

SEQ ID NO: 953738 - RNA, 20 nt, Human
cagcagucaagaaccucggc

SEQ ID NO: 953739 - RNA, 18 nt, Human
caggccucucaccagcgu

SEQ ID NO: 953740 - RNA, 21 nt, Human
cagggcacagccuaguuuggg

SEQ ID NO: 953741 - RNA, 20 nt, Human
caguguggacggaacagaau

SEQ ID NO: 953742 - RNA, 23 nt, Human
caugcuagccaggcuggucucaa

SEQ ID NO: 953743 - RNA, 23 nt, Human
ccaaagugcugggauuacaggca

SEQ ID NO: 953744 - RNA, 24 nt, Human
ccaaagugcugggauuacaggcau

SEQ ID NO: 953745 - RNA, 21 nt, Human
ccacggagccagggcacagcc

SEQ ID NO: 953746 - RNA, 23 nt, Human
ccacuccuggccaucaucuccaa

SEQ ID NO: 953747 - RNA, 24 nt, Human
ccagagcucucagaucuuccccaa

SEQ ID NO: 953748 - RNA, 20 nt, Human
ccagcaaaaacaaaguccca

SEQ ID NO: 953749 - RNA, 20 nt, Human
ccaggcugggcagugggaag

SEQ ID NO: 953750 - RNA, 24 nt, Human
cccaaagugcugggauuacaggca

SEQ ID NO: 953751 - RNA, 23 nt, Human
cccaaguagcugggacuacaggc

SEQ ID NO: 953752 - RNA, 24 nt, Human
cccaaguagcugggacuacaggca

SEQ ID NO: 953753 - RNA, 20 nt, Human
cccagguucgagcaauccuc

SEQ ID NO: 953754 - RNA, 23 nt, Human
cccagguucgagcaauccuccug

SEQ ID NO: 953755 - RNA, 22 nt, Human
cccauaugugaacaaauccccu

SEQ ID NO: 953756 - RNA, 19 nt, Human
ccccaccaagguggugccc

SEQ ID NO: 953757 - RNA, 22 nt, Human
ccccgaggcuggagugcagugg

SEQ ID NO: 953758 - RNA, 19 nt, Human
cccgaguagcugggauuac

SEQ ID NO: 953759 - RNA, 23 nt, Human
cccggauucaagcgauucuccug

SEQ ID NO: 953760 - RNA, 19 nt, Human
cccuccuuccuuccuuccu

SEQ ID NO: 953761 - RNA, 27 nt, Human
ccgccucccagguucgagcaauccuuu

SEQ ID NO: 953762 - RNA, 25 nt, Human
ccuaauaccaucuuauuucuuugau

SEQ ID NO: 953763 - RNA, 21 nt, Human
ccucccagguucgagcaaucc

SEQ ID NO: 953764 - RNA, 24 nt, Human
ccucccggauucaagcgauucucc

SEQ ID NO: 953765 - RNA, 22 nt, Human
ccucucaccagcguguuggagg

SEQ ID NO: 953766 - RNA, 21 nt, Human
ccugaccuuaggucugggcac

SEQ ID NO: 953767 - RNA, 23 nt, Human
ccugccucagccucccaaguagc

SEQ ID NO: 953768 - RNA, 20 nt, Human
ccuuccuucccuccuuccuc

SEQ ID NO: 953769 - RNA, 20 nt, Human
ccuuccuuccuuccuuucuc

SEQ ID NO: 953770 - RNA, 19 nt, Human
ccuuguagggggcuagaag

SEQ ID NO: 953771 - RNA, 21 nt, Human
ccuuucuuucuuuuuguuuga

SEQ ID NO: 953772 - RNA, 27 nt, Human
cgagcaauccuccugccucagccuccc

SEQ ID NO: 953773 - RNA, 27 nt, Human
cgagcaauccuccugccucagccuccc

SEQ ID NO: 953774 - RNA, 24 nt, Human
cgccaugcuagccaggcuggucuc

SEQ ID NO: 953775 - RNA, 27 nt, Human
cgccaugcuagccaggcuggucucaac

SEQ ID NO: 953776 - RNA, 24 nt, Human
cgccucccagguucgagcaauccu

SEQ ID NO: 953777 - RNA, 24 nt, Human
cucaagugauccgcccaccuuggc

SEQ ID NO: 953778 - RNA, 24 nt, Human
cucacucugucacccaggcuggag

SEQ ID NO: 953779 - RNA, 24 nt, Human
cucacugcaaccuccgccucccag

SEQ ID NO: 953780 - RNA, 24 nt, Human
cucacugcaaccucugccucccgg

SEQ ID NO: 953781 - RNA, 24 nt, Human
cucagccucccaaguagcugggac

SEQ ID NO: 953782 - RNA, 24 nt, Human
cucagccucccgaguagcugggau

SEQ ID NO: 953783 - RNA, 22 nt, Human
cuccaacucuuuaccccaaccu

SEQ ID NO: 953784 - RNA, 23 nt, Human
cuccugcgcaggcucacugacag

SEQ ID NO: 953785 - RNA, 19 nt, Human
cucggcgccggacccgcgc

SEQ ID NO: 953786 - RNA, 25 nt, Human
cucucagaucuuccccaaaaccuaa

SEQ ID NO: 953787 - RNA, 18 nt, Human
cugaccuuaggucugggc

SEQ ID NO: 953788 - RNA, 23 nt, Human
cugcaaccuccgccucccagguu

SEQ ID NO: 953789 - RNA, 24 nt, Human
cugcaaccuccgccucccagguuc

SEQ ID NO: 953790 - RNA, 19 nt, Human
cugcaaccucugccucccg

SEQ ID NO: 953791 - RNA, 23 nt, Human
cugcaaccucugccucccggauu

SEQ ID NO: 953792 - RNA, 24 nt, Human
cugcaaccucugccucccggauuc

SEQ ID NO: 953793 - RNA, 22 nt, Human
cugccccaccaagguggugccc

SEQ ID NO: 953794 - RNA, 23 nt, Human
cugccucagccucccaaguagcu

SEQ ID NO: 953795 - RNA, 23 nt, Human
cugccucagccucccgaguagcu

SEQ ID NO: 953796 - RNA, 24 nt, Human
cuggguuucgccaugcuagccagg

SEQ ID NO: 953797 - RNA, 20 nt, Human
cugucauaaaaguucagagu

SEQ ID NO: 953798 - RNA, 21 nt, Human
cuuccuuccuucccuccuucc

SEQ ID NO: 953799 - RNA, 24 nt, Human
cuuccuuccuucccuccuuccuuc

SEQ ID NO: 953800 - RNA, 20 nt, Human
cuuuagucccagcuacuugg

SEQ ID NO: 953801 - RNA, 21 nt, Human
cuuucuuucuuuucuuucucu

SEQ ID NO: 953802 - RNA, 20 nt, Human
gaacagaaucuggcuacacg

SEQ ID NO: 953803 - RNA, 20 nt, Human
gacagcacaaugauacaauu

SEQ ID NO: 953804 - RNA, 25 nt, Human
gagcaauccuccugccucagccucc

SEQ ID NO: 953805 - RNA, 21 nt, Human
gagcaucagagcagaagacau

SEQ ID NO: 953806 - RNA, 22 nt, Human
gaggcggcuuuauguuccacuc

SEQ ID NO: 953807 - RNA, 22 nt, Human
gaggugucuuucacuuaugcuu

SEQ ID NO: 953808 - RNA, 24 nt, Human
gaguagcugggauuacaagcacac

SEQ ID NO: 953809 - RNA, 19 nt, Human
gagugcaguggccugaucu

SEQ ID NO: 953810 - RNA, 24 nt, Human
gaguuucgcucuugaccccgaggc

SEQ ID NO: 953811 - RNA, 19 nt, Human
gauuacaggcaugaccacc

SEQ ID NO: 953812 - RNA, 20 nt, Human
gcacagccuaguuuggggga

SEQ ID NO: 953813 - RNA, 19 nt, Human
gcagugggaaggcccucug

SEQ ID NO: 953814 - RNA, 21 nt, Human
gcagugggaaggcccucugga

SEQ ID NO: 953815 - RNA, 18 nt, Human
gccaagaaaaauguaacc

SEQ ID NO: 953816 - RNA, 20 nt, Human
gccucagccucccgaguagc

SEQ ID NO: 953817 - RNA, 18 nt, Human
gccucuggccagcucucc

SEQ ID NO: 953818 - RNA, 24 nt, Human
gcgauucuccugccucagccuccc

SEQ ID NO: 953819 - RNA, 21 nt, Human
gcucacugcaaccucugccuc

SEQ ID NO: 953820 - RNA, 24 nt, Human
gcuggagugcaauggcgugaucua

SEQ ID NO: 953821 - RNA, 19 nt, Human
gcuggagugcaguggccug

SEQ ID NO: 953822 - RNA, 21 nt, Human
ggaacucuucacgggggcagg

SEQ ID NO: 953823 - RNA, 20 nt, Human
ggacggaacagaaucuggcu

SEQ ID NO: 953824 - RNA, 18 nt, Human
ggauuacaggcaugacca

SEQ ID NO: 953825 - RNA, 21 nt, Human
ggccucuggccagcucuccag

SEQ ID NO: 953826 - RNA, 20 nt, Human
ggcguccggcacagcaguca

SEQ ID NO: 953827 - RNA, 23 nt, Human
ggcugaggcaggagggucgcuug

SEQ ID NO: 953828 - RNA, 22 nt, Human
ggcuggagugcaauggcgugau

SEQ ID NO: 953829 - RNA, 24 nt, Human
gggaaugaggugugcccugggcac

SEQ ID NO: 953830 - RNA, 18 nt, Human
ggggcaggauuugauguu

SEQ ID NO: 953831 - RNA, 18 nt, Human
gggggcugaggcaggagg

SEQ ID NO: 953832 - RNA, 18 nt, Human
ggucucaacucuuuaccu

SEQ ID NO: 953833 - RNA, 22 nt, Human
guggacggaacagaaucuggcu

SEQ ID NO: 953834 - RNA, 19 nt, Human
uaaacaacugacuacagac

SEQ ID NO: 953835 - RNA, 22 nt, Human
uaagaaaauagacuacugaagg

SEQ ID NO: 953836 - RNA, 23 nt, Human
uaagauacacagaaauaaaauga

SEQ ID NO: 953837 - RNA, 24 nt, Human
uaauuuuuguauuuuuaguagaga

SEQ ID NO: 953838 - RNA, 24 nt, Human
uacagcaccaugguaggcaugagg

SEQ ID NO: 953839 - RNA, 22 nt, Human
uacaggcacacgccgccacgcc

SEQ ID NO: 953840 - RNA, 23 nt, Human
uacauguaacaaaagaugcaaac

SEQ ID NO: 953841 - RNA, 21 nt, Human
uaccucaagugauccgcccac

SEQ ID NO: 953842 - RNA, 18 nt, Human
uacugagagagcagguca

SEQ ID NO: 953843 - RNA, 22 nt, Human
uacugauggauggacagggggu

SEQ ID NO: 953844 - RNA, 23 nt, Human
uacuuggggggcugaggcaggag

SEQ ID NO: 953845 - RNA, 23 nt, Human
uagccaggcuggucucaacucuu

SEQ ID NO: 953846 - RNA, 20 nt, Human
uaggcaagguaaugcuuuuc

SEQ ID NO: 953847 - RNA, 24 nt, Human
uaguagagacuggguuucgccaug

SEQ ID NO: 953848 - RNA, 19 nt, Human
uauagaggcaccuuggcua

SEQ ID NO: 953849 - RNA, 23 nt, Human
uauaguaagauuugccuaauacc

SEQ ID NO: 953850 - RNA, 24 nt, Human
uaugacauuccugaccuuaggucu

SEQ ID NO: 953851 - RNA, 18 nt, Human
ucacccaggcuggagugc

SEQ ID NO: 953852 - RNA, 21 nt, Human
ucacccggcuaauuuuuguau

SEQ ID NO: 953853 - RNA, 24 nt, Human
ucacucugucacccaggcuggagu

SEQ ID NO: 953854 - RNA, 19 nt, Human
ucacugcaaccuccgccuc

SEQ ID NO: 953855 - RNA, 24 nt, Human
ucacugcaaccuccgccucccagg

SEQ ID NO: 953856 - RNA, 25 nt, Human
ucacugcaaccuccgccucccaggu

SEQ ID NO: 953857 - RNA, 27 nt, Human
ucacugcaaccuccgccucccagguuc

SEQ ID NO: 953858 - RNA, 18 nt, Human
ucacugcaaccucugccu

SEQ ID NO: 953859 - RNA, 19 nt, Human
ucacugcaaccucugccuc

SEQ ID NO: 953860 - RNA, 23 nt, Human
ucacugcaaccucugccucccgg

SEQ ID NO: 953861 - RNA, 24 nt, Human
ucacugcaaccucugccucccgga

SEQ ID NO: 953862 - RNA, 18 nt, Human
ucagcacccucuggccac

SEQ ID NO: 953863 - RNA, 20 nt, Human
ucagccucccaaguagcugg

SEQ ID NO: 953864 - RNA, 20 nt, Human
ucagccucccgaguagcugg

SEQ ID NO: 953865 - RNA, 18 nt, Human
uccaaggaguauuggcag

SEQ ID NO: 953866 - RNA, 24 nt, Human
ucccaaagugcugggauuacaggc

SEQ ID NO: 953867 - RNA, 26 nt, Human
ucccaagguaaccacguucaguaacu

SEQ ID NO: 953868 - RNA, 24 nt, Human
ucccaaguagcugggacuacaggc

SEQ ID NO: 953869 - RNA, 19 nt, Human
ucccaggucugaggagcuc

SEQ ID NO: 953870 - RNA, 18 nt, Human
ucccagguucgagcaauc

SEQ ID NO: 953871 - RNA, 24 nt, Human
ucccagguucgagcaauccuccug

SEQ ID NO: 953872 - RNA, 28 nt, Human
uccccaaaaccuaaucaggccucucacc

SEQ ID NO: 953873 - RNA, 18 nt, Human
ucccgaguagcugggauu

SEQ ID NO: 953874 - RNA, 21 nt, Human
ucccggauucaagcgauucuc

SEQ ID NO: 953875 - RNA, 24 nt, Human
ucccggauucaagcgauucuccug

SEQ ID NO: 953876 - RNA, 27 nt, Human
uccuccugccucagccucccaaguagc

SEQ ID NO: 953877 - RNA, 23 nt, Human
ucucacucugucacccaggcugg

SEQ ID NO: 953878 - RNA, 24 nt, Human
ucucacucugucacccaggcugga

SEQ ID NO: 953879 - RNA, 26 nt, Human
ucucacucugucacccaggcuggagu

SEQ ID NO: 953880 - RNA, 27 nt, Human
ucucacucugucacccaggcuggagug

SEQ ID NO: 953881 - RNA, 24 nt, Human
ucuccugccucagccucccgagua

SEQ ID NO: 953882 - RNA, 19 nt, Human
ucugaggaugaugccugug

SEQ ID NO: 953883 - RNA, 20 nt, Human
ucuggccaccaccagcuuug

SEQ ID NO: 953884 - RNA, 24 nt, Human
ucugucacccaggcuggagugcaa

SEQ ID NO: 953885 - RNA, 23 nt, Human
ucuuucucuuucuuucuuucuuu

SEQ ID NO: 953886 - RNA, 25 nt, Human
ucuuucuuucuuucuuucuuucuuu

SEQ ID NO: 953887 - RNA, 22 nt, Human
ucuuucuuucuuucuuucuuuu

SEQ ID NO: 953888 - RNA, 24 nt, Human
ucuuucuuucuuucuuuucuuucc

SEQ ID NO: 953889 - RNA, 20 nt, Human
ucuuuuuguuugagacagag

SEQ ID NO: 953890 - RNA, 23 nt, Human
ugacaaugucaauuucuaguucc

SEQ ID NO: 953891 - RNA, 24 nt, Human
ugacuuuagucccagcuacuuggg

SEQ ID NO: 953892 - RNA, 24 nt, Human
ugagcccuucgggcagggcagccu

SEQ ID NO: 953893 - RNA, 24 nt, Human
ugaggcaggagggucgcuugagcc

SEQ ID NO: 953894 - RNA, 25 nt, Human
ugaggcaggagggucgcuugagccc

SEQ ID NO: 953895 - RNA, 22 nt, Human
ugaggugacagggaacucuuca

SEQ ID NO: 953896 - RNA, 23 nt, Human
ugaggugugcccugggcacaggg

SEQ ID NO: 953897 - RNA, 22 nt, Human
ugauacagcaccaugguaggca

SEQ ID NO: 953898 - RNA, 24 nt, Human
ugauccgcccaccuuggccuccca

SEQ ID NO: 953899 - RNA, 18 nt, Human
ugauggccucuggccagc

SEQ ID NO: 953900 - RNA, 18 nt, Human
ugcaaacaaaauagauuc

SEQ ID NO: 953901 - RNA, 21 nt, Human
ugcacugaaccagcaaaaaca

SEQ ID NO: 953902 - RNA, 22 nt, Human
ugcaguggccugaucuuggcuc

SEQ ID NO: 953903 - RNA, 24 nt, Human
ugccucagccucccaaguagcugg

SEQ ID NO: 953904 - RNA, 24 nt, Human
ugccucagccucccgaguagcugg

SEQ ID NO: 953905 - RNA, 18 nt, Human
ugcuagccaggcuggucu

SEQ ID NO: 953906 - RNA, 22 nt, Human
ugcuauagaacugggaaugagg

SEQ ID NO: 953907 - RNA, 21 nt, Human
ugcuggccuguggucugaguu

SEQ ID NO: 953908 - RNA, 22 nt, Human
ugcugggauuacaggcaugacc

SEQ ID NO: 953909 - RNA, 20 nt, Human
uggacggaacagaaucuggc

SEQ ID NO: 953910 - RNA, 19 nt, Human
uggagugcaauggcgugau

SEQ ID NO: 953911 - RNA, 22 nt, Human
uggagugcaauggcgugaucua

SEQ ID NO: 953912 - RNA, 24 nt, Human
uggagugcaauggcgugaucuagg

SEQ ID NO: 953913 - RNA, 19 nt, Human
uggagugcaguggccugau

SEQ ID NO: 953914 - RNA, 24 nt, Human
uggagugcaguggccugaucuugg

SEQ ID NO: 953915 - RNA, 22 nt, Human
uggccaagaaaaauguaaccuu

SEQ ID NO: 953916 - RNA, 18 nt, Human
uggccagugauggacugc

SEQ ID NO: 953917 - RNA, 20 nt, Human
ugggacuacaggcacacgcc

SEQ ID NO: 953918 - RNA, 21 nt, Human
ugggacuacaggcacacgccg

SEQ ID NO: 953919 - RNA, 24 nt, Human
ugggacuacaggcacacgccgcca

SEQ ID NO: 953920 - RNA, 21 nt, Human
ugggauuacaagcacacacca

SEQ ID NO: 953921 - RNA, 24 nt, Human
ugggauuacaagcacacaccacca

SEQ ID NO: 953922 - RNA, 20 nt, Human
ugggauuacaggcaugacca

SEQ ID NO: 953923 - RNA, 22 nt, Human
ugggauuacaggcaugaccacc

SEQ ID NO: 953924 - RNA, 23 nt, Human
ugggauuacaggcaugaccaccu

SEQ ID NO: 953925 - RNA, 24 nt, Human
ugggauuacaggcaugaccaccuc

SEQ ID NO: 953926 - RNA, 20 nt, Human
ugggcacaugaugucugacc

SEQ ID NO: 953927 - RNA, 28 nt, Human
ugggcagugggaaggcccucuggaccgg

SEQ ID NO: 953928 - RNA, 23 nt, Human
uggggggcugaggcaggaggguc

SEQ ID NO: 953929 - RNA, 18 nt, Human
ugggugugguggcacaug

SEQ ID NO: 953930 - RNA, 23 nt, Human
uggguuucgccaugcuagccagg

SEQ ID NO: 953931 - RNA, 20 nt, Human
uguaaauagcacagcguucu

SEQ ID NO: 953932 - RNA, 22 nt, Human
uguagggggcuagaagggugag

SEQ ID NO: 953933 - RNA, 20 nt, Human
ugucacccaggcuggagugc

SEQ ID NO: 953934 - RNA, 21 nt, Human
ugucauaaaaguucagaguaa

SEQ ID NO: 953935 - RNA, 26 nt, Human
ugugcaggagagggaguuugggaacc

SEQ ID NO: 953936 - RNA, 21 nt, Human
uguuuuguuuuuagccauguu

SEQ ID NO: 953937 - RNA, 24 nt, Human
uguuuuguuuuuagccauguuugu

SEQ ID NO: 953938 - RNA, 23 nt, Human
uuaaaaaagaaaaaaaauagagu

SEQ ID NO: 953939 - RNA, 25 nt, Human
uuaaauacacaaaaugcacugaacc

SEQ ID NO: 953940 - RNA, 18 nt, Human
uuaccucaagugauccgc

SEQ ID NO: 953941 - RNA, 24 nt, Human
uuaguagagacuggguuucgccau

SEQ ID NO: 953942 - RNA, 21 nt, Human
uucaaaauacaaaauuaaagc

SEQ ID NO: 953943 - RNA, 21 nt, Human
uucaagcgauucuccugccuc

SEQ ID NO: 953944 - RNA, 23 nt, Human
uucaagcgauucuccugccucag

SEQ ID NO: 953945 - RNA, 24 nt, Human
uucaagcgauucuccugccucagc

SEQ ID NO: 953946 - RNA, 21 nt, Human
uucagcacaggcagugcagug

SEQ ID NO: 953947 - RNA, 19 nt, Human
uucaggggacaaaggcacu

SEQ ID NO: 953948 - RNA, 20 nt, Human
uucaggggacaaaggcacua

SEQ ID NO: 953949 - RNA, 20 nt, Human
uuccuuccuuucuuucuuuu

SEQ ID NO: 953950 - RNA, 21 nt, Human
uucgagcaauccuccugccuc

SEQ ID NO: 953951 - RNA, 21 nt, Human
uucuacauuaaaaacaaaaaa

SEQ ID NO: 953952 - RNA, 19 nt, Human
uucucauaauggaaacagu

SEQ ID NO: 953953 - RNA, 22 nt, Human
uuggggggcugaggcaggaggg

SEQ ID NO: 953954 - RNA, 25 nt, Human
uuggggggcugaggcaggagggucg

SEQ ID NO: 953955 - RNA, 24 nt, Human
uuucuuuucuuucucucuuucccu

SEQ ID NO: 953956 - RNA, 18 nt, Human
uuugcaguucuauuuaca

SEQ ID NO: 953957 - RNA, 20 nt, Human
uuuucuuucucucuuuccuu

SEQ ID NO: 953958 - RNA, 22 nt, Human
uuuuuaguagagacuggguuuc

SEQ ID NO: 953959 - RNA, 20 nt, Human
uuuuuguauuuuuaguagag

SEQ ID NO: 953960 - RNA, 21 nt, Human
aacccacgggccgugcucccc

SEQ ID NO: 953961 - RNA, 19 nt, Human
acagaguaauacaaucaaa

SEQ ID NO: 953962 - RNA, 19 nt, Human
accaauggagagaagcauc

SEQ ID NO: 953963 - RNA, 28 nt, Human
acucuaaagugcuaccaauggagagaag

SEQ ID NO: 953964 - RNA, 22 nt, Human
cagucccaggcccuguccuccc

SEQ ID NO: 953965 - RNA, 21 nt, Human
ccaggcccuguccucccuguu

SEQ ID NO: 953966 - RNA, 22 nt, Human
ccccagccaggccgugggcuuc

SEQ ID NO: 953967 - RNA, 22 nt, Human
cccugguccuggccucccaggg

SEQ ID NO: 953968 - RNA, 24 nt, Human
ccgcucagucaggccuggggaugc

SEQ ID NO: 953969 - RNA, 21 nt, Human
ccgcugaaugaaggaccucug

SEQ ID NO: 953970 - RNA, 18 nt, Human
ccugauugagaugugaga

SEQ ID NO: 953971 - RNA, 22 nt, Human
ccugguccuggccucccagggu

SEQ ID NO: 953972 - RNA, 21 nt, Human
cgcugaaugaaggaccucuga

SEQ ID NO: 953973 - RNA, 20 nt, Human
cggcguugacccugccccag

SEQ ID NO: 953974 - RNA, 21 nt, Human
cgggcuccugguggacagccu

SEQ ID NO: 953975 - RNA, 21 nt, Human
cucccggaaccgcugaaugaa

SEQ ID NO: 953976 - RNA, 22 nt, Human
cuggccauuuagugggggaagg

SEQ ID NO: 953977 - RNA, 19 nt, Human
gacauggggacauggggag

SEQ ID NO: 953978 - RNA, 20 nt, Human
gacuuuggcccugguccugg

SEQ ID NO: 953979 - RNA, 18 nt, Human
gaguguccucuguuccca

SEQ ID NO: 953980 - RNA, 19 nt, Human
gccgugggcuucccagacc

SEQ ID NO: 953981 - RNA, 19 nt, Human
ggcguugacccugccccag

SEQ ID NO: 953982 - RNA, 20 nt, Human
gggaguggcggaucuggaag

SEQ ID NO: 953983 - RNA, 21 nt, Human
gggccgugcuccccugccgcu

SEQ ID NO: 953984 - RNA, 18 nt, Human
guaauacaaucaaaccca

SEQ ID NO: 953985 - RNA, 18 nt, Human
uagcaccgggcuccuggu

SEQ ID NO: 953986 - RNA, 21 nt, Human
ucccaacgcccugcgucccuc

SEQ ID NO: 953987 - RNA, 21 nt, Human
ucccaggcccuguccucccug

SEQ ID NO: 953988 - RNA, 24 nt, Human
ucccagggucagcgccuggagugu

SEQ ID NO: 953989 - RNA, 21 nt, Human
uccccuagcaccgggcuccug

SEQ ID NO: 953990 - RNA, 22 nt, Human
uccccuagcaccgggcuccugg

SEQ ID NO: 953991 - RNA, 22 nt, Human
uccugauugagaugugagaagc

SEQ ID NO: 953992 - RNA, 23 nt, Human
uccugguggacagccuuagaagg

SEQ ID NO: 953993 - RNA, 20 nt, Human
ucuaaagugcuaccaaugga

SEQ ID NO: 953994 - RNA, 20 nt, Human
ucugaggacuccucuugccc

SEQ ID NO: 953995 - RNA, 28 nt, Human
ugauauauauauauuuuuuaccauaaua

SEQ ID NO: 953996 - RNA, 20 nt, Human
uuccccuagcaccgggcucc

SEQ ID NO: 953997 - RNA, 24 nt, Human
uugacccugccccagccaggccgu

SEQ ID NO: 953998 - RNA, 22 nt, Human
aaacaagaaaucaacgugucau

SEQ ID NO: 953999 - RNA, 23 nt, Human
aaagcauaugucacacauaccaa

SEQ ID NO: 954000 - RNA, 21 nt, Human
aagaagaguuaaaauggaaug

SEQ ID NO: 954001 - RNA, 18 nt, Human
aagcauaugucacacaua

SEQ ID NO: 954002 - RNA, 27 nt, Human
acauaccaaagucuuacauuuugccuu

SEQ ID NO: 954003 - RNA, 21 nt, Human
accaaagucuuacauuuugcc

SEQ ID NO: 954004 - RNA, 20 nt, Human
agaaaacaaaaugaagaaau

SEQ ID NO: 954005 - RNA, 20 nt, Human
agaagaguuaaaauggaaug

SEQ ID NO: 954006 - RNA, 23 nt, Human
auaaagcauaugucacacauacc

SEQ ID NO: 954007 - RNA, 21 nt, Human
augcaaauaguucuuuuuauu

SEQ ID NO: 954008 - RNA, 23 nt, Human
caaggaauggcgacaguggacac

SEQ ID NO: 954009 - RNA, 20 nt, Human
caucuucaucuucaauuugc

SEQ ID NO: 954010 - RNA, 19 nt, Human
cauuguuuucuauggccaa

SEQ ID NO: 954011 - RNA, 19 nt, Human
ccucgugcuaacacuauuc

SEQ ID NO: 954012 - RNA, 19 nt, Human
cgacaguggacacugcuga

SEQ ID NO: 954013 - RNA, 21 nt, Human
gaauguuagagauacaaaauu

SEQ ID NO: 954014 - RNA, 18 nt, Human
gacaguaauuuggaaugu

SEQ ID NO: 954015 - RNA, 24 nt, Human
gucaucuucaucuucaauuugcua

SEQ ID NO: 954016 - RNA, 24 nt, Human
uaaaucagaagugacuacacauua

SEQ ID NO: 954017 - RNA, 24 nt, Human
uaauuacuaaaacuccacugugga

SEQ ID NO: 954018 - RNA, 23 nt, Human
uauaccagaaaacaaaaugaaga

SEQ ID NO: 954019 - RNA, 27 nt, Human
uaucuuccucuccuauuugacguuuua

SEQ ID NO: 954020 - RNA, 26 nt, Human
uccaauauuaacucacacuuucccaa

SEQ ID NO: 954021 - RNA, 20 nt, Human
uccucgugcuaacacuauuc

SEQ ID NO: 954022 - RNA, 20 nt, Human
uggccaaggaauggcgacag

SEQ ID NO: 954023 - RNA, 20 nt, Human
uguaaaauaaagccaaauaa

SEQ ID NO: 954024 - RNA, 19 nt, Human
uucuauggccaaggaaugg

SEQ ID NO: 954025 - RNA, 21 nt, Human
uuuccacaauuauuacaauug

SEQ ID NO: 954026 - RNA, 23 nt, Human
aaaaaagagacuuuuaaaaagga

SEQ ID NO: 954027 - RNA, 21 nt, Human
aaaacugaaacauucaaaagc

SEQ ID NO: 954028 - RNA, 22 nt, Human
aaaaggagacgguuguuuuaaa

SEQ ID NO: 954029 - RNA, 22 nt, Human
aaacugaaacauucaaaagcga

SEQ ID NO: 954030 - RNA, 25 nt, Human
aaauucacauuuacaaaauaauaaa

SEQ ID NO: 954031 - RNA, 27 nt, Human
aagcgaacagggaaaccgagggcuuca

SEQ ID NO: 954032 - RNA, 19 nt, Human
acuugaacauuuggauggc

SEQ ID NO: 954033 - RNA, 20 nt, Human
agccuuuguuuuguuuuccu

SEQ ID NO: 954034 - RNA, 18 nt, Human
auggcacugggugcaagu

SEQ ID NO: 954035 - RNA, 21 nt, Human
cacacauauauuuaacaguac

SEQ ID NO: 954036 - RNA, 19 nt, Human
cacaguaccacugaguuag

SEQ ID NO: 954037 - RNA, 18 nt, Human
ccuuuguuuuguuuuccu

SEQ ID NO: 954038 - RNA, 22 nt, Human
cuaacuccuaaauagaugaugc

SEQ ID NO: 954039 - RNA, 21 nt, Human
cuucauauuuuacagaagggc

SEQ ID NO: 954040 - RNA, 24 nt, Human
gaaaaaagagacuuuuaaaaagga

SEQ ID NO: 954041 - RNA, 26 nt, Human
gaaaaaagagacuuuuaaaaaggaga

SEQ ID NO: 954042 - RNA, 19 nt, Human
gagccguuucagacagugg

SEQ ID NO: 954043 - RNA, 23 nt, Human
gcuuuuuuuuuuugucuuuuuuu

SEQ ID NO: 954044 - RNA, 20 nt, Human
ggauggcacugggugcaagu

SEQ ID NO: 954045 - RNA, 20 nt, Human
uaaaaaggagacgguuguuu

SEQ ID NO: 954046 - RNA, 20 nt, Human
uaacugacggaaaaauaaau

SEQ ID NO: 954047 - RNA, 23 nt, Human
uacaauagcacauccaaaucuaa

SEQ ID NO: 954048 - RNA, 24 nt, Human
ucagagccguuucagacaguggaa

SEQ ID NO: 954049 - RNA, 25 nt, Human
uccuacggccugcgagacgcucgcc

SEQ ID NO: 954050 - RNA, 19 nt, Human
uccugugcuguaaaggaag

SEQ ID NO: 954051 - RNA, 22 nt, Human
ucuguuuuugugcuguuacucg

SEQ ID NO: 954052 - RNA, 21 nt, Human
ugaaacauucaaaagcgaaca

SEQ ID NO: 954053 - RNA, 23 nt, Human
ugacggaaaaauaaauucaacaa

SEQ ID NO: 954054 - RNA, 20 nt, Human
uggcaauaaucaggggagga

SEQ ID NO: 954055 - RNA, 20 nt, Human
uguuuuguuuuccugagccc

SEQ ID NO: 954056 - RNA, 22 nt, Human
uguuuuguuuuccugagcccuc

SEQ ID NO: 954057 - RNA, 23 nt, Human
uguuuuguuuuccugagcccuca

SEQ ID NO: 954058 - RNA, 23 nt, Human
uuaaaguacuguaacucacgacu

SEQ ID NO: 954059 - RNA, 20 nt, Human
uuacaaaauaauaaagucag

SEQ ID NO: 954060 - RNA, 23 nt, Human
uucauauuuuacagaagggcuug

SEQ ID NO: 954061 - RNA, 23 nt, Human
uugaacauuuggauggcacuggg

SEQ ID NO: 954062 - RNA, 29 nt, Human
uuuaaggaggaagccuuuguuccguucgg

SEQ ID NO: 954063 - RNA, 22 nt, Human
uuuacauaacugacggaaaaau

SEQ ID NO: 954064 - RNA, 20 nt, Human
acagugcugagggccgggac

SEQ ID NO: 954065 - RNA, 22 nt, Human
acagugcugagggccgggacgc

SEQ ID NO: 954066 - RNA, 18 nt, Human
agaaaaaauacacaaaga

SEQ ID NO: 954067 - RNA, 22 nt, Human
agaaaaaauacacaaagaacau

SEQ ID NO: 954068 - RNA, 23 nt, Human
caaagaaaauaaaaucagagaaa

SEQ ID NO: 954069 - RNA, 23 nt, Human
caaguuagacagcggcacggcca

SEQ ID NO: 954070 - RNA, 23 nt, Human
cacggccaaacaccaacuguccc

SEQ ID NO: 954071 - RNA, 28 nt, Human
cacggccaaacaccaacugucccgggcc

SEQ ID NO: 954072 - RNA, 27 nt, Human
cagaaacaaagaaaauaaaaucagaga

SEQ ID NO: 954073 - RNA, 19 nt, Human
caguggacagugcugaggg

SEQ ID NO: 954074 - RNA, 24 nt, Human
ccggcgcugacagaaauccccucu

SEQ ID NO: 954075 - RNA, 20 nt, Human
ccuggccgcuccgccucucu

SEQ ID NO: 954076 - RNA, 18 nt, Human
cggcagcggcaauucacu

SEQ ID NO: 954077 - RNA, 26 nt, Human
cggccaaacaccaacugucccgggcc

SEQ ID NO: 954078 - RNA, 23 nt, Human
gaaacaaagaaaauaaaaucaga

SEQ ID NO: 954079 - RNA, 23 nt, Human
ggccggcgcugacagaaaucccc

SEQ ID NO: 954080 - RNA, 21 nt, Human
uauaugaguuuccaacuaauu

SEQ ID NO: 954081 - RNA, 21 nt, Human
ucccgggccugcuggucucug

SEQ ID NO: 954082 - RNA, 22 nt, Human
uccggcagcggcaauucacucu

SEQ ID NO: 954083 - RNA, 21 nt, Human
ucucugcuggcaccgaaacag

SEQ ID NO: 954084 - RNA, 19 nt, Human
ucuguagaaaaaauacaca

SEQ ID NO: 954085 - RNA, 22 nt, Human
ugcacaccaaguuagacagcgg

SEQ ID NO: 954086 - RNA, 23 nt, Human
uuuuuuuuuuuuuuuuuuaauag

SEQ ID NO: 954087 - RNA, 23 nt, Human
aaacaacucaaauuuaggagccu

SEQ ID NO: 954088 - RNA, 19 nt, Human
aaccuggguaaggaagggg

SEQ ID NO: 954089 - RNA, 24 nt, Human
aauaacuucuugaauaauuucuac

SEQ ID NO: 954090 - RNA, 21 nt, Human
acaacucaaauuuaggagccu

SEQ ID NO: 954091 - RNA, 20 nt, Human
cacauauucuccacuuccaa

SEQ ID NO: 954092 - RNA, 22 nt, Human
caccaaacaaaccaccucccaa

SEQ ID NO: 954093 - RNA, 23 nt, Human
ccauucaccaaacaaaccaccuc

SEQ ID NO: 954094 - RNA, 22 nt, Human
cccaucaaacgauuuccccauc

SEQ ID NO: 954095 - RNA, 19 nt, Human
ccuacugcucaucucuuag

SEQ ID NO: 954096 - RNA, 19 nt, Human
cucccaaucuauuauguuu

SEQ ID NO: 954097 - RNA, 24 nt, Human
cugcaaguuccgcugggaauccau

SEQ ID NO: 954098 - RNA, 22 nt, Human
gagacuuuuccccaucaaacga

SEQ ID NO: 954099 - RNA, 23 nt, Human
uacaauccauugagugaaacaga

SEQ ID NO: 954100 - RNA, 23 nt, Human
uauuauuagaaaaugguuuuaaa

SEQ ID NO: 954101 - RNA, 24 nt, Human
ucacaaaauaauuuguucaacuga

SEQ ID NO: 954102 - RNA, 23 nt, Human
ucaccaaacaaaccaccucccaa

SEQ ID NO: 954103 - RNA, 20 nt, Human
ucuauuauguuuugucaccu

SEQ ID NO: 954104 - RNA, 18 nt, Human
ugaagcacgaggagaggu

SEQ ID NO: 954105 - RNA, 21 nt, Human
ugagugaaacagauucacaaa

SEQ ID NO: 954106 - RNA, 19 nt, Human
ugagugucuguacaagcuu

SEQ ID NO: 954107 - RNA, 26 nt, Human
uguaauagaaaaucaguuuaaggaua

SEQ ID NO: 954108 - RNA, 21 nt, Human
uuaaagccccauucaccaaac

SEQ ID NO: 954109 - RNA, 20 nt, Human
uuugaagcacgaggagaggu

SEQ ID NO: 954110 - RNA, 20 nt, Human
aaaaaaucacccaggcaugg

SEQ ID NO: 954111 - RNA, 18 nt, Human
aaacugcacagccccaac

SEQ ID NO: 954112 - RNA, 23 nt, Human
aaaucagcuucagcaaacugaaa

SEQ ID NO: 954113 - RNA, 23 nt, Human
aaaugcagaguccuaggccccac

SEQ ID NO: 954114 - RNA, 26 nt, Human
aacugcacagccccaaccagguuccc

SEQ ID NO: 954115 - RNA, 23 nt, Human
aagagccagaaaucauccccugg

SEQ ID NO: 954116 - RNA, 24 nt, Human
aagagccuucagcagcccccacgg

SEQ ID NO: 954117 - RNA, 22 nt, Human
aagagugccaaucauuacaaau

SEQ ID NO: 954118 - RNA, 18 nt, Human
aaggaugaaugagugugg

SEQ ID NO: 954119 - RNA, 20 nt, Human
aaggcaccaccccauccaca

SEQ ID NO: 954120 - RNA, 21 nt, Human
aaggcaccaccccauccacag

SEQ ID NO: 954121 - RNA, 22 nt, Human
aauacagugcccaggcccgccu

SEQ ID NO: 954122 - RNA, 22 nt, Human
aaucauaacccacacaggccca

SEQ ID NO: 954123 - RNA, 20 nt, Human
aauggcagggccugggggag

SEQ ID NO: 954124 - RNA, 24 nt, Human
acaacaguggaggguauaccaaau

SEQ ID NO: 954125 - RNA, 18 nt, Human
acacccuggcccuacaga

SEQ ID NO: 954126 - RNA, 20 nt, Human
acaccuggcccuugcgggga

SEQ ID NO: 954127 - RNA, 25 nt, Human
acagagcaagacccugucucuuaaa

SEQ ID NO: 954128 - RNA, 23 nt, Human
acagugcccaggcccgccugggc

SEQ ID NO: 954129 - RNA, 18 nt, Human
accacccccaccccaacu

SEQ ID NO: 954130 - RNA, 25 nt, Human
accccagaucuccugauuuuaacaa

SEQ ID NO: 954131 - RNA, 20 nt, Human
accuuugacuuucugaugau

SEQ ID NO: 954132 - RNA, 18 nt, Human
acugaauccuugucacag

SEQ ID NO: 954133 - RNA, 24 nt, Human
acugcccuccagccuggacaacag

SEQ ID NO: 954134 - RNA, 24 nt, Human
acugcccuccagccuggacaacag

SEQ ID NO: 954135 - RNA, 18 nt, Human
acuggugaggaaggggag

SEQ ID NO: 954136 - RNA, 23 nt, Human
agaaguagggggaggaucuggga

SEQ ID NO: 954137 - RNA, 19 nt, Human
agacagaagaucgggcaga

SEQ ID NO: 954138 - RNA, 22 nt, Human
agacagacaacccaauggcagg

SEQ ID NO: 954139 - RNA, 23 nt, Human
agagagaccaaggcaccacccca

SEQ ID NO: 954140 - RNA, 20 nt, Human
agaguuggaauauggcccuu

SEQ ID NO: 954141 - RNA, 21 nt, Human
agcaaagugaacaccaagcaa

SEQ ID NO: 954142 - RNA, 20 nt, Human
agcaagugcagcaaagcugg

SEQ ID NO: 954143 - RNA, 22 nt, Human
agcagcccccacggccuggagc

SEQ ID NO: 954144 - RNA, 23 nt, Human
agccugggcaacauagcaagacc

SEQ ID NO: 954145 - RNA, 24 nt, Human
agccugggcaacauagcaagaccu

SEQ ID NO: 954146 - RNA, 18 nt, Human
agcugcagguucugucua

SEQ ID NO: 954147 - RNA, 20 nt, Human
agcuggaagcccagcccaca

SEQ ID NO: 954148 - RNA, 23 nt, Human
agcuguguuuguccuaguauggg

SEQ ID NO: 954149 - RNA, 21 nt, Human
agcuguuccagcuggggcugg

SEQ ID NO: 954150 - RNA, 23 nt, Human
aggaagcuguaggggaucuggga

SEQ ID NO: 954151 - RNA, 24 nt, Human
aggaccacuugagcccgggaauuc

SEQ ID NO: 954152 - RNA, 23 nt, Human
aggaggcugaggcaggaggauca

SEQ ID NO: 954153 - RNA, 24 nt, Human
aggaggcugaggcaggaggaucac

SEQ ID NO: 954154 - RNA, 20 nt, Human
aggagggagggagguaagag

SEQ ID NO: 954155 - RNA, 21 nt, Human
aggagggagggagguaagagg

SEQ ID NO: 954156 - RNA, 24 nt, Human
aggaucacuugagcccaggaguuc

SEQ ID NO: 954157 - RNA, 18 nt, Human
aggaugcuggaaaaggcu

SEQ ID NO: 954158 - RNA, 18 nt, Human
aggcaggaggaccacuug

SEQ ID NO: 954159 - RNA, 24 nt, Human
aggcaggaggaccacuugagcccg

SEQ ID NO: 954160 - RNA, 18 nt, Human
aggcaggaggaucacuug

SEQ ID NO: 954161 - RNA, 23 nt, Human
aggcaggaggaucacuugagccc

SEQ ID NO: 954162 - RNA, 24 nt, Human
aggcugaggcaggaggaccacuug

SEQ ID NO: 954163 - RNA, 24 nt, Human
aggcugaggcaggaggaucacuug

SEQ ID NO: 954164 - RNA, 19 nt, Human
aggcuuuggaggaaaggcc

SEQ ID NO: 954165 - RNA, 20 nt, Human
agggaaugcagaaccacccc

SEQ ID NO: 954166 - RNA, 19 nt, Human
agggagggagguaagaggg

SEQ ID NO: 954167 - RNA, 24 nt, Human
agggcaguggacaacaguggagaa

SEQ ID NO: 954168 - RNA, 21 nt, Human
agggcgagauggcgagcuagg

SEQ ID NO: 954169 - RNA, 20 nt, Human
agggggagggagagccauuu

SEQ ID NO: 954170 - RNA, 18 nt, Human
aguggaggagggggcaau

SEQ ID NO: 954171 - RNA, 19 nt, Human
aguggguagcccuggaugg

SEQ ID NO: 954172 - RNA, 20 nt, Human
aguguugccuuugcuguggu

SEQ ID NO: 954173 - RNA, 20 nt, Human
aguuccccuauuucccucca

SEQ ID NO: 954174 - RNA, 21 nt, Human
aguuguaagugcaggggccag

SEQ ID NO: 954175 - RNA, 18 nt, Human
auccaugcccuggcucug

SEQ ID NO: 954176 - RNA, 19 nt, Human
auggcagggccugggggag

SEQ ID NO: 954177 - RNA, 23 nt, Human
augggguagggugggcuuugagg

SEQ ID NO: 954178 - RNA, 24 nt, Human
auuaugucacugcccuccagccug

SEQ ID NO: 954179 - RNA, 23 nt, Human
caaaaccaaagcaucgaggcugg

SEQ ID NO: 954180 - RNA, 24 nt, Human
caaaagauaccacaccgaaggaag

SEQ ID NO: 954181 - RNA, 22 nt, Human
caaagugaacaccaagcaacug

SEQ ID NO: 954182 - RNA, 19 nt, Human
caacagaagcugcugggcu

SEQ ID NO: 954183 - RNA, 23 nt, Human
caacagaagcugcugggcugggc

SEQ ID NO: 954184 - RNA, 22 nt, Human
caacagagcaagacccugucuc

SEQ ID NO: 954185 - RNA, 20 nt, Human
caacuggaggucugcagcug

SEQ ID NO: 954186 - RNA, 18 nt, Human
caagagagaccaaggcac

SEQ ID NO: 954187 - RNA, 22 nt, Human
caagagagaccaaggcaccacc

SEQ ID NO: 954188 - RNA, 22 nt, Human
caagaggagcaaagugaacacc

SEQ ID NO: 954189 - RNA, 22 nt, Human
caagcaacucuugucuaagggc

SEQ ID NO: 954190 - RNA, 22 nt, Human
caagcagaacacccuggcccua

SEQ ID NO: 954191 - RNA, 20 nt, Human
cacacagcugugagguggug

SEQ ID NO: 954192 - RNA, 20 nt, Human
cacagccaagaguggggcug

SEQ ID NO: 954193 - RNA, 23 nt, Human
caccucgaguuccagcaguuucc

SEQ ID NO: 954194 - RNA, 18 nt, Human
cacugcccuccagccugg

SEQ ID NO: 954195 - RNA, 18 nt, Human
cacugcccuccagccugg

SEQ ID NO: 954196 - RNA, 19 nt, Human
cacugcccuccagccugga

SEQ ID NO: 954197 - RNA, 24 nt, Human
cacugcccuccagccuggacaaca

SEQ ID NO: 954198 - RNA, 24 nt, Human
cacugguagucccagcuacuaagg

SEQ ID NO: 954199 - RNA, 23 nt, Human
cagaaccacccccaccccaacuc

SEQ ID NO: 954200 - RNA, 21 nt, Human
cagaagcugcugggcugggca

SEQ ID NO: 954201 - RNA, 21 nt, Human
cagagcaagacccugucucuu

SEQ ID NO: 954202 - RNA, 20 nt, Human
cagaguccuaggccccaccc

SEQ ID NO: 954203 - RNA, 19 nt, Human
cagcaccaaggcauggggu

SEQ ID NO: 954204 - RNA, 21 nt, Human
cagcccaaacugcacagcccc

SEQ ID NO: 954205 - RNA, 23 nt, Human
cagcugcagcccagccaagcaga

SEQ ID NO: 954206 - RNA, 18 nt, Human
cagcuucagcaaacugaa

SEQ ID NO: 954207 - RNA, 18 nt, Human
caggaguucaaggguaca

SEQ ID NO: 954208 - RNA, 24 nt, Human
caggaguucaaggguacagugaga

SEQ ID NO: 954209 - RNA, 18 nt, Human
cagggcuucuacugacuc

SEQ ID NO: 954210 - RNA, 25 nt, Human
cauagcaagaccuugucuguauaaa

SEQ ID NO: 954211 - RNA, 24 nt, Human
ccaaccgagggguagcagcugcag

SEQ ID NO: 954212 - RNA, 22 nt, Human
ccaauggcagggccugggggag

SEQ ID NO: 954213 - RNA, 18 nt, Human
ccacagagcugcagguuc

SEQ ID NO: 954214 - RNA, 19 nt, Human
ccacaggcuagcuugaccc

SEQ ID NO: 954215 - RNA, 21 nt, Human
ccacaggcuagcuugacccgc

SEQ ID NO: 954216 - RNA, 21 nt, Human
ccacccccaccccaacuccag

SEQ ID NO: 954217 - RNA, 21 nt, Human
ccagagccaugucccuggaua

SEQ ID NO: 954218 - RNA, 22 nt, Human
ccagcccaaacugcacagcccc

SEQ ID NO: 954219 - RNA, 23 nt, Human
ccagcccacagcaggacaagcaa

SEQ ID NO: 954220 - RNA, 19 nt, Human
ccagcuggggcuggaugcu

SEQ ID NO: 954221 - RNA, 26 nt, Human
cccagacccaggcccaaacaggaggc

SEQ ID NO: 954222 - RNA, 18 nt, Human
cccagguugccccucucc

SEQ ID NO: 954223 - RNA, 19 nt, Human
cccaugacggagacagaca

SEQ ID NO: 954224 - RNA, 30 nt, Human
ccccagagccccugaucugccuggaccagg

SEQ ID NO: 954225 - RNA, 19 nt, Human
ccccaugcccagacccagg

SEQ ID NO: 954226 - RNA, 22 nt, Human
ccccaugcccagacccaggccc

SEQ ID NO: 954227 - RNA, 18 nt, Human
cccccaccccaacuccag

SEQ ID NO: 954228 - RNA, 18 nt, Human
ccccggugagcacuugug

SEQ ID NO: 954229 - RNA, 18 nt, Human
cccggcuguucugauugg

SEQ ID NO: 954230 - RNA, 20 nt, Human
cccucagagagacagaagau

SEQ ID NO: 954231 - RNA, 23 nt, Human
cccuccagccuggacaacagagc

SEQ ID NO: 954232 - RNA, 19 nt, Human
cccuccauucccauuuuau

SEQ ID NO: 954233 - RNA, 19 nt, Human
cccucuguuuuccugcucc

SEQ ID NO: 954234 - RNA, 19 nt, Human
cccuuggggagaaguaggg

SEQ ID NO: 954235 - RNA, 20 nt, Human
ccggugagcacuugugcugc

SEQ ID NO: 954236 - RNA, 20 nt, Human
ccuaggugcuugaccuggug

SEQ ID NO: 954237 - RNA, 24 nt, Human
ccucugggucagcuuuuuguugca

SEQ ID NO: 954238 - RNA, 21 nt, Human
ccugggcaacauagcaagacc

SEQ ID NO: 954239 - RNA, 22 nt, Human
ccuguaaucccgauccuguggg

SEQ ID NO: 954240 - RNA, 18 nt, Human
ccuucauccuccucaagc

SEQ ID NO: 954241 - RNA, 25 nt, Human
ccuuggcuauggccuacccacuccc

SEQ ID NO: 954242 - RNA, 19 nt, Human
ccuugggcuuuggggcccu

SEQ ID NO: 954243 - RNA, 24 nt, Human
cgagguagucaagagagaccaagg

SEQ ID NO: 954244 - RNA, 19 nt, Human
cgauccugugggaggcuga

SEQ ID NO: 954245 - RNA, 24 nt, Human
cgauccugugggaggcugaggcag

SEQ ID NO: 954246 - RNA, 18 nt, Human
cucacucuacccagccac

SEQ ID NO: 954247 - RNA, 18 nt, Human
cucccggucacacagcug

SEQ ID NO: 954248 - RNA, 23 nt, Human
cucucugaauacugcccuugggg

SEQ ID NO: 954249 - RNA, 18 nt, Human
cucucuucaugggccugg

SEQ ID NO: 954250 - RNA, 20 nt, Human
cucugugccagcuacugucc

SEQ ID NO: 954251 - RNA, 20 nt, Human
cucuugccuguaaucccgau

SEQ ID NO: 954252 - RNA, 19 nt, Human
cugcagcuggaagcccagc

SEQ ID NO: 954253 - RNA, 22 nt, Human
cuggauguggcaaaagauacca

SEQ ID NO: 954254 - RNA, 18 nt, Human
cugggugucuugucccag

SEQ ID NO: 954255 - RNA, 21 nt, Human
cugguagucccagcuacuaag

SEQ ID NO: 954256 - RNA, 18 nt, Human
cuguguuaaagggaaggc

SEQ ID NO: 954257 - RNA, 18 nt, Human
cuuauaaccccacaggcc

SEQ ID NO: 954258 - RNA, 18 nt, Human
cuuggcccuuggggagaa

SEQ ID NO: 954259 - RNA, 28 nt, Human
gaagcccagcccacagcaggacaagcaa

SEQ ID NO: 954260 - RNA, 24 nt, Human
gaccacuugagcccgggaauucaa

SEQ ID NO: 954261 - RNA, 21 nt, Human
gaccuuugacuuucugaugau

SEQ ID NO: 954262 - RNA, 18 nt, Human
gagcuauuugggacagga

SEQ ID NO: 954263 - RNA, 24 nt, Human
gaggggcuggggaagccagcuggg

SEQ ID NO: 954264 - RNA, 24 nt, Human
gaucacuugagcccaggaguucaa

SEQ ID NO: 954265 - RNA, 20 nt, Human
gccaagaacuaggagucacc

SEQ ID NO: 954266 - RNA, 24 nt, Human
gccaggccuaggugcuugaccugg

SEQ ID NO: 954267 - RNA, 21 nt, Human
gcccacagcaggacaagcaac

SEQ ID NO: 954268 - RNA, 22 nt, Human
gccccggugagcacuugugcug

SEQ ID NO: 954269 - RNA, 21 nt, Human
gcccucuguuuuccugcuccc

SEQ ID NO: 954270 - RNA, 22 nt, Human
gcccugagcugccugguggauu

SEQ ID NO: 954271 - RNA, 23 nt, Human
gcccuggauguggcaaaagauac

SEQ ID NO: 954272 - RNA, 19 nt, Human
gcugccuaauccuccagga

SEQ ID NO: 954273 - RNA, 20 nt, Human
gcuggcaucucuccuuccag

SEQ ID NO: 954274 - RNA, 22 nt, Human
gcuggccuccugcucaucccgg

SEQ ID NO: 954275 - RNA, 24 nt, Human
gcuggcuccugggcccaggcccuu

SEQ ID NO: 954276 - RNA, 24 nt, Human
gcugugcaaccuugagcaagcccc

SEQ ID NO: 954277 - RNA, 20 nt, Human
gcuguuccagcuggggcugg

SEQ ID NO: 954278 - RNA, 21 nt, Human
gcuucucagcuuggggaagga

SEQ ID NO: 954279 - RNA, 19 nt, Human
gcuugaccuggugaucuga

SEQ ID NO: 954280 - RNA, 18 nt, Human
gcuuuuuguugcaaaauc

SEQ ID NO: 954281 - RNA, 20 nt, Human
ggaaggagggagggagguaa

SEQ ID NO: 954282 - RNA, 26 nt, Human
ggagcccuuucucuuaaaaguuuccu

SEQ ID NO: 954283 - RNA, 18 nt, Human
ggaguguuugggaaaugg

SEQ ID NO: 954284 - RNA, 23 nt, Human
ggaucacuugagcccaggaguuc

SEQ ID NO: 954285 - RNA, 18 nt, Human
ggcaccgccagccgcucg

SEQ ID NO: 954286 - RNA, 23 nt, Human
ggccacuucugaguccucugucu

SEQ ID NO: 954287 - RNA, 23 nt, Human
ggcguggaggcucuugccuguaa

SEQ ID NO: 954288 - RNA, 18 nt, Human
ggcuagcuugacccgcug

SEQ ID NO: 954289 - RNA, 19 nt, Human
ggcuucgugcuuuagagau

SEQ ID NO: 954290 - RNA, 18 nt, Human
gggaaggaggagguucag

SEQ ID NO: 954291 - RNA, 18 nt, Human
gggcauugccuuaauucc

SEQ ID NO: 954292 - RNA, 23 nt, Human
gggcgcagccagcuuuaaggugu

SEQ ID NO: 954293 - RNA, 20 nt, Human
gggcuggggaagccagcugg

SEQ ID NO: 954294 - RNA, 22 nt, Human
ggggcuggggaagccagcuggg

SEQ ID NO: 954295 - RNA, 24 nt, Human
ggguacagugagcuaugauuaugu

SEQ ID NO: 954296 - RNA, 18 nt, Human
gucagcuaguuguggcug

SEQ ID NO: 954297 - RNA, 19 nt, Human
gucuaagggcagugcucuc

SEQ ID NO: 954298 - RNA, 24 nt, Human
gugaucucuggaggaagaguguug

SEQ ID NO: 954299 - RNA, 21 nt, Human
guugcucugaugacuggagac

SEQ ID NO: 954300 - RNA, 20 nt, Human
uaccacaccgaaggaagcug

SEQ ID NO: 954301 - RNA, 21 nt, Human
uaccagguagaguugcucuga

SEQ ID NO: 954302 - RNA, 25 nt, Human
uaccugguuagugccagccuuggga

SEQ ID NO: 954303 - RNA, 19 nt, Human
uacuggugaggaaggggag

SEQ ID NO: 954304 - RNA, 19 nt, Human
uacuguccacauaugaccu

SEQ ID NO: 954305 - RNA, 23 nt, Human
uagaggaggcuugugacuucagc

SEQ ID NO: 954306 - RNA, 23 nt, Human
uaggucuggaucuggggcugcca

SEQ ID NO: 954307 - RNA, 19 nt, Human
uauagauggaacuauggca

SEQ ID NO: 954308 - RNA, 22 nt, Human
uauccaugcccuggcucuggcc

SEQ ID NO: 954309 - RNA, 24 nt, Human
uauuguuauuggcgcuguccugug

SEQ ID NO: 954310 - RNA, 18 nt, Human
uauuucuucacaggugcu

SEQ ID NO: 954311 - RNA, 21 nt, Human
ucaaccuuucugagccucagu

SEQ ID NO: 954312 - RNA, 20 nt, Human
ucaacucacucuacccagcc

SEQ ID NO: 954313 - RNA, 24 nt, Human
ucaagagagaccaaggcaccaccc

SEQ ID NO: 954314 - RNA, 21 nt, Human
ucacugcccuccagccuggac

SEQ ID NO: 954315 - RNA, 23 nt, Human
ucacuugagcccaggaguucaag

SEQ ID NO: 954316 - RNA, 19 nt, Human
ucagcaaacugaaacaaac

SEQ ID NO: 954317 - RNA, 22 nt, Human
ucagcaaacugaaacaaaccuu

SEQ ID NO: 954318 - RNA, 24 nt, Human
ucaggagcuguuccuucagaaagg

SEQ ID NO: 954319 - RNA, 19 nt, Human
ucagguggggucaaaacca

SEQ ID NO: 954320 - RNA, 19 nt, Human
ucccaaccagaaauggcag

SEQ ID NO: 954321 - RNA, 18 nt, Human
ucccagguugccccucuc

SEQ ID NO: 954322 - RNA, 19 nt, Human
ucccugagcaguucuuggc

SEQ ID NO: 954323 - RNA, 18 nt, Human
ucccugaguaagcagugg

SEQ ID NO: 954324 - RNA, 25 nt, Human
ucccuucccucuccagauacugagg

SEQ ID NO: 954325 - RNA, 20 nt, Human
ucccuuucugcuauccauca

SEQ ID NO: 954326 - RNA, 18 nt, Human
uccuaggccccaccccag

SEQ ID NO: 954327 - RNA, 18 nt, Human
uccuaucccccgcugcua

SEQ ID NO: 954328 - RNA, 22 nt, Human
uccugggagcuggccuccugcu

SEQ ID NO: 954329 - RNA, 22 nt, Human
uccugggcccaggcccuugcuc

SEQ ID NO: 954330 - RNA, 25 nt, Human
ucucagcccagggagacugguuuca

SEQ ID NO: 954331 - RNA, 21 nt, Human
ucucugaauacugcccuuggg

SEQ ID NO: 954332 - RNA, 18 nt, Human
ucucuggucucucacagg

SEQ ID NO: 954333 - RNA, 22 nt, Human
ucucuggucucucacaggaugc

SEQ ID NO: 954334 - RNA, 22 nt, Human
ucugcagcuggaagcccagccc

SEQ ID NO: 954335 - RNA, 23 nt, Human
ucugggugucuugucccagguug

SEQ ID NO: 954336 - RNA, 19 nt, Human
ucuucaacucacucuaccc

SEQ ID NO: 954337 - RNA, 23 nt, Human
ugaauacugcccuuggggaccuc

SEQ ID NO: 954338 - RNA, 20 nt, Human
ugacggccuccggcaucuuc

SEQ ID NO: 954339 - RNA, 20 nt, Human
ugacucagccccaaccgagg

SEQ ID NO: 954340 - RNA, 21 nt, Human
ugagaugccucucuucauggg

SEQ ID NO: 954341 - RNA, 22 nt, Human
ugagcaggcuuuggaggaaagg

SEQ ID NO: 954342 - RNA, 20 nt, Human
ugaggaaaggaggaucaggu

SEQ ID NO: 954343 - RNA, 22 nt, Human
ugaggaaaguggguuggaggug

SEQ ID NO: 954344 - RNA, 19 nt, Human
ugaggaaggggagacauag

SEQ ID NO: 954345 - RNA, 20 nt, Human
ugaggcaggaggaccacuug

SEQ ID NO: 954346 - RNA, 24 nt, Human
ugaggcaggaggaccacuugagcc

SEQ ID NO: 954347 - RNA, 25 nt, Human
ugaggcaggaggaccacuugagccc

SEQ ID NO: 954348 - RNA, 20 nt, Human
ugaggcaggaggaucacuug

SEQ ID NO: 954349 - RNA, 24 nt, Human
ugaggcaggaggaucacuugagcc

SEQ ID NO: 954350 - RNA, 25 nt, Human
ugaggcaggaggaucacuugagccc

SEQ ID NO: 954351 - RNA, 24 nt, Human
ugaggggcuggggaagccagcugg

SEQ ID NO: 954352 - RNA, 21 nt, Human
ugaguaagcaguggguagccc

SEQ ID NO: 954353 - RNA, 28 nt, Human
ugcacagccccaaccagguucccaacac

SEQ ID NO: 954354 - RNA, 23 nt, Human
ugcagaguccuaggccccacccc

SEQ ID NO: 954355 - RNA, 20 nt, Human
ugcagcccagccaagcagaa

SEQ ID NO: 954356 - RNA, 20 nt, Human
ugccaguggacugggugcca

SEQ ID NO: 954357 - RNA, 19 nt, Human
ugcccuggcucuggccccg

SEQ ID NO: 954358 - RNA, 26 nt, Human
ugccugguggauugguaccaaguggg

SEQ ID NO: 954359 - RNA, 19 nt, Human
ugccuugggcuuuggggcc

SEQ ID NO: 954360 - RNA, 25 nt, Human
ugccuugggcuuuggggcccucugu

SEQ ID NO: 954361 - RNA, 25 nt, Human
ugcggggaaagagccuucagcagga

SEQ ID NO: 954362 - RNA, 18 nt, Human
ugcucugaugacuggaga

SEQ ID NO: 954363 - RNA, 21 nt, Human
ugcuuuagagauuugcuaccc

SEQ ID NO: 954364 - RNA, 20 nt, Human
uggaaaaggcugauccucac

SEQ ID NO: 954365 - RNA, 25 nt, Human
uggaaggaaggagccccaaaccugg

SEQ ID NO: 954366 - RNA, 20 nt, Human
uggacugggugccaggaggc

SEQ ID NO: 954367 - RNA, 24 nt, Human
uggaggcucuugccuguaaucccg

SEQ ID NO: 954368 - RNA, 19 nt, Human
uggauggacaaguuaggaa

SEQ ID NO: 954369 - RNA, 22 nt, Human
uggcaaaagauaccacaccgaa

SEQ ID NO: 954370 - RNA, 26 nt, Human
uggcaaggcuguguucucucucccag

SEQ ID NO: 954371 - RNA, 20 nt, Human
uggcagaggagcuauuuggg

SEQ ID NO: 954372 - RNA, 25 nt, Human
uggccaagaacuaggagucaccugg

SEQ ID NO: 954373 - RNA, 21 nt, Human
uggccaagacagacucuggcc

SEQ ID NO: 954374 - RNA, 18 nt, Human
uggcccaggcaccgccag

SEQ ID NO: 954375 - RNA, 23 nt, Human
uggcccaggcaccgccagccgcu

SEQ ID NO: 954376 - RNA, 26 nt, Human
uggcugcagugacaaggaagucagag

SEQ ID NO: 954377 - RNA, 18 nt, Human
ugggaaggagggagggag

SEQ ID NO: 954378 - RNA, 18 nt, Human
ugggacaggagucaguuc

SEQ ID NO: 954379 - RNA, 20 nt, Human
ugggaggcugaggcaggagg

SEQ ID NO: 954380 - RNA, 24 nt, Human
ugggaggcugaggcaggaggacca

SEQ ID NO: 954381 - RNA, 21 nt, Human
uggggaccucaggagggagug

SEQ ID NO: 954382 - RNA, 22 nt, Human
uggggcccucuguuuuccugcu

SEQ ID NO: 954383 - RNA, 21 nt, Human
ugggguagggugggcuuugag

SEQ ID NO: 954384 - RNA, 26 nt, Human
uggugaggaaggggagacauagguua

SEQ ID NO: 954385 - RNA, 18 nt, Human
ugguuagugccagccuug

SEQ ID NO: 954386 - RNA, 20 nt, Human
uguaagaaaugcagaguccu

SEQ ID NO: 954387 - RNA, 23 nt, Human
ugucacaguacaugauguagcag

SEQ ID NO: 954388 - RNA, 19 nt, Human
ugucagcuaguuguggcug

SEQ ID NO: 954389 - RNA, 25 nt, Human
ugugcaccagcaagugcagcaaagc

SEQ ID NO: 954390 - RNA, 18 nt, Human
uguuugggaaauggcaaa

SEQ ID NO: 954391 - RNA, 19 nt, Human
uuaaccaccagcaucagcu

SEQ ID NO: 954392 - RNA, 23 nt, Human
uuaugucacugcccuccagccug

SEQ ID NO: 954393 - RNA, 21 nt, Human
uuccuucauccuccucaagcu

SEQ ID NO: 954394 - RNA, 22 nt, Human
uuccuucauccuccucaagcug

SEQ ID NO: 954395 - RNA, 23 nt, Human
uucuaaccucccgugcccaagcc

SEQ ID NO: 954396 - RNA, 24 nt, Human
uugccucuuuccacagagcugcag

SEQ ID NO: 954397 - RNA, 24 nt, Human
uugcuacccuuaaccaccagcauc

SEQ ID NO: 954398 - RNA, 21 nt, Human
uuuaauguggauuuaauagca

SEQ ID NO: 954399 - RNA, 20 nt, Human
uuuauuggagggugcuuucu

SEQ ID NO: 954400 - RNA, 23 nt, Human
uuucaggacuuugccucuuucca

SEQ ID NO: 954401 - RNA, 18 nt, Human
uuuccacagagcugcagg

SEQ ID NO: 954402 - RNA, 26 nt, Human
uuucuuacccucugaacccaguggag

SEQ ID NO: 954403 - RNA, 21 nt, Human
aagcccggggaagaagacuga

SEQ ID NO: 954404 - RNA, 21 nt, Human
agacagaaaugaaagccuggc

SEQ ID NO: 954405 - RNA, 18 nt, Human
aggagacaggaacaucug

SEQ ID NO: 954406 - RNA, 23 nt, Human
cggggaagaagacugaggaagag

SEQ ID NO: 954407 - RNA, 19 nt, Human
gaagaagacugaggaagag

SEQ ID NO: 954408 - RNA, 23 nt, Human
gacagaaaugaaagccuggcaaa

SEQ ID NO: 954409 - RNA, 23 nt, Human
gcucugagaucucagcagacaga

SEQ ID NO: 954410 - RNA, 21 nt, Human
ggcacuguuccccucucagcu

SEQ ID NO: 954411 - RNA, 20 nt, Human
ggggaugaaugggugcuugg

SEQ ID NO: 954412 - RNA, 25 nt, Human
ggggcagggggaugaaugggugcuu

SEQ ID NO: 954413 - RNA, 18 nt, Human
uccccagagaugcuuuau

SEQ ID NO: 954414 - RNA, 23 nt, Human
uccccagagaugcuuuauuacau

SEQ ID NO: 954415 - RNA, 23 nt, Human
ucucagcagacagaaaugaaagc

SEQ ID NO: 954416 - RNA, 22 nt, Human
ugggcaggcucugagaucucag

SEQ ID NO: 954417 - RNA, 22 nt, Human
ugggggcagggggaugaauggg

SEQ ID NO: 954418 - RNA, 25 nt, Human
ugggggcagggggaugaaugggugc

SEQ ID NO: 954419 - RNA, 21 nt, Human
ugugguacauggcacuguucc

SEQ ID NO: 954420 - RNA, 24 nt, Human
uuuuuuuuuuuuuuuuucgggguu

SEQ ID NO: 954421 - RNA, 29 nt, Human
uuuuuuuuuuuuuuuuuuuuuuuucgggg

SEQ ID NO: 954422 - RNA, 19 nt, Human
aaaggcucuugacuuagaa

SEQ ID NO: 954423 - RNA, 21 nt, Human
aaauaauuccuauacaaaaca

SEQ ID NO: 954424 - RNA, 19 nt, Human
aacaugaaacaagggcuga

SEQ ID NO: 954425 - RNA, 18 nt, Human
aagaaaacaguccacagc

SEQ ID NO: 954426 - RNA, 19 nt, Human
aagguacacccacuucaaa

SEQ ID NO: 954427 - RNA, 18 nt, Human
acaaaacaaauguugcaa

SEQ ID NO: 954428 - RNA, 21 nt, Human
acacaucuauuagguaaagca

SEQ ID NO: 954429 - RNA, 19 nt, Human
accacauccugggcccagc

SEQ ID NO: 954430 - RNA, 21 nt, Human
agcaagaaguuuugaagagaa

SEQ ID NO: 954431 - RNA, 20 nt, Human
aggcaaagaaaacaguccac

SEQ ID NO: 954432 - RNA, 22 nt, Human
agguacacccacuucaaaacac

SEQ ID NO: 954433 - RNA, 19 nt, Human
caaaaccaaagggcugaaa

SEQ ID NO: 954434 - RNA, 19 nt, Human
caaaaccaaagggcugaaa

SEQ ID NO: 954435 - RNA, 22 nt, Human
caaauaauuccuauacaaaaca

SEQ ID NO: 954436 - RNA, 19 nt, Human
caaauguugcaaauauucu

SEQ ID NO: 954437 - RNA, 21 nt, Human
caagguacacccacuucaaaa

SEQ ID NO: 954438 - RNA, 19 nt, Human
cacagccccauugaacaaa

SEQ ID NO: 954439 - RNA, 21 nt, Human
cacuucaaaacacaucuguau

SEQ ID NO: 954440 - RNA, 19 nt, Human
cagcacaccaggccugucc

SEQ ID NO: 954441 - RNA, 19 nt, Human
cagccccauugaacaaaac

SEQ ID NO: 954442 - RNA, 21 nt, Human
caggguggaagagaaguguca

SEQ ID NO: 954443 - RNA, 19 nt, Human
cauccugggcccagccugc

SEQ ID NO: 954444 - RNA, 24 nt, Human
caucugccauuucaucuuuuaaaa

SEQ ID NO: 954445 - RNA, 19 nt, Human
cccucagacccacccccac

SEQ ID NO: 954446 - RNA, 21 nt, Human
cccucagacccacccccacaa

SEQ ID NO: 954447 - RNA, 21 nt, Human
cuagucacuaggcaaagaaaa

SEQ ID NO: 954448 - RNA, 22 nt, Human
cucaauaugagggagcacugaa

SEQ ID NO: 954449 - RNA, 24 nt, Human
cucagacccacccccacaagaggc

SEQ ID NO: 954450 - RNA, 24 nt, Human
cucuugacuuagaaccccuucccc

SEQ ID NO: 954451 - RNA, 21 nt, Human
cugucuaaagccgaggagcca

SEQ ID NO: 954452 - RNA, 21 nt, Human
gaaacaugaaacaagggcuga

SEQ ID NO: 954453 - RNA, 22 nt, Human
gaaaggcucuugacuuagaacc

SEQ ID NO: 954454 - RNA, 25 nt, Human
gaagugucauacaaaaaggggccgg

SEQ ID NO: 954455 - RNA, 21 nt, Human
gacuucccucagacccacccc

SEQ ID NO: 954456 - RNA, 19 nt, Human
gcaaagaaaacaguccaca

SEQ ID NO: 954457 - RNA, 23 nt, Human
gcacagccccauugaacaaaacu

SEQ ID NO: 954458 - RNA, 22 nt, Human
ggacaccacauccugggcccag

SEQ ID NO: 954459 - RNA, 20 nt, Human
gggccggagcuggccagaaa

SEQ ID NO: 954460 - RNA, 23 nt, Human
ggguggugggagguccgccgggc

SEQ ID NO: 954461 - RNA, 24 nt, Human
ggguggugggagguccgccgggcc

SEQ ID NO: 954462 - RNA, 23 nt, Human
gguggugggagguccgccgggcc

SEQ ID NO: 954463 - RNA, 18 nt, Human
guaaagcaagguacaccc

SEQ ID NO: 954464 - RNA, 19 nt, Human
gucaguuuaauaaagcuaa

SEQ ID NO: 954465 - RNA, 18 nt, Human
uagaaccccuuccccuuu

SEQ ID NO: 954466 - RNA, 20 nt, Human
uaugugaaugcacaucugag

SEQ ID NO: 954467 - RNA, 21 nt, Human
ucaaaacacaucuguauguga

SEQ ID NO: 954468 - RNA, 19 nt, Human
uccugggcccagccugcag

SEQ ID NO: 954469 - RNA, 22 nt, Human
ucugugguugcgagcacgcagc

SEQ ID NO: 954470 - RNA, 22 nt, Human
ugaacaaaacuccagcaaaugu

SEQ ID NO: 954471 - RNA, 21 nt, Human
ugaaguaaggcauuuccuguc

SEQ ID NO: 954472 - RNA, 19 nt, Human
ugaaugcacaucugaguac

SEQ ID NO: 954473 - RNA, 20 nt, Human
ugacuuagaaccccuucccc

SEQ ID NO: 954474 - RNA, 19 nt, Human
ugacuucccucagacccac

SEQ ID NO: 954475 - RNA, 23 nt, Human
ugacuucccucagacccaccccc

SEQ ID NO: 954476 - RNA, 23 nt, Human
ugaguaccauucagcaagaaguu

SEQ ID NO: 954477 - RNA, 25 nt, Human
ugaguaccauucagcaagaaguuuu

SEQ ID NO: 954478 - RNA, 28 nt, Human
uggccagaaacauuuggacaacuguguc

SEQ ID NO: 954479 - RNA, 24 nt, Human
uggguggugggagguccgccgggc

SEQ ID NO: 954480 - RNA, 19 nt, Human
uuagaaccccuuccccuuu

SEQ ID NO: 954481 - RNA, 20 nt, Human
uuccccuuucugucuaaagc

SEQ ID NO: 954482 - RNA, 21 nt, Human
uuuucugccacugcccucaau

SEQ ID NO: 954483 - RNA, 25 nt, Human
aaacagcagcgcgcuccccuaccac

SEQ ID NO: 954484 - RNA, 19 nt, Human
aaagaugcauucucuuuau

SEQ ID NO: 954485 - RNA, 20 nt, Human
aauauuggaaaacuucaaca

SEQ ID NO: 954486 - RNA, 22 nt, Human
acucguggcucuaaacagcagc

SEQ ID NO: 954487 - RNA, 20 nt, Human
acuucaacagaauauuggaa

SEQ ID NO: 954488 - RNA, 23 nt, Human
cagaauauuggaaaacuucaaca

SEQ ID NO: 954489 - RNA, 18 nt, Human
cccagacaaauuuccuug

SEQ ID NO: 954490 - RNA, 20 nt, Human
cggccaccacugacuucggc

SEQ ID NO: 954491 - RNA, 20 nt, Human
cugccaaaaaccuuaugcuu

SEQ ID NO: 954492 - RNA, 26 nt, Human
ggaaaacuucaacagaauauuggaaa

SEQ ID NO: 954493 - RNA, 19 nt, Human
ggacaagaauuuuuaaaau

SEQ ID NO: 954494 - RNA, 19 nt, Human
uaacacuccacaaugaacu

SEQ ID NO: 954495 - RNA, 20 nt, Human
uauugcucccauaguucuua

SEQ ID NO: 954496 - RNA, 20 nt, Human
ucaaagaugcauucucuuua

SEQ ID NO: 954497 - RNA, 24 nt, Human
uccuuguggacaagaauuuuuaaa

SEQ ID NO: 954498 - RNA, 21 nt, Human
ucggcuacuggaauuuccucu

SEQ ID NO: 954499 - RNA, 19 nt, Human
ugaacugugaaauuucccu

SEQ ID NO: 954500 - RNA, 23 nt, Human
ugaucggcuacuggaauuuccuc

SEQ ID NO: 954501 - RNA, 20 nt, Human
uugauccaaaacugccaaaa

SEQ ID NO: 954502 - RNA, 19 nt, Human
uuuaacacuccacaaugaa

SEQ ID NO: 954503 - RNA, 21 nt, Human
uuugcagacuccugaucggcu

SEQ ID NO: 954504 - RNA, 22 nt, Human
uuugcagacuccugaucggcua

SEQ ID NO: 954505 - RNA, 18 nt, Human
uuuuacagcgacuccgga

SEQ ID NO: 954506 - RNA, 25 nt, Human
aaaggagcagaacaugccgaccaca

SEQ ID NO: 954507 - RNA, 18 nt, Human
aaggggucacgggugagg

SEQ ID NO: 954508 - RNA, 23 nt, Human
agagagagucagacaugacccgg

SEQ ID NO: 954509 - RNA, 26 nt, Human
agcacgccaucggccagaggcagaac

SEQ ID NO: 954510 - RNA, 26 nt, Human
agccagaugaagggagcgaggccaga

SEQ ID NO: 954511 - RNA, 19 nt, Human
agcgugggugaagugcugg

SEQ ID NO: 954512 - RNA, 19 nt, Human
agcgugggugaagugcugg

SEQ ID NO: 954513 - RNA, 21 nt, Human
agcuggugaaggcgcuccugg

SEQ ID NO: 954514 - RNA, 23 nt, Human
aggaggagggggagcgcccgggg

SEQ ID NO: 954515 - RNA, 22 nt, Human
aggagggggagcgcccggggcu

SEQ ID NO: 954516 - RNA, 21 nt, Human
aguaacgaaggccaccuccaa

SEQ ID NO: 954517 - RNA, 19 nt, Human
auaauaagcaacuucuuca

SEQ ID NO: 954518 - RNA, 21 nt, Human
cacgcagcacggacgcacuuu

SEQ ID NO: 954519 - RNA, 19 nt, Human
cagaacaugccgaccacaa

SEQ ID NO: 954520 - RNA, 19 nt, Human
cagagcguucauaggcguc

SEQ ID NO: 954521 - RNA, 20 nt, Human
cagcagccucgcagggcgug

SEQ ID NO: 954522 - RNA, 19 nt, Human
cagcagcggcggaggcggc

SEQ ID NO: 954523 - RNA, 18 nt, Human
caggaggacgagacggug

SEQ ID NO: 954524 - RNA, 23 nt, Human
caugaccaugcagagguggcgcc

SEQ ID NO: 954525 - RNA, 22 nt, Human
caugacccggcggcggcgacau

SEQ ID NO: 954526 - RNA, 21 nt, Human
ccauagccagaugaagggagc

SEQ ID NO: 954527 - RNA, 18 nt, Human
ccgccggggaaggagggc

SEQ ID NO: 954528 - RNA, 18 nt, Human
ccuucggccgccuccagc

SEQ ID NO: 954529 - RNA, 19 nt, Human
cgcuccacaaaggccugcu

SEQ ID NO: 954530 - RNA, 25 nt, Human
cggcggcggcggcggcgcggggagg

SEQ ID NO: 954531 - RNA, 21 nt, Human
cggggcugaggcuccgugagc

SEQ ID NO: 954532 - RNA, 20 nt, Human
cguaggaggagggggagcgc

SEQ ID NO: 954533 - RNA, 21 nt, Human
cucaaaggagcagaacaugcc

SEQ ID NO: 954534 - RNA, 21 nt, Human
cuccucgggguugaauuccag

SEQ ID NO: 954535 - RNA, 19 nt, Human
cugcugccuaggugaccug

SEQ ID NO: 954536 - RNA, 27 nt, Human
cuguccuguuccuccagaugcaccaca

SEQ ID NO: 954537 - RNA, 21 nt, Human
cuugcugcugcggcccucaga

SEQ ID NO: 954538 - RNA, 20 nt, Human
gaccguggugaugaggccgu

SEQ ID NO: 954539 - RNA, 21 nt, Human
gagaagugggcggggguguug

SEQ ID NO: 954540 - RNA, 21 nt, Human
gagcaggaggacgagacggug

SEQ ID NO: 954541 - RNA, 20 nt, Human
gagcgaggccagagaccacc

SEQ ID NO: 954542 - RNA, 18 nt, Human
gcaccgucucagcaaagu

SEQ ID NO: 954543 - RNA, 25 nt, Human
gcacgccaucggccagaggcagaac

SEQ ID NO: 954544 - RNA, 20 nt, Human
gccaucggccagaggcagaa

SEQ ID NO: 954545 - RNA, 25 nt, Human
gccgaccacaaacggguucucggcg

SEQ ID NO: 954546 - RNA, 20 nt, Human
gcggaacauacugccgccgg

SEQ ID NO: 954547 - RNA, 23 nt, Human
gcggaggcggcggcggcggcggc

SEQ ID NO: 954548 - RNA, 21 nt, Human
gcuccaauauucuucagcagg

SEQ ID NO: 954549 - RNA, 23 nt, Human
ggaggacgagacgguggaacugg

SEQ ID NO: 954550 - RNA, 21 nt, Human
ggaggcuguaggcuugagguc

SEQ ID NO: 954551 - RNA, 22 nt, Human
ggaggcuguaggcuugaggucg

SEQ ID NO: 954552 - RNA, 20 nt, Human
ggccagcucgaugaucuggu

SEQ ID NO: 954553 - RNA, 23 nt, Human
ggcggaggcggcggcggcggcgg

SEQ ID NO: 954554 - RNA, 22 nt, Human
gggaggaggcaaacgagaagug

SEQ ID NO: 954555 - RNA, 21 nt, Human
ggggagaaguuucgggggcug

SEQ ID NO: 954556 - RNA, 28 nt, Human
gggggcuguccaggggacugcugccuag

SEQ ID NO: 954557 - RNA, 21 nt, Human
uaacgaaggccaccuccaagc

SEQ ID NO: 954558 - RNA, 18 nt, Human
uaagcaacuucuucacca

SEQ ID NO: 954559 - RNA, 22 nt, Human
uacggaggcuguacagcgcggg

SEQ ID NO: 954560 - RNA, 21 nt, Human
uagaaagcgcgguccagagag

SEQ ID NO: 954561 - RNA, 22 nt, Human
ucccccggcgguuucuuggccu

SEQ ID NO: 954562 - RNA, 21 nt, Human
ucgcgcagcuucuccuccauc

SEQ ID NO: 954563 - RNA, 21 nt, Human
ucuccugcaauucauagaagu

SEQ ID NO: 954564 - RNA, 18 nt, Human
ucucggcgaaggugagga

SEQ ID NO: 954565 - RNA, 22 nt, Human
ucucguugucguaggaggaggg

SEQ ID NO: 954566 - RNA, 25 nt, Human
ucucuacgggcagcgcuccaauauu

SEQ ID NO: 954567 - RNA, 25 nt, Human
ugaauuccaggcacuccagcagccu

SEQ ID NO: 954568 - RNA, 20 nt, Human
ugacccggcggcggcgacau

SEQ ID NO: 954569 - RNA, 23 nt, Human
ugccauagccagaugaagggagc

SEQ ID NO: 954570 - RNA, 21 nt, Human
ugccauaguugugcaaauacu

SEQ ID NO: 954571 - RNA, 23 nt, Human
ugccauaguugugcaaauacucc

SEQ ID NO: 954572 - RNA, 19 nt, Human
ugcggaggaucaaguucug

SEQ ID NO: 954573 - RNA, 19 nt, Human
uggaaaggggucacgggug

SEQ ID NO: 954574 - RNA, 21 nt, Human
uggaaaggggucacgggugag

SEQ ID NO: 954575 - RNA, 23 nt, Human
uggaacugggcguguuggugcca

SEQ ID NO: 954576 - RNA, 23 nt, Human
ugggaggagcaggaggacgagac

SEQ ID NO: 954577 - RNA, 27 nt, Human
ugggggagaaguuucgggggcugguca

SEQ ID NO: 954578 - RNA, 22 nt, Human
uggugaaggcgcuccugggagg

SEQ ID NO: 954579 - RNA, 18 nt, Human
uggugcggcagcucuugg

SEQ ID NO: 954580 - RNA, 24 nt, Human
uguccuguuccuccagaugcacca

SEQ ID NO: 954581 - RNA, 18 nt, Human
uguguacauauguauacg

SEQ ID NO: 954582 - RNA, 18 nt, Human
uucaccagcugaguaacg

SEQ ID NO: 954583 - RNA, 26 nt, Human
uuccaugaccaugcagagguggcgcc

SEQ ID NO: 954584 - RNA, 19 nt, Human
uuucauggcaaagcgcugc

SEQ ID NO: 954585 - RNA, 24 nt, Human
aaauagccagucaaucuugagagc

SEQ ID NO: 954586 - RNA, 20 nt, Human
aaauauaaagauugcauucc

SEQ ID NO: 954587 - RNA, 21 nt, Human
aacaagcaacacccaaccacc

SEQ ID NO: 954588 - RNA, 24 nt, Human
aacacccaaccacccgagagcgac

SEQ ID NO: 954589 - RNA, 27 nt, Human
acaagcaacacccaaccacccgagagc

SEQ ID NO: 954590 - RNA, 23 nt, Human
acaauaaucagaaaauauucucc

SEQ ID NO: 954591 - RNA, 20 nt, Human
accacccgagagcgacccca

SEQ ID NO: 954592 - RNA, 19 nt, Human
acuucaguacuuuauaaua

SEQ ID NO: 954593 - RNA, 19 nt, Human
agaaaauauucuccaaaag

SEQ ID NO: 954594 - RNA, 21 nt, Human
agcaugugugugaugcacaga

SEQ ID NO: 954595 - RNA, 20 nt, Human
auguaguuuacaguaauucc

SEQ ID NO: 954596 - RNA, 21 nt, Human
caagcaacacccaaccacccg

SEQ ID NO: 954597 - RNA, 22 nt, Human
cacgcuuuauuugaguuaaaga

SEQ ID NO: 954598 - RNA, 21 nt, Human
cagaaaagcaugugugugaug

SEQ ID NO: 954599 - RNA, 20 nt, Human
cagaaaauauaaagauugca

SEQ ID NO: 954600 - RNA, 19 nt, Human
caugugugugaugcacaga

SEQ ID NO: 954601 - RNA, 20 nt, Human
caugugugugaugcacagaa

SEQ ID NO: 954602 - RNA, 24 nt, Human
ccaaccacccgagagcgaccccag

SEQ ID NO: 954603 - RNA, 18 nt, Human
ccaaugauauauagcaca

SEQ ID NO: 954604 - RNA, 18 nt, Human
cccgagagcgaccccagc

SEQ ID NO: 954605 - RNA, 22 nt, Human
cgcgaaucccacggacccggau

SEQ ID NO: 954606 - RNA, 24 nt, Human
cguauuauucuuuuagacauuuua

SEQ ID NO: 954607 - RNA, 22 nt, Human
cgugcagaaaagcaugugugug

SEQ ID NO: 954608 - RNA, 27 nt, Human
gaugacuaaggcaaccacgugcagaaa

SEQ ID NO: 954609 - RNA, 23 nt, Human
gcaaugauaguuuguuaucugaa

SEQ ID NO: 954610 - RNA, 23 nt, Human
uaaacuguacuuuuaggcacugu

SEQ ID NO: 954611 - RNA, 24 nt, Human
uaaggcaaccacgugcagaaaagc

SEQ ID NO: 954612 - RNA, 21 nt, Human
uagccagucaaucuugagagc

SEQ ID NO: 954613 - RNA, 19 nt, Human
uaucacaaauggugccuga

SEQ ID NO: 954614 - RNA, 24 nt, Human
uauucaaaauauggaauguuuaac

SEQ ID NO: 954615 - RNA, 20 nt, Human
ucguauuauucuuuuagaca

SEQ ID NO: 954616 - RNA, 22 nt, Human
ugacuaaggcaaccacgugcag

SEQ ID NO: 954617 - RNA, 21 nt, Human
ugcacagaaaauauaaagauu

SEQ ID NO: 954618 - RNA, 22 nt, Human
ugcacagaaaauauaaagauug

SEQ ID NO: 954619 - RNA, 24 nt, Human
ugcacagaaaauauaaagauugca

SEQ ID NO: 954620 - RNA, 18 nt, Human
ugccugauguggacacuc

SEQ ID NO: 954621 - RNA, 22 nt, Human
uggaacagcgggaacaagcaac

SEQ ID NO: 954622 - RNA, 19 nt, Human
uggaauguuuaacauagag

SEQ ID NO: 954623 - RNA, 21 nt, Human
uggagugucuugucauuaaaa

SEQ ID NO: 954624 - RNA, 21 nt, Human
ugucuagauggugcuguagga

SEQ ID NO: 954625 - RNA, 19 nt, Human
uguggacacucuaccuuua

SEQ ID NO: 954626 - RNA, 22 nt, Human
ugugugaugcacagaaaauaua

SEQ ID NO: 954627 - RNA, 20 nt, Human
uguuuugucauauugcauag

SEQ ID NO: 954628 - RNA, 19 nt, Human
uuccugaaguggcuugcua

SEQ ID NO: 954629 - RNA, 18 nt, Human
caggggaugaaugugaug

SEQ ID NO: 954630 - RNA, 21 nt, Human
cgacugaguauuccuucccag

SEQ ID NO: 954631 - RNA, 18 nt, Human
cugaagagauucucccag

SEQ ID NO: 954632 - RNA, 24 nt, Human
ucccagugacaagcuccaucgccc

SEQ ID NO: 954633 - RNA, 26 nt, Human
ucccagugacaagcuccaucgcccag

SEQ ID NO: 954634 - RNA, 18 nt, Human
ucucaucacugaaaccca

SEQ ID NO: 954635 - RNA, 21 nt, Human
ugaaacccagguccuuccaag

SEQ ID NO: 954636 - RNA, 23 nt, Human
ugaagagauucucccaguaaccc

SEQ ID NO: 954637 - RNA, 19 nt, Human
uucccagugacaagcucca

SEQ ID NO: 954638 - RNA, 18 nt, Human
aaaacaccaaaccaaaac

SEQ ID NO: 954639 - RNA, 19 nt, Human
aaacagagacauaaauuaa

SEQ ID NO: 954640 - RNA, 18 nt, Human
aaauccauauaaaagaaa

SEQ ID NO: 954641 - RNA, 22 nt, Human
aaccacuggauaaaacagagac

SEQ ID NO: 954642 - RNA, 27 nt, Human
aagacaaggccgggcggcccccuuaga

SEQ ID NO: 954643 - RNA, 22 nt, Human
aagcacugguggcuauauuuua

SEQ ID NO: 954644 - RNA, 19 nt, Human
acagaccuaaccguauagc

SEQ ID NO: 954645 - RNA, 22 nt, Human
acauuuggcacuaaauaaaaua

SEQ ID NO: 954646 - RNA, 22 nt, Human
acgcccaugaaacccgccaaca

SEQ ID NO: 954647 - RNA, 20 nt, Human
agcuucuucccgagcagcaa

SEQ ID NO: 954648 - RNA, 18 nt, Human
aggcggcgguggcucggc

SEQ ID NO: 954649 - RNA, 21 nt, Human
augacgcccaugaaacccgcc

SEQ ID NO: 954650 - RNA, 21 nt, Human
augccuugacucacucuggcu

SEQ ID NO: 954651 - RNA, 19 nt, Human
cacugccgaaagacaaggc

SEQ ID NO: 954652 - RNA, 22 nt, Human
ccaaacuccuggaacaaagcac

SEQ ID NO: 954653 - RNA, 20 nt, Human
cccaugaaacccgccaacaa

SEQ ID NO: 954654 - RNA, 22 nt, Human
cccaugaaacccgccaacaauu

SEQ ID NO: 954655 - RNA, 23 nt, Human
ccccagaggcugccauccucccu

SEQ ID NO: 954656 - RNA, 20 nt, Human
cccccuuagaaacgcucagg

SEQ ID NO: 954657 - RNA, 23 nt, Human
cgaaagacaaggccgggcggccc

SEQ ID NO: 954658 - RNA, 21 nt, Human
cgcccaugaaacccgccaaca

SEQ ID NO: 954659 - RNA, 19 nt, Human
cuagagcuaagauacugcg

SEQ ID NO: 954660 - RNA, 23 nt, Human
cucaugauuacaaaacuuuuaga

SEQ ID NO: 954661 - RNA, 23 nt, Human
cucucugggcacacuggggauuc

SEQ ID NO: 954662 - RNA, 22 nt, Human
gaaaguguguauaugccuugac

SEQ ID NO: 954663 - RNA, 19 nt, Human
gcaggcggcgguggcucgg

SEQ ID NO: 954664 - RNA, 21 nt, Human
gcggcaggcggcgguggcucg

SEQ ID NO: 954665 - RNA, 18 nt, Human
gggccgggcgaggggucg

SEQ ID NO: 954666 - RNA, 22 nt, Human
ggggcucgccgggccgggcgag

SEQ ID NO: 954667 - RNA, 21 nt, Human
guuaaagaaguucaaagucaa

SEQ ID NO: 954668 - RNA, 19 nt, Human
uaaaacagagacauaaauu

SEQ ID NO: 954669 - RNA, 26 nt, Human
uaaaauaaauagacaagcaaacugug

SEQ ID NO: 954670 - RNA, 23 nt, Human
uaaggaaauccauauaaaagaaa

SEQ ID NO: 954671 - RNA, 19 nt, Human
uauagcacuucugugaugc

SEQ ID NO: 954672 - RNA, 24 nt, Human
uaucuaacucaugauuacaaaacu

SEQ ID NO: 954673 - RNA, 19 nt, Human
ucaccaaacuccuggaaca

SEQ ID NO: 954674 - RNA, 22 nt, Human
ucacucuggcuuacuuuuaaaa

SEQ ID NO: 954675 - RNA, 21 nt, Human
ucccgagcagcaaguuucuuc

SEQ ID NO: 954676 - RNA, 20 nt, Human
ucgaccaaacacggcgaucg

SEQ ID NO: 954677 - RNA, 19 nt, Human
ucgccgggccgggcgaggg

SEQ ID NO: 954678 - RNA, 21 nt, Human
ucuucucggucuucuucuugc

SEQ ID NO: 954679 - RNA, 24 nt, Human
ugaaaauagaaucuagagcuaaga

SEQ ID NO: 954680 - RNA, 21 nt, Human
ugaaacccgccaacaauuuag

SEQ ID NO: 954681 - RNA, 21 nt, Human
ugagcacaaacagaccuaacc

SEQ ID NO: 954682 - RNA, 18 nt, Human
ugccgaaagacaaggccg

SEQ ID NO: 954683 - RNA, 21 nt, Human
ugccuugacucacucuggcuu

SEQ ID NO: 954684 - RNA, 24 nt, Human
uucuucucggucuucuucuugcug

SEQ ID NO: 954685 - RNA, 21 nt, Human
uucuugguuuuguggccagcu

SEQ ID NO: 954686 - RNA, 23 nt, Human
uuuaggaaguuuugugagaaagu

SEQ ID NO: 954687 - RNA, 23 nt, Human
aaaaguuugcagcaggcuuaaaa

SEQ ID NO: 954688 - RNA, 21 nt, Human
aaacaaacaccaacaacuuca

SEQ ID NO: 954689 - RNA, 22 nt, Human
aaaguuugcagcaggcuuaaaa

SEQ ID NO: 954690 - RNA, 19 nt, Human
aacaaaauggccccuaaac

SEQ ID NO: 954691 - RNA, 18 nt, Human
aaggaugauguacagugg

SEQ ID NO: 954692 - RNA, 21 nt, Human
acaaacaccaacaacuucacu

SEQ ID NO: 954693 - RNA, 24 nt, Human
acaaacaccaacaacuucacuugg

SEQ ID NO: 954694 - RNA, 22 nt, Human
acaaagaaacagucuuuuuuuc

SEQ ID NO: 954695 - RNA, 20 nt, Human
acagaacuuacuaaaacgaa

SEQ ID NO: 954696 - RNA, 23 nt, Human
acauggcacccuucuaaagggcu

SEQ ID NO: 954697 - RNA, 20 nt, Human
acuugcuucugcuucuuuuc

SEQ ID NO: 954698 - RNA, 20 nt, Human
aguguuaaaaguuaugugcu

SEQ ID NO: 954699 - RNA, 25 nt, Human
caaaauggccccuaaacaaacacca

SEQ ID NO: 954700 - RNA, 22 nt, Human
caaggaucauccuaauagccca

SEQ ID NO: 954701 - RNA, 19 nt, Human
cacacccuugaguaaaccc

SEQ ID NO: 954702 - RNA, 28 nt, Human
cacauacagcacauacauauagguagua

SEQ ID NO: 954703 - RNA, 26 nt, Human
cacucuacuucuuaaacacuuggccu

SEQ ID NO: 954704 - RNA, 21 nt, Human
cauaaauaggcuagcuauuaa

SEQ ID NO: 954705 - RNA, 18 nt, Human
cccacauacagcacauac

SEQ ID NO: 954706 - RNA, 19 nt, Human
cccacauguaguacagaau

SEQ ID NO: 954707 - RNA, 21 nt, Human
ccccuaaacaaacaccaacaa

SEQ ID NO: 954708 - RNA, 24 nt, Human
ccuaaaaugaaugcacacccuuga

SEQ ID NO: 954709 - RNA, 21 nt, Human
ccuccuuuucauggguuucua

SEQ ID NO: 954710 - RNA, 22 nt, Human
cgcuucacuccuugucaguuca

SEQ ID NO: 954711 - RNA, 23 nt, Human
cugaguaugaugcaacuccacuc

SEQ ID NO: 954712 - RNA, 21 nt, Human
cuuaaacacuuggccuuagcc

SEQ ID NO: 954713 - RNA, 20 nt, Human
cuucaaacaaagaaacaguu

SEQ ID NO: 954714 - RNA, 20 nt, Human
cuuggccuuagccugaccac

SEQ ID NO: 954715 - RNA, 22 nt, Human
gaaaugcccacauacagcacag

SEQ ID NO: 954716 - RNA, 24 nt, Human
gaggaaaagcuacuuguugugaug

SEQ ID NO: 954717 - RNA, 19 nt, Human
gcagugugugucuguggcc

SEQ ID NO: 954718 - RNA, 25 nt, Human
gccagccggcugagggcgaguuggg

SEQ ID NO: 954719 - RNA, 18 nt, Human
gcuguccauccgcugggu

SEQ ID NO: 954720 - RNA, 23 nt, Human
gggcuuucaaggaucauccuaau

SEQ ID NO: 954721 - RNA, 18 nt, Human
gggugggcgcuucacucc

SEQ ID NO: 954722 - RNA, 19 nt, Human
guauauaugcuuuuauccu

SEQ ID NO: 954723 - RNA, 21 nt, Human
gucuuuuuuuccaacauagga

SEQ ID NO: 954724 - RNA, 24 nt, Human
guuaaauugguagguauugauuuc

SEQ ID NO: 954725 - RNA, 24 nt, Human
uaaaaacauuuuaaaaaaaucucc

SEQ ID NO: 954726 - RNA, 21 nt, Human
uaaaaugaaugcacacccuug

SEQ ID NO: 954727 - RNA, 25 nt, Human
uaaaaugaaugcacacccuugagua

SEQ ID NO: 954728 - RNA, 21 nt, Human
uaaaaugccaugaucuuaaaa

SEQ ID NO: 954729 - RNA, 29 nt, Human
uaaacaaacaccaacaacuucacuugguc

SEQ ID NO: 954730 - RNA, 23 nt, Human
uaaauaccuugcucccacagaac

SEQ ID NO: 954731 - RNA, 29 nt, Human
uaaccccugaguaugaugcaacuccuuuu

SEQ ID NO: 954732 - RNA, 31 nt, Human
uacagcacauacauauagguaguauauaugg

SEQ ID NO: 954733 - RNA, 22 nt, Human
uagauccuaaucaaaaaccaug

SEQ ID NO: 954734 - RNA, 21 nt, Human
uaucacuggcugagaaaaucu

SEQ ID NO: 954735 - RNA, 18 nt, Human
uaugauucaggauaugau

SEQ ID NO: 954736 - RNA, 20 nt, Human
uccaauacccaacuauuacu

SEQ ID NO: 954737 - RNA, 20 nt, Human
uccaucuucacauuuagcag

SEQ ID NO: 954738 - RNA, 21 nt, Human
ucuccuggugccagcauuuca

SEQ ID NO: 954739 - RNA, 24 nt, Human
ucuccuggugccagcauuucagaa

SEQ ID NO: 954740 - RNA, 23 nt, Human
ucuccuguggccuccuuuucaug

SEQ ID NO: 954741 - RNA, 23 nt, Human
ugaaauccuguggcgaucccacc

SEQ ID NO: 954742 - RNA, 23 nt, Human
ugaaaugcccacauacagcacau

SEQ ID NO: 954743 - RNA, 18 nt, Human
ugaagcagagaguggcuu

SEQ ID NO: 954744 - RNA, 22 nt, Human
ugaguaaacccaggugggugcu

SEQ ID NO: 954745 - RNA, 21 nt, Human
ugaguaugaugcaacuccacu

SEQ ID NO: 954746 - RNA, 18 nt, Human
ugcaacuccacucuaaug

SEQ ID NO: 954747 - RNA, 18 nt, Human
ugcacuuuaccacuagcu

SEQ ID NO: 954748 - RNA, 25 nt, Human
ugcccacauacagcacauacauaua

SEQ ID NO: 954749 - RNA, 20 nt, Human
ugcucccacagaacuuacua

SEQ ID NO: 954750 - RNA, 26 nt, Human
uggccccuaaacaaacaccaacaacu

SEQ ID NO: 954751 - RNA, 22 nt, Human
uggccuccuuuucauggguuuc

SEQ ID NO: 954752 - RNA, 19 nt, Human
uggcugagaaaaucucacg

SEQ ID NO: 954753 - RNA, 18 nt, Human
uggugcgacugaagcaga

SEQ ID NO: 954754 - RNA, 25 nt, Human
uguuuugcuacacccagugcuccca

SEQ ID NO: 954755 - RNA, 23 nt, Human
uuaaaaaaaucuccaauacccaa

SEQ ID NO: 954756 - RNA, 18 nt, Human
uuaaaaaugccauaauau

SEQ ID NO: 954757 - RNA, 19 nt, Human
uucacuccuugucaguuca

SEQ ID NO: 954758 - RNA, 18 nt, Human
uuuuuuuuuuuuuccuug

SEQ ID NO: 954759 - RNA, 21 nt, Human
agcagcggcaguggggagcag

SEQ ID NO: 954760 - RNA, 22 nt, Human
aggcagcagcggcaguggggag

SEQ ID NO: 954761 - RNA, 18 nt, Human
augcagugugcgcagccg

SEQ ID NO: 954762 - RNA, 22 nt, Human
cagcagauuuauugaggcagca

SEQ ID NO: 954763 - RNA, 19 nt, Human
cagcagcggcaguggggag

SEQ ID NO: 954764 - RNA, 19 nt, Human
cagcggcaguggggagcag

SEQ ID NO: 954765 - RNA, 20 nt, Human
cagcggcaguggggagcagg

SEQ ID NO: 954766 - RNA, 21 nt, Human
cagcggcaguggggagcaggg

SEQ ID NO: 954767 - RNA, 22 nt, Human
cgcaaaucagcagauuuauuga

SEQ ID NO: 954768 - RNA, 23 nt, Human
cggcuccugcccagccacggcgc

SEQ ID NO: 954769 - RNA, 20 nt, Human
gcagauuuauugaggcagca

SEQ ID NO: 954770 - RNA, 23 nt, Human
gcagcagcggcaguggggagcag

SEQ ID NO: 954771 - RNA, 19 nt, Human
gcggcaguggggagcaggg

SEQ ID NO: 954772 - RNA, 21 nt, Human
ggagcagggguguggggaggg

SEQ ID NO: 954773 - RNA, 20 nt, Human
ggggagcaggggugugggga

SEQ ID NO: 954774 - RNA, 23 nt, Human
gggguguggggagggggcggggc

SEQ ID NO: 954775 - RNA, 19 nt, Human
ggguguggggagggggcgg

SEQ ID NO: 954776 - RNA, 19 nt, Human
gugcuggccuuucccaggc

SEQ ID NO: 954777 - RNA, 21 nt, Human
gugggcgccgauggucagcca

SEQ ID NO: 954778 - RNA, 20 nt, Human
guggggagggggcggggccu

SEQ ID NO: 954779 - RNA, 20 nt, Human
guguggggagggggcggggc

SEQ ID NO: 954780 - RNA, 21 nt, Human
ugaggcagcagcggcaguggg

SEQ ID NO: 954781 - RNA, 22 nt, Human
uggggagggggcggggccuccc

SEQ ID NO: 954782 - RNA, 20 nt, Human
uguggggagggggcggggcc

SEQ ID NO: 954783 - RNA, 18 nt, Human
uuuuuuuuuuuuuuuucg

SEQ ID NO: 954784 - RNA, 22 nt, Human
uuuuuuuuuuuuuuuuucgcaa

SEQ ID NO: 954785 - RNA, 18 nt, Human
aaaauuagcugggcgugg

SEQ ID NO: 954786 - RNA, 19 nt, Human
aacaucgagaaaccccauc

SEQ ID NO: 954787 - RNA, 20 nt, Human
aacaucgagaaaccccaucu

SEQ ID NO: 954788 - RNA, 21 nt, Human
aacaucgagaaaccccaucuc

SEQ ID NO: 954789 - RNA, 22 nt, Human
aagaauugcuugaacugggagg

SEQ ID NO: 954790 - RNA, 25 nt, Human
aaggagacagaguguggcuuugucu

SEQ ID NO: 954791 - RNA, 23 nt, Human
aauugcuugaacugggaggcaga

SEQ ID NO: 954792 - RNA, 21 nt, Human
acaccuguaaucccagcacuu

SEQ ID NO: 954793 - RNA, 24 nt, Human
acagaguguggcuuugucucaaaa

SEQ ID NO: 954794 - RNA, 19 nt, Human
acagccuuauaauucugaa

SEQ ID NO: 954795 - RNA, 24 nt, Human
accacacuccagacaaggagacag

SEQ ID NO: 954796 - RNA, 25 nt, Human
acuaugaagaauuuucugaaaugac

SEQ ID NO: 954797 - RNA, 18 nt, Human
agagguugcagugagcug

SEQ ID NO: 954798 - RNA, 22 nt, Human
agagguugcagugagcugagac

SEQ ID NO: 954799 - RNA, 24 nt, Human
agagguugcagugagcugagacug

SEQ ID NO: 954800 - RNA, 20 nt, Human
agagguugcagugagcuggc

SEQ ID NO: 954801 - RNA, 24 nt, Human
agcacuuugggaggccaagguggg

SEQ ID NO: 954802 - RNA, 24 nt, Human
agccuggccaacaucgagaaaccc

SEQ ID NO: 954803 - RNA, 21 nt, Human
agcugagacugugccaccaca

SEQ ID NO: 954804 - RNA, 23 nt, Human
agcugggcgugguggcgggugcc

SEQ ID NO: 954805 - RNA, 21 nt, Human
aggcagaagaauugcuugaac

SEQ ID NO: 954806 - RNA, 23 nt, Human
aggcagaagaauugcuugaacug

SEQ ID NO: 954807 - RNA, 20 nt, Human
aggcagagguugcagugagc

SEQ ID NO: 954808 - RNA, 24 nt, Human
aggcagagguugcagugagcugag

SEQ ID NO: 954809 - RNA, 21 nt, Human
aggccaaggugggcagaucac

SEQ ID NO: 954810 - RNA, 22 nt, Human
aggccaauaccacuaugaagaa

SEQ ID NO: 954811 - RNA, 24 nt, Human
aggcugaggcagaagaauugcuug

SEQ ID NO: 954812 - RNA, 23 nt, Human
aggugggcagaucacuugagguc

SEQ ID NO: 954813 - RNA, 24 nt, Human
aguggcuuacaccuguaaucccag

SEQ ID NO: 954814 - RNA, 24 nt, Human
caaggugggcagaucacuugaggu

SEQ ID NO: 954815 - RNA, 26 nt, Human
caaggugggcagaucacuugagguca

SEQ ID NO: 954816 - RNA, 21 nt, Human
caccgacaccgaggacucgcc

SEQ ID NO: 954817 - RNA, 19 nt, Human
caccuguaaucccagcacu

SEQ ID NO: 954818 - RNA, 24 nt, Human
caccuguaaucccagcacuuuggg

SEQ ID NO: 954819 - RNA, 21 nt, Human
cacuugaggucagaaguuuga

SEQ ID NO: 954820 - RNA, 27 nt, Human
cagaucacuugaggucagaaguuugag

SEQ ID NO: 954821 - RNA, 24 nt, Human
cagcacuuugggaggccaaggugg

SEQ ID NO: 954822 - RNA, 24 nt, Human
cagcuacuugggaggcugaggcag

SEQ ID NO: 954823 - RNA, 19 nt, Human
ccacacuccagacaaggag

SEQ ID NO: 954824 - RNA, 22 nt, Human
ccagaagacaugcuuauuucug

SEQ ID NO: 954825 - RNA, 24 nt, Human
ccuggccaacaucgagaaacccca

SEQ ID NO: 954826 - RNA, 18 nt, Human
ccuguaaucccagcuacu

SEQ ID NO: 954827 - RNA, 21 nt, Human
ccuguaaucccagcuacuugg

SEQ ID NO: 954828 - RNA, 22 nt, Human
ccuguaaucccagcuacuuggg

SEQ ID NO: 954829 - RNA, 18 nt, Human
cugugccaccacacucca

SEQ ID NO: 954830 - RNA, 22 nt, Human
cuuacaccuguaaucccagcac

SEQ ID NO: 954831 - RNA, 24 nt, Human
gacagaguguggcuuugucucaaa

SEQ ID NO: 954832 - RNA, 20 nt, Human
gagaccagccuggccaacau

SEQ ID NO: 954833 - RNA, 24 nt, Human
gaucacuugaggucagaaguuuga

SEQ ID NO: 954834 - RNA, 20 nt, Human
gcacuuugggaggccaaggu

SEQ ID NO: 954835 - RNA, 20 nt, Human
gcgggugccuguaaucccag

SEQ ID NO: 954836 - RNA, 22 nt, Human
gcgggugccuguaaucccagcu

SEQ ID NO: 954837 - RNA, 18 nt, Human
ggcgcaguggcuuacacc

SEQ ID NO: 954838 - RNA, 23 nt, Human
ggcgcaguggcuuacaccuguaa

SEQ ID NO: 954839 - RNA, 23 nt, Human
ggcgugguggcgggugccuguaa

SEQ ID NO: 954840 - RNA, 24 nt, Human
ggugccuguaaucccagcuacuug

SEQ ID NO: 954841 - RNA, 24 nt, Human
gguggcgggugccuguaaucccag

SEQ ID NO: 954842 - RNA, 24 nt, Human
guugcagugagcugagacugugcc

SEQ ID NO: 954843 - RNA, 24 nt, Human
uacaccuguaaucccagcacuuug

SEQ ID NO: 954844 - RNA, 22 nt, Human
uauccaaaaccuucuuggaagc

SEQ ID NO: 954845 - RNA, 18 nt, Human
ucgagaaaccccaucucu

SEQ ID NO: 954846 - RNA, 22 nt, Human
ucugcagacagccuuauaauuc

SEQ ID NO: 954847 - RNA, 18 nt, Human
ugagaccagccuggccaa

SEQ ID NO: 954848 - RNA, 19 nt, Human
ugagcugagacugugccac

SEQ ID NO: 954849 - RNA, 23 nt, Human
ugaggcagaagaauugcuugaac

SEQ ID NO: 954850 - RNA, 24 nt, Human
ugccuguaaucccagcuacuuggg

SEQ ID NO: 954851 - RNA, 22 nt, Human
uggcgggugccuguaaucccag

SEQ ID NO: 954852 - RNA, 21 nt, Human
uggcuuacaccuguaauccca

SEQ ID NO: 954853 - RNA, 24 nt, Human
uggcuuacaccuguaaucccagca

SEQ ID NO: 954854 - RNA, 24 nt, Human
ugggaggcagagguugcagugagc

SEQ ID NO: 954855 - RNA, 20 nt, Human
ugggaggccaaggugggcag

SEQ ID NO: 954856 - RNA, 24 nt, Human
ugggaggccaaggugggcagauca

SEQ ID NO: 954857 - RNA, 22 nt, Human
ugggaggcugaggcagaagaau

SEQ ID NO: 954858 - RNA, 27 nt, Human
ugggaggcugaggcagaagaauugcuu

SEQ ID NO: 954859 - RNA, 18 nt, Human
ugggcagaucacuugagg

SEQ ID NO: 954860 - RNA, 24 nt, Human
ugggcagaucacuugaggucagaa

SEQ ID NO: 954861 - RNA, 24 nt, Human
ugguggcgggugccuguaauccca

SEQ ID NO: 954862 - RNA, 21 nt, Human
uuaaaaaggccgggcgcagug

SEQ ID NO: 954863 - RNA, 24 nt, Human
uuagcugggcgugguggcgggugc

SEQ ID NO: 954864 - RNA, 19 nt, Human
uuaguagccagaagacaug

SEQ ID NO: 954865 - RNA, 23 nt, Human
uugaacugggaggcagagguugc

SEQ ID NO: 954866 - RNA, 19 nt, Human
uugcagugagcugagacug

SEQ ID NO: 954867 - RNA, 22 nt, Human
uugcagugagcugagacugugc

SEQ ID NO: 954868 - RNA, 23 nt, Human
uugggaggcugaggcagaagaau

SEQ ID NO: 954869 - RNA, 22 nt, Human
uuuuaaaacuuccucaugaaaa

SEQ ID NO: 954870 - RNA, 24 nt, Human
aaaaugcugggauuacagguguga

SEQ ID NO: 954871 - RNA, 22 nt, Human
aaagauggagucucgcucuguc

SEQ ID NO: 954872 - RNA, 26 nt, Human
aaaugcugggauuacaggugugagcc

SEQ ID NO: 954873 - RNA, 23 nt, Human
aaccugcaaugccaccaccaucc

SEQ ID NO: 954874 - RNA, 24 nt, Human
aagugauccacccaccuuggccuc

SEQ ID NO: 954875 - RNA, 22 nt, Human
accauguuggccaggcaggucu

SEQ ID NO: 954876 - RNA, 19 nt, Human
accugcaaugccaccacca

SEQ ID NO: 954877 - RNA, 25 nt, Human
acucugucgcccaggcuggagugca

SEQ ID NO: 954878 - RNA, 18 nt, Human
acugcaagcuccgccucc

SEQ ID NO: 954879 - RNA, 22 nt, Human
agcagugaggagggcggacccc

SEQ ID NO: 954880 - RNA, 21 nt, Human
agccaccgcaccuggcccauc

SEQ ID NO: 954881 - RNA, 23 nt, Human
agccaccgugccggcccgucuug

SEQ ID NO: 954882 - RNA, 20 nt, Human
agcccacuugccaaccugca

SEQ ID NO: 954883 - RNA, 19 nt, Human
agcuacgauuacaggugug

SEQ ID NO: 954884 - RNA, 18 nt, Human
agcuccgccuccuggguu

SEQ ID NO: 954885 - RNA, 25 nt, Human
aggcuggagugcaguggcacgaucu

SEQ ID NO: 954886 - RNA, 22 nt, Human
aggucucaucauguuggccagg

SEQ ID NO: 954887 - RNA, 22 nt, Human
aguagagaugggguuucaccau

SEQ ID NO: 954888 - RNA, 18 nt, Human
aguagcugggauuucagg

SEQ ID NO: 954889 - RNA, 19 nt, Human
agugauccacccaccuugg

SEQ ID NO: 954890 - RNA, 20 nt, Human
agugcaguggcacgaucucg

SEQ ID NO: 954891 - RNA, 23 nt, Human
agugcaguggcacgaucucggcu

SEQ ID NO: 954892 - RNA, 24 nt, Human
agugcaguggcacgaucucggcuc

SEQ ID NO: 954893 - RNA, 21 nt, Human
agugcgguggcgcaaucucag

SEQ ID NO: 954894 - RNA, 18 nt, Human
agugcugggauuacaggc

SEQ ID NO: 954895 - RNA, 18 nt, Human
agugcugggauuacaggc

SEQ ID NO: 954896 - RNA, 18 nt, Human
augggguuucaccauguu

SEQ ID NO: 954897 - RNA, 22 nt, Human
augggguuucaccauguuggcc

SEQ ID NO: 954898 - RNA, 23 nt, Human
augggguuucaccauguuggcca

SEQ ID NO: 954899 - RNA, 24 nt, Human
augggguuucaccauguuggccag

SEQ ID NO: 954900 - RNA, 25 nt, Human
auuuuuguauuuuuuaguagagaug

SEQ ID NO: 954901 - RNA, 24 nt, Human
caaaaugcugggauuacaggugug

SEQ ID NO: 954902 - RNA, 25 nt, Human
caacaaacauuuauugagcaccuac

SEQ ID NO: 954903 - RNA, 24 nt, Human
caaccugcaaugccaccaccaucc

SEQ ID NO: 954904 - RNA, 20 nt, Human
caagcgauucuccugccuca

SEQ ID NO: 954905 - RNA, 22 nt, Human
caagcgauucuccugccucagc

SEQ ID NO: 954906 - RNA, 20 nt, Human
caaugccaccaccauccugu

SEQ ID NO: 954907 - RNA, 21 nt, Human
cacacccggcuaauuuaugua

SEQ ID NO: 954908 - RNA, 24 nt, Human
caccaugccuggcuaauuuuugua

SEQ ID NO: 954909 - RNA, 21 nt, Human
caccauguuggccaggcaggu

SEQ ID NO: 954910 - RNA, 23 nt, Human
caccauguuggccaggcaggucu

SEQ ID NO: 954911 - RNA, 24 nt, Human
caccauguuggccaggcaggucuu

SEQ ID NO: 954912 - RNA, 31 nt, Human
caccauguuggccaggcaggucuugaacucc

SEQ ID NO: 954913 - RNA, 23 nt, Human
cacccaccuuggccucccaaaau

SEQ ID NO: 954914 - RNA, 21 nt, Human
caccgcaaccuuugccuccca

SEQ ID NO: 954915 - RNA, 24 nt, Human
cacucugucgcccaggcuggagug

SEQ ID NO: 954916 - RNA, 19 nt, Human
cagcccacuugccaaccug

SEQ ID NO: 954917 - RNA, 22 nt, Human
caggcgauucuccugccucagc

SEQ ID NO: 954918 - RNA, 21 nt, Human
caggcgccugccaccacaccc

SEQ ID NO: 954919 - RNA, 23 nt, Human
caggcgccugccaccacacccgg

SEQ ID NO: 954920 - RNA, 25 nt, Human
caggugugugccaccaugccuggcu

SEQ ID NO: 954921 - RNA, 19 nt, Human
cagugcugggauuacaggc

SEQ ID NO: 954922 - RNA, 25 nt, Human
cagugcugggauuacaggcgugagc

SEQ ID NO: 954923 - RNA, 27 nt, Human
caucauguuggccaggcuggucuugaa

SEQ ID NO: 954924 - RNA, 23 nt, Human
cauguuggccaggcaggucuuga

SEQ ID NO: 954925 - RNA, 18 nt, Human
cauguuggccaggcuggu

SEQ ID NO: 954926 - RNA, 20 nt, Human
cauguuggccaggcuggucu

SEQ ID NO: 954927 - RNA, 20 nt, Human
cauguuggccaggcuggucu

SEQ ID NO: 954928 - RNA, 24 nt, Human
cauguuggccaggcuggucuugaa

SEQ ID NO: 954929 - RNA, 20 nt, Human
ccaaaaugcugggauuacag

SEQ ID NO: 954930 - RNA, 21 nt, Human
ccaaaaugcugggauuacagg

SEQ ID NO: 954931 - RNA, 21 nt, Human
ccaaaaugcugggauuacagg

SEQ ID NO: 954932 - RNA, 24 nt, Human
ccaaaaugcugggauuacaggugu

SEQ ID NO: 954933 - RNA, 22 nt, Human
cccaggcuggagugcgguggcg

SEQ ID NO: 954934 - RNA, 23 nt, Human
cccagguucaagcgauucuccug

SEQ ID NO: 954935 - RNA, 19 nt, Human
cccaugggugaggcaggau

SEQ ID NO: 954936 - RNA, 23 nt, Human
ccgcaaccuuugccucccagguu

SEQ ID NO: 954937 - RNA, 24 nt, Human
ccgcaaccuuugccucccagguuc

SEQ ID NO: 954938 - RNA, 24 nt, Human
ccgccuccuggguucaggcgauuc

SEQ ID NO: 954939 - RNA, 23 nt, Human
ccuacuggucagggcccuggaac

SEQ ID NO: 954940 - RNA, 24 nt, Human
ccucccagguucaagcgauucucc

SEQ ID NO: 954941 - RNA, 24 nt, Human
ccucucagugcugggauuacaggc

SEQ ID NO: 954942 - RNA, 18 nt, Human
ccugaccucaagugaucg

SEQ ID NO: 954943 - RNA, 24 nt, Human
ccugccucagccucuugaguagcu

SEQ ID NO: 954944 - RNA, 18 nt, Human
ccuggccucaagugaucc

SEQ ID NO: 954945 - RNA, 24 nt, Human
ccuggccucaagugauccacccac

SEQ ID NO: 954946 - RNA, 24 nt, Human
cgcucugucgcccaggcuggagug

SEQ ID NO: 954947 - RNA, 24 nt, Human
cggaggucucaucauguuggccag

SEQ ID NO: 954948 - RNA, 23 nt, Human
cgugagccaccgugccggcccgu

SEQ ID NO: 954949 - RNA, 21 nt, Human
cgugccggcccgucuuguuuu

SEQ ID NO: 954950 - RNA, 24 nt, Human
cucaagugauccacccaccuuggc

SEQ ID NO: 954951 - RNA, 24 nt, Human
cucacucugucgcccaggcuggag

SEQ ID NO: 954952 - RNA, 24 nt, Human
cucagccucuugaguagcugggau

SEQ ID NO: 954953 - RNA, 23 nt, Human
cuccuggccucaagugauccacc

SEQ ID NO: 954954 - RNA, 27 nt, Human
cuccuggccucaagugauccacccacc

SEQ ID NO: 954955 - RNA, 21 nt, Human
cuccuggguucaggcgauucu

SEQ ID NO: 954956 - RNA, 21 nt, Human
cuccuuguccaggagacuguc

SEQ ID NO: 954957 - RNA, 23 nt, Human
cuccuuguccaggagacugucca

SEQ ID NO: 954958 - RNA, 24 nt, Human
cucgcucugucgcccaggcuggag

SEQ ID NO: 954959 - RNA, 23 nt, Human
cucugucgcccaggcuggagugc

SEQ ID NO: 954960 - RNA, 21 nt, Human
cuugaguagcugggauuucag

SEQ ID NO: 954961 - RNA, 19 nt, Human
gaccucaagugaucggccu

SEQ ID NO: 954962 - RNA, 25 nt, Human
gagacuguccaggugaggagcucag

SEQ ID NO: 954963 - RNA, 18 nt, Human
gagaugggguuucaccau

SEQ ID NO: 954964 - RNA, 24 nt, Human
gagaugggguuucaccauguuggc

SEQ ID NO: 954965 - RNA, 18 nt, Human
gauuacaggcgugagcca

SEQ ID NO: 954966 - RNA, 21 nt, Human
gauuacaggcgugagccaccg

SEQ ID NO: 954967 - RNA, 24 nt, Human
gauuacaggcgugagccaccgugc

SEQ ID NO: 954968 - RNA, 18 nt, Human
gauuacaggugugagcca

SEQ ID NO: 954969 - RNA, 22 nt, Human
gauuacaggugugagccaccgc

SEQ ID NO: 954970 - RNA, 23 nt, Human
gauuacaggugugagccaccgca

SEQ ID NO: 954971 - RNA, 18 nt, Human
gauuacaggugugugcca

SEQ ID NO: 954972 - RNA, 22 nt, Human
gauuacaggugugugccaccau

SEQ ID NO: 954973 - RNA, 20 nt, Human
gauucuccugccucagccuc

SEQ ID NO: 954974 - RNA, 19 nt, Human
gcccaggcuggagugcagu

SEQ ID NO: 954975 - RNA, 23 nt, Human
gcccaggcuggagugcaguggca

SEQ ID NO: 954976 - RNA, 19 nt, Human
gcccaggcuggagugcggu

SEQ ID NO: 954977 - RNA, 20 nt, Human
gcccaggcuggagugcggug

SEQ ID NO: 954978 - RNA, 20 nt, Human
gcccuggaaccacuagacuc

SEQ ID NO: 954979 - RNA, 21 nt, Human
gccggcccgucuuguuuuuuu

SEQ ID NO: 954980 - RNA, 25 nt, Human
gccuccuggguucaggcgauucucc

SEQ ID NO: 954981 - RNA, 22 nt, Human
gcgauucuccugccucagccuc

SEQ ID NO: 954982 - RNA, 18 nt, Human
gcugcugcccaggcuggu

SEQ ID NO: 954983 - RNA, 19 nt, Human
gcuggagugcaguggcacg

SEQ ID NO: 954984 - RNA, 23 nt, Human
gcuggucuugaacuccuggccuc

SEQ ID NO: 954985 - RNA, 26 nt, Human
ggaaacuccuuguccaggagacuguc

SEQ ID NO: 954986 - RNA, 24 nt, Human
ggaggucucaucauguuggccagg

SEQ ID NO: 954987 - RNA, 24 nt, Human
ggcaggucuugaacuccugaccuc

SEQ ID NO: 954988 - RNA, 24 nt, Human
ggccucaagugauccacccaccuu

SEQ ID NO: 954989 - RNA, 24 nt, Human
ggcuggucuugaacuccuggccuc

SEQ ID NO: 954990 - RNA, 22 nt, Human
gggguuucaccauguuggccag

SEQ ID NO: 954991 - RNA, 23 nt, Human
gggguuucaccauguuggccagg

SEQ ID NO: 954992 - RNA, 19 nt, Human
gguccagucagcugugucc

SEQ ID NO: 954993 - RNA, 20 nt, Human
ggucuugaacuccugaccuc

SEQ ID NO: 954994 - RNA, 23 nt, Human
guagagaugggguuucaccaugu

SEQ ID NO: 954995 - RNA, 20 nt, Human
guauuuuuuaguagagaugg

SEQ ID NO: 954996 - RNA, 24 nt, Human
gugauccacccaccuuggccuccc

SEQ ID NO: 954997 - RNA, 23 nt, Human
uaaauaguucuugcugcugccca

SEQ ID NO: 954998 - RNA, 23 nt, Human
uaauuuauguauuuuaguagaga

SEQ ID NO: 954999 - RNA, 25 nt, Human
uaauuuauguauuuuaguagagacg

SEQ ID NO: 955000 - RNA, 25 nt, Human
uaauuuuuguauuuuuuaguagaga

SEQ ID NO: 955001 - RNA, 22 nt, Human
uacaggcgugagccaccgugcc

SEQ ID NO: 955002 - RNA, 22 nt, Human
uacaggugugagccaccgcacc

SEQ ID NO: 955003 - RNA, 22 nt, Human
uacaggugugagccaccgcacc

SEQ ID NO: 955004 - RNA, 23 nt, Human
uacaggugugagccaccgcaccu

SEQ ID NO: 955005 - RNA, 24 nt, Human
uacgauuacaggugugugccacca

SEQ ID NO: 955006 - RNA, 22 nt, Human
uagagaugggguuucaccaugu

SEQ ID NO: 955007 - RNA, 25 nt, Human
uaguagagacggaggucucaucaug

SEQ ID NO: 955008 - RNA, 24 nt, Human
uaguagagaugggguuucaccaug

SEQ ID NO: 955009 - RNA, 26 nt, Human
uaguagagaugggguuucaccauguu

SEQ ID NO: 955010 - RNA, 24 nt, Human
ucaccgcaaccuuugccucccagg

SEQ ID NO: 955011 - RNA, 25 nt, Human
ucaccgcaaccuuugccucccaggu

SEQ ID NO: 955012 - RNA, 24 nt, Human
ucacucugucgcccaggcuggagu

SEQ ID NO: 955013 - RNA, 18 nt, Human
ucacugcaagcuccgccu

SEQ ID NO: 955014 - RNA, 23 nt, Human
ucacugcaagcuccgccuccugg

SEQ ID NO: 955015 - RNA, 24 nt, Human
ucacugcaagcuccgccuccuggg

SEQ ID NO: 955016 - RNA, 26 nt, Human
ucacugcaagcuccgccuccuggguu

SEQ ID NO: 955017 - RNA, 20 nt, Human
ucagcagugaggagggcgga

SEQ ID NO: 955018 - RNA, 20 nt, Human
ucagccucuugaguagcugg

SEQ ID NO: 955019 - RNA, 19 nt, Human
ucaggcgauucuccugccu

SEQ ID NO: 955020 - RNA, 24 nt, Human
ucagugcugggauuacaggcguga

SEQ ID NO: 955021 - RNA, 25 nt, Human
ucaguucaccgcaaccuuugccucc

SEQ ID NO: 955022 - RNA, 23 nt, Human
ucccaaaaugcugggauuacagg

SEQ ID NO: 955023 - RNA, 21 nt, Human
ucccagguucaagcgauucuc

SEQ ID NO: 955024 - RNA, 24 nt, Human
ucccagguucaagcgauucuccug

SEQ ID NO: 955025 - RNA, 19 nt, Human
uccuggguucaggcgauuc

SEQ ID NO: 955026 - RNA, 21 nt, Human
uccuggguucaggcgauucuc

SEQ ID NO: 955027 - RNA, 24 nt, Human
uccuggguucaggcgauucuccug

SEQ ID NO: 955028 - RNA, 24 nt, Human
ucgcccaggcuggagugcaguggc

SEQ ID NO: 955029 - RNA, 24 nt, Human
ucgcccaggcuggagugcgguggc

SEQ ID NO: 955030 - RNA, 24 nt, Human
ucgcucugucgcccaggcuggagu

SEQ ID NO: 955031 - RNA, 22 nt, Human
ucucacucugucgcccaggcug

SEQ ID NO: 955032 - RNA, 23 nt, Human
ucucacucugucgcccaggcugg

SEQ ID NO: 955033 - RNA, 24 nt, Human
ucucacucugucgcccaggcugga

SEQ ID NO: 955034 - RNA, 26 nt, Human
ucucacucugucgcccaggcuggagu

SEQ ID NO: 955035 - RNA, 27 nt, Human
ucucacucugucgcccaggcuggagug

SEQ ID NO: 955036 - RNA, 22 nt, Human
ucucagugcugggauuacaggc

SEQ ID NO: 955037 - RNA, 24 nt, Human
ucucagugcugggauuacaggcgu

SEQ ID NO: 955038 - RNA, 24 nt, Human
ucucaucauguuggccaggcuggu

SEQ ID NO: 955039 - RNA, 24 nt, Human
ucuccugccucagccucuugagua

SEQ ID NO: 955040 - RNA, 19 nt, Human
ucucgcucugucgcccagg

SEQ ID NO: 955041 - RNA, 23 nt, Human
ucucgcucugucgcccaggcugg

SEQ ID NO: 955042 - RNA, 24 nt, Human
ucucgcucugucgcccaggcugga

SEQ ID NO: 955043 - RNA, 20 nt, Human
ucugcaauuuggccugagac

SEQ ID NO: 955044 - RNA, 24 nt, Human
ucugucgcccaggcuggagugcag

SEQ ID NO: 955045 - RNA, 24 nt, Human
ucugucgcccaggcuggagugcgg

SEQ ID NO: 955046 - RNA, 21 nt, Human
ucuugaacuccugaccucaag

SEQ ID NO: 955047 - RNA, 21 nt, Human
ucuugaacuccuggccucaag

SEQ ID NO: 955048 - RNA, 24 nt, Human
ucuugaguagcugggauuucaggc

SEQ ID NO: 955049 - RNA, 21 nt, Human
ucuugcugcugcccaggcugg

SEQ ID NO: 955050 - RNA, 22 nt, Human
ucuugcugcugcccaggcuggu

SEQ ID NO: 955051 - RNA, 23 nt, Human
ucuugcugcugcccaggcuggug

SEQ ID NO: 955052 - RNA, 19 nt, Human
ugaccucaagugaucggcc

SEQ ID NO: 955053 - RNA, 19 nt, Human
ugaccucaagugaucggcc

SEQ ID NO: 955054 - RNA, 21 nt, Human
ugaccucaagugaucggccuc

SEQ ID NO: 955055 - RNA, 22 nt, Human
ugagauggagucucacucuguc

SEQ ID NO: 955056 - RNA, 21 nt, Human
ugaggagggcggaccccauca

SEQ ID NO: 955057 - RNA, 24 nt, Human
ugauccacccaccuuggccuccca

SEQ ID NO: 955058 - RNA, 19 nt, Human
ugcaaugccaccaccaucc

SEQ ID NO: 955059 - RNA, 23 nt, Human
ugccaccaccauccuguggucca

SEQ ID NO: 955060 - RNA, 24 nt, Human
ugccaccaccauccugugguccag

SEQ ID NO: 955061 - RNA, 21 nt, Human
ugccggcccgucuuguuuuuu

SEQ ID NO: 955062 - RNA, 24 nt, Human
ugccucagccucuugaguagcugg

SEQ ID NO: 955063 - RNA, 22 nt, Human
ugcgguggcgcaaucucaguuc

SEQ ID NO: 955064 - RNA, 23 nt, Human
ugcgguggcgcaaucucaguuca

SEQ ID NO: 955065 - RNA, 24 nt, Human
ugcugggauuacaggcgugagcca

SEQ ID NO: 955066 - RNA, 24 nt, Human
ugcugggauuacaggugugagcca

SEQ ID NO: 955067 - RNA, 24 nt, Human
uggagucucacucugucgcccagg

SEQ ID NO: 955068 - RNA, 24 nt, Human
uggagucucgcucugucgcccagg

SEQ ID NO: 955069 - RNA, 23 nt, Human
uggagugcaguggcacgaucucg

SEQ ID NO: 955070 - RNA, 24 nt, Human
uggagugcaguggcacgaucucgg

SEQ ID NO: 955071 - RNA, 18 nt, Human
uggagugcgguggcgcaa

SEQ ID NO: 955072 - RNA, 23 nt, Human
uggagugcgguggcgcaaucuca

SEQ ID NO: 955073 - RNA, 24 nt, Human
uggagugcgguggcgcaaucucag

SEQ ID NO: 955074 - RNA, 24 nt, Human
uggccaggcaggucuugaacuccu

SEQ ID NO: 955075 - RNA, 24 nt, Human
uggccaggcuggucuugaacuccu

SEQ ID NO: 955076 - RNA, 22 nt, Human
uggccucaagugauccacccac

SEQ ID NO: 955077 - RNA, 24 nt, Human
uggcgcaaucucaguucaccgcaa

SEQ ID NO: 955078 - RNA, 18 nt, Human
ugggauuacaggcgugag

SEQ ID NO: 955079 - RNA, 21 nt, Human
ugggauuacaggcgugagcca

SEQ ID NO: 955080 - RNA, 22 nt, Human
ugggauuacaggcgugagccac

SEQ ID NO: 955081 - RNA, 23 nt, Human
ugggauuacaggcgugagccacc

SEQ ID NO: 955082 - RNA, 23 nt, Human
ugggauuacaggcgugagccacc

SEQ ID NO: 955083 - RNA, 24 nt, Human
ugggauuacaggcgugagccaccg

SEQ ID NO: 955084 - RNA, 18 nt, Human
ugggauuacaggugugag

SEQ ID NO: 955085 - RNA, 19 nt, Human
ugggauuacaggugugagc

SEQ ID NO: 955086 - RNA, 21 nt, Human
ugggauuacaggugugagcca

SEQ ID NO: 955087 - RNA, 22 nt, Human
ugggauuacaggugugagccac

SEQ ID NO: 955088 - RNA, 23 nt, Human
ugggauuacaggugugagccacc

SEQ ID NO: 955089 - RNA, 24 nt, Human
ugggauuacaggugugagccaccg

SEQ ID NO: 955090 - RNA, 24 nt, Human
ugggauuucaggcgccugccacca

SEQ ID NO: 955091 - RNA, 18 nt, Human
uggggugcagcacccaug

SEQ ID NO: 955092 - RNA, 24 nt, Human
ugggguuucaccauguuggccagg

SEQ ID NO: 955093 - RNA, 24 nt, Human
uggguucaggcgauucuccugccu

SEQ ID NO: 955094 - RNA, 22 nt, Human
uguccaggugaggagcucagca

SEQ ID NO: 955095 - RNA, 24 nt, Human
uguuuuuuuuuaaagauggagucu

SEQ ID NO: 955096 - RNA, 22 nt, Human
uuaguagagacggaggucucau

SEQ ID NO: 955097 - RNA, 25 nt, Human
uuaguagagacggaggucucaucau

SEQ ID NO: 955098 - RNA, 18 nt, Human
uuaguagagaugggguuu

SEQ ID NO: 955099 - RNA, 22 nt, Human
uuaguagagaugggguuucacc

SEQ ID NO: 955100 - RNA, 24 nt, Human
uuaguagagaugggguuucaccau

SEQ ID NO: 955101 - RNA, 21 nt, Human
uucaagcgauucuccugccuc

SEQ ID NO: 955102 - RNA, 23 nt, Human
uucaagcgauucuccugccucag

SEQ ID NO: 955103 - RNA, 24 nt, Human
uucaagcgauucuccugccucagc

SEQ ID NO: 955104 - RNA, 18 nt, Human
uucaggcgauucuccugc

SEQ ID NO: 955105 - RNA, 21 nt, Human
uucaggcgauucuccugccuc

SEQ ID NO: 955106 - RNA, 23 nt, Human
uucaggcgauucuccugccucag

SEQ ID NO: 955107 - RNA, 23 nt, Human
uucuccugccucagcuacgauua

SEQ ID NO: 955108 - RNA, 21 nt, Human
uucuugcugcugcccaggcug

SEQ ID NO: 955109 - RNA, 24 nt, Human
uuucaccauguuggccaggcaggu

SEQ ID NO: 955110 - RNA, 24 nt, Human
uuuuuaguagagaugggguuucac

SEQ ID NO: 955111 - RNA, 21 nt, Human
uuuuuguauuuuuuaguagag

SEQ ID NO: 955112 - RNA, 23 nt, Human
uuuuuuaguagagaugggguuuc

SEQ ID NO: 955113 - RNA, 23 nt, Human
uuuuuuuuuaaagauggagucuc

SEQ ID NO: 955114 - RNA, 26 nt, Human
uuuuuuuuuuuugagauggagucuca

SEQ ID NO: 955115 - RNA, 22 nt, Human
uuuuuuuuuuuuuugagaugga

SEQ ID NO: 955116 - RNA, 21 nt, Human
uuuuuuuuuuuuuuuuucauu

SEQ ID NO: 955117 - RNA, 18 nt, Human
uuuuuuuuuuuuuuuuug

SEQ ID NO: 955118 - RNA, 23 nt, Human
aaagcggagagcuggucccuguu

SEQ ID NO: 955119 - RNA, 23 nt, Human
acacagcagucucccuggggaau

SEQ ID NO: 955120 - RNA, 21 nt, Human
acacccagcuggaggccagaa

SEQ ID NO: 955121 - RNA, 18 nt, Human
agaaggcaaagagggcag

SEQ ID NO: 955122 - RNA, 22 nt, Human
agccagcugcuccucugcgugu

SEQ ID NO: 955123 - RNA, 22 nt, Human
agcuggucccugucgugacaca

SEQ ID NO: 955124 - RNA, 19 nt, Human
aggcaaagagggcagccag

SEQ ID NO: 955125 - RNA, 20 nt, Human
aggugggaggacuccgggca

SEQ ID NO: 955126 - RNA, 21 nt, Human
augccagggccagggccagga

SEQ ID NO: 955127 - RNA, 18 nt, Human
caaagcggagagcugguc

SEQ ID NO: 955128 - RNA, 19 nt, Human
cagcaagcuggggugcugg

SEQ ID NO: 955129 - RNA, 20 nt, Human
cagcacacagcagucucccu

SEQ ID NO: 955130 - RNA, 19 nt, Human
cagcaggcgggggcggccu

SEQ ID NO: 955131 - RNA, 19 nt, Human
cagcaggcgggggcggccu

SEQ ID NO: 955132 - RNA, 19 nt, Human
caggcgggcagcacacagc

SEQ ID NO: 955133 - RNA, 23 nt, Human
ccagcuggaggccagaaggcaaa

SEQ ID NO: 955134 - RNA, 20 nt, Human
ccagggggcuucgagggggg

SEQ ID NO: 955135 - RNA, 19 nt, Human
ccccccacacccagcugga

SEQ ID NO: 955136 - RNA, 21 nt, Human
ccccgccuugcuccgcccccc

SEQ ID NO: 955137 - RNA, 20 nt, Human
ccgcuccccaccccauccug

SEQ ID NO: 955138 - RNA, 22 nt, Human
ccucccacgagugccaccgcuc

SEQ ID NO: 955139 - RNA, 21 nt, Human
ccucuguauuuggggaguggg

SEQ ID NO: 955140 - RNA, 22 nt, Human
ccugcccggcugcugccugccc

SEQ ID NO: 955141 - RNA, 18 nt, Human
cgaaggcccuugugucca

SEQ ID NO: 955142 - RNA, 19 nt, Human
cgccuugcuccgccccccc

SEQ ID NO: 955143 - RNA, 21 nt, Human
cuaguggugccuggccccaca

SEQ ID NO: 955144 - RNA, 19 nt, Human
cugucccccgccuugcucc

SEQ ID NO: 955145 - RNA, 18 nt, Human
cuuggggucuggucucaa

SEQ ID NO: 955146 - RNA, 23 nt, Human
gagcucagguccuggggaaggag

SEQ ID NO: 955147 - RNA, 18 nt, Human
gauguggggcugggggag

SEQ ID NO: 955148 - RNA, 24 nt, Human
gccaccgcuccccaccccauccug

SEQ ID NO: 955149 - RNA, 19 nt, Human
gccagggccagggccagga

SEQ ID NO: 955150 - RNA, 21 nt, Human
gcugcgggggucgucugcaga

SEQ ID NO: 955151 - RNA, 25 nt, Human
ggaaaugaaagggcugugggaggaa

SEQ ID NO: 955152 - RNA, 21 nt, Human
ggagcaggauggggguggggg

SEQ ID NO: 955153 - RNA, 21 nt, Human
ggcaaagagggcagccagcaa

SEQ ID NO: 955154 - RNA, 19 nt, Human
ggccuuggggccagagcuc

SEQ ID NO: 955155 - RNA, 19 nt, Human
ggcugggcccgaggccgcc

SEQ ID NO: 955156 - RNA, 21 nt, Human
gggaagaggaggccuuggggc

SEQ ID NO: 955157 - RNA, 19 nt, Human
gggaaggaggaugugggcg

SEQ ID NO: 955158 - RNA, 21 nt, Human
gggaaggaggaugugggcggg

SEQ ID NO: 955159 - RNA, 20 nt, Human
gggaaucaguccagggggcu

SEQ ID NO: 955160 - RNA, 22 nt, Human
gggaaucaguccagggggcuuc

SEQ ID NO: 955161 - RNA, 19 nt, Human
gggcagcacacagcagucu

SEQ ID NO: 955162 - RNA, 20 nt, Human
gggcuucgagggggguccga

SEQ ID NO: 955163 - RNA, 25 nt, Human
ggggaaggaggaugugggcgggggu

SEQ ID NO: 955164 - RNA, 18 nt, Human
ggggaggaaaugaaaggg

SEQ ID NO: 955165 - RNA, 21 nt, Human
ggggcugggggagagccagca

SEQ ID NO: 955166 - RNA, 20 nt, Human
ucagguccuggggaaggagg

SEQ ID NO: 955167 - RNA, 18 nt, Human
uccagaggggaugugggg

SEQ ID NO: 955168 - RNA, 24 nt, Human
uccagggggcuucgagggggggaa

SEQ ID NO: 955169 - RNA, 22 nt, Human
ucccacgagugccaccgcuccc

SEQ ID NO: 955170 - RNA, 24 nt, Human
uccccaccccauccuggcuggcuc

SEQ ID NO: 955171 - RNA, 24 nt, Human
uccccggcgagcagguggcugggc

SEQ ID NO: 955172 - RNA, 22 nt, Human
ucccugcccggcugcugccugc

SEQ ID NO: 955173 - RNA, 19 nt, Human
ugagccaggcuaguggugc

SEQ ID NO: 955174 - RNA, 18 nt, Human
ugccuggccccacagugc

SEQ ID NO: 955175 - RNA, 19 nt, Human
ugccugugagucgugggug

SEQ ID NO: 955176 - RNA, 20 nt, Human
ugcuccgcccccccacaccc

SEQ ID NO: 955177 - RNA, 21 nt, Human
ugcugcgggggucgucugcag

SEQ ID NO: 955178 - RNA, 18 nt, Human
uggcuggcuccaaguugc

SEQ ID NO: 955179 - RNA, 20 nt, Human
ugggaggaaugccugugagu

SEQ ID NO: 955180 - RNA, 18 nt, Human
uggggaggaaaugaaagg

SEQ ID NO: 955181 - RNA, 21 nt, Human
uggggccagagcucuugccag

SEQ ID NO: 955182 - RNA, 20 nt, Human
ugggggugggggacuugggg

SEQ ID NO: 955183 - RNA, 19 nt, Human
uugcuccgcccccccacac

SEQ ID NO: 955184 - RNA, 20 nt, Human
uuggggagugggguggggag

SEQ ID NO: 955185 - RNA, 23 nt, Human
aaaagagaaaaaacaaaacaaaa

SEQ ID NO: 955186 - RNA, 18 nt, Human
aaaauuagcugggcgugg

SEQ ID NO: 955187 - RNA, 24 nt, Human
aaacaaaacaaaacaaaacacaaa

SEQ ID NO: 955188 - RNA, 27 nt, Human
aaacaaaacacaaaggccucuccugca

SEQ ID NO: 955189 - RNA, 19 nt, Human
aaaugucuugccugggaga

SEQ ID NO: 955190 - RNA, 23 nt, Human
aacaaaacacaaaggccucuccu

SEQ ID NO: 955191 - RNA, 19 nt, Human
aacauggugaaaccccauc

SEQ ID NO: 955192 - RNA, 20 nt, Human
aacauggugaaaccccaucu

SEQ ID NO: 955193 - RNA, 23 nt, Human
aacauggugaaaccccaucugua

SEQ ID NO: 955194 - RNA, 25 nt, Human
aagagaaaaaacaaaacaaaacaaa

SEQ ID NO: 955195 - RNA, 22 nt, Human
acaaaacaaaacaaaacacaaa

SEQ ID NO: 955196 - RNA, 23 nt, Human
acaaaacaaaacacaaaggccuc

SEQ ID NO: 955197 - RNA, 20 nt, Human
acaccacugcacuccagccu

SEQ ID NO: 955198 - RNA, 24 nt, Human
acaccacugcacuccagccugggc

SEQ ID NO: 955199 - RNA, 23 nt, Human
acaccuauuaucccagcacuuug

SEQ ID NO: 955200 - RNA, 18 nt, Human
acagagugaaacucuguc

SEQ ID NO: 955201 - RNA, 19 nt, Human
acagagugaaacucugucu

SEQ ID NO: 955202 - RNA, 20 nt, Human
acagagugaaacucugucuc

SEQ ID NO: 955203 - RNA, 24 nt, Human
acagagugaaacucugucucaaaa

SEQ ID NO: 955204 - RNA, 24 nt, Human
acauccuggggagggcuccagggc

SEQ ID NO: 955205 - RNA, 22 nt, Human
accacugcacuccagccugggc

SEQ ID NO: 955206 - RNA, 23 nt, Human
acccugaagcauggccgugagac

SEQ ID NO: 955207 - RNA, 20 nt, Human
accuauuaucccagcacuuu

SEQ ID NO: 955208 - RNA, 24 nt, Human
acuccagccugggcgacagaguga

SEQ ID NO: 955209 - RNA, 19 nt, Human
acuccaggcugggugcggu

SEQ ID NO: 955210 - RNA, 24 nt, Human
acugcacuccagccugggcgacag

SEQ ID NO: 955211 - RNA, 26 nt, Human
acugcacuccagccugggcgacagag

SEQ ID NO: 955212 - RNA, 24 nt, Human
acuugaggucaggaguucgagacc

SEQ ID NO: 955213 - RNA, 23 nt, Human
agaaaaaacaaaacaaaacaaaa

SEQ ID NO: 955214 - RNA, 21 nt, Human
agacaaggccguaccagccgu

SEQ ID NO: 955215 - RNA, 24 nt, Human
agacggagcuccccaucagacccg

SEQ ID NO: 955216 - RNA, 18 nt, Human
agagguugcagugagccg

SEQ ID NO: 955217 - RNA, 23 nt, Human
agagguugcagugagccgagauc

SEQ ID NO: 955218 - RNA, 24 nt, Human
agagguugcagugagccgagauca

SEQ ID NO: 955219 - RNA, 18 nt, Human
agagugaaacucugucuc

SEQ ID NO: 955220 - RNA, 22 nt, Human
agccuggccaacauggugaaac

SEQ ID NO: 955221 - RNA, 24 nt, Human
agccuggccaacauggugaaaccc

SEQ ID NO: 955222 - RNA, 22 nt, Human
agccugggcgacagagugaaac

SEQ ID NO: 955223 - RNA, 24 nt, Human
agccugggcgacagagugaaacuc

SEQ ID NO: 955224 - RNA, 24 nt, Human
agcuggggggauggggccccaggu

SEQ ID NO: 955225 - RNA, 21 nt, Human
aggcagagguugcagugagcc

SEQ ID NO: 955226 - RNA, 24 nt, Human
aggcagagguugcagugagccgag

SEQ ID NO: 955227 - RNA, 18 nt, Human
aggcaggagaacugcuug

SEQ ID NO: 955228 - RNA, 21 nt, Human
aggccaaggcggguggaucac

SEQ ID NO: 955229 - RNA, 22 nt, Human
aggcggguggaucacuugaggu

SEQ ID NO: 955230 - RNA, 23 nt, Human
aggcggguggaucacuugagguc

SEQ ID NO: 955231 - RNA, 26 nt, Human
aggcggguggaucacuugaggucagg

SEQ ID NO: 955232 - RNA, 24 nt, Human
aggcugaggcaggagaacugcuug

SEQ ID NO: 955233 - RNA, 25 nt, Human
aggggacuggcucacauccugggga

SEQ ID NO: 955234 - RNA, 22 nt, Human
agggggaguuggggggugaggg

SEQ ID NO: 955235 - RNA, 21 nt, Human
aggggugggguggggguuggg

SEQ ID NO: 955236 - RNA, 22 nt, Human
aggggugggguggggguugggc

SEQ ID NO: 955237 - RNA, 24 nt, Human
aucacaccacugcacuccagccug

SEQ ID NO: 955238 - RNA, 22 nt, Human
aucccagcacuuugggaggcca

SEQ ID NO: 955239 - RNA, 21 nt, Human
auccuggggagggcuccaggg

SEQ ID NO: 955240 - RNA, 21 nt, Human
augaacacggguucuguggcc

SEQ ID NO: 955241 - RNA, 23 nt, Human
caaaacaaaacacaaaggccucu

SEQ ID NO: 955242 - RNA, 21 nt, Human
caacauggugaaaccccaucu

SEQ ID NO: 955243 - RNA, 22 nt, Human
caacauggugaaaccccaucug

SEQ ID NO: 955244 - RNA, 23 nt, Human
caacuguaaucccagcuauuugg

SEQ ID NO: 955245 - RNA, 24 nt, Human
caacuguaaucccagcuauuuggg

SEQ ID NO: 955246 - RNA, 24 nt, Human
caaggcggguggaucacuugaggu

SEQ ID NO: 955247 - RNA, 26 nt, Human
caaggcggguggaucacuugagguca

SEQ ID NO: 955248 - RNA, 21 nt, Human
cacaccacugcacuccagccu

SEQ ID NO: 955249 - RNA, 23 nt, Human
caccaaccagcgcaggcugaagc

SEQ ID NO: 955250 - RNA, 26 nt, Human
caccacugcacuccagccugggcgac

SEQ ID NO: 955251 - RNA, 20 nt, Human
caccauggccgccuccgggc

SEQ ID NO: 955252 - RNA, 22 nt, Human
cacuccagccugggcgacagag

SEQ ID NO: 955253 - RNA, 22 nt, Human
cacuccagccugggcgacagag

SEQ ID NO: 955254 - RNA, 24 nt, Human
cacuccagccugggcgacagagug

SEQ ID NO: 955255 - RNA, 19 nt, Human
cacugcacuccagccuggg

SEQ ID NO: 955256 - RNA, 20 nt, Human
cacugcacuccagccugggc

SEQ ID NO: 955257 - RNA, 22 nt, Human
cacugcacuccagccugggcga

SEQ ID NO: 955258 - RNA, 23 nt, Human
cacugcacuccagccugggcgac

SEQ ID NO: 955259 - RNA, 24 nt, Human
cacugcacuccagccugggcgaca

SEQ ID NO: 955260 - RNA, 25 nt, Human
cacugcacuccagccugggcgacaa

SEQ ID NO: 955261 - RNA, 23 nt, Human
cacuugaggucaggaguucgaga

SEQ ID NO: 955262 - RNA, 23 nt, Human
cagcaacagcauccuggggguga

SEQ ID NO: 955263 - RNA, 22 nt, Human
cagcacuuugggaggccaaggc

SEQ ID NO: 955264 - RNA, 24 nt, Human
cagcacuuugggaggccaaggcgg

SEQ ID NO: 955265 - RNA, 23 nt, Human
cagcgaggggacuggcucacauc

SEQ ID NO: 955266 - RNA, 24 nt, Human
cagcuauuugggaggcugaggcag

SEQ ID NO: 955267 - RNA, 19 nt, Human
caggaaugaaggggaggag

SEQ ID NO: 955268 - RNA, 18 nt, Human
caggaccugaagacccug

SEQ ID NO: 955269 - RNA, 21 nt, Human
caggccucgagaccugaagag

SEQ ID NO: 955270 - RNA, 23 nt, Human
ccaccaccggcuuccaccauccc

SEQ ID NO: 955271 - RNA, 20 nt, Human
ccacugcacuccagccuggg

SEQ ID NO: 955272 - RNA, 21 nt, Human
ccacugcacuccagccugggc

SEQ ID NO: 955273 - RNA, 21 nt, Human
ccacugcacuccagccugggc

SEQ ID NO: 955274 - RNA, 21 nt, Human
ccacugcacuccagccugggc

SEQ ID NO: 955275 - RNA, 23 nt, Human
ccacugcacuccagccugggcga

SEQ ID NO: 955276 - RNA, 24 nt, Human
ccacugcacuccagccugggcgac

SEQ ID NO: 955277 - RNA, 23 nt, Human
ccaggcugggugcgguggcugac

SEQ ID NO: 955278 - RNA, 18 nt, Human
ccagggggaguugggggg

SEQ ID NO: 955279 - RNA, 22 nt, Human
ccauggccgccuccgggcaccc

SEQ ID NO: 955280 - RNA, 21 nt, Human
cccaaccguugugaauggugc

SEQ ID NO: 955281 - RNA, 24 nt, Human
cccgaccuggccuggguccccgac

SEQ ID NO: 955282 - RNA, 23 nt, Human
ccgggcacccagcggcauuccgu

SEQ ID NO: 955283 - RNA, 19 nt, Human
ccguccaucgagacaccau

SEQ ID NO: 955284 - RNA, 20 nt, Human
ccuccgggcacccagcggca

SEQ ID NO: 955285 - RNA, 20 nt, Human
ccucuuggcagacuggccgg

SEQ ID NO: 955286 - RNA, 22 nt, Human
ccucuuggcagacuggccgggg

SEQ ID NO: 955287 - RNA, 24 nt, Human
ccugcagggcuccggcugcuggga

SEQ ID NO: 955288 - RNA, 23 nt, Human
ccugcugccaccugucccccgga

SEQ ID NO: 955289 - RNA, 23 nt, Human
ccuggccaacauggugaaacccc

SEQ ID NO: 955290 - RNA, 24 nt, Human
ccuggccaacauggugaaacccca

SEQ ID NO: 955291 - RNA, 20 nt, Human
ccugggcgacagagugaaac

SEQ ID NO: 955292 - RNA, 21 nt, Human
ccugggggugaacgggugggg

SEQ ID NO: 955293 - RNA, 23 nt, Human
ccugggguguccaaaguuguggu

SEQ ID NO: 955294 - RNA, 21 nt, Human
cgaccugcugccaccuguccc

SEQ ID NO: 955295 - RNA, 24 nt, Human
cgagaccagccuggccaacauggu

SEQ ID NO: 955296 - RNA, 19 nt, Human
cgaggggccacacacggcg

SEQ ID NO: 955297 - RNA, 20 nt, Human
cgggaccagggguagcagca

SEQ ID NO: 955298 - RNA, 24 nt, Human
cgggaggcagagguugcagugagc

SEQ ID NO: 955299 - RNA, 24 nt, Human
cggguggaucacuugaggucagga

SEQ ID NO: 955300 - RNA, 24 nt, Human
cucaaaagagaaaaaacaaaacaa

SEQ ID NO: 955301 - RNA, 22 nt, Human
cuccugcagggcuccggcugcu

SEQ ID NO: 955302 - RNA, 23 nt, Human
cugaagcauggccgugagaccca

SEQ ID NO: 955303 - RNA, 19 nt, Human
cugccaccugucccccgga

SEQ ID NO: 955304 - RNA, 23 nt, Human
cuggccaacauggugaaacccca

SEQ ID NO: 955305 - RNA, 20 nt, Human
cuguaaucccagcuauuugg

SEQ ID NO: 955306 - RNA, 24 nt, Human
cugugaaaaugucuugccugggag

SEQ ID NO: 955307 - RNA, 23 nt, Human
cugugcucccgaccuggccuggg

SEQ ID NO: 955308 - RNA, 19 nt, Human
gaagcuggccccgacgccu

SEQ ID NO: 955309 - RNA, 21 nt, Human
gacagagugaaacucugucuc

SEQ ID NO: 955310 - RNA, 24 nt, Human
gacagagugaaacucugucucaaa

SEQ ID NO: 955311 - RNA, 25 nt, Human
gaccugcugccaccuguccccuuuc

SEQ ID NO: 955312 - RNA, 20 nt, Human
gaccuggccuggguccccga

SEQ ID NO: 955313 - RNA, 23 nt, Human
gagaucacaccacugcacuccag

SEQ ID NO: 955314 - RNA, 19 nt, Human
gaggacgggagggcggccc

SEQ ID NO: 955315 - RNA, 18 nt, Human
gaggcagggaggguggcc

SEQ ID NO: 955316 - RNA, 20 nt, Human
gagguggugggcgguggggg

SEQ ID NO: 955317 - RNA, 24 nt, Human
gaucacuugaggucaggaguucga

SEQ ID NO: 955318 - RNA, 20 nt, Human
gauggcggggacagcgagga

SEQ ID NO: 955319 - RNA, 23 nt, Human
gcacuccagccugggcgacagag

SEQ ID NO: 955320 - RNA, 20 nt, Human
gcaggcaacuguaaucccag

SEQ ID NO: 955321 - RNA, 22 nt, Human
gccaacauggugaaaccccauc

SEQ ID NO: 955322 - RNA, 21 nt, Human
gccaccaccggcuuccaccau

SEQ ID NO: 955323 - RNA, 20 nt, Human
gccgagaucacaccacugca

SEQ ID NO: 955324 - RNA, 25 nt, Human
gccugggguguccaaaguugugguc

SEQ ID NO: 955325 - RNA, 23 nt, Human
gcgacagagugaaacucugucuc

SEQ ID NO: 955326 - RNA, 22 nt, Human
gcucugaccucagcgccagcag

SEQ ID NO: 955327 - RNA, 18 nt, Human
gcugacaccuauuauccc

SEQ ID NO: 955328 - RNA, 22 nt, Human
ggagaacugcuugaacacggga

SEQ ID NO: 955329 - RNA, 20 nt, Human
ggagagguguuccaggggga

SEQ ID NO: 955330 - RNA, 21 nt, Human
ggagcaagagggcguccugug

SEQ ID NO: 955331 - RNA, 18 nt, Human
ggagcggcugugcucccg

SEQ ID NO: 955332 - RNA, 23 nt, Human
ggagcuccccaucagacccgcuc

SEQ ID NO: 955333 - RNA, 18 nt, Human
ggaggagguggugggcgg

SEQ ID NO: 955334 - RNA, 21 nt, Human
ggagggcuccagggcagcagg

SEQ ID NO: 955335 - RNA, 22 nt, Human
ggaucacuugaggucaggaguu

SEQ ID NO: 955336 - RNA, 22 nt, Human
ggccccagguacucccagcccu

SEQ ID NO: 955337 - RNA, 21 nt, Human
ggcccuggcaggaggggggcg

SEQ ID NO: 955338 - RNA, 19 nt, Human
ggcugaagccugcagccgc

SEQ ID NO: 955339 - RNA, 20 nt, Human
gggaguuggggggugagggg

SEQ ID NO: 955340 - RNA, 19 nt, Human
gggccacacacggcggggg

SEQ ID NO: 955341 - RNA, 22 nt, Human
ggggacagcgaggacucagccg

SEQ ID NO: 955342 - RNA, 21 nt, Human
ggggaggagguggugggcggu

SEQ ID NO: 955343 - RNA, 18 nt, Human
ggggagggggcgaggcug

SEQ ID NO: 955344 - RNA, 22 nt, Human
gggggagggguggggugggggu

SEQ ID NO: 955345 - RNA, 18 nt, Human
ggggugaacgggugggga

SEQ ID NO: 955346 - RNA, 24 nt, Human
ggguugggccugccaggugagauu

SEQ ID NO: 955347 - RNA, 19 nt, Human
ggugagauuuugucugcau

SEQ ID NO: 955348 - RNA, 21 nt, Human
gguggaucacuugaggucagg

SEQ ID NO: 955349 - RNA, 19 nt, Human
gugcaguggacggcgggug

SEQ ID NO: 955350 - RNA, 18 nt, Human
guggaaagacagccugcc

SEQ ID NO: 955351 - RNA, 19 nt, Human
guggggagggggcgaggcu

SEQ ID NO: 955352 - RNA, 19 nt, Human
guugcagugagccgagauc

SEQ ID NO: 955353 - RNA, 24 nt, Human
uaaggcacagauuugacggguccc

SEQ ID NO: 955354 - RNA, 22 nt, Human
ucaaaagagaaaaaacaaaaca

SEQ ID NO: 955355 - RNA, 23 nt, Human
ucacaccacugcacuccagccug

SEQ ID NO: 955356 - RNA, 20 nt, Human
ucacuugaggucaggaguuc

SEQ ID NO: 955357 - RNA, 24 nt, Human
ucagacccgcucugaccucagcgc

SEQ ID NO: 955358 - RNA, 20 nt, Human
ucagugcaggcgagaggcug

SEQ ID NO: 955359 - RNA, 23 nt, Human
uccaccaucccagcuggggggau

SEQ ID NO: 955360 - RNA, 22 nt, Human
uccagccugggcgacagaguga

SEQ ID NO: 955361 - RNA, 24 nt, Human
uccaggcugggugcgguggcugac

SEQ ID NO: 955362 - RNA, 18 nt, Human
uccagggggaguuggggg

SEQ ID NO: 955363 - RNA, 21 nt, Human
ucccagcuggggggauggggc

SEQ ID NO: 955364 - RNA, 20 nt, Human
ucucaaaagagaaaaaacaa

SEQ ID NO: 955365 - RNA, 19 nt, Human
ugaaaccccaucuguacua

SEQ ID NO: 955366 - RNA, 22 nt, Human
ugaacacggguucuguggcccu

SEQ ID NO: 955367 - RNA, 21 nt, Human
ugaaggggaggaggugguggg

SEQ ID NO: 955368 - RNA, 25 nt, Human
ugagggauccgggcgcgagcgcagc

SEQ ID NO: 955369 - RNA, 18 nt, Human
ugcaggcgagaggcuggg

SEQ ID NO: 955370 - RNA, 22 nt, Human
ugcaucagugcaggcgagaggc

SEQ ID NO: 955371 - RNA, 21 nt, Human
ugccagggaucccuguuuugg

SEQ ID NO: 955372 - RNA, 21 nt, Human
ugcuggggagugcuugugagg

SEQ ID NO: 955373 - RNA, 19 nt, Human
uggacggcagaggccaagg

SEQ ID NO: 955374 - RNA, 24 nt, Human
uggaucacuugaggucaggaguuc

SEQ ID NO: 955375 - RNA, 27 nt, Human
uggaucacuugaggucaggaguucgag

SEQ ID NO: 955376 - RNA, 20 nt, Human
uggcagacuggccgggggca

SEQ ID NO: 955377 - RNA, 21 nt, Human
uggcagacuggccgggggcag

SEQ ID NO: 955378 - RNA, 18 nt, Human
uggcaggaggggggcggu

SEQ ID NO: 955379 - RNA, 20 nt, Human
uggcaggaggggggcggucc

SEQ ID NO: 955380 - RNA, 20 nt, Human
uggcaggaggggggcggucc

SEQ ID NO: 955381 - RNA, 24 nt, Human
uggccaacauggugaaaccccauc

SEQ ID NO: 955382 - RNA, 21 nt, Human
uggcggggacagcgaggacuc

SEQ ID NO: 955383 - RNA, 23 nt, Human
uggcggggacagcgaggacuccu

SEQ ID NO: 955384 - RNA, 22 nt, Human
uggcugacaccuauuaucccag

SEQ ID NO: 955385 - RNA, 24 nt, Human
ugggaggccaaggcggguggauca

SEQ ID NO: 955386 - RNA, 18 nt, Human
ugggaggcugaggcagga

SEQ ID NO: 955387 - RNA, 19 nt, Human
ugggaggcugaggcaggag

SEQ ID NO: 955388 - RNA, 20 nt, Human
uggggagggggcgaggcugg

SEQ ID NO: 955389 - RNA, 24 nt, Human
uggggagggggcgaggcuggagcc

SEQ ID NO: 955390 - RNA, 19 nt, Human
ugggguggggguugggccu

SEQ ID NO: 955391 - RNA, 23 nt, Human
uggguccccgacucugaacucag

SEQ ID NO: 955392 - RNA, 18 nt, Human
uggugggcggugggggca

SEQ ID NO: 955393 - RNA, 19 nt, Human
uggugggcggugggggcag

SEQ ID NO: 955394 - RNA, 18 nt, Human
uuagcugggcgugguggc

SEQ ID NO: 955395 - RNA, 18 nt, Human
uugcagugagccgagauc

SEQ ID NO: 955396 - RNA, 19 nt, Human
uugcagugagccgagauca

SEQ ID NO: 955397 - RNA, 20 nt, Human
uugcagugagccgagaucac

SEQ ID NO: 955398 - RNA, 19 nt, Human
uuuuuuuuuuuuuuucuaa

SEQ ID NO: 955399 - RNA, 22 nt, Human
aaaacaaaacaaaacuaaagcc

SEQ ID NO: 955400 - RNA, 19 nt, Human
aaaagaugagccugccccu

SEQ ID NO: 955401 - RNA, 23 nt, Human
aaacaaaacaaaacuaaagccag

SEQ ID NO: 955402 - RNA, 19 nt, Human
aaacagggagcagcagcgg

SEQ ID NO: 955403 - RNA, 22 nt, Human
aaaguucugggguaggggagag

SEQ ID NO: 955404 - RNA, 22 nt, Human
aacagccccacgggccuaaaac

SEQ ID NO: 955405 - RNA, 24 nt, Human
aacagcucaggcaagcuucuggug

SEQ ID NO: 955406 - RNA, 23 nt, Human
aacccacuccccuucaggccccg

SEQ ID NO: 955407 - RNA, 21 nt, Human
aagagugcuaaguacuguuac

SEQ ID NO: 955408 - RNA, 18 nt, Human
acaaaacaaaacuaaagc

SEQ ID NO: 955409 - RNA, 18 nt, Human
acaaaacuaaagccagag

SEQ ID NO: 955410 - RNA, 21 nt, Human
acaaagaaaagccacauagga

SEQ ID NO: 955411 - RNA, 21 nt, Human
acacaucuagcaccacaagag

SEQ ID NO: 955412 - RNA, 25 nt, Human
acagaacagccccacgggccuaaaa

SEQ ID NO: 955413 - RNA, 21 nt, Human
acauauacauauauauauaua

SEQ ID NO: 955414 - RNA, 19 nt, Human
acaucagggaacagaugag

SEQ ID NO: 955415 - RNA, 21 nt, Human
acccacccucccacccaccac

SEQ ID NO: 955416 - RNA, 22 nt, Human
acccacccucccacccaccacc

SEQ ID NO: 955417 - RNA, 20 nt, Human
acccugccuaaccugaaauc

SEQ ID NO: 955418 - RNA, 23 nt, Human
accugggcccuccuucacccgac

SEQ ID NO: 955419 - RNA, 22 nt, Human
acucugguccuuuguacaaagu

SEQ ID NO: 955420 - RNA, 22 nt, Human
agaacagccccacgggccuaaa

SEQ ID NO: 955421 - RNA, 25 nt, Human
agacugaaaguagaaacaggggacc

SEQ ID NO: 955422 - RNA, 22 nt, Human
agagauagacagaccaugggca

SEQ ID NO: 955423 - RNA, 19 nt, Human
agagcagaaucugaaaggu

SEQ ID NO: 955424 - RNA, 21 nt, Human
agaggaagggaaagggaagaa

SEQ ID NO: 955425 - RNA, 25 nt, Human
agaggggcucaagggggcucugggg

SEQ ID NO: 955426 - RNA, 20 nt, Human
agaugccaccuggcacaugg

SEQ ID NO: 955427 - RNA, 23 nt, Human
aggaggcagagggacauaggcag

SEQ ID NO: 955428 - RNA, 28 nt, Human
aggaggcagagggacauaggcagagggg

SEQ ID NO: 955429 - RNA, 20 nt, Human
aggcagaggggcucaagggg

SEQ ID NO: 955430 - RNA, 22 nt, Human
aggcagaggggcucaagggggc

SEQ ID NO: 955431 - RNA, 23 nt, Human
agggaagaagggccuagaccuag

SEQ ID NO: 955432 - RNA, 21 nt, Human
agggaagggggaacccugcuu

SEQ ID NO: 955433 - RNA, 23 nt, Human
agggaagggggaacccugcuugg

SEQ ID NO: 955434 - RNA, 23 nt, Human
agggacauaggcagaggggcuca

SEQ ID NO: 955435 - RNA, 19 nt, Human
aggggcagguggagggugg

SEQ ID NO: 955436 - RNA, 20 nt, Human
aggggcucaagggggcucug

SEQ ID NO: 955437 - RNA, 19 nt, Human
agguaccagggacugugac

SEQ ID NO: 955438 - RNA, 18 nt, Human
agguauuggguuccaagc

SEQ ID NO: 955439 - RNA, 19 nt, Human
aguuaccaaagacagacac

SEQ ID NO: 955440 - RNA, 21 nt, Human
aguucugggguaggggagagg

SEQ ID NO: 955441 - RNA, 22 nt, Human
auauacauauauauauauauau

SEQ ID NO: 955442 - RNA, 23 nt, Human
caaaacaaaacuaaagccagaga

SEQ ID NO: 955443 - RNA, 20 nt, Human
caaaacuaaagccagagagc

SEQ ID NO: 955444 - RNA, 22 nt, Human
caaaacuaaagccagagagccu

SEQ ID NO: 955445 - RNA, 33 nt, Human
caaaacuaaagccagagagccuccccuccccuu

SEQ ID NO: 955446 - RNA, 19 nt, Human
caaagcaggucacugggac

SEQ ID NO: 955447 - RNA, 22 nt, Human
caagggaagauugcacagggaa

SEQ ID NO: 955448 - RNA, 21 nt, Human
cacagcuagagccucuaccag

SEQ ID NO: 955449 - RNA, 22 nt, Human
cacccucccacccaccaccaag

SEQ ID NO: 955450 - RNA, 20 nt, Human
caccugguaggcguggcugg

SEQ ID NO: 955451 - RNA, 18 nt, Human
cacugcuuggaacagaac

SEQ ID NO: 955452 - RNA, 25 nt, Human
cacugcuuggaacagaacagcccca

SEQ ID NO: 955453 - RNA, 22 nt, Human
cagaacagccccacgggccuaa

SEQ ID NO: 955454 - RNA, 23 nt, Human
cagagagccuccccucccacccu

SEQ ID NO: 955455 - RNA, 19 nt, Human
cagagggacauaggcagag

SEQ ID NO: 955456 - RNA, 19 nt, Human
cagaguagccaaguggggu

SEQ ID NO: 955457 - RNA, 23 nt, Human
cagaucaaacucucaggcccaag

SEQ ID NO: 955458 - RNA, 18 nt, Human
cagcaacugggggcaugg

SEQ ID NO: 955459 - RNA, 18 nt, Human
cagcagcggcaccaggag

SEQ ID NO: 955460 - RNA, 22 nt, Human
cagccagaccuuccccagggac

SEQ ID NO: 955461 - RNA, 22 nt, Human
cagccaggacugggccugugcu

SEQ ID NO: 955462 - RNA, 25 nt, Human
cagccuuggggaagacaaagaaaag

SEQ ID NO: 955463 - RNA, 18 nt, Human
cagcuagagccucuacca

SEQ ID NO: 955464 - RNA, 20 nt, Human
cagcucaggcaagcuucugg

SEQ ID NO: 955465 - RNA, 18 nt, Human
cagcugagugccaagagc

SEQ ID NO: 955466 - RNA, 21 nt, Human
caggaagagaauuuccagagg

SEQ ID NO: 955467 - RNA, 19 nt, Human
cagggaccaaucauuacug

SEQ ID NO: 955468 - RNA, 21 nt, Human
cagggguaaggcccagcuccc

SEQ ID NO: 955469 - RNA, 19 nt, Human
cagguggagggugggggug

SEQ ID NO: 955470 - RNA, 20 nt, Human
cauauacauauauauauaua

SEQ ID NO: 955471 - RNA, 24 nt, Human
cauauacauauauauauauauaua

SEQ ID NO: 955472 - RNA, 20 nt, Human
caucagggaacagaugaggg

SEQ ID NO: 955473 - RNA, 22 nt, Human
ccaaagacagacacauuggcuc

SEQ ID NO: 955474 - RNA, 21 nt, Human
ccacaagagaccuccacugca

SEQ ID NO: 955475 - RNA, 21 nt, Human
ccagagagccuccccucccac

SEQ ID NO: 955476 - RNA, 22 nt, Human
ccagagagccuccccucccacc

SEQ ID NO: 955477 - RNA, 23 nt, Human
ccaggccagaguagccaaguggg

SEQ ID NO: 955478 - RNA, 19 nt, Human
cccaagcagacucauccuu

SEQ ID NO: 955479 - RNA, 22 nt, Human
cccacagcugagugccaagagc

SEQ ID NO: 955480 - RNA, 24 nt, Human
cccaccaccaagagugcuaaguac

SEQ ID NO: 955481 - RNA, 21 nt, Human
cccacccucccacccaccacc

SEQ ID NO: 955482 - RNA, 21 nt, Human
cccacccugccuaaccugaaa

SEQ ID NO: 955483 - RNA, 21 nt, Human
cccagcugugugccccuccua

SEQ ID NO: 955484 - RNA, 18 nt, Human
ccccacgggccuaaaacc

SEQ ID NO: 955485 - RNA, 22 nt, Human
ccccagaacugaccugggcccu

SEQ ID NO: 955486 - RNA, 19 nt, Human
ccccagcugugugccccuc

SEQ ID NO: 955487 - RNA, 21 nt, Human
ccccaucagcuuccuugaacu

SEQ ID NO: 955488 - RNA, 23 nt, Human
ccccugggggucagguacccagg

SEQ ID NO: 955489 - RNA, 24 nt, Human
ccccugggggucagguacccaggu

SEQ ID NO: 955490 - RNA, 22 nt, Human
cccucccacccaccaccaagag

SEQ ID NO: 955491 - RNA, 19 nt, Human
cccugccugccuucuccuc

SEQ ID NO: 955492 - RNA, 22 nt, Human
cccuggccuguacccacccucc

SEQ ID NO: 955493 - RNA, 22 nt, Human
cccuucaggccccgcacacagc

SEQ ID NO: 955494 - RNA, 19 nt, Human
ccgcacgggacagcuccac

SEQ ID NO: 955495 - RNA, 25 nt, Human
ccuaaaaccacucuccugaaagugg

SEQ ID NO: 955496 - RNA, 19 nt, Human
ccucucacugggcccugcc

SEQ ID NO: 955497 - RNA, 19 nt, Human
ccugccuaaccugaaaucc

SEQ ID NO: 955498 - RNA, 19 nt, Human
ccugccuucuccucugacc

SEQ ID NO: 955499 - RNA, 24 nt, Human
ccugccuucuccucugaccuuccc

SEQ ID NO: 955500 - RNA, 22 nt, Human
ccuggccuguacccacccuccc

SEQ ID NO: 955501 - RNA, 22 nt, Human
ccugggccagggucagaggggc

SEQ ID NO: 955502 - RNA, 22 nt, Human
ccuguacccacccucccaccca

SEQ ID NO: 955503 - RNA, 18 nt, Human
ccuguaggcagaagggag

SEQ ID NO: 955504 - RNA, 21 nt, Human
ccugucccaauggccccagcc

SEQ ID NO: 955505 - RNA, 27 nt, Human
ccugugaccaagagcaagccggggucc

SEQ ID NO: 955506 - RNA, 23 nt, Human
ccuucacccgaccccaggccaga

SEQ ID NO: 955507 - RNA, 22 nt, Human
cgaccccaggccagaccuuccu

SEQ ID NO: 955508 - RNA, 19 nt, Human
cuaaagccagagagccucc

SEQ ID NO: 955509 - RNA, 18 nt, Human
cuagagccucuaccagcc

SEQ ID NO: 955510 - RNA, 24 nt, Human
cuccgugccuagcccucugagccc

SEQ ID NO: 955511 - RNA, 25 nt, Human
cucucacugggcccugccugccuuc

SEQ ID NO: 955512 - RNA, 19 nt, Human
cucugcacccccagcugug

SEQ ID NO: 955513 - RNA, 19 nt, Human
cugaaaggugggggcuggg

SEQ ID NO: 955514 - RNA, 18 nt, Human
cugaaaucccauucaggc

SEQ ID NO: 955515 - RNA, 23 nt, Human
cugaagccaggccagaguagcca

SEQ ID NO: 955516 - RNA, 20 nt, Human
cugagcccuguccuaccaga

SEQ ID NO: 955517 - RNA, 18 nt, Human
cugcccagcaugucccag

SEQ ID NO: 955518 - RNA, 24 nt, Human
cuggccccgugaggggucccuggg

SEQ ID NO: 955519 - RNA, 24 nt, Human
cugguccuuuguacaaaguaggac

SEQ ID NO: 955520 - RNA, 21 nt, Human
cugugugccccuccuacauca

SEQ ID NO: 955521 - RNA, 23 nt, Human
cugugugccccuccuacaucagg

SEQ ID NO: 955522 - RNA, 21 nt, Human
cuucccaggaagacugaaagu

SEQ ID NO: 955523 - RNA, 22 nt, Human
cuuccuacaaagaugaaugugu

SEQ ID NO: 955524 - RNA, 18 nt, Human
cuugggcccugaguucaa

SEQ ID NO: 955525 - RNA, 21 nt, Human
cuuucugcuaugccuccccug

SEQ ID NO: 955526 - RNA, 21 nt, Human
gaacagcuacugcuuccagga

SEQ ID NO: 955527 - RNA, 21 nt, Human
gaacauccagcuccagaaaca

SEQ ID NO: 955528 - RNA, 22 nt, Human
gaagacaaagaaaagccacaua

SEQ ID NO: 955529 - RNA, 20 nt, Human
gaaggagaaaagggaagggg

SEQ ID NO: 955530 - RNA, 18 nt, Human
gacacauuggcucaggca

SEQ ID NO: 955531 - RNA, 25 nt, Human
gagcaagggaauaucccuggccugu

SEQ ID NO: 955532 - RNA, 20 nt, Human
gagcagaaucugaaaggugg

SEQ ID NO: 955533 - RNA, 21 nt, Human
gagcagcagcggcaccaggag

SEQ ID NO: 955534 - RNA, 18 nt, Human
gaggaggcugaaggaggc

SEQ ID NO: 955535 - RNA, 21 nt, Human
gaggcagagggacauaggcag

SEQ ID NO: 955536 - RNA, 20 nt, Human
gaggggcagguggagggugg

SEQ ID NO: 955537 - RNA, 23 nt, Human
gaucaaacucucaggcccaagca

SEQ ID NO: 955538 - RNA, 23 nt, Human
gcaaagcaggucacugggacccc

SEQ ID NO: 955539 - RNA, 18 nt, Human
gccuagcccucugagccc

SEQ ID NO: 955540 - RNA, 19 nt, Human
gcuaggcagggagcuggau

SEQ ID NO: 955541 - RNA, 19 nt, Human
ggaaaugggcagaugcucu

SEQ ID NO: 955542 - RNA, 19 nt, Human
ggaaggagaaaagggaagg

SEQ ID NO: 955543 - RNA, 21 nt, Human
ggaaggagaaaagggaagggg

SEQ ID NO: 955544 - RNA, 26 nt, Human
ggagaugcagcaucccagggccugaa

SEQ ID NO: 955545 - RNA, 23 nt, Human
ggaggaggaggcugaaggaggcg

SEQ ID NO: 955546 - RNA, 20 nt, Human
ggagggugggggugggggcu

SEQ ID NO: 955547 - RNA, 26 nt, Human
ggcaggggagagaaaagaugagcccc

SEQ ID NO: 955548 - RNA, 19 nt, Human
ggcagguggaggguggggg

SEQ ID NO: 955549 - RNA, 21 nt, Human
ggcucuggggagagaaggagg

SEQ ID NO: 955550 - RNA, 23 nt, Human
gggaaggagaaaagggaaggggg

SEQ ID NO: 955551 - RNA, 18 nt, Human
gggcagguggaggguggg

SEQ ID NO: 955552 - RNA, 22 nt, Human
gggcugguuuagcucuaaacac

SEQ ID NO: 955553 - RNA, 23 nt, Human
gggguaaggcccagcuccccauc

SEQ ID NO: 955554 - RNA, 19 nt, Human
gggguaggggagaggaagg

SEQ ID NO: 955555 - RNA, 20 nt, Human
ggggugggggcugguuuagc

SEQ ID NO: 955556 - RNA, 24 nt, Human
gguacagacauauacauauauaua

SEQ ID NO: 955557 - RNA, 18 nt, Human
gguaggggagaggaaggg

SEQ ID NO: 955558 - RNA, 21 nt, Human
guggagggugggggugggggc

SEQ ID NO: 955559 - RNA, 23 nt, Human
uaaacacacaucuagcaccacaa

SEQ ID NO: 955560 - RNA, 19 nt, Human
uaccagccauguucucaca

SEQ ID NO: 955561 - RNA, 23 nt, Human
uacccacccucccacccaccacc

SEQ ID NO: 955562 - RNA, 18 nt, Human
uacccaggugggcucugc

SEQ ID NO: 955563 - RNA, 20 nt, Human
uaccuaaaugccucacugug

SEQ ID NO: 955564 - RNA, 24 nt, Human
uagauuuggggaucugggcucagu

SEQ ID NO: 955565 - RNA, 19 nt, Human
uauacauauauauauauau

SEQ ID NO: 955566 - RNA, 22 nt, Human
uauacauauauauauauauaua

SEQ ID NO: 955567 - RNA, 20 nt, Human
ucacccgaccccaggccaga

SEQ ID NO: 955568 - RNA, 22 nt, Human
ucaccgagagauaccuaaaugc

SEQ ID NO: 955569 - RNA, 24 nt, Human
ucacugggaccccagaacugaccu

SEQ ID NO: 955570 - RNA, 21 nt, Human
ucaggcuauugugcuugcagc

SEQ ID NO: 955571 - RNA, 21 nt, Human
ucagggaaggcaguaaggcag

SEQ ID NO: 955572 - RNA, 26 nt, Human
ucagguacccaggugggcucugcacc

SEQ ID NO: 955573 - RNA, 20 nt, Human
ucauaacccuaggaaggggc

SEQ ID NO: 955574 - RNA, 21 nt, Human
uccaagcugaagccaggccag

SEQ ID NO: 955575 - RNA, 18 nt, Human
ucccacccaccaccaaga

SEQ ID NO: 955576 - RNA, 21 nt, Human
ucccacccugccuaaccugaa

SEQ ID NO: 955577 - RNA, 20 nt, Human
ucccagggccugaacaagcu

SEQ ID NO: 955578 - RNA, 20 nt, Human
ucccugggccagggucagag

SEQ ID NO: 955579 - RNA, 18 nt, Human
ucucaggcccaagcagac

SEQ ID NO: 955580 - RNA, 20 nt, Human
ucugcuccagcugugccuuu

SEQ ID NO: 955581 - RNA, 21 nt, Human
ucuuugggcgagaacccacuc

SEQ ID NO: 955582 - RNA, 18 nt, Human
ugaccaagagcaagccag

SEQ ID NO: 955583 - RNA, 26 nt, Human
ugagcccccugucccaauggccccag

SEQ ID NO: 955584 - RNA, 24 nt, Human
ugagggaggaggaggcugaaggag

SEQ ID NO: 955585 - RNA, 22 nt, Human
ugcacccccagcugugugcccc

SEQ ID NO: 955586 - RNA, 26 nt, Human
ugccuaaccugaaaucccauucaggc

SEQ ID NO: 955587 - RNA, 23 nt, Human
ugccucacugugcuggagccagc

SEQ ID NO: 955588 - RNA, 24 nt, Human
ugcucccaagagagaaaaugggag

SEQ ID NO: 955589 - RNA, 19 nt, Human
uggaaaacaaaacaaaacu

SEQ ID NO: 955590 - RNA, 26 nt, Human
uggaaaacaaaacaaaacuaaagcca

SEQ ID NO: 955591 - RNA, 20 nt, Human
uggaacagaacagccccacg

SEQ ID NO: 955592 - RNA, 18 nt, Human
uggagggugggggugggg

SEQ ID NO: 955593 - RNA, 19 nt, Human
uggaggguggggguggggg

SEQ ID NO: 955594 - RNA, 21 nt, Human
uggagggugggggugggggcu

SEQ ID NO: 955595 - RNA, 19 nt, Human
uggauuuuuguccaaacag

SEQ ID NO: 955596 - RNA, 18 nt, Human
uggccccgugaggggucc

SEQ ID NO: 955597 - RNA, 23 nt, Human
ugggacacucagccuuggggaag

SEQ ID NO: 955598 - RNA, 21 nt, Human
ugggaccccagaacugaccug

SEQ ID NO: 955599 - RNA, 22 nt, Human
ugggcccugaguucaagugccc

SEQ ID NO: 955600 - RNA, 23 nt, Human
uggggaacauccagcuccagaaa

SEQ ID NO: 955601 - RNA, 21 nt, Human
ugggggucagguacccaggug

SEQ ID NO: 955602 - RNA, 19 nt, Human
ugggguaggggagaggaag

SEQ ID NO: 955603 - RNA, 18 nt, Human
ugugaccauugcucccaa

SEQ ID NO: 955604 - RNA, 19 nt, Human
ugugcccaaaccuaaagga

SEQ ID NO: 955605 - RNA, 22 nt, Human
ugugugccccuccuacaucagg

SEQ ID NO: 955606 - RNA, 22 nt, Human
uucugggguaggggagaggaag

SEQ ID NO: 955607 - RNA, 21 nt, Human
uugccuggagaugcagcaucc

SEQ ID NO: 955608 - RNA, 18 nt, Human
uuggggaucugggcucag

SEQ ID NO: 955609 - RNA, 23 nt, Human
uuucacagggccaaauguucccc

SEQ ID NO: 955610 - RNA, 22 nt, Human
uuuggaaaacaaaacaaaacua

SEQ ID NO: 955611 - RNA, 22 nt, Human
uuugggcgagaacccacucccc

SEQ ID NO: 955612 - RNA, 25 nt, Human
uuuuuuuuuuuuuuuuucacagggg

SEQ ID NO: 955613 - RNA, 22 nt, Human
aagcgccugcggcagccggaag

SEQ ID NO: 955614 - RNA, 20 nt, Human
accugcaccagcgaagcgcc

SEQ ID NO: 955615 - RNA, 20 nt, Human
aggcucaggcccccgggccc

SEQ ID NO: 955616 - RNA, 26 nt, Human
cacugcgucugcaccagcgaagcgcc

SEQ ID NO: 955617 - RNA, 18 nt, Human
cagcacugcgucugcacc

SEQ ID NO: 955618 - RNA, 21 nt, Human
caggcucaggcccccgggccc

SEQ ID NO: 955619 - RNA, 19 nt, Human
ccaguccgcacagagcgcc

SEQ ID NO: 955620 - RNA, 19 nt, Human
cccccgggcccgaucaugg

SEQ ID NO: 955621 - RNA, 21 nt, Human
ccccgggcccgaucauggccc

SEQ ID NO: 955622 - RNA, 22 nt, Human
cccggcccuggccgcccgcagc

SEQ ID NO: 955623 - RNA, 26 nt, Human
cgccugcggcagccggaagcgaaagu

SEQ ID NO: 955624 - RNA, 25 nt, Human
cgggguggggucccaggcucaggcc

SEQ ID NO: 955625 - RNA, 18 nt, Human
gagcucgcgucacccuug

SEQ ID NO: 955626 - RNA, 18 nt, Human
gccgcccgcagcuccacc

SEQ ID NO: 955627 - RNA, 21 nt, Human
gcgaagcgccugcggcagccg

SEQ ID NO: 955628 - RNA, 21 nt, Human
gcggggguggggugagcaggg

SEQ ID NO: 955629 - RNA, 19 nt, Human
gucccaggcucaggccccc

SEQ ID NO: 955630 - RNA, 20 nt, Human
gucccaggcucaggcccccg

SEQ ID NO: 955631 - RNA, 23 nt, Human
ucccaggcucaggcccccgggcc

SEQ ID NO: 955632 - RNA, 22 nt, Human
uccgcacagagcgcccggcccu

SEQ ID NO: 955633 - RNA, 22 nt, Human
uggggucccaggcucaggcccc

SEQ ID NO: 955634 - RNA, 24 nt, Human
uuuuuggcgcugccaaaacucauu

SEQ ID NO: 955635 - RNA, 18 nt, Human
uuuuuuuuuuuuuuuuug

SEQ ID NO: 955636 - RNA, 18 nt, Human
uuuuuuuuuuuuuuuuug

SEQ ID NO: 955637 - RNA, 23 nt, Human
uuuuuuuuuuuuuuuuuggcgcu

SEQ ID NO: 955638 - RNA, 24 nt, Human
uuuuuuuuuuuuuuuuuggcgcug

SEQ ID NO: 955639 - RNA, 22 nt, Human
uuuuuuuuuuuuuuuuuuuggc

SEQ ID NO: 955640 - RNA, 28 nt, Human
uuuuuuuuuuuuuuuuuuuuuuuggggg

SEQ ID NO: 955641 - RNA, 27 nt, Human
aaaaaaaaaaaaggcauucuuacccag

SEQ ID NO: 955642 - RNA, 20 nt, Human
aaaaaaaaaaaauuaaacuc

SEQ ID NO: 955643 - RNA, 22 nt, Human
aaaaaaaaaaauuaaacucuuc

SEQ ID NO: 955644 - RNA, 23 nt, Human
aaaaaaaaaagaaaaaaacaaag

SEQ ID NO: 955645 - RNA, 22 nt, Human
aaaaaaaagaaaaaaacaaaga

SEQ ID NO: 955646 - RNA, 24 nt, Human
aaaaaaacaaagacuacacauugg

SEQ ID NO: 955647 - RNA, 18 nt, Human
aaaagaaaaaaacaaaga

SEQ ID NO: 955648 - RNA, 20 nt, Human
aaaauccagcgugaccucau

SEQ ID NO: 955649 - RNA, 20 nt, Human
aaaauccagcgugaccucau

SEQ ID NO: 955650 - RNA, 20 nt, Human
aaaauccagcgugaccucau

SEQ ID NO: 955651 - RNA, 20 nt, Human
aaaauccagcgugaccucau

SEQ ID NO: 955652 - RNA, 19 nt, Human
aacagagccaggacaauaa

SEQ ID NO: 955653 - RNA, 19 nt, Human
aacauuucuuuuuuuuuuu

SEQ ID NO: 955654 - RNA, 21 nt, Human
aaccucuucaucaccucacug

SEQ ID NO: 955655 - RNA, 23 nt, Human
aacuugaaaaaggucuggaguag

SEQ ID NO: 955656 - RNA, 18 nt, Human
aagaagagagccuuccug

SEQ ID NO: 955657 - RNA, 21 nt, Human
aagaagcccgagcccaggucc

SEQ ID NO: 955658 - RNA, 22 nt, Human
aagaagcccgagcccagguccc

SEQ ID NO: 955659 - RNA, 26 nt, Human
aagaagcccgagcccaggucccaaac

SEQ ID NO: 955660 - RNA, 19 nt, Human
aagcugagagaauacggac

SEQ ID NO: 955661 - RNA, 24 nt, Human
aaggccuggggaccaagccuccag

SEQ ID NO: 955662 - RNA, 22 nt, Human
aaguagagaugaaauuaacuca

SEQ ID NO: 955663 - RNA, 22 nt, Human
aagucacagcagucagaaucuu

SEQ ID NO: 955664 - RNA, 18 nt, Human
aaguggucuuugugagcc

SEQ ID NO: 955665 - RNA, 24 nt, Human
aaucacuugaacccgggaggcaga

SEQ ID NO: 955666 - RNA, 23 nt, Human
aaugcaguggcaugaucacagcu

SEQ ID NO: 955667 - RNA, 23 nt, Human
acaauaucaaaaaaaagcagcaa

SEQ ID NO: 955668 - RNA, 22 nt, Human
acagaacagccuuuccuccccc

SEQ ID NO: 955669 - RNA, 24 nt, Human
acagcagucuaucaaauuuggguu

SEQ ID NO: 955670 - RNA, 18 nt, Human
acagcucacugcggccuc

SEQ ID NO: 955671 - RNA, 21 nt, Human
acauagggaaaaagaaaaaaa

SEQ ID NO: 955672 - RNA, 24 nt, Human
accacuccacuccagccuggguga

SEQ ID NO: 955673 - RNA, 18 nt, Human
accccaucuggcugggga

SEQ ID NO: 955674 - RNA, 20 nt, Human
accuccacuuaccuuggcau

SEQ ID NO: 955675 - RNA, 18 nt, Human
acuccacuccagccuggg

SEQ ID NO: 955676 - RNA, 24 nt, Human
acuccacuccagccugggugauag

SEQ ID NO: 955677 - RNA, 18 nt, Human
acuccagccugggugaua

SEQ ID NO: 955678 - RNA, 24 nt, Human
acuccugggcucaagugauucucc

SEQ ID NO: 955679 - RNA, 24 nt, Human
acucugucgcccaggcucaaaaaa

SEQ ID NO: 955680 - RNA, 25 nt, Human
acucugucgcccaggcuggaaugca

SEQ ID NO: 955681 - RNA, 25 nt, Human
acucugucgcccaggcuggagugca

SEQ ID NO: 955682 - RNA, 24 nt, Human
agaacuuuuccaugcaaccaaaca

SEQ ID NO: 955683 - RNA, 22 nt, Human
agaaucacuugaacccgggagg

SEQ ID NO: 955684 - RNA, 21 nt, Human
agagagccuuccugucccagc

SEQ ID NO: 955685 - RNA, 19 nt, Human
agaggagcuugaagcugag

SEQ ID NO: 955686 - RNA, 20 nt, Human
agaggagcuugaagcugaga

SEQ ID NO: 955687 - RNA, 24 nt, Human
agauauuuuacuuuagcucgugcu

SEQ ID NO: 955688 - RNA, 20 nt, Human
agauguugcagugagucaag

SEQ ID NO: 955689 - RNA, 22 nt, Human
agcaaacuaggcuuuaccuucu

SEQ ID NO: 955690 - RNA, 20 nt, Human
agcagagcaagagccucaaa

SEQ ID NO: 955691 - RNA, 24 nt, Human
agcccagcaggcuugaggugaaga

SEQ ID NO: 955692 - RNA, 21 nt, Human
agccgaaucaccaggugucac

SEQ ID NO: 955693 - RNA, 24 nt, Human
agccugggugauagaaugagacuc

SEQ ID NO: 955694 - RNA, 19 nt, Human
aggaauucccagagccaca

SEQ ID NO: 955695 - RNA, 19 nt, Human
aggaauucccagagccaca

SEQ ID NO: 955696 - RNA, 21 nt, Human
aggagucaagggcuagugacc

SEQ ID NO: 955697 - RNA, 24 nt, Human
aggcagauguugcagugagucaag

SEQ ID NO: 955698 - RNA, 23 nt, Human
aggcaggaagggagacuccuugg

SEQ ID NO: 955699 - RNA, 18 nt, Human
aggcaggagaaucacuug

SEQ ID NO: 955700 - RNA, 24 nt, Human
aggcaggagaaucacuugaacccg

SEQ ID NO: 955701 - RNA, 20 nt, Human
aggccucugagaauucccag

SEQ ID NO: 955702 - RNA, 24 nt, Human
aggcugaggcaggagaaucacuug

SEQ ID NO: 955703 - RNA, 25 nt, Human
aggcuggagugcaguggcacaaucu

SEQ ID NO: 955704 - RNA, 19 nt, Human
agggaggcauuagaguaca

SEQ ID NO: 955705 - RNA, 21 nt, Human
agguccauugugggggagagu

SEQ ID NO: 955706 - RNA, 21 nt, Human
aggucccaaacacggcuauuc

SEQ ID NO: 955707 - RNA, 18 nt, Human
agguguuagaaagugccc

SEQ ID NO: 955708 - RNA, 19 nt, Human
aguagcugggacuacaggc

SEQ ID NO: 955709 - RNA, 19 nt, Human
aguagcugggacuacaggc

SEQ ID NO: 955710 - RNA, 23 nt, Human
agugauucuccugccccagccuc

SEQ ID NO: 955711 - RNA, 21 nt, Human
agugcaguggcacaaucucag

SEQ ID NO: 955712 - RNA, 23 nt, Human
aguggucuuugugagccacccug

SEQ ID NO: 955713 - RNA, 22 nt, Human
auagaaugagacucagucucaa

SEQ ID NO: 955714 - RNA, 24 nt, Human
auagaaugagacucagucucaaaa

SEQ ID NO: 955715 - RNA, 24 nt, Human
aucauaccacuccacuccagccug

SEQ ID NO: 955716 - RNA, 18 nt, Human
aucuggcaaaauauaaga

SEQ ID NO: 955717 - RNA, 22 nt, Human
aucuuagaacuuccacuuagga

SEQ ID NO: 955718 - RNA, 24 nt, Human
augccuccuaggagauauacacag

SEQ ID NO: 955719 - RNA, 22 nt, Human
auuggguuucauuauugacaau

SEQ ID NO: 955720 - RNA, 18 nt, Human
caaagcucuucacuuuuc

SEQ ID NO: 955721 - RNA, 28 nt, Human
caacuccugggcucaagugauucuccuu

SEQ ID NO: 955722 - RNA, 20 nt, Human
caagugauucuccugcccca

SEQ ID NO: 955723 - RNA, 23 nt, Human
cacagaacagccuuuccuccccc

SEQ ID NO: 955724 - RNA, 23 nt, Human
cacagcagucagaaucuucuguu

SEQ ID NO: 955725 - RNA, 22 nt, Human
caccccugcucuucucugcagg

SEQ ID NO: 955726 - RNA, 22 nt, Human
caccccugcucuucucugcagg

SEQ ID NO: 955727 - RNA, 22 nt, Human
caccccugcucuucucugcagg

SEQ ID NO: 955728 - RNA, 20 nt, Human
caccugcacuggacguuuuc

SEQ ID NO: 955729 - RNA, 22 nt, Human
cacuccacuccagccuggguga

SEQ ID NO: 955730 - RNA, 18 nt, Human
cacuccagccugggugau

SEQ ID NO: 955731 - RNA, 22 nt, Human
cacuccagccugggugauagaa

SEQ ID NO: 955732 - RNA, 24 nt, Human
cacuccagccugggugauagaaug

SEQ ID NO: 955733 - RNA, 23 nt, Human
cacuccugccaccuucucauccu

SEQ ID NO: 955734 - RNA, 18 nt, Human
cacucuaaagcucaaacc

SEQ ID NO: 955735 - RNA, 18 nt, Human
cacucugucgcccaggcu

SEQ ID NO: 955736 - RNA, 19 nt, Human
cacucugucgcccaggcuc

SEQ ID NO: 955737 - RNA, 24 nt, Human
cacucugucgcccaggcuggaaug

SEQ ID NO: 955738 - RNA, 24 nt, Human
cacucugucgcccaggcuggagug

SEQ ID NO: 955739 - RNA, 23 nt, Human
cacugagcagucuuucacacucu

SEQ ID NO: 955740 - RNA, 23 nt, Human
cacugagcagucuuucacacucu

SEQ ID NO: 955741 - RNA, 23 nt, Human
cacugagcagucuuucacacucu

SEQ ID NO: 955742 - RNA, 23 nt, Human
cacugagcagucuuucacacucu

SEQ ID NO: 955743 - RNA, 22 nt, Human
cagaaaaacagcagucuaucaa

SEQ ID NO: 955744 - RNA, 21 nt, Human
cagaaaucaccacugaagaac

SEQ ID NO: 955745 - RNA, 21 nt, Human
cagaacagccuuuccuccccc

SEQ ID NO: 955746 - RNA, 21 nt, Human
cagagccaggacaauaaucac

SEQ ID NO: 955747 - RNA, 21 nt, Human
cagcaaucuuuaagaguucaa

SEQ ID NO: 955748 - RNA, 20 nt, Human
cagcauugugaccccaucug

SEQ ID NO: 955749 - RNA, 24 nt, Human
cagcgacucaggaggcugaggcag

SEQ ID NO: 955750 - RNA, 24 nt, Human
caggaggcugaggcaggagaauca

SEQ ID NO: 955751 - RNA, 22 nt, Human
cagggcugggggaagaaaaggg

SEQ ID NO: 955752 - RNA, 21 nt, Human
cagguucuggaucccuccaug

SEQ ID NO: 955753 - RNA, 21 nt, Human
cagguucuggaucccuccaug

SEQ ID NO: 955754 - RNA, 21 nt, Human
cagguucuggaucccuccaug

SEQ ID NO: 955755 - RNA, 21 nt, Human
cagguucuggaucccuccaug

SEQ ID NO: 955756 - RNA, 21 nt, Human
cagguucuggaucccuccaug

SEQ ID NO: 955757 - RNA, 23 nt, Human
caucuuagaacuuccacuuagga

SEQ ID NO: 955758 - RNA, 22 nt, Human
ccaaagaaggccuccuaccacc

SEQ ID NO: 955759 - RNA, 20 nt, Human
ccacuccacuccagccuggg

SEQ ID NO: 955760 - RNA, 21 nt, Human
ccacuccacuccagccugggu

SEQ ID NO: 955761 - RNA, 21 nt, Human
ccacuccacuccagccugggu

SEQ ID NO: 955762 - RNA, 23 nt, Human
ccacuccacuccagccuggguga

SEQ ID NO: 955763 - RNA, 24 nt, Human
ccacuccacuccagccugggugau

SEQ ID NO: 955764 - RNA, 18 nt, Human
ccagacccaaauuaguca

SEQ ID NO: 955765 - RNA, 18 nt, Human
ccagagccacaucaggca

SEQ ID NO: 955766 - RNA, 18 nt, Human
ccagagccacaucaggca

SEQ ID NO: 955767 - RNA, 18 nt, Human
ccagagccacaucaggca

SEQ ID NO: 955768 - RNA, 24 nt, Human
ccagagccacaucaggcagggcug

SEQ ID NO: 955769 - RNA, 23 nt, Human
cccaaagaaggccuccuaccacc

SEQ ID NO: 955770 - RNA, 24 nt, Human
cccacaggacugcgucgcucccac

SEQ ID NO: 955771 - RNA, 24 nt, Human
cccagcaggcuugaggugaagaag

SEQ ID NO: 955772 - RNA, 24 nt, Human
cccagcgacucaggaggcugaggc

SEQ ID NO: 955773 - RNA, 24 nt, Human
cccaggcucaaaaaaaaaaaaaaa

SEQ ID NO: 955774 - RNA, 25 nt, Human
cccaggcucaaaaaaaaaaaaaaaa

SEQ ID NO: 955775 - RNA, 23 nt, Human
cccaggcuggaaugcaguggcau

SEQ ID NO: 955776 - RNA, 25 nt, Human
ccccaaacacuacugaaauaaaagu

SEQ ID NO: 955777 - RNA, 24 nt, Human
cccgaguagcugggacuacaggcu

SEQ ID NO: 955778 - RNA, 24 nt, Human
ccuccacuauuucauuaccauccc

SEQ ID NO: 955779 - RNA, 20 nt, Human
ccuccaggauuccucuugag

SEQ ID NO: 955780 - RNA, 23 nt, Human
ccuccaggauuccucuugagacu

SEQ ID NO: 955781 - RNA, 18 nt, Human
ccuccagggccugccacu

SEQ ID NO: 955782 - RNA, 23 nt, Human
ccuccagggccugccacuccagc

SEQ ID NO: 955783 - RNA, 20 nt, Human
ccuccugggagcugcucacu

SEQ ID NO: 955784 - RNA, 20 nt, Human
ccuccugggagcugcucacu

SEQ ID NO: 955785 - RNA, 20 nt, Human
ccuccugggagcugcucacu

SEQ ID NO: 955786 - RNA, 18 nt, Human
ccucugagaauucccaga

SEQ ID NO: 955787 - RNA, 19 nt, Human
ccucuucaucaccucacug

SEQ ID NO: 955788 - RNA, 23 nt, Human
ccugccccagccucccgaguagc

SEQ ID NO: 955789 - RNA, 24 nt, Human
ccugccccagccucccgaguagcu

SEQ ID NO: 955790 - RNA, 20 nt, Human
ccuggccaccccugcucuuc

SEQ ID NO: 955791 - RNA, 20 nt, Human
ccuggccaccccugcucuuc

SEQ ID NO: 955792 - RNA, 23 nt, Human
ccugggcucaagugauucuccuc

SEQ ID NO: 955793 - RNA, 23 nt, Human
ccugggcucaagugauucuccug

SEQ ID NO: 955794 - RNA, 22 nt, Human
ccugggugauagaaugagacuc

SEQ ID NO: 955795 - RNA, 21 nt, Human
ccuguaagcaaucacagauuc

SEQ ID NO: 955796 - RNA, 23 nt, Human
ccuuccugucccagcccuguugc

SEQ ID NO: 955797 - RNA, 22 nt, Human
ccuugaugcucuucaacagaga

SEQ ID NO: 955798 - RNA, 21 nt, Human
cgacucaggaggcugaggcag

SEQ ID NO: 955799 - RNA, 18 nt, Human
cgcaagaagcccgagccc

SEQ ID NO: 955800 - RNA, 24 nt, Human
cgccacgaugcccggcuuauaggg

SEQ ID NO: 955801 - RNA, 21 nt, Human
cggaguuuuucguggauccag

SEQ ID NO: 955802 - RNA, 24 nt, Human
cgggaggcagauguugcagugagu

SEQ ID NO: 955803 - RNA, 18 nt, Human
cucaaaaaaaaaaaaaaa

SEQ ID NO: 955804 - RNA, 23 nt, Human
cucaaaaaaaaaaaaaaagaaaa

SEQ ID NO: 955805 - RNA, 24 nt, Human
cucaaaaaaaaaaaaaaagaaaaa

SEQ ID NO: 955806 - RNA, 24 nt, Human
cucaagugauucuccugccccagc

SEQ ID NO: 955807 - RNA, 22 nt, Human
cucacuaucuccuggccacccc

SEQ ID NO: 955808 - RNA, 22 nt, Human
cucacuaucuccuggccacccc

SEQ ID NO: 955809 - RNA, 24 nt, Human
cucacucugucgcccaggcuggag

SEQ ID NO: 955810 - RNA, 21 nt, Human
cucacugcggccuccaacucc

SEQ ID NO: 955811 - RNA, 24 nt, Human
cucacugcggccuccaacuccugg

SEQ ID NO: 955812 - RNA, 24 nt, Human
cucagucucaaaaaaaaaaaaaaa

SEQ ID NO: 955813 - RNA, 19 nt, Human
cuccagggccugccacucc

SEQ ID NO: 955814 - RNA, 19 nt, Human
cuccugggagcugcucacu

SEQ ID NO: 955815 - RNA, 19 nt, Human
cuccugggagcugcucacu

SEQ ID NO: 955816 - RNA, 19 nt, Human
cuccugggagcugcucacu

SEQ ID NO: 955817 - RNA, 20 nt, Human
cuccugggcucaagugauuc

SEQ ID NO: 955818 - RNA, 21 nt, Human
cuccugggcucaagugauucu

SEQ ID NO: 955819 - RNA, 23 nt, Human
cuccugggcucaagugauucucc

SEQ ID NO: 955820 - RNA, 19 nt, Human
cugaaggcaggaagggaga

SEQ ID NO: 955821 - RNA, 23 nt, Human
cugagcagucuuucacacucucu

SEQ ID NO: 955822 - RNA, 23 nt, Human
cugagcagucuuucacacucucu

SEQ ID NO: 955823 - RNA, 23 nt, Human
cugagcagucuuucacacucucu

SEQ ID NO: 955824 - RNA, 23 nt, Human
cugagcagucuuucacacucucu

SEQ ID NO: 955825 - RNA, 18 nt, Human
cugcugaguuauuucuag

SEQ ID NO: 955826 - RNA, 20 nt, Human
cugcugaguuauuucuaggu

SEQ ID NO: 955827 - RNA, 20 nt, Human
cugcugaguuauuucuaggu

SEQ ID NO: 955828 - RNA, 20 nt, Human
cugcugaguuauuucuaggu

SEQ ID NO: 955829 - RNA, 20 nt, Human
cugcugaguuauuucuaggu

SEQ ID NO: 955830 - RNA, 20 nt, Human
cugcugaguuauuucuaggu

SEQ ID NO: 955831 - RNA, 19 nt, Human
cuggccaccccugcucuuc

SEQ ID NO: 955832 - RNA, 19 nt, Human
cuggccaccccugcucuuc

SEQ ID NO: 955833 - RNA, 25 nt, Human
cuggugggguggcaguuccggaagu

SEQ ID NO: 955834 - RNA, 25 nt, Human
cuguggagucacuggugggguggca

SEQ ID NO: 955835 - RNA, 23 nt, Human
cuuccugucccagcccuguugca

SEQ ID NO: 955836 - RNA, 18 nt, Human
gaaaaaaaaaaaaaggca

SEQ ID NO: 955837 - RNA, 24 nt, Human
gaaacaaaugacuggaucuuuaac

SEQ ID NO: 955838 - RNA, 22 nt, Human
gaaauucuagagucagagacau

SEQ ID NO: 955839 - RNA, 18 nt, Human
gaacccgggaggcagaug

SEQ ID NO: 955840 - RNA, 22 nt, Human
gaagaaaagggaggcauuagag

SEQ ID NO: 955841 - RNA, 22 nt, Human
gaagguuggugaaaaaccaaaa

SEQ ID NO: 955842 - RNA, 20 nt, Human
gacuaugaaaaaaaaaaaaa

SEQ ID NO: 955843 - RNA, 24 nt, Human
gagcagucuuucacacucucuuuu

SEQ ID NO: 955844 - RNA, 24 nt, Human
gagcagucuuucacacucucuuuu

SEQ ID NO: 955845 - RNA, 24 nt, Human
gagcagucuuucacacucucuuuu

SEQ ID NO: 955846 - RNA, 24 nt, Human
gagcagucuuucacacucucuuuu

SEQ ID NO: 955847 - RNA, 24 nt, Human
gaguagcugggacuacaggcuugc

SEQ ID NO: 955848 - RNA, 23 nt, Human
gcaggagaaucacuugaacccgg

SEQ ID NO: 955849 - RNA, 23 nt, Human
gcccaggcuggaaugcaguggca

SEQ ID NO: 955850 - RNA, 19 nt, Human
gcccaggcuggagugcagu

SEQ ID NO: 955851 - RNA, 23 nt, Human
gcccaggcuggagugcaguggca

SEQ ID NO: 955852 - RNA, 24 nt, Human
gccccaagacucaacagggcaucc

SEQ ID NO: 955853 - RNA, 21 nt, Human
gccuccugggagcugcucacu

SEQ ID NO: 955854 - RNA, 23 nt, Human
gcucacuaucuccuggccacccc

SEQ ID NO: 955855 - RNA, 23 nt, Human
gcucacuaucuccuggccacccc

SEQ ID NO: 955856 - RNA, 19 nt, Human
gcuggaaugcaguggcaug

SEQ ID NO: 955857 - RNA, 19 nt, Human
gcuggagugcaguggcaca

SEQ ID NO: 955858 - RNA, 19 nt, Human
gcugggacuacaggcuugc

SEQ ID NO: 955859 - RNA, 19 nt, Human
gcugggggaagaaaaggga

SEQ ID NO: 955860 - RNA, 23 nt, Human
ggaagaaaagggaggcauuagag

SEQ ID NO: 955861 - RNA, 18 nt, Human
ggaauucccagagccaca

SEQ ID NO: 955862 - RNA, 18 nt, Human
ggaauucccagagccaca

SEQ ID NO: 955863 - RNA, 23 nt, Human
ggacgcaagaagcccgagcccag

SEQ ID NO: 955864 - RNA, 21 nt, Human
ggagaucuucauuccaaagcu

SEQ ID NO: 955865 - RNA, 21 nt, Human
ggagucacuggugggguggca

SEQ ID NO: 955866 - RNA, 21 nt, Human
ggaguuuuucguggauccagg

SEQ ID NO: 955867 - RNA, 19 nt, Human
ggaucccuccaugccuccu

SEQ ID NO: 955868 - RNA, 19 nt, Human
ggaucccuccaugccuccu

SEQ ID NO: 955869 - RNA, 19 nt, Human
ggaucccuccaugccuccu

SEQ ID NO: 955870 - RNA, 19 nt, Human
ggaucccuccaugccuccu

SEQ ID NO: 955871 - RNA, 19 nt, Human
ggaucccuccaugccuccu

SEQ ID NO: 955872 - RNA, 18 nt, Human
ggauuggaaaauccagcg

SEQ ID NO: 955873 - RNA, 18 nt, Human
ggauuggaaaauccagcg

SEQ ID NO: 955874 - RNA, 18 nt, Human
ggauuggaaaauccagcg

SEQ ID NO: 955875 - RNA, 18 nt, Human
ggauuggaaaauccagcg

SEQ ID NO: 955876 - RNA, 22 nt, Human
gggaaaaagaaaaaaaauucaa

SEQ ID NO: 955877 - RNA, 19 nt, Human
gggcacuuuagauggaaac

SEQ ID NO: 955878 - RNA, 22 nt, Human
gggcucaagugauucuccugcc

SEQ ID NO: 955879 - RNA, 18 nt, Human
gucacuggugggguggca

SEQ ID NO: 955880 - RNA, 21 nt, Human
gucucaaaaaaaaaaaaaaag

SEQ ID NO: 955881 - RNA, 22 nt, Human
gugaauacuacagaaacuccau

SEQ ID NO: 955882 - RNA, 24 nt, Human
gugauucuccugccccagccuccc

SEQ ID NO: 955883 - RNA, 20 nt, Human
guguaggugcuccuggcuuu

SEQ ID NO: 955884 - RNA, 22 nt, Human
guugaaaaguagaggagcuuga

SEQ ID NO: 955885 - RNA, 20 nt, Human
guugccacugggauuccacc

SEQ ID NO: 955886 - RNA, 22 nt, Human
uaaaaaagacuacccuugggug

SEQ ID NO: 955887 - RNA, 19 nt, Human
uaaagagcagagcaagagc

SEQ ID NO: 955888 - RNA, 20 nt, Human
uaacagaucuggcaaaauau

SEQ ID NO: 955889 - RNA, 21 nt, Human
uaagacgucuuuacugacuga

SEQ ID NO: 955890 - RNA, 18 nt, Human
uacaaaguuaacucuagu

SEQ ID NO: 955891 - RNA, 25 nt, Human
uagcccagcaggcuugaggugaaga

SEQ ID NO: 955892 - RNA, 19 nt, Human
uagggaaaaagaaaaaaaa

SEQ ID NO: 955893 - RNA, 20 nt, Human
uagggcacuuuagauggaaa

SEQ ID NO: 955894 - RNA, 21 nt, Human
uauaccuccacuuaccuuggc

SEQ ID NO: 955895 - RNA, 18 nt, Human
uaucaaaaaaaagcagca

SEQ ID NO: 955896 - RNA, 19 nt, Human
uaucaaaaaaaagcagcaa

SEQ ID NO: 955897 - RNA, 24 nt, Human
uaucaaaaaaaagcagcaaucuuu

SEQ ID NO: 955898 - RNA, 21 nt, Human
uaugaaaaaaaaaaaaaggca

SEQ ID NO: 955899 - RNA, 22 nt, Human
uauugaguucaauccucacacc

SEQ ID NO: 955900 - RNA, 19 nt, Human
ucaaaaaaaaaaaaaaaga

SEQ ID NO: 955901 - RNA, 18 nt, Human
ucaacagggcauccaucu

SEQ ID NO: 955902 - RNA, 19 nt, Human
ucaagcaauauuugaggac

SEQ ID NO: 955903 - RNA, 23 nt, Human
ucaaggcguauguaaucuucccu

SEQ ID NO: 955904 - RNA, 23 nt, Human
ucacacucucuuuuucuccagaa

SEQ ID NO: 955905 - RNA, 23 nt, Human
ucacacucucuuuuucuccagaa

SEQ ID NO: 955906 - RNA, 23 nt, Human
ucacacucucuuuuucuccagaa

SEQ ID NO: 955907 - RNA, 23 nt, Human
ucacacucucuuuuucuccagaa

SEQ ID NO: 955908 - RNA, 24 nt, Human
ucacucugucgcccaggcuggagu

SEQ ID NO: 955909 - RNA, 24 nt, Human
ucacugcggccuccaacuccuggg

SEQ ID NO: 955910 - RNA, 19 nt, Human
ucagaaaucaccacugaag

SEQ ID NO: 955911 - RNA, 23 nt, Human
ucagaccagaaaaacagcagucu

SEQ ID NO: 955912 - RNA, 18 nt, Human
ucagagacauacauuaca

SEQ ID NO: 955913 - RNA, 19 nt, Human
ucagcugagucugggucuc

SEQ ID NO: 955914 - RNA, 26 nt, Human
ucagucucaaaaaaaaaaaaaaagaa

SEQ ID NO: 955915 - RNA, 20 nt, Human
ucaguuguaauuaaagugcu

SEQ ID NO: 955916 - RNA, 23 nt, Human
ucauaccacuccacuccagccug

SEQ ID NO: 955917 - RNA, 24 nt, Human
uccagccugggugauagaaugaga

SEQ ID NO: 955918 - RNA, 21 nt, Human
uccaucucaucauagaagaca

SEQ ID NO: 955919 - RNA, 19 nt, Human
ucccagaaaaaucuugguu

SEQ ID NO: 955920 - RNA, 25 nt, Human
ucccagaaaaaucuugguuucuuug

SEQ ID NO: 955921 - RNA, 18 nt, Human
ucccagagccacaucagc

SEQ ID NO: 955922 - RNA, 18 nt, Human
ucccagagccacaucagc

SEQ ID NO: 955923 - RNA, 18 nt, Human
ucccagagccacaucagc

SEQ ID NO: 955924 - RNA, 24 nt, Human
ucccagcgacucaggaggcugagg

SEQ ID NO: 955925 - RNA, 19 nt, Human
uccccagugcacuccugcc

SEQ ID NO: 955926 - RNA, 23 nt, Human
uccccagugcacuccugccaccu

SEQ ID NO: 955927 - RNA, 24 nt, Human
ucccgaguagcugggacuacaggc

SEQ ID NO: 955928 - RNA, 21 nt, Human
uccugggcucaagugauucuc

SEQ ID NO: 955929 - RNA, 22 nt, Human
uccugggcucaagugauucucc

SEQ ID NO: 955930 - RNA, 24 nt, Human
uccugggcucaagugauucuccug

SEQ ID NO: 955931 - RNA, 24 nt, Human
ucgcccaggcuggaaugcaguggc

SEQ ID NO: 955932 - RNA, 24 nt, Human
ucgcccaggcuggagugcaguggc

SEQ ID NO: 955933 - RNA, 20 nt, Human
ucuaggugguucuucagucc

SEQ ID NO: 955934 - RNA, 20 nt, Human
ucuaggugguucuucagucc

SEQ ID NO: 955935 - RNA, 20 nt, Human
ucuaggugguucuucagucc

SEQ ID NO: 955936 - RNA, 20 nt, Human
ucuaggugguucuucagucc

SEQ ID NO: 955937 - RNA, 20 nt, Human
ucuaggugguucuucagucc

SEQ ID NO: 955938 - RNA, 24 nt, Human
ucucaaaaaaaaaaaaaaagaaaa

SEQ ID NO: 955939 - RNA, 19 nt, Human
ucucacucugucgcccagg

SEQ ID NO: 955940 - RNA, 24 nt, Human
ucucacucugucgcccaggcucaa

SEQ ID NO: 955941 - RNA, 24 nt, Human
ucucacucugucgcccaggcucaa

SEQ ID NO: 955942 - RNA, 23 nt, Human
ucucacucugucgcccaggcugg

SEQ ID NO: 955943 - RNA, 23 nt, Human
ucucacucugucgcccaggcugg

SEQ ID NO: 955944 - RNA, 24 nt, Human
ucucacucugucgcccaggcugga

SEQ ID NO: 955945 - RNA, 24 nt, Human
ucucacucugucgcccaggcugga

SEQ ID NO: 955946 - RNA, 26 nt, Human
ucucacucugucgcccaggcuggaau

SEQ ID NO: 955947 - RNA, 26 nt, Human
ucucacucugucgcccaggcuggagu

SEQ ID NO: 955948 - RNA, 27 nt, Human
ucucacucugucgcccaggcuggagug

SEQ ID NO: 955949 - RNA, 18 nt, Human
ucuccugauucugagccu

SEQ ID NO: 955950 - RNA, 24 nt, Human
ucuccugccccagccucccgagua

SEQ ID NO: 955951 - RNA, 26 nt, Human
ucuggcaaaauauaagaaugaaaaaa

SEQ ID NO: 955952 - RNA, 24 nt, Human
ucugucgcccaggcuggaaugcag

SEQ ID NO: 955953 - RNA, 24 nt, Human
ucugucgcccaggcuggagugcag

SEQ ID NO: 955954 - RNA, 18 nt, Human
ucuuuuuuuuuuuuuuuu

SEQ ID NO: 955955 - RNA, 19 nt, Human
ugaaaaaaaaaaaaaggca

SEQ ID NO: 955956 - RNA, 20 nt, Human
ugaaaaaaauucuacacagg

SEQ ID NO: 955957 - RNA, 21 nt, Human
ugaaaaaggucuggaguagug

SEQ ID NO: 955958 - RNA, 23 nt, Human
ugaaauucuagagucagagacau

SEQ ID NO: 955959 - RNA, 26 nt, Human
ugacaauaucaaaaaaaagcagcaau

SEQ ID NO: 955960 - RNA, 21 nt, Human
ugacauguucuuagcggggac

SEQ ID NO: 955961 - RNA, 19 nt, Human
ugaccugguugaaaaguag

SEQ ID NO: 955962 - RNA, 22 nt, Human
ugagacggagucucacucuguc

SEQ ID NO: 955963 - RNA, 24 nt, Human
ugaggcaggagaaucacuugaacc

SEQ ID NO: 955964 - RNA, 25 nt, Human
ugaggcaggagaaucacuugaaccc

SEQ ID NO: 955965 - RNA, 20 nt, Human
ugauucuccugccccagccu

SEQ ID NO: 955966 - RNA, 23 nt, Human
ugcaaccaaacacuacuuguucc

SEQ ID NO: 955967 - RNA, 25 nt, Human
ugcacuggacguuuucugaaucucc

SEQ ID NO: 955968 - RNA, 18 nt, Human
ugccccaagacucaacag

SEQ ID NO: 955969 - RNA, 21 nt, Human
ugccccaagacucaacagggc

SEQ ID NO: 955970 - RNA, 24 nt, Human
ugccccagccucccgaguagcugg

SEQ ID NO: 955971 - RNA, 19 nt, Human
uggaaugcaguggcaugau

SEQ ID NO: 955972 - RNA, 19 nt, Human
uggaaugcaguggcaugau

SEQ ID NO: 955973 - RNA, 20 nt, Human
uggaaugcuagcucccauuc

SEQ ID NO: 955974 - RNA, 20 nt, Human
uggagucacugguggggugg

SEQ ID NO: 955975 - RNA, 18 nt, Human
uggagugcaguggcacaa

SEQ ID NO: 955976 - RNA, 23 nt, Human
uggagugcaguggcacaaucuca

SEQ ID NO: 955977 - RNA, 24 nt, Human
uggagugcaguggcacaaucucag

SEQ ID NO: 955978 - RNA, 21 nt, Human
uggcaaaauauaagaaugaaa

SEQ ID NO: 955979 - RNA, 22 nt, Human
uggcacaaucucaguaauccca

SEQ ID NO: 955980 - RNA, 24 nt, Human
uggcaugaucacagcucacugcgg

SEQ ID NO: 955981 - RNA, 20 nt, Human
uggcuaaagagcagagcaag

SEQ ID NO: 955982 - RNA, 21 nt, Human
ugggacuacaggcuugcgcca

SEQ ID NO: 955983 - RNA, 18 nt, Human
ugggcucaagugauucuc

SEQ ID NO: 955984 - RNA, 23 nt, Human
ugggggaagaaaagggaggcauu

SEQ ID NO: 955985 - RNA, 23 nt, Human
ugggucucacucugucgcccagg

SEQ ID NO: 955986 - RNA, 21 nt, Human
uggguucaaugucagcaaacu

SEQ ID NO: 955987 - RNA, 21 nt, Human
ugguaguaaauggugacuguu

SEQ ID NO: 955988 - RNA, 18 nt, Human
uggugaaaaaccaaaaug

SEQ ID NO: 955989 - RNA, 21 nt, Human
uggugccuguggagucacugg

SEQ ID NO: 955990 - RNA, 25 nt, Human
uggugggguggcaguuccggaaguu

SEQ ID NO: 955991 - RNA, 19 nt, Human
uguauccccagugcacucc

SEQ ID NO: 955992 - RNA, 24 nt, Human
ugucgcccaggcucaaaaaaaaaa

SEQ ID NO: 955993 - RNA, 25 nt, Human
uguuagaaagugccccaagacucaa

SEQ ID NO: 955994 - RNA, 26 nt, Human
uuacaaaguuaacucuaguaaaaauc

SEQ ID NO: 955995 - RNA, 22 nt, Human
uuagcccagcaggcuugaggug

SEQ ID NO: 955996 - RNA, 27 nt, Human
uucaaacuugacauauauuaaaaaagu

SEQ ID NO: 955997 - RNA, 22 nt, Human
uucacaaauuaacaaauagcgu

SEQ ID NO: 955998 - RNA, 20 nt, Human
uuccacuuaggagucacuaa

SEQ ID NO: 955999 - RNA, 24 nt, Human
uucccagaaaaaucuugguuucuu

SEQ ID NO: 956000 - RNA, 22 nt, Human
uucuacacagggcacuuauuuc

SEQ ID NO: 956001 - RNA, 21 nt, Human
uucuagagucagagacauaca

SEQ ID NO: 956002 - RNA, 18 nt, Human
uucucauccuccagggcc

SEQ ID NO: 956003 - RNA, 23 nt, Human
uucuccagauuagcaccuggcca

SEQ ID NO: 956004 - RNA, 19 nt, Human
uugacuaugaaaaaaaaaa

SEQ ID NO: 956005 - RNA, 20 nt, Human
uugcagugagucaagaucau

SEQ ID NO: 956006 - RNA, 19 nt, Human
uuggggacuagcccaacug

SEQ ID NO: 956007 - RNA, 24 nt, Human
uuucagaauucugcugaguuauuu

SEQ ID NO: 956008 - RNA, 24 nt, Human
uuucagaauucugcugaguuauuu

SEQ ID NO: 956009 - RNA, 24 nt, Human
uuucagaauucugcugaguuauuu

SEQ ID NO: 956010 - RNA, 24 nt, Human
uuucagaauucugcugaguuauuu

SEQ ID NO: 956011 - RNA, 24 nt, Human
uuucagaauucugcugaguuauuu

SEQ ID NO: 956012 - RNA, 26 nt, Human
uuuuuuuuuuuugagacggagucuca

SEQ ID NO: 956013 - RNA, 22 nt, Human
uuuuuuuuuuuuuugagacgga

SEQ ID NO: 956014 - RNA, 22 nt, Human
uuuuuuuuuuuuuuuuucacau

SEQ ID NO: 956015 - RNA, 18 nt, Human
uuuuuuuuuuuuuuuuug

SEQ ID NO: 956016 - RNA, 24 nt, Human
aagcugcggcggcggcggcggcgg

SEQ ID NO: 956017 - RNA, 21 nt, Human
aauauuauuacagucaggagg

SEQ ID NO: 956018 - RNA, 18 nt, Human
accccagccuccugccug

SEQ ID NO: 956019 - RNA, 25 nt, Human
aggcagcggcuggaagauacucggc

SEQ ID NO: 956020 - RNA, 21 nt, Human
agucaggaggcagcggcugga

SEQ ID NO: 956021 - RNA, 18 nt, Human
caaagaacaacaugugca

SEQ ID NO: 956022 - RNA, 29 nt, Human
caagcugcggcggcggcggcggcggcgac

SEQ ID NO: 956023 - RNA, 22 nt, Human
cacccuggcacacacuugacag

SEQ ID NO: 956024 - RNA, 24 nt, Human
caggggcggagcgcggcgugcgcg

SEQ ID NO: 956025 - RNA, 19 nt, Human
cccagccuccugccugggc

SEQ ID NO: 956026 - RNA, 20 nt, Human
ccccagccuccugccugggc

SEQ ID NO: 956027 - RNA, 22 nt, Human
cccccacacagcaccccagccu

SEQ ID NO: 956028 - RNA, 18 nt, Human
cccggaaagugaccaugg

SEQ ID NO: 956029 - RNA, 21 nt, Human
ccggugcguggcgcccucccu

SEQ ID NO: 956030 - RNA, 21 nt, Human
ccugugguggcagcaccuccc

SEQ ID NO: 956031 - RNA, 21 nt, Human
cgcgcucucggcccgcagucc

SEQ ID NO: 956032 - RNA, 24 nt, Human
cggcgacgggggcggcagcagggg

SEQ ID NO: 956033 - RNA, 19 nt, Human
cggcggcggcggcggcgac

SEQ ID NO: 956034 - RNA, 20 nt, Human
cggcucuuucccccaagucc

SEQ ID NO: 956035 - RNA, 26 nt, Human
cggcucuuucccccaaguccagguuc

SEQ ID NO: 956036 - RNA, 18 nt, Human
cgggggcggcagcagggg

SEQ ID NO: 956037 - RNA, 25 nt, Human
cugacagaugaugauaugguuuuuu

SEQ ID NO: 956038 - RNA, 21 nt, Human
cugcggcggcggcggcggcuu

SEQ ID NO: 956039 - RNA, 23 nt, Human
cuggaagauacucggcucuuucc

SEQ ID NO: 956040 - RNA, 21 nt, Human
gcccccacacagcaccccagc

SEQ ID NO: 956041 - RNA, 19 nt, Human
gcggcagcaggggcggagc

SEQ ID NO: 956042 - RNA, 31 nt, Human
gcggcggcggcggcgacgggggcggcagcaa

SEQ ID NO: 956043 - RNA, 20 nt, Human
gcggcggcggcggcggcgac

SEQ ID NO: 956044 - RNA, 20 nt, Human
ggcagcaggggcggagcgcg

SEQ ID NO: 956045 - RNA, 20 nt, Human
ggcgcccucccucucucucc

SEQ ID NO: 956046 - RNA, 19 nt, Human
gggcggcagcaggggcgga

SEQ ID NO: 956047 - RNA, 22 nt, Human
gggcggcagcaggggcggagcg

SEQ ID NO: 956048 - RNA, 22 nt, Human
uauuacagucaggaggcagcgg

SEQ ID NO: 956049 - RNA, 25 nt, Human
ucccggaaagugaccauggaucacc

SEQ ID NO: 956050 - RNA, 22 nt, Human
ugacaaagaacaacaugugcag

SEQ ID NO: 956051 - RNA, 26 nt, Human
ugacaaagaacaacaugugcagguac

SEQ ID NO: 956052 - RNA, 19 nt, Human
ugacagcacugacaaagaa

SEQ ID NO: 956053 - RNA, 21 nt, Human
ugcggcggcggcggcggcggc

SEQ ID NO: 956054 - RNA, 20 nt, Human
uggaagauacucggcucuuu

SEQ ID NO: 956055 - RNA, 22 nt, Human
uggcacacacuugacagcacug

SEQ ID NO: 956056 - RNA, 24 nt, Human
uggcagcaccucccaagcugcggc

SEQ ID NO: 956057 - RNA, 20 nt, Human
uggcccccacacagcacccc

SEQ ID NO: 956058 - RNA, 23 nt, Human
aaaaagacgggaacacaaaagca

SEQ ID NO: 956059 - RNA, 25 nt, Human
aaaaagacgggaacacaaaagcaag

SEQ ID NO: 956060 - RNA, 21 nt, Human
aaaacagacacaaaggaggcu

SEQ ID NO: 956061 - RNA, 19 nt, Human
aaacagacacaaaggaggc

SEQ ID NO: 956062 - RNA, 20 nt, Human
aaacaggaaaucagaacagu

SEQ ID NO: 956063 - RNA, 21 nt, Human
aaacaggaaaucagaacagug

SEQ ID NO: 956064 - RNA, 22 nt, Human
aaacuuccugcaugcugaacuu

SEQ ID NO: 956065 - RNA, 21 nt, Human
aaagauaacagguaaccaagg

SEQ ID NO: 956066 - RNA, 20 nt, Human
aaagcaagcuccauagauua

SEQ ID NO: 956067 - RNA, 18 nt, Human
aaaguguuuugcccuaua

SEQ ID NO: 956068 - RNA, 20 nt, Human
aaauaccauuaaccaaugua

SEQ ID NO: 956069 - RNA, 25 nt, Human
aagaaaaagccggguucugcucccg

SEQ ID NO: 956070 - RNA, 19 nt, Human
aagaggcauauuacauucg

SEQ ID NO: 956071 - RNA, 21 nt, Human
aagugcagauagggcuuuaac

SEQ ID NO: 956072 - RNA, 21 nt, Human
aaugcccaugccauucuugaa

SEQ ID NO: 956073 - RNA, 24 nt, Human
aauuuaaaaauaaauuuaucuccu

SEQ ID NO: 956074 - RNA, 20 nt, Human
acaaaggaggcagagagaaa

SEQ ID NO: 956075 - RNA, 27 nt, Human
acaccaucuggaaagguucauacagaa

SEQ ID NO: 956076 - RNA, 18 nt, Human
accuaauuuccaguuacg

SEQ ID NO: 956077 - RNA, 20 nt, Human
acuuuaccagcccugucacc

SEQ ID NO: 956078 - RNA, 24 nt, Human
agaaugcccaugccauucuugaaa

SEQ ID NO: 956079 - RNA, 18 nt, Human
agacacaaaggaggcaga

SEQ ID NO: 956080 - RNA, 19 nt, Human
agagcaccauacuuagaaa

SEQ ID NO: 956081 - RNA, 23 nt, Human
agcaaaaugcauaaaaaacacaa

SEQ ID NO: 956082 - RNA, 20 nt, Human
agcccugucacccaaacugg

SEQ ID NO: 956083 - RNA, 24 nt, Human
agcccugucacccaaacugguugu

SEQ ID NO: 956084 - RNA, 18 nt, Human
aggaaaggcaaagaaaag

SEQ ID NO: 956085 - RNA, 19 nt, Human
agguauuggccuuuucucu

SEQ ID NO: 956086 - RNA, 24 nt, Human
auaagaaaaaauguaguucucugu

SEQ ID NO: 956087 - RNA, 21 nt, Human
aucuggaaagguucauacaga

SEQ ID NO: 956088 - RNA, 25 nt, Human
auuggccuuuucucuggaaaccaua

SEQ ID NO: 956089 - RNA, 23 nt, Human
caaaagauaacagguaaccaagg

SEQ ID NO: 956090 - RNA, 23 nt, Human
caaaaugcauaaaaaacacaaug

SEQ ID NO: 956091 - RNA, 20 nt, Human
caaagcaaggcugagacuca

SEQ ID NO: 956092 - RNA, 22 nt, Human
caaagcaguuaugaagaggaag

SEQ ID NO: 956093 - RNA, 26 nt, Human
caagaaaaagccggguucugcucccg

SEQ ID NO: 956094 - RNA, 19 nt, Human
caaggcaauaagaaaaaau

SEQ ID NO: 956095 - RNA, 18 nt, Human
cagacacaaaggaggcag

SEQ ID NO: 956096 - RNA, 25 nt, Human
cagacacaaaggaggcagagagaaa

SEQ ID NO: 956097 - RNA, 24 nt, Human
cagcaaaaugcauaaaaaacacaa

SEQ ID NO: 956098 - RNA, 20 nt, Human
cagcgucgcuccaagaaaaa

SEQ ID NO: 956099 - RNA, 22 nt, Human
caguaggacagcagggccaaac

SEQ ID NO: 956100 - RNA, 21 nt, Human
cauacagaaugcccaugccau

SEQ ID NO: 956101 - RNA, 22 nt, Human
caucuggaaagguucauacaga

SEQ ID NO: 956102 - RNA, 22 nt, Human
cauugcauugcaggcuaguagu

SEQ ID NO: 956103 - RNA, 21 nt, Human
ccaccuaauuuccaguuacgu

SEQ ID NO: 956104 - RNA, 23 nt, Human
ccaucuggaaagguucauacaga

SEQ ID NO: 956105 - RNA, 26 nt, Human
ccccaaacuuccugcaugcugaacuu

SEQ ID NO: 956106 - RNA, 19 nt, Human
cccugcgcucucgccgccu

SEQ ID NO: 956107 - RNA, 23 nt, Human
cccugucacccaaacugguugua

SEQ ID NO: 956108 - RNA, 20 nt, Human
ccuaaauuuucuaaagacau

SEQ ID NO: 956109 - RNA, 26 nt, Human
cgccgcccugcgcucucgccgccugc

SEQ ID NO: 956110 - RNA, 23 nt, Human
cgccgccugcgcucgcccugcgc

SEQ ID NO: 956111 - RNA, 19 nt, Human
cgccugcgcucgcccugcg

SEQ ID NO: 956112 - RNA, 22 nt, Human
cgcucgcccugcgcuggcccgg

SEQ ID NO: 956113 - RNA, 23 nt, Human
cuauuaaacaguaggacagcagg

SEQ ID NO: 956114 - RNA, 25 nt, Human
cucccgggaccgacgccgcgccgcc

SEQ ID NO: 956115 - RNA, 20 nt, Human
cuugcuuuggaggaugauga

SEQ ID NO: 956116 - RNA, 23 nt, Human
gacacaaaggaggcagagagaaa

SEQ ID NO: 956117 - RNA, 19 nt, Human
gauaacagguaaccaaggg

SEQ ID NO: 956118 - RNA, 18 nt, Human
gcaaaagauaacagguaa

SEQ ID NO: 956119 - RNA, 20 nt, Human
gcauauauaaccucaaacac

SEQ ID NO: 956120 - RNA, 24 nt, Human
gccgagcucuccccaaacuuccug

SEQ ID NO: 956121 - RNA, 22 nt, Human
gccgccugcgcucgcccugcgc

SEQ ID NO: 956122 - RNA, 21 nt, Human
gcucgcccugcgcuggcccgg

SEQ ID NO: 956123 - RNA, 21 nt, Human
ggaagguuuauugaaaacugg

SEQ ID NO: 956124 - RNA, 19 nt, Human
guaggacagcagggccaaa

SEQ ID NO: 956125 - RNA, 22 nt, Human
guaguaaguuugguugcuggua

SEQ ID NO: 956126 - RNA, 21 nt, Human
gucgcuccaagaaaaagccgg

SEQ ID NO: 956127 - RNA, 23 nt, Human
uaaauccaugucuauauuucaaa

SEQ ID NO: 956128 - RNA, 24 nt, Human
uaacguucauuuugacuuugguac

SEQ ID NO: 956129 - RNA, 24 nt, Human
uaacugggaagaauugcacugcuu

SEQ ID NO: 956130 - RNA, 23 nt, Human
uaagaaaaaauguaguucucugu

SEQ ID NO: 956131 - RNA, 19 nt, Human
uaagaaccauagccucuag

SEQ ID NO: 956132 - RNA, 20 nt, Human
uaaguucucaacuacccaca

SEQ ID NO: 956133 - RNA, 22 nt, Human
uauacacauagacaugaauaua

SEQ ID NO: 956134 - RNA, 19 nt, Human
uaucaaauaucccaccuaa

SEQ ID NO: 956135 - RNA, 24 nt, Human
uaucucacccuccuuaaacuaaag

SEQ ID NO: 956136 - RNA, 24 nt, Human
uaugacaaaaaacauaaaaaacuc

SEQ ID NO: 956137 - RNA, 18 nt, Human
uaugagaggaaaaagcug

SEQ ID NO: 956138 - RNA, 21 nt, Human
uauuuaggucacucaucuaac

SEQ ID NO: 956139 - RNA, 18 nt, Human
ucaaaaagacgggaacac

SEQ ID NO: 956140 - RNA, 25 nt, Human
ucaaaaagacgggaacacaaaagca

SEQ ID NO: 956141 - RNA, 21 nt, Human
ucgccgagcucuccccaaacu

SEQ ID NO: 956142 - RNA, 18 nt, Human
ucgcuauagaaaaugcua

SEQ ID NO: 956143 - RNA, 21 nt, Human
ucucacccuccuuaaacuaaa

SEQ ID NO: 956144 - RNA, 21 nt, Human
ucucuguuagcagucccugag

SEQ ID NO: 956145 - RNA, 24 nt, Human
ucugccugagcuauuucugauugu

SEQ ID NO: 956146 - RNA, 26 nt, Human
ugaauaagcaugccucagcaaaaugc

SEQ ID NO: 956147 - RNA, 22 nt, Human
ugagagcaccauacuuagaaau

SEQ ID NO: 956148 - RNA, 22 nt, Human
ugcaaagaaaaacaauucaaaa

SEQ ID NO: 956149 - RNA, 22 nt, Human
ugcagccuggaagguuuauuga

SEQ ID NO: 956150 - RNA, 24 nt, Human
ugcagccuggaagguuuauugaaa

SEQ ID NO: 956151 - RNA, 18 nt, Human
ugccugcuuacauuucag

SEQ ID NO: 956152 - RNA, 24 nt, Human
ugcgcuggcccgggucgcugugcu

SEQ ID NO: 956153 - RNA, 26 nt, Human
ugcuaugagaggaaaaagcugcaugu

SEQ ID NO: 956154 - RNA, 18 nt, Human
uggaaaaaaugcuuaggu

SEQ ID NO: 956155 - RNA, 18 nt, Human
ugggacuuuaccagcccu

SEQ ID NO: 956156 - RNA, 21 nt, Human
uggguagaacacucucauuuu

SEQ ID NO: 956157 - RNA, 20 nt, Human
uguaagcucugguguaccug

SEQ ID NO: 956158 - RNA, 20 nt, Human
uguguguguuugugcauaua

SEQ ID NO: 956159 - RNA, 22 nt, Human
uguguguguuugugcauauaua

SEQ ID NO: 956160 - RNA, 22 nt, Human
uguuacagcuuauacauugucu

SEQ ID NO: 956161 - RNA, 18 nt, Human
uuaggucacucaucuaac

SEQ ID NO: 956162 - RNA, 19 nt, Human
uuaguaggaccacaaaguc

SEQ ID NO: 956163 - RNA, 24 nt, Human
uucaaaauuuaaaaauaaauuuau

SEQ ID NO: 956164 - RNA, 20 nt, Human
uugcacugcuuaagaauagu

SEQ ID NO: 956165 - RNA, 25 nt, Human
uugcagccuggaagguuuauugaaa

SEQ ID NO: 956166 - RNA, 20 nt, Human
uuuauugaaaacuggguaga

SEQ ID NO: 956167 - RNA, 18 nt, Human
uuucuguguguguuugug

SEQ ID NO: 956168 - RNA, 18 nt, Human
uuugauggcuaucaaaua

SEQ ID NO: 956169 - RNA, 20 nt, Human
uuuuuuuuuuuuuuuuuugg

SEQ ID NO: 956170 - RNA, 22 nt, Human
agaucaggguaucauugaaaga

SEQ ID NO: 956171 - RNA, 23 nt, Human
agaucagggugucauugaaagac

SEQ ID NO: 956172 - RNA, 21 nt, Human
gaaagacaguggaaaccagga

SEQ ID NO: 956173 - RNA, 22 nt, Human
uaaagcaagacguugaaaccuu

SEQ ID NO: 956174 - RNA, 24 nt, Human
ucagggugucauugaaagacagug

SEQ ID NO: 956175 - RNA, 22 nt, Human
ucauugaaagacaguggaaacc

SEQ ID NO: 956176 - RNA, 22 nt, Human
ugaaagacaguggaaaccagga

SEQ ID NO: 956177 - RNA, 21 nt, Human
uuaaagcaagacguugaaacc

SEQ ID NO: 956178 - RNA, 21 nt, Human
aagagcccucccagaagcgcc

SEQ ID NO: 956179 - RNA, 20 nt, Human
agagcccucccagaagcgcc

SEQ ID NO: 956180 - RNA, 24 nt, Human
agagcccucccagaagcgcccuuc

SEQ ID NO: 956181 - RNA, 19 nt, Human
agcuggacucuuggcaccc

SEQ ID NO: 956182 - RNA, 19 nt, Human
agggaaaggccggguggug

SEQ ID NO: 956183 - RNA, 19 nt, Human
agugccccugcccugugug

SEQ ID NO: 956184 - RNA, 18 nt, Human
caagagcccucccagaag

SEQ ID NO: 956185 - RNA, 21 nt, Human
caagagcccucccagaagcgc

SEQ ID NO: 956186 - RNA, 21 nt, Human
caccgcaagagcccucccaga

SEQ ID NO: 956187 - RNA, 18 nt, Human
ccagaagcgcccagacug

SEQ ID NO: 956188 - RNA, 22 nt, Human
ccaggaagggaagggcgauucc

SEQ ID NO: 956189 - RNA, 19 nt, Human
cccagaagcgcccagacug

SEQ ID NO: 956190 - RNA, 18 nt, Human
cccagguucccgauucuc

SEQ ID NO: 956191 - RNA, 19 nt, Human
ccccagguucccgauucuc

SEQ ID NO: 956192 - RNA, 23 nt, Human
cccccagguucccgauucuccca

SEQ ID NO: 956193 - RNA, 22 nt, Human
ccucugggaacugccgagugcc

SEQ ID NO: 956194 - RNA, 21 nt, Human
cgcaagagcccucccagaagc

SEQ ID NO: 956195 - RNA, 24 nt, Human
cgcccagacugggggucggggagg

SEQ ID NO: 956196 - RNA, 22 nt, Human
cgccccuucaaggaaagacacu

SEQ ID NO: 956197 - RNA, 20 nt, Human
cggcaccgcaagagcccucc

SEQ ID NO: 956198 - RNA, 22 nt, Human
cggggaggacgcugccauucgu

SEQ ID NO: 956199 - RNA, 21 nt, Human
cguggccaggaagggaagggc

SEQ ID NO: 956200 - RNA, 20 nt, Human
cuucaaggaaagacacuaac

SEQ ID NO: 956201 - RNA, 21 nt, Human
cuuccuguuccucuccucguc

SEQ ID NO: 956202 - RNA, 18 nt, Human
gcaccggaccuagccugg

SEQ ID NO: 956203 - RNA, 20 nt, Human
gcccagacugggggucgggg

SEQ ID NO: 956204 - RNA, 24 nt, Human
gcgauuccggaggagggugggcac

SEQ ID NO: 956205 - RNA, 23 nt, Human
ggaacugccgagugccccugccc

SEQ ID NO: 956206 - RNA, 19 nt, Human
ggcgauuccggaggagggu

SEQ ID NO: 956207 - RNA, 21 nt, Human
ggucacuagcccccagguucc

SEQ ID NO: 956208 - RNA, 19 nt, Human
uaacaaggaggagugccgg

SEQ ID NO: 956209 - RNA, 25 nt, Human
uagcccccagguucccgauucuccc

SEQ ID NO: 956210 - RNA, 19 nt, Human
uagccuggugcccgccccu

SEQ ID NO: 956211 - RNA, 21 nt, Human
ucagauuccacaaggauuuau

SEQ ID NO: 956212 - RNA, 21 nt, Human
ucucccagcuucucucuuccu

SEQ ID NO: 956213 - RNA, 22 nt, Human
ucucccagcuucucucuuccug

SEQ ID NO: 956214 - RNA, 24 nt, Human
ucuuccuguuccucuccucgucuc

SEQ ID NO: 956215 - RNA, 23 nt, Human
uggacucuuggcacccaaaguuc

SEQ ID NO: 956216 - RNA, 24 nt, Human
uggacucuuggcacccaaaguucc

SEQ ID NO: 956217 - RNA, 21 nt, Human
uggcacccaaaguuccagaug

SEQ ID NO: 956218 - RNA, 21 nt, Human
uggccaggaagggaagggcga

SEQ ID NO: 956219 - RNA, 25 nt, Human
uggccaggaagggaagggcgauucc

SEQ ID NO: 956220 - RNA, 19 nt, Human
ugggagggguggccucugg

SEQ ID NO: 956221 - RNA, 20 nt, Human
ugggagggguggccucugga

SEQ ID NO: 956222 - RNA, 18 nt, Human
ugggaugggcaaggaggc

SEQ ID NO: 956223 - RNA, 19 nt, Human
ugggaugggcaaggaggcg

SEQ ID NO: 956224 - RNA, 22 nt, Human
ugggggucggggaggacgcugg

SEQ ID NO: 956225 - RNA, 18 nt, Human
uggggugggagggguggc

SEQ ID NO: 956226 - RNA, 23 nt, Human
uggggugggagggguggccucug

SEQ ID NO: 956227 - RNA, 24 nt, Human
uggggugggagggguggccucugg

SEQ ID NO: 956228 - RNA, 22 nt, Human
ugucuggaugucugggguggga

SEQ ID NO: 956229 - RNA, 24 nt, Human
aagaaaagcacaaaaugaaugcac

SEQ ID NO: 956230 - RNA, 20 nt, Human
aagcagaaagcccauaagaa

SEQ ID NO: 956231 - RNA, 23 nt, Human
acaggggcuuucagugagacagg

SEQ ID NO: 956232 - RNA, 19 nt, Human
agaaagcccauaagaaaag

SEQ ID NO: 956233 - RNA, 24 nt, Human
agaccaggcaccggcgcggaagga

SEQ ID NO: 956234 - RNA, 23 nt, Human
aggcagagccaucuaacagggga

SEQ ID NO: 956235 - RNA, 21 nt, Human
aggggcuuucagugagacagg

SEQ ID NO: 956236 - RNA, 24 nt, Human
caacacagacacuacacaggggcu

SEQ ID NO: 956237 - RNA, 23 nt, Human
cacacacacaaaaaaaaucuaug

SEQ ID NO: 956238 - RNA, 23 nt, Human
cagacuaagcagaaagcccauaa

SEQ ID NO: 956239 - RNA, 23 nt, Human
cagagccaucuaacaggggagcu

SEQ ID NO: 956240 - RNA, 20 nt, Human
cagcugccccuguccccccc

SEQ ID NO: 956241 - RNA, 24 nt, Human
cagcugccccugucccccccaccc

SEQ ID NO: 956242 - RNA, 22 nt, Human
cauaguaagagcaaaaggcaaa

SEQ ID NO: 956243 - RNA, 20 nt, Human
ccagcaagaucacagaaaca

SEQ ID NO: 956244 - RNA, 26 nt, Human
ccagggucaagggaaaacaacacaga

SEQ ID NO: 956245 - RNA, 25 nt, Human
cccaacaucaaugcacagauacaau

SEQ ID NO: 956246 - RNA, 19 nt, Human
cccaagaauagcacaccau

SEQ ID NO: 956247 - RNA, 18 nt, Human
ccccugucccccccaccc

SEQ ID NO: 956248 - RNA, 20 nt, Human
cucagcugccccuguccccc

SEQ ID NO: 956249 - RNA, 22 nt, Human
gaccuagacaacuuugggaagg

SEQ ID NO: 956250 - RNA, 23 nt, Human
gacuaagcagaaagcccauaaga

SEQ ID NO: 956251 - RNA, 18 nt, Human
gacuugcucuccugcuuc

SEQ ID NO: 956252 - RNA, 20 nt, Human
gcuggggaggacgcgagcgc

SEQ ID NO: 956253 - RNA, 19 nt, Human
ggaaaacaacacagacacu

SEQ ID NO: 956254 - RNA, 20 nt, Human
ggaaaacaacacagacacua

SEQ ID NO: 956255 - RNA, 28 nt, Human
ggaaggacaggcagagccaucuaacagg

SEQ ID NO: 956256 - RNA, 22 nt, Human
ggaaggaccuagacaacuuugg

SEQ ID NO: 956257 - RNA, 18 nt, Human
ggcagagccaucuaacag

SEQ ID NO: 956258 - RNA, 19 nt, Human
gggagcugagucuuuggga

SEQ ID NO: 956259 - RNA, 21 nt, Human
ggggagcugagucuuugggag

SEQ ID NO: 956260 - RNA, 20 nt, Human
guggaaggaaggcccuagcg

SEQ ID NO: 956261 - RNA, 20 nt, Human
guguucccaacaucaaugca

SEQ ID NO: 956262 - RNA, 27 nt, Human
uaagaaaagcacaaaaugaaugcacuc

SEQ ID NO: 956263 - RNA, 24 nt, Human
uaagaaaagcacaaaaugaaugcu

SEQ ID NO: 956264 - RNA, 25 nt, Human
uaagaaaagcacaaaaugaauggug

SEQ ID NO: 956265 - RNA, 18 nt, Human
uagcgucccucuucuugc

SEQ ID NO: 956266 - RNA, 19 nt, Human
uaguaagagcaaaaggcaa

SEQ ID NO: 956267 - RNA, 23 nt, Human
ucagacuaagcagaaagcccaua

SEQ ID NO: 956268 - RNA, 18 nt, Human
ucagcugccccugucccc

SEQ ID NO: 956269 - RNA, 18 nt, Human
ucagugagacagggauag

SEQ ID NO: 956270 - RNA, 21 nt, Human
ugaaugccacacaccuuucag

SEQ ID NO: 956271 - RNA, 20 nt, Human
ugacgacgaagaccaggcac

SEQ ID NO: 956272 - RNA, 18 nt, Human
uucagacuaagcagaaag

SEQ ID NO: 956273 - RNA, 21 nt, Human
uucccaacaucaaugcacaga

SEQ ID NO: 956274 - RNA, 18 nt, Human
uugaaguuacaggauugc

SEQ ID NO: 956275 - RNA, 19 nt, Human
uugcuggggaggacgcgag

SEQ ID NO: 956276 - RNA, 21 nt, Human
uuugcccacuguguucccaac

SEQ ID NO: 956277 - RNA, 19 nt, Human
uuuuuuuuuuuuuguuucc

SEQ ID NO: 956278 - RNA, 24 nt, Human
uuuuuuuuuuuuuuuuguuuccaa

SEQ ID NO: 956279 - RNA, 22 nt, Human
uuuuuuuuuuuuuuuuuuguuu

SEQ ID NO: 956280 - RNA, 23 nt, Human
uuuuuuuuuuuuuuuuuuuuggg

SEQ ID NO: 956281 - RNA, 22 nt, Human
aaacuuucaaggaacccucuga

SEQ ID NO: 956282 - RNA, 22 nt, Human
aacagcauuuuuacaaccacag

SEQ ID NO: 956283 - RNA, 18 nt, Human
aacuuaaaaucucuaaac

SEQ ID NO: 956284 - RNA, 19 nt, Human
aaugccugauauuaagugg

SEQ ID NO: 956285 - RNA, 25 nt, Human
acaaccacagaagcaaaauaaauuc

SEQ ID NO: 956286 - RNA, 23 nt, Human
acucucuuuuauuaaccaugauu

SEQ ID NO: 956287 - RNA, 18 nt, Human
acucuugcccauuugaga

SEQ ID NO: 956288 - RNA, 25 nt, Human
agaagcaaaauaaauucuagcuugu

SEQ ID NO: 956289 - RNA, 21 nt, Human
caaggaacccucugaauccag

SEQ ID NO: 956290 - RNA, 23 nt, Human
cagaagcaaaauaaauucuagcu

SEQ ID NO: 956291 - RNA, 20 nt, Human
caguacuguacauuuuuugu

SEQ ID NO: 956292 - RNA, 24 nt, Human
ccacagaagcaaaauaaauucuag

SEQ ID NO: 956293 - RNA, 24 nt, Human
cuugcccauuugagagggaagagu

SEQ ID NO: 956294 - RNA, 18 nt, Human
gcaggcauguauuuuuug

SEQ ID NO: 956295 - RNA, 26 nt, Human
uaaaauaaauuaagaagcaaaggcca

SEQ ID NO: 956296 - RNA, 19 nt, Human
uaaaauauacauauuacgg

SEQ ID NO: 956297 - RNA, 20 nt, Human
uaagaagcaaaggccaauca

SEQ ID NO: 956298 - RNA, 19 nt, Human
uacaaccacagaagcaaaa

SEQ ID NO: 956299 - RNA, 22 nt, Human
uacaacuucacuacgaggcagg

SEQ ID NO: 956300 - RNA, 24 nt, Human
ucaacauucacaaaauguugaaaa

SEQ ID NO: 956301 - RNA, 21 nt, Human
ucacaaaauguugaaaacuga

SEQ ID NO: 956302 - RNA, 20 nt, Human
ugaagaaugaaaaguaguca

SEQ ID NO: 956303 - RNA, 27 nt, Human
ugagagggaagaguuguuuauucaaau

SEQ ID NO: 956304 - RNA, 23 nt, Human
uggcacaaguaaaaaauuaaaau

SEQ ID NO: 956305 - RNA, 23 nt, Human
uuaaaauaaauuaagaagcaaag

SEQ ID NO: 956306 - RNA, 26 nt, Human
uuaaaauaaauuaagaagcaaaggcc

SEQ ID NO: 956307 - RNA, 22 nt, Human
uuaauagcacaucuaaaaagga

SEQ ID NO: 956308 - RNA, 24 nt, Human
aaaaagauauaaaucaguuuccau

SEQ ID NO: 956309 - RNA, 21 nt, Human
aaaagacaaauaagcaaaaag

SEQ ID NO: 956310 - RNA, 24 nt, Human
aaagugcugggauuacagguguga

SEQ ID NO: 956311 - RNA, 23 nt, Human
aaaucaguuuccauaagagcuaa

SEQ ID NO: 956312 - RNA, 23 nt, Human
aaccacaccacugauaaauuucc

SEQ ID NO: 956313 - RNA, 23 nt, Human
aagaagaauuucaagccaaaacu

SEQ ID NO: 956314 - RNA, 21 nt, Human
aagaaggaaaauagcaaccaa

SEQ ID NO: 956315 - RNA, 24 nt, Human
aagccaaaacuaagcauuaaaaaa

SEQ ID NO: 956316 - RNA, 26 nt, Human
aagcucuggcuuuuccccuaagaccu

SEQ ID NO: 956317 - RNA, 18 nt, Human
aagugcugggauuacagg

SEQ ID NO: 956318 - RNA, 19 nt, Human
aagugcugggauuacaggu

SEQ ID NO: 956319 - RNA, 26 nt, Human
aagugcugggauuacaggugugagcc

SEQ ID NO: 956320 - RNA, 19 nt, Human
acagcaaugagauaacugc

SEQ ID NO: 956321 - RNA, 21 nt, Human
acagcaaugagauaacugccu

SEQ ID NO: 956322 - RNA, 23 nt, Human
accacaccacugauaaauuucca

SEQ ID NO: 956323 - RNA, 22 nt, Human
accuccaucuggaagcucuggc

SEQ ID NO: 956324 - RNA, 18 nt, Human
acuccaggugaagaagaa

SEQ ID NO: 956325 - RNA, 24 nt, Human
acuuuugaaaggucauaaaaaaga

SEQ ID NO: 956326 - RNA, 18 nt, Human
agaaggaaaauagcaacc

SEQ ID NO: 956327 - RNA, 24 nt, Human
agagucucuguugcccaggcugga

SEQ ID NO: 956328 - RNA, 23 nt, Human
agccuccuggguucaagcaauuu

SEQ ID NO: 956329 - RNA, 22 nt, Human
aguagaggcgagguuucgccau

SEQ ID NO: 956330 - RNA, 24 nt, Human
agucucuguugcccaggcuggagu

SEQ ID NO: 956331 - RNA, 20 nt, Human
agugugguggcgcaauccug

SEQ ID NO: 956332 - RNA, 24 nt, Human
aucaguuuccauaagagcuaauau

SEQ ID NO: 956333 - RNA, 20 nt, Human
caaagugcugggauuacagg

SEQ ID NO: 956334 - RNA, 24 nt, Human
caaagugcugggauuacaggugug

SEQ ID NO: 956335 - RNA, 25 nt, Human
caaauaagcaaaaagcuuuucccgu

SEQ ID NO: 956336 - RNA, 23 nt, Human
caaccucagccuccuggguucaa

SEQ ID NO: 956337 - RNA, 22 nt, Human
caagcaauuuuccugucucagc

SEQ ID NO: 956338 - RNA, 23 nt, Human
caaucuauagaaaagagaauaac

SEQ ID NO: 956339 - RNA, 19 nt, Human
cacugcaaccucagccucc

SEQ ID NO: 956340 - RNA, 21 nt, Human
cacugcaaccucagccuccug

SEQ ID NO: 956341 - RNA, 23 nt, Human
cacugcaaccucagccuccuggg

SEQ ID NO: 956342 - RNA, 19 nt, Human
cagagucucuguugcccag

SEQ ID NO: 956343 - RNA, 22 nt, Human
cagccuccuggguucaagcaau

SEQ ID NO: 956344 - RNA, 23 nt, Human
cagccuccuggguucaagcaauu

SEQ ID NO: 956345 - RNA, 24 nt, Human
cauguuggccaggcuggucucgaa

SEQ ID NO: 956346 - RNA, 22 nt, Human
ccaccgcgcccagccuuaauuu

SEQ ID NO: 956347 - RNA, 21 nt, Human
ccaggcuggucucgaaauccu

SEQ ID NO: 956348 - RNA, 26 nt, Human
ccagugauccgccuaccucauccucu

SEQ ID NO: 956349 - RNA, 19 nt, Human
ccauguuggccaggcuggu

SEQ ID NO: 956350 - RNA, 22 nt, Human
ccauguuggccaggcuggucuc

SEQ ID NO: 956351 - RNA, 23 nt, Human
ccauguuggccaggcuggucucg

SEQ ID NO: 956352 - RNA, 19 nt, Human
ccccuaagaccuuuauaag

SEQ ID NO: 956353 - RNA, 18 nt, Human
ccgcgcccagccuuaauu

SEQ ID NO: 956354 - RNA, 19 nt, Human
ccucagccuccuggguuca

SEQ ID NO: 956355 - RNA, 23 nt, Human
ccugaccccagugauccgccuac

SEQ ID NO: 956356 - RNA, 22 nt, Human
ccuggcucacugcaaccucagc

SEQ ID NO: 956357 - RNA, 23 nt, Human
ccuggguucaagcaauuuuccug

SEQ ID NO: 956358 - RNA, 19 nt, Human
cgagguuucgccauguugg

SEQ ID NO: 956359 - RNA, 23 nt, Human
cgagguuucgccauguuggccag

SEQ ID NO: 956360 - RNA, 24 nt, Human
cgagguuucgccauguuggccagg

SEQ ID NO: 956361 - RNA, 24 nt, Human
cgccauguuggccaggcuggucuc

SEQ ID NO: 956362 - RNA, 24 nt, Human
cucacugcaaccucagccuccugg

SEQ ID NO: 956363 - RNA, 23 nt, Human
cuccaggugaagaagaauuucaa

SEQ ID NO: 956364 - RNA, 22 nt, Human
cucccaaaacagcaaugagaua

SEQ ID NO: 956365 - RNA, 24 nt, Human
cucuggcauguuaaaaaacaacuc

SEQ ID NO: 956366 - RNA, 19 nt, Human
cucuguugcccaggcugga

SEQ ID NO: 956367 - RNA, 20 nt, Human
cucuguugcccaggcuggag

SEQ ID NO: 956368 - RNA, 23 nt, Human
cucuguugcccaggcuggagugu

SEQ ID NO: 956369 - RNA, 19 nt, Human
gaaaguuuccuucagguua

SEQ ID NO: 956370 - RNA, 23 nt, Human
gaccccagugauccgccuaccuc

SEQ ID NO: 956371 - RNA, 18 nt, Human
gaccuuccuuuccuuuca

SEQ ID NO: 956372 - RNA, 25 nt, Human
gaccuuccuuuccuuucauuguacc

SEQ ID NO: 956373 - RNA, 23 nt, Human
gagguuucgccauguuggccagg

SEQ ID NO: 956374 - RNA, 18 nt, Human
gauuacaggugugagcca

SEQ ID NO: 956375 - RNA, 22 nt, Human
gauuacaggugugagccaccgc

SEQ ID NO: 956376 - RNA, 22 nt, Human
gauuacaggugugagccaccgc

SEQ ID NO: 956377 - RNA, 22 nt, Human
gcaaccucagccuccuggguuc

SEQ ID NO: 956378 - RNA, 22 nt, Human
gcagcuaauuuuuuuguauuuu

SEQ ID NO: 956379 - RNA, 23 nt, Human
gggacuacaggcgugcaccacca

SEQ ID NO: 956380 - RNA, 21 nt, Human
gucucuguugcccaggcugga

SEQ ID NO: 956381 - RNA, 22 nt, Human
guugcacgaggaaccacaccac

SEQ ID NO: 956382 - RNA, 24 nt, Human
uaacuuccaaggcauuacaacuuu

SEQ ID NO: 956383 - RNA, 26 nt, Human
uaauuuuuuuguauuuuuaguagagg

SEQ ID NO: 956384 - RNA, 24 nt, Human
uacaggugugagccaccgcgccca

SEQ ID NO: 956385 - RNA, 22 nt, Human
uagaggcgagguuucgccaugu

SEQ ID NO: 956386 - RNA, 18 nt, Human
uagcagggacuacaggcg

SEQ ID NO: 956387 - RNA, 24 nt, Human
uaguagaggcgagguuucgccaug

SEQ ID NO: 956388 - RNA, 24 nt, Human
uauagaaaagagaauaacuuccaa

SEQ ID NO: 956389 - RNA, 20 nt, Human
ucaaagugcugggauuacag

SEQ ID NO: 956390 - RNA, 21 nt, Human
ucaaagugcugggauuacagg

SEQ ID NO: 956391 - RNA, 24 nt, Human
ucaaagugcugggauuacaggugu

SEQ ID NO: 956392 - RNA, 18 nt, Human
ucacugcaaccucagccu

SEQ ID NO: 956393 - RNA, 23 nt, Human
ucacugcaaccucagccuccugg

SEQ ID NO: 956394 - RNA, 24 nt, Human
ucacugcaaccucagccuccuggg

SEQ ID NO: 956395 - RNA, 27 nt, Human
ucacugcaaccucagccuccuggguuc

SEQ ID NO: 956396 - RNA, 23 nt, Human
uccaaguagcagggacuacaggc

SEQ ID NO: 956397 - RNA, 21 nt, Human
uccuggguucaagcaauuuuc

SEQ ID NO: 956398 - RNA, 24 nt, Human
uccuggguucaagcaauuuuccug

SEQ ID NO: 956399 - RNA, 22 nt, Human
ucgccauguuggccaggcuggu

SEQ ID NO: 956400 - RNA, 24 nt, Human
ucgccauguuggccaggcuggucu

SEQ ID NO: 956401 - RNA, 23 nt, Human
ucucaaagugcugggauuacagg

SEQ ID NO: 956402 - RNA, 24 nt, Human
ucucaaagugcugggauuacaggu

SEQ ID NO: 956403 - RNA, 23 nt, Human
ucucuguugcccaggcuggagug

SEQ ID NO: 956404 - RNA, 18 nt, Human
ucuguugcccaggcugga

SEQ ID NO: 956405 - RNA, 24 nt, Human
ucuguugcccaggcuggagugugg

SEQ ID NO: 956406 - RNA, 22 nt, Human
ugaacacaaucuauagaaaaga

SEQ ID NO: 956407 - RNA, 22 nt, Human
ugagacagagucucuguugccc

SEQ ID NO: 956408 - RNA, 24 nt, Human
ugauccgccuaccucauccucuca

SEQ ID NO: 956409 - RNA, 21 nt, Human
ugcccaggcuggaguguggug

SEQ ID NO: 956410 - RNA, 24 nt, Human
ugcccaggcuggagugugguggcg

SEQ ID NO: 956411 - RNA, 24 nt, Human
ugcugggauuacaggugugagcca

SEQ ID NO: 956412 - RNA, 20 nt, Human
uggaagcucuggcuuuuccc

SEQ ID NO: 956413 - RNA, 24 nt, Human
uggagugugguggcgcaauccugg

SEQ ID NO: 956414 - RNA, 24 nt, Human
uggccaggcuggucucgaaauccu

SEQ ID NO: 956415 - RNA, 23 nt, Human
uggcccauaacgaaaguuuccuu

SEQ ID NO: 956416 - RNA, 20 nt, Human
uggcucacugcaaccucagc

SEQ ID NO: 956417 - RNA, 18 nt, Human
ugggauuacaggugugag

SEQ ID NO: 956418 - RNA, 19 nt, Human
ugggauuacaggugugagc

SEQ ID NO: 956419 - RNA, 21 nt, Human
ugggauuacaggugugagcca

SEQ ID NO: 956420 - RNA, 22 nt, Human
ugggauuacaggugugagccac

SEQ ID NO: 956421 - RNA, 23 nt, Human
ugggauuacaggugugagccacc

SEQ ID NO: 956422 - RNA, 24 nt, Human
ugggauuacaggugugagccaccg

SEQ ID NO: 956423 - RNA, 24 nt, Human
uggguucaagcaauuuuccugucu

SEQ ID NO: 956424 - RNA, 23 nt, Human
ugucaucaucaucaccuccaucu

SEQ ID NO: 956425 - RNA, 19 nt, Human
ugucucagccuuccaagua

SEQ ID NO: 956426 - RNA, 23 nt, Human
ugugguggcgcaauccuggcuca

SEQ ID NO: 956427 - RNA, 25 nt, Human
ugugguggcgcaauccuggcucaac

SEQ ID NO: 956428 - RNA, 21 nt, Human
uuaaaaaacaacucugacuaa

SEQ ID NO: 956429 - RNA, 24 nt, Human
uuaguagaggcgagguuucgccau

SEQ ID NO: 956430 - RNA, 22 nt, Human
uuaguucagaccuuccuuuccu

SEQ ID NO: 956431 - RNA, 18 nt, Human
uucaaaagacaaauaagc

SEQ ID NO: 956432 - RNA, 24 nt, Human
uucacuuccuucuuccacgacaau

SEQ ID NO: 956433 - RNA, 24 nt, Human
uuccaaguagcagggacuacaggc

SEQ ID NO: 956434 - RNA, 24 nt, Human
uucuagauuaugcauaguauuuua

SEQ ID NO: 956435 - RNA, 23 nt, Human
uucuuccacgacaauuaguucag

SEQ ID NO: 956436 - RNA, 18 nt, Human
uugagacagagucucugu

SEQ ID NO: 956437 - RNA, 24 nt, Human
uugcccaggcuggagugugguggc

SEQ ID NO: 956438 - RNA, 21 nt, Human
uuuauaaguucugaggguuca

SEQ ID NO: 956439 - RNA, 24 nt, Human
uuucgccauguuggccaggcuggu

SEQ ID NO: 956440 - RNA, 23 nt, Human
uuugagacagagucucuguugcc

SEQ ID NO: 956441 - RNA, 22 nt, Human
uuuuuaguagaggcgagguuuc

SEQ ID NO: 956442 - RNA, 20 nt, Human
uuuuuguauuuuuaguagag

SEQ ID NO: 956443 - RNA, 21 nt, Human
uuuuuuguauuuuuaguagag

SEQ ID NO: 956444 - RNA, 24 nt, Human
uuuuuuguauuuuuaguagaggcg

SEQ ID NO: 956445 - RNA, 18 nt, Human
uuuuuuuuuuuuuuuuug

SEQ ID NO: 956446 - RNA, 23 nt, Human
aaagggacaagacaggaaggccu

SEQ ID NO: 956447 - RNA, 22 nt, Human
aacucagcgagguuggagcuga

SEQ ID NO: 956448 - RNA, 22 nt, Human
acuccaggacaaaaugcagagg

SEQ ID NO: 956449 - RNA, 18 nt, Human
agacaggaaggccugggg

SEQ ID NO: 956450 - RNA, 20 nt, Human
agcaggguggugggggcagc

SEQ ID NO: 956451 - RNA, 18 nt, Human
agcauuuggcugacaaug

SEQ ID NO: 956452 - RNA, 18 nt, Human
aggaaggccuggggaccg

SEQ ID NO: 956453 - RNA, 20 nt, Human
aggagggguggugggcggug

SEQ ID NO: 956454 - RNA, 20 nt, Human
aggccagaggagcagggugg

SEQ ID NO: 956455 - RNA, 19 nt, Human
agggacaagacaggaaggc

SEQ ID NO: 956456 - RNA, 23 nt, Human
agggacaagacaggaaggccugg

SEQ ID NO: 956457 - RNA, 19 nt, Human
caaauaucgacaugugaug

SEQ ID NO: 956458 - RNA, 23 nt, Human
cacuccaggacaaaaugcagagg

SEQ ID NO: 956459 - RNA, 21 nt, Human
cacucuggaaaggugcaugua

SEQ ID NO: 956460 - RNA, 23 nt, Human
cagcccucaggagggaacuggag

SEQ ID NO: 956461 - RNA, 23 nt, Human
cagcgagguuggagcugaaaccc

SEQ ID NO: 956462 - RNA, 21 nt, Human
caggagggguggugggcggug

SEQ ID NO: 956463 - RNA, 20 nt, Human
cagucauccuggcacagccc

SEQ ID NO: 956464 - RNA, 19 nt, Human
caguucccaguggggaggg

SEQ ID NO: 956465 - RNA, 21 nt, Human
cauguagaggccaugaucaaa

SEQ ID NO: 956466 - RNA, 23 nt, Human
caugugggcggucccaugugggc

SEQ ID NO: 956467 - RNA, 23 nt, Human
caugugggcggucccaugugggc

SEQ ID NO: 956468 - RNA, 20 nt, Human
caugugggcgguccuaugug

SEQ ID NO: 956469 - RNA, 20 nt, Human
caugugggcguucccaugug

SEQ ID NO: 956470 - RNA, 20 nt, Human
caugugggcguucccaugug

SEQ ID NO: 956471 - RNA, 24 nt, Human
ccaugugggcgguccuaugugggc

SEQ ID NO: 956472 - RNA, 21 nt, Human
ccccgccccacugcugccucg

SEQ ID NO: 956473 - RNA, 22 nt, Human
cccgagaagagaccacucugga

SEQ ID NO: 956474 - RNA, 23 nt, Human
cccugccacgggcuucccagaag

SEQ ID NO: 956475 - RNA, 23 nt, Human
ccugccacgggcuucccagaagc

SEQ ID NO: 956476 - RNA, 25 nt, Human
ccuggccgaggcugggggccacugu

SEQ ID NO: 956477 - RNA, 22 nt, Human
cgagaagagaccacucuggaaa

SEQ ID NO: 956478 - RNA, 24 nt, Human
cuaugugggcgguccuaugugggc

SEQ ID NO: 956479 - RNA, 19 nt, Human
gaaaagaauccucugcaaa

SEQ ID NO: 956480 - RNA, 24 nt, Human
gaacuggagggacaacccugugcc

SEQ ID NO: 956481 - RNA, 19 nt, Human
gagcaggguggugggggca

SEQ ID NO: 956482 - RNA, 28 nt, Human
gcacagcccucaggagggagggaacgcc

SEQ ID NO: 956483 - RNA, 18 nt, Human
gccgaggcugggggccac

SEQ ID NO: 956484 - RNA, 18 nt, Human
gcuucccagaagcggggu

SEQ ID NO: 956485 - RNA, 20 nt, Human
ggagggguggugggcggugg

SEQ ID NO: 956486 - RNA, 19 nt, Human
ggcggugggcgcugagcag

SEQ ID NO: 956487 - RNA, 18 nt, Human
gggaccguggacagggaa

SEQ ID NO: 956488 - RNA, 18 nt, Human
gggcuucccagaagcggg

SEQ ID NO: 956489 - RNA, 22 nt, Human
ggggaagcaggagggguggugg

SEQ ID NO: 956490 - RNA, 21 nt, Human
gguggugggggcagcuuugga

SEQ ID NO: 956491 - RNA, 27 nt, Human
gguggugggggcagcuuuggaaaggga

SEQ ID NO: 956492 - RNA, 21 nt, Human
gucccaugugggcgguccuau

SEQ ID NO: 956493 - RNA, 22 nt, Human
gugggcggaacagggucaggcu

SEQ ID NO: 956494 - RNA, 22 nt, Human
guucccaugugggcgguccuau

SEQ ID NO: 956495 - RNA, 22 nt, Human
guucccaugugggcgguccuau

SEQ ID NO: 956496 - RNA, 22 nt, Human
uaaaaauguuauuccacugaaa

SEQ ID NO: 956497 - RNA, 18 nt, Human
uaaaauuaagguauaagc

SEQ ID NO: 956498 - RNA, 21 nt, Human
uagcauuuggcugacaaugag

SEQ ID NO: 956499 - RNA, 23 nt, Human
uaugugggcggucccaugugggc

SEQ ID NO: 956500 - RNA, 23 nt, Human
uaugugggcggucccaugugggc

SEQ ID NO: 956501 - RNA, 23 nt, Human
uaugugggcggucccaugugggc

SEQ ID NO: 956502 - RNA, 20 nt, Human
ucacaacaggcgugcccagu

SEQ ID NO: 956503 - RNA, 20 nt, Human
ucagcgagguuggagcugaa

SEQ ID NO: 956504 - RNA, 19 nt, Human
uccaggacaaaaugcagag

SEQ ID NO: 956505 - RNA, 20 nt, Human
ucccaugugggcggucccau

SEQ ID NO: 956506 - RNA, 20 nt, Human
ucccaugugggcggucccau

SEQ ID NO: 956507 - RNA, 26 nt, Human
uccucugcaaauaaaauuaagguauu

SEQ ID NO: 956508 - RNA, 19 nt, Human
uccugggcccugugagcuc

SEQ ID NO: 956509 - RNA, 25 nt, Human
ucgcuggcacuccaggacaaaaugc

SEQ ID NO: 956510 - RNA, 22 nt, Human
ugaaccguaaaaccacacauua

SEQ ID NO: 956511 - RNA, 20 nt, Human
ugacaaugaguuauaaauac

SEQ ID NO: 956512 - RNA, 19 nt, Human
ugacccggagcugcaccaa

SEQ ID NO: 956513 - RNA, 21 nt, Human
ugccacgggcuucccagaagc

SEQ ID NO: 956514 - RNA, 24 nt, Human
ugccagagcauuuugagaaaagaa

SEQ ID NO: 956515 - RNA, 20 nt, Human
ugccagugggcggaacaggg

SEQ ID NO: 956516 - RNA, 19 nt, Human
ugggcgcugagcagagcag

SEQ ID NO: 956517 - RNA, 22 nt, Human
ugggcggaacagggucaggcuc

SEQ ID NO: 956518 - RNA, 19 nt, Human
ugggcgguccuaugcggcg

SEQ ID NO: 956519 - RNA, 22 nt, Human
ugggcggugggcgcugagcagg

SEQ ID NO: 956520 - RNA, 21 nt, Human
uggugggggcagcuuuggaaa

SEQ ID NO: 956521 - RNA, 24 nt, Human
uguccugggcccugugagcucugc

SEQ ID NO: 956522 - RNA, 21 nt, Human
uuccagauaaaaacaccuucc

SEQ ID NO: 956523 - RNA, 22 nt, Human
uuggaaagggacuaaaaagggc

SEQ ID NO: 956524 - RNA, 22 nt, Human
uuuuuuuuuuuuuuuuuucggg

SEQ ID NO: 956525 - RNA, 22 nt, Human
aaccugcccucccaucccccuu

SEQ ID NO: 956526 - RNA, 23 nt, Human
accaauaccuugcucugacuucu

SEQ ID NO: 956527 - RNA, 26 nt, Human
acccagugucuagugugggaggagua

SEQ ID NO: 956528 - RNA, 25 nt, Human
acccuagauccaggaugucagcagc

SEQ ID NO: 956529 - RNA, 18 nt, Human
acuccagucuaucacauu

SEQ ID NO: 956530 - RNA, 19 nt, Human
acuucaaagaaugucagaa

SEQ ID NO: 956531 - RNA, 25 nt, Human
acuucaaagaaugucagaagauuug

SEQ ID NO: 956532 - RNA, 26 nt, Human
agaaauaaauagagggaccuuagagc

SEQ ID NO: 956533 - RNA, 19 nt, Human
agagccccggcagagcuga

SEQ ID NO: 956534 - RNA, 19 nt, Human
agguggcccggaaccccac

SEQ ID NO: 956535 - RNA, 24 nt, Human
aucuucuuuacaacccuagaucca

SEQ ID NO: 956536 - RNA, 24 nt, Human
auuugagaguuuuuaagauguuuu

SEQ ID NO: 956537 - RNA, 23 nt, Human
caagaccaggacagaguuggcug

SEQ ID NO: 956538 - RNA, 21 nt, Human
cacucucccuccucaguccuu

SEQ ID NO: 956539 - RNA, 23 nt, Human
cagcccuggacccccacucuccc

SEQ ID NO: 956540 - RNA, 19 nt, Human
cagggacucccuucccaca

SEQ ID NO: 956541 - RNA, 30 nt, Human
cagggacucccuucccacagaugaggccuu

SEQ ID NO: 956542 - RNA, 19 nt, Human
cagggauccuucuccuccc

SEQ ID NO: 956543 - RNA, 25 nt, Human
caucccccuuagcgccuucuuggcc

SEQ ID NO: 956544 - RNA, 20 nt, Human
ccaagugccagaaacaauaa

SEQ ID NO: 956545 - RNA, 24 nt, Human
cccaccugcugccacuugguuguc

SEQ ID NO: 956546 - RNA, 20 nt, Human
cccacugaggugccuggggu

SEQ ID NO: 956547 - RNA, 23 nt, Human
cccccacucucccuccucagucc

SEQ ID NO: 956548 - RNA, 20 nt, Human
ccuagauccaggaugucagc

SEQ ID NO: 956549 - RNA, 21 nt, Human
ccuagggcugcaaaagggccc

SEQ ID NO: 956550 - RNA, 21 nt, Human
ccucccaucccccuuagcgcc

SEQ ID NO: 956551 - RNA, 22 nt, Human
ccucccaucccccuuagcgccu

SEQ ID NO: 956552 - RNA, 22 nt, Human
ccuggaaaaccugcccucccau

SEQ ID NO: 956553 - RNA, 24 nt, Human
ccuggaaaaccugcccucccaucc

SEQ ID NO: 956554 - RNA, 22 nt, Human
ccuggacccccacucucccucc

SEQ ID NO: 956555 - RNA, 22 nt, Human
ccuggugagaggccagccaggg

SEQ ID NO: 956556 - RNA, 18 nt, Human
ccuuagagccccggcaga

SEQ ID NO: 956557 - RNA, 24 nt, Human
cggcgggggcgcggggcggcucac

SEQ ID NO: 956558 - RNA, 20 nt, Human
cuccacacagccucuuggag

SEQ ID NO: 956559 - RNA, 20 nt, Human
cugcugccacuugguugucu

SEQ ID NO: 956560 - RNA, 22 nt, Human
cuucccgccgccauguuuccgc

SEQ ID NO: 956561 - RNA, 22 nt, Human
gaagccuguggacaggcgagug

SEQ ID NO: 956562 - RNA, 19 nt, Human
gaccaggacagaguuggcc

SEQ ID NO: 956563 - RNA, 20 nt, Human
gacuucugacaagucaguuu

SEQ ID NO: 956564 - RNA, 23 nt, Human
gagggcgcggcgggggcgcgggg

SEQ ID NO: 956565 - RNA, 21 nt, Human
gauuuucuucgacagcaguuc

SEQ ID NO: 956566 - RNA, 19 nt, Human
gcccuggacccccacucuc

SEQ ID NO: 956567 - RNA, 24 nt, Human
gccugauuuucuucgacagcaguu

SEQ ID NO: 956568 - RNA, 20 nt, Human
gccuggaaaaccugcccucc

SEQ ID NO: 956569 - RNA, 21 nt, Human
gcugcaaaagggccccgugaa

SEQ ID NO: 956570 - RNA, 21 nt, Human
ggccagggcaaggagcugugg

SEQ ID NO: 956571 - RNA, 21 nt, Human
ggcgcggcgggggcgcggggc

SEQ ID NO: 956572 - RNA, 20 nt, Human
ggugggggcaguaugagcca

SEQ ID NO: 956573 - RNA, 18 nt, Human
guacgagcuguggggcga

SEQ ID NO: 956574 - RNA, 23 nt, Human
guuuggauucaggggaaucuggu

SEQ ID NO: 956575 - RNA, 21 nt, Human
uaaacagauugacauaaaaua

SEQ ID NO: 956576 - RNA, 18 nt, Human
uaaauuaacaauaagauc

SEQ ID NO: 956577 - RNA, 22 nt, Human
uagggguuaagaaguuugggau

SEQ ID NO: 956578 - RNA, 21 nt, Human
ucaguuucuuuguaugcuaau

SEQ ID NO: 956579 - RNA, 21 nt, Human
ucauggaaggacuuaucaugg

SEQ ID NO: 956580 - RNA, 20 nt, Human
uccacacagccucuuggagu

SEQ ID NO: 956581 - RNA, 23 nt, Human
ucccaucccccuuagcgccuucu

SEQ ID NO: 956582 - RNA, 19 nt, Human
ucucccuccuccugaaacc

SEQ ID NO: 956583 - RNA, 25 nt, Human
ucucugggaccaaagcagggcaguc

SEQ ID NO: 956584 - RNA, 22 nt, Human
ucuggccagggcaaggagcugu

SEQ ID NO: 956585 - RNA, 21 nt, Human
ugaagaggggccacgccuauc

SEQ ID NO: 956586 - RNA, 22 nt, Human
ugacagggauccuucuccuccc

SEQ ID NO: 956587 - RNA, 20 nt, Human
ugagaaauaaauagagggaa

SEQ ID NO: 956588 - RNA, 21 nt, Human
ugagggaagagcagcaccagc

SEQ ID NO: 956589 - RNA, 20 nt, Human
uggaaggacuuaucauggca

SEQ ID NO: 956590 - RNA, 23 nt, Human
uggcagcgugaguagcugugcug

SEQ ID NO: 956591 - RNA, 24 nt, Human
uggcuaggagugguggcuccacag

SEQ ID NO: 956592 - RNA, 20 nt, Human
uggugagaggccagccaggg

SEQ ID NO: 956593 - RNA, 18 nt, Human
uguggacaggcgaguggg

SEQ ID NO: 956594 - RNA, 27 nt, Human
uguggugggggcaguaugagccagggg

SEQ ID NO: 956595 - RNA, 21 nt, Human
uuagcgccuucuuggccuucc

SEQ ID NO: 956596 - RNA, 20 nt, Human
uucuucgacagcaguucugg

SEQ ID NO: 956597 - RNA, 22 nt, Human
uuuguaugcuaauuucuccauc

SEQ ID NO: 956598 - RNA, 19 nt, Human
aaaagagcuacaugugaua

SEQ ID NO: 956599 - RNA, 26 nt, Human
aaaagagcuacaugugauaaaccaca

SEQ ID NO: 956600 - RNA, 19 nt, Human
aaacaaaaaugauguaucu

SEQ ID NO: 956601 - RNA, 22 nt, Human
aaacagccugcccuaggauucc

SEQ ID NO: 956602 - RNA, 22 nt, Human
aaacccaaaauaauuaauguug

SEQ ID NO: 956603 - RNA, 19 nt, Human
aaagugcugggauuccagg

SEQ ID NO: 956604 - RNA, 24 nt, Human
aaagugcugggauuccaggcauga

SEQ ID NO: 956605 - RNA, 20 nt, Human
aagcgauucuccugccucag

SEQ ID NO: 956606 - RNA, 21 nt, Human
aagcgauucuccugccucagc

SEQ ID NO: 956607 - RNA, 23 nt, Human
aagcugcugaccccuggagcuca

SEQ ID NO: 956608 - RNA, 19 nt, Human
aaguagcugggacuacagg

SEQ ID NO: 956609 - RNA, 20 nt, Human
aaguagcugggacuacaggc

SEQ ID NO: 956610 - RNA, 26 nt, Human
aaguagcugggacuacaggcgcacgc

SEQ ID NO: 956611 - RNA, 19 nt, Human
aagugcugggauuccaggc

SEQ ID NO: 956612 - RNA, 21 nt, Human
aauguccuuuuacaguccuuc

SEQ ID NO: 956613 - RNA, 19 nt, Human
acaguccuuccuggugucu

SEQ ID NO: 956614 - RNA, 23 nt, Human
accaugcccagcuaauuuuugua

SEQ ID NO: 956615 - RNA, 24 nt, Human
accucgugauccaccugccuuggc

SEQ ID NO: 956616 - RNA, 18 nt, Human
acggaguuucaucauggu

SEQ ID NO: 956617 - RNA, 20 nt, Human
acggaguuucaucaugguug

SEQ ID NO: 956618 - RNA, 21 nt, Human
acggaguuucaucaugguugg

SEQ ID NO: 956619 - RNA, 25 nt, Human
acggaguuucaucaugguuggccag

SEQ ID NO: 956620 - RNA, 24 nt, Human
acucugucaccaggcuggagugca

SEQ ID NO: 956621 - RNA, 18 nt, Human
agagaugaccaccacugu

SEQ ID NO: 956622 - RNA, 21 nt, Human
aggcgggaauaaaacagccug

SEQ ID NO: 956623 - RNA, 25 nt, Human
aggcuggagugcagugacacgaucu

SEQ ID NO: 956624 - RNA, 20 nt, Human
aggucaggggccuugggagc

SEQ ID NO: 956625 - RNA, 24 nt, Human
agugcagugacacgaucuuggcuc

SEQ ID NO: 956626 - RNA, 19 nt, Human
auccaccugccuuggccuc

SEQ ID NO: 956627 - RNA, 23 nt, Human
auggaacacaaacagaaagcuuu

SEQ ID NO: 956628 - RNA, 23 nt, Human
caaacccaaaauaauuaauguug

SEQ ID NO: 956629 - RNA, 23 nt, Human
caaagugcugggauuccaggcau

SEQ ID NO: 956630 - RNA, 24 nt, Human
caaagugcugggauuccaggcaug

SEQ ID NO: 956631 - RNA, 20 nt, Human
cacagauccucagaaaggcc

SEQ ID NO: 956632 - RNA, 22 nt, Human
cacagauccucagaaaggccuc

SEQ ID NO: 956633 - RNA, 23 nt, Human
caccugccuuggccucucaaagu

SEQ ID NO: 956634 - RNA, 24 nt, Human
caccugccuuggccucucaaagug

SEQ ID NO: 956635 - RNA, 23 nt, Human
cacucugucaccaggcuggagug

SEQ ID NO: 956636 - RNA, 21 nt, Human
caggcaugagccacugcgccc

SEQ ID NO: 956637 - RNA, 19 nt, Human
cagugacacgaucuuggcu

SEQ ID NO: 956638 - RNA, 22 nt, Human
caugguuggccaggauggucuc

SEQ ID NO: 956639 - RNA, 22 nt, Human
ccacagauccucagaaaggccu

SEQ ID NO: 956640 - RNA, 21 nt, Human
ccaggcaugagccacugcgcc

SEQ ID NO: 956641 - RNA, 23 nt, Human
cccaaguagcugggacuacaggc

SEQ ID NO: 956642 - RNA, 24 nt, Human
cccaaguagcugggacuacaggcg

SEQ ID NO: 956643 - RNA, 23 nt, Human
cccagguuuaagcgauucuccug

SEQ ID NO: 956644 - RNA, 24 nt, Human
ccugccucagccucccaaguagcu

SEQ ID NO: 956645 - RNA, 25 nt, Human
ccuugggagcugauuggcugugaag

SEQ ID NO: 956646 - RNA, 25 nt, Human
cggaguuucaucaugguuggccagg

SEQ ID NO: 956647 - RNA, 23 nt, Human
cucacucugucaccaggcuggag

SEQ ID NO: 956648 - RNA, 24 nt, Human
cucacugcaaccuccgucucccag

SEQ ID NO: 956649 - RNA, 24 nt, Human
cucagccucccaaguagcugggac

SEQ ID NO: 956650 - RNA, 24 nt, Human
cucuugaccucgugauccaccugc

SEQ ID NO: 956651 - RNA, 23 nt, Human
cugcaaccuccgucucccagguu

SEQ ID NO: 956652 - RNA, 24 nt, Human
cugcaaccuccgucucccagguuu

SEQ ID NO: 956653 - RNA, 24 nt, Human
cuuaaaauuuuaauguguuuuuug

SEQ ID NO: 956654 - RNA, 21 nt, Human
cuugaccucgugauccaccug

SEQ ID NO: 956655 - RNA, 24 nt, Human
cuuggccucucaaagugcugggau

SEQ ID NO: 956656 - RNA, 30 nt, Human
cuuuauugaauuuauauauauauauauauu

SEQ ID NO: 956657 - RNA, 21 nt, Human
gaccucgugauccaccugccu

SEQ ID NO: 956658 - RNA, 24 nt, Human
gaccucgugauccaccugccuugg

SEQ ID NO: 956659 - RNA, 18 nt, Human
gagcuacaugugauaaac

SEQ ID NO: 956660 - RNA, 19 nt, Human
gauuccaggcaugagccac

SEQ ID NO: 956661 - RNA, 22 nt, Human
gauuccaggcaugagccacugc

SEQ ID NO: 956662 - RNA, 21 nt, Human
gauucuccugccucagccucc

SEQ ID NO: 956663 - RNA, 22 nt, Human
gcaaccuccgucucccagguuu

SEQ ID NO: 956664 - RNA, 22 nt, Human
gcccagcuaauuuuuguauuuu

SEQ ID NO: 956665 - RNA, 20 nt, Human
gccucagccucccaaguagc

SEQ ID NO: 956666 - RNA, 22 nt, Human
gccuuggccucucaaagugcug

SEQ ID NO: 956667 - RNA, 24 nt, Human
gcgauucuccugccucagccuccc

SEQ ID NO: 956668 - RNA, 19 nt, Human
gcuggagugcagugacacg

SEQ ID NO: 956669 - RNA, 19 nt, Human
gggccuugggagcugauug

SEQ ID NO: 956670 - RNA, 22 nt, Human
gugauccaccugccuuggccuc

SEQ ID NO: 956671 - RNA, 26 nt, Human
uaaaaaaugucugcaauaagcuauuc

SEQ ID NO: 956672 - RNA, 18 nt, Human
uaaaacagccugcccuag

SEQ ID NO: 956673 - RNA, 27 nt, Human
uaagcgauucuccugccucagccuccc

SEQ ID NO: 956674 - RNA, 19 nt, Human
uaauuuggugaauccacuc

SEQ ID NO: 956675 - RNA, 23 nt, Human
uaauuuuuguauuuuaguagaga

SEQ ID NO: 956676 - RNA, 24 nt, Human
uacaaaagcugagcugaggucagg

SEQ ID NO: 956677 - RNA, 24 nt, Human
uaguagagacggaguuucaucaug

SEQ ID NO: 956678 - RNA, 24 nt, Human
uaucauuuaaaaugaaauugaaau

SEQ ID NO: 956679 - RNA, 20 nt, Human
uauggaacacaaacagaaag

SEQ ID NO: 956680 - RNA, 18 nt, Human
ucaaagugcugggauucc

SEQ ID NO: 956681 - RNA, 24 nt, Human
ucaaagugcugggauuccaggcau

SEQ ID NO: 956682 - RNA, 19 nt, Human
ucacugcaaccuccgucuc

SEQ ID NO: 956683 - RNA, 24 nt, Human
ucacugcaaccuccgucucccagg

SEQ ID NO: 956684 - RNA, 25 nt, Human
ucacugcaaccuccgucucccaggu

SEQ ID NO: 956685 - RNA, 20 nt, Human
ucagccucccaaguagcugg

SEQ ID NO: 956686 - RNA, 21 nt, Human
ucaggacagagacaagccaca

SEQ ID NO: 956687 - RNA, 24 nt, Human
ucccaaguagcugggacuacaggc

SEQ ID NO: 956688 - RNA, 21 nt, Human
ucccagguuuaagcgauucuc

SEQ ID NO: 956689 - RNA, 24 nt, Human
ucccagguuuaagcgauucuccug

SEQ ID NO: 956690 - RNA, 21 nt, Human
uccuuccuggugucuucuucc

SEQ ID NO: 956691 - RNA, 24 nt, Human
ucucaaagugcugggauuccaggc

SEQ ID NO: 956692 - RNA, 21 nt, Human
ucucacucugucaccaggcug

SEQ ID NO: 956693 - RNA, 23 nt, Human
ucucacucugucaccaggcugga

SEQ ID NO: 956694 - RNA, 24 nt, Human
ucucccagguuuaagcgauucucc

SEQ ID NO: 956695 - RNA, 26 nt, Human
ucuccugccucagccucccaaguagc

SEQ ID NO: 956696 - RNA, 23 nt, Human
ucugucaccaggcuggagugcag

SEQ ID NO: 956697 - RNA, 18 nt, Human
ugaaacagagucucacuc

SEQ ID NO: 956698 - RNA, 22 nt, Human
ugaaacagagucucacucuguc

SEQ ID NO: 956699 - RNA, 19 nt, Human
ugaccucgugauccaccug

SEQ ID NO: 956700 - RNA, 23 nt, Human
ugaccucgugauccaccugccuu

SEQ ID NO: 956701 - RNA, 22 nt, Human
ugcagugacacgaucuuggcuc

SEQ ID NO: 956702 - RNA, 22 nt, Human
ugcaucaggaaaauaucaaaca

SEQ ID NO: 956703 - RNA, 24 nt, Human
ugccucagccucccaaguagcugg

SEQ ID NO: 956704 - RNA, 19 nt, Human
uggaacacaaacagaaagc

SEQ ID NO: 956705 - RNA, 21 nt, Human
uggaacacaaacagaaagcuu

SEQ ID NO: 956706 - RNA, 23 nt, Human
uggagugcagugacacgaucuug

SEQ ID NO: 956707 - RNA, 24 nt, Human
uggagugcagugacacgaucuugg

SEQ ID NO: 956708 - RNA, 22 nt, Human
uggccaggauggucucgaucuc

SEQ ID NO: 956709 - RNA, 24 nt, Human
ugggacuacaggcgcacgcaacca

SEQ ID NO: 956710 - RNA, 25 nt, Human
ugggacuacaggcgcacgcaaccau

SEQ ID NO: 956711 - RNA, 18 nt, Human
ugggagcugauuggcugu

SEQ ID NO: 956712 - RNA, 18 nt, Human
ugggauuccaggcaugag

SEQ ID NO: 956713 - RNA, 22 nt, Human
ugggauuccaggcaugagccac

SEQ ID NO: 956714 - RNA, 24 nt, Human
ugggauuccaggcaugagccacug

SEQ ID NO: 956715 - RNA, 26 nt, Human
ugggauuccaggcaugagccacugcg

SEQ ID NO: 956716 - RNA, 20 nt, Human
ugguagcuugugaaagggua

SEQ ID NO: 956717 - RNA, 18 nt, Human
ugugaagcuaugagguag

SEQ ID NO: 956718 - RNA, 18 nt, Human
uguguuuuuuguuucuua

SEQ ID NO: 956719 - RNA, 18 nt, Human
uuaguagagacggaguuu

SEQ ID NO: 956720 - RNA, 21 nt, Human
uuaguagagacggaguuucau

SEQ ID NO: 956721 - RNA, 24 nt, Human
uuaguagagacggaguuucaucau

SEQ ID NO: 956722 - RNA, 18 nt, Human
uuggccucucaaagugcu

SEQ ID NO: 956723 - RNA, 24 nt, Human
uuuaagcgauucuccugccucagc

SEQ ID NO: 956724 - RNA, 25 nt, Human
uuuacaguccuuccuggugucuucu

SEQ ID NO: 956725 - RNA, 31 nt, Human
uuuacaguccuuccuggugucuucuuccuuu

SEQ ID NO: 956726 - RNA, 19 nt, Human
uuuauauauauauauauau

SEQ ID NO: 956727 - RNA, 20 nt, Human
uuuauauauauauauauauu

SEQ ID NO: 956728 - RNA, 22 nt, Human
uuuuaguagagacggaguuuca

SEQ ID NO: 956729 - RNA, 20 nt, Human
uuuuguauuuuaguagagac

SEQ ID NO: 956730 - RNA, 19 nt, Human
uuuuuguauuuuaguagag

SEQ ID NO: 956731 - RNA, 23 nt, Human
uuuuuuuuuuuuuuuuuuuaugg

SEQ ID NO: 956732 - RNA, 24 nt, Human
acacaaauaaaucacuuucacagg

SEQ ID NO: 956733 - RNA, 26 nt, Human
acagaguucucuuacgauucuuaaag

SEQ ID NO: 956734 - RNA, 18 nt, Human
acaggcuguaaacaauau

SEQ ID NO: 956735 - RNA, 26 nt, Human
caaaaauaaccaucugcuaaugcugc

SEQ ID NO: 956736 - RNA, 25 nt, Human
cagaguucucuuacgauucuuaaag

SEQ ID NO: 956737 - RNA, 23 nt, Human
caucagugcaaaaauaaccaucu

SEQ ID NO: 956738 - RNA, 18 nt, Human
cccaccuuucuuaggaaa

SEQ ID NO: 956739 - RNA, 21 nt, Human
cccaccuuucuuaggaaauca

SEQ ID NO: 956740 - RNA, 21 nt, Human
cugcacugccuucgagaauau

SEQ ID NO: 956741 - RNA, 24 nt, Human
cuguaaacaauauaucaaaaauga

SEQ ID NO: 956742 - RNA, 23 nt, Human
guuagugacugcacugccuucga

SEQ ID NO: 956743 - RNA, 26 nt, Human
uaaaaaccaaaaaacugaaucaauca

SEQ ID NO: 956744 - RNA, 22 nt, Human
uaacacaaauaaaucacuuuca

SEQ ID NO: 956745 - RNA, 22 nt, Human
uaauuccuacagaguucucuua

SEQ ID NO: 956746 - RNA, 21 nt, Human
uauaaucaauaauuccuacag

SEQ ID NO: 956747 - RNA, 25 nt, Human
uauuuuaauuccucuucagcuccuc

SEQ ID NO: 956748 - RNA, 23 nt, Human
uccucaaaagaguuuuauuaaca

SEQ ID NO: 956749 - RNA, 23 nt, Human
ugcaaaaauaaccaucugcuaau

SEQ ID NO: 956750 - RNA, 22 nt, Human
ugggaaacaagacuaauuacaa

SEQ ID NO: 956751 - RNA, 24 nt, Human
ugggaaacaagacuaauuacaauc

SEQ ID NO: 956752 - RNA, 23 nt, Human
uuaaaaaccaaaaaacugaauca

SEQ ID NO: 956753 - RNA, 21 nt, Human
uuaauuccucuucagcuccuc

SEQ ID NO: 956754 - RNA, 20 nt, Human
uuccucuucagcuccucaca

SEQ ID NO: 956755 - RNA, 18 nt, Human
uuuuuuuuuuuuuuucug

SEQ ID NO: 956756 - RNA, 19 nt, Human
uuuuuuuuuuuuuuucugu

SEQ ID NO: 956757 - RNA, 25 nt, Human
aaaaaauaacccaaagaaagagaac

SEQ ID NO: 956758 - RNA, 23 nt, Human
aaaaacaaaacaaaacaaaacaa

SEQ ID NO: 956759 - RNA, 22 nt, Human
aaaaagccauuuuaaaaaauau

SEQ ID NO: 956760 - RNA, 23 nt, Human
aaaacaaaacaaaacaaaacaaa

SEQ ID NO: 956761 - RNA, 18 nt, Human
aaacaaaacaaaacaaaa

SEQ ID NO: 956762 - RNA, 22 nt, Human
aaacaaaacaaaacaaaacaaa

SEQ ID NO: 956763 - RNA, 22 nt, Human
aaacaaaacaaaacaaaacaaa

SEQ ID NO: 956764 - RNA, 22 nt, Human
aaacaaaacaaaacaaaacaaa

SEQ ID NO: 956765 - RNA, 25 nt, Human
aaacaaaagccuuuuccccccaaag

SEQ ID NO: 956766 - RNA, 22 nt, Human
aaacaacaaaaagccauuuuaa

SEQ ID NO: 956767 - RNA, 23 nt, Human
aaagaaagagaaccuacagauua

SEQ ID NO: 956768 - RNA, 23 nt, Human
aacaaaagccuuuuccccccaaa

SEQ ID NO: 956769 - RNA, 23 nt, Human
aagacaaaaacaaaacaaaacaa

SEQ ID NO: 956770 - RNA, 21 nt, Human
acaaaacaaaacaaaacaaaa

SEQ ID NO: 956771 - RNA, 21 nt, Human
acaaaacaaaacaaaacaaaa

SEQ ID NO: 956772 - RNA, 21 nt, Human
acaaaacaaaacaaaacaaaa

SEQ ID NO: 956773 - RNA, 26 nt, Human
acaaaacaaaacaaaacaaaagccuu

SEQ ID NO: 956774 - RNA, 22 nt, Human
acaaaacaaaagccuuuucccc

SEQ ID NO: 956775 - RNA, 22 nt, Human
acccaaagaaagagaaccuaca

SEQ ID NO: 956776 - RNA, 24 nt, Human
acgaggagccgccgccgcugcugu

SEQ ID NO: 956777 - RNA, 21 nt, Human
acuacaaaacaucguaagccu

SEQ ID NO: 956778 - RNA, 21 nt, Human
acucuggguauguaaauggcc

SEQ ID NO: 956779 - RNA, 26 nt, Human
agaaacacugcagcugcucagccucc

SEQ ID NO: 956780 - RNA, 20 nt, Human
aggagccgccgccgcugcug

SEQ ID NO: 956781 - RNA, 20 nt, Human
aggauguggaguaaaacccc

SEQ ID NO: 956782 - RNA, 20 nt, Human
aggggaggaaaauggguuca

SEQ ID NO: 956783 - RNA, 18 nt, Human
aggggcugcgcggggugg

SEQ ID NO: 956784 - RNA, 19 nt, Human
agguucuuguccaguggcc

SEQ ID NO: 956785 - RNA, 25 nt, Human
caaaaacaaaacaaaacaaaacaaa

SEQ ID NO: 956786 - RNA, 21 nt, Human
caaaacaaaacaaaacaaaac

SEQ ID NO: 956787 - RNA, 24 nt, Human
caaaacaaaacaaaacaaaacaaa

SEQ ID NO: 956788 - RNA, 25 nt, Human
caaaacaaaacaaaacaaaacaaaa

SEQ ID NO: 956789 - RNA, 22 nt, Human
caaaacaaaacaaaacaaaagc

SEQ ID NO: 956790 - RNA, 25 nt, Human
caaaacaaaacaaaagccuuuuccc

SEQ ID NO: 956791 - RNA, 22 nt, Human
caaaacaaaagccuuuuccccc

SEQ ID NO: 956792 - RNA, 22 nt, Human
caaacaaacaacaaaaagccau

SEQ ID NO: 956793 - RNA, 18 nt, Human
cacagcuccccaaauccc

SEQ ID NO: 956794 - RNA, 18 nt, Human
cacuauacaacacugagc

SEQ ID NO: 956795 - RNA, 22 nt, Human
cagagaaaauuagugaauccca

SEQ ID NO: 956796 - RNA, 21 nt, Human
cagcugcucagccuccucauu

SEQ ID NO: 956797 - RNA, 23 nt, Human
caggcuccucagaggggaggggg

SEQ ID NO: 956798 - RNA, 23 nt, Human
caguggccuaagauccauuuccu

SEQ ID NO: 956799 - RNA, 24 nt, Human
cccaaagaaagagaaccuacagau

SEQ ID NO: 956800 - RNA, 20 nt, Human
cccccaaagaaauacagaaa

SEQ ID NO: 956801 - RNA, 22 nt, Human
ccccgcuccucccggggguaga

SEQ ID NO: 956802 - RNA, 21 nt, Human
ccuccaagcgccggguggucu

SEQ ID NO: 956803 - RNA, 24 nt, Human
ccugcacccuccacagcuccccaa

SEQ ID NO: 956804 - RNA, 18 nt, Human
cgccaagacuacaaaaca

SEQ ID NO: 956805 - RNA, 21 nt, Human
cgccaagacuacaaaacaucg

SEQ ID NO: 956806 - RNA, 21 nt, Human
cggcagccugcccugccuucc

SEQ ID NO: 956807 - RNA, 21 nt, Human
cgggaggggcugcgcggggug

SEQ ID NO: 956808 - RNA, 23 nt, Human
cgggguggccgggacggcggggc

SEQ ID NO: 956809 - RNA, 22 nt, Human
cuagaagaaaguggugauuacu

SEQ ID NO: 956810 - RNA, 18 nt, Human
cuauuauuuucaagacaa

SEQ ID NO: 956811 - RNA, 24 nt, Human
cucacuauacaacacugagcuauu

SEQ ID NO: 956812 - RNA, 24 nt, Human
cucagaggggagggggaggggaaa

SEQ ID NO: 956813 - RNA, 22 nt, Human
cuccgcggucaccccgcuccuc

SEQ ID NO: 956814 - RNA, 24 nt, Human
cuccucauucagugaagugagggu

SEQ ID NO: 956815 - RNA, 19 nt, Human
cucgcggacggccccgccc

SEQ ID NO: 956816 - RNA, 23 nt, Human
cucggggcuuucugcuccuaagg

SEQ ID NO: 956817 - RNA, 19 nt, Human
cugcaauggcuucuccucc

SEQ ID NO: 956818 - RNA, 24 nt, Human
cugccuuccaaacaaacaacaaaa

SEQ ID NO: 956819 - RNA, 21 nt, Human
cugcggcugaggcgaggaagc

SEQ ID NO: 956820 - RNA, 21 nt, Human
cugggacucagacugaagcuc

SEQ ID NO: 956821 - RNA, 19 nt, Human
cugggagacucuugcaacu

SEQ ID NO: 956822 - RNA, 21 nt, Human
gacggccccgcccgggcuguc

SEQ ID NO: 956823 - RNA, 18 nt, Human
gacggcggggcuggcccg

SEQ ID NO: 956824 - RNA, 21 nt, Human
gaucugcaauggcuucuccuc

SEQ ID NO: 956825 - RNA, 20 nt, Human
gcaacggcagccugcccugc

SEQ ID NO: 956826 - RNA, 19 nt, Human
gccacggcugccgcugccu

SEQ ID NO: 956827 - RNA, 22 nt, Human
gccuuccuccugcacccuccac

SEQ ID NO: 956828 - RNA, 19 nt, Human
gcugcucagccuccucauu

SEQ ID NO: 956829 - RNA, 21 nt, Human
ggaaggcugggacaggggagg

SEQ ID NO: 956830 - RNA, 20 nt, Human
ggacaggggaggaaaauggg

SEQ ID NO: 956831 - RNA, 19 nt, Human
ggaggaaaauggguucagg

SEQ ID NO: 956832 - RNA, 18 nt, Human
ggagggggaggggaaacg

SEQ ID NO: 956833 - RNA, 20 nt, Human
ggcgaggaagccgucugggg

SEQ ID NO: 956834 - RNA, 20 nt, Human
gggaggggcugcgcggggug

SEQ ID NO: 956835 - RNA, 22 nt, Human
ggggcugcgcgggguggccggg

SEQ ID NO: 956836 - RNA, 20 nt, Human
ggugggcggcgggggcggcg

SEQ ID NO: 956837 - RNA, 21 nt, Human
ggugggcggcgggggcggcgg

SEQ ID NO: 956838 - RNA, 20 nt, Human
uaaagcaucacuagaagaaa

SEQ ID NO: 956839 - RNA, 19 nt, Human
uaacaaauguaaaucauau

SEQ ID NO: 956840 - RNA, 21 nt, Human
uaacccaaagaaagagaaccu

SEQ ID NO: 956841 - RNA, 22 nt, Human
uacaaaugucuauuauuuucaa

SEQ ID NO: 956842 - RNA, 18 nt, Human
uacagggugggcggcggg

SEQ ID NO: 956843 - RNA, 21 nt, Human
uaugacauguccauuugugca

SEQ ID NO: 956844 - RNA, 21 nt, Human
ucaaagugggaaggcugggac

SEQ ID NO: 956845 - RNA, 23 nt, Human
ucaaagugggaaggcugggacag

SEQ ID NO: 956846 - RNA, 24 nt, Human
ucaagacaaaaacaaaacaaaaca

SEQ ID NO: 956847 - RNA, 26 nt, Human
ucaagacaaaaacaaaacaaaacaaa

SEQ ID NO: 956848 - RNA, 22 nt, Human
ucaauggcccucggggcuuucu

SEQ ID NO: 956849 - RNA, 26 nt, Human
uccaaacaaacaacaaaaaggaguuc

SEQ ID NO: 956850 - RNA, 23 nt, Human
ucggggcuuucugcugcggcuga

SEQ ID NO: 956851 - RNA, 20 nt, Human
ugagccugggagacucuugc

SEQ ID NO: 956852 - RNA, 22 nt, Human
uggaagagguagucauuuugga

SEQ ID NO: 956853 - RNA, 25 nt, Human
uggcagcaguaaggaacacaguuaa

SEQ ID NO: 956854 - RNA, 20 nt, Human
uggcccgggacccccgucgg

SEQ ID NO: 956855 - RNA, 23 nt, Human
ugggggaaggauguggaguaaaa

SEQ ID NO: 956856 - RNA, 18 nt, Human
ugucugggggaaggaugu

SEQ ID NO: 956857 - RNA, 20 nt, Human
ugucugggggaaggaugugg

SEQ ID NO: 956858 - RNA, 18 nt, Human
uguguccuuacgccaaga

SEQ ID NO: 956859 - RNA, 18 nt, Human
uguuaaacagcucggcug

SEQ ID NO: 956860 - RNA, 25 nt, Human
uuauuuucaagacaaaaacaaaaca

SEQ ID NO: 956861 - RNA, 21 nt, Human
uucaagacaaaaacaaaacaa

SEQ ID NO: 956862 - RNA, 19 nt, Human
uucagugaagugaggguga

SEQ ID NO: 956863 - RNA, 22 nt, Human
uuccaaacaaacaacaaaaagc

SEQ ID NO: 956864 - RNA, 23 nt, Human
uuggaucugcaauggcuucuccu

SEQ ID NO: 956865 - RNA, 19 nt, Human
uuucugcugcggcugaggc

SEQ ID NO: 956866 - RNA, 22 nt, Human
aacuagucuauacaagaaccuc

SEQ ID NO: 956867 - RNA, 18 nt, Human
aggugcuggaaggagcuu

SEQ ID NO: 956868 - RNA, 18 nt, Human
aguuugugggaaaucagg

SEQ ID NO: 956869 - RNA, 18 nt, Human
caaaaggagaagagagga

SEQ ID NO: 956870 - RNA, 20 nt, Human
cagaggaugcuucuuaaaug

SEQ ID NO: 956871 - RNA, 19 nt, Human
ccacagagaaaaauuagau

SEQ ID NO: 956872 - RNA, 22 nt, Human
ccaggacuguggggaggagggg

SEQ ID NO: 956873 - RNA, 20 nt, Human
ccugagggauuuuaaaagaa

SEQ ID NO: 956874 - RNA, 20 nt, Human
cugccuccuuuggaaguguu

SEQ ID NO: 956875 - RNA, 22 nt, Human
cugccuugucucuggccuggga

SEQ ID NO: 956876 - RNA, 21 nt, Human
cugcuccagccaggacugugg

SEQ ID NO: 956877 - RNA, 22 nt, Human
cuuuuucuucuuuccuuuuggu

SEQ ID NO: 956878 - RNA, 23 nt, Human
gagaggaggugcuggaaggagcu

SEQ ID NO: 956879 - RNA, 19 nt, Human
gcccuuuuucuucuuuccc

SEQ ID NO: 956880 - RNA, 25 nt, Human
gcuucuuuacaaaugaaccuuuguc

SEQ ID NO: 956881 - RNA, 19 nt, Human
ggagaagagaggaggugcu

SEQ ID NO: 956882 - RNA, 24 nt, Human
ggagaagagaggaggugcuggaag

SEQ ID NO: 956883 - RNA, 19 nt, Human
guagugcaguuugugggaa

SEQ ID NO: 956884 - RNA, 24 nt, Human
uccagccaggacuguggggaggag

SEQ ID NO: 956885 - RNA, 23 nt, Human
ucugccuugucucuggccuggga

SEQ ID NO: 956886 - RNA, 20 nt, Human
ugaguuugggcaaaaggaga

SEQ ID NO: 956887 - RNA, 18 nt, Human
uggaaggagacaaggcug

SEQ ID NO: 956888 - RNA, 22 nt, Human
ugggcaaaaggagaagagagga

SEQ ID NO: 956889 - RNA, 24 nt, Human
ugggcaaaaggagaagagaggagg

SEQ ID NO: 956890 - RNA, 24 nt, Human
uggggaggaggggaguggaaggag

SEQ ID NO: 956891 - RNA, 24 nt, Human
uuggcagaggaugcuucuuaaaug

SEQ ID NO: 956892 - RNA, 20 nt, Human
uuuggaaguguucaguuugu

SEQ ID NO: 956893 - RNA, 20 nt, Human
uuugggcaaaaggagaagag

SEQ ID NO: 956894 - RNA, 19 nt, Human
agaaggaaugguguagggc

SEQ ID NO: 956895 - RNA, 22 nt, Human
agcagcuuugaugagccuggug

SEQ ID NO: 956896 - RNA, 22 nt, Human
agcccacaauggaaagaaaucu

SEQ ID NO: 956897 - RNA, 27 nt, Human
agggcagaaggaaugguguagggcugg

SEQ ID NO: 956898 - RNA, 22 nt, Human
cccacaauggaaagaaaucugc

SEQ ID NO: 956899 - RNA, 18 nt, Human
cuggcuugggccuuccug

SEQ ID NO: 956900 - RNA, 18 nt, Human
cuggucuggcuugggccu

SEQ ID NO: 956901 - RNA, 26 nt, Human
cuucuggucuggcuugggaggaaaac

SEQ ID NO: 956902 - RNA, 18 nt, Human
gcuugggccuuccuggag

SEQ ID NO: 956903 - RNA, 19 nt, Human
ggugaagcuaagagcucac

SEQ ID NO: 956904 - RNA, 20 nt, Human
uagcuuaucaagaccaagca

SEQ ID NO: 956905 - RNA, 22 nt, Human
uccucugugaccuagcaaaagc

SEQ ID NO: 956906 - RNA, 23 nt, Human
uuccagagcccacaauggaaaga

SEQ ID NO: 956907 - RNA, 22 nt, Human
uuucggggacaggugaagccau

SEQ ID NO: 956908 - RNA, 18 nt, Human
aagagaggagagggggaa

SEQ ID NO: 956909 - RNA, 18 nt, Human
agggaggaagagaggaga

SEQ ID NO: 956910 - RNA, 22 nt, Human
auacugaucaucuuugccagga

SEQ ID NO: 956911 - RNA, 19 nt, Human
auauauauauauauauaua

SEQ ID NO: 956912 - RNA, 19 nt, Human
cccacacgugacaggggau

SEQ ID NO: 956913 - RNA, 19 nt, Human
cuuuggguucacaagaaca

SEQ ID NO: 956914 - RNA, 19 nt, Human
gaggaagagaggagagggg

SEQ ID NO: 956915 - RNA, 24 nt, Human
ggggaucgaauuggggcucccagg

SEQ ID NO: 956916 - RNA, 19 nt, Human
uaugcacauacuuuaugua

SEQ ID NO: 956917 - RNA, 23 nt, Human
uccagggaggaagagaggagagg

SEQ ID NO: 956918 - RNA, 21 nt, Human
ucccaggggguaaagaaucug

SEQ ID NO: 956919 - RNA, 22 nt, Human
ugagguuaccucagaaugcauu

SEQ ID NO: 956920 - RNA, 19 nt, Human
uggaggauaaguuuuaaag

SEQ ID NO: 956921 - RNA, 24 nt, Human
uguaagaagggaaaacaaauuagg

SEQ ID NO: 956922 - RNA, 27 nt, Human
uuuaaaaaaaaauauauauauauauau

SEQ ID NO: 956923 - RNA, 23 nt, Human
aaagaucagcaauacucaaauaa

SEQ ID NO: 956924 - RNA, 28 nt, Human
aaagaucagcaauacucaaauaaacucc

SEQ ID NO: 956925 - RNA, 19 nt, Human
aaagucauuucacguacuc

SEQ ID NO: 956926 - RNA, 24 nt, Human
agcaucccuucauguccaugacuc

SEQ ID NO: 956927 - RNA, 20 nt, Human
auucacaaagagcucuccuu

SEQ ID NO: 956928 - RNA, 24 nt, Human
cagcaauacucaaauaaacuccaa

SEQ ID NO: 956929 - RNA, 18 nt, Human
caggcaugcucucaaccc

SEQ ID NO: 956930 - RNA, 23 nt, Human
cucaaauaaacuccaaaccagca

SEQ ID NO: 956931 - RNA, 23 nt, Human
cuccuuccuacauugcagcaucc

SEQ ID NO: 956932 - RNA, 21 nt, Human
cucucugcuccucuggcuguu

SEQ ID NO: 956933 - RNA, 20 nt, Human
gcaacaccucacauucacaa

SEQ ID NO: 956934 - RNA, 23 nt, Human
gcaucccuucauguccaugacuc

SEQ ID NO: 956935 - RNA, 20 nt, Human
guacuccagcuugauuucag

SEQ ID NO: 956936 - RNA, 23 nt, Human
uaauagccaauauuacuuaacac

SEQ ID NO: 956937 - RNA, 26 nt, Human
uacaaacccacugccagcagcucaua

SEQ ID NO: 956938 - RNA, 21 nt, Human
uauugcauucaucuuuccaca

SEQ ID NO: 956939 - RNA, 19 nt, Human
ucacguacuccagcuugau

SEQ ID NO: 956940 - RNA, 19 nt, Human
ucauuucacguacuccagc

SEQ ID NO: 956941 - RNA, 18 nt, Human
uccaaaccagcaacaagu

SEQ ID NO: 956942 - RNA, 20 nt, Human
uccaaagcauagaagaggag

SEQ ID NO: 956943 - RNA, 18 nt, Human
ucugcaaaaugucagcag

SEQ ID NO: 956944 - RNA, 25 nt, Human
ugaaucacaaaaccgaaugcauccu

SEQ ID NO: 956945 - RNA, 25 nt, Human
uuccaaagcauagaagaggaggcca

SEQ ID NO: 956946 - RNA, 18 nt, Human
uugaaucacaaaaccgaa

SEQ ID NO: 956947 - RNA, 21 nt, Human
aaaaagagaacaaggcugaga

SEQ ID NO: 956948 - RNA, 21 nt, Human
aagaagaggaggauccaggaa

SEQ ID NO: 956949 - RNA, 23 nt, Human
aagcuguucagaacuacuggauu

SEQ ID NO: 956950 - RNA, 19 nt, Human
aagcuguugugggaggaga

SEQ ID NO: 956951 - RNA, 23 nt, Human
aagcuuugacaucauuaacucug

SEQ ID NO: 956952 - RNA, 21 nt, Human
acuggauuuuccaguggaagc

SEQ ID NO: 956953 - RNA, 20 nt, Human
agcgguggguggaggagggg

SEQ ID NO: 956954 - RNA, 22 nt, Human
aggcaggagagggcagccacgg

SEQ ID NO: 956955 - RNA, 19 nt, Human
aggcagggcuggccgagga

SEQ ID NO: 956956 - RNA, 21 nt, Human
agguguuggagguggguggcu

SEQ ID NO: 956957 - RNA, 22 nt, Human
caaggaagagucuucccuccag

SEQ ID NO: 956958 - RNA, 22 nt, Human
caaggacagcaacaagcaugag

SEQ ID NO: 956959 - RNA, 24 nt, Human
caaggacagcaacaagcaugaggc

SEQ ID NO: 956960 - RNA, 20 nt, Human
cacggagaccuucauccucc

SEQ ID NO: 956961 - RNA, 20 nt, Human
cagaggucagaaugcucuuc

SEQ ID NO: 956962 - RNA, 19 nt, Human
cagcagcaaagugaaagcu

SEQ ID NO: 956963 - RNA, 18 nt, Human
cagcagucagcagcaaag

SEQ ID NO: 956964 - RNA, 26 nt, Human
caugcaauccugaacucccggaccac

SEQ ID NO: 956965 - RNA, 18 nt, Human
ccacggagaccuucaucc

SEQ ID NO: 956966 - RNA, 24 nt, Human
ccaguggaagcuuugacaucauua

SEQ ID NO: 956967 - RNA, 21 nt, Human
ccccgggauaccagcucugcc

SEQ ID NO: 956968 - RNA, 18 nt, Human
ccuccuggugggcaggca

SEQ ID NO: 956969 - RNA, 22 nt, Human
ccuccuggugggcaggcagggc

SEQ ID NO: 956970 - RNA, 22 nt, Human
ccucuaagccugagauaggagu

SEQ ID NO: 956971 - RNA, 25 nt, Human
ccucuaagccugagauaggaguggg

SEQ ID NO: 956972 - RNA, 20 nt, Human
cuccugggcucacugcuucc

SEQ ID NO: 956973 - RNA, 20 nt, Human
cuccugggcucacugcuucc

SEQ ID NO: 956974 - RNA, 24 nt, Human
cuccuggugggcaggcagggcugg

SEQ ID NO: 956975 - RNA, 18 nt, Human
gcagcagucagcagcaaa

SEQ ID NO: 956976 - RNA, 19 nt, Human
gccacggagaccuucaucc

SEQ ID NO: 956977 - RNA, 20 nt, Human
gccuuuuuucccuuuccagu

SEQ ID NO: 956978 - RNA, 18 nt, Human
gcuggccucuuuugucuc

SEQ ID NO: 956979 - RNA, 24 nt, Human
gcuggccucuuuugucucuuuauu

SEQ ID NO: 956980 - RNA, 23 nt, Human
ggaagcuguugugggaggagagc

SEQ ID NO: 956981 - RNA, 24 nt, Human
ggaagucccagggcagaggucaga

SEQ ID NO: 956982 - RNA, 24 nt, Human
ggacuccugggcucacugcuuccu

SEQ ID NO: 956983 - RNA, 21 nt, Human
ggagagcuggccuggugggag

SEQ ID NO: 956984 - RNA, 22 nt, Human
ggagguguuagcaguggugaau

SEQ ID NO: 956985 - RNA, 19 nt, Human
ggccuggugggagcuucag

SEQ ID NO: 956986 - RNA, 19 nt, Human
gguggaggagggggccuug

SEQ ID NO: 956987 - RNA, 21 nt, Human
ggugggcaggcagggcuggcc

SEQ ID NO: 956988 - RNA, 21 nt, Human
guggaggagggggccuuggca

SEQ ID NO: 956989 - RNA, 24 nt, Human
gugggaagcuguugugggaggaga

SEQ ID NO: 956990 - RNA, 20 nt, Human
gugggaggagagcuggccug

SEQ ID NO: 956991 - RNA, 21 nt, Human
uacuggauuuuccaguggaag

SEQ ID NO: 956992 - RNA, 24 nt, Human
uacuggauuuuccaguggaagcuu

SEQ ID NO: 956993 - RNA, 22 nt, Human
ucacugcuuccuggcuccccgg

SEQ ID NO: 956994 - RNA, 23 nt, Human
uccaaggacagcaacaagcauga

SEQ ID NO: 956995 - RNA, 24 nt, Human
uccaaggacagcaacaagcaugag

SEQ ID NO: 956996 - RNA, 19 nt, Human
uccaggagauuaaucuaau

SEQ ID NO: 956997 - RNA, 19 nt, Human
uccugggcucacugcuucc

SEQ ID NO: 956998 - RNA, 21 nt, Human
uccugggcucacugcuuccug

SEQ ID NO: 956999 - RNA, 24 nt, Human
uccugggcucacugcuuccuggcu

SEQ ID NO: 957000 - RNA, 22 nt, Human
uccuggugggcaggcagggcug

SEQ ID NO: 957001 - RNA, 21 nt, Human
ucuaagccugagauaggagug

SEQ ID NO: 957002 - RNA, 18 nt, Human
ugaaagcuguucagaacu

SEQ ID NO: 957003 - RNA, 22 nt, Human
ugagaguuagcgguggguggag

SEQ ID NO: 957004 - RNA, 24 nt, Human
ugagcugugccuucgccaccccuu

SEQ ID NO: 957005 - RNA, 21 nt, Human
ugaggcaggagagggcagcca

SEQ ID NO: 957006 - RNA, 19 nt, Human
ugcuuugugagauguagga

SEQ ID NO: 957007 - RNA, 19 nt, Human
uggagguggguggcuggcc

SEQ ID NO: 957008 - RNA, 18 nt, Human
uggauucaggauugggau

SEQ ID NO: 957009 - RNA, 19 nt, Human
uggcacagacuugccgccc

SEQ ID NO: 957010 - RNA, 21 nt, Human
uggccucuuuugucucuuuau

SEQ ID NO: 957011 - RNA, 20 nt, Human
uggcuggccucuuuugucuc

SEQ ID NO: 957012 - RNA, 18 nt, Human
ugggaggagagcuggccu

SEQ ID NO: 957013 - RNA, 19 nt, Human
ugggauguggugaaugcug

SEQ ID NO: 957014 - RNA, 27 nt, Human
ugggcaggcagggcuggccgaggacuc

SEQ ID NO: 957015 - RNA, 20 nt, Human
ugggcucacugcuuccuggc

SEQ ID NO: 957016 - RNA, 23 nt, Human
uggguggaggagggggccuuggc

SEQ ID NO: 957017 - RNA, 23 nt, Human
uucaaagcagggaagcuccaaga

SEQ ID NO: 957018 - RNA, 24 nt, Human
uucuuuagcuauauaauaguuacc

SEQ ID NO: 957019 - RNA, 27 nt, Human
uuggcaucuucucuuuaugucucugag

SEQ ID NO: 957020 - RNA, 23 nt, Human
uugugagauguaggaggugcagc

SEQ ID NO: 957021 - RNA, 25 nt, Human
uuucaaggaagagucuucccuccag

SEQ ID NO: 957022 - RNA, 21 nt, Human
uuugacaucauuaacucuguc

SEQ ID NO: 957023 - RNA, 21 nt, Human
aaaaagagaacaaggcugaga

SEQ ID NO: 957024 - RNA, 21 nt, Human
aagaagaggaggauccaggaa

SEQ ID NO: 957025 - RNA, 19 nt, Human
aggcagggcuggccgagga

SEQ ID NO: 957026 - RNA, 21 nt, Human
agguguuggagguggguggcu

SEQ ID NO: 957027 - RNA, 20 nt, Human
cagaggucagaaugcucuuc

SEQ ID NO: 957028 - RNA, 21 nt, Human
ccccgggauaccagcucugcc

SEQ ID NO: 957029 - RNA, 18 nt, Human
ccuccuggugggcaggca

SEQ ID NO: 957030 - RNA, 22 nt, Human
ccuccuggugggcaggcagggc

SEQ ID NO: 957031 - RNA, 22 nt, Human
ccucuaagccugagauaggagu

SEQ ID NO: 957032 - RNA, 25 nt, Human
ccucuaagccugagauaggaguggg

SEQ ID NO: 957033 - RNA, 20 nt, Human
cuccugggcucacugcuucc

SEQ ID NO: 957034 - RNA, 24 nt, Human
cuccuggugggcaggcagggcugg

SEQ ID NO: 957035 - RNA, 20 nt, Human
gccuuuuuucccuuuccagu

SEQ ID NO: 957036 - RNA, 24 nt, Human
gcugcccucuuuugucucuuuauu

SEQ ID NO: 957037 - RNA, 24 nt, Human
ggaagucccagggcagaggucaga

SEQ ID NO: 957038 - RNA, 24 nt, Human
ggacuccugggcucacugcuuccu

SEQ ID NO: 957039 - RNA, 22 nt, Human
ggagguguuagcaguggugaau

SEQ ID NO: 957040 - RNA, 21 nt, Human
ggugggcaggcagggcuggcc

SEQ ID NO: 957041 - RNA, 23 nt, Human
uauuagaugcauuacuuucauua

SEQ ID NO: 957042 - RNA, 22 nt, Human
ucacugcuuccuggcuccccgg

SEQ ID NO: 957043 - RNA, 18 nt, Human
ucagaccaagaaacucac

SEQ ID NO: 957044 - RNA, 19 nt, Human
uccaggagauuaaucuaau

SEQ ID NO: 957045 - RNA, 19 nt, Human
uccugggcucacugcuucc

SEQ ID NO: 957046 - RNA, 21 nt, Human
uccugggcucacugcuuccug

SEQ ID NO: 957047 - RNA, 24 nt, Human
uccugggcucacugcuuccuggcu

SEQ ID NO: 957048 - RNA, 22 nt, Human
uccuggugggcaggcagggcug

SEQ ID NO: 957049 - RNA, 21 nt, Human
ucuaagccugagauaggagug

SEQ ID NO: 957050 - RNA, 18 nt, Human
ugcauuacuuucauuacc

SEQ ID NO: 957051 - RNA, 18 nt, Human
uggauucaggauugggau

SEQ ID NO: 957052 - RNA, 19 nt, Human
ugggauguggugaaugcug

SEQ ID NO: 957053 - RNA, 27 nt, Human
ugggcaggcagggcuggccgaggacuc

SEQ ID NO: 957054 - RNA, 20 nt, Human
ugggcucacugcuuccuggc

SEQ ID NO: 957055 - RNA, 23 nt, Human
uucagaccaagaaacucacagga

SEQ ID NO: 957056 - RNA, 24 nt, Human
uucuuuagcuauauaauaguuacc

SEQ ID NO: 957057 - RNA, 25 nt, Human
uuucaaggaagagucuucccuccag

SEQ ID NO: 957058 - RNA, 20 nt, Human
aaaaauaaaaauauaaauau

SEQ ID NO: 957059 - RNA, 21 nt, Human
aaaauauucgaaauacuucuc

SEQ ID NO: 957060 - RNA, 19 nt, Human
aaagagcguaccucugccc

SEQ ID NO: 957061 - RNA, 21 nt, Human
aacaugguagaaucccgucuc

SEQ ID NO: 957062 - RNA, 22 nt, Human
aagaucaagugagccaagauca

SEQ ID NO: 957063 - RNA, 21 nt, Human
aaucccgucucuaccaaaaau

SEQ ID NO: 957064 - RNA, 23 nt, Human
aaugaaagaauaauugaagaaaa

SEQ ID NO: 957065 - RNA, 18 nt, Human
acaccacugcacuccagc

SEQ ID NO: 957066 - RNA, 20 nt, Human
acaccacugcacuccagccu

SEQ ID NO: 957067 - RNA, 24 nt, Human
acagaguaagacccuaucucaaaa

SEQ ID NO: 957068 - RNA, 19 nt, Human
accacugcacuccagccug

SEQ ID NO: 957069 - RNA, 24 nt, Human
acugcacuccagccugggugacag

SEQ ID NO: 957070 - RNA, 26 nt, Human
acugcacuccagccugggugacagag

SEQ ID NO: 957071 - RNA, 22 nt, Human
agacaaaauaugagaggaucua

SEQ ID NO: 957072 - RNA, 23 nt, Human
agauccagaaaaauccauaaaga

SEQ ID NO: 957073 - RNA, 21 nt, Human
agccaggugugguggcgcaag

SEQ ID NO: 957074 - RNA, 23 nt, Human
agccaggugugguggcgcaagcc

SEQ ID NO: 957075 - RNA, 20 nt, Human
agccugggcaacaugguaga

SEQ ID NO: 957076 - RNA, 24 nt, Human
agccugggcaacaugguagaaucc

SEQ ID NO: 957077 - RNA, 22 nt, Human
agccugggugacagaguaagac

SEQ ID NO: 957078 - RNA, 24 nt, Human
agccuguagucccagcuacucagg

SEQ ID NO: 957079 - RNA, 24 nt, Human
agcuacucaggaggcugggguggg

SEQ ID NO: 957080 - RNA, 21 nt, Human
aggcugaggcagguggauugc

SEQ ID NO: 957081 - RNA, 24 nt, Human
aggcugaggcagguggauugcuug

SEQ ID NO: 957082 - RNA, 24 nt, Human
aggcuggggugggaggaucacuug

SEQ ID NO: 957083 - RNA, 19 nt, Human
agguggagguuacagugag

SEQ ID NO: 957084 - RNA, 24 nt, Human
agguggagguuacagugagccaag

SEQ ID NO: 957085 - RNA, 18 nt, Human
agucucugcaaaaaugau

SEQ ID NO: 957086 - RNA, 24 nt, Human
aucacaccacugcacuccagccug

SEQ ID NO: 957087 - RNA, 23 nt, Human
aucacuugagccugggaggugga

SEQ ID NO: 957088 - RNA, 19 nt, Human
aucaggcacucucuguacc

SEQ ID NO: 957089 - RNA, 21 nt, Human
caaaaauacaaaaauuagcca

SEQ ID NO: 957090 - RNA, 24 nt, Human
caacaugguagaaucccgucucua

SEQ ID NO: 957091 - RNA, 21 nt, Human
caagggcuuccacuaaagccu

SEQ ID NO: 957092 - RNA, 21 nt, Human
cacaccacugcacuccagccu

SEQ ID NO: 957093 - RNA, 25 nt, Human
cacgccuguaaucccagcacuuuug

SEQ ID NO: 957094 - RNA, 22 nt, Human
cacuccagccugggugacagag

SEQ ID NO: 957095 - RNA, 22 nt, Human
cacuccagccugggugacagag

SEQ ID NO: 957096 - RNA, 18 nt, Human
cacucucuguaccccugc

SEQ ID NO: 957097 - RNA, 19 nt, Human
cacugcacuccagccuggg

SEQ ID NO: 957098 - RNA, 19 nt, Human
cacugcacuccagccuggg

SEQ ID NO: 957099 - RNA, 21 nt, Human
cacugcacuccagccugggug

SEQ ID NO: 957100 - RNA, 22 nt, Human
cacugcacuccagccuggguga

SEQ ID NO: 957101 - RNA, 24 nt, Human
cacugcacuccagccugggugaca

SEQ ID NO: 957102 - RNA, 24 nt, Human
cacugcacuccagccugggugaca

SEQ ID NO: 957103 - RNA, 25 nt, Human
cagcacuuuuggaaggcugaggcag

SEQ ID NO: 957104 - RNA, 20 nt, Human
cagcuacucaggaggcuggg

SEQ ID NO: 957105 - RNA, 24 nt, Human
cagcuacucaggaggcuggggugg

SEQ ID NO: 957106 - RNA, 22 nt, Human
cagggagagccgaaugaagaug

SEQ ID NO: 957107 - RNA, 23 nt, Human
ccaagaucaagugagccaagauc

SEQ ID NO: 957108 - RNA, 20 nt, Human
ccacugcacuccagccuggg

SEQ ID NO: 957109 - RNA, 20 nt, Human
ccacugcacuccagccuggg

SEQ ID NO: 957110 - RNA, 20 nt, Human
ccacugcacuccagccuggg

SEQ ID NO: 957111 - RNA, 21 nt, Human
ccacugcacuccagccugggu

SEQ ID NO: 957112 - RNA, 21 nt, Human
ccacugcacuccagccugggu

SEQ ID NO: 957113 - RNA, 23 nt, Human
ccacugcacuccagccuggguga

SEQ ID NO: 957114 - RNA, 23 nt, Human
ccacugcacuccagccuggguga

SEQ ID NO: 957115 - RNA, 24 nt, Human
ccacugcacuccagccugggugac

SEQ ID NO: 957116 - RNA, 25 nt, Human
ccacugcacuccagccugggugaca

SEQ ID NO: 957117 - RNA, 22 nt, Human
cccgucucuaccaaaaauacaa

SEQ ID NO: 957118 - RNA, 22 nt, Human
cccuaucucaaaaaaauaaaaa

SEQ ID NO: 957119 - RNA, 23 nt, Human
cccugccacccugaggaagacaa

SEQ ID NO: 957120 - RNA, 18 nt, Human
cccuuucuuucccugucc

SEQ ID NO: 957121 - RNA, 19 nt, Human
ccuaucucaaaaaaauaaa

SEQ ID NO: 957122 - RNA, 23 nt, Human
ccugggcaacaugguagaauccc

SEQ ID NO: 957123 - RNA, 24 nt, Human
ccugggcaacaugguagaaucccg

SEQ ID NO: 957124 - RNA, 20 nt, Human
ccugggugacagaguaagac

SEQ ID NO: 957125 - RNA, 21 nt, Human
ccuguagucccagcuacucag

SEQ ID NO: 957126 - RNA, 18 nt, Human
cgccuguaaucccagcac

SEQ ID NO: 957127 - RNA, 22 nt, Human
cucacgccuguaaucccagcac

SEQ ID NO: 957128 - RNA, 24 nt, Human
cucacgccuguaaucccagcacuu

SEQ ID NO: 957129 - RNA, 23 nt, Human
cuucuucucucucucucucuuuu

SEQ ID NO: 957130 - RNA, 19 nt, Human
cuucuucuucuucucucuc

SEQ ID NO: 957131 - RNA, 20 nt, Human
gaaagaauaauugaagaaaa

SEQ ID NO: 957132 - RNA, 18 nt, Human
gagguuacagugagccaa

SEQ ID NO: 957133 - RNA, 19 nt, Human
gagguuacagugagccaag

SEQ ID NO: 957134 - RNA, 24 nt, Human
gaucacuugagccugggaggugga

SEQ ID NO: 957135 - RNA, 23 nt, Human
gcacuccagccugggugacagag

SEQ ID NO: 957136 - RNA, 20 nt, Human
gccaagaucacaccacugca

SEQ ID NO: 957137 - RNA, 21 nt, Human
ggagguggagguuacagugag

SEQ ID NO: 957138 - RNA, 20 nt, Human
ggagguuacagugagccaag

SEQ ID NO: 957139 - RNA, 24 nt, Human
ggagguuacagugagccaagauca

SEQ ID NO: 957140 - RNA, 20 nt, Human
ggaucacuugagccugggag

SEQ ID NO: 957141 - RNA, 24 nt, Human
ggaugugguggcucacgccuguaa

SEQ ID NO: 957142 - RNA, 21 nt, Human
ggccggaugugguggcucacg

SEQ ID NO: 957143 - RNA, 24 nt, Human
gguggcucacgccuguaaucccag

SEQ ID NO: 957144 - RNA, 21 nt, Human
ggugggaggaucacuugagcc

SEQ ID NO: 957145 - RNA, 23 nt, Human
ggugggaggaucacuugagccug

SEQ ID NO: 957146 - RNA, 20 nt, Human
ggugugguggcgcaagccug

SEQ ID NO: 957147 - RNA, 26 nt, Human
guacagcuucagggagaggggaacgc

SEQ ID NO: 957148 - RNA, 23 nt, Human
guagaaucccgucucuaccaaaa

SEQ ID NO: 957149 - RNA, 21 nt, Human
gugugguggcgcaagccugua

SEQ ID NO: 957150 - RNA, 22 nt, Human
uaaagauggacaggaaaaauca

SEQ ID NO: 957151 - RNA, 21 nt, Human
uaccaaaaauacaaaaauuag

SEQ ID NO: 957152 - RNA, 24 nt, Human
uaccaaaaauacaaaaauuagcca

SEQ ID NO: 957153 - RNA, 20 nt, Human
uacccuuucuuucccugucc

SEQ ID NO: 957154 - RNA, 21 nt, Human
uagauccagaaaaauccauaa

SEQ ID NO: 957155 - RNA, 23 nt, Human
ucacaccacugcacuccagccug

SEQ ID NO: 957156 - RNA, 24 nt, Human
ucacuugagccugggagguggagg

SEQ ID NO: 957157 - RNA, 25 nt, Human
ucacuugagccugggagguggaggu

SEQ ID NO: 957158 - RNA, 23 nt, Human
uccaaucaggcacucucuguacc

SEQ ID NO: 957159 - RNA, 24 nt, Human
uccagccugggugacagaguaaga

SEQ ID NO: 957160 - RNA, 20 nt, Human
ucucuguaccccugccaccc

SEQ ID NO: 957161 - RNA, 22 nt, Human
ucucuucuguaaacaagggcug

SEQ ID NO: 957162 - RNA, 24 nt, Human
ucuucuguaaacaagggcuuccac

SEQ ID NO: 957163 - RNA, 25 nt, Human
ugaaagagagcaggagaaggaugug

SEQ ID NO: 957164 - RNA, 18 nt, Human
ugagccugggagguggag

SEQ ID NO: 957165 - RNA, 20 nt, Human
ugagccugggagguggaggu

SEQ ID NO: 957166 - RNA, 21 nt, Human
ugaggaagacaaaauaugaga

SEQ ID NO: 957167 - RNA, 21 nt, Human
ugaggaauugaaagagagcag

SEQ ID NO: 957168 - RNA, 20 nt, Human
ugaggcagguggauugcuuc

SEQ ID NO: 957169 - RNA, 18 nt, Human
uggaaggcugaggcaggu

SEQ ID NO: 957170 - RNA, 22 nt, Human
uggaaggcugaggcagguggau

SEQ ID NO: 957171 - RNA, 24 nt, Human
uggaaggcugaggcagguggauug

SEQ ID NO: 957172 - RNA, 23 nt, Human
uggacaggaaaaaucaagaguuc

SEQ ID NO: 957173 - RNA, 24 nt, Human
uggccggaugugguggcucacgcc

SEQ ID NO: 957174 - RNA, 22 nt, Human
uggcucacgccuguaaucccag

SEQ ID NO: 957175 - RNA, 24 nt, Human
uggcucacgccuguaaucccagca

SEQ ID NO: 957176 - RNA, 29 nt, Human
ugggagguggagguuacagugacaacggu

SEQ ID NO: 957177 - RNA, 24 nt, Human
ugggagguggagguuacagugagc

SEQ ID NO: 957178 - RNA, 18 nt, Human
uggggugggaggaucacu

SEQ ID NO: 957179 - RNA, 23 nt, Human
uggggugggaggaucacuugagc

SEQ ID NO: 957180 - RNA, 24 nt, Human
uggggugggaggaucacuugagcc

SEQ ID NO: 957181 - RNA, 20 nt, Human
ugggucaagacccagagggc

SEQ ID NO: 957182 - RNA, 24 nt, Human
ugguggcgcaagccuguaguccca

SEQ ID NO: 957183 - RNA, 24 nt, Human
ugguggcucacgccuguaauccca

SEQ ID NO: 957184 - RNA, 18 nt, Human
ugucucuucuucuucuuc

SEQ ID NO: 957185 - RNA, 20 nt, Human
uguucugcuucucucaaugu

SEQ ID NO: 957186 - RNA, 21 nt, Human
uugagccugggagguggaggu

SEQ ID NO: 957187 - RNA, 20 nt, Human
uuggaaggcugaggcaggug

SEQ ID NO: 957188 - RNA, 23 nt, Human
uuucuuucccuguccugcaaagc

SEQ ID NO: 957189 - RNA, 23 nt, Human
uuuuauuuauugcaugcuugggu

SEQ ID NO: 957190 - RNA, 18 nt, Human
uuuuuuuccaaucaggca

SEQ ID NO: 957191 - RNA, 19 nt, Human
aggccuccccuggacccag

SEQ ID NO: 957192 - RNA, 19 nt, Human
aggcgcucagggugggggc

SEQ ID NO: 957193 - RNA, 19 nt, Human
augggaucucccucacugu

SEQ ID NO: 957194 - RNA, 18 nt, Human
caggagcccaggagggaa

SEQ ID NO: 957195 - RNA, 18 nt, Human
cccuggacccaggcgcuc

SEQ ID NO: 957196 - RNA, 23 nt, Human
ccuggaaggccuccccuggaccc

SEQ ID NO: 957197 - RNA, 20 nt, Human
cucagggugggggcggugaa

SEQ ID NO: 957198 - RNA, 20 nt, Human
cuccccuggacccaggcgcu

SEQ ID NO: 957199 - RNA, 22 nt, Human
cuggaaggccuccccuggaccc

SEQ ID NO: 957200 - RNA, 18 nt, Human
gagucuggggugaggagg

SEQ ID NO: 957201 - RNA, 22 nt, Human
ggagacagucaggagucugggg

SEQ ID NO: 957202 - RNA, 22 nt, Human
ggugccaggagcccaggaggga

SEQ ID NO: 957203 - RNA, 23 nt, Human
uccccuggacccaggcgcucagg

SEQ ID NO: 957204 - RNA, 19 nt, Human
ucucugugugcaggucccu

SEQ ID NO: 957205 - RNA, 24 nt, Human
aaaucaauuucaaaaugaaauaug

SEQ ID NO: 957206 - RNA, 27 nt, Human
aagcuaaucacacugauugauccaugc

SEQ ID NO: 957207 - RNA, 25 nt, Human
agaaguggucagagugagcuggggc

SEQ ID NO: 957208 - RNA, 18 nt, Human
agagugagcuggggcuug

SEQ ID NO: 957209 - RNA, 18 nt, Human
aggcagagaaguggucag

SEQ ID NO: 957210 - RNA, 24 nt, Human
aucacacugauugauccaugcauu

SEQ ID NO: 957211 - RNA, 25 nt, Human
cagcucaacaauagaaaucaauuuc

SEQ ID NO: 957212 - RNA, 25 nt, Human
cccuccugggcccaccaaguucacu

SEQ ID NO: 957213 - RNA, 22 nt, Human
ccuccugggcccaccaaguuca

SEQ ID NO: 957214 - RNA, 23 nt, Human
cuccugggcccaccaaguucacu

SEQ ID NO: 957215 - RNA, 22 nt, Human
cuccuguucccuccugggccca

SEQ ID NO: 957216 - RNA, 22 nt, Human
cugcugagaaagcuaaucacac

SEQ ID NO: 957217 - RNA, 22 nt, Human
cugggcccaccaaguucacugg

SEQ ID NO: 957218 - RNA, 19 nt, Human
gcuccuguucccuccuggg

SEQ ID NO: 957219 - RNA, 22 nt, Human
gcugagcaaaaccauucaauaa

SEQ ID NO: 957220 - RNA, 24 nt, Human
uaaugcagcucaacaauagaaauc

SEQ ID NO: 957221 - RNA, 20 nt, Human
uaauguggcugggcauagca

SEQ ID NO: 957222 - RNA, 22 nt, Human
uauauaauaaguacugccaaua

SEQ ID NO: 957223 - RNA, 23 nt, Human
ucacugggcccucgcagcuucca

SEQ ID NO: 957224 - RNA, 18 nt, Human
uccaggguggcagggcca

SEQ ID NO: 957225 - RNA, 30 nt, Human
uccugggcccaccaaguucacugggcccuu

SEQ ID NO: 957226 - RNA, 23 nt, Human
ucuuagaagagguggccuccagg

SEQ ID NO: 957227 - RNA, 20 nt, Human
ugcccuggcucaggcuccug

SEQ ID NO: 957228 - RNA, 19 nt, Human
uggaaacucacaacuccuc

SEQ ID NO: 957229 - RNA, 18 nt, Human
uggucagagugagcuggg

SEQ ID NO: 957230 - RNA, 23 nt, Human
uucacugggcccucgcagcuucc

SEQ ID NO: 957231 - RNA, 24 nt, Human
uucacugggcccucgcagcuucca

SEQ ID NO: 957232 - RNA, 22 nt, Human
uuggaaacucacaacuccucuc

SEQ ID NO: 957233 - RNA, 22 nt, Human
uuuuuuuuuuuuuuuuucacag

SEQ ID NO: 957234 - RNA, 23 nt, Human
uuuuuuuuuuuuuuuuucacagu

SEQ ID NO: 957235 - RNA, 19 nt, Human
aacagaggcaggccaacgg

SEQ ID NO: 957236 - RNA, 22 nt, Human
accacacucacccucucgcuca

SEQ ID NO: 957237 - RNA, 18 nt, Human
agcuuuacucugaccaca

SEQ ID NO: 957238 - RNA, 18 nt, Human
aggcugcagggcgacugg

SEQ ID NO: 957239 - RNA, 21 nt, Human
cacacaccccaggcccugucc

SEQ ID NO: 957240 - RNA, 20 nt, Human
cacucacacacaccccaggc

SEQ ID NO: 957241 - RNA, 19 nt, Human
cacucacccucucgcucac

SEQ ID NO: 957242 - RNA, 23 nt, Human
ccacacucacccucucgcucaca

SEQ ID NO: 957243 - RNA, 19 nt, Human
cccucucgcucacacucac

SEQ ID NO: 957244 - RNA, 19 nt, Human
cuggaagccugguccuucc

SEQ ID NO: 957245 - RNA, 26 nt, Human
gcucacacucacacucacacacaccc

SEQ ID NO: 957246 - RNA, 19 nt, Human
ggcgacugggaugcagggg

SEQ ID NO: 957247 - RNA, 19 nt, Human
ucugugugaggcugcaggg

SEQ ID NO: 957248 - RNA, 19 nt, Human
ugaccacacucacccucuc

SEQ ID NO: 957249 - RNA, 22 nt, Human
ugaccacacucacccucucgcu

SEQ ID NO: 957250 - RNA, 18 nt, Human
ugggaugcaggggugaaa

SEQ ID NO: 957251 - RNA, 19 nt, Human
uguccuggcuggucagguc

SEQ ID NO: 957252 - RNA, 25 nt, Human
uguccuggcuggucaggucuggugc

SEQ ID NO: 957253 - RNA, 26 nt, Human
aaacaaaauucauuauaauaaaauaa

SEQ ID NO: 957254 - RNA, 21 nt, Human
acuaguaccaugaaagauaaa

SEQ ID NO: 957255 - RNA, 19 nt, Human
agggugucuggggaaagcu

SEQ ID NO: 957256 - RNA, 21 nt, Human
cccagggguagaacugugguu

SEQ ID NO: 957257 - RNA, 24 nt, Human
cccucaaaacaucccagggguaga

SEQ ID NO: 957258 - RNA, 19 nt, Human
cugcagauucuuggguugu

SEQ ID NO: 957259 - RNA, 25 nt, Human
cuugcaaagacccucaaaacauccc

SEQ ID NO: 957260 - RNA, 24 nt, Human
uaaaacagggugucuggggaaagc

SEQ ID NO: 957261 - RNA, 21 nt, Human
uaaaacaucaauaacuuaaau

SEQ ID NO: 957262 - RNA, 23 nt, Human
uaccaugaaagauaaacuuaaaa

SEQ ID NO: 957263 - RNA, 18 nt, Human
uaucuaaaaaacacuagu

SEQ ID NO: 957264 - RNA, 23 nt, Human
ucuaaaaaacacuaguaccauga

SEQ ID NO: 957265 - RNA, 19 nt, Human
uggaauguuaaaaaaaauu

SEQ ID NO: 957266 - RNA, 21 nt, Human
uggggaaagcuaggggaaaau

SEQ ID NO: 957267 - RNA, 22 nt, Human
uuaaaacaucaauaacuuaaau

SEQ ID NO: 957268 - RNA, 21 nt, Human
uucuuuguauuaaugauucuu

SEQ ID NO: 957269 - RNA, 24 nt, Human
uuuuuuuuuuuuguacaaaaauau

SEQ ID NO: 957270 - RNA, 23 nt, Human
aaacacagaaaaccuacagcuau

SEQ ID NO: 957271 - RNA, 23 nt, Human
aaccuccaaccccagcaagguuc

SEQ ID NO: 957272 - RNA, 20 nt, Human
agaaaaccuacagcuauaaa

SEQ ID NO: 957273 - RNA, 20 nt, Human
agauaagcacuaaacccucc

SEQ ID NO: 957274 - RNA, 21 nt, Human
agauaagcacuaaacccucca

SEQ ID NO: 957275 - RNA, 19 nt, Human
agcuaaacacagaaaaccu

SEQ ID NO: 957276 - RNA, 21 nt, Human
caagguucuuucuguucuugg

SEQ ID NO: 957277 - RNA, 18 nt, Human
caauuccauuccagaaaa

SEQ ID NO: 957278 - RNA, 20 nt, Human
cagcaagguucuuucuguuc

SEQ ID NO: 957279 - RNA, 19 nt, Human
ccuccaaccccagcaaggu

SEQ ID NO: 957280 - RNA, 22 nt, Human
gagacaaaacaauauaaacaaa

SEQ ID NO: 957281 - RNA, 23 nt, Human
ggagacaaaacaauauaaacaaa

SEQ ID NO: 957282 - RNA, 22 nt, Human
gugaaaccuccaaccccagcaa

SEQ ID NO: 957283 - RNA, 24 nt, Human
uaaaauacaguuuaacuuuaaugu

SEQ ID NO: 957284 - RNA, 18 nt, Human
uaaugcaauuacaacaau

SEQ ID NO: 957285 - RNA, 22 nt, Human
ugaugcaauaugaaucaacuuc

SEQ ID NO: 957286 - RNA, 19 nt, Human
uuacaacaauuuaggagac

SEQ ID NO: 957287 - RNA, 20 nt, Human
uuacaacaauuuaggagaca

SEQ ID NO: 957288 - RNA, 21 nt, Human
aagaggccagagcugagggug

SEQ ID NO: 957289 - RNA, 19 nt, Human
aagcaggagaaagagugug

SEQ ID NO: 957290 - RNA, 23 nt, Human
aagcaggagaaagaguguggcaa

SEQ ID NO: 957291 - RNA, 25 nt, Human
aagcaggagaaagaguguggcaagg

SEQ ID NO: 957292 - RNA, 19 nt, Human
aagcguuggugaggcuggu

SEQ ID NO: 957293 - RNA, 20 nt, Human
aagcguuggugaggcuggug

SEQ ID NO: 957294 - RNA, 24 nt, Human
agacagaacagcuuuuuauucagu

SEQ ID NO: 957295 - RNA, 20 nt, Human
aggguccugaugauucuccu

SEQ ID NO: 957296 - RNA, 18 nt, Human
caggagaaagaguguggc

SEQ ID NO: 957297 - RNA, 19 nt, Human
caggagaaagaguguggca

SEQ ID NO: 957298 - RNA, 21 nt, Human
ccagggccccugagcauagcc

SEQ ID NO: 957299 - RNA, 23 nt, Human
ccaggguccugaugauucuccuu

SEQ ID NO: 957300 - RNA, 19 nt, Human
cugcugccuccucucaugc

SEQ ID NO: 957301 - RNA, 21 nt, Human
gaagacagaacagcuuuuuau

SEQ ID NO: 957302 - RNA, 20 nt, Human
gggagacucucccuccucgg

SEQ ID NO: 957303 - RNA, 22 nt, Human
gggccccugagcauagccuccu

SEQ ID NO: 957304 - RNA, 24 nt, Human
ggggugguuaaagcaggagaaaga

SEQ ID NO: 957305 - RNA, 21 nt, Human
ggguagagcugggaaugcaga

SEQ ID NO: 957306 - RNA, 19 nt, Human
ggguggcugcuccagggcc

SEQ ID NO: 957307 - RNA, 18 nt, Human
guccugcugccuccucuc

SEQ ID NO: 957308 - RNA, 24 nt, Human
gucucucuggaccuggccugcugu

SEQ ID NO: 957309 - RNA, 20 nt, Human
gugggguguacuggggagcc

SEQ ID NO: 957310 - RNA, 19 nt, Human
uaaagcaggagaaagagug

SEQ ID NO: 957311 - RNA, 19 nt, Human
uaucagguccaggguccug

SEQ ID NO: 957312 - RNA, 20 nt, Human
uaucagguccaggguccuga

SEQ ID NO: 957313 - RNA, 21 nt, Human
ucaagcguuggugaggcuggu

SEQ ID NO: 957314 - RNA, 19 nt, Human
ucccugggagacucucccu

SEQ ID NO: 957315 - RNA, 20 nt, Human
uccucggucucucuggaccu

SEQ ID NO: 957316 - RNA, 18 nt, Human
ucucccuccucggucucu

SEQ ID NO: 957317 - RNA, 18 nt, Human
ucucuggaccuggccugc

SEQ ID NO: 957318 - RNA, 24 nt, Human
ucugugguagagggugaguaagag

SEQ ID NO: 957319 - RNA, 18 nt, Human
ugaguaagaggccagagc

SEQ ID NO: 957320 - RNA, 18 nt, Human
ugaguaagaggccagagc

SEQ ID NO: 957321 - RNA, 23 nt, Human
ugcagauggggugguuaaagcag

SEQ ID NO: 957322 - RNA, 23 nt, Human
ugcugugggcagcucagccaugc

SEQ ID NO: 957323 - RNA, 22 nt, Human
uggcugcuccagggccccugag

SEQ ID NO: 957324 - RNA, 22 nt, Human
ugggaagacagaacagcuuuuu

SEQ ID NO: 957325 - RNA, 19 nt, Human
ugggguggcugcuccaggg

SEQ ID NO: 957326 - RNA, 19 nt, Human
ugggguguacuggggagcc

SEQ ID NO: 957327 - RNA, 21 nt, Human
uggguucaggcuucaagcguu

SEQ ID NO: 957328 - RNA, 22 nt, Human
uggguucaggcuucaagcguug

SEQ ID NO: 957329 - RNA, 18 nt, Human
aaaauuagcugggcgugg

SEQ ID NO: 957330 - RNA, 18 nt, Human
aaaauucuuccauucauc

SEQ ID NO: 957331 - RNA, 20 nt, Human
aacauggcaaaaccccgucu

SEQ ID NO: 957332 - RNA, 21 nt, Human
aacauggcaaaaccccgucuc

SEQ ID NO: 957333 - RNA, 21 nt, Human
aagaggccaggcacuguggcu

SEQ ID NO: 957334 - RNA, 18 nt, Human
aagaggccaggccugggu

SEQ ID NO: 957335 - RNA, 26 nt, Human
aagcagacacgacacauagguaaaac

SEQ ID NO: 957336 - RNA, 20 nt, Human
aagcaggggaaucgcugaug

SEQ ID NO: 957337 - RNA, 23 nt, Human
aagccaggcgcagugacucacgc

SEQ ID NO: 957338 - RNA, 18 nt, Human
aaggacaggacaggaggg

SEQ ID NO: 957339 - RNA, 24 nt, Human
aaucacuugaacccaggaggcaga

SEQ ID NO: 957340 - RNA, 24 nt, Human
aaucgcuugaacccaggaggucga

SEQ ID NO: 957341 - RNA, 19 nt, Human
aaucugggcaaauuugggg

SEQ ID NO: 957342 - RNA, 19 nt, Human
acaagagcgaaacuccauc

SEQ ID NO: 957343 - RNA, 20 nt, Human
acaagagcgaaacuccaucu

SEQ ID NO: 957344 - RNA, 21 nt, Human
acaagagcgaaacuccaucuc

SEQ ID NO: 957345 - RNA, 18 nt, Human
acaaggaagguggaucac

SEQ ID NO: 957346 - RNA, 24 nt, Human
acagagugagacccugccauaaaa

SEQ ID NO: 957347 - RNA, 23 nt, Human
acagggauggagaucagggaaug

SEQ ID NO: 957348 - RNA, 21 nt, Human
acauauauaacuccagcuuau

SEQ ID NO: 957349 - RNA, 23 nt, Human
accacccaaaaaaagccugaggg

SEQ ID NO: 957350 - RNA, 22 nt, Human
accauugcacuccagcgugggu

SEQ ID NO: 957351 - RNA, 25 nt, Human
accauugcacuccagcgugggugac

SEQ ID NO: 957352 - RNA, 22 nt, Human
acccaaaucccagucuuuagcc

SEQ ID NO: 957353 - RNA, 20 nt, Human
accuguaaucccagcuacuc

SEQ ID NO: 957354 - RNA, 23 nt, Human
accuguaaucccagcuacucagg

SEQ ID NO: 957355 - RNA, 22 nt, Human
acgccacugcacuccagccugg

SEQ ID NO: 957356 - RNA, 24 nt, Human
acgccacugcacuccagccugggc

SEQ ID NO: 957357 - RNA, 24 nt, Human
acuccagccugggcgacagaguga

SEQ ID NO: 957358 - RNA, 24 nt, Human
acugcacuccagccugggcgacag

SEQ ID NO: 957359 - RNA, 26 nt, Human
acugcacuccagccugggcgacagag

SEQ ID NO: 957360 - RNA, 24 nt, Human
acuugaggucaggaguucaagacc

SEQ ID NO: 957361 - RNA, 22 nt, Human
agaaucacuugaacccaggagg

SEQ ID NO: 957362 - RNA, 24 nt, Human
agacagagauggaacccagaucca

SEQ ID NO: 957363 - RNA, 19 nt, Human
agcacuuugggaggcugag

SEQ ID NO: 957364 - RNA, 24 nt, Human
agcacuuugggaggcugagguggg

SEQ ID NO: 957365 - RNA, 21 nt, Human
agcaggaaccuguaaucccag

SEQ ID NO: 957366 - RNA, 18 nt, Human
agccagaaaggcauagau

SEQ ID NO: 957367 - RNA, 23 nt, Human
agccaggaggaucgcuugagccc

SEQ ID NO: 957368 - RNA, 18 nt, Human
agccagggccugucugca

SEQ ID NO: 957369 - RNA, 19 nt, Human
agccguaguggcacacacc

SEQ ID NO: 957370 - RNA, 24 nt, Human
agccguaguggcacacaccuguaa

SEQ ID NO: 957371 - RNA, 23 nt, Human
agccuggccaacauggugaagcc

SEQ ID NO: 957372 - RNA, 22 nt, Human
agccuggccaauauggugaaac

SEQ ID NO: 957373 - RNA, 23 nt, Human
agccuggccaauauggugaaacc

SEQ ID NO: 957374 - RNA, 24 nt, Human
agccuggccaauauggugaaaccu

SEQ ID NO: 957375 - RNA, 22 nt, Human
agccugggcgacagagugagac

SEQ ID NO: 957376 - RNA, 24 nt, Human
agccuggguaacauggcaaaaccc

SEQ ID NO: 957377 - RNA, 24 nt, Human
agcuacuugggaggcugggguggg

SEQ ID NO: 957378 - RNA, 21 nt, Human
agcugcuugggcgagcaaugc

SEQ ID NO: 957379 - RNA, 21 nt, Human
agcuggaugccuaggcagugu

SEQ ID NO: 957380 - RNA, 19 nt, Human
aggaaaaaaagggggaggc

SEQ ID NO: 957381 - RNA, 22 nt, Human
aggaaaaaaagggggaggcugg

SEQ ID NO: 957382 - RNA, 23 nt, Human
aggaaggaggcagggaaagugga

SEQ ID NO: 957383 - RNA, 22 nt, Human
aggaagguggaucacuugaggu

SEQ ID NO: 957384 - RNA, 26 nt, Human
aggaagguggaucacuugaggucagg

SEQ ID NO: 957385 - RNA, 21 nt, Human
aggaccacccaaaaaaagccu

SEQ ID NO: 957386 - RNA, 23 nt, Human
aggaggcagggaaaguggaaugg

SEQ ID NO: 957387 - RNA, 19 nt, Human
aggaggcugaggcaagaga

SEQ ID NO: 957388 - RNA, 20 nt, Human
aggaguuugagaccagccug

SEQ ID NO: 957389 - RNA, 24 nt, Human
aggaucgcuugagcccaggaguuu

SEQ ID NO: 957390 - RNA, 24 nt, Human
aggauuccuucacucaauuacacc

SEQ ID NO: 957391 - RNA, 18 nt, Human
aggcaagagaaucacuug

SEQ ID NO: 957392 - RNA, 24 nt, Human
aggcaagagaaucacuugaaccca

SEQ ID NO: 957393 - RNA, 24 nt, Human
aggcacuguggcucacgccuguaa

SEQ ID NO: 957394 - RNA, 24 nt, Human
aggcagaggauggguuagaggggu

SEQ ID NO: 957395 - RNA, 25 nt, Human
aggcagaggcuucaauaagccaaga

SEQ ID NO: 957396 - RNA, 20 nt, Human
aggcagggaaaguggaaugg

SEQ ID NO: 957397 - RNA, 21 nt, Human
aggcagggaaaguggaauggg

SEQ ID NO: 957398 - RNA, 22 nt, Human
aggcccuggaugacacugagcu

SEQ ID NO: 957399 - RNA, 24 nt, Human
aggcgcagugacucacgccuguaa

SEQ ID NO: 957400 - RNA, 24 nt, Human
aggcugagccaggaggaucgcuug

SEQ ID NO: 957401 - RNA, 24 nt, Human
aggcugaggcaagagaaucacuug

SEQ ID NO: 957402 - RNA, 24 nt, Human
aggcugaggugggcggauuaccug

SEQ ID NO: 957403 - RNA, 24 nt, Human
aggcuggggugggagaaucgcuug

SEQ ID NO: 957404 - RNA, 22 nt, Human
aggcuuggagacuagaguaacu

SEQ ID NO: 957405 - RNA, 20 nt, Human
agggagaggggagggacauu

SEQ ID NO: 957406 - RNA, 23 nt, Human
agggagaggggagggacauuagu

SEQ ID NO: 957407 - RNA, 20 nt, Human
agggagugggggaagaaagg

SEQ ID NO: 957408 - RNA, 24 nt, Human
agggcaguggggagucauggaagg

SEQ ID NO: 957409 - RNA, 21 nt, Human
agggccaggaaagcuccaccu

SEQ ID NO: 957410 - RNA, 19 nt, Human
aggggcaaggacaggacag

SEQ ID NO: 957411 - RNA, 19 nt, Human
agguagggcuccugagccu

SEQ ID NO: 957412 - RNA, 24 nt, Human
aggucgagguuguagugagccgag

SEQ ID NO: 957413 - RNA, 22 nt, Human
agguggaucacuugaggucagg

SEQ ID NO: 957414 - RNA, 21 nt, Human
aggugggcggauuaccugagg

SEQ ID NO: 957415 - RNA, 21 nt, Human
agguggugggacuuucugggu

SEQ ID NO: 957416 - RNA, 24 nt, Human
agugacucacgccuguaaucccag

SEQ ID NO: 957417 - RNA, 19 nt, Human
agugcucuaugcuagaggc

SEQ ID NO: 957418 - RNA, 24 nt, Human
aguggcacacaccuguaaucccag

SEQ ID NO: 957419 - RNA, 18 nt, Human
auaaaaaaaaaaaaaagu

SEQ ID NO: 957420 - RNA, 23 nt, Human
auagcucacgccuguaaucucag

SEQ ID NO: 957421 - RNA, 24 nt, Human
aucacgccacugcacuccagccug

SEQ ID NO: 957422 - RNA, 23 nt, Human
aucacuugaggucaggaguucaa

SEQ ID NO: 957423 - RNA, 23 nt, Human
augcagagaguuggcacaggcuu

SEQ ID NO: 957424 - RNA, 19 nt, Human
auggugaaaccugucucua

SEQ ID NO: 957425 - RNA, 19 nt, Human
auuacacccuacucuuugc

SEQ ID NO: 957426 - RNA, 21 nt, Human
auugcacuccagcguggguga

SEQ ID NO: 957427 - RNA, 22 nt, Human
caaaaaaaaaaaaaaaaaggga

SEQ ID NO: 957428 - RNA, 22 nt, Human
caaauacauauauaacuccagc

SEQ ID NO: 957429 - RNA, 23 nt, Human
caaaucccaagaaucugcggaga

SEQ ID NO: 957430 - RNA, 21 nt, Human
caacaucccaggcaaagaccc

SEQ ID NO: 957431 - RNA, 24 nt, Human
caacaucccaggcaaagacccaga

SEQ ID NO: 957432 - RNA, 24 nt, Human
caacauggugaagccucgucucua

SEQ ID NO: 957433 - RNA, 23 nt, Human
caagaccacaccauugcacucca

SEQ ID NO: 957434 - RNA, 24 nt, Human
caagaccagccuggccaauauggu

SEQ ID NO: 957435 - RNA, 24 nt, Human
caaggaagguggaucacuugaggu

SEQ ID NO: 957436 - RNA, 26 nt, Human
caaggaagguggaucacuugagguca

SEQ ID NO: 957437 - RNA, 23 nt, Human
caauauggugaaaccugucucua

SEQ ID NO: 957438 - RNA, 24 nt, Human
cacaccuguaaucccagcuacuug

SEQ ID NO: 957439 - RNA, 20 nt, Human
cacacuuucaaccugagccc

SEQ ID NO: 957440 - RNA, 24 nt, Human
cacacuuucaaccugagccccaca

SEQ ID NO: 957441 - RNA, 22 nt, Human
cacccuacucuuugccuccugc

SEQ ID NO: 957442 - RNA, 23 nt, Human
caccuguaaucccagcuacuugg

SEQ ID NO: 957443 - RNA, 24 nt, Human
caccuguaaucccagcuacuuggg

SEQ ID NO: 957444 - RNA, 19 nt, Human
caccuugucccccucucac

SEQ ID NO: 957445 - RNA, 20 nt, Human
caccuugucccccucucaca

SEQ ID NO: 957446 - RNA, 24 nt, Human
cacgccuguaaucccagcacuuug

SEQ ID NO: 957447 - RNA, 24 nt, Human
cacgccuguaaucccagcacuuug

SEQ ID NO: 957448 - RNA, 24 nt, Human
cacgccuguaaucucagcacuuug

SEQ ID NO: 957449 - RNA, 22 nt, Human
cacuccagccugggcgacagag

SEQ ID NO: 957450 - RNA, 22 nt, Human
cacuccagccugggcgacagag

SEQ ID NO: 957451 - RNA, 24 nt, Human
cacuccagccugggcgacagagug

SEQ ID NO: 957452 - RNA, 24 nt, Human
cacuccagcgugggugacaagagc

SEQ ID NO: 957453 - RNA, 19 nt, Human
cacugcacuccagccuggg

SEQ ID NO: 957454 - RNA, 20 nt, Human
cacugcacuccagccugggc

SEQ ID NO: 957455 - RNA, 22 nt, Human
cacugcacuccagccugggcga

SEQ ID NO: 957456 - RNA, 23 nt, Human
cacugcacuccagccugggcgac

SEQ ID NO: 957457 - RNA, 24 nt, Human
cacugcacuccagccugggcgaca

SEQ ID NO: 957458 - RNA, 23 nt, Human
cacuugaggucaggaguucaaga

SEQ ID NO: 957459 - RNA, 21 nt, Human
cagcacggaggugaccaaggg

SEQ ID NO: 957460 - RNA, 20 nt, Human
cagcacuuugggagcacaag

SEQ ID NO: 957461 - RNA, 27 nt, Human
cagcacuuugggagcacaaggaaggug

SEQ ID NO: 957462 - RNA, 18 nt, Human
cagcacuuugggaggcug

SEQ ID NO: 957463 - RNA, 24 nt, Human
cagcacuuugggaggcugagccag

SEQ ID NO: 957464 - RNA, 21 nt, Human
cagcacuuugggaggcugagg

SEQ ID NO: 957465 - RNA, 24 nt, Human
cagcacuuugggaggcugaggugg

SEQ ID NO: 957466 - RNA, 24 nt, Human
cagcuacuugggaggcuggggugg

SEQ ID NO: 957467 - RNA, 18 nt, Human
caggacaggagggagaag

SEQ ID NO: 957468 - RNA, 24 nt, Human
caggaggcugaggcaagagaauca

SEQ ID NO: 957469 - RNA, 24 nt, Human
cagugcucuaugcuagaggcuugg

SEQ ID NO: 957470 - RNA, 21 nt, Human
cauagauagacccaaauccca

SEQ ID NO: 957471 - RNA, 22 nt, Human
cauagauagacccaaaucccuc

SEQ ID NO: 957472 - RNA, 19 nt, Human
cauugcacuccagcguggg

SEQ ID NO: 957473 - RNA, 19 nt, Human
cauugcacuccagcguggg

SEQ ID NO: 957474 - RNA, 21 nt, Human
cauugcacuccagcgugggug

SEQ ID NO: 957475 - RNA, 24 nt, Human
cauugcacuccagcgugggugaca

SEQ ID NO: 957476 - RNA, 25 nt, Human
cauugcacuccagcgugggugacaa

SEQ ID NO: 957477 - RNA, 18 nt, Human
ccaagaccacaccauugc

SEQ ID NO: 957478 - RNA, 22 nt, Human
ccacagacagagagagagagcg

SEQ ID NO: 957479 - RNA, 21 nt, Human
ccacagccagcuuccucccag

SEQ ID NO: 957480 - RNA, 22 nt, Human
ccacaugccaggcuugggagac

SEQ ID NO: 957481 - RNA, 20 nt, Human
ccacugcacuccagccuggg

SEQ ID NO: 957482 - RNA, 20 nt, Human
ccacugcacuccagccuggg

SEQ ID NO: 957483 - RNA, 21 nt, Human
ccacugcacuccagccugggc

SEQ ID NO: 957484 - RNA, 21 nt, Human
ccacugcacuccagccugggc

SEQ ID NO: 957485 - RNA, 24 nt, Human
ccacugcacuccagccugggcgac

SEQ ID NO: 957486 - RNA, 21 nt, Human
ccacuuucugggcucugauuc

SEQ ID NO: 957487 - RNA, 22 nt, Human
ccaggaggucgagguuguagug

SEQ ID NO: 957488 - RNA, 18 nt, Human
ccaggcacuguggcucac

SEQ ID NO: 957489 - RNA, 24 nt, Human
ccagucuuuagccuggcccaacca

SEQ ID NO: 957490 - RNA, 24 nt, Human
ccaucucaaaaaaaaaaaaaaaaa

SEQ ID NO: 957491 - RNA, 20 nt, Human
ccauugcacuccagcguggg

SEQ ID NO: 957492 - RNA, 20 nt, Human
ccauugcacuccagcguggg

SEQ ID NO: 957493 - RNA, 21 nt, Human
ccauugcacuccagcgugggu

SEQ ID NO: 957494 - RNA, 23 nt, Human
ccauugcacuccagcguggguga

SEQ ID NO: 957495 - RNA, 24 nt, Human
ccauugcacuccagcgugggugac

SEQ ID NO: 957496 - RNA, 25 nt, Human
ccauugcacuccagcgugggugaca

SEQ ID NO: 957497 - RNA, 24 nt, Human
cccacacuuucaaccugagcccca

SEQ ID NO: 957498 - RNA, 19 nt, Human
cccaggauuccuucacuca

SEQ ID NO: 957499 - RNA, 22 nt, Human
cccccucucacaguuccuaaaa

SEQ ID NO: 957500 - RNA, 22 nt, Human
ccuaaaauucuuccauucaucu

SEQ ID NO: 957501 - RNA, 20 nt, Human
ccucccucagaaaggaccag

SEQ ID NO: 957502 - RNA, 23 nt, Human
ccucgucucuacuaaaaauacaa

SEQ ID NO: 957503 - RNA, 21 nt, Human
ccugagccuuccuggaggagc

SEQ ID NO: 957504 - RNA, 21 nt, Human
ccuggccaacauggugaagcc

SEQ ID NO: 957505 - RNA, 24 nt, Human
ccuggccaacauggugaagccucg

SEQ ID NO: 957506 - RNA, 21 nt, Human
ccuggccaauauggugaaacc

SEQ ID NO: 957507 - RNA, 23 nt, Human
ccuggccaauauggugaaaccug

SEQ ID NO: 957508 - RNA, 21 nt, Human
ccuggcccaaccaccugagaa

SEQ ID NO: 957509 - RNA, 23 nt, Human
ccuggguaacauggcaaaacccc

SEQ ID NO: 957510 - RNA, 24 nt, Human
ccuggguaacauggcaaaaccccg

SEQ ID NO: 957511 - RNA, 22 nt, Human
ccuguaaucccagcacuuuggg

SEQ ID NO: 957512 - RNA, 21 nt, Human
ccuguaaucccagcuacucag

SEQ ID NO: 957513 - RNA, 21 nt, Human
ccuguaaucccagcuacuugg

SEQ ID NO: 957514 - RNA, 22 nt, Human
ccugucucuacuaaaaauacaa

SEQ ID NO: 957515 - RNA, 23 nt, Human
cgaaacuccaucucaaaaaaaaa

SEQ ID NO: 957516 - RNA, 24 nt, Human
cgagaccagccuggccaacauggu

SEQ ID NO: 957517 - RNA, 26 nt, Human
cgccacugcacuccagccugggcgac

SEQ ID NO: 957518 - RNA, 23 nt, Human
cgccuguaaucccagcacuuugg

SEQ ID NO: 957519 - RNA, 24 nt, Human
cgccuguaaucccagcacuuuggg

SEQ ID NO: 957520 - RNA, 23 nt, Human
cgccuguaaucucagcacuuugg

SEQ ID NO: 957521 - RNA, 24 nt, Human
cgccuguaaucucagcacuuuggg

SEQ ID NO: 957522 - RNA, 24 nt, Human
cggauuaccugaggacaggaguuc

SEQ ID NO: 957523 - RNA, 20 nt, Human
cuagaacccaacauucauga

SEQ ID NO: 957524 - RNA, 22 nt, Human
cucacgccuguaaucccagcac

SEQ ID NO: 957525 - RNA, 22 nt, Human
cucacgccuguaaucccagcac

SEQ ID NO: 957526 - RNA, 24 nt, Human
cucacgccuguaaucccagcacuu

SEQ ID NO: 957527 - RNA, 24 nt, Human
cucacgccuguaaucccagcacuu

SEQ ID NO: 957528 - RNA, 22 nt, Human
cucacgccuguaaucucagcac

SEQ ID NO: 957529 - RNA, 24 nt, Human
cucacgccuguaaucucagcacuu

SEQ ID NO: 957530 - RNA, 19 nt, Human
cuccaucucaaaaaaaaaa

SEQ ID NO: 957531 - RNA, 21 nt, Human
cucccagggccaggaaagcuc

SEQ ID NO: 957532 - RNA, 18 nt, Human
cuccugccacagacagag

SEQ ID NO: 957533 - RNA, 21 nt, Human
cugccauaaaaaaaaaaaaaa

SEQ ID NO: 957534 - RNA, 22 nt, Human
cugggugucagcaacaucccag

SEQ ID NO: 957535 - RNA, 22 nt, Human
cugggugucagcaacaucccag

SEQ ID NO: 957536 - RNA, 21 nt, Human
cuguaaucccagcuacucagg

SEQ ID NO: 957537 - RNA, 21 nt, Human
cuguaaucccagcuacuuggg

SEQ ID NO: 957538 - RNA, 18 nt, Human
cugugguaggcagguuga

SEQ ID NO: 957539 - RNA, 20 nt, Human
cuugucccccucucacaguu

SEQ ID NO: 957540 - RNA, 18 nt, Human
gaaaaaaagggggaggcu

SEQ ID NO: 957541 - RNA, 18 nt, Human
gaagaggaagccaggcgc

SEQ ID NO: 957542 - RNA, 20 nt, Human
gaagaggaagccaggcgcag

SEQ ID NO: 957543 - RNA, 19 nt, Human
gaagaggccaggccugggg

SEQ ID NO: 957544 - RNA, 21 nt, Human
gaccacccaaaaaaagccuga

SEQ ID NO: 957545 - RNA, 25 nt, Human
gacgcuugagggccccguuccagag

SEQ ID NO: 957546 - RNA, 21 nt, Human
gacugcagggagggaggcagg

SEQ ID NO: 957547 - RNA, 19 nt, Human
gagaggggagggacauuag

SEQ ID NO: 957548 - RNA, 23 nt, Human
gagaucacgccacugcacuccag

SEQ ID NO: 957549 - RNA, 21 nt, Human
gagauggcagugacagcacgg

SEQ ID NO: 957550 - RNA, 18 nt, Human
gaggcuggggugggagaa

SEQ ID NO: 957551 - RNA, 20 nt, Human
gaggcugggugugauagcuc

SEQ ID NO: 957552 - RNA, 22 nt, Human
gagguuguagugagccgagauc

SEQ ID NO: 957553 - RNA, 23 nt, Human
gagguuguagugagccgagauca

SEQ ID NO: 957554 - RNA, 23 nt, Human
gaucacuugaggucaggaguuca

SEQ ID NO: 957555 - RNA, 24 nt, Human
gaucacuugaggucaggaguucaa

SEQ ID NO: 957556 - RNA, 24 nt, Human
gaucgcuugagcccaggaguuuga

SEQ ID NO: 957557 - RNA, 18 nt, Human
gauuaccugaggacagga

SEQ ID NO: 957558 - RNA, 24 nt, Human
gauuaccugaggacaggaguucga

SEQ ID NO: 957559 - RNA, 22 nt, Human
gcaagagaaucacuugaaccca

SEQ ID NO: 957560 - RNA, 24 nt, Human
gcacuccagccugggcgacagagu

SEQ ID NO: 957561 - RNA, 21 nt, Human
gcagguugacccuggguucgg

SEQ ID NO: 957562 - RNA, 24 nt, Human
gccaacauggugaagccucgucuc

SEQ ID NO: 957563 - RNA, 23 nt, Human
gccaauauggugaaaccugucuc

SEQ ID NO: 957564 - RNA, 22 nt, Human
gccacugcacuccagccugggc

SEQ ID NO: 957565 - RNA, 24 nt, Human
gccacugcacuccagccugggcga

SEQ ID NO: 957566 - RNA, 22 nt, Human
gcccaggaguuugagaccagcc

SEQ ID NO: 957567 - RNA, 20 nt, Human
gccgagaucacgccacugca

SEQ ID NO: 957568 - RNA, 20 nt, Human
gccuuggagggcuggugggg

SEQ ID NO: 957569 - RNA, 20 nt, Human
gcgcuacgcuaccacagcca

SEQ ID NO: 957570 - RNA, 22 nt, Human
gcuccaccuugucccccucuca

SEQ ID NO: 957571 - RNA, 19 nt, Human
gcugggugugauagcucac

SEQ ID NO: 957572 - RNA, 20 nt, Human
gcuucuggcggggagcagcu

SEQ ID NO: 957573 - RNA, 19 nt, Human
gcuuggagacuagaguaac

SEQ ID NO: 957574 - RNA, 18 nt, Human
ggaaagcuccaccuuguc

SEQ ID NO: 957575 - RNA, 24 nt, Human
ggaagccaggcgcagugacucacg

SEQ ID NO: 957576 - RNA, 21 nt, Human
ggacaucuaauacaugaaaug

SEQ ID NO: 957577 - RNA, 22 nt, Human
ggagacagagauggaacccaga

SEQ ID NO: 957578 - RNA, 24 nt, Human
ggagaucccaggacgcuugagggc

SEQ ID NO: 957579 - RNA, 22 nt, Human
ggaggucgagguuguagugagc

SEQ ID NO: 957580 - RNA, 22 nt, Human
ggaucacuugaggucaggaguu

SEQ ID NO: 957581 - RNA, 22 nt, Human
ggaucgcuugagcccaggaguu

SEQ ID NO: 957582 - RNA, 23 nt, Human
ggauuaccugaggacaggaguuc

SEQ ID NO: 957583 - RNA, 23 nt, Human
ggcgugguagcaggaaccuguaa

SEQ ID NO: 957584 - RNA, 21 nt, Human
ggcucacgccuguaaucccag

SEQ ID NO: 957585 - RNA, 22 nt, Human
ggcuccugagccuuccuggagg

SEQ ID NO: 957586 - RNA, 19 nt, Human
gggagauggcagugacagc

SEQ ID NO: 957587 - RNA, 26 nt, Human
gggaggcagaggauggguuagagggg

SEQ ID NO: 957588 - RNA, 20 nt, Human
gggaggcugaggugggcgga

SEQ ID NO: 957589 - RNA, 24 nt, Human
gggauggagaucagggaaugcaga

SEQ ID NO: 957590 - RNA, 18 nt, Human
gggcuccugagccuuccu

SEQ ID NO: 957591 - RNA, 18 nt, Human
ggggagagggaagaggcc

SEQ ID NO: 957592 - RNA, 24 nt, Human
ggggaggcugggugugauagcuca

SEQ ID NO: 957593 - RNA, 19 nt, Human
gggggagaaaacccccaaa

SEQ ID NO: 957594 - RNA, 21 nt, Human
gggggagauggcagugacagc

SEQ ID NO: 957595 - RNA, 23 nt, Human
gggggguggggagagggaagagg

SEQ ID NO: 957596 - RNA, 19 nt, Human
ggguauuggagguuggagg

SEQ ID NO: 957597 - RNA, 23 nt, Human
gggugggagaaucgcuugaaccc

SEQ ID NO: 957598 - RNA, 22 nt, Human
ggugggagaaucgcuugaaccc

SEQ ID NO: 957599 - RNA, 23 nt, Human
ggugugauagcucacgccuguaa

SEQ ID NO: 957600 - RNA, 21 nt, Human
gugaagccucgucucuacuaa

SEQ ID NO: 957601 - RNA, 21 nt, Human
guggaaugggggguacucuga

SEQ ID NO: 957602 - RNA, 22 nt, Human
guggcucacgccuguaauccca

SEQ ID NO: 957603 - RNA, 23 nt, Human
guggcucacgccuguaaucccag

SEQ ID NO: 957604 - RNA, 21 nt, Human
uaaaaauacaaaaauuagcca

SEQ ID NO: 957605 - RNA, 24 nt, Human
uaacauggcaaaaccccgucucua

SEQ ID NO: 957606 - RNA, 23 nt, Human
uaaggaaggaggcagggaaagug

SEQ ID NO: 957607 - RNA, 18 nt, Human
uacccaggauuccuucac

SEQ ID NO: 957608 - RNA, 22 nt, Human
uacccaggauuccuucacucaa

SEQ ID NO: 957609 - RNA, 23 nt, Human
uacccaggauuccuucacucaau

SEQ ID NO: 957610 - RNA, 22 nt, Human
uagcaggaaccuguaaucccag

SEQ ID NO: 957611 - RNA, 23 nt, Human
uagcuagaaaccuugguccaacu

SEQ ID NO: 957612 - RNA, 24 nt, Human
uagcucacgccuguaaucucagca

SEQ ID NO: 957613 - RNA, 25 nt, Human
uagggcuccugagccuuccuggagg

SEQ ID NO: 957614 - RNA, 23 nt, Human
uaguggcacacaccuguaauccc

SEQ ID NO: 957615 - RNA, 24 nt, Human
uaguggcacacaccuguaauccca

SEQ ID NO: 957616 - RNA, 22 nt, Human
uaugaaaagaauauuucucaag

SEQ ID NO: 957617 - RNA, 25 nt, Human
ucaaaaaaaaaaaaaaaaagggagu

SEQ ID NO: 957618 - RNA, 25 nt, Human
ucaaagguagucuuucacaccauag

SEQ ID NO: 957619 - RNA, 20 nt, Human
ucaagaggaagaggaagcca

SEQ ID NO: 957620 - RNA, 18 nt, Human
ucaauaagccaagaccac

SEQ ID NO: 957621 - RNA, 23 nt, Human
ucacgccacugcacuccagccug

SEQ ID NO: 957622 - RNA, 23 nt, Human
ucacuugaggucaggaguucaag

SEQ ID NO: 957623 - RNA, 20 nt, Human
ucagcuauuuaaggaaggag

SEQ ID NO: 957624 - RNA, 18 nt, Human
ucaggggggagauggcag

SEQ ID NO: 957625 - RNA, 23 nt, Human
uccagccugggcgacagagugag

SEQ ID NO: 957626 - RNA, 24 nt, Human
uccagccugggcgacagagugaga

SEQ ID NO: 957627 - RNA, 23 nt, Human
uccaucucaaaaaaaaaaaaaaa

SEQ ID NO: 957628 - RNA, 19 nt, Human
ucccagggccaggaaagcu

SEQ ID NO: 957629 - RNA, 24 nt, Human
ucccucagaaaggaccagacacuu

SEQ ID NO: 957630 - RNA, 22 nt, Human
uccugagccuuccuggaggagc

SEQ ID NO: 957631 - RNA, 19 nt, Human
ucgcuugagcccaggaguu

SEQ ID NO: 957632 - RNA, 21 nt, Human
ucgcuugagcccaggaguuug

SEQ ID NO: 957633 - RNA, 20 nt, Human
ucuaugcuagaggcuuggag

SEQ ID NO: 957634 - RNA, 21 nt, Human
ucucuacuaaaaauacaaaaa

SEQ ID NO: 957635 - RNA, 21 nt, Human
ucucuacuaaaaauacaaaaa

SEQ ID NO: 957636 - RNA, 23 nt, Human
ucugcggagacugugacuagggu

SEQ ID NO: 957637 - RNA, 23 nt, Human
ucuuaaguauuuacucuguuuuc

SEQ ID NO: 957638 - RNA, 22 nt, Human
ugaaauggaauuaccagcugcu

SEQ ID NO: 957639 - RNA, 21 nt, Human
ugaagggaagugggcaggcug

SEQ ID NO: 957640 - RNA, 21 nt, Human
ugacucacgccuguaauccca

SEQ ID NO: 957641 - RNA, 22 nt, Human
ugacucacgccuguaaucccag

SEQ ID NO: 957642 - RNA, 24 nt, Human
ugacucacgccuguaaucccagca

SEQ ID NO: 957643 - RNA, 23 nt, Human
ugacugcagggagggaggcagag

SEQ ID NO: 957644 - RNA, 18 nt, Human
ugagaauggucucuaccc

SEQ ID NO: 957645 - RNA, 23 nt, Human
ugagcccaggaguuugagaccag

SEQ ID NO: 957646 - RNA, 22 nt, Human
ugagccgagaucacgccacugc

SEQ ID NO: 957647 - RNA, 18 nt, Human
ugaggcaagagaaucacu

SEQ ID NO: 957648 - RNA, 20 nt, Human
ugaggcaagagaaucacuug

SEQ ID NO: 957649 - RNA, 24 nt, Human
ugaggcaagagaaucacuugaacc

SEQ ID NO: 957650 - RNA, 25 nt, Human
ugaggcaagagaaucacuugaaccc

SEQ ID NO: 957651 - RNA, 19 nt, Human
ugaggggagaaggaaaugu

SEQ ID NO: 957652 - RNA, 19 nt, Human
ugaggugggcggauuaccu

SEQ ID NO: 957653 - RNA, 23 nt, Human
ugaggugggcggauuaccugagg

SEQ ID NO: 957654 - RNA, 18 nt, Human
ugauauguaacugccuuu

SEQ ID NO: 957655 - RNA, 19 nt, Human
ugauucugagccagggccu

SEQ ID NO: 957656 - RNA, 26 nt, Human
ugccuuggagggcugguggggcuuga

SEQ ID NO: 957657 - RNA, 20 nt, Human
uggaacccagauccagaggg

SEQ ID NO: 957658 - RNA, 25 nt, Human
uggaaugggggguacucugaagagg

SEQ ID NO: 957659 - RNA, 30 nt, Human
uggaggaccacccaaaaaaagccugagggg

SEQ ID NO: 957660 - RNA, 24 nt, Human
uggaucacuugaggucaggaguuc

SEQ ID NO: 957661 - RNA, 27 nt, Human
uggaucacuugaggucaggaguucaag

SEQ ID NO: 957662 - RNA, 22 nt, Human
uggcacacaccuguaaucccag

SEQ ID NO: 957663 - RNA, 19 nt, Human
uggcacaggcuucuggcgg

SEQ ID NO: 957664 - RNA, 23 nt, Human
uggcagggagaggggagggacau

SEQ ID NO: 957665 - RNA, 18 nt, Human
uggcagggagguagggcu

SEQ ID NO: 957666 - RNA, 24 nt, Human
uggccaacauggugaagccucguc

SEQ ID NO: 957667 - RNA, 23 nt, Human
uggccaauauggugaaaccuguc

SEQ ID NO: 957668 - RNA, 24 nt, Human
uggccucuuaaguauuuacucuuu

SEQ ID NO: 957669 - RNA, 22 nt, Human
uggcucacgccuguaaucccag

SEQ ID NO: 957670 - RNA, 24 nt, Human
uggcucacgccuguaaucccagca

SEQ ID NO: 957671 - RNA, 19 nt, Human
ugggaggcugagccaggag

SEQ ID NO: 957672 - RNA, 23 nt, Human
ugggaggcugagccaggaggauc

SEQ ID NO: 957673 - RNA, 18 nt, Human
ugggaggcugaggugggc

SEQ ID NO: 957674 - RNA, 19 nt, Human
ugggaggcugaggugggcg

SEQ ID NO: 957675 - RNA, 22 nt, Human
ugggaggcugaggugggcggau

SEQ ID NO: 957676 - RNA, 23 nt, Human
ugggaggcuggggugggagaauc

SEQ ID NO: 957677 - RNA, 24 nt, Human
ugggaggcuggggugggagaaucg

SEQ ID NO: 957678 - RNA, 21 nt, Human
ugggcgacagagugagacccu

SEQ ID NO: 957679 - RNA, 21 nt, Human
ugggggaagaaaggugaaucu

SEQ ID NO: 957680 - RNA, 22 nt, Human
ugggggaagaaaggugaaucug

SEQ ID NO: 957681 - RNA, 23 nt, Human
ugggggaagaaaggugaaucugg

SEQ ID NO: 957682 - RNA, 18 nt, Human
ugggggggggguggggag

SEQ ID NO: 957683 - RNA, 22 nt, Human
ugggggggggguggggagaggg

SEQ ID NO: 957684 - RNA, 24 nt, Human
ugguagcaggaaccuguaauccca

SEQ ID NO: 957685 - RNA, 21 nt, Human
ugguggggcuacacaugugca

SEQ ID NO: 957686 - RNA, 19 nt, Human
uuaagaggggacagagggc

SEQ ID NO: 957687 - RNA, 22 nt, Human
uuaggaaaaaaagggggaggcu

SEQ ID NO: 957688 - RNA, 22 nt, Human
uucacauugacccagcuggccc

SEQ ID NO: 957689 - RNA, 22 nt, Human
uugagcccaggaguuugagacc

SEQ ID NO: 957690 - RNA, 24 nt, Human
uugggaggcugagccaggaggauc

SEQ ID NO: 957691 - RNA, 18 nt, Human
uuguagugagccgagauc

SEQ ID NO: 957692 - RNA, 20 nt, Human
uuguagugagccgagaucac

SEQ ID NO: 957693 - RNA, 21 nt, Human
uuguagugagccgagaucacg

SEQ ID NO: 957694 - RNA, 20 nt, Human
uuucugggcucugauucuga

SEQ ID NO: 957695 - RNA, 19 nt, Human
aggcagggcuggccgagga

SEQ ID NO: 957696 - RNA, 18 nt, Human
ccuccuggugggcaggca

SEQ ID NO: 957697 - RNA, 22 nt, Human
ccuccuggugggcaggcagggc

SEQ ID NO: 957698 - RNA, 20 nt, Human
cuccugggcucacugcuucc

SEQ ID NO: 957699 - RNA, 24 nt, Human
cuccuggugggcaggcagggcugg

SEQ ID NO: 957700 - RNA, 24 nt, Human
ggacuccugggcucacugcuuccu

SEQ ID NO: 957701 - RNA, 22 nt, Human
uccagaacacaagaauaaaugc

SEQ ID NO: 957702 - RNA, 19 nt, Human
uccugggcucacugcuucc

SEQ ID NO: 957703 - RNA, 21 nt, Human
uccugggcucacugcuuccug

SEQ ID NO: 957704 - RNA, 24 nt, Human
uccugggcucacugcuuccuggcu

SEQ ID NO: 957705 - RNA, 22 nt, Human
uccuggugggcaggcagggcug

SEQ ID NO: 957706 - RNA, 21 nt, Human
uggcuggcaacuugugucccu

SEQ ID NO: 957707 - RNA, 27 nt, Human
ugggcaggcagggcuggccgaggacuc

SEQ ID NO: 957708 - RNA, 20 nt, Human
ugggcucacugcuuccuggc

SEQ ID NO: 957709 - RNA, 27 nt, Human
uugguggcuggcaacuugugucccuuc

SEQ ID NO: 957710 - RNA, 23 nt, Human
aaacagaaagugagagaggggac

SEQ ID NO: 957711 - RNA, 19 nt, Human
auggagcccagaaaugagc

SEQ ID NO: 957712 - RNA, 20 nt, Human
cacuggcugcccaggauugu

SEQ ID NO: 957713 - RNA, 26 nt, Human
caguugccagacgggcaggagguggg

SEQ ID NO: 957714 - RNA, 24 nt, Human
cauucaccccccaagguuuauuua

SEQ ID NO: 957715 - RNA, 23 nt, Human
ccugugccgauggagcccagaaa

SEQ ID NO: 957716 - RNA, 22 nt, Human
cggcaagaaacagaaagugaga

SEQ ID NO: 957717 - RNA, 22 nt, Human
cuacaagagccacuggcugccc

SEQ ID NO: 957718 - RNA, 22 nt, Human
cuggcugcccaggauugugcug

SEQ ID NO: 957719 - RNA, 21 nt, Human
cugggucuguagggcgacggu

SEQ ID NO: 957720 - RNA, 22 nt, Human
gagguggugggggugcagaggg

SEQ ID NO: 957721 - RNA, 21 nt, Human
gcaagaaacagaaagugagag

SEQ ID NO: 957722 - RNA, 22 nt, Human
ggacccagaggacacacuggca

SEQ ID NO: 957723 - RNA, 18 nt, Human
ggcaagaaacagaaagug

SEQ ID NO: 957724 - RNA, 22 nt, Human
ggcaagaaacagaaagugagag

SEQ ID NO: 957725 - RNA, 23 nt, Human
ggcccgggguggacggcaagaaa

SEQ ID NO: 957726 - RNA, 22 nt, Human
gggcaggagguggugggggugc

SEQ ID NO: 957727 - RNA, 21 nt, Human
ggggacagcugggucuguagg

SEQ ID NO: 957728 - RNA, 21 nt, Human
uagaaaagcauagccuuggga

SEQ ID NO: 957729 - RNA, 25 nt, Human
ucucuacaagagccacuggcugccc

SEQ ID NO: 957730 - RNA, 22 nt, Human
ugcagagggaggaccaacucag

SEQ ID NO: 957731 - RNA, 20 nt, Human
uggcccgggguggacggcaa

SEQ ID NO: 957732 - RNA, 21 nt, Human
ugggaggggauccuugaaugg

SEQ ID NO: 957733 - RNA, 21 nt, Human
uuaagacuugacccaaaagac

SEQ ID NO: 957734 - RNA, 21 nt, Human
caagagcgggguccaagcguc

SEQ ID NO: 957735 - RNA, 19 nt, Human
ccccagagggcugcagagc

SEQ ID NO: 957736 - RNA, 21 nt, Human
ccccagcggguccauguagcc

SEQ ID NO: 957737 - RNA, 25 nt, Human
cuucagaaaagauuccgcaggcucc

SEQ ID NO: 957738 - RNA, 22 nt, Human
uaaaguaacucugggaggaaac

SEQ ID NO: 957739 - RNA, 20 nt, Human
uccucggaugacaauucagc

SEQ ID NO: 957740 - RNA, 28 nt, Human
cccaaugcugcuuuauuauuuggcuauu

SEQ ID NO: 957741 - RNA, 22 nt, Human
uuauuauuuggcuauugggggc

SEQ ID NO: 957742 - RNA, 23 nt, Human
aaaaaauaccaaaaccagccagg

SEQ ID NO: 957743 - RNA, 26 nt, Human
aaaaauaccaaaaccagccaggcgca

SEQ ID NO: 957744 - RNA, 23 nt, Human
aaaauaccaaaaccagccaggcg

SEQ ID NO: 957745 - RNA, 19 nt, Human
aacacggugaaaccccguc

SEQ ID NO: 957746 - RNA, 20 nt, Human
aacacggugaaaccccgucu

SEQ ID NO: 957747 - RNA, 21 nt, Human
aagcaauagccaaacaacuau

SEQ ID NO: 957748 - RNA, 21 nt, Human
aaucauggccaaguccacuug

SEQ ID NO: 957749 - RNA, 21 nt, Human
aaucauuaggauauggaaauu

SEQ ID NO: 957750 - RNA, 23 nt, Human
aaucauuaggauauggaaauugc

SEQ ID NO: 957751 - RNA, 24 nt, Human
aaucccuugaacccgugaggcaaa

SEQ ID NO: 957752 - RNA, 20 nt, Human
acaccugcaaucccagccac

SEQ ID NO: 957753 - RNA, 19 nt, Human
acauggugcugagucagga

SEQ ID NO: 957754 - RNA, 23 nt, Human
accugaaagaaugucucgaaggg

SEQ ID NO: 957755 - RNA, 23 nt, Human
acugauuggucaggguaagggag

SEQ ID NO: 957756 - RNA, 24 nt, Human
acugcccuccagccugugugacag

SEQ ID NO: 957757 - RNA, 26 nt, Human
acugcccuccagccugugugacagag

SEQ ID NO: 957758 - RNA, 24 nt, Human
aggcacgagaaucccuugaacccg

SEQ ID NO: 957759 - RNA, 26 nt, Human
aggcagauggaucacuugagaucaga

SEQ ID NO: 957760 - RNA, 22 nt, Human
aggccaggugcaguggcucaug

SEQ ID NO: 957761 - RNA, 24 nt, Human
aggcugaggcacgagaaucccuug

SEQ ID NO: 957762 - RNA, 24 nt, Human
aggugcaguggcucaugccuguaa

SEQ ID NO: 957763 - RNA, 18 nt, Human
aguaugcaggaccugaaa

SEQ ID NO: 957764 - RNA, 23 nt, Human
aguggcucaugccuguaauccca

SEQ ID NO: 957765 - RNA, 24 nt, Human
aguggcucaugccuguaaucccag

SEQ ID NO: 957766 - RNA, 23 nt, Human
auaauucugaagcaauagccaaa

SEQ ID NO: 957767 - RNA, 22 nt, Human
aucccagcacccugggaggcca

SEQ ID NO: 957768 - RNA, 24 nt, Human
aucccgccacugcccuccagccug

SEQ ID NO: 957769 - RNA, 19 nt, Human
augccuguaaucccagcac

SEQ ID NO: 957770 - RNA, 20 nt, Human
auggugcugagucaggaggu

SEQ ID NO: 957771 - RNA, 27 nt, Human
caagcaaagugaccuagugauuaaugc

SEQ ID NO: 957772 - RNA, 21 nt, Human
cacaccugcaaucccagccac

SEQ ID NO: 957773 - RNA, 24 nt, Human
cacaccugcaaucccagccacuug

SEQ ID NO: 957774 - RNA, 20 nt, Human
caccugcaaucccagccacu

SEQ ID NO: 957775 - RNA, 24 nt, Human
cacugcccuccagccugugugaca

SEQ ID NO: 957776 - RNA, 21 nt, Human
cacuggcgcacaccugcaauc

SEQ ID NO: 957777 - RNA, 24 nt, Human
cagauggaucacuugagaucagaa

SEQ ID NO: 957778 - RNA, 20 nt, Human
caugccuguaaucccagcac

SEQ ID NO: 957779 - RNA, 27 nt, Human
ccaaggcagauggaucacuugagauca

SEQ ID NO: 957780 - RNA, 18 nt, Human
ccacugcccuccagccug

SEQ ID NO: 957781 - RNA, 18 nt, Human
ccacugcccuccagccug

SEQ ID NO: 957782 - RNA, 19 nt, Human
ccacugcccuccagccugu

SEQ ID NO: 957783 - RNA, 24 nt, Human
ccacugcccuccagccugugugac

SEQ ID NO: 957784 - RNA, 22 nt, Human
cccagcacccugggaggccaag

SEQ ID NO: 957785 - RNA, 23 nt, Human
cccuccagccugugugacagagu

SEQ ID NO: 957786 - RNA, 22 nt, Human
ccgucuguaacaaaaaauacca

SEQ ID NO: 957787 - RNA, 18 nt, Human
ccuguaaucccagcaccc

SEQ ID NO: 957788 - RNA, 20 nt, Human
ccuguaaucccagcacccug

SEQ ID NO: 957789 - RNA, 22 nt, Human
cgagaucccgccacugcccucc

SEQ ID NO: 957790 - RNA, 23 nt, Human
cucaugccuguaaucccagcacc

SEQ ID NO: 957791 - RNA, 21 nt, Human
cuggcgcacaccugcaauccc

SEQ ID NO: 957792 - RNA, 21 nt, Human
cugggaggcaaggggcuggaa

SEQ ID NO: 957793 - RNA, 19 nt, Human
cuuggaaggcugaggcacg

SEQ ID NO: 957794 - RNA, 19 nt, Human
gagucaggagguaggagga

SEQ ID NO: 957795 - RNA, 24 nt, Human
gaucacuugagaucagaaguucga

SEQ ID NO: 957796 - RNA, 22 nt, Human
gcacgagaaucccuugaacccg

SEQ ID NO: 957797 - RNA, 20 nt, Human
gcagcagagaguuuaaugau

SEQ ID NO: 957798 - RNA, 22 nt, Human
gccaacacggugaaaccccguc

SEQ ID NO: 957799 - RNA, 24 nt, Human
gcccuccagccugugugacagagu

SEQ ID NO: 957800 - RNA, 19 nt, Human
ggaaauugcauucuuugau

SEQ ID NO: 957801 - RNA, 19 nt, Human
ggguucugggaggcaaggg

SEQ ID NO: 957802 - RNA, 22 nt, Human
guaggccaggugcaguggcuca

SEQ ID NO: 957803 - RNA, 23 nt, Human
uaaagccuaauacguaggccagg

SEQ ID NO: 957804 - RNA, 18 nt, Human
uacguaggccaggugcag

SEQ ID NO: 957805 - RNA, 22 nt, Human
uacuauguacaucuuacauaaa

SEQ ID NO: 957806 - RNA, 19 nt, Human
uaggaggaaaaggaaagga

SEQ ID NO: 957807 - RNA, 23 nt, Human
uccagccugugugacagagugag

SEQ ID NO: 957808 - RNA, 24 nt, Human
uccagccugugugacagagugaga

SEQ ID NO: 957809 - RNA, 21 nt, Human
ucugggcugggguucugggag

SEQ ID NO: 957810 - RNA, 22 nt, Human
ugaagcaauagccaaacaacua

SEQ ID NO: 957811 - RNA, 24 nt, Human
ugaaucauuaggauauggaaauug

SEQ ID NO: 957812 - RNA, 19 nt, Human
ugacagcaacacaagugag

SEQ ID NO: 957813 - RNA, 24 nt, Human
ugaggcacgagaaucccuugaacc

SEQ ID NO: 957814 - RNA, 18 nt, Human
ugagucaggagguaggag

SEQ ID NO: 957815 - RNA, 21 nt, Human
ugauuaaugcugaauguggug

SEQ ID NO: 957816 - RNA, 21 nt, Human
ugccuguaaucccagcacccu

SEQ ID NO: 957817 - RNA, 23 nt, Human
ugccuguaaucccagcacccugg

SEQ ID NO: 957818 - RNA, 24 nt, Human
ugccuguaaucccagcacccuggg

SEQ ID NO: 957819 - RNA, 24 nt, Human
uggaaggcugaggcacgagaaucc

SEQ ID NO: 957820 - RNA, 24 nt, Human
uggaucacuugagaucagaaguuc

SEQ ID NO: 957821 - RNA, 27 nt, Human
uggaucacuugagaucagaaguucgag

SEQ ID NO: 957822 - RNA, 27 nt, Human
uggcacugacagcaacacaagugaggc

SEQ ID NO: 957823 - RNA, 22 nt, Human
uggcucaugccuguaaucccag

SEQ ID NO: 957824 - RNA, 24 nt, Human
uggcucaugccuguaaucccagca

SEQ ID NO: 957825 - RNA, 18 nt, Human
ugggaggcaaggggcugg

SEQ ID NO: 957826 - RNA, 18 nt, Human
ugggaggcaaggggcugg

SEQ ID NO: 957827 - RNA, 18 nt, Human
ugggaggccaaggcagau

SEQ ID NO: 957828 - RNA, 24 nt, Human
ugggaggccaaggcagauggauca

SEQ ID NO: 957829 - RNA, 18 nt, Human
ugggcugggguucuggga

SEQ ID NO: 957830 - RNA, 21 nt, Human
ugggcugggguucugggaggc

SEQ ID NO: 957831 - RNA, 22 nt, Human
ugggguucugggaggcaagggg

SEQ ID NO: 957832 - RNA, 22 nt, Human
ugguaggguccuucagaccagc

SEQ ID NO: 957833 - RNA, 23 nt, Human
uuacauggugcugagucaggagg

SEQ ID NO: 957834 - RNA, 20 nt, Human
uucaucaguaugcaggaccu

SEQ ID NO: 957835 - RNA, 21 nt, Human
uucaucaguaugcaggaccug

SEQ ID NO: 957836 - RNA, 21 nt, Human
uucgagaccagcccagccaac

SEQ ID NO: 957837 - RNA, 18 nt, Human
uucugggaggcaaggggc

SEQ ID NO: 957838 - RNA, 19 nt, Human
uucugggcugggguucugg

SEQ ID NO: 957839 - RNA, 19 nt, Human
uuuuuuuuuuuuuuugcag

SEQ ID NO: 957840 - RNA, 22 nt, Human
aaacaaucacaaacacacugug

SEQ ID NO: 957841 - RNA, 23 nt, Human
acaaaaacuaaauaguauaaaua

SEQ ID NO: 957842 - RNA, 25 nt, Human
acacauuugucagucugguggcuuu

SEQ ID NO: 957843 - RNA, 23 nt, Human
agcaaacaaucacaaacacacug

SEQ ID NO: 957844 - RNA, 21 nt, Human
agggaagggggaggggacagg

SEQ ID NO: 957845 - RNA, 23 nt, Human
agggggaggggacaggggaacuc

SEQ ID NO: 957846 - RNA, 18 nt, Human
caaggcucaggcuccugc

SEQ ID NO: 957847 - RNA, 23 nt, Human
cacagcccugaacaaaagcaucc

SEQ ID NO: 957848 - RNA, 24 nt, Human
cagagcaaacaaucacaaacacac

SEQ ID NO: 957849 - RNA, 21 nt, Human
caggcuccugcuccucccccu

SEQ ID NO: 957850 - RNA, 21 nt, Human
ccaggccgaucacagcccuga

SEQ ID NO: 957851 - RNA, 21 nt, Human
cggugugagggaagggggagg

SEQ ID NO: 957852 - RNA, 18 nt, Human
cucaggcuccugcuccuc

SEQ ID NO: 957853 - RNA, 23 nt, Human
cuccccacugggcccaccgaggu

SEQ ID NO: 957854 - RNA, 22 nt, Human
cugggcccaccgaggucgcugg

SEQ ID NO: 957855 - RNA, 18 nt, Human
ggugugagggaaggggga

SEQ ID NO: 957856 - RNA, 23 nt, Human
ucaccagacgcggugugagggaa

SEQ ID NO: 957857 - RNA, 24 nt, Human
ucagcagagccaagaaaggacuga

SEQ ID NO: 957858 - RNA, 21 nt, Human
ucaggcuccugcuccucccca

SEQ ID NO: 957859 - RNA, 22 nt, Human
ucagucugguggcuuuggugcc

SEQ ID NO: 957860 - RNA, 18 nt, Human
ucccaaggcucaggcucc

SEQ ID NO: 957861 - RNA, 23 nt, Human
uccccaggccgaucacagcccug

SEQ ID NO: 957862 - RNA, 23 nt, Human
ucgagugucagcagagccaagaa

SEQ ID NO: 957863 - RNA, 22 nt, Human
ucgcugggccucgaagcuucug

SEQ ID NO: 957864 - RNA, 22 nt, Human
ugagcaggugacggaauguggg

SEQ ID NO: 957865 - RNA, 28 nt, Human
ugagcaggugacggaauguuguaaugac

SEQ ID NO: 957866 - RNA, 20 nt, Human
ugagggaagggggaggggac

SEQ ID NO: 957867 - RNA, 20 nt, Human
uguggaggucacacgcaugu

SEQ ID NO: 957868 - RNA, 21 nt, Human
uucccaaggcucaggcuccug

SEQ ID NO: 957869 - RNA, 25 nt, Human
uuggcaacaaccaguccauagaaga

SEQ ID NO: 957870 - RNA, 27 nt, Human
aacacacagaaucaaauguguuaucca

SEQ ID NO: 957871 - RNA, 20 nt, Human
aagacuuccugucucugagc

SEQ ID NO: 957872 - RNA, 22 nt, Human
acagugacaguggaccaucccc

SEQ ID NO: 957873 - RNA, 21 nt, Human
agaagggacaggaacugcgga

SEQ ID NO: 957874 - RNA, 21 nt, Human
auaaauaauggaaaugacacc

SEQ ID NO: 957875 - RNA, 18 nt, Human
cagcuguguccugugcuc

SEQ ID NO: 957876 - RNA, 21 nt, Human
caguggaccauccccauagga

SEQ ID NO: 957877 - RNA, 23 nt, Human
cauccgggcucaggugaccuucc

SEQ ID NO: 957878 - RNA, 20 nt, Human
ccugaagacuuccugucucu

SEQ ID NO: 957879 - RNA, 18 nt, Human
cugaagacuuccugucuc

SEQ ID NO: 957880 - RNA, 21 nt, Human
ggagaagcauccgggcucagg

SEQ ID NO: 957881 - RNA, 20 nt, Human
gggcgggggggggggggggg

SEQ ID NO: 957882 - RNA, 19 nt, Human
guccugaguauggaggaga

SEQ ID NO: 957883 - RNA, 20 nt, Human
guguccugugcucgggcggg

SEQ ID NO: 957884 - RNA, 21 nt, Human
uaacacggcacauaaaaaaga

SEQ ID NO: 957885 - RNA, 22 nt, Human
uacaauaacacggcacauaaaa

SEQ ID NO: 957886 - RNA, 21 nt, Human
uauuauggaaaacacacagaa

SEQ ID NO: 957887 - RNA, 22 nt, Human
ucagaacccagcuguguccugu

SEQ ID NO: 957888 - RNA, 20 nt, Human
ucccugaagacuuccugucc

SEQ ID NO: 957889 - RNA, 21 nt, Human
ucccugaagacuuccugucuc

SEQ ID NO: 957890 - RNA, 23 nt, Human
ucccugaagacuuccugucucug

SEQ ID NO: 957891 - RNA, 19 nt, Human
ugacaguggaccaucccca

SEQ ID NO: 957892 - RNA, 25 nt, Human
uggaaaacacacagaaucaaaugug

SEQ ID NO: 957893 - RNA, 19 nt, Human
aaagugcugggauuacaag

SEQ ID NO: 957894 - RNA, 20 nt, Human
aaagugcugggauuacaagg

SEQ ID NO: 957895 - RNA, 20 nt, Human
aagagcaagcagaaacaggc

SEQ ID NO: 957896 - RNA, 19 nt, Human
aagccaaggcaaagccaga

SEQ ID NO: 957897 - RNA, 24 nt, Human
aagccagagcucagaaccuagaga

SEQ ID NO: 957898 - RNA, 22 nt, Human
aaggcaaagccagagcucagaa

SEQ ID NO: 957899 - RNA, 24 nt, Human
aagugauccacccaccuuggccuc

SEQ ID NO: 957900 - RNA, 20 nt, Human
aagugcugggauuacaaggc

SEQ ID NO: 957901 - RNA, 25 nt, Human
aagugcugggauuacaaggcugagc

SEQ ID NO: 957902 - RNA, 26 nt, Human
aagugcugggauuacaaggcugagcc

SEQ ID NO: 957903 - RNA, 20 nt, Human
acagagcccuugcaaagcca

SEQ ID NO: 957904 - RNA, 18 nt, Human
acugcagccuccaccucc

SEQ ID NO: 957905 - RNA, 18 nt, Human
acuuugucacccaggcug

SEQ ID NO: 957906 - RNA, 27 nt, Human
acuuugucacccaggcuggagugaagu

SEQ ID NO: 957907 - RNA, 22 nt, Human
agaaacaggcaaauuuguguaa

SEQ ID NO: 957908 - RNA, 21 nt, Human
agagcccuugcaaagccaagg

SEQ ID NO: 957909 - RNA, 18 nt, Human
agccucccgaguagcugg

SEQ ID NO: 957910 - RNA, 22 nt, Human
agcugggauuacaggcgugggc

SEQ ID NO: 957911 - RNA, 20 nt, Human
aggacaagagcaagcagaaa

SEQ ID NO: 957912 - RNA, 25 nt, Human
aggauagugaggggaagccgguacc

SEQ ID NO: 957913 - RNA, 20 nt, Human
aggcgcccgcuaccacgccc

SEQ ID NO: 957914 - RNA, 25 nt, Human
aggcuggagugcaguggcgcgaucu

SEQ ID NO: 957915 - RNA, 24 nt, Human
aggcugucucgaacuccugaccuc

SEQ ID NO: 957916 - RNA, 18 nt, Human
aguagcugggacuacagg

SEQ ID NO: 957917 - RNA, 19 nt, Human
aguagcugggacuacaggc

SEQ ID NO: 957918 - RNA, 19 nt, Human
aguagcugggauuacaggc

SEQ ID NO: 957919 - RNA, 22 nt, Human
aguagcugggauuacaggcgug

SEQ ID NO: 957920 - RNA, 19 nt, Human
agugauccacccaccuugg

SEQ ID NO: 957921 - RNA, 20 nt, Human
agugcaguggcgcgaucucg

SEQ ID NO: 957922 - RNA, 23 nt, Human
agugcaguggcgcgaucucggcu

SEQ ID NO: 957923 - RNA, 24 nt, Human
agugcaguggcgcgaucucggcuc

SEQ ID NO: 957924 - RNA, 24 nt, Human
agugcugggauuacaaggcugagc

SEQ ID NO: 957925 - RNA, 23 nt, Human
aucauguuggccaggcugucucg

SEQ ID NO: 957926 - RNA, 18 nt, Human
augggguuucaucauguu

SEQ ID NO: 957927 - RNA, 22 nt, Human
caaacaauuuuccugccuuagc

SEQ ID NO: 957928 - RNA, 20 nt, Human
caaagcagcgccucagaagc

SEQ ID NO: 957929 - RNA, 21 nt, Human
caaagccaaggcaaagccaga

SEQ ID NO: 957930 - RNA, 24 nt, Human
caaagugcugggauuacaaggcug

SEQ ID NO: 957931 - RNA, 21 nt, Human
caaggagcgggugggguagga

SEQ ID NO: 957932 - RNA, 23 nt, Human
caagugauccacccaccuuggcc

SEQ ID NO: 957933 - RNA, 22 nt, Human
caccacgcggcuaauuuuugua

SEQ ID NO: 957934 - RNA, 22 nt, Human
cacccaccuuggccucccaaag

SEQ ID NO: 957935 - RNA, 23 nt, Human
cacccaccuuggccucccaaagu

SEQ ID NO: 957936 - RNA, 22 nt, Human
cacgccauucuccugccucagc

SEQ ID NO: 957937 - RNA, 23 nt, Human
cacugcagccuccaccuccuggg

SEQ ID NO: 957938 - RNA, 24 nt, Human
cacuuugucacccaggcuggagug

SEQ ID NO: 957939 - RNA, 23 nt, Human
cagccuccaccuccuggguucaa

SEQ ID NO: 957940 - RNA, 26 nt, Human
caucauguuggccaggcugucucgaa

SEQ ID NO: 957941 - RNA, 20 nt, Human
cauguuggccaggcugucuc

SEQ ID NO: 957942 - RNA, 23 nt, Human
cauguuggccaggcugucucgaa

SEQ ID NO: 957943 - RNA, 19 nt, Human
ccaaagugcugggauuaca

SEQ ID NO: 957944 - RNA, 24 nt, Human
ccaaggcaaagccagagcucagaa

SEQ ID NO: 957945 - RNA, 18 nt, Human
ccaccacgcggcuaauuu

SEQ ID NO: 957946 - RNA, 26 nt, Human
ccaccuccuggguucaaacaauuuuu

SEQ ID NO: 957947 - RNA, 22 nt, Human
cccaggcuggagugcaguggcg

SEQ ID NO: 957948 - RNA, 23 nt, Human
cccgaguagcugggacuacaggc

SEQ ID NO: 957949 - RNA, 24 nt, Human
cccgaguagcugggacuacaggcg

SEQ ID NO: 957950 - RNA, 23 nt, Human
cccgaguagcugggauuacaggc

SEQ ID NO: 957951 - RNA, 24 nt, Human
cccgaguagcugggauuacaggcg

SEQ ID NO: 957952 - RNA, 22 nt, Human
ccgaguagcugggauuacaggc

SEQ ID NO: 957953 - RNA, 24 nt, Human
ccgaguagcugggauuacaggcgu

SEQ ID NO: 957954 - RNA, 19 nt, Human
ccgcucccggguucacgcc

SEQ ID NO: 957955 - RNA, 19 nt, Human
ccuccaccuccuggguuca

SEQ ID NO: 957956 - RNA, 22 nt, Human
ccucccaagcuaggacaagagc

SEQ ID NO: 957957 - RNA, 25 nt, Human
ccucccaagcuaggacaagagcaag

SEQ ID NO: 957958 - RNA, 21 nt, Human
ccucuagaggcaugcugacuu

SEQ ID NO: 957959 - RNA, 24 nt, Human
ccugaccucaagugauccacccac

SEQ ID NO: 957960 - RNA, 24 nt, Human
ccugccucagccucccgaguagcu

SEQ ID NO: 957961 - RNA, 23 nt, Human
ccugccuuagccucccgaguagc

SEQ ID NO: 957962 - RNA, 24 nt, Human
ccugccuuagccucccgaguagcu

SEQ ID NO: 957963 - RNA, 23 nt, Human
ccuggguucaaacaauuuuccug

SEQ ID NO: 957964 - RNA, 25 nt, Human
cgcucccggguucacgccauucucc

SEQ ID NO: 957965 - RNA, 24 nt, Human
cgcucugucgcccaggcuggagug

SEQ ID NO: 957966 - RNA, 24 nt, Human
cucaagugauccacccaccuuggc

SEQ ID NO: 957967 - RNA, 24 nt, Human
cucacugcagccuccaccuccugg

SEQ ID NO: 957968 - RNA, 24 nt, Human
cucacuuugucacccaggcuggag

SEQ ID NO: 957969 - RNA, 24 nt, Human
cucagccucccgaguagcugggac

SEQ ID NO: 957970 - RNA, 21 nt, Human
cucccaagcuaggacaagagc

SEQ ID NO: 957971 - RNA, 21 nt, Human
cucccggguucacgccauucu

SEQ ID NO: 957972 - RNA, 21 nt, Human
cucgcucugucgcccaggcug

SEQ ID NO: 957973 - RNA, 24 nt, Human
cucgcucugucgcccaggcuggag

SEQ ID NO: 957974 - RNA, 23 nt, Human
cucugucgcccaggcuggagugc

SEQ ID NO: 957975 - RNA, 23 nt, Human
cugcagccuccaccuccuggguu

SEQ ID NO: 957976 - RNA, 23 nt, Human
cuuagccucccgaguagcuggga

SEQ ID NO: 957977 - RNA, 24 nt, Human
gaccucaagugauccacccaccuu

SEQ ID NO: 957978 - RNA, 25 nt, Human
gaguagcugggacuacaggcgcccg

SEQ ID NO: 957979 - RNA, 27 nt, Human
gaguagcugggauuacaggcgugggcc

SEQ ID NO: 957980 - RNA, 18 nt, Human
gauuacaaggcugagcca

SEQ ID NO: 957981 - RNA, 18 nt, Human
gauuacaggcgugggcca

SEQ ID NO: 957982 - RNA, 21 nt, Human
gauuacaggcgugggccacca

SEQ ID NO: 957983 - RNA, 22 nt, Human
gauuacaggcgugggccaccac

SEQ ID NO: 957984 - RNA, 22 nt, Human
gcagccuccaccuccuggguuc

SEQ ID NO: 957985 - RNA, 19 nt, Human
gcccaggcuggagugcagu

SEQ ID NO: 957986 - RNA, 20 nt, Human
gcccaggcuggagugcagug

SEQ ID NO: 957987 - RNA, 23 nt, Human
gcccggcuaauuuuuuguauuuu

SEQ ID NO: 957988 - RNA, 20 nt, Human
gccucagccucccgaguagc

SEQ ID NO: 957989 - RNA, 19 nt, Human
gcuggagugcaguggcgcg

SEQ ID NO: 957990 - RNA, 24 nt, Human
gcuuuuuguuguuguuguugugac

SEQ ID NO: 957991 - RNA, 21 nt, Human
ggaagccucccaagcuaggac

SEQ ID NO: 957992 - RNA, 26 nt, Human
ggcaaagccagagcucagaaccuaga

SEQ ID NO: 957993 - RNA, 22 nt, Human
ggcugagccaccacguccagcc

SEQ ID NO: 957994 - RNA, 22 nt, Human
gggguuucaucauguuggccag

SEQ ID NO: 957995 - RNA, 18 nt, Human
ggguuucaucauguuggc

SEQ ID NO: 957996 - RNA, 18 nt, Human
guagcugggauuacaggc

SEQ ID NO: 957997 - RNA, 24 nt, Human
gugauccacccaccuuggccuccc

SEQ ID NO: 957998 - RNA, 19 nt, Human
uaauuuuuuguauuuuuag

SEQ ID NO: 957999 - RNA, 20 nt, Human
uaauuuuuuguauuuuuaga

SEQ ID NO: 958000 - RNA, 24 nt, Human
uacaaggcugagccaccacgucca

SEQ ID NO: 958001 - RNA, 19 nt, Human
uacaggcgugggccaccac

SEQ ID NO: 958002 - RNA, 23 nt, Human
uaggauagugaggggaagccucc

SEQ ID NO: 958003 - RNA, 24 nt, Human
uaguacacaugggguuucaucaug

SEQ ID NO: 958004 - RNA, 21 nt, Human
ucacccaggcuggagugaagu

SEQ ID NO: 958005 - RNA, 22 nt, Human
ucacugcaagcuccgcucccgg

SEQ ID NO: 958006 - RNA, 23 nt, Human
ucacugcaagcuccgcucccggg

SEQ ID NO: 958007 - RNA, 23 nt, Human
ucacugcagccuccaccuccugg

SEQ ID NO: 958008 - RNA, 24 nt, Human
ucacugcagccuccaccuccuggg

SEQ ID NO: 958009 - RNA, 25 nt, Human
ucacugcagccuccaccuccugggu

SEQ ID NO: 958010 - RNA, 27 nt, Human
ucacugcagccuccaccuccuggguuc

SEQ ID NO: 958011 - RNA, 24 nt, Human
ucacuuugucacccaggcuggagu

SEQ ID NO: 958012 - RNA, 23 nt, Human
ucagccucccgaguagcugggac

SEQ ID NO: 958013 - RNA, 25 nt, Human
ucccaaagugcugggauuacaaggc

SEQ ID NO: 958014 - RNA, 24 nt, Human
ucccgaguagcugggacuacaggc

SEQ ID NO: 958015 - RNA, 24 nt, Human
ucccgaguagcugggauuacaggc

SEQ ID NO: 958016 - RNA, 21 nt, Human
ucccggguucacgccauucuc

SEQ ID NO: 958017 - RNA, 24 nt, Human
ucccggguucacgccauucuccug

SEQ ID NO: 958018 - RNA, 21 nt, Human
uccuggguucaaacaauuuuc

SEQ ID NO: 958019 - RNA, 24 nt, Human
uccuggguucaaacaauuuuccug

SEQ ID NO: 958020 - RNA, 24 nt, Human
ucgcccaggcuggagugcaguggc

SEQ ID NO: 958021 - RNA, 24 nt, Human
ucgcucugucgcccaggcuggagu

SEQ ID NO: 958022 - RNA, 23 nt, Human
ucucacuuugucacccaggcugg

SEQ ID NO: 958023 - RNA, 24 nt, Human
ucucacuuugucacccaggcugga

SEQ ID NO: 958024 - RNA, 24 nt, Human
ucuccugccucagccucccgagua

SEQ ID NO: 958025 - RNA, 21 nt, Human
ucucgaacuccugaccucaag

SEQ ID NO: 958026 - RNA, 19 nt, Human
ucucgcucugucgcccagg

SEQ ID NO: 958027 - RNA, 23 nt, Human
ucucgcucugucgcccaggcugg

SEQ ID NO: 958028 - RNA, 24 nt, Human
ucucgcucugucgcccaggcugga

SEQ ID NO: 958029 - RNA, 26 nt, Human
ucucgcucugucgcccaggcuggagu

SEQ ID NO: 958030 - RNA, 27 nt, Human
ucucgcucugucgcccaggcuggagug

SEQ ID NO: 958031 - RNA, 24 nt, Human
ucugucgcccaggcuggagugcag

SEQ ID NO: 958032 - RNA, 23 nt, Human
ugaaguggcacaaucucagcuca

SEQ ID NO: 958033 - RNA, 21 nt, Human
ugacaaagcagcgccucagaa

SEQ ID NO: 958034 - RNA, 22 nt, Human
ugagacggagucucgcucuguc

SEQ ID NO: 958035 - RNA, 24 nt, Human
ugauccacccaccuuggccuccca

SEQ ID NO: 958036 - RNA, 24 nt, Human
ugccucagccucccgaguagcugg

SEQ ID NO: 958037 - RNA, 24 nt, Human
ugccuuagccucccgaguagcugg

SEQ ID NO: 958038 - RNA, 23 nt, Human
ugcugggauuacaaggcugagcc

SEQ ID NO: 958039 - RNA, 24 nt, Human
uggagugaaguggcacaaucucag

SEQ ID NO: 958040 - RNA, 23 nt, Human
uggagugcaguggcgcgaucucg

SEQ ID NO: 958041 - RNA, 24 nt, Human
uggagugcaguggcgcgaucucgg

SEQ ID NO: 958042 - RNA, 23 nt, Human
uggcacaaucucagcucacugca

SEQ ID NO: 958043 - RNA, 23 nt, Human
uggccaggcugucucgaacuccu

SEQ ID NO: 958044 - RNA, 21 nt, Human
ugggacuacaggcgcccgcua

SEQ ID NO: 958045 - RNA, 22 nt, Human
ugggacuacaggcgcccgcuac

SEQ ID NO: 958046 - RNA, 24 nt, Human
ugggacuacaggcgcccgcuacca

SEQ ID NO: 958047 - RNA, 22 nt, Human
ugggauuacaaggcugagccac

SEQ ID NO: 958048 - RNA, 24 nt, Human
ugggauuacaaggcugagccacca

SEQ ID NO: 958049 - RNA, 18 nt, Human
ugggauuacaggcguggg

SEQ ID NO: 958050 - RNA, 19 nt, Human
ugggauuacaggcgugggc

SEQ ID NO: 958051 - RNA, 21 nt, Human
ugggauuacaggcgugggcca

SEQ ID NO: 958052 - RNA, 22 nt, Human
ugggauuacaggcgugggccac

SEQ ID NO: 958053 - RNA, 23 nt, Human
ugggauuacaggcgugggccacc

SEQ ID NO: 958054 - RNA, 24 nt, Human
ugggauuacaggcgugggccacca

SEQ ID NO: 958055 - RNA, 24 nt, Human
ugggguuucaucauguuggccagg

SEQ ID NO: 958056 - RNA, 23 nt, Human
uggguucaaacaauuuuccugcc

SEQ ID NO: 958057 - RNA, 21 nt, Human
uguauuuuuaguacacauggg

SEQ ID NO: 958058 - RNA, 21 nt, Human
ugucacagagcccuugcaaag

SEQ ID NO: 958059 - RNA, 19 nt, Human
ugucacccaggcuggagug

SEQ ID NO: 958060 - RNA, 21 nt, Human
ugucacccaggcuggagugaa

SEQ ID NO: 958061 - RNA, 19 nt, Human
ugugagggguugagacggc

SEQ ID NO: 958062 - RNA, 24 nt, Human
uuaguacacaugggguuucaucau

SEQ ID NO: 958063 - RNA, 24 nt, Human
uucaaacaauuuuccugccuuagc

SEQ ID NO: 958064 - RNA, 18 nt, Human
uuggccucccaaagugcu

SEQ ID NO: 958065 - RNA, 23 nt, Human
uuguauuuuuaguacacaugggg

SEQ ID NO: 958066 - RNA, 21 nt, Human
uuucaucauguuggccaggcu

SEQ ID NO: 958067 - RNA, 23 nt, Human
uuuuuaguacacaugggguuuca

SEQ ID NO: 958068 - RNA, 18 nt, Human
uuuuuuguauuuuuagua

SEQ ID NO: 958069 - RNA, 25 nt, Human
uuuuuuuuuuuugagacggagucuc

SEQ ID NO: 958070 - RNA, 22 nt, Human
uuuuuuuuuuuuuugagacgga

SEQ ID NO: 958071 - RNA, 18 nt, Human
uuuuuuuuuuuuuuuuug

SEQ ID NO: 958072 - RNA, 22 nt, Human
aaaaaucuauuuuaugugaaaa

SEQ ID NO: 958073 - RNA, 18 nt, Human
agucauggcuuguuuuua

SEQ ID NO: 958074 - RNA, 18 nt, Human
auacauaugcaaauaugu

SEQ ID NO: 958075 - RNA, 18 nt, Human
caaaacccaccaaaaucc

SEQ ID NO: 958076 - RNA, 19 nt, Human
cacucugagaaaggacagg

SEQ ID NO: 958077 - RNA, 22 nt, Human
cauacauaugcaaauauguaau

SEQ ID NO: 958078 - RNA, 23 nt, Human
cauaugcaaauauguaauuauau

SEQ ID NO: 958079 - RNA, 18 nt, Human
cugguuuggucucagccc

SEQ ID NO: 958080 - RNA, 19 nt, Human
cuuccauagggacaucaua

SEQ ID NO: 958081 - RNA, 18 nt, Human
gagggugagggcaugggc

SEQ ID NO: 958082 - RNA, 18 nt, Human
ggagucauacauaugcaa

SEQ ID NO: 958083 - RNA, 23 nt, Human
uaaaaucuacuaagaaaaaccau

SEQ ID NO: 958084 - RNA, 22 nt, Human
uaagaaaaaccaugauucacau

SEQ ID NO: 958085 - RNA, 22 nt, Human
uacaauacccccaugagguaga

SEQ ID NO: 958086 - RNA, 23 nt, Human
uacauccaaggcuuuauguucaa

SEQ ID NO: 958087 - RNA, 20 nt, Human
uccacaugagaauuggaggu

SEQ ID NO: 958088 - RNA, 18 nt, Human
uggcuuguuuuuaguuca

SEQ ID NO: 958089 - RNA, 19 nt, Human
uggucucagccccucugcu

SEQ ID NO: 958090 - RNA, 20 nt, Human
ugguuuggucucagccccuc

SEQ ID NO: 958091 - RNA, 21 nt, Human
uucugguuuggucucagcccc

SEQ ID NO: 958092 - RNA, 20 nt, Human
aaagauuccuuaguacccuu

SEQ ID NO: 958093 - RNA, 19 nt, Human
aaccuuuugaucuuucaac

SEQ ID NO: 958094 - RNA, 23 nt, Human
acacugaaaacaauauaggaaau

SEQ ID NO: 958095 - RNA, 20 nt, Human
agaacauccacuaagaacau

SEQ ID NO: 958096 - RNA, 19 nt, Human
agacuggagguuccucugc

SEQ ID NO: 958097 - RNA, 22 nt, Human
agagcuuacauuauagugccag

SEQ ID NO: 958098 - RNA, 18 nt, Human
agauucugagaauucuga

SEQ ID NO: 958099 - RNA, 19 nt, Human
agcagaaagauuccuuagu

SEQ ID NO: 958100 - RNA, 18 nt, Human
aggcagccucuguguggu

SEQ ID NO: 958101 - RNA, 19 nt, Human
agggaaauauuugaagcag

SEQ ID NO: 958102 - RNA, 19 nt, Human
aguagagcuuacauuauag

SEQ ID NO: 958103 - RNA, 18 nt, Human
cauagcaccucaguagag

SEQ ID NO: 958104 - RNA, 19 nt, Human
caucgauuuugcuccccuc

SEQ ID NO: 958105 - RNA, 21 nt, Human
caucgauuuugcuccccucug

SEQ ID NO: 958106 - RNA, 19 nt, Human
ccaaagcagaaagauuccu

SEQ ID NO: 958107 - RNA, 23 nt, Human
cccuuggaagaugggaaagguga

SEQ ID NO: 958108 - RNA, 24 nt, Human
cccuuggaagaugggaaaggugag

SEQ ID NO: 958109 - RNA, 18 nt, Human
ccucugcuguaggcucag

SEQ ID NO: 958110 - RNA, 22 nt, Human
cucagaauaugucuaagcaauu

SEQ ID NO: 958111 - RNA, 19 nt, Human
cuguaggcucagaauaugu

SEQ ID NO: 958112 - RNA, 24 nt, Human
cuuuauuaaccuuuugaucuuuca

SEQ ID NO: 958113 - RNA, 22 nt, Human
gauggcaguggaaguccaugaa

SEQ ID NO: 958114 - RNA, 24 nt, Human
gcagggucagaacauccacuaaga

SEQ ID NO: 958115 - RNA, 18 nt, Human
gggucagaacauccacua

SEQ ID NO: 958116 - RNA, 24 nt, Human
uaacaugcagagcauauaucuauc

SEQ ID NO: 958117 - RNA, 19 nt, Human
uacugaauagcuuaggaug

SEQ ID NO: 958118 - RNA, 22 nt, Human
uauguaacaugcagagcauaua

SEQ ID NO: 958119 - RNA, 24 nt, Human
ucuguauuuuuaaaauuuuccugu

SEQ ID NO: 958120 - RNA, 24 nt, Human
ugaagcagggucagaacauccacu

SEQ ID NO: 958121 - RNA, 21 nt, Human
uggaaguccaugaaguaaaga

SEQ ID NO: 958122 - RNA, 24 nt, Human
uugaagcagggucagaacauccac

SEQ ID NO: 958123 - RNA, 20 nt, Human
aaaaaagaaagguuguggua

SEQ ID NO: 958124 - RNA, 22 nt, Human
aaaaguugaaagucacaaaacc

SEQ ID NO: 958125 - RNA, 22 nt, Human
aaacaucaaauuaagacuggug

SEQ ID NO: 958126 - RNA, 22 nt, Human
aagugauugcuagguauacauu

SEQ ID NO: 958127 - RNA, 24 nt, Human
aaugaauugguuauaaaacaaacc

SEQ ID NO: 958128 - RNA, 18 nt, Human
accaaaugaugcauaaga

SEQ ID NO: 958129 - RNA, 27 nt, Human
accguaaccacagauaguaauauagca

SEQ ID NO: 958130 - RNA, 18 nt, Human
auagcauaaagaucaaua

SEQ ID NO: 958131 - RNA, 18 nt, Human
auucugauugucauucau

SEQ ID NO: 958132 - RNA, 20 nt, Human
caggaagacuguauuucugu

SEQ ID NO: 958133 - RNA, 23 nt, Human
cauaaagaucaauacagacagau

SEQ ID NO: 958134 - RNA, 25 nt, Human
caucucaaugaauaaaaguugaaaa

SEQ ID NO: 958135 - RNA, 23 nt, Human
cauuuuguauuucagaugugucc

SEQ ID NO: 958136 - RNA, 22 nt, Human
cggaucaaaacaaaaaguacag

SEQ ID NO: 958137 - RNA, 20 nt, Human
cuucagcuuugcugcucuuc

SEQ ID NO: 958138 - RNA, 20 nt, Human
cuucuuggaaggaguagaaa

SEQ ID NO: 958139 - RNA, 18 nt, Human
gcugcuggugcugcugcu

SEQ ID NO: 958140 - RNA, 23 nt, Human
gcuggugcugcugcugcuacuuc

SEQ ID NO: 958141 - RNA, 22 nt, Human
guuuuuugcuguugcugcuggu

SEQ ID NO: 958142 - RNA, 26 nt, Human
uaaacacacauauccuaauugcuuca

SEQ ID NO: 958143 - RNA, 23 nt, Human
uaaccagccuuucuuaagguagc

SEQ ID NO: 958144 - RNA, 23 nt, Human
uacaguauauaggcaugaacaaa

SEQ ID NO: 958145 - RNA, 24 nt, Human
uacaugauguuuggggaaagaagu

SEQ ID NO: 958146 - RNA, 27 nt, Human
uaccuaaauuuuacaguauauaggcau

SEQ ID NO: 958147 - RNA, 22 nt, Human
uacgacacauagaugcuuuuga

SEQ ID NO: 958148 - RNA, 21 nt, Human
uagacaaaaacauuuuguauu

SEQ ID NO: 958149 - RNA, 24 nt, Human
uaguuuauuagagaaaaaaaugac

SEQ ID NO: 958150 - RNA, 21 nt, Human
uauuagagaaaaaaaugacuu

SEQ ID NO: 958151 - RNA, 19 nt, Human
uauugaugugcuacaugau

SEQ ID NO: 958152 - RNA, 22 nt, Human
uauuucagauguguccaagaua

SEQ ID NO: 958153 - RNA, 19 nt, Human
uccaccguaaccacagaua

SEQ ID NO: 958154 - RNA, 23 nt, Human
uccuuugggcaguggaauucuga

SEQ ID NO: 958155 - RNA, 22 nt, Human
ucuucuuggaaggaguagaaau

SEQ ID NO: 958156 - RNA, 26 nt, Human
ugcaacaaguaagaacgugaaagcac

SEQ ID NO: 958157 - RNA, 24 nt, Human
ugccaguaucccauagcguauaau

SEQ ID NO: 958158 - RNA, 23 nt, Human
uggaaggaguagaaaugcugaac

SEQ ID NO: 958159 - RNA, 24 nt, Human
uguagaauucuugucauuucagua

SEQ ID NO: 958160 - RNA, 22 nt, Human
uguguauuugcaugaaaaaaug

SEQ ID NO: 958161 - RNA, 23 nt, Human
uguugcugcuggugcugcugcug

SEQ ID NO: 958162 - RNA, 23 nt, Human
uuaaugaauugguuauaaaacaa

SEQ ID NO: 958163 - RNA, 20 nt, Human
uucuagagacagaaauguuc

SEQ ID NO: 958164 - RNA, 26 nt, Human
uucucauagucacaacagaauaguug

SEQ ID NO: 958165 - RNA, 24 nt, Human
uucuuggaaggaguagaaaugcug

SEQ ID NO: 958166 - RNA, 18 nt, Human
uugcugcuggugcugcug

SEQ ID NO: 958167 - RNA, 22 nt, Human
uugcugcuggugcugcugcugc

SEQ ID NO: 958168 - RNA, 30 nt, Human
uugcuguugcugcuggugcugcugcugccg

SEQ ID NO: 958169 - RNA, 23 nt, Human
uuucacccaccuuucauccuuca

SEQ ID NO: 958170 - RNA, 24 nt, Human
uuugcuuauuuuucaacauuuuuc

SEQ ID NO: 958171 - RNA, 21 nt, Human
uuuugcuguugcugcuggugc

SEQ ID NO: 958172 - RNA, 21 nt, Human
uuuuugguccuuucacccacc

SEQ ID NO: 958173 - RNA, 21 nt, Human
cacaagucucccaacugguuu

SEQ ID NO: 958174 - RNA, 23 nt, Human
ccaacugguuuggaguuuucccu

SEQ ID NO: 958175 - RNA, 19 nt, Human
cggcccggagacgccaccc

SEQ ID NO: 958176 - RNA, 19 nt, Human
cgguggaugcccagggcug

SEQ ID NO: 958177 - RNA, 21 nt, Human
cgucggagcggcggcccggag

SEQ ID NO: 958178 - RNA, 19 nt, Human
cucccaacugguuuggagu

SEQ ID NO: 958179 - RNA, 19 nt, Human
cucugcccggggcgcgccu

SEQ ID NO: 958180 - RNA, 20 nt, Human
cuggcccgucggagcggcgg

SEQ ID NO: 958181 - RNA, 21 nt, Human
gcggcccggagacgccaccca

SEQ ID NO: 958182 - RNA, 18 nt, Human
gggcgcgccuuccggcuc

SEQ ID NO: 958183 - RNA, 23 nt, Human
uaaucugcaaaguccuuugcaca

SEQ ID NO: 958184 - RNA, 23 nt, Human
uggaguuuucccuucugagguuu

SEQ ID NO: 958185 - RNA, 24 nt, Human
uggaugcccagggcugucuguggc

SEQ ID NO: 958186 - RNA, 24 nt, Human
uuuuuuuuuuuuuuuuuuaaucug

SEQ ID NO: 958187 - RNA, 22 nt, Human
aaaauauauauuuagcuaccag

SEQ ID NO: 958188 - RNA, 19 nt, Human
aaacaaauaaacaaacaac

SEQ ID NO: 958189 - RNA, 22 nt, Human
aaacaaauaaacaaacaacaac

SEQ ID NO: 958190 - RNA, 20 nt, Human
aaacaacaacaaaaucuuuc

SEQ ID NO: 958191 - RNA, 20 nt, Human
aacaacaaaaucuuuccuuc

SEQ ID NO: 958192 - RNA, 21 nt, Human
aacagcaaauagcagagguac

SEQ ID NO: 958193 - RNA, 25 nt, Human
aacuacuggaaaaacaaauaaacaa

SEQ ID NO: 958194 - RNA, 21 nt, Human
aacuuaaacuuuuagaaauuc

SEQ ID NO: 958195 - RNA, 22 nt, Human
acagaauucuuaugaaacauca

SEQ ID NO: 958196 - RNA, 18 nt, Human
acuagcagucaggaauuu

SEQ ID NO: 958197 - RNA, 21 nt, Human
acuucauuagcugagcugaaa

SEQ ID NO: 958198 - RNA, 24 nt, Human
agccagugauuccuggcucacacu

SEQ ID NO: 958199 - RNA, 24 nt, Human
agcgaagauuggaggauccggagc

SEQ ID NO: 958200 - RNA, 23 nt, Human
auagguuuuccucacacucuuca

SEQ ID NO: 958201 - RNA, 24 nt, Human
auagguuuuccucacacucuucaa

SEQ ID NO: 958202 - RNA, 23 nt, Human
aucuaaaauauauauuuagcuac

SEQ ID NO: 958203 - RNA, 19 nt, Human
auuucuuggaaauauaaua

SEQ ID NO: 958204 - RNA, 24 nt, Human
caaaacuuucagaguacaagucau

SEQ ID NO: 958205 - RNA, 28 nt, Human
caacaacaaaaucuuuccuucuugucuu

SEQ ID NO: 958206 - RNA, 22 nt, Human
caauugccaaaacuucaauagc

SEQ ID NO: 958207 - RNA, 22 nt, Human
cagcuuucuaaagugaaauaau

SEQ ID NO: 958208 - RNA, 25 nt, Human
ccauacuaaaaagauaaagaauguc

SEQ ID NO: 958209 - RNA, 20 nt, Human
cccuggguucagagaccucc

SEQ ID NO: 958210 - RNA, 22 nt, Human
cuaacauauuccccaagaaaca

SEQ ID NO: 958211 - RNA, 26 nt, Human
cuaacuacuggaaaaacaaauaaaca

SEQ ID NO: 958212 - RNA, 20 nt, Human
cuauagucaauugccaaaac

SEQ ID NO: 958213 - RNA, 21 nt, Human
gaaauucucuaacauauuccc

SEQ ID NO: 958214 - RNA, 21 nt, Human
gaagauaagauauuagcccuc

SEQ ID NO: 958215 - RNA, 18 nt, Human
gaagauuggaggauccgg

SEQ ID NO: 958216 - RNA, 20 nt, Human
gccuguuuucuagcuucuuc

SEQ ID NO: 958217 - RNA, 23 nt, Human
gcggguuccugaacuggguggag

SEQ ID NO: 958218 - RNA, 22 nt, Human
gguggaggagcggagauuggag

SEQ ID NO: 958219 - RNA, 19 nt, Human
guuaaguuugccuuuacuu

SEQ ID NO: 958220 - RNA, 24 nt, Human
uaaacaaacaacaacaaaaucuuu

SEQ ID NO: 958221 - RNA, 19 nt, Human
uacaagucauuguuaaguu

SEQ ID NO: 958222 - RNA, 18 nt, Human
uagcagagguacuaugcu

SEQ ID NO: 958223 - RNA, 19 nt, Human
uaguaucccacaaucaaga

SEQ ID NO: 958224 - RNA, 22 nt, Human
uccaucaacagaauucuuauga

SEQ ID NO: 958225 - RNA, 22 nt, Human
ucccuggguucagagaccucca

SEQ ID NO: 958226 - RNA, 23 nt, Human
ucuaaaauauauauuuagcuacc

SEQ ID NO: 958227 - RNA, 18 nt, Human
ucucugcugaagacuggg

SEQ ID NO: 958228 - RNA, 19 nt, Human
ucuuuccuucuugucuucc

SEQ ID NO: 958229 - RNA, 18 nt, Human
ugaggaauccaggaagaa

SEQ ID NO: 958230 - RNA, 19 nt, Human
ugccuuuacuuuaaaaacu

SEQ ID NO: 958231 - RNA, 20 nt, Human
ugcuagggccucgaggaugu

SEQ ID NO: 958232 - RNA, 20 nt, Human
ugcugaagacugggaaacuu

SEQ ID NO: 958233 - RNA, 20 nt, Human
uggaaaaacaaauaaacaaa

SEQ ID NO: 958234 - RNA, 22 nt, Human
uuaaauaguaucccacaaucaa

SEQ ID NO: 958235 - RNA, 24 nt, Human
uucaaagugaggaauccaggaaga

SEQ ID NO: 958236 - RNA, 22 nt, Human
uugaaagauuaacagccaguga

SEQ ID NO: 958237 - RNA, 22 nt, Human
uuggaggagcgaagauuggagg

SEQ ID NO: 958238 - RNA, 25 nt, Human
uuguuugaauacguuuccaaaacuu

SEQ ID NO: 958239 - RNA, 19 nt, Human
uuuccacauuaaauccaca

SEQ ID NO: 958240 - RNA, 23 nt, Human
uuuuccaugcgugcucauuucuc

SEQ ID NO: 958241 - RNA, 18 nt, Human
uuuuuuuuuuuuuuuuug

SEQ ID NO: 958242 - RNA, 26 nt, Human
aaaaaagggaaccccugacuuuaugc

SEQ ID NO: 958243 - RNA, 24 nt, Human
aaagucuuuccaaagucuuccuac

SEQ ID NO: 958244 - RNA, 25 nt, Human
aacucacucccuugcaggcccucug

SEQ ID NO: 958245 - RNA, 19 nt, Human
aacugcagcaggaccaaga

SEQ ID NO: 958246 - RNA, 24 nt, Human
acaaaguccauggaagggggaccu

SEQ ID NO: 958247 - RNA, 21 nt, Human
acagggcagcaugggucagaa

SEQ ID NO: 958248 - RNA, 20 nt, Human
acccuuaucuccccuuccca

SEQ ID NO: 958249 - RNA, 21 nt, Human
acccuuaucuccccuucccac

SEQ ID NO: 958250 - RNA, 22 nt, Human
accucccucuuuccuuucacag

SEQ ID NO: 958251 - RNA, 20 nt, Human
accuggguagaacccagccc

SEQ ID NO: 958252 - RNA, 19 nt, Human
acuggccccagcggcuucc

SEQ ID NO: 958253 - RNA, 23 nt, Human
agaaacuaacaaaguccauggaa

SEQ ID NO: 958254 - RNA, 21 nt, Human
agcagcagaggagaguuuugg

SEQ ID NO: 958255 - RNA, 22 nt, Human
agccaaaaaagggaaccccuga

SEQ ID NO: 958256 - RNA, 22 nt, Human
aggaaacaccacacuagccuca

SEQ ID NO: 958257 - RNA, 21 nt, Human
aggaauguggcugcuccugga

SEQ ID NO: 958258 - RNA, 21 nt, Human
aggaccaagagacacaaucag

SEQ ID NO: 958259 - RNA, 18 nt, Human
aggagaaggucuuggagg

SEQ ID NO: 958260 - RNA, 21 nt, Human
aggcaggcggcuagagccagg

SEQ ID NO: 958261 - RNA, 24 nt, Human
aggcagggccccaucacagggugu

SEQ ID NO: 958262 - RNA, 21 nt, Human
aggcccuuggguggggguggg

SEQ ID NO: 958263 - RNA, 18 nt, Human
agggaaccucuaaccagc

SEQ ID NO: 958264 - RNA, 20 nt, Human
agggagugggcagagggccu

SEQ ID NO: 958265 - RNA, 21 nt, Human
agggauggucucugcucugcc

SEQ ID NO: 958266 - RNA, 23 nt, Human
aggggacucauggaaaacaucau

SEQ ID NO: 958267 - RNA, 24 nt, Human
agguagacggcaagggucggggac

SEQ ID NO: 958268 - RNA, 21 nt, Human
agugagagaggugggaaggga

SEQ ID NO: 958269 - RNA, 20 nt, Human
auccaggggcuggagagaag

SEQ ID NO: 958270 - RNA, 20 nt, Human
caaaaaagggaaccccugac

SEQ ID NO: 958271 - RNA, 22 nt, Human
caaaauggcacagacguuggug

SEQ ID NO: 958272 - RNA, 18 nt, Human
caaagugcauugggccca

SEQ ID NO: 958273 - RNA, 21 nt, Human
caaguuaguccauuggcaggg

SEQ ID NO: 958274 - RNA, 21 nt, Human
caccacacuagccucaugcaa

SEQ ID NO: 958275 - RNA, 19 nt, Human
caccagauacccuuaucuc

SEQ ID NO: 958276 - RNA, 23 nt, Human
caccagauacccuuaucuccccu

SEQ ID NO: 958277 - RNA, 28 nt, Human
caccagggacccugaggggccaggccag

SEQ ID NO: 958278 - RNA, 21 nt, Human
cacccccucugucccuggcag

SEQ ID NO: 958279 - RNA, 23 nt, Human
caccuccccccuccaaucauccc

SEQ ID NO: 958280 - RNA, 23 nt, Human
caccugagccaggcccugagcuu

SEQ ID NO: 958281 - RNA, 19 nt, Human
cacuagccucaugcaagaa

SEQ ID NO: 958282 - RNA, 28 nt, Human
cagcagcagaggagaguuuuggggcugg

SEQ ID NO: 958283 - RNA, 21 nt, Human
cagcaggaccaagagacacaa

SEQ ID NO: 958284 - RNA, 24 nt, Human
cagcaugggucagaaggggcuggg

SEQ ID NO: 958285 - RNA, 21 nt, Human
cagccagcagcagaggagagu

SEQ ID NO: 958286 - RNA, 22 nt, Human
caggaaacaccacacuagccuc

SEQ ID NO: 958287 - RNA, 23 nt, Human
caggagucucugaagaagcauca

SEQ ID NO: 958288 - RNA, 22 nt, Human
cagggccccaucacaggguguc

SEQ ID NO: 958289 - RNA, 23 nt, Human
caugcaagaaaagacaugucacc

SEQ ID NO: 958290 - RNA, 22 nt, Human
ccaaagucuuccuacucuuucc

SEQ ID NO: 958291 - RNA, 25 nt, Human
ccaacuggccccagcggcuuccuca

SEQ ID NO: 958292 - RNA, 18 nt, Human
ccagugggggcgugggcu

SEQ ID NO: 958293 - RNA, 18 nt, Human
ccccauccaggcaugcuc

SEQ ID NO: 958294 - RNA, 23 nt, Human
ccccuggaaggcucucccagccu

SEQ ID NO: 958295 - RNA, 21 nt, Human
cccuuaucuccccuucccaca

SEQ ID NO: 958296 - RNA, 22 nt, Human
ccuccaagcacccaucugugaa

SEQ ID NO: 958297 - RNA, 19 nt, Human
ccuggguagaacccagccc

SEQ ID NO: 958298 - RNA, 23 nt, Human
ccugucugcgguggggacaaagg

SEQ ID NO: 958299 - RNA, 18 nt, Human
ccuuaccucccucuuucc

SEQ ID NO: 958300 - RNA, 18 nt, Human
cucagcacaguguagacc

SEQ ID NO: 958301 - RNA, 18 nt, Human
cucauggaaaacaucaug

SEQ ID NO: 958302 - RNA, 20 nt, Human
cucccacccucucugagcug

SEQ ID NO: 958303 - RNA, 18 nt, Human
cucugcccauuuccauuu

SEQ ID NO: 958304 - RNA, 20 nt, Human
cugcgguggggacaaaggug

SEQ ID NO: 958305 - RNA, 21 nt, Human
cugcucugcccauuuccauuu

SEQ ID NO: 958306 - RNA, 19 nt, Human
cuggaaggcucucccagcc

SEQ ID NO: 958307 - RNA, 18 nt, Human
cuggccccagcggcuucc

SEQ ID NO: 958308 - RNA, 20 nt, Human
cuggcgugugugggguggga

SEQ ID NO: 958309 - RNA, 21 nt, Human
cugugaggcugcauccagggg

SEQ ID NO: 958310 - RNA, 19 nt, Human
cuucccacaaugccuaacc

SEQ ID NO: 958311 - RNA, 21 nt, Human
cuuccuacucuuuccaaaguc

SEQ ID NO: 958312 - RNA, 20 nt, Human
cuucuuggacaugugucugg

SEQ ID NO: 958313 - RNA, 21 nt, Human
cuuuaugccuacaacuucccc

SEQ ID NO: 958314 - RNA, 23 nt, Human
gacaaguuaguccauuggcaggg

SEQ ID NO: 958315 - RNA, 21 nt, Human
gagcugccagagugaccccac

SEQ ID NO: 958316 - RNA, 18 nt, Human
gaggcagagcccgggcug

SEQ ID NO: 958317 - RNA, 18 nt, Human
gagggccuggccugaugc

SEQ ID NO: 958318 - RNA, 24 nt, Human
gaucccaccuccccccuccaauca

SEQ ID NO: 958319 - RNA, 22 nt, Human
gcagugccaggaaacaccacac

SEQ ID NO: 958320 - RNA, 18 nt, Human
gccaggcccugagcuucc

SEQ ID NO: 958321 - RNA, 28 nt, Human
gcccagccucaggaaagaagggaacgcc

SEQ ID NO: 958322 - RNA, 19 nt, Human
gcccauaagaggccccuca

SEQ ID NO: 958323 - RNA, 27 nt, Human
gcuccuggagccuuuccugggcuucuu

SEQ ID NO: 958324 - RNA, 22 nt, Human
gcugcuccuggagccuuuccug

SEQ ID NO: 958325 - RNA, 21 nt, Human
ggaggcagagcccgggcuguc

SEQ ID NO: 958326 - RNA, 19 nt, Human
ggagugggcagagggccug

SEQ ID NO: 958327 - RNA, 21 nt, Human
ggcagguggagaauggucaag

SEQ ID NO: 958328 - RNA, 21 nt, Human
ggccucaggguccaaagacaa

SEQ ID NO: 958329 - RNA, 24 nt, Human
ggcuggagagaagggccucagguc

SEQ ID NO: 958330 - RNA, 22 nt, Human
ggcuggggugaguugggaggcc

SEQ ID NO: 958331 - RNA, 21 nt, Human
gggaaccccugacuuuaugcc

SEQ ID NO: 958332 - RNA, 19 nt, Human
gggaaugccugggagcuug

SEQ ID NO: 958333 - RNA, 19 nt, Human
gggacagguauuccuuacc

SEQ ID NO: 958334 - RNA, 19 nt, Human
gggagugcagaggccaggu

SEQ ID NO: 958335 - RNA, 21 nt, Human
gggcagcacagcgucuugcuc

SEQ ID NO: 958336 - RNA, 21 nt, Human
gggcugggauggcgucaaagg

SEQ ID NO: 958337 - RNA, 21 nt, Human
ggggaaugccugggagcuugg

SEQ ID NO: 958338 - RNA, 20 nt, Human
ggggacagguauuccuuacc

SEQ ID NO: 958339 - RNA, 20 nt, Human
ggggcccacagggcaggguc

SEQ ID NO: 958340 - RNA, 23 nt, Human
ggggcugggauggcgucaaaggg

SEQ ID NO: 958341 - RNA, 18 nt, Human
ggggugggaccacaaggg

SEQ ID NO: 958342 - RNA, 20 nt, Human
ggguggguaugaggaugagg

SEQ ID NO: 958343 - RNA, 21 nt, Human
gguggagaauggucaaggcug

SEQ ID NO: 958344 - RNA, 18 nt, Human
gugagaugggaggacugu

SEQ ID NO: 958345 - RNA, 20 nt, Human
guggagaauggucaaggcug

SEQ ID NO: 958346 - RNA, 19 nt, Human
gugggggcgugggcucugu

SEQ ID NO: 958347 - RNA, 20 nt, Human
gugggggcgugggcucugua

SEQ ID NO: 958348 - RNA, 19 nt, Human
guugggaggccacccccuc

SEQ ID NO: 958349 - RNA, 20 nt, Human
uaaccaagggcagagccuca

SEQ ID NO: 958350 - RNA, 19 nt, Human
uagaacccagcccauaaga

SEQ ID NO: 958351 - RNA, 19 nt, Human
uagcaccuggguagaaccc

SEQ ID NO: 958352 - RNA, 21 nt, Human
uaguaaaauacaaaauggcac

SEQ ID NO: 958353 - RNA, 23 nt, Human
uaguaaaauacaaaauggcacag

SEQ ID NO: 958354 - RNA, 23 nt, Human
ucaacucacucccuugcaggccc

SEQ ID NO: 958355 - RNA, 20 nt, Human
ucacagggugucccaccccu

SEQ ID NO: 958356 - RNA, 22 nt, Human
ucaggccaggcccuuggguggg

SEQ ID NO: 958357 - RNA, 24 nt, Human
ucccacccucucugagcugccaga

SEQ ID NO: 958358 - RNA, 18 nt, Human
ucccaccuccccccucca

SEQ ID NO: 958359 - RNA, 19 nt, Human
ucccaccuccccccuccaa

SEQ ID NO: 958360 - RNA, 26 nt, Human
ucccaccuccccccuccaaucauccc

SEQ ID NO: 958361 - RNA, 25 nt, Human
ucccaggcagcugucugaaucaaac

SEQ ID NO: 958362 - RNA, 20 nt, Human
ucccucuuuccuuucacaga

SEQ ID NO: 958363 - RNA, 18 nt, Human
uccuggagccuuuccugg

SEQ ID NO: 958364 - RNA, 18 nt, Human
uccuggggaaugccuggg

SEQ ID NO: 958365 - RNA, 19 nt, Human
uccuuaccucccucuuucc

SEQ ID NO: 958366 - RNA, 21 nt, Human
ucuauggaccagagcuggguu

SEQ ID NO: 958367 - RNA, 20 nt, Human
ucucugagcugccagagucg

SEQ ID NO: 958368 - RNA, 24 nt, Human
ucucugagcugccagagucgacuu

SEQ ID NO: 958369 - RNA, 22 nt, Human
ucugagcugccagagugacccc

SEQ ID NO: 958370 - RNA, 20 nt, Human
ugagaugggaggacuguagu

SEQ ID NO: 958371 - RNA, 22 nt, Human
ugagaugggaggacuguaguac

SEQ ID NO: 958372 - RNA, 22 nt, Human
ugaggcugcauccaggggcugg

SEQ ID NO: 958373 - RNA, 21 nt, Human
ugaugggaggcagagcccggg

SEQ ID NO: 958374 - RNA, 21 nt, Human
ugcagggagugggcagagggc

SEQ ID NO: 958375 - RNA, 25 nt, Human
ugcagggagugggcagagggccugg

SEQ ID NO: 958376 - RNA, 19 nt, Human
ugccuaaccaagggcagag

SEQ ID NO: 958377 - RNA, 19 nt, Human
ugccugggagcuuggagcu

SEQ ID NO: 958378 - RNA, 19 nt, Human
ugcucgagccuucagcagc

SEQ ID NO: 958379 - RNA, 23 nt, Human
ugcuuggagaaacuaacaaaguc

SEQ ID NO: 958380 - RNA, 19 nt, Human
uggaggaucccaccucccc

SEQ ID NO: 958381 - RNA, 20 nt, Human
uggcagguggagaaugguca

SEQ ID NO: 958382 - RNA, 25 nt, Human
uggccuccuggggaaugccugggag

SEQ ID NO: 958383 - RNA, 25 nt, Human
ugggaggccacccccucugucccug

SEQ ID NO: 958384 - RNA, 19 nt, Human
ugggauggcgucaaaggga

SEQ ID NO: 958385 - RNA, 18 nt, Human
uggggaaugccugggagc

SEQ ID NO: 958386 - RNA, 19 nt, Human
ugggggcccacagggcagg

SEQ ID NO: 958387 - RNA, 20 nt, Human
uggggugaguugggaggcca

SEQ ID NO: 958388 - RNA, 21 nt, Human
uggggugggaccacaaggguc

SEQ ID NO: 958389 - RNA, 19 nt, Human
ugucccagcccccuucccg

SEQ ID NO: 958390 - RNA, 19 nt, Human
ugucccagcccccuucccg

SEQ ID NO: 958391 - RNA, 20 nt, Human
ugucucagugacuaagccug

SEQ ID NO: 958392 - RNA, 21 nt, Human
uguggggugggaccacaaggg

SEQ ID NO: 958393 - RNA, 24 nt, Human
ugugucuggagcccucccucccuc

SEQ ID NO: 958394 - RNA, 22 nt, Human
uguguggggugggaccacaagg

SEQ ID NO: 958395 - RNA, 23 nt, Human
uucagacucagcacaguguagac

SEQ ID NO: 958396 - RNA, 18 nt, Human
uucccaugucccagcccc

SEQ ID NO: 958397 - RNA, 24 nt, Human
uuggggcugggauggcgucaaagg

SEQ ID NO: 958398 - RNA, 23 nt, Human
agguggaggguggcagaggcugg

SEQ ID NO: 958399 - RNA, 18 nt, Human
gagaaagaggagacagag

SEQ ID NO: 958400 - RNA, 19 nt, Human
gaggagguggaggguggca

SEQ ID NO: 958401 - RNA, 22 nt, Human
ggagguggaggguggcagaggc

SEQ ID NO: 958402 - RNA, 23 nt, Human
ggggcuggggcugaccgaggagg

SEQ ID NO: 958403 - RNA, 23 nt, Human
uggggcugaccgaggagguggag

SEQ ID NO: 958404 - RNA, 22 nt, Human
uggggcuggggcugaccgagga

SEQ ID NO: 958405 - RNA, 20 nt, Human
aaaaaaaaaaaaaacaaaaa

SEQ ID NO: 958406 - RNA, 30 nt, Human
aaaaaaaaaacaaaaacaaaaacaaaaccu

SEQ ID NO: 958407 - RNA, 30 nt, Human
aaaaaaacaaaaacaaaaacaaaaccaggg

SEQ ID NO: 958408 - RNA, 24 nt, Human
aaaacaaaaacaaaaacaaaacca

SEQ ID NO: 958409 - RNA, 19 nt, Human
aaaagaucugugaccccac

SEQ ID NO: 958410 - RNA, 22 nt, Human
aaaagaucugugaccccacauu

SEQ ID NO: 958411 - RNA, 27 nt, Human
aaacaaaaaaaaaaaaaacaaaaacaa

SEQ ID NO: 958412 - RNA, 22 nt, Human
aaacaaaaacaaaaacaaaacc

SEQ ID NO: 958413 - RNA, 19 nt, Human
aaacaaaaacaaaaccagu

SEQ ID NO: 958414 - RNA, 22 nt, Human
aaagccccucagaacacuccau

SEQ ID NO: 958415 - RNA, 21 nt, Human
aaaggacuuggcuaaggaggg

SEQ ID NO: 958416 - RNA, 18 nt, Human
aaaggcaccccuaccaca

SEQ ID NO: 958417 - RNA, 18 nt, Human
aaagguggucaguugcug

SEQ ID NO: 958418 - RNA, 24 nt, Human
aaccacaugcccccucccugcccu

SEQ ID NO: 958419 - RNA, 20 nt, Human
aacccccucucuuuacccaa

SEQ ID NO: 958420 - RNA, 19 nt, Human
aaccugccuuccugacuug

SEQ ID NO: 958421 - RNA, 19 nt, Human
aagaaauccagagaacaca

SEQ ID NO: 958422 - RNA, 21 nt, Human
aagaccccccaacaaccuggg

SEQ ID NO: 958423 - RNA, 20 nt, Human
aagaggccuggggaggcaag

SEQ ID NO: 958424 - RNA, 18 nt, Human
aagcacacccuccccaaa

SEQ ID NO: 958425 - RNA, 21 nt, Human
aagcaggaaggggacacaggg

SEQ ID NO: 958426 - RNA, 22 nt, Human
aagccaggcccaccugcaugca

SEQ ID NO: 958427 - RNA, 20 nt, Human
aagccccccgugggcuucuc

SEQ ID NO: 958428 - RNA, 18 nt, Human
aagccgggacagugaagg

SEQ ID NO: 958429 - RNA, 22 nt, Human
aaggacacagagaagagaagcc

SEQ ID NO: 958430 - RNA, 25 nt, Human
aaggacucacaggagggagggacaa

SEQ ID NO: 958431 - RNA, 22 nt, Human
aaggcuggguccaccuggcuuc

SEQ ID NO: 958432 - RNA, 24 nt, Human
aaggucugcagagaaagccacaua

SEQ ID NO: 958433 - RNA, 18 nt, Human
aagguuuuggccaugaac

SEQ ID NO: 958434 - RNA, 26 nt, Human
aaguguuaaaaaacaaacaaacaaac

SEQ ID NO: 958435 - RNA, 24 nt, Human
aaugcccuaaaagggcuguggccc

SEQ ID NO: 958436 - RNA, 18 nt, Human
acacagagaagagaagcc

SEQ ID NO: 958437 - RNA, 19 nt, Human
acaccgcuaccccucaucc

SEQ ID NO: 958438 - RNA, 18 nt, Human
acagagaagagaagccag

SEQ ID NO: 958439 - RNA, 18 nt, Human
acaugagguccugaagcc

SEQ ID NO: 958440 - RNA, 25 nt, Human
accccagagagaccaggacaaaaca

SEQ ID NO: 958441 - RNA, 19 nt, Human
accccagcuuccuauccca

SEQ ID NO: 958442 - RNA, 21 nt, Human
accccaugaggcagagggucu

SEQ ID NO: 958443 - RNA, 21 nt, Human
acccccucucuuuacccaauu

SEQ ID NO: 958444 - RNA, 21 nt, Human
accccgaguagaggucaucca

SEQ ID NO: 958445 - RNA, 20 nt, Human
accccucccccacuaucacc

SEQ ID NO: 958446 - RNA, 24 nt, Human
accccucccccacuaucaccuggu

SEQ ID NO: 958447 - RNA, 18 nt, Human
acccuaagcccugcccag

SEQ ID NO: 958448 - RNA, 18 nt, Human
acccuaagcccugcccag

SEQ ID NO: 958449 - RNA, 19 nt, Human
acccuaagcccugcccagc

SEQ ID NO: 958450 - RNA, 22 nt, Human
accgcuaccccucauccugcag

SEQ ID NO: 958451 - RNA, 21 nt, Human
accuggggccaaauuuccuuc

SEQ ID NO: 958452 - RNA, 18 nt, Human
accugggggaugcugggg

SEQ ID NO: 958453 - RNA, 24 nt, Human
acuugcuggggcuugcaggggaac

SEQ ID NO: 958454 - RNA, 18 nt, Human
agaagagaagccagugcc

SEQ ID NO: 958455 - RNA, 18 nt, Human
agacagcagcaccccagg

SEQ ID NO: 958456 - RNA, 23 nt, Human
agacagcagcaccccagggagca

SEQ ID NO: 958457 - RNA, 25 nt, Human
agaccagaggcgagggcugugggga

SEQ ID NO: 958458 - RNA, 26 nt, Human
agagaagccagugccuggagcccaag

SEQ ID NO: 958459 - RNA, 19 nt, Human
agagucagcccccuagcuc

SEQ ID NO: 958460 - RNA, 20 nt, Human
agaugccagcccgugcccuc

SEQ ID NO: 958461 - RNA, 25 nt, Human
agcaagaagaacuugccugacccag

SEQ ID NO: 958462 - RNA, 21 nt, Human
agccacagccagcuccugggc

SEQ ID NO: 958463 - RNA, 18 nt, Human
agccagaauuguuuggcc

SEQ ID NO: 958464 - RNA, 25 nt, Human
agccagcuccugggcucggaaccag

SEQ ID NO: 958465 - RNA, 25 nt, Human
agccauggccccugaagcugcagcc

SEQ ID NO: 958466 - RNA, 21 nt, Human
agcccaagccccaaaucagaa

SEQ ID NO: 958467 - RNA, 19 nt, Human
agcccuacuugcuagguaa

SEQ ID NO: 958468 - RNA, 18 nt, Human
agcccugguugccaccca

SEQ ID NO: 958469 - RNA, 20 nt, Human
agccuggacaucugccuugg

SEQ ID NO: 958470 - RNA, 21 nt, Human
agcuaaagguggucaguugcu

SEQ ID NO: 958471 - RNA, 19 nt, Human
agcuccugggcucggaacc

SEQ ID NO: 958472 - RNA, 22 nt, Human
aggcaagaggccuggggaggca

SEQ ID NO: 958473 - RNA, 18 nt, Human
aggcaaggcccccaucug

SEQ ID NO: 958474 - RNA, 24 nt, Human
aggcaccacuugaagcaccugccc

SEQ ID NO: 958475 - RNA, 19 nt, Human
aggcagagggcagagggug

SEQ ID NO: 958476 - RNA, 26 nt, Human
aggcagagggcagagggugcggaggg

SEQ ID NO: 958477 - RNA, 19 nt, Human
aggcagagggucugcuccc

SEQ ID NO: 958478 - RNA, 22 nt, Human
aggcagagguagggaggggggu

SEQ ID NO: 958479 - RNA, 22 nt, Human
aggcaggagggaggggagccag

SEQ ID NO: 958480 - RNA, 24 nt, Human
aggcaggagggaggggagccaggg

SEQ ID NO: 958481 - RNA, 25 nt, Human
aggcagggguagggggacaugaggg

SEQ ID NO: 958482 - RNA, 26 nt, Human
aggcagggguagggggacaugagggc

SEQ ID NO: 958483 - RNA, 23 nt, Human
aggcaggggugguacacuaaggg

SEQ ID NO: 958484 - RNA, 19 nt, Human
aggcagguucuguacagga

SEQ ID NO: 958485 - RNA, 21 nt, Human
aggcugcagggaggcacugug

SEQ ID NO: 958486 - RNA, 21 nt, Human
agggccucugggcaggugggc

SEQ ID NO: 958487 - RNA, 26 nt, Human
aggggaacacaggaguggcauucugg

SEQ ID NO: 958488 - RNA, 20 nt, Human
aggugaaaauacagggauuc

SEQ ID NO: 958489 - RNA, 21 nt, Human
agugaaggaacuugggaggaa

SEQ ID NO: 958490 - RNA, 19 nt, Human
auccucccugguuucucag

SEQ ID NO: 958491 - RNA, 27 nt, Human
caaaaaaaaaaaaaacaaaaacaaaaa

SEQ ID NO: 958492 - RNA, 31 nt, Human
caaaaaaaaaaaaaacaaaaacaaaaacaaa

SEQ ID NO: 958493 - RNA, 22 nt, Human
caaaaaggagaucucagugagc

SEQ ID NO: 958494 - RNA, 24 nt, Human
caaaacaggcuggugacaagggac

SEQ ID NO: 958495 - RNA, 30 nt, Human
caaacaaacaaacaaaaaaaaaaaaaacaa

SEQ ID NO: 958496 - RNA, 21 nt, Human
caaaccucccccucugccagc

SEQ ID NO: 958497 - RNA, 21 nt, Human
caaaucagaagccaaccccug

SEQ ID NO: 958498 - RNA, 19 nt, Human
caaccccagagagaccagg

SEQ ID NO: 958499 - RNA, 22 nt, Human
caagaggagagauucaacaacc

SEQ ID NO: 958500 - RNA, 18 nt, Human
caagcacacccuccccaa

SEQ ID NO: 958501 - RNA, 22 nt, Human
caagccccaaaucagaagccaa

SEQ ID NO: 958502 - RNA, 26 nt, Human
caagccccaaaucagaagccaacccc

SEQ ID NO: 958503 - RNA, 21 nt, Human
cacacacccuaagcccugccc

SEQ ID NO: 958504 - RNA, 20 nt, Human
cacacccuccccaaaagauc

SEQ ID NO: 958505 - RNA, 20 nt, Human
cacaccgcuaccccucaucc

SEQ ID NO: 958506 - RNA, 22 nt, Human
caccacaucccuuuggcuccaa

SEQ ID NO: 958507 - RNA, 18 nt, Human
caccccagggagcagggu

SEQ ID NO: 958508 - RNA, 26 nt, Human
cacccccaccauuggcuccagcccca

SEQ ID NO: 958509 - RNA, 19 nt, Human
caccccuaccacaagcuca

SEQ ID NO: 958510 - RNA, 19 nt, Human
cacccucucacccagcuag

SEQ ID NO: 958511 - RNA, 21 nt, Human
cacccuuucuuccaccaccag

SEQ ID NO: 958512 - RNA, 23 nt, Human
cacccuuucuuccaccaccagcc

SEQ ID NO: 958513 - RNA, 19 nt, Human
caccggaaccaagcaaggu

SEQ ID NO: 958514 - RNA, 18 nt, Human
caccugggggaugcuggg

SEQ ID NO: 958515 - RNA, 19 nt, Human
cacugcgccagcgcugggc

SEQ ID NO: 958516 - RNA, 22 nt, Human
cacuggcugggguugguggcug

SEQ ID NO: 958517 - RNA, 19 nt, Human
cacugugggugccaaguca

SEQ ID NO: 958518 - RNA, 20 nt, Human
cagaccccaaaggcaccccu

SEQ ID NO: 958519 - RNA, 23 nt, Human
cagagagaccaggacaaaacagg

SEQ ID NO: 958520 - RNA, 20 nt, Human
cagagcaagaagaacuugcc

SEQ ID NO: 958521 - RNA, 19 nt, Human
cagaggcagaggcggaggg

SEQ ID NO: 958522 - RNA, 20 nt, Human
cagaggcggaggguaaaagg

SEQ ID NO: 958523 - RNA, 18 nt, Human
cagagguagggagggggg

SEQ ID NO: 958524 - RNA, 24 nt, Human
cagauaucaggggccccccaugcc

SEQ ID NO: 958525 - RNA, 22 nt, Human
cagauggcaacucccagggccc

SEQ ID NO: 958526 - RNA, 19 nt, Human
cagcaaaugccaaagcccc

SEQ ID NO: 958527 - RNA, 22 nt, Human
cagcagcaccccagggagcagg

SEQ ID NO: 958528 - RNA, 26 nt, Human
cagccaaucgcaacucacaccacauc

SEQ ID NO: 958529 - RNA, 24 nt, Human
cagccagcuccugggcucggaacc

SEQ ID NO: 958530 - RNA, 20 nt, Human
cagccccuggaaccuccccc

SEQ ID NO: 958531 - RNA, 19 nt, Human
caggcaccacuugaagcac

SEQ ID NO: 958532 - RNA, 19 nt, Human
caggcagagggcagagggu

SEQ ID NO: 958533 - RNA, 19 nt, Human
caggggaacugcuugagca

SEQ ID NO: 958534 - RNA, 23 nt, Human
cagggucugggcucuccaggucc

SEQ ID NO: 958535 - RNA, 25 nt, Human
caucuggccuccuggccuccuggag

SEQ ID NO: 958536 - RNA, 21 nt, Human
caucuugaaaagggcccugaa

SEQ ID NO: 958537 - RNA, 23 nt, Human
cauucugggcccugagguccucc

SEQ ID NO: 958538 - RNA, 21 nt, Human
cauuggcuccagccccacuga

SEQ ID NO: 958539 - RNA, 21 nt, Human
cauuggcuccagccccacuga

SEQ ID NO: 958540 - RNA, 21 nt, Human
ccaaaccucccccucugccag

SEQ ID NO: 958541 - RNA, 24 nt, Human
ccaacccccucucuuuacccaauu

SEQ ID NO: 958542 - RNA, 20 nt, Human
ccaagacagcagcaccccag

SEQ ID NO: 958543 - RNA, 20 nt, Human
ccaagaccccccaacaaccu

SEQ ID NO: 958544 - RNA, 19 nt, Human
ccacagccagcuccugggc

SEQ ID NO: 958545 - RNA, 22 nt, Human
ccacccccaccauuggcuccag

SEQ ID NO: 958546 - RNA, 19 nt, Human
ccaggcaggagggagggga

SEQ ID NO: 958547 - RNA, 18 nt, Human
ccaggcccaccugcaugc

SEQ ID NO: 958548 - RNA, 21 nt, Human
cccaaaggcaccccuaccaca

SEQ ID NO: 958549 - RNA, 23 nt, Human
cccaagccccaaaucagaagcca

SEQ ID NO: 958550 - RNA, 21 nt, Human
cccacaugccuccagcgauca

SEQ ID NO: 958551 - RNA, 18 nt, Human
cccagaaggauguucugc

SEQ ID NO: 958552 - RNA, 23 nt, Human
cccagcuagagagaggcccuggg

SEQ ID NO: 958553 - RNA, 21 nt, Human
cccagucucagcugccuucuu

SEQ ID NO: 958554 - RNA, 19 nt, Human
ccccagaaggauguucugc

SEQ ID NO: 958555 - RNA, 18 nt, Human
ccccagaggcucucaagc

SEQ ID NO: 958556 - RNA, 24 nt, Human
ccccagcuuccuaucccaaaccuu

SEQ ID NO: 958557 - RNA, 23 nt, Human
cccccaacaaccuggggccaaau

SEQ ID NO: 958558 - RNA, 19 nt, Human
ccccccaacaaccuggggc

SEQ ID NO: 958559 - RNA, 22 nt, Human
ccccccaugcccacucuuccaa

SEQ ID NO: 958560 - RNA, 22 nt, Human
cccccugccaagcacacccucc

SEQ ID NO: 958561 - RNA, 22 nt, Human
ccccggucaggccggccagggc

SEQ ID NO: 958562 - RNA, 23 nt, Human
ccccuaccacaagcucaaggcag

SEQ ID NO: 958563 - RNA, 23 nt, Human
ccccuccucaccaguggcugccc

SEQ ID NO: 958564 - RNA, 20 nt, Human
ccccuggaaccucccccuca

SEQ ID NO: 958565 - RNA, 22 nt, Human
ccccuggaaccucccccucacu

SEQ ID NO: 958566 - RNA, 19 nt, Human
ccccuggccucuucucuca

SEQ ID NO: 958567 - RNA, 21 nt, Human
ccccuggccucuucucucaaa

SEQ ID NO: 958568 - RNA, 21 nt, Human
cccgagauucugcuagacccu

SEQ ID NO: 958569 - RNA, 24 nt, Human
cccgcaguggggcaggccgggguc

SEQ ID NO: 958570 - RNA, 24 nt, Human
cccguaccaucuccucagaugcca

SEQ ID NO: 958571 - RNA, 20 nt, Human
cccuaagcccugcccagccc

SEQ ID NO: 958572 - RNA, 21 nt, Human
cccuaagcccugcccagcccu

SEQ ID NO: 958573 - RNA, 18 nt, Human
cccucaaacccugaccuc

SEQ ID NO: 958574 - RNA, 19 nt, Human
cccucagaacacuccauca

SEQ ID NO: 958575 - RNA, 21 nt, Human
cccuggaaccucccccucacu

SEQ ID NO: 958576 - RNA, 24 nt, Human
cccugguuucucagccucggccug

SEQ ID NO: 958577 - RNA, 18 nt, Human
cccuguguccaggggccc

SEQ ID NO: 958578 - RNA, 18 nt, Human
cccuuuucuccucuaucc

SEQ ID NO: 958579 - RNA, 18 nt, Human
ccuaaccccaccauuggc

SEQ ID NO: 958580 - RNA, 25 nt, Human
ccuaccacaagcucaaggcaggggu

SEQ ID NO: 958581 - RNA, 19 nt, Human
ccucacugggcccagucuc

SEQ ID NO: 958582 - RNA, 18 nt, Human
ccucaggaggauaaagcc

SEQ ID NO: 958583 - RNA, 22 nt, Human
ccuccagguccacgggucucuc

SEQ ID NO: 958584 - RNA, 18 nt, Human
ccucuuauaaaugggcac

SEQ ID NO: 958585 - RNA, 24 nt, Human
ccugaaauaaaaccugccuuccug

SEQ ID NO: 958586 - RNA, 25 nt, Human
ccugaagccccagacugguggcagg

SEQ ID NO: 958587 - RNA, 19 nt, Human
ccugaccucggggccugag

SEQ ID NO: 958588 - RNA, 21 nt, Human
ccugagggaucugcaggggcu

SEQ ID NO: 958589 - RNA, 20 nt, Human
ccugcacccacauugcaccu

SEQ ID NO: 958590 - RNA, 19 nt, Human
ccugcaugcaaugcccuaa

SEQ ID NO: 958591 - RNA, 22 nt, Human
ccugcaugcaaugcccuaaaag

SEQ ID NO: 958592 - RNA, 22 nt, Human
ccugccaagcacacccucccca

SEQ ID NO: 958593 - RNA, 19 nt, Human
ccugccggggccaccccca

SEQ ID NO: 958594 - RNA, 21 nt, Human
ccuggcuuccucacaagccuc

SEQ ID NO: 958595 - RNA, 21 nt, Human
ccugggagacccaagaccccc

SEQ ID NO: 958596 - RNA, 22 nt, Human
ccugggccuuccguccugggag

SEQ ID NO: 958597 - RNA, 21 nt, Human
ccugguuucucagccucggcc

SEQ ID NO: 958598 - RNA, 25 nt, Human
ccugugaaggaggguuuugggacug

SEQ ID NO: 958599 - RNA, 24 nt, Human
ccuucuuguucuggggauccagag

SEQ ID NO: 958600 - RNA, 18 nt, Human
ccuugggagagagggcag

SEQ ID NO: 958601 - RNA, 19 nt, Human
ccuuguggucuguggcccc

SEQ ID NO: 958602 - RNA, 23 nt, Human
cgaguagaggucauccaguucau

SEQ ID NO: 958603 - RNA, 21 nt, Human
cgcggugcccuucucucccga

SEQ ID NO: 958604 - RNA, 18 nt, Human
cuacacaccgcuaccccu

SEQ ID NO: 958605 - RNA, 27 nt, Human
cucacugggcccagucucagcugccuu

SEQ ID NO: 958606 - RNA, 22 nt, Human
cucagccucggccugcccaggc

SEQ ID NO: 958607 - RNA, 23 nt, Human
cucagugagcacugugggugcca

SEQ ID NO: 958608 - RNA, 21 nt, Human
cucaucccucaaacccugacc

SEQ ID NO: 958609 - RNA, 22 nt, Human
cucccaacccccucucuuuacc

SEQ ID NO: 958610 - RNA, 26 nt, Human
cucccaacccccucucuuuacccaau

SEQ ID NO: 958611 - RNA, 23 nt, Human
cuccccaaaagaucugugacccc

SEQ ID NO: 958612 - RNA, 24 nt, Human
cucccgagauucugcuagacccag

SEQ ID NO: 958613 - RNA, 19 nt, Human
cuccucugugccagacccc

SEQ ID NO: 958614 - RNA, 25 nt, Human
cucucugccaagucaaaaauucugg

SEQ ID NO: 958615 - RNA, 22 nt, Human
cucugugccagaccccagcuuc

SEQ ID NO: 958616 - RNA, 19 nt, Human
cucuuuuuuccacugucuu

SEQ ID NO: 958617 - RNA, 19 nt, Human
cugaagccccagacuggug

SEQ ID NO: 958618 - RNA, 22 nt, Human
cugacaugagguccugaagccc

SEQ ID NO: 958619 - RNA, 23 nt, Human
cugacccaggcagugaaugcccc

SEQ ID NO: 958620 - RNA, 18 nt, Human
cugacgcaaagccgggac

SEQ ID NO: 958621 - RNA, 24 nt, Human
cugagaagaagucguauuucucac

SEQ ID NO: 958622 - RNA, 21 nt, Human
cugccggggccacccccacca

SEQ ID NO: 958623 - RNA, 19 nt, Human
cugcuagacccagcugacc

SEQ ID NO: 958624 - RNA, 20 nt, Human
cugcucccuguguccagggg

SEQ ID NO: 958625 - RNA, 19 nt, Human
cugggcccugagguccucc

SEQ ID NO: 958626 - RNA, 22 nt, Human
cugggcccugagguccucccag

SEQ ID NO: 958627 - RNA, 24 nt, Human
cugggcccugugaaggaggguuuu

SEQ ID NO: 958628 - RNA, 19 nt, Human
cugggggccgccucucccg

SEQ ID NO: 958629 - RNA, 21 nt, Human
cuguaaaucuguacaguuugc

SEQ ID NO: 958630 - RNA, 19 nt, Human
cugugaaggaggguuuugg

SEQ ID NO: 958631 - RNA, 22 nt, Human
cuuccagcaaaugccaaagccc

SEQ ID NO: 958632 - RNA, 24 nt, Human
cuuccuaucccaaacccuccuaga

SEQ ID NO: 958633 - RNA, 26 nt, Human
cuuccuaucccaaacccuccuagagg

SEQ ID NO: 958634 - RNA, 22 nt, Human
cuugcaggggaacacaggagug

SEQ ID NO: 958635 - RNA, 21 nt, Human
cuugcuggggcuugcagggga

SEQ ID NO: 958636 - RNA, 20 nt, Human
gaaaagaagcccuugaggca

SEQ ID NO: 958637 - RNA, 20 nt, Human
gaaaagacaggcugugggag

SEQ ID NO: 958638 - RNA, 22 nt, Human
gaagcagguaggggugaagcca

SEQ ID NO: 958639 - RNA, 24 nt, Human
gaagcagguaggggugaagccagg

SEQ ID NO: 958640 - RNA, 24 nt, Human
gaagcucccucucauuuggaacuc

SEQ ID NO: 958641 - RNA, 24 nt, Human
gacagcagcaccccagggagcagg

SEQ ID NO: 958642 - RNA, 25 nt, Human
gaccaggacaaaacaggcuggugac

SEQ ID NO: 958643 - RNA, 19 nt, Human
gaccaugacuagugacuug

SEQ ID NO: 958644 - RNA, 25 nt, Human
gaccccaaaggcaccccuaccacaa

SEQ ID NO: 958645 - RNA, 21 nt, Human
gaccuggcuccccuuccccaa

SEQ ID NO: 958646 - RNA, 19 nt, Human
gacgcaaagccgggacagu

SEQ ID NO: 958647 - RNA, 21 nt, Human
gacugguggcagggaugaggg

SEQ ID NO: 958648 - RNA, 18 nt, Human
gagaacacaggaggcagc

SEQ ID NO: 958649 - RNA, 18 nt, Human
gagagagggcagagaaga

SEQ ID NO: 958650 - RNA, 24 nt, Human
gagcccaagccccaaaucccgagg

SEQ ID NO: 958651 - RNA, 18 nt, Human
gagcccccaggcucccag

SEQ ID NO: 958652 - RNA, 19 nt, Human
gaggaggccacacugucac

SEQ ID NO: 958653 - RNA, 19 nt, Human
gaggcaggggaacugcuug

SEQ ID NO: 958654 - RNA, 22 nt, Human
gaggccugacaggcggcuuugc

SEQ ID NO: 958655 - RNA, 20 nt, Human
gagggagaagccacagccag

SEQ ID NO: 958656 - RNA, 20 nt, Human
gauccaugaacaaggccccu

SEQ ID NO: 958657 - RNA, 18 nt, Human
gaugagagaaaggaggaa

SEQ ID NO: 958658 - RNA, 20 nt, Human
gccacagcuuauugcaccug

SEQ ID NO: 958659 - RNA, 21 nt, Human
gcccacacacccuaagcccug

SEQ ID NO: 958660 - RNA, 19 nt, Human
gcccugggauacgagcaag

SEQ ID NO: 958661 - RNA, 21 nt, Human
gccuacacaccgcuaccccuc

SEQ ID NO: 958662 - RNA, 22 nt, Human
gccugagggaucugcaggggcu

SEQ ID NO: 958663 - RNA, 18 nt, Human
gccugccucgugcucugg

SEQ ID NO: 958664 - RNA, 19 nt, Human
gccugccuguuucccucca

SEQ ID NO: 958665 - RNA, 21 nt, Human
gccuuguggucuguggcccca

SEQ ID NO: 958666 - RNA, 19 nt, Human
gcggaggguaaaagggaaa

SEQ ID NO: 958667 - RNA, 18 nt, Human
gcggcuuugccaacccca

SEQ ID NO: 958668 - RNA, 21 nt, Human
gcggugcccuucucucccgag

SEQ ID NO: 958669 - RNA, 20 nt, Human
gcucaggcucaucucaagcc

SEQ ID NO: 958670 - RNA, 21 nt, Human
gcucccucucauuuggaacuc

SEQ ID NO: 958671 - RNA, 23 nt, Human
gcugcaaaacuugcuggggcuug

SEQ ID NO: 958672 - RNA, 22 nt, Human
gcugggguugguggcugcaugg

SEQ ID NO: 958673 - RNA, 23 nt, Human
ggaagaugcagaaagaaaugaag

SEQ ID NO: 958674 - RNA, 20 nt, Human
ggaagcagguaggggugaag

SEQ ID NO: 958675 - RNA, 24 nt, Human
ggacacccucucacccagcuagag

SEQ ID NO: 958676 - RNA, 24 nt, Human
ggacagugaaggaacuugggagga

SEQ ID NO: 958677 - RNA, 24 nt, Human
ggacaucagagcagccccuccuca

SEQ ID NO: 958678 - RNA, 18 nt, Human
ggagacuuguguccuggg

SEQ ID NO: 958679 - RNA, 25 nt, Human
ggagcccagccuggaaaagacaggc

SEQ ID NO: 958680 - RNA, 26 nt, Human
ggaggaaaugagacggggaguagggg

SEQ ID NO: 958681 - RNA, 21 nt, Human
ggaguaggggaugggggaggg

SEQ ID NO: 958682 - RNA, 22 nt, Human
ggaguaggggaugggggaggga

SEQ ID NO: 958683 - RNA, 18 nt, Human
ggaugggggagggagaag

SEQ ID NO: 958684 - RNA, 20 nt, Human
ggaugugaggagccaggccu

SEQ ID NO: 958685 - RNA, 23 nt, Human
ggcaccacuugaagcaccugccc

SEQ ID NO: 958686 - RNA, 24 nt, Human
ggcagagaagaacuggggccaggu

SEQ ID NO: 958687 - RNA, 21 nt, Human
ggcagugaaugcccccugccu

SEQ ID NO: 958688 - RNA, 19 nt, Human
ggccuggggaggcaagucc

SEQ ID NO: 958689 - RNA, 18 nt, Human
ggcugcagggaggcacug

SEQ ID NO: 958690 - RNA, 24 nt, Human
ggcuguggggagccagcucugugg

SEQ ID NO: 958691 - RNA, 18 nt, Human
gggaacacaggaguggcc

SEQ ID NO: 958692 - RNA, 21 nt, Human
gggacagugaaggaacuuggg

SEQ ID NO: 958693 - RNA, 23 nt, Human
gggagauaaaggagcccaaccac

SEQ ID NO: 958694 - RNA, 19 nt, Human
gggaugggggagggagaag

SEQ ID NO: 958695 - RNA, 21 nt, Human
gggccaaauuuccuuccucag

SEQ ID NO: 958696 - RNA, 18 nt, Human
gggcccugagguccuccc

SEQ ID NO: 958697 - RNA, 27 nt, Human
gggcucggaaccaggcaggagggaggg

SEQ ID NO: 958698 - RNA, 22 nt, Human
gggcugggggcccaagcccuuu

SEQ ID NO: 958699 - RNA, 18 nt, Human
ggggaggaagcagguagg

SEQ ID NO: 958700 - RNA, 20 nt, Human
ggggcagggaaggccugggg

SEQ ID NO: 958701 - RNA, 21 nt, Human
ggggcccagcaucuucugggg

SEQ ID NO: 958702 - RNA, 22 nt, Human
ggggcccagcaucuucuggggc

SEQ ID NO: 958703 - RNA, 22 nt, Human
gggugccaagucagggcucagg

SEQ ID NO: 958704 - RNA, 20 nt, Human
gguagggaggcugagccuug

SEQ ID NO: 958705 - RNA, 20 nt, Human
gguagggggacaugagggcc

SEQ ID NO: 958706 - RNA, 18 nt, Human
gguuccaggcccaguccc

SEQ ID NO: 958707 - RNA, 18 nt, Human
gucagacuccucauccuc

SEQ ID NO: 958708 - RNA, 24 nt, Human
gucuggccccaaaccucccccucu

SEQ ID NO: 958709 - RNA, 18 nt, Human
gugaggcuggcagccugg

SEQ ID NO: 958710 - RNA, 20 nt, Human
gugggcaccauggcauggga

SEQ ID NO: 958711 - RNA, 18 nt, Human
gugggguucgcggugccc

SEQ ID NO: 958712 - RNA, 22 nt, Human
guugggagaagaaauccagaga

SEQ ID NO: 958713 - RNA, 24 nt, Human
uaaaaaacaaacaaacaaacaaaa

SEQ ID NO: 958714 - RNA, 18 nt, Human
uaaacggguuuuacaaag

SEQ ID NO: 958715 - RNA, 22 nt, Human
uaaccccucccccacuaucacc

SEQ ID NO: 958716 - RNA, 22 nt, Human
uaaggacacagagaagagaagc

SEQ ID NO: 958717 - RNA, 24 nt, Human
uaaggacacagagaagagaagcca

SEQ ID NO: 958718 - RNA, 25 nt, Human
uacacuaagggcuucccccagaggc

SEQ ID NO: 958719 - RNA, 20 nt, Human
uacagcccgagcccgacccc

SEQ ID NO: 958720 - RNA, 18 nt, Human
uacaggcaagaggccugg

SEQ ID NO: 958721 - RNA, 20 nt, Human
uacaggggagagaaggggca

SEQ ID NO: 958722 - RNA, 27 nt, Human
uacaggggagagaaggggcagggaagg

SEQ ID NO: 958723 - RNA, 24 nt, Human
uacaugcauuugccacgcugaggc

SEQ ID NO: 958724 - RNA, 19 nt, Human
uagaggcacugagaagaag

SEQ ID NO: 958725 - RNA, 24 nt, Human
uagcucaaagcaggaaggggacac

SEQ ID NO: 958726 - RNA, 22 nt, Human
uaucccaaacccuccuagaggc

SEQ ID NO: 958727 - RNA, 24 nt, Human
uaugguuuugucauugcaugcuuu

SEQ ID NO: 958728 - RNA, 19 nt, Human
ucagaugccagcccgugcc

SEQ ID NO: 958729 - RNA, 24 nt, Human
ucagauggcaacucccagggccca

SEQ ID NO: 958730 - RNA, 21 nt, Human
ucaggacagguaugguuaaua

SEQ ID NO: 958731 - RNA, 24 nt, Human
uccaagaggcccccugccaagcac

SEQ ID NO: 958732 - RNA, 27 nt, Human
uccaaggcuggguccaccuggcuuccc

SEQ ID NO: 958733 - RNA, 18 nt, Human
uccacaggugaaaauaca

SEQ ID NO: 958734 - RNA, 23 nt, Human
uccacaggugaaaauacagggau

SEQ ID NO: 958735 - RNA, 23 nt, Human
uccacgggucucucgaaguucuc

SEQ ID NO: 958736 - RNA, 18 nt, Human
uccagcaaaugccaaagc

SEQ ID NO: 958737 - RNA, 21 nt, Human
uccaggcagcagcaacugagg

SEQ ID NO: 958738 - RNA, 18 nt, Human
ucccaacccccucucuuu

SEQ ID NO: 958739 - RNA, 19 nt, Human
ucccaggcaccacuugaag

SEQ ID NO: 958740 - RNA, 23 nt, Human
uccccagagcccuccagguccac

SEQ ID NO: 958741 - RNA, 18 nt, Human
ucccccagaggcagaggc

SEQ ID NO: 958742 - RNA, 25 nt, Human
ucccccagaggcagaggcggagggu

SEQ ID NO: 958743 - RNA, 24 nt, Human
ucccccucacugccuacacaccgc

SEQ ID NO: 958744 - RNA, 19 nt, Human
ucccugguuucucagccuc

SEQ ID NO: 958745 - RNA, 18 nt, Human
ucccuguguccaggggcc

SEQ ID NO: 958746 - RNA, 22 nt, Human
uccugcagaaaucugcugccag

SEQ ID NO: 958747 - RNA, 18 nt, Human
uccuggagacagggucug

SEQ ID NO: 958748 - RNA, 21 nt, Human
ucggggccugagggaucugca

SEQ ID NO: 958749 - RNA, 20 nt, Human
ucguauuucucaccauccac

SEQ ID NO: 958750 - RNA, 25 nt, Human
ucguauuucucaccauccacaggug

SEQ ID NO: 958751 - RNA, 20 nt, Human
ucgugcucuggcagccaagg

SEQ ID NO: 958752 - RNA, 23 nt, Human
ucucaccauccacaggugaaaau

SEQ ID NO: 958753 - RNA, 21 nt, Human
ucuccaagacagcagcacccc

SEQ ID NO: 958754 - RNA, 24 nt, Human
ucucccaacccccucucuuuaccc

SEQ ID NO: 958755 - RNA, 19 nt, Human
ucucccgggaagccuuccu

SEQ ID NO: 958756 - RNA, 19 nt, Human
ucugcccuucuuguucugg

SEQ ID NO: 958757 - RNA, 18 nt, Human
ucuggggcugggggccca

SEQ ID NO: 958758 - RNA, 18 nt, Human
ucugugccagaccccagc

SEQ ID NO: 958759 - RNA, 18 nt, Human
ucuuccucccauccaucu

SEQ ID NO: 958760 - RNA, 20 nt, Human
ucuuguucuauccccagaag

SEQ ID NO: 958761 - RNA, 22 nt, Human
ugaaugcccccugccucacuga

SEQ ID NO: 958762 - RNA, 19 nt, Human
ugacaagggacacccucuc

SEQ ID NO: 958763 - RNA, 19 nt, Human
ugacgcaaagccgggacag

SEQ ID NO: 958764 - RNA, 20 nt, Human
ugacuagugacuugcauugc

SEQ ID NO: 958765 - RNA, 19 nt, Human
ugacuugaaucugggaugu

SEQ ID NO: 958766 - RNA, 22 nt, Human
ugagaagaagucguauuucuca

SEQ ID NO: 958767 - RNA, 20 nt, Human
ugaggcagagggucugcucc

SEQ ID NO: 958768 - RNA, 20 nt, Human
ugaggcagagggucugcucc

SEQ ID NO: 958769 - RNA, 23 nt, Human
ugaggcagagggucugcucccug

SEQ ID NO: 958770 - RNA, 20 nt, Human
ugaggccaacccgcccccuc

SEQ ID NO: 958771 - RNA, 23 nt, Human
ugaggccaacccgcccccuccag

SEQ ID NO: 958772 - RNA, 19 nt, Human
ugaggggguguccacaggg

SEQ ID NO: 958773 - RNA, 24 nt, Human
ugagguugaauccaggcagcagca

SEQ ID NO: 958774 - RNA, 18 nt, Human
ugagugccucucugcccc

SEQ ID NO: 958775 - RNA, 18 nt, Human
ugcaaaacuugcuggggc

SEQ ID NO: 958776 - RNA, 22 nt, Human
ugcagaccccguaccaucuccu

SEQ ID NO: 958777 - RNA, 19 nt, Human
ugcaguacgugucuggggg

SEQ ID NO: 958778 - RNA, 24 nt, Human
ugccaaagccccucagaacacucc

SEQ ID NO: 958779 - RNA, 22 nt, Human
ugccaagcacacccuccccaaa

SEQ ID NO: 958780 - RNA, 23 nt, Human
ugccaagcacacccuccccaaaa

SEQ ID NO: 958781 - RNA, 24 nt, Human
ugccagcccgugcccucacugggc

SEQ ID NO: 958782 - RNA, 18 nt, Human
ugccaggcaggcaccugg

SEQ ID NO: 958783 - RNA, 18 nt, Human
ugccagggcaucuugaaa

SEQ ID NO: 958784 - RNA, 27 nt, Human
ugcccuaaccccaccauuggccacagc

SEQ ID NO: 958785 - RNA, 19 nt, Human
ugcccugggccuuccgucc

SEQ ID NO: 958786 - RNA, 22 nt, Human
ugcccugugucaucacugcccu

SEQ ID NO: 958787 - RNA, 19 nt, Human
ugccugacccaggcaguga

SEQ ID NO: 958788 - RNA, 20 nt, Human
ugccuugccccggucaggcc

SEQ ID NO: 958789 - RNA, 24 nt, Human
ugccuugccccggucaggccggcc

SEQ ID NO: 958790 - RNA, 26 nt, Human
ugcuacauggcagagugggguucgcg

SEQ ID NO: 958791 - RNA, 19 nt, Human
ugcuggggcuugcagggga

SEQ ID NO: 958792 - RNA, 19 nt, Human
uggaaaagacaggcugugg

SEQ ID NO: 958793 - RNA, 21 nt, Human
uggaaaagacaggcuguggga

SEQ ID NO: 958794 - RNA, 18 nt, Human
uggaaaccagccugagug

SEQ ID NO: 958795 - RNA, 23 nt, Human
uggacagcagggugguguugagg

SEQ ID NO: 958796 - RNA, 19 nt, Human
uggcagacccccacccacc

SEQ ID NO: 958797 - RNA, 19 nt, Human
uggcagcagccccucuucc

SEQ ID NO: 958798 - RNA, 21 nt, Human
uggcaggcaagaggagagauu

SEQ ID NO: 958799 - RNA, 19 nt, Human
uggcauucugggaagaguc

SEQ ID NO: 958800 - RNA, 18 nt, Human
uggccccaaaccuccccc

SEQ ID NO: 958801 - RNA, 20 nt, Human
uggccccugaagcugcagcc

SEQ ID NO: 958802 - RNA, 20 nt, Human
uggcucgauuccacccuccc

SEQ ID NO: 958803 - RNA, 23 nt, Human
uggcucgauuccacccuccccag

SEQ ID NO: 958804 - RNA, 21 nt, Human
uggcugggguugguggcugca

SEQ ID NO: 958805 - RNA, 23 nt, Human
ugggaagagucagaccccaaagg

SEQ ID NO: 958806 - RNA, 18 nt, Human
ugggaggaaaugagacgg

SEQ ID NO: 958807 - RNA, 21 nt, Human
ugggaugugggugaggggugg

SEQ ID NO: 958808 - RNA, 19 nt, Human
ugggcccugagguccuccc

SEQ ID NO: 958809 - RNA, 21 nt, Human
uggggacuggacagcagggug

SEQ ID NO: 958810 - RNA, 22 nt, Human
uggggccaggcuggggacugga

SEQ ID NO: 958811 - RNA, 21 nt, Human
ugggggagggagaagccacag

SEQ ID NO: 958812 - RNA, 21 nt, Human
ugggggaugcuggggccaucg

SEQ ID NO: 958813 - RNA, 24 nt, Human
ugggggcccaagcccuuuucuccu

SEQ ID NO: 958814 - RNA, 22 nt, Human
uguccuggaaaccagccugagu

SEQ ID NO: 958815 - RNA, 19 nt, Human
ugugaaggaggguuuuggg

SEQ ID NO: 958816 - RNA, 22 nt, Human
ugugcucuccaagacagcagca

SEQ ID NO: 958817 - RNA, 19 nt, Human
uguguccugggaggcagag

SEQ ID NO: 958818 - RNA, 25 nt, Human
uguguguggugccagagugugggug

SEQ ID NO: 958819 - RNA, 30 nt, Human
uuaaaaaacaaacaaacaaacaaaaaaaaa

SEQ ID NO: 958820 - RNA, 18 nt, Human
uucacaaggcuggaacag

SEQ ID NO: 958821 - RNA, 23 nt, Human
uucagggagggggagcaccgagg

SEQ ID NO: 958822 - RNA, 27 nt, Human
uuccaggcccagucccaggcuugggcu

SEQ ID NO: 958823 - RNA, 23 nt, Human
uucuugggggaagaugcagaaag

SEQ ID NO: 958824 - RNA, 23 nt, Human
uugcaugcuuuugucuugugugu

SEQ ID NO: 958825 - RNA, 18 nt, Human
uuggcaggcaagaggaga

SEQ ID NO: 958826 - RNA, 23 nt, Human
uuggcccacacacccuaagcccu

SEQ ID NO: 958827 - RNA, 19 nt, Human
uugguggcugcaugguugg

SEQ ID NO: 958828 - RNA, 20 nt, Human
uuuaccaaauguuuguccug

SEQ ID NO: 958829 - RNA, 20 nt, Human
uuuauuuccucuuauaaaug

SEQ ID NO: 958830 - RNA, 18 nt, Human
uuuccgagaaaggcaagg

SEQ ID NO: 958831 - RNA, 23 nt, Human
uuugaaagaggcucaaaggacuu

SEQ ID NO: 958832 - RNA, 23 nt, Human
uuuugagagcuccuccucugugc

SEQ ID NO: 958833 - RNA, 20 nt, Human
aaaaaaaaaaaucaaaggca

SEQ ID NO: 958834 - RNA, 21 nt, Human
aaaaggaacaaguuaucagaa

SEQ ID NO: 958835 - RNA, 22 nt, Human
aaagaaaaaaaucaggauaaag

SEQ ID NO: 958836 - RNA, 22 nt, Human
aaccgcucgccgccgccgcucc

SEQ ID NO: 958837 - RNA, 18 nt, Human
acacacacacacacagaa

SEQ ID NO: 958838 - RNA, 18 nt, Human
accgcucgccgccgccgc

SEQ ID NO: 958839 - RNA, 19 nt, Human
accgcucgccgccgccgcu

SEQ ID NO: 958840 - RNA, 25 nt, Human
acuaaaaaaucucaaaaacaacuaa

SEQ ID NO: 958841 - RNA, 24 nt, Human
agaauagacauaaaccaaaaaaaa

SEQ ID NO: 958842 - RNA, 26 nt, Human
auaaucuuaagagucaaaugccaaaa

SEQ ID NO: 958843 - RNA, 24 nt, Human
auggaaugaaaccaguguucuuaa

SEQ ID NO: 958844 - RNA, 21 nt, Human
caaaugccaaaauuaaguauu

SEQ ID NO: 958845 - RNA, 22 nt, Human
cacacacacacacagaauuuaa

SEQ ID NO: 958846 - RNA, 26 nt, Human
cacacacacacagaauuuaaaaaaaa

SEQ ID NO: 958847 - RNA, 23 nt, Human
cacagaauuuaaaaaaaaaaauc

SEQ ID NO: 958848 - RNA, 19 nt, Human
caccgcccccgccucgugc

SEQ ID NO: 958849 - RNA, 23 nt, Human
caguaaguaccauuaaacuguuc

SEQ ID NO: 958850 - RNA, 18 nt, Human
ccaaagaaggaaacugga

SEQ ID NO: 958851 - RNA, 25 nt, Human
ccgcucgccgccgccgcuccgguca

SEQ ID NO: 958852 - RNA, 23 nt, Human
cuaaaaaaucucaaaaacaacua

SEQ ID NO: 958853 - RNA, 24 nt, Human
cuaaaaaaucucaaaaacaacuaa

SEQ ID NO: 958854 - RNA, 20 nt, Human
cuaagcagcuaugcuauagc

SEQ ID NO: 958855 - RNA, 23 nt, Human
cuagaugcuuaacauaguuaagg

SEQ ID NO: 958856 - RNA, 23 nt, Human
cuaucauuuuguuugcaaggagg

SEQ ID NO: 958857 - RNA, 23 nt, Human
cugggcuaguguacauuucaggu

SEQ ID NO: 958858 - RNA, 23 nt, Human
gcuuacauggaaugaaaccagug

SEQ ID NO: 958859 - RNA, 18 nt, Human
ggaaagucaguaaaucuc

SEQ ID NO: 958860 - RNA, 19 nt, Human
ggagucaaaaguuuauccu

SEQ ID NO: 958861 - RNA, 20 nt, Human
gggcuaguguacauuucagg

SEQ ID NO: 958862 - RNA, 23 nt, Human
uaaaaaaaaaaaucaaaggcaau

SEQ ID NO: 958863 - RNA, 22 nt, Human
uaaaccaaaaaaaagaaaaaaa

SEQ ID NO: 958864 - RNA, 18 nt, Human
uaagauccccagccauaa

SEQ ID NO: 958865 - RNA, 24 nt, Human
uacagaaguugccaaagaaggaaa

SEQ ID NO: 958866 - RNA, 21 nt, Human
uagaaagguccucaugcagca

SEQ ID NO: 958867 - RNA, 24 nt, Human
uauucuaggaaagucaguaaaucu

SEQ ID NO: 958868 - RNA, 19 nt, Human
ucacacaaagcuaagccug

SEQ ID NO: 958869 - RNA, 22 nt, Human
ucacgugcauaauacagaaguu

SEQ ID NO: 958870 - RNA, 18 nt, Human
ucacuggcacggacuucu

SEQ ID NO: 958871 - RNA, 20 nt, Human
uccacaaaugaacaaaaggg

SEQ ID NO: 958872 - RNA, 18 nt, Human
ugaaaccuacauacacug

SEQ ID NO: 958873 - RNA, 19 nt, Human
ugaaagaguaagaucccca

SEQ ID NO: 958874 - RNA, 24 nt, Human
ugaagguaguuaaaauuuaagaau

SEQ ID NO: 958875 - RNA, 21 nt, Human
ugacuaaaaaaucucaaaaac

SEQ ID NO: 958876 - RNA, 23 nt, Human
ugacuaaaaaaucucaaaaacaa

SEQ ID NO: 958877 - RNA, 23 nt, Human
ugcaaggaggagucaggaaaagg

SEQ ID NO: 958878 - RNA, 20 nt, Human
ugcaccgcccccgccucgug

SEQ ID NO: 958879 - RNA, 20 nt, Human
ugccaaagaaggaaacugga

SEQ ID NO: 958880 - RNA, 19 nt, Human
ugcuauagcucaguaagua

SEQ ID NO: 958881 - RNA, 22 nt, Human
uggaaugaaaccaguguucuua

SEQ ID NO: 958882 - RNA, 19 nt, Human
ugucaacuaucauuuuguu

SEQ ID NO: 958883 - RNA, 18 nt, Human
uguguugacuaaaaaauc

SEQ ID NO: 958884 - RNA, 22 nt, Human
uugaaaguucacaucuguaaaa

SEQ ID NO: 958885 - RNA, 20 nt, Human
uuuuguuugcaaggaggagu

SEQ ID NO: 958886 - RNA, 24 nt, Human
uuuuguuugcaaggaggagucagg

SEQ ID NO: 958887 - RNA, 18 nt, Human
uuuuuuuuuuuuuuuuug

SEQ ID NO: 958888 - RNA, 22 nt, Human
uuuuuuuuuuuuuuuuugacag

SEQ ID NO: 958889 - RNA, 23 nt, Human
caggagggcgggaagcccccccu

SEQ ID NO: 958890 - RNA, 19 nt, Human
cccccccugccugcccugc

SEQ ID NO: 958891 - RNA, 18 nt, Human
ccugcccugcccugcagu

SEQ ID NO: 958892 - RNA, 23 nt, Human
cugccugcccugcccugcagugg

SEQ ID NO: 958893 - RNA, 25 nt, Human
gaagcccccccugccugcccugccc

SEQ ID NO: 958894 - RNA, 23 nt, Human
gcccccccugccugcccugcccu

SEQ ID NO: 958895 - RNA, 19 nt, Human
aaagcagaagaaaauccac

SEQ ID NO: 958896 - RNA, 23 nt, Human
aagcagaagaaaauccacuccaa

SEQ ID NO: 958897 - RNA, 23 nt, Human
accucccaaauuucaagaaaaug

SEQ ID NO: 958898 - RNA, 23 nt, Human
accucucaaauuucaagaaaaug

SEQ ID NO: 958899 - RNA, 21 nt, Human
agaagaaaauccacuccaaua

SEQ ID NO: 958900 - RNA, 19 nt, Human
agcagaagaaaauccacuc

SEQ ID NO: 958901 - RNA, 25 nt, Human
aguccuuuuggugaauauagcaagg

SEQ ID NO: 958902 - RNA, 25 nt, Human
aguccuuuuggugaauauagcaagg

SEQ ID NO: 958903 - RNA, 22 nt, Human
auaguguuuccucuauauaaaa

SEQ ID NO: 958904 - RNA, 23 nt, Human
aucaagccacuucacuguucagu

SEQ ID NO: 958905 - RNA, 23 nt, Human
aucaagccacuucacuguucagu

SEQ ID NO: 958906 - RNA, 20 nt, Human
aucaaugaaagcagaagaaa

SEQ ID NO: 958907 - RNA, 22 nt, Human
cacaaauacuuuaggaaauccu

SEQ ID NO: 958908 - RNA, 25 nt, Human
cacuguucaguuucuuuacaucaug

SEQ ID NO: 958909 - RNA, 25 nt, Human
cacuguucaguuucuuuacaucaug

SEQ ID NO: 958910 - RNA, 25 nt, Human
ccaaccaagccaggugauuuccuaa

SEQ ID NO: 958911 - RNA, 25 nt, Human
cucuauauaaaacugggaaaaaaac

SEQ ID NO: 958912 - RNA, 25 nt, Human
cucuauauaaaacugggaaaaaaac

SEQ ID NO: 958913 - RNA, 18 nt, Human
ggaaauccugauacaugg

SEQ ID NO: 958914 - RNA, 20 nt, Human
uauaaaacugggaaaaaaac

SEQ ID NO: 958915 - RNA, 20 nt, Human
uauaaaacugggaaaaaaac

SEQ ID NO: 958916 - RNA, 24 nt, Human
uauaaaacugggaaaaaaacaaga

SEQ ID NO: 958917 - RNA, 24 nt, Human
uauaaaacugggaaaaaaacaaga

SEQ ID NO: 958918 - RNA, 20 nt, Human
uauauuagauguuauauaca

SEQ ID NO: 958919 - RNA, 20 nt, Human
uauauuagauguuauauaca

SEQ ID NO: 958920 - RNA, 19 nt, Human
ucaauaguuuaagcaauca

SEQ ID NO: 958921 - RNA, 19 nt, Human
ucaauaguuuaagcaauca

SEQ ID NO: 958922 - RNA, 23 nt, Human
ucauguuauucuuuauccucauc

SEQ ID NO: 958923 - RNA, 23 nt, Human
uccacaggaguuucauguuauuc

SEQ ID NO: 958924 - RNA, 22 nt, Human
ucccauauuucuccaaaaaauc

SEQ ID NO: 958925 - RNA, 24 nt, Human
ugcuuucaucuuugaacuuccaaa

SEQ ID NO: 958926 - RNA, 24 nt, Human
aaaaauacuucuuuucacaccccu

SEQ ID NO: 958927 - RNA, 23 nt, Human
acaagauaauuguuuuucaaaac

SEQ ID NO: 958928 - RNA, 18 nt, Human
auacuucuuuucacaccc

SEQ ID NO: 958929 - RNA, 25 nt, Human
caaaaccagacaacagguucaaaaa

SEQ ID NO: 958930 - RNA, 19 nt, Human
caacagguucaaaaauacu

SEQ ID NO: 958931 - RNA, 24 nt, Human
caauauaaaaggucagcuaggaaa

SEQ ID NO: 958932 - RNA, 21 nt, Human
ccaaaagcauuugcuuacauc

SEQ ID NO: 958933 - RNA, 24 nt, Human
uaaccaaaagcauuugcuuacauc

SEQ ID NO: 958934 - RNA, 19 nt, Human
ucagcuaggaaaaaacaca

SEQ ID NO: 958935 - RNA, 19 nt, Human
uguaccaguaaccaaaagc

SEQ ID NO: 958936 - RNA, 19 nt, Human
uuuucaaaaccagacaaca

SEQ ID NO: 958937 - RNA, 22 nt, Human
cugagccaguuuuggaauccac

SEQ ID NO: 958938 - RNA, 21 nt, Human
gggcuccuggcugucacuccu

SEQ ID NO: 958939 - RNA, 20 nt, Human
ucagaguaaaacuggaccaa

SEQ ID NO: 958940 - RNA, 23 nt, Human
uggaccaaaggaagugaagucag

SEQ ID NO: 958941 - RNA, 22 nt, Human
uuaaaaaaugccuuuauuuuua

SEQ ID NO: 958942 - RNA, 24 nt, Human
caaggaaggcuccagcccaaaggc

SEQ ID NO: 958943 - RNA, 20 nt, Human
caaucuaagccuguauccaa

SEQ ID NO: 958944 - RNA, 20 nt, Human
cagcagggucuuccuccauc

SEQ ID NO: 958945 - RNA, 21 nt, Human
cagggacuccccuagguucuc

SEQ ID NO: 958946 - RNA, 20 nt, Human
ccaagguggggguaggagaa

SEQ ID NO: 958947 - RNA, 23 nt, Human
ccccugucccucuuugggcccuc

SEQ ID NO: 958948 - RNA, 21 nt, Human
ccugggguacaaggaaggcuc

SEQ ID NO: 958949 - RNA, 18 nt, Human
cgucccugaagcggugcg

SEQ ID NO: 958950 - RNA, 23 nt, Human
cuugcucacagccugcugagacc

SEQ ID NO: 958951 - RNA, 23 nt, Human
gaccuggcaagccccugucccuc

SEQ ID NO: 958952 - RNA, 20 nt, Human
ggagaagaauugggaacagg

SEQ ID NO: 958953 - RNA, 20 nt, Human
ucaggccaagguggggguag

SEQ ID NO: 958954 - RNA, 22 nt, Human
uccccuagguucucaggguaca

SEQ ID NO: 958955 - RNA, 21 nt, Human
uccuccaucaggccaaggugg

SEQ ID NO: 958956 - RNA, 20 nt, Human
uggcaagccccugucccucu

SEQ ID NO: 958957 - RNA, 22 nt, Human
ugggaacagggacuccccuagg

SEQ ID NO: 958958 - RNA, 22 nt, Human
ugggcccucagguuugcaauuu

SEQ ID NO: 958959 - RNA, 18 nt, Human
aaaaugccacuugaaacg

SEQ ID NO: 958960 - RNA, 26 nt, Human
accagaacccccagccaaagaggcac

SEQ ID NO: 958961 - RNA, 19 nt, Human
acccacuggggccacaaga

SEQ ID NO: 958962 - RNA, 18 nt, Human
acccccagccaaagaggc

SEQ ID NO: 958963 - RNA, 22 nt, Human
acccgggagccagagggagccc

SEQ ID NO: 958964 - RNA, 25 nt, Human
acgcgguggccccugcgcacucagg

SEQ ID NO: 958965 - RNA, 20 nt, Human
agaaaggcaacugggaccug

SEQ ID NO: 958966 - RNA, 21 nt, Human
agaaccacucuuuuucuuaaa

SEQ ID NO: 958967 - RNA, 23 nt, Human
agcugggggagacaagaccggcg

SEQ ID NO: 958968 - RNA, 21 nt, Human
aggaaaaaaaaguuuuaaaaa

SEQ ID NO: 958969 - RNA, 24 nt, Human
aggaaaaaaaaguuuuaaaaaaaa

SEQ ID NO: 958970 - RNA, 23 nt, Human
aggucccugccaugggggcgcuc

SEQ ID NO: 958971 - RNA, 18 nt, Human
aucacuggcuuuuaugac

SEQ ID NO: 958972 - RNA, 18 nt, Human
auggccccggcuccgccc

SEQ ID NO: 958973 - RNA, 20 nt, Human
cacagagacaacucggccag

SEQ ID NO: 958974 - RNA, 19 nt, Human
cacauacuugaaauuccug

SEQ ID NO: 958975 - RNA, 20 nt, Human
cacgcgguggccccugcgca

SEQ ID NO: 958976 - RNA, 18 nt, Human
cagaacccccagccaaag

SEQ ID NO: 958977 - RNA, 19 nt, Human
cagcgggguggcgcccggg

SEQ ID NO: 958978 - RNA, 23 nt, Human
cauagaaaccacagagacaacuc

SEQ ID NO: 958979 - RNA, 18 nt, Human
cauugugguggccaagaa

SEQ ID NO: 958980 - RNA, 18 nt, Human
ccaccagaacccccagcc

SEQ ID NO: 958981 - RNA, 24 nt, Human
cccccagccaaagaggcacaucug

SEQ ID NO: 958982 - RNA, 18 nt, Human
ccccgugggucccggagg

SEQ ID NO: 958983 - RNA, 19 nt, Human
ccccugcgcacucaggcca

SEQ ID NO: 958984 - RNA, 21 nt, Human
ccccugcgcacucaggccaug

SEQ ID NO: 958985 - RNA, 18 nt, Human
cccgggcacauacuugaa

SEQ ID NO: 958986 - RNA, 18 nt, Human
ccgggguggccaucucag

SEQ ID NO: 958987 - RNA, 20 nt, Human
ccucugaggggggccgucag

SEQ ID NO: 958988 - RNA, 23 nt, Human
cggcagccacgcgguggccccug

SEQ ID NO: 958989 - RNA, 22 nt, Human
cggcagcggcggcuccauggcc

SEQ ID NO: 958990 - RNA, 18 nt, Human
cuccauggccccggcucc

SEQ ID NO: 958991 - RNA, 21 nt, Human
cuccauggccccggcuccgcc

SEQ ID NO: 958992 - RNA, 23 nt, Human
cugguagcccgacaucgccgccg

SEQ ID NO: 958993 - RNA, 25 nt, Human
cuugaaacguccaccagaaccccca

SEQ ID NO: 958994 - RNA, 20 nt, Human
gaaaauagucaaaaaagcau

SEQ ID NO: 958995 - RNA, 18 nt, Human
gaagaagggggaguccag

SEQ ID NO: 958996 - RNA, 25 nt, Human
gaggaaaaaaaaguuuuaaaaaaaa

SEQ ID NO: 958997 - RNA, 18 nt, Human
gaugggacuggaaaacac

SEQ ID NO: 958998 - RNA, 19 nt, Human
gccacgcgguggccccugc

SEQ ID NO: 958999 - RNA, 18 nt, Human
gcgaucaacacuuuacuc

SEQ ID NO: 959000 - RNA, 21 nt, Human
ggacagcggcagccacgcggu

SEQ ID NO: 959001 - RNA, 23 nt, Human
ggaggaggacagcggcagccacg

SEQ ID NO: 959002 - RNA, 18 nt, Human
ggguggcgcugguagccc

SEQ ID NO: 959003 - RNA, 24 nt, Human
uauacacggagcuucaugcugaga

SEQ ID NO: 959004 - RNA, 24 nt, Human
uaugacaaugucuuccaagagcuc

SEQ ID NO: 959005 - RNA, 24 nt, Human
ucacuggcuuuuaugacaaugucu

SEQ ID NO: 959006 - RNA, 24 nt, Human
ucacuggcuuuuaugacaaugucu

SEQ ID NO: 959007 - RNA, 18 nt, Human
ucagaaaggcaacuggga

SEQ ID NO: 959008 - RNA, 21 nt, Human
ugaaacguccaccagaacccc

SEQ ID NO: 959009 - RNA, 22 nt, Human
ugaaacguccaccagaaccccc

SEQ ID NO: 959010 - RNA, 24 nt, Human
ugacugcagggaccacccacuggg

SEQ ID NO: 959011 - RNA, 18 nt, Human
ugagaacacccagggguc

SEQ ID NO: 959012 - RNA, 25 nt, Human
ugcccgggguggccaucucagaggc

SEQ ID NO: 959013 - RNA, 18 nt, Human
ugccuagcccggcagcgg

SEQ ID NO: 959014 - RNA, 26 nt, Human
ugugguggccaagaacuggcugaggg

SEQ ID NO: 959015 - RNA, 23 nt, Human
uucaugcugagaacacccagggg

SEQ ID NO: 959016 - RNA, 18 nt, Human
uuggaacaggaggaaaaa

SEQ ID NO: 959017 - RNA, 19 nt, Human
uuuguucuacuuaugaaau

SEQ ID NO: 959018 - RNA, 21 nt, Human
uuuuaugacaaugucuuccaa

SEQ ID NO: 959019 - RNA, 23 nt, Human
uuuuuuuggugaacuacagaauu

SEQ ID NO: 959020 - RNA, 24 nt, Human
uuuuuuuuggugaacuacagaauu

SEQ ID NO: 959021 - RNA, 19 nt, Human
uuuuuuuuuuuuuuuuugg

SEQ ID NO: 959022 - RNA, 20 nt, Human
uuuuuuuuuuuuuuuuuggu

SEQ ID NO: 959023 - RNA, 19 nt, Human
aaaagauagcuuaacacca

SEQ ID NO: 959024 - RNA, 24 nt, Human
aaaauauguguaagaaaaccaagg

SEQ ID NO: 959025 - RNA, 22 nt, Human
aaagaaaaauaacaugcacaga

SEQ ID NO: 959026 - RNA, 21 nt, Human
acuuugacucacggaaaaaga

SEQ ID NO: 959027 - RNA, 18 nt, Human
agaggcucaggccaggcc

SEQ ID NO: 959028 - RNA, 22 nt, Human
aguacaugcacuucagcaccuu

SEQ ID NO: 959029 - RNA, 23 nt, Human
caaaagauagcuuaacaccaaaa

SEQ ID NO: 959030 - RNA, 24 nt, Human
caaaagauagcuuaacaccaaaaa

SEQ ID NO: 959031 - RNA, 21 nt, Human
cacuauuuccuacaaaagaua

SEQ ID NO: 959032 - RNA, 24 nt, Human
cacuggcuccuucagaggcacuuu

SEQ ID NO: 959033 - RNA, 23 nt, Human
cagcucgacgacguuuagugcaa

SEQ ID NO: 959034 - RNA, 20 nt, Human
cagggagcgcuuccugggcu

SEQ ID NO: 959035 - RNA, 18 nt, Human
cauggcaacuucaccauu

SEQ ID NO: 959036 - RNA, 19 nt, Human
cauggcaacuucaccauuu

SEQ ID NO: 959037 - RNA, 20 nt, Human
ccaagguccagagaggcggg

SEQ ID NO: 959038 - RNA, 21 nt, Human
ccacaguacaugcacuucagc

SEQ ID NO: 959039 - RNA, 22 nt, Human
ccagcaacaaaggaaagacuga

SEQ ID NO: 959040 - RNA, 18 nt, Human
ccaggccuagugcagcuc

SEQ ID NO: 959041 - RNA, 19 nt, Human
ccuccuuccccuccaucuc

SEQ ID NO: 959042 - RNA, 21 nt, Human
cgggccagcaacaaaggaaag

SEQ ID NO: 959043 - RNA, 23 nt, Human
cuuuuuaucauuguuauuugugu

SEQ ID NO: 959044 - RNA, 18 nt, Human
gggagcaggggggcgcca

SEQ ID NO: 959045 - RNA, 23 nt, Human
gucucugaguagugugccccacu

SEQ ID NO: 959046 - RNA, 24 nt, Human
guggaggggaccaguuuggugaug

SEQ ID NO: 959047 - RNA, 22 nt, Human
uaagaaaaccaagguccagaga

SEQ ID NO: 959048 - RNA, 25 nt, Human
uacaaaauauguguaagaaaaccaa

SEQ ID NO: 959049 - RNA, 19 nt, Human
uagcuuaacaccaaaaaca

SEQ ID NO: 959050 - RNA, 19 nt, Human
ucaggccaggccuagugca

SEQ ID NO: 959051 - RNA, 19 nt, Human
ucaggccaggccuagugca

SEQ ID NO: 959052 - RNA, 21 nt, Human
ucauguggacgcugagguccu

SEQ ID NO: 959053 - RNA, 22 nt, Human
ucauguggacgcugagguccug

SEQ ID NO: 959054 - RNA, 20 nt, Human
uccugggcuuggaccaccuc

SEQ ID NO: 959055 - RNA, 22 nt, Human
ucuuuuuaucauuguuauuugu

SEQ ID NO: 959056 - RNA, 18 nt, Human
ugaaaggcacagaaaugc

SEQ ID NO: 959057 - RNA, 23 nt, Human
ugcacagaucggacagagagcau

SEQ ID NO: 959058 - RNA, 23 nt, Human
ugcuggcucaggggagcaggggg

SEQ ID NO: 959059 - RNA, 19 nt, Human
uguaagaaaaccaaggucc

SEQ ID NO: 959060 - RNA, 24 nt, Human
ugucauggcaacuucaccauuuua

SEQ ID NO: 959061 - RNA, 30 nt, Human
uugagaauaaaggucagacuuugacucacu

SEQ ID NO: 959062 - RNA, 27 nt, Human
uuggugauggcuggcacuggcuccuuc

SEQ ID NO: 959063 - RNA, 23 nt, Human
aaccuuuuccgauaauuuuuuuu

SEQ ID NO: 959064 - RNA, 18 nt, Human
aacugaauugauggaaua

SEQ ID NO: 959065 - RNA, 18 nt, Human
aagaaugaccccgcccuc

SEQ ID NO: 959066 - RNA, 21 nt, Human
aagcagcuccgccagugugcc

SEQ ID NO: 959067 - RNA, 20 nt, Human
aagggcuguguugugcccac

SEQ ID NO: 959068 - RNA, 24 nt, Human
aagugggcaggagagagggcagcc

SEQ ID NO: 959069 - RNA, 23 nt, Human
aaguggguguggagacggcgcgu

SEQ ID NO: 959070 - RNA, 19 nt, Human
aaucauggagaagggaggg

SEQ ID NO: 959071 - RNA, 23 nt, Human
accuagcaauggaagcucuucaa

SEQ ID NO: 959072 - RNA, 22 nt, Human
acggccagcagggggauagugg

SEQ ID NO: 959073 - RNA, 20 nt, Human
agaaacuauacaauucacag

SEQ ID NO: 959074 - RNA, 22 nt, Human
agaagggagggaagugggcagg

SEQ ID NO: 959075 - RNA, 19 nt, Human
agccccuggaugagcccag

SEQ ID NO: 959076 - RNA, 20 nt, Human
aggcaagggggacaggugag

SEQ ID NO: 959077 - RNA, 22 nt, Human
agggaagugggcaggagagagg

SEQ ID NO: 959078 - RNA, 19 nt, Human
agggggacaggugagggca

SEQ ID NO: 959079 - RNA, 19 nt, Human
agguggaggaggcuggggc

SEQ ID NO: 959080 - RNA, 21 nt, Human
caaggcacuguacuucugcag

SEQ ID NO: 959081 - RNA, 18 nt, Human
cacagguuggccugggag

SEQ ID NO: 959082 - RNA, 20 nt, Human
cacucuacugaggacaaagc

SEQ ID NO: 959083 - RNA, 19 nt, Human
cacuguacuucugcagggu

SEQ ID NO: 959084 - RNA, 21 nt, Human
cagaagauucugcauaaucac

SEQ ID NO: 959085 - RNA, 24 nt, Human
cagaaugaauggacagggcagcca

SEQ ID NO: 959086 - RNA, 21 nt, Human
cagggcaagggggcccaguac

SEQ ID NO: 959087 - RNA, 26 nt, Human
cagggcagccacgcccgaccccuugg

SEQ ID NO: 959088 - RNA, 21 nt, Human
caggggugagcagagccacag

SEQ ID NO: 959089 - RNA, 21 nt, Human
cauaaucaccuagaaaauuca

SEQ ID NO: 959090 - RNA, 23 nt, Human
ccaacacacaccuuauccucacu

SEQ ID NO: 959091 - RNA, 25 nt, Human
ccagcgcaacaacugacauucccua

SEQ ID NO: 959092 - RNA, 18 nt, Human
ccagugggagguggagga

SEQ ID NO: 959093 - RNA, 20 nt, Human
ccuagaaaauucaauucuaa

SEQ ID NO: 959094 - RNA, 18 nt, Human
ccuccgcagagcaggcuu

SEQ ID NO: 959095 - RNA, 18 nt, Human
ccuggaugagcccaggga

SEQ ID NO: 959096 - RNA, 20 nt, Human
ccuggaugagcccagggaac

SEQ ID NO: 959097 - RNA, 24 nt, Human
cgacagcaucgugcccuggcagaa

SEQ ID NO: 959098 - RNA, 24 nt, Human
cggcacucuacugaggacaaagca

SEQ ID NO: 959099 - RNA, 23 nt, Human
cuccacagggugggcgggcagcc

SEQ ID NO: 959100 - RNA, 24 nt, Human
cugcuuuccagugggagguggagg

SEQ ID NO: 959101 - RNA, 24 nt, Human
gcuucagauuuguaaaccauucac

SEQ ID NO: 959102 - RNA, 18 nt, Human
ggaaccggcacucuacug

SEQ ID NO: 959103 - RNA, 22 nt, Human
ggaaggccgcuggguacacagg

SEQ ID NO: 959104 - RNA, 22 nt, Human
ggagacggcgcguggaccacag

SEQ ID NO: 959105 - RNA, 25 nt, Human
ggagagcggucugcaugccaggggu

SEQ ID NO: 959106 - RNA, 24 nt, Human
ggagggaagugggcaggagagagg

SEQ ID NO: 959107 - RNA, 25 nt, Human
gggaaggccgcuggguacacagguu

SEQ ID NO: 959108 - RNA, 18 nt, Human
gggagggaagugggcagg

SEQ ID NO: 959109 - RNA, 20 nt, Human
gggagguggaggaggcuggg

SEQ ID NO: 959110 - RNA, 18 nt, Human
gggcaggagagagggcag

SEQ ID NO: 959111 - RNA, 20 nt, Human
gguuggccugggagcugggc

SEQ ID NO: 959112 - RNA, 23 nt, Human
uaauaaguacagaaacuauacaa

SEQ ID NO: 959113 - RNA, 21 nt, Human
uacaaggaagggauucacagg

SEQ ID NO: 959114 - RNA, 22 nt, Human
uagaaaauucaauucuaacuga

SEQ ID NO: 959115 - RNA, 19 nt, Human
uauaggaagugggugugga

SEQ ID NO: 959116 - RNA, 25 nt, Human
ucaaugcacaagccaauugcaaagg

SEQ ID NO: 959117 - RNA, 19 nt, Human
ucaccuaacguuuucuggc

SEQ ID NO: 959118 - RNA, 21 nt, Human
ucugcucaccuaacguuuucu

SEQ ID NO: 959119 - RNA, 20 nt, Human
ucuuacgacagcaucgugcc

SEQ ID NO: 959120 - RNA, 23 nt, Human
ugagcaagcagcuccgccagugu

SEQ ID NO: 959121 - RNA, 26 nt, Human
ugagcagagccacaggucuccaugga

SEQ ID NO: 959122 - RNA, 19 nt, Human
ugcauuuggcacaaugguc

SEQ ID NO: 959123 - RNA, 22 nt, Human
ugccacugaccaccauguacaa

SEQ ID NO: 959124 - RNA, 19 nt, Human
uggcccagcgcaacaacug

SEQ ID NO: 959125 - RNA, 25 nt, Human
uggcccagcgcaacaacugacauuc

SEQ ID NO: 959126 - RNA, 19 nt, Human
uggcggauuucucauggcc

SEQ ID NO: 959127 - RNA, 18 nt, Human
ugggaaggccgcugggua

SEQ ID NO: 959128 - RNA, 18 nt, Human
uguuuauuuuucuccuuc

SEQ ID NO: 959129 - RNA, 18 nt, Human
uuggccugggagcugggc

SEQ ID NO: 959130 - RNA, 19 nt, Human
cauacaccaggagcucugc

SEQ ID NO: 959131 - RNA, 21 nt, Human
cugcuuccugccgcggcuguc

SEQ ID NO: 959132 - RNA, 20 nt, Human
cuuccugccgcggcugucac

SEQ ID NO: 959133 - RNA, 22 nt, Human
gacuccagcuccagcccgacug

SEQ ID NO: 959134 - RNA, 20 nt, Human
gggaaauguccagcuuucuc

SEQ ID NO: 959135 - RNA, 19 nt, Human
gucacaggggagccuagaa

SEQ ID NO: 959136 - RNA, 20 nt, Human
ucacccugggaaggucgugg

SEQ ID NO: 959137 - RNA, 23 nt, Human
uccugccgcggcugucacagggg

SEQ ID NO: 959138 - RNA, 21 nt, Human
ugaauguaaauaucucuuugu

SEQ ID NO: 959139 - RNA, 22 nt, Human
ugaggcggugucacccugggaa

SEQ ID NO: 959140 - RNA, 21 nt, Human
uuccugccgcggcugucacag

SEQ ID NO: 959141 - RNA, 18 nt, Human
aaaaaccaaaaacaaguu

SEQ ID NO: 959142 - RNA, 20 nt, Human
aaacaaaaacccacaagugc

SEQ ID NO: 959143 - RNA, 18 nt, Human
aaagcccuuggcaaugcc

SEQ ID NO: 959144 - RNA, 18 nt, Human
aagcacaggugacacgca

SEQ ID NO: 959145 - RNA, 22 nt, Human
aauacagcucuaucgacugccc

SEQ ID NO: 959146 - RNA, 23 nt, Human
acaagcagagugcccucuggagc

SEQ ID NO: 959147 - RNA, 30 nt, Human
acaccacagcacaaacacguggcacagacc

SEQ ID NO: 959148 - RNA, 27 nt, Human
acaccgaauucccuugggcucugccca

SEQ ID NO: 959149 - RNA, 19 nt, Human
acacuccaaaugucaggca

SEQ ID NO: 959150 - RNA, 18 nt, Human
acauccaaguucuacgug

SEQ ID NO: 959151 - RNA, 19 nt, Human
accaagaauucaauggucu

SEQ ID NO: 959152 - RNA, 20 nt, Human
accuggauaaugacugcccc

SEQ ID NO: 959153 - RNA, 18 nt, Human
acugaauaaucaaacuaa

SEQ ID NO: 959154 - RNA, 23 nt, Human
agaagccuucacuaggcuuugcc

SEQ ID NO: 959155 - RNA, 22 nt, Human
agacagagaaugaugagcagaa

SEQ ID NO: 959156 - RNA, 18 nt, Human
agacauuggucacagagg

SEQ ID NO: 959157 - RNA, 23 nt, Human
agagguuaauuucaaaagguuuu

SEQ ID NO: 959158 - RNA, 25 nt, Human
agaguccagcgagguugcaaaauaa

SEQ ID NO: 959159 - RNA, 24 nt, Human
aggaggacgcuggcuuuccuuaaa

SEQ ID NO: 959160 - RNA, 25 nt, Human
aggaggacgcuggcuuugaacaaaa

SEQ ID NO: 959161 - RNA, 27 nt, Human
aggcucccucagcccagucuccccacc

SEQ ID NO: 959162 - RNA, 23 nt, Human
aucaaauggugaaaauauggcaa

SEQ ID NO: 959163 - RNA, 19 nt, Human
auccucuggggucaacccu

SEQ ID NO: 959164 - RNA, 18 nt, Human
aucuaagguugggggagg

SEQ ID NO: 959165 - RNA, 25 nt, Human
augaaaaacaaaacaaaaacccaca

SEQ ID NO: 959166 - RNA, 18 nt, Human
augcaaauaauuuucccu

SEQ ID NO: 959167 - RNA, 20 nt, Human
caaaaacccacaagugcuuu

SEQ ID NO: 959168 - RNA, 18 nt, Human
caaaacaaagcccuuggc

SEQ ID NO: 959169 - RNA, 24 nt, Human
caaauggaagacuguauuuaaaug

SEQ ID NO: 959170 - RNA, 22 nt, Human
caacacacagccagucaacgag

SEQ ID NO: 959171 - RNA, 18 nt, Human
caagacacagaugugcac

SEQ ID NO: 959172 - RNA, 23 nt, Human
caauggaaagacuuagaacaucu

SEQ ID NO: 959173 - RNA, 19 nt, Human
caauggucuugguucaugg

SEQ ID NO: 959174 - RNA, 24 nt, Human
cacaccacagcacaaacacguggc

SEQ ID NO: 959175 - RNA, 22 nt, Human
cacagcucagagaauacaaaac

SEQ ID NO: 959176 - RNA, 24 nt, Human
cacccuagggcugaccauggggcc

SEQ ID NO: 959177 - RNA, 20 nt, Human
caccugggaaaggcgaucaa

SEQ ID NO: 959178 - RNA, 22 nt, Human
cacucuaauaaggcaaguacaa

SEQ ID NO: 959179 - RNA, 24 nt, Human
cagaagaggcagacccggcuccca

SEQ ID NO: 959180 - RNA, 19 nt, Human
cagcucguggacgcacuug

SEQ ID NO: 959181 - RNA, 23 nt, Human
caggcgucccucuugguggcucu

SEQ ID NO: 959182 - RNA, 23 nt, Human
caggcucccucagcccagucucc

SEQ ID NO: 959183 - RNA, 23 nt, Human
caguggaaggggaacacuccaaa

SEQ ID NO: 959184 - RNA, 21 nt, Human
cauguuuguuuccucaaccaa

SEQ ID NO: 959185 - RNA, 24 nt, Human
ccaaacaagacacagaugugcaca

SEQ ID NO: 959186 - RNA, 21 nt, Human
cccaacacacagccagucaac

SEQ ID NO: 959187 - RNA, 18 nt, Human
cccaaggagcaucuccuc

SEQ ID NO: 959188 - RNA, 20 nt, Human
cccuccaccaucccauccca

SEQ ID NO: 959189 - RNA, 20 nt, Human
cccucugcuccaagcggaac

SEQ ID NO: 959190 - RNA, 19 nt, Human
cccugcugcccucccagaa

SEQ ID NO: 959191 - RNA, 22 nt, Human
ccucaguggaaggggaacacuc

SEQ ID NO: 959192 - RNA, 23 nt, Human
ccucgcucagcggcugcacaggg

SEQ ID NO: 959193 - RNA, 25 nt, Human
ccucuugguggcucuccacccuagg

SEQ ID NO: 959194 - RNA, 25 nt, Human
ccuggacagagggggacacaccaca

SEQ ID NO: 959195 - RNA, 21 nt, Human
ccuggcacccccaggcguccc

SEQ ID NO: 959196 - RNA, 25 nt, Human
ccuggccucacacugcugccucagc

SEQ ID NO: 959197 - RNA, 22 nt, Human
cgaauucccuugggcucugccc

SEQ ID NO: 959198 - RNA, 21 nt, Human
cgagcgcgggucgggggccgg

SEQ ID NO: 959199 - RNA, 21 nt, Human
cgccagugacacugaauaauc

SEQ ID NO: 959200 - RNA, 21 nt, Human
cgggcgggcgggcgggcggac

SEQ ID NO: 959201 - RNA, 21 nt, Human
cgggcgggcgggcgggcgggc

SEQ ID NO: 959202 - RNA, 19 nt, Human
cucaaucccaacacacagc

SEQ ID NO: 959203 - RNA, 19 nt, Human
cuccccaccugcacagcuc

SEQ ID NO: 959204 - RNA, 26 nt, Human
cucugcccuggccucacaccgguucc

SEQ ID NO: 959205 - RNA, 18 nt, Human
cugcacagcucagagaau

SEQ ID NO: 959206 - RNA, 22 nt, Human
cuggaccauuuucacauuaucu

SEQ ID NO: 959207 - RNA, 18 nt, Human
cuggcaggggaggcugug

SEQ ID NO: 959208 - RNA, 18 nt, Human
cuucacuaggcuuugccc

SEQ ID NO: 959209 - RNA, 18 nt, Human
gacccggcucccaugugg

SEQ ID NO: 959210 - RNA, 18 nt, Human
gacugccccacugaaaac

SEQ ID NO: 959211 - RNA, 22 nt, Human
gacuuuucccuugcaaauggaa

SEQ ID NO: 959212 - RNA, 18 nt, Human
gagacagagaaugaugag

SEQ ID NO: 959213 - RNA, 20 nt, Human
gagcagaacguggaggaugu

SEQ ID NO: 959214 - RNA, 19 nt, Human
gagcaucuccucgcucagc

SEQ ID NO: 959215 - RNA, 19 nt, Human
gcccaggaggaaggcagga

SEQ ID NO: 959216 - RNA, 23 nt, Human
gcccaggaggaaggcaggagaug

SEQ ID NO: 959217 - RNA, 18 nt, Human
gccccuuccucugggucc

SEQ ID NO: 959218 - RNA, 18 nt, Human
gcgggcgggcgggcggac

SEQ ID NO: 959219 - RNA, 21 nt, Human
gcgggcgggcgggcgggcggg

SEQ ID NO: 959220 - RNA, 22 nt, Human
ggaagggcccgaagcacaggug

SEQ ID NO: 959221 - RNA, 22 nt, Human
ggacagaugagggaucccuagu

SEQ ID NO: 959222 - RNA, 22 nt, Human
ggauaaugacugccccacugaa

SEQ ID NO: 959223 - RNA, 24 nt, Human
ggccggacgccgagcgggcaaugc

SEQ ID NO: 959224 - RNA, 19 nt, Human
ggcgcgggcgggcgggcgg

SEQ ID NO: 959225 - RNA, 19 nt, Human
gggcccaggaggaaggcag

SEQ ID NO: 959226 - RNA, 22 nt, Human
gggccggacgccgagcgggcaa

SEQ ID NO: 959227 - RNA, 20 nt, Human
gggcgggcgggcgggcgggc

SEQ ID NO: 959228 - RNA, 21 nt, Human
guaaagaucccucaggcucua

SEQ ID NO: 959229 - RNA, 21 nt, Human
gucacagaggaggacgcuggc

SEQ ID NO: 959230 - RNA, 18 nt, Human
guccugugggaagggccc

SEQ ID NO: 959231 - RNA, 21 nt, Human
gugagccucccauguggcccu

SEQ ID NO: 959232 - RNA, 24 nt, Human
guggauggagaagggggugagccu

SEQ ID NO: 959233 - RNA, 23 nt, Human
guggcuccguggaaagacacucu

SEQ ID NO: 959234 - RNA, 21 nt, Human
uaagacugaaugaaaaacaaa

SEQ ID NO: 959235 - RNA, 21 nt, Human
uacaugaaagcuuugguccug

SEQ ID NO: 959236 - RNA, 18 nt, Human
uagaugugaauugggaaa

SEQ ID NO: 959237 - RNA, 25 nt, Human
uagcugggcagucuccaggaaggag

SEQ ID NO: 959238 - RNA, 23 nt, Human
uauuuuuucaauauaacauagcu

SEQ ID NO: 959239 - RNA, 20 nt, Human
ucaagacauuggucacagag

SEQ ID NO: 959240 - RNA, 19 nt, Human
ucacauagcacauuguucu

SEQ ID NO: 959241 - RNA, 20 nt, Human
ucagagaauacaaaacccag

SEQ ID NO: 959242 - RNA, 21 nt, Human
ucagagcugggcuccuacugu

SEQ ID NO: 959243 - RNA, 19 nt, Human
ucagcccagucuccccacc

SEQ ID NO: 959244 - RNA, 21 nt, Human
ucagccccucugcuccaagcg

SEQ ID NO: 959245 - RNA, 19 nt, Human
ucagugccuggacagaggg

SEQ ID NO: 959246 - RNA, 20 nt, Human
ucagugccuggacagagggg

SEQ ID NO: 959247 - RNA, 23 nt, Human
ucccagaagaggcagacccggcu

SEQ ID NO: 959248 - RNA, 24 nt, Human
ucccauguggcccuccaccauccc

SEQ ID NO: 959249 - RNA, 18 nt, Human
ucccucagcccagucucc

SEQ ID NO: 959250 - RNA, 23 nt, Human
ucccucagcccagucuccccacc

SEQ ID NO: 959251 - RNA, 20 nt, Human
uccucuggggucaacccugg

SEQ ID NO: 959252 - RNA, 23 nt, Human
ucgcucagcggcugcacaggggg

SEQ ID NO: 959253 - RNA, 23 nt, Human
ucuaauaacaagcagagugcccu

SEQ ID NO: 959254 - RNA, 19 nt, Human
ucuggagccuccucgcugg

SEQ ID NO: 959255 - RNA, 18 nt, Human
ucuuaucuauuuucuccc

SEQ ID NO: 959256 - RNA, 25 nt, Human
ugaaaaacaaaacaaaaacccacaa

SEQ ID NO: 959257 - RNA, 26 nt, Human
ugaaaaacaaaacaaaaacccacaag

SEQ ID NO: 959258 - RNA, 20 nt, Human
ugaaagcuuugguccugaga

SEQ ID NO: 959259 - RNA, 25 nt, Human
ugaaugaaaaacaaaacaaaaaccc

SEQ ID NO: 959260 - RNA, 23 nt, Human
ugagauccaauggaaagacuuag

SEQ ID NO: 959261 - RNA, 21 nt, Human
ugauacagagcuggcagcgag

SEQ ID NO: 959262 - RNA, 21 nt, Human
ugcaaauaauuuucccugcag

SEQ ID NO: 959263 - RNA, 18 nt, Human
ugcccucuggagccuccu

SEQ ID NO: 959264 - RNA, 19 nt, Human
ugcuacgugucgccaguga

SEQ ID NO: 959265 - RNA, 25 nt, Human
ugcucgggaugagggcugggguggc

SEQ ID NO: 959266 - RNA, 19 nt, Human
uggaaaaggguguagcacc

SEQ ID NO: 959267 - RNA, 25 nt, Human
uggaaaaggguguagcaccugggaa

SEQ ID NO: 959268 - RNA, 19 nt, Human
uggaaguuucuagggaaua

SEQ ID NO: 959269 - RNA, 23 nt, Human
uggacaauauuccaaacaagaca

SEQ ID NO: 959270 - RNA, 23 nt, Human
uggaggagaaauagaaaugauuc

SEQ ID NO: 959271 - RNA, 18 nt, Human
ugggaagggcccgaagca

SEQ ID NO: 959272 - RNA, 20 nt, Human
uggggcagcaauccucuggg

SEQ ID NO: 959273 - RNA, 20 nt, Human
ugggucucacucugcccugg

SEQ ID NO: 959274 - RNA, 22 nt, Human
uguggaggugcucgggaugagg

SEQ ID NO: 959275 - RNA, 18 nt, Human
uguuuccucaaccaagaa

SEQ ID NO: 959276 - RNA, 23 nt, Human
uugacuagcaguucgaaagcaaa

SEQ ID NO: 959277 - RNA, 24 nt, Human
uugacugguccuggcacccccagg

SEQ ID NO: 959278 - RNA, 20 nt, Human
uugcagggccauggagacag

SEQ ID NO: 959279 - RNA, 21 nt, Human
uuggauuaccuggauaaugac

SEQ ID NO: 959280 - RNA, 25 nt, Human
uuggccuucuccuggaccauuuucc

SEQ ID NO: 959281 - RNA, 24 nt, Human
uugguccugagaguccuuuugcag

SEQ ID NO: 959282 - RNA, 19 nt, Human
uuucccaggaauggggcuc

SEQ ID NO: 959283 - RNA, 19 nt, Human
uuuccugacuguagucaag

SEQ ID NO: 959284 - RNA, 20 nt, Human
uuucucaaagaguuguuucu

SEQ ID NO: 959285 - RNA, 20 nt, Human
aguggcccugcagacgcccc

SEQ ID NO: 959286 - RNA, 21 nt, Human
caaacccaaagucucugccaa

SEQ ID NO: 959287 - RNA, 24 nt, Human
caaacccaaagucucugccaagag

SEQ ID NO: 959288 - RNA, 20 nt, Human
cacccuccauccacccaucc

SEQ ID NO: 959289 - RNA, 21 nt, Human
cagacgccccaccugccaccc

SEQ ID NO: 959290 - RNA, 23 nt, Human
ccccuacaaacccaaagucucug

SEQ ID NO: 959291 - RNA, 26 nt, Human
cccugcagacgccccaccugccaccc

SEQ ID NO: 959292 - RNA, 26 nt, Human
ccuccauccacccauccauccacaca

SEQ ID NO: 959293 - RNA, 21 nt, Human
cugccacccuccauccaccca

SEQ ID NO: 959294 - RNA, 21 nt, Human
gccccaccugccacccuccau

SEQ ID NO: 959295 - RNA, 18 nt, Human
ggaccccuacaaacccaa

SEQ ID NO: 959296 - RNA, 19 nt, Human
ugaggaccccuacaaaccc

SEQ ID NO: 959297 - RNA, 22 nt, Human
ugcagacgccccaccugccacc

SEQ ID NO: 959298 - RNA, 18 nt, Human
ugccaagaguggcccugc

SEQ ID NO: 959299 - RNA, 18 nt, Human
uggcccugcagacgcccc

SEQ ID NO: 959300 - RNA, 20 nt, Human
aaaggggagagaaccaaaga

SEQ ID NO: 959301 - RNA, 20 nt, Human
aacaaaggaaaaaaaaaagc

SEQ ID NO: 959302 - RNA, 24 nt, Human
aacauuucaaggucauuggaaaca

SEQ ID NO: 959303 - RNA, 23 nt, Human
aagaauaagguucaacacaucag

SEQ ID NO: 959304 - RNA, 21 nt, Human
aaggggagagaaccaaagagg

SEQ ID NO: 959305 - RNA, 23 nt, Human
acaaaggaaaaaaaaaagcaaca

SEQ ID NO: 959306 - RNA, 23 nt, Human
acagcgaaugggccggggccaga

SEQ ID NO: 959307 - RNA, 22 nt, Human
acugcaauucauuauacccauu

SEQ ID NO: 959308 - RNA, 21 nt, Human
aggcaugcuuuagacagucau

SEQ ID NO: 959309 - RNA, 21 nt, Human
agggaggggagggagggaggg

SEQ ID NO: 959310 - RNA, 24 nt, Human
agggaggggagggagggagggggc

SEQ ID NO: 959311 - RNA, 19 nt, Human
auauaaauauauauauaua

SEQ ID NO: 959312 - RNA, 24 nt, Human
auauaaauauauauauauauauau

SEQ ID NO: 959313 - RNA, 18 nt, Human
auaugcuguauauaccug

SEQ ID NO: 959314 - RNA, 21 nt, Human
augaauaucagcagcuuaaaa

SEQ ID NO: 959315 - RNA, 21 nt, Human
caaaacacacaaguacaugca

SEQ ID NO: 959316 - RNA, 19 nt, Human
cagaagaaaagauaaucac

SEQ ID NO: 959317 - RNA, 19 nt, Human
cagcagcuuaaaaaugaaa

SEQ ID NO: 959318 - RNA, 22 nt, Human
cagcagugcauuuuagagcuuu

SEQ ID NO: 959319 - RNA, 21 nt, Human
caggagaggcuaaauaaggca

SEQ ID NO: 959320 - RNA, 20 nt, Human
caugacuuaacagaagaaaa

SEQ ID NO: 959321 - RNA, 22 nt, Human
caugcaucuacaauuacgcacc

SEQ ID NO: 959322 - RNA, 19 nt, Human
cauguugccaccaguuuca

SEQ ID NO: 959323 - RNA, 20 nt, Human
cauguugccaccaguuucag

SEQ ID NO: 959324 - RNA, 21 nt, Human
cauugcacuucaauaguuaca

SEQ ID NO: 959325 - RNA, 22 nt, Human
cauugcacuucaauaguuacac

SEQ ID NO: 959326 - RNA, 23 nt, Human
cccggggaagggaggggagggag

SEQ ID NO: 959327 - RNA, 22 nt, Human
cgaaugggccggggccagaccc

SEQ ID NO: 959328 - RNA, 25 nt, Human
cuuaacagaagaaaagauaaucacu

SEQ ID NO: 959329 - RNA, 25 nt, Human
gaaccaaagagguccaagcagaaaa

SEQ ID NO: 959330 - RNA, 26 nt, Human
gaaccaaagagguccaagcagaaaaa

SEQ ID NO: 959331 - RNA, 21 nt, Human
gaagggaggggagggagggag

SEQ ID NO: 959332 - RNA, 19 nt, Human
gaauaucagcagcuuaaaa

SEQ ID NO: 959333 - RNA, 21 nt, Human
gcuagaucacccuuacaggag

SEQ ID NO: 959334 - RNA, 20 nt, Human
ggagggagggggcgggcgag

SEQ ID NO: 959335 - RNA, 18 nt, Human
ggagggggcgggcgagug

SEQ ID NO: 959336 - RNA, 19 nt, Human
ggccggggccagacccggg

SEQ ID NO: 959337 - RNA, 18 nt, Human
gggaagggaggggaggga

SEQ ID NO: 959338 - RNA, 21 nt, Human
gggagggagggagggggcggg

SEQ ID NO: 959339 - RNA, 30 nt, Human
gggccggggccagacccgggcccggggaaa

SEQ ID NO: 959340 - RNA, 19 nt, Human
ggggaagggaggggaggga

SEQ ID NO: 959341 - RNA, 22 nt, Human
uaaaaguuugccuugauugaau

SEQ ID NO: 959342 - RNA, 22 nt, Human
uacguauauacugcaauucauu

SEQ ID NO: 959343 - RNA, 22 nt, Human
uaucagcagcuuaaaaaugaaa

SEQ ID NO: 959344 - RNA, 21 nt, Human
ugaaaggggagagaaccaaag

SEQ ID NO: 959345 - RNA, 18 nt, Human
ugacuuaacagaagaaaa

SEQ ID NO: 959346 - RNA, 20 nt, Human
ugacuuaacagaagaaaaga

SEQ ID NO: 959347 - RNA, 24 nt, Human
ugacuuaacagaagaaaagauaau

SEQ ID NO: 959348 - RNA, 21 nt, Human
ugagcgagggaggcagccgcg

SEQ ID NO: 959349 - RNA, 20 nt, Human
ugaucugauccucagaggac

SEQ ID NO: 959350 - RNA, 19 nt, Human
ugcacaauuuccucaucug

SEQ ID NO: 959351 - RNA, 21 nt, Human
uggcagcagugcauuuuagag

SEQ ID NO: 959352 - RNA, 19 nt, Human
uuaaaaacaggugaaucca

SEQ ID NO: 959353 - RNA, 20 nt, Human
uuauaugcuguauauaccug

SEQ ID NO: 959354 - RNA, 26 nt, Human
uucacuucuauuuaaauaaccccuag

SEQ ID NO: 959355 - RNA, 25 nt, Human
uucacuucuauuuaaauaaccccug

SEQ ID NO: 959356 - RNA, 21 nt, Human
uugccaauuuaacagcugcau

SEQ ID NO: 959357 - RNA, 20 nt, Human
uuugcuguacuuuacaaaag

SEQ ID NO: 959358 - RNA, 18 nt, Human
uuuggauuucucccaccc

SEQ ID NO: 959359 - RNA, 21 nt, Human
aagcagacgcgaagcccucca

SEQ ID NO: 959360 - RNA, 22 nt, Human
aagcagacgcgaagcccuccaa

SEQ ID NO: 959361 - RNA, 19 nt, Human
auuucucuuaucucuucuc

SEQ ID NO: 959362 - RNA, 21 nt, Human
cuccaacgccucgggccucac

SEQ ID NO: 959363 - RNA, 24 nt, Human
gaagcccuccaacgccucgggccu

SEQ ID NO: 959364 - RNA, 19 nt, Human
ggaaaugaguuauuuugca

SEQ ID NO: 959365 - RNA, 23 nt, Human
uaacgaaucgcuacagguuuuua

SEQ ID NO: 959366 - RNA, 19 nt, Human
uaccaaaaugcugcagcag

SEQ ID NO: 959367 - RNA, 20 nt, Human
uacuaaaguguucaaucaca

SEQ ID NO: 959368 - RNA, 18 nt, Human
uccgaagcagacgcgaag

SEQ ID NO: 959369 - RNA, 22 nt, Human
ucucuucucuuucauuucucuu

SEQ ID NO: 959370 - RNA, 18 nt, Human
ucuucucuuucauuucuc

SEQ ID NO: 959371 - RNA, 20 nt, Human
ucuuucauuucucuuaucuc

SEQ ID NO: 959372 - RNA, 23 nt, Human
ugucccauuucucuucucuuuca

SEQ ID NO: 959373 - RNA, 21 nt, Human
uuagggacuauuagauguccc

SEQ ID NO: 959374 - RNA, 20 nt, Human
uuuguauauaaccaggagau

SEQ ID NO: 959375 - RNA, 23 nt, Human
uuuuuuguuguuuuuccuugucc

SEQ ID NO: 959376 - RNA, 24 nt, Human
uuuuuuuuuuuuuuuucuucccag

SEQ ID NO: 959377 - RNA, 19 nt, Human
aaacagcagaaccuggaac

SEQ ID NO: 959378 - RNA, 22 nt, Human
aaacagcagaaccuggaacuca

SEQ ID NO: 959379 - RNA, 22 nt, Human
agcagaaccuggaacucaugga

SEQ ID NO: 959380 - RNA, 20 nt, Human
aggaucagagcaaacagcag

SEQ ID NO: 959381 - RNA, 20 nt, Human
caaacagcagaaccuggaac

SEQ ID NO: 959382 - RNA, 23 nt, Human
caaacagcagaaccuggaacuca

SEQ ID NO: 959383 - RNA, 18 nt, Human
cacauauaucaacaggau

SEQ ID NO: 959384 - RNA, 23 nt, Human
caggaucagagcaaacagcagaa

SEQ ID NO: 959385 - RNA, 24 nt, Human
caguaagucuacuccucgugacuu

SEQ ID NO: 959386 - RNA, 18 nt, Human
ccaggagaaaaugagaaa

SEQ ID NO: 959387 - RNA, 18 nt, Human
cucauggagauaagaaaa

SEQ ID NO: 959388 - RNA, 25 nt, Human
cuccucugccuaggaaaaccagaga

SEQ ID NO: 959389 - RNA, 22 nt, Human
gaagaugagggaccaggagaaa

SEQ ID NO: 959390 - RNA, 24 nt, Human
gaccaggagaaaaugagaaaaaag

SEQ ID NO: 959391 - RNA, 19 nt, Human
gcaaacagcagaaccugga

SEQ ID NO: 959392 - RNA, 19 nt, Human
ggaucagagcaaacagcag

SEQ ID NO: 959393 - RNA, 21 nt, Human
uaagucuacuccucgugacuu

SEQ ID NO: 959394 - RNA, 23 nt, Human
ucagagcaaacagcagaaccugg

SEQ ID NO: 959395 - RNA, 25 nt, Human
ucucuagcccugucaagggcucacc

SEQ ID NO: 959396 - RNA, 21 nt, Human
ugagggaccaggagaaaauga

SEQ ID NO: 959397 - RNA, 18 nt, Human
ugucaggugcucucuagc

SEQ ID NO: 959398 - RNA, 21 nt, Human
ugucaggugcucucuagcccu

SEQ ID NO: 959399 - RNA, 18 nt, Human
ugugggugcccaccugca

SEQ ID NO: 959400 - RNA, 20 nt, Human
aagcgggguacacacaaaca

SEQ ID NO: 959401 - RNA, 19 nt, Human
aaggcauccuccacccaca

SEQ ID NO: 959402 - RNA, 25 nt, Human
aaggcauccuccacccacacauccc

SEQ ID NO: 959403 - RNA, 19 nt, Human
acaagagcauccugaggcu

SEQ ID NO: 959404 - RNA, 18 nt, Human
acaguggagaugaugaca

SEQ ID NO: 959405 - RNA, 22 nt, Human
accacccugcucugccugagag

SEQ ID NO: 959406 - RNA, 21 nt, Human
agcuacuuugaaaccucaccc

SEQ ID NO: 959407 - RNA, 22 nt, Human
aggcauccuccacccacacauc

SEQ ID NO: 959408 - RNA, 24 nt, Human
aggcauccuccacccacacauccc

SEQ ID NO: 959409 - RNA, 19 nt, Human
auagcugggcccccgaggc

SEQ ID NO: 959410 - RNA, 25 nt, Human
caacaacccaaauuaacaguauuuu

SEQ ID NO: 959411 - RNA, 18 nt, Human
caagagcauccugaggcu

SEQ ID NO: 959412 - RNA, 20 nt, Human
cacaaacacucuagaagcca

SEQ ID NO: 959413 - RNA, 25 nt, Human
cacacguggugaaagagaaaaucua

SEQ ID NO: 959414 - RNA, 22 nt, Human
caggaaugagcugaccgagaca

SEQ ID NO: 959415 - RNA, 18 nt, Human
caggaugcccacucgccc

SEQ ID NO: 959416 - RNA, 24 nt, Human
caucccaucuucugagugguccca

SEQ ID NO: 959417 - RNA, 18 nt, Human
ccagaauaaacaagagca

SEQ ID NO: 959418 - RNA, 22 nt, Human
ccagagcugugcgccaccccug

SEQ ID NO: 959419 - RNA, 18 nt, Human
cccacacaucccaucuuc

SEQ ID NO: 959420 - RNA, 23 nt, Human
cccaggcccugaacuggcucagg

SEQ ID NO: 959421 - RNA, 22 nt, Human
cccagucuuccggcccagggga

SEQ ID NO: 959422 - RNA, 27 nt, Human
ccccaagcuggcucucccccaggcccu

SEQ ID NO: 959423 - RNA, 21 nt, Human
ccccaggcccugaacuggcuc

SEQ ID NO: 959424 - RNA, 24 nt, Human
ccccaggcccugaacuggcucagg

SEQ ID NO: 959425 - RNA, 20 nt, Human
ccccugugggacaaucaggc

SEQ ID NO: 959426 - RNA, 19 nt, Human
ccucacccacaguucacac

SEQ ID NO: 959427 - RNA, 18 nt, Human
ccuccacccacacauccc

SEQ ID NO: 959428 - RNA, 19 nt, Human
cgggguacacacaaacacu

SEQ ID NO: 959429 - RNA, 20 nt, Human
cuccugggucucuaccagcu

SEQ ID NO: 959430 - RNA, 21 nt, Human
cugggcccccgaggcccugac

SEQ ID NO: 959431 - RNA, 19 nt, Human
ggaccacccugcucugccu

SEQ ID NO: 959432 - RNA, 19 nt, Human
gggacaguggagaugauga

SEQ ID NO: 959433 - RNA, 19 nt, Human
ggucccagagcugugcgcc

SEQ ID NO: 959434 - RNA, 23 nt, Human
guaaauccaacaacaacccaaau

SEQ ID NO: 959435 - RNA, 22 nt, Human
gugaagcuacuuugaaaccuca

SEQ ID NO: 959436 - RNA, 23 nt, Human
gugaagcuacuuugaaaccucac

SEQ ID NO: 959437 - RNA, 19 nt, Human
ucaggaaggaggcaggaau

SEQ ID NO: 959438 - RNA, 18 nt, Human
ucccagagcugugcgccc

SEQ ID NO: 959439 - RNA, 21 nt, Human
ucccccaggcccugaacuggc

SEQ ID NO: 959440 - RNA, 22 nt, Human
ucuagcaaaguaaauccaacaa

SEQ ID NO: 959441 - RNA, 18 nt, Human
ugagcccagaauaaacaa

SEQ ID NO: 959442 - RNA, 19 nt, Human
ugaggcuggagaggcaggc

SEQ ID NO: 959443 - RNA, 20 nt, Human
ugcccggaccacccugcucu

SEQ ID NO: 959444 - RNA, 22 nt, Human
uggcccggccgccaccuaguga

SEQ ID NO: 959445 - RNA, 19 nt, Human
uggcucaggaaggaggcag

SEQ ID NO: 959446 - RNA, 19 nt, Human
ugggcuggguuccagcugg

SEQ ID NO: 959447 - RNA, 19 nt, Human
uggugaaagagaaaaucua

SEQ ID NO: 959448 - RNA, 25 nt, Human
ugucuucuccuucgacagcuucguu

SEQ ID NO: 959449 - RNA, 18 nt, Human
uuuuuuuuuuuuuuuuug

SEQ ID NO: 959450 - RNA, 19 nt, Human
uuuuuuuuuuuuuuuuugc

SEQ ID NO: 959451 - RNA, 21 nt, Human
uuuuuuuuuuuuuuuuugcag

SEQ ID NO: 959452 - RNA, 21 nt, Human
aacgggaggcagagcaucugg

SEQ ID NO: 959453 - RNA, 20 nt, Human
aguggguuuuggaacgggag

SEQ ID NO: 959454 - RNA, 22 nt, Human
cccccaaacuccguggcuccuc

SEQ ID NO: 959455 - RNA, 19 nt, Human
ccgcggagccgggcagggg

SEQ ID NO: 959456 - RNA, 23 nt, Human
cgccgcggagccgggcagggggc

SEQ ID NO: 959457 - RNA, 19 nt, Human
gagcaucuggggacagacc

SEQ ID NO: 959458 - RNA, 24 nt, Human
gcuguccugcucacccagcagaag

SEQ ID NO: 959459 - RNA, 22 nt, Human
ggaaauggucuaugcacacugc

SEQ ID NO: 959460 - RNA, 23 nt, Human
ggaaauguucaaaagugucaagg

SEQ ID NO: 959461 - RNA, 19 nt, Human
gggacaggagcuguccugc

SEQ ID NO: 959462 - RNA, 24 nt, Human
ggugugugcccaggugcuguggcc

SEQ ID NO: 959463 - RNA, 20 nt, Human
gugcccaggugcuguggccc

SEQ ID NO: 959464 - RNA, 25 nt, Human
uccgcgccgcggagccgggcagggg

SEQ ID NO: 959465 - RNA, 21 nt, Human
uccucaagcaugucuucaucc

SEQ ID NO: 959466 - RNA, 21 nt, Human
ucgcuggggacaggagcuguc

SEQ ID NO: 959467 - RNA, 22 nt, Human
ucuaugcacacugcugaggcug

SEQ ID NO: 959468 - RNA, 24 nt, Human
ucuggcuguuuuccugccucccug

SEQ ID NO: 959469 - RNA, 21 nt, Human
ucuucgcuggggacaggagcu

SEQ ID NO: 959470 - RNA, 21 nt, Human
ugacaauaaacucuacagaac

SEQ ID NO: 959471 - RNA, 19 nt, Human
ugaguggguuuuggaacgg

SEQ ID NO: 959472 - RNA, 20 nt, Human
ugcccaggugcuguggcccc

SEQ ID NO: 959473 - RNA, 21 nt, Human
uggacaggugcucgggugugu

SEQ ID NO: 959474 - RNA, 18 nt, Human
uggcccaggggcagccgg

SEQ ID NO: 959475 - RNA, 24 nt, Human
uggcccccaaacuccguggcuccu

SEQ ID NO: 959476 - RNA, 19 nt, Human
ugucaagguggcuucuggc

SEQ ID NO: 959477 - RNA, 22 nt, Human
ugucaagguggcuucuggcugu

SEQ ID NO: 959478 - RNA, 23 nt, Human
uguccugcucacccagcagaagc

SEQ ID NO: 959479 - RNA, 24 nt, Human
uguccugcucacccagcagaagca

SEQ ID NO: 959480 - RNA, 19 nt, Human
ugugcaaagguccugggac

SEQ ID NO: 959481 - RNA, 21 nt, Human
uucuggcuguuuuccugccuc

SEQ ID NO: 959482 - RNA, 22 nt, Human
uuuuucauuccugccguucaac

SEQ ID NO: 959483 - RNA, 20 nt, Human
aaaaaaaaaagaggaaaaaa

SEQ ID NO: 959484 - RNA, 20 nt, Human
aaaaccccaacacucaucac

SEQ ID NO: 959485 - RNA, 28 nt, Human
aaaacgaaacaaaacaaaaauaaaaccc

SEQ ID NO: 959486 - RNA, 25 nt, Human
aaaagaggaaaaaacggauuguaag

SEQ ID NO: 959487 - RNA, 21 nt, Human
aaaaggaaaguaaaucaaacc

SEQ ID NO: 959488 - RNA, 23 nt, Human
aaaauaaaacccacuccagaaaa

SEQ ID NO: 959489 - RNA, 25 nt, Human
aaacaaaaauaaaacccacuccaga

SEQ ID NO: 959490 - RNA, 26 nt, Human
aaacaaaaauaaaacccacuccagaa

SEQ ID NO: 959491 - RNA, 22 nt, Human
aaacaaaacaaaaauaaaaccc

SEQ ID NO: 959492 - RNA, 23 nt, Human
aaacaaaacaaaaauaaaaccca

SEQ ID NO: 959493 - RNA, 23 nt, Human
aaacgaaacaaaacaaaaauaaa

SEQ ID NO: 959494 - RNA, 19 nt, Human
aaagacugacaaaguugga

SEQ ID NO: 959495 - RNA, 21 nt, Human
aaauacuaguauccgcaugaa

SEQ ID NO: 959496 - RNA, 21 nt, Human
aacacacccgcagcaaacacu

SEQ ID NO: 959497 - RNA, 19 nt, Human
aacaguugcucuaacccca

SEQ ID NO: 959498 - RNA, 21 nt, Human
aaccccagugguuaucaauac

SEQ ID NO: 959499 - RNA, 18 nt, Human
aaccccauucuaaacccc

SEQ ID NO: 959500 - RNA, 18 nt, Human
aaccugggccaaaugaag

SEQ ID NO: 959501 - RNA, 18 nt, Human
aaccugggccaaaugaag

SEQ ID NO: 959502 - RNA, 21 nt, Human
aacuuggaaauucaucuggug

SEQ ID NO: 959503 - RNA, 20 nt, Human
aagcagagguaaaaugaagg

SEQ ID NO: 959504 - RNA, 20 nt, Human
aaggaaaguaaaucaaaccc

SEQ ID NO: 959505 - RNA, 21 nt, Human
aaggagaaaacgaaacaaaac

SEQ ID NO: 959506 - RNA, 21 nt, Human
aagucagagaggagagaaggc

SEQ ID NO: 959507 - RNA, 26 nt, Human
aaucaccugcauuaaauaacauuuaa

SEQ ID NO: 959508 - RNA, 22 nt, Human
acaaacaagaacaggugaagcc

SEQ ID NO: 959509 - RNA, 21 nt, Human
acaaaguucuccacagguuug

SEQ ID NO: 959510 - RNA, 26 nt, Human
acacucaucacccaaugaaucauuuc

SEQ ID NO: 959511 - RNA, 20 nt, Human
acagucaaggcuaacaaaca

SEQ ID NO: 959512 - RNA, 21 nt, Human
accugggccaaaugaagcugg

SEQ ID NO: 959513 - RNA, 21 nt, Human
agaaaaaaaaaaaaaaaagag

SEQ ID NO: 959514 - RNA, 23 nt, Human
agaaaaaaaaaaaaaaaagagga

SEQ ID NO: 959515 - RNA, 24 nt, Human
agaaaaccccaacacucaucaccc

SEQ ID NO: 959516 - RNA, 27 nt, Human
agaaucacuugagaccaaaagaauuac

SEQ ID NO: 959517 - RNA, 22 nt, Human
agaauucacugcagugcucucc

SEQ ID NO: 959518 - RNA, 23 nt, Human
agagacaacaugaagagaaucac

SEQ ID NO: 959519 - RNA, 19 nt, Human
agccacaagagugaaacuu

SEQ ID NO: 959520 - RNA, 20 nt, Human
agccagaacuucagagaagg

SEQ ID NO: 959521 - RNA, 19 nt, Human
agcuugauuugcagaucag

SEQ ID NO: 959522 - RNA, 21 nt, Human
aggaccucugccccaagcuuc

SEQ ID NO: 959523 - RNA, 20 nt, Human
aggagaaggcaauggcggag

SEQ ID NO: 959524 - RNA, 21 nt, Human
aggcagaaaagacugacaaag

SEQ ID NO: 959525 - RNA, 21 nt, Human
agggaaaaggggguaggcagg

SEQ ID NO: 959526 - RNA, 18 nt, Human
aggggguaggcagggcau

SEQ ID NO: 959527 - RNA, 22 nt, Human
aggggguaggcagggcaugggg

SEQ ID NO: 959528 - RNA, 18 nt, Human
aguaaaaauucaaagcua

SEQ ID NO: 959529 - RNA, 24 nt, Human
auagcagucggggauuggagggca

SEQ ID NO: 959530 - RNA, 23 nt, Human
aucaaaccccccaauacgccuga

SEQ ID NO: 959531 - RNA, 20 nt, Human
aucauugaaaaacuccaccu

SEQ ID NO: 959532 - RNA, 19 nt, Human
auccgcaugaaugaaaaca

SEQ ID NO: 959533 - RNA, 18 nt, Human
augaaauguccccucccc

SEQ ID NO: 959534 - RNA, 22 nt, Human
auuccagcuuaagcuagaacaa

SEQ ID NO: 959535 - RNA, 27 nt, Human
caaaaacaaaaauuaaguuagguaguc

SEQ ID NO: 959536 - RNA, 25 nt, Human
caaaaacaaguauaagcaaaaaaua

SEQ ID NO: 959537 - RNA, 21 nt, Human
caaaacccccaagcagaggua

SEQ ID NO: 959538 - RNA, 22 nt, Human
caaaacccccaagcagagguaa

SEQ ID NO: 959539 - RNA, 18 nt, Human
caacaccagaaaaaaaaa

SEQ ID NO: 959540 - RNA, 22 nt, Human
caacaugaguauagaaaacccc

SEQ ID NO: 959541 - RNA, 23 nt, Human
caacuauaaaaacaaacuuuggu

SEQ ID NO: 959542 - RNA, 18 nt, Human
caacucgaggaccggcag

SEQ ID NO: 959543 - RNA, 21 nt, Human
caagaacaggugaagccugug

SEQ ID NO: 959544 - RNA, 19 nt, Human
caaggcuaacaaacaagaa

SEQ ID NO: 959545 - RNA, 22 nt, Human
caauacccucaaaagucagaga

SEQ ID NO: 959546 - RNA, 23 nt, Human
caaucucaccucccacccguaaa

SEQ ID NO: 959547 - RNA, 20 nt, Human
cacacaaaacccccaagcag

SEQ ID NO: 959548 - RNA, 21 nt, Human
cacacaaaacccccaagcaga

SEQ ID NO: 959549 - RNA, 19 nt, Human
cacacccgcagcaaacacu

SEQ ID NO: 959550 - RNA, 21 nt, Human
cacagucaaggcuaacaaaca

SEQ ID NO: 959551 - RNA, 18 nt, Human
cacauuauaaauaugaaa

SEQ ID NO: 959552 - RNA, 20 nt, Human
caccacagaaguacccccau

SEQ ID NO: 959553 - RNA, 24 nt, Human
caccacagaaguacccccaucuac

SEQ ID NO: 959554 - RNA, 25 nt, Human
cacuacaugaaaaccaacagcugca

SEQ ID NO: 959555 - RNA, 20 nt, Human
cacuguacauagacuugagg

SEQ ID NO: 959556 - RNA, 19 nt, Human
cagaggcagccacagcaga

SEQ ID NO: 959557 - RNA, 21 nt, Human
cagaugccucuaacacaacac

SEQ ID NO: 959558 - RNA, 19 nt, Human
cagccucugggaucgaccu

SEQ ID NO: 959559 - RNA, 18 nt, Human
caggaggaaauuuauuua

SEQ ID NO: 959560 - RNA, 22 nt, Human
cagggccugacaacaaaguucu

SEQ ID NO: 959561 - RNA, 21 nt, Human
cagugcacauagucuuccagg

SEQ ID NO: 959562 - RNA, 21 nt, Human
caguguccgcggcagccccca

SEQ ID NO: 959563 - RNA, 22 nt, Human
cauauacagguucuugaucaaa

SEQ ID NO: 959564 - RNA, 22 nt, Human
caucaccugcuugaaauggcug

SEQ ID NO: 959565 - RNA, 19 nt, Human
caugaaaaccaacagcugc

SEQ ID NO: 959566 - RNA, 24 nt, Human
caugaaaaccaacagcugcacaau

SEQ ID NO: 959567 - RNA, 20 nt, Human
ccaaacccaaaaaacuguaa

SEQ ID NO: 959568 - RNA, 21 nt, Human
ccaacacucaucacccaauga

SEQ ID NO: 959569 - RNA, 19 nt, Human
ccacccguaaaagauuacc

SEQ ID NO: 959570 - RNA, 19 nt, Human
ccacggacaccgcggccac

SEQ ID NO: 959571 - RNA, 22 nt, Human
ccagaaaaaaaaaaaaaaaaaa

SEQ ID NO: 959572 - RNA, 24 nt, Human
cccaacacucaucacccaaugaau

SEQ ID NO: 959573 - RNA, 24 nt, Human
cccauacccuggucuucaaauaaa

SEQ ID NO: 959574 - RNA, 21 nt, Human
cccucaauacccucaaaaguc

SEQ ID NO: 959575 - RNA, 22 nt, Human
ccucugccccaagcuucugggc

SEQ ID NO: 959576 - RNA, 21 nt, Human
ccugcuaggaccucugcccca

SEQ ID NO: 959577 - RNA, 18 nt, Human
ccugucaggcuucaacug

SEQ ID NO: 959578 - RNA, 18 nt, Human
ccuugucuucaaccuggg

SEQ ID NO: 959579 - RNA, 20 nt, Human
cgcucagggccugacaacaa

SEQ ID NO: 959580 - RNA, 22 nt, Human
cguggcccacggacaccgcggc

SEQ ID NO: 959581 - RNA, 24 nt, Human
cuaaagaaaugugagaaggaagcc

SEQ ID NO: 959582 - RNA, 21 nt, Human
cuaaauaagacuccaacaccc

SEQ ID NO: 959583 - RNA, 25 nt, Human
cucaaaauggacuucucaccugccc

SEQ ID NO: 959584 - RNA, 19 nt, Human
cuccaccuucaauggaaaa

SEQ ID NO: 959585 - RNA, 24 nt, Human
cuccaccuucaauggaaaaauaca

SEQ ID NO: 959586 - RNA, 18 nt, Human
cucccccaaccccauuua

SEQ ID NO: 959587 - RNA, 23 nt, Human
cucugccccaagcuucugggcaa

SEQ ID NO: 959588 - RNA, 18 nt, Human
cugaccgcagcugagcgu

SEQ ID NO: 959589 - RNA, 24 nt, Human
cugcacaauaugugaugugacaca

SEQ ID NO: 959590 - RNA, 19 nt, Human
cugcuuauuccagcuuaag

SEQ ID NO: 959591 - RNA, 18 nt, Human
cuguuccuggucaccacu

SEQ ID NO: 959592 - RNA, 23 nt, Human
cuucagugcacauagucuuccag

SEQ ID NO: 959593 - RNA, 21 nt, Human
cuugauuugcagaucagccuc

SEQ ID NO: 959594 - RNA, 21 nt, Human
cuuggaaauucaucuggugcc

SEQ ID NO: 959595 - RNA, 23 nt, Human
cuuuaaaaaaaaaaaaaaaccua

SEQ ID NO: 959596 - RNA, 21 nt, Human
gaaaacuucugaaaugaccac

SEQ ID NO: 959597 - RNA, 22 nt, Human
gaaacaaaacaaaaauaaaacc

SEQ ID NO: 959598 - RNA, 20 nt, Human
gaagccaaacccaaaaaacu

SEQ ID NO: 959599 - RNA, 18 nt, Human
gaaggcaauggcggaguc

SEQ ID NO: 959600 - RNA, 21 nt, Human
gagaaaacgaaacaaaacaaa

SEQ ID NO: 959601 - RNA, 19 nt, Human
gagaagaaauacagaaccc

SEQ ID NO: 959602 - RNA, 19 nt, Human
gagcggaauggauggugug

SEQ ID NO: 959603 - RNA, 19 nt, Human
gcacauacuuacuacuacc

SEQ ID NO: 959604 - RNA, 20 nt, Human
gcccacggacaccgcggcca

SEQ ID NO: 959605 - RNA, 23 nt, Human
gcgcucgguacucgccgucugcc

SEQ ID NO: 959606 - RNA, 21 nt, Human
gcucagcgagcggaauggaug

SEQ ID NO: 959607 - RNA, 23 nt, Human
ggaauggauggugugcacagaug

SEQ ID NO: 959608 - RNA, 26 nt, Human
ggagaguguaucccuuccugcucuuc

SEQ ID NO: 959609 - RNA, 22 nt, Human
ggagggcagagaagaaauacag

SEQ ID NO: 959610 - RNA, 18 nt, Human
gggauuagaaauguaauu

SEQ ID NO: 959611 - RNA, 25 nt, Human
ggucaagagaagagcacuguagaaa

SEQ ID NO: 959612 - RNA, 22 nt, Human
uaaaaaauacagucaaccccau

SEQ ID NO: 959613 - RNA, 23 nt, Human
uaaaacagucucauggugacuga

SEQ ID NO: 959614 - RNA, 23 nt, Human
uaaauaagacuccaacaccagaa

SEQ ID NO: 959615 - RNA, 23 nt, Human
uacauucaccucucagaauauuu

SEQ ID NO: 959616 - RNA, 25 nt, Human
uagaaaaccccaacacucaucaccc

SEQ ID NO: 959617 - RNA, 23 nt, Human
uaggaggacaaaacacaugauca

SEQ ID NO: 959618 - RNA, 21 nt, Human
uaggauguguaaguucuacug

SEQ ID NO: 959619 - RNA, 19 nt, Human
uaguauccgcaugaaugaa

SEQ ID NO: 959620 - RNA, 27 nt, Human
uauaaaaaaagaccaucaccugcuuga

SEQ ID NO: 959621 - RNA, 20 nt, Human
uauaaauaugaaaugucccc

SEQ ID NO: 959622 - RNA, 21 nt, Human
uauagaaaaccccaacacuca

SEQ ID NO: 959623 - RNA, 22 nt, Human
ucagaggagguuuucaaaaaca

SEQ ID NO: 959624 - RNA, 19 nt, Human
ucaggcuucaacugcugau

SEQ ID NO: 959625 - RNA, 23 nt, Human
uccaacaccagaaaaaaaaaaaa

SEQ ID NO: 959626 - RNA, 23 nt, Human
ucccacagagaaggccagaaaaa

SEQ ID NO: 959627 - RNA, 18 nt, Human
uccugcuaggaccucugc

SEQ ID NO: 959628 - RNA, 20 nt, Human
ucuuuaaaaaaaaaaaaaaa

SEQ ID NO: 959629 - RNA, 21 nt, Human
ugaaaacacccuggcuuuggu

SEQ ID NO: 959630 - RNA, 24 nt, Human
ugaaauguccccucccccaacccc

SEQ ID NO: 959631 - RNA, 27 nt, Human
ugaauaaaucaccugcauuaaauaaca

SEQ ID NO: 959632 - RNA, 19 nt, Human
ugagaccaaaagaauuacu

SEQ ID NO: 959633 - RNA, 21 nt, Human
ugagcguggcccacggacacc

SEQ ID NO: 959634 - RNA, 20 nt, Human
ugaggcagaugccucuaacc

SEQ ID NO: 959635 - RNA, 19 nt, Human
ugauuugcagaucagccuc

SEQ ID NO: 959636 - RNA, 18 nt, Human
ugccccaagcuucugggc

SEQ ID NO: 959637 - RNA, 18 nt, Human
ugcggaaccccagugguu

SEQ ID NO: 959638 - RNA, 24 nt, Human
ugcugauuuuucaccucuggggug

SEQ ID NO: 959639 - RNA, 19 nt, Human
ugcuuauuccagcuuaagc

SEQ ID NO: 959640 - RNA, 22 nt, Human
ugcuucacaaaagcagaggucc

SEQ ID NO: 959641 - RNA, 23 nt, Human
uggaagaaguugaggcagaaaag

SEQ ID NO: 959642 - RNA, 25 nt, Human
uggcccacggacaccgcggccaccc

SEQ ID NO: 959643 - RNA, 18 nt, Human
uggcuacagaaauccauc

SEQ ID NO: 959644 - RNA, 26 nt, Human
uggcuacagaaauccaucuggaaauu

SEQ ID NO: 959645 - RNA, 19 nt, Human
ugggauuagaaauguaauu

SEQ ID NO: 959646 - RNA, 18 nt, Human
uggucaccacugaggccu

SEQ ID NO: 959647 - RNA, 19 nt, Human
uggucaccacugaggccug

SEQ ID NO: 959648 - RNA, 18 nt, Human
ugugagaaggaagccaaa

SEQ ID NO: 959649 - RNA, 19 nt, Human
uuacacaaagcauuuauuu

SEQ ID NO: 959650 - RNA, 22 nt, Human
uuacuacuaccuacuugggaac

SEQ ID NO: 959651 - RNA, 22 nt, Human
uuacuaugcugauucucaaaau

SEQ ID NO: 959652 - RNA, 22 nt, Human
uucacaaaagcagaggucccac

SEQ ID NO: 959653 - RNA, 19 nt, Human
uucaccucucagaauauuu

SEQ ID NO: 959654 - RNA, 23 nt, Human
uuccuggucaccacugaggccug

SEQ ID NO: 959655 - RNA, 18 nt, Human
uugaauaaaucaccugca

SEQ ID NO: 959656 - RNA, 24 nt, Human
uuugaaaguuuauuguuuucuuua

SEQ ID NO: 959657 - RNA, 18 nt, Human
uuugaacaucucaagaug

SEQ ID NO: 959658 - RNA, 21 nt, Human
aaauaagcccauuccaaaauc

SEQ ID NO: 959659 - RNA, 21 nt, Human
aagaagaaaauuagucacaaa

SEQ ID NO: 959660 - RNA, 20 nt, Human
aaggcagaggaaaccaugug

SEQ ID NO: 959661 - RNA, 20 nt, Human
aaucacaaacuccaccuaca

SEQ ID NO: 959662 - RNA, 18 nt, Human
accacuauaaaaaaguca

SEQ ID NO: 959663 - RNA, 21 nt, Human
accacuauaaaaaagucagaa

SEQ ID NO: 959664 - RNA, 24 nt, Human
acuacacugcaaauacuuaaagca

SEQ ID NO: 959665 - RNA, 24 nt, Human
agaauugacaaucuuaaaacaauc

SEQ ID NO: 959666 - RNA, 21 nt, Human
agacaacacugauauuucaca

SEQ ID NO: 959667 - RNA, 19 nt, Human
agauagauaguuaggucag

SEQ ID NO: 959668 - RNA, 25 nt, Human
agaucucuuucacugucauaauuuc

SEQ ID NO: 959669 - RNA, 20 nt, Human
agcaauaaaaauguuuccaa

SEQ ID NO: 959670 - RNA, 19 nt, Human
agcagucauuauuccuuug

SEQ ID NO: 959671 - RNA, 18 nt, Human
agcaucaauuuucuuuau

SEQ ID NO: 959672 - RNA, 21 nt, Human
aggauuacaguacuuggauaa

SEQ ID NO: 959673 - RNA, 18 nt, Human
aggcaggagaaucguuua

SEQ ID NO: 959674 - RNA, 24 nt, Human
aggcaggagaaucguuuaguuuug

SEQ ID NO: 959675 - RNA, 20 nt, Human
aggcugaggcaggagaaucg

SEQ ID NO: 959676 - RNA, 20 nt, Human
aggcugaggcaggagaaucg

SEQ ID NO: 959677 - RNA, 18 nt, Human
agucacaaaggcagagga

SEQ ID NO: 959678 - RNA, 19 nt, Human
aguuccauuuaaauaaugg

SEQ ID NO: 959679 - RNA, 24 nt, Human
auaaauauaccuucaaaauaagcu

SEQ ID NO: 959680 - RNA, 18 nt, Human
auacaugcccuucauaca

SEQ ID NO: 959681 - RNA, 24 nt, Human
auagugaaaucaaaauaaaaacca

SEQ ID NO: 959682 - RNA, 21 nt, Human
aucaacucauuucagcaaaau

SEQ ID NO: 959683 - RNA, 21 nt, Human
aucuuuccaauucauaaauuc

SEQ ID NO: 959684 - RNA, 19 nt, Human
auuauucccccuuguaauc

SEQ ID NO: 959685 - RNA, 21 nt, Human
caaacuccaccuacaaagaag

SEQ ID NO: 959686 - RNA, 24 nt, Human
caaaguuagcuuggcccacacuca

SEQ ID NO: 959687 - RNA, 21 nt, Human
caaauacuuaaagcaggacuc

SEQ ID NO: 959688 - RNA, 23 nt, Human
caagacgaaguaaaauuaauaga

SEQ ID NO: 959689 - RNA, 21 nt, Human
caccaugugagcaaguagaau

SEQ ID NO: 959690 - RNA, 21 nt, Human
cacuagagaggaagaucaaag

SEQ ID NO: 959691 - RNA, 22 nt, Human
cagcauuauuuuucuauccccc

SEQ ID NO: 959692 - RNA, 24 nt, Human
cagcuacucgggaggcugaggcag

SEQ ID NO: 959693 - RNA, 21 nt, Human
caguagaaaaaaaaaucugaa

SEQ ID NO: 959694 - RNA, 24 nt, Human
cauaaaacucacacacaguuacac

SEQ ID NO: 959695 - RNA, 20 nt, Human
ccaaaaguuaacuuucaaau

SEQ ID NO: 959696 - RNA, 26 nt, Human
cccacacucaggaacgaccaagggca

SEQ ID NO: 959697 - RNA, 18 nt, Human
cccugggcgaucggaccu

SEQ ID NO: 959698 - RNA, 24 nt, Human
ccucuagaaaccaauuuuuaaucc

SEQ ID NO: 959699 - RNA, 25 nt, Human
ccuucuauuuauacucuuaaaaacc

SEQ ID NO: 959700 - RNA, 22 nt, Human
cggugcugcuccuccccugggc

SEQ ID NO: 959701 - RNA, 25 nt, Human
cucccuucuauuuauacucuuaaaa

SEQ ID NO: 959702 - RNA, 22 nt, Human
cugcuccuccccugggcgaucg

SEQ ID NO: 959703 - RNA, 24 nt, Human
cuucaaaauaagcaagcaauaaaa

SEQ ID NO: 959704 - RNA, 18 nt, Human
cuuuucuuuuccugacuu

SEQ ID NO: 959705 - RNA, 21 nt, Human
gacuggcuucccuuguggggc

SEQ ID NO: 959706 - RNA, 28 nt, Human
gacuggcuucccuuguggggcgccccgg

SEQ ID NO: 959707 - RNA, 21 nt, Human
gagaugaacuuaugucacugu

SEQ ID NO: 959708 - RNA, 20 nt, Human
gagcuaaaacgccaaccuug

SEQ ID NO: 959709 - RNA, 24 nt, Human
gaggcaagauagauaguuagguca

SEQ ID NO: 959710 - RNA, 20 nt, Human
gcaaguagaaugaauaucaa

SEQ ID NO: 959711 - RNA, 20 nt, Human
gcccacacucaggaacgacc

SEQ ID NO: 959712 - RNA, 18 nt, Human
gcccagccgacgcggggu

SEQ ID NO: 959713 - RNA, 18 nt, Human
gcgcccagccgacgcggg

SEQ ID NO: 959714 - RNA, 18 nt, Human
ggcauauggguuggggaa

SEQ ID NO: 959715 - RNA, 20 nt, Human
gggcaguuucgaggcaagau

SEQ ID NO: 959716 - RNA, 19 nt, Human
ggggaagauaaaauaaauu

SEQ ID NO: 959717 - RNA, 21 nt, Human
gguauuauaaagacagcuacu

SEQ ID NO: 959718 - RNA, 19 nt, Human
guaaaacaggaauaaucug

SEQ ID NO: 959719 - RNA, 18 nt, Human
guaguccagcuggugaaa

SEQ ID NO: 959720 - RNA, 21 nt, Human
gugaaagaucaacucauuuca

SEQ ID NO: 959721 - RNA, 23 nt, Human
guuucuuuucuuuuccugacuuc

SEQ ID NO: 959722 - RNA, 24 nt, Human
uaaaaaccacuauaaaaaagucag

SEQ ID NO: 959723 - RNA, 19 nt, Human
uaaaacaggaauaaucugc

SEQ ID NO: 959724 - RNA, 24 nt, Human
uaaaacucacacacaguuacacaa

SEQ ID NO: 959725 - RNA, 23 nt, Human
uaaaggaaauucauccuuuaggg

SEQ ID NO: 959726 - RNA, 19 nt, Human
uaaagucauaaauaauaaa

SEQ ID NO: 959727 - RNA, 24 nt, Human
uaagacucacgcagucuuucuaaa

SEQ ID NO: 959728 - RNA, 25 nt, Human
uaauauauacauuuucauggaagua

SEQ ID NO: 959729 - RNA, 21 nt, Human
uagcaucaauuuucuuuaugg

SEQ ID NO: 959730 - RNA, 21 nt, Human
uaggaaacaauccauacauga

SEQ ID NO: 959731 - RNA, 23 nt, Human
uaguccagcuggugaaagaucaa

SEQ ID NO: 959732 - RNA, 21 nt, Human
uaugcccuaaauguuaacaga

SEQ ID NO: 959733 - RNA, 21 nt, Human
uauucacugcaaucacaaacu

SEQ ID NO: 959734 - RNA, 25 nt, Human
ucacuguacgaucuuuccuaucauc

SEQ ID NO: 959735 - RNA, 22 nt, Human
ucaguuaaauaagcccauucca

SEQ ID NO: 959736 - RNA, 21 nt, Human
ucaugagaaggcaccugguuu

SEQ ID NO: 959737 - RNA, 21 nt, Human
ucauguaugaauuucagaccc

SEQ ID NO: 959738 - RNA, 24 nt, Human
ucauucauacacauauacacucuc

SEQ ID NO: 959739 - RNA, 26 nt, Human
uccacaaaauaacacaggcagucauu

SEQ ID NO: 959740 - RNA, 19 nt, Human
uccaccuacaaagaaggca

SEQ ID NO: 959741 - RNA, 20 nt, Human
uccagcaugaugaaugaggu

SEQ ID NO: 959742 - RNA, 19 nt, Human
ucccaaaguuagcuuggcc

SEQ ID NO: 959743 - RNA, 19 nt, Human
ucccagaacuaagaagaac

SEQ ID NO: 959744 - RNA, 19 nt, Human
ucccaguagaaaaaaaaau

SEQ ID NO: 959745 - RNA, 24 nt, Human
ucccggugcugcuccuccccuggg

SEQ ID NO: 959746 - RNA, 24 nt, Human
ucgggaggcugaggcaggagaauc

SEQ ID NO: 959747 - RNA, 22 nt, Human
ucugaaaugucaucuucuugca

SEQ ID NO: 959748 - RNA, 22 nt, Human
ucugcucuuucuccugcccccc

SEQ ID NO: 959749 - RNA, 18 nt, Human
ucuggccaagacgaagua

SEQ ID NO: 959750 - RNA, 20 nt, Human
ucuuuccaauucauaaauuc

SEQ ID NO: 959751 - RNA, 20 nt, Human
ugaaaucaaaauaaaaacca

SEQ ID NO: 959752 - RNA, 22 nt, Human
ugaaaucaaaauaaaaaccaac

SEQ ID NO: 959753 - RNA, 19 nt, Human
ugaggcaggagaaucguuu

SEQ ID NO: 959754 - RNA, 19 nt, Human
ugaguauagugaaaucaaa

SEQ ID NO: 959755 - RNA, 22 nt, Human
ugcucauucauacauauacaug

SEQ ID NO: 959756 - RNA, 19 nt, Human
uggcaaaaauagagagaag

SEQ ID NO: 959757 - RNA, 27 nt, Human
uguaaaacaggaauaaucugcuucuga

SEQ ID NO: 959758 - RNA, 23 nt, Human
ugucaucuucuugcaaagccauu

SEQ ID NO: 959759 - RNA, 21 nt, Human
ugugcguuuguguguacaggu

SEQ ID NO: 959760 - RNA, 24 nt, Human
uguucuuuccugacuguaugucug

SEQ ID NO: 959761 - RNA, 21 nt, Human
uguugcugguauaagguaacu

SEQ ID NO: 959762 - RNA, 21 nt, Human
uuagcagggaaguuugucuga

SEQ ID NO: 959763 - RNA, 23 nt, Human
uuauuuggaauaaaacugaacua

SEQ ID NO: 959764 - RNA, 23 nt, Human
uucacugagaaguguuuuuuuuu

SEQ ID NO: 959765 - RNA, 18 nt, Human
uuccauguucaaaaauga

SEQ ID NO: 959766 - RNA, 19 nt, Human
uuccauguucaaaaaugag

SEQ ID NO: 959767 - RNA, 23 nt, Human
uugcugguauaagguaacuaugc

SEQ ID NO: 959768 - RNA, 24 nt, Human
uugggcuguguuucagagaauaaa

SEQ ID NO: 959769 - RNA, 19 nt, Human
uuuucuauccccccaauau

SEQ ID NO: 959770 - RNA, 19 nt, Human
uuuuuagcagggaaguuug

SEQ ID NO: 959771 - RNA, 22 nt, Human
aaauucauuccuuauuuggaau

SEQ ID NO: 959772 - RNA, 25 nt, Human
aacauugucuuggcuuuuuuuuuuu

SEQ ID NO: 959773 - RNA, 18 nt, Human
aaggacacaugucuccuc

SEQ ID NO: 959774 - RNA, 21 nt, Human
aaguauguaauaaaaacauug

SEQ ID NO: 959775 - RNA, 20 nt, Human
aauacauaacuuggagacuu

SEQ ID NO: 959776 - RNA, 27 nt, Human
aauuauuuucuaauggaucuguucuau

SEQ ID NO: 959777 - RNA, 21 nt, Human
acaaaaggcuaauacauagua

SEQ ID NO: 959778 - RNA, 22 nt, Human
caaaauacaagaucagaaggua

SEQ ID NO: 959779 - RNA, 20 nt, Human
caaagaacccaaagaauucu

SEQ ID NO: 959780 - RNA, 21 nt, Human
caugucuccucucauacaaaa

SEQ ID NO: 959781 - RNA, 21 nt, Human
cuacuggaucacuuccaugau

SEQ ID NO: 959782 - RNA, 24 nt, Human
cucucauacaaaaacccuuuucau

SEQ ID NO: 959783 - RNA, 23 nt, Human
cuuuuuuuuuuuuaaagagacca

SEQ ID NO: 959784 - RNA, 20 nt, Human
gaguucuagcauaugcagau

SEQ ID NO: 959785 - RNA, 18 nt, Human
ggggaguccaggaggagg

SEQ ID NO: 959786 - RNA, 22 nt, Human
gguggggggaguccaggaggag

SEQ ID NO: 959787 - RNA, 18 nt, Human
gguguaagaauuggugga

SEQ ID NO: 959788 - RNA, 22 nt, Human
gucuccucucauacaaaaaccc

SEQ ID NO: 959789 - RNA, 22 nt, Human
uaaaacaaaguccucuaaguua

SEQ ID NO: 959790 - RNA, 22 nt, Human
uaacaggugggagacugggugg

SEQ ID NO: 959791 - RNA, 20 nt, Human
uaaguuuucagaccuauuca

SEQ ID NO: 959792 - RNA, 21 nt, Human
uacaaagaacccaaagaauuc

SEQ ID NO: 959793 - RNA, 21 nt, Human
uacaccauuaucauuaaaacc

SEQ ID NO: 959794 - RNA, 22 nt, Human
uacaccauuaucauuaaaaccc

SEQ ID NO: 959795 - RNA, 21 nt, Human
uacugggggccugagauucac

SEQ ID NO: 959796 - RNA, 22 nt, Human
uacuguaauagugcugcucaaa

SEQ ID NO: 959797 - RNA, 23 nt, Human
uagauaauacuaaugaaacacag

SEQ ID NO: 959798 - RNA, 23 nt, Human
uauguaauauuauaauacauaac

SEQ ID NO: 959799 - RNA, 24 nt, Human
uauucaguuuugaaaacauucauu

SEQ ID NO: 959800 - RNA, 22 nt, Human
ucaaaauacaagaucagaaggu

SEQ ID NO: 959801 - RNA, 25 nt, Human
ucaaaguagguacaggguaguggcc

SEQ ID NO: 959802 - RNA, 25 nt, Human
ucacaucuucuacaacuacuggauc

SEQ ID NO: 959803 - RNA, 19 nt, Human
ucaguuuugaaaacauuca

SEQ ID NO: 959804 - RNA, 23 nt, Human
uccaugaucaaaaggaccggggc

SEQ ID NO: 959805 - RNA, 29 nt, Human
uccucucauacaaaaacccuuuucaucag

SEQ ID NO: 959806 - RNA, 18 nt, Human
ugaaacacagguagaguu

SEQ ID NO: 959807 - RNA, 20 nt, Human
ugaaguaaaaugcaaacauc

SEQ ID NO: 959808 - RNA, 19 nt, Human
ugaguaggagcaauuacug

SEQ ID NO: 959809 - RNA, 21 nt, Human
ugcauaaggacucauguaaag

SEQ ID NO: 959810 - RNA, 25 nt, Human
ugcugggaaaggcagcauaccagga

SEQ ID NO: 959811 - RNA, 18 nt, Human
uggagguggggggagucc

SEQ ID NO: 959812 - RNA, 19 nt, Human
uggagguggggggagucca

SEQ ID NO: 959813 - RNA, 19 nt, Human
uggcauggguggucuuacg

SEQ ID NO: 959814 - RNA, 22 nt, Human
uggcggugguacugggggccug

SEQ ID NO: 959815 - RNA, 22 nt, Human
uggcuuuuuuuuuuuuuuuuuu

SEQ ID NO: 959816 - RNA, 25 nt, Human
ugggggccugagauucacagguggg

SEQ ID NO: 959817 - RNA, 22 nt, Human
uggggggaguccaggaggaggu

SEQ ID NO: 959818 - RNA, 24 nt, Human
uggggguguaagaauugguggagg

SEQ ID NO: 959819 - RNA, 27 nt, Human
uguaauagugcugcucaaaguagguac

SEQ ID NO: 959820 - RNA, 24 nt, Human
uucgguaguguuguuuccaugaug

SEQ ID NO: 959821 - RNA, 25 nt, Human
uuuggaauaaaacaaaguccucuaa

SEQ ID NO: 959822 - RNA, 22 nt, Human
uuugucauugcuuuucucuuuu

SEQ ID NO: 959823 - RNA, 21 nt, Human
uuuuugucauugcuuuucucu

SEQ ID NO: 959824 - RNA, 21 nt, Human
uuuuuugucauugcuuuucuc

SEQ ID NO: 959825 - RNA, 23 nt, Human
uuuuuuuuugucauugcuuuucu

SEQ ID NO: 959826 - RNA, 18 nt, Human
uuuuuuuuuuuuuuuuug

SEQ ID NO: 959827 - RNA, 21 nt, Human
uuuuuuuuuuuuuuuuuuguc

SEQ ID NO: 959828 - RNA, 21 nt, Human
aagccgcaaacgcuccggaau

SEQ ID NO: 959829 - RNA, 21 nt, Human
cagaucccaggaggggcggga

SEQ ID NO: 959830 - RNA, 22 nt, Human
cagcuccggcuccgggccgcug

SEQ ID NO: 959831 - RNA, 20 nt, Human
ccacagaucccaggaggggc

SEQ ID NO: 959832 - RNA, 22 nt, Human
cccacagaucccaggaggggcg

SEQ ID NO: 959833 - RNA, 22 nt, Human
ccccccacuggaugccgucucc

SEQ ID NO: 959834 - RNA, 21 nt, Human
ccgcugcgggcuccccagcuc

SEQ ID NO: 959835 - RNA, 25 nt, Human
cuccccagcuccccacagaucccag

SEQ ID NO: 959836 - RNA, 20 nt, Human
gcgaagccgcaaacgcuccu

SEQ ID NO: 959837 - RNA, 25 nt, Human
ggccaugaagcgaagccgcaaacgc

SEQ ID NO: 959838 - RNA, 19 nt, Human
ggcugagaggcucgccccc

SEQ ID NO: 959839 - RNA, 22 nt, Human
ucccaggaggggcgggagagcg

SEQ ID NO: 959840 - RNA, 22 nt, Human
uccccagcuccccacagauccc

SEQ ID NO: 959841 - RNA, 21 nt, Human
uccgcucggcucgccagcucc

SEQ ID NO: 959842 - RNA, 21 nt, Human
ugaagcgaagccgcaaacgcu

SEQ ID NO: 959843 - RNA, 19 nt, Human
aaaaagaacagaucuucag

SEQ ID NO: 959844 - RNA, 20 nt, Human
aaacacaaaugugguccaaa

SEQ ID NO: 959845 - RNA, 21 nt, Human
aaacacguguugcauguccuu

SEQ ID NO: 959846 - RNA, 27 nt, Human
aaacaguucuauaaacaucucugggca

SEQ ID NO: 959847 - RNA, 20 nt, Human
aaagaagcaggacuccuaca

SEQ ID NO: 959848 - RNA, 20 nt, Human
aaauaacaaauuuaggaagg

SEQ ID NO: 959849 - RNA, 22 nt, Human
aacacgaugcaaacugcauacu

SEQ ID NO: 959850 - RNA, 19 nt, Human
aaccucugaauccucagag

SEQ ID NO: 959851 - RNA, 23 nt, Human
aagaacccccccacccaaggcac

SEQ ID NO: 959852 - RNA, 23 nt, Human
aagaacccccccacccaaguuca

SEQ ID NO: 959853 - RNA, 18 nt, Human
aagauuccuucauuacuc

SEQ ID NO: 959854 - RNA, 21 nt, Human
aagcagcacagacgcgcuacu

SEQ ID NO: 959855 - RNA, 19 nt, Human
aagcgagcuggcagcuucc

SEQ ID NO: 959856 - RNA, 22 nt, Human
aagggccuguaccagauagagc

SEQ ID NO: 959857 - RNA, 24 nt, Human
aaugcaacagcaacccucucacac

SEQ ID NO: 959858 - RNA, 21 nt, Human
aauucauucacuaauggacaa

SEQ ID NO: 959859 - RNA, 18 nt, Human
aauugguacagaaacuac

SEQ ID NO: 959860 - RNA, 22 nt, Human
acaaagaagcaggacuccuaca

SEQ ID NO: 959861 - RNA, 21 nt, Human
acacacacgcaugaguccaca

SEQ ID NO: 959862 - RNA, 31 nt, Human
acacagcacaugcacacacacacacgcaugg

SEQ ID NO: 959863 - RNA, 30 nt, Human
acacaugcacacacacagcacaugcacaca

SEQ ID NO: 959864 - RNA, 21 nt, Human
acagaaaaauccugcucuaaa

SEQ ID NO: 959865 - RNA, 23 nt, Human
accccguccccccagcaccccca

SEQ ID NO: 959866 - RNA, 23 nt, Human
acccucucacaccugucuuguug

SEQ ID NO: 959867 - RNA, 19 nt, Human
acugcauacucaaaccaua

SEQ ID NO: 959868 - RNA, 24 nt, Human
agacauaauagagggagaaucaaa

SEQ ID NO: 959869 - RNA, 21 nt, Human
agagaaagagaaagagaaagc

SEQ ID NO: 959870 - RNA, 18 nt, Human
agagccccuccugagccc

SEQ ID NO: 959871 - RNA, 18 nt, Human
agagccccuccugagccc

SEQ ID NO: 959872 - RNA, 20 nt, Human
agcaaacacaaauguggucc

SEQ ID NO: 959873 - RNA, 21 nt, Human
agcacagacgcgcuacuaacc

SEQ ID NO: 959874 - RNA, 25 nt, Human
agcauuuucuuggcagcugucagca

SEQ ID NO: 959875 - RNA, 18 nt, Human
agccccuccugagccccc

SEQ ID NO: 959876 - RNA, 20 nt, Human
agcccuaccuacuaacccua

SEQ ID NO: 959877 - RNA, 20 nt, Human
agcccuaccuacuaacccua

SEQ ID NO: 959878 - RNA, 20 nt, Human
agcccuaccuacuaacccua

SEQ ID NO: 959879 - RNA, 20 nt, Human
agcccuaccuacuaacccua

SEQ ID NO: 959880 - RNA, 20 nt, Human
agcccuaccuacuaacccua

SEQ ID NO: 959881 - RNA, 20 nt, Human
agcccuaccuacuaacccua

SEQ ID NO: 959882 - RNA, 20 nt, Human
agcccuaccuacuaacccua

SEQ ID NO: 959883 - RNA, 20 nt, Human
agcccuaccuacuaacccua

SEQ ID NO: 959884 - RNA, 26 nt, Human
agcuacuaauaaaaccccauggacag

SEQ ID NO: 959885 - RNA, 19 nt, Human
agcuauuugcuaucuagag

SEQ ID NO: 959886 - RNA, 21 nt, Human
agcuauuugcuaucuagaggu

SEQ ID NO: 959887 - RNA, 18 nt, Human
aggaggggcggccguccc

SEQ ID NO: 959888 - RNA, 23 nt, Human
aggcagcuugggggaagcgagcu

SEQ ID NO: 959889 - RNA, 22 nt, Human
aggcaggugaucacagcacagg

SEQ ID NO: 959890 - RNA, 23 nt, Human
agggggaaggggcgcggcgacgg

SEQ ID NO: 959891 - RNA, 18 nt, Human
agggggcaggggauggcu

SEQ ID NO: 959892 - RNA, 20 nt, Human
agguaguuuugggaucaaac

SEQ ID NO: 959893 - RNA, 21 nt, Human
augcacacaugcacacacaca

SEQ ID NO: 959894 - RNA, 20 nt, Human
augccacacgccacccugaa

SEQ ID NO: 959895 - RNA, 21 nt, Human
auggcagcauuuuccuggagu

SEQ ID NO: 959896 - RNA, 20 nt, Human
augucacaggaauucauuca

SEQ ID NO: 959897 - RNA, 21 nt, Human
caaaaucgccaucugagacac

SEQ ID NO: 959898 - RNA, 22 nt, Human
caaacauacaaaacugaauauc

SEQ ID NO: 959899 - RNA, 23 nt, Human
caaccucugaauccucagaggau

SEQ ID NO: 959900 - RNA, 24 nt, Human
caaugcaacagcaacccucucaca

SEQ ID NO: 959901 - RNA, 25 nt, Human
cacacacagcacaugcacacacaca

SEQ ID NO: 959902 - RNA, 19 nt, Human
cacagaccaucuugacugg

SEQ ID NO: 959903 - RNA, 23 nt, Human
cacccacacagugccuucagagc

SEQ ID NO: 959904 - RNA, 22 nt, Human
caccccguccccccagcacccc

SEQ ID NO: 959905 - RNA, 27 nt, Human
cacucaccccguccccccagcaccccc

SEQ ID NO: 959906 - RNA, 19 nt, Human
cagaguuaaaacuaccugc

SEQ ID NO: 959907 - RNA, 22 nt, Human
cagcaacccucucacaccuguc

SEQ ID NO: 959908 - RNA, 21 nt, Human
cagcagcguuuuaaaagagug

SEQ ID NO: 959909 - RNA, 22 nt, Human
cagccacuagggcugacccgac

SEQ ID NO: 959910 - RNA, 18 nt, Human
caggcuuuaaaaucagga

SEQ ID NO: 959911 - RNA, 23 nt, Human
caugaaaaacacggccucugcug

SEQ ID NO: 959912 - RNA, 21 nt, Human
caugcacacacacagcacaug

SEQ ID NO: 959913 - RNA, 22 nt, Human
ccacacagcucuccagucacgc

SEQ ID NO: 959914 - RNA, 21 nt, Human
cccacacagugccuucagagc

SEQ ID NO: 959915 - RNA, 27 nt, Human
ccccaccgucaugcacacaugcacaca

SEQ ID NO: 959916 - RNA, 18 nt, Human
ccccagcacccccaccgu

SEQ ID NO: 959917 - RNA, 23 nt, Human
ccccagcacccccaccgucaugc

SEQ ID NO: 959918 - RNA, 19 nt, Human
cccccacccaaguucacau

SEQ ID NO: 959919 - RNA, 22 nt, Human
cccccagcacccccaccgucau

SEQ ID NO: 959920 - RNA, 22 nt, Human
ccccguccccccagcaccccca

SEQ ID NO: 959921 - RNA, 20 nt, Human
cccuaccuacgaacccuacc

SEQ ID NO: 959922 - RNA, 20 nt, Human
cccuaccuacgaacccuacc

SEQ ID NO: 959923 - RNA, 20 nt, Human
cccuaccuacgaacccuacc

SEQ ID NO: 959924 - RNA, 20 nt, Human
cccuaccuacgaacccuacc

SEQ ID NO: 959925 - RNA, 20 nt, Human
cccuaccuacgaacccuacc

SEQ ID NO: 959926 - RNA, 20 nt, Human
cccuaccuacgaacccuacc

SEQ ID NO: 959927 - RNA, 20 nt, Human
cccuaccuacgaacccuacc

SEQ ID NO: 959928 - RNA, 20 nt, Human
cccuaccuacgaacccuacc

SEQ ID NO: 959929 - RNA, 20 nt, Human
cccuaccuacgaacccuacc

SEQ ID NO: 959930 - RNA, 20 nt, Human
cccuaccuacgaacccuacc

SEQ ID NO: 959931 - RNA, 22 nt, Human
cccuaccuacuaacccuaccua

SEQ ID NO: 959932 - RNA, 22 nt, Human
cccuaccuacuaacccuaccua

SEQ ID NO: 959933 - RNA, 22 nt, Human
cccuaccuacuaacccuaccua

SEQ ID NO: 959934 - RNA, 22 nt, Human
cccuaccuacuaacccuaccua

SEQ ID NO: 959935 - RNA, 22 nt, Human
cccuaccuacuaacccuaccua

SEQ ID NO: 959936 - RNA, 22 nt, Human
cccuaccuacuaacccuaccua

SEQ ID NO: 959937 - RNA, 22 nt, Human
cccuaccuacuaacccuaccua

SEQ ID NO: 959938 - RNA, 22 nt, Human
cccuaccuacuaacccuaccua

SEQ ID NO: 959939 - RNA, 22 nt, Human
cccuaccuacuaacccuaccua

SEQ ID NO: 959940 - RNA, 22 nt, Human
cccuaccuacuaacccuaccua

SEQ ID NO: 959941 - RNA, 24 nt, Human
cccuccugagcccccggccccacu

SEQ ID NO: 959942 - RNA, 18 nt, Human
ccguccccucugcacacu

SEQ ID NO: 959943 - RNA, 19 nt, Human
ccuaccgcgcuuuccggaa

SEQ ID NO: 959944 - RNA, 19 nt, Human
ccuaccuacgaacccuacc

SEQ ID NO: 959945 - RNA, 19 nt, Human
ccuaccuacgaacccuacc

SEQ ID NO: 959946 - RNA, 19 nt, Human
ccuaccuacgaacccuacc

SEQ ID NO: 959947 - RNA, 19 nt, Human
ccuaccuacgaacccuacc

SEQ ID NO: 959948 - RNA, 19 nt, Human
ccuaccuacgaacccuacc

SEQ ID NO: 959949 - RNA, 19 nt, Human
ccuaccuacgaacccuacc

SEQ ID NO: 959950 - RNA, 19 nt, Human
ccuaccuacgaacccuacc

SEQ ID NO: 959951 - RNA, 19 nt, Human
ccuaccuacgaacccuacc

SEQ ID NO: 959952 - RNA, 19 nt, Human
ccuaccuacgaacccuacc

SEQ ID NO: 959953 - RNA, 19 nt, Human
ccuaccuacgaacccuacc

SEQ ID NO: 959954 - RNA, 27 nt, Human
ccuacgaacccuaccgcgcuuuccgga

SEQ ID NO: 959955 - RNA, 21 nt, Human
ccuacgaacccuaccuacgaa

SEQ ID NO: 959956 - RNA, 21 nt, Human
ccuacgaacccuaccuacgaa

SEQ ID NO: 959957 - RNA, 25 nt, Human
ccuacgaacccuaccuacgaacccu

SEQ ID NO: 959958 - RNA, 25 nt, Human
ccuacgaacccuaccuacgaacccu

SEQ ID NO: 959959 - RNA, 25 nt, Human
ccucaagggcuggcccuaaguccac

SEQ ID NO: 959960 - RNA, 18 nt, Human
cgggaagaacccccccac

SEQ ID NO: 959961 - RNA, 21 nt, Human
cgggaagaacccccccaccca

SEQ ID NO: 959962 - RNA, 21 nt, Human
cgggccugggacacggggugg

SEQ ID NO: 959963 - RNA, 19 nt, Human
cggucccucccccgcccuc

SEQ ID NO: 959964 - RNA, 26 nt, Human
cgucaugcacacaugcacacacacag

SEQ ID NO: 959965 - RNA, 23 nt, Human
cuaacccuaccuaccagcccuac

SEQ ID NO: 959966 - RNA, 23 nt, Human
cuaacccuaccuaccagcccuac

SEQ ID NO: 959967 - RNA, 23 nt, Human
cuaacccuaccuaccagcccuac

SEQ ID NO: 959968 - RNA, 23 nt, Human
cuaacccuaccuaccagcccuac

SEQ ID NO: 959969 - RNA, 18 nt, Human
cuaccuacuaacccuacc

SEQ ID NO: 959970 - RNA, 18 nt, Human
cuaccuacuaacccuacc

SEQ ID NO: 959971 - RNA, 19 nt, Human
cucaaaccauagcugcccc

SEQ ID NO: 959972 - RNA, 20 nt, Human
cucccccgcccuccugaucc

SEQ ID NO: 959973 - RNA, 18 nt, Human
cuggaacugucugggcuc

SEQ ID NO: 959974 - RNA, 24 nt, Human
cuggagucaccaggagucccugag

SEQ ID NO: 959975 - RNA, 22 nt, Human
gaaaaacacggccucugcugca

SEQ ID NO: 959976 - RNA, 19 nt, Human
gaacccuaccgcgcuuucc

SEQ ID NO: 959977 - RNA, 21 nt, Human
gaacccuaccuacuaacccua

SEQ ID NO: 959978 - RNA, 21 nt, Human
gaacccuaccuacuaacccua

SEQ ID NO: 959979 - RNA, 21 nt, Human
gaacccuaccuacuaacccua

SEQ ID NO: 959980 - RNA, 21 nt, Human
gaacccuaccuacuaacccua

SEQ ID NO: 959981 - RNA, 20 nt, Human
gagaaagagaaagagaaagg

SEQ ID NO: 959982 - RNA, 23 nt, Human
gagccuccagagggcacagagga

SEQ ID NO: 959983 - RNA, 21 nt, Human
gagcggagcugagacggcaca

SEQ ID NO: 959984 - RNA, 22 nt, Human
gaggcagcuugggggaagcgag

SEQ ID NO: 959985 - RNA, 20 nt, Human
gaggggccaucucuggagga

SEQ ID NO: 959986 - RNA, 21 nt, Human
gcaacagcaacccucucacac

SEQ ID NO: 959987 - RNA, 22 nt, Human
gcaacccucucacaccugucuu

SEQ ID NO: 959988 - RNA, 19 nt, Human
gcacacacacagcacaugc

SEQ ID NO: 959989 - RNA, 22 nt, Human
gcacaugcacacacacacacgg

SEQ ID NO: 959990 - RNA, 18 nt, Human
gcagcacccacacagugc

SEQ ID NO: 959991 - RNA, 18 nt, Human
gcagcugcuguccgagga

SEQ ID NO: 959992 - RNA, 19 nt, Human
gcagcuugggggaagcgag

SEQ ID NO: 959993 - RNA, 18 nt, Human
gccaugaggcagcuuggg

SEQ ID NO: 959994 - RNA, 22 nt, Human
gccccacugcagacagugggug

SEQ ID NO: 959995 - RNA, 23 nt, Human
gcuacuaauaaaaccccauggac

SEQ ID NO: 959996 - RNA, 23 nt, Human
gcucggucccucccccgcccucc

SEQ ID NO: 959997 - RNA, 24 nt, Human
ggaggaugucacaggaauucauuc

SEQ ID NO: 959998 - RNA, 24 nt, Human
ggagggggccggggaggcgggagg

SEQ ID NO: 959999 - RNA, 20 nt, Human
ggcaaacaaaucccauauuc

SEQ ID NO: 960000 - RNA, 23 nt, Human
gggaaaugacagcagcguuuuaa

SEQ ID NO: 960001 - RNA, 19 nt, Human
gggacacgggguggcgagg

SEQ ID NO: 960002 - RNA, 20 nt, Human
gggccggggaggcgggaggg

SEQ ID NO: 960003 - RNA, 18 nt, Human
ggggagggggccggggag

SEQ ID NO: 960004 - RNA, 18 nt, Human
gggggccgugaggcggcg

SEQ ID NO: 960005 - RNA, 20 nt, Human
gggugggcgggugcagcugc

SEQ ID NO: 960006 - RNA, 24 nt, Human
gguagaaacacgaugcaaacugca

SEQ ID NO: 960007 - RNA, 18 nt, Human
gguuccggggagggggcc

SEQ ID NO: 960008 - RNA, 21 nt, Human
gucaugugcuuugagcucuuc

SEQ ID NO: 960009 - RNA, 19 nt, Human
gugggugugucuggcccug

SEQ ID NO: 960010 - RNA, 23 nt, Human
gugguccaaaggcaggugaucac

SEQ ID NO: 960011 - RNA, 22 nt, Human
uaaaaccccauggacaguguca

SEQ ID NO: 960012 - RNA, 21 nt, Human
uaaaaggcaaacaaaucccau

SEQ ID NO: 960013 - RNA, 18 nt, Human
uaagagcaaacacaaaug

SEQ ID NO: 960014 - RNA, 21 nt, Human
uaagagcaaacacaaaugugg

SEQ ID NO: 960015 - RNA, 25 nt, Human
uacaugccacacgccacccugaagu

SEQ ID NO: 960016 - RNA, 20 nt, Human
uacuaagaaaugggaaauga

SEQ ID NO: 960017 - RNA, 18 nt, Human
ucaaacaguucuauaaac

SEQ ID NO: 960018 - RNA, 20 nt, Human
ucaaacuaaguuuccacuca

SEQ ID NO: 960019 - RNA, 22 nt, Human
ucagccugggagggggcagggg

SEQ ID NO: 960020 - RNA, 21 nt, Human
uccacagaccaucuugacugg

SEQ ID NO: 960021 - RNA, 19 nt, Human
uccacucguccgcgaccgu

SEQ ID NO: 960022 - RNA, 23 nt, Human
uccccuaugcaacuucuggacag

SEQ ID NO: 960023 - RNA, 22 nt, Human
uccgcaggcaaccucugaaucc

SEQ ID NO: 960024 - RNA, 21 nt, Human
uccggggagggggccggggag

SEQ ID NO: 960025 - RNA, 21 nt, Human
ucuaaaaaguaucaaaaagau

SEQ ID NO: 960026 - RNA, 22 nt, Human
ucuauaaacaucucugggcaca

SEQ ID NO: 960027 - RNA, 19 nt, Human
ucucuggaggaugucacag

SEQ ID NO: 960028 - RNA, 22 nt, Human
ugaaguggaugcgagagcugcu

SEQ ID NO: 960029 - RNA, 22 nt, Human
ugacagccgcgugggguuuggc

SEQ ID NO: 960030 - RNA, 18 nt, Human
ugacugcaggugagaggg

SEQ ID NO: 960031 - RNA, 24 nt, Human
ugagaccacgucaauccuuuaauu

SEQ ID NO: 960032 - RNA, 23 nt, Human
ugagagcuauuugcuaucuagag

SEQ ID NO: 960033 - RNA, 18 nt, Human
ugagaggggcgacgcacg

SEQ ID NO: 960034 - RNA, 22 nt, Human
ugagcccccggccccacugcag

SEQ ID NO: 960035 - RNA, 20 nt, Human
ugaggaggggccaucucugg

SEQ ID NO: 960036 - RNA, 23 nt, Human
ugaggaggggccaucucuggagg

SEQ ID NO: 960037 - RNA, 23 nt, Human
ugaggcggcgugcgggccaugag

SEQ ID NO: 960038 - RNA, 19 nt, Human
ugagguaauauguuuacaa

SEQ ID NO: 960039 - RNA, 21 nt, Human
ugauaacaauaaaaaaaucuu

SEQ ID NO: 960040 - RNA, 20 nt, Human
ugauuugcuucugugaagau

SEQ ID NO: 960041 - RNA, 23 nt, Human
ugauuugcuucugugaagauucc

SEQ ID NO: 960042 - RNA, 22 nt, Human
ugcaacagcaacccucucacac

SEQ ID NO: 960043 - RNA, 26 nt, Human
ugcacacacacacacgcaugagucca

SEQ ID NO: 960044 - RNA, 26 nt, Human
ugcacacacacagcacaugcacacac

SEQ ID NO: 960045 - RNA, 19 nt, Human
ugccacacgccacccugaa

SEQ ID NO: 960046 - RNA, 19 nt, Human
ugccccagaauucccuuac

SEQ ID NO: 960047 - RNA, 23 nt, Human
ugccccagaauucccuuacaagg

SEQ ID NO: 960048 - RNA, 21 nt, Human
ugcugcacacagaaacacgug

SEQ ID NO: 960049 - RNA, 19 nt, Human
uggcaagguacuaaaggua

SEQ ID NO: 960050 - RNA, 20 nt, Human
uggcccuaaguccacagacc

SEQ ID NO: 960051 - RNA, 26 nt, Human
uggcgggaagcaugggggccgugagg

SEQ ID NO: 960052 - RNA, 19 nt, Human
ugggagggggcaggggaug

SEQ ID NO: 960053 - RNA, 24 nt, Human
ugggagggggcaggggauggcugc

SEQ ID NO: 960054 - RNA, 20 nt, Human
ugggugggcgggugcagcug

SEQ ID NO: 960055 - RNA, 23 nt, Human
uggguggugugggugugucuggc

SEQ ID NO: 960056 - RNA, 18 nt, Human
uggugagaggauauucaa

SEQ ID NO: 960057 - RNA, 21 nt, Human
uguaaaaggcaaacaaauccc

SEQ ID NO: 960058 - RNA, 19 nt, Human
uguacaaagaagcaggacu

SEQ ID NO: 960059 - RNA, 20 nt, Human
ugucagaaaggccgggccug

SEQ ID NO: 960060 - RNA, 20 nt, Human
uguccgaggaggggcggccg

SEQ ID NO: 960061 - RNA, 19 nt, Human
uguugagugaagcauuuuc

SEQ ID NO: 960062 - RNA, 21 nt, Human
uguugagugaagcauuuucuu

SEQ ID NO: 960063 - RNA, 23 nt, Human
uuacucaaacuaaguuuccacuc

SEQ ID NO: 960064 - RNA, 20 nt, Human
uuaguacuaagaaaugggaa

SEQ ID NO: 960065 - RNA, 18 nt, Human
uucacauuuauuauugau

SEQ ID NO: 960066 - RNA, 19 nt, Human
uucauucacuaauggacaa

SEQ ID NO: 960067 - RNA, 22 nt, Human
uuccacucaccccgucccccca

SEQ ID NO: 960068 - RNA, 23 nt, Human
aaaagccaaaagcuaccccagcc

SEQ ID NO: 960069 - RNA, 21 nt, Human
aaaggaucccgagaggcggag

SEQ ID NO: 960070 - RNA, 26 nt, Human
aacucuagcaaccagcuacccugcua

SEQ ID NO: 960071 - RNA, 22 nt, Human
aagggcacuggacgaucugcuu

SEQ ID NO: 960072 - RNA, 21 nt, Human
acccgaagucccaggaagcuc

SEQ ID NO: 960073 - RNA, 23 nt, Human
acccggaguaaagucccagccuu

SEQ ID NO: 960074 - RNA, 22 nt, Human
accugaacucccugcacgcguu

SEQ ID NO: 960075 - RNA, 18 nt, Human
acucccacccccaaccuc

SEQ ID NO: 960076 - RNA, 21 nt, Human
acucccacccccaaccucccu

SEQ ID NO: 960077 - RNA, 20 nt, Human
acugagggggccaggccugc

SEQ ID NO: 960078 - RNA, 23 nt, Human
agcguuguaaacccaggccggga

SEQ ID NO: 960079 - RNA, 19 nt, Human
aggaagcucugagucacug

SEQ ID NO: 960080 - RNA, 18 nt, Human
auggagaacagcgggugg

SEQ ID NO: 960081 - RNA, 20 nt, Human
cacccccaaccucccuggcc

SEQ ID NO: 960082 - RNA, 21 nt, Human
cacccccaaccucccuggccc

SEQ ID NO: 960083 - RNA, 26 nt, Human
cacccggaguaaagucccagccuuuu

SEQ ID NO: 960084 - RNA, 19 nt, Human
caccgcgggacacucagac

SEQ ID NO: 960085 - RNA, 24 nt, Human
cacugcagucgcucuuccucugcc

SEQ ID NO: 960086 - RNA, 22 nt, Human
cagccucggccccuuccggucc

SEQ ID NO: 960087 - RNA, 18 nt, Human
cagcuccuggggacuccu

SEQ ID NO: 960088 - RNA, 21 nt, Human
caggacagacagauccuauca

SEQ ID NO: 960089 - RNA, 24 nt, Human
ccagccccuagucugcgagacgcc

SEQ ID NO: 960090 - RNA, 25 nt, Human
cccaaucuuucacccuuuucuaauu

SEQ ID NO: 960091 - RNA, 21 nt, Human
cccacccccaaccucccuggc

SEQ ID NO: 960092 - RNA, 21 nt, Human
cccaccguaacucuagcaacc

SEQ ID NO: 960093 - RNA, 23 nt, Human
ccccaaccucccuggcccucccu

SEQ ID NO: 960094 - RNA, 19 nt, Human
ccccaccguaacucuagca

SEQ ID NO: 960095 - RNA, 18 nt, Human
ccccagccucagugcuaa

SEQ ID NO: 960096 - RNA, 24 nt, Human
ccccagccucagugcuaaaauguu

SEQ ID NO: 960097 - RNA, 26 nt, Human
cccccaaccucccuggcccucccugc

SEQ ID NO: 960098 - RNA, 18 nt, Human
cccccagccccuagucug

SEQ ID NO: 960099 - RNA, 21 nt, Human
ccccccgccacccccagcuuc

SEQ ID NO: 960100 - RNA, 23 nt, Human
ccccgccacccccagcuucgcug

SEQ ID NO: 960101 - RNA, 22 nt, Human
cccugagcucccucagcuucgc

SEQ ID NO: 960102 - RNA, 20 nt, Human
cccugugguacaugcccccc

SEQ ID NO: 960103 - RNA, 18 nt, Human
ccgccacccccagcuucg

SEQ ID NO: 960104 - RNA, 23 nt, Human
ccuccagcccaguuucuuugggc

SEQ ID NO: 960105 - RNA, 18 nt, Human
ccucccacagagauggga

SEQ ID NO: 960106 - RNA, 25 nt, Human
ccucgccgccacccggaguaaaguc

SEQ ID NO: 960107 - RNA, 19 nt, Human
ccucugccuaacugaaaug

SEQ ID NO: 960108 - RNA, 20 nt, Human
ccugcagcugcgaucccugu

SEQ ID NO: 960109 - RNA, 28 nt, Human
ccuggccuuugcccugagcucccucagc

SEQ ID NO: 960110 - RNA, 23 nt, Human
cgaaaaugacugcuacaaggggu

SEQ ID NO: 960111 - RNA, 20 nt, Human
cgcccccagccccuagucug

SEQ ID NO: 960112 - RNA, 24 nt, Human
cgcggagcuggcagccaagccccg

SEQ ID NO: 960113 - RNA, 25 nt, Human
cggaguaaagucccagccuuuugcc

SEQ ID NO: 960114 - RNA, 25 nt, Human
cgggacacucagacuggcaaacacc

SEQ ID NO: 960115 - RNA, 23 nt, Human
cuccagcccaguuucuuugggcu

SEQ ID NO: 960116 - RNA, 25 nt, Human
cucccacccccaaccucccuggccc

SEQ ID NO: 960117 - RNA, 24 nt, Human
cuccccggcagcugacuucccuga

SEQ ID NO: 960118 - RNA, 20 nt, Human
cuccuggggacuccuuaggu

SEQ ID NO: 960119 - RNA, 18 nt, Human
cugaaaugaaagcuccug

SEQ ID NO: 960120 - RNA, 18 nt, Human
cuggacaggugaaguugg

SEQ ID NO: 960121 - RNA, 23 nt, Human
cuguggccgcccccagccccuag

SEQ ID NO: 960122 - RNA, 19 nt, Human
cuuugcccugagcucccuc

SEQ ID NO: 960123 - RNA, 23 nt, Human
gaaaagccaaaagcuaccccaga

SEQ ID NO: 960124 - RNA, 22 nt, Human
gacugcuacaagggguagaaau

SEQ ID NO: 960125 - RNA, 27 nt, Human
gagaacagcggguggguaccgguaccc

SEQ ID NO: 960126 - RNA, 20 nt, Human
gcacugaaaagggcacugga

SEQ ID NO: 960127 - RNA, 18 nt, Human
gcacuggacgaucugcuu

SEQ ID NO: 960128 - RNA, 24 nt, Human
gccuuuugcccgggccgcggagcc

SEQ ID NO: 960129 - RNA, 23 nt, Human
gcugcucucuugaucccacuuag

SEQ ID NO: 960130 - RNA, 19 nt, Human
ggacacucagacuggcaaa

SEQ ID NO: 960131 - RNA, 24 nt, Human
ggagaggccagccugucuaccgag

SEQ ID NO: 960132 - RNA, 18 nt, Human
ggccgcggagcuggcagc

SEQ ID NO: 960133 - RNA, 18 nt, Human
gggaggcggcgggugcgg

SEQ ID NO: 960134 - RNA, 24 nt, Human
gggccggggccuggcucugaggga

SEQ ID NO: 960135 - RNA, 27 nt, Human
gggcggccuccugccuggggggccucc

SEQ ID NO: 960136 - RNA, 18 nt, Human
ggggaugggguuuggggg

SEQ ID NO: 960137 - RNA, 19 nt, Human
ggggaugggguuugggggc

SEQ ID NO: 960138 - RNA, 19 nt, Human
gggucauuucccuggcgcu

SEQ ID NO: 960139 - RNA, 24 nt, Human
gugguacaugccccccgccacccc

SEQ ID NO: 960140 - RNA, 20 nt, Human
guuugggggcgggaggcggc

SEQ ID NO: 960141 - RNA, 19 nt, Human
uaccccagccucagugcua

SEQ ID NO: 960142 - RNA, 23 nt, Human
uaccccagccucagugcuaaaau

SEQ ID NO: 960143 - RNA, 20 nt, Human
uagcauucacucccaccccc

SEQ ID NO: 960144 - RNA, 19 nt, Human
ucacucccacccccaaccu

SEQ ID NO: 960145 - RNA, 18 nt, Human
ucauuuaggagcaaguuu

SEQ ID NO: 960146 - RNA, 19 nt, Human
ucccacccccaaccucccu

SEQ ID NO: 960147 - RNA, 19 nt, Human
ucccaggaagcucugaguc

SEQ ID NO: 960148 - RNA, 20 nt, Human
ucccugcagcugcgaucccu

SEQ ID NO: 960149 - RNA, 21 nt, Human
ucccugcagcugcgaucccug

SEQ ID NO: 960150 - RNA, 21 nt, Human
ucgcugucccuggacagguga

SEQ ID NO: 960151 - RNA, 22 nt, Human
ucggccccuuccgguccgcgcu

SEQ ID NO: 960152 - RNA, 18 nt, Human
ugagaccugggaaaagcc

SEQ ID NO: 960153 - RNA, 22 nt, Human
ugagcguucuggcagaggcccg

SEQ ID NO: 960154 - RNA, 18 nt, Human
ugauggagcacagacucg

SEQ ID NO: 960155 - RNA, 23 nt, Human
ugcccugagcucccucagcuucg

SEQ ID NO: 960156 - RNA, 19 nt, Human
ugccuaacugaaaugaaag

SEQ ID NO: 960157 - RNA, 21 nt, Human
uggcagccaagccccgccucu

SEQ ID NO: 960158 - RNA, 18 nt, Human
uggccagccagcuccugg

SEQ ID NO: 960159 - RNA, 24 nt, Human
ugggaaaagccaaaagcuacccca

SEQ ID NO: 960160 - RNA, 21 nt, Human
ugggacugcuuaguaagaccu

SEQ ID NO: 960161 - RNA, 20 nt, Human
ugggauugggguaagggcug

SEQ ID NO: 960162 - RNA, 23 nt, Human
ugggauugggguaagggcugugg

SEQ ID NO: 960163 - RNA, 20 nt, Human
ugucccuggacaggugaagu

SEQ ID NO: 960164 - RNA, 21 nt, Human
uucccauguucucuaaagccc

SEQ ID NO: 960165 - RNA, 24 nt, Human
uugucucgggguugcucacaugga

SEQ ID NO: 960166 - RNA, 22 nt, Human
uuugcccgggccgcggagcugg

SEQ ID NO: 960167 - RNA, 18 nt, Human
uuugggcggccuccugcc

SEQ ID NO: 960168 - RNA, 21 nt, Human
aaaacacugggaauugacuug

SEQ ID NO: 960169 - RNA, 20 nt, Human
aaaauuacuuucuuaaaaca

SEQ ID NO: 960170 - RNA, 26 nt, Human
aaacaaaguacacuacaacugcaacc

SEQ ID NO: 960171 - RNA, 23 nt, Human
aaacauguagaaaaaacauauua

SEQ ID NO: 960172 - RNA, 21 nt, Human
aaaccacaacccaccugccca

SEQ ID NO: 960173 - RNA, 19 nt, Human
aaacugcagagaggacaaa

SEQ ID NO: 960174 - RNA, 20 nt, Human
aacauucagaucacauagga

SEQ ID NO: 960175 - RNA, 21 nt, Human
aagaaaacagagaaaacauag

SEQ ID NO: 960176 - RNA, 20 nt, Human
aagaaauaacgaauauauuu

SEQ ID NO: 960177 - RNA, 18 nt, Human
aagacaugcauggcucau

SEQ ID NO: 960178 - RNA, 20 nt, Human
aagcagacauaauaccagga

SEQ ID NO: 960179 - RNA, 25 nt, Human
aagcagacauaauaccaggaaccau

SEQ ID NO: 960180 - RNA, 23 nt, Human
aagggcaacagacugagaaucuu

SEQ ID NO: 960181 - RNA, 19 nt, Human
aaggucaaugaaaaaauga

SEQ ID NO: 960182 - RNA, 27 nt, Human
aaguagccucuacauaucauuaaaggu

SEQ ID NO: 960183 - RNA, 25 nt, Human
acaaaguacacuacaacugcaaccc

SEQ ID NO: 960184 - RNA, 26 nt, Human
acaaaguacacuacaacugcaacccc

SEQ ID NO: 960185 - RNA, 26 nt, Human
acagacaggaccauaucacugaaaac

SEQ ID NO: 960186 - RNA, 18 nt, Human
acagagaaaacauagaca

SEQ ID NO: 960187 - RNA, 18 nt, Human
accauuuucagaugaaaa

SEQ ID NO: 960188 - RNA, 23 nt, Human
acccaauuccuguugucaaugag

SEQ ID NO: 960189 - RNA, 21 nt, Human
accuuuucccugccccacaau

SEQ ID NO: 960190 - RNA, 19 nt, Human
acuacaacugcaacccaau

SEQ ID NO: 960191 - RNA, 19 nt, Human
acugaauucuaaagcuaaa

SEQ ID NO: 960192 - RNA, 22 nt, Human
agaaaaaacauauuaaaaggca

SEQ ID NO: 960193 - RNA, 22 nt, Human
agaacugugagaaacaaauuuc

SEQ ID NO: 960194 - RNA, 21 nt, Human
agacugguagcuuauaaacaa

SEQ ID NO: 960195 - RNA, 20 nt, Human
aggaacaacuaggagaggaa

SEQ ID NO: 960196 - RNA, 20 nt, Human
aggcuccacagccgccccag

SEQ ID NO: 960197 - RNA, 23 nt, Human
aggcuccacagccgccccagccu

SEQ ID NO: 960198 - RNA, 19 nt, Human
auaauugugagauuaacuc

SEQ ID NO: 960199 - RNA, 20 nt, Human
auacuggguacugcuaaguc

SEQ ID NO: 960200 - RNA, 22 nt, Human
auaguccucuuuggugcuaaaa

SEQ ID NO: 960201 - RNA, 23 nt, Human
augaauaucacauuauaugaaua

SEQ ID NO: 960202 - RNA, 22 nt, Human
augcuuaagaaaacagagaaaa

SEQ ID NO: 960203 - RNA, 19 nt, Human
caacagacuagagugccac

SEQ ID NO: 960204 - RNA, 25 nt, Human
caacagacugagaaucuuaaaacca

SEQ ID NO: 960205 - RNA, 21 nt, Human
caaccgaaaaauauuagaaac

SEQ ID NO: 960206 - RNA, 20 nt, Human
caagaaacuguaucucccuc

SEQ ID NO: 960207 - RNA, 20 nt, Human
cacauuuuaagggguuucug

SEQ ID NO: 960208 - RNA, 24 nt, Human
cacuaaauuucaaauagauguucu

SEQ ID NO: 960209 - RNA, 22 nt, Human
cagaauaauguaacaaaauccc

SEQ ID NO: 960210 - RNA, 19 nt, Human
cagaucacauaggagcuga

SEQ ID NO: 960211 - RNA, 25 nt, Human
cagaugaaaaaaaugcaaaggucaa

SEQ ID NO: 960212 - RNA, 23 nt, Human
cagcgcguccccuccgucggcuc

SEQ ID NO: 960213 - RNA, 23 nt, Human
caggaccauaucacugaaaacca

SEQ ID NO: 960214 - RNA, 25 nt, Human
caucaaagaauuucaguuuauauaa

SEQ ID NO: 960215 - RNA, 27 nt, Human
caucaggugcugugaagcaaugaagac

SEQ ID NO: 960216 - RNA, 22 nt, Human
caucauaaucuaucaccuccca

SEQ ID NO: 960217 - RNA, 18 nt, Human
cauggccacaaggaacaa

SEQ ID NO: 960218 - RNA, 22 nt, Human
ccacaguuagagguuugaggac

SEQ ID NO: 960219 - RNA, 22 nt, Human
ccauagacugguagcuuauaaa

SEQ ID NO: 960220 - RNA, 23 nt, Human
ccauccuugcauuucuggaauaa

SEQ ID NO: 960221 - RNA, 19 nt, Human
cccaccacaggcuccacag

SEQ ID NO: 960222 - RNA, 22 nt, Human
cccaccacaggcuccacagccg

SEQ ID NO: 960223 - RNA, 21 nt, Human
ccccgcagcgcguccccuccg

SEQ ID NO: 960224 - RNA, 20 nt, Human
ccccguauccucacauggcc

SEQ ID NO: 960225 - RNA, 21 nt, Human
ccuacuccucgcuauacaaaa

SEQ ID NO: 960226 - RNA, 18 nt, Human
ccuggauguaauaaaaug

SEQ ID NO: 960227 - RNA, 24 nt, Human
cgccccagccucuggcuacccgcu

SEQ ID NO: 960228 - RNA, 21 nt, Human
cggcucaccuuuucccugccc

SEQ ID NO: 960229 - RNA, 19 nt, Human
cuaccaacaagggcaaaca

SEQ ID NO: 960230 - RNA, 29 nt, Human
cuaggagaggaaguaaaacauguagaaaa

SEQ ID NO: 960231 - RNA, 21 nt, Human
cucaagacauuuaccagauuc

SEQ ID NO: 960232 - RNA, 23 nt, Human
cucacuaguagaagaaugccuaa

SEQ ID NO: 960233 - RNA, 24 nt, Human
cugaaaaccaagagaaaaaaaauc

SEQ ID NO: 960234 - RNA, 22 nt, Human
cugaggaaaauaaggguuuaag

SEQ ID NO: 960235 - RNA, 19 nt, Human
cugcuaagucuccuucuca

SEQ ID NO: 960236 - RNA, 24 nt, Human
cuuauaaacaaggaguguuaccau

SEQ ID NO: 960237 - RNA, 20 nt, Human
gaaaaacugacuccaaaaag

SEQ ID NO: 960238 - RNA, 19 nt, Human
gaaaaagacucacuaguag

SEQ ID NO: 960239 - RNA, 19 nt, Human
gaacagacaagguuucugu

SEQ ID NO: 960240 - RNA, 19 nt, Human
gacaaauuagauaaaaaag

SEQ ID NO: 960241 - RNA, 24 nt, Human
gagaagcaucuucacccaauuccu

SEQ ID NO: 960242 - RNA, 22 nt, Human
gaggcuuggaaguccaacauca

SEQ ID NO: 960243 - RNA, 20 nt, Human
gagggcacaaaaauuucaga

SEQ ID NO: 960244 - RNA, 20 nt, Human
gaguuuguccuuuuugccuc

SEQ ID NO: 960245 - RNA, 20 nt, Human
gauacagaggugccauuuau

SEQ ID NO: 960246 - RNA, 23 nt, Human
gccacaguuagagguuucggacc

SEQ ID NO: 960247 - RNA, 20 nt, Human
gcuuuuauauugucuuugua

SEQ ID NO: 960248 - RNA, 29 nt, Human
ggcugaggaaaauaaggguuuaagcccca

SEQ ID NO: 960249 - RNA, 22 nt, Human
guuucugugaagagcaggaauu

SEQ ID NO: 960250 - RNA, 24 nt, Human
uaaaaagacaaugacauaucaggc

SEQ ID NO: 960251 - RNA, 19 nt, Human
uaaaaccaggcagagacua

SEQ ID NO: 960252 - RNA, 24 nt, Human
uaaaauauacauaucugaaauucu

SEQ ID NO: 960253 - RNA, 19 nt, Human
uaaaaugucuuucuagaau

SEQ ID NO: 960254 - RNA, 23 nt, Human
uaaagaauauucuaaaacuaaaa

SEQ ID NO: 960255 - RNA, 21 nt, Human
uaaagggaauaaaacugcaga

SEQ ID NO: 960256 - RNA, 21 nt, Human
uaaaguaacacugacaauccc

SEQ ID NO: 960257 - RNA, 22 nt, Human
uaacaaaaucccauagacuggu

SEQ ID NO: 960258 - RNA, 20 nt, Human
uaagaaaacagagaaaacau

SEQ ID NO: 960259 - RNA, 21 nt, Human
uaagcagacauaauaccagga

SEQ ID NO: 960260 - RNA, 20 nt, Human
uaaggauacagaggugccag

SEQ ID NO: 960261 - RNA, 22 nt, Human
uaagugaaucaucuaaccuaaa

SEQ ID NO: 960262 - RNA, 19 nt, Human
uacaggaggcugaacagac

SEQ ID NO: 960263 - RNA, 22 nt, Human
uaccauuuucuuauuucugagu

SEQ ID NO: 960264 - RNA, 18 nt, Human
uagaacuucuaaaguguu

SEQ ID NO: 960265 - RNA, 19 nt, Human
uaguuacagcagaaacuaa

SEQ ID NO: 960266 - RNA, 24 nt, Human
uaucacacaagcuuaauuuguaug

SEQ ID NO: 960267 - RNA, 22 nt, Human
uauccuaccaacaagggcaaac

SEQ ID NO: 960268 - RNA, 23 nt, Human
uaugcuuaagaaaacagagaaaa

SEQ ID NO: 960269 - RNA, 24 nt, Human
uauuggacuuugcagccuccagaa

SEQ ID NO: 960270 - RNA, 22 nt, Human
ucaacauaugauuuuuuggggu

SEQ ID NO: 960271 - RNA, 24 nt, Human
ucagaauaauguaacaaaauccca

SEQ ID NO: 960272 - RNA, 22 nt, Human
ucauaaucuaucaccucccaag

SEQ ID NO: 960273 - RNA, 26 nt, Human
uccaaaaagacuacaauaacuagacc

SEQ ID NO: 960274 - RNA, 23 nt, Human
uccacagccgccccagccucugg

SEQ ID NO: 960275 - RNA, 19 nt, Human
uccucacauggccacaagg

SEQ ID NO: 960276 - RNA, 27 nt, Human
ucuaagugaaucaucuaaccuaaacuc

SEQ ID NO: 960277 - RNA, 25 nt, Human
ucuacauauuuuauacaaugucuaa

SEQ ID NO: 960278 - RNA, 23 nt, Human
ucugcagagccauauccuaccaa

SEQ ID NO: 960279 - RNA, 20 nt, Human
ucuuuuuuuaauucuaccaa

SEQ ID NO: 960280 - RNA, 20 nt, Human
ugaaaaaacuuucuacagaa

SEQ ID NO: 960281 - RNA, 22 nt, Human
ugaaaagcaaggagauuucuca

SEQ ID NO: 960282 - RNA, 19 nt, Human
ugaaggccuauuuccuagu

SEQ ID NO: 960283 - RNA, 22 nt, Human
ugacaggagcuaucuuagucca

SEQ ID NO: 960284 - RNA, 25 nt, Human
ugacuccaaaaagacuacaauaacu

SEQ ID NO: 960285 - RNA, 18 nt, Human
ugacuugcuaaguagcug

SEQ ID NO: 960286 - RNA, 21 nt, Human
ugccccacaaugccgcuccca

SEQ ID NO: 960287 - RNA, 18 nt, Human
uguacuaauuaccuugaa

SEQ ID NO: 960288 - RNA, 23 nt, Human
uguaucucccucaccuaguaaua

SEQ ID NO: 960289 - RNA, 22 nt, Human
uguaugucuuauuaauagaguu

SEQ ID NO: 960290 - RNA, 22 nt, Human
uguccauuuuugcuuacaaaug

SEQ ID NO: 960291 - RNA, 24 nt, Human
uuaauuuauaccuacuccucgcua

SEQ ID NO: 960292 - RNA, 20 nt, Human
uucagaucacauaggagcug

SEQ ID NO: 960293 - RNA, 25 nt, Human
uugauacucacugcaauuagauuaa

SEQ ID NO: 960294 - RNA, 20 nt, Human
uuuaucagacacugaaucug

SEQ ID NO: 960295 - RNA, 25 nt, Human
uuuaucagacacugaaucugcugac

SEQ ID NO: 960296 - RNA, 20 nt, Human
uuucagagaaaaagacucac

SEQ ID NO: 960297 - RNA, 25 nt, Human
uuugccuucucugccacguaaggau

SEQ ID NO: 960298 - RNA, 20 nt, Human
uuuuauacaaugucuaacau

SEQ ID NO: 960299 - RNA, 24 nt, Human
aaaaccuuuuguucauauucagaa

SEQ ID NO: 960300 - RNA, 23 nt, Human
aaaauaaaagcuaaaagucagaa

SEQ ID NO: 960301 - RNA, 24 nt, Human
aaaccaaaccaaacaaauccagaa

SEQ ID NO: 960302 - RNA, 18 nt, Human
aaccaaacaaauccagaa

SEQ ID NO: 960303 - RNA, 22 nt, Human
aacccugaugaacagaaacaac

SEQ ID NO: 960304 - RNA, 21 nt, Human
aacuggaaccaaaccaaacca

SEQ ID NO: 960305 - RNA, 20 nt, Human
aagcccucauguaucuucuc

SEQ ID NO: 960306 - RNA, 23 nt, Human
acaaugaggauaaaguacugaaa

SEQ ID NO: 960307 - RNA, 19 nt, Human
accacccaaguagaacaaa

SEQ ID NO: 960308 - RNA, 18 nt, Human
acccugaugaacagaaac

SEQ ID NO: 960309 - RNA, 29 nt, Human
agaacgauuaaauuaaaccacccaaguag

SEQ ID NO: 960310 - RNA, 23 nt, Human
agacuggauuuauauugccauuu

SEQ ID NO: 960311 - RNA, 21 nt, Human
aucaacauugaaucauggauu

SEQ ID NO: 960312 - RNA, 21 nt, Human
augaacagaaacaacacugca

SEQ ID NO: 960313 - RNA, 23 nt, Human
auggauuuggugucacugaguca

SEQ ID NO: 960314 - RNA, 22 nt, Human
caaauccagaauggggucaccu

SEQ ID NO: 960315 - RNA, 26 nt, Human
caagcaauauaguuagaaauauuaac

SEQ ID NO: 960316 - RNA, 19 nt, Human
cacaaaauccagagaugua

SEQ ID NO: 960317 - RNA, 22 nt, Human
cacuuuugcauuuuccccuaaa

SEQ ID NO: 960318 - RNA, 26 nt, Human
caucuacccucgcacaagcugcaccc

SEQ ID NO: 960319 - RNA, 20 nt, Human
ccaaagccauauacugauca

SEQ ID NO: 960320 - RNA, 20 nt, Human
ccagaguucauuugguuugg

SEQ ID NO: 960321 - RNA, 19 nt, Human
ccaucuacccucgcacaag

SEQ ID NO: 960322 - RNA, 24 nt, Human
cccucauguaucuucucuauugua

SEQ ID NO: 960323 - RNA, 18 nt, Human
ccucgcacaagcugcacc

SEQ ID NO: 960324 - RNA, 19 nt, Human
ccugaagugguuagcccca

SEQ ID NO: 960325 - RNA, 23 nt, Human
ccuucagaauuagcagaauuaga

SEQ ID NO: 960326 - RNA, 18 nt, Human
cugaaaaggcaaagggaa

SEQ ID NO: 960327 - RNA, 21 nt, Human
cuuaaaucacauugaggugaa

SEQ ID NO: 960328 - RNA, 21 nt, Human
gaacaaauaauucacauucuu

SEQ ID NO: 960329 - RNA, 25 nt, Human
gaccacggaaacauacacaaaggaa

SEQ ID NO: 960330 - RNA, 24 nt, Human
gaggauaaaguacugaaaucugcu

SEQ ID NO: 960331 - RNA, 18 nt, Human
gauuugucuauuuccccu

SEQ ID NO: 960332 - RNA, 21 nt, Human
gcauaaauacaacaaagggag

SEQ ID NO: 960333 - RNA, 21 nt, Human
gugaaauacuaccauaucaga

SEQ ID NO: 960334 - RNA, 18 nt, Human
uaaaagcuaaaagucaga

SEQ ID NO: 960335 - RNA, 22 nt, Human
uaaaccacccaaguagaacaaa

SEQ ID NO: 960336 - RNA, 22 nt, Human
uaacccugaugaacagaaacaa

SEQ ID NO: 960337 - RNA, 24 nt, Human
uaacuggaaccaaaccaaaccaaa

SEQ ID NO: 960338 - RNA, 23 nt, Human
uacaacaaagggagaauaaagac

SEQ ID NO: 960339 - RNA, 24 nt, Human
uagaaaauccaaaaccuuuuguuc

SEQ ID NO: 960340 - RNA, 21 nt, Human
uagaaauuuuggucugcuuaa

SEQ ID NO: 960341 - RNA, 18 nt, Human
uagaacaaauaauucaca

SEQ ID NO: 960342 - RNA, 27 nt, Human
ucaccuacaagcaauauaguuagaaau

SEQ ID NO: 960343 - RNA, 22 nt, Human
ugaacagaaacaacacugcauc

SEQ ID NO: 960344 - RNA, 19 nt, Human
ugcucaagaucaacauuga

SEQ ID NO: 960345 - RNA, 18 nt, Human
uggaaccaaaccaaacca

SEQ ID NO: 960346 - RNA, 21 nt, Human
uggaaccaaaccaaaccaaac

SEQ ID NO: 960347 - RNA, 22 nt, Human
uguacauauaauucuuuacacu

SEQ ID NO: 960348 - RNA, 21 nt, Human
uuagaaauuuuggucugcuua

SEQ ID NO: 960349 - RNA, 19 nt, Human
uuccacaaugaggauaaag

SEQ ID NO: 960350 - RNA, 28 nt, Human
uuuaauauuucaucacaaaauccagaga

SEQ ID NO: 960351 - RNA, 21 nt, Human
uuuagguuuuccagaguucau

SEQ ID NO: 960352 - RNA, 20 nt, Human
uuuguucauauucagaacga

SEQ ID NO: 960353 - RNA, 21 nt, Human
uuuuguucauauucagaacga

SEQ ID NO: 960354 - RNA, 18 nt, Human
uuuuuggauucuguaaac

SEQ ID NO: 960355 - RNA, 24 nt, Human
aagaaacaauaaauguggauuaga

SEQ ID NO: 960356 - RNA, 19 nt, Human
aagaaccaauuucacacca

SEQ ID NO: 960357 - RNA, 26 nt, Human
aagcaaaaauauaaaaguaaaaagaa

SEQ ID NO: 960358 - RNA, 21 nt, Human
aagcagagcuucuccucugug

SEQ ID NO: 960359 - RNA, 19 nt, Human
aaggaaaguuggagagaaa

SEQ ID NO: 960360 - RNA, 26 nt, Human
aauauaaaaguaaaaagaaccaauuu

SEQ ID NO: 960361 - RNA, 22 nt, Human
acuuccaauggcauaugacugu

SEQ ID NO: 960362 - RNA, 21 nt, Human
agacugaaguuugggaaacaa

SEQ ID NO: 960363 - RNA, 24 nt, Human
agacuuccaauggcauaugacugu

SEQ ID NO: 960364 - RNA, 18 nt, Human
agagaaagaaagcagagc

SEQ ID NO: 960365 - RNA, 20 nt, Human
agagcaauaccacaucuauu

SEQ ID NO: 960366 - RNA, 22 nt, Human
agaguuccuccugccugguccu

SEQ ID NO: 960367 - RNA, 25 nt, Human
agcaaaaauauaaaaguaaaaagaa

SEQ ID NO: 960368 - RNA, 23 nt, Human
agcuucuccucuguggggaacag

SEQ ID NO: 960369 - RNA, 25 nt, Human
agcuucuccucuguggggaacagcu

SEQ ID NO: 960370 - RNA, 24 nt, Human
aggacugcuggccaagacuuccaa

SEQ ID NO: 960371 - RNA, 19 nt, Human
aguuccuccugccuggucc

SEQ ID NO: 960372 - RNA, 20 nt, Human
aucacagucuucuucuacau

SEQ ID NO: 960373 - RNA, 24 nt, Human
caacagagaagaccugucgagacg

SEQ ID NO: 960374 - RNA, 19 nt, Human
cauaaaugugcaaauaauc

SEQ ID NO: 960375 - RNA, 22 nt, Human
ccccugaagccaaggcaauaga

SEQ ID NO: 960376 - RNA, 19 nt, Human
ccugccugguccucagagc

SEQ ID NO: 960377 - RNA, 20 nt, Human
cucacaaaggcaaacucagg

SEQ ID NO: 960378 - RNA, 21 nt, Human
cucacaggcacaucaugcuga

SEQ ID NO: 960379 - RNA, 21 nt, Human
cuccuuaucccccugaagcca

SEQ ID NO: 960380 - RNA, 21 nt, Human
gagagaaauccccuccuccuc

SEQ ID NO: 960381 - RNA, 22 nt, Human
gaggacucuuccaugcucacag

SEQ ID NO: 960382 - RNA, 21 nt, Human
ggaaggauucaggacugcugg

SEQ ID NO: 960383 - RNA, 21 nt, Human
ggacccgccgcuccccaauuc

SEQ ID NO: 960384 - RNA, 24 nt, Human
guggggaacagcuucuucaucaca

SEQ ID NO: 960385 - RNA, 23 nt, Human
uaaaaguaaaaagaaccaauuuc

SEQ ID NO: 960386 - RNA, 23 nt, Human
uaccacaucuauuuucugaacuc

SEQ ID NO: 960387 - RNA, 22 nt, Human
uagacgugauuucaaaagaaac

SEQ ID NO: 960388 - RNA, 25 nt, Human
uauaaaaguaaaaagaaccaauuuc

SEQ ID NO: 960389 - RNA, 20 nt, Human
ucuuccacuguuauggccuu

SEQ ID NO: 960390 - RNA, 22 nt, Human
ugauauguucccuccuuauccc

SEQ ID NO: 960391 - RNA, 18 nt, Human
ugauuuuaaaaaaggaaa

SEQ ID NO: 960392 - RNA, 19 nt, Human
ugccucacaaaggcaaacu

SEQ ID NO: 960393 - RNA, 23 nt, Human
ugccucacaaaggcaaacucagg

SEQ ID NO: 960394 - RNA, 22 nt, Human
uggauuagaaaggaaacaucca

SEQ ID NO: 960395 - RNA, 19 nt, Human
uguagaguuccuccugccu

SEQ ID NO: 960396 - RNA, 19 nt, Human
uguagaguuccuccugccu

SEQ ID NO: 960397 - RNA, 25 nt, Human
uuaugauauguucccuccuuauccc

SEQ ID NO: 960398 - RNA, 24 nt, Human
uucaagcaaaaauauaaaaguaaa

SEQ ID NO: 960399 - RNA, 21 nt, Human
uuccaauuucugcagcuuuuu

SEQ ID NO: 960400 - RNA, 18 nt, Human
aaaguagagaagcagaaa

SEQ ID NO: 960401 - RNA, 21 nt, Human
aaaugguuuugcccugacuaa

SEQ ID NO: 960402 - RNA, 24 nt, Human
aagcaaccccagaaucauauaaau

SEQ ID NO: 960403 - RNA, 18 nt, Human
aagcagaaagagaaacau

SEQ ID NO: 960404 - RNA, 21 nt, Human
aagcagaaagagaaacauaga

SEQ ID NO: 960405 - RNA, 25 nt, Human
aagcagaaagagaaacauagauuga

SEQ ID NO: 960406 - RNA, 21 nt, Human
aagcucuuucuggaugagccc

SEQ ID NO: 960407 - RNA, 19 nt, Human
acuguuuaacauccccaau

SEQ ID NO: 960408 - RNA, 21 nt, Human
agaaaagcccauuaaacaaaa

SEQ ID NO: 960409 - RNA, 21 nt, Human
agaaagagaaacauagauuga

SEQ ID NO: 960410 - RNA, 20 nt, Human
agcagaaagagaaacauaga

SEQ ID NO: 960411 - RNA, 24 nt, Human
caaaagaaaaucaaagaauccauu

SEQ ID NO: 960412 - RNA, 22 nt, Human
caaaauagaauccugggggauc

SEQ ID NO: 960413 - RNA, 22 nt, Human
caagagaagucaugaggacacc

SEQ ID NO: 960414 - RNA, 27 nt, Human
cacugcaacuguuuaacauccccaauu

SEQ ID NO: 960415 - RNA, 18 nt, Human
cagcuacccgccgccucc

SEQ ID NO: 960416 - RNA, 26 nt, Human
ccacaggcucccugcugaugagauuu

SEQ ID NO: 960417 - RNA, 22 nt, Human
cccccagauccagcuguccuag

SEQ ID NO: 960418 - RNA, 23 nt, Human
ccgccuccucagcaaucuuagcc

SEQ ID NO: 960419 - RNA, 21 nt, Human
ccugccagcuacccgccgccu

SEQ ID NO: 960420 - RNA, 18 nt, Human
ccuucggaagucggcgcc

SEQ ID NO: 960421 - RNA, 20 nt, Human
ccuuucucucuuccaauaaa

SEQ ID NO: 960422 - RNA, 22 nt, Human
cgccgccuccucagcaaucuua

SEQ ID NO: 960423 - RNA, 18 nt, Human
cuaagcaugggucagagg

SEQ ID NO: 960424 - RNA, 25 nt, Human
cucaaaauauuuauuguuacaagaa

SEQ ID NO: 960425 - RNA, 18 nt, Human
cugcaguaaugcuuggca

SEQ ID NO: 960426 - RNA, 21 nt, Human
cuuagccgaccgggagggcuc

SEQ ID NO: 960427 - RNA, 21 nt, Human
gaacagcaaguauugaaaacg

SEQ ID NO: 960428 - RNA, 26 nt, Human
gaguuuguuaaaauguacccauuauu

SEQ ID NO: 960429 - RNA, 22 nt, Human
gcccauuaaacaaaauagaauc

SEQ ID NO: 960430 - RNA, 22 nt, Human
gcccggacggcggccuucggaa

SEQ ID NO: 960431 - RNA, 18 nt, Human
ggcacagaaccaaggcug

SEQ ID NO: 960432 - RNA, 23 nt, Human
ggccuucggaagucggcgccugc

SEQ ID NO: 960433 - RNA, 18 nt, Human
guaucauucaacuuaaaa

SEQ ID NO: 960434 - RNA, 20 nt, Human
uaaaggucauauguacuaag

SEQ ID NO: 960435 - RNA, 24 nt, Human
uacccgccgccuccucagcaaucu

SEQ ID NO: 960436 - RNA, 19 nt, Human
uauuuccuuucucucuucc

SEQ ID NO: 960437 - RNA, 26 nt, Human
uauuuuaugcuuuuaguagaaaagcc

SEQ ID NO: 960438 - RNA, 23 nt, Human
ucagaggaauagaauggauuugu

SEQ ID NO: 960439 - RNA, 18 nt, Human
uccacaggcucccugcug

SEQ ID NO: 960440 - RNA, 23 nt, Human
uccagccauucccagauuucacu

SEQ ID NO: 960441 - RNA, 23 nt, Human
uccccaauuccugguuuuucagu

SEQ ID NO: 960442 - RNA, 21 nt, Human
uccucaaaagaaaaucaaaga

SEQ ID NO: 960443 - RNA, 21 nt, Human
ucggcgccugccagcuacccg

SEQ ID NO: 960444 - RNA, 19 nt, Human
ucuccucauuugggucagg

SEQ ID NO: 960445 - RNA, 19 nt, Human
ugaaaaggauggaaacugg

SEQ ID NO: 960446 - RNA, 24 nt, Human
ugagcccccagauccagcuguccu

SEQ ID NO: 960447 - RNA, 18 nt, Human
uggaugagcccccagauc

SEQ ID NO: 960448 - RNA, 23 nt, Human
uggaugagcccccagauccagcu

SEQ ID NO: 960449 - RNA, 21 nt, Human
uggcacagaaccaaggcuggg

SEQ ID NO: 960450 - RNA, 23 nt, Human
uggcacagaaccaaggcugggua

SEQ ID NO: 960451 - RNA, 24 nt, Human
uggcacagaaccaaggcuggguau

SEQ ID NO: 960452 - RNA, 23 nt, Human
ugggagaaucagagcucuccuca

SEQ ID NO: 960453 - RNA, 24 nt, Human
uguaaggguuaaaggucauaugua

SEQ ID NO: 960454 - RNA, 23 nt, Human
uguuacaagaaaaccguaagaag

SEQ ID NO: 960455 - RNA, 20 nt, Human
uuccaauaaagcucuuucug

SEQ ID NO: 960456 - RNA, 22 nt, Human
uuggcacagaaccaaggcuggg

SEQ ID NO: 960457 - RNA, 21 nt, Human
uuuacacacuuuuauacaagu

SEQ ID NO: 960458 - RNA, 20 nt, Human
uuuguuaaaauguacccauu

SEQ ID NO: 960459 - RNA, 18 nt, Human
uuuuuuuuuuuuuuuuug

SEQ ID NO: 960460 - RNA, 24 nt, Human
uuuuuuuuuuuuuuuuuuguuauu

SEQ ID NO: 960461 - RNA, 18 nt, Human
aacacugugguaagcaaa

SEQ ID NO: 960462 - RNA, 22 nt, Human
agcuauaacacugugguaagca

SEQ ID NO: 960463 - RNA, 18 nt, Human
aggacccgucgcagccuc

SEQ ID NO: 960464 - RNA, 19 nt, Human
auaauuccagcuuaaucuu

SEQ ID NO: 960465 - RNA, 18 nt, Human
cacugugguaagcaaaau

SEQ ID NO: 960466 - RNA, 23 nt, Human
ccauauguugucucaaaccauac

SEQ ID NO: 960467 - RNA, 18 nt, Human
ccucacugucccccugca

SEQ ID NO: 960468 - RNA, 21 nt, Human
ccucuccgcccagcaggagcu

SEQ ID NO: 960469 - RNA, 22 nt, Human
cuagaaccagcuauaacacugu

SEQ ID NO: 960470 - RNA, 19 nt, Human
cugucccccugcaggaccc

SEQ ID NO: 960471 - RNA, 22 nt, Human
cuuaaucuacaaaugugaacau

SEQ ID NO: 960472 - RNA, 20 nt, Human
uaaucuacaaaugugaacau

SEQ ID NO: 960473 - RNA, 18 nt, Human
uacaaaaaauauagagca

SEQ ID NO: 960474 - RNA, 26 nt, Human
uauuucaucuucuuaaggugucuuua

SEQ ID NO: 960475 - RNA, 21 nt, Human
ucccccaggagcggagacgag

SEQ ID NO: 960476 - RNA, 22 nt, Human
ucccccugcaggacccgucgca

SEQ ID NO: 960477 - RNA, 22 nt, Human
ucgcagccuccgcuuugcaaaa

SEQ ID NO: 960478 - RNA, 23 nt, Human
ucgcagccuccgcuuugcaaaau

SEQ ID NO: 960479 - RNA, 18 nt, Human
ugcucucauuauaauucc

SEQ ID NO: 960480 - RNA, 24 nt, Human
ugguaagcaaaauaaauuuguucu

SEQ ID NO: 960481 - RNA, 21 nt, Human
ugucucaaaccauacuaauac

SEQ ID NO: 960482 - RNA, 24 nt, Human
uuccacagauaaauggaaaaagga

SEQ ID NO: 960483 - RNA, 22 nt, Human
uuccauauguugucucaaacca

SEQ ID NO: 960484 - RNA, 23 nt, Human
aaaaagcacauaaacaucuacaa

SEQ ID NO: 960485 - RNA, 22 nt, Human
aaaaaggacaaagacaggaaua

SEQ ID NO: 960486 - RNA, 25 nt, Human
aaaaggacaaagacaggaauacaaa

SEQ ID NO: 960487 - RNA, 20 nt, Human
aaacaagcugccaaaauaca

SEQ ID NO: 960488 - RNA, 24 nt, Human
acaaaaagcacauaaacaucuaca

SEQ ID NO: 960489 - RNA, 22 nt, Human
accgccaaguccagcucagcuc

SEQ ID NO: 960490 - RNA, 18 nt, Human
agaaaaaggacaaagaca

SEQ ID NO: 960491 - RNA, 27 nt, Human
agacaggaauacaaauaaauuauaauc

SEQ ID NO: 960492 - RNA, 20 nt, Human
agggaacguugccuaagcgc

SEQ ID NO: 960493 - RNA, 24 nt, Human
caaaaagcacauaaacaucuacaa

SEQ ID NO: 960494 - RNA, 18 nt, Human
caacaagcaggcuccggc

SEQ ID NO: 960495 - RNA, 18 nt, Human
caacaagcaggcuccggc

SEQ ID NO: 960496 - RNA, 21 nt, Human
cacccacagcugcaacaagca

SEQ ID NO: 960497 - RNA, 19 nt, Human
caccuaaacaagcugccaa

SEQ ID NO: 960498 - RNA, 22 nt, Human
cagccagcgcuccucagagguu

SEQ ID NO: 960499 - RNA, 18 nt, Human
cagcucagcucucaaccg

SEQ ID NO: 960500 - RNA, 24 nt, Human
caucuacaaguaccaaaacauuua

SEQ ID NO: 960501 - RNA, 19 nt, Human
ccacagcugcaacaagcag

SEQ ID NO: 960502 - RNA, 19 nt, Human
ccacagcugcaacaagcag

SEQ ID NO: 960503 - RNA, 22 nt, Human
ccaccgccaaguccagcucagc

SEQ ID NO: 960504 - RNA, 22 nt, Human
cccacagcugcaacaagcaggc

SEQ ID NO: 960505 - RNA, 22 nt, Human
cccacagcugcaacaagcaggc

SEQ ID NO: 960506 - RNA, 21 nt, Human
ccgccaaguccagcucagcuc

SEQ ID NO: 960507 - RNA, 22 nt, Human
gaacacaaucugacaccguugc

SEQ ID NO: 960508 - RNA, 22 nt, Human
gcuagagccguccucacccaca

SEQ ID NO: 960509 - RNA, 22 nt, Human
gcuagagccguccucacccaca

SEQ ID NO: 960510 - RNA, 26 nt, Human
gcugccaaaauacauuaccucugauu

SEQ ID NO: 960511 - RNA, 18 nt, Human
guuacauauaaaaugucc

SEQ ID NO: 960512 - RNA, 23 nt, Human
uaaaagggaacuagcuagagccg

SEQ ID NO: 960513 - RNA, 27 nt, Human
uaaaagggaacuggccggagccgcuca

SEQ ID NO: 960514 - RNA, 24 nt, Human
uaaacaucuacaaguaccaaaaca

SEQ ID NO: 960515 - RNA, 23 nt, Human
uaccucugauuuuauuuagauuc

SEQ ID NO: 960516 - RNA, 21 nt, Human
uaggauacaaaaagcacauaa

SEQ ID NO: 960517 - RNA, 22 nt, Human
uaggauacaaaaagcacauaaa

SEQ ID NO: 960518 - RNA, 23 nt, Human
ucacccacagcugcaacaagcag

SEQ ID NO: 960519 - RNA, 23 nt, Human
ucacccacagcugcaacaagcag

SEQ ID NO: 960520 - RNA, 19 nt, Human
ucccaccgccaaguccagc

SEQ ID NO: 960521 - RNA, 19 nt, Human
ugacaccguugcauuuccu

SEQ ID NO: 960522 - RNA, 20 nt, Human
ugcauuuccugguuguaucc

SEQ ID NO: 960523 - RNA, 22 nt, Human
ugccaaaauacauuaccucuga

SEQ ID NO: 960524 - RNA, 23 nt, Human
ugccaaaauacauuaccucugau

SEQ ID NO: 960525 - RNA, 24 nt, Human
uguuaaaaucugcuagaaaaguaa

SEQ ID NO: 960526 - RNA, 25 nt, Human
uuagcaauauuuuagccaguacuuu

SEQ ID NO: 960527 - RNA, 21 nt, Human
uucugcaucuagauuuauuuc

SEQ ID NO: 960528 - RNA, 23 nt, Human
uuuauuuagauucuaaaaguuag

SEQ ID NO: 960529 - RNA, 20 nt, Human
uuuucaggaaaucacauuug

SEQ ID NO: 960530 - RNA, 20 nt, Human
uuuuuuuuuuuuuuuucagg

SEQ ID NO: 960531 - RNA, 22 nt, Human
aaaaaaaagacacgugugggga

SEQ ID NO: 960532 - RNA, 20 nt, Human
aaaacaucacuaccaaucaa

SEQ ID NO: 960533 - RNA, 18 nt, Human
aaaagcacaaauguuucc

SEQ ID NO: 960534 - RNA, 20 nt, Human
aaacaaaaaacccaaaaaua

SEQ ID NO: 960535 - RNA, 21 nt, Human
aaacaaaacaaaaaacccaaa

SEQ ID NO: 960536 - RNA, 19 nt, Human
aaaccuuucauuucuucac

SEQ ID NO: 960537 - RNA, 18 nt, Human
aaauccuagaaauuagaa

SEQ ID NO: 960538 - RNA, 18 nt, Human
aacacugcuuaagggaga

SEQ ID NO: 960539 - RNA, 18 nt, Human
aagagucauacccacuua

SEQ ID NO: 960540 - RNA, 26 nt, Human
aauacugacagauuuuaacuccgaga

SEQ ID NO: 960541 - RNA, 22 nt, Human
aauauccaccaaaucaaacagc

SEQ ID NO: 960542 - RNA, 23 nt, Human
aauugcuucuuaauagaugaagc

SEQ ID NO: 960543 - RNA, 21 nt, Human
acaaaacaaaaaacccaaaaa

SEQ ID NO: 960544 - RNA, 18 nt, Human
acaaagaaaaaaaaaaga

SEQ ID NO: 960545 - RNA, 24 nt, Human
acacacugcaaaccaaccuuaaca

SEQ ID NO: 960546 - RNA, 22 nt, Human
acauucaacauugcaaaaaaua

SEQ ID NO: 960547 - RNA, 22 nt, Human
acucauuucaccaaaaaccccc

SEQ ID NO: 960548 - RNA, 21 nt, Human
acugaagacugggagaagagg

SEQ ID NO: 960549 - RNA, 18 nt, Human
agaaaaccaccuaaugau

SEQ ID NO: 960550 - RNA, 22 nt, Human
agaaaugcaccaaauaaaaucc

SEQ ID NO: 960551 - RNA, 24 nt, Human
agacaaaaugaaucugugaaaacu

SEQ ID NO: 960552 - RNA, 26 nt, Human
agacaaaaugaaucugugaaaacuga

SEQ ID NO: 960553 - RNA, 18 nt, Human
agagcugaaagaccacug

SEQ ID NO: 960554 - RNA, 18 nt, Human
agcauaaagaauacugac

SEQ ID NO: 960555 - RNA, 18 nt, Human
agccugggagcugaggcu

SEQ ID NO: 960556 - RNA, 19 nt, Human
aguauccaaucauacguag

SEQ ID NO: 960557 - RNA, 24 nt, Human
auauuauacacuacuuuacaaaau

SEQ ID NO: 960558 - RNA, 19 nt, Human
aucccaaacaacucaguua

SEQ ID NO: 960559 - RNA, 21 nt, Human
aucccaaacaacucaguuaaa

SEQ ID NO: 960560 - RNA, 18 nt, Human
augcaucuuugauuagaa

SEQ ID NO: 960561 - RNA, 21 nt, Human
auuucuuaugaaugacuucca

SEQ ID NO: 960562 - RNA, 21 nt, Human
caaaacaaaaaacccaaaaau

SEQ ID NO: 960563 - RNA, 23 nt, Human
caaaaugaaucugugaaaacuga

SEQ ID NO: 960564 - RNA, 23 nt, Human
caaacuguaaaaaggaagacaaa

SEQ ID NO: 960565 - RNA, 21 nt, Human
caaaucaaacagcagcauuua

SEQ ID NO: 960566 - RNA, 24 nt, Human
caaccuuaacacugcuuaagggag

SEQ ID NO: 960567 - RNA, 23 nt, Human
caagaagagagcugaaagaccac

SEQ ID NO: 960568 - RNA, 26 nt, Human
cacaaacauaauagaaaaagaaggua

SEQ ID NO: 960569 - RNA, 21 nt, Human
cacaaauguuucccucuagaa

SEQ ID NO: 960570 - RNA, 22 nt, Human
cacagccuagccugggagcuga

SEQ ID NO: 960571 - RNA, 18 nt, Human
caccaaaucaaacagcag

SEQ ID NO: 960572 - RNA, 27 nt, Human
cagaaaaccaccuaaugauaguucuca

SEQ ID NO: 960573 - RNA, 21 nt, Human
cagcagcauuuaugcuuucau

SEQ ID NO: 960574 - RNA, 22 nt, Human
cauuucaccaaaaacccccacu

SEQ ID NO: 960575 - RNA, 20 nt, Human
cccacuuuuauuauauaccc

SEQ ID NO: 960576 - RNA, 19 nt, Human
ccccaggccaccggcggcc

SEQ ID NO: 960577 - RNA, 24 nt, Human
ccuaucccaaacaacucaguuaaa

SEQ ID NO: 960578 - RNA, 22 nt, Human
cgacaacagcgcacaagaagag

SEQ ID NO: 960579 - RNA, 24 nt, Human
cgcgaacgcccggcuagaaggcgg

SEQ ID NO: 960580 - RNA, 25 nt, Human
cuaaaaaacacauucaacauugcaa

SEQ ID NO: 960581 - RNA, 23 nt, Human
cuccaaaggcucauucauucucu

SEQ ID NO: 960582 - RNA, 21 nt, Human
cuccccaggccaccggcggcc

SEQ ID NO: 960583 - RNA, 22 nt, Human
cugaaagcggagggaggaggcu

SEQ ID NO: 960584 - RNA, 25 nt, Human
cuuuacaucaaaaaguaauacaaga

SEQ ID NO: 960585 - RNA, 20 nt, Human
gacaacagcgcacaagaaga

SEQ ID NO: 960586 - RNA, 22 nt, Human
gaucauauaagaccaagauugu

SEQ ID NO: 960587 - RNA, 22 nt, Human
gcucauauugauauaaaccugg

SEQ ID NO: 960588 - RNA, 19 nt, Human
ggccaccggcggccacagc

SEQ ID NO: 960589 - RNA, 20 nt, Human
ggggaaaaaaaaagaaucaa

SEQ ID NO: 960590 - RNA, 24 nt, Human
guauacuguagagggacugcuucu

SEQ ID NO: 960591 - RNA, 25 nt, Human
gucaaguuucuuucauaacuuuaau

SEQ ID NO: 960592 - RNA, 28 nt, Human
uaaaacaaaacaaaaaacccaaaaauau

SEQ ID NO: 960593 - RNA, 25 nt, Human
uaaaauaaaugguacugcuugagug

SEQ ID NO: 960594 - RNA, 24 nt, Human
uaacccauuaaaacaaaacaaaaa

SEQ ID NO: 960595 - RNA, 21 nt, Human
uaagaaaggaccuacaaauaa

SEQ ID NO: 960596 - RNA, 21 nt, Human
uacaaauaacuccauuuaaaa

SEQ ID NO: 960597 - RNA, 23 nt, Human
uaccaagauugcccuugucuguu

SEQ ID NO: 960598 - RNA, 23 nt, Human
uacccagagcagaaaugcaccaa

SEQ ID NO: 960599 - RNA, 23 nt, Human
uaccuauuuguaaacaaaauuca

SEQ ID NO: 960600 - RNA, 23 nt, Human
uacuaagaaaggaccuacaaaua

SEQ ID NO: 960601 - RNA, 28 nt, Human
uaguuaacaaaauuuugaaaucacauuu

SEQ ID NO: 960602 - RNA, 21 nt, Human
uauacuaaaaaagcauguggu

SEQ ID NO: 960603 - RNA, 18 nt, Human
uaucccaaacaacucagu

SEQ ID NO: 960604 - RNA, 20 nt, Human
uaucccuaaaagcacaaaug

SEQ ID NO: 960605 - RNA, 19 nt, Human
uauggcagguagugcccua

SEQ ID NO: 960606 - RNA, 23 nt, Human
ucaaacuaaaaaacacauucaac

SEQ ID NO: 960607 - RNA, 22 nt, Human
ucagaaaaccaccuaaugauag

SEQ ID NO: 960608 - RNA, 23 nt, Human
ucagcucauauugauauaaaccu

SEQ ID NO: 960609 - RNA, 19 nt, Human
ucauaacuuuaauauguug

SEQ ID NO: 960610 - RNA, 21 nt, Human
uccagguauucugcacuaucg

SEQ ID NO: 960611 - RNA, 23 nt, Human
ucccuuaacaaagaaaaaaaaaa

SEQ ID NO: 960612 - RNA, 23 nt, Human
ucuucaagcauaaagaauacuga

SEQ ID NO: 960613 - RNA, 19 nt, Human
ugaaaauuacaaacuguaa

SEQ ID NO: 960614 - RNA, 24 nt, Human
ugaagacugggagaagaggggggg

SEQ ID NO: 960615 - RNA, 22 nt, Human
ugacuggguuggaaggggcugg

SEQ ID NO: 960616 - RNA, 20 nt, Human
ugcacuaucgugacauuccu

SEQ ID NO: 960617 - RNA, 22 nt, Human
ugcccuugucuguuacauuagu

SEQ ID NO: 960618 - RNA, 23 nt, Human
ugccuuauaucaguaucuccaaa

SEQ ID NO: 960619 - RNA, 20 nt, Human
uggaaggggcuggucggggu

SEQ ID NO: 960620 - RNA, 21 nt, Human
uggcagguagugcccuauugg

SEQ ID NO: 960621 - RNA, 20 nt, Human
ugggagaagaggggggggcg

SEQ ID NO: 960622 - RNA, 27 nt, Human
ugggagaagaggggggggcgcauuaag

SEQ ID NO: 960623 - RNA, 20 nt, Human
uguggggaaugaauucuagu

SEQ ID NO: 960624 - RNA, 19 nt, Human
uuaaaacaaaacaaaaaac

SEQ ID NO: 960625 - RNA, 19 nt, Human
uuauuuugauccagcuggc

SEQ ID NO: 960626 - RNA, 18 nt, Human
uucaagcauaaagaauac

SEQ ID NO: 960627 - RNA, 22 nt, Human
uucgcuacaauuugaaaauugc

SEQ ID NO: 960628 - RNA, 22 nt, Human
uugaaaaauacaguauuucaga

SEQ ID NO: 960629 - RNA, 18 nt, Human
uugauuagaagaaauaaa

SEQ ID NO: 960630 - RNA, 19 nt, Human
uuuaagaaauucuuaagac

SEQ ID NO: 960631 - RNA, 19 nt, Human
uuugugagguuuuaaaugu

SEQ ID NO: 960632 - RNA, 24 nt, Human
uuuuaaaaacaucacuaccaauca

SEQ ID NO: 960633 - RNA, 21 nt, Human
aaaugccuucauuucaaauuu

SEQ ID NO: 960634 - RNA, 21 nt, Human
aagaggaaggaacgcgccugg

SEQ ID NO: 960635 - RNA, 22 nt, Human
aagaguugucauccaacaaugc

SEQ ID NO: 960636 - RNA, 20 nt, Human
aagaguuuuguguuccuuug

SEQ ID NO: 960637 - RNA, 24 nt, Human
accucauucucuaacugugacaaa

SEQ ID NO: 960638 - RNA, 21 nt, Human
acucaauucauaauaugcauu

SEQ ID NO: 960639 - RNA, 23 nt, Human
agaguugucauccaacaaugcag

SEQ ID NO: 960640 - RNA, 24 nt, Human
agaguugucauccaacaaugcagc

SEQ ID NO: 960641 - RNA, 23 nt, Human
agaguuuuguguuccuuugugga

SEQ ID NO: 960642 - RNA, 20 nt, Human
agggaagggaaggcggggcc

SEQ ID NO: 960643 - RNA, 18 nt, Human
agggaggugggcggaggg

SEQ ID NO: 960644 - RNA, 18 nt, Human
aguucauguacugaaacu

SEQ ID NO: 960645 - RNA, 23 nt, Human
caaaugccuucauuucaaauuuc

SEQ ID NO: 960646 - RNA, 21 nt, Human
caaauuucucacgcgcuucuc

SEQ ID NO: 960647 - RNA, 20 nt, Human
cagaguucaaguccagaaau

SEQ ID NO: 960648 - RNA, 24 nt, Human
cagaguucaaguccagaaauguua

SEQ ID NO: 960649 - RNA, 20 nt, Human
caucaucguuaccauuaauu

SEQ ID NO: 960650 - RNA, 23 nt, Human
ccacauagcuacauaaauuugcc

SEQ ID NO: 960651 - RNA, 18 nt, Human
cccgggaccgcggcucag

SEQ ID NO: 960652 - RNA, 18 nt, Human
cuccgcuucagggaggug

SEQ ID NO: 960653 - RNA, 20 nt, Human
cuccgcuucagggagguggg

SEQ ID NO: 960654 - RNA, 24 nt, Human
cugguggcgacggcggcuccgcuu

SEQ ID NO: 960655 - RNA, 22 nt, Human
gacaaaaagaguugucauccaa

SEQ ID NO: 960656 - RNA, 22 nt, Human
gagaggagagaggaagaggaag

SEQ ID NO: 960657 - RNA, 21 nt, Human
gccuuuuggcaucucuugcca

SEQ ID NO: 960658 - RNA, 20 nt, Human
gcguugcaucuuguauuaac

SEQ ID NO: 960659 - RNA, 19 nt, Human
ggaaggaacgcgccuggcg

SEQ ID NO: 960660 - RNA, 21 nt, Human
ggagaggagagaggaagagga

SEQ ID NO: 960661 - RNA, 20 nt, Human
uaacugugacaaaaagaguu

SEQ ID NO: 960662 - RNA, 20 nt, Human
uaagaaaaaagaauuuaucu

SEQ ID NO: 960663 - RNA, 18 nt, Human
uacaaagaguuuuguguu

SEQ ID NO: 960664 - RNA, 18 nt, Human
uaccauuaauuugaguug

SEQ ID NO: 960665 - RNA, 22 nt, Human
uacuacuggaaauguguagaag

SEQ ID NO: 960666 - RNA, 24 nt, Human
uauauagauuuuuuucuauaguuc

SEQ ID NO: 960667 - RNA, 22 nt, Human
ucuauaguucauguacugaaac

SEQ ID NO: 960668 - RNA, 20 nt, Human
ugaaacagcaucaucguuac

SEQ ID NO: 960669 - RNA, 23 nt, Human
ugacauaucauuccacauagcua

SEQ ID NO: 960670 - RNA, 18 nt, Human
ugagggugucacccggga

SEQ ID NO: 960671 - RNA, 21 nt, Human
ugaguugaaaaagaucuguca

SEQ ID NO: 960672 - RNA, 22 nt, Human
uggaaauguguagaaaccaauu

SEQ ID NO: 960673 - RNA, 19 nt, Human
uggcgucacugaggguguc

SEQ ID NO: 960674 - RNA, 19 nt, Human
ugggcggagggaagggaag

SEQ ID NO: 960675 - RNA, 22 nt, Human
ugggcggagggaagggaaggcg

SEQ ID NO: 960676 - RNA, 23 nt, Human
uggugaaacagcaucaucguuac

SEQ ID NO: 960677 - RNA, 18 nt, Human
ugugacaaaaagaguugu

SEQ ID NO: 960678 - RNA, 24 nt, Human
uucuauaguucauguacugaaacu

SEQ ID NO: 960679 - RNA, 19 nt, Human
uugccagaguucaagucca

SEQ ID NO: 960680 - RNA, 19 nt, Human
uuggcaucucuugccagag

SEQ ID NO: 960681 - RNA, 21 nt, Human
uuuuuuuuuuuuuuugucaag

SEQ ID NO: 960682 - RNA, 22 nt, Human
aaaaauaaaccaaugaagagaa

SEQ ID NO: 960683 - RNA, 18 nt, Human
aagagaaaugagaggucc

SEQ ID NO: 960684 - RNA, 22 nt, Human
aagaugcauugaaaaauaaacc

SEQ ID NO: 960685 - RNA, 25 nt, Human
aagcugguaccucuaccagaucuua

SEQ ID NO: 960686 - RNA, 20 nt, Human
acagaaccauccaguguugg

SEQ ID NO: 960687 - RNA, 22 nt, Human
agaaacuugacugcuaaccucc

SEQ ID NO: 960688 - RNA, 18 nt, Human
agagaaaugagaggucca

SEQ ID NO: 960689 - RNA, 22 nt, Human
agaggguagaaugagggaacag

SEQ ID NO: 960690 - RNA, 20 nt, Human
agccuggccaccaucaagcc

SEQ ID NO: 960691 - RNA, 18 nt, Human
aggaaaaagaggguagaa

SEQ ID NO: 960692 - RNA, 21 nt, Human
aggaaaaagaggguagaauga

SEQ ID NO: 960693 - RNA, 21 nt, Human
agguauugcaaguugaugacc

SEQ ID NO: 960694 - RNA, 22 nt, Human
augacaggauuagcaggaaaaa

SEQ ID NO: 960695 - RNA, 18 nt, Human
caagccuagcccuugucc

SEQ ID NO: 960696 - RNA, 22 nt, Human
caauuugaucucaccuuaucag

SEQ ID NO: 960697 - RNA, 23 nt, Human
caccaccuaugggcuauacccca

SEQ ID NO: 960698 - RNA, 21 nt, Human
cagaaagaaggugucuccuua

SEQ ID NO: 960699 - RNA, 18 nt, Human
cagagcaggggcauccca

SEQ ID NO: 960700 - RNA, 20 nt, Human
cagcugccucugccucucuc

SEQ ID NO: 960701 - RNA, 23 nt, Human
caggagagagcgagcgagcagug

SEQ ID NO: 960702 - RNA, 23 nt, Human
caggauuagcaggaaaaagaggg

SEQ ID NO: 960703 - RNA, 22 nt, Human
ccaauaccgaaucauauacagu

SEQ ID NO: 960704 - RNA, 19 nt, Human
ccaggcccaagaaggacug

SEQ ID NO: 960705 - RNA, 18 nt, Human
cccagaaagaaggugucu

SEQ ID NO: 960706 - RNA, 21 nt, Human
ccuccaggcccaagaaggacu

SEQ ID NO: 960707 - RNA, 19 nt, Human
ccugcccccaagccaguug

SEQ ID NO: 960708 - RNA, 22 nt, Human
ccugccccucuccucuugggag

SEQ ID NO: 960709 - RNA, 22 nt, Human
ccuguaguaaccuuaggauccc

SEQ ID NO: 960710 - RNA, 22 nt, Human
cucagucaauaccaaagcccaa

SEQ ID NO: 960711 - RNA, 23 nt, Human
cuccaccaccuaugggcuauacc

SEQ ID NO: 960712 - RNA, 23 nt, Human
cuccuuauaucucccccuccccc

SEQ ID NO: 960713 - RNA, 20 nt, Human
cucuuuccugccugccccuc

SEQ ID NO: 960714 - RNA, 21 nt, Human
cugaccacuuuucucuccacc

SEQ ID NO: 960715 - RNA, 20 nt, Human
cugccucucuccccaacaac

SEQ ID NO: 960716 - RNA, 23 nt, Human
cugccucugccucucuccccaac

SEQ ID NO: 960717 - RNA, 24 nt, Human
cuuauaucucccccuccccccaga

SEQ ID NO: 960718 - RNA, 18 nt, Human
gaacaggggcaccuucca

SEQ ID NO: 960719 - RNA, 20 nt, Human
gcaggauacuugagcccaga

SEQ ID NO: 960720 - RNA, 18 nt, Human
gccagggucugggugccu

SEQ ID NO: 960721 - RNA, 19 nt, Human
ggggcaucccaggugggga

SEQ ID NO: 960722 - RNA, 20 nt, Human
gguccaaagggacacauaau

SEQ ID NO: 960723 - RNA, 21 nt, Human
ggugucccagcaggagagaac

SEQ ID NO: 960724 - RNA, 19 nt, Human
uaccagaucuuaauauauu

SEQ ID NO: 960725 - RNA, 26 nt, Human
uaccgaaucauauacagugaacugag

SEQ ID NO: 960726 - RNA, 18 nt, Human
uaucagacagugaucagu

SEQ ID NO: 960727 - RNA, 19 nt, Human
ucaccuuaucagacaguga

SEQ ID NO: 960728 - RNA, 24 nt, Human
ucauauacagugaacugagaagcu

SEQ ID NO: 960729 - RNA, 20 nt, Human
uccagcuggaaaggaagcuc

SEQ ID NO: 960730 - RNA, 24 nt, Human
uccaguguuggggccucuccagcc

SEQ ID NO: 960731 - RNA, 18 nt, Human
uccaucagcaggacauga

SEQ ID NO: 960732 - RNA, 18 nt, Human
uccccaacaaccccgggc

SEQ ID NO: 960733 - RNA, 21 nt, Human
ucccccuccccccagagagac

SEQ ID NO: 960734 - RNA, 18 nt, Human
uccuuauaucucccccuc

SEQ ID NO: 960735 - RNA, 19 nt, Human
ucgugggagcucagagugg

SEQ ID NO: 960736 - RNA, 27 nt, Human
ucuccuuauaucucccccuccccccag

SEQ ID NO: 960737 - RNA, 21 nt, Human
ucucgugggagcucagagugg

SEQ ID NO: 960738 - RNA, 19 nt, Human
ugaaaaauaaaccaaugaa

SEQ ID NO: 960739 - RNA, 20 nt, Human
ugagaagcuacauucauuau

SEQ ID NO: 960740 - RNA, 19 nt, Human
ugagcccagaaagaaggug

SEQ ID NO: 960741 - RNA, 21 nt, Human
ugccagggucugggugccucc

SEQ ID NO: 960742 - RNA, 19 nt, Human
ugccuccaaacccccaaua

SEQ ID NO: 960743 - RNA, 20 nt, Human
ugccugccccucuccucuug

SEQ ID NO: 960744 - RNA, 22 nt, Human
ugggaugugaacuggcucugug

SEQ ID NO: 960745 - RNA, 19 nt, Human
ugggugccuccaaaccccc

SEQ ID NO: 960746 - RNA, 19 nt, Human
uguccugcccccaagccag

SEQ ID NO: 960747 - RNA, 24 nt, Human
uuaguaauuuucugccccagccag

SEQ ID NO: 960748 - RNA, 18 nt, Human
uugagcccagaaagaagg

SEQ ID NO: 960749 - RNA, 24 nt, Human
uugaucucaccuuaucagacagug

SEQ ID NO: 960750 - RNA, 19 nt, Human
uugggguuggaagauaacu

SEQ ID NO: 960751 - RNA, 21 nt, Human
aaacaacuggaaaauaguuuu

SEQ ID NO: 960752 - RNA, 22 nt, Human
aaggagauuaucuccuuggaaa

SEQ ID NO: 960753 - RNA, 29 nt, Human
aagugauuuauugauacugguuaacaucc

SEQ ID NO: 960754 - RNA, 19 nt, Human
accccgcgggcuuccgagc

SEQ ID NO: 960755 - RNA, 24 nt, Human
agaaacuuucaaaauuguacaaag

SEQ ID NO: 960756 - RNA, 19 nt, Human
agaauguuuaugguucugu

SEQ ID NO: 960757 - RNA, 20 nt, Human
agcauaaagaaaauugagaa

SEQ ID NO: 960758 - RNA, 18 nt, Human
aggcaccaagaaggagau

SEQ ID NO: 960759 - RNA, 24 nt, Human
cacaucaguuuuaaaaauuagaaa

SEQ ID NO: 960760 - RNA, 21 nt, Human
caccaagaaggagauuaucuc

SEQ ID NO: 960761 - RNA, 20 nt, Human
caccccgcgggcuuccgagc

SEQ ID NO: 960762 - RNA, 22 nt, Human
caucuagaaaauuaggcaccaa

SEQ ID NO: 960763 - RNA, 22 nt, Human
cccaagguuauuaaaagucugc

SEQ ID NO: 960764 - RNA, 22 nt, Human
cccgcugcggucgcuucucccg

SEQ ID NO: 960765 - RNA, 21 nt, Human
cccucgguggccgggcucccg

SEQ ID NO: 960766 - RNA, 19 nt, Human
ccuagugccggcagcccuc

SEQ ID NO: 960767 - RNA, 24 nt, Human
cuaccagauaaaucccaagguuau

SEQ ID NO: 960768 - RNA, 23 nt, Human
cucccgcaccccgcgggcuuccg

SEQ ID NO: 960769 - RNA, 22 nt, Human
cugaaaaugagcaagaaaucaa

SEQ ID NO: 960770 - RNA, 22 nt, Human
cuggacucacgcucggaguugc

SEQ ID NO: 960771 - RNA, 20 nt, Human
gagcaagaaaucaaaacuag

SEQ ID NO: 960772 - RNA, 21 nt, Human
gcaacaucaaugacagagaag

SEQ ID NO: 960773 - RNA, 22 nt, Human
gcuuuuuuuucucauugcaauu

SEQ ID NO: 960774 - RNA, 23 nt, Human
gucuguucccgcucccgcacccc

SEQ ID NO: 960775 - RNA, 18 nt, Human
uagaaacuuucaaaauug

SEQ ID NO: 960776 - RNA, 22 nt, Human
uagcauaaagaaaauugagaau

SEQ ID NO: 960777 - RNA, 21 nt, Human
uaggcaccaagaaggagauua

SEQ ID NO: 960778 - RNA, 25 nt, Human
uauaauuaugaaaaaaauguagaac

SEQ ID NO: 960779 - RNA, 22 nt, Human
uauauaauuaugaaaaaaaugu

SEQ ID NO: 960780 - RNA, 27 nt, Human
uaugaaaugcaaaccacaucaguuuua

SEQ ID NO: 960781 - RNA, 22 nt, Human
uccauuauauacagguagaaac

SEQ ID NO: 960782 - RNA, 22 nt, Human
uggccgggcucccgcugcgguc

SEQ ID NO: 960783 - RNA, 20 nt, Human
uguucccgcucccgcacccc

SEQ ID NO: 960784 - RNA, 22 nt, Human
uuaaaagucugcuaugcagacc

SEQ ID NO: 960785 - RNA, 22 nt, Human
uucuaaaugccaucucuuccug

SEQ ID NO: 960786 - RNA, 22 nt, Human
aaaugcuaaaggcauuuuaugg

SEQ ID NO: 960787 - RNA, 21 nt, Human
aacauuuaauaauacauaaaa

SEQ ID NO: 960788 - RNA, 22 nt, Human
aaguagugaaagcugaagaacu

SEQ ID NO: 960789 - RNA, 22 nt, Human
agcaagcaacagagaaguagug

SEQ ID NO: 960790 - RNA, 21 nt, Human
auaggacaaccacucaaacac

SEQ ID NO: 960791 - RNA, 18 nt, Human
caaccuauagggcaaaua

SEQ ID NO: 960792 - RNA, 18 nt, Human
cagcuaggcaauaaagga

SEQ ID NO: 960793 - RNA, 22 nt, Human
ggggccacuaggauacgccccu

SEQ ID NO: 960794 - RNA, 19 nt, Human
uaaguuaguaugcaaccua

SEQ ID NO: 960795 - RNA, 22 nt, Human
uaucuuuucuucuuucacaagg

SEQ ID NO: 960796 - RNA, 20 nt, Human
uauuuuaguaguuacaugau

SEQ ID NO: 960797 - RNA, 19 nt, Human
uggcugugccgaggcgggu

SEQ ID NO: 960798 - RNA, 18 nt, Human
uggguucucaaaacaguu

SEQ ID NO: 960799 - RNA, 24 nt, Human
uuacaugauuagcaagcaacagag

SEQ ID NO: 960800 - RNA, 18 nt, Human
uucacaaaugaucaucac

SEQ ID NO: 960801 - RNA, 23 nt, Human
uucuccauauacacauuuguuag

SEQ ID NO: 960802 - RNA, 20 nt, Human
uugguauuuugguauagugu

SEQ ID NO: 960803 - RNA, 20 nt, Human
uuucucagcgcaaggccgga

SEQ ID NO: 960804 - RNA, 19 nt, Human
uuugcauuuaaauauuugu

SEQ ID NO: 960805 - RNA, 21 nt, Human
uuuuauggugacaugaaugcu

SEQ ID NO: 960806 - RNA, 26 nt, Human
aaaaagaaacagaaucuguugcagaa

SEQ ID NO: 960807 - RNA, 23 nt, Human
aaaaagcaggcacucagcugguu

SEQ ID NO: 960808 - RNA, 22 nt, Human
aacaauccuguucacccucuca

SEQ ID NO: 960809 - RNA, 24 nt, Human
aagauauccugccccagguccuua

SEQ ID NO: 960810 - RNA, 20 nt, Human
accacagaagggagaaacaa

SEQ ID NO: 960811 - RNA, 21 nt, Human
accccagacccugggcuacag

SEQ ID NO: 960812 - RNA, 20 nt, Human
agaaaacugacauggcccuc

SEQ ID NO: 960813 - RNA, 19 nt, Human
agaaggccagacauaaagg

SEQ ID NO: 960814 - RNA, 21 nt, Human
agagugaagaacugauucuau

SEQ ID NO: 960815 - RNA, 20 nt, Human
agcaaaaggcaguucauccc

SEQ ID NO: 960816 - RNA, 24 nt, Human
agcaaggaaaagagucgggaaaaa

SEQ ID NO: 960817 - RNA, 18 nt, Human
agccaagccuacagcauc

SEQ ID NO: 960818 - RNA, 22 nt, Human
agcuuccagcaaaaggcaguuc

SEQ ID NO: 960819 - RNA, 24 nt, Human
aggacccccaacccuugaggagcc

SEQ ID NO: 960820 - RNA, 27 nt, Human
aggcagggaaaagguaagggcaggguc

SEQ ID NO: 960821 - RNA, 22 nt, Human
auaaaccacagaagggagaaac

SEQ ID NO: 960822 - RNA, 23 nt, Human
auaaaggaguaaaaagcaggcac

SEQ ID NO: 960823 - RNA, 20 nt, Human
aucccuuucaccuuccaucc

SEQ ID NO: 960824 - RNA, 19 nt, Human
auggcuccaauuccagaac

SEQ ID NO: 960825 - RNA, 18 nt, Human
caaaucgaagcagcuuua

SEQ ID NO: 960826 - RNA, 26 nt, Human
cacagccuaagacagcuuccagcaaa

SEQ ID NO: 960827 - RNA, 22 nt, Human
cacccucucagaagccacuuaa

SEQ ID NO: 960828 - RNA, 21 nt, Human
cagaggcagggaaaagguaag

SEQ ID NO: 960829 - RNA, 23 nt, Human
cagcaaaaggcaguucaucccuu

SEQ ID NO: 960830 - RNA, 18 nt, Human
cagccuaagacagcuucc

SEQ ID NO: 960831 - RNA, 22 nt, Human
ccaacauagguggagucaaggg

SEQ ID NO: 960832 - RNA, 20 nt, Human
ccaaccuagcccacccuuaa

SEQ ID NO: 960833 - RNA, 18 nt, Human
ccacagaagggagaaaca

SEQ ID NO: 960834 - RNA, 20 nt, Human
ccauccaaccuagcccaccc

SEQ ID NO: 960835 - RNA, 22 nt, Human
cccagacccugggcuacagaga

SEQ ID NO: 960836 - RNA, 21 nt, Human
ccccagacccugggcuacaga

SEQ ID NO: 960837 - RNA, 21 nt, Human
cccucucagaagccacuuaaa

SEQ ID NO: 960838 - RNA, 21 nt, Human
ccuccaggccugagagugucu

SEQ ID NO: 960839 - RNA, 24 nt, Human
cgggaaaaagaaacagaaucuguu

SEQ ID NO: 960840 - RNA, 25 nt, Human
cucuugguucugcucagcacccauc

SEQ ID NO: 960841 - RNA, 18 nt, Human
cuugguucugcucagcac

SEQ ID NO: 960842 - RNA, 20 nt, Human
gaaacagaaucuguugcaga

SEQ ID NO: 960843 - RNA, 24 nt, Human
gaaauacggaccuggaaauaccaa

SEQ ID NO: 960844 - RNA, 21 nt, Human
gacagcuuccagcaaaaggca

SEQ ID NO: 960845 - RNA, 24 nt, Human
gcuacagagaaauacggaccugga

SEQ ID NO: 960846 - RNA, 21 nt, Human
gcugugguuccccugcuccug

SEQ ID NO: 960847 - RNA, 19 nt, Human
gggcaggcucauaaaccac

SEQ ID NO: 960848 - RNA, 24 nt, Human
ggggagaagauauccugccccagg

SEQ ID NO: 960849 - RNA, 19 nt, Human
guucaaagggugaacagca

SEQ ID NO: 960850 - RNA, 18 nt, Human
uaaaggaguaaaaagcag

SEQ ID NO: 960851 - RNA, 18 nt, Human
uaagacagcuuccagcaa

SEQ ID NO: 960852 - RNA, 23 nt, Human
uacagcaucacauaccuggcagc

SEQ ID NO: 960853 - RNA, 19 nt, Human
uaccccagacccugggcua

SEQ ID NO: 960854 - RNA, 18 nt, Human
uagaagaucccuggggga

SEQ ID NO: 960855 - RNA, 21 nt, Human
uagaagaucccugggggagaa

SEQ ID NO: 960856 - RNA, 19 nt, Human
uagaaggccagacauaaag

SEQ ID NO: 960857 - RNA, 19 nt, Human
uagcccacccuuaauaaug

SEQ ID NO: 960858 - RNA, 18 nt, Human
uagguggcagaaaacuga

SEQ ID NO: 960859 - RNA, 18 nt, Human
ucacagaaggaauggccu

SEQ ID NO: 960860 - RNA, 19 nt, Human
uccaaccuagcccacccuu

SEQ ID NO: 960861 - RNA, 22 nt, Human
uccaaccuagcccacccuuaau

SEQ ID NO: 960862 - RNA, 24 nt, Human
ucccugggggagaagauauccugc

SEQ ID NO: 960863 - RNA, 21 nt, Human
uccugccccagguccuuacag

SEQ ID NO: 960864 - RNA, 24 nt, Human
ugcccugccuccaggccugagagu

SEQ ID NO: 960865 - RNA, 23 nt, Human
ugccuccaggccugagagugucu

SEQ ID NO: 960866 - RNA, 21 nt, Human
ugcgagggagaaggaccccca

SEQ ID NO: 960867 - RNA, 22 nt, Human
ugcucagcacccaucccucacg

SEQ ID NO: 960868 - RNA, 20 nt, Human
uggaaauaccaagucagagg

SEQ ID NO: 960869 - RNA, 25 nt, Human
uggcagaaaacugacauggcccuca

SEQ ID NO: 960870 - RNA, 22 nt, Human
uggcugcgagggagaaggaccc

SEQ ID NO: 960871 - RNA, 19 nt, Human
ugguucugcucagcaccca

SEQ ID NO: 960872 - RNA, 21 nt, Human
uguaguauuagggagagugaa

SEQ ID NO: 960873 - RNA, 24 nt, Human
uguaguauuagggagagugaagaa

SEQ ID NO: 960874 - RNA, 24 nt, Human
uguucacccucucagaagccacuu

SEQ ID NO: 960875 - RNA, 22 nt, Human
uuggacagauccuagaaggcca

SEQ ID NO: 960876 - RNA, 21 nt, Human
uuguucaaagggugaacagca

SEQ ID NO: 960877 - RNA, 22 nt, Human
uuuuuuuuuuuuuuuuuaccaa

SEQ ID NO: 960878 - RNA, 23 nt, Human
aaccacugcaacaaacaagcacc

SEQ ID NO: 960879 - RNA, 20 nt, Human
acacuggcaccuaaagacag

SEQ ID NO: 960880 - RNA, 22 nt, Human
accacugcaacaaacaagcacc

SEQ ID NO: 960881 - RNA, 23 nt, Human
aggccuuugacagcacagugagg

SEQ ID NO: 960882 - RNA, 19 nt, Human
caacaaacaagcacccaag

SEQ ID NO: 960883 - RNA, 29 nt, Human
caacaaacaagcacccaagagaggcugug

SEQ ID NO: 960884 - RNA, 23 nt, Human
cacccacaggccuuugacagcac

SEQ ID NO: 960885 - RNA, 20 nt, Human
cacugcaacaaacaagcacc

SEQ ID NO: 960886 - RNA, 20 nt, Human
cagggaccgaggcuguggag

SEQ ID NO: 960887 - RNA, 20 nt, Human
cagggaccgaggcuguggag

SEQ ID NO: 960888 - RNA, 18 nt, Human
ccacaggccuuugacagc

SEQ ID NO: 960889 - RNA, 20 nt, Human
cggcugcggcgagcuggcuu

SEQ ID NO: 960890 - RNA, 19 nt, Human
cuaaaggcagggaccgagg

SEQ ID NO: 960891 - RNA, 23 nt, Human
gacaggccgugcagcuaaaagga

SEQ ID NO: 960892 - RNA, 21 nt, Human
gagcccugcacccacaggccu

SEQ ID NO: 960893 - RNA, 22 nt, Human
gcggcagagcccugcacccaca

SEQ ID NO: 960894 - RNA, 23 nt, Human
ggcuguggaggggcgagcagggc

SEQ ID NO: 960895 - RNA, 20 nt, Human
ggugacgggguuccgagcac

SEQ ID NO: 960896 - RNA, 21 nt, Human
ggugcggugaaggcccaggga

SEQ ID NO: 960897 - RNA, 18 nt, Human
gucucccucacaaucuca

SEQ ID NO: 960898 - RNA, 19 nt, Human
ucacacuggcaccuaaaga

SEQ ID NO: 960899 - RNA, 21 nt, Human
ucccgcguuucuaaaggcagg

SEQ ID NO: 960900 - RNA, 24 nt, Human
ucccgcguuucuaaaggcagggac

SEQ ID NO: 960901 - RNA, 21 nt, Human
uuagguccugggucucccuca

SEQ ID NO: 960902 - RNA, 24 nt, Human
uugacagcacagugaggggccucc

SEQ ID NO: 960903 - RNA, 22 nt, Human
aaacaggcagacucuaagccca

SEQ ID NO: 960904 - RNA, 23 nt, Human
aaacuggcuuuauuugucacuua

SEQ ID NO: 960905 - RNA, 21 nt, Human
aacaggcagacucuaagccca

SEQ ID NO: 960906 - RNA, 23 nt, Human
aacauccuuggucccaccaaugu

SEQ ID NO: 960907 - RNA, 24 nt, Human
aaccugacuucacuaccaaccuug

SEQ ID NO: 960908 - RNA, 18 nt, Human
aacugaucaacaccacca

SEQ ID NO: 960909 - RNA, 21 nt, Human
aacugaucaacaccaccacag

SEQ ID NO: 960910 - RNA, 20 nt, Human
aagaaaauucugaacacagc

SEQ ID NO: 960911 - RNA, 28 nt, Human
aaugaaagaauacgaaauucaaaaacau

SEQ ID NO: 960912 - RNA, 22 nt, Human
acacccuacugccaaaaugaaa

SEQ ID NO: 960913 - RNA, 24 nt, Human
agaaacaggcagacucuaagccca

SEQ ID NO: 960914 - RNA, 21 nt, Human
agagugagaaauucccuuugu

SEQ ID NO: 960915 - RNA, 31 nt, Human
agcaacugaucaacaccaccacagcccaugg

SEQ ID NO: 960916 - RNA, 22 nt, Human
agcaaggucuccagagugugcc

SEQ ID NO: 960917 - RNA, 22 nt, Human
agcagcagagcagacagggcag

SEQ ID NO: 960918 - RNA, 19 nt, Human
agcagcuuccucaaccugu

SEQ ID NO: 960919 - RNA, 26 nt, Human
agccagcucgaaaccucgagcuccuc

SEQ ID NO: 960920 - RNA, 23 nt, Human
agcccccacccacccaccgugac

SEQ ID NO: 960921 - RNA, 19 nt, Human
agcugccugccugccagag

SEQ ID NO: 960922 - RNA, 18 nt, Human
agcuuggcagagcugaug

SEQ ID NO: 960923 - RNA, 20 nt, Human
auaugccgcagcagcacgcg

SEQ ID NO: 960924 - RNA, 24 nt, Human
augacccaaguggacuaaacacgg

SEQ ID NO: 960925 - RNA, 19 nt, Human
caacugaucaacaccacca

SEQ ID NO: 960926 - RNA, 24 nt, Human
cacacccuacugccaaaaugaaac

SEQ ID NO: 960927 - RNA, 22 nt, Human
cacaguaagaaaauucugaaca

SEQ ID NO: 960928 - RNA, 22 nt, Human
cacaguggaaugaaagaauacg

SEQ ID NO: 960929 - RNA, 18 nt, Human
caccaaugucuaaagcca

SEQ ID NO: 960930 - RNA, 20 nt, Human
caccugucagcacaaacaga

SEQ ID NO: 960931 - RNA, 19 nt, Human
cacugcacagcagcuccgc

SEQ ID NO: 960932 - RNA, 18 nt, Human
cagacucuaagcccaacc

SEQ ID NO: 960933 - RNA, 23 nt, Human
cagcacaaacagaacuuauucca

SEQ ID NO: 960934 - RNA, 25 nt, Human
cagcacaaacagaacuuauuccaga

SEQ ID NO: 960935 - RNA, 19 nt, Human
cagcacugagaaggugcaa

SEQ ID NO: 960936 - RNA, 19 nt, Human
cagcccccugcccaccagc

SEQ ID NO: 960937 - RNA, 22 nt, Human
cagcuagaagagccaauaggug

SEQ ID NO: 960938 - RNA, 24 nt, Human
cagcuucacacccuacugccaaaa

SEQ ID NO: 960939 - RNA, 19 nt, Human
cagcuuccucaaccugucc

SEQ ID NO: 960940 - RNA, 24 nt, Human
caggcccccuucuuaggaucaggg

SEQ ID NO: 960941 - RNA, 22 nt, Human
cagugccaggauaaaaagcaaa

SEQ ID NO: 960942 - RNA, 24 nt, Human
caugcaccccgaaccugacuucac

SEQ ID NO: 960943 - RNA, 21 nt, Human
ccacagcccaugcaccccgaa

SEQ ID NO: 960944 - RNA, 24 nt, Human
ccaccacagcccaugcaccccgaa

SEQ ID NO: 960945 - RNA, 24 nt, Human
ccagccgaugguuacaggcugcag

SEQ ID NO: 960946 - RNA, 18 nt, Human
cccaaguggacuaaacac

SEQ ID NO: 960947 - RNA, 18 nt, Human
cccaccaaugucuaaagc

SEQ ID NO: 960948 - RNA, 19 nt, Human
cccacugucagaguggggu

SEQ ID NO: 960949 - RNA, 20 nt, Human
cccacugucagagugggguc

SEQ ID NO: 960950 - RNA, 20 nt, Human
cccgaaccugacuucacuac

SEQ ID NO: 960951 - RNA, 25 nt, Human
cccuaaaggccagagagagggugcu

SEQ ID NO: 960952 - RNA, 20 nt, Human
cccuacugccaaaaugaaac

SEQ ID NO: 960953 - RNA, 24 nt, Human
ccucaggaucuuagcacccaacuc

SEQ ID NO: 960954 - RNA, 22 nt, Human
ccucuguagcagcagagcagac

SEQ ID NO: 960955 - RNA, 24 nt, Human
ccuuggucacucuguuuccuggcu

SEQ ID NO: 960956 - RNA, 23 nt, Human
cgcguuccacugcacagcagcuc

SEQ ID NO: 960957 - RNA, 21 nt, Human
cggcgcggcgcggcgcggggc

SEQ ID NO: 960958 - RNA, 18 nt, Human
cgggcuccgggucccgcu

SEQ ID NO: 960959 - RNA, 21 nt, Human
cggggccgggccucggaucgc

SEQ ID NO: 960960 - RNA, 22 nt, Human
cgugaccaucacccacagggcu

SEQ ID NO: 960961 - RNA, 19 nt, Human
cgugugcccacugucagag

SEQ ID NO: 960962 - RNA, 25 nt, Human
cuaagcacaguaagaaaauucugaa

SEQ ID NO: 960963 - RNA, 25 nt, Human
cuccccgacaggcugcacgcacccc

SEQ ID NO: 960964 - RNA, 20 nt, Human
cuccccugcucaggacuggg

SEQ ID NO: 960965 - RNA, 21 nt, Human
cuccgggucccgcuucagcuc

SEQ ID NO: 960966 - RNA, 19 nt, Human
cuccugaggccuggugccu

SEQ ID NO: 960967 - RNA, 23 nt, Human
cucgaaaccucgagcuccucagg

SEQ ID NO: 960968 - RNA, 21 nt, Human
cugacuucacuaccaaccuug

SEQ ID NO: 960969 - RNA, 22 nt, Human
cugaggccuggugccuuccagc

SEQ ID NO: 960970 - RNA, 20 nt, Human
cugcagccgcauacagcacu

SEQ ID NO: 960971 - RNA, 24 nt, Human
cugcccuugcugcugggcagugcc

SEQ ID NO: 960972 - RNA, 18 nt, Human
cugcuccgcgugaggcga

SEQ ID NO: 960973 - RNA, 21 nt, Human
cugcuccgcgugaggcgacgc

SEQ ID NO: 960974 - RNA, 19 nt, Human
cugcugcccuugcugcugg

SEQ ID NO: 960975 - RNA, 23 nt, Human
cugcugcccuugcugcugggcag

SEQ ID NO: 960976 - RNA, 23 nt, Human
cugcugcugaguugcuggguggc

SEQ ID NO: 960977 - RNA, 22 nt, Human
cuggagcagcuuccucaaccug

SEQ ID NO: 960978 - RNA, 18 nt, Human
cuggugacgcagaaagga

SEQ ID NO: 960979 - RNA, 20 nt, Human
cuguccuuaaaaaaaucacu

SEQ ID NO: 960980 - RNA, 18 nt, Human
cugugcuuugcaggcugc

SEQ ID NO: 960981 - RNA, 21 nt, Human
cuugcgugcaguccuaagcac

SEQ ID NO: 960982 - RNA, 18 nt, Human
gaaagccaucccucucuu

SEQ ID NO: 960983 - RNA, 18 nt, Human
gaaccauguggguaggag

SEQ ID NO: 960984 - RNA, 24 nt, Human
gagagacacgucagugcuagcccg

SEQ ID NO: 960985 - RNA, 18 nt, Human
gagcagacagggcagugg

SEQ ID NO: 960986 - RNA, 20 nt, Human
gagggugcucaucuccagga

SEQ ID NO: 960987 - RNA, 22 nt, Human
gaguugcuggguggcuuuaggc

SEQ ID NO: 960988 - RNA, 22 nt, Human
gcaguccuaagcacaguaagaa

SEQ ID NO: 960989 - RNA, 20 nt, Human
gccaggauaaaaagcaaaau

SEQ ID NO: 960990 - RNA, 19 nt, Human
gcccugugcuuugcaggcu

SEQ ID NO: 960991 - RNA, 24 nt, Human
gcccugugcuuugcaggcugccgu

SEQ ID NO: 960992 - RNA, 25 nt, Human
gcgacgcugcccgcggcccagcgcg

SEQ ID NO: 960993 - RNA, 18 nt, Human
gcgcggcgcggggcgggg

SEQ ID NO: 960994 - RNA, 18 nt, Human
gcgcggggcggggccggg

SEQ ID NO: 960995 - RNA, 26 nt, Human
gcugcagccgcauacagcacugagaa

SEQ ID NO: 960996 - RNA, 18 nt, Human
gcuucagcucagcucugc

SEQ ID NO: 960997 - RNA, 23 nt, Human
ggacaaacggacaucacugcaag

SEQ ID NO: 960998 - RNA, 25 nt, Human
ggccggggccgggccucggaucgcu

SEQ ID NO: 960999 - RNA, 21 nt, Human
ggccuggugccuuccagcccc

SEQ ID NO: 961000 - RNA, 18 nt, Human
ggcgcggcgcggcgcggg

SEQ ID NO: 961001 - RNA, 20 nt, Human
ggcgcggcgcggcgcggggc

SEQ ID NO: 961002 - RNA, 21 nt, Human
ggcuguggcgguggcccugug

SEQ ID NO: 961003 - RNA, 26 nt, Human
gggcggggccggggccgggccucgga

SEQ ID NO: 961004 - RNA, 24 nt, Human
gggcuugugagcacuaagucaguu

SEQ ID NO: 961005 - RNA, 22 nt, Human
ggggccggggccgggccucgga

SEQ ID NO: 961006 - RNA, 22 nt, Human
ggucacucuguuuccuggcuag

SEQ ID NO: 961007 - RNA, 20 nt, Human
gugaccaucacccacagggc

SEQ ID NO: 961008 - RNA, 18 nt, Human
gugugcccacugucagag

SEQ ID NO: 961009 - RNA, 20 nt, Human
guuugugcuuccaaccagag

SEQ ID NO: 961010 - RNA, 21 nt, Human
uaagccagauauucccacgcc

SEQ ID NO: 961011 - RNA, 18 nt, Human
uacauggacacuugggga

SEQ ID NO: 961012 - RNA, 26 nt, Human
uaccacaaugucuccccuugcuaggg

SEQ ID NO: 961013 - RNA, 20 nt, Human
uagaagagccaauaggugca

SEQ ID NO: 961014 - RNA, 24 nt, Human
uagacauuucaguguuugugcuuc

SEQ ID NO: 961015 - RNA, 21 nt, Human
uagcacugccagcaaggucuc

SEQ ID NO: 961016 - RNA, 23 nt, Human
uagcagaaacaggcagacucuaa

SEQ ID NO: 961017 - RNA, 23 nt, Human
uagcccggcggcaagcggcgcgg

SEQ ID NO: 961018 - RNA, 18 nt, Human
uagggcagcugcgaggag

SEQ ID NO: 961019 - RNA, 21 nt, Human
ucaacaccaccacagcccaug

SEQ ID NO: 961020 - RNA, 19 nt, Human
ucacaguucuuuuugccag

SEQ ID NO: 961021 - RNA, 18 nt, Human
ucagcucagcucugcucc

SEQ ID NO: 961022 - RNA, 22 nt, Human
ucagcucugcuccgcgugaggc

SEQ ID NO: 961023 - RNA, 24 nt, Human
ucaguguuugugcuuccaaccaga

SEQ ID NO: 961024 - RNA, 23 nt, Human
uccacagauggccaggagugucu

SEQ ID NO: 961025 - RNA, 19 nt, Human
ucccuuggucacucuguuu

SEQ ID NO: 961026 - RNA, 20 nt, Human
uccuaagcacaguaagaaaa

SEQ ID NO: 961027 - RNA, 19 nt, Human
ucgaaaccucgagcuccuc

SEQ ID NO: 961028 - RNA, 23 nt, Human
ucuccagagugugccccucugcc

SEQ ID NO: 961029 - RNA, 22 nt, Human
ucugcucccagcuucacacccu

SEQ ID NO: 961030 - RNA, 22 nt, Human
ugacgacacuggugacgcagaa

SEQ ID NO: 961031 - RNA, 27 nt, Human
ugaucaacaccaccacagcccaugcac

SEQ ID NO: 961032 - RNA, 20 nt, Human
ugcacgcacccccaggcccc

SEQ ID NO: 961033 - RNA, 23 nt, Human
ugcugcugaguugcuggguggcu

SEQ ID NO: 961034 - RNA, 18 nt, Human
uggccaggcucagcuugg

SEQ ID NO: 961035 - RNA, 23 nt, Human
uggugccuuccagcccccugccc

SEQ ID NO: 961036 - RNA, 18 nt, Human
uguccagugaugacuggc

SEQ ID NO: 961037 - RNA, 19 nt, Human
uuacacaguggaaugaaag

SEQ ID NO: 961038 - RNA, 19 nt, Human
uuagcacccaacucugcug

SEQ ID NO: 961039 - RNA, 21 nt, Human
uucaccuuaucucaguuaugc

SEQ ID NO: 961040 - RNA, 22 nt, Human
uuggaaaaugucuagcacuuua

SEQ ID NO: 961041 - RNA, 18 nt, Human
uuuccuggcuagcacugc

SEQ ID NO: 961042 - RNA, 18 nt, Human
acggagcccccgaaagac

SEQ ID NO: 961043 - RNA, 23 nt, Human
agaaaaaaacugauuccucaaaa

SEQ ID NO: 961044 - RNA, 21 nt, Human
ccccuguaaaacagcaagcuu

SEQ ID NO: 961045 - RNA, 18 nt, Human
cgaaagaccggcagcugg

SEQ ID NO: 961046 - RNA, 22 nt, Human
cucaugaacagauagucacuau

SEQ ID NO: 961047 - RNA, 24 nt, Human
gaacagauagucacuauacuuuug

SEQ ID NO: 961048 - RNA, 22 nt, Human
guaaaacagcaagcuuacagaa

SEQ ID NO: 961049 - RNA, 23 nt, Human
uaaaacagcaagcuuacagaaaa

SEQ ID NO: 961050 - RNA, 19 nt, Human
uagaaaaaaacugauuccu

SEQ ID NO: 961051 - RNA, 21 nt, Human
uagaaaaaaacugauuccuca

SEQ ID NO: 961052 - RNA, 19 nt, Human
uagccauagaaaaaaacug

SEQ ID NO: 961053 - RNA, 21 nt, Human
uagucacuauacuuuuggucc

SEQ ID NO: 961054 - RNA, 19 nt, Human
uccccuguaaaacagcaag

SEQ ID NO: 961055 - RNA, 18 nt, Human
ucucucaugaacagauag

SEQ ID NO: 961056 - RNA, 19 nt, Human
ucucucaugaacagauagu

SEQ ID NO: 961057 - RNA, 22 nt, Human
uucaguauaagugaauuaaaaa

SEQ ID NO: 961058 - RNA, 19 nt, Human
uuggguuuuuuccuccuuc

SEQ ID NO: 961059 - RNA, 24 nt, Human
uuuuuuuuuuuuuuuuuuuuucag

SEQ ID NO: 961060 - RNA, 26 nt, Human
aaacaucuugaaaggaaaaaaaaaaa

SEQ ID NO: 961061 - RNA, 23 nt, Human
aaauagaaaacaucuugaaagga

SEQ ID NO: 961062 - RNA, 19 nt, Human
agaaaacaucuugaaagga

SEQ ID NO: 961063 - RNA, 23 nt, Human
aggaaaaaaaaaaacccacaaaa

SEQ ID NO: 961064 - RNA, 24 nt, Human
cacccucacacuuguucaccaauc

SEQ ID NO: 961065 - RNA, 22 nt, Human
ccaaccgacaccuaaaaugcca

SEQ ID NO: 961066 - RNA, 18 nt, Human
cccacaaaacauacaggc

SEQ ID NO: 961067 - RNA, 22 nt, Human
cccacaaaacauacaggcaaau

SEQ ID NO: 961068 - RNA, 24 nt, Human
cucacacuuguucaccaaucucua

SEQ ID NO: 961069 - RNA, 20 nt, Human
cugugaguuucucacacccu

SEQ ID NO: 961070 - RNA, 21 nt, Human
gaaaaaaaaaaacccacaaaa

SEQ ID NO: 961071 - RNA, 22 nt, Human
gaaaaaaaaaaacccacaaaac

SEQ ID NO: 961072 - RNA, 19 nt, Human
gaaaggaaaaaaaaaaacc

SEQ ID NO: 961073 - RNA, 20 nt, Human
gcugauggagcccaccggaa

SEQ ID NO: 961074 - RNA, 21 nt, Human
uaaaaugccagggacacguag

SEQ ID NO: 961075 - RNA, 22 nt, Human
ugccuacccaaccgacaccuaa

SEQ ID NO: 961076 - RNA, 20 nt, Human
ugcugauggagcccaccgga

SEQ ID NO: 961077 - RNA, 21 nt, Human
ugcugauggagcccaccggaa

SEQ ID NO: 961078 - RNA, 19 nt, Human
uucucacacccucacacuu

SEQ ID NO: 961079 - RNA, 20 nt, Human
uuucucacacccucacacuu

SEQ ID NO: 961080 - RNA, 27 nt, Human
uuuuuuuuuuuuuuuuuuuuacuuuga

SEQ ID NO: 961081 - RNA, 23 nt, Human
aaaaguuuaaaucuaugagugga

SEQ ID NO: 961082 - RNA, 21 nt, Human
aaaauaaaaguuuaaaucuau

SEQ ID NO: 961083 - RNA, 19 nt, Human
aaaauuccaaaacguagcc

SEQ ID NO: 961084 - RNA, 18 nt, Human
aaagcugaacaaagaaaa

SEQ ID NO: 961085 - RNA, 22 nt, Human
aacaacagagcuuaucaagaga

SEQ ID NO: 961086 - RNA, 21 nt, Human
aagaaaaggaaaauuccaaaa

SEQ ID NO: 961087 - RNA, 24 nt, Human
aagaaaaggaaaauuccaaaacgu

SEQ ID NO: 961088 - RNA, 18 nt, Human
aagauagagguuuagaaa

SEQ ID NO: 961089 - RNA, 23 nt, Human
aagcuuccuuugcauguuauacu

SEQ ID NO: 961090 - RNA, 24 nt, Human
accauccccuacuugaaagguuuc

SEQ ID NO: 961091 - RNA, 30 nt, Human
agccaccaguaucagaaaacauacaguccu

SEQ ID NO: 961092 - RNA, 22 nt, Human
agguuuagaaaugguuuaagcc

SEQ ID NO: 961093 - RNA, 25 nt, Human
agugaaccuuuuuuaaaaaagguuu

SEQ ID NO: 961094 - RNA, 23 nt, Human
auaauaacaaaggauuuauuauc

SEQ ID NO: 961095 - RNA, 18 nt, Human
auacacuuucaaaacagc

SEQ ID NO: 961096 - RNA, 21 nt, Human
auuugugguguuugcuaaaac

SEQ ID NO: 961097 - RNA, 26 nt, Human
caaaaaauugcaaauaugugcaaaca

SEQ ID NO: 961098 - RNA, 24 nt, Human
caaaaugaauacaaaaaaagcuuc

SEQ ID NO: 961099 - RNA, 21 nt, Human
caagagauuaucaacuugagc

SEQ ID NO: 961100 - RNA, 25 nt, Human
caccaguaucagaaaacauacaguc

SEQ ID NO: 961101 - RNA, 24 nt, Human
cacccccuccuccgccaccacugg

SEQ ID NO: 961102 - RNA, 18 nt, Human
cacccccuccuccgccuc

SEQ ID NO: 961103 - RNA, 22 nt, Human
cacucccgcucccaacgcccca

SEQ ID NO: 961104 - RNA, 26 nt, Human
cagaugaaauaaauguaccauccccu

SEQ ID NO: 961105 - RNA, 18 nt, Human
cauguggaaugugagaga

SEQ ID NO: 961106 - RNA, 21 nt, Human
ccauuucuagaguaaaaaaac

SEQ ID NO: 961107 - RNA, 18 nt, Human
ccgccgccgccacgacca

SEQ ID NO: 961108 - RNA, 20 nt, Human
ccgccgccgccacgaccacg

SEQ ID NO: 961109 - RNA, 20 nt, Human
ccgccgccucuccuccccgc

SEQ ID NO: 961110 - RNA, 22 nt, Human
ccgccgccucuccuccccgccc

SEQ ID NO: 961111 - RNA, 19 nt, Human
ccuccgccucgcucuucuc

SEQ ID NO: 961112 - RNA, 19 nt, Human
ccucuccuccccgccccca

SEQ ID NO: 961113 - RNA, 24 nt, Human
cuaagauagagguuuagaaauggu

SEQ ID NO: 961114 - RNA, 23 nt, Human
cuucucaccgccgccgccacgac

SEQ ID NO: 961115 - RNA, 18 nt, Human
gaccacgcucugcacucc

SEQ ID NO: 961116 - RNA, 23 nt, Human
gauguuacuuaaaacauauuugu

SEQ ID NO: 961117 - RNA, 22 nt, Human
ggaaaauuccaaaacguagccc

SEQ ID NO: 961118 - RNA, 23 nt, Human
gucaaguagacugaaaacuaagg

SEQ ID NO: 961119 - RNA, 21 nt, Human
uaagaaaaggaaaauuccaaa

SEQ ID NO: 961120 - RNA, 19 nt, Human
uaagccaccaguaucagaa

SEQ ID NO: 961121 - RNA, 21 nt, Human
uacgagucaacaaacuucuau

SEQ ID NO: 961122 - RNA, 22 nt, Human
uaucacugcaaaaugucaacaa

SEQ ID NO: 961123 - RNA, 19 nt, Human
uaucauguggaaugugaga

SEQ ID NO: 961124 - RNA, 21 nt, Human
ucaaaacagcaaaaaauugca

SEQ ID NO: 961125 - RNA, 21 nt, Human
ucaaaagaauuagauccugca

SEQ ID NO: 961126 - RNA, 20 nt, Human
ucaacaaacuucuauuuuuu

SEQ ID NO: 961127 - RNA, 21 nt, Human
ucaccgccgccgccacgacca

SEQ ID NO: 961128 - RNA, 21 nt, Human
uccaaaaugaauacaaaaaaa

SEQ ID NO: 961129 - RNA, 24 nt, Human
uccugcaucuuuacuuuuacuggg

SEQ ID NO: 961130 - RNA, 25 nt, Human
ucucaccgccgccgccacgaccacg

SEQ ID NO: 961131 - RNA, 20 nt, Human
ugagagaaugccaacuuaug

SEQ ID NO: 961132 - RNA, 22 nt, Human
ugcaaauaugugcaaacacugu

SEQ ID NO: 961133 - RNA, 21 nt, Human
ugcuaaaacuaaagcugaaca

SEQ ID NO: 961134 - RNA, 22 nt, Human
uggacacugccgccgccgccuc

SEQ ID NO: 961135 - RNA, 18 nt, Human
uggcguagcuuggacacu

SEQ ID NO: 961136 - RNA, 19 nt, Human
uguucugguuuaugauaca

SEQ ID NO: 961137 - RNA, 22 nt, Human
uuauugacaggaguccaaaaug

SEQ ID NO: 961138 - RNA, 24 nt, Human
uuauugacaggaguccaaaaugaa

SEQ ID NO: 961139 - RNA, 23 nt, Human
uucaaaacagcaaaaaauugcaa

SEQ ID NO: 961140 - RNA, 25 nt, Human
uuucagguuguaccaaggcaccgcc

SEQ ID NO: 961141 - RNA, 19 nt, Human
uuuuuuuuuuuuacgaguc

SEQ ID NO: 961142 - RNA, 21 nt, Human
aaagccaaaaccagagagaaa

SEQ ID NO: 961143 - RNA, 20 nt, Human
aacacucuguacugucgccu

SEQ ID NO: 961144 - RNA, 23 nt, Human
aacggauaaggucaggagaggaa

SEQ ID NO: 961145 - RNA, 22 nt, Human
aagccaaaaccagagagaaaga

SEQ ID NO: 961146 - RNA, 22 nt, Human
aauauacucaauaacauaccaa

SEQ ID NO: 961147 - RNA, 21 nt, Human
aauugccuuucauuccuccau

SEQ ID NO: 961148 - RNA, 22 nt, Human
accgggggacauggugaggucc

SEQ ID NO: 961149 - RNA, 19 nt, Human
acucugucccaucuucccu

SEQ ID NO: 961150 - RNA, 18 nt, Human
agaaaugucacucugucc

SEQ ID NO: 961151 - RNA, 20 nt, Human
agaauauacucaauaacaua

SEQ ID NO: 961152 - RNA, 24 nt, Human
agaauauacucaauaacauaccaa

SEQ ID NO: 961153 - RNA, 18 nt, Human
agagaaaacuaagcucag

SEQ ID NO: 961154 - RNA, 20 nt, Human
agagaaaacuaagcucagaa

SEQ ID NO: 961155 - RNA, 21 nt, Human
aggacuggugaccgggggaca

SEQ ID NO: 961156 - RNA, 18 nt, Human
aggagaaaugucacucug

SEQ ID NO: 961157 - RNA, 19 nt, Human
aggcaucacuguguguggg

SEQ ID NO: 961158 - RNA, 23 nt, Human
agggacuaaaaguuagguagcag

SEQ ID NO: 961159 - RNA, 24 nt, Human
aucaagaccaaaguuguacaaaca

SEQ ID NO: 961160 - RNA, 22 nt, Human
caaaaccagagagaaagaaucc

SEQ ID NO: 961161 - RNA, 23 nt, Human
caaacagguacaaaaucccccac

SEQ ID NO: 961162 - RNA, 22 nt, Human
caagauacagcauacaaaacug

SEQ ID NO: 961163 - RNA, 24 nt, Human
caagugagcaccuaagaaucauuu

SEQ ID NO: 961164 - RNA, 19 nt, Human
cacuguguguggucaaagu

SEQ ID NO: 961165 - RNA, 21 nt, Human
cagcauacaaaacugucccac

SEQ ID NO: 961166 - RNA, 22 nt, Human
cagcauacaaaacugucccacg

SEQ ID NO: 961167 - RNA, 18 nt, Human
caggcucagcuggaggcc

SEQ ID NO: 961168 - RNA, 21 nt, Human
caugguaagugcccacauugc

SEQ ID NO: 961169 - RNA, 21 nt, Human
cauggugagguccagugugcc

SEQ ID NO: 961170 - RNA, 24 nt, Human
cauuuauaugaaaagccaaaacca

SEQ ID NO: 961171 - RNA, 18 nt, Human
ccaaaacacucuguacug

SEQ ID NO: 961172 - RNA, 19 nt, Human
ccaaaaccagagagaaaga

SEQ ID NO: 961173 - RNA, 23 nt, Human
ccaaaaccagagagaaagaaucc

SEQ ID NO: 961174 - RNA, 18 nt, Human
ccaacaauuugauaccac

SEQ ID NO: 961175 - RNA, 23 nt, Human
cccaucuccuccccuuucccuuu

SEQ ID NO: 961176 - RNA, 26 nt, Human
ccuccccuuucccuuuccacgaguuu

SEQ ID NO: 961177 - RNA, 19 nt, Human
ccuccucuccacuaaagua

SEQ ID NO: 961178 - RNA, 24 nt, Human
ccuuucauuccuccauaguugucu

SEQ ID NO: 961179 - RNA, 21 nt, Human
cucuccacuaaaguaucacug

SEQ ID NO: 961180 - RNA, 25 nt, Human
cucugucccaucuucccugcauuca

SEQ ID NO: 961181 - RNA, 25 nt, Human
cuguacugucgccuuccuuuagcag

SEQ ID NO: 961182 - RNA, 28 nt, Human
gaacaauucagagacaggcucagcugga

SEQ ID NO: 961183 - RNA, 23 nt, Human
gagggaacaauucagagacaggc

SEQ ID NO: 961184 - RNA, 25 nt, Human
gauaccaccuuccucccuaucccac

SEQ ID NO: 961185 - RNA, 23 nt, Human
gccaaaaccagagagaaagaauc

SEQ ID NO: 961186 - RNA, 18 nt, Human
ggagggaacaauucagag

SEQ ID NO: 961187 - RNA, 22 nt, Human
ggagggaacaauucagagacag

SEQ ID NO: 961188 - RNA, 21 nt, Human
ggcaauagagacagacagcaa

SEQ ID NO: 961189 - RNA, 22 nt, Human
gucccaucuccuccccuuuccc

SEQ ID NO: 961190 - RNA, 23 nt, Human
uaaaccaaccuacaaccugugua

SEQ ID NO: 961191 - RNA, 23 nt, Human
uaaaguaguuguucaaccaaaac

SEQ ID NO: 961192 - RNA, 21 nt, Human
uaaaguaucacuguagagaaa

SEQ ID NO: 961193 - RNA, 23 nt, Human
uaaaugguuuuggaagggacuaa

SEQ ID NO: 961194 - RNA, 18 nt, Human
uacaaaaucccccaccuu

SEQ ID NO: 961195 - RNA, 22 nt, Human
uacaaacagguacaaaaucccc

SEQ ID NO: 961196 - RNA, 19 nt, Human
uacaagauacagcauacaa

SEQ ID NO: 961197 - RNA, 19 nt, Human
uacuaaaugguuuuggaag

SEQ ID NO: 961198 - RNA, 22 nt, Human
uagauuugacugcauuaaagua

SEQ ID NO: 961199 - RNA, 21 nt, Human
uauguaauagaacccuacuaa

SEQ ID NO: 961200 - RNA, 23 nt, Human
ucaaauauuaguaauccauccac

SEQ ID NO: 961201 - RNA, 25 nt, Human
ucaaccaaaacacucuguacugucg

SEQ ID NO: 961202 - RNA, 18 nt, Human
ucaagugagaugcaaugu

SEQ ID NO: 961203 - RNA, 18 nt, Human
ucagaaauuagggguggc

SEQ ID NO: 961204 - RNA, 20 nt, Human
ucagaccaagugagcaccua

SEQ ID NO: 961205 - RNA, 24 nt, Human
uccacuaaaguaucacuguagaga

SEQ ID NO: 961206 - RNA, 18 nt, Human
uccccuuucccuuuccac

SEQ ID NO: 961207 - RNA, 19 nt, Human
uccucccuaucccacccua

SEQ ID NO: 961208 - RNA, 20 nt, Human
ucuguacugucgccuuccuu

SEQ ID NO: 961209 - RNA, 21 nt, Human
ugaaaagccaaaaccagagag

SEQ ID NO: 961210 - RNA, 18 nt, Human
ugaccgggggacauggug

SEQ ID NO: 961211 - RNA, 23 nt, Human
ugaccgggggacauggugagguc

SEQ ID NO: 961212 - RNA, 23 nt, Human
ugcccacauugcgggggagggaa

SEQ ID NO: 961213 - RNA, 26 nt, Human
uggaagggacuaaaaguuagguagca

SEQ ID NO: 961214 - RNA, 18 nt, Human
uguagagaaaacuaagcu

SEQ ID NO: 961215 - RNA, 20 nt, Human
uugcugccuucuaugaccua

SEQ ID NO: 961216 - RNA, 21 nt, Human
uuuauaagcuucucaaaacac

SEQ ID NO: 961217 - RNA, 24 nt, Human
uuuuuuuuuuuuauaagcuucuca

SEQ ID NO: 961218 - RNA, 19 nt, Human
aaccuggcuuguccuuugg

SEQ ID NO: 961219 - RNA, 18 nt, Human
aucauauuuccaaaaagg

SEQ ID NO: 961220 - RNA, 25 nt, Human
caucucccucacaucaugcaacccu

SEQ ID NO: 961221 - RNA, 25 nt, Human
ccaaaaacagucauuauuaaaaucu

SEQ ID NO: 961222 - RNA, 20 nt, Human
cgcgcaccgggguggggcuu

SEQ ID NO: 961223 - RNA, 23 nt, Human
ugcaaccuggcuuguccuuuggc

SEQ ID NO: 961224 - RNA, 22 nt, Human
uucacaauuuuuaaaaaggagu

SEQ ID NO: 961225 - RNA, 20 nt, Human
uuuuuuuuuuuuuuuuuugg

SEQ ID NO: 961226 - RNA, 19 nt, Human
aaccaauucuucccaggcu

SEQ ID NO: 961227 - RNA, 24 nt, Human
agacuggauggaggacugccuggc

SEQ ID NO: 961228 - RNA, 19 nt, Human
aggcaagaagucagggccc

SEQ ID NO: 961229 - RNA, 21 nt, Human
agucagggcccauggacugua

SEQ ID NO: 961230 - RNA, 21 nt, Human
caagugccaaagucaagacug

SEQ ID NO: 961231 - RNA, 20 nt, Human
cccacuggcauggagcccac

SEQ ID NO: 961232 - RNA, 18 nt, Human
ccgggggugaugguuucu

SEQ ID NO: 961233 - RNA, 22 nt, Human
ccucucugggagucaugagucu

SEQ ID NO: 961234 - RNA, 25 nt, Human
ccuggcugcaaaccaauucuuccca

SEQ ID NO: 961235 - RNA, 20 nt, Human
cuacuucuagaugccauccu

SEQ ID NO: 961236 - RNA, 28 nt, Human
cugcaaaccaauucuucccaggcugugc

SEQ ID NO: 961237 - RNA, 20 nt, Human
cugugcuuugcccacuggca

SEQ ID NO: 961238 - RNA, 22 nt, Human
ggcagggaacaaccugggagga

SEQ ID NO: 961239 - RNA, 22 nt, Human
gggcgcugcauagauggcuggc

SEQ ID NO: 961240 - RNA, 21 nt, Human
uacuucugaaaggcuaacaga

SEQ ID NO: 961241 - RNA, 19 nt, Human
ucaaauuuuauuuuggaca

SEQ ID NO: 961242 - RNA, 21 nt, Human
ucaaauuuuauuuuggacaug

SEQ ID NO: 961243 - RNA, 23 nt, Human
uccaggcagaaagguccuugagg

SEQ ID NO: 961244 - RNA, 18 nt, Human
ucccaggcugugcuuugc

SEQ ID NO: 961245 - RNA, 20 nt, Human
ucccaggcugugcuuugccc

SEQ ID NO: 961246 - RNA, 19 nt, Human
ucucugggagucaugaguc

SEQ ID NO: 961247 - RNA, 21 nt, Human
ugagacgaaggcaagaaguca

SEQ ID NO: 961248 - RNA, 19 nt, Human
uggcauggagcccacgguc

SEQ ID NO: 961249 - RNA, 24 nt, Human
uggcugcagagucuauuugagacg

SEQ ID NO: 961250 - RNA, 23 nt, Human
uggggcgcugcauagauggcugg

SEQ ID NO: 961251 - RNA, 21 nt, Human
aaaaagcugccagcugccuuu

SEQ ID NO: 961252 - RNA, 28 nt, Human
aaaaauaaaugagaacauuaucugcaaa

SEQ ID NO: 961253 - RNA, 22 nt, Human
aaaguccugccccaucccaccu

SEQ ID NO: 961254 - RNA, 26 nt, Human
aaauucuacaucaaaaauaaaugaga

SEQ ID NO: 961255 - RNA, 23 nt, Human
aacagcaggcagaucuggccccc

SEQ ID NO: 961256 - RNA, 26 nt, Human
aagaaacuugaugccagagaacagac

SEQ ID NO: 961257 - RNA, 20 nt, Human
aagccccccuuuccccaccu

SEQ ID NO: 961258 - RNA, 26 nt, Human
aaguaucaaaacccuaaauccaaacu

SEQ ID NO: 961259 - RNA, 21 nt, Human
acacaccugcucuaaggcaca

SEQ ID NO: 961260 - RNA, 23 nt, Human
acacagcuuuagaccagaaggcc

SEQ ID NO: 961261 - RNA, 23 nt, Human
acagcaggcagaucuggcccccc

SEQ ID NO: 961262 - RNA, 18 nt, Human
acaggggagaccaagaca

SEQ ID NO: 961263 - RNA, 18 nt, Human
acccaguaacacagagac

SEQ ID NO: 961264 - RNA, 22 nt, Human
acucagaccaagaggaggcugu

SEQ ID NO: 961265 - RNA, 18 nt, Human
agaaugccuaggaugaaa

SEQ ID NO: 961266 - RNA, 21 nt, Human
agcaaacaggcaaaguuugca

SEQ ID NO: 961267 - RNA, 23 nt, Human
agcacccaugagaaagguaguga

SEQ ID NO: 961268 - RNA, 18 nt, Human
agcugcaagaaacuugau

SEQ ID NO: 961269 - RNA, 19 nt, Human
aggaacaacauaaaaugac

SEQ ID NO: 961270 - RNA, 21 nt, Human
aggagcucugcacucauucca

SEQ ID NO: 961271 - RNA, 19 nt, Human
aggcagucuugcagcucac

SEQ ID NO: 961272 - RNA, 21 nt, Human
auagcaagcucucugcccaca

SEQ ID NO: 961273 - RNA, 24 nt, Human
aucccaccucccaccuugccucag

SEQ ID NO: 961274 - RNA, 18 nt, Human
caaaaccaguucagcaga

SEQ ID NO: 961275 - RNA, 22 nt, Human
caaaaucuaacagcacccauga

SEQ ID NO: 961276 - RNA, 21 nt, Human
caacauaaaaugacucuucuc

SEQ ID NO: 961277 - RNA, 18 nt, Human
caaccaaagcacgaacug

SEQ ID NO: 961278 - RNA, 21 nt, Human
caagaaacuugaugccagaga

SEQ ID NO: 961279 - RNA, 18 nt, Human
caagaggaggcugugugu

SEQ ID NO: 961280 - RNA, 19 nt, Human
caagugggccaugcaacca

SEQ ID NO: 961281 - RNA, 19 nt, Human
cagaaggccaaccaaagca

SEQ ID NO: 961282 - RNA, 21 nt, Human
cagcacaguaaauguaaccca

SEQ ID NO: 961283 - RNA, 18 nt, Human
cagcacccaugagaaagg

SEQ ID NO: 961284 - RNA, 23 nt, Human
cagcaggggugcaagccccccuu

SEQ ID NO: 961285 - RNA, 19 nt, Human
cagcucacugucucucccu

SEQ ID NO: 961286 - RNA, 22 nt, Human
cagcucacugucucucccucag

SEQ ID NO: 961287 - RNA, 21 nt, Human
caucuuaaaaagagguuuguc

SEQ ID NO: 961288 - RNA, 24 nt, Human
caugaacaaagcugaauacccuaa

SEQ ID NO: 961289 - RNA, 22 nt, Human
ccaaccaaagcacgaacugcaa

SEQ ID NO: 961290 - RNA, 24 nt, Human
ccaguccuccauucucucccuggg

SEQ ID NO: 961291 - RNA, 22 nt, Human
cccaaaaagcugccagcugccu

SEQ ID NO: 961292 - RNA, 30 nt, Human
cccaaaaagcugccagcugccuuuacagaa

SEQ ID NO: 961293 - RNA, 18 nt, Human
cccaucccaccucccacc

SEQ ID NO: 961294 - RNA, 22 nt, Human
cccauggaaacagcaggcagau

SEQ ID NO: 961295 - RNA, 18 nt, Human
ccccccuuuccccaccug

SEQ ID NO: 961296 - RNA, 20 nt, Human
cccuaccucccacaacaggc

SEQ ID NO: 961297 - RNA, 23 nt, Human
ccugccaugcaugugcuuggaag

SEQ ID NO: 961298 - RNA, 21 nt, Human
ccugggcugaaugcugagaaa

SEQ ID NO: 961299 - RNA, 20 nt, Human
cggucaagacggucagccug

SEQ ID NO: 961300 - RNA, 25 nt, Human
cuacaucaaaaauaaaugagaacau

SEQ ID NO: 961301 - RNA, 26 nt, Human
cuaccucccacaacaggcucugaucc

SEQ ID NO: 961302 - RNA, 25 nt, Human
cuacucagaccaagaggaggcugug

SEQ ID NO: 961303 - RNA, 19 nt, Human
cuccauucuaccaucuuaa

SEQ ID NO: 961304 - RNA, 25 nt, Human
cugaaugcugagaaaacgggugcca

SEQ ID NO: 961305 - RNA, 24 nt, Human
cuggggccuucugcacgaugacca

SEQ ID NO: 961306 - RNA, 20 nt, Human
gaacagacgagcacguucuu

SEQ ID NO: 961307 - RNA, 19 nt, Human
gaagggaaaguccugcccc

SEQ ID NO: 961308 - RNA, 20 nt, Human
gagcucaguuaaugcuucuc

SEQ ID NO: 961309 - RNA, 28 nt, Human
gcaggggugcaagccccccuuuccccaa

SEQ ID NO: 961310 - RNA, 23 nt, Human
gcagguaucuuccuguuuuucuu

SEQ ID NO: 961311 - RNA, 20 nt, Human
gccagcugccuuuacagagc

SEQ ID NO: 961312 - RNA, 19 nt, Human
gcucacugucucucccuca

SEQ ID NO: 961313 - RNA, 21 nt, Human
ggagaccaagacagcauucau

SEQ ID NO: 961314 - RNA, 20 nt, Human
ggccccgugagcuucaccuc

SEQ ID NO: 961315 - RNA, 19 nt, Human
ggcugugugugcugagguc

SEQ ID NO: 961316 - RNA, 20 nt, Human
guaacccauggaaacagcag

SEQ ID NO: 961317 - RNA, 19 nt, Human
gugcugagguccuggggcc

SEQ ID NO: 961318 - RNA, 23 nt, Human
uaacagcacccaugagaaaggua

SEQ ID NO: 961319 - RNA, 23 nt, Human
uaacccauggaaacagcaggcag

SEQ ID NO: 961320 - RNA, 21 nt, Human
uacacaccugcucuaaggcac

SEQ ID NO: 961321 - RNA, 19 nt, Human
uacucagaccaagaggagg

SEQ ID NO: 961322 - RNA, 26 nt, Human
uacucgguauauuaagaguuugauuu

SEQ ID NO: 961323 - RNA, 20 nt, Human
uagaaagucauucauaaaaa

SEQ ID NO: 961324 - RNA, 24 nt, Human
uagaccagaaggccaaccaaagca

SEQ ID NO: 961325 - RNA, 30 nt, Human
uagcaaacaggcaaaguuugcagagcucag

SEQ ID NO: 961326 - RNA, 19 nt, Human
uagcacucucuuuuucucu

SEQ ID NO: 961327 - RNA, 19 nt, Human
uagccaauagcaaacaggc

SEQ ID NO: 961328 - RNA, 20 nt, Human
uagccaauagcaaacaggca

SEQ ID NO: 961329 - RNA, 19 nt, Human
uaucaaaacccuaaaucca

SEQ ID NO: 961330 - RNA, 22 nt, Human
uaucugacgaagaagugaaaac

SEQ ID NO: 961331 - RNA, 19 nt, Human
uauucaggacacagcuuua

SEQ ID NO: 961332 - RNA, 22 nt, Human
uauucaggacacagcuuuagac

SEQ ID NO: 961333 - RNA, 19 nt, Human
ucagagcuccauaucauuu

SEQ ID NO: 961334 - RNA, 19 nt, Human
uccacacacugcuguauuu

SEQ ID NO: 961335 - RNA, 24 nt, Human
uccagauagacuggcacuugauuu

SEQ ID NO: 961336 - RNA, 22 nt, Human
ucccaaaaagcugccagcugcc

SEQ ID NO: 961337 - RNA, 18 nt, Human
ucccuggggccacuuucu

SEQ ID NO: 961338 - RNA, 21 nt, Human
ucuccucccaguccuccauuc

SEQ ID NO: 961339 - RNA, 18 nt, Human
ucucucccuggggccacu

SEQ ID NO: 961340 - RNA, 25 nt, Human
ucugcaauacaacauggauuccaga

SEQ ID NO: 961341 - RNA, 24 nt, Human
ugaaaaccacauucccugggcuga

SEQ ID NO: 961342 - RNA, 24 nt, Human
ugagguccuggggccuucugcacg

SEQ ID NO: 961343 - RNA, 24 nt, Human
ugcagagcucaaugaagucugaau

SEQ ID NO: 961344 - RNA, 19 nt, Human
ugcaucagaaauauacaca

SEQ ID NO: 961345 - RNA, 21 nt, Human
ugccacccaguaacacagaga

SEQ ID NO: 961346 - RNA, 27 nt, Human
ugccccaucccaccucccaccuugccu

SEQ ID NO: 961347 - RNA, 18 nt, Human
ugccuaggaugaaauggc

SEQ ID NO: 961348 - RNA, 23 nt, Human
ugccuaggaugaaauggcggggc

SEQ ID NO: 961349 - RNA, 21 nt, Human
ugcuguauuucagugaauugu

SEQ ID NO: 961350 - RNA, 24 nt, Human
uggccagcauuucacuccaaauau

SEQ ID NO: 961351 - RNA, 23 nt, Human
ugggaugugaacaauuguuuuuu

SEQ ID NO: 961352 - RNA, 22 nt, Human
uguaaauucuacaucaaaaaua

SEQ ID NO: 961353 - RNA, 20 nt, Human
ugucagaccuuauggacaug

SEQ ID NO: 961354 - RNA, 25 nt, Human
uuccagaaggguuuacaagcuagau

SEQ ID NO: 961355 - RNA, 19 nt, Human
uuccgaggcuuccagaagg

SEQ ID NO: 961356 - RNA, 26 nt, Human
uuccuguuuuucuuuacauauuuccu

SEQ ID NO: 961357 - RNA, 23 nt, Human
uucuacaucaaaaauaaaugaga

SEQ ID NO: 961358 - RNA, 24 nt, Human
uugaucagaaacauuaguauuuca

SEQ ID NO: 961359 - RNA, 24 nt, Human
uugaugccagagaacagacgagca

SEQ ID NO: 961360 - RNA, 20 nt, Human
uuggccucaauaagaaaucu

SEQ ID NO: 961361 - RNA, 20 nt, Human
agggaagccagcugugucuu

SEQ ID NO: 961362 - RNA, 21 nt, Human
cacccacaaccaaucaggaaa

SEQ ID NO: 961363 - RNA, 20 nt, Human
cacuagcggccaaucagaac

SEQ ID NO: 961364 - RNA, 26 nt, Human
cauuccaucacuaggggguaauucca

SEQ ID NO: 961365 - RNA, 23 nt, Human
ccaagcccuguucucuguacuag

SEQ ID NO: 961366 - RNA, 23 nt, Human
ccacccacaaccaaucaggaaac

SEQ ID NO: 961367 - RNA, 24 nt, Human
ccacccacaaccaaucaggaaacg

SEQ ID NO: 961368 - RNA, 20 nt, Human
cggcagcaucgcuuguuggc

SEQ ID NO: 961369 - RNA, 22 nt, Human
cucuucccguaucagagaagga

SEQ ID NO: 961370 - RNA, 19 nt, Human
gaagagguagccacccaca

SEQ ID NO: 961371 - RNA, 19 nt, Human
gcccaagcccuguucucug

SEQ ID NO: 961372 - RNA, 19 nt, Human
gcccaagcuaugaccccag

SEQ ID NO: 961373 - RNA, 21 nt, Human
gcccugagacaggaggacgga

SEQ ID NO: 961374 - RNA, 21 nt, Human
uaccagacaaccauuccagca

SEQ ID NO: 961375 - RNA, 26 nt, Human
ucagaacgaagagguagccacccaca

SEQ ID NO: 961376 - RNA, 20 nt, Human
ucagagaaggaacagcccaa

SEQ ID NO: 961377 - RNA, 22 nt, Human
ucagauaccagacaaccauucc

SEQ ID NO: 961378 - RNA, 21 nt, Human
ucccguaucagagaaggaaca

SEQ ID NO: 961379 - RNA, 22 nt, Human
ucgaggacaguugguccagcca

SEQ ID NO: 961380 - RNA, 22 nt, Human
ucuccaaaguggcccaagcccu

SEQ ID NO: 961381 - RNA, 19 nt, Human
ugcccaggacuagauucug

SEQ ID NO: 961382 - RNA, 23 nt, Human
uguacuagggaagccagcugugu

SEQ ID NO: 961383 - RNA, 21 nt, Human
uuuuuuuuuuuuuuuucccag

SEQ ID NO: 961384 - RNA, 25 nt, Human
uuuuuuuuuuuuuuuuuuucccagg

SEQ ID NO: 961385 - RNA, 20 nt, Human
aagcuugggggugggggcug

SEQ ID NO: 961386 - RNA, 19 nt, Human
aaggaggcccugggggagg

SEQ ID NO: 961387 - RNA, 20 nt, Human
aggaggcccugggggagguc

SEQ ID NO: 961388 - RNA, 22 nt, Human
caacccaucccccucagcuccu

SEQ ID NO: 961389 - RNA, 18 nt, Human
cagcaacccaucccccuc

SEQ ID NO: 961390 - RNA, 19 nt, Human
cagcaccaagcuugggggu

SEQ ID NO: 961391 - RNA, 18 nt, Human
cagcagccuggacugggc

SEQ ID NO: 961392 - RNA, 20 nt, Human
cagcagccuggacugggcug

SEQ ID NO: 961393 - RNA, 22 nt, Human
ccaucccccucagcuccucacc

SEQ ID NO: 961394 - RNA, 19 nt, Human
ccccagcaacccauccccc

SEQ ID NO: 961395 - RNA, 22 nt, Human
ccccagcaacccaucccccuca

SEQ ID NO: 961396 - RNA, 18 nt, Human
ccccucagcuccucacca

SEQ ID NO: 961397 - RNA, 19 nt, Human
cccuuuccuaguugggcug

SEQ ID NO: 961398 - RNA, 20 nt, Human
ccuccuggccccagcaaccc

SEQ ID NO: 961399 - RNA, 27 nt, Human
ccucugcccauggcccuuuccuaguug

SEQ ID NO: 961400 - RNA, 18 nt, Human
ccuggccccagcaaccca

SEQ ID NO: 961401 - RNA, 18 nt, Human
ccuggccccagcaaccca

SEQ ID NO: 961402 - RNA, 22 nt, Human
cuccuggccccagcaacccauc

SEQ ID NO: 961403 - RNA, 23 nt, Human
gaagauacuggcuaccagcccuc

SEQ ID NO: 961404 - RNA, 22 nt, Human
gccccagcaacccaucccccuc

SEQ ID NO: 961405 - RNA, 20 nt, Human
gcccugggggaggucaccgg

SEQ ID NO: 961406 - RNA, 20 nt, Human
gcucagcaccaagcuugggg

SEQ ID NO: 961407 - RNA, 20 nt, Human
ggacugggcugggcaaggag

SEQ ID NO: 961408 - RNA, 21 nt, Human
ggcaaggaggcccugggggag

SEQ ID NO: 961409 - RNA, 25 nt, Human
ggccacgggacauuuauuuguagcc

SEQ ID NO: 961410 - RNA, 24 nt, Human
ggcucagcaccaagcuugggggug

SEQ ID NO: 961411 - RNA, 22 nt, Human
gggcaaggaggcccugggggag

SEQ ID NO: 961412 - RNA, 19 nt, Human
ggggcugcugcugcaggac

SEQ ID NO: 961413 - RNA, 18 nt, Human
ggggugggggcugcugcu

SEQ ID NO: 961414 - RNA, 21 nt, Human
gggugggagugugcaggggcu

SEQ ID NO: 961415 - RNA, 18 nt, Human
gugcaggggcuggaggag

SEQ ID NO: 961416 - RNA, 18 nt, Human
uccuggccccagcaaccc

SEQ ID NO: 961417 - RNA, 18 nt, Human
uccugggugggagugugc

SEQ ID NO: 961418 - RNA, 23 nt, Human
ugcaggggcuggaggagagaccc

SEQ ID NO: 961419 - RNA, 23 nt, Human
uggaagauacuggcuaccagccc

SEQ ID NO: 961420 - RNA, 19 nt, Human
uggaggagagacccuccug

SEQ ID NO: 961421 - RNA, 19 nt, Human
uggcuaccagcccucugcc

SEQ ID NO: 961422 - RNA, 19 nt, Human
ugggagaggcugaggcgug

SEQ ID NO: 961423 - RNA, 20 nt, Human
ugggauuuggcacagcagcc

SEQ ID NO: 961424 - RNA, 23 nt, Human
ugggcaaggaggcccugggggag

SEQ ID NO: 961425 - RNA, 26 nt, Human
ugggcaaggaggcccugggggagguu

SEQ ID NO: 961426 - RNA, 21 nt, Human
ugggggaggguugagacuggc

SEQ ID NO: 961427 - RNA, 19 nt, Human
ugggggcugcugcugcagg

SEQ ID NO: 961428 - RNA, 19 nt, Human
ugggggcugcugcugcagg

SEQ ID NO: 961429 - RNA, 22 nt, Human
uguccugggugggagugugcag

SEQ ID NO: 961430 - RNA, 24 nt, Human
uugggggugggggcugcugcugca

SEQ ID NO: 961431 - RNA, 20 nt, Human
aaccuccccaaccccauccc

SEQ ID NO: 961432 - RNA, 23 nt, Human
aagcuggaggcgaaccuccgagu

SEQ ID NO: 961433 - RNA, 21 nt, Human
aagugggguugggagaaccuc

SEQ ID NO: 961434 - RNA, 19 nt, Human
aggaagaaagugggguugg

SEQ ID NO: 961435 - RNA, 24 nt, Human
aggcaggagggaauuuaguggagc

SEQ ID NO: 961436 - RNA, 20 nt, Human
aguggagcuggggaaggaag

SEQ ID NO: 961437 - RNA, 18 nt, Human
caucccugcuggcccggg

SEQ ID NO: 961438 - RNA, 21 nt, Human
cccaaccccaucccugcuggc

SEQ ID NO: 961439 - RNA, 23 nt, Human
cccagcuccgccgcgcccccgga

SEQ ID NO: 961440 - RNA, 23 nt, Human
ccccaaccccaucccugcuggcc

SEQ ID NO: 961441 - RNA, 18 nt, Human
gagaaccuccccaacccc

SEQ ID NO: 961442 - RNA, 21 nt, Human
gagcuggggaaggaagaaagu

SEQ ID NO: 961443 - RNA, 22 nt, Human
gcgcaagcuggaggcgaaccuc

SEQ ID NO: 961444 - RNA, 21 nt, Human
ggcaucggcucucagcaagag

SEQ ID NO: 961445 - RNA, 19 nt, Human
gggaauuuaguggagcugg

SEQ ID NO: 961446 - RNA, 21 nt, Human
ucccugcuggcccggggacgg

SEQ ID NO: 961447 - RNA, 22 nt, Human
ucccugcuggcccggggacggg

SEQ ID NO: 961448 - RNA, 20 nt, Human
ugaugcgcaagcuggaggcc

SEQ ID NO: 961449 - RNA, 21 nt, Human
uggcccggggacgggcaucgg

SEQ ID NO: 961450 - RNA, 19 nt, Human
ugggagaaccuccccaacc

SEQ ID NO: 961451 - RNA, 22 nt, Human
ugggagaaccuccccaacccca

SEQ ID NO: 961452 - RNA, 23 nt, Human
ugggagaaccuccccaaccccau

SEQ ID NO: 961453 - RNA, 25 nt, Human
uggggaaggaagaaagugggguugg

SEQ ID NO: 961454 - RNA, 19 nt, Human
ugggguugggagaaccucc

SEQ ID NO: 961455 - RNA, 20 nt, Human
aaaagccuauuaggaaaguu

SEQ ID NO: 961456 - RNA, 23 nt, Human
aggaaaaaaaagccuauuaggaa

SEQ ID NO: 961457 - RNA, 20 nt, Human
uaaacauccacauaaugcca

SEQ ID NO: 961458 - RNA, 18 nt, Human
uauuaggaaaaaaaagcc

SEQ ID NO: 961459 - RNA, 18 nt, Human
uugcauuuguuuuuccag

SEQ ID NO: 961460 - RNA, 23 nt, Human
acugcucacuacccaaggaggug

SEQ ID NO: 961461 - RNA, 19 nt, Human
agcugcccuggacucugcc

SEQ ID NO: 961462 - RNA, 19 nt, Human
agguggggucugucuccca

SEQ ID NO: 961463 - RNA, 23 nt, Human
cacagcuuucugcucacugcuca

SEQ ID NO: 961464 - RNA, 18 nt, Human
caggguucagcgggugug

SEQ ID NO: 961465 - RNA, 20 nt, Human
ccacuuccgaacccuccccu

SEQ ID NO: 961466 - RNA, 22 nt, Human
ccagggccugucgguugguguc

SEQ ID NO: 961467 - RNA, 20 nt, Human
cccaacccguccuucuuuuc

SEQ ID NO: 961468 - RNA, 20 nt, Human
cccaaugugcccggccccaa

SEQ ID NO: 961469 - RNA, 27 nt, Human
cccccaaugugcccggccccaacccgu

SEQ ID NO: 961470 - RNA, 22 nt, Human
cccgcgcagcugcccucagcca

SEQ ID NO: 961471 - RNA, 20 nt, Human
ccgaccugugccgcccuccc

SEQ ID NO: 961472 - RNA, 24 nt, Human
ccuccucggcccuggucguugcuc

SEQ ID NO: 961473 - RNA, 20 nt, Human
ccucgccccaccuccagcag

SEQ ID NO: 961474 - RNA, 21 nt, Human
ccugugccgcccucccggggc

SEQ ID NO: 961475 - RNA, 23 nt, Human
cgaccugugccgcccucccgggg

SEQ ID NO: 961476 - RNA, 27 nt, Human
cgagggcgggaggcuagggggggaguc

SEQ ID NO: 961477 - RNA, 20 nt, Human
cgccccaccuccagcagcca

SEQ ID NO: 961478 - RNA, 23 nt, Human
cgccccaccuccagcagcccagc

SEQ ID NO: 961479 - RNA, 19 nt, Human
cugccccaggaucuggaag

SEQ ID NO: 961480 - RNA, 23 nt, Human
cugugccgcccucccggggcugc

SEQ ID NO: 961481 - RNA, 24 nt, Human
gcagcccagccuguucacagcuuu

SEQ ID NO: 961482 - RNA, 22 nt, Human
gccccaccuccagcagcccagc

SEQ ID NO: 961483 - RNA, 18 nt, Human
gcccucagccagggccug

SEQ ID NO: 961484 - RNA, 19 nt, Human
gccgcccucccggggcugc

SEQ ID NO: 961485 - RNA, 22 nt, Human
gccucgccccaccuccagcagc

SEQ ID NO: 961486 - RNA, 20 nt, Human
ggaggcuagggggggagucc

SEQ ID NO: 961487 - RNA, 21 nt, Human
ggggaaagaggcugggggguc

SEQ ID NO: 961488 - RNA, 22 nt, Human
guggaggagccuugagcugccc

SEQ ID NO: 961489 - RNA, 23 nt, Human
guggaggagccuugagcugcccu

SEQ ID NO: 961490 - RNA, 22 nt, Human
uaauaaauaagcccgcgcagcu

SEQ ID NO: 961491 - RNA, 21 nt, Human
ucagauuacagccccuagggg

SEQ ID NO: 961492 - RNA, 23 nt, Human
ucagggucugucuggcuccucuc

SEQ ID NO: 961493 - RNA, 22 nt, Human
uccaggcaccuccucggcccug

SEQ ID NO: 961494 - RNA, 18 nt, Human
ucccagggugggcacucc

SEQ ID NO: 961495 - RNA, 23 nt, Human
ucccagggugggcacuccaggca

SEQ ID NO: 961496 - RNA, 20 nt, Human
uccugcgcccgaccugugcc

SEQ ID NO: 961497 - RNA, 21 nt, Human
ucugcucacugcucacuaccc

SEQ ID NO: 961498 - RNA, 18 nt, Human
ugagcugcccuggacucu

SEQ ID NO: 961499 - RNA, 21 nt, Human
ugccccgccuggccacaauca

SEQ ID NO: 961500 - RNA, 21 nt, Human
ugcccggccccaacccguccu

SEQ ID NO: 961501 - RNA, 25 nt, Human
ugcccuggacucugccccaggaucu

SEQ ID NO: 961502 - RNA, 19 nt, Human
ugccucgccccaccuccag

SEQ ID NO: 961503 - RNA, 21 nt, Human
ugccucgccccaccuccagca

SEQ ID NO: 961504 - RNA, 26 nt, Human
uggcuccucucucgccugucgucucc

SEQ ID NO: 961505 - RNA, 23 nt, Human
ugugccgcccucccggggcugcu

SEQ ID NO: 961506 - RNA, 20 nt, Human
uguggaggagccuugagcug

SEQ ID NO: 961507 - RNA, 24 nt, Human
uugguucccggcguggggacaguc

SEQ ID NO: 961508 - RNA, 21 nt, Human
aaaaagcaaaaguaguguuuu

SEQ ID NO: 961509 - RNA, 21 nt, Human
aaaaguaaugaaaguguacac

SEQ ID NO: 961510 - RNA, 22 nt, Human
aaagaaguuuaauuauaccuuu

SEQ ID NO: 961511 - RNA, 20 nt, Human
aaagccccaaagcaggaaag

SEQ ID NO: 961512 - RNA, 21 nt, Human
aacccugcuccuuucgcaguc

SEQ ID NO: 961513 - RNA, 19 nt, Human
aacugauuauuuuuacaau

SEQ ID NO: 961514 - RNA, 26 nt, Human
aacugcuucacugauauaacucccac

SEQ ID NO: 961515 - RNA, 19 nt, Human
aacugugacucugaaacaa

SEQ ID NO: 961516 - RNA, 23 nt, Human
aagaaaaggugaauaaaggggac

SEQ ID NO: 961517 - RNA, 19 nt, Human
aagaaucauugaauuugag

SEQ ID NO: 961518 - RNA, 21 nt, Human
aagagaaaagaaguuuaauua

SEQ ID NO: 961519 - RNA, 22 nt, Human
aagcaggaaaggaauaccacag

SEQ ID NO: 961520 - RNA, 24 nt, Human
aagcaggaaaggaauaccacaggg

SEQ ID NO: 961521 - RNA, 21 nt, Human
acacagauugaacauucacca

SEQ ID NO: 961522 - RNA, 18 nt, Human
acagaagaugguuuuggc

SEQ ID NO: 961523 - RNA, 23 nt, Human
accccgagcgcgcccgcgagagc

SEQ ID NO: 961524 - RNA, 23 nt, Human
agaaaucagcacggaaaagucau

SEQ ID NO: 961525 - RNA, 24 nt, Human
agagccuggcagggagccgcgggg

SEQ ID NO: 961526 - RNA, 19 nt, Human
agcacgucgcaaaggugaa

SEQ ID NO: 961527 - RNA, 18 nt, Human
agccccggccgcaucucc

SEQ ID NO: 961528 - RNA, 21 nt, Human
aggagauaauuauuuuauuca

SEQ ID NO: 961529 - RNA, 20 nt, Human
aguuuguuuucuuacacaga

SEQ ID NO: 961530 - RNA, 22 nt, Human
cacacugaaaagaucauaaaau

SEQ ID NO: 961531 - RNA, 19 nt, Human
caccaccgcgcagccccgg

SEQ ID NO: 961532 - RNA, 19 nt, Human
caccccuuauuuagaaguc

SEQ ID NO: 961533 - RNA, 20 nt, Human
cauaacaagcaccuugccau

SEQ ID NO: 961534 - RNA, 24 nt, Human
cauaacaagcaccuugccaucaca

SEQ ID NO: 961535 - RNA, 22 nt, Human
caugcucauuucaguucgugua

SEQ ID NO: 961536 - RNA, 22 nt, Human
ccaaaaaaaguaagugcuuuug

SEQ ID NO: 961537 - RNA, 24 nt, Human
ccaaagcaggaaaggaauaccaca

SEQ ID NO: 961538 - RNA, 21 nt, Human
ccacacagacuagggaauaag

SEQ ID NO: 961539 - RNA, 24 nt, Human
ccagccgcgaggccccaccccgag

SEQ ID NO: 961540 - RNA, 21 nt, Human
ccaucuaauuuuuauuuggag

SEQ ID NO: 961541 - RNA, 22 nt, Human
cccaccaaauaucuucaugggg

SEQ ID NO: 961542 - RNA, 18 nt, Human
cccagcaggcucgcauca

SEQ ID NO: 961543 - RNA, 19 nt, Human
ccccaccccgagcgcgccc

SEQ ID NO: 961544 - RNA, 19 nt, Human
ccccaccccgagcgcgccc

SEQ ID NO: 961545 - RNA, 19 nt, Human
cccggcgcgccgcccagca

SEQ ID NO: 961546 - RNA, 23 nt, Human
ccgcggcacccggagcucuucuc

SEQ ID NO: 961547 - RNA, 20 nt, Human
ccucugaguuucuuuguaaa

SEQ ID NO: 961548 - RNA, 21 nt, Human
cgcaucaccaccgcgcagccc

SEQ ID NO: 961549 - RNA, 19 nt, Human
cgccgcggcgcgcggcucc

SEQ ID NO: 961550 - RNA, 21 nt, Human
cgccgcggcgcgcggcuccgg

SEQ ID NO: 961551 - RNA, 18 nt, Human
cggccgcaggcuggagcc

SEQ ID NO: 961552 - RNA, 24 nt, Human
cggggccgacccuuagagcucgcg

SEQ ID NO: 961553 - RNA, 23 nt, Human
cugguuuuaauaaaaggaagaau

SEQ ID NO: 961554 - RNA, 20 nt, Human
cugugugucaauguagaaga

SEQ ID NO: 961555 - RNA, 22 nt, Human
cuuacuuucuagacauaacaag

SEQ ID NO: 961556 - RNA, 19 nt, Human
cuuccaaaaaaaguaagug

SEQ ID NO: 961557 - RNA, 23 nt, Human
cuuuaaaugccgucuuccuuuuc

SEQ ID NO: 961558 - RNA, 23 nt, Human
gaaaguggccggaggccgggggc

SEQ ID NO: 961559 - RNA, 21 nt, Human
gcgcugcagugccgcggcacc

SEQ ID NO: 961560 - RNA, 22 nt, Human
gcgcugcagugccgcggcaccc

SEQ ID NO: 961561 - RNA, 22 nt, Human
ggaaaggaauaccacagggaua

SEQ ID NO: 961562 - RNA, 22 nt, Human
ggagccgcgggggcggaccggg

SEQ ID NO: 961563 - RNA, 19 nt, Human
gggggcggaccgggcgggg

SEQ ID NO: 961564 - RNA, 26 nt, Human
gggguuggaugcgcuugugucuccag

SEQ ID NO: 961565 - RNA, 23 nt, Human
gucacugaauugucaagcuacau

SEQ ID NO: 961566 - RNA, 21 nt, Human
uaaaaaucaguaugauaucug

SEQ ID NO: 961567 - RNA, 18 nt, Human
uaaaaccaaucaaccacc

SEQ ID NO: 961568 - RNA, 19 nt, Human
uaaaaccaaucaaccacca

SEQ ID NO: 961569 - RNA, 23 nt, Human
uaaaauaaauuaaauaacuucca

SEQ ID NO: 961570 - RNA, 28 nt, Human
uaagcaggcaaaccauuauuguaaugac

SEQ ID NO: 961571 - RNA, 18 nt, Human
uaccacagggauauggcc

SEQ ID NO: 961572 - RNA, 21 nt, Human
uagcacgucgcaaaggugaaa

SEQ ID NO: 961573 - RNA, 23 nt, Human
uaggagauaauuauuuuauucau

SEQ ID NO: 961574 - RNA, 21 nt, Human
uaguuuguuuucuuacacaga

SEQ ID NO: 961575 - RNA, 23 nt, Human
uauaugagagcaugaauaauuuu

SEQ ID NO: 961576 - RNA, 21 nt, Human
uauguacaauacaaauggaau

SEQ ID NO: 961577 - RNA, 24 nt, Human
uauuaagucacugaauugucaagc

SEQ ID NO: 961578 - RNA, 24 nt, Human
uauucaucacaaaauuuacuacuu

SEQ ID NO: 961579 - RNA, 21 nt, Human
uccaucuaauuuuuauuugga

SEQ ID NO: 961580 - RNA, 22 nt, Human
uccgcaacccugcuccuuucgc

SEQ ID NO: 961581 - RNA, 18 nt, Human
ucgauuuugaagaaaagg

SEQ ID NO: 961582 - RNA, 18 nt, Human
ucgauuuugaagaaaagg

SEQ ID NO: 961583 - RNA, 20 nt, Human
ucgauuuugaagaaaaggug

SEQ ID NO: 961584 - RNA, 22 nt, Human
ucgcaucaccaccgcgcagccc

SEQ ID NO: 961585 - RNA, 25 nt, Human
ucgcaucaccaccgcgcagccccgg

SEQ ID NO: 961586 - RNA, 21 nt, Human
ucugaaacaauuuuacuuuua

SEQ ID NO: 961587 - RNA, 21 nt, Human
ucugugugucaauguagaaga

SEQ ID NO: 961588 - RNA, 20 nt, Human
ugaaauaaagggaacuguga

SEQ ID NO: 961589 - RNA, 19 nt, Human
ugaauggaaaguggccgga

SEQ ID NO: 961590 - RNA, 19 nt, Human
ugaauugucaagcuacaua

SEQ ID NO: 961591 - RNA, 21 nt, Human
uggaaggugauaacauaagaa

SEQ ID NO: 961592 - RNA, 23 nt, Human
uggaaggugauaacauaagaaua

SEQ ID NO: 961593 - RNA, 23 nt, Human
uguaaaggaaucucagcgcugca

SEQ ID NO: 961594 - RNA, 22 nt, Human
uguccgauuacagcgccgcggc

SEQ ID NO: 961595 - RNA, 22 nt, Human
ugugaaaauagaaagaauuaaa

SEQ ID NO: 961596 - RNA, 23 nt, Human
ugugucuccaguccuuuucccag

SEQ ID NO: 961597 - RNA, 24 nt, Human
uguuuggaaggugauaacauaaga

SEQ ID NO: 961598 - RNA, 19 nt, Human
uuaaauaacuuccaaaaaa

SEQ ID NO: 961599 - RNA, 18 nt, Human
uuaguuuuugaaguuuua

SEQ ID NO: 961600 - RNA, 22 nt, Human
uucaaauuuuuccuucuuauau

SEQ ID NO: 961601 - RNA, 23 nt, Human
uucccagacgaccuuauuuucua

SEQ ID NO: 961602 - RNA, 18 nt, Human
uuggaaccauaaaaacuc

SEQ ID NO: 961603 - RNA, 30 nt, Human
uuggaaccauaaaaacucaucauuuucucc

SEQ ID NO: 961604 - RNA, 23 nt, Human
uuuaaaauauauaugagagcaug

SEQ ID NO: 961605 - RNA, 25 nt, Human
uuuuccaucuaauuuuuauuuggag

SEQ ID NO: 961606 - RNA, 21 nt, Human
uuuuucacauuuuuccaucua

SEQ ID NO: 961607 - RNA, 19 nt, Human
aaaaaaaaaaaaagagaga

SEQ ID NO: 961608 - RNA, 19 nt, Human
aaaaaaaaaaaaagagaga

SEQ ID NO: 961609 - RNA, 19 nt, Human
aaaaaaaaaaaaagagaga

SEQ ID NO: 961610 - RNA, 22 nt, Human
aaaaaaaaaaaaagagagaaaa

SEQ ID NO: 961611 - RNA, 18 nt, Human
aaaaaaaaaaaagagaga

SEQ ID NO: 961612 - RNA, 21 nt, Human
aaaacccuaaaaccuauagca

SEQ ID NO: 961613 - RNA, 24 nt, Human
aaaacuaagucuauccacaggucc

SEQ ID NO: 961614 - RNA, 23 nt, Human
aaacaacacuaauaaaauaaucc

SEQ ID NO: 961615 - RNA, 23 nt, Human
aaacaggcagacuuucuguuccc

SEQ ID NO: 961616 - RNA, 25 nt, Human
aaacugagaaaauggugggacauga

SEQ ID NO: 961617 - RNA, 20 nt, Human
aaacuuaaaauuuggagcuu

SEQ ID NO: 961618 - RNA, 19 nt, Human
aaagcuauuuuccucugcc

SEQ ID NO: 961619 - RNA, 24 nt, Human
aaagugcugggauuacaggcguga

SEQ ID NO: 961620 - RNA, 21 nt, Human
aaauuguggacuugggcccuc

SEQ ID NO: 961621 - RNA, 21 nt, Human
aacaccuucauagucauuccu

SEQ ID NO: 961622 - RNA, 22 nt, Human
aacgcucuucaguauauggacu

SEQ ID NO: 961623 - RNA, 23 nt, Human
aagaaaaaauuagcaauauagaa

SEQ ID NO: 961624 - RNA, 26 nt, Human
aagauuauauacauauauauguacau

SEQ ID NO: 961625 - RNA, 21 nt, Human
aagcaagauuauauacauaua

SEQ ID NO: 961626 - RNA, 26 nt, Human
aagcagccaaguacugaaaauaacag

SEQ ID NO: 961627 - RNA, 19 nt, Human
aaguagcugggacuacagg

SEQ ID NO: 961628 - RNA, 20 nt, Human
aaguagcugggacuacaggc

SEQ ID NO: 961629 - RNA, 18 nt, Human
aagucagccucuugcacu

SEQ ID NO: 961630 - RNA, 20 nt, Human
aagucagccucuugcacuga

SEQ ID NO: 961631 - RNA, 19 nt, Human
aagugcugggauuacaggc

SEQ ID NO: 961632 - RNA, 19 nt, Human
aagugcugggauuacaggc

SEQ ID NO: 961633 - RNA, 22 nt, Human
acaaaacccuaaaaccuauagc

SEQ ID NO: 961634 - RNA, 19 nt, Human
acagguccucuccuguaac

SEQ ID NO: 961635 - RNA, 23 nt, Human
acagguccucuccuguaacaaag

SEQ ID NO: 961636 - RNA, 18 nt, Human
acgggguuucaccuuguu

SEQ ID NO: 961637 - RNA, 20 nt, Human
acgggguuucaccuuguuag

SEQ ID NO: 961638 - RNA, 20 nt, Human
acugcaguggcgcaaucucg

SEQ ID NO: 961639 - RNA, 24 nt, Human
acugcaguggcgcaaucucggcuc

SEQ ID NO: 961640 - RNA, 19 nt, Human
acuuuaaggagggucugag

SEQ ID NO: 961641 - RNA, 21 nt, Human
agaaaaaaaaaaaaaaaagag

SEQ ID NO: 961642 - RNA, 24 nt, Human
agaaaaaaaaaaaaaaaagagaga

SEQ ID NO: 961643 - RNA, 22 nt, Human
agaaaauuugauauuugagagc

SEQ ID NO: 961644 - RNA, 24 nt, Human
agaaggacagaacagcauagagga

SEQ ID NO: 961645 - RNA, 18 nt, Human
agacuuucuguucccuuu

SEQ ID NO: 961646 - RNA, 22 nt, Human
agagaaaaaagaaaugugugag

SEQ ID NO: 961647 - RNA, 24 nt, Human
agagaaaaaagaaaugugugagaa

SEQ ID NO: 961648 - RNA, 21 nt, Human
agcaagaggacauuccaaaga

SEQ ID NO: 961649 - RNA, 18 nt, Human
agcuguauuuuucaguca

SEQ ID NO: 961650 - RNA, 23 nt, Human
aguagcugggacuacaggcgccc

SEQ ID NO: 961651 - RNA, 18 nt, Human
agugcugggauuacaggc

SEQ ID NO: 961652 - RNA, 18 nt, Human
aguucacaugagaaugcc

SEQ ID NO: 961653 - RNA, 24 nt, Human
aguuggaugauuuauuuuuuuacu

SEQ ID NO: 961654 - RNA, 21 nt, Human
auccuuggaaacugcuuucuc

SEQ ID NO: 961655 - RNA, 22 nt, Human
aucucaguaguuaagugaacuc

SEQ ID NO: 961656 - RNA, 24 nt, Human
augauccacccgccucggccuccc

SEQ ID NO: 961657 - RNA, 22 nt, Human
auguguguguauaauuauaugu

SEQ ID NO: 961658 - RNA, 19 nt, Human
auugcaauuaaaaugauaa

SEQ ID NO: 961659 - RNA, 21 nt, Human
auuuuaaaauucagauacagg

SEQ ID NO: 961660 - RNA, 22 nt, Human
caaaagacaguagauagucuca

SEQ ID NO: 961661 - RNA, 24 nt, Human
caaagugcugggauuacaggcgug

SEQ ID NO: 961662 - RNA, 21 nt, Human
caacacaccugcuacuuaaca

SEQ ID NO: 961663 - RNA, 24 nt, Human
caacagcugcuguuuguuucaugc

SEQ ID NO: 961664 - RNA, 18 nt, Human
cacaagagggaagcaaaa

SEQ ID NO: 961665 - RNA, 20 nt, Human
caccaacacucaaaaugacu

SEQ ID NO: 961666 - RNA, 23 nt, Human
cacccgccucggccucccaaagu

SEQ ID NO: 961667 - RNA, 19 nt, Human
caccugcuacuuaacacuc

SEQ ID NO: 961668 - RNA, 21 nt, Human
caccugcuacuuaacacucau

SEQ ID NO: 961669 - RNA, 24 nt, Human
caccuuguuagccaggauggucuc

SEQ ID NO: 961670 - RNA, 22 nt, Human
cacgccauucuccugccucagc

SEQ ID NO: 961671 - RNA, 21 nt, Human
cagaacaaaagacuggggaug

SEQ ID NO: 961672 - RNA, 22 nt, Human
caggauggucuccaucuccuga

SEQ ID NO: 961673 - RNA, 21 nt, Human
caggcgcccgccaccgcgccc

SEQ ID NO: 961674 - RNA, 22 nt, Human
cagguccucuccuguaacaaag

SEQ ID NO: 961675 - RNA, 19 nt, Human
caguaguuagaauccuaac

SEQ ID NO: 961676 - RNA, 20 nt, Human
ccaaagugcugggauuacag

SEQ ID NO: 961677 - RNA, 22 nt, Human
ccaaagugcugggauuacaggc

SEQ ID NO: 961678 - RNA, 22 nt, Human
ccaaagugcugggauuacaggc

SEQ ID NO: 961679 - RNA, 24 nt, Human
ccaaagugcugggauuacaggcgu

SEQ ID NO: 961680 - RNA, 23 nt, Human
cccaaguagcugggacuacaggc

SEQ ID NO: 961681 - RNA, 24 nt, Human
cccaaguagcugggacuacaggcg

SEQ ID NO: 961682 - RNA, 20 nt, Human
cccucccucuucuuucccaa

SEQ ID NO: 961683 - RNA, 19 nt, Human
cccuucgucuuucucucuc

SEQ ID NO: 961684 - RNA, 23 nt, Human
ccuacugauaaucugcuuucaaa

SEQ ID NO: 961685 - RNA, 20 nt, Human
ccugaccucaugauccaccc

SEQ ID NO: 961686 - RNA, 24 nt, Human
ccugccucagccucccaaguagcu

SEQ ID NO: 961687 - RNA, 22 nt, Human
ccuggaagccucucagaaguca

SEQ ID NO: 961688 - RNA, 19 nt, Human
cgcucugucgcccaggccg

SEQ ID NO: 961689 - RNA, 24 nt, Human
cucagccucccaaguagcugggac

SEQ ID NO: 961690 - RNA, 24 nt, Human
cuccugaccucaugauccacccgc

SEQ ID NO: 961691 - RNA, 25 nt, Human
cuccugccucagccucccaaguagc

SEQ ID NO: 961692 - RNA, 23 nt, Human
cucugucgcccaggccggacugc

SEQ ID NO: 961693 - RNA, 20 nt, Human
cucuucagcaacuacgccgg

SEQ ID NO: 961694 - RNA, 18 nt, Human
cugaauaucucaguaguu

SEQ ID NO: 961695 - RNA, 22 nt, Human
gaagauuuauuuuauaguaugu

SEQ ID NO: 961696 - RNA, 21 nt, Human
gacaguagauagucucacccc

SEQ ID NO: 961697 - RNA, 22 nt, Human
gaccucaugauccacccgccuc

SEQ ID NO: 961698 - RNA, 18 nt, Human
gacguugugcugaaggag

SEQ ID NO: 961699 - RNA, 20 nt, Human
gagacgggguuucaccuugu

SEQ ID NO: 961700 - RNA, 23 nt, Human
gagcacacgcacucccuucuccc

SEQ ID NO: 961701 - RNA, 18 nt, Human
gauuacaggcgugagcca

SEQ ID NO: 961702 - RNA, 20 nt, Human
gauuacaggcgugagccacc

SEQ ID NO: 961703 - RNA, 22 nt, Human
gauuacaggcgugagccaccgc

SEQ ID NO: 961704 - RNA, 23 nt, Human
gcccggcuaauuuuuuguauuuu

SEQ ID NO: 961705 - RNA, 21 nt, Human
gccggacugcggacugcagug

SEQ ID NO: 961706 - RNA, 21 nt, Human
gccgggagcaagaggacauuc

SEQ ID NO: 961707 - RNA, 20 nt, Human
gccucagccucccaaguagc

SEQ ID NO: 961708 - RNA, 23 nt, Human
gccucggccucccaaagugcugg

SEQ ID NO: 961709 - RNA, 20 nt, Human
gcuauuuuccucugccuauu

SEQ ID NO: 961710 - RNA, 25 nt, Human
gcuucccggguucacgccauucucc

SEQ ID NO: 961711 - RNA, 18 nt, Human
ggacaugaaacauauccu

SEQ ID NO: 961712 - RNA, 18 nt, Human
ggagagagagggagaaac

SEQ ID NO: 961713 - RNA, 20 nt, Human
ggagagagagggagaaacug

SEQ ID NO: 961714 - RNA, 18 nt, Human
ggaggaggugaaugggca

SEQ ID NO: 961715 - RNA, 21 nt, Human
ggaggugaaugggcauuguuu

SEQ ID NO: 961716 - RNA, 24 nt, Human
gggaaaauuuggugagaugaaggg

SEQ ID NO: 961717 - RNA, 19 nt, Human
gggugugugugugugugug

SEQ ID NO: 961718 - RNA, 19 nt, Human
gggugugugugugugugug

SEQ ID NO: 961719 - RNA, 22 nt, Human
ggguuucaccuuguuagccagg

SEQ ID NO: 961720 - RNA, 20 nt, Human
ggucuccaucuccugaccuc

SEQ ID NO: 961721 - RNA, 19 nt, Human
guaauccacuugcuuucaa

SEQ ID NO: 961722 - RNA, 18 nt, Human
gugugugugugugugugu

SEQ ID NO: 961723 - RNA, 18 nt, Human
guguguguguguugggag

SEQ ID NO: 961724 - RNA, 18 nt, Human
guuagaauccuaacuaua

SEQ ID NO: 961725 - RNA, 20 nt, Human
uaaaauuuaguggucucacc

SEQ ID NO: 961726 - RNA, 21 nt, Human
uaaauguucauaaugguucuc

SEQ ID NO: 961727 - RNA, 20 nt, Human
uaaauuaucuauaaacaaua

SEQ ID NO: 961728 - RNA, 18 nt, Human
uaacaaagauagaagagg

SEQ ID NO: 961729 - RNA, 24 nt, Human
uaacaaagauagaagaggucuaaa

SEQ ID NO: 961730 - RNA, 21 nt, Human
uaagcuaacuuugaaaacuga

SEQ ID NO: 961731 - RNA, 24 nt, Human
uaauuuuuuguauuuuuaguagag

SEQ ID NO: 961732 - RNA, 25 nt, Human
uaauuuuuuguauuuuuaguagaga

SEQ ID NO: 961733 - RNA, 19 nt, Human
uacaaaauuucauauuuua

SEQ ID NO: 961734 - RNA, 18 nt, Human
uacaaggauuaacauguu

SEQ ID NO: 961735 - RNA, 19 nt, Human
uacaccauuguuaucauca

SEQ ID NO: 961736 - RNA, 19 nt, Human
uacagcacucacaacacac

SEQ ID NO: 961737 - RNA, 23 nt, Human
uacaggcgugagccaccgcgccc

SEQ ID NO: 961738 - RNA, 19 nt, Human
uacauauauauguacauau

SEQ ID NO: 961739 - RNA, 18 nt, Human
uaccacaagagggaagca

SEQ ID NO: 961740 - RNA, 23 nt, Human
uaccuacugauaaucugcuuuca

SEQ ID NO: 961741 - RNA, 21 nt, Human
uacuaaacaggcagacuuucu

SEQ ID NO: 961742 - RNA, 22 nt, Human
uagaagaaggaaagacuuugau

SEQ ID NO: 961743 - RNA, 20 nt, Human
uagcauugaauaaacuuucu

SEQ ID NO: 961744 - RNA, 24 nt, Human
uagccaggauggucuccaucuccu

SEQ ID NO: 961745 - RNA, 24 nt, Human
uaguagagacgggguuucaccuug

SEQ ID NO: 961746 - RNA, 27 nt, Human
uaguaugugaggggugugugugugugu

SEQ ID NO: 961747 - RNA, 18 nt, Human
uauacauauauauguaca

SEQ ID NO: 961748 - RNA, 20 nt, Human
uauauacauauauauguaca

SEQ ID NO: 961749 - RNA, 19 nt, Human
uauauguacauaugugugu

SEQ ID NO: 961750 - RNA, 24 nt, Human
uauauguacauauguguguguaua

SEQ ID NO: 961751 - RNA, 22 nt, Human
uauguacauauguguguguaua

SEQ ID NO: 961752 - RNA, 26 nt, Human
uaugugaggggugugugugugugugu

SEQ ID NO: 961753 - RNA, 20 nt, Human
ucaaaacuaagucuauccac

SEQ ID NO: 961754 - RNA, 23 nt, Human
ucaaaucuuuccuaaacagauau

SEQ ID NO: 961755 - RNA, 18 nt, Human
ucaauuuuuauuuaggug

SEQ ID NO: 961756 - RNA, 26 nt, Human
ucacaacacaccugcuacuguccgga

SEQ ID NO: 961757 - RNA, 24 nt, Human
ucacaacacaccugcuacuuaaca

SEQ ID NO: 961758 - RNA, 24 nt, Human
ucaccuuguuagccaggauggucu

SEQ ID NO: 961759 - RNA, 23 nt, Human
ucacugcaagcuccgcuucccgg

SEQ ID NO: 961760 - RNA, 24 nt, Human
ucacugcaagcuccgcuucccggg

SEQ ID NO: 961761 - RNA, 22 nt, Human
ucacuuuaauauuuuuuucaca

SEQ ID NO: 961762 - RNA, 20 nt, Human
ucagaaaaaaaaaaaaaaaa

SEQ ID NO: 961763 - RNA, 18 nt, Human
ucagccucccaaguagcu

SEQ ID NO: 961764 - RNA, 20 nt, Human
ucagccucccaaguagcugg

SEQ ID NO: 961765 - RNA, 27 nt, Human
uccaaagagugagucuucagagccaug

SEQ ID NO: 961766 - RNA, 24 nt, Human
uccacagguccucuccuguaacaa

SEQ ID NO: 961767 - RNA, 19 nt, Human
uccauguaccuacugauaa

SEQ ID NO: 961768 - RNA, 24 nt, Human
ucccaaagugcugggauuacaggc

SEQ ID NO: 961769 - RNA, 24 nt, Human
ucccaaguagcugggacuacaggc

SEQ ID NO: 961770 - RNA, 20 nt, Human
ucccggguucacgccauucu

SEQ ID NO: 961771 - RNA, 21 nt, Human
ucccggguucacgccauucuc

SEQ ID NO: 961772 - RNA, 24 nt, Human
ucccggguucacgccauucuccug

SEQ ID NO: 961773 - RNA, 23 nt, Human
ucgaacacucauuacaaacauuc

SEQ ID NO: 961774 - RNA, 21 nt, Human
ucuccaucuccugaccucaug

SEQ ID NO: 961775 - RNA, 22 nt, Human
ucuccuucuacaagaaagagaa

SEQ ID NO: 961776 - RNA, 18 nt, Human
ucucgcucugucgcccag

SEQ ID NO: 961777 - RNA, 18 nt, Human
ucucgcucugucgcccag

SEQ ID NO: 961778 - RNA, 19 nt, Human
ucucgcucugucgcccagg

SEQ ID NO: 961779 - RNA, 24 nt, Human
ucucgcucugucgcccaggccgga

SEQ ID NO: 961780 - RNA, 21 nt, Human
ucucuucgggcuccuggaagc

SEQ ID NO: 961781 - RNA, 18 nt, Human
ucuuaucaauuuucuuuc

SEQ ID NO: 961782 - RNA, 23 nt, Human
ugaauaaacuuaaauuuuucuua

SEQ ID NO: 961783 - RNA, 22 nt, Human
ugagagcaaaucacuuuaauau

SEQ ID NO: 961784 - RNA, 22 nt, Human
ugcaguggcgcaaucucggcuc

SEQ ID NO: 961785 - RNA, 23 nt, Human
ugcaguggcgcaaucucggcuca

SEQ ID NO: 961786 - RNA, 24 nt, Human
ugccucagccucccaaguagcugg

SEQ ID NO: 961787 - RNA, 24 nt, Human
ugcugggauuacaggcgugagcca

SEQ ID NO: 961788 - RNA, 25 nt, Human
uggaagccucucagaagucagccuc

SEQ ID NO: 961789 - RNA, 19 nt, Human
uggaauuuucagaggaugu

SEQ ID NO: 961790 - RNA, 21 nt, Human
uggagguccucucuucgggcu

SEQ ID NO: 961791 - RNA, 21 nt, Human
ugggacuacaggcgcccgcca

SEQ ID NO: 961792 - RNA, 22 nt, Human
ugggacuacaggcgcccgccac

SEQ ID NO: 961793 - RNA, 23 nt, Human
ugggacuacaggcgcccgccacc

SEQ ID NO: 961794 - RNA, 24 nt, Human
ugggacuacaggcgcccgccaccg

SEQ ID NO: 961795 - RNA, 19 nt, Human
ugggauuacaggcgugagc

SEQ ID NO: 961796 - RNA, 21 nt, Human
ugggauuacaggcgugagcca

SEQ ID NO: 961797 - RNA, 22 nt, Human
ugggauuacaggcgugagccac

SEQ ID NO: 961798 - RNA, 23 nt, Human
ugggauuacaggcgugagccacc

SEQ ID NO: 961799 - RNA, 24 nt, Human
ugggauuacaggcgugagccaccg

SEQ ID NO: 961800 - RNA, 19 nt, Human
uggggauguauuuuugugg

SEQ ID NO: 961801 - RNA, 21 nt, Human
uggggauguauuuuuguggga

SEQ ID NO: 961802 - RNA, 21 nt, Human
uguauuuuuaguagagacggg

SEQ ID NO: 961803 - RNA, 20 nt, Human
uguuaucaucauuaacuacu

SEQ ID NO: 961804 - RNA, 21 nt, Human
uuagcaauauagaauuauaga

SEQ ID NO: 961805 - RNA, 24 nt, Human
uuaguagagacgggguuucaccuu

SEQ ID NO: 961806 - RNA, 25 nt, Human
uuaguagagacgggguuucaccuug

SEQ ID NO: 961807 - RNA, 22 nt, Human
uuauauacauauauauguacau

SEQ ID NO: 961808 - RNA, 21 nt, Human
uucaccguccaagcccucgcu

SEQ ID NO: 961809 - RNA, 29 nt, Human
uucagaaaaaaaaaaaaaaaagagagaaa

SEQ ID NO: 961810 - RNA, 19 nt, Human
uuccuccaagucuuguagg

SEQ ID NO: 961811 - RNA, 20 nt, Human
uucucaagaaggacagaaca

SEQ ID NO: 961812 - RNA, 23 nt, Human
uuguauuuuuaguagagacgggg

SEQ ID NO: 961813 - RNA, 19 nt, Human
uugugcugaaggaggaggu

SEQ ID NO: 961814 - RNA, 21 nt, Human
uuuacuuaggacuucccucca

SEQ ID NO: 961815 - RNA, 20 nt, Human
uuuauaauuacuaugaagau

SEQ ID NO: 961816 - RNA, 21 nt, Human
uuugaagcauggugacuuauc

SEQ ID NO: 961817 - RNA, 20 nt, Human
uuuguaaggccccugugauc

SEQ ID NO: 961818 - RNA, 22 nt, Human
uuuuacuuuuuuacuuuccaaa

SEQ ID NO: 961819 - RNA, 21 nt, Human
uuuucaguauauuugcauuuc

SEQ ID NO: 961820 - RNA, 24 nt, Human
uuuuuaguagagacgggguuucac

SEQ ID NO: 961821 - RNA, 21 nt, Human
uuuuuguauuuuuaguagaga

SEQ ID NO: 961822 - RNA, 24 nt, Human
uuuuuuguauuuuuaguagagacg

SEQ ID NO: 961823 - RNA, 20 nt, Human
aaacagggucaagugggccc

SEQ ID NO: 961824 - RNA, 19 nt, Human
aaagauggagcgagggugg

SEQ ID NO: 961825 - RNA, 20 nt, Human
acgcagcccaagcugguccu

SEQ ID NO: 961826 - RNA, 21 nt, Human
agcaacaacuacauccucggc

SEQ ID NO: 961827 - RNA, 20 nt, Human
agcccaagcugguccugaau

SEQ ID NO: 961828 - RNA, 25 nt, Human
agcuggccccaaggcucccaagggc

SEQ ID NO: 961829 - RNA, 20 nt, Human
aggcccccauauuuggccag

SEQ ID NO: 961830 - RNA, 21 nt, Human
aggguuuccaacucugucuca

SEQ ID NO: 961831 - RNA, 24 nt, Human
auccccagcaccccugggaggcca

SEQ ID NO: 961832 - RNA, 25 nt, Human
auccccagcaccccugggaggccau

SEQ ID NO: 961833 - RNA, 19 nt, Human
auguauaaaaaccacauaa

SEQ ID NO: 961834 - RNA, 24 nt, Human
cacacggguucucacgcaacaacg

SEQ ID NO: 961835 - RNA, 20 nt, Human
cacagccccugaagccaggg

SEQ ID NO: 961836 - RNA, 18 nt, Human
cacauuuggaauuguuuu

SEQ ID NO: 961837 - RNA, 21 nt, Human
caccaaccuaggcaggccccc

SEQ ID NO: 961838 - RNA, 24 nt, Human
cacgcagcccaagcugguccugaa

SEQ ID NO: 961839 - RNA, 22 nt, Human
cagcaccccugggaggccauga

SEQ ID NO: 961840 - RNA, 19 nt, Human
cagcaggccagcuggcccc

SEQ ID NO: 961841 - RNA, 26 nt, Human
cagcaggccagcuggccccaaggcuc

SEQ ID NO: 961842 - RNA, 21 nt, Human
cagggcagcguccucuggaag

SEQ ID NO: 961843 - RNA, 22 nt, Human
caguugacccucuccgagcauu

SEQ ID NO: 961844 - RNA, 18 nt, Human
ccacagccugauacaggc

SEQ ID NO: 961845 - RNA, 21 nt, Human
ccacauaaauucagggccccu

SEQ ID NO: 961846 - RNA, 22 nt, Human
ccagcuggccccaaggcuccca

SEQ ID NO: 961847 - RNA, 21 nt, Human
ccccagcaccccugggaggcc

SEQ ID NO: 961848 - RNA, 21 nt, Human
cccccgagucgccccgggggc

SEQ ID NO: 961849 - RNA, 22 nt, Human
ccccgagucgccccgggggccc

SEQ ID NO: 961850 - RNA, 18 nt, Human
ccccgggggcccccgccu

SEQ ID NO: 961851 - RNA, 23 nt, Human
cccucuccgagcauucacagccc

SEQ ID NO: 961852 - RNA, 22 nt, Human
ccgcaguccucccgccggcgcc

SEQ ID NO: 961853 - RNA, 21 nt, Human
ccgcagugccaaccuagcccu

SEQ ID NO: 961854 - RNA, 19 nt, Human
ccgccccgcgguccgcccc

SEQ ID NO: 961855 - RNA, 22 nt, Human
ccggccccgcagccucggcuug

SEQ ID NO: 961856 - RNA, 23 nt, Human
ccuagcccucuggucccugaggu

SEQ ID NO: 961857 - RNA, 21 nt, Human
ccuccggaccuggggggcggg

SEQ ID NO: 961858 - RNA, 21 nt, Human
cgcaguccucccgccggcgcc

SEQ ID NO: 961859 - RNA, 21 nt, Human
cgccggccccgcagccucggc

SEQ ID NO: 961860 - RNA, 23 nt, Human
cgccggcgccggccccgcagccu

SEQ ID NO: 961861 - RNA, 23 nt, Human
cgcgcuguccucucguguggcca

SEQ ID NO: 961862 - RNA, 18 nt, Human
cggacucacgggcggcag

SEQ ID NO: 961863 - RNA, 19 nt, Human
cuuuggaugcauccccagc

SEQ ID NO: 961864 - RNA, 20 nt, Human
gaaaucucuccugagcucgc

SEQ ID NO: 961865 - RNA, 18 nt, Human
gagaggaccagggugcag

SEQ ID NO: 961866 - RNA, 23 nt, Human
gagguggugggacgacggcagca

SEQ ID NO: 961867 - RNA, 24 nt, Human
gcaacaacggaggaaggcaggcga

SEQ ID NO: 961868 - RNA, 26 nt, Human
gcaaggcagaacgcacgcagcccaag

SEQ ID NO: 961869 - RNA, 20 nt, Human
gccccaaggcucccaagggc

SEQ ID NO: 961870 - RNA, 24 nt, Human
gccccgggggcccccgccuccgga

SEQ ID NO: 961871 - RNA, 21 nt, Human
ggacuggggagaggaccaggg

SEQ ID NO: 961872 - RNA, 22 nt, Human
ggacuggggagaggaccagggu

SEQ ID NO: 961873 - RNA, 23 nt, Human
ggaggaaggugagggauggaggg

SEQ ID NO: 961874 - RNA, 20 nt, Human
ggccccaaggcucccaaggg

SEQ ID NO: 961875 - RNA, 21 nt, Human
ggccgcagugccaaccuagcc

SEQ ID NO: 961876 - RNA, 22 nt, Human
ggcgccggccccgcagccucgg

SEQ ID NO: 961877 - RNA, 21 nt, Human
ggcgggaggugggaaacaggg

SEQ ID NO: 961878 - RNA, 22 nt, Human
gggacgacggcagcaacaacua

SEQ ID NO: 961879 - RNA, 22 nt, Human
ggggccacggcuguuugggugu

SEQ ID NO: 961880 - RNA, 23 nt, Human
ggugaagaggccaguuggugagg

SEQ ID NO: 961881 - RNA, 20 nt, Human
gucucuucccugaauucuga

SEQ ID NO: 961882 - RNA, 19 nt, Human
guggcagcgggauaaugug

SEQ ID NO: 961883 - RNA, 21 nt, Human
guguuccacgaagagcagagc

SEQ ID NO: 961884 - RNA, 21 nt, Human
uaaaaaauguauaaaaaccac

SEQ ID NO: 961885 - RNA, 22 nt, Human
uaucucuucccucucauucuag

SEQ ID NO: 961886 - RNA, 21 nt, Human
uccaacucugucucagacaac

SEQ ID NO: 961887 - RNA, 20 nt, Human
uccgagcccaggaccuggug

SEQ ID NO: 961888 - RNA, 23 nt, Human
uccggaccuggggggcgggaggu

SEQ ID NO: 961889 - RNA, 21 nt, Human
ucggccggacucacgggcggc

SEQ ID NO: 961890 - RNA, 23 nt, Human
ucuccgagcauucacagccccug

SEQ ID NO: 961891 - RNA, 24 nt, Human
ucugggugguaggagcuucgcuac

SEQ ID NO: 961892 - RNA, 18 nt, Human
ugaagaggccaguuggug

SEQ ID NO: 961893 - RNA, 22 nt, Human
ugaagaggccaguuggugaggg

SEQ ID NO: 961894 - RNA, 21 nt, Human
ugaagccagggcagcguccuc

SEQ ID NO: 961895 - RNA, 19 nt, Human
ugacuggagagcagcaggc

SEQ ID NO: 961896 - RNA, 21 nt, Human
ugagggaaaggcguacauugu

SEQ ID NO: 961897 - RNA, 24 nt, Human
ugccaugcuaucucuucccucuca

SEQ ID NO: 961898 - RNA, 21 nt, Human
uggaaagguccaggaguuggg

SEQ ID NO: 961899 - RNA, 22 nt, Human
uggaggaaggugagggauggag

SEQ ID NO: 961900 - RNA, 23 nt, Human
uggaggaaggugagggauggagg

SEQ ID NO: 961901 - RNA, 21 nt, Human
uggcaaggcagaacgcacgca

SEQ ID NO: 961902 - RNA, 23 nt, Human
uggcagcgggauaauguggaagg

SEQ ID NO: 961903 - RNA, 20 nt, Human
uggccaggaccucuggggcc

SEQ ID NO: 961904 - RNA, 22 nt, Human
ugggaaggggcacacggguucu

SEQ ID NO: 961905 - RNA, 22 nt, Human
ugggcccuggcaaacucagccc

SEQ ID NO: 961906 - RNA, 21 nt, Human
ugucacgaaaucucuccugag

SEQ ID NO: 961907 - RNA, 18 nt, Human
ugugcugggcaguguuga

SEQ ID NO: 961908 - RNA, 23 nt, Human
uuaaaaaauguauaaaaaccaca

SEQ ID NO: 961909 - RNA, 24 nt, Human
aaacacaugugcaaauacagacaa

SEQ ID NO: 961910 - RNA, 21 nt, Human
aaacaggaaggcuaugccaca

SEQ ID NO: 961911 - RNA, 22 nt, Human
aaguauaaaauaccacugaacc

SEQ ID NO: 961912 - RNA, 24 nt, Human
acacaaacacaugugcaaauacag

SEQ ID NO: 961913 - RNA, 23 nt, Human
acacacacauacacacacacaca

SEQ ID NO: 961914 - RNA, 33 nt, Human
acacacacauacacacacacacaaacacauggu

SEQ ID NO: 961915 - RNA, 19 nt, Human
acacagccuuucccagccc

SEQ ID NO: 961916 - RNA, 18 nt, Human
acacaggaggcuccaucu

SEQ ID NO: 961917 - RNA, 24 nt, Human
accccuuccccuucauagcuccaa

SEQ ID NO: 961918 - RNA, 20 nt, Human
acccuguccaccccaccucc

SEQ ID NO: 961919 - RNA, 20 nt, Human
accucccacgcuucccgccg

SEQ ID NO: 961920 - RNA, 21 nt, Human
acugugcuugaaaaaccccaa

SEQ ID NO: 961921 - RNA, 23 nt, Human
agaaggcaaguauaaaauaccac

SEQ ID NO: 961922 - RNA, 25 nt, Human
agcgcgcacgcgcgugcacacacac

SEQ ID NO: 961923 - RNA, 21 nt, Human
aggaagaaggcaaguauaaaa

SEQ ID NO: 961924 - RNA, 26 nt, Human
aggugguguugugccaggaggugucc

SEQ ID NO: 961925 - RNA, 29 nt, Human
auacacacacacacaaacacaugugcagu

SEQ ID NO: 961926 - RNA, 23 nt, Human
caaaaguaggagcuacaccuccc

SEQ ID NO: 961927 - RNA, 22 nt, Human
cacacaggaggcuccaucuccc

SEQ ID NO: 961928 - RNA, 20 nt, Human
cacagcaggcccacccucuc

SEQ ID NO: 961929 - RNA, 21 nt, Human
cacaggaggcuccaucucccu

SEQ ID NO: 961930 - RNA, 20 nt, Human
cacccucucccuucucuccc

SEQ ID NO: 961931 - RNA, 19 nt, Human
cacccuguccaccccaccu

SEQ ID NO: 961932 - RNA, 24 nt, Human
cacccuuccccccaaacacacagg

SEQ ID NO: 961933 - RNA, 19 nt, Human
cacucggggcagugggggu

SEQ ID NO: 961934 - RNA, 24 nt, Human
cagaaacaggaaggcuaugccaca

SEQ ID NO: 961935 - RNA, 22 nt, Human
cagacaaacacacaucuugaaa

SEQ ID NO: 961936 - RNA, 20 nt, Human
cagagaggaggaagaugccu

SEQ ID NO: 961937 - RNA, 18 nt, Human
caggaggacccaggccaa

SEQ ID NO: 961938 - RNA, 20 nt, Human
caggaggcuccaucucccuc

SEQ ID NO: 961939 - RNA, 22 nt, Human
caugugcaaauacagacaaaca

SEQ ID NO: 961940 - RNA, 23 nt, Human
caugugcaaauacagacaaacac

SEQ ID NO: 961941 - RNA, 20 nt, Human
ccacagcaggcccacccucu

SEQ ID NO: 961942 - RNA, 22 nt, Human
ccacccacccuuccccccaaac

SEQ ID NO: 961943 - RNA, 23 nt, Human
ccacccacccuuccccccaaaca

SEQ ID NO: 961944 - RNA, 24 nt, Human
ccacccacccuuccccccaaacac

SEQ ID NO: 961945 - RNA, 24 nt, Human
ccacccuuccccccaaacacacag

SEQ ID NO: 961946 - RNA, 22 nt, Human
cccacccacccuuccccccaaa

SEQ ID NO: 961947 - RNA, 23 nt, Human
cccacccacccuuccccccaaac

SEQ ID NO: 961948 - RNA, 24 nt, Human
cccacccacccuuccccccaaaca

SEQ ID NO: 961949 - RNA, 23 nt, Human
ccccaagcccugcacucccucug

SEQ ID NO: 961950 - RNA, 21 nt, Human
ccccacccacccuucccccca

SEQ ID NO: 961951 - RNA, 23 nt, Human
ccccacccacccuuccccccaaa

SEQ ID NO: 961952 - RNA, 24 nt, Human
cccccaaacacacaggaggcucca

SEQ ID NO: 961953 - RNA, 18 nt, Human
ccccccacccugaaaaca

SEQ ID NO: 961954 - RNA, 20 nt, Human
cccucugaaggggcacagca

SEQ ID NO: 961955 - RNA, 20 nt, Human
cccuguccaccccaccucca

SEQ ID NO: 961956 - RNA, 23 nt, Human
ccuccauauguacaucgcugccc

SEQ ID NO: 961957 - RNA, 18 nt, Human
ccuccccccacccugaaa

SEQ ID NO: 961958 - RNA, 31 nt, Human
cgcacgcgcgugcacacacacauacacacag

SEQ ID NO: 961959 - RNA, 26 nt, Human
cgcgugcacacacacauacacacaca

SEQ ID NO: 961960 - RNA, 19 nt, Human
cgugccaugucccugaggu

SEQ ID NO: 961961 - RNA, 22 nt, Human
cuaugccacaagcgcgcacgcg

SEQ ID NO: 961962 - RNA, 20 nt, Human
cucauggccgggugggugcu

SEQ ID NO: 961963 - RNA, 22 nt, Human
gaccccuuccccuucauagcuc

SEQ ID NO: 961964 - RNA, 24 nt, Human
gagcuacaccucccacgcuucccg

SEQ ID NO: 961965 - RNA, 24 nt, Human
gccccacccacccuuccccccaaa

SEQ ID NO: 961966 - RNA, 20 nt, Human
gcuugaaaaaccccaaagaa

SEQ ID NO: 961967 - RNA, 19 nt, Human
ggcaguggggguaggagag

SEQ ID NO: 961968 - RNA, 22 nt, Human
ggcuccaucucccuccccccac

SEQ ID NO: 961969 - RNA, 20 nt, Human
ggggguaggagagacaaagu

SEQ ID NO: 961970 - RNA, 24 nt, Human
uacaacaaauaaauacgcggggac

SEQ ID NO: 961971 - RNA, 18 nt, Human
uacagacaaacacacauc

SEQ ID NO: 961972 - RNA, 28 nt, Human
uacgaccccuuccccuucauagcuccaa

SEQ ID NO: 961973 - RNA, 22 nt, Human
uaggagcccuccuccuagggcu

SEQ ID NO: 961974 - RNA, 30 nt, Human
uaugccacaagcgcgcacgcgcgugcacag

SEQ ID NO: 961975 - RNA, 19 nt, Human
uccaccccaccuccauaug

SEQ ID NO: 961976 - RNA, 27 nt, Human
uccaccccaccuccauauguacaucgc

SEQ ID NO: 961977 - RNA, 20 nt, Human
uccaucucccuccccccacc

SEQ ID NO: 961978 - RNA, 26 nt, Human
uccccccacccugaaaacauucacag

SEQ ID NO: 961979 - RNA, 21 nt, Human
ucccugagguagcuggugccu

SEQ ID NO: 961980 - RNA, 19 nt, Human
ucccuucucuccccucaca

SEQ ID NO: 961981 - RNA, 18 nt, Human
ucgcugcccgacacucgg

SEQ ID NO: 961982 - RNA, 21 nt, Human
ucgcugcccgacacucggggc

SEQ ID NO: 961983 - RNA, 18 nt, Human
ucggggcaguggggguag

SEQ ID NO: 961984 - RNA, 22 nt, Human
ucucccuccccccacccugaaa

SEQ ID NO: 961985 - RNA, 24 nt, Human
ucucccuccccccacccugaaaac

SEQ ID NO: 961986 - RNA, 20 nt, Human
ugacagaaacaggaaggcua

SEQ ID NO: 961987 - RNA, 21 nt, Human
ugagguagcuggugccugugc

SEQ ID NO: 961988 - RNA, 18 nt, Human
ugauacgaccccuucccc

SEQ ID NO: 961989 - RNA, 24 nt, Human
ugcacacacacauacacacacaca

SEQ ID NO: 961990 - RNA, 25 nt, Human
ugcacacacacauacacacacacac

SEQ ID NO: 961991 - RNA, 21 nt, Human
ugccaggagguguccugcagg

SEQ ID NO: 961992 - RNA, 18 nt, Human
ugcccgugccaugucccu

SEQ ID NO: 961993 - RNA, 22 nt, Human
ugcccgugcugagcagagcagg

SEQ ID NO: 961994 - RNA, 21 nt, Human
ugccugugcaaaaguaggagc

SEQ ID NO: 961995 - RNA, 24 nt, Human
ugccuucugcgaggcuggugcccu

SEQ ID NO: 961996 - RNA, 19 nt, Human
uggccgggugggugcuggg

SEQ ID NO: 961997 - RNA, 21 nt, Human
ugugccaggagguguccugca

SEQ ID NO: 961998 - RNA, 23 nt, Human
uguuaggagcccuccuccuaggg

SEQ ID NO: 961999 - RNA, 23 nt, Human
uuuuuuuuuuuuuuuuucauuuu

SEQ ID NO: 962000 - RNA, 20 nt, Human
aaaauccaaguaaucacuca

SEQ ID NO: 962001 - RNA, 20 nt, Human
aaagccauaaaaccucccca

SEQ ID NO: 962002 - RNA, 23 nt, Human
aaccagaaagcaaagucauagcu

SEQ ID NO: 962003 - RNA, 20 nt, Human
aagaauaagcagaaccaccc

SEQ ID NO: 962004 - RNA, 19 nt, Human
aagcaaagucauagcuaug

SEQ ID NO: 962005 - RNA, 19 nt, Human
aagcaaagucauagcuaug

SEQ ID NO: 962006 - RNA, 18 nt, Human
aagcagaaccaccccaag

SEQ ID NO: 962007 - RNA, 19 nt, Human
aagcaggaagaggucuuga

SEQ ID NO: 962008 - RNA, 18 nt, Human
aagcaguucugauuucuc

SEQ ID NO: 962009 - RNA, 21 nt, Human
aaugggcccaagauagggggc

SEQ ID NO: 962010 - RNA, 23 nt, Human
acaaaagccauaaaaccucccca

SEQ ID NO: 962011 - RNA, 21 nt, Human
acagacacacauguacaaaca

SEQ ID NO: 962012 - RNA, 22 nt, Human
acagacacacauguacaaacaa

SEQ ID NO: 962013 - RNA, 18 nt, Human
acauacagacacacaugu

SEQ ID NO: 962014 - RNA, 22 nt, Human
acauacagacacacauguacaa

SEQ ID NO: 962015 - RNA, 21 nt, Human
agaaacaagaaggccuccagc

SEQ ID NO: 962016 - RNA, 26 nt, Human
agaaggccuccagcagcuaccagucc

SEQ ID NO: 962017 - RNA, 20 nt, Human
agacacacauguacaaacaa

SEQ ID NO: 962018 - RNA, 21 nt, Human
agacuccauauugcaacaugg

SEQ ID NO: 962019 - RNA, 18 nt, Human
agagccaugugcgagugg

SEQ ID NO: 962020 - RNA, 21 nt, Human
agagcucagcuuccagggacu

SEQ ID NO: 962021 - RNA, 18 nt, Human
agaggcugggauggucuu

SEQ ID NO: 962022 - RNA, 23 nt, Human
agccauaaaaccuccccacagag

SEQ ID NO: 962023 - RNA, 22 nt, Human
aggaagaggucuugacguuugg

SEQ ID NO: 962024 - RNA, 27 nt, Human
aggccaagaccaggacucagcaggaga

SEQ ID NO: 962025 - RNA, 25 nt, Human
aggccuugaaaaucugacaaaagcc

SEQ ID NO: 962026 - RNA, 23 nt, Human
agggacuggccacagucagucag

SEQ ID NO: 962027 - RNA, 24 nt, Human
agggcaaguccagggagagcugcc

SEQ ID NO: 962028 - RNA, 23 nt, Human
auacagacacacauguacaaaca

SEQ ID NO: 962029 - RNA, 23 nt, Human
auauugcaacauggggaucaugc

SEQ ID NO: 962030 - RNA, 21 nt, Human
augaacgaggcacauucacag

SEQ ID NO: 962031 - RNA, 23 nt, Human
auguacaaacaacauuuugcaua

SEQ ID NO: 962032 - RNA, 20 nt, Human
caaguccagggagagcugcc

SEQ ID NO: 962033 - RNA, 22 nt, Human
cacauuugcccccaaccaccuc

SEQ ID NO: 962034 - RNA, 20 nt, Human
cacccuguuccaggcagggc

SEQ ID NO: 962035 - RNA, 28 nt, Human
caggcaacgcccccauuccccugaaagg

SEQ ID NO: 962036 - RNA, 18 nt, Human
cagggcagagacuccauu

SEQ ID NO: 962037 - RNA, 23 nt, Human
caggggguaaaaacaaagaaaag

SEQ ID NO: 962038 - RNA, 21 nt, Human
cauagagcucagcuuccaggg

SEQ ID NO: 962039 - RNA, 24 nt, Human
cauccccaaaacuaaugggcccaa

SEQ ID NO: 962040 - RNA, 24 nt, Human
cauguacaaacaacauuuugcaua

SEQ ID NO: 962041 - RNA, 20 nt, Human
ccaaccagaaagcaaaguca

SEQ ID NO: 962042 - RNA, 27 nt, Human
ccacccggaaggucacuuuaggagcuu

SEQ ID NO: 962043 - RNA, 22 nt, Human
ccagacccagcaaccuuuggca

SEQ ID NO: 962044 - RNA, 27 nt, Human
ccauggaccccagguaggggggacucc

SEQ ID NO: 962045 - RNA, 18 nt, Human
ccccaagcccauccaggc

SEQ ID NO: 962046 - RNA, 20 nt, Human
ccccaagcccauccaggcuc

SEQ ID NO: 962047 - RNA, 23 nt, Human
ccccaagcccauccaggcucaga

SEQ ID NO: 962048 - RNA, 21 nt, Human
ccccauuccaauugucucccu

SEQ ID NO: 962049 - RNA, 20 nt, Human
cccccaaccaccuccagggc

SEQ ID NO: 962050 - RNA, 19 nt, Human
cccccagcaucucaguggu

SEQ ID NO: 962051 - RNA, 20 nt, Human
cccccagcaucucagugguc

SEQ ID NO: 962052 - RNA, 22 nt, Human
cccucauaaauauuccuaagca

SEQ ID NO: 962053 - RNA, 18 nt, Human
ccuacacuccagccagag

SEQ ID NO: 962054 - RNA, 24 nt, Human
ccuccagggcucuuccuuccggcc

SEQ ID NO: 962055 - RNA, 20 nt, Human
cuacacuccagccagagaaa

SEQ ID NO: 962056 - RNA, 19 nt, Human
cuccagcagcuaccagucc

SEQ ID NO: 962057 - RNA, 20 nt, Human
cuccccacagagacauacag

SEQ ID NO: 962058 - RNA, 24 nt, Human
cuccccaucccucauaaauauucc

SEQ ID NO: 962059 - RNA, 18 nt, Human
cucucggcucgguccggc

SEQ ID NO: 962060 - RNA, 23 nt, Human
cuggagaaacaagaaggccucca

SEQ ID NO: 962061 - RNA, 19 nt, Human
cuggccccaagcccaucca

SEQ ID NO: 962062 - RNA, 19 nt, Human
cuucaaaggggaaggacug

SEQ ID NO: 962063 - RNA, 20 nt, Human
gaaagcagcugugacauggc

SEQ ID NO: 962064 - RNA, 19 nt, Human
gaagaucacacauuuacua

SEQ ID NO: 962065 - RNA, 23 nt, Human
gacauggcagugguggcagcccc

SEQ ID NO: 962066 - RNA, 22 nt, Human
gacuccugcuuuagggcaaggg

SEQ ID NO: 962067 - RNA, 21 nt, Human
gagaggccacaacagucuucc

SEQ ID NO: 962068 - RNA, 22 nt, Human
gagcugccacagagugaugcca

SEQ ID NO: 962069 - RNA, 24 nt, Human
gaggggcaguguuucaguuccuuu

SEQ ID NO: 962070 - RNA, 20 nt, Human
gcagaaagcaguucugauuu

SEQ ID NO: 962071 - RNA, 30 nt, Human
gcccccauuccaauugucucccuccccauu

SEQ ID NO: 962072 - RNA, 24 nt, Human
gcccugugccccauccccaaaacu

SEQ ID NO: 962073 - RNA, 21 nt, Human
gcugcccuucccacccggaag

SEQ ID NO: 962074 - RNA, 23 nt, Human
ggaaggacuggaucauugacugg

SEQ ID NO: 962075 - RNA, 19 nt, Human
ggccccggggcuacuggcc

SEQ ID NO: 962076 - RNA, 19 nt, Human
ggccucggccccacucggg

SEQ ID NO: 962077 - RNA, 19 nt, Human
gggaagaucucagggcaga

SEQ ID NO: 962078 - RNA, 22 nt, Human
ggggagaggggcaguguuucag

SEQ ID NO: 962079 - RNA, 18 nt, Human
gggugcggcgcaagcuac

SEQ ID NO: 962080 - RNA, 21 nt, Human
gggugcggcgcaagcuacggc

SEQ ID NO: 962081 - RNA, 18 nt, Human
gguaaaaacaaagaaaag

SEQ ID NO: 962082 - RNA, 24 nt, Human
gguuguggggcaauggggagaggg

SEQ ID NO: 962083 - RNA, 21 nt, Human
guagagcagaaaacuucaaag

SEQ ID NO: 962084 - RNA, 18 nt, Human
uaacuuggccucagugca

SEQ ID NO: 962085 - RNA, 21 nt, Human
uaagcagaaccaccccaagga

SEQ ID NO: 962086 - RNA, 25 nt, Human
uacagccuacacuccagccagagaa

SEQ ID NO: 962087 - RNA, 20 nt, Human
uacuaaaauccaaguaauca

SEQ ID NO: 962088 - RNA, 24 nt, Human
uagcuaugcccugugccccauccc

SEQ ID NO: 962089 - RNA, 22 nt, Human
uauuuucucauuuaauccuuga

SEQ ID NO: 962090 - RNA, 19 nt, Human
ucaguggucacuccguucc

SEQ ID NO: 962091 - RNA, 23 nt, Human
ucauggaaggaaaacugagaugg

SEQ ID NO: 962092 - RNA, 20 nt, Human
uccaaguaaucacucauacc

SEQ ID NO: 962093 - RNA, 19 nt, Human
uccaggcccagugaccccc

SEQ ID NO: 962094 - RNA, 19 nt, Human
uccauauugcaacaugggg

SEQ ID NO: 962095 - RNA, 22 nt, Human
uccauggaccccagguaggggg

SEQ ID NO: 962096 - RNA, 23 nt, Human
ucccuagguuagguuacuugccg

SEQ ID NO: 962097 - RNA, 22 nt, Human
uccuuuaacuuuguuaaggccu

SEQ ID NO: 962098 - RNA, 18 nt, Human
ugacaaaagccauaaaac

SEQ ID NO: 962099 - RNA, 18 nt, Human
ugacguuugguaagagcu

SEQ ID NO: 962100 - RNA, 19 nt, Human
ugaguaaacugaugucccu

SEQ ID NO: 962101 - RNA, 18 nt, Human
ugccccauccccaaaacu

SEQ ID NO: 962102 - RNA, 19 nt, Human
ugccccauccccaaaacua

SEQ ID NO: 962103 - RNA, 18 nt, Human
ugcugcagaaagcaguuc

SEQ ID NO: 962104 - RNA, 20 nt, Human
ugcuuuagggcaaggguguc

SEQ ID NO: 962105 - RNA, 18 nt, Human
uggaaggaaaacugagau

SEQ ID NO: 962106 - RNA, 22 nt, Human
uggaaggaaaacugagaugggg

SEQ ID NO: 962107 - RNA, 22 nt, Human
uggcagugguggcagccagggg

SEQ ID NO: 962108 - RNA, 23 nt, Human
uggcagugguggcagccaggggg

SEQ ID NO: 962109 - RNA, 19 nt, Human
ugggagccaaggaaauggg

SEQ ID NO: 962110 - RNA, 19 nt, Human
uggggaagaucucagggca

SEQ ID NO: 962111 - RNA, 21 nt, Human
ugucaucaaauacacauagag

SEQ ID NO: 962112 - RNA, 25 nt, Human
uuccaggcagggcaaguccagggag

SEQ ID NO: 962113 - RNA, 18 nt, Human
uuccaggcccagugaccc

SEQ ID NO: 962114 - RNA, 22 nt, Human
uugcccccaaccaccuccaggg

SEQ ID NO: 962115 - RNA, 21 nt, Human
uugguacagacaggucuuuau

SEQ ID NO: 962116 - RNA, 19 nt, Human
uuuaacuuuguuaaggccu

SEQ ID NO: 962117 - RNA, 21 nt, Human
uuuaacuuuguuaaggccuug

SEQ ID NO: 962118 - RNA, 19 nt, Human
uuugcccccaaccaccucc

SEQ ID NO: 962119 - RNA, 24 nt, Human
uuuugcauacaauuucagggaguc

SEQ ID NO: 962120 - RNA, 21 nt, Human
uuuuuuuuuuuuucauuggua

SEQ ID NO: 962121 - RNA, 19 nt, Human
aaaagagaggcuggcucau

SEQ ID NO: 962122 - RNA, 23 nt, Human
aaacccaacagacagguccaaga

SEQ ID NO: 962123 - RNA, 24 nt, Human
aaaggguuugggcagaugaaugga

SEQ ID NO: 962124 - RNA, 21 nt, Human
aagacccccaaagggagccag

SEQ ID NO: 962125 - RNA, 24 nt, Human
aagagaaaggguuugggcagauga

SEQ ID NO: 962126 - RNA, 24 nt, Human
aagagaaaggguuugggcagauga

SEQ ID NO: 962127 - RNA, 18 nt, Human
aagcguccaaacucccag

SEQ ID NO: 962128 - RNA, 19 nt, Human
aaugugcaucccagagccc

SEQ ID NO: 962129 - RNA, 23 nt, Human
acagcugcccuccaggcccccag

SEQ ID NO: 962130 - RNA, 20 nt, Human
acaggccacauagaggaggg

SEQ ID NO: 962131 - RNA, 18 nt, Human
accacaugugcaugggga

SEQ ID NO: 962132 - RNA, 30 nt, Human
accauccugguauuccauauaggguccugg

SEQ ID NO: 962133 - RNA, 24 nt, Human
accccacccucauagcgaccccag

SEQ ID NO: 962134 - RNA, 25 nt, Human
accccacccucauagcgaccccagc

SEQ ID NO: 962135 - RNA, 23 nt, Human
acccugaaagugccccggugagg

SEQ ID NO: 962136 - RNA, 24 nt, Human
accgcagauccuccugcccggcug

SEQ ID NO: 962137 - RNA, 18 nt, Human
accucgggcucccaccag

SEQ ID NO: 962138 - RNA, 18 nt, Human
accuguuggcuauggugg

SEQ ID NO: 962139 - RNA, 18 nt, Human
accuugucaucaucaccc

SEQ ID NO: 962140 - RNA, 23 nt, Human
acugugugcucagcgugaaggcu

SEQ ID NO: 962141 - RNA, 20 nt, Human
agacacgagccacacgggcc

SEQ ID NO: 962142 - RNA, 19 nt, Human
agacagccuggaucucugc

SEQ ID NO: 962143 - RNA, 22 nt, Human
agacaggccacauagaggaggg

SEQ ID NO: 962144 - RNA, 23 nt, Human
agacagguccaagacagcaaggg

SEQ ID NO: 962145 - RNA, 24 nt, Human
agacagguccaagacagcaaggga

SEQ ID NO: 962146 - RNA, 22 nt, Human
agacuaacaagacccccaaagg

SEQ ID NO: 962147 - RNA, 21 nt, Human
agagccucccccacaucuucc

SEQ ID NO: 962148 - RNA, 22 nt, Human
agaggagggaggaggccaggau

SEQ ID NO: 962149 - RNA, 18 nt, Human
agagguggguagaauuga

SEQ ID NO: 962150 - RNA, 25 nt, Human
agcagcaguguugaguaguucuggg

SEQ ID NO: 962151 - RNA, 19 nt, Human
agcagccauaguugccacu

SEQ ID NO: 962152 - RNA, 18 nt, Human
agcagcuggagaguggua

SEQ ID NO: 962153 - RNA, 23 nt, Human
agcauccaggcugcagaccccac

SEQ ID NO: 962154 - RNA, 19 nt, Human
agccaucagcugugcccag

SEQ ID NO: 962155 - RNA, 23 nt, Human
agcccaggacuacggccuugugg

SEQ ID NO: 962156 - RNA, 20 nt, Human
agccgguggcggugggggcg

SEQ ID NO: 962157 - RNA, 21 nt, Human
agcguccaaacucccagccuc

SEQ ID NO: 962158 - RNA, 25 nt, Human
agcugcccuccaggcccccagcccc

SEQ ID NO: 962159 - RNA, 19 nt, Human
aggccaccaagcgcggcaa

SEQ ID NO: 962160 - RNA, 19 nt, Human
aguaggggucucgggccaa

SEQ ID NO: 962161 - RNA, 25 nt, Human
agucagaauugauugucccauugug

SEQ ID NO: 962162 - RNA, 20 nt, Human
aguugagacaucagauuucu

SEQ ID NO: 962163 - RNA, 20 nt, Human
auagaggagggaggaggcca

SEQ ID NO: 962164 - RNA, 20 nt, Human
aucacccacugcacuggccu

SEQ ID NO: 962165 - RNA, 19 nt, Human
aucaggugccagcugugcc

SEQ ID NO: 962166 - RNA, 18 nt, Human
auggaacaggaggaugga

SEQ ID NO: 962167 - RNA, 21 nt, Human
auggaccugcagagcccugcc

SEQ ID NO: 962168 - RNA, 21 nt, Human
auggaccugcagagcccugcc

SEQ ID NO: 962169 - RNA, 18 nt, Human
auuuccgucggcgcccuc

SEQ ID NO: 962170 - RNA, 21 nt, Human
caaaguccaggaccagggaug

SEQ ID NO: 962171 - RNA, 21 nt, Human
caagacccccaaagggagcca

SEQ ID NO: 962172 - RNA, 21 nt, Human
caagggaggcucagaggugca

SEQ ID NO: 962173 - RNA, 22 nt, Human
cacaucaggugccagcugugcc

SEQ ID NO: 962174 - RNA, 21 nt, Human
caccagcagccuugcugaggc

SEQ ID NO: 962175 - RNA, 23 nt, Human
caccucgggcucccaccagcagc

SEQ ID NO: 962176 - RNA, 19 nt, Human
caccuugucaucaucaccc

SEQ ID NO: 962177 - RNA, 23 nt, Human
cacgagccaggccggggcucagg

SEQ ID NO: 962178 - RNA, 22 nt, Human
cacggacuaaacccaacagaca

SEQ ID NO: 962179 - RNA, 18 nt, Human
cacggugacugcugcggc

SEQ ID NO: 962180 - RNA, 19 nt, Human
cacugagagagaacagggc

SEQ ID NO: 962181 - RNA, 22 nt, Human
cacugcacuggccuugcucucc

SEQ ID NO: 962182 - RNA, 20 nt, Human
cacuucuccuuccccuccuc

SEQ ID NO: 962183 - RNA, 18 nt, Human
cagagcccaggacuacgg

SEQ ID NO: 962184 - RNA, 19 nt, Human
cagcagcccguccacgccc

SEQ ID NO: 962185 - RNA, 22 nt, Human
cagcauccaggcugcagacccc

SEQ ID NO: 962186 - RNA, 22 nt, Human
cagcugcccuccaggcccccag

SEQ ID NO: 962187 - RNA, 21 nt, Human
cagcugugcccagaaagagca

SEQ ID NO: 962188 - RNA, 22 nt, Human
caggaucuucuucccucccagg

SEQ ID NO: 962189 - RNA, 23 nt, Human
caggggcuuuuggagcuggggca

SEQ ID NO: 962190 - RNA, 22 nt, Human
cagggucuuccacugugugcuc

SEQ ID NO: 962191 - RNA, 19 nt, Human
cagguccaagacagcaagg

SEQ ID NO: 962192 - RNA, 27 nt, Human
cagguccaagacagcaagggaggcuga

SEQ ID NO: 962193 - RNA, 20 nt, Human
cagguugugggggcggggaa

SEQ ID NO: 962194 - RNA, 19 nt, Human
caugccuguuccacccacc

SEQ ID NO: 962195 - RNA, 20 nt, Human
caugccuguuccacccaccu

SEQ ID NO: 962196 - RNA, 21 nt, Human
ccaaaagagaggcuggcucau

SEQ ID NO: 962197 - RNA, 21 nt, Human
ccacccucauagcgaccccag

SEQ ID NO: 962198 - RNA, 19 nt, Human
ccaccugguuguaaguggg

SEQ ID NO: 962199 - RNA, 18 nt, Human
ccacgagcugcgugugcc

SEQ ID NO: 962200 - RNA, 23 nt, Human
ccagagccucccccacaucuucc

SEQ ID NO: 962201 - RNA, 21 nt, Human
ccagcagcccguccacgccca

SEQ ID NO: 962202 - RNA, 24 nt, Human
ccagcagccuugcugaggccuccu

SEQ ID NO: 962203 - RNA, 19 nt, Human
ccaggccggggcucaggca

SEQ ID NO: 962204 - RNA, 23 nt, Human
ccauuggucagcucagccggugg

SEQ ID NO: 962205 - RNA, 21 nt, Human
cccaacagacagguccaagac

SEQ ID NO: 962206 - RNA, 21 nt, Human
cccacccucauagcgacccca

SEQ ID NO: 962207 - RNA, 19 nt, Human
cccagacuaacaagacccc

SEQ ID NO: 962208 - RNA, 24 nt, Human
cccagacuaacaagacccccaaag

SEQ ID NO: 962209 - RNA, 19 nt, Human
cccagagagcucuucauag

SEQ ID NO: 962210 - RNA, 24 nt, Human
ccccacccucauagcgaccccagc

SEQ ID NO: 962211 - RNA, 21 nt, Human
ccccacucugucacaugccug

SEQ ID NO: 962212 - RNA, 24 nt, Human
cccccacauagaggcugugcugca

SEQ ID NO: 962213 - RNA, 23 nt, Human
ccccugaaagugccccggugagg

SEQ ID NO: 962214 - RNA, 22 nt, Human
ccccuggacccugaaagugccc

SEQ ID NO: 962215 - RNA, 20 nt, Human
cccuccaggcccccagcccc

SEQ ID NO: 962216 - RNA, 21 nt, Human
cccuggacccugaaagugccc

SEQ ID NO: 962217 - RNA, 19 nt, Human
cccugggaccuguuggcua

SEQ ID NO: 962218 - RNA, 21 nt, Human
ccgcagccggcugggcagugc

SEQ ID NO: 962219 - RNA, 24 nt, Human
ccucgggcucccaccagcagccuu

SEQ ID NO: 962220 - RNA, 19 nt, Human
ccucugaaauguccacgga

SEQ ID NO: 962221 - RNA, 23 nt, Human
ccucugcccuuugcauaguucca

SEQ ID NO: 962222 - RNA, 18 nt, Human
ccugaaagugccccggug

SEQ ID NO: 962223 - RNA, 18 nt, Human
ccugggacagauaggcug

SEQ ID NO: 962224 - RNA, 21 nt, Human
ccugugaagccacgggcuggg

SEQ ID NO: 962225 - RNA, 22 nt, Human
ccuugaagugccgggucccaga

SEQ ID NO: 962226 - RNA, 21 nt, Human
cgcagccggcugggcagugcc

SEQ ID NO: 962227 - RNA, 22 nt, Human
cgcuaggagcccccacauagag

SEQ ID NO: 962228 - RNA, 19 nt, Human
cgggagcagcuggagagug

SEQ ID NO: 962229 - RNA, 24 nt, Human
cguccaaacucccagccucugccc

SEQ ID NO: 962230 - RNA, 19 nt, Human
cgugaaggcugcauagaag

SEQ ID NO: 962231 - RNA, 27 nt, Human
cucauagcgaccccagcgccgggaacc

SEQ ID NO: 962232 - RNA, 25 nt, Human
cuccucccuuucccugcuguagucu

SEQ ID NO: 962233 - RNA, 19 nt, Human
cugagcccaggcuccccac

SEQ ID NO: 962234 - RNA, 21 nt, Human
cugagcccaggcuccccacuc

SEQ ID NO: 962235 - RNA, 18 nt, Human
cugagcccaggcuccccc

SEQ ID NO: 962236 - RNA, 22 nt, Human
cugcgugugcuuccuuuuuucc

SEQ ID NO: 962237 - RNA, 26 nt, Human
cugcugcucucacagccucggugaca

SEQ ID NO: 962238 - RNA, 19 nt, Human
cuggacccugaaagugccc

SEQ ID NO: 962239 - RNA, 21 nt, Human
cuggcuuggaagagcauuugu

SEQ ID NO: 962240 - RNA, 22 nt, Human
cugggaccuguuggcuauggug

SEQ ID NO: 962241 - RNA, 21 nt, Human
cuggggaggcuucccagugga

SEQ ID NO: 962242 - RNA, 18 nt, Human
cugugcugcaauagagag

SEQ ID NO: 962243 - RNA, 20 nt, Human
cuucagaggccccuggaccc

SEQ ID NO: 962244 - RNA, 21 nt, Human
cuucagaggccccuggccccu

SEQ ID NO: 962245 - RNA, 19 nt, Human
cuucccgcagacaggccac

SEQ ID NO: 962246 - RNA, 22 nt, Human
cuugcugaggccuccuccagca

SEQ ID NO: 962247 - RNA, 22 nt, Human
cuuuggcugggccugacuggcc

SEQ ID NO: 962248 - RNA, 21 nt, Human
gaacuggcucugggucugcag

SEQ ID NO: 962249 - RNA, 20 nt, Human
gacagggguaggagcuaagc

SEQ ID NO: 962250 - RNA, 19 nt, Human
gacgggcuuucaggaagga

SEQ ID NO: 962251 - RNA, 24 nt, Human
gagcauuuguucugggaggcuggg

SEQ ID NO: 962252 - RNA, 26 nt, Human
gagcuggggcaggaguggcuggccgg

SEQ ID NO: 962253 - RNA, 20 nt, Human
gaggggccagagccuccccc

SEQ ID NO: 962254 - RNA, 18 nt, Human
gagggggcuuuggcuggg

SEQ ID NO: 962255 - RNA, 24 nt, Human
gagguggguagaauugagccgcug

SEQ ID NO: 962256 - RNA, 20 nt, Human
gaguuccucggcgaaggagc

SEQ ID NO: 962257 - RNA, 19 nt, Human
gauaggaacuggcucuggg

SEQ ID NO: 962258 - RNA, 20 nt, Human
gcaauagagagaugacuaga

SEQ ID NO: 962259 - RNA, 25 nt, Human
gcaaugaaucugugauacacgagcc

SEQ ID NO: 962260 - RNA, 19 nt, Human
gcagauggcugaggccucc

SEQ ID NO: 962261 - RNA, 21 nt, Human
gcaggggcuuuuggagcuggg

SEQ ID NO: 962262 - RNA, 18 nt, Human
gccacugugcucaggcug

SEQ ID NO: 962263 - RNA, 24 nt, Human
gccagggucccagccacaguaggg

SEQ ID NO: 962264 - RNA, 21 nt, Human
gccuugcugaggccuccucca

SEQ ID NO: 962265 - RNA, 18 nt, Human
gcuggggcucccucccca

SEQ ID NO: 962266 - RNA, 18 nt, Human
ggacccugaaagugcccc

SEQ ID NO: 962267 - RNA, 18 nt, Human
ggagaacacaaacuccgc

SEQ ID NO: 962268 - RNA, 18 nt, Human
ggaggcuucccaguggau

SEQ ID NO: 962269 - RNA, 25 nt, Human
ggauccagccaucagcugugcccag

SEQ ID NO: 962270 - RNA, 21 nt, Human
ggcaggaggacaucaucaccc

SEQ ID NO: 962271 - RNA, 20 nt, Human
ggccugggcugcucacaugu

SEQ ID NO: 962272 - RNA, 20 nt, Human
ggcggugggggcgguggggg

SEQ ID NO: 962273 - RNA, 18 nt, Human
gggcacaacgggccgagc

SEQ ID NO: 962274 - RNA, 23 nt, Human
gggcugggucauaaggacacuuc

SEQ ID NO: 962275 - RNA, 21 nt, Human
gggcuucaugugccaguugag

SEQ ID NO: 962276 - RNA, 20 nt, Human
gggggcgguggggguggugg

SEQ ID NO: 962277 - RNA, 18 nt, Human
ggguggcuguguuaggga

SEQ ID NO: 962278 - RNA, 21 nt, Human
gguagcgggagcagcuggaga

SEQ ID NO: 962279 - RNA, 24 nt, Human
gguauggaguggggguaaugaagg

SEQ ID NO: 962280 - RNA, 21 nt, Human
gguccagcaggcguggugacc

SEQ ID NO: 962281 - RNA, 23 nt, Human
ggugccagcugugccccaggugu

SEQ ID NO: 962282 - RNA, 22 nt, Human
ggugggggcgguggggguggug

SEQ ID NO: 962283 - RNA, 23 nt, Human
ggugggggugguggggcuggggc

SEQ ID NO: 962284 - RNA, 19 nt, Human
gugcaucccagagcccagg

SEQ ID NO: 962285 - RNA, 18 nt, Human
guggaacaggaggaugga

SEQ ID NO: 962286 - RNA, 18 nt, Human
guguguguagcguauguu

SEQ ID NO: 962287 - RNA, 23 nt, Human
guguguguuaccacaugugcaug

SEQ ID NO: 962288 - RNA, 21 nt, Human
uaaacccaacagacaggucca

SEQ ID NO: 962289 - RNA, 24 nt, Human
uaaacccaacagacagguccaaga

SEQ ID NO: 962290 - RNA, 21 nt, Human
uaagcacaugugugauacagg

SEQ ID NO: 962291 - RNA, 21 nt, Human
uaagguguguguagcguaugu

SEQ ID NO: 962292 - RNA, 19 nt, Human
uagaggaagcaaaugcuug

SEQ ID NO: 962293 - RNA, 22 nt, Human
uagaggagggaggaggccagga

SEQ ID NO: 962294 - RNA, 19 nt, Human
uaguucugggcuuggcccu

SEQ ID NO: 962295 - RNA, 21 nt, Human
ucagaggccccuggacccuga

SEQ ID NO: 962296 - RNA, 18 nt, Human
ucagcauccaggcugcag

SEQ ID NO: 962297 - RNA, 18 nt, Human
ucagggaguguggguggc

SEQ ID NO: 962298 - RNA, 25 nt, Human
uccacgcccacacgguagccacccu

SEQ ID NO: 962299 - RNA, 23 nt, Human
uccacggacuaaacccaacagac

SEQ ID NO: 962300 - RNA, 22 nt, Human
uccacguucucagcuacaaaaa

SEQ ID NO: 962301 - RNA, 23 nt, Human
uccaggcccccagcccccucauc

SEQ ID NO: 962302 - RNA, 23 nt, Human
ucccagagcccaggacuacggcc

SEQ ID NO: 962303 - RNA, 19 nt, Human
ucccagccacaguaggggu

SEQ ID NO: 962304 - RNA, 24 nt, Human
ucccagccucugcccuuugcauag

SEQ ID NO: 962305 - RNA, 19 nt, Human
ucccaguggaucucuuugu

SEQ ID NO: 962306 - RNA, 23 nt, Human
ucccugcuguagucuagaggaag

SEQ ID NO: 962307 - RNA, 25 nt, Human
ucccugcuguagucuagaggaagca

SEQ ID NO: 962308 - RNA, 22 nt, Human
uccgcagugaggguccugggac

SEQ ID NO: 962309 - RNA, 23 nt, Human
uccuaggcaagggccugugagga

SEQ ID NO: 962310 - RNA, 24 nt, Human
uccucgaagcugguuggcaaggug

SEQ ID NO: 962311 - RNA, 20 nt, Human
ucgggcucccaccagcagcc

SEQ ID NO: 962312 - RNA, 21 nt, Human
ucgguagcgggagcagcugga

SEQ ID NO: 962313 - RNA, 20 nt, Human
ucuccucccuuucccugcug

SEQ ID NO: 962314 - RNA, 22 nt, Human
ucuccucccuuucccugcugua

SEQ ID NO: 962315 - RNA, 21 nt, Human
ucucuauguccuguaucagug

SEQ ID NO: 962316 - RNA, 25 nt, Human
ucugaaauguccacggacuaaaccc

SEQ ID NO: 962317 - RNA, 22 nt, Human
ucugcaggaucuucuucccucc

SEQ ID NO: 962318 - RNA, 19 nt, Human
ucuggagacagcugcccuc

SEQ ID NO: 962319 - RNA, 25 nt, Human
ugaagggcaguaaaaacccguggga

SEQ ID NO: 962320 - RNA, 23 nt, Human
ugagacaucagauuucuccuccc

SEQ ID NO: 962321 - RNA, 19 nt, Human
ugagcccaggcuccccacu

SEQ ID NO: 962322 - RNA, 22 nt, Human
ugaggagcaccgaugggccugg

SEQ ID NO: 962323 - RNA, 21 nt, Human
ugaggagggggcuuuggcugg

SEQ ID NO: 962324 - RNA, 24 nt, Human
ugaggagggggcuuuggcugggcc

SEQ ID NO: 962325 - RNA, 18 nt, Human
ugaguggaaauguaagca

SEQ ID NO: 962326 - RNA, 20 nt, Human
ugaguggaaauguaagcaca

SEQ ID NO: 962327 - RNA, 24 nt, Human
ugcacuggccuugcucucccgcac

SEQ ID NO: 962328 - RNA, 20 nt, Human
ugcauuggugucuccucagu

SEQ ID NO: 962329 - RNA, 23 nt, Human
ugcccuccaggcccccagccccc

SEQ ID NO: 962330 - RNA, 19 nt, Human
ugccucagaagcacauagc

SEQ ID NO: 962331 - RNA, 21 nt, Human
ugccugggagaaagagaaagg

SEQ ID NO: 962332 - RNA, 21 nt, Human
ugccugggagaaagagaaagg

SEQ ID NO: 962333 - RNA, 20 nt, Human
ugcugugaggaugcugagga

SEQ ID NO: 962334 - RNA, 23 nt, Human
ugcugugaggaugcugaggagga

SEQ ID NO: 962335 - RNA, 23 nt, Human
uggaauguggcagaugagacggg

SEQ ID NO: 962336 - RNA, 22 nt, Human
uggaugacuccgcuaggagccc

SEQ ID NO: 962337 - RNA, 23 nt, Human
uggcacugagagagaacagggca

SEQ ID NO: 962338 - RNA, 23 nt, Human
uggcaucuaguucucuagacggu

SEQ ID NO: 962339 - RNA, 19 nt, Human
uggccccugaaagugcccc

SEQ ID NO: 962340 - RNA, 23 nt, Human
ugggagaaggguauggagugggg

SEQ ID NO: 962341 - RNA, 18 nt, Human
ugggagggggaucucccu

SEQ ID NO: 962342 - RNA, 21 nt, Human
ugggcugcucacauguggguc

SEQ ID NO: 962343 - RNA, 22 nt, Human
ugggggcggugggggugguggg

SEQ ID NO: 962344 - RNA, 21 nt, Human
uggggguaaugaagggagggu

SEQ ID NO: 962345 - RNA, 23 nt, Human
uggggguaaugaagggagggugg

SEQ ID NO: 962346 - RNA, 19 nt, Human
ugggggugguggggcuggg

SEQ ID NO: 962347 - RNA, 21 nt, Human
ugggggugguggggcuggggc

SEQ ID NO: 962348 - RNA, 20 nt, Human
ugggguggaggugggagagg

SEQ ID NO: 962349 - RNA, 20 nt, Human
ugggguggaggugggagagg

SEQ ID NO: 962350 - RNA, 21 nt, Human
ugggguggaggugggagaggu

SEQ ID NO: 962351 - RNA, 24 nt, Human
ugguagcuggaugacuccgcuagg

SEQ ID NO: 962352 - RNA, 23 nt, Human
uggucagcucagccgguggcggu

SEQ ID NO: 962353 - RNA, 21 nt, Human
uguggagacugaggagggggc

SEQ ID NO: 962354 - RNA, 22 nt, Human
uguggagacugaggagggggcu

SEQ ID NO: 962355 - RNA, 25 nt, Human
uguggagacugaggagggggcuuug

SEQ ID NO: 962356 - RNA, 19 nt, Human
ugugggggcggggaauggg

SEQ ID NO: 962357 - RNA, 20 nt, Human
ugugggguggaggugggaga

SEQ ID NO: 962358 - RNA, 19 nt, Human
ugugugauacaggugugug

SEQ ID NO: 962359 - RNA, 22 nt, Human
uguguguuaccacaugugcaug

SEQ ID NO: 962360 - RNA, 19 nt, Human
uguuccacccaccugguug

SEQ ID NO: 962361 - RNA, 20 nt, Human
uguuccacccaccugguugu

SEQ ID NO: 962362 - RNA, 21 nt, Human
uguuccacccaccugguugua

SEQ ID NO: 962363 - RNA, 20 nt, Human
uucccaguggaucucuuugu

SEQ ID NO: 962364 - RNA, 18 nt, Human
uucccugggaccuguugg

SEQ ID NO: 962365 - RNA, 22 nt, Human
uucucagcuacaaaaauaacag

SEQ ID NO: 962366 - RNA, 18 nt, Human
uucucagggagugugggu

SEQ ID NO: 962367 - RNA, 20 nt, Human
uugagccgcugcaggaaccg

SEQ ID NO: 962368 - RNA, 19 nt, Human
uugcaccgcagauccuccu

SEQ ID NO: 962369 - RNA, 19 nt, Human
uugcauaguuccaagaaug

SEQ ID NO: 962370 - RNA, 21 nt, Human
uugcauaguuccaagaauggg

SEQ ID NO: 962371 - RNA, 22 nt, Human
uugcucugccucagaagcacau

SEQ ID NO: 962372 - RNA, 20 nt, Human
uuggcacugagagagaacag

SEQ ID NO: 962373 - RNA, 18 nt, Human
uugggcagaugaguggaa

SEQ ID NO: 962374 - RNA, 19 nt, Human
uugugggggcggggaaugg

SEQ ID NO: 962375 - RNA, 18 nt, Human
uuuccucucucuaugucc

SEQ ID NO: 962376 - RNA, 19 nt, Human
uuugggcagaugaauggaa

SEQ ID NO: 962377 - RNA, 18 nt, Human
uuuuuuuuuuuugugggg

SEQ ID NO: 962378 - RNA, 32 nt, Human
uuuuuuuuuuuuuguggggaaaaaggguguuc

SEQ ID NO: 962379 - RNA, 19 nt, Human
uuuuuuuuuuuuuuuuugu

SEQ ID NO: 962380 - RNA, 24 nt, Human
uuuuuuuuuuuuuuuuuguggggg

SEQ ID NO: 962381 - RNA, 22 nt, Human
aaaaaacaaaccaauggacuug

SEQ ID NO: 962382 - RNA, 24 nt, Human
aaacaaaccaauggacuugucaga

SEQ ID NO: 962383 - RNA, 18 nt, Human
aaaccccaguuucaccaa

SEQ ID NO: 962384 - RNA, 22 nt, Human
aaagacguguauuuuuggcacc

SEQ ID NO: 962385 - RNA, 24 nt, Human
aaagugcugggauuauaggcauga

SEQ ID NO: 962386 - RNA, 20 nt, Human
aacaggcuuagggaaccauc

SEQ ID NO: 962387 - RNA, 23 nt, Human
aacuauguguugguuuuuguucc

SEQ ID NO: 962388 - RNA, 24 nt, Human
aagaaacugggaccacaggcacgc

SEQ ID NO: 962389 - RNA, 21 nt, Human
aagaagacucaaaaauaacua

SEQ ID NO: 962390 - RNA, 21 nt, Human
aagaaucccacagcuuuaucc

SEQ ID NO: 962391 - RNA, 19 nt, Human
aagacaggaaggacucuug

SEQ ID NO: 962392 - RNA, 18 nt, Human
aagaucauuaaagaccag

SEQ ID NO: 962393 - RNA, 22 nt, Human
aagcaaauggaggagggacccc

SEQ ID NO: 962394 - RNA, 21 nt, Human
aagcccacccgcggcgggaaa

SEQ ID NO: 962395 - RNA, 23 nt, Human
aaggacucuugacauaugaggga

SEQ ID NO: 962396 - RNA, 19 nt, Human
aaggagcaggucuuucaga

SEQ ID NO: 962397 - RNA, 21 nt, Human
aaggggccucugacucugggc

SEQ ID NO: 962398 - RNA, 19 nt, Human
aagugcugggauuauaggc

SEQ ID NO: 962399 - RNA, 21 nt, Human
aagugcugggauuauaggcau

SEQ ID NO: 962400 - RNA, 22 nt, Human
aagugguugguuauuuuacaga

SEQ ID NO: 962401 - RNA, 18 nt, Human
aaugguguuagcacacuc

SEQ ID NO: 962402 - RNA, 20 nt, Human
acaaacacaacuuauuccac

SEQ ID NO: 962403 - RNA, 19 nt, Human
acagaagcucuucuucucc

SEQ ID NO: 962404 - RNA, 18 nt, Human
acauugaguccccccugc

SEQ ID NO: 962405 - RNA, 18 nt, Human
accaucccuacaaacaug

SEQ ID NO: 962406 - RNA, 21 nt, Human
accccaguuucaccaaagcua

SEQ ID NO: 962407 - RNA, 22 nt, Human
accucagccccacacauacauu

SEQ ID NO: 962408 - RNA, 19 nt, Human
acgagcacgguccccgagc

SEQ ID NO: 962409 - RNA, 24 nt, Human
acuccagcccaagucucacacacc

SEQ ID NO: 962410 - RNA, 25 nt, Human
acucccgccucagccucccaagaaa

SEQ ID NO: 962411 - RNA, 21 nt, Human
acucgcugaguuccagaaugg

SEQ ID NO: 962412 - RNA, 26 nt, Human
acugaaauaaaagaaaaggcaccagu

SEQ ID NO: 962413 - RNA, 19 nt, Human
agaaagacuccuuccaaug

SEQ ID NO: 962414 - RNA, 18 nt, Human
agacagguggacuuccag

SEQ ID NO: 962415 - RNA, 20 nt, Human
agaccccugguucaucccaa

SEQ ID NO: 962416 - RNA, 18 nt, Human
agcagcugcagccgcccc

SEQ ID NO: 962417 - RNA, 24 nt, Human
agccaagcgagcuuccucaugaaa

SEQ ID NO: 962418 - RNA, 19 nt, Human
agccuaucugcaacuguau

SEQ ID NO: 962419 - RNA, 23 nt, Human
agcgagcuuccucaugaaaacca

SEQ ID NO: 962420 - RNA, 21 nt, Human
aggaaggacucuugacauaug

SEQ ID NO: 962421 - RNA, 19 nt, Human
aggcagcaaguaacagcag

SEQ ID NO: 962422 - RNA, 21 nt, Human
aggcagcaaguaacagcagaa

SEQ ID NO: 962423 - RNA, 21 nt, Human
aggcaugagccacugcaccca

SEQ ID NO: 962424 - RNA, 23 nt, Human
aggccuugaggaacuggggauuu

SEQ ID NO: 962425 - RNA, 20 nt, Human
agggugaauggacugggugg

SEQ ID NO: 962426 - RNA, 24 nt, Human
aggugauccgcccaccuuggccuc

SEQ ID NO: 962427 - RNA, 19 nt, Human
agugaagagaccacaggga

SEQ ID NO: 962428 - RNA, 24 nt, Human
agugaugugaucucagcucacugc

SEQ ID NO: 962429 - RNA, 19 nt, Human
agugcagugaugugaucuc

SEQ ID NO: 962430 - RNA, 21 nt, Human
agugcagugaugugaucucag

SEQ ID NO: 962431 - RNA, 24 nt, Human
agugcagugaugugaucucagcuc

SEQ ID NO: 962432 - RNA, 21 nt, Human
auauuuuguagagauggaguu

SEQ ID NO: 962433 - RNA, 24 nt, Human
augaacaccaauuaaaaacuucac

SEQ ID NO: 962434 - RNA, 22 nt, Human
augaguuggaaauuucugauga

SEQ ID NO: 962435 - RNA, 24 nt, Human
augauacucccgccucagccuccc

SEQ ID NO: 962436 - RNA, 21 nt, Human
auggaccuuggagcaugugca

SEQ ID NO: 962437 - RNA, 24 nt, Human
auggagugcagugaugugaucuca

SEQ ID NO: 962438 - RNA, 25 nt, Human
auuaauccccaaauaacuuacagag

SEQ ID NO: 962439 - RNA, 20 nt, Human
caaaaccccaguuucaccaa

SEQ ID NO: 962440 - RNA, 22 nt, Human
caaauaacuuacagagcccacc

SEQ ID NO: 962441 - RNA, 18 nt, Human
caacacaggugcgaggag

SEQ ID NO: 962442 - RNA, 18 nt, Human
caacagcauggcaaggag

SEQ ID NO: 962443 - RNA, 23 nt, Human
caaccucaaccuccuggcucaaa

SEQ ID NO: 962444 - RNA, 22 nt, Human
caagaaacugggaccacaggca

SEQ ID NO: 962445 - RNA, 18 nt, Human
caagaaaggacccugaau

SEQ ID NO: 962446 - RNA, 26 nt, Human
caagacccuggauuucauuaaucccc

SEQ ID NO: 962447 - RNA, 24 nt, Human
caagcgagcuuccucaugaaaacc

SEQ ID NO: 962448 - RNA, 19 nt, Human
caagggccgcggcuggccu

SEQ ID NO: 962449 - RNA, 21 nt, Human
cacagaaacugcaucaggagc

SEQ ID NO: 962450 - RNA, 19 nt, Human
caccaggacuuccaaacag

SEQ ID NO: 962451 - RNA, 24 nt, Human
cacccaggauggagugcagugaug

SEQ ID NO: 962452 - RNA, 19 nt, Human
cacccgcggcgggaaagca

SEQ ID NO: 962453 - RNA, 23 nt, Human
cacgcaccacgauggcuggcuaa

SEQ ID NO: 962454 - RNA, 22 nt, Human
cacucugggcaguugauccuga

SEQ ID NO: 962455 - RNA, 19 nt, Human
cacugcaaccucaaccucc

SEQ ID NO: 962456 - RNA, 21 nt, Human
cacugcaaccucaaccuccug

SEQ ID NO: 962457 - RNA, 22 nt, Human
cacugcacccagccuuugucca

SEQ ID NO: 962458 - RNA, 25 nt, Human
cacuuccccagagccgcccccuacu

SEQ ID NO: 962459 - RNA, 19 nt, Human
cagaagcucuucuucuccu

SEQ ID NO: 962460 - RNA, 20 nt, Human
cagcagcugcagccgccccc

SEQ ID NO: 962461 - RNA, 19 nt, Human
caggccuugaggaacuggg

SEQ ID NO: 962462 - RNA, 21 nt, Human
caucaugaagauuuacacucc

SEQ ID NO: 962463 - RNA, 21 nt, Human
caucccuacaaacaugaagaa

SEQ ID NO: 962464 - RNA, 24 nt, Human
cauccggcuagauuucccccuacu

SEQ ID NO: 962465 - RNA, 21 nt, Human
caugaaaaccagccuaucugc

SEQ ID NO: 962466 - RNA, 23 nt, Human
cauguugcccaggcuggucuuaa

SEQ ID NO: 962467 - RNA, 24 nt, Human
cauguugcccaggcuggucuuaaa

SEQ ID NO: 962468 - RNA, 25 nt, Human
cauguuguguagugugcagaaauuc

SEQ ID NO: 962469 - RNA, 24 nt, Human
ccaaagugcugggauuauaggcau

SEQ ID NO: 962470 - RNA, 22 nt, Human
ccaaauaacuuacagagcccac

SEQ ID NO: 962471 - RNA, 21 nt, Human
ccaagggucagacccauggac

SEQ ID NO: 962472 - RNA, 20 nt, Human
ccaccagcaccagcaauggc

SEQ ID NO: 962473 - RNA, 20 nt, Human
ccacugcacccagccuuugu

SEQ ID NO: 962474 - RNA, 24 nt, Human
ccagacagguggacuuccaggcca

SEQ ID NO: 962475 - RNA, 21 nt, Human
ccauguugcccaggcuggucu

SEQ ID NO: 962476 - RNA, 19 nt, Human
cccaaaaacccuuacuucc

SEQ ID NO: 962477 - RNA, 23 nt, Human
cccacaguuuccauccuuuugga

SEQ ID NO: 962478 - RNA, 23 nt, Human
cccagcagagacgacccucgagg

SEQ ID NO: 962479 - RNA, 22 nt, Human
ccccaaaaacccuuacuuccag

SEQ ID NO: 962480 - RNA, 27 nt, Human
ccccauguugcccaggcuggucuuaaa

SEQ ID NO: 962481 - RNA, 21 nt, Human
ccccccugccaagacccugga

SEQ ID NO: 962482 - RNA, 23 nt, Human
cccccugccacuuccccagagcc

SEQ ID NO: 962483 - RNA, 21 nt, Human
ccccugcacggggaaggugga

SEQ ID NO: 962484 - RNA, 20 nt, Human
cccgagcgcgcggccaaccg

SEQ ID NO: 962485 - RNA, 20 nt, Human
ccgcugccuccaccagcacc

SEQ ID NO: 962486 - RNA, 21 nt, Human
ccgcugccuccaccagcacca

SEQ ID NO: 962487 - RNA, 19 nt, Human
ccucauguaagucacaaga

SEQ ID NO: 962488 - RNA, 18 nt, Human
ccugagcucaggugaucc

SEQ ID NO: 962489 - RNA, 24 nt, Human
ccugagcucaggugauccgcccac

SEQ ID NO: 962490 - RNA, 21 nt, Human
ccuggcucaaaugauacuccc

SEQ ID NO: 962491 - RNA, 23 nt, Human
ccuugaggaacuggggauuuaca

SEQ ID NO: 962492 - RNA, 21 nt, Human
cgaggaacaauuggggaacca

SEQ ID NO: 962493 - RNA, 24 nt, Human
cgccucagccucccaagaaacugg

SEQ ID NO: 962494 - RNA, 21 nt, Human
cgcgcccagcagagacgaccc

SEQ ID NO: 962495 - RNA, 19 nt, Human
cggcgggaaagcagcgcuc

SEQ ID NO: 962496 - RNA, 19 nt, Human
cgguggagccugaccacgu

SEQ ID NO: 962497 - RNA, 23 nt, Human
cucacagucuacuguaacuucug

SEQ ID NO: 962498 - RNA, 24 nt, Human
cucacugcaaccucaaccuccugg

SEQ ID NO: 962499 - RNA, 24 nt, Human
cucaggugauccgcccaccuuggc

SEQ ID NO: 962500 - RNA, 21 nt, Human
cuccacagccacgugggcacu

SEQ ID NO: 962501 - RNA, 25 nt, Human
cuggcucaaaugauacucccgccuc

SEQ ID NO: 962502 - RNA, 24 nt, Human
cuuccaauguggguggcacauuua

SEQ ID NO: 962503 - RNA, 24 nt, Human
cuucguguggaccuggcagacucc

SEQ ID NO: 962504 - RNA, 21 nt, Human
cuuggaaaugcuguugccucc

SEQ ID NO: 962505 - RNA, 20 nt, Human
gagauggaguuuccccaugu

SEQ ID NO: 962506 - RNA, 24 nt, Human
gagcucaggugauccgcccaccuu

SEQ ID NO: 962507 - RNA, 23 nt, Human
gauaaagaaagagagaaugaaaa

SEQ ID NO: 962508 - RNA, 22 nt, Human
gaucauuaaagaccagcuucga

SEQ ID NO: 962509 - RNA, 23 nt, Human
gaugaguuggaaauuucugauga

SEQ ID NO: 962510 - RNA, 22 nt, Human
gauuauaggcaugagccacugc

SEQ ID NO: 962511 - RNA, 23 nt, Human
gauuauaggcaugagccacugca

SEQ ID NO: 962512 - RNA, 21 nt, Human
gcagaacacauccacgcuuca

SEQ ID NO: 962513 - RNA, 19 nt, Human
gccacuuccccagagccgc

SEQ ID NO: 962514 - RNA, 21 nt, Human
gccagaacaugugaacgguag

SEQ ID NO: 962515 - RNA, 20 nt, Human
gccucaagaaaggacccuga

SEQ ID NO: 962516 - RNA, 22 nt, Human
gccucagaaacaugggcaguca

SEQ ID NO: 962517 - RNA, 24 nt, Human
gcggcuccgaggauccucuucagc

SEQ ID NO: 962518 - RNA, 19 nt, Human
gcgguggagccugaccacg

SEQ ID NO: 962519 - RNA, 20 nt, Human
gcugcagcgggccaagggcc

SEQ ID NO: 962520 - RNA, 20 nt, Human
ggaaagcagcgcucgggagg

SEQ ID NO: 962521 - RNA, 18 nt, Human
ggaagaagacucaaaaau

SEQ ID NO: 962522 - RNA, 21 nt, Human
ggaauggggaguucuggaggg

SEQ ID NO: 962523 - RNA, 19 nt, Human
ggacagagguuucucccca

SEQ ID NO: 962524 - RNA, 22 nt, Human
ggaguuuccccauguugcccag

SEQ ID NO: 962525 - RNA, 21 nt, Human
ggcaaggagcuuccuggaaug

SEQ ID NO: 962526 - RNA, 24 nt, Human
ggcacagaaacugcaucaggagca

SEQ ID NO: 962527 - RNA, 18 nt, Human
ggcagucauggggcacag

SEQ ID NO: 962528 - RNA, 25 nt, Human
ggccucugacucugggcacgugucu

SEQ ID NO: 962529 - RNA, 21 nt, Human
ggccuugaggaacuggggauu

SEQ ID NO: 962530 - RNA, 23 nt, Human
gggaauggggaguucuggaggga

SEQ ID NO: 962531 - RNA, 21 nt, Human
gggccagagcggcuccgagga

SEQ ID NO: 962532 - RNA, 19 nt, Human
ggggcaccggcuugggggc

SEQ ID NO: 962533 - RNA, 20 nt, Human
ggguguccaagccagcuccg

SEQ ID NO: 962534 - RNA, 24 nt, Human
gucaccuacuuauccgacuauuuc

SEQ ID NO: 962535 - RNA, 23 nt, Human
gugcgguggagccugaccacgug

SEQ ID NO: 962536 - RNA, 21 nt, Human
uaacagcagaaacugggggua

SEQ ID NO: 962537 - RNA, 19 nt, Human
uaacuuacagagcccaccu

SEQ ID NO: 962538 - RNA, 20 nt, Human
uaagacaggaaggacucuug

SEQ ID NO: 962539 - RNA, 22 nt, Human
uaagcguggaguacagagccag

SEQ ID NO: 962540 - RNA, 19 nt, Human
uaagucacaagaagcagca

SEQ ID NO: 962541 - RNA, 20 nt, Human
uaagucacaagaagcagcag

SEQ ID NO: 962542 - RNA, 21 nt, Human
uacaaaaccccaguuucacca

SEQ ID NO: 962543 - RNA, 18 nt, Human
uacacagugauggacaaa

SEQ ID NO: 962544 - RNA, 21 nt, Human
uacacagugauggacaaacac

SEQ ID NO: 962545 - RNA, 18 nt, Human
uacagaggauccaguggg

SEQ ID NO: 962546 - RNA, 21 nt, Human
uagaaccucagccccacacau

SEQ ID NO: 962547 - RNA, 23 nt, Human
uaggggacagagguuucucccca

SEQ ID NO: 962548 - RNA, 23 nt, Human
uauaagacaggaaggacucuuga

SEQ ID NO: 962549 - RNA, 20 nt, Human
uaucugcaacuguauucaga

SEQ ID NO: 962550 - RNA, 24 nt, Human
uauuuuguauauuuuguagagaug

SEQ ID NO: 962551 - RNA, 19 nt, Human
ucacugcaaccucaaccuc

SEQ ID NO: 962552 - RNA, 23 nt, Human
ucacugcaaccucaaccuccugg

SEQ ID NO: 962553 - RNA, 24 nt, Human
ucacugcaaccucaaccuccuggc

SEQ ID NO: 962554 - RNA, 26 nt, Human
ucacugcaaccucaaccuccuggcuc

SEQ ID NO: 962555 - RNA, 19 nt, Human
ucagaaacaugggcaguca

SEQ ID NO: 962556 - RNA, 19 nt, Human
ucagaggggaauggggagu

SEQ ID NO: 962557 - RNA, 18 nt, Human
ucagcaccuggcuaggga

SEQ ID NO: 962558 - RNA, 21 nt, Human
ucagccccacacauacauuuu

SEQ ID NO: 962559 - RNA, 21 nt, Human
ucagcucacugcaaccucaac

SEQ ID NO: 962560 - RNA, 22 nt, Human
uccaaacagcccaggccuaagg

SEQ ID NO: 962561 - RNA, 26 nt, Human
uccagaaugggggcaccggcuugggg

SEQ ID NO: 962562 - RNA, 24 nt, Human
ucccaaagugcugggauuauaggc

SEQ ID NO: 962563 - RNA, 18 nt, Human
ucccaggcaagaugaaaa

SEQ ID NO: 962564 - RNA, 25 nt, Human
uccccaaauaacuuacagagcccac

SEQ ID NO: 962565 - RNA, 22 nt, Human
uccccccugccaagacccugga

SEQ ID NO: 962566 - RNA, 18 nt, Human
uccccgagcgcgcggcca

SEQ ID NO: 962567 - RNA, 21 nt, Human
ucccgccucagccucccaaga

SEQ ID NO: 962568 - RNA, 19 nt, Human
ucgcgcccagcagagacgg

SEQ ID NO: 962569 - RNA, 20 nt, Human
ucucucucugucacccagga

SEQ ID NO: 962570 - RNA, 24 nt, Human
ucucucucugucacccaggaugga

SEQ ID NO: 962571 - RNA, 24 nt, Human
ucucucugucacccaggauggagu

SEQ ID NO: 962572 - RNA, 19 nt, Human
ucucugucacccaggaugg

SEQ ID NO: 962573 - RNA, 24 nt, Human
ucugucacccaggauggagugcag

SEQ ID NO: 962574 - RNA, 23 nt, Human
ucuuaaacuccugagcucaggug

SEQ ID NO: 962575 - RNA, 21 nt, Human
ucuucuccuuccuguaaacug

SEQ ID NO: 962576 - RNA, 20 nt, Human
ugaaaacacucaagcugcuu

SEQ ID NO: 962577 - RNA, 21 nt, Human
ugaaaauccagccgaggaaca

SEQ ID NO: 962578 - RNA, 22 nt, Human
ugaaaggcaggaaggaagaaca

SEQ ID NO: 962579 - RNA, 22 nt, Human
ugaaaugcacuugaaauguauc

SEQ ID NO: 962580 - RNA, 21 nt, Human
ugaaggacaaaaacaaagaua

SEQ ID NO: 962581 - RNA, 18 nt, Human
ugaagugggcaaccguuu

SEQ ID NO: 962582 - RNA, 19 nt, Human
ugaagugggcaaccguuuc

SEQ ID NO: 962583 - RNA, 20 nt, Human
ugaauggacugggugggugg

SEQ ID NO: 962584 - RNA, 21 nt, Human
ugaaugguguuagcacacucu

SEQ ID NO: 962585 - RNA, 20 nt, Human
ugacagcaugaccugcuaau

SEQ ID NO: 962586 - RNA, 22 nt, Human
ugaccacgugcccccugaguuc

SEQ ID NO: 962587 - RNA, 22 nt, Human
ugacucccacaguuuccauccu

SEQ ID NO: 962588 - RNA, 20 nt, Human
ugagaauauuuugaacucaa

SEQ ID NO: 962589 - RNA, 22 nt, Human
ugagcaucuccugcuccccugg

SEQ ID NO: 962590 - RNA, 18 nt, Human
ugagcucaggugauccgc

SEQ ID NO: 962591 - RNA, 23 nt, Human
ugagggaugagugagagggccac

SEQ ID NO: 962592 - RNA, 23 nt, Human
ugagugagagggccacauugagu

SEQ ID NO: 962593 - RNA, 21 nt, Human
ugaguuccagaaugggggcac

SEQ ID NO: 962594 - RNA, 21 nt, Human
ugcaaaagaucauuaaagacc

SEQ ID NO: 962595 - RNA, 22 nt, Human
ugcaaaagaucauuaaagacca

SEQ ID NO: 962596 - RNA, 18 nt, Human
ugcaacuguauucagaaa

SEQ ID NO: 962597 - RNA, 19 nt, Human
ugccaugaaauccaaaagu

SEQ ID NO: 962598 - RNA, 24 nt, Human
ugcccaggcuggucuuaaacuccu

SEQ ID NO: 962599 - RNA, 28 nt, Human
ugcccaggcuggucuuaaacuccugagc

SEQ ID NO: 962600 - RNA, 20 nt, Human
ugcucaaaaaacaaaccaau

SEQ ID NO: 962601 - RNA, 18 nt, Human
uggaaagugccaaggaga

SEQ ID NO: 962602 - RNA, 24 nt, Human
uggaaaguugggcaauccauggug

SEQ ID NO: 962603 - RNA, 23 nt, Human
uggaccuggcagacuccagaaag

SEQ ID NO: 962604 - RNA, 21 nt, Human
uggacugggugggugggaagg

SEQ ID NO: 962605 - RNA, 24 nt, Human
uggaggcagcaaguaacagcagaa

SEQ ID NO: 962606 - RNA, 19 nt, Human
uggagugcagugaugugau

SEQ ID NO: 962607 - RNA, 19 nt, Human
uggagugcagugaugugau

SEQ ID NO: 962608 - RNA, 28 nt, Human
uggagugcagugaugugauggcucuagc

SEQ ID NO: 962609 - RNA, 24 nt, Human
uggaguuuccccauguugcccagg

SEQ ID NO: 962610 - RNA, 23 nt, Human
uggcaaauagaaaagaagcaaau

SEQ ID NO: 962611 - RNA, 18 nt, Human
uggcacauuuauaaaaua

SEQ ID NO: 962612 - RNA, 18 nt, Human
uggcagacuccagaaagc

SEQ ID NO: 962613 - RNA, 21 nt, Human
uggcagacuccagaaagccag

SEQ ID NO: 962614 - RNA, 19 nt, Human
uggcagaguccaaggguca

SEQ ID NO: 962615 - RNA, 21 nt, Human
uggcaucaccugugacccgau

SEQ ID NO: 962616 - RNA, 19 nt, Human
uggccucaagaaaggaccc

SEQ ID NO: 962617 - RNA, 24 nt, Human
uggcuugaaaugcacuugaaaugu

SEQ ID NO: 962618 - RNA, 23 nt, Human
ugggacacucugguggcuugaaa

SEQ ID NO: 962619 - RNA, 21 nt, Human
ugggaccacaggcacgcacca

SEQ ID NO: 962620 - RNA, 23 nt, Human
ugggaccacaggcacgcaccacg

SEQ ID NO: 962621 - RNA, 19 nt, Human
ugggauuauaggcaugagc

SEQ ID NO: 962622 - RNA, 21 nt, Human
ugggauuauaggcaugagcca

SEQ ID NO: 962623 - RNA, 22 nt, Human
ugggauuauaggcaugagccac

SEQ ID NO: 962624 - RNA, 22 nt, Human
ugggauuauaggcaugagccac

SEQ ID NO: 962625 - RNA, 24 nt, Human
ugggauuauaggcaugagccacug

SEQ ID NO: 962626 - RNA, 24 nt, Human
ugggauuauaggcaugagccacug

SEQ ID NO: 962627 - RNA, 18 nt, Human
ugggcaguugauccuggc

SEQ ID NO: 962628 - RNA, 27 nt, Human
uguaaaaucaauaguagauggugauga

SEQ ID NO: 962629 - RNA, 24 nt, Human
uguagagauggaguuuccccaugu

SEQ ID NO: 962630 - RNA, 21 nt, Human
ugucacccaggauggagugca

SEQ ID NO: 962631 - RNA, 23 nt, Human
ugugaaaguccaacaugugaggg

SEQ ID NO: 962632 - RNA, 22 nt, Human
ugugaacgguagcuacacagug

SEQ ID NO: 962633 - RNA, 18 nt, Human
ugugaagugggcaaccgu

SEQ ID NO: 962634 - RNA, 19 nt, Human
ugugccugagccucugcuc

SEQ ID NO: 962635 - RNA, 21 nt, Human
uuagaaguuaaauaguggauu

SEQ ID NO: 962636 - RNA, 24 nt, Human
uuagaaguuaaauaguggauuaau

SEQ ID NO: 962637 - RNA, 25 nt, Human
uucaccaggacuuccaaacagccca

SEQ ID NO: 962638 - RNA, 19 nt, Human
uucacuaauugacaucaua

SEQ ID NO: 962639 - RNA, 20 nt, Human
uuccucaugaaaaccagccu

SEQ ID NO: 962640 - RNA, 18 nt, Human
uucguguggaccuggcag

SEQ ID NO: 962641 - RNA, 22 nt, Human
uugagacagggucucucucugu

SEQ ID NO: 962642 - RNA, 19 nt, Human
uugcaaugcuaauuucaaa

SEQ ID NO: 962643 - RNA, 18 nt, Human
uugcagcaaccugcagaa

SEQ ID NO: 962644 - RNA, 22 nt, Human
uuggaaaugcuguugccuccau

SEQ ID NO: 962645 - RNA, 18 nt, Human
uuggccucccaaagugcu

SEQ ID NO: 962646 - RNA, 21 nt, Human
uuggguguccaagccagcucc

SEQ ID NO: 962647 - RNA, 22 nt, Human
uuucccaucaauuccaguggaa

SEQ ID NO: 962648 - RNA, 23 nt, Human
uuuccccauguugcccaggcugg

SEQ ID NO: 962649 - RNA, 22 nt, Human
uuuuuuuuugagacagggucuc

SEQ ID NO: 962650 - RNA, 26 nt, Human
aaacuggcuccacugucccaucucca

SEQ ID NO: 962651 - RNA, 19 nt, Human
aacuggcuccacuguccca

SEQ ID NO: 962652 - RNA, 21 nt, Human
agaaaauccagagcuacugga

SEQ ID NO: 962653 - RNA, 22 nt, Human
aggcaagaagcccaagucccca

SEQ ID NO: 962654 - RNA, 18 nt, Human
aggcacagaggccagacu

SEQ ID NO: 962655 - RNA, 23 nt, Human
augaagggccagcagagacuccc

SEQ ID NO: 962656 - RNA, 22 nt, Human
caaacuuaaaagccugcccucu

SEQ ID NO: 962657 - RNA, 23 nt, Human
caagaagcccaaguccccaggac

SEQ ID NO: 962658 - RNA, 20 nt, Human
cacaggucagccuccaguuc

SEQ ID NO: 962659 - RNA, 20 nt, Human
caccagcuggaaccacucac

SEQ ID NO: 962660 - RNA, 23 nt, Human
cagacucagcuugugggggccac

SEQ ID NO: 962661 - RNA, 19 nt, Human
cagcccuuucccccauggu

SEQ ID NO: 962662 - RNA, 19 nt, Human
cagcgugacaguggguugg

SEQ ID NO: 962663 - RNA, 22 nt, Human
caguggguuggaagauaaccau

SEQ ID NO: 962664 - RNA, 22 nt, Human
ccagcagagacucccaagcagg

SEQ ID NO: 962665 - RNA, 19 nt, Human
ccagcccuggcagaaaauc

SEQ ID NO: 962666 - RNA, 21 nt, Human
ccauaugucagccugaaacca

SEQ ID NO: 962667 - RNA, 22 nt, Human
cccaguacucacugccucugac

SEQ ID NO: 962668 - RNA, 18 nt, Human
cccauggucaaugccagc

SEQ ID NO: 962669 - RNA, 24 nt, Human
cccauggucaaugccagccagagc

SEQ ID NO: 962670 - RNA, 21 nt, Human
ccccacaggcaaggcagcaag

SEQ ID NO: 962671 - RNA, 19 nt, Human
cccccacaggcaaggcagc

SEQ ID NO: 962672 - RNA, 21 nt, Human
cccccauggucaaugccagcc

SEQ ID NO: 962673 - RNA, 24 nt, Human
ccccccacaggcaaggcagcaagu

SEQ ID NO: 962674 - RNA, 26 nt, Human
cccucuugccaucuccauucuccaau

SEQ ID NO: 962675 - RNA, 24 nt, Human
ccgacucccgggcggcgcggagcg

SEQ ID NO: 962676 - RNA, 26 nt, Human
ccugcggccauaugucagccugaaac

SEQ ID NO: 962677 - RNA, 18 nt, Human
cgcuggccuuggucccau

SEQ ID NO: 962678 - RNA, 22 nt, Human
cuccaacccaaacuuaaaagcc

SEQ ID NO: 962679 - RNA, 19 nt, Human
cuccaauuccucaaaugcc

SEQ ID NO: 962680 - RNA, 22 nt, Human
cugaaaccagcccuuuccccca

SEQ ID NO: 962681 - RNA, 22 nt, Human
gaagauaaccaugagagaccug

SEQ ID NO: 962682 - RNA, 24 nt, Human
gaagauaaccaugagagaccuggg

SEQ ID NO: 962683 - RNA, 20 nt, Human
gagcagcaacuggaagauag

SEQ ID NO: 962684 - RNA, 20 nt, Human
gauccucucuccugggccac

SEQ ID NO: 962685 - RNA, 21 nt, Human
gcaaguucuuggccuagugca

SEQ ID NO: 962686 - RNA, 18 nt, Human
gcaccacaauggcccagc

SEQ ID NO: 962687 - RNA, 21 nt, Human
gcugaggccuguaccagccca

SEQ ID NO: 962688 - RNA, 18 nt, Human
ggcauugauccucucucc

SEQ ID NO: 962689 - RNA, 24 nt, Human
ggccacaggaaguugucuccaacc

SEQ ID NO: 962690 - RNA, 21 nt, Human
gggcagcaccacaauggccca

SEQ ID NO: 962691 - RNA, 22 nt, Human
gggcagcaccacaauggcccag

SEQ ID NO: 962692 - RNA, 23 nt, Human
gggcggcgcggagcggcgggagc

SEQ ID NO: 962693 - RNA, 21 nt, Human
guauagacuuccaggcagagg

SEQ ID NO: 962694 - RNA, 22 nt, Human
gugcaggugcccgguuccccgc

SEQ ID NO: 962695 - RNA, 18 nt, Human
gugugugugugugugugu

SEQ ID NO: 962696 - RNA, 19 nt, Human
guguuccugaacagaugaa

SEQ ID NO: 962697 - RNA, 22 nt, Human
uaaccagaugggcuggcggccg

SEQ ID NO: 962698 - RNA, 24 nt, Human
uaaccaugagagaccugggcugaa

SEQ ID NO: 962699 - RNA, 21 nt, Human
uagugcagagggagaaaacca

SEQ ID NO: 962700 - RNA, 21 nt, Human
uccaauuccucaaaugcccag

SEQ ID NO: 962701 - RNA, 27 nt, Human
uccacagcccaggcauggccggggucc

SEQ ID NO: 962702 - RNA, 22 nt, Human
uccccgcggcucccgacucccg

SEQ ID NO: 962703 - RNA, 22 nt, Human
uccucaaaugcccaguaggucc

SEQ ID NO: 962704 - RNA, 26 nt, Human
ucuccaacccaaacuuaaaagccugc

SEQ ID NO: 962705 - RNA, 21 nt, Human
ucuccauagaggcacagaggc

SEQ ID NO: 962706 - RNA, 21 nt, Human
ucugaccagagggaugcccug

SEQ ID NO: 962707 - RNA, 18 nt, Human
ugaaaccagcccuuuccc

SEQ ID NO: 962708 - RNA, 24 nt, Human
ugacaguggguuggaagauaacca

SEQ ID NO: 962709 - RNA, 20 nt, Human
ugagugugugugugugugug

SEQ ID NO: 962710 - RNA, 21 nt, Human
ugcgugugugagugugugugu

SEQ ID NO: 962711 - RNA, 21 nt, Human
ugcgugugugagugugugugu

SEQ ID NO: 962712 - RNA, 21 nt, Human
ugcgugugugagugugugugu

SEQ ID NO: 962713 - RNA, 25 nt, Human
ugcgugugugagugugugugugugu

SEQ ID NO: 962714 - RNA, 18 nt, Human
uggaaccacucacuccca

SEQ ID NO: 962715 - RNA, 20 nt, Human
uggaagauaaccaugagaga

SEQ ID NO: 962716 - RNA, 21 nt, Human
uggaagauagucuccauagag

SEQ ID NO: 962717 - RNA, 23 nt, Human
uggcggccggucugggaaugggg

SEQ ID NO: 962718 - RNA, 18 nt, Human
ugggcuggcggccggucu

SEQ ID NO: 962719 - RNA, 21 nt, Human
ugugagugugugugugugugu

SEQ ID NO: 962720 - RNA, 21 nt, Human
ugugcgugugugagugugugu

SEQ ID NO: 962721 - RNA, 21 nt, Human
ugugggggccacaggaaguug

SEQ ID NO: 962722 - RNA, 21 nt, Human
ugugugagugugugugugugu

SEQ ID NO: 962723 - RNA, 22 nt, Human
ugugugagugugugugugugug

SEQ ID NO: 962724 - RNA, 22 nt, Human
ugugugcgugugugagugugug

SEQ ID NO: 962725 - RNA, 24 nt, Human
ugugugcgugugugagugugugug

SEQ ID NO: 962726 - RNA, 21 nt, Human
uguguguguguguguguuccu

SEQ ID NO: 962727 - RNA, 22 nt, Human
uguguguguguguguguuccug

SEQ ID NO: 962728 - RNA, 24 nt, Human
uucccaguacucacugccucugac

SEQ ID NO: 962729 - RNA, 23 nt, Human
uugugggggccacaggaaguuga

SEQ ID NO: 962730 - RNA, 18 nt, Human
uuguugcuguagcaaauu

SEQ ID NO: 962731 - RNA, 27 nt, Human
uuuuuuguugcuguagcaaauugugau

SEQ ID NO: 962732 - RNA, 23 nt, Human
aaaaaaagaagaaaaagaaaaag

SEQ ID NO: 962733 - RNA, 20 nt, Human
aaaaagaaaaccaacaagga

SEQ ID NO: 962734 - RNA, 23 nt, Human
aaaaagaaaaccaacaaggaaga

SEQ ID NO: 962735 - RNA, 19 nt, Human
aaaagaaaaagaaaaccaa

SEQ ID NO: 962736 - RNA, 24 nt, Human
aaaagaaaaagaaaaccaacaagg

SEQ ID NO: 962737 - RNA, 21 nt, Human
aaaagaagaaaaagaaaaaga

SEQ ID NO: 962738 - RNA, 24 nt, Human
aacaaggaagaggguaaauguuca

SEQ ID NO: 962739 - RNA, 18 nt, Human
aagaagaaaaagaaaaag

SEQ ID NO: 962740 - RNA, 22 nt, Human
aagaagaaaaagaaaaagaaaa

SEQ ID NO: 962741 - RNA, 23 nt, Human
aagaagaaaaagaaaaagaaaac

SEQ ID NO: 962742 - RNA, 19 nt, Human
aaggggagaggaaaaaaga

SEQ ID NO: 962743 - RNA, 21 nt, Human
agaagaaaaagaaaaagaaaa

SEQ ID NO: 962744 - RNA, 24 nt, Human
agccaaaaaaaaaaagaagaaaaa

SEQ ID NO: 962745 - RNA, 18 nt, Human
agcgccugggcagccgag

SEQ ID NO: 962746 - RNA, 18 nt, Human
agcgggcaccucgccuug

SEQ ID NO: 962747 - RNA, 22 nt, Human
aggaaaaaagaagccaaaaaaa

SEQ ID NO: 962748 - RNA, 19 nt, Human
aggcggccggggcucggag

SEQ ID NO: 962749 - RNA, 18 nt, Human
caaggcucuggcccggcu

SEQ ID NO: 962750 - RNA, 21 nt, Human
ccaaaaaaaaaaagaagaaaa

SEQ ID NO: 962751 - RNA, 25 nt, Human
ccaaaaaaaaaaagaagaaaaagaa

SEQ ID NO: 962752 - RNA, 18 nt, Human
ccaaauccaaauuccacu

SEQ ID NO: 962753 - RNA, 20 nt, Human
ccgagcgccugggcagccga

SEQ ID NO: 962754 - RNA, 23 nt, Human
ccugcugguucgacaccugaccc

SEQ ID NO: 962755 - RNA, 19 nt, Human
ccugggcagccgagugcgc

SEQ ID NO: 962756 - RNA, 24 nt, Human
cucgaggcaguugagaaccuugcu

SEQ ID NO: 962757 - RNA, 21 nt, Human
cuggccgcugcuacacgcugc

SEQ ID NO: 962758 - RNA, 19 nt, Human
cugggaugcaaacgcgaug

SEQ ID NO: 962759 - RNA, 24 nt, Human
gaaaaagaaaaagaaaaccaacaa

SEQ ID NO: 962760 - RNA, 24 nt, Human
gaagaaaaagaaaaagaaaaccaa

SEQ ID NO: 962761 - RNA, 22 nt, Human
gacgagcggagaaggggagagg

SEQ ID NO: 962762 - RNA, 21 nt, Human
gccuuugucauuccuacaugu

SEQ ID NO: 962763 - RNA, 21 nt, Human
gcugguucgacaccugacccc

SEQ ID NO: 962764 - RNA, 18 nt, Human
ggcugggggaggggggca

SEQ ID NO: 962765 - RNA, 19 nt, Human
gggcggggggcgggguggg

SEQ ID NO: 962766 - RNA, 24 nt, Human
gggcggggggcggggugggggccg

SEQ ID NO: 962767 - RNA, 18 nt, Human
ggggaucucuccgggccg

SEQ ID NO: 962768 - RNA, 22 nt, Human
ggggcggggugggggcuggggg

SEQ ID NO: 962769 - RNA, 18 nt, Human
gggggaggggggcaaggc

SEQ ID NO: 962770 - RNA, 21 nt, Human
ggggugggggcugggggaggg

SEQ ID NO: 962771 - RNA, 22 nt, Human
ggggugggggcugggggagggg

SEQ ID NO: 962772 - RNA, 23 nt, Human
ggggugggggcugggggaggggg

SEQ ID NO: 962773 - RNA, 22 nt, Human
uacucgaggcaguugagaaccu

SEQ ID NO: 962774 - RNA, 22 nt, Human
uccccuugguggugucugcgcc

SEQ ID NO: 962775 - RNA, 19 nt, Human
uccgggccgcggcugcggc

SEQ ID NO: 962776 - RNA, 19 nt, Human
ucgacaccugacccccucc

SEQ ID NO: 962777 - RNA, 23 nt, Human
ucuccgggccgcggcugcggcuc

SEQ ID NO: 962778 - RNA, 23 nt, Human
ucuuggucugguggguacucgag

SEQ ID NO: 962779 - RNA, 18 nt, Human
ugacgagcggagaagggg

SEQ ID NO: 962780 - RNA, 19 nt, Human
ugacgagcggagaagggga

SEQ ID NO: 962781 - RNA, 23 nt, Human
ugagaaccuugcugagcugagcg

SEQ ID NO: 962782 - RNA, 21 nt, Human
ugcggccggcagcgcggugcc

SEQ ID NO: 962783 - RNA, 18 nt, Human
ugcuacacgcugcuaagc

SEQ ID NO: 962784 - RNA, 18 nt, Human
ugcuggguuccgagcgcc

SEQ ID NO: 962785 - RNA, 22 nt, Human
uggccgcugcuacacgcugcua

SEQ ID NO: 962786 - RNA, 18 nt, Human
uggcugcagccucgugcc

SEQ ID NO: 962787 - RNA, 22 nt, Human
uuccgagcgccugggcagccga

SEQ ID NO: 962788 - RNA, 22 nt, Human
uucgcaagccuuugucauuccu

SEQ ID NO: 962789 - RNA, 19 nt, Human
uucuuggucugguggguac

SEQ ID NO: 962790 - RNA, 26 nt, Human
aaaccgcaaaagaaaccaaaacugca

SEQ ID NO: 962791 - RNA, 21 nt, Human
aaacugcaaaaaaaaccaaaa

SEQ ID NO: 962792 - RNA, 27 nt, Human
aaagaaaccaaaacugcaaaaaaaacc

SEQ ID NO: 962793 - RNA, 20 nt, Human
aaaguccucccgcccaccca

SEQ ID NO: 962794 - RNA, 23 nt, Human
aaaguccucccgcccacccaccc

SEQ ID NO: 962795 - RNA, 21 nt, Human
acacggcacgcacacgcacgc

SEQ ID NO: 962796 - RNA, 25 nt, Human
accgcaaaagaaaccaaaacugcaa

SEQ ID NO: 962797 - RNA, 19 nt, Human
acuccagagagggcagagg

SEQ ID NO: 962798 - RNA, 23 nt, Human
aggcgacaggaggaggugacgcc

SEQ ID NO: 962799 - RNA, 20 nt, Human
agggcuuaggucugcagcug

SEQ ID NO: 962800 - RNA, 20 nt, Human
aggggacggguggcauggga

SEQ ID NO: 962801 - RNA, 20 nt, Human
aggggacggguggcauggga

SEQ ID NO: 962802 - RNA, 19 nt, Human
auagcaaaguccucccgcc

SEQ ID NO: 962803 - RNA, 21 nt, Human
caaaacugcaaaaaaaaccaa

SEQ ID NO: 962804 - RNA, 22 nt, Human
caaacuccagagagggcagagg

SEQ ID NO: 962805 - RNA, 22 nt, Human
caaacuccagagagggcagagg

SEQ ID NO: 962806 - RNA, 21 nt, Human
cacacacacgcccaccucccc

SEQ ID NO: 962807 - RNA, 23 nt, Human
cacacacccugcacgcguggccc

SEQ ID NO: 962808 - RNA, 18 nt, Human
cacacacgcccacagcag

SEQ ID NO: 962809 - RNA, 24 nt, Human
cacccacccccaaaccgucucagc

SEQ ID NO: 962810 - RNA, 20 nt, Human
cacgcacacccacacacgcc

SEQ ID NO: 962811 - RNA, 18 nt, Human
cagcguccugcggccccg

SEQ ID NO: 962812 - RNA, 22 nt, Human
cagcuggaggucagagggggga

SEQ ID NO: 962813 - RNA, 22 nt, Human
cagcuggaggucagagggggga

SEQ ID NO: 962814 - RNA, 23 nt, Human
cagcuguggccccccauucccca

SEQ ID NO: 962815 - RNA, 23 nt, Human
caggcgacaggaggaggugacgc

SEQ ID NO: 962816 - RNA, 24 nt, Human
ccaaaacugcaaaaaaaaccaaaa

SEQ ID NO: 962817 - RNA, 25 nt, Human
ccacccaccuucgccgccccccagg

SEQ ID NO: 962818 - RNA, 25 nt, Human
ccacccaccuucgccgccccccagg

SEQ ID NO: 962819 - RNA, 26 nt, Human
ccacccaccuucgccgccccccaggc

SEQ ID NO: 962820 - RNA, 27 nt, Human
cccacccaccuucgccgccccccaggc

SEQ ID NO: 962821 - RNA, 24 nt, Human
ccccaccggcguccaagccucccc

SEQ ID NO: 962822 - RNA, 26 nt, Human
ccccaccggcguccaagccuccccug

SEQ ID NO: 962823 - RNA, 18 nt, Human
ccccaggcccccaagccc

SEQ ID NO: 962824 - RNA, 18 nt, Human
ccccaggcccccaagccc

SEQ ID NO: 962825 - RNA, 18 nt, Human
ccccaggcccccaagccc

SEQ ID NO: 962826 - RNA, 18 nt, Human
ccccaggcccccaagccc

SEQ ID NO: 962827 - RNA, 18 nt, Human
cccccaggcccccaagcc

SEQ ID NO: 962828 - RNA, 18 nt, Human
cccccaggcccccaagcc

SEQ ID NO: 962829 - RNA, 19 nt, Human
cccccaggcccccaagccc

SEQ ID NO: 962830 - RNA, 19 nt, Human
cccccaggcccccaagccc

SEQ ID NO: 962831 - RNA, 19 nt, Human
cccccgggccuucuggaag

SEQ ID NO: 962832 - RNA, 21 nt, Human
ccccgggccuucuggaagccc

SEQ ID NO: 962833 - RNA, 19 nt, Human
ccccugccugccgccaccc

SEQ ID NO: 962834 - RNA, 20 nt, Human
cccgcccacccacccccaaa

SEQ ID NO: 962835 - RNA, 23 nt, Human
cccguggcuggcacugccaaggc

SEQ ID NO: 962836 - RNA, 21 nt, Human
ccgcaaaagaaaccaaaacug

SEQ ID NO: 962837 - RNA, 21 nt, Human
ccgccccccaggcccccaagc

SEQ ID NO: 962838 - RNA, 21 nt, Human
ccgccccccaggcccccaagc

SEQ ID NO: 962839 - RNA, 23 nt, Human
ccucccgcccacccacccccaaa

SEQ ID NO: 962840 - RNA, 24 nt, Human
ccucccgcccacccacccccaaac

SEQ ID NO: 962841 - RNA, 23 nt, Human
ccugccugccgccaccccgagaa

SEQ ID NO: 962842 - RNA, 24 nt, Human
ccugccugccgccaccccgagaac

SEQ ID NO: 962843 - RNA, 22 nt, Human
cgcacacacacgcccaccuccc

SEQ ID NO: 962844 - RNA, 18 nt, Human
cgcacacccacacacgcc

SEQ ID NO: 962845 - RNA, 20 nt, Human
cgccccccaggcccccaagc

SEQ ID NO: 962846 - RNA, 23 nt, Human
cgccccccaggcccccaagcccu

SEQ ID NO: 962847 - RNA, 23 nt, Human
cgccccccaggcccccaagcccu

SEQ ID NO: 962848 - RNA, 20 nt, Human
cgcuggcacgcacacacacg

SEQ ID NO: 962849 - RNA, 22 nt, Human
cgggugggucgcgggggggacu

SEQ ID NO: 962850 - RNA, 22 nt, Human
cguccaagccuccccugccugc

SEQ ID NO: 962851 - RNA, 25 nt, Human
cguggacacacacccugcacgcgug

SEQ ID NO: 962852 - RNA, 24 nt, Human
cucccgcccacccacccccaaacc

SEQ ID NO: 962853 - RNA, 18 nt, Human
cuccugguucccguggcu

SEQ ID NO: 962854 - RNA, 23 nt, Human
cugaaaccccggcauuguccccg

SEQ ID NO: 962855 - RNA, 23 nt, Human
cugaaaccccggcauuguccccg

SEQ ID NO: 962856 - RNA, 26 nt, Human
cugcagcuguggccccccauucccca

SEQ ID NO: 962857 - RNA, 19 nt, Human
gaaaccaaaacugcaaaaa

SEQ ID NO: 962858 - RNA, 24 nt, Human
gagcugguugugcuuccuuguggc

SEQ ID NO: 962859 - RNA, 18 nt, Human
gaggacccagccagccac

SEQ ID NO: 962860 - RNA, 18 nt, Human
gaggacccagccagccac

SEQ ID NO: 962861 - RNA, 22 nt, Human
gcaaacuccagagagggcagag

SEQ ID NO: 962862 - RNA, 22 nt, Human
gcaaacuccagagagggcagag

SEQ ID NO: 962863 - RNA, 21 nt, Human
gcacgcacacgcacgcacacc

SEQ ID NO: 962864 - RNA, 18 nt, Human
gcagagugggggggguuc

SEQ ID NO: 962865 - RNA, 21 nt, Human
gcaugcauggucagcuggagg

SEQ ID NO: 962866 - RNA, 21 nt, Human
gcaugcauggucagcuggagg

SEQ ID NO: 962867 - RNA, 22 nt, Human
gcccacuugacacacacgccca

SEQ ID NO: 962868 - RNA, 26 nt, Human
gccccacccaccuucgccgcccccca

SEQ ID NO: 962869 - RNA, 26 nt, Human
gccccacccaccuucgccgcccccca

SEQ ID NO: 962870 - RNA, 20 nt, Human
gccgccaccccgagaacgga

SEQ ID NO: 962871 - RNA, 22 nt, Human
gccugaaaccccggcauugucc

SEQ ID NO: 962872 - RNA, 22 nt, Human
gccugaaaccccggcauugucc

SEQ ID NO: 962873 - RNA, 18 nt, Human
gccuggguuggggaggga

SEQ ID NO: 962874 - RNA, 24 nt, Human
gccuucuggaagccccagcgucgg

SEQ ID NO: 962875 - RNA, 21 nt, Human
gcgacaggaggaggugacgcc

SEQ ID NO: 962876 - RNA, 19 nt, Human
gcuccugguucccguggcu

SEQ ID NO: 962877 - RNA, 21 nt, Human
gcuccugguucccguggcugg

SEQ ID NO: 962878 - RNA, 20 nt, Human
ggagggggcugggggaggca

SEQ ID NO: 962879 - RNA, 22 nt, Human
ggcacugccaaggcaucggggg

SEQ ID NO: 962880 - RNA, 24 nt, Human
ggcccuccucgugucuccugccug

SEQ ID NO: 962881 - RNA, 24 nt, Human
ggcccuccucgugucuccugccug

SEQ ID NO: 962882 - RNA, 21 nt, Human
ggcgacaggaggaggugacgc

SEQ ID NO: 962883 - RNA, 19 nt, Human
ggcugggggaggcaaacuc

SEQ ID NO: 962884 - RNA, 18 nt, Human
ggcuuaggucugcagcug

SEQ ID NO: 962885 - RNA, 18 nt, Human
gggacucucucaccaccc

SEQ ID NO: 962886 - RNA, 18 nt, Human
gggacucucucaccaccc

SEQ ID NO: 962887 - RNA, 24 nt, Human
gggagggggcugggggaggcaaac

SEQ ID NO: 962888 - RNA, 20 nt, Human
gggcagaggacccagccagc

SEQ ID NO: 962889 - RNA, 20 nt, Human
gggcagaggacccagccagc

SEQ ID NO: 962890 - RNA, 20 nt, Human
gggcugggggaggcaaacuc

SEQ ID NO: 962891 - RNA, 20 nt, Human
gggcugggggaggcaaacuc

SEQ ID NO: 962892 - RNA, 18 nt, Human
ggggagggggcuggggga

SEQ ID NO: 962893 - RNA, 18 nt, Human
ggggagggggcuggggga

SEQ ID NO: 962894 - RNA, 18 nt, Human
ggggaggucacaagggga

SEQ ID NO: 962895 - RNA, 20 nt, Human
gggggcugggggaggcaaac

SEQ ID NO: 962896 - RNA, 20 nt, Human
gggggcugggggaggcaaac

SEQ ID NO: 962897 - RNA, 19 nt, Human
ggguagggggagggcgagc

SEQ ID NO: 962898 - RNA, 22 nt, Human
ggguagggggagggcgagcugg

SEQ ID NO: 962899 - RNA, 23 nt, Human
ggguuggggagggaccuuuccag

SEQ ID NO: 962900 - RNA, 19 nt, Human
gucacaaggggacgggugg

SEQ ID NO: 962901 - RNA, 19 nt, Human
gucacaaggggacgggugg

SEQ ID NO: 962902 - RNA, 21 nt, Human
guccucccgcccacccacccc

SEQ ID NO: 962903 - RNA, 21 nt, Human
gucuccugccugaaaccccgg

SEQ ID NO: 962904 - RNA, 22 nt, Human
uagaaaaccgcaaaagaaacca

SEQ ID NO: 962905 - RNA, 19 nt, Human
ucagcguccugcggccccg

SEQ ID NO: 962906 - RNA, 20 nt, Human
ucagcuggaggucagagggg

SEQ ID NO: 962907 - RNA, 20 nt, Human
ucagcuggaggucagagggg

SEQ ID NO: 962908 - RNA, 30 nt, Human
ucagcuggaggucagaggggggaggucacc

SEQ ID NO: 962909 - RNA, 30 nt, Human; identical to SEQ ID NO: 962908

SEQ ID NO: 962910 - RNA, 21 nt, Human
uccaggggugggggagggcuu

SEQ ID NO: 962911 - RNA, 24 nt, Human
uccaggggugggggagggcuuagg

SEQ ID NO: 962912 - RNA, 18 nt, Human
ucccgcccacccaccccc

SEQ ID NO: 962913 - RNA, 19 nt, Human
ucccguggcuggcacugcc

SEQ ID NO: 962914 - RNA, 19 nt, Human
uccucccgcccacccaccc

SEQ ID NO: 962915 - RNA, 21 nt, Human
ucgcgggggggacuugagcac

SEQ ID NO: 962916 - RNA, 28 nt, Human
ucucaccacccuggggccguauuuacag

SEQ ID NO: 962917 - RNA, 28 nt, Human
ucucaccacccuggggccguauuuacag

SEQ ID NO: 962918 - RNA, 20 nt, Human
ucuccugccugaaaccccgg

SEQ ID NO: 962919 - RNA, 20 nt, Human
ucuccugccugaaaccccgg

SEQ ID NO: 962920 - RNA, 21 nt, Human
ugaaaccccggcauugucccc

SEQ ID NO: 962921 - RNA, 21 nt, Human
ugaaaccccggcauugucccc

SEQ ID NO: 962922 - RNA, 19 nt, Human
ugacacacacgcccacagc

SEQ ID NO: 962923 - RNA, 22 nt, Human
ugacuuccgggcaggcccuccu

SEQ ID NO: 962924 - RNA, 22 nt, Human
ugacuuccgggcaggcccuccu

SEQ ID NO: 962925 - RNA, 19 nt, Human
ugcaaaaaaaaccaaaacc

SEQ ID NO: 962926 - RNA, 24 nt, Human
ugccaaggcaucggggggcccccc

SEQ ID NO: 962927 - RNA, 18 nt, Human
ugccgccaccccgagaac

SEQ ID NO: 962928 - RNA, 25 nt, Human
ugccugaaaccccggcauugucccc

SEQ ID NO: 962929 - RNA, 25 nt, Human
ugccugaaaccccggcauugucccc

SEQ ID NO: 962930 - RNA, 22 nt, Human
uggaggucagaggggggagguc

SEQ ID NO: 962931 - RNA, 20 nt, Human
uggcacgcacacacacgccc

SEQ ID NO: 962932 - RNA, 24 nt, Human
uggcaugcauggucagcuggaggu

SEQ ID NO: 962933 - RNA, 20 nt, Human
uggcuggcacugccaaggca

SEQ ID NO: 962934 - RNA, 20 nt, Human
uggcuggcacugccaaggca

SEQ ID NO: 962935 - RNA, 20 nt, Human
uggggagggggcugggggag

SEQ ID NO: 962936 - RNA, 20 nt, Human
uggggagggggcugggggag

SEQ ID NO: 962937 - RNA, 23 nt, Human
uggggagggggcugggggaggca

SEQ ID NO: 962938 - RNA, 19 nt, Human
uuuuuuuuuuuuuugccgg

SEQ ID NO: 962939 - RNA, 19 nt, Human
uuuuuuuuuuuuuugccgg

SEQ ID NO: 962940 - RNA, 21 nt, Human
uuuuuuuuuuuuuugccggug

SEQ ID NO: 962941 - RNA, 18 nt, Human
uuuuuuuuuuuuuuuuug

SEQ ID NO: 962942 - RNA, 18 nt, Human
uuuuuuuuuuuuuuuuug

SEQ ID NO: 962943 - RNA, 22 nt, Human
uuuuuuuuuuuuuuuuugccgg

SEQ ID NO: 962944 - RNA, 22 nt, Human
uuuuuuuuuuuuuuuuugccgg

SEQ ID NO: 962945 - RNA, 23 nt, Human
uuuuuuuuuuuuuuuuugccggu

SEQ ID NO: 962946 - RNA, 23 nt, Human
uuuuuuuuuuuuuuuuugccggu

SEQ ID NO: 962947 - RNA, 20 nt, Human
aaccucugacuccaggauuc

SEQ ID NO: 962948 - RNA, 22 nt, Human
aaggggccucgggagacucugc

SEQ ID NO: 962949 - RNA, 22 nt, Human
acucugcgagucgggaaggcug

SEQ ID NO: 962950 - RNA, 27 nt, Human
agacccaggaggcccgaggacucugga

SEQ ID NO: 962951 - RNA, 19 nt, Human
aggaggcccgaggacucug

SEQ ID NO: 962952 - RNA, 18 nt, Human
agggagcggggaguggga

SEQ ID NO: 962953 - RNA, 23 nt, Human
aggugcggggcgagggggcggug

SEQ ID NO: 962954 - RNA, 24 nt, Human
caccucccacucuucugucgagga

SEQ ID NO: 962955 - RNA, 20 nt, Human
cacgcuggaggccguggacc

SEQ ID NO: 962956 - RNA, 19 nt, Human
cagcgcgcgcggcccgccc

SEQ ID NO: 962957 - RNA, 20 nt, Human
cagucaauaaauaaacccga

SEQ ID NO: 962958 - RNA, 18 nt, Human
ccccagggggugcccccu

SEQ ID NO: 962959 - RNA, 22 nt, Human
ccccagggggugcccccucacc

SEQ ID NO: 962960 - RNA, 25 nt, Human
ccccucacccauaagccggcccugg

SEQ ID NO: 962961 - RNA, 27 nt, Human
ccggcccuggguuggugacuccugugg

SEQ ID NO: 962962 - RNA, 19 nt, Human
cgcuggaggccguggaccg

SEQ ID NO: 962963 - RNA, 22 nt, Human
cgcuggaggccguggaccgcuc

SEQ ID NO: 962964 - RNA, 22 nt, Human
cggcccuggguuggugacuccu

SEQ ID NO: 962965 - RNA, 20 nt, Human
cuucucaccucccacucuuc

SEQ ID NO: 962966 - RNA, 21 nt, Human
gaagggagcggggagugggag

SEQ ID NO: 962967 - RNA, 20 nt, Human
gaggacagggggaaagacag

SEQ ID NO: 962968 - RNA, 22 nt, Human
gagucgggaaggcuggaggugc

SEQ ID NO: 962969 - RNA, 22 nt, Human
gcagacacggcuguauugggaa

SEQ ID NO: 962970 - RNA, 24 nt, Human
gcgagucgggaaggcuggaggugc

SEQ ID NO: 962971 - RNA, 18 nt, Human
gcggggcgagggggcggu

SEQ ID NO: 962972 - RNA, 18 nt, Human
gcuggaagggagcgggga

SEQ ID NO: 962973 - RNA, 22 nt, Human
gcuuggcuggaagggagcgggg

SEQ ID NO: 962974 - RNA, 21 nt, Human
ggaaaccucugacuccaggau

SEQ ID NO: 962975 - RNA, 20 nt, Human
ggacacagcgcgcgcggccc

SEQ ID NO: 962976 - RNA, 18 nt, Human
ggcagcucaggccccagg

SEQ ID NO: 962977 - RNA, 18 nt, Human
ggcagcucaggccccagg

SEQ ID NO: 962978 - RNA, 22 nt, Human
ggggcagcucaggccccagggg

SEQ ID NO: 962979 - RNA, 21 nt, Human
gucgggaaggcuggaggugcg

SEQ ID NO: 962980 - RNA, 21 nt, Human
uaaacccgaggcgaaaagggg

SEQ ID NO: 962981 - RNA, 24 nt, Human
uccaggauucgggucagcgggauc

SEQ ID NO: 962982 - RNA, 19 nt, Human
ucccagacccaggaggccc

SEQ ID NO: 962983 - RNA, 23 nt, Human
ucccagacccaggaggcccgagg

SEQ ID NO: 962984 - RNA, 22 nt, Human
ucgaggacagggggaaagacaa

SEQ ID NO: 962985 - RNA, 18 nt, Human
ucgugaccgagaggacuc

SEQ ID NO: 962986 - RNA, 22 nt, Human
ucucaccucccacucuucuguc

SEQ ID NO: 962987 - RNA, 18 nt, Human
ugaaacguccugaagagc

SEQ ID NO: 962988 - RNA, 19 nt, Human
ugcccccucacccauaagc

SEQ ID NO: 962989 - RNA, 24 nt, Human
ugucgaggacagggggaaagacag

SEQ ID NO: 962990 - RNA, 21 nt, Human
aagaaguggcaggcaaggagc

SEQ ID NO: 962991 - RNA, 20 nt, Human
aagaguccagaaggacucag

SEQ ID NO: 962992 - RNA, 23 nt, Human
aagcaaacauccuucaauaaaca

SEQ ID NO: 962993 - RNA, 25 nt, Human
agaggacagggcuggacagagggua

SEQ ID NO: 962994 - RNA, 20 nt, Human
agagggaggggaaggaggca

SEQ ID NO: 962995 - RNA, 20 nt, Human
aggaacaccagccacccagc

SEQ ID NO: 962996 - RNA, 22 nt, Human
aggacagggcuggacagagggu

SEQ ID NO: 962997 - RNA, 23 nt, Human
aggccucagccccagggucgaga

SEQ ID NO: 962998 - RNA, 27 nt, Human
cagccgccugcggcuggaaggggccgc

SEQ ID NO: 962999 - RNA, 20 nt, Human
cagcucuccuauccaaaccc

SEQ ID NO: 963000 - RNA, 22 nt, Human
cauaaaaauagagcuuuuuccg

SEQ ID NO: 963001 - RNA, 27 nt, Human
cauccuucaauaaacaugcaaggcggc

SEQ ID NO: 963002 - RNA, 18 nt, Human
caugcaaggcggcugucc

SEQ ID NO: 963003 - RNA, 26 nt, Human
ccaaacccacuccccgacccaugggc

SEQ ID NO: 963004 - RNA, 20 nt, Human
ccagaaggacucaggccuca

SEQ ID NO: 963005 - RNA, 27 nt, Human
cccgacccaugggcucuugggcuggga

SEQ ID NO: 963006 - RNA, 23 nt, Human
cccucaccauccgugcgcaccug

SEQ ID NO: 963007 - RNA, 19 nt, Human
cccugggcugcagaagccu

SEQ ID NO: 963008 - RNA, 19 nt, Human
ccuaacauaaaaauagagc

SEQ ID NO: 963009 - RNA, 23 nt, Human
ccuauccaaacccacuccccgac

SEQ ID NO: 963010 - RNA, 23 nt, Human
ccugggcugcagaagccugaggc

SEQ ID NO: 963011 - RNA, 21 nt, Human
ccugugggacccaggaccaga

SEQ ID NO: 963012 - RNA, 20 nt, Human
cgcaccuggggcccagcagc

SEQ ID NO: 963013 - RNA, 22 nt, Human
cgggccagccggcucugagugu

SEQ ID NO: 963014 - RNA, 18 nt, Human
cuccuauccaaacccacu

SEQ ID NO: 963015 - RNA, 22 nt, Human
cuccuauccaaacccacucccc

SEQ ID NO: 963016 - RNA, 24 nt, Human
cuucaggaacaccagccacccagc

SEQ ID NO: 963017 - RNA, 25 nt, Human
gagauggagucccagcucuccuauc

SEQ ID NO: 963018 - RNA, 22 nt, Human
gaggggaaggaggcaauguggg

SEQ ID NO: 963019 - RNA, 19 nt, Human
gcccugggcugcagaagcc

SEQ ID NO: 963020 - RNA, 19 nt, Human
ggaggggaaggaggcaaug

SEQ ID NO: 963021 - RNA, 19 nt, Human
ggccuggcauccuccacug

SEQ ID NO: 963022 - RNA, 19 nt, Human
gggaaggaggcaauguggg

SEQ ID NO: 963023 - RNA, 21 nt, Human
gguaccaagaguccagaagga

SEQ ID NO: 963024 - RNA, 23 nt, Human
guggcaggcaaggagcucccggg

SEQ ID NO: 963025 - RNA, 27 nt, Human
uaaaaauagagcuuuuuccguccuucc

SEQ ID NO: 963026 - RNA, 20 nt, Human
uagagcuuuuuccguccuuc

SEQ ID NO: 963027 - RNA, 23 nt, Human
uagcccugggucuucaggaacac

SEQ ID NO: 963028 - RNA, 22 nt, Human
ucaggaacaccagccacccagc

SEQ ID NO: 963029 - RNA, 18 nt, Human
uccccgacccaugggcuc

SEQ ID NO: 963030 - RNA, 23 nt, Human
uccccuggaagaaguggcaggca

SEQ ID NO: 963031 - RNA, 21 nt, Human
ucccgggccagccggcucuga

SEQ ID NO: 963032 - RNA, 19 nt, Human
uccgugcgcaccuggggcc

SEQ ID NO: 963033 - RNA, 22 nt, Human
ucugaaaaauauuuuccagaag

SEQ ID NO: 963034 - RNA, 23 nt, Human
ucuguccccuggaagaaguggca

SEQ ID NO: 963035 - RNA, 24 nt, Human
ugaaauaagccuaacauaaaaaua

SEQ ID NO: 963036 - RNA, 19 nt, Human
ugccccagcuucacagucg

SEQ ID NO: 963037 - RNA, 26 nt, Human
ugcccugggcugcagaagccugaggc

SEQ ID NO: 963038 - RNA, 18 nt, Human
uggaagaaguggcaggca

SEQ ID NO: 963039 - RNA, 22 nt, Human
uggagucccagcucuccuaucc

SEQ ID NO: 963040 - RNA, 18 nt, Human
uggcaggcaaggagcucc

SEQ ID NO: 963041 - RNA, 20 nt, Human
ugggacccaggaccagagag

SEQ ID NO: 963042 - RNA, 26 nt, Human
ugggacccaggaccagagagggagcu

SEQ ID NO: 963043 - RNA, 20 nt, Human
uggggcccagcagccgccug

SEQ ID NO: 963044 - RNA, 19 nt, Human
uggguuauucuguccccug

SEQ ID NO: 963045 - RNA, 19 nt, Human
uuagucaaguuugagggag

SEQ ID NO: 963046 - RNA, 20 nt, Human
uuuccagaagauaaagucuu

SEQ ID NO: 963047 - RNA, 23 nt, Human
aaacaaacaauucacagaauaaa

SEQ ID NO: 963048 - RNA, 22 nt, Human
aaacaggauugcaagcagcccu

SEQ ID NO: 963049 - RNA, 23 nt, Human
aaagagcagcaguaaaugaccac

SEQ ID NO: 963050 - RNA, 21 nt, Human
aacaaacacacagaaacaaac

SEQ ID NO: 963051 - RNA, 22 nt, Human
aacaaacacacagaaacaaaca

SEQ ID NO: 963052 - RNA, 20 nt, Human
aagucaggacuagaguacag

SEQ ID NO: 963053 - RNA, 19 nt, Human
agaaacaaacaauucacag

SEQ ID NO: 963054 - RNA, 22 nt, Human
agaagugaugcagggacuuuuu

SEQ ID NO: 963055 - RNA, 20 nt, Human
agaguucccuccugcucuuc

SEQ ID NO: 963056 - RNA, 21 nt, Human
agcagcccucugcaccccaag

SEQ ID NO: 963057 - RNA, 22 nt, Human
agcaggcacagccuuacaaaca

SEQ ID NO: 963058 - RNA, 21 nt, Human
augcagggacuuuuuaaccca

SEQ ID NO: 963059 - RNA, 21 nt, Human
caaacacacagaaacaaacaa

SEQ ID NO: 963060 - RNA, 24 nt, Human
cacuuccuuccgcccccagugaga

SEQ ID NO: 963061 - RNA, 18 nt, Human
cagcagcuagagggacca

SEQ ID NO: 963062 - RNA, 24 nt, Human
ccccaagucaggacuagaguacag

SEQ ID NO: 963063 - RNA, 23 nt, Human
ccuuccgcccccagugagaguuc

SEQ ID NO: 963064 - RNA, 18 nt, Human
cgagugagugaaugaaua

SEQ ID NO: 963065 - RNA, 19 nt, Human
gagggaccaggcaaaguuu

SEQ ID NO: 963066 - RNA, 21 nt, Human
gcaaacgagugagugaaugaa

SEQ ID NO: 963067 - RNA, 21 nt, Human
gccuucaugcacuuuugacag

SEQ ID NO: 963068 - RNA, 20 nt, Human
ggaaaagaaucucuuaaaaa

SEQ ID NO: 963069 - RNA, 19 nt, Human
guuacugcuccagcuccac

SEQ ID NO: 963070 - RNA, 24 nt, Human
uaaaugaccacugcccauuauguu

SEQ ID NO: 963071 - RNA, 20 nt, Human
ucaguaccugugagaacaga

SEQ ID NO: 963072 - RNA, 19 nt, Human
uccacuuccuuccgccccc

SEQ ID NO: 963073 - RNA, 23 nt, Human
ugaaagaaccaccagcagcuaga

SEQ ID NO: 963074 - RNA, 18 nt, Human
ugaacaaacacacagaaa

SEQ ID NO: 963075 - RNA, 19 nt, Human
ugaacaaacacacagaaac

SEQ ID NO: 963076 - RNA, 21 nt, Human
ugcuccagcuccacuuccuuc

SEQ ID NO: 963077 - RNA, 23 nt, Human
ugcuccagcuccacuuccuuccg

SEQ ID NO: 963078 - RNA, 24 nt, Human
uguggguugaacaguccaaagcuc

SEQ ID NO: 963079 - RNA, 20 nt, Human
uucaaacaaguaauuuagag

SEQ ID NO: 963080 - RNA, 23 nt, Human
uucaugcacuuuugacagcucag

SEQ ID NO: 963081 - RNA, 23 nt, Human
uugcaaacgagugagugaaugaa

SEQ ID NO: 963082 - RNA, 22 nt, Human
aaaggauccuuuauugaccaga

SEQ ID NO: 963083 - RNA, 23 nt, Human
aggcaagagaggaaaggaacugg

SEQ ID NO: 963084 - RNA, 19 nt, Human
auauauauauauauauaua

SEQ ID NO: 963085 - RNA, 19 nt, Human
auauauauauauauauaua

SEQ ID NO: 963086 - RNA, 19 nt, Human
auauauauauauauauaua

SEQ ID NO: 963087 - RNA, 19 nt, Human
auauauauauauauauaua

SEQ ID NO: 963088 - RNA, 19 nt, Human
auauauauauauauauaua

SEQ ID NO: 963089 - RNA, 19 nt, Human
auauauauauauauauaua

SEQ ID NO: 963090 - RNA, 19 nt, Human
auauauauauauauauaua

SEQ ID NO: 963091 - RNA, 19 nt, Human
auauauauauauauauaua

SEQ ID NO: 963092 - RNA, 19 nt, Human
auauauauauauauauaua

SEQ ID NO: 963093 - RNA, 19 nt, Human
auauauauauauauauaua

SEQ ID NO: 963094 - RNA, 19 nt, Human
auauauauauauauauaua

SEQ ID NO: 963095 - RNA, 19 nt, Human
auauauauauauauauaua

SEQ ID NO: 963096 - RNA, 21 nt, Human
caaagaaaaaaaaauacagaa

SEQ ID NO: 963097 - RNA, 20 nt, Human
cacccaggccacagggccac

SEQ ID NO: 963098 - RNA, 20 nt, Human
caguacccgggagcggggaa

SEQ ID NO: 963099 - RNA, 20 nt, Human
caugucucccuucccauuua

SEQ ID NO: 963100 - RNA, 21 nt, Human
ccacacuccccugcaaacaga

SEQ ID NO: 963101 - RNA, 21 nt, Human
ccaggccacagggccacacuc

SEQ ID NO: 963102 - RNA, 19 nt, Human
ccccugcaaacagaggaag

SEQ ID NO: 963103 - RNA, 23 nt, Human
ccgcccaccacccccagcacuga

SEQ ID NO: 963104 - RNA, 21 nt, Human
ccugcaaacagaggaagaaag

SEQ ID NO: 963105 - RNA, 24 nt, Human
cucaaagaaaaaaaaauacagaaa

SEQ ID NO: 963106 - RNA, 27 nt, Human
cuccacccaggccacagggccacacuc

SEQ ID NO: 963107 - RNA, 20 nt, Human
cucccaugucucccuuccca

SEQ ID NO: 963108 - RNA, 19 nt, Human
cuguagccacccccugcac

SEQ ID NO: 963109 - RNA, 21 nt, Human
cuuccaguacccgggagcggg

SEQ ID NO: 963110 - RNA, 19 nt, Human
gcaaacagaggaagaaagg

SEQ ID NO: 963111 - RNA, 22 nt, Human
gcaagagaggaaaggaacugga

SEQ ID NO: 963112 - RNA, 24 nt, Human
gcacugauuuccugcucccugcac

SEQ ID NO: 963113 - RNA, 22 nt, Human
ggaaaggaacuggaguuucuug

SEQ ID NO: 963114 - RNA, 18 nt, Human
ggaguuucuugggaaggg

SEQ ID NO: 963115 - RNA, 19 nt, Human
ggcauuuauauauuuuuau

SEQ ID NO: 963116 - RNA, 22 nt, Human
uacccgggagcggggaagccgg

SEQ ID NO: 963117 - RNA, 21 nt, Human
uagccacccccugcacaucag

SEQ ID NO: 963118 - RNA, 19 nt, Human
uauauauauauauauauau

SEQ ID NO: 963119 - RNA, 19 nt, Human
uauauauauauauauauau

SEQ ID NO: 963120 - RNA, 19 nt, Human
uauauauauauauauauau

SEQ ID NO: 963121 - RNA, 19 nt, Human
uauauauauauauauauau

SEQ ID NO: 963122 - RNA, 19 nt, Human
uauauauauauauauauau

SEQ ID NO: 963123 - RNA, 19 nt, Human
uauauauauauauauauau

SEQ ID NO: 963124 - RNA, 19 nt, Human
uauauauauauauauauau

SEQ ID NO: 963125 - RNA, 29 nt, Human
uccccugcaaacagaggaagaaaggggcu

SEQ ID NO: 963126 - RNA, 19 nt, Human
ucucucaaagaaaaaaaaa

SEQ ID NO: 963127 - RNA, 21 nt, Human
ugggaagaggcaagagaggaa

SEQ ID NO: 963128 - RNA, 19 nt, Human
uuuauauauauauauauau

SEQ ID NO: 963129 - RNA, 19 nt, Human
uuuauauauauauauauau

SEQ ID NO: 963130 - RNA, 21 nt, Human
uuuuauauauauauauauauu

SEQ ID NO: 963131 - RNA, 19 nt, Human
aaaaguaccccccaacaca

SEQ ID NO: 963132 - RNA, 20 nt, Human
aaaauuagauguacaaaaca

SEQ ID NO: 963133 - RNA, 19 nt, Human
aagcacuggggcuggcacc

SEQ ID NO: 963134 - RNA, 19 nt, Human
aaguuauuuucuucucugu

SEQ ID NO: 963135 - RNA, 21 nt, Human
acaagcacuggggcuggcacc

SEQ ID NO: 963136 - RNA, 22 nt, Human
acaagcacuggggcuggcacca

SEQ ID NO: 963137 - RNA, 18 nt, Human
acuccccucagcacccag

SEQ ID NO: 963138 - RNA, 19 nt, Human
agggagggggaggggaaag

SEQ ID NO: 963139 - RNA, 20 nt, Human
aguaaucuuagagaacaucu

SEQ ID NO: 963140 - RNA, 23 nt, Human
auacugcaugcuugagcugcaaa

SEQ ID NO: 963141 - RNA, 19 nt, Human
aucacccccauucccauuc

SEQ ID NO: 963142 - RNA, 18 nt, Human
aucauauauaaugccacc

SEQ ID NO: 963143 - RNA, 24 nt, Human
augaggaucauaggucucuaaaag

SEQ ID NO: 963144 - RNA, 19 nt, Human
auuaugaaugucuuuuugu

SEQ ID NO: 963145 - RNA, 20 nt, Human
caccucaggaccccuccggc

SEQ ID NO: 963146 - RNA, 23 nt, Human
cacuuuaaaagagcgaauuuuua

SEQ ID NO: 963147 - RNA, 23 nt, Human
cagaagggaugccguaaauggca

SEQ ID NO: 963148 - RNA, 21 nt, Human
cugcaaguuauuuucuucucu

SEQ ID NO: 963149 - RNA, 19 nt, Human
cuggcuaacacaaaugcug

SEQ ID NO: 963150 - RNA, 25 nt, Human
cuucucugugagcuggcuaacacaa

SEQ ID NO: 963151 - RNA, 18 nt, Human
gaaaaaaaaaaagcagag

SEQ ID NO: 963152 - RNA, 18 nt, Human
gagagcaaucuggcuuug

SEQ ID NO: 963153 - RNA, 19 nt, Human
gagcuggcuaacacaaaug

SEQ ID NO: 963154 - RNA, 25 nt, Human
ggaggcuuuaacuccccucagcacc

SEQ ID NO: 963155 - RNA, 20 nt, Human
gggaaaggaaaaaaaaaaaa

SEQ ID NO: 963156 - RNA, 23 nt, Human
guuauuuucuucucugugagcug

SEQ ID NO: 963157 - RNA, 23 nt, Human
uaaaaaauuaaguuccaugagga

SEQ ID NO: 963158 - RNA, 22 nt, Human
uaaaacaccgauauccucaaaa

SEQ ID NO: 963159 - RNA, 22 nt, Human
uaagaauacugaggcuuaacug

SEQ ID NO: 963160 - RNA, 18 nt, Human
uaagauacucacauauga

SEQ ID NO: 963161 - RNA, 22 nt, Human
uaagauacucacauaugacauc

SEQ ID NO: 963162 - RNA, 23 nt, Human
uaagauacucacauaugacauca

SEQ ID NO: 963163 - RNA, 19 nt, Human
uacaaacaaaaacauuaag

SEQ ID NO: 963164 - RNA, 18 nt, Human
uacacaguauucauacug

SEQ ID NO: 963165 - RNA, 21 nt, Human
uacccauuaauaaauaggacu

SEQ ID NO: 963166 - RNA, 18 nt, Human
uaccccccaacacacaca

SEQ ID NO: 963167 - RNA, 25 nt, Human
uagaauuacaauaugaugugaccug

SEQ ID NO: 963168 - RNA, 22 nt, Human
uagcaguaccucaaguugagcu

SEQ ID NO: 963169 - RNA, 22 nt, Human
uaucuauaucacccccauuccc

SEQ ID NO: 963170 - RNA, 22 nt, Human
uaugaaauauccaaacaacaaa

SEQ ID NO: 963171 - RNA, 19 nt, Human
uaugaggacaccaauuuua

SEQ ID NO: 963172 - RNA, 24 nt, Human
uauuuuaaauaauguuccaaugac

SEQ ID NO: 963173 - RNA, 21 nt, Human
uauuuugcacagguaaaauuu

SEQ ID NO: 963174 - RNA, 23 nt, Human
uccaugaggaucauaggucucua

SEQ ID NO: 963175 - RNA, 24 nt, Human
ucccaaaauuagauguacaaaaca

SEQ ID NO: 963176 - RNA, 26 nt, Human
ugaaaaacauacaaacaaaaacauua

SEQ ID NO: 963177 - RNA, 21 nt, Human
ugaaauaaaauguucagacuu

SEQ ID NO: 963178 - RNA, 24 nt, Human
ugacaucaaaagaaaugaaaaaaa

SEQ ID NO: 963179 - RNA, 26 nt, Human
ugacaucaaaagaaaugaaaaaaaaa

SEQ ID NO: 963180 - RNA, 23 nt, Human
ugagcuggcuaacacaaaugcug

SEQ ID NO: 963181 - RNA, 21 nt, Human
ugcaaagaauagaauuacaau

SEQ ID NO: 963182 - RNA, 19 nt, Human
ugccaaaaucaacaaaagc

SEQ ID NO: 963183 - RNA, 25 nt, Human
uggagagggagggggaggggaaagg

SEQ ID NO: 963184 - RNA, 18 nt, Human
ugguaaggggcuuuccag

SEQ ID NO: 963185 - RNA, 20 nt, Human
ugucuuauagacuugguuuc

SEQ ID NO: 963186 - RNA, 21 nt, Human
uuaaaaaauacacaguauuca

SEQ ID NO: 963187 - RNA, 19 nt, Human
uuagaaaguucugaagugu

SEQ ID NO: 963188 - RNA, 21 nt, Human
uuagcaauugagaauaauaag

SEQ ID NO: 963189 - RNA, 25 nt, Human
uucccauauuacauaugcuguugca

SEQ ID NO: 963190 - RNA, 18 nt, Human
uuuccaguaaucuuagag

SEQ ID NO: 963191 - RNA, 21 nt, Human
uuugacaagcacuggggcugg

SEQ ID NO: 963192 - RNA, 22 nt, Human
uuuuuuuuuuuuuugaauugga

SEQ ID NO: 963193 - RNA, 23 nt, Human
uuuuuuuuuuuuuuuugaauugg

SEQ ID NO: 963194 - RNA, 18 nt, Human
uuuuuuuuuuuuuuuuug

SEQ ID NO: 963195 - RNA, 25 nt, Human
aaauuccagaagcugaacaagagcu

SEQ ID NO: 963196 - RNA, 18 nt, Human
aagggagaccaaaggaaa

SEQ ID NO: 963197 - RNA, 18 nt, Human
acagaacauauugcuccc

SEQ ID NO: 963198 - RNA, 20 nt, Human
accuccccaaccacccucag

SEQ ID NO: 963199 - RNA, 22 nt, Human
accucuguguuggccggaaagc

SEQ ID NO: 963200 - RNA, 20 nt, Human
agaagcugaacaagagcugc

SEQ ID NO: 963201 - RNA, 21 nt, Human
aguacagggagaaucuaaagc

SEQ ID NO: 963202 - RNA, 21 nt, Human
caccucuguguuggccggaaa

SEQ ID NO: 963203 - RNA, 20 nt, Human
cacugagauugcagccaucc

SEQ ID NO: 963204 - RNA, 19 nt, Human
cagaggaugauauucuuuc

SEQ ID NO: 963205 - RNA, 23 nt, Human
ccagaauaagccaauguggauaa

SEQ ID NO: 963206 - RNA, 20 nt, Human
ccauggggauaaugcagagg

SEQ ID NO: 963207 - RNA, 24 nt, Human
ccccaaccacccucaggcaccucu

SEQ ID NO: 963208 - RNA, 22 nt, Human
cggucgcaaacucagagguuuc

SEQ ID NO: 963209 - RNA, 21 nt, Human
cuccagaauaagccaaugugg

SEQ ID NO: 963210 - RNA, 24 nt, Human
cuccccaaccacccucaggcaccu

SEQ ID NO: 963211 - RNA, 24 nt, Human
gacgagggcugcucagaaauucca

SEQ ID NO: 963212 - RNA, 19 nt, Human
gaggaugauauucuuucag

SEQ ID NO: 963213 - RNA, 21 nt, Human
uacguaaacccuguguguaau

SEQ ID NO: 963214 - RNA, 18 nt, Human
uaggcaucuucccucagg

SEQ ID NO: 963215 - RNA, 22 nt, Human
uaggcaucuucccucaggcacu

SEQ ID NO: 963216 - RNA, 23 nt, Human
uauaccaauaagaaaagucuuac

SEQ ID NO: 963217 - RNA, 22 nt, Human
ucaccuccccaaccacccucag

SEQ ID NO: 963218 - RNA, 27 nt, Human
uccccaaccacccucaggcaccucugu

SEQ ID NO: 963219 - RNA, 23 nt, Human
uccccaaccuugcgacaucccuu

SEQ ID NO: 963220 - RNA, 22 nt, Human
ucccuuuccaguacagggagaa

SEQ ID NO: 963221 - RNA, 23 nt, Human
ucuacuaggcaucuucccucagg

SEQ ID NO: 963222 - RNA, 24 nt, Human
ugaacaagagcugcucgggccuca

SEQ ID NO: 963223 - RNA, 20 nt, Human
ugcucagaaauuccagaagc

SEQ ID NO: 963224 - RNA, 22 nt, Human
uuccaguacagggagaaucuaa

SEQ ID NO: 963225 - RNA, 19 nt, Human
uuggccggaaagcgacagc

SEQ ID NO: 963226 - RNA, 23 nt, Human
uuucacagaacauauugcucccc

SEQ ID NO: 963227 - RNA, 21 nt, Human
aaaacuaaauuauuuucuagg

SEQ ID NO: 963228 - RNA, 24 nt, Human
aaaagaaagcuggguaauacaaaa

SEQ ID NO: 963229 - RNA, 23 nt, Human
aaacaugaaagaacaaaccagaa

SEQ ID NO: 963230 - RNA, 22 nt, Human
aaacuggaccaauuaucacaaa

SEQ ID NO: 963231 - RNA, 21 nt, Human
aaagcacuauuaccaacaaua

SEQ ID NO: 963232 - RNA, 18 nt, Human
aagcuugccaacuccuua

SEQ ID NO: 963233 - RNA, 19 nt, Human
aauacaaaaauaggagaga

SEQ ID NO: 963234 - RNA, 22 nt, Human
accaauuaucacaaacuaucau

SEQ ID NO: 963235 - RNA, 20 nt, Human
acuuuuuauuuauauuuugg

SEQ ID NO: 963236 - RNA, 19 nt, Human
agacugaucaauggaagca

SEQ ID NO: 963237 - RNA, 22 nt, Human
agccauuuuuacauuuuggcua

SEQ ID NO: 963238 - RNA, 25 nt, Human
auaagguaacaaaaggauaggacaa

SEQ ID NO: 963239 - RNA, 20 nt, Human
aucaauggaagcaagcaaaa

SEQ ID NO: 963240 - RNA, 18 nt, Human
auguaucugauccacaca

SEQ ID NO: 963241 - RNA, 26 nt, Human
gaaaaaaaugcauugaaaaacaucau

SEQ ID NO: 963242 - RNA, 18 nt, Human
gaaagaacaaaccagaag

SEQ ID NO: 963243 - RNA, 20 nt, Human
gaaagaacaaaccagaagaa

SEQ ID NO: 963244 - RNA, 24 nt, Human
gacaaaauuuaagcaagaggacau

SEQ ID NO: 963245 - RNA, 24 nt, Human
gaucaauggaagcaagcaaaacua

SEQ ID NO: 963246 - RNA, 21 nt, Human
gaucacuuuuaaauggacuuu

SEQ ID NO: 963247 - RNA, 19 nt, Human
gguaauacaaaaauaggag

SEQ ID NO: 963248 - RNA, 22 nt, Human
gguaauacaaaaauaggagaga

SEQ ID NO: 963249 - RNA, 19 nt, Human
uaaaaagaaagcuggguaa

SEQ ID NO: 963250 - RNA, 19 nt, Human
uacaaaguuuuuaugcagu

SEQ ID NO: 963251 - RNA, 24 nt, Human
uacuguaggaucuugaauauguuu

SEQ ID NO: 963252 - RNA, 24 nt, Human
uaucuuauuugcuuuguagucugc

SEQ ID NO: 963253 - RNA, 19 nt, Human
ucaauggaagcaagcaaaa

SEQ ID NO: 963254 - RNA, 18 nt, Human
ucacaaacuaucauuugc

SEQ ID NO: 963255 - RNA, 22 nt, Human
ucaguauaucuuauuugcuuug

SEQ ID NO: 963256 - RNA, 20 nt, Human
ucaucugucuuguuaaccuc

SEQ ID NO: 963257 - RNA, 23 nt, Human
ucauuuuuaaacaugaaagaaca

SEQ ID NO: 963258 - RNA, 24 nt, Human
uccaaauucagauagauuuuugaa

SEQ ID NO: 963259 - RNA, 18 nt, Human
ucccuagaaagguuuucu

SEQ ID NO: 963260 - RNA, 18 nt, Human
ucugauccacacaaaucc

SEQ ID NO: 963261 - RNA, 25 nt, Human
ugaaaaauaaaaucagacaaauaua

SEQ ID NO: 963262 - RNA, 22 nt, Human
uggaagcaagcaaaacuaaauu

SEQ ID NO: 963263 - RNA, 18 nt, Human
ugucuuguuaaccucucu

SEQ ID NO: 963264 - RNA, 19 nt, Human
uguuagugguaucaacaaa

SEQ ID NO: 963265 - RNA, 21 nt, Human
uuagauaucauggacuauacu

SEQ ID NO: 963266 - RNA, 23 nt, Human
uucacucuuacuguaggaucuug

SEQ ID NO: 963267 - RNA, 25 nt, Human
uucauaaaugaaaaaacuuugaaaa

SEQ ID NO: 963268 - RNA, 22 nt, Human
uuccaaauucagauagauuuuu

SEQ ID NO: 963269 - RNA, 22 nt, Human
uuuacaauaaugaagcuacaaa

SEQ ID NO: 963270 - RNA, 24 nt, Human
uuuucuguguagucuucauuaacg

SEQ ID NO: 963271 - RNA, 21 nt, Human
agaagaagggggacuccggaa

SEQ ID NO: 963272 - RNA, 23 nt, Human
agaagaagggggacuccggaaga

SEQ ID NO: 963273 - RNA, 21 nt, Human
agagucugggagaagaagggg

SEQ ID NO: 963274 - RNA, 18 nt, Human
agcccgcgcgagggcggg

SEQ ID NO: 963275 - RNA, 23 nt, Human
cagagucugggagaagaaggggg

SEQ ID NO: 963276 - RNA, 18 nt, Human
cccgcggaggucccgggg

SEQ ID NO: 963277 - RNA, 22 nt, Human
cccgcggaggucccggggggcg

SEQ ID NO: 963278 - RNA, 18 nt, Human
ccgcggaggucccggggg

SEQ ID NO: 963279 - RNA, 21 nt, Human
cugggagaaccucccccuaau

SEQ ID NO: 963280 - RNA, 18 nt, Human
ggcggugucugggugggc

SEQ ID NO: 963281 - RNA, 18 nt, Human
ucugggagaagaaggggg

SEQ ID NO: 963282 - RNA, 20 nt, Human
ucugggugggcgggaccagc

SEQ ID NO: 963283 - RNA, 23 nt, Human
ugggagaagaagggggacuccgg

SEQ ID NO: 963284 - RNA, 21 nt, Human
uuuuuuuuuuuuuugccgcgg

SEQ ID NO: 963285 - RNA, 18 nt, Human
uuuuuuuuuuuuuuuuug

SEQ ID NO: 963286 - RNA, 25 nt, Human
uuuuuuuuuuuuuuuuugccgcggg

SEQ ID NO: 963287 - RNA, 19 nt, Human
aaagaggcagcuggccccu

SEQ ID NO: 963288 - RNA, 27 nt, Human
aaccaggagaugggacagaagggaccc

SEQ ID NO: 963289 - RNA, 19 nt, Human
aaccucccccagaucuccu

SEQ ID NO: 963290 - RNA, 27 nt, Human
aacuggccuaaagaggcagcuggcccc

SEQ ID NO: 963291 - RNA, 23 nt, Human
aagaacccagcucuggccuacuu

SEQ ID NO: 963292 - RNA, 19 nt, Human
aagcaaauggagcaacaga

SEQ ID NO: 963293 - RNA, 18 nt, Human
aaggacagugcccaggag

SEQ ID NO: 963294 - RNA, 22 nt, Human
aagugcugggauucauagagga

SEQ ID NO: 963295 - RNA, 23 nt, Human
acacacacacacacacacacaca

SEQ ID NO: 963296 - RNA, 23 nt, Human
acacacacacacacacacacaca

SEQ ID NO: 963297 - RNA, 23 nt, Human
acacacacacacacacacacaca

SEQ ID NO: 963298 - RNA, 23 nt, Human
acacacacacacacacacacaca

SEQ ID NO: 963299 - RNA, 23 nt, Human
acacacacacacacacacacaca

SEQ ID NO: 963300 - RNA, 22 nt, Human
acacacagacaagaugcuccac

SEQ ID NO: 963301 - RNA, 22 nt, Human
acagaguugagaggaagaaggu

SEQ ID NO: 963302 - RNA, 18 nt, Human
acaguagccaaggauccc

SEQ ID NO: 963303 - RNA, 21 nt, Human
acgcccaccucccaugcccau

SEQ ID NO: 963304 - RNA, 22 nt, Human
agaaagacagacauaaauauga

SEQ ID NO: 963305 - RNA, 23 nt, Human
agaaagucaacuccagcaauguc

SEQ ID NO: 963306 - RNA, 19 nt, Human
agaagaaagucaacuccag

SEQ ID NO: 963307 - RNA, 21 nt, Human
agaggaagaaggugguuggug

SEQ ID NO: 963308 - RNA, 23 nt, Human
agagggugggcaaaggggaauuc

SEQ ID NO: 963309 - RNA, 26 nt, Human
agccuuacccccagaccacccccaac

SEQ ID NO: 963310 - RNA, 21 nt, Human
agcuccacugccaucuguccu

SEQ ID NO: 963311 - RNA, 20 nt, Human
aggaagagggugggcaaagg

SEQ ID NO: 963312 - RNA, 18 nt, Human
aggagccaaacuuacaag

SEQ ID NO: 963313 - RNA, 22 nt, Human
aggaggccuucucccugcaggg

SEQ ID NO: 963314 - RNA, 22 nt, Human
aggagggaaagggagaaagaag

SEQ ID NO: 963315 - RNA, 21 nt, Human
aggcaguggccuggcagcaga

SEQ ID NO: 963316 - RNA, 22 nt, Human
agggaaaggcaagaaaagccua

SEQ ID NO: 963317 - RNA, 21 nt, Human
agggagaugcuccgggcgcgg

SEQ ID NO: 963318 - RNA, 20 nt, Human
agggaggaugagggcugggu

SEQ ID NO: 963319 - RNA, 21 nt, Human
agguggggaggauguacaacc

SEQ ID NO: 963320 - RNA, 18 nt, Human
agguuguaugagguuauu

SEQ ID NO: 963321 - RNA, 20 nt, Human
aguggagagcagcaguaggc

SEQ ID NO: 963322 - RNA, 20 nt, Human
auagccccaguuugugugca

SEQ ID NO: 963323 - RNA, 19 nt, Human
auggagcaacagagaagga

SEQ ID NO: 963324 - RNA, 20 nt, Human
caaggaaaggagacagauaa

SEQ ID NO: 963325 - RNA, 18 nt, Human
caaguagcugggaugggc

SEQ ID NO: 963326 - RNA, 20 nt, Human
cacacacacacacacacaca

SEQ ID NO: 963327 - RNA, 20 nt, Human
cacacacacacacacacaca

SEQ ID NO: 963328 - RNA, 20 nt, Human
cacacacacacacacacaca

SEQ ID NO: 963329 - RNA, 20 nt, Human
cacacacacacacacacaca

SEQ ID NO: 963330 - RNA, 20 nt, Human
cacacacacacacacacaca

SEQ ID NO: 963331 - RNA, 20 nt, Human
cacacacacacacacacaca

SEQ ID NO: 963332 - RNA, 20 nt, Human
cacacacacacacacacaca

SEQ ID NO: 963333 - RNA, 20 nt, Human
cacacacacacacacacaca

SEQ ID NO: 963334 - RNA, 20 nt, Human
cacacacacacacacacaca

SEQ ID NO: 963335 - RNA, 20 nt, Human
cacacacacacacacacaca

SEQ ID NO: 963336 - RNA, 22 nt, Human
cacacacacacacacacacaca

SEQ ID NO: 963337 - RNA, 22 nt, Human
cacacacacacacacacacaca

SEQ ID NO: 963338 - RNA, 22 nt, Human
cacacacacacacacacacaca

SEQ ID NO: 963339 - RNA, 22 nt, Human
cacacacacacacacacacaca

SEQ ID NO: 963340 - RNA, 21 nt, Human
cacacacacacacagacaaga

SEQ ID NO: 963341 - RNA, 24 nt, Human
cacacacacacagacaagaugcuc

SEQ ID NO: 963342 - RNA, 24 nt, Human
cacacacagacaagaugcuccaca

SEQ ID NO: 963343 - RNA, 19 nt, Human
cacacagacaagaugcucc

SEQ ID NO: 963344 - RNA, 22 nt, Human
cacacaggcucucucgcucucu

SEQ ID NO: 963345 - RNA, 20 nt, Human
cacccugcagaugggcuagg

SEQ ID NO: 963346 - RNA, 23 nt, Human
cacccuugucccacuuuggggcu

SEQ ID NO: 963347 - RNA, 24 nt, Human
caccgccccccuuucuccuggucc

SEQ ID NO: 963348 - RNA, 18 nt, Human
caccugagugauaaaaga

SEQ ID NO: 963349 - RNA, 19 nt, Human
cagcaauaacagcugagag

SEQ ID NO: 963350 - RNA, 19 nt, Human
cagccuccaggaaagaccg

SEQ ID NO: 963351 - RNA, 19 nt, Human
caggaggccuucucccugc

SEQ ID NO: 963352 - RNA, 20 nt, Human
caggggugccaggcaccauu

SEQ ID NO: 963353 - RNA, 21 nt, Human
caggugccuacccuguaacuu

SEQ ID NO: 963354 - RNA, 19 nt, Human
cagugaccaccugugguca

SEQ ID NO: 963355 - RNA, 19 nt, Human
caugcaucugauggggggc

SEQ ID NO: 963356 - RNA, 25 nt, Human
ccaaacuuacaagggacucuccagg

SEQ ID NO: 963357 - RNA, 23 nt, Human
ccaacgcccaccucccaugccca

SEQ ID NO: 963358 - RNA, 21 nt, Human
ccaagaguagcucaugcagau

SEQ ID NO: 963359 - RNA, 23 nt, Human
ccacaaauaccagacaggccugu

SEQ ID NO: 963360 - RNA, 21 nt, Human
ccacugccaucuguccuugga

SEQ ID NO: 963361 - RNA, 22 nt, Human
ccagacaggccugugggacaga

SEQ ID NO: 963362 - RNA, 19 nt, Human
ccaggaaagaccgagagca

SEQ ID NO: 963363 - RNA, 20 nt, Human
ccagguggagacaggaagag

SEQ ID NO: 963364 - RNA, 19 nt, Human
ccaugcccauagaucuucc

SEQ ID NO: 963365 - RNA, 19 nt, Human
ccaugcccauagaucuucc

SEQ ID NO: 963366 - RNA, 26 nt, Human
cccagaccacccccaacuuacaggag

SEQ ID NO: 963367 - RNA, 30 nt, Human
cccagccuuacccccagaccacccccaacc

SEQ ID NO: 963368 - RNA, 25 nt, Human
cccaggaagccccagccuuaccccc

SEQ ID NO: 963369 - RNA, 22 nt, Human
ccccagaccacccccaacuuac

SEQ ID NO: 963370 - RNA, 22 nt, Human
cccccaacuuacaggaggguug

SEQ ID NO: 963371 - RNA, 21 nt, Human
cccccagaccacccccaacuu

SEQ ID NO: 963372 - RNA, 18 nt, Human
ccccccuuucuccugguc

SEQ ID NO: 963373 - RNA, 19 nt, Human
ccccccuuucuccuggucc

SEQ ID NO: 963374 - RNA, 19 nt, Human
ccccuaggcgugggccucu

SEQ ID NO: 963375 - RNA, 24 nt, Human
ccccuuucuccugguccauugaau

SEQ ID NO: 963376 - RNA, 19 nt, Human
ccggcugacgcagaugaug

SEQ ID NO: 963377 - RNA, 27 nt, Human
ccuaaagaggcagcuggccccucccac

SEQ ID NO: 963378 - RNA, 21 nt, Human
ccuccaggaaagaccgagagc

SEQ ID NO: 963379 - RNA, 23 nt, Human
ccugcucccagcacuuuuaaaug

SEQ ID NO: 963380 - RNA, 19 nt, Human
ccuggucucugggagcccu

SEQ ID NO: 963381 - RNA, 22 nt, Human
ccuguggucaggcuaauucauu

SEQ ID NO: 963382 - RNA, 23 nt, Human
ccuguucaggugcuugacuacag

SEQ ID NO: 963383 - RNA, 24 nt, Human
cggggcugcaaggcugagcggggc

SEQ ID NO: 963384 - RNA, 22 nt, Human
cugcagcaauaacagcugagag

SEQ ID NO: 963385 - RNA, 25 nt, Human
cuucuuaggaaaaccacucuuccuc

SEQ ID NO: 963386 - RNA, 18 nt, Human
cuuuacauuggcugccug

SEQ ID NO: 963387 - RNA, 19 nt, Human
cuuuccuauuccuuucuuu

SEQ ID NO: 963388 - RNA, 23 nt, Human
gaaacaccuaggcugaaccagga

SEQ ID NO: 963389 - RNA, 20 nt, Human
gaacucccugcccccuacuc

SEQ ID NO: 963390 - RNA, 19 nt, Human
gaagcagagacaggcagug

SEQ ID NO: 963391 - RNA, 18 nt, Human
gaauccuccuuugucucc

SEQ ID NO: 963392 - RNA, 23 nt, Human
gacacaguguguggggcaguggc

SEQ ID NO: 963393 - RNA, 18 nt, Human
gaccaccuguggucaggc

SEQ ID NO: 963394 - RNA, 20 nt, Human
gacccuuuaaggaagccaag

SEQ ID NO: 963395 - RNA, 23 nt, Human
gagaaagaagacaaagucggaag

SEQ ID NO: 963396 - RNA, 20 nt, Human
gagaaucucuauagccccag

SEQ ID NO: 963397 - RNA, 22 nt, Human
gagacagauaauggacaggcau

SEQ ID NO: 963398 - RNA, 19 nt, Human
gagcagcaguaggcucugg

SEQ ID NO: 963399 - RNA, 22 nt, Human
gcaacagagaagccugcuuaga

SEQ ID NO: 963400 - RNA, 19 nt, Human
gcagaaggagcucuugaug

SEQ ID NO: 963401 - RNA, 21 nt, Human
gcagaaggagcucuugaugag

SEQ ID NO: 963402 - RNA, 23 nt, Human
gccaaauuacuaagaaagacaaa

SEQ ID NO: 963403 - RNA, 22 nt, Human
gccccagccuuacccccagacc

SEQ ID NO: 963404 - RNA, 19 nt, Human
gccuacuucucugccuucu

SEQ ID NO: 963405 - RNA, 21 nt, Human
gcugagaggggcugugguggu

SEQ ID NO: 963406 - RNA, 23 nt, Human
ggaaaaccacucuuccucagugg

SEQ ID NO: 963407 - RNA, 22 nt, Human
ggaaaggcaagaaaagccuaaa

SEQ ID NO: 963408 - RNA, 18 nt, Human
ggaaggacagugcccagg

SEQ ID NO: 963409 - RNA, 18 nt, Human
ggagaggagugguuugga

SEQ ID NO: 963410 - RNA, 19 nt, Human
ggcacagguggaaggacag

SEQ ID NO: 963411 - RNA, 20 nt, Human
ggccuggcagcagaggccag

SEQ ID NO: 963412 - RNA, 21 nt, Human
ggccuuccuuuucccaggaag

SEQ ID NO: 963413 - RNA, 20 nt, Human
ggcuguagcgcugcugcugu

SEQ ID NO: 963414 - RNA, 24 nt, Human
gggaaggggguuggggguaggagu

SEQ ID NO: 963415 - RNA, 19 nt, Human
gggacagaguugagaggaa

SEQ ID NO: 963416 - RNA, 19 nt, Human
gggaugggcuuacaagggc

SEQ ID NO: 963417 - RNA, 18 nt, Human
ggggaaggggguuggggg

SEQ ID NO: 963418 - RNA, 20 nt, Human
ggggggcuuugcccucccuu

SEQ ID NO: 963419 - RNA, 20 nt, Human
gguggagacaggaagagggu

SEQ ID NO: 963420 - RNA, 21 nt, Human
gguguggucaaaaauuugucu

SEQ ID NO: 963421 - RNA, 22 nt, Human
gguucaggggugccaggcacca

SEQ ID NO: 963422 - RNA, 21 nt, Human
gucuccauacaggacugcuuc

SEQ ID NO: 963423 - RNA, 21 nt, Human
gugaaaggcagucuaaaguca

SEQ ID NO: 963424 - RNA, 20 nt, Human
uaacucacuguguuucccuc

SEQ ID NO: 963425 - RNA, 18 nt, Human
uaacuggacacugggaac

SEQ ID NO: 963426 - RNA, 19 nt, Human
uaacuggacacugggaacu

SEQ ID NO: 963427 - RNA, 22 nt, Human
uaagcagaaaaauugcuuucuu

SEQ ID NO: 963428 - RNA, 18 nt, Human
uaaguaaugaaggagaca

SEQ ID NO: 963429 - RNA, 21 nt, Human
uacaaguagcugggaugggcu

SEQ ID NO: 963430 - RNA, 24 nt, Human
uacagggcuucagggaaaggcaag

SEQ ID NO: 963431 - RNA, 23 nt, Human
uaccagacaggccugugggacag

SEQ ID NO: 963432 - RNA, 18 nt, Human
uagcaugugugcuuccuu

SEQ ID NO: 963433 - RNA, 18 nt, Human
uagccuacagugaccacc

SEQ ID NO: 963434 - RNA, 21 nt, Human
uaggaaaaccacucuuccuca

SEQ ID NO: 963435 - RNA, 23 nt, Human
uaggaccggcugacgcagaugau

SEQ ID NO: 963436 - RNA, 24 nt, Human
uaguaagcagaaaaauugcuuucu

SEQ ID NO: 963437 - RNA, 24 nt, Human
uauaaagacacaguguguggggca

SEQ ID NO: 963438 - RNA, 23 nt, Human
uaugagguuauuguaaacaguuu

SEQ ID NO: 963439 - RNA, 19 nt, Human
uauuguggguuucuggggg

SEQ ID NO: 963440 - RNA, 24 nt, Human
ucaacauucgcaaacauucaugca

SEQ ID NO: 963441 - RNA, 21 nt, Human
ucacacacacacacacacaca

SEQ ID NO: 963442 - RNA, 18 nt, Human
ucacuguguuucccucuu

SEQ ID NO: 963443 - RNA, 19 nt, Human
ucagcaguggggcaggggg

SEQ ID NO: 963444 - RNA, 22 nt, Human
ucaugcagaugaauggguaggg

SEQ ID NO: 963445 - RNA, 22 nt, Human
uccacaaauaccagacaggccu

SEQ ID NO: 963446 - RNA, 18 nt, Human
uccacugggaggagagga

SEQ ID NO: 963447 - RNA, 27 nt, Human
ucccaggaagccccagccuuaccccca

SEQ ID NO: 963448 - RNA, 20 nt, Human
uccccugcugguccaagguc

SEQ ID NO: 963449 - RNA, 21 nt, Human
ucuagaaccugaugucccaau

SEQ ID NO: 963450 - RNA, 24 nt, Human
ucuauagccccaguuugugugcag

SEQ ID NO: 963451 - RNA, 21 nt, Human
ucuguccuuggagaaucucuu

SEQ ID NO: 963452 - RNA, 25 nt, Human
ucuuccucaguggcugcguuaugag

SEQ ID NO: 963453 - RNA, 20 nt, Human
ugaaaauaccucaccccugc

SEQ ID NO: 963454 - RNA, 21 nt, Human
ugaaaccucccccagaucucc

SEQ ID NO: 963455 - RNA, 20 nt, Human
ugaagcaaauggagcaacaa

SEQ ID NO: 963456 - RNA, 22 nt, Human
ugaagcaaauggagcaacagag

SEQ ID NO: 963457 - RNA, 21 nt, Human
ugaauggguagggagcaaugc

SEQ ID NO: 963458 - RNA, 19 nt, Human
ugacggagaaaacggaggu

SEQ ID NO: 963459 - RNA, 19 nt, Human
ugagaagcagcgcuugaaa

SEQ ID NO: 963460 - RNA, 22 nt, Human
ugagaggaagaaggugguuggu

SEQ ID NO: 963461 - RNA, 19 nt, Human
ugagaggggcugugguggu

SEQ ID NO: 963462 - RNA, 25 nt, Human
ugagcucagggccuguucaggugcu

SEQ ID NO: 963463 - RNA, 20 nt, Human
ugagggaaggagggaaaggg

SEQ ID NO: 963464 - RNA, 18 nt, Human
ugagggcugagaggggcu

SEQ ID NO: 963465 - RNA, 18 nt, Human
ugaguggacagaagggug

SEQ ID NO: 963466 - RNA, 19 nt, Human
ugaucaccgccccccuuuc

SEQ ID NO: 963467 - RNA, 21 nt, Human
ugaucaccgccccccuuucuc

SEQ ID NO: 963468 - RNA, 19 nt, Human
ugcuccgggcgcggggcug

SEQ ID NO: 963469 - RNA, 20 nt, Human
ugcuucuacaguagccaagg

SEQ ID NO: 963470 - RNA, 21 nt, Human
ugcuugacuacagaaacuuuc

SEQ ID NO: 963471 - RNA, 21 nt, Human
uggaaggacagugcccaggag

SEQ ID NO: 963472 - RNA, 22 nt, Human
uggaaguagacugggcauaaau

SEQ ID NO: 963473 - RNA, 21 nt, Human
uggacgagcacagcacuaaaa

SEQ ID NO: 963474 - RNA, 20 nt, Human
uggagacaggaagagggugg

SEQ ID NO: 963475 - RNA, 23 nt, Human
uggagcuccauuuguaggcacug

SEQ ID NO: 963476 - RNA, 21 nt, Human
uggccuggcagcagaggccag

SEQ ID NO: 963477 - RNA, 21 nt, Human
uggccuggcagcagaggccag

SEQ ID NO: 963478 - RNA, 19 nt, Human
uggcucaccugcucccagc

SEQ ID NO: 963479 - RNA, 22 nt, Human
uggcugccugugagcucagggc

SEQ ID NO: 963480 - RNA, 18 nt, Human
ugggaugggcuuacaagg

SEQ ID NO: 963481 - RNA, 22 nt, Human
ugggaugugugugugugaagug

SEQ ID NO: 963482 - RNA, 20 nt, Human
ugggauucauagaggaccag

SEQ ID NO: 963483 - RNA, 23 nt, Human
ugguauuugggaugugugugugu

SEQ ID NO: 963484 - RNA, 18 nt, Human
uguggagaccagcagcug

SEQ ID NO: 963485 - RNA, 22 nt, Human
ugugugugugaaguggguaugu

SEQ ID NO: 963486 - RNA, 19 nt, Human
uuacccccagaccaccccc

SEQ ID NO: 963487 - RNA, 20 nt, Human
uucccuggccccgaauuuca

SEQ ID NO: 963488 - RNA, 23 nt, Human
uuuccauuagccuacagugacca

SEQ ID NO: 963489 - RNA, 19 nt, Human
uuucccaggaagccccagc

SEQ ID NO: 963490 - RNA, 18 nt, Human
aacgcgccgcuucccccu

SEQ ID NO: 963491 - RNA, 22 nt, Human
aagaagaagugagcuugaagua

SEQ ID NO: 963492 - RNA, 21 nt, Human
agaccugacaggccuaacuca

SEQ ID NO: 963493 - RNA, 18 nt, Human
agagcaccaaaccuacac

SEQ ID NO: 963494 - RNA, 20 nt, Human
agagcuucucaagccuuaac

SEQ ID NO: 963495 - RNA, 24 nt, Human
agcagauuuuuuuuuuuuuuuuuu

SEQ ID NO: 963496 - RNA, 25 nt, Human
agcuucucaagccuuaacuaguuaa

SEQ ID NO: 963497 - RNA, 18 nt, Human
aggaaccucggcuuaaaa

SEQ ID NO: 963498 - RNA, 22 nt, Human
aggcggcgguguggggaagugg

SEQ ID NO: 963499 - RNA, 21 nt, Human
aguaagugaucaaaaaaagaa

SEQ ID NO: 963500 - RNA, 23 nt, Human
agucaggaggcaugaaaauuagu

SEQ ID NO: 963501 - RNA, 19 nt, Human
auaggaaccucggcuuaaa

SEQ ID NO: 963502 - RNA, 24 nt, Human
cacagcaaaccuacauucuugcuu

SEQ ID NO: 963503 - RNA, 21 nt, Human
cacuucgggcgcgaccaaguc

SEQ ID NO: 963504 - RNA, 20 nt, Human
caggaggcaugaaaauuagu

SEQ ID NO: 963505 - RNA, 21 nt, Human
ccaaaccuacacagcaaaccu

SEQ ID NO: 963506 - RNA, 20 nt, Human
ccaccccuugaaaguagggu

SEQ ID NO: 963507 - RNA, 24 nt, Human
ccagggcugccacgggugccgccg

SEQ ID NO: 963508 - RNA, 18 nt, Human
ccaguggggcugggaggc

SEQ ID NO: 963509 - RNA, 21 nt, Human
cccaagaaacuggcuugugcu

SEQ ID NO: 963510 - RNA, 28 nt, Human
ccccaaccuccccucuaccgcccacccc

SEQ ID NO: 963511 - RNA, 20 nt, Human
cccccuauggccagcaccag

SEQ ID NO: 963512 - RNA, 24 nt, Human
cccccucgccgcugcuccaacccc

SEQ ID NO: 963513 - RNA, 21 nt, Human
ccccuauggccagcaccaguu

SEQ ID NO: 963514 - RNA, 23 nt, Human
cccucuaccgcccaccccuugaa

SEQ ID NO: 963515 - RNA, 26 nt, Human
ccucggucaagucccuucccuucucc

SEQ ID NO: 963516 - RNA, 24 nt, Human
cuccaaccccaaccuccccucuac

SEQ ID NO: 963517 - RNA, 18 nt, Human
cuccccucuaccgcccac

SEQ ID NO: 963518 - RNA, 24 nt, Human
cucuaaaaaaaaaauagaaguagg

SEQ ID NO: 963519 - RNA, 22 nt, Human
cucucugagcuacuggcugagu

SEQ ID NO: 963520 - RNA, 18 nt, Human
cuggucacucaccaauca

SEQ ID NO: 963521 - RNA, 18 nt, Human
gaauuuucccaagaaacu

SEQ ID NO: 963522 - RNA, 20 nt, Human
gagcagauuuuuuuuuuuuu

SEQ ID NO: 963523 - RNA, 20 nt, Human
gccgcugcuccaaccccaac

SEQ ID NO: 963524 - RNA, 22 nt, Human
gcgcgaccaaguccgguggggg

SEQ ID NO: 963525 - RNA, 20 nt, Human
gcgguguggggaaguggugg

SEQ ID NO: 963526 - RNA, 20 nt, Human
ggagaccugacaggccuaac

SEQ ID NO: 963527 - RNA, 22 nt, Human
ggagcaaguugcggaacucaaa

SEQ ID NO: 963528 - RNA, 21 nt, Human
gguggggggaggugcaaggga

SEQ ID NO: 963529 - RNA, 18 nt, Human
gucaagucccuucccuuc

SEQ ID NO: 963530 - RNA, 18 nt, Human
ucaaaaaggccuggaaau

SEQ ID NO: 963531 - RNA, 20 nt, Human
ucauuuuuuucuuuuugcuu

SEQ ID NO: 963532 - RNA, 22 nt, Human
uccaagcauauggucuucaaaa

SEQ ID NO: 963533 - RNA, 24 nt, Human
uccccucuaccgcccaccccuuga

SEQ ID NO: 963534 - RNA, 19 nt, Human
uccgacaaagagaaagugu

SEQ ID NO: 963535 - RNA, 20 nt, Human
ucuaaaaaaaaaauagaagu

SEQ ID NO: 963536 - RNA, 19 nt, Human
ugaaggucucuccaaggcu

SEQ ID NO: 963537 - RNA, 22 nt, Human
ugaauuucugggaaagcagcuc

SEQ ID NO: 963538 - RNA, 20 nt, Human
ugacaggccuaacucagcau

SEQ ID NO: 963539 - RNA, 23 nt, Human
ugcaaauaugaagccuuucccaa

SEQ ID NO: 963540 - RNA, 18 nt, Human
ugcauauguuugcuuuuc

SEQ ID NO: 963541 - RNA, 24 nt, Human
ugcggaacucaaaaagaagaagug

SEQ ID NO: 963542 - RNA, 19 nt, Human
ugcguccgccagggcugcc

SEQ ID NO: 963543 - RNA, 20 nt, Human
ugcuccaaccccaaccuccg

SEQ ID NO: 963544 - RNA, 22 nt, Human
ugcuuuggcagcaucaccuuca

SEQ ID NO: 963545 - RNA, 21 nt, Human
uggcaggauaggggugggggg

SEQ ID NO: 963546 - RNA, 20 nt, Human
ugggaaagcagcucugaagc

SEQ ID NO: 963547 - RNA, 20 nt, Human
ugggaggcaggagcaaguug

SEQ ID NO: 963548 - RNA, 20 nt, Human
uggggggaggugcaagggag

SEQ ID NO: 963549 - RNA, 23 nt, Human
ugucaacaagaaaagugcgugca

SEQ ID NO: 963550 - RNA, 28 nt, Human
uguggggaaguggugguuaaccgugagg

SEQ ID NO: 963551 - RNA, 19 nt, Human
uuaccaggcggcggugugg

SEQ ID NO: 963552 - RNA, 22 nt, Human
uuguuucuaccuccaagcauau

SEQ ID NO: 963553 - RNA, 18 nt, Human
uuuuuggucguugguuug

SEQ ID NO: 963554 - RNA, 18 nt, Human
uuuuuuuuuuuuuuuuug

SEQ ID NO: 963555 - RNA, 20 nt, Human
uuuuuuuuuuuuuuuuuggu

SEQ ID NO: 963556 - RNA, 20 nt, Human
aaggaugccugaggcgggau

SEQ ID NO: 963557 - RNA, 23 nt, Human
aaucucugcccccaacagcagcc

SEQ ID NO: 963558 - RNA, 22 nt, Human
agacacauacacacagacucuc

SEQ ID NO: 963559 - RNA, 23 nt, Human
agacacauacacacagacucucc

SEQ ID NO: 963560 - RNA, 24 nt, Human
agccacgagaacaucagggaaaga

SEQ ID NO: 963561 - RNA, 18 nt, Human
caaacguugccacaauca

SEQ ID NO: 963562 - RNA, 23 nt, Human
caaacuccaggggacaacugggg

SEQ ID NO: 963563 - RNA, 31 nt, Human
cacaaucagaaacccacccauccugaugccc

SEQ ID NO: 963564 - RNA, 21 nt, Human
caggaggagggugggguggug

SEQ ID NO: 963565 - RNA, 18 nt, Human
caucagggaaagaccagg

SEQ ID NO: 963566 - RNA, 19 nt, Human
caucagggaaagaccaggu

SEQ ID NO: 963567 - RNA, 23 nt, Human
ccccaacagcagccacgagaaca

SEQ ID NO: 963568 - RNA, 22 nt, Human
cccccaacagcagccacgagaa

SEQ ID NO: 963569 - RNA, 23 nt, Human
cccccaacagcagccacgagaac

SEQ ID NO: 963570 - RNA, 22 nt, Human
ccccccaaacuccaggggacaa

SEQ ID NO: 963571 - RNA, 28 nt, Human
ccccccaaacuccaggggacaacugggg

SEQ ID NO: 963572 - RNA, 20 nt, Human
cgagaacaucagggaaagac

SEQ ID NO: 963573 - RNA, 22 nt, Human
cgagaacaucagggaaagacca

SEQ ID NO: 963574 - RNA, 23 nt, Human
cgagaacaucagggaaagaccag

SEQ ID NO: 963575 - RNA, 18 nt, Human
cgcucagaggcaaagacc

SEQ ID NO: 963576 - RNA, 24 nt, Human
cguugccacaaucagaaacccacc

SEQ ID NO: 963577 - RNA, 22 nt, Human
cucucccgcucagaggcaaaga

SEQ ID NO: 963578 - RNA, 24 nt, Human
cugaugccucucuuggcuuccccu

SEQ ID NO: 963579 - RNA, 23 nt, Human
cugggucaaggucccuggacucu

SEQ ID NO: 963580 - RNA, 27 nt, Human
gagaacaucagggaaagaccgguaccc

SEQ ID NO: 963581 - RNA, 20 nt, Human
gagaggggcugggucaaggu

SEQ ID NO: 963582 - RNA, 23 nt, Human
gaggcaaagaccgggggcgucaa

SEQ ID NO: 963583 - RNA, 20 nt, Human
ggaaagaccagguguccaca

SEQ ID NO: 963584 - RNA, 22 nt, Human
ggaaagaccagguguccacaag

SEQ ID NO: 963585 - RNA, 22 nt, Human
gggacaacuggggaagacaugg

SEQ ID NO: 963586 - RNA, 21 nt, Human
ggggaagacacauacacacag

SEQ ID NO: 963587 - RNA, 22 nt, Human
guguggauuccggggaagacac

SEQ ID NO: 963588 - RNA, 22 nt, Human
uaucaugaagcgucugcugaga

SEQ ID NO: 963589 - RNA, 20 nt, Human
ugagaaggaugccugaggcg

SEQ ID NO: 963590 - RNA, 21 nt, Human
uggggugguguggauuccggg

SEQ ID NO: 963591 - RNA, 21 nt, Human
uuuuuuuuuuuuuuuuuccgg

SEQ ID NO: 963592 - RNA, 23 nt, Human
uuuuuuuuuuuuuuuuuccgguu

SEQ ID NO: 963593 - RNA, 23 nt, Human
uuuuuuuuuuuuuuuuuuuccgg

SEQ ID NO: 963594 - RNA, 24 nt, Human
aaaaauaaauaaauuaccugggug

SEQ ID NO: 963595 - RNA, 24 nt, Human
aaagugcucagauuacaggcauga

SEQ ID NO: 963596 - RNA, 18 nt, Human
aacaguagaaacuguaac

SEQ ID NO: 963597 - RNA, 24 nt, Human
aacagugcgagacucugucucaaa

SEQ ID NO: 963598 - RNA, 19 nt, Human
aacauggugaaaccccauc

SEQ ID NO: 963599 - RNA, 20 nt, Human
aacauggugaaaccccaucu

SEQ ID NO: 963600 - RNA, 21 nt, Human
aacauggugaaaccccaucuc

SEQ ID NO: 963601 - RNA, 21 nt, Human
aacauggugaaaccccaucuc

SEQ ID NO: 963602 - RNA, 24 nt, Human
aacugcuugaacccaggaggcaga

SEQ ID NO: 963603 - RNA, 24 nt, Human
aagaagagcaacucggaaaagcaa

SEQ ID NO: 963604 - RNA, 24 nt, Human
aaucgcuugaacccgggaggcgga

SEQ ID NO: 963605 - RNA, 24 nt, Human
acagagugagacuccaucucaaaa

SEQ ID NO: 963606 - RNA, 24 nt, Human
acagugcgagacucugucucaaaa

SEQ ID NO: 963607 - RNA, 24 nt, Human
accccaucucuacuaagaauacaa

SEQ ID NO: 963608 - RNA, 23 nt, Human
acccgccuuggucucccaaagug

SEQ ID NO: 963609 - RNA, 25 nt, Human
acccgccuuggucucccaaagugcu

SEQ ID NO: 963610 - RNA, 21 nt, Human
accuggguguggcagcgcgga

SEQ ID NO: 963611 - RNA, 24 nt, Human
acgccacugcaguccagccugggc

SEQ ID NO: 963612 - RNA, 23 nt, Human
acuccagucuggugacagaguga

SEQ ID NO: 963613 - RNA, 22 nt, Human
acucggccuauccccucgcccc

SEQ ID NO: 963614 - RNA, 23 nt, Human
acugcacuccagucuggugacag

SEQ ID NO: 963615 - RNA, 25 nt, Human
acugcacuccagucuggugacagag

SEQ ID NO: 963616 - RNA, 24 nt, Human
acugcaguccagccugggcaacag

SEQ ID NO: 963617 - RNA, 24 nt, Human
agagaucacgccacugcaguccag

SEQ ID NO: 963618 - RNA, 21 nt, Human
agaggccaacugucacaggca

SEQ ID NO: 963619 - RNA, 23 nt, Human
agagguugcauggagcugagaug

SEQ ID NO: 963620 - RNA, 24 nt, Human
agagguugcauggagcugagaugg

SEQ ID NO: 963621 - RNA, 19 nt, Human
agauuacaggcaugagcca

SEQ ID NO: 963622 - RNA, 22 nt, Human
agauuacaggcaugagccacca

SEQ ID NO: 963623 - RNA, 24 nt, Human
agcacuuugggaggccgaggcggg

SEQ ID NO: 963624 - RNA, 22 nt, Human
agccuggccaacauggugaaac

SEQ ID NO: 963625 - RNA, 24 nt, Human
agccuggccaacauggugaaaccc

SEQ ID NO: 963626 - RNA, 24 nt, Human
agccugggcaacagugcgagacuc

SEQ ID NO: 963627 - RNA, 21 nt, Human
agcgcgugccuguaaucccag

SEQ ID NO: 963628 - RNA, 23 nt, Human
agcugggcgugguggcaggcgcc

SEQ ID NO: 963629 - RNA, 19 nt, Human
aggaagcugaggcuggaga

SEQ ID NO: 963630 - RNA, 19 nt, Human
aggaggcugaggcaagaga

SEQ ID NO: 963631 - RNA, 19 nt, Human
aggcaagagaacugcuuga

SEQ ID NO: 963632 - RNA, 24 nt, Human
aggcaagagaacugcuugaaccca

SEQ ID NO: 963633 - RNA, 24 nt, Human
aggcagagguugcauggagcugag

SEQ ID NO: 963634 - RNA, 21 nt, Human
aggccgaggcgggugaaucac

SEQ ID NO: 963635 - RNA, 19 nt, Human
aggcggagguugcagugag

SEQ ID NO: 963636 - RNA, 20 nt, Human
aggcggagguugcagugagc

SEQ ID NO: 963637 - RNA, 24 nt, Human
aggcggagguugcagugagcagag

SEQ ID NO: 963638 - RNA, 24 nt, Human
aggcgggugaaucacgaggucagg

SEQ ID NO: 963639 - RNA, 24 nt, Human
aggcugaggcaagagaacugcuug

SEQ ID NO: 963640 - RNA, 24 nt, Human
aggcuggagaaucgcuugaacccg

SEQ ID NO: 963641 - RNA, 23 nt, Human
agggaucuacccgccuuggucuc

SEQ ID NO: 963642 - RNA, 22 nt, Human
aguagaaaugggguuucgccau

SEQ ID NO: 963643 - RNA, 23 nt, Human
agucuggugacagagugagacuc

SEQ ID NO: 963644 - RNA, 24 nt, Human
aucacgccacugcaguccagccug

SEQ ID NO: 963645 - RNA, 18 nt, Human
auccggaagaucagcugc

SEQ ID NO: 963646 - RNA, 21 nt, Human
augagccaccacgccuggccc

SEQ ID NO: 963647 - RNA, 18 nt, Human
augggguuucgccauguu

SEQ ID NO: 963648 - RNA, 19 nt, Human
augggguuucgccauguug

SEQ ID NO: 963649 - RNA, 24 nt, Human
augggguuucgccauguugcccag

SEQ ID NO: 963650 - RNA, 24 nt, Human
caaagugcucagauuacaggcaug

SEQ ID NO: 963651 - RNA, 24 nt, Human
caacauggugaaaccccaucucua

SEQ ID NO: 963652 - RNA, 18 nt, Human
caccacgccuggcccaac

SEQ ID NO: 963653 - RNA, 22 nt, Human
caccacgccuggcccaacaugg

SEQ ID NO: 963654 - RNA, 23 nt, Human
cacccggaacucggccuaucccc

SEQ ID NO: 963655 - RNA, 24 nt, Human
cacgccuguaaucccagcacuuug

SEQ ID NO: 963656 - RNA, 21 nt, Human
cacuccagucuggugacagag

SEQ ID NO: 963657 - RNA, 21 nt, Human
cacuccagucuggugacagag

SEQ ID NO: 963658 - RNA, 23 nt, Human
cacuccagucuggugacagagug

SEQ ID NO: 963659 - RNA, 18 nt, Human
cacugcacuccagucugg

SEQ ID NO: 963660 - RNA, 20 nt, Human
cacugcacuccagucuggug

SEQ ID NO: 963661 - RNA, 22 nt, Human
cacugcacuccagucuggugac

SEQ ID NO: 963662 - RNA, 23 nt, Human
cacugcacuccagucuggugaca

SEQ ID NO: 963663 - RNA, 24 nt, Human
cacugcacuccagucuggugacag

SEQ ID NO: 963664 - RNA, 21 nt, Human
cacugcaguccagccugggca

SEQ ID NO: 963665 - RNA, 24 nt, Human
cacugcaguccagccugggcaaca

SEQ ID NO: 963666 - RNA, 23 nt, Human
cagauuacaggcaugagccacca

SEQ ID NO: 963667 - RNA, 24 nt, Human
cagcacuuugggaggccgaggcgg

SEQ ID NO: 963668 - RNA, 21 nt, Human
cagcuuccgggcaaggccccc

SEQ ID NO: 963669 - RNA, 21 nt, Human
cauaucaugcauucacaugug

SEQ ID NO: 963670 - RNA, 19 nt, Human
cauguugcccaggcugguc

SEQ ID NO: 963671 - RNA, 20 nt, Human
cauguugcccaggcuggucu

SEQ ID NO: 963672 - RNA, 23 nt, Human
cauguugcccaggcuggucuuga

SEQ ID NO: 963673 - RNA, 24 nt, Human
cauguugcccaggcuggucuugaa

SEQ ID NO: 963674 - RNA, 24 nt, Human
ccaaagugcucagauuacaggcau

SEQ ID NO: 963675 - RNA, 22 nt, Human
ccaauccggaagaucagcugcc

SEQ ID NO: 963676 - RNA, 19 nt, Human
ccacugcacuccagucugg

SEQ ID NO: 963677 - RNA, 20 nt, Human
ccacugcacuccagucuggu

SEQ ID NO: 963678 - RNA, 23 nt, Human
ccacugcacuccagucuggugac

SEQ ID NO: 963679 - RNA, 20 nt, Human
ccacugcaguccagccuggg

SEQ ID NO: 963680 - RNA, 20 nt, Human
ccacugcaguccagccuggg

SEQ ID NO: 963681 - RNA, 21 nt, Human
ccacugcaguccagccugggc

SEQ ID NO: 963682 - RNA, 24 nt, Human
ccacugcaguccagccugggcaac

SEQ ID NO: 963683 - RNA, 19 nt, Human
ccaggcucuucauaucaug

SEQ ID NO: 963684 - RNA, 24 nt, Human
ccaggcuggucuugaacuccuggg

SEQ ID NO: 963685 - RNA, 24 nt, Human
ccaucucaaaaaaaaaaaaaaaaa

SEQ ID NO: 963686 - RNA, 21 nt, Human
ccauguugcccaggcuggucu

SEQ ID NO: 963687 - RNA, 23 nt, Human
ccucgccccagcuaauuuuugua

SEQ ID NO: 963688 - RNA, 23 nt, Human
ccuggccaacauggugaaacccc

SEQ ID NO: 963689 - RNA, 24 nt, Human
ccuggccaacauggugaaacccca

SEQ ID NO: 963690 - RNA, 21 nt, Human
ccuggguguggcagcgcgugc

SEQ ID NO: 963691 - RNA, 21 nt, Human
ccuguaaucccagcuacccag

SEQ ID NO: 963692 - RNA, 24 nt, Human
ccuguaaucccagcuacccaggag

SEQ ID NO: 963693 - RNA, 19 nt, Human
ccuguaaucccaucuacuc

SEQ ID NO: 963694 - RNA, 24 nt, Human
cgaggcgggugaaucacgagguca

SEQ ID NO: 963695 - RNA, 20 nt, Human
cgccacugcacuccagucug

SEQ ID NO: 963696 - RNA, 25 nt, Human
cgccacugcacuccagucuggugac

SEQ ID NO: 963697 - RNA, 24 nt, Human
cgccacugcaguccagccugggca

SEQ ID NO: 963698 - RNA, 24 nt, Human
cgccauguugcccaggcuggucuu

SEQ ID NO: 963699 - RNA, 27 nt, Human
cgccauguugcccaggcuggucuugaa

SEQ ID NO: 963700 - RNA, 23 nt, Human
cgccuguaaucccagcacuuugg

SEQ ID NO: 963701 - RNA, 24 nt, Human
cgccuguaaucccagcacuuuggg

SEQ ID NO: 963702 - RNA, 24 nt, Human
cgccuguaaucccaucuacucagg

SEQ ID NO: 963703 - RNA, 19 nt, Human
cgcucugcuccgccaacgg

SEQ ID NO: 963704 - RNA, 28 nt, Human
cgcucugcucucccuaauggcccccuua

SEQ ID NO: 963705 - RNA, 24 nt, Human
cgggaggcggagguugcagugagc

SEQ ID NO: 963706 - RNA, 19 nt, Human
cuaagaauacaaaaaauua

SEQ ID NO: 963707 - RNA, 25 nt, Human
cuaauggcccccuuacacccggaac

SEQ ID NO: 963708 - RNA, 18 nt, Human
cucaaaaaaaaaaaaaaa

SEQ ID NO: 963709 - RNA, 22 nt, Human
cucacgccuguaaucccagcac

SEQ ID NO: 963710 - RNA, 24 nt, Human
cucacgccuguaaucccagcacuu

SEQ ID NO: 963711 - RNA, 20 nt, Human
cucagauuacaggcaugagc

SEQ ID NO: 963712 - RNA, 24 nt, Human
cuccagucuggugacagagugaga

SEQ ID NO: 963713 - RNA, 19 nt, Human
cuccaucucaaaaaaaaaa

SEQ ID NO: 963714 - RNA, 19 nt, Human
cucccuaauggcccccuua

SEQ ID NO: 963715 - RNA, 20 nt, Human
cuccgcccggcugcgccucc

SEQ ID NO: 963716 - RNA, 21 nt, Human
cucuacuaagaauacaaaaaa

SEQ ID NO: 963717 - RNA, 19 nt, Human
cucugucucaaaaaaaaaa

SEQ ID NO: 963718 - RNA, 18 nt, Human
cuggaggcccgacaacag

SEQ ID NO: 963719 - RNA, 23 nt, Human
cuggccaacauggugaaacccca

SEQ ID NO: 963720 - RNA, 19 nt, Human
cuggucuugaacuccuggg

SEQ ID NO: 963721 - RNA, 23 nt, Human
cuggucuugaacuccugggcaca

SEQ ID NO: 963722 - RNA, 20 nt, Human
cuggugacagagugagacuc

SEQ ID NO: 963723 - RNA, 22 nt, Human
cuugcuagaaaauggaguuuga

SEQ ID NO: 963724 - RNA, 24 nt, Human
gaaaugggguuucgccauguugcc

SEQ ID NO: 963725 - RNA, 22 nt, Human
gaacaguagaaacuguaaccag

SEQ ID NO: 963726 - RNA, 24 nt, Human
gacagagugagacuccaucucaaa

SEQ ID NO: 963727 - RNA, 23 nt, Human
gagauggcgccacugcacuccag

SEQ ID NO: 963728 - RNA, 19 nt, Human
gagcccucgugggcccucc

SEQ ID NO: 963729 - RNA, 23 nt, Human
gagcccucgugggcccuccgccc

SEQ ID NO: 963730 - RNA, 21 nt, Human
gagucucuuauaccuuucugg

SEQ ID NO: 963731 - RNA, 18 nt, Human
gauuacaggcaugagcca

SEQ ID NO: 963732 - RNA, 22 nt, Human
gauuacaggcaugagccaccac

SEQ ID NO: 963733 - RNA, 22 nt, Human
gcaagagaacugcuugaaccca

SEQ ID NO: 963734 - RNA, 24 nt, Human
gcacaccagggccaggagaccuca

SEQ ID NO: 963735 - RNA, 23 nt, Human
gcacuccagucuggugacagagu

SEQ ID NO: 963736 - RNA, 20 nt, Human
gcagagaucacgccacugca

SEQ ID NO: 963737 - RNA, 23 nt, Human
gcagcgcgugccuguaaucccag

SEQ ID NO: 963738 - RNA, 24 nt, Human
gccaacauggugaaaccccaucuc

SEQ ID NO: 963739 - RNA, 22 nt, Human
gccacugcaguccagccugggc

SEQ ID NO: 963740 - RNA, 24 nt, Human
gccacugcaguccagccugggcaa

SEQ ID NO: 963741 - RNA, 24 nt, Human
gccauguugcccaggcuggucuug

SEQ ID NO: 963742 - RNA, 23 nt, Human
gccccagcuaauuuuuguauuuu

SEQ ID NO: 963743 - RNA, 19 nt, Human
ggaaaacaguuuuuguaga

SEQ ID NO: 963744 - RNA, 24 nt, Human
ggagaccagccuggccaacauggu

SEQ ID NO: 963745 - RNA, 25 nt, Human
ggagaucauauccucgugcaucuuc

SEQ ID NO: 963746 - RNA, 22 nt, Human
ggagccuggaagaagagcaacu

SEQ ID NO: 963747 - RNA, 22 nt, Human
ggagguugcagugagcagagau

SEQ ID NO: 963748 - RNA, 23 nt, Human
ggagguugcagugagcagagauc

SEQ ID NO: 963749 - RNA, 24 nt, Human
ggagguugcagugagcagagauca

SEQ ID NO: 963750 - RNA, 20 nt, Human
ggagguugcagugagcaggc

SEQ ID NO: 963751 - RNA, 21 nt, Human
ggccuauuuacuugcagagaa

SEQ ID NO: 963752 - RNA, 23 nt, Human
ggcgugguggcaggcgccuguaa

SEQ ID NO: 963753 - RNA, 18 nt, Human
ggcuggucuugaacuccu

SEQ ID NO: 963754 - RNA, 24 nt, Human
gggaucuacccgccuuggucuccc

SEQ ID NO: 963755 - RNA, 24 nt, Human
gggggcugugacucacgccuguaa

SEQ ID NO: 963756 - RNA, 22 nt, Human
gggguuucgccauguugcccag

SEQ ID NO: 963757 - RNA, 23 nt, Human
gggguuucgccauguugcccagg

SEQ ID NO: 963758 - RNA, 19 nt, Human
gggugaaucacgaggucag

SEQ ID NO: 963759 - RNA, 20 nt, Human
gugcgagacucugucucaaa

SEQ ID NO: 963760 - RNA, 20 nt, Human
uaaauaaauuaccugggugu

SEQ ID NO: 963761 - RNA, 22 nt, Human
uaagaauacaaaaaauuagcug

SEQ ID NO: 963762 - RNA, 18 nt, Human
uaagauaaauggagugac

SEQ ID NO: 963763 - RNA, 21 nt, Human
uaagauaaauggagugacucg

SEQ ID NO: 963764 - RNA, 22 nt, Human
uaauuuuuguauuuuuaguaga

SEQ ID NO: 963765 - RNA, 22 nt, Human
uacaggcaugagccaccacgcc

SEQ ID NO: 963766 - RNA, 21 nt, Human
uacaucuaaguuuccuauuuu

SEQ ID NO: 963767 - RNA, 22 nt, Human
uaccaauauucacagaggccaa

SEQ ID NO: 963768 - RNA, 20 nt, Human
uaccagagcucaacuuguuc

SEQ ID NO: 963769 - RNA, 23 nt, Human
uacccgccuuggucucccaaagu

SEQ ID NO: 963770 - RNA, 22 nt, Human
uaccgucaccaccgcugaccgg

SEQ ID NO: 963771 - RNA, 22 nt, Human
uagaaaugggguuucgccaugu

SEQ ID NO: 963772 - RNA, 20 nt, Human
uagcuauuaagaucaguuac

SEQ ID NO: 963773 - RNA, 24 nt, Human
uaguagaaaugggguuucgccaug

SEQ ID NO: 963774 - RNA, 26 nt, Human
uauuuacaauuauaccaauauucaca

SEQ ID NO: 963775 - RNA, 24 nt, Human
ucacgaggucaggagauggagacc

SEQ ID NO: 963776 - RNA, 23 nt, Human
ucacgccacugcaguccagccug

SEQ ID NO: 963777 - RNA, 23 nt, Human
ucagcugccucgcucugcucucc

SEQ ID NO: 963778 - RNA, 23 nt, Human
uccaucucaaaaaaaaaaaaaaa

SEQ ID NO: 963779 - RNA, 24 nt, Human
ucccaaagugcucagauuacaggc

SEQ ID NO: 963780 - RNA, 18 nt, Human
uccgccaacggccccgcc

SEQ ID NO: 963781 - RNA, 21 nt, Human
uccgggcaaggcccccaaucc

SEQ ID NO: 963782 - RNA, 21 nt, Human
ucgccauguugcccaggcugg

SEQ ID NO: 963783 - RNA, 22 nt, Human
ucgccauguugcccaggcuggu

SEQ ID NO: 963784 - RNA, 24 nt, Human
ucgcuugaacccgggaggcggagg

SEQ ID NO: 963785 - RNA, 24 nt, Human
ucucuacuaagaauacaaaaaauu

SEQ ID NO: 963786 - RNA, 21 nt, Human
ucuugaacuccugggcacaag

SEQ ID NO: 963787 - RNA, 19 nt, Human
ugaaaccccaucucuacua

SEQ ID NO: 963788 - RNA, 24 nt, Human
ugaacuccugggcacaagggaucu

SEQ ID NO: 963789 - RNA, 18 nt, Human
ugacauuauuuacaauua

SEQ ID NO: 963790 - RNA, 21 nt, Human
ugaccgggaaggcugagcccu

SEQ ID NO: 963791 - RNA, 21 nt, Human
ugacucacgccuguaauccca

SEQ ID NO: 963792 - RNA, 22 nt, Human
ugacucacgccuguaaucccag

SEQ ID NO: 963793 - RNA, 24 nt, Human
ugacucacgccuguaaucccagca

SEQ ID NO: 963794 - RNA, 24 nt, Human
ugaggcaagagaacugcuugaacc

SEQ ID NO: 963795 - RNA, 25 nt, Human
ugaggcaagagaacugcuugaaccc

SEQ ID NO: 963796 - RNA, 24 nt, Human
ugaggcuggagaaucgcuugaacc

SEQ ID NO: 963797 - RNA, 24 nt, Human
ugcccaggcuggucuugaacuccu

SEQ ID NO: 963798 - RNA, 28 nt, Human
ugcccaggcuggucuugaacuccugggc

SEQ ID NO: 963799 - RNA, 20 nt, Human
ugccucgcucugcucucccu

SEQ ID NO: 963800 - RNA, 24 nt, Human
ugccuguaaucccagcuacccagg

SEQ ID NO: 963801 - RNA, 19 nt, Human
uggaagaagagcaacucgg

SEQ ID NO: 963802 - RNA, 24 nt, Human
uggcagcgcgugccuguaauccca

SEQ ID NO: 963803 - RNA, 24 nt, Human
uggccaacauggugaaaccccauc

SEQ ID NO: 963804 - RNA, 23 nt, Human
uggccgggggcugugacucacgg

SEQ ID NO: 963805 - RNA, 19 nt, Human
ugggaggccgaggcgggug

SEQ ID NO: 963806 - RNA, 24 nt, Human
ugggaggccgaggcgggugaauca

SEQ ID NO: 963807 - RNA, 24 nt, Human
ugggguuucgccauguugcccagg

SEQ ID NO: 963808 - RNA, 24 nt, Human
ugguggcaggcgccuguaauccca

SEQ ID NO: 963809 - RNA, 19 nt, Human
ugucacaggcauuaagggc

SEQ ID NO: 963810 - RNA, 24 nt, Human
ugugacucacgccuguaaucccag

SEQ ID NO: 963811 - RNA, 22 nt, Human
uuaccuggguguggcagcgcgu

SEQ ID NO: 963812 - RNA, 18 nt, Human
uuagcugggcgugguggc

SEQ ID NO: 963813 - RNA, 22 nt, Human
uuagcugggcgugguggcaggc

SEQ ID NO: 963814 - RNA, 24 nt, Human
uuagcugggcgugguggcaggcgc

SEQ ID NO: 963815 - RNA, 18 nt, Human
uuaguagaaaugggguuu

SEQ ID NO: 963816 - RNA, 22 nt, Human
uuaguagaaaugggguuucgcc

SEQ ID NO: 963817 - RNA, 24 nt, Human
uuaguagaaaugggguuucgccau

SEQ ID NO: 963818 - RNA, 18 nt, Human
uucauaugcuguccaauu

SEQ ID NO: 963819 - RNA, 24 nt, Human
uugaacccgggaggcggagguugc

SEQ ID NO: 963820 - RNA, 20 nt, Human
uugcagugagcagagaucac

SEQ ID NO: 963821 - RNA, 21 nt, Human
uugcagugagcagagaucacg

SEQ ID NO: 963822 - RNA, 25 nt, Human
uugggaggccgaggcgggugaauca

SEQ ID NO: 963823 - RNA, 23 nt, Human
uuguauuuuuaguagaaaugggg

SEQ ID NO: 963824 - RNA, 22 nt, Human
uuuaagauaaauggagugacuc

SEQ ID NO: 963825 - RNA, 22 nt, Human
uuucgccauguugcccaggcug

SEQ ID NO: 963826 - RNA, 24 nt, Human
uuucgccauguugcccaggcuggu

SEQ ID NO: 963827 - RNA, 22 nt, Human
uuuuuaguagaaaugggguuuc

SEQ ID NO: 963828 - RNA, 18 nt, Human
uuuuuguauuuuuaguag

SEQ ID NO: 963829 - RNA, 21 nt, Human
aaaaaacacugggaaggggua

SEQ ID NO: 963830 - RNA, 25 nt, Human
aaaagcccaggcgcugucucgggug

SEQ ID NO: 963831 - RNA, 21 nt, Human
aaccgcugagcccgccuacca

SEQ ID NO: 963832 - RNA, 21 nt, Human
aaggcaggacuggggacucug

SEQ ID NO: 963833 - RNA, 18 nt, Human
acaagaaaaagcacgugg

SEQ ID NO: 963834 - RNA, 19 nt, Human
acagagcaagacuaugucu

SEQ ID NO: 963835 - RNA, 21 nt, Human
acagagcaagacuaugucucu

SEQ ID NO: 963836 - RNA, 24 nt, Human
accguacuccagcauggguaacag

SEQ ID NO: 963837 - RNA, 23 nt, Human
acguggauccacgggucgugcuu

SEQ ID NO: 963838 - RNA, 21 nt, Human
acuccaaauucagggucgcug

SEQ ID NO: 963839 - RNA, 24 nt, Human
acuccagcauggguaacagagcaa

SEQ ID NO: 963840 - RNA, 21 nt, Human
agcgcucagcguggggcgggg

SEQ ID NO: 963841 - RNA, 21 nt, Human
aggcaggacuggggacucuga

SEQ ID NO: 963842 - RNA, 24 nt, Human
aggcaggacuggggacucugaguu

SEQ ID NO: 963843 - RNA, 24 nt, Human
aggcugagaugggaggauugcuug

SEQ ID NO: 963844 - RNA, 24 nt, Human
caaccaggcccuuucucccgcccc

SEQ ID NO: 963845 - RNA, 21 nt, Human
cagagcaagacuaugucucuc

SEQ ID NO: 963846 - RNA, 18 nt, Human
caggguggggguggaggg

SEQ ID NO: 963847 - RNA, 24 nt, Human
ccacaggaauaaaaaacacuggga

SEQ ID NO: 963848 - RNA, 20 nt, Human
ccaccguacuccagcauggg

SEQ ID NO: 963849 - RNA, 20 nt, Human
ccaccguacuccagcauggg

SEQ ID NO: 963850 - RNA, 21 nt, Human
ccaccguacuccagcaugggu

SEQ ID NO: 963851 - RNA, 23 nt, Human
ccaggcccuuucucccgccccuc

SEQ ID NO: 963852 - RNA, 23 nt, Human
cccacaggaauaaaaaacacugg

SEQ ID NO: 963853 - RNA, 19 nt, Human
ccccgccccuucgcgcccg

SEQ ID NO: 963854 - RNA, 21 nt, Human
cccgccccuucgcgcccggga

SEQ ID NO: 963855 - RNA, 18 nt, Human
cccucaagggguugcagg

SEQ ID NO: 963856 - RNA, 20 nt, Human
ccgcgggcgggaaaaagccc

SEQ ID NO: 963857 - RNA, 20 nt, Human
ccuuuccuccccgccccuuc

SEQ ID NO: 963858 - RNA, 23 nt, Human
cgggaaaaagcccaggcgcuguc

SEQ ID NO: 963859 - RNA, 23 nt, Human
cuaaggcaggacuggggacucug

SEQ ID NO: 963860 - RNA, 19 nt, Human
cucugcggcugaaacccuc

SEQ ID NO: 963861 - RNA, 24 nt, Human
gagaugggaggauugcuugaaucc

SEQ ID NO: 963862 - RNA, 21 nt, Human
gcaggguggggguggaggggu

SEQ ID NO: 963863 - RNA, 24 nt, Human
gccaccguacuccagcauggguaa

SEQ ID NO: 963864 - RNA, 20 nt, Human
gcucagcguggggcggggcu

SEQ ID NO: 963865 - RNA, 22 nt, Human
ggaggauugcuugaauccagga

SEQ ID NO: 963866 - RNA, 22 nt, Human
ggcgacggcagcggcuccaacc

SEQ ID NO: 963867 - RNA, 25 nt, Human
gggaaaaagcccaggcgcugucucg

SEQ ID NO: 963868 - RNA, 20 nt, Human
gggcaggguggggguggagg

SEQ ID NO: 963869 - RNA, 22 nt, Human
gggcaggguggggguggagggg

SEQ ID NO: 963870 - RNA, 18 nt, Human
ggguggggguggaggggu

SEQ ID NO: 963871 - RNA, 24 nt, Human
guacuccagcauggguaacagagc

SEQ ID NO: 963872 - RNA, 18 nt, Human
gugcggcuggcgaugugg

SEQ ID NO: 963873 - RNA, 20 nt, Human
guggggguggaggggugcgg

SEQ ID NO: 963874 - RNA, 23 nt, Human
uacuccagcauggguaacagagc

SEQ ID NO: 963875 - RNA, 22 nt, Human
uagcccaaagcgauucaugcgg

SEQ ID NO: 963876 - RNA, 19 nt, Human
ucagccauccucuggucuc

SEQ ID NO: 963877 - RNA, 20 nt, Human
uccaaccugccuccguuacg

SEQ ID NO: 963878 - RNA, 20 nt, Human
uccagcauggguaacagagc

SEQ ID NO: 963879 - RNA, 21 nt, Human
ucccgccccucugcggcugaa

SEQ ID NO: 963880 - RNA, 22 nt, Human
uccgggcgguuggcccgccucg

SEQ ID NO: 963881 - RNA, 21 nt, Human
ucgcccuguaguccuuagcua

SEQ ID NO: 963882 - RNA, 19 nt, Human
ucgcucugcuuuuucauau

SEQ ID NO: 963883 - RNA, 22 nt, Human
ucucccgccccucugcggcuga

SEQ ID NO: 963884 - RNA, 22 nt, Human
ucugagugagaggucagacgcu

SEQ ID NO: 963885 - RNA, 18 nt, Human
ugagaugggaggauugcu

SEQ ID NO: 963886 - RNA, 21 nt, Human
ugcuuuuucauauucuucugg

SEQ ID NO: 963887 - RNA, 18 nt, Human
uggcaacguagcacaguc

SEQ ID NO: 963888 - RNA, 23 nt, Human
uggcgacggcagcggcuccaacc

SEQ ID NO: 963889 - RNA, 21 nt, Human
ugggcaggguggggguggagg

SEQ ID NO: 963890 - RNA, 22 nt, Human
ugggcaggguggggguggaggg

SEQ ID NO: 963891 - RNA, 19 nt, Human
ugggcgcgaaccgcugagc

SEQ ID NO: 963892 - RNA, 20 nt, Human
ugggcgcgaaccgcugagcc

SEQ ID NO: 963893 - RNA, 23 nt, Human
uggggaaacuaaggcaggacugg

SEQ ID NO: 963894 - RNA, 25 nt, Human
uggggaaacuaaggcaggacugggg

SEQ ID NO: 963895 - RNA, 21 nt, Human
uguaguccuuagcuacucagg

SEQ ID NO: 963896 - RNA, 24 nt, Human
uugcagguucagcuuucacuuaga

SEQ ID NO: 963897 - RNA, 24 nt, Human
uuuuuuuuuuuuuuuuuuacaaag

SEQ ID NO: 963898 - RNA, 20 nt, Human
acccagacucugucuccccc

SEQ ID NO: 963899 - RNA, 21 nt, Human
acuaccauccuaggcugggcc

SEQ ID NO: 963900 - RNA, 20 nt, Human
acuuccacaaacuggaaccg

SEQ ID NO: 963901 - RNA, 21 nt, Human
agacagcagcccuggaaccca

SEQ ID NO: 963902 - RNA, 23 nt, Human
agacagcagcccuggaacccaga

SEQ ID NO: 963903 - RNA, 21 nt, Human
aggccaggguugcugugauug

SEQ ID NO: 963904 - RNA, 23 nt, Human
auacaagaaccuuuuauuuucca

SEQ ID NO: 963905 - RNA, 19 nt, Human
auaguuccaggcccagagc

SEQ ID NO: 963906 - RNA, 25 nt, Human
auaguuccaggcccagagcuacagc

SEQ ID NO: 963907 - RNA, 24 nt, Human
auccaguugggcagcagggaaagg

SEQ ID NO: 963908 - RNA, 18 nt, Human
aucucgcuccuuccccug

SEQ ID NO: 963909 - RNA, 25 nt, Human
caucccuggccuuguuguggggcuc

SEQ ID NO: 963910 - RNA, 22 nt, Human
ccacgugcugggguucgcucau

SEQ ID NO: 963911 - RNA, 21 nt, Human
ccagagcuacagcugggcugg

SEQ ID NO: 963912 - RNA, 24 nt, Human
ccagagcuacagcugggcugggag

SEQ ID NO: 963913 - RNA, 18 nt, Human
cccgcccuuccuuccucc

SEQ ID NO: 963914 - RNA, 20 nt, Human
cccgcccuuccuuccuccag

SEQ ID NO: 963915 - RNA, 20 nt, Human
cccuggaacccagacucugu

SEQ ID NO: 963916 - RNA, 21 nt, Human
cuagugaggccuguccccacc

SEQ ID NO: 963917 - RNA, 19 nt, Human
cuggaacccagacucuguc

SEQ ID NO: 963918 - RNA, 22 nt, Human
gagacagcagcccuggaaccca

SEQ ID NO: 963919 - RNA, 21 nt, Human
gaggggaguguauccugcagu

SEQ ID NO: 963920 - RNA, 18 nt, Human
gauugccugggacuucca

SEQ ID NO: 963921 - RNA, 22 nt, Human
gcagcagggaaaggcuaggugg

SEQ ID NO: 963922 - RNA, 20 nt, Human
gcugaguugugaaguugcau

SEQ ID NO: 963923 - RNA, 21 nt, Human
ggcccagagcuacagcugggc

SEQ ID NO: 963924 - RNA, 18 nt, Human
gggaaaggcuaggugggc

SEQ ID NO: 963925 - RNA, 20 nt, Human
gggcagggccgaggccaggg

SEQ ID NO: 963926 - RNA, 22 nt, Human
gggcagggccgaggccaggguu

SEQ ID NO: 963927 - RNA, 19 nt, Human
gggccgaggccaggguugc

SEQ ID NO: 963928 - RNA, 21 nt, Human
guauccgaaguaguccucuuu

SEQ ID NO: 963929 - RNA, 22 nt, Human
gugcacuguaagaaggagcuga

SEQ ID NO: 963930 - RNA, 22 nt, Human
uaagaaggagcugaugauacug

SEQ ID NO: 963931 - RNA, 26 nt, Human
uacagcugggcugggagcgugugugu

SEQ ID NO: 963932 - RNA, 18 nt, Human
uacuggccacgugcuggg

SEQ ID NO: 963933 - RNA, 18 nt, Human
uagguagcaggaggggag

SEQ ID NO: 963934 - RNA, 23 nt, Human
uaggugggcccagcccgcccuuc

SEQ ID NO: 963935 - RNA, 25 nt, Human
uccacaaacuggaaccgcuuaggga

SEQ ID NO: 963936 - RNA, 19 nt, Human
uccccaccaucccuggccu

SEQ ID NO: 963937 - RNA, 22 nt, Human
uccccaccaucccuggccuugu

SEQ ID NO: 963938 - RNA, 21 nt, Human
ugcauggcagggacagggcag

SEQ ID NO: 963939 - RNA, 19 nt, Human
ugcugggguucgcucaugu

SEQ ID NO: 963940 - RNA, 21 nt, Human
uggaacccagacucugucucc

SEQ ID NO: 963941 - RNA, 20 nt, Human
uggcagggacagggcagggc

SEQ ID NO: 963942 - RNA, 20 nt, Human
ugggagcgugugugugcacu

SEQ ID NO: 963943 - RNA, 21 nt, Human
ugggcagcagggaaaggcuag

SEQ ID NO: 963944 - RNA, 23 nt, Human
uugccugggacuuccacaaacug

SEQ ID NO: 963945 - RNA, 23 nt, Human
uuggaggccucccaggggucuag

SEQ ID NO: 963946 - RNA, 24 nt, Human
uugggcagcagggaaaggcuaggu

SEQ ID NO: 963947 - RNA, 19 nt, Human
aaaacccaaaaccugcccu

SEQ ID NO: 963948 - RNA, 21 nt, Human
aaacaaguacagagacugauu

SEQ ID NO: 963949 - RNA, 23 nt, Human
aaacacaaacaacaacuuaaagc

SEQ ID NO: 963950 - RNA, 19 nt, Human
aaacuuggaaugacucaug

SEQ ID NO: 963951 - RNA, 18 nt, Human
aacaaagggaagacuaaa

SEQ ID NO: 963952 - RNA, 23 nt, Human
aaggcaccugcuaugaauuuagc

SEQ ID NO: 963953 - RNA, 19 nt, Human
aagggagugugcuuucagu

SEQ ID NO: 963954 - RNA, 18 nt, Human
acaaacaacaacuuaaag

SEQ ID NO: 963955 - RNA, 23 nt, Human
acucgccugccuccucuggagcc

SEQ ID NO: 963956 - RNA, 21 nt, Human
acuguucuccauguuugaggg

SEQ ID NO: 963957 - RNA, 24 nt, Human
agacauuuagaagcuuuuaaaacu

SEQ ID NO: 963958 - RNA, 25 nt, Human
agaugcuaaagguuguggcaaaacu

SEQ ID NO: 963959 - RNA, 23 nt, Human
agccaaauaucuauaguaaacca

SEQ ID NO: 963960 - RNA, 24 nt, Human
agccaauacuugcaguuuucaaca

SEQ ID NO: 963961 - RNA, 19 nt, Human
agcgcggagugaaagagga

SEQ ID NO: 963962 - RNA, 24 nt, Human
aggaggaagagaacuggccgccgg

SEQ ID NO: 963963 - RNA, 23 nt, Human
auaaacaaaccuucccugacuga

SEQ ID NO: 963964 - RNA, 19 nt, Human
augcuaaaaugucuuaugg

SEQ ID NO: 963965 - RNA, 21 nt, Human
augcuaaaaugucuuauggca

SEQ ID NO: 963966 - RNA, 18 nt, Human
caaaaucuagacccuguc

SEQ ID NO: 963967 - RNA, 19 nt, Human
caaagcaaacacaagcagc

SEQ ID NO: 963968 - RNA, 19 nt, Human
caagccgggcgccggccgc

SEQ ID NO: 963969 - RNA, 24 nt, Human
cacaguaacuaauuaagucagaaa

SEQ ID NO: 963970 - RNA, 20 nt, Human
caccaccugccccggccacc

SEQ ID NO: 963971 - RNA, 18 nt, Human
caguacuagaaaacccaa

SEQ ID NO: 963972 - RNA, 20 nt, Human
cccgcgccgccggagcgccg

SEQ ID NO: 963973 - RNA, 26 nt, Human
ccgccgggucguucucgcgccgccgu

SEQ ID NO: 963974 - RNA, 21 nt, Human
ccgccgucgccgccgcuuugg

SEQ ID NO: 963975 - RNA, 31 nt, Human
ccgccgucgccgccgcuuuggccgccgccgg

SEQ ID NO: 963976 - RNA, 24 nt, Human
ccgcugcgaggcucggcucguggu

SEQ ID NO: 963977 - RNA, 21 nt, Human
cgaggcucggcucguggugcc

SEQ ID NO: 963978 - RNA, 18 nt, Human
cgccgccgucgccgccgc

SEQ ID NO: 963979 - RNA, 20 nt, Human
cgcgccgccgucgccgccgc

SEQ ID NO: 963980 - RNA, 20 nt, Human
cgcgccgccgucgccgccgc

SEQ ID NO: 963981 - RNA, 19 nt, Human
cgggcgccggccgccgacu

SEQ ID NO: 963982 - RNA, 19 nt, Human
cucacccuuaccauuagua

SEQ ID NO: 963983 - RNA, 18 nt, Human
cucccuuacuguucucca

SEQ ID NO: 963984 - RNA, 18 nt, Human
cugacuucacuccaccac

SEQ ID NO: 963985 - RNA, 18 nt, Human
gaaacaaguacagagacu

SEQ ID NO: 963986 - RNA, 22 nt, Human
gaggguaucagaagcccccugu

SEQ ID NO: 963987 - RNA, 21 nt, Human
gcacaaccauaaaacagaauu

SEQ ID NO: 963988 - RNA, 22 nt, Human
gcaguuuucaacaguacuagaa

SEQ ID NO: 963989 - RNA, 18 nt, Human
gcgccaccaccugccccg

SEQ ID NO: 963990 - RNA, 19 nt, Human
ggaaacaaguacagagacu

SEQ ID NO: 963991 - RNA, 24 nt, Human
ggaaugacucaugaagaaaccuug

SEQ ID NO: 963992 - RNA, 20 nt, Human
ggcaggugcgcaggaggaag

SEQ ID NO: 963993 - RNA, 21 nt, Human
gggaaacaaguacagagacug

SEQ ID NO: 963994 - RNA, 18 nt, Human
gggaaugcaauuuuuuac

SEQ ID NO: 963995 - RNA, 20 nt, Human
uaaaaaacacaaacaacaac

SEQ ID NO: 963996 - RNA, 23 nt, Human
uaaaaaacacaaacaacaacuua

SEQ ID NO: 963997 - RNA, 26 nt, Human
uaaaacagaauuaguuaaccaagaca

SEQ ID NO: 963998 - RNA, 19 nt, Human
uaaagguuguggcaaaacu

SEQ ID NO: 963999 - RNA, 21 nt, Human
uacauagacacugcucagguu

SEQ ID NO: 964000 - RNA, 22 nt, Human
uacauuaaaaaacacaaacaac

SEQ ID NO: 964001 - RNA, 18 nt, Human
uacggccgcugggccugg

SEQ ID NO: 964002 - RNA, 19 nt, Human
uagaaaacccaaaaccugc

SEQ ID NO: 964003 - RNA, 25 nt, Human
uagaaaacccaaaaccugcccuaug

SEQ ID NO: 964004 - RNA, 23 nt, Human
uauaaaaaccacaagacuucaaa

SEQ ID NO: 964005 - RNA, 21 nt, Human
uaucagaagcccccugugagg

SEQ ID NO: 964006 - RNA, 20 nt, Human
uaugacccucacccuuacca

SEQ ID NO: 964007 - RNA, 23 nt, Human
ucaacaguacuagaaaacccaaa

SEQ ID NO: 964008 - RNA, 20 nt, Human
ucagaagcccccugugaggu

SEQ ID NO: 964009 - RNA, 18 nt, Human
ucaggccagacgcuagcu

SEQ ID NO: 964010 - RNA, 23 nt, Human
uccagaauaguuaaguuccugaa

SEQ ID NO: 964011 - RNA, 26 nt, Human
uccucuuaaaacagcuuauuuuaaaa

SEQ ID NO: 964012 - RNA, 24 nt, Human
uccugaaaguccuuaaccacucug

SEQ ID NO: 964013 - RNA, 22 nt, Human
ucuagaaaaagcauuugcaaac

SEQ ID NO: 964014 - RNA, 18 nt, Human
ucucgcgccgccgucgcc

SEQ ID NO: 964015 - RNA, 22 nt, Human
ucucgcgccgccgucgccgccg

SEQ ID NO: 964016 - RNA, 19 nt, Human
ucugcucccuuacuguucu

SEQ ID NO: 964017 - RNA, 21 nt, Human
ucuuuccaacgcauuaauaca

SEQ ID NO: 964018 - RNA, 22 nt, Human
ugaaaaaucauuaaucuagaaa

SEQ ID NO: 964019 - RNA, 25 nt, Human
ugacuaaaagcaaagaauaaggcac

SEQ ID NO: 964020 - RNA, 24 nt, Human
ugacuucacuccaccacgguagcu

SEQ ID NO: 964021 - RNA, 24 nt, Human
ugaggcaggaugcuuuacugaauu

SEQ ID NO: 964022 - RNA, 19 nt, Human
ugccccggccaccccucgg

SEQ ID NO: 964023 - RNA, 25 nt, Human
ugcucccuuacuguucuccauguuu

SEQ ID NO: 964024 - RNA, 24 nt, Human
ugcuuuacugaauuguuuucaacc

SEQ ID NO: 964025 - RNA, 21 nt, Human
ugcuuucaguucaaaagagua

SEQ ID NO: 964026 - RNA, 19 nt, Human
ugguauggacuagaaaacu

SEQ ID NO: 964027 - RNA, 23 nt, Human
ugguauggacuagaaaacuugga

SEQ ID NO: 964028 - RNA, 23 nt, Human
uuaaaagaaauauccugaggcaa

SEQ ID NO: 964029 - RNA, 18 nt, Human
uucacgcuguguauagac

SEQ ID NO: 964030 - RNA, 21 nt, Human
uucccugacugacuucacucc

SEQ ID NO: 964031 - RNA, 24 nt, Human
uuguacauuaaaaaacacaaacaa

SEQ ID NO: 964032 - RNA, 18 nt, Human
aggggagggguugaggag

SEQ ID NO: 964033 - RNA, 24 nt, Human
ccagggagggggccagggauggag

SEQ ID NO: 964034 - RNA, 22 nt, Human
ccugaagcugaggagacagggc

SEQ ID NO: 964035 - RNA, 19 nt, Human
cggaggagcaaacaggggc

SEQ ID NO: 964036 - RNA, 22 nt, Human
cggaggagcaaacaggggcuaa

SEQ ID NO: 964037 - RNA, 18 nt, Human
cgggggaggcugcuggug

SEQ ID NO: 964038 - RNA, 25 nt, Human
cucguccguauuuaagcaguggauc

SEQ ID NO: 964039 - RNA, 21 nt, Human
gagucgcccgccuacgcugcc

SEQ ID NO: 964040 - RNA, 24 nt, Human
ggccagggauggaggggagggguu

SEQ ID NO: 964041 - RNA, 23 nt, Human
gggagggguugaggagcgagagg

SEQ ID NO: 964042 - RNA, 20 nt, Human
gggccagggauggaggggag

SEQ ID NO: 964043 - RNA, 19 nt, Human
gggggccagggauggaggg

SEQ ID NO: 964044 - RNA, 24 nt, Human
guggauccagaggggcaacggggg

SEQ ID NO: 964045 - RNA, 20 nt, Human
ucagugguggugccugaagc

SEQ ID NO: 964046 - RNA, 26 nt, Human
uccagaggggcaacgggggagggaag

SEQ ID NO: 964047 - RNA, 21 nt, Human
ugaggagacagggcccugucc

SEQ ID NO: 964048 - RNA, 18 nt, Human
ugcccggacgcuuugccu

SEQ ID NO: 964049 - RNA, 24 nt, Human
ugccugaagcugaggagacagggc

SEQ ID NO: 964050 - RNA, 22 nt, Human
ugccugggcaguguacagcuuu

SEQ ID NO: 964051 - RNA, 21 nt, Human
ugguggugccugaagcugagg

SEQ ID NO: 964052 - RNA, 23 nt, Human
uuuuuuuuuuuuuuuuuuuccag

SEQ ID NO: 964053 - RNA, 25 nt, Human
aaaagucuuaagcagcaugccauuc

SEQ ID NO: 964054 - RNA, 24 nt, Human
aacaaaaggaacacucuccccugc

SEQ ID NO: 964055 - RNA, 18 nt, Human
aaccugggcaguaaggaa

SEQ ID NO: 964056 - RNA, 19 nt, Human
aagccuuucaagccucuuu

SEQ ID NO: 964057 - RNA, 20 nt, Human
accaugguccaaaaacauua

SEQ ID NO: 964058 - RNA, 22 nt, Human
acgcaccuuccuagacagaacc

SEQ ID NO: 964059 - RNA, 20 nt, Human
agcauggugaggacgcaccu

SEQ ID NO: 964060 - RNA, 23 nt, Human
agcauggugaggacgcaccuucc

SEQ ID NO: 964061 - RNA, 21 nt, Human
aucccugccuccccucagccc

SEQ ID NO: 964062 - RNA, 22 nt, Human
caagccucuuucccuuggccuc

SEQ ID NO: 964063 - RNA, 23 nt, Human
caagccucuuucccuuggccucc

SEQ ID NO: 964064 - RNA, 21 nt, Human
cagcacacaucccugccuccc

SEQ ID NO: 964065 - RNA, 23 nt, Human
cagcacacaucccugccuccccu

SEQ ID NO: 964066 - RNA, 18 nt, Human
cagcccugggaaggggag

SEQ ID NO: 964067 - RNA, 20 nt, Human
cagcucaccugccacuucuc

SEQ ID NO: 964068 - RNA, 23 nt, Human
cccaaugucuccacacugucuau

SEQ ID NO: 964069 - RNA, 20 nt, Human
ccggcagugagugguggugg

SEQ ID NO: 964070 - RNA, 23 nt, Human
ccuggacuaggacaccauccagc

SEQ ID NO: 964071 - RNA, 23 nt, Human
cgcgaagugcuuaugcguguccu

SEQ ID NO: 964072 - RNA, 22 nt, Human
cucaucuacccaacccuuugga

SEQ ID NO: 964073 - RNA, 22 nt, Human
cuccacacugucuaugcuccuc

SEQ ID NO: 964074 - RNA, 20 nt, Human
cuccccucagcccugggaag

SEQ ID NO: 964075 - RNA, 21 nt, Human
cuccuggacuaggacaccauc

SEQ ID NO: 964076 - RNA, 23 nt, Human
gaacacccuaaacuaguuaagaa

SEQ ID NO: 964077 - RNA, 21 nt, Human
gcucaccugccacuucucagc

SEQ ID NO: 964078 - RNA, 26 nt, Human
guagcccaguaauuccugggugcucc

SEQ ID NO: 964079 - RNA, 24 nt, Human
uaaacuaguuaagaacaaaaggaa

SEQ ID NO: 964080 - RNA, 22 nt, Human
uaaggaaucaccagcucaccug

SEQ ID NO: 964081 - RNA, 19 nt, Human
uagacagaaccugggcagu

SEQ ID NO: 964082 - RNA, 18 nt, Human
uagcccaguaauuccugg

SEQ ID NO: 964083 - RNA, 25 nt, Human
uaguagccuucucuauaaucaguuu

SEQ ID NO: 964084 - RNA, 27 nt, Human
uccaaaaacauuaaaugaaaaauucca

SEQ ID NO: 964085 - RNA, 23 nt, Human
uccaugguuuugcuuucugcagu

SEQ ID NO: 964086 - RNA, 21 nt, Human
ucccccucagauaagugggga

SEQ ID NO: 964087 - RNA, 20 nt, Human
ucccugccuccccucagccc

SEQ ID NO: 964088 - RNA, 19 nt, Human
ucucagcccugggacagca

SEQ ID NO: 964089 - RNA, 22 nt, Human
ucugcagucucaguuaaccaug

SEQ ID NO: 964090 - RNA, 24 nt, Human
ugccuaauuuauaaauuaaacuuu

SEQ ID NO: 964091 - RNA, 21 nt, Human
uggagucuaggccaggagcuc

SEQ ID NO: 964092 - RNA, 22 nt, Human
ugggugcuccuggacauauauc

SEQ ID NO: 964093 - RNA, 20 nt, Human
uuaguagccuucucuauaau

SEQ ID NO: 964094 - RNA, 18 nt, Human
uucaagccucuuucccuu

SEQ ID NO: 964095 - RNA, 23 nt, Human
uuccugcagaggagccccuugug

SEQ ID NO: 964096 - RNA, 23 nt, Human
uugcauuguccugcucuguccca

SEQ ID NO: 964097 - RNA, 19 nt, Human
acagugcugaggcucuggg

SEQ ID NO: 964098 - RNA, 24 nt, Human
agaugccuaaaguuagacacaacu

SEQ ID NO: 964099 - RNA, 23 nt, Human
cagacagugcugaggcucugggu

SEQ ID NO: 964100 - RNA, 21 nt, Human
ccaaagucagacagugcugag

SEQ ID NO: 964101 - RNA, 18 nt, Human
cucccgcucuccaaaaca

SEQ ID NO: 964102 - RNA, 21 nt, Human
ggaaaccucccgcucuccaaa

SEQ ID NO: 964103 - RNA, 22 nt, Human
uaaaagaugccuaaaguuagac

SEQ ID NO: 964104 - RNA, 25 nt, Human
uaaaagaugccuaaaguuagacaca

SEQ ID NO: 964105 - RNA, 23 nt, Human
uccaaaacauuucugugggaucc

SEQ ID NO: 964106 - RNA, 19 nt, Human
ucccaaagucagacagugc

SEQ ID NO: 964107 - RNA, 19 nt, Human
ucccaaagucagacagugc

SEQ ID NO: 964108 - RNA, 22 nt, Human
ucugugggaucccugguuccca

SEQ ID NO: 964109 - RNA, 19 nt, Human
ugaggcuguuucugcuggc

SEQ ID NO: 964110 - RNA, 18 nt, Human
ugcugaggcucugggugg

SEQ ID NO: 964111 - RNA, 21 nt, Human
uggaggagauugggggaaacc

SEQ ID NO: 964112 - RNA, 22 nt, Human
uggaggagauugggggaaaccu

SEQ ID NO: 964113 - RNA, 19 nt, Human
uggagggagaagaacuugg

SEQ ID NO: 964114 - RNA, 22 nt, Human
uggagggagaagaacuuggagg

SEQ ID NO: 964115 - RNA, 24 nt, Human
aaacacucccugagccagagacac

SEQ ID NO: 964116 - RNA, 25 nt, Human
aacccagucaaauuuauuagagcaa

SEQ ID NO: 964117 - RNA, 30 nt, Human
agagaaauauacaaacauagagccuuccuu

SEQ ID NO: 964118 - RNA, 18 nt, Human
agcagggguuucucuccc

SEQ ID NO: 964119 - RNA, 22 nt, Human
caaacauagagccuuccuaugc

SEQ ID NO: 964120 - RNA, 21 nt, Human
cagccaacaaaguucagccag

SEQ ID NO: 964121 - RNA, 18 nt, Human
cagggguuucucucccuu

SEQ ID NO: 964122 - RNA, 18 nt, Human
caucaggggcugagcagg

SEQ ID NO: 964123 - RNA, 22 nt, Human
caucaggggcugagcagggguu

SEQ ID NO: 964124 - RNA, 20 nt, Human
cauucugaaugcucugccau

SEQ ID NO: 964125 - RNA, 21 nt, Human
ccaagcucacaucaaucacac

SEQ ID NO: 964126 - RNA, 19 nt, Human
cuuccacagccaacaaagu

SEQ ID NO: 964127 - RNA, 23 nt, Human
gaugcaucuaauauggacaggga

SEQ ID NO: 964128 - RNA, 23 nt, Human
gcaauuagccaauggccuuuuuc

SEQ ID NO: 964129 - RNA, 23 nt, Human
gccagagacacauaauaaccacc

SEQ ID NO: 964130 - RNA, 24 nt, Human
uaagagaugaagugagacaaccac

SEQ ID NO: 964131 - RNA, 19 nt, Human
ucccuugaaaacaggagau

SEQ ID NO: 964132 - RNA, 21 nt, Human
ucccuugaaaacaggagaugc

SEQ ID NO: 964133 - RNA, 23 nt, Human
ucugacaaagagaaauauacaaa

SEQ ID NO: 964134 - RNA, 21 nt, Human
ugaagugagacaaccacugag

SEQ ID NO: 964135 - RNA, 22 nt, Human
ugaaugcucugccauaggauug

SEQ ID NO: 964136 - RNA, 21 nt, Human
ugagacaaccacugagggagc

SEQ ID NO: 964137 - RNA, 24 nt, Human
uggaaggaaguuaaucuauaagag

SEQ ID NO: 964138 - RNA, 24 nt, Human
uucagccaggguucaaucuucauc

SEQ ID NO: 964139 - RNA, 19 nt, Human
agguaauaaagcacuaagc

SEQ ID NO: 964140 - RNA, 24 nt, Human
uaaagcacuaagcuugauuuuugu

SEQ ID NO: 964141 - RNA, 25 nt, Human
uggcucuauuaaaaacucagguaau

SEQ ID NO: 964142 - RNA, 18 nt, Human
uuuuuuuuuuuuuuucug

SEQ ID NO: 964143 - RNA, 22 nt, Human
uuuuuuuuuuuuuuuuuuuucu

SEQ ID NO: 964144 - RNA, 19 nt, Human
acauauugucuuaucaaag

SEQ ID NO: 964145 - RNA, 23 nt, Human
cacuaccuaaugaaccaaaguca

SEQ ID NO: 964146 - RNA, 18 nt, Human
cagcauuucuagacaaaa

SEQ ID NO: 964147 - RNA, 23 nt, Human
cagugucaucugcugaccaaugu

SEQ ID NO: 964148 - RNA, 18 nt, Human
cucuaaaaucuucauagg

SEQ ID NO: 964149 - RNA, 21 nt, Human
gaagaaagacaaugaaauuag

SEQ ID NO: 964150 - RNA, 20 nt, Human
gacuguugagcccuagguau

SEQ ID NO: 964151 - RNA, 24 nt, Human
gcagcgcuagcaucugauacccag

SEQ ID NO: 964152 - RNA, 26 nt, Human
gcagugaugggaaucugguuuccuuu

SEQ ID NO: 964153 - RNA, 22 nt, Human
gccuguuuuaccacuaccuaau

SEQ ID NO: 964154 - RNA, 20 nt, Human
ggagaaugauagaaaugagc

SEQ ID NO: 964155 - RNA, 18 nt, Human
gggacugcuauaacagaa

SEQ ID NO: 964156 - RNA, 21 nt, Human
ggugagacacauggugguaga

SEQ ID NO: 964157 - RNA, 26 nt, Human
ggugaugaaggagagcuucgaaggga

SEQ ID NO: 964158 - RNA, 18 nt, Human
guuuccacacuucucaag

SEQ ID NO: 964159 - RNA, 19 nt, Human
uaaacuacacagcauauga

SEQ ID NO: 964160 - RNA, 22 nt, Human
uaaacucaaaggaaacaccaca

SEQ ID NO: 964161 - RNA, 20 nt, Human
uacaaugaagcuagaauauc

SEQ ID NO: 964162 - RNA, 20 nt, Human
uagaaugcuaagagcaggga

SEQ ID NO: 964163 - RNA, 23 nt, Human
uaggaagggucaagucaccagug

SEQ ID NO: 964164 - RNA, 27 nt, Human
uaucaaagaaaggccaaaauuugucaa

SEQ ID NO: 964165 - RNA, 23 nt, Human
ucacucacaaagaaaauguuucc

SEQ ID NO: 964166 - RNA, 18 nt, Human
uccagacgggucaugggg

SEQ ID NO: 964167 - RNA, 19 nt, Human
ucucaagacuguugagccc

SEQ ID NO: 964168 - RNA, 22 nt, Human
ugagcccuagguauuuuccccc

SEQ ID NO: 964169 - RNA, 24 nt, Human
ugggggagaaugauagaaaugagc

SEQ ID NO: 964170 - RNA, 18 nt, Human
ugggugagacacauggug

SEQ ID NO: 964171 - RNA, 20 nt, Human
uuacagguauguuguauuuc

SEQ ID NO: 964172 - RNA, 24 nt, Human
aaacuucuggucaccaggcagcuc

SEQ ID NO: 964173 - RNA, 20 nt, Human
acaccugaggcaggaggugg

SEQ ID NO: 964174 - RNA, 27 nt, Human
agggcugcaacugagagcugaggcugg

SEQ ID NO: 964175 - RNA, 18 nt, Human
aggggcaaguccaggcag

SEQ ID NO: 964176 - RNA, 24 nt, Human
aggggcaaguccaggcaggcagca

SEQ ID NO: 964177 - RNA, 21 nt, Human
cauggcagggccauggagaag

SEQ ID NO: 964178 - RNA, 21 nt, Human
ccaaacuucuggucaccaggc

SEQ ID NO: 964179 - RNA, 23 nt, Human
cugaggcaggagguggcaggggc

SEQ ID NO: 964180 - RNA, 23 nt, Human
gagcauggcagggccauggagaa

SEQ ID NO: 964181 - RNA, 19 nt, Human
gcugcaacugagagcugag

SEQ ID NO: 964182 - RNA, 21 nt, Human
ggagaagggcuaauagaagca

SEQ ID NO: 964183 - RNA, 22 nt, Human
ugagagcugaggcuggagaggu

SEQ ID NO: 964184 - RNA, 18 nt, Human
ugaggcaggagguggcag

SEQ ID NO: 964185 - RNA, 20 nt, Human
ugaggcaggagguggcaggg

SEQ ID NO: 964186 - RNA, 19 nt, Human
ugcccagacccucaggagc

SEQ ID NO: 964187 - RNA, 18 nt, Human
uggcagggccauggagaa

SEQ ID NO: 964188 - RNA, 20 nt, Human
uuggagagcauggcagggcc

SEQ ID NO: 964189 - RNA, 26 nt, Human
uuggagagcauggcagggccauggag

SEQ ID NO: 964190 - RNA, 23 nt, Human
aaaaaaacguacaaacaaguccc

SEQ ID NO: 964191 - RNA, 26 nt, Human
aaaaaaggaagaaacaaaacaaaaag

SEQ ID NO: 964192 - RNA, 20 nt, Human
aacaaaaaguucauccccac

SEQ ID NO: 964193 - RNA, 21 nt, Human
aacuaaaaaaggaagaaacaa

SEQ ID NO: 964194 - RNA, 19 nt, Human
aagccccuccugggagcuc

SEQ ID NO: 964195 - RNA, 22 nt, Human
acaaaacaaaaaguucaucccc

SEQ ID NO: 964196 - RNA, 20 nt, Human
accagggucuucccagaagc

SEQ ID NO: 964197 - RNA, 22 nt, Human
accucaccucccccccaacccc

SEQ ID NO: 964198 - RNA, 24 nt, Human
accucaccucccccccaaccccaa

SEQ ID NO: 964199 - RNA, 24 nt, Human
accucccccccaaccccaauagca

SEQ ID NO: 964200 - RNA, 18 nt, Human
acuuucagggcaggcaga

SEQ ID NO: 964201 - RNA, 24 nt, Human
agagcuggggaggcagcugaggug

SEQ ID NO: 964202 - RNA, 18 nt, Human
aggaagaaacaaaacaaa

SEQ ID NO: 964203 - RNA, 21 nt, Human
aggcagaaugacuauggccca

SEQ ID NO: 964204 - RNA, 19 nt, Human
aggcaggcuugaucuggga

SEQ ID NO: 964205 - RNA, 22 nt, Human
agugagaaaaaaaaacguacaa

SEQ ID NO: 964206 - RNA, 22 nt, Human
augguaucuggggcccaugucc

SEQ ID NO: 964207 - RNA, 22 nt, Human
caacaaaggcucauugcccccc

SEQ ID NO: 964208 - RNA, 23 nt, Human
caaggcugguaccucaccucccc

SEQ ID NO: 964209 - RNA, 20 nt, Human
caaucgccucacugcggcca

SEQ ID NO: 964210 - RNA, 21 nt, Human
caaucgccucacugcggccag

SEQ ID NO: 964211 - RNA, 23 nt, Human
cagaagccccuccugggagcucc

SEQ ID NO: 964212 - RNA, 22 nt, Human
cauugccccccuggccccccau

SEQ ID NO: 964213 - RNA, 25 nt, Human
ccagggucuucccagaagccccucc

SEQ ID NO: 964214 - RNA, 22 nt, Human
cccaggcugcagcaccuaguuu

SEQ ID NO: 964215 - RNA, 18 nt, Human
cccccaaccccaauagca

SEQ ID NO: 964216 - RNA, 19 nt, Human
cccccaaccccaauagcac

SEQ ID NO: 964217 - RNA, 21 nt, Human
cccccaaccccaauagcaccc

SEQ ID NO: 964218 - RNA, 23 nt, Human
ccccccaaccccaauagcaccca

SEQ ID NO: 964219 - RNA, 22 nt, Human
cccccccaaccccaauagcacc

SEQ ID NO: 964220 - RNA, 23 nt, Human
cccccccaaccccaauagcaccc

SEQ ID NO: 964221 - RNA, 22 nt, Human
ccucccccccaaccccaauagc

SEQ ID NO: 964222 - RNA, 21 nt, Human
ccuugaagaacuaaaaaagga

SEQ ID NO: 964223 - RNA, 21 nt, Human
cgagcucaauuuggucucaca

SEQ ID NO: 964224 - RNA, 22 nt, Human
cucaggagccuuuggaugccuc

SEQ ID NO: 964225 - RNA, 22 nt, Human
cugguaccucaccuccccccca

SEQ ID NO: 964226 - RNA, 24 nt, Human
cuucccagaagccccuccugggag

SEQ ID NO: 964227 - RNA, 19 nt, Human
gaagccccuccugggagcu

SEQ ID NO: 964228 - RNA, 19 nt, Human
gagcucaauuuggucucac

SEQ ID NO: 964229 - RNA, 18 nt, Human
gcagaaugacuauggccc

SEQ ID NO: 964230 - RNA, 18 nt, Human
gccuggucccaggcugca

SEQ ID NO: 964231 - RNA, 19 nt, Human
ggagagguugggauagagc

SEQ ID NO: 964232 - RNA, 21 nt, Human
ggagcuccuucucaaucgccu

SEQ ID NO: 964233 - RNA, 21 nt, Human
ggaggcagcugagguguuuua

SEQ ID NO: 964234 - RNA, 21 nt, Human
ggggcccauguccaaguggag

SEQ ID NO: 964235 - RNA, 24 nt, Human
ggucccacaggauguggaguuucc

SEQ ID NO: 964236 - RNA, 18 nt, Human
gguugggauagagcuggg

SEQ ID NO: 964237 - RNA, 23 nt, Human
gucucaggagccuuuggaugccu

SEQ ID NO: 964238 - RNA, 24 nt, Human
uaaaaaaggaagaaacaaaacaaa

SEQ ID NO: 964239 - RNA, 19 nt, Human
uaccucaccucccccccaa

SEQ ID NO: 964240 - RNA, 22 nt, Human
uaccucaccucccccccaaccc

SEQ ID NO: 964241 - RNA, 23 nt, Human
uagagcuggggaggcagcugagg

SEQ ID NO: 964242 - RNA, 23 nt, Human
ucaaucgccucacugcggccagg

SEQ ID NO: 964243 - RNA, 23 nt, Human
ucaggagccuuuggaugccuccu

SEQ ID NO: 964244 - RNA, 23 nt, Human
ucccacaggauguggaguuuccg

SEQ ID NO: 964245 - RNA, 23 nt, Human
ugaccagggucuucccagaagcc

SEQ ID NO: 964246 - RNA, 21 nt, Human
ugagaaaaaaaaacguacaaa

SEQ ID NO: 964247 - RNA, 25 nt, Human
ugagaaaaaaaaacguacaaacaag

SEQ ID NO: 964248 - RNA, 22 nt, Human
ugaggcaggcuugaucugggac

SEQ ID NO: 964249 - RNA, 19 nt, Human
ugccauccugugugcaccc

SEQ ID NO: 964250 - RNA, 26 nt, Human
ugcggccaggucauucugggggugcc

SEQ ID NO: 964251 - RNA, 18 nt, Human
ugggagagguugggauag

SEQ ID NO: 964252 - RNA, 21 nt, Human
ugggauagagcuggggaggca

SEQ ID NO: 964253 - RNA, 22 nt, Human
ugggauagagcuggggaggcag

SEQ ID NO: 964254 - RNA, 25 nt, Human
ugggauagagcuggggaggcagcug

SEQ ID NO: 964255 - RNA, 18 nt, Human
uucagugagaaaaaaaaa

SEQ ID NO: 964256 - RNA, 24 nt, Human
uucccagaagccccuccugggagc

SEQ ID NO: 964257 - RNA, 24 nt, Human
ucucccaaacugacuucugauuau

SEQ ID NO: 964258 - RNA, 22 nt, Human
uuuuuuuuuuuuuuuuauuuuu

SEQ ID NO: 964259 - RNA, 19 nt, Human
aaagaggauuuauaaucua

SEQ ID NO: 964260 - RNA, 21 nt, Human
aaaggaccaaaauaaagagga

SEQ ID NO: 964261 - RNA, 22 nt, Human
aaccucagcgaacguuuauuuc

SEQ ID NO: 964262 - RNA, 21 nt, Human
aagagaagucguaauucacag

SEQ ID NO: 964263 - RNA, 26 nt, Human
aagccgggacugggcgccgccgggga

SEQ ID NO: 964264 - RNA, 21 nt, Human
aagcugccuggagugucaguc

SEQ ID NO: 964265 - RNA, 20 nt, Human
aagggcaaaggaagucaaaa

SEQ ID NO: 964266 - RNA, 22 nt, Human
aagggucuggggcugucuccag

SEQ ID NO: 964267 - RNA, 18 nt, Human
acacaagcccacugcagc

SEQ ID NO: 964268 - RNA, 28 nt, Human
acacuggauaccacucccuacccaccca

SEQ ID NO: 964269 - RNA, 27 nt, Human
accaaaauaaagaggauuuauaaucua

SEQ ID NO: 964270 - RNA, 20 nt, Human
acccuggugccucccgcccc

SEQ ID NO: 964271 - RNA, 21 nt, Human
accuaagccaucuagaaaggc

SEQ ID NO: 964272 - RNA, 23 nt, Human
accuaagccaucuagaaaggcuc

SEQ ID NO: 964273 - RNA, 21 nt, Human
accuggccauggcccaggggc

SEQ ID NO: 964274 - RNA, 21 nt, Human
acucccuccucuucagaaggc

SEQ ID NO: 964275 - RNA, 20 nt, Human
acugcagcguggggagggug

SEQ ID NO: 964276 - RNA, 18 nt, Human
acugggcgccgccgggga

SEQ ID NO: 964277 - RNA, 19 nt, Human
agaacccagauccccaugc

SEQ ID NO: 964278 - RNA, 20 nt, Human
agacacuggcugcagaaaug

SEQ ID NO: 964279 - RNA, 21 nt, Human
agacacuggcugcagaaaugg

SEQ ID NO: 964280 - RNA, 21 nt, Human
agcauggagaaaagggaaaaa

SEQ ID NO: 964281 - RNA, 22 nt, Human
aggaaaagggaggguguggcuu

SEQ ID NO: 964282 - RNA, 20 nt, Human
aggagaguggggugcuggcc

SEQ ID NO: 964283 - RNA, 22 nt, Human
aggagcagggcugagaucccag

SEQ ID NO: 964284 - RNA, 25 nt, Human
aggaggaaggguguggucccuuagg

SEQ ID NO: 964285 - RNA, 20 nt, Human
aggcaggugcagcucuggga

SEQ ID NO: 964286 - RNA, 19 nt, Human
aggccggaagggggugccg

SEQ ID NO: 964287 - RNA, 24 nt, Human
aggcuccucuccugccccgcccag

SEQ ID NO: 964288 - RNA, 22 nt, Human
agggccacuggaggcaggagag

SEQ ID NO: 964289 - RNA, 20 nt, Human
agucauuugcuacagaaagu

SEQ ID NO: 964290 - RNA, 23 nt, Human
auaaaggaccaaaauaaagagga

SEQ ID NO: 964291 - RNA, 20 nt, Human
augacaggggagagaaggca

SEQ ID NO: 964292 - RNA, 21 nt, Human
augggggugggaguccucaga

SEQ ID NO: 964293 - RNA, 24 nt, Human
auuccagugaggaaaagggagggu

SEQ ID NO: 964294 - RNA, 22 nt, Human
caaagauuucugcacuugaaca

SEQ ID NO: 964295 - RNA, 23 nt, Human
caacagaacaggcuuuuagggaa

SEQ ID NO: 964296 - RNA, 23 nt, Human
caagcauaaaggaccaaaauaaa

SEQ ID NO: 964297 - RNA, 23 nt, Human
cacacaagcccacugcagcgugg

SEQ ID NO: 964298 - RNA, 23 nt, Human
cacagaccagcugugacccugac

SEQ ID NO: 964299 - RNA, 21 nt, Human
caccauuaagcauggagaaaa

SEQ ID NO: 964300 - RNA, 24 nt, Human
caccauuaagcauggagaaaaggg

SEQ ID NO: 964301 - RNA, 21 nt, Human
caccuggccauggcccagggg

SEQ ID NO: 964302 - RNA, 21 nt, Human
cacugcagcguggggagggug

SEQ ID NO: 964303 - RNA, 21 nt, Human
caggcuccucuccugcccccu

SEQ ID NO: 964304 - RNA, 22 nt, Human
caggggcagcuucagacauugu

SEQ ID NO: 964305 - RNA, 27 nt, Human
caggggcaggguccaaacaagaaccuu

SEQ ID NO: 964306 - RNA, 19 nt, Human
cagugcccuccaaacuggu

SEQ ID NO: 964307 - RNA, 22 nt, Human
caucacaugcccucuagaaccc

SEQ ID NO: 964308 - RNA, 19 nt, Human
caugccggggccucuucuc

SEQ ID NO: 964309 - RNA, 19 nt, Human
cauuccagugaggaaaagg

SEQ ID NO: 964310 - RNA, 20 nt, Human
ccaagugcucuuccagcucc

SEQ ID NO: 964311 - RNA, 25 nt, Human
ccccaugccggggccucuucucucc

SEQ ID NO: 964312 - RNA, 21 nt, Human
cccccgggggccagccaggga

SEQ ID NO: 964313 - RNA, 19 nt, Human
ccccgcccagcagcagcag

SEQ ID NO: 964314 - RNA, 18 nt, Human
ccccgggggccagccagg

SEQ ID NO: 964315 - RNA, 27 nt, Human
cccuacccacccagugaacauuuacag

SEQ ID NO: 964316 - RNA, 23 nt, Human
cccuccaaacuggucagagagga

SEQ ID NO: 964317 - RNA, 22 nt, Human
cccucuagaacccagaucccca

SEQ ID NO: 964318 - RNA, 23 nt, Human
cccucuccuccuccucucacaca

SEQ ID NO: 964319 - RNA, 19 nt, Human
cccuggugccucccgcccc

SEQ ID NO: 964320 - RNA, 24 nt, Human
cccuggugccucccgccccuccug

SEQ ID NO: 964321 - RNA, 19 nt, Human
ccucccgccccuccugcug

SEQ ID NO: 964322 - RNA, 23 nt, Human
ccuccugcugagccauggugccc

SEQ ID NO: 964323 - RNA, 20 nt, Human
ccugccccgcccagcagcag

SEQ ID NO: 964324 - RNA, 23 nt, Human
ccugccccgcccagcagcagcac

SEQ ID NO: 964325 - RNA, 20 nt, Human
ccuggugccucccgccccuc

SEQ ID NO: 964326 - RNA, 18 nt, Human
cuagaacccagaucccca

SEQ ID NO: 964327 - RNA, 21 nt, Human
cuagaacccagauccccaugc

SEQ ID NO: 964328 - RNA, 23 nt, Human
cucaaacucucuagagauaaucu

SEQ ID NO: 964329 - RNA, 18 nt, Human
cucagcgaacguuuauuu

SEQ ID NO: 964330 - RNA, 22 nt, Human
cuccaagugcucuuccagcucc

SEQ ID NO: 964331 - RNA, 20 nt, Human
cuccugccccgcccagcagc

SEQ ID NO: 964332 - RNA, 20 nt, Human
cucucggggcuccagaacgc

SEQ ID NO: 964333 - RNA, 22 nt, Human
cucucggggcuccagaacgcuc

SEQ ID NO: 964334 - RNA, 24 nt, Human
gagacacuggcugcagaaaugggg

SEQ ID NO: 964335 - RNA, 19 nt, Human
gagagaaggcaaagcugcc

SEQ ID NO: 964336 - RNA, 21 nt, Human
gcagguuggccugagaauccc

SEQ ID NO: 964337 - RNA, 22 nt, Human
gcccacugcagcguggggaggg

SEQ ID NO: 964338 - RNA, 22 nt, Human
gcucgccgacgacccgugcacc

SEQ ID NO: 964339 - RNA, 23 nt, Human
ggaaaugacaggggagagaaggc

SEQ ID NO: 964340 - RNA, 25 nt, Human
ggaagcaacccacuuaagccccagc

SEQ ID NO: 964341 - RNA, 22 nt, Human
ggaaggaggaaggguguggucc

SEQ ID NO: 964342 - RNA, 30 nt, Human
ggagaacagaauucucccucuccuccuccc

SEQ ID NO: 964343 - RNA, 22 nt, Human
ggaggcaggagaguggggugcu

SEQ ID NO: 964344 - RNA, 22 nt, Human
ggcaaaggaagucaaaaaacug

SEQ ID NO: 964345 - RNA, 19 nt, Human
ggcaggggaaggaggaagg

SEQ ID NO: 964346 - RNA, 20 nt, Human
gggccacuggaggcaggaga

SEQ ID NO: 964347 - RNA, 28 nt, Human
ggggacagaugagauacugggauggggg

SEQ ID NO: 964348 - RNA, 20 nt, Human
gggggugggaguccucagaa

SEQ ID NO: 964349 - RNA, 20 nt, Human
gggugcuggccucugcgagg

SEQ ID NO: 964350 - RNA, 21 nt, Human
gugaccagcaaaggcucaaac

SEQ ID NO: 964351 - RNA, 18 nt, Human
uacagucaucacaugccc

SEQ ID NO: 964352 - RNA, 21 nt, Human
uaggaucuccaagugcucuuc

SEQ ID NO: 964353 - RNA, 19 nt, Human
ucacacacaagcccacugc

SEQ ID NO: 964354 - RNA, 23 nt, Human
ucacaugcccucuagaacccaga

SEQ ID NO: 964355 - RNA, 19 nt, Human
uccagguuggaaccucaag

SEQ ID NO: 964356 - RNA, 20 nt, Human
ucccugaucuugcaagaaaa

SEQ ID NO: 964357 - RNA, 19 nt, Human
uccgagcuuggcccggcuu

SEQ ID NO: 964358 - RNA, 22 nt, Human
ucgcggcucgccgacgacccgu

SEQ ID NO: 964359 - RNA, 26 nt, Human
ucuagaaccccggggcgucucucggg

SEQ ID NO: 964360 - RNA, 20 nt, Human
ucucagucugcagcuguggc

SEQ ID NO: 964361 - RNA, 23 nt, Human
ucuccaagugcucuuccagcucu

SEQ ID NO: 964362 - RNA, 23 nt, Human
ucugcggcagggccacuggaggc

SEQ ID NO: 964363 - RNA, 24 nt, Human
ucuggaaaugacaggggagagaag

SEQ ID NO: 964364 - RNA, 19 nt, Human
ugaaacaaaaccucagcga

SEQ ID NO: 964365 - RNA, 21 nt, Human
ugaaacaaaaccucagcgaac

SEQ ID NO: 964366 - RNA, 19 nt, Human
ugcacaucacacacaagcc

SEQ ID NO: 964367 - RNA, 24 nt, Human
ugccuggaaucgguccuuggcugc

SEQ ID NO: 964368 - RNA, 25 nt, Human
ugccuggagugucagucccggaggc

SEQ ID NO: 964369 - RNA, 24 nt, Human
uggaaccucaagcauaaaggacca

SEQ ID NO: 964370 - RNA, 23 nt, Human
uggaagcaacccacuuaagcccc

SEQ ID NO: 964371 - RNA, 23 nt, Human
uggagaaaagggaaaaagggcaa

SEQ ID NO: 964372 - RNA, 19 nt, Human
uggcaaguaggagguaaug

SEQ ID NO: 964373 - RNA, 21 nt, Human
uggccaggcuccucuccugcc

SEQ ID NO: 964374 - RNA, 21 nt, Human
uggccugagaaucccaggggc

SEQ ID NO: 964375 - RNA, 18 nt, Human
ugggagacaucugcggca

SEQ ID NO: 964376 - RNA, 20 nt, Human
ugggaugggggugggagucc

SEQ ID NO: 964377 - RNA, 20 nt, Human
ugggcaugggacacaaaagg

SEQ ID NO: 964378 - RNA, 18 nt, Human
ugggcgccgccggggagc

SEQ ID NO: 964379 - RNA, 24 nt, Human
ugggcgccgccggggagcuucuag

SEQ ID NO: 964380 - RNA, 19 nt, Human
uggucccuuaggaucucca

SEQ ID NO: 964381 - RNA, 22 nt, Human
uguggcagucagagguuuggca

SEQ ID NO: 964382 - RNA, 19 nt, Human
uguggggagcugaaccggg

SEQ ID NO: 964383 - RNA, 22 nt, Human
uuaggaucuccaagugcucuuc

SEQ ID NO: 964384 - RNA, 23 nt, Human
uucacagucauuugcuacagaaa

SEQ ID NO: 964385 - RNA, 20 nt, Human
uugaacacuggauaccacuc

SEQ ID NO: 964386 - RNA, 18 nt, Human
uugcuguuggcagguugg

SEQ ID NO: 964387 - RNA, 23 nt, Human
uuggcccggcuucuuuccugugc

SEQ ID NO: 964388 - RNA, 21 nt, Human
uuguggggagcugaaccgggc

SEQ ID NO: 964389 - RNA, 21 nt, Human
aaaaacaucugaaguaauccg

SEQ ID NO: 964390 - RNA, 21 nt, Human
aaguguguaaaaaaaaauuca

SEQ ID NO: 964391 - RNA, 21 nt, Human
aggaaggcgcaggcggcgcgu

SEQ ID NO: 964392 - RNA, 20 nt, Human
aggcagggcccggcacccgc

SEQ ID NO: 964393 - RNA, 21 nt, Human
agggaaaguggggcggggagg

SEQ ID NO: 964394 - RNA, 19 nt, Human
agggaggaaggcgcaggcg

SEQ ID NO: 964395 - RNA, 21 nt, Human
agggaggaaggcgcaggcggc

SEQ ID NO: 964396 - RNA, 19 nt, Human
aguacaaaaacaacuagaa

SEQ ID NO: 964397 - RNA, 19 nt, Human
caaggcagggcccggcacc

SEQ ID NO: 964398 - RNA, 19 nt, Human
caccgcggcagccccgggc

SEQ ID NO: 964399 - RNA, 19 nt, Human
cagggaggaaggcgcaggc

SEQ ID NO: 964400 - RNA, 19 nt, Human
ccagcccgcccgcuccacc

SEQ ID NO: 964401 - RNA, 22 nt, Human
ccgcccggggcgaggcacgcag

SEQ ID NO: 964402 - RNA, 22 nt, Human
ccgcgcaccgcggcagccccgg

SEQ ID NO: 964403 - RNA, 18 nt, Human
ccuuugaagaagggaaag

SEQ ID NO: 964404 - RNA, 22 nt, Human
ccuuugaagaagggaaaguggg

SEQ ID NO: 964405 - RNA, 18 nt, Human
cggggagggcgcggggcc

SEQ ID NO: 964406 - RNA, 23 nt, Human
gaagaagggaaaguggggcgggg

SEQ ID NO: 964407 - RNA, 23 nt, Human
gaagggaaaguggggcggggagg

SEQ ID NO: 964408 - RNA, 20 nt, Human
ggcggggagggcgcggggcc

SEQ ID NO: 964409 - RNA, 18 nt, Human
gggcgcggggcccaccgg

SEQ ID NO: 964410 - RNA, 20 nt, Human
gggcggggagggcgcggggc

SEQ ID NO: 964411 - RNA, 22 nt, Human
ggggcggggagggcgcggggcc

SEQ ID NO: 964412 - RNA, 22 nt, Human
uaaguguguaaaaaaaaauuca

SEQ ID NO: 964413 - RNA, 24 nt, Human
ucccuuugagggcacuuuguccuu

SEQ ID NO: 964414 - RNA, 24 nt, Human
uguaacagauauuuaaauacuaca

SEQ ID NO: 964415 - RNA, 18 nt, Human
aaccauuuuauucugccu

SEQ ID NO: 964416 - RNA, 22 nt, Human
aaggugucucccugcuuugcuu

SEQ ID NO: 964417 - RNA, 20 nt, Human
aauuugcagcuuuucucccc

SEQ ID NO: 964418 - RNA, 26 nt, Human
acaaugcuaaaaaucaguguaugugc

SEQ ID NO: 964419 - RNA, 23 nt, Human
auaggaauagacaaugcuaaaaa

SEQ ID NO: 964420 - RNA, 19 nt, Human
auggcucagccccgucguc

SEQ ID NO: 964421 - RNA, 22 nt, Human
caagaaaaaaaaaaggcagcaa

SEQ ID NO: 964422 - RNA, 20 nt, Human
caaugcuaaaaaucagugua

SEQ ID NO: 964423 - RNA, 18 nt, Human
caccuuggcagcgugagg

SEQ ID NO: 964424 - RNA, 22 nt, Human
caggugcagacgcccagacccg

SEQ ID NO: 964425 - RNA, 21 nt, Human
ccaccagccugcuccuccugg

SEQ ID NO: 964426 - RNA, 22 nt, Human
ccaccuucugaucacacaauuc

SEQ ID NO: 964427 - RNA, 21 nt, Human
cccaagagcuccugauggcuc

SEQ ID NO: 964428 - RNA, 18 nt, Human
cccacgugucaguucccu

SEQ ID NO: 964429 - RNA, 21 nt, Human
ccccgucgucuggccggauuc

SEQ ID NO: 964430 - RNA, 20 nt, Human
ccccuuggaauguuuccuaa

SEQ ID NO: 964431 - RNA, 25 nt, Human
cccuaggccccaggugcagacgccc

SEQ ID NO: 964432 - RNA, 28 nt, Human
cugaucacacaauuccaucgagaaacug

SEQ ID NO: 964433 - RNA, 20 nt, Human
cugcggaggauccagccgua

SEQ ID NO: 964434 - RNA, 20 nt, Human
cuucugaucacacaauucca

SEQ ID NO: 964435 - RNA, 27 nt, Human
gcaauagaagaggcacacagaacauga

SEQ ID NO: 964436 - RNA, 18 nt, Human
gcugugggguauuuaaac

SEQ ID NO: 964437 - RNA, 22 nt, Human
ggccagcaaaugaaaucgggag

SEQ ID NO: 964438 - RNA, 18 nt, Human
guguaccaagaaaaaaaa

SEQ ID NO: 964439 - RNA, 19 nt, Human
gugucucccugcuuugcuu

SEQ ID NO: 964440 - RNA, 21 nt, Human
uaaaaagguuuuaucaauacu

SEQ ID NO: 964441 - RNA, 20 nt, Human
uaccaagaaaaaaaaaaggc

SEQ ID NO: 964442 - RNA, 21 nt, Human
uaccaagaaaaaaaaaaggca

SEQ ID NO: 964443 - RNA, 23 nt, Human
uaccaagaaaaaaaaaaggcagc

SEQ ID NO: 964444 - RNA, 18 nt, Human
uaccccaaagcuuagcag

SEQ ID NO: 964445 - RNA, 21 nt, Human
uaccccaaagcuuagcagagc

SEQ ID NO: 964446 - RNA, 24 nt, Human
uagcagagcuugaaaaucaaaaga

SEQ ID NO: 964447 - RNA, 24 nt, Human
uaggccccaggugcagacgcccag

SEQ ID NO: 964448 - RNA, 24 nt, Human
ucaguucccuaggccccaggugcc

SEQ ID NO: 964449 - RNA, 20 nt, Human
ugaaaagauauauggaagua

SEQ ID NO: 964450 - RNA, 18 nt, Human
ugaacuuuacagcacagg

SEQ ID NO: 964451 - RNA, 23 nt, Human
ugacaucugggucaacauauccu

SEQ ID NO: 964452 - RNA, 23 nt, Human
ugccaccagccugcuccuccugg

SEQ ID NO: 964453 - RNA, 26 nt, Human
uggccggauucugccugcccggcuuu

SEQ ID NO: 964454 - RNA, 23 nt, Human
ugggggccuuccgcucgccugcg

SEQ ID NO: 964455 - RNA, 25 nt, Human
ugggggccuuccgcucggggacacc

SEQ ID NO: 964456 - RNA, 25 nt, Human
uuaaugaaaagauauauggaaguac

SEQ ID NO: 964457 - RNA, 22 nt, Human
uucuucugaaggugucucccug

SEQ ID NO: 964458 - RNA, 23 nt, Human
aaacuuacaauaacagugacuua

SEQ ID NO: 964459 - RNA, 22 nt, Human
aaauggagaauucuauuacaga

SEQ ID NO: 964460 - RNA, 21 nt, Human
aagaggaggugaagggcagga

SEQ ID NO: 964461 - RNA, 19 nt, Human
aagcaggguuuagguaugc

SEQ ID NO: 964462 - RNA, 19 nt, Human
agacagaaaucaaaaaguc

SEQ ID NO: 964463 - RNA, 21 nt, Human
agacagaaaucaaaaagucag

SEQ ID NO: 964464 - RNA, 22 nt, Human
agacagaaaucaaaaagucagc

SEQ ID NO: 964465 - RNA, 21 nt, Human
agaggaggugaagggcaggau

SEQ ID NO: 964466 - RNA, 26 nt, Human
agaggaggugaagggcaggggcgugu

SEQ ID NO: 964467 - RNA, 23 nt, Human
aggaagaaagaggaggugaaggg

SEQ ID NO: 964468 - RNA, 18 nt, Human
agggucauccuggggucu

SEQ ID NO: 964469 - RNA, 18 nt, Human
auuuuucuaugcaauggc

SEQ ID NO: 964470 - RNA, 23 nt, Human
caacgcccacuacccugacaguc

SEQ ID NO: 964471 - RNA, 26 nt, Human
caauggcuuccuuucccagggucauc

SEQ ID NO: 964472 - RNA, 24 nt, Human
cccacuacccugacaguccugggc

SEQ ID NO: 964473 - RNA, 25 nt, Human
ccuagacuccuuuuaaccuuguuga

SEQ ID NO: 964474 - RNA, 22 nt, Human
ccucacgcaacgcccacuaccc

SEQ ID NO: 964475 - RNA, 23 nt, Human
ccuggggucuaggaugacugcuc

SEQ ID NO: 964476 - RNA, 21 nt, Human
cuacccugacaguccugggcc

SEQ ID NO: 964477 - RNA, 19 nt, Human
gaaaguacaaaggugucag

SEQ ID NO: 964478 - RNA, 20 nt, Human
gauacugauggacaacuugc

SEQ ID NO: 964479 - RNA, 21 nt, Human
ggguuuagguaugcagccaca

SEQ ID NO: 964480 - RNA, 20 nt, Human
uaccagacaccuagacuccu

SEQ ID NO: 964481 - RNA, 18 nt, Human
uagaacagucacuaagac

SEQ ID NO: 964482 - RNA, 20 nt, Human
uagaacagucacuaagacaa

SEQ ID NO: 964483 - RNA, 18 nt, Human
uaugcagccacaaggguu

SEQ ID NO: 964484 - RNA, 21 nt, Human
ucccagggucauccugggguc

SEQ ID NO: 964485 - RNA, 18 nt, Human
ugcaauggcuuccuuucc

SEQ ID NO: 964486 - RNA, 22 nt, Human
uguauacauuccagccagcagg

SEQ ID NO: 964487 - RNA, 19 nt, Human
uuccugaguuaaacuuaug

SEQ ID NO: 964488 - RNA, 19 nt, Human
uucuacaguaccagacacc

SEQ ID NO: 964489 - RNA, 20 nt, Human
aacacaguggucaagaggag

SEQ ID NO: 964490 - RNA, 19 nt, Human
aauaaggaaacaacagaaa

SEQ ID NO: 964491 - RNA, 20 nt, Human
acaguggucaagaggagagc

SEQ ID NO: 964492 - RNA, 19 nt, Human
accaagaaaauaggccaug

SEQ ID NO: 964493 - RNA, 22 nt, Human
agccuugcugcuggacuguggu

SEQ ID NO: 964494 - RNA, 23 nt, Human
aggaguuuuggccauuggugaug

SEQ ID NO: 964495 - RNA, 23 nt, Human
aggcggggaagggcacaacuucu

SEQ ID NO: 964496 - RNA, 20 nt, Human
augcccacccccuccccuua

SEQ ID NO: 964497 - RNA, 21 nt, Human
cagaauaugcccacccccucc

SEQ ID NO: 964498 - RNA, 24 nt, Human
cagcaggaagcaaggagccuugcu

SEQ ID NO: 964499 - RNA, 19 nt, Human
cagcuccugggcgucuccc

SEQ ID NO: 964500 - RNA, 20 nt, Human
caggagguggagggacagca

SEQ ID NO: 964501 - RNA, 22 nt, Human
cauauaauacauuacauguaca

SEQ ID NO: 964502 - RNA, 23 nt, Human
ccagaauaugcccacccccuccc

SEQ ID NO: 964503 - RNA, 24 nt, Human
ccauggugggcaucgcaggcgggg

SEQ ID NO: 964504 - RNA, 22 nt, Human
ccauuggugauggcgcugugag

SEQ ID NO: 964505 - RNA, 19 nt, Human
cccaagaggcugauguugg

SEQ ID NO: 964506 - RNA, 25 nt, Human
cccaagaggcugauguuggcaugcc

SEQ ID NO: 964507 - RNA, 25 nt, Human
cccaagugggcaaugacaccaagau

SEQ ID NO: 964508 - RNA, 22 nt, Human
ccccaagugggcaaugacacca

SEQ ID NO: 964509 - RNA, 21 nt, Human
cccccuccccuuaucccauaa

SEQ ID NO: 964510 - RNA, 21 nt, Human
ccuccccuuaucccauaacac

SEQ ID NO: 964511 - RNA, 23 nt, Human
cuagagaccucccaagaggcuga

SEQ ID NO: 964512 - RNA, 23 nt, Human
cugcuccucuccagaauaugccc

SEQ ID NO: 964513 - RNA, 25 nt, Human
cuggagcccagaccccauauaauac

SEQ ID NO: 964514 - RNA, 20 nt, Human
gaaacaacagaaauaaaaga

SEQ ID NO: 964515 - RNA, 20 nt, Human
gaggagggacuauuagggug

SEQ ID NO: 964516 - RNA, 22 nt, Human
gcaggaggcagaacuguccaga

SEQ ID NO: 964517 - RNA, 18 nt, Human
gccaaauuccuggguccu

SEQ ID NO: 964518 - RNA, 25 nt, Human
gccauggugggcaucgcaggcgggg

SEQ ID NO: 964519 - RNA, 19 nt, Human
gcccagggaagcccaaccu

SEQ ID NO: 964520 - RNA, 19 nt, Human
gcuugguggcaucuccucc

SEQ ID NO: 964521 - RNA, 22 nt, Human
ggcggggaagggcacaacuucu

SEQ ID NO: 964522 - RNA, 22 nt, Human
ggcuuucagccagcuccugggc

SEQ ID NO: 964523 - RNA, 21 nt, Human
gggacagcaggaagcaaggag

SEQ ID NO: 964524 - RNA, 25 nt, Human
gggcaggaggcagaacuguccagaa

SEQ ID NO: 964525 - RNA, 19 nt, Human
ggguccuuggaccucugcu

SEQ ID NO: 964526 - RNA, 23 nt, Human
gguccuuggaccucugcuccucu

SEQ ID NO: 964527 - RNA, 21 nt, Human
guuccaggcugguccagggca

SEQ ID NO: 964528 - RNA, 18 nt, Human
uacccuggugcaguuccc

SEQ ID NO: 964529 - RNA, 24 nt, Human
uccagggcaugaggaggcucagga

SEQ ID NO: 964530 - RNA, 18 nt, Human
uccaugccaaauuccugg

SEQ ID NO: 964531 - RNA, 19 nt, Human
ucccauaacacagugguca

SEQ ID NO: 964532 - RNA, 23 nt, Human
ucccuggggcucuccuaccaccu

SEQ ID NO: 964533 - RNA, 18 nt, Human
uccuggguccuuggaccu

SEQ ID NO: 964534 - RNA, 19 nt, Human
uccuggguccuuggaccuc

SEQ ID NO: 964535 - RNA, 21 nt, Human
uccuuggaccucugcuccucu

SEQ ID NO: 964536 - RNA, 22 nt, Human
ucuccuagaauuacugccucca

SEQ ID NO: 964537 - RNA, 19 nt, Human
ucucuggcuggagcccaga

SEQ ID NO: 964538 - RNA, 23 nt, Human
ucucuggcuggagcccagacccc

SEQ ID NO: 964539 - RNA, 23 nt, Human
ugaaccccuuaggaucuccuaga

SEQ ID NO: 964540 - RNA, 23 nt, Human
ugagguggggguagggucccccu

SEQ ID NO: 964541 - RNA, 24 nt, Human
ugagugcccagggaagcccaaccu

SEQ ID NO: 964542 - RNA, 21 nt, Human
ugcaguucccaccauggucaa

SEQ ID NO: 964543 - RNA, 21 nt, Human
uggaccucugcuccucuccag

SEQ ID NO: 964544 - RNA, 21 nt, Human
uggaggagggacuauuagggu

SEQ ID NO: 964545 - RNA, 21 nt, Human
uggaggagggacuauuagggu

SEQ ID NO: 964546 - RNA, 25 nt, Human
uggcuggaauuggaggagggacuau

SEQ ID NO: 964547 - RNA, 20 nt, Human
uguccagaacuuuagagaac

SEQ ID NO: 964548 - RNA, 21 nt, Human
uguuccaggcugguccagggc

SEQ ID NO: 964549 - RNA, 20 nt, Human
uucccacagguagaugcccc

SEQ ID NO: 964550 - RNA, 19 nt, Human
uuccuggguccuuggaccu

SEQ ID NO: 964551 - RNA, 20 nt, Human
uuccuggguccuuggaccuc

SEQ ID NO: 964552 - RNA, 21 nt, Human
uugcugcuggacuguggugca

SEQ ID NO: 964553 - RNA, 22 nt, Human
aaaacacaaugacaaugaagca

SEQ ID NO: 964554 - RNA, 18 nt, Human
aaacacaaugacaaugaa

SEQ ID NO: 964555 - RNA, 24 nt, Human
aaaucagugcugacuuaaagcuaa

SEQ ID NO: 964556 - RNA, 18 nt, Human
aagaaaaagaaagcagag

SEQ ID NO: 964557 - RNA, 19 nt, Human
aagaaaaagaaagcagaga

SEQ ID NO: 964558 - RNA, 22 nt, Human
aagaaaaagaaagcagagaaca

SEQ ID NO: 964559 - RNA, 21 nt, Human
aagcugauacccgcaggcccc

SEQ ID NO: 964560 - RNA, 21 nt, Human
agaacaaaguucaaucuacaa

SEQ ID NO: 964561 - RNA, 23 nt, Human
agaaugaaaacaaccaaaagggu

SEQ ID NO: 964562 - RNA, 19 nt, Human
aggcaggcuauauccuccc

SEQ ID NO: 964563 - RNA, 20 nt, Human
aggccacaccacuggaaaug

SEQ ID NO: 964564 - RNA, 24 nt, Human
augacaaugaagcacugauaugcc

SEQ ID NO: 964565 - RNA, 21 nt, Human
caaaacaaaggaaaggccuau

SEQ ID NO: 964566 - RNA, 22 nt, Human
caaaucagugcugacuuaaagc

SEQ ID NO: 964567 - RNA, 22 nt, Human
caagagauguccacauuuccac

SEQ ID NO: 964568 - RNA, 19 nt, Human
cacugauaugccuuaggaa

SEQ ID NO: 964569 - RNA, 26 nt, Human
cagagccccaggacuauuccagcucc

SEQ ID NO: 964570 - RNA, 18 nt, Human
cagcaggugauccacuuc

SEQ ID NO: 964571 - RNA, 20 nt, Human
cagcaggugauccacuucug

SEQ ID NO: 964572 - RNA, 22 nt, Human
ccacuggaaaugcuuuucuucu

SEQ ID NO: 964573 - RNA, 21 nt, Human
cccagagccccaggacuauuc

SEQ ID NO: 964574 - RNA, 22 nt, Human
cccagagccccaggacuauucc

SEQ ID NO: 964575 - RNA, 21 nt, Human
ccccgaaagugcaaagagagc

SEQ ID NO: 964576 - RNA, 26 nt, Human
cccgcaggccccagagccccaggacu

SEQ ID NO: 964577 - RNA, 18 nt, Human
cccgcucgcgcccuccuu

SEQ ID NO: 964578 - RNA, 24 nt, Human
cccucucgcgcucguuuucuuucu

SEQ ID NO: 964579 - RNA, 21 nt, Human
ccucccaaaacaaaggaaagg

SEQ ID NO: 964580 - RNA, 23 nt, Human
cucacaaccuuuauuuuuuaaaa

SEQ ID NO: 964581 - RNA, 24 nt, Human
cucgcccgcucgcgcccuccuucc

SEQ ID NO: 964582 - RNA, 23 nt, Human
cucgcuuuucccccucucgcgcu

SEQ ID NO: 964583 - RNA, 19 nt, Human
cugcauuugugcuucaaag

SEQ ID NO: 964584 - RNA, 27 nt, Human
cugcuggguucggcggagcggggcggc

SEQ ID NO: 964585 - RNA, 19 nt, Human
cugugaguccuccuucccc

SEQ ID NO: 964586 - RNA, 20 nt, Human
cuuuccgucuuuucgcuccc

SEQ ID NO: 964587 - RNA, 28 nt, Human
gaaaacaaccaaaagggugccgguaccc

SEQ ID NO: 964588 - RNA, 23 nt, Human
gaacagucccaaaucagugcuga

SEQ ID NO: 964589 - RNA, 21 nt, Human
gcagguuucaagcaucuguuc

SEQ ID NO: 964590 - RNA, 18 nt, Human
gcggccggcagcucuccc

SEQ ID NO: 964591 - RNA, 19 nt, Human
guuuucuuucuuucuuucc

SEQ ID NO: 964592 - RNA, 23 nt, Human
uccaagaaaaagaaagcagagaa

SEQ ID NO: 964593 - RNA, 24 nt, Human
uccaccagcaggugauccacuucu

SEQ ID NO: 964594 - RNA, 19 nt, Human
uccacuuauaaagcagggu

SEQ ID NO: 964595 - RNA, 19 nt, Human
uccgucuuuucgcuccccc

SEQ ID NO: 964596 - RNA, 21 nt, Human
uccuuccccgaaagugcaaaa

SEQ ID NO: 964597 - RNA, 25 nt, Human
ucgcgcgcgcgcucgcucgaucgcu

SEQ ID NO: 964598 - RNA, 18 nt, Human
ucugcuaggaucugaaga

SEQ ID NO: 964599 - RNA, 26 nt, Human
ugcugcccgcgcucgcccgcucgcgc

SEQ ID NO: 964600 - RNA, 22 nt, Human
uguccacauuuccaccagcagg

SEQ ID NO: 964601 - RNA, 22 nt, Human
uuaaaaacacaaugacaaugaa

SEQ ID NO: 964602 - RNA, 21 nt, Human
uuccugcuggguucggcggag

SEQ ID NO: 964603 - RNA, 22 nt, Human
uuugcuuccucacugugagucc

SEQ ID NO: 964604 - RNA, 22 nt, Human
uuuucgcgcgcgcgcucgcucg

SEQ ID NO: 964605 - RNA, 22 nt, Human
uuuucgcucccccgcgcggaag

SEQ ID NO: 964606 - RNA, 25 nt, Human
uuuucuuucuuucuuuccgucuuuu

SEQ ID NO: 964607 - RNA, 26 nt, Human
aaacaagagacaauaaaaaagggacc

SEQ ID NO: 964608 - RNA, 24 nt, Human
aaacauacuuuucugaaaacacuu

SEQ ID NO: 964609 - RNA, 23 nt, Human
aagaaaaguaaaaaucaaacugu

SEQ ID NO: 964610 - RNA, 19 nt, Human
acaaacaauaucccagcuc

SEQ ID NO: 964611 - RNA, 21 nt, Human
acaaagcaccaaacuacacaa

SEQ ID NO: 964612 - RNA, 23 nt, Human
accugaaaauaauauuuaaaaaa

SEQ ID NO: 964613 - RNA, 24 nt, Human
accugaaaauaauauuuaaaaaau

SEQ ID NO: 964614 - RNA, 24 nt, Human
accuuccuuaaggaggcuccgccg

SEQ ID NO: 964615 - RNA, 19 nt, Human
agaauacccuggauucagu

SEQ ID NO: 964616 - RNA, 19 nt, Human
agauuacauaaaagccgac

SEQ ID NO: 964617 - RNA, 20 nt, Human
aggaggcuccgccgcagccc

SEQ ID NO: 964618 - RNA, 21 nt, Human
agguguaaaagucaccuaacu

SEQ ID NO: 964619 - RNA, 19 nt, Human
auccccuuguaacaccuuu

SEQ ID NO: 964620 - RNA, 25 nt, Human
caaagcaccaaacuacacaaaugca

SEQ ID NO: 964621 - RNA, 22 nt, Human
cacaaaugcagaaugaaaacag

SEQ ID NO: 964622 - RNA, 19 nt, Human
cagauuacauaaaagccga

SEQ ID NO: 964623 - RNA, 22 nt, Human
cauauagucuaaaagcuagaag

SEQ ID NO: 964624 - RNA, 23 nt, Human
ccacaaacaauaucccagcucua

SEQ ID NO: 964625 - RNA, 23 nt, Human
ccccuuguaacaccuuuaagaaa

SEQ ID NO: 964626 - RNA, 22 nt, Human
ccggucgcccucgugccgaauu

SEQ ID NO: 964627 - RNA, 19 nt, Human
cgaagcugccaaccucuug

SEQ ID NO: 964628 - RNA, 25 nt, Human
cuccuggcugcugucgccggucgau

SEQ ID NO: 964629 - RNA, 20 nt, Human
cuugcaccuuccuuaaggaa

SEQ ID NO: 964630 - RNA, 27 nt, Human
gaaaacagcauuucaacuccaccaaaa

SEQ ID NO: 964631 - RNA, 23 nt, Human
uaaaagguguaaaagucaccuaa

SEQ ID NO: 964632 - RNA, 21 nt, Human
uaacuuggaacaaagcaccaa

SEQ ID NO: 964633 - RNA, 19 nt, Human
uaagaaacagccuuuuaag

SEQ ID NO: 964634 - RNA, 25 nt, Human
uaagcaaaggaccugaaaauaauau

SEQ ID NO: 964635 - RNA, 21 nt, Human
uacauaaaagccgacaaaucc

SEQ ID NO: 964636 - RNA, 24 nt, Human
uauaguguucccuuaucauguacu

SEQ ID NO: 964637 - RNA, 20 nt, Human
ucugaauaguucugcuaagc

SEQ ID NO: 964638 - RNA, 19 nt, Human
ucuucaguucauccaugac

SEQ ID NO: 964639 - RNA, 19 nt, Human
ucuuuaaauuuacuacuga

SEQ ID NO: 964640 - RNA, 18 nt, Human
ugacagguauaguguucc

SEQ ID NO: 964641 - RNA, 24 nt, Human
ugcagaaugaaaacagcauuucaa

SEQ ID NO: 964642 - RNA, 19 nt, Human
ugguaagcaaaggaccuga

SEQ ID NO: 964643 - RNA, 21 nt, Human
uuccugcuauacauauuacag

SEQ ID NO: 964644 - RNA, 22 nt, Human
uuuaaaaaaugaacaggcaaag

SEQ ID NO: 964645 - RNA, 26 nt, Human
uuuuuuuuuucuuuucauuugcguuu

SEQ ID NO: 964646 - RNA, 22 nt, Human
uuuuuuuuuuuucuuuucauuu

SEQ ID NO: 964647 - RNA, 23 nt, Human
uuuuuuuuuuuuuuuuuucuuuu

SEQ ID NO: 964648 - RNA, 22 nt, Human
aaaguuaaacaaaagccacaaa

SEQ ID NO: 964649 - RNA, 24 nt, Human
aaaguuaaacaaaagccacaaaaa

SEQ ID NO: 964650 - RNA, 22 nt, Human
aacaaauacagcauuaagaaau

SEQ ID NO: 964651 - RNA, 21 nt, Human
aacauggcacagacuguagcc

SEQ ID NO: 964652 - RNA, 19 nt, Human
aaguaauuccaggacgcua

SEQ ID NO: 964653 - RNA, 23 nt, Human
acaaaagccacaaaaauuuugcc

SEQ ID NO: 964654 - RNA, 22 nt, Human
acaacucuacuucaaaauaugc

SEQ ID NO: 964655 - RNA, 22 nt, Human
acacaaaggaaugacacugaug

SEQ ID NO: 964656 - RNA, 22 nt, Human
agaugcaugcagcuuuucauuu

SEQ ID NO: 964657 - RNA, 21 nt, Human
agccaccaaaaaagguuagug

SEQ ID NO: 964658 - RNA, 22 nt, Human
agcuguauacaucuagguuuga

SEQ ID NO: 964659 - RNA, 25 nt, Human
aggccggcaccggcaacggaaaagg

SEQ ID NO: 964660 - RNA, 23 nt, Human
augccugcuguagaugcaugcag

SEQ ID NO: 964661 - RNA, 23 nt, Human
caacauggcacagacuguagccu

SEQ ID NO: 964662 - RNA, 25 nt, Human
caccaaaaaagguuagugcauaaua

SEQ ID NO: 964663 - RNA, 19 nt, Human
caccggcaacggaaaaggc

SEQ ID NO: 964664 - RNA, 20 nt, Human
caggaaaaaaauucccaaac

SEQ ID NO: 964665 - RNA, 25 nt, Human
ccaccaaaaaagguuagugcauaau

SEQ ID NO: 964666 - RNA, 19 nt, Human
ccggcaacggaaaaggcuu

SEQ ID NO: 964667 - RNA, 31 nt, Human
ccggcaccggcaacggaaaaggcuucucucu

SEQ ID NO: 964668 - RNA, 24 nt, Human
ccuuuaagauagacucaggauagg

SEQ ID NO: 964669 - RNA, 20 nt, Human
cgacauaaacaauccaugcc

SEQ ID NO: 964670 - RNA, 20 nt, Human
cggcaccggcaacggaaaag

SEQ ID NO: 964671 - RNA, 24 nt, Human
cuacuuuuguuucuacugcacaaa

SEQ ID NO: 964672 - RNA, 21 nt, Human
cucacugcccaaagacaguuu

SEQ ID NO: 964673 - RNA, 23 nt, Human
cucacugcccaaagacaguuuua

SEQ ID NO: 964674 - RNA, 19 nt, Human
cugcaguaacacaaauuua

SEQ ID NO: 964675 - RNA, 23 nt, Human
guuuuuuucuuuuuuuccuuuaa

SEQ ID NO: 964676 - RNA, 24 nt, Human
uaaaacaauuucagaaacuguaca

SEQ ID NO: 964677 - RNA, 19 nt, Human
uaaaaugcacuaccccuuu

SEQ ID NO: 964678 - RNA, 27 nt, Human
uaaacaaaagccacaaaaauuuugcca

SEQ ID NO: 964679 - RNA, 25 nt, Human
uaaacccuaauuagccaccaaaaaa

SEQ ID NO: 964680 - RNA, 24 nt, Human
uaagaaaacaguugccuacuuugc

SEQ ID NO: 964681 - RNA, 23 nt, Human
uaagauuacuacugcaguaacac

SEQ ID NO: 964682 - RNA, 28 nt, Human
uaagguuuuuuucuuuuuuuccuuuaag

SEQ ID NO: 964683 - RNA, 18 nt, Human
uaaguagauccaucaugu

SEQ ID NO: 964684 - RNA, 22 nt, Human
uaaguagauccaucauguugga

SEQ ID NO: 964685 - RNA, 23 nt, Human
uacaacuugagaucaaauaaagg

SEQ ID NO: 964686 - RNA, 19 nt, Human
uacucacugcccaaagaca

SEQ ID NO: 964687 - RNA, 20 nt, Human
uaggccggcaccggcaacgg

SEQ ID NO: 964688 - RNA, 24 nt, Human
uaggccggcaccggcaacggaaaa

SEQ ID NO: 964689 - RNA, 24 nt, Human
uaugcuauuuacucacugcccaaa

SEQ ID NO: 964690 - RNA, 20 nt, Human
ucagagcuguauacaucuag

SEQ ID NO: 964691 - RNA, 25 nt, Human
ucagagcuguauacaucuagguuug

SEQ ID NO: 964692 - RNA, 23 nt, Human
ucuguaacuaagaaaacaguugc

SEQ ID NO: 964693 - RNA, 24 nt, Human
ucuguaacuaagaaaacaguugcc

SEQ ID NO: 964694 - RNA, 19 nt, Human
ugagaugaacaaauacagc

SEQ ID NO: 964695 - RNA, 20 nt, Human
ugagaugaacaaauacagca

SEQ ID NO: 964696 - RNA, 19 nt, Human
ugcacuaccccuuuuuuuc

SEQ ID NO: 964697 - RNA, 26 nt, Human
uggaaaauucaaaauaagggcaagag

SEQ ID NO: 964698 - RNA, 21 nt, Human
uggcacagacuguagccuacu

SEQ ID NO: 964699 - RNA, 23 nt, Human
uguacaucaacauggcacagacu

SEQ ID NO: 964700 - RNA, 22 nt, Human
uguagccuacuuuuguuucuac

SEQ ID NO: 964701 - RNA, 21 nt, Human
uucaaaguuaaacaaaagcca

SEQ ID NO: 964702 - RNA, 23 nt, Human
uucacugauguagaugugggaau

SEQ ID NO: 964703 - RNA, 22 nt, Human
uuguuaugaagcagcaccagaa

SEQ ID NO: 964704 - RNA, 19 nt, Human
uuuaaacccuaauuagcca

SEQ ID NO: 964705 - RNA, 24 nt, Human
aaaaaaaacaguaauucugaacac

SEQ ID NO: 964706 - RNA, 25 nt, Human
aaaaaggaaaaacaaacaaaaaaaa

SEQ ID NO: 964707 - RNA, 18 nt, Human
aaaacaguaauucugaac

SEQ ID NO: 964708 - RNA, 23 nt, Human
aaaagaaaacacaauagugagaa

SEQ ID NO: 964709 - RNA, 24 nt, Human
aaacaaaaaaaacaguaauucuga

SEQ ID NO: 964710 - RNA, 23 nt, Human
aaaggaaaaacaaacaaaaaaaa

SEQ ID NO: 964711 - RNA, 19 nt, Human
aacaagauggccacaaagu

SEQ ID NO: 964712 - RNA, 21 nt, Human
aacaagggcaacucuuuccau

SEQ ID NO: 964713 - RNA, 21 nt, Human
aacaauacaaaauucaguaac

SEQ ID NO: 964714 - RNA, 20 nt, Human
aacagugagcaaaagaaaac

SEQ ID NO: 964715 - RNA, 25 nt, Human
aagcagcuucauaaucaaaucaggc

SEQ ID NO: 964716 - RNA, 20 nt, Human
aauaagcuuggaaaugucaa

SEQ ID NO: 964717 - RNA, 21 nt, Human
accaaguaacuaacaugcuau

SEQ ID NO: 964718 - RNA, 21 nt, Human
agcaggagccaauaaagagag

SEQ ID NO: 964719 - RNA, 21 nt, Human
aggagccaauaaagagagggc

SEQ ID NO: 964720 - RNA, 19 nt, Human
agggcuuuggauuccucug

SEQ ID NO: 964721 - RNA, 20 nt, Human
aguccugugaaguaaauguu

SEQ ID NO: 964722 - RNA, 25 nt, Human
aguuuggguaacaucuguuauuuuc

SEQ ID NO: 964723 - RNA, 21 nt, Human
auagcccauuuugaaaagcca

SEQ ID NO: 964724 - RNA, 23 nt, Human
auggccacaaagucaucuaacaa

SEQ ID NO: 964725 - RNA, 21 nt, Human
caaaaaaaacaguaauucuga

SEQ ID NO: 964726 - RNA, 24 nt, Human
caaaagaaaacacaauagugagaa

SEQ ID NO: 964727 - RNA, 20 nt, Human
caaacuguauauauugaaau

SEQ ID NO: 964728 - RNA, 24 nt, Human
caagacacacugcaauauuauuca

SEQ ID NO: 964729 - RNA, 19 nt, Human
caauaaagagagggcuuug

SEQ ID NO: 964730 - RNA, 26 nt, Human
cacaauagugagaauuuaacacaauc

SEQ ID NO: 964731 - RNA, 24 nt, Human
cacuuauuuaagcaauuuuaaucu

SEQ ID NO: 964732 - RNA, 23 nt, Human
cagaauaagcuguuuaccagcca

SEQ ID NO: 964733 - RNA, 22 nt, Human
cagcuguugaugcaagacacac

SEQ ID NO: 964734 - RNA, 23 nt, Human
ccaaaauuuuaauguacacagug

SEQ ID NO: 964735 - RNA, 19 nt, Human
ccaccuacagcugacaaga

SEQ ID NO: 964736 - RNA, 24 nt, Human
ccuacagcugacaagaccgggguc

SEQ ID NO: 964737 - RNA, 21 nt, Human
cguauccuuaaacauaaaacc

SEQ ID NO: 964738 - RNA, 22 nt, Human
cuaaagcuucagcuugugcucc

SEQ ID NO: 964739 - RNA, 22 nt, Human
cuaaaguuucaaucuuauuaac

SEQ ID NO: 964740 - RNA, 21 nt, Human
cucuauggguaugcaugaaau

SEQ ID NO: 964741 - RNA, 19 nt, Human
cugaacacaugaagaguga

SEQ ID NO: 964742 - RNA, 19 nt, Human
cuugaaaacaggacuuccu

SEQ ID NO: 964743 - RNA, 20 nt, Human
gaaaaacaaacaaaaaaaac

SEQ ID NO: 964744 - RNA, 21 nt, Human
gagcaggagccaauaaagaga

SEQ ID NO: 964745 - RNA, 23 nt, Human
gcaacucuuuccauuccccacua

SEQ ID NO: 964746 - RNA, 20 nt, Human
gcaugaaauauccaucuaga

SEQ ID NO: 964747 - RNA, 21 nt, Human
guaaggcaacugaguaaucuc

SEQ ID NO: 964748 - RNA, 18 nt, Human
uaaaaaaguaacucuucc

SEQ ID NO: 964749 - RNA, 19 nt, Human
uaaaacaauacaaaauuca

SEQ ID NO: 964750 - RNA, 19 nt, Human
uaaaaccaauaaccuccca

SEQ ID NO: 964751 - RNA, 25 nt, Human
uaaagcuucagcuugugcucccaua

SEQ ID NO: 964752 - RNA, 23 nt, Human
uaaauaagacagcuguugaugca

SEQ ID NO: 964753 - RNA, 23 nt, Human
uaacuaacaugcuauucagcuuu

SEQ ID NO: 964754 - RNA, 24 nt, Human
uaagaacauguuucauuuucaauu

SEQ ID NO: 964755 - RNA, 23 nt, Human
uaagacagcuguugaugcaagac

SEQ ID NO: 964756 - RNA, 23 nt, Human
uacaacaauaaugaguucagaaa

SEQ ID NO: 964757 - RNA, 28 nt, Human
uacuuuacauaguaaagcaucuuccaaa

SEQ ID NO: 964758 - RNA, 19 nt, Human
uagaaaacaguauaccaca

SEQ ID NO: 964759 - RNA, 18 nt, Human
uagaaggcacuaaagcuu

SEQ ID NO: 964760 - RNA, 18 nt, Human
uaguacaaacuuggaucu

SEQ ID NO: 964761 - RNA, 24 nt, Human
ucaucuaacaacuggaaaagcugu

SEQ ID NO: 964762 - RNA, 23 nt, Human
uccaaaauuuuaauguacacagu

SEQ ID NO: 964763 - RNA, 20 nt, Human
uccuuauccccuuaggcaaa

SEQ ID NO: 964764 - RNA, 20 nt, Human
uccuuauccccuuaggcaaa

SEQ ID NO: 964765 - RNA, 23 nt, Human
ucuaaaaaaguaacucuucccau

SEQ ID NO: 964766 - RNA, 18 nt, Human
ucuagaaaacaguauacc

SEQ ID NO: 964767 - RNA, 19 nt, Human
ugaaaacaggacuuccuuc

SEQ ID NO: 964768 - RNA, 21 nt, Human
ugaaagagaacaguagcaugc

SEQ ID NO: 964769 - RNA, 22 nt, Human
ugaaagagaacaguagcaugca

SEQ ID NO: 964770 - RNA, 22 nt, Human
ugaaaucaguaagaagcucuuc

SEQ ID NO: 964771 - RNA, 18 nt, Human
ugaacacaugaagaguga

SEQ ID NO: 964772 - RNA, 22 nt, Human
ugaacacaugaagagugauuaa

SEQ ID NO: 964773 - RNA, 19 nt, Human
ugaagagugauuaagcagc

SEQ ID NO: 964774 - RNA, 22 nt, Human
ugaaugauuaaaaugaccaucu

SEQ ID NO: 964775 - RNA, 21 nt, Human
ugacaaaaaggaaaaacaaac

SEQ ID NO: 964776 - RNA, 24 nt, Human
ugacaaaaaggaaaaacaaacaaa

SEQ ID NO: 964777 - RNA, 26 nt, Human
ugacuagcacauauaaaauucuagaa

SEQ ID NO: 964778 - RNA, 18 nt, Human
ugcuuuauuuucuuacuc

SEQ ID NO: 964779 - RNA, 22 nt, Human
uggaaaugucaagaaaauuuaa

SEQ ID NO: 964780 - RNA, 22 nt, Human
uggcaaacacuaacagaccaca

SEQ ID NO: 964781 - RNA, 20 nt, Human
ugggauuuuaccuguacugg

SEQ ID NO: 964782 - RNA, 18 nt, Human
uggggaaaaacauuagca

SEQ ID NO: 964783 - RNA, 19 nt, Human
uggggaaaaacauuagcag

SEQ ID NO: 964784 - RNA, 23 nt, Human
uuaacuuuuaauacacuaauuaa

SEQ ID NO: 964785 - RNA, 20 nt, Human
uuaggugaaaucaguaagaa

SEQ ID NO: 964786 - RNA, 27 nt, Human
uucacauuauuuuuccuuauccccuua

SEQ ID NO: 964787 - RNA, 27 nt, Human
uucacauuauuuuuccuuauccccuua

SEQ ID NO: 964788 - RNA, 20 nt, Human
uuccuuauccccuuaggcaa

SEQ ID NO: 964789 - RNA, 20 nt, Human
uuccuuauccccuuaggcaa

SEQ ID NO: 964790 - RNA, 19 nt, Human
uuggauuccucugggauuu

SEQ ID NO: 964791 - RNA, 20 nt, Human
uuggauuugauuccagcauu

SEQ ID NO: 964792 - RNA, 22 nt, Human
uuguccuaaacagugagcaaaa

SEQ ID NO: 964793 - RNA, 23 nt, Human
uuguugagagaauuaaaagcuuu

SEQ ID NO: 964794 - RNA, 21 nt, Human
uuuggauuccucugggauuuu

SEQ ID NO: 964795 - RNA, 21 nt, Human
uuuuaggugaaaucaguaaga

SEQ ID NO: 964796 - RNA, 18 nt, Human
aagcgagagcacggcggc

SEQ ID NO: 964797 - RNA, 25 nt, Human
acaucgaagggcaucaauucaagag

SEQ ID NO: 964798 - RNA, 24 nt, Human
aggaaggccuggugccaggaggcu

SEQ ID NO: 964799 - RNA, 26 nt, Human
aggaaggccuggugccaggaggcuuu

SEQ ID NO: 964800 - RNA, 20 nt, Human
aggccuggugccaggaggcu

SEQ ID NO: 964801 - RNA, 21 nt, Human
cacaauaccagaauauggaac

SEQ ID NO: 964802 - RNA, 19 nt, Human
cagcagugacauguucuac

SEQ ID NO: 964803 - RNA, 20 nt, Human
ccccggccccagccccccuu

SEQ ID NO: 964804 - RNA, 23 nt, Human
cccggccccagccccccuuaggc

SEQ ID NO: 964805 - RNA, 25 nt, Human
cgagagcacggcggcagcuggagac

SEQ ID NO: 964806 - RNA, 24 nt, Human
cggcagugauggcuggccccggcc

SEQ ID NO: 964807 - RNA, 22 nt, Human
cggcagugauggcuggccccuu

SEQ ID NO: 964808 - RNA, 23 nt, Human
cggcggcagcggcggcggcggca

SEQ ID NO: 964809 - RNA, 22 nt, Human
cuggccccggccccagcccccc

SEQ ID NO: 964810 - RNA, 29 nt, Human
cuggccccggccccagccccccuuaggcc

SEQ ID NO: 964811 - RNA, 26 nt, Human
gagcaaaaaugguugaacucaccaua

SEQ ID NO: 964812 - RNA, 25 nt, Human
gcagcggcggcggcggcaacggccu

SEQ ID NO: 964813 - RNA, 21 nt, Human
gcggcagcggcggcggcggca

SEQ ID NO: 964814 - RNA, 21 nt, Human
gcuggccccggccccagcccc

SEQ ID NO: 964815 - RNA, 24 nt, Human
gcuggccccggccccagccccccu

SEQ ID NO: 964816 - RNA, 19 nt, Human
ggaaaggccaggccugaag

SEQ ID NO: 964817 - RNA, 20 nt, Human
ggcaaagcgagagcacggcg

SEQ ID NO: 964818 - RNA, 25 nt, Human
ggcagcggcggcggcggcaacggcc

SEQ ID NO: 964819 - RNA, 19 nt, Human
ggcggcagcggcggcggcg

SEQ ID NO: 964820 - RNA, 22 nt, Human
ggcggcggcaacggccucgugc

SEQ ID NO: 964821 - RNA, 24 nt, Human
gugauggcuggccccggccccagc

SEQ ID NO: 964822 - RNA, 21 nt, Human
uagcacuuucacuaaauggca

SEQ ID NO: 964823 - RNA, 21 nt, Human
uaggaaaggccaggccugaaa

SEQ ID NO: 964824 - RNA, 26 nt, Human
ucaagagcaaaaaugguugaacucac

SEQ ID NO: 964825 - RNA, 19 nt, Human
uccuauggguuacugcagg

SEQ ID NO: 964826 - RNA, 19 nt, Human
ucgacugugcuauucacaa

SEQ ID NO: 964827 - RNA, 24 nt, Human
ugagcucccuguaggaaaggccag

SEQ ID NO: 964828 - RNA, 18 nt, Human
uguaggaaaggccaggcc

SEQ ID NO: 964829 - RNA, 24 nt, Human
uuaggggaguuaaaaauguacagc

SEQ ID NO: 964830 - RNA, 27 nt, Human
aaagauauccagcccaacccaaccccc

SEQ ID NO: 964831 - RNA, 22 nt, Human
aaccaagaacuaaaauguucaa

SEQ ID NO: 964832 - RNA, 26 nt, Human
aacccaaccccccuuccaaaucccac

SEQ ID NO: 964833 - RNA, 22 nt, Human
aacgggacuugcuccggcuccg

SEQ ID NO: 964834 - RNA, 21 nt, Human
aagaggcaaacucaaccaccc

SEQ ID NO: 964835 - RNA, 20 nt, Human
aagauuugcgacuacgggaa

SEQ ID NO: 964836 - RNA, 18 nt, Human
aaucuuugagauccugcc

SEQ ID NO: 964837 - RNA, 22 nt, Human
acaauggaagaaaugcaaugac

SEQ ID NO: 964838 - RNA, 21 nt, Human
accauaagaggcaaacucaac

SEQ ID NO: 964839 - RNA, 26 nt, Human
acccuaacaaggaaaacaaauuaagc

SEQ ID NO: 964840 - RNA, 23 nt, Human
acuuguguucaacugugggcaag

SEQ ID NO: 964841 - RNA, 20 nt, Human
agaaaagcacauacuuacca

SEQ ID NO: 964842 - RNA, 21 nt, Human
agaagaacagauuauacggca

SEQ ID NO: 964843 - RNA, 23 nt, Human
agaccugcuucuugaccugugcc

SEQ ID NO: 964844 - RNA, 18 nt, Human
agcccaacccaacccccc

SEQ ID NO: 964845 - RNA, 22 nt, Human
auaagaggcaaacucaaccacc

SEQ ID NO: 964846 - RNA, 21 nt, Human
auccgcaaacguuacuucccc

SEQ ID NO: 964847 - RNA, 18 nt, Human
caaacucaaccaccccuu

SEQ ID NO: 964848 - RNA, 23 nt, Human
caacaaccccuuggugguccaca

SEQ ID NO: 964849 - RNA, 18 nt, Human
caacccaaccccccuucc

SEQ ID NO: 964850 - RNA, 21 nt, Human
caacccaaccccccuuccaaa

SEQ ID NO: 964851 - RNA, 27 nt, Human
caaccccccuuccaaaucccacccccu

SEQ ID NO: 964852 - RNA, 21 nt, Human
caagccaucagauaucacaag

SEQ ID NO: 964853 - RNA, 22 nt, Human
caauagauuuguguucuaugac

SEQ ID NO: 964854 - RNA, 19 nt, Human
caauggaagaaaugcaaug

SEQ ID NO: 964855 - RNA, 21 nt, Human
cagaaaagcacauacuuacca

SEQ ID NO: 964856 - RNA, 19 nt, Human
cagcagcuguuaaagagug

SEQ ID NO: 964857 - RNA, 18 nt, Human
cagcccaacccaaccccc

SEQ ID NO: 964858 - RNA, 24 nt, Human
cagcccaacccaaccccccuucca

SEQ ID NO: 964859 - RNA, 22 nt, Human
cagccccggccgcucacgaucu

SEQ ID NO: 964860 - RNA, 23 nt, Human
caucacugcuaaugacuccugaa

SEQ ID NO: 964861 - RNA, 25 nt, Human
ccaaccccccuuccaaaucccaccc

SEQ ID NO: 964862 - RNA, 22 nt, Human
ccagcugacucuugaggauaaa

SEQ ID NO: 964863 - RNA, 20 nt, Human
cccaacccaaccccccuucc

SEQ ID NO: 964864 - RNA, 23 nt, Human
cccaacccaaccccccuuccaaa

SEQ ID NO: 964865 - RNA, 22 nt, Human
cccacccccacagaaaagcaca

SEQ ID NO: 964866 - RNA, 22 nt, Human
ccccccuuccaaaucccacccc

SEQ ID NO: 964867 - RNA, 20 nt, Human
cccccuuccaaaucccaccc

SEQ ID NO: 964868 - RNA, 19 nt, Human
cuccugcuucuugaccggc

SEQ ID NO: 964869 - RNA, 20 nt, Human
cuggcucuucucaggcacgg

SEQ ID NO: 964870 - RNA, 20 nt, Human
cuguuaaagaguggaggaca

SEQ ID NO: 964871 - RNA, 20 nt, Human
cuugacccuaacaaggaaaa

SEQ ID NO: 964872 - RNA, 19 nt, Human
gacacccuugacccuaaca

SEQ ID NO: 964873 - RNA, 24 nt, Human
gaccggcuguaagauuugcgacua

SEQ ID NO: 964874 - RNA, 18 nt, Human
gagcggccaugaagaagc

SEQ ID NO: 964875 - RNA, 19 nt, Human
gagcggccaugaagaagcc

SEQ ID NO: 964876 - RNA, 19 nt, Human
gcuccggcuccugcuccug

SEQ ID NO: 964877 - RNA, 24 nt, Human
ggacacccuugacccuaacaagga

SEQ ID NO: 964878 - RNA, 19 nt, Human
gggaauuuuugugguuuuu

SEQ ID NO: 964879 - RNA, 19 nt, Human
gggagaccuacuaacagaa

SEQ ID NO: 964880 - RNA, 18 nt, Human
gggcaaguucaagccauc

SEQ ID NO: 964881 - RNA, 23 nt, Human
guggaggacacccuugacccuaa

SEQ ID NO: 964882 - RNA, 23 nt, Human
guuucuggcucuucucaggcacg

SEQ ID NO: 964883 - RNA, 22 nt, Human
uaacaaacagcugcucuaaugu

SEQ ID NO: 964884 - RNA, 22 nt, Human
uaacagaacgggacuugcuccg

SEQ ID NO: 964885 - RNA, 21 nt, Human
uaaccaagaacuaaaauguuc

SEQ ID NO: 964886 - RNA, 20 nt, Human
uaagaggcaaacucaaccac

SEQ ID NO: 964887 - RNA, 20 nt, Human
uaagucaccauaagaggcaa

SEQ ID NO: 964888 - RNA, 20 nt, Human
uagcaaguaugguuugggaa

SEQ ID NO: 964889 - RNA, 22 nt, Human
ucacugcuaaugacuccugaau

SEQ ID NO: 964890 - RNA, 19 nt, Human
uccagcccaacccaacccc

SEQ ID NO: 964891 - RNA, 21 nt, Human
uccagcccaacccaacccccc

SEQ ID NO: 964892 - RNA, 23 nt, Human
uccgagaaggcuugcccucaaag

SEQ ID NO: 964893 - RNA, 21 nt, Human
uccgcaaacguuacuucccca

SEQ ID NO: 964894 - RNA, 19 nt, Human
uccgcaaagagagcagccc

SEQ ID NO: 964895 - RNA, 19 nt, Human
ucugaggaagaaaauucgu

SEQ ID NO: 964896 - RNA, 23 nt, Human
ucuuaaaugcuaccccuacaaua

SEQ ID NO: 964897 - RNA, 23 nt, Human
ugcuccggcuccggcuccugcuc

SEQ ID NO: 964898 - RNA, 24 nt, Human
ugucaauauacacaaacuauauac

SEQ ID NO: 964899 - RNA, 23 nt, Human
uguccagcagcuguuaaagagug

SEQ ID NO: 964900 - RNA, 22 nt, Human
uucacaaaaaugugagcagaag

SEQ ID NO: 964901 - RNA, 19 nt, Human
uuccucgaaucaacugcgc

SEQ ID NO: 964902 - RNA, 21 nt, Human
uucugguccgggaucgagacc

SEQ ID NO: 964903 - RNA, 21 nt, Human
uugccacugucaacugaucug

SEQ ID NO: 964904 - RNA, 22 nt, Human
uugcugccuucaauuaauuuua

SEQ ID NO: 964905 - RNA, 23 nt, Human
uuuaagucaccauaagaggcaaa

SEQ ID NO: 964906 - RNA, 24 nt, Human
aaaaaaaaaaaaaacaacacuaaa

SEQ ID NO: 964907 - RNA, 23 nt, Human
aaaaaaaaaacaacacuaaauga

SEQ ID NO: 964908 - RNA, 23 nt, Human
aaaaaaacccugccagcagaucc

SEQ ID NO: 964909 - RNA, 22 nt, Human
aaaaaacccugccagcagaucc

SEQ ID NO: 964910 - RNA, 27 nt, Human
aaaaauaagcaaacaaauaaaacaaaa

SEQ ID NO: 964911 - RNA, 23 nt, Human
aaacaaauaaaacaaaaaaaccc

SEQ ID NO: 964912 - RNA, 23 nt, Human
aaauaaaacaaaaaaacccugcc

SEQ ID NO: 964913 - RNA, 23 nt, Human
aacccugccagcagauccugcug

SEQ ID NO: 964914 - RNA, 19 nt, Human
aaguauucaaagcucaaaa

SEQ ID NO: 964915 - RNA, 21 nt, Human
aaucaaaguuaucuuaauucu

SEQ ID NO: 964916 - RNA, 21 nt, Human
accgcaagccaguaaccgcgg

SEQ ID NO: 964917 - RNA, 24 nt, Human
acggcaagagcccgaacacgcgcc

SEQ ID NO: 964918 - RNA, 25 nt, Human
acugccuaaguaggaaaguguucca

SEQ ID NO: 964919 - RNA, 21 nt, Human
auaaaacaaaaaaacccugcc

SEQ ID NO: 964920 - RNA, 23 nt, Human
auaaaacaaaaaaacccugccag

SEQ ID NO: 964921 - RNA, 22 nt, Human
auccugcugaaauacuaaaaaa

SEQ ID NO: 964922 - RNA, 22 nt, Human
auucaaagcucaaaacaguuaa

SEQ ID NO: 964923 - RNA, 20 nt, Human
caaaagcuauaaaaucaaag

SEQ ID NO: 964924 - RNA, 23 nt, Human
caaauaaaacaaaaaaacccugc

SEQ ID NO: 964925 - RNA, 22 nt, Human
caagagcccgaacacgcgccuc

SEQ ID NO: 964926 - RNA, 22 nt, Human
cagaagaggccaaguauaaaca

SEQ ID NO: 964927 - RNA, 18 nt, Human
ccgcaagccaguaaccgc

SEQ ID NO: 964928 - RNA, 22 nt, Human
ccucacaccacaggggcggccg

SEQ ID NO: 964929 - RNA, 19 nt, Human
ccucaucuuuuucauccaa

SEQ ID NO: 964930 - RNA, 21 nt, Human
ccucuugcagaagaggccaag

SEQ ID NO: 964931 - RNA, 18 nt, Human
cucaucuuuuucauccaa

SEQ ID NO: 964932 - RNA, 25 nt, Human
cugaaauacuaaaaaaaaaaaaaaa

SEQ ID NO: 964933 - RNA, 18 nt, Human
gaagggagagggucuuca

SEQ ID NO: 964934 - RNA, 26 nt, Human
gagccucaucuuuuucauccaauuug

SEQ ID NO: 964935 - RNA, 25 nt, Human
gcaaacaaauaaaacaaaaaaaccc

SEQ ID NO: 964936 - RNA, 20 nt, Human
ggcaagagcccgaacacgcg

SEQ ID NO: 964937 - RNA, 19 nt, Human
ggccaaguauaaacaugga

SEQ ID NO: 964938 - RNA, 20 nt, Human
uaaaacaaaaaaacccugcc

SEQ ID NO: 964939 - RNA, 22 nt, Human
uaaaacaaaaaaacccugccag

SEQ ID NO: 964940 - RNA, 26 nt, Human
uaaaacaaaaaaacccugccagcaga

SEQ ID NO: 964941 - RNA, 22 nt, Human
uaaguaggaaaguguuccauaa

SEQ ID NO: 964942 - RNA, 18 nt, Human
ucugugugccccuguuuu

SEQ ID NO: 964943 - RNA, 31 nt, Human
ugcugaaauacuaaaaaaaaaaaaaaaaaaa

SEQ ID NO: 964944 - RNA, 21 nt, Human
uggguucucccucuaaagccu

SEQ ID NO: 964945 - RNA, 22 nt, Human
uggguucucccucuaaagccuu

SEQ ID NO: 964946 - RNA, 19 nt, Human
uguuccauaauaaugugca

SEQ ID NO: 964947 - RNA, 19 nt, Human
uucaagagauuccucuugc

SEQ ID NO: 964948 - RNA, 20 nt, Human
uuuuugguagcaaacuuuua

SEQ ID NO: 964949 - RNA, 20 nt, Human
uuuuuuuuuuuuuuuuuggu

SEQ ID NO: 964950 - RNA, 22 nt, Human
uuuuuuuuuuuuuuuuugguag

SEQ ID NO: 964951 - RNA, 28 nt, Human
uuuuuuuuuuuuuuuuuuuuuuuggggg

SEQ ID NO: 964952 - RNA, 19 nt, Human
aaagccaccaaggguccau

SEQ ID NO: 964953 - RNA, 21 nt, Human
aagaccccgcaucccggaccc

SEQ ID NO: 964954 - RNA, 24 nt, Human
aagguguuuccucccauuuuauuu

SEQ ID NO: 964955 - RNA, 18 nt, Human
acccaaccucaacaccgc

SEQ ID NO: 964956 - RNA, 26 nt, Human
caaagaccccgcaucccggacccaac

SEQ ID NO: 964957 - RNA, 19 nt, Human
cagaagcccacgcagccuc

SEQ ID NO: 964958 - RNA, 19 nt, Human
cagccucccggcucugccu

SEQ ID NO: 964959 - RNA, 24 nt, Human
cagucaaagaccccgcaucccgga

SEQ ID NO: 964960 - RNA, 25 nt, Human
cauggaggcggccagguggauggug

SEQ ID NO: 964961 - RNA, 20 nt, Human
ccccgcaucccggacccaac

SEQ ID NO: 964962 - RNA, 19 nt, Human
gaaaagguguuuccuccca

SEQ ID NO: 964963 - RNA, 21 nt, Human
gaccccgcaucccggacccaa

SEQ ID NO: 964964 - RNA, 20 nt, Human
gaccccgcaucccggacccc

SEQ ID NO: 964965 - RNA, 22 nt, Human
gacgucccugauaccuccacuu

SEQ ID NO: 964966 - RNA, 20 nt, Human
gccaccaaggguccauggag

SEQ ID NO: 964967 - RNA, 19 nt, Human
uacaaaagccaccaagggu

SEQ ID NO: 964968 - RNA, 21 nt, Human
uagaaaagguguuuccuccca

SEQ ID NO: 964969 - RNA, 26 nt, Human
ucaaagaccccgcaucccggacccaa

SEQ ID NO: 964970 - RNA, 23 nt, Human
ucccugauaccuccacuuggccu

SEQ ID NO: 964971 - RNA, 22 nt, Human
ucugcgugagccugcccagaag

SEQ ID NO: 964972 - RNA, 27 nt, Human
ucuucugugccgcgcgacgucccugau

SEQ ID NO: 964973 - RNA, 20 nt, Human
ugcccagaagcccacgcagc

SEQ ID NO: 964974 - RNA, 21 nt, Human
ugcgugagccugcccagaagc

SEQ ID NO: 964975 - RNA, 23 nt, Human
ugcgugagccugcccagaagccc

SEQ ID NO: 964976 - RNA, 23 nt, Human
uguggccggcgucugcgugagcc

SEQ ID NO: 964977 - RNA, 20 nt, Human
aaagcagcucaguuaaccua

SEQ ID NO: 964978 - RNA, 21 nt, Human
aagaaaaaauucccaucaccu

SEQ ID NO: 964979 - RNA, 21 nt, Human
acaaagcagcucaguuaaccu

SEQ ID NO: 964980 - RNA, 19 nt, Human
accccacaaagacagaacg

SEQ ID NO: 964981 - RNA, 21 nt, Human
acucagucacaguaacuguug

SEQ ID NO: 964982 - RNA, 19 nt, Human
aguaacuguugaucuccau

SEQ ID NO: 964983 - RNA, 24 nt, Human
cacaaagcagcucaguuaaccuaa

SEQ ID NO: 964984 - RNA, 18 nt, Human
cagaaugggccgacucag

SEQ ID NO: 964985 - RNA, 27 nt, Human
ccgccgcagcccacgucgccgccgccg

SEQ ID NO: 964986 - RNA, 27 nt, Human
ccuaaaaaauaaagaaaaaauucccau

SEQ ID NO: 964987 - RNA, 21 nt, Human
cugcaguuuaaaauguuucac

SEQ ID NO: 964988 - RNA, 20 nt, Human
gaaccccacaaagacagaac

SEQ ID NO: 964989 - RNA, 21 nt, Human
gcgaaccccacaaagacagaa

SEQ ID NO: 964990 - RNA, 20 nt, Human
uaaauccucaaucuggaaug

SEQ ID NO: 964991 - RNA, 24 nt, Human
uagauucugagcacaaagcagcuc

SEQ ID NO: 964992 - RNA, 18 nt, Human
uaguagagcgaaccccac

SEQ ID NO: 964993 - RNA, 24 nt, Human
uaguuuuuuuucuucuuuaaaaaa

SEQ ID NO: 964994 - RNA, 22 nt, Human
ucugcaguuuaaaauguuucac

SEQ ID NO: 964995 - RNA, 24 nt, Human
aaagagguauagaagcuuccuuuu

SEQ ID NO: 964996 - RNA, 22 nt, Human
aaccauguaacucugcugccuu

SEQ ID NO: 964997 - RNA, 24 nt, Human
aaccuaaugggcugaggaagggag

SEQ ID NO: 964998 - RNA, 19 nt, Human
aagaaagagguauagaagc

SEQ ID NO: 964999 - RNA, 19 nt, Human
aagaagaaagagguauaga

SEQ ID NO: 965000 - RNA, 20 nt, Human
aagcugccugaccagggggc

SEQ ID NO: 965001 - RNA, 24 nt, Human
aaucgcuugaauccaggaggcaga

SEQ ID NO: 965002 - RNA, 24 nt, Human
acagagcaagacuccaucuugaaa

SEQ ID NO: 965003 - RNA, 18 nt, Human
acagucccccaaggagcu

SEQ ID NO: 965004 - RNA, 18 nt, Human
acauuggccuuugcuacc

SEQ ID NO: 965005 - RNA, 23 nt, Human
accccgucuccacuaaaauacaa

SEQ ID NO: 965006 - RNA, 24 nt, Human
accugaggucaggaguucgagacc

SEQ ID NO: 965007 - RNA, 24 nt, Human
acuaaaauacaaaaauuagccagu

SEQ ID NO: 965008 - RNA, 24 nt, Human
acugcauuccagccugggcgacag

SEQ ID NO: 965009 - RNA, 26 nt, Human
acugcauuccagccugggcgacagag

SEQ ID NO: 965010 - RNA, 18 nt, Human
agaagaaagagguauaga

SEQ ID NO: 965011 - RNA, 19 nt, Human
agaagacauuggccuuugc

SEQ ID NO: 965012 - RNA, 18 nt, Human
agaagcuguccgggcugg

SEQ ID NO: 965013 - RNA, 22 nt, Human
agaaucgcuugaauccaggagg

SEQ ID NO: 965014 - RNA, 24 nt, Human
agaguuugcagugagccgagaucg

SEQ ID NO: 965015 - RNA, 20 nt, Human
agcauggugaaaccccgucu

SEQ ID NO: 965016 - RNA, 23 nt, Human
agccaggcgugguggcaggugcc

SEQ ID NO: 965017 - RNA, 24 nt, Human
agccugggcgacagagcaagacuc

SEQ ID NO: 965018 - RNA, 23 nt, Human
aggaggaagcgaagaagagggac

SEQ ID NO: 965019 - RNA, 23 nt, Human
aggaguucgagaccagucuggcc

SEQ ID NO: 965020 - RNA, 21 nt, Human
aggcagaguuugcagugagcc

SEQ ID NO: 965021 - RNA, 24 nt, Human
aggcagaguuugcagugagccgag

SEQ ID NO: 965022 - RNA, 23 nt, Human
aggcaggagaaucgcuugaaucc

SEQ ID NO: 965023 - RNA, 24 nt, Human
aggcaggagaaucgcuugaaucca

SEQ ID NO: 965024 - RNA, 22 nt, Human
aggcgggcggaucaccugaggu

SEQ ID NO: 965025 - RNA, 26 nt, Human
aggcgggcggaucaccugaggucagg

SEQ ID NO: 965026 - RNA, 20 nt, Human
aggcugaggcaggagaaucg

SEQ ID NO: 965027 - RNA, 24 nt, Human
aggcugaggcaggagaaucgcuug

SEQ ID NO: 965028 - RNA, 21 nt, Human
aggcugaggcgggcggaucac

SEQ ID NO: 965029 - RNA, 24 nt, Human
aggcugaggcgggcggaucaccug

SEQ ID NO: 965030 - RNA, 20 nt, Human
aguccuuucccccuucuuuu

SEQ ID NO: 965031 - RNA, 22 nt, Human
agucuggccagcauggugaaac

SEQ ID NO: 965032 - RNA, 24 nt, Human
agucuggccagcauggugaaaccc

SEQ ID NO: 965033 - RNA, 25 nt, Human
auagagaagauuccaagaauagguu

SEQ ID NO: 965034 - RNA, 24 nt, Human
aucgcgccacugcauuccagccug

SEQ ID NO: 965035 - RNA, 21 nt, Human
auuggccuuugcuacccuuuu

SEQ ID NO: 965036 - RNA, 21 nt, Human
caaaugauuugcuuggauguc

SEQ ID NO: 965037 - RNA, 20 nt, Human
caaggucuuuuccucaaccc

SEQ ID NO: 965038 - RNA, 21 nt, Human
cacaagugugcacguagcuaa

SEQ ID NO: 965039 - RNA, 23 nt, Human
caccugaggucaggaguucgaga

SEQ ID NO: 965040 - RNA, 19 nt, Human
cacugcauuccagccuggg

SEQ ID NO: 965041 - RNA, 22 nt, Human
cacugcauuccagccugggcga

SEQ ID NO: 965042 - RNA, 23 nt, Human
cacugcauuccagccugggcgac

SEQ ID NO: 965043 - RNA, 24 nt, Human
cacugcauuccagccugggcgaca

SEQ ID NO: 965044 - RNA, 18 nt, Human
cagaguccuuucccccuu

SEQ ID NO: 965045 - RNA, 24 nt, Human
cagcuacuugagaggcugaggcag

SEQ ID NO: 965046 - RNA, 18 nt, Human
cagcuucuggucuccagg

SEQ ID NO: 965047 - RNA, 25 nt, Human
caugccuguaaucccagcaauuuca

SEQ ID NO: 965048 - RNA, 18 nt, Human
cauggugaaaccccgucu

SEQ ID NO: 965049 - RNA, 19 nt, Human
cauggugaaaccccgucuc

SEQ ID NO: 965050 - RNA, 21 nt, Human
cauggugaaaccccgucucca

SEQ ID NO: 965051 - RNA, 23 nt, Human
cauuccagccugggcgacagagc

SEQ ID NO: 965052 - RNA, 22 nt, Human
ccaaggagcuugagaaaucacc

SEQ ID NO: 965053 - RNA, 20 nt, Human
ccacgcccgccccacgcccc

SEQ ID NO: 965054 - RNA, 25 nt, Human
ccacgcccgccccacgccccuccuu

SEQ ID NO: 965055 - RNA, 20 nt, Human
ccacugcauuccagccuggg

SEQ ID NO: 965056 - RNA, 21 nt, Human
ccacugcauuccagccugggc

SEQ ID NO: 965057 - RNA, 21 nt, Human
ccacugcauuccagccugggc

SEQ ID NO: 965058 - RNA, 24 nt, Human
ccacugcauuccagccugggcgac

SEQ ID NO: 965059 - RNA, 25 nt, Human
ccaucuugaaaaaaaaaaaaaagaa

SEQ ID NO: 965060 - RNA, 21 nt, Human
ccauuaaagugugugguuaau

SEQ ID NO: 965061 - RNA, 23 nt, Human
cccaaggagcuugagaaaucacc

SEQ ID NO: 965062 - RNA, 18 nt, Human
cccaaggggacagagucc

SEQ ID NO: 965063 - RNA, 21 nt, Human
cccaaucuacccuggccuuca

SEQ ID NO: 965064 - RNA, 23 nt, Human
cccacgccccuccuuuucgacca

SEQ ID NO: 965065 - RNA, 24 nt, Human
ccccacgcccgccccacgccccuc

SEQ ID NO: 965066 - RNA, 22 nt, Human
cccccaaucuacccuggccuuc

SEQ ID NO: 965067 - RNA, 19 nt, Human
cccgucuccacuaaaauac

SEQ ID NO: 965068 - RNA, 21 nt, Human
cccugagguccaaucaaccag

SEQ ID NO: 965069 - RNA, 21 nt, Human
cccuguaaucccagcuacuug

SEQ ID NO: 965070 - RNA, 22 nt, Human
cccuguaaucccagcuacuuga

SEQ ID NO: 965071 - RNA, 24 nt, Human
ccgggcugggugugguggcucaug

SEQ ID NO: 965072 - RNA, 23 nt, Human
ccgggugagaggaggaccugggc

SEQ ID NO: 965073 - RNA, 19 nt, Human
ccuaccagacaaaacucau

SEQ ID NO: 965074 - RNA, 22 nt, Human
ccugaggucaggaguucgagac

SEQ ID NO: 965075 - RNA, 22 nt, Human
ccugggcgacagagcaagacuc

SEQ ID NO: 965076 - RNA, 22 nt, Human
ccuguaaucccagcuacuugag

SEQ ID NO: 965077 - RNA, 20 nt, Human
ccuuucccccuucuuuuucc

SEQ ID NO: 965078 - RNA, 24 nt, Human
cgagaccagucuggccagcauggu

SEQ ID NO: 965079 - RNA, 24 nt, Human
cgagaucgcgccacugcauuccag

SEQ ID NO: 965080 - RNA, 22 nt, Human
cgaggaggaggauguggaaggg

SEQ ID NO: 965081 - RNA, 21 nt, Human
cgccuugaaaacuggcccggg

SEQ ID NO: 965082 - RNA, 19 nt, Human
cgcuugaauccaggaggca

SEQ ID NO: 965083 - RNA, 24 nt, Human
cggaucaccugaggucaggaguuc

SEQ ID NO: 965084 - RNA, 27 nt, Human
cggaucaccugaggucaggaguucgag

SEQ ID NO: 965085 - RNA, 24 nt, Human
cgggcggaucaccugaggucagga

SEQ ID NO: 965086 - RNA, 24 nt, Human
cguagcuaaggaggagcuggugaa

SEQ ID NO: 965087 - RNA, 24 nt, Human
cuaaagguuuccuaacuuuuccaa

SEQ ID NO: 965088 - RNA, 20 nt, Human
cuagggcagccaagcugggg

SEQ ID NO: 965089 - RNA, 25 nt, Human
cucaugccuguaaucccagcaauuu

SEQ ID NO: 965090 - RNA, 23 nt, Human
cucuuugguccugguugauuucc

SEQ ID NO: 965091 - RNA, 22 nt, Human
cuggccagcauggugaaacccc

SEQ ID NO: 965092 - RNA, 23 nt, Human
cuggccuucaggccuuguuggca

SEQ ID NO: 965093 - RNA, 19 nt, Human
cugguccuugcugaagugg

SEQ ID NO: 965094 - RNA, 26 nt, Human
cuugcucacacauaaaacuguggacc

SEQ ID NO: 965095 - RNA, 19 nt, Human
cuuucccccuucuuuuucc

SEQ ID NO: 965096 - RNA, 24 nt, Human
cuuuuuagcacuaauaacuccuaa

SEQ ID NO: 965097 - RNA, 24 nt, Human
gaaaucaccuagggcagccaagcu

SEQ ID NO: 965098 - RNA, 19 nt, Human
gaagggaaguggcugugca

SEQ ID NO: 965099 - RNA, 19 nt, Human
gagaggaggaccugggcug

SEQ ID NO: 965100 - RNA, 24 nt, Human
gaucaccugaggucaggaguucga

SEQ ID NO: 965101 - RNA, 24 nt, Human
gcauuccagccugggcgacagagc

SEQ ID NO: 965102 - RNA, 22 nt, Human
gccacugcauuccagccugggc

SEQ ID NO: 965103 - RNA, 24 nt, Human
gccacugcauuccagccugggcga

SEQ ID NO: 965104 - RNA, 24 nt, Human
gccagcauggugaaaccccgucuc

SEQ ID NO: 965105 - RNA, 20 nt, Human
gccgagaucgcgccacugca

SEQ ID NO: 965106 - RNA, 18 nt, Human
gcuggaaccagaauccua

SEQ ID NO: 965107 - RNA, 18 nt, Human
ggaggaggauguggaagg

SEQ ID NO: 965108 - RNA, 27 nt, Human
ggaggaggauguggaagggugaugagc

SEQ ID NO: 965109 - RNA, 22 nt, Human
ggaucaccugaggucaggaguu

SEQ ID NO: 965110 - RNA, 23 nt, Human
ggaucaccugaggucaggaguuc

SEQ ID NO: 965111 - RNA, 24 nt, Human
ggcaacgaggaggaggauguggaa

SEQ ID NO: 965112 - RNA, 18 nt, Human
ggcagccaagcuggggaa

SEQ ID NO: 965113 - RNA, 22 nt, Human
ggcaggugcccuguaaucccag

SEQ ID NO: 965114 - RNA, 21 nt, Human
ggcggaucaccugaggucagg

SEQ ID NO: 965115 - RNA, 19 nt, Human
ggcugggugugguggcuca

SEQ ID NO: 965116 - RNA, 23 nt, Human
ggcugggugugguggcucaugcc

SEQ ID NO: 965117 - RNA, 24 nt, Human
gggcagccaagcuggggaagggaa

SEQ ID NO: 965118 - RNA, 20 nt, Human
gggcugggugugguggcuca

SEQ ID NO: 965119 - RNA, 29 nt, Human
ggggacagaguccuuucccccuucuuuuu

SEQ ID NO: 965120 - RNA, 24 nt, Human
gguggcaggugcccuguaauccca

SEQ ID NO: 965121 - RNA, 24 nt, Human
gguggcucaugccuguaaucccag

SEQ ID NO: 965122 - RNA, 23 nt, Human
ggugugguggcucaugccuguaa

SEQ ID NO: 965123 - RNA, 25 nt, Human
guggacuuaucuuuuaaaacagagg

SEQ ID NO: 965124 - RNA, 24 nt, Human
guggcaggugcccuguaaucccag

SEQ ID NO: 965125 - RNA, 18 nt, Human
guggcagugggguaagag

SEQ ID NO: 965126 - RNA, 20 nt, Human
uaaaacagagguauguggca

SEQ ID NO: 965127 - RNA, 20 nt, Human
uaaggcucuuugguccuggu

SEQ ID NO: 965128 - RNA, 18 nt, Human
uacccuggccuucaggcc

SEQ ID NO: 965129 - RNA, 21 nt, Human
uagcuaaggaggagcugguga

SEQ ID NO: 965130 - RNA, 20 nt, Human
ucaccugaggucaggaguuc

SEQ ID NO: 965131 - RNA, 19 nt, Human
ucagcuucuggucuccagg

SEQ ID NO: 965132 - RNA, 23 nt, Human
ucaggccuuguuggcaaagggga

SEQ ID NO: 965133 - RNA, 20 nt, Human
ucaugccuguaaucccagca

SEQ ID NO: 965134 - RNA, 24 nt, Human
uccagccugggcgacagagcaaga

SEQ ID NO: 965135 - RNA, 20 nt, Human
ucccaccccccaaucuaccc

SEQ ID NO: 965136 - RNA, 21 nt, Human
ucccaggccgggaggcucccg

SEQ ID NO: 965137 - RNA, 19 nt, Human
ucccugagagggccucagc

SEQ ID NO: 965138 - RNA, 21 nt, Human
ucccugagagggccucagcuu

SEQ ID NO: 965139 - RNA, 22 nt, Human
ucccuuuccuauucaguacaca

SEQ ID NO: 965140 - RNA, 23 nt, Human
ucgcgccacugcauuccagccug

SEQ ID NO: 965141 - RNA, 18 nt, Human
ucuccaggggacaggggu

SEQ ID NO: 965142 - RNA, 24 nt, Human
ucuggccagcauggugaaaccccg

SEQ ID NO: 965143 - RNA, 23 nt, Human
ucuuugguguuuaaccuaauggg

SEQ ID NO: 965144 - RNA, 23 nt, Human
ucuuuuccucaacccuggcugga

SEQ ID NO: 965145 - RNA, 21 nt, Human
ugaaaaaaaaaaaaaagaagc

SEQ ID NO: 965146 - RNA, 22 nt, Human
ugaaaccccgucuccacuaaaa

SEQ ID NO: 965147 - RNA, 21 nt, Human
ugaccagggggcaacgaggag

SEQ ID NO: 965148 - RNA, 22 nt, Human
ugagaaacaacagucccccaag

SEQ ID NO: 965149 - RNA, 22 nt, Human
ugagaggaggaccugggcuggg

SEQ ID NO: 965150 - RNA, 22 nt, Human
ugagccgagaucgcgccacugc

SEQ ID NO: 965151 - RNA, 20 nt, Human
ugaggcaggagaaucgcuug

SEQ ID NO: 965152 - RNA, 22 nt, Human
ugaggcaggagaaucgcuugaa

SEQ ID NO: 965153 - RNA, 25 nt, Human
ugaggcaggagaaucgcuugaaucc

SEQ ID NO: 965154 - RNA, 20 nt, Human
ugaggcgggcggaucaccug

SEQ ID NO: 965155 - RNA, 24 nt, Human
ugaggcgggcggaucaccugaggu

SEQ ID NO: 965156 - RNA, 26 nt, Human
ugaggcgggcggaucaccugagguca

SEQ ID NO: 965157 - RNA, 20 nt, Human
ugauccaaggucuuuuccuc

SEQ ID NO: 965158 - RNA, 21 nt, Human
ugauuugaagaaccauguaac

SEQ ID NO: 965159 - RNA, 19 nt, Human
ugauuugcuuggaugucuc

SEQ ID NO: 965160 - RNA, 23 nt, Human
ugcccuguaaucccagcuacuug

SEQ ID NO: 965161 - RNA, 22 nt, Human
ugcugccuugcacgguccccuu

SEQ ID NO: 965162 - RNA, 20 nt, Human
uggaagggugaugagcccca

SEQ ID NO: 965163 - RNA, 24 nt, Human
uggccagcauggugaaaccccguc

SEQ ID NO: 965164 - RNA, 22 nt, Human
uggcucaugccuguaaucccag

SEQ ID NO: 965165 - RNA, 24 nt, Human
uggcucaugccuguaaucccagca

SEQ ID NO: 965166 - RNA, 21 nt, Human
uggcugugcauugcuguguga

SEQ ID NO: 965167 - RNA, 19 nt, Human
uggggaagggaaguggcug

SEQ ID NO: 965168 - RNA, 18 nt, Human
ugggugugguggcucaug

SEQ ID NO: 965169 - RNA, 24 nt, Human
ugguggcucaugccuguaauccca

SEQ ID NO: 965170 - RNA, 22 nt, Human
uuaaagugugugguuaaugccu

SEQ ID NO: 965171 - RNA, 25 nt, Human
uugagaggcugaggcaggagaaucg

SEQ ID NO: 965172 - RNA, 22 nt, Human
uugcacgguccccuuuuuagca

SEQ ID NO: 965173 - RNA, 19 nt, Human
uugcagugagccgagaucg

SEQ ID NO: 965174 - RNA, 22 nt, Human
uugcagugagccgagaucgcgc

SEQ ID NO: 965175 - RNA, 25 nt, Human
uuuccugaguucagcuagaauuaca

SEQ ID NO: 965176 - RNA, 22 nt, Human
uuugauccaaggucuuuuccuc

SEQ ID NO: 965177 - RNA, 19 nt, Human
uuugcagugagccgagauc

SEQ ID NO: 965178 - RNA, 21 nt, Human
uuugcagugagccgagaucgc

SEQ ID NO: 965179 - RNA, 25 nt, Human
aaaaaggaaccaaaguauaaaagga

SEQ ID NO: 965180 - RNA, 18 nt, Human
aaaagacgacccagacau

SEQ ID NO: 965181 - RNA, 27 nt, Human
aaaauaaaaauaaaaaaggaaccaaag

SEQ ID NO: 965182 - RNA, 19 nt, Human
aaagaagucggcucauaac

SEQ ID NO: 965183 - RNA, 19 nt, Human
aaaggccccugggaguggc

SEQ ID NO: 965184 - RNA, 24 nt, Human
aagaggccaagugcagguccaugg

SEQ ID NO: 965185 - RNA, 19 nt, Human
aagcaaaugaguuaugaga

SEQ ID NO: 965186 - RNA, 23 nt, Human
aaucugccccucaggccucccuu

SEQ ID NO: 965187 - RNA, 20 nt, Human
acacuggggacaugcccagg

SEQ ID NO: 965188 - RNA, 27 nt, Human
acccugcagcggccucuuccccccagg

SEQ ID NO: 965189 - RNA, 25 nt, Human
agaagggcauccccaagccugaggg

SEQ ID NO: 965190 - RNA, 25 nt, Human
agacaugccagcaccuaguucaggc

SEQ ID NO: 965191 - RNA, 23 nt, Human
agcacagcgcagcagucacuggc

SEQ ID NO: 965192 - RNA, 20 nt, Human
agccagcccagucuagcccc

SEQ ID NO: 965193 - RNA, 20 nt, Human
agcgggaggcgcaaggcguu

SEQ ID NO: 965194 - RNA, 21 nt, Human
agcuccccggcugcacagugc

SEQ ID NO: 965195 - RNA, 19 nt, Human
agcuggggucacuucaggg

SEQ ID NO: 965196 - RNA, 18 nt, Human
agcuggugggcaccagcg

SEQ ID NO: 965197 - RNA, 26 nt, Human
aggccagaggccagaacaccaaagaa

SEQ ID NO: 965198 - RNA, 18 nt, Human
aggcugggccagggcacc

SEQ ID NO: 965199 - RNA, 21 nt, Human
agggaggccuggggcugcagg

SEQ ID NO: 965200 - RNA, 20 nt, Human
aucuauguuaccuccuccuc

SEQ ID NO: 965201 - RNA, 22 nt, Human
aucuauguuaccuccuccucca

SEQ ID NO: 965202 - RNA, 21 nt, Human
augcccaggaugaccagcauc

SEQ ID NO: 965203 - RNA, 23 nt, Human
augugcugcagagccagcuggug

SEQ ID NO: 965204 - RNA, 26 nt, Human
caaaagacgacccagacaugccagca

SEQ ID NO: 965205 - RNA, 24 nt, Human
caaaucacauagauugagaaauuu

SEQ ID NO: 965206 - RNA, 26 nt, Human
caaaucacauagauugagaaauuuuc

SEQ ID NO: 965207 - RNA, 21 nt, Human
caacaccauggcacccccaca

SEQ ID NO: 965208 - RNA, 22 nt, Human
caacaccauggcacccccacac

SEQ ID NO: 965209 - RNA, 24 nt, Human
cacacucccgcuguuuuguccucc

SEQ ID NO: 965210 - RNA, 18 nt, Human
caccauggcacccccaca

SEQ ID NO: 965211 - RNA, 22 nt, Human
caccauggcacccccacacucc

SEQ ID NO: 965212 - RNA, 20 nt, Human
caccccaggcucugcuuccc

SEQ ID NO: 965213 - RNA, 23 nt, Human
cacccugggucuguccaccagcc

SEQ ID NO: 965214 - RNA, 23 nt, Human
caccugaagcugcauuugggagc

SEQ ID NO: 965215 - RNA, 18 nt, Human
cacugcaccgccacagga

SEQ ID NO: 965216 - RNA, 19 nt, Human
cacugcaccgccacaggag

SEQ ID NO: 965217 - RNA, 21 nt, Human
cacugcaccgccacaggagca

SEQ ID NO: 965218 - RNA, 22 nt, Human
cacugccauuuagugacagagc

SEQ ID NO: 965219 - RNA, 20 nt, Human
cagaacaccaaagaagucgg

SEQ ID NO: 965220 - RNA, 21 nt, Human
cagaacaccaaagaagucggc

SEQ ID NO: 965221 - RNA, 20 nt, Human
cagaggccuccagugcuccc

SEQ ID NO: 965222 - RNA, 18 nt, Human
cagcagaguggggcaugg

SEQ ID NO: 965223 - RNA, 23 nt, Human
cagcauccagccuggggccugga

SEQ ID NO: 965224 - RNA, 25 nt, Human
cagccuggccaccaaaccagcccaa

SEQ ID NO: 965225 - RNA, 24 nt, Human
cagccuuuuuccuccucuaggcuc

SEQ ID NO: 965226 - RNA, 19 nt, Human
cagcuggugggcaccagcg

SEQ ID NO: 965227 - RNA, 18 nt, Human
cagggucacuggacuuca

SEQ ID NO: 965228 - RNA, 19 nt, Human
cagucuagccccacucuca

SEQ ID NO: 965229 - RNA, 18 nt, Human
cauagcccacugucccuc

SEQ ID NO: 965230 - RNA, 19 nt, Human
caugccagcccagggagcc

SEQ ID NO: 965231 - RNA, 24 nt, Human
ccaaagaagucggcucauaaccag

SEQ ID NO: 965232 - RNA, 18 nt, Human
ccacagaaucuugcagag

SEQ ID NO: 965233 - RNA, 21 nt, Human
ccacaggcugggccagggcac

SEQ ID NO: 965234 - RNA, 22 nt, Human
ccaccucagcacacuuccccua

SEQ ID NO: 965235 - RNA, 22 nt, Human
ccaccuguccuccugccacuuc

SEQ ID NO: 965236 - RNA, 19 nt, Human
ccaggcaugaaccaaucug

SEQ ID NO: 965237 - RNA, 19 nt, Human
ccagucuucugguuucaga

SEQ ID NO: 965238 - RNA, 19 nt, Human
cccaccaucaggcccaggc

SEQ ID NO: 965239 - RNA, 21 nt, Human
ccccaccaucaggcccaggca

SEQ ID NO: 965240 - RNA, 19 nt, Human
ccccacucucagccccaga

SEQ ID NO: 965241 - RNA, 19 nt, Human
ccccagaacccagcaucca

SEQ ID NO: 965242 - RNA, 22 nt, Human
ccccaggcaugaaccaaucugc

SEQ ID NO: 965243 - RNA, 18 nt, Human
cccccgccacagcugccu

SEQ ID NO: 965244 - RNA, 23 nt, Human
ccccgccacagcugccucucccg

SEQ ID NO: 965245 - RNA, 23 nt, Human
ccccugagguggagaccccgggg

SEQ ID NO: 965246 - RNA, 23 nt, Human
cccgcaaucuccggcccuuuuaa

SEQ ID NO: 965247 - RNA, 21 nt, Human
cccguauuuauugcccaaagc

SEQ ID NO: 965248 - RNA, 21 nt, Human
cccuccaacaccauggcaccc

SEQ ID NO: 965249 - RNA, 20 nt, Human
cccugaaucaguuagagcuc

SEQ ID NO: 965250 - RNA, 24 nt, Human
cccugggccacugccugaggaccc

SEQ ID NO: 965251 - RNA, 25 nt, Human
cccugggccacugccugaggacccu

SEQ ID NO: 965252 - RNA, 23 nt, Human
ccuacccuaagaugccacccugc

SEQ ID NO: 965253 - RNA, 19 nt, Human
ccuccagugcucccugauu

SEQ ID NO: 965254 - RNA, 18 nt, Human
ccucuggccuaagucucc

SEQ ID NO: 965255 - RNA, 22 nt, Human
ccuuuguacagcuugcucuucc

SEQ ID NO: 965256 - RNA, 24 nt, Human
cuaacccuucucccccuccucacg

SEQ ID NO: 965257 - RNA, 20 nt, Human
cuagguggggucaggagggg

SEQ ID NO: 965258 - RNA, 18 nt, Human
cucaaaaaggccugcccc

SEQ ID NO: 965259 - RNA, 18 nt, Human
cuccacuguagguugagc

SEQ ID NO: 965260 - RNA, 22 nt, Human
cuccaggccuaaucuggcucgc

SEQ ID NO: 965261 - RNA, 21 nt, Human
cuccccuccccaugccagccc

SEQ ID NO: 965262 - RNA, 21 nt, Human
cuccccugagguggagacccc

SEQ ID NO: 965263 - RNA, 21 nt, Human
cuccugcccuuuucccaggcc

SEQ ID NO: 965264 - RNA, 23 nt, Human
cucgggguuuccugccccuaagg

SEQ ID NO: 965265 - RNA, 22 nt, Human
cucucagccccagaacccagcc

SEQ ID NO: 965266 - RNA, 22 nt, Human
cugaggcuggugcuucccccug

SEQ ID NO: 965267 - RNA, 20 nt, Human
cugagggcauguuugaagug

SEQ ID NO: 965268 - RNA, 18 nt, Human
cugcucccugcaggugca

SEQ ID NO: 965269 - RNA, 19 nt, Human
cuggccucagcagaguggg

SEQ ID NO: 965270 - RNA, 25 nt, Human
cuuagccuccaccccaggcaugaac

SEQ ID NO: 965271 - RNA, 22 nt, Human
cuucugcugaggccaacugcag

SEQ ID NO: 965272 - RNA, 19 nt, Human
cuuuguacagcuugcucuu

SEQ ID NO: 965273 - RNA, 20 nt, Human
cuuuguacagcuugcucuuc

SEQ ID NO: 965274 - RNA, 24 nt, Human
cuuuguacagcuugcucuuccuuc

SEQ ID NO: 965275 - RNA, 22 nt, Human
gacuccacggccagcuugacau

SEQ ID NO: 965276 - RNA, 20 nt, Human
gagcuggggucacuucaggg

SEQ ID NO: 965277 - RNA, 22 nt, Human
gagcuggggucacuucaggggc

SEQ ID NO: 965278 - RNA, 18 nt, Human
gagguggagaccccgggg

SEQ ID NO: 965279 - RNA, 23 nt, Human
gagucuacggcccugccccucag

SEQ ID NO: 965280 - RNA, 21 nt, Human
gcaccaggccucuggcagggg

SEQ ID NO: 965281 - RNA, 21 nt, Human
gcaugaaccaaucugccccuc

SEQ ID NO: 965282 - RNA, 19 nt, Human
gcccacugucccucuguca

SEQ ID NO: 965283 - RNA, 22 nt, Human
gcccauggaaggcccaccucag

SEQ ID NO: 965284 - RNA, 27 nt, Human
gccugccccuccaacaccauggcaccc

SEQ ID NO: 965285 - RNA, 25 nt, Human
gccuggggcugcagguggaggcuuc

SEQ ID NO: 965286 - RNA, 21 nt, Human
gcuccgcagaaggcagccagc

SEQ ID NO: 965287 - RNA, 21 nt, Human
gcuccugcccuuuucccaggc

SEQ ID NO: 965288 - RNA, 23 nt, Human
ggacccuagcuccagggucacug

SEQ ID NO: 965289 - RNA, 24 nt, Human
ggagaugggagccagcagcaaggg

SEQ ID NO: 965290 - RNA, 18 nt, Human
ggagccagcagcaagggg

SEQ ID NO: 965291 - RNA, 23 nt, Human
ggagcuggggucacuucaggggc

SEQ ID NO: 965292 - RNA, 21 nt, Human
ggaguggaggcugagagaagg

SEQ ID NO: 965293 - RNA, 20 nt, Human
ggccaccaaaccagcccaac

SEQ ID NO: 965294 - RNA, 21 nt, Human
ggccaggcagggacaccaggg

SEQ ID NO: 965295 - RNA, 20 nt, Human
ggccagggcaccaggccucu

SEQ ID NO: 965296 - RNA, 18 nt, Human
ggcugcacugaggcuggu

SEQ ID NO: 965297 - RNA, 28 nt, Human
ggcuggugcuucccccugguuugggccu

SEQ ID NO: 965298 - RNA, 23 nt, Human
gggaaccccuugauccagucuuc

SEQ ID NO: 965299 - RNA, 19 nt, Human
gggaauggaagaagggcau

SEQ ID NO: 965300 - RNA, 21 nt, Human
gggaggccuggggcugcaggu

SEQ ID NO: 965301 - RNA, 21 nt, Human
gggcagcaggugggcugcucc

SEQ ID NO: 965302 - RNA, 20 nt, Human
gggcaggcagccuugguggc

SEQ ID NO: 965303 - RNA, 19 nt, Human
gggcaugggugcuggguga

SEQ ID NO: 965304 - RNA, 23 nt, Human
gggccaggcagggacaccagggg

SEQ ID NO: 965305 - RNA, 23 nt, Human
gggcccaggacugcugggguugg

SEQ ID NO: 965306 - RNA, 20 nt, Human
gggggagggaggccuggggc

SEQ ID NO: 965307 - RNA, 24 nt, Human
ggugcagaccaccuucucuccccu

SEQ ID NO: 965308 - RNA, 21 nt, Human
ggugcugggugaagguuuccc

SEQ ID NO: 965309 - RNA, 21 nt, Human
gguggguaggcaguuuugguc

SEQ ID NO: 965310 - RNA, 19 nt, Human
gucuacggcccugccccuc

SEQ ID NO: 965311 - RNA, 24 nt, Human
gugcugcagagccagcuggugggc

SEQ ID NO: 965312 - RNA, 23 nt, Human
uaaaaugucccuccucggccccc

SEQ ID NO: 965313 - RNA, 18 nt, Human
uaacccuucucccccucc

SEQ ID NO: 965314 - RNA, 20 nt, Human
uagauugagaaauuuucuga

SEQ ID NO: 965315 - RNA, 19 nt, Human
uagguggggucaggagggg

SEQ ID NO: 965316 - RNA, 23 nt, Human
ucacacccaccccaggcucugcu

SEQ ID NO: 965317 - RNA, 22 nt, Human
ucacccugcucacacccacccc

SEQ ID NO: 965318 - RNA, 20 nt, Human
uccaacaccauggcaccccc

SEQ ID NO: 965319 - RNA, 21 nt, Human
uccaugguuccugccaagcac

SEQ ID NO: 965320 - RNA, 18 nt, Human
ucccccugguuugggccu

SEQ ID NO: 965321 - RNA, 20 nt, Human
ucccugauucccugggccac

SEQ ID NO: 965322 - RNA, 19 nt, Human
ucccugcaggugcagccgu

SEQ ID NO: 965323 - RNA, 21 nt, Human
ucccugggccacugccugagg

SEQ ID NO: 965324 - RNA, 23 nt, Human
ucccugggccacugccugaggac

SEQ ID NO: 965325 - RNA, 23 nt, Human
uccugcccuuuucccaggccaga

SEQ ID NO: 965326 - RNA, 18 nt, Human
ucugacaucucacugcca

SEQ ID NO: 965327 - RNA, 19 nt, Human
ucugauaggugucuaagga

SEQ ID NO: 965328 - RNA, 21 nt, Human
ucuugcagaggccuccagugc

SEQ ID NO: 965329 - RNA, 25 nt, Human
ucuugcagaggccuccagugcuccc

SEQ ID NO: 965330 - RNA, 22 nt, Human
ugaagugaccagaggagggcca

SEQ ID NO: 965331 - RNA, 20 nt, Human
ugaccagaggagggccaggc

SEQ ID NO: 965332 - RNA, 19 nt, Human
ugagaugcugaggccacag

SEQ ID NO: 965333 - RNA, 18 nt, Human
ugaggcugccagagugag

SEQ ID NO: 965334 - RNA, 22 nt, Human
ugaggcuggugcuucccccugg

SEQ ID NO: 965335 - RNA, 21 nt, Human
ugagguuaaaaagacgcugca

SEQ ID NO: 965336 - RNA, 23 nt, Human
ugagguuaaaaagacgcugcaaa

SEQ ID NO: 965337 - RNA, 24 nt, Human
ugaguuaugagaugcugaggccac

SEQ ID NO: 965338 - RNA, 22 nt, Human
ugcagagccagcuggugggcac

SEQ ID NO: 965339 - RNA, 19 nt, Human
ugccauuuagugacagagc

SEQ ID NO: 965340 - RNA, 25 nt, Human
ugcccaggaugaccagcaucugagc

SEQ ID NO: 965341 - RNA, 28 nt, Human
ugccuggagcuggggucacuucaggggc

SEQ ID NO: 965342 - RNA, 22 nt, Human
uggaaggaggaucuucccgaag

SEQ ID NO: 965343 - RNA, 18 nt, Human
uggagaccccgggggagg

SEQ ID NO: 965344 - RNA, 21 nt, Human
uggaguuuugacaaccccaca

SEQ ID NO: 965345 - RNA, 21 nt, Human
uggcagggggagggcgggaag

SEQ ID NO: 965346 - RNA, 24 nt, Human
uggccaccaaaccagcccaacucc

SEQ ID NO: 965347 - RNA, 22 nt, Human
uggccuaggcauucucaggcau

SEQ ID NO: 965348 - RNA, 18 nt, Human
ugggaguggcugaggcug

SEQ ID NO: 965349 - RNA, 20 nt, Human
ugggauggggcaggcagccu

SEQ ID NO: 965350 - RNA, 23 nt, Human
ugggauggggcaggcagccuugg

SEQ ID NO: 965351 - RNA, 24 nt, Human
uggggacaugcccaggaugaccag

SEQ ID NO: 965352 - RNA, 20 nt, Human
uggggcugcagguggaggcu

SEQ ID NO: 965353 - RNA, 19 nt, Human
uggguaggcaguuuugguc

SEQ ID NO: 965354 - RNA, 24 nt, Human
ugucuaaggagcuggccuaggcau

SEQ ID NO: 965355 - RNA, 20 nt, Human
ugugcugcagagccagcugg

SEQ ID NO: 965356 - RNA, 21 nt, Human
uucacauuauggugggauugg

SEQ ID NO: 965357 - RNA, 22 nt, Human
uuccuggucugcaaaugggagg

SEQ ID NO: 965358 - RNA, 24 nt, Human
uucuagguggggucaggagggggc

SEQ ID NO: 965359 - RNA, 27 nt, Human
uuggucccaagauaaagugcacaagaa

SEQ ID NO: 965360 - RNA, 21 nt, Human
uuuggcaaaggucaacugcuc

SEQ ID NO: 965361 - RNA, 18 nt, Human
uuuucagcuucacacaua

SEQ ID NO: 965362 - RNA, 22 nt, Human
uuuuuuuuuuuuuuuuuuuggc

SEQ ID NO: 965363 - RNA, 21 nt, Human
aaaccuaacauuggaagccau

SEQ ID NO: 965364 - RNA, 21 nt, Human
aacacaaaauaggcagcuaga

SEQ ID NO: 965365 - RNA, 20 nt, Human
aagaccccugugagccaggg

SEQ ID NO: 965366 - RNA, 19 nt, Human
acacccagggcaacaagac

SEQ ID NO: 965367 - RNA, 24 nt, Human
acccaacauucuccccuaaugucu

SEQ ID NO: 965368 - RNA, 22 nt, Human
agaaaugauauccccuggaccc

SEQ ID NO: 965369 - RNA, 19 nt, Human
agggauagucacguaccca

SEQ ID NO: 965370 - RNA, 21 nt, Human
agggggauggucagggugugg

SEQ ID NO: 965371 - RNA, 24 nt, Human
agucauuggggggagcuuuuggga

SEQ ID NO: 965372 - RNA, 21 nt, Human
augugcuggaaaaaauaaacc

SEQ ID NO: 965373 - RNA, 18 nt, Human
caaaauaggcagcuagag

SEQ ID NO: 965374 - RNA, 22 nt, Human
caaaauaggcagcuagagcucc

SEQ ID NO: 965375 - RNA, 19 nt, Human
caacaagaccccugugagc

SEQ ID NO: 965376 - RNA, 22 nt, Human
caacaagaccccugugagccag

SEQ ID NO: 965377 - RNA, 21 nt, Human
cagaagggauaaagggggaug

SEQ ID NO: 965378 - RNA, 21 nt, Human
cagcaaauaagccacauuucc

SEQ ID NO: 965379 - RNA, 24 nt, Human
cagccucugaguaucugaugaccu

SEQ ID NO: 965380 - RNA, 21 nt, Human
cagcuggccucaguaguuuca

SEQ ID NO: 965381 - RNA, 21 nt, Human
cagggcagagauacagccucu

SEQ ID NO: 965382 - RNA, 20 nt, Human
cauuucccagccuccauucc

SEQ ID NO: 965383 - RNA, 22 nt, Human
ccagcuggccucaguaguuuca

SEQ ID NO: 965384 - RNA, 20 nt, Human
ccccugugagccaggguagc

SEQ ID NO: 965385 - RNA, 18 nt, Human
ccccuuuccuccauuuuc

SEQ ID NO: 965386 - RNA, 20 nt, Human
ccccuuuccuccauuuuccc

SEQ ID NO: 965387 - RNA, 24 nt, Human
cccuuugcucuucuccccuuuccu

SEQ ID NO: 965388 - RNA, 24 nt, Human
ccugugagccaggguagcuccaga

SEQ ID NO: 965389 - RNA, 23 nt, Human
ccuuacuaauaccagcuggccuc

SEQ ID NO: 965390 - RNA, 18 nt, Human
cuaaacacaaaauaggca

SEQ ID NO: 965391 - RNA, 19 nt, Human
cuagagcuccaguaaccau

SEQ ID NO: 965392 - RNA, 24 nt, Human
cucuucuccccuuuccuccauuuu

SEQ ID NO: 965393 - RNA, 19 nt, Human
cugccuacccaacauucuc

SEQ ID NO: 965394 - RNA, 21 nt, Human
cuuugcucuucuccccuuucc

SEQ ID NO: 965395 - RNA, 22 nt, Human
gagaucaaaauccaaacaccag

SEQ ID NO: 965396 - RNA, 23 nt, Human
gaggcccuaugguaaaagagggc

SEQ ID NO: 965397 - RNA, 22 nt, Human
gauucuuuucaagaacugggga

SEQ ID NO: 965398 - RNA, 20 nt, Human
gccacauuucccagccucca

SEQ ID NO: 965399 - RNA, 22 nt, Human
gccuacccaacauucuccccua

SEQ ID NO: 965400 - RNA, 20 nt, Human
gcucuucuccccuuuccucc

SEQ ID NO: 965401 - RNA, 19 nt, Human
ggagcuuuugggaaagcuc

SEQ ID NO: 965402 - RNA, 24 nt, Human
ggggggagcuuuugggaaagcucu

SEQ ID NO: 965403 - RNA, 23 nt, Human
ggucaggguguggccccucccag

SEQ ID NO: 965404 - RNA, 19 nt, Human
gucauuggggggagcuuuu

SEQ ID NO: 965405 - RNA, 22 nt, Human
uaagccacauuucccagccucc

SEQ ID NO: 965406 - RNA, 23 nt, Human
uagcaaaccuaacauuggaagcc

SEQ ID NO: 965407 - RNA, 21 nt, Human
uagcuccagaaguccaagaug

SEQ ID NO: 965408 - RNA, 23 nt, Human
uauccccuggacccagacuuccu

SEQ ID NO: 965409 - RNA, 25 nt, Human
uauuagggauagucacguacccagc

SEQ ID NO: 965410 - RNA, 22 nt, Human
ucaaaauccaaacaccaggagg

SEQ ID NO: 965411 - RNA, 18 nt, Human
ucaguaguuucacagguc

SEQ ID NO: 965412 - RNA, 24 nt, Human
ucaguaguuucacagguccuucuc

SEQ ID NO: 965413 - RNA, 19 nt, Human
uccccuuuccuccauuuuc

SEQ ID NO: 965414 - RNA, 21 nt, Human
ucuucuccccuuuccuccauu

SEQ ID NO: 965415 - RNA, 21 nt, Human
ugagaucaaaauccaaacacc

SEQ ID NO: 965416 - RNA, 19 nt, Human
ugagauggaagcaaaaguc

SEQ ID NO: 965417 - RNA, 21 nt, Human
ugcucuucuccccuuuccucc

SEQ ID NO: 965418 - RNA, 21 nt, Human
uggaagcaaaagucauugggg

SEQ ID NO: 965419 - RNA, 22 nt, Human
uggaagccauuugucaagguug

SEQ ID NO: 965420 - RNA, 23 nt, Human
uggccccucccaggcugauucuu

SEQ ID NO: 965421 - RNA, 21 nt, Human
uguccugccaguccuggacuc

SEQ ID NO: 965422 - RNA, 22 nt, Human
uuaguuugagucgcucuuccua

SEQ ID NO: 965423 - RNA, 19 nt, Human
uucaagaacuggggacacc

SEQ ID NO: 965424 - RNA, 21 nt, Human
uuugcucuucuccccuuuccu

SEQ ID NO: 965425 - RNA, 26 nt, Human
aaagugcuggaauuuuauaggcauga

SEQ ID NO: 965426 - RNA, 24 nt, Human
aaagugcugggauuacaggcguga

SEQ ID NO: 965427 - RNA, 21 nt, Human
aaauaauccacaaaguugaac

SEQ ID NO: 965428 - RNA, 21 nt, Human
aacaaaagccauagcaaagag

SEQ ID NO: 965429 - RNA, 20 nt, Human
aagagcacaccaaaaaaugc

SEQ ID NO: 965430 - RNA, 24 nt, Human
aagagcuuugaaauaccuauuugc

SEQ ID NO: 965431 - RNA, 23 nt, Human
aagcaaauacaaagauucagaau

SEQ ID NO: 965432 - RNA, 25 nt, Human
aagcgauucuccugccuuagccucc

SEQ ID NO: 965433 - RNA, 23 nt, Human
aaggucuguuuccugugcuuuuu

SEQ ID NO: 965434 - RNA, 24 nt, Human
aaguagcugggauuauaggcaugu

SEQ ID NO: 965435 - RNA, 24 nt, Human
aagugauccuccugccuuggccuc

SEQ ID NO: 965436 - RNA, 19 nt, Human
aagugcugggauuacaggc

SEQ ID NO: 965437 - RNA, 19 nt, Human
aagugcugggauuacaggc

SEQ ID NO: 965438 - RNA, 20 nt, Human
aaguuauuccaauuguuaac

SEQ ID NO: 965439 - RNA, 23 nt, Human
aaugaguacaaaaaaucauacaa

SEQ ID NO: 965440 - RNA, 21 nt, Human
acaccaaaaaaugcauccgaa

SEQ ID NO: 965441 - RNA, 24 nt, Human
acaccaaaaaaugcauccgaagaa

SEQ ID NO: 965442 - RNA, 19 nt, Human
acauugccuaggcuggucu

SEQ ID NO: 965443 - RNA, 23 nt, Human
accucuacucuaagccaagaauc

SEQ ID NO: 965444 - RNA, 20 nt, Human
acgggguuuguccauguugg

SEQ ID NO: 965445 - RNA, 24 nt, Human
acgggguuuguccauguuggucag

SEQ ID NO: 965446 - RNA, 24 nt, Human
acuuauuuugcucaaugguuucug

SEQ ID NO: 965447 - RNA, 21 nt, Human
acuucagccuccugaguagcu

SEQ ID NO: 965448 - RNA, 21 nt, Human
agaaaugcuucugugauuucu

SEQ ID NO: 965449 - RNA, 21 nt, Human
agaggaaaaauaauccacaaa

SEQ ID NO: 965450 - RNA, 26 nt, Human
agcaaaaagguuucuuucuccccugg

SEQ ID NO: 965451 - RNA, 25 nt, Human
aggcaggagugcaauggugcgaucu

SEQ ID NO: 965452 - RNA, 19 nt, Human
aggcaugagccaccaugcc

SEQ ID NO: 965453 - RNA, 20 nt, Human
aggcaugagccaccgugccc

SEQ ID NO: 965454 - RNA, 21 nt, Human
aggcaugagccaccgugcccg

SEQ ID NO: 965455 - RNA, 23 nt, Human
aggcaugagccaccgugcccggc

SEQ ID NO: 965456 - RNA, 21 nt, Human
aggcucaagugauccuccugc

SEQ ID NO: 965457 - RNA, 22 nt, Human
aggcucaagugauccuccugcc

SEQ ID NO: 965458 - RNA, 23 nt, Human
agggucucgcuguggcacccagg

SEQ ID NO: 965459 - RNA, 24 nt, Human
aggugaucugcccgccucagccuc

SEQ ID NO: 965460 - RNA, 23 nt, Human
aguagcugggacuaaaggcaugu

SEQ ID NO: 965461 - RNA, 20 nt, Human
agugcaauggugcgaucucg

SEQ ID NO: 965462 - RNA, 24 nt, Human
agugcaauggugcgaucucggcuc

SEQ ID NO: 965463 - RNA, 21 nt, Human
agugcaguggcacaauuucag

SEQ ID NO: 965464 - RNA, 18 nt, Human
agugcugggauuacaggc

SEQ ID NO: 965465 - RNA, 18 nt, Human
auaggguuucgccauguu

SEQ ID NO: 965466 - RNA, 19 nt, Human
auaggguuucgccauguug

SEQ ID NO: 965467 - RNA, 24 nt, Human
auaggguuucgccauguugcccag

SEQ ID NO: 965468 - RNA, 21 nt, Human
caaaaaaugcauccgaagaaa

SEQ ID NO: 965469 - RNA, 23 nt, Human
caaaaaaugcauccgaagaaaca

SEQ ID NO: 965470 - RNA, 26 nt, Human
caaagugcuggaauuuuauaggcaug

SEQ ID NO: 965471 - RNA, 24 nt, Human
caaagugcugggauuacaggcgug

SEQ ID NO: 965472 - RNA, 18 nt, Human
caacuucagccuccugag

SEQ ID NO: 965473 - RNA, 22 nt, Human
caagcgauucuccugccuuagc

SEQ ID NO: 965474 - RNA, 22 nt, Human
caagugauccuccugccuuggc

SEQ ID NO: 965475 - RNA, 27 nt, Human
caagugauccuccugccuuggccuccc

SEQ ID NO: 965476 - RNA, 27 nt, Human
caagugauccuccugccuuggccuccc

SEQ ID NO: 965477 - RNA, 18 nt, Human
caccaugccuggccuauu

SEQ ID NO: 965478 - RNA, 24 nt, Human
caccaugucuggcuaauuuuugua

SEQ ID NO: 965479 - RNA, 21 nt, Human
cacugcaaccuccgccucccg

SEQ ID NO: 965480 - RNA, 23 nt, Human
cacugcaaccuccgccucccggg

SEQ ID NO: 965481 - RNA, 20 nt, Human
cagccuccugaguagcuggg

SEQ ID NO: 965482 - RNA, 23 nt, Human
caucucgugggcucaagccaucc

SEQ ID NO: 965483 - RNA, 24 nt, Human
caugagccaccaugccuggccuau

SEQ ID NO: 965484 - RNA, 24 nt, Human
cauguugcccaggauggucucaaa

SEQ ID NO: 965485 - RNA, 22 nt, Human
cauugccuaggcuggucuugaa

SEQ ID NO: 965486 - RNA, 26 nt, Human
ccaaagugcuggaauuuuauaggcau

SEQ ID NO: 965487 - RNA, 22 nt, Human
ccaaagugcugggauuacaggc

SEQ ID NO: 965488 - RNA, 22 nt, Human
ccaaagugcugggauuacaggc

SEQ ID NO: 965489 - RNA, 24 nt, Human
ccaaagugcugggauuacaggcgu

SEQ ID NO: 965490 - RNA, 22 nt, Human
ccaaauaaaccaaauauuuaca

SEQ ID NO: 965491 - RNA, 24 nt, Human
ccaaguagcugggauuauaggcau

SEQ ID NO: 965492 - RNA, 18 nt, Human
ccacugcccaauucugcu

SEQ ID NO: 965493 - RNA, 21 nt, Human
ccauagcaaagaguuacaaag

SEQ ID NO: 965494 - RNA, 22 nt, Human
ccauguugcccaggauggucuc

SEQ ID NO: 965495 - RNA, 19 nt, Human
ccauguuggucaggcuggu

SEQ ID NO: 965496 - RNA, 22 nt, Human
ccauguuggucaggcuggucuc

SEQ ID NO: 965497 - RNA, 23 nt, Human
cccaaguagcugggauuauaggc

SEQ ID NO: 965498 - RNA, 24 nt, Human
cccaaguagcugggauuauaggca

SEQ ID NO: 965499 - RNA, 20 nt, Human
cccggguucaagcgauucuc

SEQ ID NO: 965500 - RNA, 23 nt, Human
cccggguucaagcgauucuccug

SEQ ID NO: 965501 - RNA, 24 nt, Human
ccgccucagccucccaaagugcug

SEQ ID NO: 965502 - RNA, 24 nt, Human
ccgccucccggguucaagcgauuc

SEQ ID NO: 965503 - RNA, 20 nt, Human
ccgcgcccggccuguuacuu

SEQ ID NO: 965504 - RNA, 24 nt, Human
ccucccggguucaagcgauucucc

SEQ ID NO: 965505 - RNA, 26 nt, Human
ccuccugccuuggccucccaaagugc

SEQ ID NO: 965506 - RNA, 22 nt, Human
ccugaccucaggugaucugccc

SEQ ID NO: 965507 - RNA, 19 nt, Human
ccugaguagcugggacuaa

SEQ ID NO: 965508 - RNA, 23 nt, Human
ccugccuuagccucccaaguagc

SEQ ID NO: 965509 - RNA, 24 nt, Human
ccugccuuggccucccaaagugcu

SEQ ID NO: 965510 - RNA, 25 nt, Human
ccuuagccucccaaguagcugggau

SEQ ID NO: 965511 - RNA, 24 nt, Human
cgccauguugcccaggauggucuc

SEQ ID NO: 965512 - RNA, 27 nt, Human
cgccauguugcccaggauggucucaaa

SEQ ID NO: 965513 - RNA, 21 nt, Human
cucaaauaaucugccugccuc

SEQ ID NO: 965514 - RNA, 20 nt, Human
cucaagugauccuccugccu

SEQ ID NO: 965515 - RNA, 24 nt, Human
cucaagugauccuccugccuuggc

SEQ ID NO: 965516 - RNA, 24 nt, Human
cucacugcaaccuccgccucccgg

SEQ ID NO: 965517 - RNA, 26 nt, Human
cuccugaccucaggugaucugcccgc

SEQ ID NO: 965518 - RNA, 24 nt, Human
cucuacucuaagccaagaauccaa

SEQ ID NO: 965519 - RNA, 18 nt, Human
cucucucuuuuuuuuaaa

SEQ ID NO: 965520 - RNA, 23 nt, Human
cugcaaccuccgccucccggguu

SEQ ID NO: 965521 - RNA, 24 nt, Human
cugcaaccuccgccucccggguuc

SEQ ID NO: 965522 - RNA, 29 nt, Human
cugccaauuuuguauuuuuaguagagacg

SEQ ID NO: 965523 - RNA, 21 nt, Human
cugccugccucggccucccag

SEQ ID NO: 965524 - RNA, 23 nt, Human
cugccuuagccucccaaguagcu

SEQ ID NO: 965525 - RNA, 21 nt, Human
cuuauaggcaugagccaccau

SEQ ID NO: 965526 - RNA, 21 nt, Human
cuuuuguuacuuuuuccuuuu

SEQ ID NO: 965527 - RNA, 21 nt, Human
gaaaaaacagucaauagcaaa

SEQ ID NO: 965528 - RNA, 24 nt, Human
gaaaaaacagucaauagcaaaaag

SEQ ID NO: 965529 - RNA, 24 nt, Human
gaccucaggugaucugcccgccuc

SEQ ID NO: 965530 - RNA, 23 nt, Human
gagacgggguuuguccauguugg

SEQ ID NO: 965531 - RNA, 24 nt, Human
gagacgggguuuguccauguuggu

SEQ ID NO: 965532 - RNA, 24 nt, Human
gagcucaaauaaucugccugccuc

SEQ ID NO: 965533 - RNA, 20 nt, Human
gaguagcugggacuaaaggc

SEQ ID NO: 965534 - RNA, 23 nt, Human
gccucagccucccaaagugcugg

SEQ ID NO: 965535 - RNA, 22 nt, Human
gccuuggccucccaaagugcug

SEQ ID NO: 965536 - RNA, 24 nt, Human
gcgauucuccugccuuagccuccc

SEQ ID NO: 965537 - RNA, 23 nt, Human
gcuggucuccaacuccugaccuc

SEQ ID NO: 965538 - RNA, 24 nt, Human
gcuuauaggcaugagccaccaugc

SEQ ID NO: 965539 - RNA, 23 nt, Human
ggagugcaauggugcgaucucgg

SEQ ID NO: 965540 - RNA, 24 nt, Human
ggcuggucuccaacuccugaccuc

SEQ ID NO: 965541 - RNA, 23 nt, Human
gggguuuguccauguuggucagg

SEQ ID NO: 965542 - RNA, 21 nt, Human
ggguuucgccauguugcccag

SEQ ID NO: 965543 - RNA, 22 nt, Human
ggguuucgccauguugcccagg

SEQ ID NO: 965544 - RNA, 22 nt, Human
ggguuuguccauguuggucagg

SEQ ID NO: 965545 - RNA, 23 nt, Human
guagagacgggguuuguccaugu

SEQ ID NO: 965546 - RNA, 21 nt, Human
guagagauaggguuucgccau

SEQ ID NO: 965547 - RNA, 22 nt, Human
guagagauaggguuucgccaug

SEQ ID NO: 965548 - RNA, 18 nt, Human
guagcugggauuauaggc

SEQ ID NO: 965549 - RNA, 24 nt, Human
gugaucugcccgccucagccuccc

SEQ ID NO: 965550 - RNA, 22 nt, Human
uaaaauaaauagaaaugaggug

SEQ ID NO: 965551 - RNA, 22 nt, Human
uaaauuccgggcccgauuuuca

SEQ ID NO: 965552 - RNA, 24 nt, Human
uaacaggaaugaaugaguacaaaa

SEQ ID NO: 965553 - RNA, 23 nt, Human
uaagccaagaauccaagguaagc

SEQ ID NO: 965554 - RNA, 24 nt, Human
uaauuuuuguauuuuuuguagaga

SEQ ID NO: 965555 - RNA, 25 nt, Human
uacaaaaaaucauacaagaaacuag

SEQ ID NO: 965556 - RNA, 22 nt, Human
uacaggcgugacaacccgcgcc

SEQ ID NO: 965557 - RNA, 19 nt, Human
uacaguagugccaaauaaa

SEQ ID NO: 965558 - RNA, 24 nt, Human
uacauugccuaggcuggucuugaa

SEQ ID NO: 965559 - RNA, 22 nt, Human
uacgguuucuucuuaaacaacc

SEQ ID NO: 965560 - RNA, 19 nt, Human
uacuuuuuccuuuuuuuuu

SEQ ID NO: 965561 - RNA, 22 nt, Human
uagagauaggguuucgccaugu

SEQ ID NO: 965562 - RNA, 24 nt, Human
uagggucucgcuguggcacccagg

SEQ ID NO: 965563 - RNA, 24 nt, Human
uaggguuucgccauguugcccagg

SEQ ID NO: 965564 - RNA, 24 nt, Human
uaguagagacgggguuuguccaug

SEQ ID NO: 965565 - RNA, 26 nt, Human
uaugacagacauucauuuuugguacc

SEQ ID NO: 965566 - RNA, 21 nt, Human
uaugcuuuuacauuucgauca

SEQ ID NO: 965567 - RNA, 21 nt, Human
uauucacacaaauagaaguuu

SEQ ID NO: 965568 - RNA, 18 nt, Human
uauuuugcucaaugguuu

SEQ ID NO: 965569 - RNA, 20 nt, Human
ucacccccacugcccaauuc

SEQ ID NO: 965570 - RNA, 21 nt, Human
ucacccccacugcccaauucu

SEQ ID NO: 965571 - RNA, 23 nt, Human
ucacugcaaccuccgccucccgg

SEQ ID NO: 965572 - RNA, 24 nt, Human
ucacugcaaccuccgccucccggg

SEQ ID NO: 965573 - RNA, 25 nt, Human
ucacugcaaccuccgccucccgggu

SEQ ID NO: 965574 - RNA, 27 nt, Human
ucacugcaaccuccgccucccggguuc

SEQ ID NO: 965575 - RNA, 23 nt, Human
ucacugcaacuuccaucucgugg

SEQ ID NO: 965576 - RNA, 24 nt, Human
ucacugcaacuuccaucucguggg

SEQ ID NO: 965577 - RNA, 23 nt, Human
ucagccuccugaguagcugggac

SEQ ID NO: 965578 - RNA, 20 nt, Human
ucaggcuggucuccaacucc

SEQ ID NO: 965579 - RNA, 24 nt, Human
ucagucccaucuauagacuuauuu

SEQ ID NO: 965580 - RNA, 18 nt, Human
uccauguuggucaggcug

SEQ ID NO: 965581 - RNA, 26 nt, Human
ucccaaagugcuggaauuuuauaggc

SEQ ID NO: 965582 - RNA, 24 nt, Human
ucccaaagugcugggauuacaggc

SEQ ID NO: 965583 - RNA, 24 nt, Human
ucccaaguagcugggauuauaggc

SEQ ID NO: 965584 - RNA, 21 nt, Human
ucccggguucaagcgauucuc

SEQ ID NO: 965585 - RNA, 24 nt, Human
ucccggguucaagcgauucuccug

SEQ ID NO: 965586 - RNA, 23 nt, Human
uccuccauaacuuaaaaaaaacc

SEQ ID NO: 965587 - RNA, 24 nt, Human
uccugaguagcugggacuaaaggc

SEQ ID NO: 965588 - RNA, 24 nt, Human
ucgccauguugcccaggauggucu

SEQ ID NO: 965589 - RNA, 19 nt, Human
ucucaaacuccugagcuca

SEQ ID NO: 965590 - RNA, 20 nt, Human
ucucaagacauacauggaag

SEQ ID NO: 965591 - RNA, 26 nt, Human
ucuccugccuuagccucccaaguagc

SEQ ID NO: 965592 - RNA, 24 nt, Human
ucucgcuguggcacccaggcugaa

SEQ ID NO: 965593 - RNA, 21 nt, Human
ucugcccgccucagccuccca

SEQ ID NO: 965594 - RNA, 22 nt, Human
ucugccugccucggccucccag

SEQ ID NO: 965595 - RNA, 20 nt, Human
ucuuugggaauacuuaaaaa

SEQ ID NO: 965596 - RNA, 22 nt, Human
ucuuugggaauacuuaaaaauc

SEQ ID NO: 965597 - RNA, 22 nt, Human
ugaauauauucacacaaauaga

SEQ ID NO: 965598 - RNA, 18 nt, Human
ugaccucaggugaucugc

SEQ ID NO: 965599 - RNA, 20 nt, Human
ugaccucaggugaucugccc

SEQ ID NO: 965600 - RNA, 24 nt, Human
ugaccucaggugaucugcccgccu

SEQ ID NO: 965601 - RNA, 21 nt, Human
ugcagaauaaaguuauuccaa

SEQ ID NO: 965602 - RNA, 22 nt, Human
ugcaguggcacaauuucaguuc

SEQ ID NO: 965603 - RNA, 28 nt, Human
ugcccaggauggucucaaacuccugagc

SEQ ID NO: 965604 - RNA, 19 nt, Human
ugcccaggcaggagugcaa

SEQ ID NO: 965605 - RNA, 20 nt, Human
ugcccggccaguuauucucc

SEQ ID NO: 965606 - RNA, 21 nt, Human
ugccuaggcuggucuugaacu

SEQ ID NO: 965607 - RNA, 21 nt, Human
ugccucggccucccagggugc

SEQ ID NO: 965608 - RNA, 24 nt, Human
ugccuuagccucccaaguagcugg

SEQ ID NO: 965609 - RNA, 22 nt, Human
ugcugggauuacaggcgugaca

SEQ ID NO: 965610 - RNA, 20 nt, Human
uggcacaauuucaguucacu

SEQ ID NO: 965611 - RNA, 24 nt, Human
uggcacaauuucaguucacugcaa

SEQ ID NO: 965612 - RNA, 24 nt, Human
ugggacuaaaggcaugugccacca

SEQ ID NO: 965613 - RNA, 18 nt, Human
ugggauuacaggcgugac

SEQ ID NO: 965614 - RNA, 19 nt, Human
ugggauuacaggcgugaca

SEQ ID NO: 965615 - RNA, 22 nt, Human
ugggauuacaggcgugacaacc

SEQ ID NO: 965616 - RNA, 23 nt, Human
ugggauuacaggcgugacaaccc

SEQ ID NO: 965617 - RNA, 24 nt, Human
ugggauuacaggcgugacaacccg

SEQ ID NO: 965618 - RNA, 18 nt, Human
ugggauuauaggcaugug

SEQ ID NO: 965619 - RNA, 23 nt, Human
ugggauuauaggcaugugcacca

SEQ ID NO: 965620 - RNA, 24 nt, Human
ugguaccaccuuaaaaaauccuuu

SEQ ID NO: 965621 - RNA, 24 nt, Human
uggucaggcuggucuccaacuccu

SEQ ID NO: 965622 - RNA, 24 nt, Human
uguagagauaggguuucgccaugu

SEQ ID NO: 965623 - RNA, 21 nt, Human
uguauuuuuaguagagacggg

SEQ ID NO: 965624 - RNA, 26 nt, Human
uguggcacccaggcugaaaagugcag

SEQ ID NO: 965625 - RNA, 22 nt, Human
uguugcccaggcaggagugcaa

SEQ ID NO: 965626 - RNA, 18 nt, Human
uuaguagagacgggguuu

SEQ ID NO: 965627 - RNA, 24 nt, Human
uuaguagagacgggguuuguccau

SEQ ID NO: 965628 - RNA, 24 nt, Human
uuauuaaacaagaauauaaauuuu

SEQ ID NO: 965629 - RNA, 19 nt, Human
uucaaaagaugaauagaac

SEQ ID NO: 965630 - RNA, 24 nt, Human
uucaaaagaugaauagaacauaaa

SEQ ID NO: 965631 - RNA, 20 nt, Human
uucaagcgauucuccugccu

SEQ ID NO: 965632 - RNA, 24 nt, Human
uucaagcgauucuccugccuuagc

SEQ ID NO: 965633 - RNA, 24 nt, Human
uucagaggaaaaauaauccacaaa

SEQ ID NO: 965634 - RNA, 24 nt, Human
uucagccuccugaguagcugggac

SEQ ID NO: 965635 - RNA, 22 nt, Human
uucuagaaagcucaauuuuuua

SEQ ID NO: 965636 - RNA, 18 nt, Human
uugcccaggcaggagugc

SEQ ID NO: 965637 - RNA, 18 nt, Human
uuggccucccaaagugcu

SEQ ID NO: 965638 - RNA, 24 nt, Human
uuguagagauaggguuucgccaug

SEQ ID NO: 965639 - RNA, 23 nt, Human
uuguauuuuuaguagagacgggg

SEQ ID NO: 965640 - RNA, 21 nt, Human
uuuaaaauaaauagaaaugag

SEQ ID NO: 965641 - RNA, 25 nt, Human
uuuacaguauagauauuaaagucuu

SEQ ID NO: 965642 - RNA, 26 nt, Human
uuuacaguauagauauuaaagucuuc

SEQ ID NO: 965643 - RNA, 19 nt, Human
uuucgccauguugcccagg

SEQ ID NO: 965644 - RNA, 25 nt, Human
uuugaaauaccuauuugcaaaagca

SEQ ID NO: 965645 - RNA, 18 nt, Human
uuuguagagauaggguuu

SEQ ID NO: 965646 - RNA, 24 nt, Human
uuuguagagauaggguuucgccau

SEQ ID NO: 965647 - RNA, 19 nt, Human
uuuuguauuuuuaguagag

SEQ ID NO: 965648 - RNA, 20 nt, Human
uuuuguauuuuuaguagaga

SEQ ID NO: 965649 - RNA, 20 nt, Human
uuuuguauuuuuuguagaga

SEQ ID NO: 965650 - RNA, 23 nt, Human
uuuuuaguagagacgggguuugu

SEQ ID NO: 965651 - RNA, 20 nt, Human
uuuuuguauuuuuuguagag

SEQ ID NO: 965652 - RNA, 22 nt, Human
uuuuuuguagagauaggguuuc

SEQ ID NO: 965653 - RNA, 23 nt, Human
uuuuuuguagagauaggguuucg

SEQ ID NO: 965654 - RNA, 22 nt, Human
aaaaagcagauccagaagaaaa

SEQ ID NO: 965655 - RNA, 25 nt, Human
aaaaagcagauccagaagaaaaaca

SEQ ID NO: 965656 - RNA, 20 nt, Human
aaaagcagauccagaagaaa

SEQ ID NO: 965657 - RNA, 20 nt, Human
aaaggcaacuacagccaagg

SEQ ID NO: 965658 - RNA, 24 nt, Human
aagaagcacauugcauuuggcuca

SEQ ID NO: 965659 - RNA, 25 nt, Human
aagaagggugaaugagugaaaagaa

SEQ ID NO: 965660 - RNA, 24 nt, Human
aagagaagagagguuuaaaaauga

SEQ ID NO: 965661 - RNA, 18 nt, Human
aagaugcuuagccuuaga

SEQ ID NO: 965662 - RNA, 23 nt, Human
aauaaaaagcagauccagaagaa

SEQ ID NO: 965663 - RNA, 26 nt, Human
agaaaucaacacuacuguuaaaaaua

SEQ ID NO: 965664 - RNA, 20 nt, Human
agaauguccuucaacuugag

SEQ ID NO: 965665 - RNA, 23 nt, Human
aguacagagaauuccuagauagc

SEQ ID NO: 965666 - RNA, 24 nt, Human
cacuacuguuaaaaauacuccaga

SEQ ID NO: 965667 - RNA, 23 nt, Human
cacuuucaauccaggguuuuagu

SEQ ID NO: 965668 - RNA, 24 nt, Human
cauuuggcucacaugucuccuuag

SEQ ID NO: 965669 - RNA, 25 nt, Human
ggaauacucuaaaauaccccaggga

SEQ ID NO: 965670 - RNA, 19 nt, Human
guagaauguccuucaacuu

SEQ ID NO: 965671 - RNA, 22 nt, Human
guagaauguccuucaacuugag

SEQ ID NO: 965672 - RNA, 20 nt, Human
guggagcuaggaaaggcaac

SEQ ID NO: 965673 - RNA, 19 nt, Human
uaaaaagcagauccagaag

SEQ ID NO: 965674 - RNA, 24 nt, Human
uaaaaagcagauccagaagaaaaa

SEQ ID NO: 965675 - RNA, 24 nt, Human
uaaguagauaaucugacuccucuc

SEQ ID NO: 965676 - RNA, 24 nt, Human
uagauagcccucacccaguuucag

SEQ ID NO: 965677 - RNA, 21 nt, Human
uagcccuacucgguguguaau

SEQ ID NO: 965678 - RNA, 19 nt, Human
uaucuagaacaaaucugaa

SEQ ID NO: 965679 - RNA, 24 nt, Human
uauuuuuguaaaauaaaaagcaga

SEQ ID NO: 965680 - RNA, 19 nt, Human
ucacccaguuucaguuucu

SEQ ID NO: 965681 - RNA, 21 nt, Human
uccagaagaaaaacauuugaa

SEQ ID NO: 965682 - RNA, 18 nt, Human
uccuagauagcccucacc

SEQ ID NO: 965683 - RNA, 24 nt, Human
uccuagauagcccucacccaguuu

SEQ ID NO: 965684 - RNA, 19 nt, Human
ucuaccuccuugaguggag

SEQ ID NO: 965685 - RNA, 24 nt, Human
ucuauucagacuucaucaguuuuu

SEQ ID NO: 965686 - RNA, 19 nt, Human
uguaucaaacaugccuaca

SEQ ID NO: 965687 - RNA, 21 nt, Human
uuacugaucuuuuucuguucc

SEQ ID NO: 965688 - RNA, 23 nt, Human
uuauauuguucuuuuuguacauu

SEQ ID NO: 965689 - RNA, 24 nt, Human
uucaaaauuuucacccuaauuaaa

SEQ ID NO: 965690 - RNA, 18 nt, Human
uucuauucagacuucauc

SEQ ID NO: 965691 - RNA, 22 nt, Human
uuuaaaucacaaaguuuauaua

SEQ ID NO: 965692 - RNA, 22 nt, Human
uuucucaggauucccuuauuuu

SEQ ID NO: 965693 - RNA, 25 nt, Human
uuucuuagacuuaccgaaaauuugg

SEQ ID NO: 965694 - RNA, 24 nt, Human
uuuuuuuuuuuuuuuuuuuucaag

SEQ ID NO: 965695 - RNA, 21 nt, Human
aagauuucuccauccccacaa

SEQ ID NO: 965696 - RNA, 21 nt, Human
agaaguauaaucuuucaaaaa

SEQ ID NO: 965697 - RNA, 23 nt, Human
agaaugaaucuaucuaggagcaa

SEQ ID NO: 965698 - RNA, 23 nt, Human
agcaaacacaauguaacacugaa

SEQ ID NO: 965699 - RNA, 19 nt, Human
cacaauacgaugagagcaa

SEQ ID NO: 965700 - RNA, 20 nt, Human
cauuaaagauuucuccaucc

SEQ ID NO: 965701 - RNA, 19 nt, Human
cugaaaucuuuaaggacag

SEQ ID NO: 965702 - RNA, 18 nt, Human
uaaaauguuaucuucauu

SEQ ID NO: 965703 - RNA, 19 nt, Human
uacuaucacgguuaccacc

SEQ ID NO: 965704 - RNA, 21 nt, Human
uaucaaaaauaaggcaauaac

SEQ ID NO: 965705 - RNA, 25 nt, Human
ucaaaaauaaggcaauaaccgaaaa

SEQ ID NO: 965706 - RNA, 22 nt, Human
ucaaaagcaguuuuuaaaagca

SEQ ID NO: 965707 - RNA, 18 nt, Human
ucaaaauucaagaaugca

SEQ ID NO: 965708 - RNA, 27 nt, Human
uccauccccacaacuagauagaaugaa

SEQ ID NO: 965709 - RNA, 24 nt, Human
ugaaaaaucuaagcucacccaaag

SEQ ID NO: 965710 - RNA, 23 nt, Human
ugaaggaaaauaauuucuaaagc

SEQ ID NO: 965711 - RNA, 28 nt, Human
uuaaagauuucuccauccccacaacuag

SEQ ID NO: 965712 - RNA, 22 nt, Human
uucaaaaagauauucaguguuc

SEQ ID NO: 965713 - RNA, 19 nt, Human
acaggcccccucacacggu

SEQ ID NO: 965714 - RNA, 24 nt, Human
acaugucuugccccagaguuccag

SEQ ID NO: 965715 - RNA, 21 nt, Human
accauagacaucucuugcccc

SEQ ID NO: 965716 - RNA, 24 nt, Human
accauagacaucucuugccccaga

SEQ ID NO: 965717 - RNA, 22 nt, Human
acgcuggggccacaggcccccu

SEQ ID NO: 965718 - RNA, 20 nt, Human
acuccaaucacaccaacccg

SEQ ID NO: 965719 - RNA, 23 nt, Human
aggcccccucacacggucugccu

SEQ ID NO: 965720 - RNA, 19 nt, Human
caccuuuaguuucuuggcu

SEQ ID NO: 965721 - RNA, 27 nt, Human
ccacagcacgcuggggccacaggcccc

SEQ ID NO: 965722 - RNA, 23 nt, Human
ccacaggcccccucacacggucu

SEQ ID NO: 965723 - RNA, 23 nt, Human
ccauagacaugucuugccccaga

SEQ ID NO: 965724 - RNA, 22 nt, Human
ccucuccgccucuacaccagcc

SEQ ID NO: 965725 - RNA, 18 nt, Human
cucauggucauaguauca

SEQ ID NO: 965726 - RNA, 20 nt, Human
cucauggucauaguaucacc

SEQ ID NO: 965727 - RNA, 23 nt, Human
cucuacaccagccucauauccac

SEQ ID NO: 965728 - RNA, 24 nt, Human
gagucacuccaaucacaccaaccc

SEQ ID NO: 965729 - RNA, 19 nt, Human
gccuccacuucccacuccc

SEQ ID NO: 965730 - RNA, 18 nt, Human
gugaaccuuaaaacggaa

SEQ ID NO: 965731 - RNA, 18 nt, Human
uaccauagacaugucuug

SEQ ID NO: 965732 - RNA, 22 nt, Human
uacucauggucauaguaucacc

SEQ ID NO: 965733 - RNA, 22 nt, Human
ucauauccacacgggaugcucu

SEQ ID NO: 965734 - RNA, 19 nt, Human
ucuaaauuuugaaaccacu

SEQ ID NO: 965735 - RNA, 20 nt, Human
ucucuugccccagaguucca

SEQ ID NO: 965736 - RNA, 19 nt, Human
ugaaaaaugcuaccauagc

SEQ ID NO: 965737 - RNA, 23 nt, Human
ugccuccacuucccacuccccga

SEQ ID NO: 965738 - RNA, 19 nt, Human
uggcucagcuaccauagac

SEQ ID NO: 965739 - RNA, 21 nt, Human
ugucuugccccagaguuccag

SEQ ID NO: 965740 - RNA, 22 nt, Human
uucaccuuuaguuucuuggcuc

SEQ ID NO: 965741 - RNA, 22 nt, Human
uucccacuccccgaggccacag

SEQ ID NO: 965742 - RNA, 20 nt, Human
uucucccucucauguucugg

SEQ ID NO: 965743 - RNA, 24 nt, Human
aaagugcugagauuacaggccuga

SEQ ID NO: 965744 - RNA, 19 nt, Human
aacugcuagaaaucacggc

SEQ ID NO: 965745 - RNA, 26 nt, Human
aagugcugagauuacaggccugagcu

SEQ ID NO: 965746 - RNA, 24 nt, Human
accauguugcccuggcuggucuug

SEQ ID NO: 965747 - RNA, 22 nt, Human
agauuacaggccugagcugcug

SEQ ID NO: 965748 - RNA, 21 nt, Human
agggugccagggcugagcucu

SEQ ID NO: 965749 - RNA, 24 nt, Human
agugcugagauuacaggccugagc

SEQ ID NO: 965750 - RNA, 24 nt, Human
caaagugcugagauuacaggccug

SEQ ID NO: 965751 - RNA, 24 nt, Human
caccauguugcccuggcuggucuu

SEQ ID NO: 965752 - RNA, 27 nt, Human
caccauguugcccuggcuggucuugaa

SEQ ID NO: 965753 - RNA, 23 nt, Human
cagagggugccagggcugagcuc

SEQ ID NO: 965754 - RNA, 19 nt, Human
caggacccgcggggcuccc

SEQ ID NO: 965755 - RNA, 22 nt, Human
caggauuccaccugaggcgcga

SEQ ID NO: 965756 - RNA, 24 nt, Human
cauguugcccuggcuggucuugaa

SEQ ID NO: 965757 - RNA, 24 nt, Human
ccaaagugcugagauuacaggccu

SEQ ID NO: 965758 - RNA, 20 nt, Human
cccgcggggcucccacgagg

SEQ ID NO: 965759 - RNA, 19 nt, Human
ccugaggcgcgaggagccu

SEQ ID NO: 965760 - RNA, 31 nt, Human
ccuggccucaagccuuccuuccgccucggcc

SEQ ID NO: 965761 - RNA, 23 nt, Human
ccuuccuuccgccucggccuccc

SEQ ID NO: 965762 - RNA, 24 nt, Human
cgaggcuggguccaggcggaagcu

SEQ ID NO: 965763 - RNA, 24 nt, Human
cgccucggccucccaaagugcuga

SEQ ID NO: 965764 - RNA, 21 nt, Human
cggaagcugaggcuccgcggc

SEQ ID NO: 965765 - RNA, 24 nt, Human
cggcuccgggcugcugucaccccc

SEQ ID NO: 965766 - RNA, 21 nt, Human
cucccaaagugcugagauuac

SEQ ID NO: 965767 - RNA, 22 nt, Human
cugagcucugcacuuucaacag

SEQ ID NO: 965768 - RNA, 19 nt, Human
cugcgguccccaccucuuc

SEQ ID NO: 965769 - RNA, 26 nt, Human
cugggacgacuccuuuggucucuucu

SEQ ID NO: 965770 - RNA, 19 nt, Human
cugugaggcacagggcagg

SEQ ID NO: 965771 - RNA, 26 nt, Human
gacuccuuuggucucuucugggguuc

SEQ ID NO: 965772 - RNA, 24 nt, Human
gauuacaggccugagcugcuguau

SEQ ID NO: 965773 - RNA, 22 nt, Human
gccucagucuuccacaucuggg

SEQ ID NO: 965774 - RNA, 23 nt, Human
gcuggucuugaacuccuggccuc

SEQ ID NO: 965775 - RNA, 21 nt, Human
ggagcucuugggaacagaggg

SEQ ID NO: 965776 - RNA, 24 nt, Human
ggcuggucuugaacuccuggccuc

SEQ ID NO: 965777 - RNA, 22 nt, Human
uagagaugaggucucaccaugu

SEQ ID NO: 965778 - RNA, 24 nt, Human
ucccaaagugcugagauuacaggc

SEQ ID NO: 965779 - RNA, 28 nt, Human
ucgcaaaaaccugggggucccggguguu

SEQ ID NO: 965780 - RNA, 18 nt, Human
ucggccucccaaagugcu

SEQ ID NO: 965781 - RNA, 21 nt, Human
ucugggcaggacccgcggggc

SEQ ID NO: 965782 - RNA, 23 nt, Human
ucugggcaggacccgcggggcuc

SEQ ID NO: 965783 - RNA, 19 nt, Human
ucuugaacuccuggccuca

SEQ ID NO: 965784 - RNA, 21 nt, Human
ucuugaacuccuggccucaag

SEQ ID NO: 965785 - RNA, 21 nt, Human
ugaagucaacugcuagaaauc

SEQ ID NO: 965786 - RNA, 19 nt, Human
ugagauuacaggccugagc

SEQ ID NO: 965787 - RNA, 19 nt, Human
ugagauuacaggccugagc

SEQ ID NO: 965788 - RNA, 22 nt, Human
ugagauuacaggccugagcugc

SEQ ID NO: 965789 - RNA, 24 nt, Human
ugagauuacaggccugagcugcug

SEQ ID NO: 965790 - RNA, 24 nt, Human
ugcacuuucaacaggccucagucu

SEQ ID NO: 965791 - RNA, 24 nt, Human
ugcccuggcuggucuugaacuccu

SEQ ID NO: 965792 - RNA, 21 nt, Human
uggccucaagccuuccuuccg

SEQ ID NO: 965793 - RNA, 24 nt, Human
uggccucaagccuuccuuccgccu

SEQ ID NO: 965794 - RNA, 18 nt, Human
ugggaacagagggugcca

SEQ ID NO: 965795 - RNA, 22 nt, Human
ugggaacagagggugccagggc

SEQ ID NO: 965796 - RNA, 20 nt, Human
ugggcaggacccgcggggcu

SEQ ID NO: 965797 - RNA, 22 nt, Human
ugguccaggugacccugacugc

SEQ ID NO: 965798 - RNA, 24 nt, Human
uguagagaugaggucucaccaugu

SEQ ID NO: 965799 - RNA, 24 nt, Human
uuguagagaugaggucucaccaug

SEQ ID NO: 965800 - RNA, 27 nt, Human
uuuuuuuuuuuuuuuuacauuuuuuaa

SEQ ID NO: 965801 - RNA, 20 nt, Human
aacccggggaccuccuaaaa

SEQ ID NO: 965802 - RNA, 21 nt, Human
ccgcugucgccgccggcaacc

SEQ ID NO: 965803 - RNA, 24 nt, Human
ucccccgcugucgccgccggcaac

SEQ ID NO: 965804 - RNA, 23 nt, Human
aaagguacauauucuuguucaug

SEQ ID NO: 965805 - RNA, 21 nt, Human
aagagguguuugcuuuuggua

SEQ ID NO: 965806 - RNA, 25 nt, Human
acacucauacaauacauggcuaaac

SEQ ID NO: 965807 - RNA, 26 nt, Human
accauaaucaccauaauguucaaauu

SEQ ID NO: 965808 - RNA, 23 nt, Human
agaaaagauucucacugcuuaga

SEQ ID NO: 965809 - RNA, 19 nt, Human
aggagggaaggguguuuuc

SEQ ID NO: 965810 - RNA, 19 nt, Human
agggaaaccaaucuugggg

SEQ ID NO: 965811 - RNA, 19 nt, Human
aguaauggcagaaggaggg

SEQ ID NO: 965812 - RNA, 18 nt, Human
aucccauucuccucacca

SEQ ID NO: 965813 - RNA, 25 nt, Human
cagcauacaauagauauacaugaua

SEQ ID NO: 965814 - RNA, 19 nt, Human
caucucuucauuauauguu

SEQ ID NO: 965815 - RNA, 21 nt, Human
caugugaaaacccaacuaauc

SEQ ID NO: 965816 - RNA, 23 nt, Human
caugugaaaacccaacuaaucua

SEQ ID NO: 965817 - RNA, 21 nt, Human
cuggaauagaggcauagaaaa

SEQ ID NO: 965818 - RNA, 22 nt, Human
cuucuacuuuuugcuggaauag

SEQ ID NO: 965819 - RNA, 21 nt, Human
gacagguuauuucucuuucuc

SEQ ID NO: 965820 - RNA, 21 nt, Human
gagggaaggguguuuucuuug

SEQ ID NO: 965821 - RNA, 25 nt, Human
gcaaaaaguaaagaccagcauacaa

SEQ ID NO: 965822 - RNA, 24 nt, Human
gcuaaacugaaauaaaaagguaag

SEQ ID NO: 965823 - RNA, 21 nt, Human
ggaauagaggcauagaaaaga

SEQ ID NO: 965824 - RNA, 22 nt, Human
ggcagaaggagggaaggguguu

SEQ ID NO: 965825 - RNA, 20 nt, Human
guaaagaccagcauacaaua

SEQ ID NO: 965826 - RNA, 18 nt, Human
guagaaguuucaucuaca

SEQ ID NO: 965827 - RNA, 19 nt, Human
guugccauaguaauggcag

SEQ ID NO: 965828 - RNA, 22 nt, Human
uaacauaucauaaacauuaccu

SEQ ID NO: 965829 - RNA, 27 nt, Human
uacaauacauggcuaaacugaaauaaa

SEQ ID NO: 965830 - RNA, 21 nt, Human
uagaaaagauucucacugcuu

SEQ ID NO: 965831 - RNA, 18 nt, Human
uagcuguguaguuaaaca

SEQ ID NO: 965832 - RNA, 26 nt, Human
uaucccauucuccucaccauaaucac

SEQ ID NO: 965833 - RNA, 21 nt, Human
ucaugauauacauaugcauau

SEQ ID NO: 965834 - RNA, 21 nt, Human
ucuuuuuagaagucuucaggc

SEQ ID NO: 965835 - RNA, 19 nt, Human
ugaaaagggcuguggagca

SEQ ID NO: 965836 - RNA, 20 nt, Human
ugaaauaaaaagguaagaua

SEQ ID NO: 965837 - RNA, 20 nt, Human
ugcuagagaaugccauuuua

SEQ ID NO: 965838 - RNA, 18 nt, Human
uggcaaaaaguaaagacc

SEQ ID NO: 965839 - RNA, 19 nt, Human
uggcagaaggagggaaggg

SEQ ID NO: 965840 - RNA, 19 nt, Human
uggcagaaggagggaaggg

SEQ ID NO: 965841 - RNA, 20 nt, Human
uggcagaaggagggaagggu

SEQ ID NO: 965842 - RNA, 21 nt, Human
uggcagaaggagggaagggug

SEQ ID NO: 965843 - RNA, 18 nt, Human
uuaaagcacagugcuuaa

SEQ ID NO: 965844 - RNA, 21 nt, Human
uucaugauauacauaugcaua

SEQ ID NO: 965845 - RNA, 18 nt, Human
uugaagcaaagcuaauuc

SEQ ID NO: 965846 - RNA, 24 nt, Human
uuguuuggguccugaaaagggcug

SEQ ID NO: 965847 - RNA, 30 nt, Human
uuucaugauauacauaugcauauuucacuu

SEQ ID NO: 965848 - RNA, 27 nt, Human
aaaaaaaaaaaaaaaugggguggggag

SEQ ID NO: 965849 - RNA, 20 nt, Human
aaaaacaccuuuuccguggc

SEQ ID NO: 965850 - RNA, 24 nt, Human
aaaacaccggaauuuggaaaaaca

SEQ ID NO: 965851 - RNA, 22 nt, Human
aaaaugcaucuccgucaucuuc

SEQ ID NO: 965852 - RNA, 24 nt, Human
aaacaccggaauuuggaaaaacaa

SEQ ID NO: 965853 - RNA, 24 nt, Human
aaaccuacagcucguucccucuga

SEQ ID NO: 965854 - RNA, 19 nt, Human
aaagccucaaccuuaccaa

SEQ ID NO: 965855 - RNA, 18 nt, Human
aaaucugucauacuuucc

SEQ ID NO: 965856 - RNA, 20 nt, Human
aaccuacagcucguucccuc

SEQ ID NO: 965857 - RNA, 19 nt, Human
aagcaaucaugcaauucuc

SEQ ID NO: 965858 - RNA, 18 nt, Human
aaguagaaaucugucaua

SEQ ID NO: 965859 - RNA, 24 nt, Human
aaguaugguauugauccuauaacc

SEQ ID NO: 965860 - RNA, 18 nt, Human
aauccaccaccugauuug

SEQ ID NO: 965861 - RNA, 23 nt, Human
acaaaauagaagcagcagcuguc

SEQ ID NO: 965862 - RNA, 22 nt, Human
accccaccccacccaggggcug

SEQ ID NO: 965863 - RNA, 21 nt, Human
acccucgugcaggaccucaug

SEQ ID NO: 965864 - RNA, 19 nt, Human
agaauacaaguaaggaccc

SEQ ID NO: 965865 - RNA, 22 nt, Human
agagaacauggccaccagccug

SEQ ID NO: 965866 - RNA, 23 nt, Human
agcacauuuccuuugcuccagca

SEQ ID NO: 965867 - RNA, 23 nt, Human
agcuacgagccgccggcagccuc

SEQ ID NO: 965868 - RNA, 22 nt, Human
agcugaaaaugccuucagauac

SEQ ID NO: 965869 - RNA, 23 nt, Human
aggcacacagggguuuguuuauu

SEQ ID NO: 965870 - RNA, 26 nt, Human
aggugggugguaggcacacagggguu

SEQ ID NO: 965871 - RNA, 22 nt, Human
auauucucugagcuaagugugg

SEQ ID NO: 965872 - RNA, 25 nt, Human
auggggcggagugcugggcacaugu

SEQ ID NO: 965873 - RNA, 23 nt, Human
auuacaaagcaugggaacuguga

SEQ ID NO: 965874 - RNA, 22 nt, Human
caaacacaacagaaagaagcuu

SEQ ID NO: 965875 - RNA, 24 nt, Human
caaauagcaauuauugucauccca

SEQ ID NO: 965876 - RNA, 18 nt, Human
cacucuaucauugaaccc

SEQ ID NO: 965877 - RNA, 18 nt, Human
cacucugcccuugucuuc

SEQ ID NO: 965878 - RNA, 22 nt, Human
cagaaaaauagccucugcucua

SEQ ID NO: 965879 - RNA, 23 nt, Human
caugcaauucucauuauagccac

SEQ ID NO: 965880 - RNA, 25 nt, Human
cauuagguaagcaugugugugcuga

SEQ ID NO: 965881 - RNA, 24 nt, Human
cccaauucagagaacauggccacc

SEQ ID NO: 965882 - RNA, 22 nt, Human
ccccugaagagaaaauugugga

SEQ ID NO: 965883 - RNA, 19 nt, Human
ccuucacaaaauagaagca

SEQ ID NO: 965884 - RNA, 19 nt, Human
cuaaccaguaauauccaua

SEQ ID NO: 965885 - RNA, 18 nt, Human
cuagaagaacuaggaaaa

SEQ ID NO: 965886 - RNA, 21 nt, Human
cuaguuaaagaagggaacaag

SEQ ID NO: 965887 - RNA, 20 nt, Human
cucaacuaaacagaacuaaa

SEQ ID NO: 965888 - RNA, 20 nt, Human
cuccauccucaguccugauc

SEQ ID NO: 965889 - RNA, 21 nt, Human
cuccgucaucuuccacucuuc

SEQ ID NO: 965890 - RNA, 25 nt, Human
cucuaaguuaaaaaaaaaauuaagc

SEQ ID NO: 965891 - RNA, 23 nt, Human
cugaagauuugaaucacaaguag

SEQ ID NO: 965892 - RNA, 18 nt, Human
cugauucugcagcaaaaa

SEQ ID NO: 965893 - RNA, 18 nt, Human
cugcucuuucaauuucuu

SEQ ID NO: 965894 - RNA, 21 nt, Human
cuggcuaaaacugcugcuuug

SEQ ID NO: 965895 - RNA, 18 nt, Human
cuggcucccucccggcgg

SEQ ID NO: 965896 - RNA, 23 nt, Human
cuguauuacucugaaaaauauga

SEQ ID NO: 965897 - RNA, 20 nt, Human
cuugauaugaaaucuaugcc

SEQ ID NO: 965898 - RNA, 21 nt, Human
cuugcaaagccucaaccuuac

SEQ ID NO: 965899 - RNA, 22 nt, Human
gaaaugcccuugauaugaaauc

SEQ ID NO: 965900 - RNA, 19 nt, Human
gaacaaacacuccauuuuc

SEQ ID NO: 965901 - RNA, 19 nt, Human
gaacccagcuacgagccgc

SEQ ID NO: 965902 - RNA, 22 nt, Human
gacaaacacauacaaguugaaa

SEQ ID NO: 965903 - RNA, 20 nt, Human
gagauggcacauaacuguga

SEQ ID NO: 965904 - RNA, 21 nt, Human
gcaaagccucaaccuuaccaa

SEQ ID NO: 965905 - RNA, 23 nt, Human
gcaaagugcagccugacacuuaa

SEQ ID NO: 965906 - RNA, 20 nt, Human
gcagcacauuuccuuugcuc

SEQ ID NO: 965907 - RNA, 19 nt, Human
gcuuuuuuuccuucugauu

SEQ ID NO: 965908 - RNA, 21 nt, Human
ggacagaccccuugccccccg

SEQ ID NO: 965909 - RNA, 20 nt, Human
gggauagagauagguucagg

SEQ ID NO: 965910 - RNA, 23 nt, Human
ggucuccuguauuucuuugcuga

SEQ ID NO: 965911 - RNA, 22 nt, Human
guauauacauaucuauauucca

SEQ ID NO: 965912 - RNA, 23 nt, Human
guguggcuuuugucacagugaug

SEQ ID NO: 965913 - RNA, 24 nt, Human
guucaguacagggguucccucuau

SEQ ID NO: 965914 - RNA, 23 nt, Human
uaaaacagaaacaaaucuagaau

SEQ ID NO: 965915 - RNA, 23 nt, Human
uaaagagaaguggguuuacgcaa

SEQ ID NO: 965916 - RNA, 24 nt, Human
uaaagagaaguggguuuacgcaac

SEQ ID NO: 965917 - RNA, 18 nt, Human
uaaagugaugaaagacaa

SEQ ID NO: 965918 - RNA, 18 nt, Human
uaaauaaauugcuagagc

SEQ ID NO: 965919 - RNA, 22 nt, Human
uaaauaaauugcuagagcugaa

SEQ ID NO: 965920 - RNA, 24 nt, Human
uaacaaguacagcaccacucgaga

SEQ ID NO: 965921 - RNA, 18 nt, Human
uaacgggagacaaaaaaa

SEQ ID NO: 965922 - RNA, 23 nt, Human
uaacugagauuuuccuuucucaa

SEQ ID NO: 965923 - RNA, 21 nt, Human
uaacugauucugcagcaaaaa

SEQ ID NO: 965924 - RNA, 22 nt, Human
uaacuuaguucugaucacuuga

SEQ ID NO: 965925 - RNA, 22 nt, Human
uaacuugcaaagccucaaccuu

SEQ ID NO: 965926 - RNA, 21 nt, Human
uaagaaaguacaccuguaaca

SEQ ID NO: 965927 - RNA, 19 nt, Human
uaagagacaaacacauaca

SEQ ID NO: 965928 - RNA, 25 nt, Human
uaagagacaaacacauacaaguuga

SEQ ID NO: 965929 - RNA, 20 nt, Human
uaagauaauauguggaggua

SEQ ID NO: 965930 - RNA, 22 nt, Human
uaauuugacaacagcuuccccu

SEQ ID NO: 965931 - RNA, 19 nt, Human
uacauggagauaaagugau

SEQ ID NO: 965932 - RNA, 22 nt, Human
uaccuugcuuuccucuucuuug

SEQ ID NO: 965933 - RNA, 25 nt, Human
uacuacaggaaauaaaaauucuguc

SEQ ID NO: 965934 - RNA, 18 nt, Human
uacuauaaucauaauagg

SEQ ID NO: 965935 - RNA, 21 nt, Human
uagaaaucugucauacuuucc

SEQ ID NO: 965936 - RNA, 20 nt, Human
uagaauauauuagaaucuga

SEQ ID NO: 965937 - RNA, 24 nt, Human
uagcaggauggcacuccauauuuu

SEQ ID NO: 965938 - RNA, 18 nt, Human
uauauguguauauacaua

SEQ ID NO: 965939 - RNA, 19 nt, Human
uaucagacagggauagaga

SEQ ID NO: 965940 - RNA, 24 nt, Human
uaugcugaauauaaaauaugugau

SEQ ID NO: 965941 - RNA, 25 nt, Human
uauggagcaaagugcagccugacac

SEQ ID NO: 965942 - RNA, 25 nt, Human
ucaaccucaaacaaugccuucagaa

SEQ ID NO: 965943 - RNA, 23 nt, Human
ucacuuccuccacccuccuucug

SEQ ID NO: 965944 - RNA, 21 nt, Human
ucagaagacucacauacucaa

SEQ ID NO: 965945 - RNA, 22 nt, Human
ucagaagacucacauacucaaa

SEQ ID NO: 965946 - RNA, 21 nt, Human
ucauacuuuccuucugguugu

SEQ ID NO: 965947 - RNA, 26 nt, Human
ucauacuuuccuucugguuguaaucc

SEQ ID NO: 965948 - RNA, 18 nt, Human
uccgcagauaaaagccca

SEQ ID NO: 965949 - RNA, 24 nt, Human
uccgucaucuuccacucuucuucu

SEQ ID NO: 965950 - RNA, 22 nt, Human
uccucaguccugaucacugucu

SEQ ID NO: 965951 - RNA, 22 nt, Human
ucgcugggaucuggcucccucc

SEQ ID NO: 965952 - RNA, 22 nt, Human
ucgugcaggaccucaugucugg

SEQ ID NO: 965953 - RNA, 23 nt, Human
ucuaacuuuuucaccagguguua

SEQ ID NO: 965954 - RNA, 18 nt, Human
ucugcacccaauucagag

SEQ ID NO: 965955 - RNA, 21 nt, Human
ucuugguacucuguggagccu

SEQ ID NO: 965956 - RNA, 28 nt, Human
ucuuugcugaucaaaaaaaaaaaaaaaa

SEQ ID NO: 965957 - RNA, 20 nt, Human
ugaaaaguaacaaaaggaaa

SEQ ID NO: 965958 - RNA, 21 nt, Human
ugaaaugcccuugauaugaaa

SEQ ID NO: 965959 - RNA, 24 nt, Human
ugaaaugcccuugauaugaaaucu

SEQ ID NO: 965960 - RNA, 22 nt, Human
ugaaccaccccaccccacccag

SEQ ID NO: 965961 - RNA, 19 nt, Human
ugacaaguacaauuccggg

SEQ ID NO: 965962 - RNA, 22 nt, Human
ugaccuggaucuuacuuaauga

SEQ ID NO: 965963 - RNA, 21 nt, Human
ugacgguauuuccaggugagu

SEQ ID NO: 965964 - RNA, 19 nt, Human
ugagaacaaguaucuguau

SEQ ID NO: 965965 - RNA, 18 nt, Human
ugagaguagagauauugc

SEQ ID NO: 965966 - RNA, 21 nt, Human
ugaugaaagacaagaaggcua

SEQ ID NO: 965967 - RNA, 21 nt, Human
ugcugagaucaaccucaaaca

SEQ ID NO: 965968 - RNA, 19 nt, Human
uggaucuuacuuaaugaca

SEQ ID NO: 965969 - RNA, 22 nt, Human
uggcuaaaacugcugcuuuguu

SEQ ID NO: 965970 - RNA, 26 nt, Human
ugggguggggagauggcacauaacug

SEQ ID NO: 965971 - RNA, 18 nt, Human
uguaaaugccacacacug

SEQ ID NO: 965972 - RNA, 22 nt, Human
uguaaaugccacacacugugcu

SEQ ID NO: 965973 - RNA, 23 nt, Human
uuagguaagcaugugugugcuga

SEQ ID NO: 965974 - RNA, 18 nt, Human
uucacaaaauagaagcag

SEQ ID NO: 965975 - RNA, 19 nt, Human
uucacaaaauagaagcagc

SEQ ID NO: 965976 - RNA, 23 nt, Human
uuccuccacccuccuucuguucu

SEQ ID NO: 965977 - RNA, 23 nt, Human
uucuagaagaacuaggaaaacuc

SEQ ID NO: 965978 - RNA, 24 nt, Human
uucuguucuggugcguagggcuug

SEQ ID NO: 965979 - RNA, 22 nt, Human
uugaacccuggcuaaaacugcu

SEQ ID NO: 965980 - RNA, 22 nt, Human
uugcuuuccucuucuuugauug

SEQ ID NO: 965981 - RNA, 26 nt, Human
uuucuauuccccucauacuugagagu

SEQ ID NO: 965982 - RNA, 21 nt, Human
uuuuaucagaagacucacaua

SEQ ID NO: 965983 - RNA, 22 nt, Human
uuuuuaaaaauucaaauggcuu

SEQ ID NO: 965984 - RNA, 22 nt, Human
aauugccucuaggguccuccug

SEQ ID NO: 965985 - RNA, 18 nt, Human
acauggaggagaggggac

SEQ ID NO: 965986 - RNA, 23 nt, Human
agccagugccaggcaggauggcg

SEQ ID NO: 965987 - RNA, 25 nt, Human
aggaaugacagggaguuggucaaaa

SEQ ID NO: 965988 - RNA, 23 nt, Human
aggauggcggccccaaugcuugg

SEQ ID NO: 965989 - RNA, 19 nt, Human
aggcaggauggcggcccca

SEQ ID NO: 965990 - RNA, 20 nt, Human
agguuagguuaggaaugaca

SEQ ID NO: 965991 - RNA, 20 nt, Human
auggaggagaggggacuaca

SEQ ID NO: 965992 - RNA, 18 nt, Human
cagugccaggcaggaugg

SEQ ID NO: 965993 - RNA, 24 nt, Human
caucauuuaauugccucuaggguc

SEQ ID NO: 965994 - RNA, 18 nt, Human
ccccaaugcuuggcuggg

SEQ ID NO: 965995 - RNA, 21 nt, Human
gaauguugccuuuacauggag

SEQ ID NO: 965996 - RNA, 20 nt, Human
gacuacauuuagagaaggag

SEQ ID NO: 965997 - RNA, 19 nt, Human
gccuuuggcagagcucugg

SEQ ID NO: 965998 - RNA, 20 nt, Human
ggaguuggucaaaagguccu

SEQ ID NO: 965999 - RNA, 21 nt, Human
ggauggcggccccaaugcuug

SEQ ID NO: 966000 - RNA, 19 nt, Human
ggcagagggcggcgguagc

SEQ ID NO: 966001 - RNA, 18 nt, Human
ggcggcgguagcggcagc

SEQ ID NO: 966002 - RNA, 23 nt, Human
ggggaguguggugauggagucca

SEQ ID NO: 966003 - RNA, 21 nt, Human
uaagacaauuucugagacuaa

SEQ ID NO: 966004 - RNA, 22 nt, Human
uacauggaggagaggggacuac

SEQ ID NO: 966005 - RNA, 22 nt, Human
uccagcaggggaacucuggaca

SEQ ID NO: 966006 - RNA, 22 nt, Human
uccuucauggccaggugaaggc

SEQ ID NO: 966007 - RNA, 23 nt, Human
ugaaggcuggggggaguguggug

SEQ ID NO: 966008 - RNA, 21 nt, Human
ugauggaaccaacagaggugc

SEQ ID NO: 966009 - RNA, 22 nt, Human
ugccaggcaggauggcggcccc

SEQ ID NO: 966010 - RNA, 22 nt, Human
ugcuuggcugggggcagccagc

SEQ ID NO: 966011 - RNA, 20 nt, Human
uggaaccaacagaggugccc

SEQ ID NO: 966012 - RNA, 22 nt, Human
uggcggccccaaugcuuggcug

SEQ ID NO: 966013 - RNA, 21 nt, Human
ugggagagggacugcggggcc

SEQ ID NO: 966014 - RNA, 24 nt, Human
ugggggcagccagcauuuggggcu

SEQ ID NO: 966015 - RNA, 22 nt, Human
uggggguagacagacgggccgg

SEQ ID NO: 966016 - RNA, 20 nt, Human
uuacauggaggagaggggac

SEQ ID NO: 966017 - RNA, 18 nt, Human
uuuuuuuuuuugaacagg

SEQ ID NO: 966018 - RNA, 23 nt, Human
uuuuuuuuuuugaacaggacauc

SEQ ID NO: 966019 - RNA, 22 nt, Human
uuuuuuuuuuuuuugaacagga

SEQ ID NO: 966020 - RNA, 23 nt, Human
uuuuuuuuuuuuuuuugaacagg

SEQ ID NO: 966021 - RNA, 20 nt, Human
uuuuuuuuuuuuuuuuuugg

SEQ ID NO: 966022 - RNA, 19 nt, Human
agacaggccugcagccgcu

SEQ ID NO: 966023 - RNA, 22 nt, Human
agaguggagaguccgguggggg

SEQ ID NO: 966024 - RNA, 21 nt, Human
aggcaaaccucuccuuccuuc

SEQ ID NO: 966025 - RNA, 21 nt, Human
agggagggggugcugagggcu

SEQ ID NO: 966026 - RNA, 19 nt, Human
agguggggagggagggggu

SEQ ID NO: 966027 - RNA, 23 nt, Human
caggguggacgaggaaaagguca

SEQ ID NO: 966028 - RNA, 18 nt, Human
cagguggggagggagggg

SEQ ID NO: 966029 - RNA, 24 nt, Human
cccaugccccuuuguggggggcga

SEQ ID NO: 966030 - RNA, 22 nt, Human
ccccuaggaccugccggagagu

SEQ ID NO: 966031 - RNA, 25 nt, Human
ccccuaggaccugccggagagugga

SEQ ID NO: 966032 - RNA, 24 nt, Human
cccgaguuuuuuuuuuuuuuuuuc

SEQ ID NO: 966033 - RNA, 21 nt, Human
cgaguuuuuuuuuuuuuuuuu

SEQ ID NO: 966034 - RNA, 22 nt, Human
gagcaggcaaaccucuccuucc

SEQ ID NO: 966035 - RNA, 22 nt, Human
gaguuuuuuuuuuuuuuuuuuu

SEQ ID NO: 966036 - RNA, 21 nt, Human
gccgcuuguggauguuguggg

SEQ ID NO: 966037 - RNA, 18 nt, Human
gccugcagccgcuugugg

SEQ ID NO: 966038 - RNA, 18 nt, Human
ggacagagccaugagggg

SEQ ID NO: 966039 - RNA, 19 nt, Human
ggagggagggggugcugag

SEQ ID NO: 966040 - RNA, 20 nt, Human
ggcacugaggcacuuguggg

SEQ ID NO: 966041 - RNA, 22 nt, Human
ggcugcccgcuuggccggcucc

SEQ ID NO: 966042 - RNA, 18 nt, Human
gggagggccaggugggga

SEQ ID NO: 966043 - RNA, 21 nt, Human
ggggccgacccagugggcacu

SEQ ID NO: 966044 - RNA, 21 nt, Human
ggggggcgagagcuguccugg

SEQ ID NO: 966045 - RNA, 22 nt, Human
guccugggagggccaggugggg

SEQ ID NO: 966046 - RNA, 19 nt, Human
guggggagggagggggugc

SEQ ID NO: 966047 - RNA, 19 nt, Human
uccccaagcccagggugga

SEQ ID NO: 966048 - RNA, 24 nt, Human
ugaggggaagcuucuucacccgcu

SEQ ID NO: 966049 - RNA, 22 nt, Human
ugcccgcuuggccggcuccagc

SEQ ID NO: 966050 - RNA, 28 nt, Human
ugggagggccagguggggagggaggggg

SEQ ID NO: 966051 - RNA, 24 nt, Human
uggggagggagggggugcugaggg

SEQ ID NO: 966052 - RNA, 21 nt, Human
ugguggacagagccaugaggg

SEQ ID NO: 966053 - RNA, 22 nt, Human
ugucugccccgcucuggcccug

SEQ ID NO: 966054 - RNA, 19 nt, Human
uuuuuuuuuuuuuugucca

SEQ ID NO: 966055 - RNA, 21 nt, Human
uuuuuuuuuuuuuuuguccaa

SEQ ID NO: 966056 - RNA, 18 nt, Human
uuuuuuuuuuuuuuuuug

SEQ ID NO: 966057 - RNA, 19 nt, Human
uuuuuuuuuuuuuuuuugu

SEQ ID NO: 966058 - RNA, 23 nt, Human
aaaaagagaauuuuguaagaaaa

SEQ ID NO: 966059 - RNA, 22 nt, Human
aagaaaaagcuugcuguuaaug

SEQ ID NO: 966060 - RNA, 26 nt, Human
aagaaaacauucuuggcaugaaagcu

SEQ ID NO: 966061 - RNA, 21 nt, Human
agccgggcggagccggccgac

SEQ ID NO: 966062 - RNA, 21 nt, Human
caacuuuauuggcagaaaggc

SEQ ID NO: 966063 - RNA, 25 nt, Human
cacauuaacauggaagauacuuaac

SEQ ID NO: 966064 - RNA, 18 nt, Human
cggccgaccuagcggcgg

SEQ ID NO: 966065 - RNA, 23 nt, Human
cggccgggcuggggcgcagggcc

SEQ ID NO: 966066 - RNA, 22 nt, Human
cuagcggcggcgaggcggaggu

SEQ ID NO: 966067 - RNA, 21 nt, Human
gauggcugguauuuucagucu

SEQ ID NO: 966068 - RNA, 19 nt, Human
uaaaaagagaauuuuguaa

SEQ ID NO: 966069 - RNA, 18 nt, Human
uacauaaaagaaaaagcu

SEQ ID NO: 966070 - RNA, 20 nt, Human
uggaagauacuuaaccugcu

SEQ ID NO: 966071 - RNA, 21 nt, Human
uggaagauacuuaaccugcuu

SEQ ID NO: 966072 - RNA, 23 nt, Human
aaaaccccgagauaaaaagugag

SEQ ID NO: 966073 - RNA, 20 nt, Human
accccgagauaaaaagugag

SEQ ID NO: 966074 - RNA, 20 nt, Human
aggcccagggcccuugacaa

SEQ ID NO: 966075 - RNA, 19 nt, Human
cacggccgcugcgcacggc

SEQ ID NO: 966076 - RNA, 23 nt, Human
ccagcaaaaauuaaaaccccgag

SEQ ID NO: 966077 - RNA, 24 nt, Human
ccagcaaaaauuaaaaccccgaga

SEQ ID NO: 966078 - RNA, 21 nt, Human
cccgcacggccgcugcgcacg

SEQ ID NO: 966079 - RNA, 26 nt, Human
cccgcacggccgcugcgcacggcccg

SEQ ID NO: 966080 - RNA, 22 nt, Human
cgagauaaaaagugagugugaa

SEQ ID NO: 966081 - RNA, 21 nt, Human
cggcccgagcgcagccggcag

SEQ ID NO: 966082 - RNA, 21 nt, Human
cugcggccgcuuggacuuggc

SEQ ID NO: 966083 - RNA, 22 nt, Human
gacugcggccgcuuggacuugg

SEQ ID NO: 966084 - RNA, 21 nt, Human
gcccuugacaagaagccccag

SEQ ID NO: 966085 - RNA, 18 nt, Human
gggcccuugacaagaagc

SEQ ID NO: 966086 - RNA, 23 nt, Human
uaaaaccccgagauaaaaaguga

SEQ ID NO: 966087 - RNA, 21 nt, Human
uaaacccaaacccccagcaaa

SEQ ID NO: 966088 - RNA, 19 nt, Human
ugaauagguaaagacugcg

SEQ ID NO: 966089 - RNA, 23 nt, Human
ugcccgcacggccgcugcgcacg

SEQ ID NO: 966090 - RNA, 24 nt, Human
aacaaaccucuccugccguugauc

SEQ ID NO: 966091 - RNA, 21 nt, Human
agggaacaaaccucuccugcc

SEQ ID NO: 966092 - RNA, 21 nt, Human
cagccuccauccuccuuccug

SEQ ID NO: 966093 - RNA, 19 nt, Human
cagcggacccaccggucuc

SEQ ID NO: 966094 - RNA, 21 nt, Human
cagcggacccaccggucucuc

SEQ ID NO: 966095 - RNA, 23 nt, Human
caguccuuauugaugagagugac

SEQ ID NO: 966096 - RNA, 22 nt, Human
ccaccggucucuccggccuucu

SEQ ID NO: 966097 - RNA, 22 nt, Human
cccaccagccuccauccuccuu

SEQ ID NO: 966098 - RNA, 22 nt, Human
cuccuucccaccagccuacguc

SEQ ID NO: 966099 - RNA, 24 nt, Human
cugauguuggugaugauuucaccc

SEQ ID NO: 966100 - RNA, 20 nt, Human
gaagcauuucuggucuuuca

SEQ ID NO: 966101 - RNA, 20 nt, Human
gaucugucccucccaccagc

SEQ ID NO: 966102 - RNA, 20 nt, Human
gcucucucucuggucuuucu

SEQ ID NO: 966103 - RNA, 24 nt, Human
ggucuauucccuuccuuuucaaag

SEQ ID NO: 966104 - RNA, 18 nt, Human
ucccaccagccuccaucc

SEQ ID NO: 966105 - RNA, 22 nt, Human
ucccaccagccuccauccuccu

SEQ ID NO: 966106 - RNA, 24 nt, Human
ucucaguggugccugccccuuguu

SEQ ID NO: 966107 - RNA, 21 nt, Human
ucucucaguggugccugcccc

SEQ ID NO: 966108 - RNA, 21 nt, Human
ucucuggucuuucuuuuucuu

SEQ ID NO: 966109 - RNA, 19 nt, Human
ucuuagguggccgaggcuu

SEQ ID NO: 966110 - RNA, 21 nt, Human
ucuuucuuuuucuucuguucu

SEQ ID NO: 966111 - RNA, 24 nt, Human
ucuuuuucuucuguucuguuugga

SEQ ID NO: 966112 - RNA, 18 nt, Human
uggcaggaacggagggcu

SEQ ID NO: 966113 - RNA, 18 nt, Human
uggcaggaacggagggcu

SEQ ID NO: 966114 - RNA, 21 nt, Human
uggcuucuugggucuauuccc

SEQ ID NO: 966115 - RNA, 20 nt, Human
ugucccucccaccagccucc

SEQ ID NO: 966116 - RNA, 23 nt, Human
uguuuggaagcauuucuggucuu

SEQ ID NO: 966117 - RNA, 18 nt, Human
aggccagcaggcucaaga

SEQ ID NO: 966118 - RNA, 22 nt, Human
aggggucagaggucaagaggcc

SEQ ID NO: 966119 - RNA, 21 nt, Human
aguucuguggacggggcuggu

SEQ ID NO: 966120 - RNA, 21 nt, Human
cuggcccggggagagaaugac

SEQ ID NO: 966121 - RNA, 18 nt, Human
ggaagaugagggcagggc

SEQ ID NO: 966122 - RNA, 22 nt, Human
uggcccggggagagaaugacag

SEQ ID NO: 966123 - RNA, 19 nt, Human
aaaacgucccagggccccc

SEQ ID NO: 966124 - RNA, 23 nt, Human
aaagccggggaagccagggaccc

SEQ ID NO: 966125 - RNA, 24 nt, Human
aacugacccuguaaaguuaaaaac

SEQ ID NO: 966126 - RNA, 22 nt, Human
aagcagcagggauucaccaggg

SEQ ID NO: 966127 - RNA, 18 nt, Human
aaguagaagggaggggag

SEQ ID NO: 966128 - RNA, 21 nt, Human
aauauaagaaacauagaucuc

SEQ ID NO: 966129 - RNA, 23 nt, Human
aaucaggcacacacacggcuccc

SEQ ID NO: 966130 - RNA, 20 nt, Human
acacacacggcucccacgug

SEQ ID NO: 966131 - RNA, 21 nt, Human
acaccccacgcaugcacacgg

SEQ ID NO: 966132 - RNA, 21 nt, Human
acagaccggcgugccaggccc

SEQ ID NO: 966133 - RNA, 19 nt, Human
acagggcgagucuccgagc

SEQ ID NO: 966134 - RNA, 21 nt, Human
acccaguuucacccacacaca

SEQ ID NO: 966135 - RNA, 19 nt, Human
acccgcggccugccgcccc

SEQ ID NO: 966136 - RNA, 25 nt, Human
accucccgccccagccucccugguc

SEQ ID NO: 966137 - RNA, 20 nt, Human
acucugugcccagggagugg

SEQ ID NO: 966138 - RNA, 25 nt, Human
acucugugcccagggaguggggccg

SEQ ID NO: 966139 - RNA, 18 nt, Human
agaagggaggggagagga

SEQ ID NO: 966140 - RNA, 18 nt, Human
agacagggugcucucaca

SEQ ID NO: 966141 - RNA, 21 nt, Human
agcgaagaggcuggcgcugaa

SEQ ID NO: 966142 - RNA, 21 nt, Human
agggcaggacaggagacuuug

SEQ ID NO: 966143 - RNA, 20 nt, Human
agggcggggcgggcaggcac

SEQ ID NO: 966144 - RNA, 22 nt, Human
aggugggggcgcugccuccaag

SEQ ID NO: 966145 - RNA, 21 nt, Human
agugaggggccggagauggaa

SEQ ID NO: 966146 - RNA, 19 nt, Human
aguggguggaugaaggugg

SEQ ID NO: 966147 - RNA, 25 nt, Human
auggagcuuaguccagacuccaaac

SEQ ID NO: 966148 - RNA, 21 nt, Human
cacccaguuucacccacacac

SEQ ID NO: 966149 - RNA, 23 nt, Human
cacccgggcgcggaccgcggugg

SEQ ID NO: 966150 - RNA, 18 nt, Human
caccucccgccccagccu

SEQ ID NO: 966151 - RNA, 27 nt, Human
caccucccgccccagccucccuggucc

SEQ ID NO: 966152 - RNA, 23 nt, Human
cacgccuccacggccccgcgcua

SEQ ID NO: 966153 - RNA, 21 nt, Human
cagaccagcuggagcgucccc

SEQ ID NO: 966154 - RNA, 25 nt, Human
cagaccagcuggagcguccccugcc

SEQ ID NO: 966155 - RNA, 20 nt, Human
cagcaaacaggacgauucau

SEQ ID NO: 966156 - RNA, 19 nt, Human
cagccagggcaagggccag

SEQ ID NO: 966157 - RNA, 21 nt, Human
cagcugcagugggaccagugg

SEQ ID NO: 966158 - RNA, 25 nt, Human
caggacccgcggccugccgccccuc

SEQ ID NO: 966159 - RNA, 22 nt, Human
caggagacuuugggguccaagg

SEQ ID NO: 966160 - RNA, 20 nt, Human
caggcacacacacggcuccc

SEQ ID NO: 966161 - RNA, 19 nt, Human
cagggccccccaccccaca

SEQ ID NO: 966162 - RNA, 20 nt, Human
caguaaucaggcacacacac

SEQ ID NO: 966163 - RNA, 19 nt, Human
caucgagaaucccaauguc

SEQ ID NO: 966164 - RNA, 26 nt, Human
ccacacacauaaagggcaggacaaua

SEQ ID NO: 966165 - RNA, 18 nt, Human
ccaccccacaggucaucg

SEQ ID NO: 966166 - RNA, 21 nt, Human
ccagccucccugguccacgcc

SEQ ID NO: 966167 - RNA, 18 nt, Human
ccagggccuguggugaac

SEQ ID NO: 966168 - RNA, 24 nt, Human
ccaggggugagcugggguccaggg

SEQ ID NO: 966169 - RNA, 23 nt, Human
cccacgcaugcacacggugcacg

SEQ ID NO: 966170 - RNA, 23 nt, Human
ccccaagcagcagggauucacca

SEQ ID NO: 966171 - RNA, 23 nt, Human
ccccagccucccugguccacgcc

SEQ ID NO: 966172 - RNA, 21 nt, Human
ccccagggcgggccacuaggg

SEQ ID NO: 966173 - RNA, 27 nt, Human
cccccacggacaggaacacaguggagc

SEQ ID NO: 966174 - RNA, 24 nt, Human
ccccccuccccccgagucaccaag

SEQ ID NO: 966175 - RNA, 24 nt, Human
cccccgagucaccaaggcgggucc

SEQ ID NO: 966176 - RNA, 19 nt, Human
cccccggccgauggucucc

SEQ ID NO: 966177 - RNA, 21 nt, Human
cccgggguggggguggggggc

SEQ ID NO: 966178 - RNA, 23 nt, Human
cccucccaccacgagcagcaccu

SEQ ID NO: 966179 - RNA, 19 nt, Human
cccugcgagcaggcacagg

SEQ ID NO: 966180 - RNA, 19 nt, Human
cccugguccacgcccuucc

SEQ ID NO: 966181 - RNA, 19 nt, Human
ccgcgccgggggcgcugcc

SEQ ID NO: 966182 - RNA, 24 nt, Human
ccgcggccugccgccccucccacc

SEQ ID NO: 966183 - RNA, 23 nt, Human
ccgcuccuccagccgccgguccu

SEQ ID NO: 966184 - RNA, 19 nt, Human
ccgggccaucgcccgcgcc

SEQ ID NO: 966185 - RNA, 21 nt, Human
ccuccaaggggcccuuggggc

SEQ ID NO: 966186 - RNA, 26 nt, Human
ccucccgccccagccucccuggucca

SEQ ID NO: 966187 - RNA, 24 nt, Human
ccucccugguccacgcccuuccug

SEQ ID NO: 966188 - RNA, 21 nt, Human
ccugacugugcgcuggguggg

SEQ ID NO: 966189 - RNA, 18 nt, Human
ccuggacuguuggcggaa

SEQ ID NO: 966190 - RNA, 18 nt, Human
ccuguggugaacugacuc

SEQ ID NO: 966191 - RNA, 19 nt, Human
ccuuggccgggcccgggcc

SEQ ID NO: 966192 - RNA, 21 nt, Human
ccuuggggagagacccuguga

SEQ ID NO: 966193 - RNA, 20 nt, Human
cgagcaggcacaggaaucca

SEQ ID NO: 966194 - RNA, 26 nt, Human
cgccccucccaccacgagcagcaccu

SEQ ID NO: 966195 - RNA, 18 nt, Human
cgccgccgggaccggggc

SEQ ID NO: 966196 - RNA, 18 nt, Human
cggagcgaagaggcuggc

SEQ ID NO: 966197 - RNA, 23 nt, Human
cggcaccucccgccccagccucc

SEQ ID NO: 966198 - RNA, 20 nt, Human
cggcagggcacggccggggc

SEQ ID NO: 966199 - RNA, 21 nt, Human
cggccggggcgggaguggggg

SEQ ID NO: 966200 - RNA, 21 nt, Human
cggcgucgggacugugcacgg

SEQ ID NO: 966201 - RNA, 22 nt, Human
cgggagggcuguagggauggca

SEQ ID NO: 966202 - RNA, 25 nt, Human
cgggcaggcacagaccggcgugcca

SEQ ID NO: 966203 - RNA, 22 nt, Human
cgggguggggguggggggcccu

SEQ ID NO: 966204 - RNA, 18 nt, Human
cgguggagcggcagggcc

SEQ ID NO: 966205 - RNA, 24 nt, Human
cgugccaggccccuggguugugaa

SEQ ID NO: 966206 - RNA, 24 nt, Human
cuaggggucccccuaugaugcccu

SEQ ID NO: 966207 - RNA, 19 nt, Human
cuccuccagccgccggucc

SEQ ID NO: 966208 - RNA, 24 nt, Human
cuccuuggggagagacccugugag

SEQ ID NO: 966209 - RNA, 21 nt, Human
cucuggaaggacaggcugggc

SEQ ID NO: 966210 - RNA, 22 nt, Human
cugugugaccuggacuguuggc

SEQ ID NO: 966211 - RNA, 18 nt, Human
cuuugggguccaaggcag

SEQ ID NO: 966212 - RNA, 18 nt, Human
gaaaacuucuguuuucuu

SEQ ID NO: 966213 - RNA, 20 nt, Human
gacaggcugggcaaacagcu

SEQ ID NO: 966214 - RNA, 22 nt, Human
gaccuucucugccucccugcga

SEQ ID NO: 966215 - RNA, 21 nt, Human
gacucuccccagggccugugg

SEQ ID NO: 966216 - RNA, 21 nt, Human
gacuuccgcuccucccggggg

SEQ ID NO: 966217 - RNA, 26 nt, Human
gacuuccgcuccucccgggggaccuu

SEQ ID NO: 966218 - RNA, 19 nt, Human
gagcaggcacaggaaucca

SEQ ID NO: 966219 - RNA, 22 nt, Human
gagcagggggugaaaccccccg

SEQ ID NO: 966220 - RNA, 22 nt, Human
gaggcucuggaaggacaggcug

SEQ ID NO: 966221 - RNA, 20 nt, Human
gauucaugcaacauuccugg

SEQ ID NO: 966222 - RNA, 18 nt, Human
gcaccccacccccggcac

SEQ ID NO: 966223 - RNA, 22 nt, Human
gcagugaggggccggagaugga

SEQ ID NO: 966224 - RNA, 22 nt, Human
gccccuggguugugaaaacuuc

SEQ ID NO: 966225 - RNA, 25 nt, Human
gcccgggccgccgaacgcgagcccc

SEQ ID NO: 966226 - RNA, 22 nt, Human
gccgaacgcgagccccgggcca

SEQ ID NO: 966227 - RNA, 18 nt, Human
gccggugggccagggcgg

SEQ ID NO: 966228 - RNA, 23 nt, Human
gcgcguccuccaccugcagcugc

SEQ ID NO: 966229 - RNA, 24 nt, Human
gcgcugggugggcugggcggccgg

SEQ ID NO: 966230 - RNA, 21 nt, Human
gcggcccgggguggggguggg

SEQ ID NO: 966231 - RNA, 20 nt, Human
gcgggaguggggguggggcg

SEQ ID NO: 966232 - RNA, 18 nt, Human
gcgugccaggccccuggg

SEQ ID NO: 966233 - RNA, 19 nt, Human
gcuagggcaccccaccccc

SEQ ID NO: 966234 - RNA, 18 nt, Human
gcuaguccagagcggccc

SEQ ID NO: 966235 - RNA, 18 nt, Human
gcucaggcugggugaggc

SEQ ID NO: 966236 - RNA, 20 nt, Human
gcugcgaaggagguggucac

SEQ ID NO: 966237 - RNA, 20 nt, Human
ggaagaggagacagggugcu

SEQ ID NO: 966238 - RNA, 21 nt, Human
ggagcggcagggcccugcccu

SEQ ID NO: 966239 - RNA, 19 nt, Human
ggagcgggagggcuguagg

SEQ ID NO: 966240 - RNA, 19 nt, Human
ggaugaagguggaacccga

SEQ ID NO: 966241 - RNA, 21 nt, Human
ggcaguggcagugaggggccg

SEQ ID NO: 966242 - RNA, 23 nt, Human
ggcggccggugagggcacuaagc

SEQ ID NO: 966243 - RNA, 18 nt, Human
ggcugggcacccucgggg

SEQ ID NO: 966244 - RNA, 20 nt, Human
gggcaaacagcuggacccag

SEQ ID NO: 966245 - RNA, 21 nt, Human
gggcaggccgagcccgcggcc

SEQ ID NO: 966246 - RNA, 18 nt, Human
gggccagggcggggcggg

SEQ ID NO: 966247 - RNA, 19 nt, Human
gggccagggcggggcgggc

SEQ ID NO: 966248 - RNA, 19 nt, Human
gggcccuggccaaccccag

SEQ ID NO: 966249 - RNA, 18 nt, Human
gggcgggagugggggugg

SEQ ID NO: 966250 - RNA, 21 nt, Human
gggcggggcgggcaggcacag

SEQ ID NO: 966251 - RNA, 19 nt, Human
gggcugggcacccucgggg

SEQ ID NO: 966252 - RNA, 18 nt, Human
ggggagaaagccggggaa

SEQ ID NO: 966253 - RNA, 22 nt, Human
ggggcgggaguggggguggggc

SEQ ID NO: 966254 - RNA, 20 nt, Human
gggugggcugggcggccggu

SEQ ID NO: 966255 - RNA, 20 nt, Human
ggguggggguggggggcccu

SEQ ID NO: 966256 - RNA, 20 nt, Human
ggucggggagggcucgcggg

SEQ ID NO: 966257 - RNA, 18 nt, Human
ggugcaggauggccucug

SEQ ID NO: 966258 - RNA, 27 nt, Human
guaaucaggcacacacacggcucccac

SEQ ID NO: 966259 - RNA, 21 nt, Human
gugacugcugcugugugaccu

SEQ ID NO: 966260 - RNA, 21 nt, Human
gugaggaagauggcugcggug

SEQ ID NO: 966261 - RNA, 21 nt, Human
gugcacgccuccacggccccg

SEQ ID NO: 966262 - RNA, 18 nt, Human
guggagcggcgccgcucc

SEQ ID NO: 966263 - RNA, 24 nt, Human
uagggcaccccacccccggcaccu

SEQ ID NO: 966264 - RNA, 20 nt, Human
uaucacaacgucagggucag

SEQ ID NO: 966265 - RNA, 23 nt, Human
ucaccagggaaccccgcucaggc

SEQ ID NO: 966266 - RNA, 22 nt, Human
ucacccacacacauaaagggca

SEQ ID NO: 966267 - RNA, 21 nt, Human
ucagggcagacaccggggagg

SEQ ID NO: 966268 - RNA, 27 nt, Human
uccagacuccaaacccuagguuuaaaa

SEQ ID NO: 966269 - RNA, 18 nt, Human
ucccagggccccccaccc

SEQ ID NO: 966270 - RNA, 19 nt, Human
uccccaggaggcgcucguc

SEQ ID NO: 966271 - RNA, 28 nt, Human
uccccaggaggcgcucgucgauggagcg

SEQ ID NO: 966272 - RNA, 19 nt, Human
ucccccuaugaugcccuca

SEQ ID NO: 966273 - RNA, 21 nt, Human
ucccgggggaccuucucugcc

SEQ ID NO: 966274 - RNA, 23 nt, Human
ucccugcgagcaggcacaggaau

SEQ ID NO: 966275 - RNA, 28 nt, Human
ucgagaaucccaaugucuccccccuccc

SEQ ID NO: 966276 - RNA, 24 nt, Human
ucgcgggcgaagcugccgccgccg

SEQ ID NO: 966277 - RNA, 21 nt, Human
ucucccaggccggcugguccc

SEQ ID NO: 966278 - RNA, 23 nt, Human
ucucugcuguaguugcccaagag

SEQ ID NO: 966279 - RNA, 21 nt, Human
ucugugcccagggaguggggc

SEQ ID NO: 966280 - RNA, 19 nt, Human
ugagcugggguccaggggu

SEQ ID NO: 966281 - RNA, 24 nt, Human
ugagcugggguccagggguuugcc

SEQ ID NO: 966282 - RNA, 20 nt, Human
ugaggagucacagugugggg

SEQ ID NO: 966283 - RNA, 22 nt, Human
ugagugacguggauggagcuua

SEQ ID NO: 966284 - RNA, 18 nt, Human
ugaguggguggaugaagg

SEQ ID NO: 966285 - RNA, 21 nt, Human
ugcccucaucccccccggccg

SEQ ID NO: 966286 - RNA, 20 nt, Human
ugccgccgccgggaccgggg

SEQ ID NO: 966287 - RNA, 19 nt, Human
ugccggugaguggguggau

SEQ ID NO: 966288 - RNA, 26 nt, Human
ugcgcguccuccaccugcagcugcuu

SEQ ID NO: 966289 - RNA, 25 nt, Human
ugcugugugaccuggacuguuggcg

SEQ ID NO: 966290 - RNA, 19 nt, Human
uggaagacugggcagcugc

SEQ ID NO: 966291 - RNA, 21 nt, Human
uggagcggcgccgcuccucca

SEQ ID NO: 966292 - RNA, 22 nt, Human
uggagcggcgccgcuccuccag

SEQ ID NO: 966293 - RNA, 19 nt, Human
uggcagugaggggccggag

SEQ ID NO: 966294 - RNA, 20 nt, Human
uggcugcgguggagcggcag

SEQ ID NO: 966295 - RNA, 18 nt, Human
ugggccagggcggggcgg

SEQ ID NO: 966296 - RNA, 19 nt, Human
ugggccagggcggggcggg

SEQ ID NO: 966297 - RNA, 20 nt, Human
uggggcacacuagagcucag

SEQ ID NO: 966298 - RNA, 19 nt, Human
ugggguggcaguggcagug

SEQ ID NO: 966299 - RNA, 22 nt, Human
ugggguggcaguggcagugagg

SEQ ID NO: 966300 - RNA, 22 nt, Human
ugugaaaacuucuguuuucuuu

SEQ ID NO: 966301 - RNA, 23 nt, Human
ugugaaaacuucuguuuucuuuu

SEQ ID NO: 966302 - RNA, 22 nt, Human
uguggcagucuguuacagugac

SEQ ID NO: 966303 - RNA, 26 nt, Human
ugugggguggcaguggcagugagggg

SEQ ID NO: 966304 - RNA, 19 nt, Human
uuggacggagcgaagaggc

SEQ ID NO: 966305 - RNA, 24 nt, Human
uuuaaaaacgucccagggcccccc

SEQ ID NO: 966306 - RNA, 18 nt, Human
aaaacagauggaucccau

SEQ ID NO: 966307 - RNA, 25 nt, Human
aaaagaacaaaacaaaacaaaagug

SEQ ID NO: 966308 - RNA, 20 nt, Human
aaacagauggaucccauagg

SEQ ID NO: 966309 - RNA, 19 nt, Human
aaagaaacgaggucggaug

SEQ ID NO: 966310 - RNA, 19 nt, Human
aaauuacuccaucuccccu

SEQ ID NO: 966311 - RNA, 21 nt, Human
aacaaaagaacauaggaaaga

SEQ ID NO: 966312 - RNA, 25 nt, Human
aagaaaccccagggaagagacaggc

SEQ ID NO: 966313 - RNA, 18 nt, Human
aagaggagaaauaaaggc

SEQ ID NO: 966314 - RNA, 23 nt, Human
aaggccauggaaagaaaccccag

SEQ ID NO: 966315 - RNA, 22 nt, Human
acaaaacaaaagugcacuccuc

SEQ ID NO: 966316 - RNA, 25 nt, Human
acagaauuuucuugaagggagaaag

SEQ ID NO: 966317 - RNA, 18 nt, Human
acagaugugccugcgccc

SEQ ID NO: 966318 - RNA, 20 nt, Human
acaggccucguucacagacc

SEQ ID NO: 966319 - RNA, 18 nt, Human
acagucccaaguccccca

SEQ ID NO: 966320 - RNA, 22 nt, Human
accuccaacccaggcacaguuc

SEQ ID NO: 966321 - RNA, 23 nt, Human
accuccaacccaggcacaguucc

SEQ ID NO: 966322 - RNA, 18 nt, Human
acugcacagccacagaau

SEQ ID NO: 966323 - RNA, 23 nt, Human
agaaauaaaggccauggaaagaa

SEQ ID NO: 966324 - RNA, 19 nt, Human
agaacagacuuggggcuuc

SEQ ID NO: 966325 - RNA, 23 nt, Human
agacagccaggcaaagucagaac

SEQ ID NO: 966326 - RNA, 21 nt, Human
agaccuccaacccaggcacag

SEQ ID NO: 966327 - RNA, 21 nt, Human
agcaguucagaccgcggccuc

SEQ ID NO: 966328 - RNA, 25 nt, Human
agccaacgcucgugaaguuuccaca

SEQ ID NO: 966329 - RNA, 21 nt, Human
agccacagaauuuucuugaag

SEQ ID NO: 966330 - RNA, 19 nt, Human
aggaaagaaaagaaacgag

SEQ ID NO: 966331 - RNA, 23 nt, Human
aggaagaaaagggggugaccugg

SEQ ID NO: 966332 - RNA, 19 nt, Human
aggagaaauaaaggccaug

SEQ ID NO: 966333 - RNA, 24 nt, Human
aggagacagccaggcaaagucaga

SEQ ID NO: 966334 - RNA, 23 nt, Human
aggcagggaauaaaaaauucaag

SEQ ID NO: 966335 - RNA, 21 nt, Human
agguagugcuguggggagggc

SEQ ID NO: 966336 - RNA, 22 nt, Human
auaaaggccauggaaagaaacc

SEQ ID NO: 966337 - RNA, 19 nt, Human
auggggcccgggacugggc

SEQ ID NO: 966338 - RNA, 19 nt, Human
augguuuuaucugaggccu

SEQ ID NO: 966339 - RNA, 18 nt, Human
caaaacaaaacaaaagug

SEQ ID NO: 966340 - RNA, 24 nt, Human
caaaacaaaacaaaagugcacucc

SEQ ID NO: 966341 - RNA, 22 nt, Human
caaaacaaaagugcacuccucu

SEQ ID NO: 966342 - RNA, 25 nt, Human
caaaagaacauaggaaagaaaagaa

SEQ ID NO: 966343 - RNA, 20 nt, Human
caaaagugcacuccucuugu

SEQ ID NO: 966344 - RNA, 21 nt, Human
caaaauuacuccaucuccccu

SEQ ID NO: 966345 - RNA, 24 nt, Human
caaggagacagccaggcaaaguca

SEQ ID NO: 966346 - RNA, 21 nt, Human
cacagggacagccagagccgg

SEQ ID NO: 966347 - RNA, 19 nt, Human
cacagucccaaguccccca

SEQ ID NO: 966348 - RNA, 21 nt, Human
cacaguuccaaaaagaacaaa

SEQ ID NO: 966349 - RNA, 19 nt, Human
caccccugacgaucgcggg

SEQ ID NO: 966350 - RNA, 24 nt, Human
cacccuccggcccaccguggcacc

SEQ ID NO: 966351 - RNA, 18 nt, Human
cacccuggaguacacucc

SEQ ID NO: 966352 - RNA, 22 nt, Human
cacuccagcgaagccgaggccc

SEQ ID NO: 966353 - RNA, 18 nt, Human
cacucgugaccaugcaau

SEQ ID NO: 966354 - RNA, 21 nt, Human
cacucgugaccaugcaauacc

SEQ ID NO: 966355 - RNA, 23 nt, Human
cagaacagacuuggggcuuccag

SEQ ID NO: 966356 - RNA, 24 nt, Human
cagaauuuucuugaagggagaaag

SEQ ID NO: 966357 - RNA, 22 nt, Human
cagcaaaauuacuccaucuccc

SEQ ID NO: 966358 - RNA, 24 nt, Human
cagcaaaauuacuccaucuccccu

SEQ ID NO: 966359 - RNA, 20 nt, Human
cagcagcgaacagagagggg

SEQ ID NO: 966360 - RNA, 23 nt, Human
caggcacaguuccaaaaagaaca

SEQ ID NO: 966361 - RNA, 24 nt, Human
caggcacaguuccaaaaagaacaa

SEQ ID NO: 966362 - RNA, 22 nt, Human
cagucccaagucccccaaccuu

SEQ ID NO: 966363 - RNA, 23 nt, Human
caucucuauuuuaaaugacccag

SEQ ID NO: 966364 - RNA, 22 nt, Human
cauggaaagcaguucagaccgc

SEQ ID NO: 966365 - RNA, 22 nt, Human
ccaaaaagaacaaaacaaaaca

SEQ ID NO: 966366 - RNA, 24 nt, Human
ccaaaaagaacaaaacaaaacaaa

SEQ ID NO: 966367 - RNA, 20 nt, Human
ccaacccaggcacaguucca

SEQ ID NO: 966368 - RNA, 27 nt, Human
ccacagagaagagccugcaaaacuccc

SEQ ID NO: 966369 - RNA, 22 nt, Human
ccaggcacaguuccaaaaagaa

SEQ ID NO: 966370 - RNA, 20 nt, Human
ccauuggccaagaacgccga

SEQ ID NO: 966371 - RNA, 18 nt, Human
cccacucugccuucaccc

SEQ ID NO: 966372 - RNA, 21 nt, Human
cccagcaaacagguccaccuc

SEQ ID NO: 966373 - RNA, 23 nt, Human
cccagcaaacagguccaccucau

SEQ ID NO: 966374 - RNA, 22 nt, Human
ccccagggaagagacaggccuc

SEQ ID NO: 966375 - RNA, 21 nt, Human
cccuguccagaccuccaaccc

SEQ ID NO: 966376 - RNA, 23 nt, Human
cccugucccagcuggcaacgugg

SEQ ID NO: 966377 - RNA, 19 nt, Human
ccgcugcggggcuggcucc

SEQ ID NO: 966378 - RNA, 21 nt, Human
ccgcugcggggcuggcuccgg

SEQ ID NO: 966379 - RNA, 19 nt, Human
ccuccaacccaggcacagg

SEQ ID NO: 966380 - RNA, 22 nt, Human
ccuuacaaucucccgcacugcu

SEQ ID NO: 966381 - RNA, 18 nt, Human
cgcugcccuccucgcagc

SEQ ID NO: 966382 - RNA, 20 nt, Human
cucaugcucacugcguucuc

SEQ ID NO: 966383 - RNA, 22 nt, Human
cuccagcgaagccgaggcccag

SEQ ID NO: 966384 - RNA, 20 nt, Human
cuccaucuccccugucccag

SEQ ID NO: 966385 - RNA, 18 nt, Human
cucugccuucacccugga

SEQ ID NO: 966386 - RNA, 25 nt, Human
cugcaacauaaacauuuucuuuucc

SEQ ID NO: 966387 - RNA, 18 nt, Human
cugcagggguggacauga

SEQ ID NO: 966388 - RNA, 18 nt, Human
gaacaaaacaaaacaaaa

SEQ ID NO: 966389 - RNA, 23 nt, Human
gaacacaaucauuaugcugaccg

SEQ ID NO: 966390 - RNA, 24 nt, Human
gaagucuuuccacagcaaaauuac

SEQ ID NO: 966391 - RNA, 19 nt, Human
gaaguuccaugcaggcugg

SEQ ID NO: 966392 - RNA, 20 nt, Human
gacaugugagacuugcuuca

SEQ ID NO: 966393 - RNA, 24 nt, Human
gacccagccuggacaucaaggaca

SEQ ID NO: 966394 - RNA, 19 nt, Human
gagagaggggucccuccuc

SEQ ID NO: 966395 - RNA, 22 nt, Human
gcacaguuccaaaaagaacaaa

SEQ ID NO: 966396 - RNA, 23 nt, Human
gcacaguuccaaaaagaacaaaa

SEQ ID NO: 966397 - RNA, 24 nt, Human
gcagauguguccccaggggccugc

SEQ ID NO: 966398 - RNA, 20 nt, Human
gcauggaaagcaguucagac

SEQ ID NO: 966399 - RNA, 18 nt, Human
gccuugcucaguguuucc

SEQ ID NO: 966400 - RNA, 18 nt, Human
gcugcuuccgggcaccug

SEQ ID NO: 966401 - RNA, 19 nt, Human
gcugugacucaggugcuga

SEQ ID NO: 966402 - RNA, 24 nt, Human
gcugugcuugaguuucaaaggggg

SEQ ID NO: 966403 - RNA, 23 nt, Human
ggacugggcucccuguccagacc

SEQ ID NO: 966404 - RNA, 23 nt, Human
ggagugagggugggggucggggu

SEQ ID NO: 966405 - RNA, 25 nt, Human
ggcacagggacagccagagccggca

SEQ ID NO: 966406 - RNA, 21 nt, Human
ggcagauguguccccaggggc

SEQ ID NO: 966407 - RNA, 18 nt, Human
ggcccgggacugggcucc

SEQ ID NO: 966408 - RNA, 18 nt, Human
ggcugggcuuggcugggc

SEQ ID NO: 966409 - RNA, 18 nt, Human
gggaaagagacaaccaug

SEQ ID NO: 966410 - RNA, 23 nt, Human
gggcacugugaaugauggaaacg

SEQ ID NO: 966411 - RNA, 19 nt, Human
gggguggacaugaugcucc

SEQ ID NO: 966412 - RNA, 23 nt, Human
gggucggggugagguagugcugu

SEQ ID NO: 966413 - RNA, 18 nt, Human
guaaucgcaaaucacugc

SEQ ID NO: 966414 - RNA, 19 nt, Human
uaaaacuucaaaguacugc

SEQ ID NO: 966415 - RNA, 21 nt, Human
uaaaacuucaaaguacugcac

SEQ ID NO: 966416 - RNA, 23 nt, Human
uagaaaaaggcaacauuuucuuu

SEQ ID NO: 966417 - RNA, 24 nt, Human
uagaaaaaggcaacauuuucuuua

SEQ ID NO: 966418 - RNA, 18 nt, Human
uauaaaagcugaguccug

SEQ ID NO: 966419 - RNA, 18 nt, Human
ucacugcguucucagggu

SEQ ID NO: 966420 - RNA, 18 nt, Human
ucagcguucacuuccuuc

SEQ ID NO: 966421 - RNA, 22 nt, Human
uccaaaaagaacaaaacaaaac

SEQ ID NO: 966422 - RNA, 21 nt, Human
uccaacccaggcacaguucca

SEQ ID NO: 966423 - RNA, 20 nt, Human
uccacagcaaaauuacucca

SEQ ID NO: 966424 - RNA, 24 nt, Human
uccacagcaaaauuacuccaucuc

SEQ ID NO: 966425 - RNA, 21 nt, Human
ucccccaaccuuccugauugc

SEQ ID NO: 966426 - RNA, 19 nt, Human
ucccuccucgcugcccucc

SEQ ID NO: 966427 - RNA, 19 nt, Human
uccgggcaccugggcugug

SEQ ID NO: 966428 - RNA, 23 nt, Human
ucggggugagguagugcuguggg

SEQ ID NO: 966429 - RNA, 21 nt, Human
ucuguggucccuccgcugcgg

SEQ ID NO: 966430 - RNA, 21 nt, Human
ucuucagaaaugcgucacauu

SEQ ID NO: 966431 - RNA, 21 nt, Human
ugacauagcgggggaaagaga

SEQ ID NO: 966432 - RNA, 22 nt, Human
ugacaugaauacaucagcaagg

SEQ ID NO: 966433 - RNA, 19 nt, Human
ugaccaugcaauacccugc

SEQ ID NO: 966434 - RNA, 20 nt, Human
ugaccugggguucccagcaa

SEQ ID NO: 966435 - RNA, 22 nt, Human
ugaccugggguucccagcaaac

SEQ ID NO: 966436 - RNA, 18 nt, Human
ugaguuucaaagggggag

SEQ ID NO: 966437 - RNA, 20 nt, Human
ugcccgcaccacuauggggc

SEQ ID NO: 966438 - RNA, 18 nt, Human
uggaaagaaaccccaggg

SEQ ID NO: 966439 - RNA, 18 nt, Human
uggccaagaacgccgaca

SEQ ID NO: 966440 - RNA, 19 nt, Human
uggcugggcuuggcugggc

SEQ ID NO: 966441 - RNA, 24 nt, Human
uuaaaguaaucgcaaaucacugcc

SEQ ID NO: 966442 - RNA, 21 nt, Human
uucaaagggggagagguuugu

SEQ ID NO: 966443 - RNA, 22 nt, Human
uucaccagccgccaccgcuucc

SEQ ID NO: 966444 - RNA, 23 nt, Human
uuuacacucccucagacgcuuua

SEQ ID NO: 966445 - RNA, 20 nt, Human
uuuauaagaaaggaaacugc

SEQ ID NO: 966446 - RNA, 22 nt, Human
aaaacaaacaaacaaaaaauuu

SEQ ID NO: 966447 - RNA, 19 nt, Human
aacugcgcugagaaaaaca

SEQ ID NO: 966448 - RNA, 19 nt, Human
aagaggaaagagaaacccg

SEQ ID NO: 966449 - RNA, 19 nt, Human
acacacaccaagacaucca

SEQ ID NO: 966450 - RNA, 24 nt, Human
acggcuggccgucuggcaguggag

SEQ ID NO: 966451 - RNA, 18 nt, Human
aggaaagagaaacccagc

SEQ ID NO: 966452 - RNA, 21 nt, Human
aggaagucuggccgacugagc

SEQ ID NO: 966453 - RNA, 22 nt, Human
aggaagucuggccgacugagcc

SEQ ID NO: 966454 - RNA, 22 nt, Human
aguauuauauauauuuauauau

SEQ ID NO: 966455 - RNA, 18 nt, Human
auacaaagucugaauaug

SEQ ID NO: 966456 - RNA, 20 nt, Human
augaaauguuccuugacccc

SEQ ID NO: 966457 - RNA, 20 nt, Human
caaaaaauuuucauuccacu

SEQ ID NO: 966458 - RNA, 26 nt, Human
caaaacaaaacugcgcugagaaaaac

SEQ ID NO: 966459 - RNA, 20 nt, Human
caagagaaaaccuuucuguu

SEQ ID NO: 966460 - RNA, 19 nt, Human
caagguagcagcaccacuc

SEQ ID NO: 966461 - RNA, 18 nt, Human
cacagccugucuucacug

SEQ ID NO: 966462 - RNA, 20 nt, Human
caccaagacauccagagugu

SEQ ID NO: 966463 - RNA, 21 nt, Human
cauaucccaccaagagaaaac

SEQ ID NO: 966464 - RNA, 22 nt, Human
caucccggugaaucaaagacgg

SEQ ID NO: 966465 - RNA, 18 nt, Human
ccaccaagagaaaaccuu

SEQ ID NO: 966466 - RNA, 18 nt, Human
cccccagguucugacucu

SEQ ID NO: 966467 - RNA, 24 nt, Human
cccuguuccuuuucuccaaaaaga

SEQ ID NO: 966468 - RNA, 19 nt, Human
ccgcugcuggcucccccuc

SEQ ID NO: 966469 - RNA, 21 nt, Human
ccgcugcuggcucccccucgc

SEQ ID NO: 966470 - RNA, 20 nt, Human
ccggggcggcggcggcggcg

SEQ ID NO: 966471 - RNA, 26 nt, Human
ccggggcggcggcggcggcggcuuuu

SEQ ID NO: 966472 - RNA, 21 nt, Human
ccuguuccuuuucuccaaaaa

SEQ ID NO: 966473 - RNA, 20 nt, Human
cgccgggaggcgggugccgg

SEQ ID NO: 966474 - RNA, 18 nt, Human
cggcaggacagcaaacgg

SEQ ID NO: 966475 - RNA, 20 nt, Human
cggcaggacagcaaacggcu

SEQ ID NO: 966476 - RNA, 23 nt, Human
cggcgaccgccgcugcuggcucc

SEQ ID NO: 966477 - RNA, 25 nt, Human
cggcucccccccgugcagagaccau

SEQ ID NO: 966478 - RNA, 22 nt, Human
cgugugacacuuccacaucgcg

SEQ ID NO: 966479 - RNA, 18 nt, Human
cugaggugauaaccacuc

SEQ ID NO: 966480 - RNA, 23 nt, Human
cugaggugauaaccacucagugg

SEQ ID NO: 966481 - RNA, 22 nt, Human
cuggcaguggagucuguccccu

SEQ ID NO: 966482 - RNA, 19 nt, Human
cuggccgucuggcagugga

SEQ ID NO: 966483 - RNA, 19 nt, Human
cuggcucccccucgccggc

SEQ ID NO: 966484 - RNA, 23 nt, Human
cuugaccccaaggucucagcaga

SEQ ID NO: 966485 - RNA, 21 nt, Human
gaauaugaaaauaagauuucc

SEQ ID NO: 966486 - RNA, 21 nt, Human
gcagcggcggcggcuccuccg

SEQ ID NO: 966487 - RNA, 18 nt, Human
gccggcgaccgccgcugc

SEQ ID NO: 966488 - RNA, 21 nt, Human
gccggcgaccgccgcugcugg

SEQ ID NO: 966489 - RNA, 27 nt, Human
gcggcggcggcggcggcugcggcggug

SEQ ID NO: 966490 - RNA, 22 nt, Human
gcggcggcggcggcugcggcgg

SEQ ID NO: 966491 - RNA, 20 nt, Human
gcggcgguggcgucggcagc

SEQ ID NO: 966492 - RNA, 19 nt, Human
gcucccccccgugcagaga

SEQ ID NO: 966493 - RNA, 24 nt, Human
ggagauggggguggacaaaaaaaa

SEQ ID NO: 966494 - RNA, 18 nt, Human
ggcagcuucuuccucugc

SEQ ID NO: 966495 - RNA, 18 nt, Human
ggcggcggcggcggcggc

SEQ ID NO: 966496 - RNA, 24 nt, Human
ggggcggcggcggcggcggcugcg

SEQ ID NO: 966497 - RNA, 23 nt, Human
guccauggguuggugaugugucc

SEQ ID NO: 966498 - RNA, 22 nt, Human
gugccggggcggcggcggcggc

SEQ ID NO: 966499 - RNA, 21 nt, Human
guggcgucggcagcggcggcg

SEQ ID NO: 966500 - RNA, 19 nt, Human
gugucugcgaguccauggg

SEQ ID NO: 966501 - RNA, 23 nt, Human
uaauccaauggacacacaaaaca

SEQ ID NO: 966502 - RNA, 23 nt, Human
uacaaagucugaauaugaaaaua

SEQ ID NO: 966503 - RNA, 24 nt, Human
uacacacaucccaaguucugcaua

SEQ ID NO: 966504 - RNA, 20 nt, Human
uaggaagagggguuagccag

SEQ ID NO: 966505 - RNA, 28 nt, Human
uauuauauauuuauauauacacacaucc

SEQ ID NO: 966506 - RNA, 21 nt, Human
uccaauggacacacaaaacaa

SEQ ID NO: 966507 - RNA, 22 nt, Human
uccaauggacacacaaaacaaa

SEQ ID NO: 966508 - RNA, 20 nt, Human
ucccaaguucugcauauccc

SEQ ID NO: 966509 - RNA, 19 nt, Human
uccuugaccccaaggucuc

SEQ ID NO: 966510 - RNA, 22 nt, Human
ucgcgggagcaggacccgugcu

SEQ ID NO: 966511 - RNA, 26 nt, Human
ucggcagcggcggcggcuccuccggc

SEQ ID NO: 966512 - RNA, 18 nt, Human
ucucgggccucgcagcuc

SEQ ID NO: 966513 - RNA, 20 nt, Human
ucugaauaugaaaauaagau

SEQ ID NO: 966514 - RNA, 21 nt, Human
ucugacucucgggccucgcag

SEQ ID NO: 966515 - RNA, 19 nt, Human
ucuguccccuucggcagcu

SEQ ID NO: 966516 - RNA, 25 nt, Human
ucuguccccuucggcagcuucuucc

SEQ ID NO: 966517 - RNA, 18 nt, Human
ucuucacugggcaaaagu

SEQ ID NO: 966518 - RNA, 19 nt, Human
ucuuccucugcuuggcugg

SEQ ID NO: 966519 - RNA, 19 nt, Human
ugaaaauaagauuuccucu

SEQ ID NO: 966520 - RNA, 23 nt, Human
ugaaaauaagauuuccucugaaa

SEQ ID NO: 966521 - RNA, 19 nt, Human
ugaaauguuccuugacccc

SEQ ID NO: 966522 - RNA, 20 nt, Human
ugaccccaaggucucagcag

SEQ ID NO: 966523 - RNA, 24 nt, Human
ugagaaaaacaguuucauaaauua

SEQ ID NO: 966524 - RNA, 24 nt, Human
ugcagagaccaucccucuccccca

SEQ ID NO: 966525 - RNA, 25 nt, Human
ugcauaucccaccaagagaaaaccu

SEQ ID NO: 966526 - RNA, 22 nt, Human
ugccggcgaccgccgcugcugg

SEQ ID NO: 966527 - RNA, 19 nt, Human
ugcggcgguggcgucggca

SEQ ID NO: 966528 - RNA, 21 nt, Human
uggacacacaaaacaaaacug

SEQ ID NO: 966529 - RNA, 18 nt, Human
uggcgucggcagcggcgg

SEQ ID NO: 966530 - RNA, 23 nt, Human
uguuaggaaguugggggaagaga

SEQ ID NO: 966531 - RNA, 20 nt, Human
uuccacugcccuguuccuuu

SEQ ID NO: 966532 - RNA, 20 nt, Human
uucggcagcuucuuccucug

SEQ ID NO: 966533 - RNA, 24 nt, Human
uugaccccaaggucucagcagaag

SEQ ID NO: 966534 - RNA, 18 nt, Human
uuggugauguguccuugg

SEQ ID NO: 966535 - RNA, 20 nt, Human
aaaaacauacagcacagaac

SEQ ID NO: 966536 - RNA, 23 nt, Human
aagaaggcucugagccacaggca

SEQ ID NO: 966537 - RNA, 23 nt, Human
agcacagcggcggccgcgcagcc

SEQ ID NO: 966538 - RNA, 18 nt, Human
agcgcccagcugcuuggg

SEQ ID NO: 966539 - RNA, 24 nt, Human
auuaaaaacauacagcacagaaca

SEQ ID NO: 966540 - RNA, 21 nt, Human
cacagcggcggccgcgcagcc

SEQ ID NO: 966541 - RNA, 18 nt, Human
cagcacagcggcggccgc

SEQ ID NO: 966542 - RNA, 18 nt, Human
cagcugcuuggggcugcu

SEQ ID NO: 966543 - RNA, 22 nt, Human
cccgggagaccgcugcuugggg

SEQ ID NO: 966544 - RNA, 19 nt, Human
ccgcugcuugggguugcac

SEQ ID NO: 966545 - RNA, 21 nt, Human
ccgcugcuugggguugcacgu

SEQ ID NO: 966546 - RNA, 18 nt, Human
cgcgcagccccggcccgg

SEQ ID NO: 966547 - RNA, 22 nt, Human
cugucccaguuccagcagcccc

SEQ ID NO: 966548 - RNA, 21 nt, Human
gagaacgagagcagagcaaga

SEQ ID NO: 966549 - RNA, 18 nt, Human
gagagcagagcaagagga

SEQ ID NO: 966550 - RNA, 25 nt, Human
gcagagcaagaggauggugcccucc

SEQ ID NO: 966551 - RNA, 19 nt, Human
gcagugccgggagcagugc

SEQ ID NO: 966552 - RNA, 24 nt, Human
guauguacaccuuuaauaugcaua

SEQ ID NO: 966553 - RNA, 18 nt, Human
uaauaugcauaugagaaa

SEQ ID NO: 966554 - RNA, 25 nt, Human
uagcaggcgagccacuguccccucu

SEQ ID NO: 966555 - RNA, 19 nt, Human
uccugaccuggugcgcagu

SEQ ID NO: 966556 - RNA, 18 nt, Human
ugaccuggugcgcagugc

SEQ ID NO: 966557 - RNA, 23 nt, Human
ugaccuuaaaggaagccuuccuu

SEQ ID NO: 966558 - RNA, 22 nt, Human
ugccgggagcagugcuggccau

SEQ ID NO: 966559 - RNA, 20 nt, Human
uuagucuuaaaaaauauaaa

SEQ ID NO: 966560 - RNA, 19 nt, Human
uugcaaaagucauaguugc

SEQ ID NO: 966561 - RNA, 26 nt, Human
aaaaggcuuccuccuggagagaauuu

SEQ ID NO: 966562 - RNA, 22 nt, Human
aaacagugguuuguacugaaac

SEQ ID NO: 966563 - RNA, 21 nt, Human
aaacguaaucaucuaugucca

SEQ ID NO: 966564 - RNA, 18 nt, Human
aaaggcuuccuccuggag

SEQ ID NO: 966565 - RNA, 18 nt, Human
aaaugaucaaacacccuc

SEQ ID NO: 966566 - RNA, 24 nt, Human
aaauguucuuccaagcugaacucc

SEQ ID NO: 966567 - RNA, 22 nt, Human
aacaaacaccaauaacccagau

SEQ ID NO: 966568 - RNA, 23 nt, Human
aagaaaaucacaaauacucaaag

SEQ ID NO: 966569 - RNA, 23 nt, Human
aagaaagaaagcacuuacuaugc

SEQ ID NO: 966570 - RNA, 25 nt, Human
aagaaggaaaaaggcuuccuccugg

SEQ ID NO: 966571 - RNA, 21 nt, Human
aagaugcugaaccagaaggaa

SEQ ID NO: 966572 - RNA, 18 nt, Human
aagcaaacucaggcaagc

SEQ ID NO: 966573 - RNA, 19 nt, Human
aagcaaacucaggcaagca

SEQ ID NO: 966574 - RNA, 18 nt, Human
aagcacugccaugcagaa

SEQ ID NO: 966575 - RNA, 21 nt, Human
aaggaauaccucauuuuugau

SEQ ID NO: 966576 - RNA, 25 nt, Human
aauuaauccucaauggaaaaaauau

SEQ ID NO: 966577 - RNA, 24 nt, Human
acaacaaacauagugaucuuuucc

SEQ ID NO: 966578 - RNA, 23 nt, Human
acacacuaaaaccauuucugccu

SEQ ID NO: 966579 - RNA, 21 nt, Human
acagagaagcugugcuaaaac

SEQ ID NO: 966580 - RNA, 25 nt, Human
acuccaagaugcugaaccagaagga

SEQ ID NO: 966581 - RNA, 21 nt, Human
acugauccauguugccucagc

SEQ ID NO: 966582 - RNA, 21 nt, Human
agaaagggguacguguccagc

SEQ ID NO: 966583 - RNA, 25 nt, Human
agagaaaaaaacuuuugcaggaugu

SEQ ID NO: 966584 - RNA, 19 nt, Human
agcucaccacaaagaccug

SEQ ID NO: 966585 - RNA, 23 nt, Human
aggaaaaaggcuuccuccuggag

SEQ ID NO: 966586 - RNA, 21 nt, Human
aggaacauggauuaaggcaaa

SEQ ID NO: 966587 - RNA, 21 nt, Human
aggaauucuggguucucacug

SEQ ID NO: 966588 - RNA, 20 nt, Human
aggaauuuucacuucaacau

SEQ ID NO: 966589 - RNA, 20 nt, Human
aggacacacaauggccaaaa

SEQ ID NO: 966590 - RNA, 21 nt, Human
aggacacacaauggccaaaag

SEQ ID NO: 966591 - RNA, 23 nt, Human
aggcaaagugaggcauugcaacc

SEQ ID NO: 966592 - RNA, 22 nt, Human
aggcagcucaguucuuuucuuu

SEQ ID NO: 966593 - RNA, 20 nt, Human
aggcuuccuccuggagagaa

SEQ ID NO: 966594 - RNA, 25 nt, Human
agggguacguguccagcagcauucg

SEQ ID NO: 966595 - RNA, 21 nt, Human
agguuuucacaaaauacaaag

SEQ ID NO: 966596 - RNA, 19 nt, Human
agugaugaucagccacugc

SEQ ID NO: 966597 - RNA, 22 nt, Human
agugaugaucagccacugcugc

SEQ ID NO: 966598 - RNA, 27 nt, Human
aucaaacacccuccaaucaguucucag

SEQ ID NO: 966599 - RNA, 19 nt, Human
caaaauacaaagcucaaac

SEQ ID NO: 966600 - RNA, 22 nt, Human
caauagccuccucccuccccag

SEQ ID NO: 966601 - RNA, 20 nt, Human
cacaaguugucccauccuuc

SEQ ID NO: 966602 - RNA, 24 nt, Human
cacacauacacacacuaaaaccau

SEQ ID NO: 966603 - RNA, 20 nt, Human
caccacaaaacagaaucaaa

SEQ ID NO: 966604 - RNA, 25 nt, Human
caccacaaagaccugacaauucaaa

SEQ ID NO: 966605 - RNA, 18 nt, Human
cacuaaaaccauuucugc

SEQ ID NO: 966606 - RNA, 25 nt, Human
caggaacaaacaccaauaacccaga

SEQ ID NO: 966607 - RNA, 27 nt, Human
caggaacaaacaccaauaacccagaua

SEQ ID NO: 966608 - RNA, 19 nt, Human
cauacacacacuaaaacca

SEQ ID NO: 966609 - RNA, 23 nt, Human
caucaggaacaaacaccaauaac

SEQ ID NO: 966610 - RNA, 19 nt, Human
ccacagccacuugccuccu

SEQ ID NO: 966611 - RNA, 22 nt, Human
ccagcagcauucgagcucucag

SEQ ID NO: 966612 - RNA, 22 nt, Human
ccucagccuguuaaaaacuaaa

SEQ ID NO: 966613 - RNA, 24 nt, Human
ccuccaaucaguucucaguuucau

SEQ ID NO: 966614 - RNA, 21 nt, Human
ccucuugagagaaagaguaag

SEQ ID NO: 966615 - RNA, 23 nt, Human
cgccacagccacuugccuccucu

SEQ ID NO: 966616 - RNA, 18 nt, Human
cuccaagaugcugaacca

SEQ ID NO: 966617 - RNA, 24 nt, Human
cuccaagaugcugaaccagaagga

SEQ ID NO: 966618 - RNA, 24 nt, Human
cuccguucgucaaaacuuccuuca

SEQ ID NO: 966619 - RNA, 18 nt, Human
cuggguucucacugaagc

SEQ ID NO: 966620 - RNA, 25 nt, Human
cuuaggagagaaaaaaacuuuugca

SEQ ID NO: 966621 - RNA, 19 nt, Human
gaacaaacaccaauaaccc

SEQ ID NO: 966622 - RNA, 21 nt, Human
gagaaaaaaacuuuugcagga

SEQ ID NO: 966623 - RNA, 23 nt, Human
gauaguucaaacagugguuugua

SEQ ID NO: 966624 - RNA, 19 nt, Human
ggaagggcaagaaggaaaa

SEQ ID NO: 966625 - RNA, 21 nt, Human
ggagagaauuuuuuuccuuuc

SEQ ID NO: 966626 - RNA, 22 nt, Human
ggcucacuucagaauuuucuaa

SEQ ID NO: 966627 - RNA, 22 nt, Human
gggcaagaaggaaaaaggcuuc

SEQ ID NO: 966628 - RNA, 19 nt, Human
guaaauccuccuccaggaa

SEQ ID NO: 966629 - RNA, 20 nt, Human
guaauaauagaaagggguac

SEQ ID NO: 966630 - RNA, 19 nt, Human
guagcuuaaaaagaaagaa

SEQ ID NO: 966631 - RNA, 21 nt, Human
uaaauccuccuccaggaauuc

SEQ ID NO: 966632 - RNA, 22 nt, Human
uaacccagauaguucaaacagg

SEQ ID NO: 966633 - RNA, 18 nt, Human
uaagaaaaucacaaauac

SEQ ID NO: 966634 - RNA, 26 nt, Human
uagccuccucccuccccagaaguagc

SEQ ID NO: 966635 - RNA, 22 nt, Human
uaggagagaaaaaaacuuuugc

SEQ ID NO: 966636 - RNA, 23 nt, Human
uauaguaagaaaaucacaaauac

SEQ ID NO: 966637 - RNA, 22 nt, Human
uauguccaccacaaaacagaau

SEQ ID NO: 966638 - RNA, 21 nt, Human
ucacaaaauacaaagcucaaa

SEQ ID NO: 966639 - RNA, 19 nt, Human
ucagccacugcugcggccg

SEQ ID NO: 966640 - RNA, 21 nt, Human
ucagugaugaucagccacugc

SEQ ID NO: 966641 - RNA, 18 nt, Human
uccaagcugaacuccaag

SEQ ID NO: 966642 - RNA, 21 nt, Human
uccauguugccucagccuguu

SEQ ID NO: 966643 - RNA, 21 nt, Human
uccccagaaguagcuuaaaaa

SEQ ID NO: 966644 - RNA, 24 nt, Human
ucccuccccagaaguagcuuaaaa

SEQ ID NO: 966645 - RNA, 24 nt, Human
uccuucaggacacacaauggccaa

SEQ ID NO: 966646 - RNA, 19 nt, Human
ucucuacuccguucgucaa

SEQ ID NO: 966647 - RNA, 24 nt, Human
ucugaagauugcuuuucugagcuu

SEQ ID NO: 966648 - RNA, 25 nt, Human
ugaaccagaaggaauuuucacuuca

SEQ ID NO: 966649 - RNA, 19 nt, Human
ugagagaaagaguaaggaa

SEQ ID NO: 966650 - RNA, 19 nt, Human
ugccaugcagaauucagcu

SEQ ID NO: 966651 - RNA, 19 nt, Human
ugccucagccuguuaaaaa

SEQ ID NO: 966652 - RNA, 19 nt, Human
ugccugaagcaaacucagg

SEQ ID NO: 966653 - RNA, 21 nt, Human
uggaaaaaauaugaaggaggc

SEQ ID NO: 966654 - RNA, 21 nt, Human
uguaaauccuccuccaggaau

SEQ ID NO: 966655 - RNA, 21 nt, Human
uguccaccacaaaacagaauc

SEQ ID NO: 966656 - RNA, 18 nt, Human
uuacaguuuucuuagugu

SEQ ID NO: 966657 - RNA, 26 nt, Human
uucaagguuuuacaguuuucuuaguu

SEQ ID NO: 966658 - RNA, 24 nt, Human
uucacacauacacacacuaaaacc

SEQ ID NO: 966659 - RNA, 21 nt, Human
uucacuucaacauuucugaau

SEQ ID NO: 966660 - RNA, 22 nt, Human
uucagaauuuucuaacuugucc

SEQ ID NO: 966661 - RNA, 19 nt, Human
uugccucagccuguuaaaa

SEQ ID NO: 966662 - RNA, 19 nt, Human
uugguuggguauuuuagaa

SEQ ID NO: 966663 - RNA, 20 nt, Human
uugguuggguauuuuagaag

SEQ ID NO: 966664 - RNA, 24 nt, Human
aaaguguucagauuacagguguga

SEQ ID NO: 966665 - RNA, 22 nt, Human
aagaaaaaucccagagguggag

SEQ ID NO: 966666 - RNA, 20 nt, Human
aagcucgacuucacuccugc

SEQ ID NO: 966667 - RNA, 25 nt, Human
aagugauccucccgccucggccucc

SEQ ID NO: 966668 - RNA, 23 nt, Human
aagugugugccaccgugccuggc

SEQ ID NO: 966669 - RNA, 19 nt, Human
acaagagauccucccuccu

SEQ ID NO: 966670 - RNA, 24 nt, Human
acuauguugcccaggcuggucuug

SEQ ID NO: 966671 - RNA, 25 nt, Human
acuauguugcccaggcuggucuuga

SEQ ID NO: 966672 - RNA, 24 nt, Human
agagauccucccuccucagccucc

SEQ ID NO: 966673 - RNA, 24 nt, Human
agauuacaggugugagccacggca

SEQ ID NO: 966674 - RNA, 24 nt, Human
agauuacaggugugagccacggca

SEQ ID NO: 966675 - RNA, 23 nt, Human
agcuggggcuacaagugugugcc

SEQ ID NO: 966676 - RNA, 19 nt, Human
aggagaaaaauggaagaaa

SEQ ID NO: 966677 - RNA, 24 nt, Human
aggagucucacuauguugcccagg

SEQ ID NO: 966678 - RNA, 21 nt, Human
agguggaggcucaaucaaaag

SEQ ID NO: 966679 - RNA, 19 nt, Human
agugcaguggugugaucac

SEQ ID NO: 966680 - RNA, 22 nt, Human
agugcaguggugugaucacagc

SEQ ID NO: 966681 - RNA, 20 nt, Human
aguuucuucaucuccauagg

SEQ ID NO: 966682 - RNA, 21 nt, Human
caaaugauuuuagugugugga

SEQ ID NO: 966683 - RNA, 28 nt, Human
caagacagguuccaagacaugcucugcc

SEQ ID NO: 966684 - RNA, 24 nt, Human
caagagauccucccuccucagccu

SEQ ID NO: 966685 - RNA, 23 nt, Human
caagaugcuggggcuggaaaugc

SEQ ID NO: 966686 - RNA, 27 nt, Human
caagugauccucccgccucggccuccc

SEQ ID NO: 966687 - RNA, 28 nt, Human
caagugauccucccgccucggccuccca

SEQ ID NO: 966688 - RNA, 18 nt, Human
cacaccugaggcugcccc

SEQ ID NO: 966689 - RNA, 20 nt, Human
cacaccugaggcugccccuc

SEQ ID NO: 966690 - RNA, 18 nt, Human
caccugaggcugccccuc

SEQ ID NO: 966691 - RNA, 20 nt, Human
caccuggccucaaguuucug

SEQ ID NO: 966692 - RNA, 21 nt, Human
cacgcuggcagagcuuaguga

SEQ ID NO: 966693 - RNA, 19 nt, Human
cacuauguugcccaggcug

SEQ ID NO: 966694 - RNA, 24 nt, Human
cacuauguugcccaggcuggucuu

SEQ ID NO: 966695 - RNA, 27 nt, Human
cacuauguugcccaggcuggucuugaa

SEQ ID NO: 966696 - RNA, 19 nt, Human
cacucaagucucugcccau

SEQ ID NO: 966697 - RNA, 20 nt, Human
cagauuacaggugugagcca

SEQ ID NO: 966698 - RNA, 19 nt, Human
cagcaagaugcuggggcug

SEQ ID NO: 966699 - RNA, 24 nt, Human
cagccucgaacuccuaggcacaag

SEQ ID NO: 966700 - RNA, 30 nt, Human
cagcuugaugaaggcacagaagguugucuu

SEQ ID NO: 966701 - RNA, 23 nt, Human
caggcacacaccugaggcugccc

SEQ ID NO: 966702 - RNA, 21 nt, Human
ccaaaguguucagauuacagg

SEQ ID NO: 966703 - RNA, 24 nt, Human
ccaaaguguucagauuacaggugu

SEQ ID NO: 966704 - RNA, 19 nt, Human
ccacauucauucccaagcu

SEQ ID NO: 966705 - RNA, 24 nt, Human
ccacugcagccucgaacuccuagg

SEQ ID NO: 966706 - RNA, 21 nt, Human
ccagagguggaggcucaauca

SEQ ID NO: 966707 - RNA, 19 nt, Human
ccaggcacacaccugaggc

SEQ ID NO: 966708 - RNA, 20 nt, Human
ccaggcacacaccugaggcu

SEQ ID NO: 966709 - RNA, 24 nt, Human
ccaggcuggucuugaacuccuggg

SEQ ID NO: 966710 - RNA, 19 nt, Human
cccaggcuggagugcagug

SEQ ID NO: 966711 - RNA, 22 nt, Human
cccaggcuggagugcaguggug

SEQ ID NO: 966712 - RNA, 22 nt, Human
ccucagccucccuaguagcugg

SEQ ID NO: 966713 - RNA, 24 nt, Human
ccucccacgauggguagcaggaac

SEQ ID NO: 966714 - RNA, 19 nt, Human
ccucccgccucggccuccc

SEQ ID NO: 966715 - RNA, 24 nt, Human
ccucccuccucagccucccuagua

SEQ ID NO: 966716 - RNA, 25 nt, Human
ccuccuaagagaggagaaaaaugga

SEQ ID NO: 966717 - RNA, 21 nt, Human
ccugaugguggccucccacga

SEQ ID NO: 966718 - RNA, 18 nt, Human
ccugggcucaagugaucc

SEQ ID NO: 966719 - RNA, 22 nt, Human
ccugggcucaagugauccuccc

SEQ ID NO: 966720 - RNA, 19 nt, Human
cggggagggaaacugucuc

SEQ ID NO: 966721 - RNA, 18 nt, Human
cuacaagugugugccacc

SEQ ID NO: 966722 - RNA, 24 nt, Human
cucaagugauccucccgccucggc

SEQ ID NO: 966723 - RNA, 22 nt, Human
cucagccucccuaguagcuggg

SEQ ID NO: 966724 - RNA, 22 nt, Human
cucaggagcgaggaccucgaag

SEQ ID NO: 966725 - RNA, 18 nt, Human
cugccguccuccuccaac

SEQ ID NO: 966726 - RNA, 19 nt, Human
cuggucuugaacuccuggg

SEQ ID NO: 966727 - RNA, 20 nt, Human
cuugaacuccugggcucaag

SEQ ID NO: 966728 - RNA, 23 nt, Human
cuuguucccaggcuggagugcag

SEQ ID NO: 966729 - RNA, 23 nt, Human
gaacuccuaggcacaagagaucc

SEQ ID NO: 966730 - RNA, 22 nt, Human
gaagaaaaaucccagaggugga

SEQ ID NO: 966731 - RNA, 20 nt, Human
gaccaacgccauucguggca

SEQ ID NO: 966732 - RNA, 20 nt, Human
gacccccaacugugucccag

SEQ ID NO: 966733 - RNA, 24 nt, Human
gacccccaacugugucccagacac

SEQ ID NO: 966734 - RNA, 18 nt, Human
gagcgaggaccucgaagg

SEQ ID NO: 966735 - RNA, 18 nt, Human
gauccucccgccucggcc

SEQ ID NO: 966736 - RNA, 18 nt, Human
gauggcaggaauuccaag

SEQ ID NO: 966737 - RNA, 18 nt, Human
gauuacaggugugagcca

SEQ ID NO: 966738 - RNA, 20 nt, Human
gccaagcaagaggccaggcu

SEQ ID NO: 966739 - RNA, 22 nt, Human
gccaagcaagaggccaggcuuc

SEQ ID NO: 966740 - RNA, 20 nt, Human
gccacggcaccuggccucaa

SEQ ID NO: 966741 - RNA, 23 nt, Human
gccucggccucccaaaguguuca

SEQ ID NO: 966742 - RNA, 18 nt, Human
gcugggugcaagaggcug

SEQ ID NO: 966743 - RNA, 21 nt, Human
ggacaugguggguacacaacc

SEQ ID NO: 966744 - RNA, 22 nt, Human
ggcuggagugcaguggugugau

SEQ ID NO: 966745 - RNA, 18 nt, Human
ggcuggucuugaacuccu

SEQ ID NO: 966746 - RNA, 19 nt, Human
ggcuucgugcaaaagaagg

SEQ ID NO: 966747 - RNA, 18 nt, Human
gggcagcaguggggggac

SEQ ID NO: 966748 - RNA, 18 nt, Human
gggcagcaguggggggac

SEQ ID NO: 966749 - RNA, 23 nt, Human
gggcagcaguggggggacguugu

SEQ ID NO: 966750 - RNA, 21 nt, Human
gggcucaagugauccucccgc

SEQ ID NO: 966751 - RNA, 22 nt, Human
gggcucaagugauccucccgcc

SEQ ID NO: 966752 - RNA, 24 nt, Human
gguacacaaccagcuugaugaagg

SEQ ID NO: 966753 - RNA, 22 nt, Human
gguaggagccucugguggcuca

SEQ ID NO: 966754 - RNA, 24 nt, Human
gugauccucccgccucggccuccc

SEQ ID NO: 966755 - RNA, 18 nt, Human
uaagagaggagaaaaaug

SEQ ID NO: 966756 - RNA, 19 nt, Human
uaaggggucauuaaucucu

SEQ ID NO: 966757 - RNA, 22 nt, Human
uaaugucucucgaucaagcuuu

SEQ ID NO: 966758 - RNA, 22 nt, Human
uacaggugugagccacggcacc

SEQ ID NO: 966759 - RNA, 22 nt, Human
uacaggugugagccacggcacc

SEQ ID NO: 966760 - RNA, 23 nt, Human
uacaggugugagccacggcaccu

SEQ ID NO: 966761 - RNA, 23 nt, Human
uagagacaggagucucacuaugu

SEQ ID NO: 966762 - RNA, 23 nt, Human
uagccuauucuccugcaauccuu

SEQ ID NO: 966763 - RNA, 22 nt, Human
uaggaucuuccacauucauucc

SEQ ID NO: 966764 - RNA, 26 nt, Human
uaguagcuggggcuacaagugugugc

SEQ ID NO: 966765 - RNA, 20 nt, Human
uauguugcccaggcuggucu

SEQ ID NO: 966766 - RNA, 23 nt, Human
uauguugcccaggcuggucuuga

SEQ ID NO: 966767 - RNA, 24 nt, Human
uauguugcccaggcuggucuugaa

SEQ ID NO: 966768 - RNA, 20 nt, Human
ucagaauauaggaucuucca

SEQ ID NO: 966769 - RNA, 22 nt, Human
ucagauuacaggugugagccac

SEQ ID NO: 966770 - RNA, 23 nt, Human
ucagccucccuaguagcuggggc

SEQ ID NO: 966771 - RNA, 22 nt, Human
ucaggagcgaggaccucgaagg

SEQ ID NO: 966772 - RNA, 23 nt, Human
ucccaaaguguucagauuacagg

SEQ ID NO: 966773 - RNA, 19 nt, Human
ucccagacacggcugugug

SEQ ID NO: 966774 - RNA, 24 nt, Human
ucccaggcuggagugcaguggugu

SEQ ID NO: 966775 - RNA, 22 nt, Human
ucccuaguagcuggggcuacaa

SEQ ID NO: 966776 - RNA, 21 nt, Human
ucccucaggagcgaggaccuc

SEQ ID NO: 966777 - RNA, 22 nt, Human
ucccugagcgucuccccagcuc

SEQ ID NO: 966778 - RNA, 23 nt, Human
uccucagccucccuaguagcugg

SEQ ID NO: 966779 - RNA, 21 nt, Human
uccugggcucaagugauccuc

SEQ ID NO: 966780 - RNA, 22 nt, Human
uccugggcucaagugauccucc

SEQ ID NO: 966781 - RNA, 23 nt, Human
uccugggcucaagugauccuccc

SEQ ID NO: 966782 - RNA, 19 nt, Human
ucucacuauguugcccagg

SEQ ID NO: 966783 - RNA, 23 nt, Human
ucucacuauguugcccaggcugg

SEQ ID NO: 966784 - RNA, 24 nt, Human
ucucacuauguugcccaggcuggu

SEQ ID NO: 966785 - RNA, 26 nt, Human
ucucacuauguugcccaggcuggucu

SEQ ID NO: 966786 - RNA, 21 nt, Human
ucuccugcaauccuuaaagag

SEQ ID NO: 966787 - RNA, 23 nt, Human
ucucugugacaguccaggguccc

SEQ ID NO: 966788 - RNA, 19 nt, Human
ucugucaucggcuguguga

SEQ ID NO: 966789 - RNA, 23 nt, Human
ucuugaacuccugggcucaagug

SEQ ID NO: 966790 - RNA, 25 nt, Human
ugaacuccugggcucaagugauccu

SEQ ID NO: 966791 - RNA, 18 nt, Human
ugagcgucuccccagcuc

SEQ ID NO: 966792 - RNA, 21 nt, Human
ugcaagaggcugugagcggug

SEQ ID NO: 966793 - RNA, 21 nt, Human
ugcccaggcacacaccugagg

SEQ ID NO: 966794 - RNA, 24 nt, Human
ugcccaggcuggucuugaacuccu

SEQ ID NO: 966795 - RNA, 28 nt, Human
ugcccaggcuggucuugaacuccugggc

SEQ ID NO: 966796 - RNA, 18 nt, Human
ugcugaguagaugcuguu

SEQ ID NO: 966797 - RNA, 21 nt, Human
ugcuugcauauauuuaccuuu

SEQ ID NO: 966798 - RNA, 19 nt, Human
uggagugcaguggugugau

SEQ ID NO: 966799 - RNA, 19 nt, Human
uggagugcaguggugugau

SEQ ID NO: 966800 - RNA, 21 nt, Human
uggagugcaguggugugauca

SEQ ID NO: 966801 - RNA, 28 nt, Human
uggagugcaguggugugauggcucuagc

SEQ ID NO: 966802 - RNA, 18 nt, Human
uggcaggaauuccaaggg

SEQ ID NO: 966803 - RNA, 24 nt, Human
ugggcucaagugauccucccgccu

SEQ ID NO: 966804 - RNA, 23 nt, Human
ugggguaggagccucugguggcu

SEQ ID NO: 966805 - RNA, 24 nt, Human
uggugugaucacagcccacugcag

SEQ ID NO: 966806 - RNA, 19 nt, Human
uguccugucucucagaaua

SEQ ID NO: 966807 - RNA, 21 nt, Human
uguccugucucucagaauaua

SEQ ID NO: 966808 - RNA, 19 nt, Human
ugucucucagaauauagga

SEQ ID NO: 966809 - RNA, 19 nt, Human
ugucucugccguccuccuc

SEQ ID NO: 966810 - RNA, 20 nt, Human
ugucucugccguccuccucc

SEQ ID NO: 966811 - RNA, 23 nt, Human
ugucucugccguccuccuccaac

SEQ ID NO: 966812 - RNA, 18 nt, Human
uuaaagagcugauaaugu

SEQ ID NO: 966813 - RNA, 23 nt, Human
uucccaggcuggagugcaguggu

SEQ ID NO: 966814 - RNA, 19 nt, Human
uucccugagcgucucccca

SEQ ID NO: 966815 - RNA, 23 nt, Human
uuuaguguguggagguugaaccu

SEQ ID NO: 966816 - RNA, 18 nt, Human
aaauaauccagucuggag

SEQ ID NO: 966817 - RNA, 18 nt, Human
acccugagaggacaaaaa

SEQ ID NO: 966818 - RNA, 19 nt, Human
acccugagaggacaaaaac

SEQ ID NO: 966819 - RNA, 26 nt, Human
acccugagaggacaaaaacaggaagc

SEQ ID NO: 966820 - RNA, 21 nt, Human
agaggcucugccucuccugcc

SEQ ID NO: 966821 - RNA, 18 nt, Human
agcacaggggcuucaggg

SEQ ID NO: 966822 - RNA, 24 nt, Human
aggggacaguggcaggggucccuu

SEQ ID NO: 966823 - RNA, 22 nt, Human
cagcggggaagcccuagaacuc

SEQ ID NO: 966824 - RNA, 19 nt, Human
caggggacuuggguuccau

SEQ ID NO: 966825 - RNA, 19 nt, Human
caugagcagacaaugaggc

SEQ ID NO: 966826 - RNA, 21 nt, Human
ccacgcccucccucauguagg

SEQ ID NO: 966827 - RNA, 18 nt, Human
ccagcccgcugaggggcc

SEQ ID NO: 966828 - RNA, 26 nt, Human
cccaacccugagaggacaaaaacagg

SEQ ID NO: 966829 - RNA, 21 nt, Human
ccccggugcccgauagauggg

SEQ ID NO: 966830 - RNA, 24 nt, Human
ccggugcccgauagaugggccgga

SEQ ID NO: 966831 - RNA, 20 nt, Human
ccugccacccuggugaggga

SEQ ID NO: 966832 - RNA, 21 nt, Human
ccugggcugcagcaugauugg

SEQ ID NO: 966833 - RNA, 18 nt, Human
ccuugccacgcccucccu

SEQ ID NO: 966834 - RNA, 19 nt, Human
ccuugccacgcccucccuc

SEQ ID NO: 966835 - RNA, 21 nt, Human
cgggccggagccccggugccc

SEQ ID NO: 966836 - RNA, 19 nt, Human
cuggagcagucgggguccu

SEQ ID NO: 966837 - RNA, 19 nt, Human
gaacacacguuggcaggag

SEQ ID NO: 966838 - RNA, 21 nt, Human
gacaaaaacaggaagcucugu

SEQ ID NO: 966839 - RNA, 18 nt, Human
gacaguggcagggguccc

SEQ ID NO: 966840 - RNA, 18 nt, Human
gaggggccagccacggcg

SEQ ID NO: 966841 - RNA, 21 nt, Human
gcaaguguugucccaccuccu

SEQ ID NO: 966842 - RNA, 23 nt, Human
ggcccaaaaccucugccagagga

SEQ ID NO: 966843 - RNA, 20 nt, Human
gggaagcccuagaacuccaa

SEQ ID NO: 966844 - RNA, 18 nt, Human
gggacaguggcagggguc

SEQ ID NO: 966845 - RNA, 23 nt, Human
gugggaaaacuccgcugcagaga

SEQ ID NO: 966846 - RNA, 19 nt, Human
uagccugccuauucuggca

SEQ ID NO: 966847 - RNA, 19 nt, Human
ucccaccuccuggcccaaa

SEQ ID NO: 966848 - RNA, 24 nt, Human
ucccugagucaggcggggccccug

SEQ ID NO: 966849 - RNA, 18 nt, Human
uccgcaguaggucuuggc

SEQ ID NO: 966850 - RNA, 21 nt, Human
uccgcaguaggucuuggcccu

SEQ ID NO: 966851 - RNA, 23 nt, Human
uccugggucccgggccggagccc

SEQ ID NO: 966852 - RNA, 24 nt, Human
ucuccgucacuagcuaggccacag

SEQ ID NO: 966853 - RNA, 22 nt, Human
ugagcagacaaugaggcggccc

SEQ ID NO: 966854 - RNA, 20 nt, Human
uggcaggaguggcuguccug

SEQ ID NO: 966855 - RNA, 19 nt, Human
uggcaggggucccuugcca

SEQ ID NO: 966856 - RNA, 21 nt, Human
uggcaggggucccuugccaac

SEQ ID NO: 966857 - RNA, 18 nt, Human
uggcccaaaaccucugcc

SEQ ID NO: 966858 - RNA, 22 nt, Human
uggcuguccugucccugaguca

SEQ ID NO: 966859 - RNA, 19 nt, Human
ugguccugggucccgggcc

SEQ ID NO: 966860 - RNA, 19 nt, Human
uguccugucccugagucag

SEQ ID NO: 966861 - RNA, 22 nt, Human
uuccaugcaaguguugucccac

SEQ ID NO: 966862 - RNA, 21 nt, Human
uucccggcagcggggaagccc

SEQ ID NO: 966863 - RNA, 26 nt, Human
aaggauuucuuucuaggggaaguggu

SEQ ID NO: 966864 - RNA, 22 nt, Human
aaucuacccacccacuucccca

SEQ ID NO: 966865 - RNA, 24 nt, Human
acaacucgagucugucuuguuuuu

SEQ ID NO: 966866 - RNA, 24 nt, Human
acgcacgcacgcuucuucggcccc

SEQ ID NO: 966867 - RNA, 26 nt, Human
auagaaaaccuaacaaaaauacccug

SEQ ID NO: 966868 - RNA, 18 nt, Human
aucuauggccauggucgc

SEQ ID NO: 966869 - RNA, 23 nt, Human
cacccacuuccccaaagagggca

SEQ ID NO: 966870 - RNA, 26 nt, Human
cacccacuuccccaaagagggcaaca

SEQ ID NO: 966871 - RNA, 19 nt, Human
cagccccccaugcacacac

SEQ ID NO: 966872 - RNA, 22 nt, Human
cagccccccaugcacacacacc

SEQ ID NO: 966873 - RNA, 18 nt, Human
ccaagccaacgcugaaag

SEQ ID NO: 966874 - RNA, 22 nt, Human
ccaagccaacgcugaaaguaaa

SEQ ID NO: 966875 - RNA, 21 nt, Human
ccauggucgcuuccccugcag

SEQ ID NO: 966876 - RNA, 20 nt, Human
ccauucccucuuggagucac

SEQ ID NO: 966877 - RNA, 22 nt, Human
cccgcgcugcugcgccgccagg

SEQ ID NO: 966878 - RNA, 23 nt, Human
ccuaacaacucgagucugucuug

SEQ ID NO: 966879 - RNA, 25 nt, Human
ccuccaagccaacgcugaaaguaaa

SEQ ID NO: 966880 - RNA, 18 nt, Human
ccucccgcgcugcugcgc

SEQ ID NO: 966881 - RNA, 18 nt, Human
ccuccgagcgaugcuccu

SEQ ID NO: 966882 - RNA, 18 nt, Human
cgccgccucccgcgcugc

SEQ ID NO: 966883 - RNA, 21 nt, Human
cuucgccgccucccgcgcugc

SEQ ID NO: 966884 - RNA, 24 nt, Human
cuugauugguuccucagcccuaac

SEQ ID NO: 966885 - RNA, 25 nt, Human
gaacugcaucuucuagauuugaacc

SEQ ID NO: 966886 - RNA, 20 nt, Human
gaaguggcagcggagggucc

SEQ ID NO: 966887 - RNA, 26 nt, Human
gaucuauggccauggucgcuuccccu

SEQ ID NO: 966888 - RNA, 20 nt, Human
gccaacgcugaaaguaaagu

SEQ ID NO: 966889 - RNA, 22 nt, Human
gccccggcgucccaggggcggg

SEQ ID NO: 966890 - RNA, 22 nt, Human
gcgccgccaggcaacccccccc

SEQ ID NO: 966891 - RNA, 22 nt, Human
gcggcggcggcgagucgcuccc

SEQ ID NO: 966892 - RNA, 19 nt, Human
ggcgggcgcuggggucucc

SEQ ID NO: 966893 - RNA, 19 nt, Human
ggggcgggggccggggccu

SEQ ID NO: 966894 - RNA, 23 nt, Human
ggucgcuuccccugcagaaggcg

SEQ ID NO: 966895 - RNA, 21 nt, Human
uaacaaaaauacccugguuca

SEQ ID NO: 966896 - RNA, 23 nt, Human
uaccuugauugguuccucagccc

SEQ ID NO: 966897 - RNA, 30 nt, Human
ucagcaacacuuuuaccccaacauuuucuu

SEQ ID NO: 966898 - RNA, 19 nt, Human
uccccugcagaaggcgggc

SEQ ID NO: 966899 - RNA, 19 nt, Human
ucgccgccucccgcgcugc

SEQ ID NO: 966900 - RNA, 22 nt, Human
ugcuauaaaguauuucauagga

SEQ ID NO: 966901 - RNA, 21 nt, Human
uggccauggucgcuuccccug

SEQ ID NO: 966902 - RNA, 23 nt, Human
ugguuccucagcccuaacaacuc

SEQ ID NO: 966903 - RNA, 19 nt, Human
uguccccuccgagcgaugc

SEQ ID NO: 966904 - RNA, 22 nt, Human
uguccccuccgagcgaugcucc

SEQ ID NO: 966905 - RNA, 23 nt, Human
uuccccaaagagggcaaaaauug

SEQ ID NO: 966906 - RNA, 20 nt, Human
uugcaaaucugccaugugcu

SEQ ID NO: 966907 - RNA, 19 nt, Human
uuggaucuucauugcuccu

SEQ ID NO: 966908 - RNA, 22 nt, Human
uuguccccuccgagcgaugcuc

SEQ ID NO: 966909 - RNA, 26 nt, Human
uuugaaccaugugcuuuaccaacagc

SEQ ID NO: 966910 - RNA, 20 nt, Human
aaccauguggcuucaaugca

SEQ ID NO: 966911 - RNA, 22 nt, Human
aacucuuaaaagagcagugcaa

SEQ ID NO: 966912 - RNA, 21 nt, Human
aauuccuugaaggggugagcu

SEQ ID NO: 966913 - RNA, 19 nt, Human
acaguucgaucuaagcaca

SEQ ID NO: 966914 - RNA, 22 nt, Human
accccaaaggaagcuccaaaca

SEQ ID NO: 966915 - RNA, 27 nt, Human
accggggggagggggugcaggagaggg

SEQ ID NO: 966916 - RNA, 20 nt, Human
agaaauuggcguuugaguuc

SEQ ID NO: 966917 - RNA, 21 nt, Human
agaggcugccucugagagugg

SEQ ID NO: 966918 - RNA, 22 nt, Human
agcuuauggccucugcuacccu

SEQ ID NO: 966919 - RNA, 19 nt, Human
aggaagauggaggggcugc

SEQ ID NO: 966920 - RNA, 22 nt, Human
aggaagcuccaaacagcaacug

SEQ ID NO: 966921 - RNA, 26 nt, Human
aggaagcuccaaacagcaacugggcc

SEQ ID NO: 966922 - RNA, 20 nt, Human
aggcaggggcgcgcggggcc

SEQ ID NO: 966923 - RNA, 20 nt, Human
agggaguagggggaaauggu

SEQ ID NO: 966924 - RNA, 22 nt, Human
agguggcuguggggagacgggg

SEQ ID NO: 966925 - RNA, 22 nt, Human
agugacaaagggggucacuuug

SEQ ID NO: 966926 - RNA, 22 nt, Human
aguucugauaaaacaaguugag

SEQ ID NO: 966927 - RNA, 18 nt, Human
augcuccuauuuguuucc

SEQ ID NO: 966928 - RNA, 22 nt, Human
augugugugugugugugugugg

SEQ ID NO: 966929 - RNA, 22 nt, Human
augugugugugugugugugugu

SEQ ID NO: 966930 - RNA, 23 nt, Human
auguguguguguguguguguguu

SEQ ID NO: 966931 - RNA, 20 nt, Human
caaaugcaacauucccuuua

SEQ ID NO: 966932 - RNA, 18 nt, Human
caagaaccaaauaagaga

SEQ ID NO: 966933 - RNA, 22 nt, Human
caccacauacuucacuuauccc

SEQ ID NO: 966934 - RNA, 27 nt, Human
caccacauacuucacuuaucccuaaag

SEQ ID NO: 966935 - RNA, 19 nt, Human
caccccaaaggaagcucca

SEQ ID NO: 966936 - RNA, 19 nt, Human
caccgccccggcccccugc

SEQ ID NO: 966937 - RNA, 20 nt, Human
caccgccccggcccccugcc

SEQ ID NO: 966938 - RNA, 23 nt, Human
cacuagagacuuuuuaaccaaaa

SEQ ID NO: 966939 - RNA, 21 nt, Human
caggagccccggagagcagcg

SEQ ID NO: 966940 - RNA, 20 nt, Human
cagggaaaccggggaaaucg

SEQ ID NO: 966941 - RNA, 22 nt, Human
cauuagaaauacaaauuaaucc

SEQ ID NO: 966942 - RNA, 18 nt, Human
ccaccggggccggggguu

SEQ ID NO: 966943 - RNA, 25 nt, Human
ccauccuucgggccuggucuccuga

SEQ ID NO: 966944 - RNA, 22 nt, Human
ccaucuccuccgccgccugcaa

SEQ ID NO: 966945 - RNA, 21 nt, Human
cccccgccauccucccacccc

SEQ ID NO: 966946 - RNA, 18 nt, Human
cccccgcgcguuuccagc

SEQ ID NO: 966947 - RNA, 19 nt, Human
ccccgccauccucccaccc

SEQ ID NO: 966948 - RNA, 23 nt, Human
ccccgccauccucccaccccaaa

SEQ ID NO: 966949 - RNA, 23 nt, Human
ccccggcugagggugccggcgag

SEQ ID NO: 966950 - RNA, 27 nt, Human
ccccugcccccgccauccucccacccc

SEQ ID NO: 966951 - RNA, 20 nt, Human
cccucguuaaggcaccgccc

SEQ ID NO: 966952 - RNA, 20 nt, Human
ccgccccggcccccugcccc

SEQ ID NO: 966953 - RNA, 21 nt, Human
ccgccugcaagauaaauguga

SEQ ID NO: 966954 - RNA, 18 nt, Human
ccggggccggggguuggg

SEQ ID NO: 966955 - RNA, 18 nt, Human
ccuuccucuccccuuucc

SEQ ID NO: 966956 - RNA, 21 nt, Human
ccuuccucuccccuuuccguc

SEQ ID NO: 966957 - RNA, 20 nt, Human
cgagccuacggccuccccgg

SEQ ID NO: 966958 - RNA, 20 nt, Human
cguguauauaugugugugug

SEQ ID NO: 966959 - RNA, 21 nt, Human
cucaggcucccccgcgcguuu

SEQ ID NO: 966960 - RNA, 23 nt, Human
cuccaaacagcaacugggccugc

SEQ ID NO: 966961 - RNA, 23 nt, Human
cucccaaaagcugaggccauuaa

SEQ ID NO: 966962 - RNA, 18 nt, Human
cuccguugcccacucuuc

SEQ ID NO: 966963 - RNA, 19 nt, Human
cuccugaugggcuaggugg

SEQ ID NO: 966964 - RNA, 22 nt, Human
cucuaaucucccaaauaaccgg

SEQ ID NO: 966965 - RNA, 20 nt, Human
cugcccccgccauccuccca

SEQ ID NO: 966966 - RNA, 25 nt, Human
cugggcuggguucagggaaaccggg

SEQ ID NO: 966967 - RNA, 19 nt, Human
cuuaaaaccuucuuggaau

SEQ ID NO: 966968 - RNA, 18 nt, Human
gaaaauacuucaaaccau

SEQ ID NO: 966969 - RNA, 26 nt, Human
gacccgggcggggguggggggaggcc

SEQ ID NO: 966970 - RNA, 26 nt, Human
gagcagcgggaccccguaggcagggg

SEQ ID NO: 966971 - RNA, 18 nt, Human
gagcgcgcgcgcgugugg

SEQ ID NO: 966972 - RNA, 19 nt, Human
gaggccaccggggccgggg

SEQ ID NO: 966973 - RNA, 19 nt, Human
gagggagggggacugaggc

SEQ ID NO: 966974 - RNA, 22 nt, Human
gcgcgcguguggcggaggaggg

SEQ ID NO: 966975 - RNA, 20 nt, Human
gcgcguguggcggaggaggg

SEQ ID NO: 966976 - RNA, 20 nt, Human
gcggcggcguggcgaaggag

SEQ ID NO: 966977 - RNA, 26 nt, Human
gcugccucugagaguggaaggcaaac

SEQ ID NO: 966978 - RNA, 22 nt, Human
ggagagggagggaguaggggga

SEQ ID NO: 966979 - RNA, 20 nt, Human
ggaggccaccggggccgggg

SEQ ID NO: 966980 - RNA, 22 nt, Human
ggaggccaccggggccgggggu

SEQ ID NO: 966981 - RNA, 21 nt, Human
ggaguagggggaaauggugga

SEQ ID NO: 966982 - RNA, 20 nt, Human
ggccggggguuggggcuggc

SEQ ID NO: 966983 - RNA, 18 nt, Human
ggccuggucuccugaugg

SEQ ID NO: 966984 - RNA, 18 nt, Human
gggcggggguggggggag

SEQ ID NO: 966985 - RNA, 21 nt, Human
gggcggggguggggggaggcc

SEQ ID NO: 966986 - RNA, 19 nt, Human
gggcugggcuggguucagg

SEQ ID NO: 966987 - RNA, 22 nt, Human
ggggagggggugcaggagaggg

SEQ ID NO: 966988 - RNA, 18 nt, Human
ggguagugccuagcaaag

SEQ ID NO: 966989 - RNA, 22 nt, Human
ggguggggggaggccaccgggg

SEQ ID NO: 966990 - RNA, 18 nt, Human
ggugcaggagagggaggg

SEQ ID NO: 966991 - RNA, 19 nt, Human
gugccggcgaggagguggc

SEQ ID NO: 966992 - RNA, 20 nt, Human
gugcuucucaaagaagcagg

SEQ ID NO: 966993 - RNA, 24 nt, Human
guggcggaggagggggacccgggc

SEQ ID NO: 966994 - RNA, 23 nt, Human
gugugugugagcgcgcgcgcgug

SEQ ID NO: 966995 - RNA, 21 nt, Human
gugugugugugugugugugug

SEQ ID NO: 966996 - RNA, 23 nt, Human
uaaaaaacacagaacuuuuuaug

SEQ ID NO: 966997 - RNA, 18 nt, Human
uaaaacaaguugagauuc

SEQ ID NO: 966998 - RNA, 23 nt, Human
uaaaagagcagugcaaaagagaa

SEQ ID NO: 966999 - RNA, 21 nt, Human
uaaaauccaaacaugaaaaua

SEQ ID NO: 967000 - RNA, 20 nt, Human
uaaaaugccaaagggaguaa

SEQ ID NO: 967001 - RNA, 27 nt, Human
uauaauaucacggaauagagagacaaa

SEQ ID NO: 967002 - RNA, 19 nt, Human
uauaugugugugugugugu

SEQ ID NO: 967003 - RNA, 23 nt, Human
uauaugugugugugugugugugu

SEQ ID NO: 967004 - RNA, 19 nt, Human
uaucugugugguuguggac

SEQ ID NO: 967005 - RNA, 21 nt, Human
uauggccucugcuacccuagc

SEQ ID NO: 967006 - RNA, 18 nt, Human
uaugugugugugugugug

SEQ ID NO: 967007 - RNA, 23 nt, Human
uaugugugugugugugugugugu

SEQ ID NO: 967008 - RNA, 24 nt, Human
uaugugugugugugugugugugug

SEQ ID NO: 967009 - RNA, 24 nt, Human
uauuauuaaaauccaaacaugaaa

SEQ ID NO: 967010 - RNA, 21 nt, Human
ucagauccauccuucgggccu

SEQ ID NO: 967011 - RNA, 18 nt, Human
ucaugcaguugggugcuc

SEQ ID NO: 967012 - RNA, 18 nt, Human
uccaguggauggacaaug

SEQ ID NO: 967013 - RNA, 19 nt, Human
ucccaaaagcugaggccau

SEQ ID NO: 967014 - RNA, 23 nt, Human
ucccaaaugcaacauucccuuua

SEQ ID NO: 967015 - RNA, 20 nt, Human
uccuucgggccuggucuccu

SEQ ID NO: 967016 - RNA, 22 nt, Human
uccuugaaggggugagcuccug

SEQ ID NO: 967017 - RNA, 24 nt, Human
ucuaaaccauguggcuucaaugca

SEQ ID NO: 967018 - RNA, 21 nt, Human
ucuaggguucuauucugaagg

SEQ ID NO: 967019 - RNA, 21 nt, Human
ucuccuccgccgccugcaaga

SEQ ID NO: 967020 - RNA, 22 nt, Human
ucugcuaaaacucuuaaaagag

SEQ ID NO: 967021 - RNA, 27 nt, Human
ugaagcagcccaagaaccaaauaagag

SEQ ID NO: 967022 - RNA, 25 nt, Human
ugaagucagcccugguuuaacuccu

SEQ ID NO: 967023 - RNA, 23 nt, Human
ugaccuuaaauuuauuuuagcau

SEQ ID NO: 967024 - RNA, 20 nt, Human
ugacuccccugugcgccuug

SEQ ID NO: 967025 - RNA, 19 nt, Human
ugacugggccuguugaagu

SEQ ID NO: 967026 - RNA, 18 nt, Human
ugagcgcgcgcgcgugug

SEQ ID NO: 967027 - RNA, 21 nt, Human
ugaggccauuaaaaaacacag

SEQ ID NO: 967028 - RNA, 25 nt, Human
ugccgagcaggaagauggaggggcu

SEQ ID NO: 967029 - RNA, 23 nt, Human
ugccuagcaaaguugcgagguga

SEQ ID NO: 967030 - RNA, 22 nt, Human
uggauggacaaugugcuugccc

SEQ ID NO: 967031 - RNA, 20 nt, Human
uggcacaaagaaugcuccua

SEQ ID NO: 967032 - RNA, 21 nt, Human
uggccugagccucccaaaagc

SEQ ID NO: 967033 - RNA, 22 nt, Human
uggccugagccucccaaaagcu

SEQ ID NO: 967034 - RNA, 20 nt, Human
uggcggaggagggggacccg

SEQ ID NO: 967035 - RNA, 20 nt, Human
uggcguguauauaugugugu

SEQ ID NO: 967036 - RNA, 23 nt, Human
uggcguguauauaugugugugug

SEQ ID NO: 967037 - RNA, 29 nt, Human
uggcguguauauaugugugugugugugug

SEQ ID NO: 967038 - RNA, 20 nt, Human
uggcuguggggagacgggau

SEQ ID NO: 967039 - RNA, 26 nt, Human
uggggcuggcaggagccccggagagc

SEQ ID NO: 967040 - RNA, 21 nt, Human
ugguggagggagggggacuga

SEQ ID NO: 967041 - RNA, 22 nt, Human
ugguggagggagggggacugag

SEQ ID NO: 967042 - RNA, 24 nt, Human
ugguggagggagggggacugaggc

SEQ ID NO: 967043 - RNA, 25 nt, Human
ugguggagggagggggacugaggcu

SEQ ID NO: 967044 - RNA, 19 nt, Human
uguauauaugugugugugu

SEQ ID NO: 967045 - RNA, 19 nt, Human
ugugagcgcgcgcgcgugu

SEQ ID NO: 967046 - RNA, 23 nt, Human
uguggggagacgggaucccaaac

SEQ ID NO: 967047 - RNA, 18 nt, Human
ugugugugugugugugug

SEQ ID NO: 967048 - RNA, 18 nt, Human
ugugugugugugugugug

SEQ ID NO: 967049 - RNA, 18 nt, Human
ugugugugugugugugug

SEQ ID NO: 967050 - RNA, 18 nt, Human
ugugugugugugugugug

SEQ ID NO: 967051 - RNA, 18 nt, Human
ugugugugugugugugug

SEQ ID NO: 967052 - RNA, 21 nt, Human
ugugugugugugugugugugu

SEQ ID NO: 967053 - RNA, 21 nt, Human
ugugugugugugugugugugu

SEQ ID NO: 967054 - RNA, 21 nt, Human
ugugugugugugugugugugu

SEQ ID NO: 967055 - RNA, 21 nt, Human
ugugugugugugugugugugu

SEQ ID NO: 967056 - RNA, 21 nt, Human
ugugugugugugugugugugu

SEQ ID NO: 967057 - RNA, 22 nt, Human
ugugugugugugugugugugug

SEQ ID NO: 967058 - RNA, 22 nt, Human
ugugugugugugugugugugug

SEQ ID NO: 967059 - RNA, 19 nt, Human
uguuucuuuagcucugucc

SEQ ID NO: 967060 - RNA, 23 nt, Human
uuagcauauucacguguuucuug

SEQ ID NO: 967061 - RNA, 23 nt, Human
uucaaaccauuucguuagcagca

SEQ ID NO: 967062 - RNA, 18 nt, Human
uucagggaaaccggggaa

SEQ ID NO: 967063 - RNA, 22 nt, Human
uucagucaugcaguugggugcu

SEQ ID NO: 967064 - RNA, 18 nt, Human
uuccaguggauggacaau

SEQ ID NO: 967065 - RNA, 24 nt, Human
uuccuugaaggggugagcuccugg

SEQ ID NO: 967066 - RNA, 23 nt, Human
uugccagaaugacuccccugugc

SEQ ID NO: 967067 - RNA, 21 nt, Human
uuugcuguccuggaggguaaa

SEQ ID NO: 967068 - RNA, 19 nt, Human
aagcaucccaauauccaaa

SEQ ID NO: 967069 - RNA, 19 nt, Human
aauauccaaaccaaaagag

SEQ ID NO: 967070 - RNA, 21 nt, Human
agaagacaaaaaaaaaaacau

SEQ ID NO: 967071 - RNA, 18 nt, Human
agcaucccaauauccaaa

SEQ ID NO: 967072 - RNA, 19 nt, Human
aggacccuuaaagucaaaa

SEQ ID NO: 967073 - RNA, 19 nt, Human
augcugaaacccagccgug

SEQ ID NO: 967074 - RNA, 21 nt, Human
cagacucagaguccugacuga

SEQ ID NO: 967075 - RNA, 18 nt, Human
cagcgaccucucgcccug

SEQ ID NO: 967076 - RNA, 18 nt, Human
cagcgaccucucgcccug

SEQ ID NO: 967077 - RNA, 18 nt, Human
cccgcaccuucucuugau

SEQ ID NO: 967078 - RNA, 23 nt, Human
ccugguugccccagcucccgcca

SEQ ID NO: 967079 - RNA, 22 nt, Human
cugacagugaugaacauauuug

SEQ ID NO: 967080 - RNA, 21 nt, Human
cuuuauucaccuuucaguuca

SEQ ID NO: 967081 - RNA, 24 nt, Human
gacccuuaaagucaaaauauuuaa

SEQ ID NO: 967082 - RNA, 18 nt, Human
gcccgagaaaguccuggu

SEQ ID NO: 967083 - RNA, 20 nt, Human
guggaugcugaaacccagcc

SEQ ID NO: 967084 - RNA, 22 nt, Human
uaaaaugcgaggagagcuugga

SEQ ID NO: 967085 - RNA, 24 nt, Human
uccaaaccaaaagagauuccagaa

SEQ ID NO: 967086 - RNA, 25 nt, Human
uccaaaccaaaagagauuccagaag

SEQ ID NO: 967087 - RNA, 22 nt, Human
uccagaagacaaaaaaaaaaac

SEQ ID NO: 967088 - RNA, 18 nt, Human
ucccaauauccaaaccaa

SEQ ID NO: 967089 - RNA, 24 nt, Human
ucccgggaucagaucacugggguc

SEQ ID NO: 967090 - RNA, 24 nt, Human
uccugacugaagcauuuacuugag

SEQ ID NO: 967091 - RNA, 19 nt, Human
ucugaguugcguuccuggg

SEQ ID NO: 967092 - RNA, 20 nt, Human
ugacaaggaugguuuaauuu

SEQ ID NO: 967093 - RNA, 20 nt, Human
ugccccagcucccgcaccuu

SEQ ID NO: 967094 - RNA, 19 nt, Human
uggaucuuguaaacacuac

SEQ ID NO: 967095 - RNA, 20 nt, Human
uggccgagcucccucugguc

SEQ ID NO: 967096 - RNA, 19 nt, Human
ugggugcccgagaaagucc

SEQ ID NO: 967097 - RNA, 20 nt, Human
ugggugcccgagaaaguccu

SEQ ID NO: 967098 - RNA, 25 nt, Human
uuuccucacucauaugcaucucaga

SEQ ID NO: 967099 - RNA, 23 nt, Human
uuugcagguauuucaucagcugg

SEQ ID NO: 967100 - RNA, 24 nt, Human
aaaaaaagugggaagagccgguac

SEQ ID NO: 967101 - RNA, 20 nt, Human
aacagagaaggguugugacc

SEQ ID NO: 967102 - RNA, 18 nt, Human
aagaaggcugucaaaaac

SEQ ID NO: 967103 - RNA, 18 nt, Human
aaggcagaccaacagaga

SEQ ID NO: 967104 - RNA, 23 nt, Human
aagucaccucagacagacacugg

SEQ ID NO: 967105 - RNA, 23 nt, Human
acaccaagcagcgcagcagggaa

SEQ ID NO: 967106 - RNA, 18 nt, Human
acgccgcugcaucgcaga

SEQ ID NO: 967107 - RNA, 20 nt, Human
acucucccaugacucuggau

SEQ ID NO: 967108 - RNA, 18 nt, Human
acugaccucaaauaaaua

SEQ ID NO: 967109 - RNA, 22 nt, Human
acuuaagugcuuugaaagggca

SEQ ID NO: 967110 - RNA, 22 nt, Human
agcagaaggcagaccaacagag

SEQ ID NO: 967111 - RNA, 23 nt, Human
aggccucacgccgcugcaucgca

SEQ ID NO: 967112 - RNA, 22 nt, Human
caagaaggcugucaaaaacagc

SEQ ID NO: 967113 - RNA, 21 nt, Human
caaugugcaguguaaacgagc

SEQ ID NO: 967114 - RNA, 19 nt, Human
cacagauucuaugucccuc

SEQ ID NO: 967115 - RNA, 24 nt, Human
caccaagcagcgcagcagggaacc

SEQ ID NO: 967116 - RNA, 19 nt, Human
cagcagaaggcagaccaac

SEQ ID NO: 967117 - RNA, 24 nt, Human
caggauggagaaauacaucaagaa

SEQ ID NO: 967118 - RNA, 18 nt, Human
caguaucagcagcagagc

SEQ ID NO: 967119 - RNA, 18 nt, Human
ccaaccagcccaggccuc

SEQ ID NO: 967120 - RNA, 22 nt, Human
ccagcccgguaccccgcgcccc

SEQ ID NO: 967121 - RNA, 21 nt, Human
ccccagcgccgcucucgcgcc

SEQ ID NO: 967122 - RNA, 19 nt, Human
cccccagcgccgcucucgc

SEQ ID NO: 967123 - RNA, 23 nt, Human
cccccagcgccgcucucgcgccc

SEQ ID NO: 967124 - RNA, 25 nt, Human
cccccagcgccgcucucgcgcccau

SEQ ID NO: 967125 - RNA, 18 nt, Human
ccccgcgcccccacccgc

SEQ ID NO: 967126 - RNA, 23 nt, Human
ccccgcgcccccacccgccccca

SEQ ID NO: 967127 - RNA, 19 nt, Human
ccgcgcccccacccgcccc

SEQ ID NO: 967128 - RNA, 22 nt, Human
ccgcuccgcgcagcccgccgcc

SEQ ID NO: 967129 - RNA, 22 nt, Human
ccgcuccgcgcagcccgccgcc

SEQ ID NO: 967130 - RNA, 23 nt, Human
ccgcuccgcgcagcccgccgccu

SEQ ID NO: 967131 - RNA, 20 nt, Human
ccucgguccgcggcugcagg

SEQ ID NO: 967132 - RNA, 18 nt, Human
ccugggaguggauccucc

SEQ ID NO: 967133 - RNA, 26 nt, Human
ccugguugguucucgagucuuucagc

SEQ ID NO: 967134 - RNA, 21 nt, Human
cgguaccccgcgcccccaccc

SEQ ID NO: 967135 - RNA, 22 nt, Human
cucagacagacacuggaacacg

SEQ ID NO: 967136 - RNA, 20 nt, Human
cugcaggauggagaaauaca

SEQ ID NO: 967137 - RNA, 20 nt, Human
gagaaauacaucaagaaggc

SEQ ID NO: 967138 - RNA, 22 nt, Human
gcagcgcagcagggaaccagaa

SEQ ID NO: 967139 - RNA, 21 nt, Human
gcaguaaaaaauccccaagga

SEQ ID NO: 967140 - RNA, 20 nt, Human
gccagcccgguaccccgcgc

SEQ ID NO: 967141 - RNA, 18 nt, Human
gcccccacccgcccccag

SEQ ID NO: 967142 - RNA, 24 nt, Human
ggaagacugugguuucuguagccc

SEQ ID NO: 967143 - RNA, 21 nt, Human
gggccaccaucaaaagaguga

SEQ ID NO: 967144 - RNA, 24 nt, Human
ggggcgccggccggccgccagccc

SEQ ID NO: 967145 - RNA, 19 nt, Human
gucauccugggaguggauc

SEQ ID NO: 967146 - RNA, 22 nt, Human
uaucagcagcagagcuacggag

SEQ ID NO: 967147 - RNA, 18 nt, Human
ucaaaaacagcucucaga

SEQ ID NO: 967148 - RNA, 20 nt, Human
ucacaccaagcagcgcagca

SEQ ID NO: 967149 - RNA, 19 nt, Human
uccgaccagggaccuccaa

SEQ ID NO: 967150 - RNA, 21 nt, Human
uccgcauacuaaugagggggc

SEQ ID NO: 967151 - RNA, 21 nt, Human
ucuccaaccagcccaggccuc

SEQ ID NO: 967152 - RNA, 24 nt, Human
ucuccgaccagggaccuccaggac

SEQ ID NO: 967153 - RNA, 21 nt, Human
ugaaagggcaguaaaaaaucc

SEQ ID NO: 967154 - RNA, 30 nt, Human
ugaaagggcaguaaaaaauccccaaggaaa

SEQ ID NO: 967155 - RNA, 21 nt, Human
ugagaagucuuuccaauucaa

SEQ ID NO: 967156 - RNA, 21 nt, Human
uggaaaggguguacucuccca

SEQ ID NO: 967157 - RNA, 23 nt, Human
uggcacacugccugguauacacc

SEQ ID NO: 967158 - RNA, 18 nt, Human
ugggaagagcuaaaauuu

SEQ ID NO: 967159 - RNA, 23 nt, Human
uguaaacgagcagaaguuuuaca

SEQ ID NO: 967160 - RNA, 22 nt, Human
ugugcaaaaacaaacacugacc

SEQ ID NO: 967161 - RNA, 19 nt, Human
uuggcauugcucggccggc

SEQ ID NO: 967162 - RNA, 23 nt, Human
uuucccaaaacauuauuccugga

SEQ ID NO: 967163 - RNA, 18 nt, Human
cagcagccgcagcagcgg

SEQ ID NO: 967164 - RNA, 18 nt, Human
cagcagcgcgcucauggc

SEQ ID NO: 967165 - RNA, 21 nt, Human
cagcagcgcgcucauggcguc

SEQ ID NO: 967166 - RNA, 22 nt, Human
caguaaaugcucauagaccccc

SEQ ID NO: 967167 - RNA, 23 nt, Human
cgcgacccggucccugcacuggu

SEQ ID NO: 967168 - RNA, 24 nt, Human
cuagcacuuggggaaaaagagucu

SEQ ID NO: 967169 - RNA, 21 nt, Human
cugcacugguccccaaccgca

SEQ ID NO: 967170 - RNA, 19 nt, Human
gacccggucccugcacugg

SEQ ID NO: 967171 - RNA, 22 nt, Human
gcaaccgugcgcagcagccgca

SEQ ID NO: 967172 - RNA, 23 nt, Human
ggcacgcagcggcuggggcaacc

SEQ ID NO: 967173 - RNA, 22 nt, Human
ggggcaaccgugcgcagcagcc

SEQ ID NO: 967174 - RNA, 24 nt, Human
guccuuagagaugggaaucuugac

SEQ ID NO: 967175 - RNA, 19 nt, Human
uaaaugcucauagaccccc

SEQ ID NO: 967176 - RNA, 23 nt, Human
uaacaggaagucaguaaaugcuc

SEQ ID NO: 967177 - RNA, 31 nt, Human
uauauauugcauagcucaaaaaguuugaaaa

SEQ ID NO: 967178 - RNA, 22 nt, Human
uuaacaggaagucaguaaaugc

SEQ ID NO: 967179 - RNA, 25 nt, Human
uugcauagcucaaaaaguuugaaaa

SEQ ID NO: 967180 - RNA, 22 nt, Human
cuccgcauaggaggcgcagggc

SEQ ID NO: 967181 - RNA, 20 nt, Human
gccgaagucccaguccuaaa

SEQ ID NO: 967182 - RNA, 25 nt, Human
uagccgaagucccaguccuaaagcc

SEQ ID NO: 967183 - RNA, 18 nt, Human
uaggaggcgcagggccug

SEQ ID NO: 967184 - RNA, 22 nt, Human
ucccuagccgaagucccagucc

SEQ ID NO: 967185 - RNA, 19 nt, Human
uccuaaagccuaagagacc

SEQ ID NO: 967186 - RNA, 22 nt, Human
caacucccacaauuccagcgcc

SEQ ID NO: 967187 - RNA, 23 nt, Human
cagacacaacucccacaauucca

SEQ ID NO: 967188 - RNA, 23 nt, Human
cagcuccaccuguacaggauaac

SEQ ID NO: 967189 - RNA, 21 nt, Human
ccacaauuccagcgccgcggc

SEQ ID NO: 967190 - RNA, 20 nt, Human
ccgcggcggcgaccagcucc

SEQ ID NO: 967191 - RNA, 19 nt, Human
ggcggcgaccagcuccacc

SEQ ID NO: 967192 - RNA, 18 nt, Human
ucccacaauuccagcgcc

SEQ ID NO: 967193 - RNA, 20 nt, Human
uggcagacacaacucccaca

SEQ ID NO: 967194 - RNA, 24 nt, Human
aaaaaaaaaaaaaguacugcccgg

SEQ ID NO: 967195 - RNA, 23 nt, Human
aaaaacccaccuggcguuccaga

SEQ ID NO: 967196 - RNA, 20 nt, Human
aaaccugaagaagcugcugu

SEQ ID NO: 967197 - RNA, 23 nt, Human
aagagcacccagucacaaagccc

SEQ ID NO: 967198 - RNA, 24 nt, Human
aagagcacccagucacaaagccca

SEQ ID NO: 967199 - RNA, 18 nt, Human
aaggccacggcgcccucc

SEQ ID NO: 967200 - RNA, 20 nt, Human
aagggcaauccgggcacgcu

SEQ ID NO: 967201 - RNA, 24 nt, Human
aauguccagccacugcauuguggc

SEQ ID NO: 967202 - RNA, 21 nt, Human
acccagucacaaagcccauga

SEQ ID NO: 967203 - RNA, 21 nt, Human
accugacuccuuucucuucuc

SEQ ID NO: 967204 - RNA, 21 nt, Human
acuggcucagggcacacaugc

SEQ ID NO: 967205 - RNA, 25 nt, Human
agaaaaacccaccuggcguuccaga

SEQ ID NO: 967206 - RNA, 21 nt, Human
agacagggugaggcugcccag

SEQ ID NO: 967207 - RNA, 20 nt, Human
agagauaagcuccggccccc

SEQ ID NO: 967208 - RNA, 21 nt, Human
agagcaggcccgucagggaca

SEQ ID NO: 967209 - RNA, 19 nt, Human
agagcccagcacggccagg

SEQ ID NO: 967210 - RNA, 21 nt, Human
agaggggagaacucugcaggg

SEQ ID NO: 967211 - RNA, 23 nt, Human
agcagccggaagagcaccaacaa

SEQ ID NO: 967212 - RNA, 19 nt, Human
agcagccgugugguguagc

SEQ ID NO: 967213 - RNA, 23 nt, Human
agcaggacucuuaggccucccuc

SEQ ID NO: 967214 - RNA, 25 nt, Human
agcgcugaccacugccgcccccaug

SEQ ID NO: 967215 - RNA, 20 nt, Human
aggaugcugcccaccaagga

SEQ ID NO: 967216 - RNA, 25 nt, Human
aggcagggacucccugcuggcugcu

SEQ ID NO: 967217 - RNA, 20 nt, Human
aggccaagcccuggcccacg

SEQ ID NO: 967218 - RNA, 23 nt, Human
aggccacaucagaggagaagcgg

SEQ ID NO: 967219 - RNA, 19 nt, Human
aggcggcagcaggagcagc

SEQ ID NO: 967220 - RNA, 24 nt, Human
agggaguggggcugguugcgcagg

SEQ ID NO: 967221 - RNA, 20 nt, Human
agggugccugcugcaaagag

SEQ ID NO: 967222 - RNA, 19 nt, Human
aguggcagaaucucagagg

SEQ ID NO: 967223 - RNA, 24 nt, Human
agugggcuccuaugccagaaaaac

SEQ ID NO: 967224 - RNA, 22 nt, Human
aucccaccucucauccucucag

SEQ ID NO: 967225 - RNA, 18 nt, Human
auccccaagaggaccgcc

SEQ ID NO: 967226 - RNA, 22 nt, Human
aucuguuuuuccccucccguuu

SEQ ID NO: 967227 - RNA, 20 nt, Human
augcagcagggggcagaguc

SEQ ID NO: 967228 - RNA, 20 nt, Human
auguaaucaccucacucagg

SEQ ID NO: 967229 - RNA, 19 nt, Human
caagagcacccagucacaa

SEQ ID NO: 967230 - RNA, 21 nt, Human
caaguccauccuuguaaaccu

SEQ ID NO: 967231 - RNA, 22 nt, Human
cacaaagcccaugagucccaaa

SEQ ID NO: 967232 - RNA, 18 nt, Human
cacaacagcugccucugc

SEQ ID NO: 967233 - RNA, 21 nt, Human
cacaacagcugccucugccca

SEQ ID NO: 967234 - RNA, 22 nt, Human
cacaugcagcagggggcagagu

SEQ ID NO: 967235 - RNA, 24 nt, Human
caccacguccuggaacuccacgcc

SEQ ID NO: 967236 - RNA, 22 nt, Human
caccccaccuagagguuggaag

SEQ ID NO: 967237 - RNA, 23 nt, Human
caccgcgucagcccucuccaggu

SEQ ID NO: 967238 - RNA, 26 nt, Human
caccgcgucagcccucuccagguacu

SEQ ID NO: 967239 - RNA, 19 nt, Human
caccucccucacacggggc

SEQ ID NO: 967240 - RNA, 24 nt, Human
cacugcauuguggcacugguggca

SEQ ID NO: 967241 - RNA, 20 nt, Human
cacugucuuguuggcaaagc

SEQ ID NO: 967242 - RNA, 24 nt, Human
cagagcccagcacggccaggagcc

SEQ ID NO: 967243 - RNA, 18 nt, Human
cagagggucaucgaggag

SEQ ID NO: 967244 - RNA, 23 nt, Human
cagcacccggucugaguucagga

SEQ ID NO: 967245 - RNA, 20 nt, Human
cagcacugucuuguuggcaa

SEQ ID NO: 967246 - RNA, 18 nt, Human
cagcagcacucgcccuga

SEQ ID NO: 967247 - RNA, 22 nt, Human
cagcagcugcuggaacagggag

SEQ ID NO: 967248 - RNA, 19 nt, Human
cagcaggugguuggccaca

SEQ ID NO: 967249 - RNA, 23 nt, Human
cagccagcaccucuguauaggcc

SEQ ID NO: 967250 - RNA, 22 nt, Human
cagcccaggcuuuggggacagc

SEQ ID NO: 967251 - RNA, 18 nt, Human
cagcugccucugcccaag

SEQ ID NO: 967252 - RNA, 19 nt, Human
cagcugcuugaagggugcc

SEQ ID NO: 967253 - RNA, 20 nt, Human
caggagccccagcaggccug

SEQ ID NO: 967254 - RNA, 26 nt, Human
caggcgaccagaugugcucugcuccu

SEQ ID NO: 967255 - RNA, 21 nt, Human
cagggccugccacaaggcccu

SEQ ID NO: 967256 - RNA, 18 nt, Human
cagggugcccuuuucccu

SEQ ID NO: 967257 - RNA, 20 nt, Human
caguggagacagggugaggc

SEQ ID NO: 967258 - RNA, 24 nt, Human
cauaagacagcgacaagcccacca

SEQ ID NO: 967259 - RNA, 25 nt, Human
cauccagaccacccauggauguaau

SEQ ID NO: 967260 - RNA, 22 nt, Human
cauccggaaccucaaaccugaa

SEQ ID NO: 967261 - RNA, 18 nt, Human
caucgaggagauagagcu

SEQ ID NO: 967262 - RNA, 24 nt, Human
ccaaacacaacagcugccucugcc

SEQ ID NO: 967263 - RNA, 18 nt, Human
ccaagcccuggcccacgg

SEQ ID NO: 967264 - RNA, 20 nt, Human
ccacugaacaaaaagggcuc

SEQ ID NO: 967265 - RNA, 22 nt, Human
ccacugcauuguggcacuggug

SEQ ID NO: 967266 - RNA, 20 nt, Human
ccacugccgcccccaugagc

SEQ ID NO: 967267 - RNA, 21 nt, Human
ccagagcccagcacggccagg

SEQ ID NO: 967268 - RNA, 20 nt, Human
ccagccgcucgacgcucacc

SEQ ID NO: 967269 - RNA, 23 nt, Human
ccagcucaccauccagaccaccc

SEQ ID NO: 967270 - RNA, 18 nt, Human
ccaggcgccgcagcuccc

SEQ ID NO: 967271 - RNA, 22 nt, Human
ccaugagucccaaauacacugg

SEQ ID NO: 967272 - RNA, 18 nt, Human
ccauucucagcccaggcu

SEQ ID NO: 967273 - RNA, 21 nt, Human
cccacggccuuccaguaagcu

SEQ ID NO: 967274 - RNA, 20 nt, Human
ccccaugagcuguagccgaa

SEQ ID NO: 967275 - RNA, 22 nt, Human
cccuagaccucgagcaggacuc

SEQ ID NO: 967276 - RNA, 22 nt, Human
cccuagaccucgagcaggacuc

SEQ ID NO: 967277 - RNA, 19 nt, Human
cccuccuucuugcuuucuu

SEQ ID NO: 967278 - RNA, 18 nt, Human
cccucucuaacccacccu

SEQ ID NO: 967279 - RNA, 22 nt, Human
cccugggguuccuggggcaggu

SEQ ID NO: 967280 - RNA, 23 nt, Human
cccuguaguggcgcugcacguga

SEQ ID NO: 967281 - RNA, 23 nt, Human
ccgaccagcagagagggacgaau

SEQ ID NO: 967282 - RNA, 19 nt, Human
ccuaauaucuggcuggagc

SEQ ID NO: 967283 - RNA, 23 nt, Human
ccucacacggggcuccugccccc

SEQ ID NO: 967284 - RNA, 27 nt, Human
ccucaccuugccaucuguuuuuccccu

SEQ ID NO: 967285 - RNA, 24 nt, Human
ccucccguuucuccgcccccaggc

SEQ ID NO: 967286 - RNA, 19 nt, Human
ccuccuccagccccuccuu

SEQ ID NO: 967287 - RNA, 24 nt, Human
ccucgagcaggacucuuaggccuc

SEQ ID NO: 967288 - RNA, 19 nt, Human
ccucuguauaggcccggcc

SEQ ID NO: 967289 - RNA, 18 nt, Human
ccugccacucuguccagg

SEQ ID NO: 967290 - RNA, 19 nt, Human
ccuggccaaacacaacagc

SEQ ID NO: 967291 - RNA, 23 nt, Human
ccuguagguggccccuguggccc

SEQ ID NO: 967292 - RNA, 25 nt, Human
ccuguggcccggagcacagagaggc

SEQ ID NO: 967293 - RNA, 19 nt, Human
ccuuguaaaccuugauucc

SEQ ID NO: 967294 - RNA, 22 nt, Human
ccuuuucccuccuguucuccca

SEQ ID NO: 967295 - RNA, 22 nt, Human
cgaugcccaacuucucuccagg

SEQ ID NO: 967296 - RNA, 21 nt, Human
cgcagcucccgugaggaggcc

SEQ ID NO: 967297 - RNA, 19 nt, Human
cgccucaccuugccaucug

SEQ ID NO: 967298 - RNA, 23 nt, Human
cgcugaccacugccgcccccaug

SEQ ID NO: 967299 - RNA, 22 nt, Human
cguggcuugcaugagaagcaga

SEQ ID NO: 967300 - RNA, 25 nt, Human
cuaacccacccugcucuggauaccc

SEQ ID NO: 967301 - RNA, 22 nt, Human
cucagagacccugggccuuuaa

SEQ ID NO: 967302 - RNA, 18 nt, Human
cucagccuucagcugaga

SEQ ID NO: 967303 - RNA, 20 nt, Human
cucaugcuucgcucaauucc

SEQ ID NO: 967304 - RNA, 22 nt, Human
cuccagccccuccuuuguuuuc

SEQ ID NO: 967305 - RNA, 23 nt, Human
cucccaguaaacuugcagguggu

SEQ ID NO: 967306 - RNA, 19 nt, Human
cuccccgucuaacccaccc

SEQ ID NO: 967307 - RNA, 20 nt, Human
cuccuaugccagaaaaaccc

SEQ ID NO: 967308 - RNA, 24 nt, Human
cuccuccagccccuccuuuguuuu

SEQ ID NO: 967309 - RNA, 23 nt, Human
cuccuccucaaaccuguaggugg

SEQ ID NO: 967310 - RNA, 18 nt, Human
cucuguauaggcccggcc

SEQ ID NO: 967311 - RNA, 18 nt, Human
cugcagcagcugcuggaa

SEQ ID NO: 967312 - RNA, 18 nt, Human
cugcagcaggcgaccaga

SEQ ID NO: 967313 - RNA, 19 nt, Human
cugcccccauuaccagccc

SEQ ID NO: 967314 - RNA, 19 nt, Human
cugcccggccggggugcug

SEQ ID NO: 967315 - RNA, 23 nt, Human
cuggcccugggguuccuggggca

SEQ ID NO: 967316 - RNA, 21 nt, Human
cugggcccgccccggcuggca

SEQ ID NO: 967317 - RNA, 24 nt, Human
cuucagggccugccacaaggcccu

SEQ ID NO: 967318 - RNA, 22 nt, Human
cuugccggagccugugcggccc

SEQ ID NO: 967319 - RNA, 23 nt, Human
cuuguaaaccuugauuccgaccg

SEQ ID NO: 967320 - RNA, 22 nt, Human
gaacagucccacugaacaaaaa

SEQ ID NO: 967321 - RNA, 25 nt, Human
gaagagcaccaacaacagggaagac

SEQ ID NO: 967322 - RNA, 21 nt, Human
gacagcacgagcaagggcaau

SEQ ID NO: 967323 - RNA, 19 nt, Human
gagaggacuguucugaguc

SEQ ID NO: 967324 - RNA, 18 nt, Human
gagcacagagaggccagc

SEQ ID NO: 967325 - RNA, 18 nt, Human
gagcagcagccagggcag

SEQ ID NO: 967326 - RNA, 18 nt, Human
gauacacaggaucuuggc

SEQ ID NO: 967327 - RNA, 20 nt, Human
gaugcagaguggcagcugcu

SEQ ID NO: 967328 - RNA, 21 nt, Human
gcaagugggcuccuaugccag

SEQ ID NO: 967329 - RNA, 22 nt, Human
gccagccggugcccagcugcag

SEQ ID NO: 967330 - RNA, 24 nt, Human
gccaggagccccagcaggccugcc

SEQ ID NO: 967331 - RNA, 21 nt, Human
gcccggagcacagagaggcca

SEQ ID NO: 967332 - RNA, 19 nt, Human
gcccugggguuccuggggc

SEQ ID NO: 967333 - RNA, 21 nt, Human
gccggggaguccagcucuacc

SEQ ID NO: 967334 - RNA, 21 nt, Human
gcgcaggguggccggggaguc

SEQ ID NO: 967335 - RNA, 20 nt, Human
gcuauucucagccuucagcu

SEQ ID NO: 967336 - RNA, 21 nt, Human
gcucugcuccuccuccagccc

SEQ ID NO: 967337 - RNA, 19 nt, Human
gcugcaguggcuggcccug

SEQ ID NO: 967338 - RNA, 18 nt, Human
gcuuucuuccugcagcag

SEQ ID NO: 967339 - RNA, 23 nt, Human
ggaagaccuagccggcgcuauuc

SEQ ID NO: 967340 - RNA, 24 nt, Human
ggaagagcaccaacaacagggaag

SEQ ID NO: 967341 - RNA, 18 nt, Human
ggagcuauucucagccuu

SEQ ID NO: 967342 - RNA, 22 nt, Human
ggaggguagaaggggagauugg

SEQ ID NO: 967343 - RNA, 18 nt, Human
ggccagagcccagcacgg

SEQ ID NO: 967344 - RNA, 20 nt, Human
ggccggggugcugggcccgc

SEQ ID NO: 967345 - RNA, 23 nt, Human
ggccuggaucagagagaggggag

SEQ ID NO: 967346 - RNA, 18 nt, Human
ggcuguggcugagucaga

SEQ ID NO: 967347 - RNA, 18 nt, Human
gggcagugggaacacugg

SEQ ID NO: 967348 - RNA, 23 nt, Human
ggggaguccagcucuaccacucu

SEQ ID NO: 967349 - RNA, 23 nt, Human
ggggugcugggcccgccccggcu

SEQ ID NO: 967350 - RNA, 20 nt, Human
ggugaggcugcccaggcgcc

SEQ ID NO: 967351 - RNA, 20 nt, Human
gguugcgcaggguggccggg

SEQ ID NO: 967352 - RNA, 19 nt, Human
guacugacugggcuguggc

SEQ ID NO: 967353 - RNA, 19 nt, Human
gugcugggcccgccccggc

SEQ ID NO: 967354 - RNA, 19 nt, Human
guguagcucagcaugccca

SEQ ID NO: 967355 - RNA, 21 nt, Human
guucuccuccucaaaccugua

SEQ ID NO: 967356 - RNA, 24 nt, Human
uaaacaagcagccagcaccucugu

SEQ ID NO: 967357 - RNA, 23 nt, Human
uaagacagcgacaagcccaccag

SEQ ID NO: 967358 - RNA, 24 nt, Human
uaagcuccggccccccucacccag

SEQ ID NO: 967359 - RNA, 19 nt, Human
uaaggacucgaugcagcag

SEQ ID NO: 967360 - RNA, 19 nt, Human
uacaguggagacaggguga

SEQ ID NO: 967361 - RNA, 18 nt, Human
uacugcccggccggggug

SEQ ID NO: 967362 - RNA, 18 nt, Human
uagagcuccuuuuccugg

SEQ ID NO: 967363 - RNA, 25 nt, Human
uaucaaauaaaacuaugaaaaugca

SEQ ID NO: 967364 - RNA, 25 nt, Human
uaugcaaaaaaaaaaaaaguacugc

SEQ ID NO: 967365 - RNA, 26 nt, Human
uaugcaaaaaaaaaaaaaguacugcc

SEQ ID NO: 967366 - RNA, 21 nt, Human
ucaaaggcggcagcaggagca

SEQ ID NO: 967367 - RNA, 20 nt, Human
ucaaggagucgcagguucuc

SEQ ID NO: 967368 - RNA, 19 nt, Human
ucacagguguacucuucca

SEQ ID NO: 967369 - RNA, 23 nt, Human
ucacaucccucugcauaaaaauc

SEQ ID NO: 967370 - RNA, 21 nt, Human
ucacccagcucaccauccaga

SEQ ID NO: 967371 - RNA, 20 nt, Human
ucagcagcguuccgcguggc

SEQ ID NO: 967372 - RNA, 21 nt, Human
uccacagcggccagaggguca

SEQ ID NO: 967373 - RNA, 26 nt, Human
uccagccccuccuuuguuuucucucc

SEQ ID NO: 967374 - RNA, 19 nt, Human
uccaucagcagcaccgcgu

SEQ ID NO: 967375 - RNA, 18 nt, Human
ucccaguaaacuugcagg

SEQ ID NO: 967376 - RNA, 19 nt, Human
ucccucacacggggcuccu

SEQ ID NO: 967377 - RNA, 21 nt, Human
ucccugcuggcugcucugcag

SEQ ID NO: 967378 - RNA, 20 nt, Human
uccgcccccaggcauccgga

SEQ ID NO: 967379 - RNA, 20 nt, Human
uccgggcacgcuguccuccg

SEQ ID NO: 967380 - RNA, 20 nt, Human
ucgcucaauuccuaauaucu

SEQ ID NO: 967381 - RNA, 19 nt, Human
ucucagagacccugggccu

SEQ ID NO: 967382 - RNA, 21 nt, Human
ucucagagggagguccuggag

SEQ ID NO: 967383 - RNA, 20 nt, Human
ucuccagguacucagugcgg

SEQ ID NO: 967384 - RNA, 20 nt, Human
ucuccagguacucagugcgg

SEQ ID NO: 967385 - RNA, 25 nt, Human
ucugcauaaaaaucuuucagaguuu

SEQ ID NO: 967386 - RNA, 24 nt, Human
ucugcuccuccuccagccccuccu

SEQ ID NO: 967387 - RNA, 20 nt, Human
ucugugaggagagcccuggc

SEQ ID NO: 967388 - RNA, 19 nt, Human
ugaagcugcucaccaggcc

SEQ ID NO: 967389 - RNA, 19 nt, Human
ugaagggugccugcugcaa

SEQ ID NO: 967390 - RNA, 18 nt, Human
ugacugggcuguggcuga

SEQ ID NO: 967391 - RNA, 22 nt, Human
ugacugggcuguggcugaguca

SEQ ID NO: 967392 - RNA, 18 nt, Human
ugagaagcagagagaaga

SEQ ID NO: 967393 - RNA, 19 nt, Human
ugagaagcagagagaagag

SEQ ID NO: 967394 - RNA, 18 nt, Human
ugaggaugaagggcaggc

SEQ ID NO: 967395 - RNA, 18 nt, Human
ugaggcagggacucccug

SEQ ID NO: 967396 - RNA, 24 nt, Human
ugcaaaaaaaaaaaaaguacugcc

SEQ ID NO: 967397 - RNA, 22 nt, Human
ugcaaagagcacugcccggaga

SEQ ID NO: 967398 - RNA, 19 nt, Human
ugcaugagaagcagagaga

SEQ ID NO: 967399 - RNA, 23 nt, Human
ugccggagccugugcggcccacg

SEQ ID NO: 967400 - RNA, 22 nt, Human
ugcggagagaagagccccauag

SEQ ID NO: 967401 - RNA, 22 nt, Human
uggagagguagagccccagagg

SEQ ID NO: 967402 - RNA, 20 nt, Human
uggagcuucauuuccuccua

SEQ ID NO: 967403 - RNA, 19 nt, Human
uggaucagagagaggggag

SEQ ID NO: 967404 - RNA, 20 nt, Human
uggcaaacuggcaccucugg

SEQ ID NO: 967405 - RNA, 20 nt, Human
uggcaaagcguuugcagaug

SEQ ID NO: 967406 - RNA, 22 nt, Human
uggcuaaggccaagcccuggcc

SEQ ID NO: 967407 - RNA, 24 nt, Human
uggcucagggcacacaugcagcag

SEQ ID NO: 967408 - RNA, 20 nt, Human
uggcuggcccugggguuccu

SEQ ID NO: 967409 - RNA, 24 nt, Human
uggcuggcccugggguuccugggg

SEQ ID NO: 967410 - RNA, 20 nt, Human
ugggaucugagcugggccag

SEQ ID NO: 967411 - RNA, 19 nt, Human
ugggucagccagccggugc

SEQ ID NO: 967412 - RNA, 22 nt, Human
uggucagcacugucuuguuggc

SEQ ID NO: 967413 - RNA, 23 nt, Human
ugguggaggguugcgccuccugg

SEQ ID NO: 967414 - RNA, 23 nt, Human
ugguguagcucagcaugcccagg

SEQ ID NO: 967415 - RNA, 22 nt, Human
ugguuggccacaucugcaucca

SEQ ID NO: 967416 - RNA, 21 nt, Human
uguaaacaagcagccagcacc

SEQ ID NO: 967417 - RNA, 19 nt, Human
uguacuucacaauccccug

SEQ ID NO: 967418 - RNA, 20 nt, Human
uguagccgaauguccagcca

SEQ ID NO: 967419 - RNA, 19 nt, Human
uguagguggccccuguggc

SEQ ID NO: 967420 - RNA, 19 nt, Human
ugucugugugaagcugcuc

SEQ ID NO: 967421 - RNA, 24 nt, Human
uuauguaggcccuggggguccagg

SEQ ID NO: 967422 - RNA, 19 nt, Human
uucacaauccccugccaga

SEQ ID NO: 967423 - RNA, 22 nt, Human
uucacaauccccugccagaccu

SEQ ID NO: 967424 - RNA, 25 nt, Human
uucucuggguucuguacugacuggg

SEQ ID NO: 967425 - RNA, 18 nt, Human
uugcagauggucugcugg

SEQ ID NO: 967426 - RNA, 21 nt, Human
uuggcaaagcguuugcagaug

SEQ ID NO: 967427 - RNA, 24 nt, Human
uuugcagauggucugcuggagcag

SEQ ID NO: 967428 - RNA, 21 nt, Human
uuuucucuggguucuguacug

SEQ ID NO: 967429 - RNA, 22 nt, Human
aaaaaaagaaauacuuuaaaaa

SEQ ID NO: 967430 - RNA, 28 nt, Human
aaaaaaagaaauacuuuaaaaacgaccu

SEQ ID NO: 967431 - RNA, 21 nt, Human
aaaaaagaaauacuuuaaaaa

SEQ ID NO: 967432 - RNA, 18 nt, Human
aaaacaugaaguuaacuu

SEQ ID NO: 967433 - RNA, 22 nt, Human
aacaaaccaggcaaaauaucac

SEQ ID NO: 967434 - RNA, 19 nt, Human
aaggaacugcauuucggga

SEQ ID NO: 967435 - RNA, 20 nt, Human
aaggcaucauuuuggagaaa

SEQ ID NO: 967436 - RNA, 24 nt, Human
aauccuaucucggaauuguugagu

SEQ ID NO: 967437 - RNA, 19 nt, Human
acuccccaccccaaggcau

SEQ ID NO: 967438 - RNA, 19 nt, Human
agcucuucccacuaccacu

SEQ ID NO: 967439 - RNA, 19 nt, Human
aggcaaaauaucacauaua

SEQ ID NO: 967440 - RNA, 18 nt, Human
aggcgcggcaucacgucc

SEQ ID NO: 967441 - RNA, 18 nt, Human
augaaacuuucauuuggg

SEQ ID NO: 967442 - RNA, 22 nt, Human
caccccaaggcaucauuuugga

SEQ ID NO: 967443 - RNA, 18 nt, Human
cacguguuaguucccagg

SEQ ID NO: 967444 - RNA, 25 nt, Human
cagcuuuauugugaaagaauccaga

SEQ ID NO: 967445 - RNA, 22 nt, Human
cauggacccaccagucuugauu

SEQ ID NO: 967446 - RNA, 24 nt, Human
ccaguuaaaaaaagaaauacuuua

SEQ ID NO: 967447 - RNA, 19 nt, Human
ccucuguacaguguggagg

SEQ ID NO: 967448 - RNA, 21 nt, Human
ccuuccaaaacaugaaguuaa

SEQ ID NO: 967449 - RNA, 18 nt, Human
cuauccucuaaaagcaaa

SEQ ID NO: 967450 - RNA, 25 nt, Human
cucaacugaaugcaugaacuaacac

SEQ ID NO: 967451 - RNA, 22 nt, Human
cucacacugaaaaaaauacuaa

SEQ ID NO: 967452 - RNA, 19 nt, Human
cucuaaaagcaaagagaaa

SEQ ID NO: 967453 - RNA, 24 nt, Human
cucuaaaagcaaagagaaagugau

SEQ ID NO: 967454 - RNA, 18 nt, Human
cugaaugcaugaacuaac

SEQ ID NO: 967455 - RNA, 22 nt, Human
cuuuaaaaacgaccugcccuuc

SEQ ID NO: 967456 - RNA, 18 nt, Human
gaaaaugaaggugacucu

SEQ ID NO: 967457 - RNA, 19 nt, Human
gaacaaggaaguggcauaa

SEQ ID NO: 967458 - RNA, 22 nt, Human
gcauaagcaacucagugugugc

SEQ ID NO: 967459 - RNA, 22 nt, Human
ggagcucuucccacuaccacuc

SEQ ID NO: 967460 - RNA, 19 nt, Human
gucacacuugacagaagca

SEQ ID NO: 967461 - RNA, 23 nt, Human
uaacacagggccauggacccacc

SEQ ID NO: 967462 - RNA, 22 nt, Human
uagaaggaaucuaaauggggca

SEQ ID NO: 967463 - RNA, 23 nt, Human
uauauggcaucaucacaccaccg

SEQ ID NO: 967464 - RNA, 23 nt, Human
ucacacugaaaaaaauacuaaca

SEQ ID NO: 967465 - RNA, 19 nt, Human
uccaaaacaugaaguuaac

SEQ ID NO: 967466 - RNA, 24 nt, Human
uccaaguugcuuucuagauccuuu

SEQ ID NO: 967467 - RNA, 20 nt, Human
ucccacuaccacuccccacc

SEQ ID NO: 967468 - RNA, 18 nt, Human
ucgaacccaggggccgcg

SEQ ID NO: 967469 - RNA, 21 nt, Human
ucuugauugaguuacagaaaa

SEQ ID NO: 967470 - RNA, 24 nt, Human
ugaaaaaaauacuaacacagcuca

SEQ ID NO: 967471 - RNA, 25 nt, Human
ugaaaaaaauacuaacacagcucau

SEQ ID NO: 967472 - RNA, 22 nt, Human
ugaaagaauccagagaucucac

SEQ ID NO: 967473 - RNA, 19 nt, Human
ugacagaagcaagcccugc

SEQ ID NO: 967474 - RNA, 23 nt, Human
ugauaugacaaacuaggcauaau

SEQ ID NO: 967475 - RNA, 18 nt, Human
ugugugccccuuagggug

SEQ ID NO: 967476 - RNA, 25 nt, Human
uuacagaaaaugaaggugacucuuu

SEQ ID NO: 967477 - RNA, 19 nt, Human
uuacuuaaacauuuaaggc

SEQ ID NO: 967478 - RNA, 23 nt, Human
uuccaaguugcuuucuagauccu

SEQ ID NO: 967479 - RNA, 23 nt, Human
uuggagaaaaaagugucuucuau

SEQ ID NO: 967480 - RNA, 23 nt, Human
aaaaaaccagaucucaugagaac

SEQ ID NO: 967481 - RNA, 19 nt, Human
aacauggagaaaccccauc

SEQ ID NO: 967482 - RNA, 20 nt, Human
aacauggagaaaccccaucu

SEQ ID NO: 967483 - RNA, 21 nt, Human
aacauggagaaaccccaucuc

SEQ ID NO: 967484 - RNA, 23 nt, Human
aagagaaucauuuuuuucuuaaa

SEQ ID NO: 967485 - RNA, 25 nt, Human
aagcagcaggacugggaaggcugca

SEQ ID NO: 967486 - RNA, 22 nt, Human
aaucacuugaacccuggaggcg

SEQ ID NO: 967487 - RNA, 19 nt, Human
acaagcagcaggacuggga

SEQ ID NO: 967488 - RNA, 23 nt, Human
acauugcacuccagccugggaau

SEQ ID NO: 967489 - RNA, 25 nt, Human
acauugcacuccagccugggaauaa

SEQ ID NO: 967490 - RNA, 24 nt, Human
accccaucucuacuaaaaauacaa

SEQ ID NO: 967491 - RNA, 23 nt, Human
acuccagccugggaauaagguga

SEQ ID NO: 967492 - RNA, 20 nt, Human
acugccacaaaugggagagg

SEQ ID NO: 967493 - RNA, 24 nt, Human
agaaacuggauauuuuaugaauaa

SEQ ID NO: 967494 - RNA, 21 nt, Human
agaaagaggcaaacaccaagg

SEQ ID NO: 967495 - RNA, 22 nt, Human
agacagguggaucaccugaggg

SEQ ID NO: 967496 - RNA, 22 nt, Human
agacagguggaucaccugaggu

SEQ ID NO: 967497 - RNA, 21 nt, Human
agaggaggcguuuggagcuga

SEQ ID NO: 967498 - RNA, 19 nt, Human
agaggagugguaauaaaag

SEQ ID NO: 967499 - RNA, 24 nt, Human
agauguuggaagcuaguccaaacu

SEQ ID NO: 967500 - RNA, 23 nt, Human
agcuggguguggugguacaugcc

SEQ ID NO: 967501 - RNA, 21 nt, Human
aggcagcagagacugaggguc

SEQ ID NO: 967502 - RNA, 18 nt, Human
aggcaggagaaucacuug

SEQ ID NO: 967503 - RNA, 23 nt, Human
aggcaggagaaucacuugaaccc

SEQ ID NO: 967504 - RNA, 24 nt, Human
aggcaugguggcucaugccuguaa

SEQ ID NO: 967505 - RNA, 24 nt, Human
aggcggggguugcagugagccaag

SEQ ID NO: 967506 - RNA, 24 nt, Human
aggcugaggcaggagaaucacuug

SEQ ID NO: 967507 - RNA, 18 nt, Human
aggucgggaguucaagac

SEQ ID NO: 967508 - RNA, 23 nt, Human
aguccugguguguuuagauuugg

SEQ ID NO: 967509 - RNA, 24 nt, Human
agucugaucaacauggagaaaccc

SEQ ID NO: 967510 - RNA, 23 nt, Human
aguugacuguggcaauguagacc

SEQ ID NO: 967511 - RNA, 24 nt, Human
aucacgacauugcacuccagccug

SEQ ID NO: 967512 - RNA, 22 nt, Human
aucccagcacuuugggaggcca

SEQ ID NO: 967513 - RNA, 18 nt, Human
augaaaggaucuucugga

SEQ ID NO: 967514 - RNA, 19 nt, Human
augccuguaaucccagcac

SEQ ID NO: 967515 - RNA, 23 nt, Human
auggagacugcuuuccuggguuu

SEQ ID NO: 967516 - RNA, 27 nt, Human
auuacacuagagaaauuggcaagcacu

SEQ ID NO: 967517 - RNA, 18 nt, Human
auugcacuccagccuggg

SEQ ID NO: 967518 - RNA, 23 nt, Human
auugcacuccagccugggaauaa

SEQ ID NO: 967519 - RNA, 21 nt, Human
auuuaagaugagauuuggaug

SEQ ID NO: 967520 - RNA, 24 nt, Human
caaaaaaugguaaaggucacagaa

SEQ ID NO: 967521 - RNA, 19 nt, Human
caaaauaagggcuaaagaa

SEQ ID NO: 967522 - RNA, 23 nt, Human
caaaauaagggcuaaagaaaaau

SEQ ID NO: 967523 - RNA, 23 nt, Human
caaacaccaagguauaauagaaa

SEQ ID NO: 967524 - RNA, 23 nt, Human
caaauaguugacuguggcaaugu

SEQ ID NO: 967525 - RNA, 24 nt, Human
caagacagguggaucaccugaggu

SEQ ID NO: 967526 - RNA, 22 nt, Human
caauuucuaccacaagcagcag

SEQ ID NO: 967527 - RNA, 20 nt, Human
cacacacuuucaaaaaacca

SEQ ID NO: 967528 - RNA, 23 nt, Human
cacaguuccacaggcuuaacagg

SEQ ID NO: 967529 - RNA, 21 nt, Human
cacaugguggcaggagggaga

SEQ ID NO: 967530 - RNA, 23 nt, Human
caccugaggucgggaguucaaga

SEQ ID NO: 967531 - RNA, 21 nt, Human
caccuucuucacaugguggca

SEQ ID NO: 967532 - RNA, 19 nt, Human
cacuccagccugggaauaa

SEQ ID NO: 967533 - RNA, 19 nt, Human
cacuccagccugggaauaa

SEQ ID NO: 967534 - RNA, 23 nt, Human
cacuccagccugggaauaaggug

SEQ ID NO: 967535 - RNA, 25 nt, Human
cacugcuauaaagaacuaccagaaa

SEQ ID NO: 967536 - RNA, 25 nt, Human
cagagcccaaucccauggccccugc

SEQ ID NO: 967537 - RNA, 21 nt, Human
cagcaaaaaacuucacaugaa

SEQ ID NO: 967538 - RNA, 20 nt, Human
cagcacuuugggaggccaag

SEQ ID NO: 967539 - RNA, 26 nt, Human
cagcacuuugggaggccaagacaggu

SEQ ID NO: 967540 - RNA, 19 nt, Human
cagcagcaggcuuggacug

SEQ ID NO: 967541 - RNA, 19 nt, Human
cagcaggcuuggacugggc

SEQ ID NO: 967542 - RNA, 24 nt, Human
cagcuacucaggaggcugaggcag

SEQ ID NO: 967543 - RNA, 24 nt, Human
caggaggcugaggcaggagaauca

SEQ ID NO: 967544 - RNA, 24 nt, Human
cagguggaucaccugaggucggga

SEQ ID NO: 967545 - RNA, 24 nt, Human
caugccuguaaucccagcacuuug

SEQ ID NO: 967546 - RNA, 18 nt, Human
cauugcacuccagccugg

SEQ ID NO: 967547 - RNA, 19 nt, Human
cauugcacuccagccuggg

SEQ ID NO: 967548 - RNA, 19 nt, Human
cauugcacuccagccuggg

SEQ ID NO: 967549 - RNA, 19 nt, Human
cauugcacuccagccuggg

SEQ ID NO: 967550 - RNA, 20 nt, Human
cauugcacuccagccuggga

SEQ ID NO: 967551 - RNA, 22 nt, Human
cauugcacuccagccugggaau

SEQ ID NO: 967552 - RNA, 23 nt, Human
cauugcacuccagccugggaaua

SEQ ID NO: 967553 - RNA, 23 nt, Human
ccaaacuuagaaagaggcaaaca

SEQ ID NO: 967554 - RNA, 25 nt, Human
ccagucccaaggcgacggaugggag

SEQ ID NO: 967555 - RNA, 18 nt, Human
cccaaagguugaaaugcc

SEQ ID NO: 967556 - RNA, 21 nt, Human
ccugggagaggaggcguuugg

SEQ ID NO: 967557 - RNA, 21 nt, Human
ccuguaaucccagcuacucag

SEQ ID NO: 967558 - RNA, 22 nt, Human
cucaccuucuagggaggugcca

SEQ ID NO: 967559 - RNA, 23 nt, Human
cucaggaccgugaauagagacac

SEQ ID NO: 967560 - RNA, 24 nt, Human
cucaugccuguaaucccagcacuu

SEQ ID NO: 967561 - RNA, 23 nt, Human
cugaucaacauggagaaacccca

SEQ ID NO: 967562 - RNA, 23 nt, Human
cugcuauaaagaacuaccagaaa

SEQ ID NO: 967563 - RNA, 21 nt, Human
cuuucaaaaaaccagaucuca

SEQ ID NO: 967564 - RNA, 19 nt, Human
gaaacgccauugacuucaa

SEQ ID NO: 967565 - RNA, 19 nt, Human
gaagaaauacugucuccau

SEQ ID NO: 967566 - RNA, 21 nt, Human
gagagcuucuuucuuuuuggg

SEQ ID NO: 967567 - RNA, 23 nt, Human
gaucaccugaggucgggaguuca

SEQ ID NO: 967568 - RNA, 24 nt, Human
gaucaccugaggucgggaguucaa

SEQ ID NO: 967569 - RNA, 21 nt, Human
gaugggagaaguccuggugug

SEQ ID NO: 967570 - RNA, 19 nt, Human
gcacagucuuuuugcaauc

SEQ ID NO: 967571 - RNA, 23 nt, Human
gcaggagaaucacuugaacccug

SEQ ID NO: 967572 - RNA, 20 nt, Human
gccuggagagagucuguggu

SEQ ID NO: 967573 - RNA, 22 nt, Human
gcuaggcaugguggcucaugcc

SEQ ID NO: 967574 - RNA, 20 nt, Human
ggagacugcuuuccuggguu

SEQ ID NO: 967575 - RNA, 19 nt, Human
ggagagagagagagagagc

SEQ ID NO: 967576 - RNA, 20 nt, Human
ggagcgugugggcaggcaga

SEQ ID NO: 967577 - RNA, 19 nt, Human
ggaguugggguaggcagga

SEQ ID NO: 967578 - RNA, 20 nt, Human
ggaugggagaaguccuggug

SEQ ID NO: 967579 - RNA, 18 nt, Human
ggcaggcagaugaccugg

SEQ ID NO: 967580 - RNA, 21 nt, Human
ggcuaggcaugguggcucaug

SEQ ID NO: 967581 - RNA, 21 nt, Human
ggcucaugccuguaaucccag

SEQ ID NO: 967582 - RNA, 20 nt, Human
gggacagggagggguggugg

SEQ ID NO: 967583 - RNA, 21 nt, Human
ggggaguugggguaggcagga

SEQ ID NO: 967584 - RNA, 24 nt, Human
ggggguugcagugagccaagauca

SEQ ID NO: 967585 - RNA, 19 nt, Human
gggguugcagugagccaag

SEQ ID NO: 967586 - RNA, 21 nt, Human
gguacaugccuguaaucccag

SEQ ID NO: 967587 - RNA, 21 nt, Human
ggucccauucccacaacacau

SEQ ID NO: 967588 - RNA, 21 nt, Human
ggucuugugaagguggaacag

SEQ ID NO: 967589 - RNA, 21 nt, Human
gguggaaggagaaaaggaagc

SEQ ID NO: 967590 - RNA, 24 nt, Human
ggugguacaugccuguaaucccag

SEQ ID NO: 967591 - RNA, 23 nt, Human
gguguggugguacaugccuguaa

SEQ ID NO: 967592 - RNA, 20 nt, Human
gguugcagugagccaagauc

SEQ ID NO: 967593 - RNA, 19 nt, Human
gucuugugaagguggaaca

SEQ ID NO: 967594 - RNA, 23 nt, Human
guggcucaugccuguaaucccag

SEQ ID NO: 967595 - RNA, 18 nt, Human
uaaaaauacaaaauuagc

SEQ ID NO: 967596 - RNA, 19 nt, Human
uaaaaauacaaaauuagcu

SEQ ID NO: 967597 - RNA, 18 nt, Human
uaaagaacuaccagaaac

SEQ ID NO: 967598 - RNA, 19 nt, Human
uaacaggaagcaugacugg

SEQ ID NO: 967599 - RNA, 25 nt, Human
uacacuagagaaauuggcaagcacu

SEQ ID NO: 967600 - RNA, 20 nt, Human
uagaagaaauacugucucca

SEQ ID NO: 967601 - RNA, 23 nt, Human
uagaaguacaaauaguugacugu

SEQ ID NO: 967602 - RNA, 22 nt, Human
uagagaaauuggcaagcacugc

SEQ ID NO: 967603 - RNA, 21 nt, Human
uagagaaccucaacaaggcug

SEQ ID NO: 967604 - RNA, 19 nt, Human
uagcccauucucacacugc

SEQ ID NO: 967605 - RNA, 24 nt, Human
uagucugaucaacauggagaaacc

SEQ ID NO: 967606 - RNA, 21 nt, Human
ucacaagaacagcaaggggga

SEQ ID NO: 967607 - RNA, 24 nt, Human
ucacagaaugaucauuguuuuucu

SEQ ID NO: 967608 - RNA, 23 nt, Human
ucaccugaggucgggaguucaag

SEQ ID NO: 967609 - RNA, 19 nt, Human
ucagaaaguccauuguuaa

SEQ ID NO: 967610 - RNA, 23 nt, Human
ucaucgagggcuccucaauguug

SEQ ID NO: 967611 - RNA, 22 nt, Human
ucaugccuguaaucccagcacu

SEQ ID NO: 967612 - RNA, 19 nt, Human
ucccaaagguugaaaugcc

SEQ ID NO: 967613 - RNA, 21 nt, Human
ucccaaggcgacggaugggag

SEQ ID NO: 967614 - RNA, 20 nt, Human
ucccauggccccugcucagg

SEQ ID NO: 967615 - RNA, 21 nt, Human
ucgccagcuccuucucucagg

SEQ ID NO: 967616 - RNA, 20 nt, Human
ucucuacuaaaaauacaaaa

SEQ ID NO: 967617 - RNA, 20 nt, Human
ugaaaaaugaaagccagagg

SEQ ID NO: 967618 - RNA, 18 nt, Human
ugaaagccagaggagugg

SEQ ID NO: 967619 - RNA, 22 nt, Human
ugaaaugccagcaaaaaacuuc

SEQ ID NO: 967620 - RNA, 22 nt, Human
ugaaggagggagagcgggacca

SEQ ID NO: 967621 - RNA, 22 nt, Human
ugaagugacauugagcagagac

SEQ ID NO: 967622 - RNA, 24 nt, Human
ugagaacucacuaucacaagaaca

SEQ ID NO: 967623 - RNA, 20 nt, Human
ugaggcaggagaaucacuug

SEQ ID NO: 967624 - RNA, 24 nt, Human
ugaggcaggagaaucacuugaacc

SEQ ID NO: 967625 - RNA, 25 nt, Human
ugaggcaggagaaucacuugaaccc

SEQ ID NO: 967626 - RNA, 30 nt, Human
ugagucagugcccagagcccaaucccaugg

SEQ ID NO: 967627 - RNA, 19 nt, Human
ugaugcaggaacuucagau

SEQ ID NO: 967628 - RNA, 23 nt, Human
ugaugcaggaacuucagauaggc

SEQ ID NO: 967629 - RNA, 19 nt, Human
ugauugacuauggagacug

SEQ ID NO: 967630 - RNA, 23 nt, Human
ugccuguaaucccagcacuuugg

SEQ ID NO: 967631 - RNA, 24 nt, Human
ugccuguaaucccagcacuuuggg

SEQ ID NO: 967632 - RNA, 24 nt, Human
ugccuguaaucccagcuacucagg

SEQ ID NO: 967633 - RNA, 23 nt, Human
uggaggcggggguugcagugagc

SEQ ID NO: 967634 - RNA, 24 nt, Human
uggaucaccugaggucgggaguuc

SEQ ID NO: 967635 - RNA, 18 nt, Human
uggcaauguagacccuga

SEQ ID NO: 967636 - RNA, 24 nt, Human
uggcuaggcaugguggcucaugcc

SEQ ID NO: 967637 - RNA, 22 nt, Human
uggcucaugccuguaaucccag

SEQ ID NO: 967638 - RNA, 24 nt, Human
uggcucaugccuguaaucccagca

SEQ ID NO: 967639 - RNA, 19 nt, Human
uggcugggacagggagggg

SEQ ID NO: 967640 - RNA, 24 nt, Human
ugggaggccaagacagguggauca

SEQ ID NO: 967641 - RNA, 21 nt, Human
ugguacaugccuguaauccca

SEQ ID NO: 967642 - RNA, 22 nt, Human
ugguacaugccuguaaucccag

SEQ ID NO: 967643 - RNA, 24 nt, Human
ugguggcucaugccuguaauccca

SEQ ID NO: 967644 - RNA, 24 nt, Human
uggugguacaugccuguaauccca

SEQ ID NO: 967645 - RNA, 21 nt, Human
uguggggaagguucucgccag

SEQ ID NO: 967646 - RNA, 18 nt, Human
uguuggggaagaagcaga

SEQ ID NO: 967647 - RNA, 18 nt, Human
uuagcugggugugguggu

SEQ ID NO: 967648 - RNA, 20 nt, Human
uuagcuggguguggugguac

SEQ ID NO: 967649 - RNA, 24 nt, Human
uuagcuggguguggugguacaugc

SEQ ID NO: 967650 - RNA, 23 nt, Human
uucauuguccucuacauuuguaa

SEQ ID NO: 967651 - RNA, 18 nt, Human
uuccaaagaaucacugug

SEQ ID NO: 967652 - RNA, 24 nt, Human
uugaacccuggaggcggggguugc

SEQ ID NO: 967653 - RNA, 20 nt, Human
uugcagugagccaagaucac

SEQ ID NO: 967654 - RNA, 20 nt, Human
uuuuggguuugagggauagg

SEQ ID NO: 967655 - RNA, 24 nt, Human
accgagcgcucguccagggaaggc

SEQ ID NO: 967656 - RNA, 27 nt, Human
caaauauaaagagguuuauucauucug

SEQ ID NO: 967657 - RNA, 20 nt, Human
caccccucccgucgacccca

SEQ ID NO: 967658 - RNA, 21 nt, Human
ccgcggggccgggagcuacgc

SEQ ID NO: 967659 - RNA, 25 nt, Human
ccucccgucgaccccacaguucagg

SEQ ID NO: 967660 - RNA, 20 nt, Human
cgcggggccgggagcuacgc

SEQ ID NO: 967661 - RNA, 20 nt, Human
gcaaauauaaagagguuuau

SEQ ID NO: 967662 - RNA, 21 nt, Human
gcaccccucccgucgacccca

SEQ ID NO: 967663 - RNA, 18 nt, Human
ggggccgggagcuacgca

SEQ ID NO: 967664 - RNA, 27 nt, Human
uaggauacaaaauagaacauguaaaag

SEQ ID NO: 967665 - RNA, 19 nt, Human
uuuuuuuuuuuuuuuuugc

SEQ ID NO: 967666 - RNA, 21 nt, Human
uuuuuuuuuuuuuuuuugcaa

SEQ ID NO: 967667 - RNA, 23 nt, Human
uuuuuuuuuuuuuuuuugcaaau

SEQ ID NO: 967668 - RNA, 20 nt, Human
uuuuuuuuuuuuuuuuuugg

SEQ ID NO: 967669 - RNA, 22 nt, Human
aaacaagaacagaaaaaggcug

SEQ ID NO: 967670 - RNA, 23 nt, Human
aaacaagaacagaaaaaggcuga

SEQ ID NO: 967671 - RNA, 25 nt, Human
aaacaagaacagaaaaaggcugaaa

SEQ ID NO: 967672 - RNA, 22 nt, Human
aaagcagauugaaaugcuccuc

SEQ ID NO: 967673 - RNA, 19 nt, Human
aaccaucaaaacaagaaca

SEQ ID NO: 967674 - RNA, 22 nt, Human
acaaaaccaucaaaacaagaac

SEQ ID NO: 967675 - RNA, 21 nt, Human
acaggagcaggaaccugaagc

SEQ ID NO: 967676 - RNA, 20 nt, Human
acgccgggauuccuugauac

SEQ ID NO: 967677 - RNA, 19 nt, Human
agaaaaaggcugaaaaucc

SEQ ID NO: 967678 - RNA, 22 nt, Human
agaaaaaggcugaaaauccguu

SEQ ID NO: 967679 - RNA, 26 nt, Human
agcaggaaccugaagcugcuuccaag

SEQ ID NO: 967680 - RNA, 19 nt, Human
aggcaggaaagcagauuga

SEQ ID NO: 967681 - RNA, 22 nt, Human
aguagccaaucacaaagucaaa

SEQ ID NO: 967682 - RNA, 21 nt, Human
caaaccccauguucucaggga

SEQ ID NO: 967683 - RNA, 19 nt, Human
caaacuagugccccagaag

SEQ ID NO: 967684 - RNA, 20 nt, Human
cagcccauagauguacugca

SEQ ID NO: 967685 - RNA, 20 nt, Human
caucaaaacaagaacagaag

SEQ ID NO: 967686 - RNA, 24 nt, Human
cccugcaauuaauuauaaucccuu

SEQ ID NO: 967687 - RNA, 19 nt, Human
ccucucugaugggcaaggg

SEQ ID NO: 967688 - RNA, 25 nt, Human
ccuucuguacuacaggagcaggaac

SEQ ID NO: 967689 - RNA, 25 nt, Human
ccuugcccaccuugauguaaggcag

SEQ ID NO: 967690 - RNA, 21 nt, Human
cugaaaauccguucaaacccc

SEQ ID NO: 967691 - RNA, 24 nt, Human
cugaggucuucauagauugguggc

SEQ ID NO: 967692 - RNA, 18 nt, Human
cugcuuccaaggcucugg

SEQ ID NO: 967693 - RNA, 21 nt, Human
cuggacacuuggcacgcaggg

SEQ ID NO: 967694 - RNA, 27 nt, Human
gagcaggaaccugaagcugcuuccaag

SEQ ID NO: 967695 - RNA, 22 nt, Human
gcuguccacgccgggauuccuu

SEQ ID NO: 967696 - RNA, 20 nt, Human
gggcaagggggaaucacagc

SEQ ID NO: 967697 - RNA, 20 nt, Human
uaauuccucacccccuggcc

SEQ ID NO: 967698 - RNA, 27 nt, Human
uacacaaaaccaucaaaacaagaacag

SEQ ID NO: 967699 - RNA, 21 nt, Human
uagccaaucacaaagucaaac

SEQ ID NO: 967700 - RNA, 21 nt, Human
uauuuccucuuacacaaaacc

SEQ ID NO: 967701 - RNA, 20 nt, Human
ucaaaacaagaacagaaaaa

SEQ ID NO: 967702 - RNA, 20 nt, Human
ucaaaacaagaacagaaaaa

SEQ ID NO: 967703 - RNA, 18 nt, Human
ucacagcccauagaugua

SEQ ID NO: 967704 - RNA, 21 nt, Human
uccagcacuaauuccucaccc

SEQ ID NO: 967705 - RNA, 21 nt, Human
ucucugaugggcaagggggaa

SEQ ID NO: 967706 - RNA, 22 nt, Human
ucuggacacuuggcacgcaggg

SEQ ID NO: 967707 - RNA, 19 nt, Human
uggacacuuggcacgcagg

SEQ ID NO: 967708 - RNA, 23 nt, Human
uucaaaccccauguucucaggga

SEQ ID NO: 967709 - RNA, 22 nt, Human
uucauagauugguggcuugagc

SEQ ID NO: 967710 - RNA, 22 nt, Human
uucuguacuacaggagcaggaa

SEQ ID NO: 967711 - RNA, 25 nt, Human
uuuuuuuuuuuggcaguaaagggcu

SEQ ID NO: 967712 - RNA, 22 nt, Human
uuuuuuuuuuuuuuuuuggcag

SEQ ID NO: 967713 - RNA, 23 nt, Human
uuuuuuuuuuuuuuuuuggcagu

SEQ ID NO: 967714 - RNA, 22 nt, Human
uuuuuuuuuuuuuuuuuuuggc

SEQ ID NO: 967715 - RNA, 28 nt, Human
uuuuuuuuuuuuuuuuuuuuuuuggggg

SEQ ID NO: 967716 - RNA, 22 nt, Human
aagggaccuccaucccuccuug

SEQ ID NO: 967717 - RNA, 25 nt, Human
acaacaaaggggccagaguagggcg

SEQ ID NO: 967718 - RNA, 23 nt, Human
acagccaaggggccuuuauugga

SEQ ID NO: 967719 - RNA, 21 nt, Human
agagaugggagcggcaugagg

SEQ ID NO: 967720 - RNA, 22 nt, Human
agcaguacagacagggcugagg

SEQ ID NO: 967721 - RNA, 19 nt, Human
aggggucuucaugggcugu

SEQ ID NO: 967722 - RNA, 24 nt, Human
auaguagcggaaacaggcaagccc

SEQ ID NO: 967723 - RNA, 20 nt, Human
aucauucugaaggaaauaag

SEQ ID NO: 967724 - RNA, 19 nt, Human
auuccaggcucguuuagcu

SEQ ID NO: 967725 - RNA, 20 nt, Human
cacauaggagcaggcaggug

SEQ ID NO: 967726 - RNA, 21 nt, Human
cacuggccuaguccccaaggc

SEQ ID NO: 967727 - RNA, 18 nt, Human
cacugggcauaauauagu

SEQ ID NO: 967728 - RNA, 23 nt, Human
caguacagacagggcugaggcug

SEQ ID NO: 967729 - RNA, 19 nt, Human
caugaucucucuuccuaca

SEQ ID NO: 967730 - RNA, 23 nt, Human
cccccacagagcugagcuugcuu

SEQ ID NO: 967731 - RNA, 23 nt, Human
cccguggugccggccccugugcu

SEQ ID NO: 967732 - RNA, 25 nt, Human
ccucuaugggucccuuccccuuaga

SEQ ID NO: 967733 - RNA, 18 nt, Human
cggccccugugcugacca

SEQ ID NO: 967734 - RNA, 22 nt, Human
cggccccugugcugaccacccu

SEQ ID NO: 967735 - RNA, 24 nt, Human
cguggugccggccccugugcugac

SEQ ID NO: 967736 - RNA, 26 nt, Human
cuaugggucccuuccccuuagaauuu

SEQ ID NO: 967737 - RNA, 20 nt, Human
cugagaaggggucuucaugg

SEQ ID NO: 967738 - RNA, 20 nt, Human
cuggucccugucuucuucca

SEQ ID NO: 967739 - RNA, 19 nt, Human
cuuagcugccauacuucug

SEQ ID NO: 967740 - RNA, 18 nt, Human
gacguggggugaggagga

SEQ ID NO: 967741 - RNA, 23 nt, Human
gagcaguacagacagggcugagg

SEQ ID NO: 967742 - RNA, 19 nt, Human
gaggaggaacacugggcau

SEQ ID NO: 967743 - RNA, 18 nt, Human
gccaugccacagccaagg

SEQ ID NO: 967744 - RNA, 23 nt, Human
gcuugcuugguuaucugggacug

SEQ ID NO: 967745 - RNA, 19 nt, Human
ggacguggggugaggagga

SEQ ID NO: 967746 - RNA, 24 nt, Human
ggcugagaaggggucuucaugggc

SEQ ID NO: 967747 - RNA, 21 nt, Human
gggaacaugagaaagucuggc

SEQ ID NO: 967748 - RNA, 21 nt, Human
gggagcggcaugaggggaagg

SEQ ID NO: 967749 - RNA, 19 nt, Human
gggcugagaaggggucuuc

SEQ ID NO: 967750 - RNA, 20 nt, Human
ggggugaggaggaacacugg

SEQ ID NO: 967751 - RNA, 21 nt, Human
guagggcgaaauuccuccuuc

SEQ ID NO: 967752 - RNA, 22 nt, Human
gucccugucuucuuccagccag

SEQ ID NO: 967753 - RNA, 22 nt, Human
gucuggucccugucuucuucca

SEQ ID NO: 967754 - RNA, 21 nt, Human
uagcggaaacaggcaagccuc

SEQ ID NO: 967755 - RNA, 24 nt, Human
uauaguagcggaaacaggcaagcc

SEQ ID NO: 967756 - RNA, 26 nt, Human
uaugggggauggggaucauucugaag

SEQ ID NO: 967757 - RNA, 19 nt, Human
ucagguuuuggggcugaga

SEQ ID NO: 967758 - RNA, 19 nt, Human
ucuaugggucccuuccccu

SEQ ID NO: 967759 - RNA, 21 nt, Human
ucugggacugcugcucagucu

SEQ ID NO: 967760 - RNA, 20 nt, Human
ugaggagguaagcaggccug

SEQ ID NO: 967761 - RNA, 24 nt, Human
ugcgauguuggucuuuugaaggag

SEQ ID NO: 967762 - RNA, 30 nt, Human
ugggccucugagcucuuccuccacucccuc

SEQ ID NO: 967763 - RNA, 23 nt, Human
uggucuggccugaccccaggacg

SEQ ID NO: 967764 - RNA, 23 nt, Human
ugucugcgauguuggucuuuuga

SEQ ID NO: 967765 - RNA, 24 nt, Human
ugugaggagguaagcaggccugag

SEQ ID NO: 967766 - RNA, 20 nt, Human
uuuuuuuuuuuuuuugugac

SEQ ID NO: 967767 - RNA, 19 nt, Human
uuuuuuuuuuuuuuuuugu

SEQ ID NO: 967768 - RNA, 20 nt, Human
uuuuuuuuuuuuuuuuuugg

SEQ ID NO: 967769 - RNA, 21 nt, Human
aagagaagggggauuggggaa

SEQ ID NO: 967770 - RNA, 19 nt, Human
aaggaaaccaaaaaggagg

SEQ ID NO: 967771 - RNA, 23 nt, Human
acaaaaaaaaccuugucaguaau

SEQ ID NO: 967772 - RNA, 24 nt, Human
accaccaaggaaaccaaaaaggag

SEQ ID NO: 967773 - RNA, 21 nt, Human
acuacaaauccuauaaaauug

SEQ ID NO: 967774 - RNA, 24 nt, Human
agaaaagaggcacaccucugagga

SEQ ID NO: 967775 - RNA, 27 nt, Human
agaaaagaggcacaccucugaggaugc

SEQ ID NO: 967776 - RNA, 21 nt, Human
agaacagccuccgacuuaaaa

SEQ ID NO: 967777 - RNA, 21 nt, Human
agcaagcaacaaacaaaaaaa

SEQ ID NO: 967778 - RNA, 20 nt, Human
aggaugccuuuguuuucuug

SEQ ID NO: 967779 - RNA, 21 nt, Human
aguaauacacagaugaaucuc

SEQ ID NO: 967780 - RNA, 20 nt, Human
auuaccaaagcaagcaacaa

SEQ ID NO: 967781 - RNA, 24 nt, Human
caaagcaagcaacaaacaaaaaaa

SEQ ID NO: 967782 - RNA, 20 nt, Human
caagcaacaaacaaaaaaaa

SEQ ID NO: 967783 - RNA, 24 nt, Human
caagcaacaaacaaaaaaaaccuu

SEQ ID NO: 967784 - RNA, 18 nt, Human
cacaccucugaggaugcc

SEQ ID NO: 967785 - RNA, 22 nt, Human
cagggucaaugcaauggucugg

SEQ ID NO: 967786 - RNA, 26 nt, Human
cauucuucuuuuaauuaaucuggaag

SEQ ID NO: 967787 - RNA, 23 nt, Human
cuagacucaaacacaagucaaaa

SEQ ID NO: 967788 - RNA, 21 nt, Human
gacuuaguuuugguucuccuu

SEQ ID NO: 967789 - RNA, 22 nt, Human
gggcagagggaguauuuccucu

SEQ ID NO: 967790 - RNA, 19 nt, Human
uaaauuuugcgacuuaguu

SEQ ID NO: 967791 - RNA, 28 nt, Human
uaaccaaaacacaugaaaaguuuaugcc

SEQ ID NO: 967792 - RNA, 22 nt, Human
uaauaauaaagaaaagaggcac

SEQ ID NO: 967793 - RNA, 24 nt, Human
uaauaauaaagaaaagaggcacac

SEQ ID NO: 967794 - RNA, 22 nt, Human
uacaaaugccuaucguaacuua

SEQ ID NO: 967795 - RNA, 19 nt, Human
uaccaaagcaagcaacaaa

SEQ ID NO: 967796 - RNA, 21 nt, Human
uaccaaagcaagcaacaaaca

SEQ ID NO: 967797 - RNA, 22 nt, Human
uaccaaagcaagcaacaaacaa

SEQ ID NO: 967798 - RNA, 23 nt, Human
uaccaaagcaagcaacaaacaaa

SEQ ID NO: 967799 - RNA, 24 nt, Human
uaccaccaaggaaaccaaaaagga

SEQ ID NO: 967800 - RNA, 25 nt, Human
ucuagacucaaacacaagucaaaau

SEQ ID NO: 967801 - RNA, 20 nt, Human
ucuggaagaagagaaggggg

SEQ ID NO: 967802 - RNA, 19 nt, Human
ugaaaagaggaaaguaaug

SEQ ID NO: 967803 - RNA, 18 nt, Human
ugaauggauacaaaugcc

SEQ ID NO: 967804 - RNA, 20 nt, Human
aacaaaaaccuguauuuaag

SEQ ID NO: 967805 - RNA, 18 nt, Human
aaccauggcguaagagcc

SEQ ID NO: 967806 - RNA, 19 nt, Human
aaccugcucauaaccaugg

SEQ ID NO: 967807 - RNA, 21 nt, Human
aacuggaguaacccucagucc

SEQ ID NO: 967808 - RNA, 19 nt, Human
acaggccauguccccaaag

SEQ ID NO: 967809 - RNA, 20 nt, Human
acagucacaaaacagccagc

SEQ ID NO: 967810 - RNA, 19 nt, Human
acccuggaaaagucugugg

SEQ ID NO: 967811 - RNA, 18 nt, Human
acuugucaccccuuccuc

SEQ ID NO: 967812 - RNA, 22 nt, Human
agaaaucccagacccucugcuc

SEQ ID NO: 967813 - RNA, 27 nt, Human
agacuagaagaggggguaggaauccag

SEQ ID NO: 967814 - RNA, 21 nt, Human
agagcaaaaguccggauuucu

SEQ ID NO: 967815 - RNA, 19 nt, Human
agauggcaggguggaggca

SEQ ID NO: 967816 - RNA, 22 nt, Human
agcaucuccccucccagacagc

SEQ ID NO: 967817 - RNA, 21 nt, Human
agccauggccugcuggaagcc

SEQ ID NO: 967818 - RNA, 21 nt, Human
aggcccaggacggcacgacaa

SEQ ID NO: 967819 - RNA, 23 nt, Human
auccuucccaguucucucuguca

SEQ ID NO: 967820 - RNA, 22 nt, Human
aucugauuucggauucccgggg

SEQ ID NO: 967821 - RNA, 19 nt, Human
caaaacagccagccauggc

SEQ ID NO: 967822 - RNA, 22 nt, Human
caacaaaaaccuguauuuaagc

SEQ ID NO: 967823 - RNA, 19 nt, Human
caacggaagcgaaccugga

SEQ ID NO: 967824 - RNA, 22 nt, Human
caagacuccuggaauccagcac

SEQ ID NO: 967825 - RNA, 23 nt, Human
caccaugggaucaggcagaccuc

SEQ ID NO: 967826 - RNA, 19 nt, Human
cacuuggcugucucuucag

SEQ ID NO: 967827 - RNA, 19 nt, Human
cagacagccugaggcccag

SEQ ID NO: 967828 - RNA, 22 nt, Human
cagccauggccugcuggaagcc

SEQ ID NO: 967829 - RNA, 27 nt, Human
cagcuccuugaccacuugucaccccuu

SEQ ID NO: 967830 - RNA, 22 nt, Human
caggacaagcacugagcaggcu

SEQ ID NO: 967831 - RNA, 24 nt, Human
cagggggccaggcugggcccccag

SEQ ID NO: 967832 - RNA, 25 nt, Human
caucggaaaggaggcuuaugauccc

SEQ ID NO: 967833 - RNA, 21 nt, Human
caucuccccucccagacagcc

SEQ ID NO: 967834 - RNA, 25 nt, Human
ccaacucucaaauccgacgauuagc

SEQ ID NO: 967835 - RNA, 20 nt, Human
ccagacagccugaggcccag

SEQ ID NO: 967836 - RNA, 19 nt, Human
ccaggucuucacuguugac

SEQ ID NO: 967837 - RNA, 20 nt, Human
cccccagcacucccggcagu

SEQ ID NO: 967838 - RNA, 19 nt, Human
ccccuccauucugcccacu

SEQ ID NO: 967839 - RNA, 21 nt, Human
ccccucccagacagccugagg

SEQ ID NO: 967840 - RNA, 22 nt, Human
ccccucccagacagccugaggc

SEQ ID NO: 967841 - RNA, 20 nt, Human
cccgggggguccaggggggg

SEQ ID NO: 967842 - RNA, 18 nt, Human
cccuccauucugcccacu

SEQ ID NO: 967843 - RNA, 22 nt, Human
ccgaagccacguuccaagucac

SEQ ID NO: 967844 - RNA, 27 nt, Human
ccgccgucguccccgcgcggugguccg

SEQ ID NO: 967845 - RNA, 20 nt, Human
ccuccauucugcccacugag

SEQ ID NO: 967846 - RNA, 24 nt, Human
ccucccagacagccugaggcccag

SEQ ID NO: 967847 - RNA, 23 nt, Human
cgacaagaaugcaggccugugcc

SEQ ID NO: 967848 - RNA, 22 nt, Human
cgccccggcuuccgucagagac

SEQ ID NO: 967849 - RNA, 24 nt, Human
cgccugggauucacucccaucccu

SEQ ID NO: 967850 - RNA, 21 nt, Human
cgcuaauaauuaccccugcac

SEQ ID NO: 967851 - RNA, 23 nt, Human
cggaaaggaggcuuaugauccca

SEQ ID NO: 967852 - RNA, 23 nt, Human
cggaagcgaaccuggauccuucc

SEQ ID NO: 967853 - RNA, 24 nt, Human
cggaggcaagugcuggaugugggg

SEQ ID NO: 967854 - RNA, 18 nt, Human
cggauucccgggguucac

SEQ ID NO: 967855 - RNA, 23 nt, Human
cggcacgacaagaaugcaggccu

SEQ ID NO: 967856 - RNA, 20 nt, Human
cggccagagcagcccugcgg

SEQ ID NO: 967857 - RNA, 21 nt, Human
cgggggguccagggggggccc

SEQ ID NO: 967858 - RNA, 22 nt, Human
cgggguucaccaugggaucagg

SEQ ID NO: 967859 - RNA, 19 nt, Human
cgugaaagagcaggcaaga

SEQ ID NO: 967860 - RNA, 19 nt, Human
cucccagacagccugaggc

SEQ ID NO: 967861 - RNA, 20 nt, Human
cuccgccugggauucacucc

SEQ ID NO: 967862 - RNA, 18 nt, Human
cugacaaggguggcacag

SEQ ID NO: 967863 - RNA, 18 nt, Human
cuggcugccagcucuggc

SEQ ID NO: 967864 - RNA, 24 nt, Human
cuuagacuaagugggccgacagcg

SEQ ID NO: 967865 - RNA, 19 nt, Human
cuucuccugggaaaagggc

SEQ ID NO: 967866 - RNA, 21 nt, Human
cuuucggcccgcucagcuucc

SEQ ID NO: 967867 - RNA, 18 nt, Human
gaaaggcagagcuggcug

SEQ ID NO: 967868 - RNA, 21 nt, Human
gaaaucccagacccucugcuc

SEQ ID NO: 967869 - RNA, 25 nt, Human
gaggauggagagcaaaaguccggaa

SEQ ID NO: 967870 - RNA, 21 nt, Human
gccccggcuuccgucagagac

SEQ ID NO: 967871 - RNA, 23 nt, Human
gccgaaggacccucaucaaccug

SEQ ID NO: 967872 - RNA, 19 nt, Human
gcgcggugguccggcaggu

SEQ ID NO: 967873 - RNA, 23 nt, Human
gcugccagcucuggccuccgccu

SEQ ID NO: 967874 - RNA, 18 nt, Human
gcuuuugcugaaagcaga

SEQ ID NO: 967875 - RNA, 20 nt, Human
ggaccacccuggaaaagucu

SEQ ID NO: 967876 - RNA, 19 nt, Human
ggacucaagcuaccaacgg

SEQ ID NO: 967877 - RNA, 22 nt, Human
ggcaggacaagcacugagcagg

SEQ ID NO: 967878 - RNA, 21 nt, Human
gggcaagacuagaagaggggg

SEQ ID NO: 967879 - RNA, 21 nt, Human
gggucccggccagagcagccc

SEQ ID NO: 967880 - RNA, 20 nt, Human
gucacaaaacagccagccau

SEQ ID NO: 967881 - RNA, 24 nt, Human
guggcacagacgcaccucaccugc

SEQ ID NO: 967882 - RNA, 19 nt, Human
uaacagucacaaaacagcc

SEQ ID NO: 967883 - RNA, 19 nt, Human
uaacccucagucccaggac

SEQ ID NO: 967884 - RNA, 20 nt, Human
ucaaccugcucauaaccaug

SEQ ID NO: 967885 - RNA, 20 nt, Human
ucaccccuuccucagauggc

SEQ ID NO: 967886 - RNA, 21 nt, Human
uccaaaaugucuugagcuggu

SEQ ID NO: 967887 - RNA, 21 nt, Human
uccaacucucaaauccgacga

SEQ ID NO: 967888 - RNA, 22 nt, Human
uccaacucucaaauccgacgau

SEQ ID NO: 967889 - RNA, 18 nt, Human
uccagcacugcuugcacc

SEQ ID NO: 967890 - RNA, 19 nt, Human
uccaugcagucagacucca

SEQ ID NO: 967891 - RNA, 21 nt, Human
uccaugcagucagacuccaug

SEQ ID NO: 967892 - RNA, 18 nt, Human
ucccagacagccugaggc

SEQ ID NO: 967893 - RNA, 20 nt, Human
ucccagacagccugaggccc

SEQ ID NO: 967894 - RNA, 19 nt, Human
ucccagaguucaauuccug

SEQ ID NO: 967895 - RNA, 24 nt, Human
ucccagaguucaauuccugcaaac

SEQ ID NO: 967896 - RNA, 23 nt, Human
uccccaaagccccuagagggugu

SEQ ID NO: 967897 - RNA, 23 nt, Human
uccccucccagacagccugaggc

SEQ ID NO: 967898 - RNA, 23 nt, Human
ucccggccagagcagcccugcgg

SEQ ID NO: 967899 - RNA, 25 nt, Human
ucccggccagagcagcccugcgggc

SEQ ID NO: 967900 - RNA, 25 nt, Human
ucccuaaaggaucuuaucucaaucu

SEQ ID NO: 967901 - RNA, 18 nt, Human
uccggacuccgaccgucc

SEQ ID NO: 967902 - RNA, 20 nt, Human
uccucagauggcagggugga

SEQ ID NO: 967903 - RNA, 19 nt, Human
uccuugaccacuugucacc

SEQ ID NO: 967904 - RNA, 22 nt, Human
ucucccggccagcgggucccgg

SEQ ID NO: 967905 - RNA, 20 nt, Human
ucugaggucccggggggucc

SEQ ID NO: 967906 - RNA, 23 nt, Human
ucugucaggaucuggaacuucca

SEQ ID NO: 967907 - RNA, 18 nt, Human
ucuuccggacuccgaccg

SEQ ID NO: 967908 - RNA, 21 nt, Human
ugaaagcagaaaucccagacc

SEQ ID NO: 967909 - RNA, 20 nt, Human
ugagaugccaagacuccugg

SEQ ID NO: 967910 - RNA, 21 nt, Human
ugagcaggcucccagaggugu

SEQ ID NO: 967911 - RNA, 19 nt, Human
ugaggucccggggggucca

SEQ ID NO: 967912 - RNA, 22 nt, Human
ugcacaauguaacagucacaaa

SEQ ID NO: 967913 - RNA, 23 nt, Human
ugccuggcaggacuacuugggca

SEQ ID NO: 967914 - RNA, 18 nt, Human
ugggaggaguauguggac

SEQ ID NO: 967915 - RNA, 19 nt, Human
ugggaggaguauguggacg

SEQ ID NO: 967916 - RNA, 21 nt, Human
uuucggcccgcucagcuuccg

SEQ ID NO: 967917 - RNA, 20 nt, Human
uuuugcugaaagcagaaauc

SEQ ID NO: 967918 - RNA, 23 nt, Human
uuuuuuuuuuuuuuuuuuaaaag

SEQ ID NO: 967919 - RNA, 20 nt, Human
aaaaaaggcaagagaaaaaa

SEQ ID NO: 967920 - RNA, 22 nt, Human
aaaaggcaagagaaaaaaggga

SEQ ID NO: 967921 - RNA, 21 nt, Human
aaaggcaagagaaaaaaggga

SEQ ID NO: 967922 - RNA, 21 nt, Human
aaccugcauuuucccgaaagg

SEQ ID NO: 967923 - RNA, 20 nt, Human
acaaacaaauccagcaggca

SEQ ID NO: 967924 - RNA, 22 nt, Human
agaaaaaagggaauuuugcuag

SEQ ID NO: 967925 - RNA, 23 nt, Human
agacugagucguccagcuccguu

SEQ ID NO: 967926 - RNA, 23 nt, Human
agggauccacuggggaagauuuc

SEQ ID NO: 967927 - RNA, 25 nt, Human
auaauaacaaagagaaaguaaugac

SEQ ID NO: 967928 - RNA, 21 nt, Human
aucaaauugaccuccauuuau

SEQ ID NO: 967929 - RNA, 19 nt, Human
auccagguaaccgcagcag

SEQ ID NO: 967930 - RNA, 20 nt, Human
augguaaaauauaagacuuc

SEQ ID NO: 967931 - RNA, 24 nt, Human
auuucuuauuguugcuguuuaaau

SEQ ID NO: 967932 - RNA, 22 nt, Human
caaaaaagggaaaagauggcua

SEQ ID NO: 967933 - RNA, 21 nt, Human
cacagaccaagagacugaguc

SEQ ID NO: 967934 - RNA, 22 nt, Human
cagcaggcauagaaaacggcug

SEQ ID NO: 967935 - RNA, 23 nt, Human
cagcaggcauagaaaacggcuga

SEQ ID NO: 967936 - RNA, 21 nt, Human
cauagaaaacggcugaacugc

SEQ ID NO: 967937 - RNA, 23 nt, Human
ccagcgaugcaauguaaggcgaa

SEQ ID NO: 967938 - RNA, 21 nt, Human
cccagcgaugcaauguaaggc

SEQ ID NO: 967939 - RNA, 22 nt, Human
cggcugaacugcuagucccuua

SEQ ID NO: 967940 - RNA, 19 nt, Human
cuauagaagucaauucaaa

SEQ ID NO: 967941 - RNA, 18 nt, Human
gaaaagauggcuauagaa

SEQ ID NO: 967942 - RNA, 21 nt, Human
gcaguggcugggaacaaauac

SEQ ID NO: 967943 - RNA, 22 nt, Human
gcuguuucuucuuccugucagc

SEQ ID NO: 967944 - RNA, 21 nt, Human
gguaacaaagccagccucaga

SEQ ID NO: 967945 - RNA, 22 nt, Human
gucuacucuccaaaaaagggaa

SEQ ID NO: 967946 - RNA, 21 nt, Human
uaaaaaaggcaagagaaaaaa

SEQ ID NO: 967947 - RNA, 21 nt, Human
uacaaacaaauccagcaggca

SEQ ID NO: 967948 - RNA, 24 nt, Human
uacaguuguccauugucugcuaca

SEQ ID NO: 967949 - RNA, 19 nt, Human
uagaaaacggcugaacugc

SEQ ID NO: 967950 - RNA, 22 nt, Human
uauaauaacaaagagaaaguaa

SEQ ID NO: 967951 - RNA, 21 nt, Human
ugagcaguggcugggaacaaa

SEQ ID NO: 967952 - RNA, 23 nt, Human
uggcugggaacaaauacaaacaa

SEQ ID NO: 967953 - RNA, 25 nt, Human
ugggaacaaauacaaacaaauccag

SEQ ID NO: 967954 - RNA, 19 nt, Human
uuggaugcuguuucuucuu

SEQ ID NO: 967955 - RNA, 19 nt, Human
uuugcuagucuacucucca

SEQ ID NO: 967956 - RNA, 21 nt, Human
aagcagaaagcccaaaucaga

SEQ ID NO: 967957 - RNA, 23 nt, Human
aagcagaaagcccaaaucagaca

SEQ ID NO: 967958 - RNA, 18 nt, Human
acaagaauucauuguucu

SEQ ID NO: 967959 - RNA, 25 nt, Human
agaucaccaccuuaaacuuccuaaa

SEQ ID NO: 967960 - RNA, 24 nt, Human
agcagaaagcccaaaucagacagu

SEQ ID NO: 967961 - RNA, 22 nt, Human
agcuccuuggcgccuccuguua

SEQ ID NO: 967962 - RNA, 23 nt, Human
aggaagugucuauauagggugug

SEQ ID NO: 967963 - RNA, 19 nt, Human
aguaaagcagaaagcccaa

SEQ ID NO: 967964 - RNA, 20 nt, Human
aucagacagugaaucaggga

SEQ ID NO: 967965 - RNA, 20 nt, Human
cacuguuaucaucccuaccu

SEQ ID NO: 967966 - RNA, 22 nt, Human
cagagacucucucaaaacaagg

SEQ ID NO: 967967 - RNA, 23 nt, Human
cagguuaaaaaauaaauuccuuu

SEQ ID NO: 967968 - RNA, 23 nt, Human
caugcacaugcacauguacaccu

SEQ ID NO: 967969 - RNA, 22 nt, Human
cccacuguuaucaucccuaccu

SEQ ID NO: 967970 - RNA, 21 nt, Human
gcagacacugcccagacuaga

SEQ ID NO: 967971 - RNA, 21 nt, Human
gcgccuccuguuaggaaggca

SEQ ID NO: 967972 - RNA, 26 nt, Human
ggaccggaagaagcaauacagaguuu

SEQ ID NO: 967973 - RNA, 18 nt, Human
uaagugggagugguggaa

SEQ ID NO: 967974 - RNA, 24 nt, Human
uagaaaauagcagagacucucuca

SEQ ID NO: 967975 - RNA, 25 nt, Human
uagcauucaggaagugucuauauag

SEQ ID NO: 967976 - RNA, 23 nt, Human
ucagggauuaagugggaguggug

SEQ ID NO: 967977 - RNA, 18 nt, Human
uccaugcacaugcacaug

SEQ ID NO: 967978 - RNA, 18 nt, Human
uccaugcacaugcacaug

SEQ ID NO: 967979 - RNA, 19 nt, Human
uccaugcacaugcacaugu

SEQ ID NO: 967980 - RNA, 23 nt, Human
uccuaaauguucaugagucaaac

SEQ ID NO: 967981 - RNA, 18 nt, Human
uccuuccaugcacaugca

SEQ ID NO: 967982 - RNA, 21 nt, Human
ucucucaaaacaagaauucau

SEQ ID NO: 967983 - RNA, 19 nt, Human
ugaaagagaagaucaccac

SEQ ID NO: 967984 - RNA, 22 nt, Human
ugcccagacuagaucuuuuauc

SEQ ID NO: 967985 - RNA, 20 nt, Human
ugucuauauaggguguggag

SEQ ID NO: 967986 - RNA, 29 nt, Human
uuaccccacuguuaucaucccuaccuuuu

SEQ ID NO: 967987 - RNA, 19 nt, Human
uuggcgccuccuguuagga

SEQ ID NO: 967988 - RNA, 21 nt, Human
aagcaagcuucgugucaugca

SEQ ID NO: 967989 - RNA, 23 nt, Human
aagcuucgugucaugcagcagag

SEQ ID NO: 967990 - RNA, 18 nt, Human
acaacacaaagauggaac

SEQ ID NO: 967991 - RNA, 19 nt, Human
agaaggaagggauccuggc

SEQ ID NO: 967992 - RNA, 19 nt, Human
agagaaacugaggcacaga

SEQ ID NO: 967993 - RNA, 18 nt, Human
agcaagaugcccaaaguc

SEQ ID NO: 967994 - RNA, 20 nt, Human
agccaagagcaagaugccca

SEQ ID NO: 967995 - RNA, 22 nt, Human
agccaagagcaagaugcccaaa

SEQ ID NO: 967996 - RNA, 23 nt, Human
agggauccuggccggagccuggc

SEQ ID NO: 967997 - RNA, 22 nt, Human
cacagcaagcuaaauucuuggg

SEQ ID NO: 967998 - RNA, 20 nt, Human
cacugcacagcaagcuaaau

SEQ ID NO: 967999 - RNA, 25 nt, Human
cagcucccagaacaaaguaaagaua

SEQ ID NO: 968000 - RNA, 22 nt, Human
cauuucacagauguauguggaa

SEQ ID NO: 968001 - RNA, 23 nt, Human
ccaaaauguaaacuuuuccagac

SEQ ID NO: 968002 - RNA, 19 nt, Human
ccagccaagagcaagaugc

SEQ ID NO: 968003 - RNA, 24 nt, Human
ccugcagccacugcacagcaagcu

SEQ ID NO: 968004 - RNA, 20 nt, Human
ccugcagccacugcacagcc

SEQ ID NO: 968005 - RNA, 20 nt, Human
cucccagaacaaaguaaaga

SEQ ID NO: 968006 - RNA, 18 nt, Human
cuucuggguuuugcaaau

SEQ ID NO: 968007 - RNA, 18 nt, Human
gacugguggucagugugu

SEQ ID NO: 968008 - RNA, 22 nt, Human
gccaaugaggagaaggaaggga

SEQ ID NO: 968009 - RNA, 18 nt, Human
gcuuccuuuauacaauaa

SEQ ID NO: 968010 - RNA, 22 nt, Human
gucccuuuguuggucucuggug

SEQ ID NO: 968011 - RNA, 20 nt, Human
uaucagaaccagcagguucc

SEQ ID NO: 968012 - RNA, 21 nt, Human
uauguggaagaaacaucacca

SEQ ID NO: 968013 - RNA, 24 nt, Human
ucagauguccuggcuuucagucug

SEQ ID NO: 968014 - RNA, 24 nt, Human
ucugcuacaacacaaagauggaac

SEQ ID NO: 968015 - RNA, 24 nt, Human
ucuugggaagccucacuuccuugu

SEQ ID NO: 968016 - RNA, 20 nt, Human
ugacuuuuuagcuucugggu

SEQ ID NO: 968017 - RNA, 24 nt, Human
ugagaaggguacagacgugcagca

SEQ ID NO: 968018 - RNA, 22 nt, Human
ugaggagaaggaagggauccug

SEQ ID NO: 968019 - RNA, 21 nt, Human
ugccaggcagaagcaagcuuc

SEQ ID NO: 968020 - RNA, 24 nt, Human
ugggccuguggccaaguucagugu

SEQ ID NO: 968021 - RNA, 20 nt, Human
aaccaacuuccccugugacu

SEQ ID NO: 968022 - RNA, 21 nt, Human
aacucuuccucagcucuacca

SEQ ID NO: 968023 - RNA, 26 nt, Human
augguaccaucugcaucacccgaggg

SEQ ID NO: 968024 - RNA, 22 nt, Human
caucaaagaaauaccuaacgau

SEQ ID NO: 968025 - RNA, 23 nt, Human
caucaaagaaauaccuaacgaug

SEQ ID NO: 968026 - RNA, 19 nt, Human
cccaugccaaggcauaggg

SEQ ID NO: 968027 - RNA, 22 nt, Human
cuuguugcagaugacuuucuug

SEQ ID NO: 968028 - RNA, 18 nt, Human
ucccagagcaauuuguug

SEQ ID NO: 968029 - RNA, 25 nt, Human
ugaccagagagaauuccuuucccag

SEQ ID NO: 968030 - RNA, 18 nt, Human
uggaugaacuuguugcag

SEQ ID NO: 968031 - RNA, 20 nt, Human
uggaugaacuuguugcagau

SEQ ID NO: 968032 - RNA, 20 nt, Human
uuccccugugacucuccaga

SEQ ID NO: 968033 - RNA, 26 nt, Human
aaacagcaggucccuaaagcccccag

SEQ ID NO: 968034 - RNA, 23 nt, Human
aaaccccgucucugcugaaaaua

SEQ ID NO: 968035 - RNA, 24 nt, Human
aacagcaggucccuaaagcccccc

SEQ ID NO: 968036 - RNA, 20 nt, Human
aagagaaucgcuugaaccca

SEQ ID NO: 968037 - RNA, 23 nt, Human
aagauugcgccacugcacuccag

SEQ ID NO: 968038 - RNA, 24 nt, Human
aaucgcuugaacccagaaggugga

SEQ ID NO: 968039 - RNA, 21 nt, Human
accccacccacccuugggcug

SEQ ID NO: 968040 - RNA, 24 nt, Human
acugcacuccagccuuggcaacag

SEQ ID NO: 968041 - RNA, 24 nt, Human
acugcacuccagccuuggcaacag

SEQ ID NO: 968042 - RNA, 19 nt, Human
acugcacuccagccuuggg

SEQ ID NO: 968043 - RNA, 22 nt, Human
agacccagaggguaaucacaug

SEQ ID NO: 968044 - RNA, 21 nt, Human
agaggguaaucacauggcugc

SEQ ID NO: 968045 - RNA, 22 nt, Human
agaggguaaucacauggcugcg

SEQ ID NO: 968046 - RNA, 23 nt, Human
agccuggccagcauggcaaaccc

SEQ ID NO: 968047 - RNA, 23 nt, Human
agcugggcgugguggcgcgcgcc

SEQ ID NO: 968048 - RNA, 21 nt, Human
aggaaacagcaggucccuaaa

SEQ ID NO: 968049 - RNA, 19 nt, Human
agguggagguugcaaugag

SEQ ID NO: 968050 - RNA, 24 nt, Human
agguggagguugcaaugaguuaag

SEQ ID NO: 968051 - RNA, 22 nt, Human
aguuuggagccugugucccgcc

SEQ ID NO: 968052 - RNA, 25 nt, Human
auugcgccacugcacuccagccuug

SEQ ID NO: 968053 - RNA, 18 nt, Human
cacccccucucugggcac

SEQ ID NO: 968054 - RNA, 18 nt, Human
cacccuugggcugucagg

SEQ ID NO: 968055 - RNA, 25 nt, Human
cacgccuguaauucccagcacuuug

SEQ ID NO: 968056 - RNA, 19 nt, Human
cacugcacuccagccuugg

SEQ ID NO: 968057 - RNA, 21 nt, Human
cacugcacuccagccuuggca

SEQ ID NO: 968058 - RNA, 22 nt, Human
cacugcacuccagccuuggcaa

SEQ ID NO: 968059 - RNA, 23 nt, Human
cacugcacuccagccuuggcaac

SEQ ID NO: 968060 - RNA, 24 nt, Human
cacugcacuccagccuuggcaaca

SEQ ID NO: 968061 - RNA, 29 nt, Human
cagaagguggagguugcaaugacaacggu

SEQ ID NO: 968062 - RNA, 18 nt, Human
cagcacuuugggagacgg

SEQ ID NO: 968063 - RNA, 19 nt, Human
cagcaggccagucacguca

SEQ ID NO: 968064 - RNA, 23 nt, Human
cagcauggcaaaccccgucucug

SEQ ID NO: 968065 - RNA, 21 nt, Human
cagccgagugcccugccucuu

SEQ ID NO: 968066 - RNA, 22 nt, Human
cagccuuggcaacagagggaga

SEQ ID NO: 968067 - RNA, 22 nt, Human
cagcuccucagccugcaccccc

SEQ ID NO: 968068 - RNA, 20 nt, Human
ccacugcacuccagccuugg

SEQ ID NO: 968069 - RNA, 21 nt, Human
ccacugcacuccagccuuggc

SEQ ID NO: 968070 - RNA, 24 nt, Human
ccacugcacuccagccuuggcaac

SEQ ID NO: 968071 - RNA, 24 nt, Human
cccagguuggcuggucucaggaac

SEQ ID NO: 968072 - RNA, 24 nt, Human
ccccacccacccuugggcugucag

SEQ ID NO: 968073 - RNA, 23 nt, Human
cccccuccacauccagcaggcca

SEQ ID NO: 968074 - RNA, 23 nt, Human
ccccucucugggcacuggugcaa

SEQ ID NO: 968075 - RNA, 20 nt, Human
ccugcacccccucucugggc

SEQ ID NO: 968076 - RNA, 22 nt, Human
ccuggccagcauggcaaacccc

SEQ ID NO: 968077 - RNA, 18 nt, Human
ccuguaauucccagcacu

SEQ ID NO: 968078 - RNA, 23 nt, Human
ccuguaauucccagcacuuuggg

SEQ ID NO: 968079 - RNA, 21 nt, Human
cgagaccagccuggccagcau

SEQ ID NO: 968080 - RNA, 20 nt, Human
cgcagccgagugcccugccc

SEQ ID NO: 968081 - RNA, 24 nt, Human
cgccacugcacuccagccuuggca

SEQ ID NO: 968082 - RNA, 22 nt, Human
cggagaugggcggaucacuuga

SEQ ID NO: 968083 - RNA, 24 nt, Human
cggaucacuugaauccagcaguuc

SEQ ID NO: 968084 - RNA, 23 nt, Human
cucaagcccucaccccacccacc

SEQ ID NO: 968085 - RNA, 25 nt, Human
cucacgccuguaauucccagcacuu

SEQ ID NO: 968086 - RNA, 18 nt, Human
cuccucagccugcacccc

SEQ ID NO: 968087 - RNA, 19 nt, Human
cucugggcacuggugcaag

SEQ ID NO: 968088 - RNA, 21 nt, Human
cucugggcagcuccucagccu

SEQ ID NO: 968089 - RNA, 18 nt, Human
cugcacccccucucuggg

SEQ ID NO: 968090 - RNA, 23 nt, Human
cugcacgcgcccccuccacaucc

SEQ ID NO: 968091 - RNA, 21 nt, Human
gaaacagcaggucccuaaagc

SEQ ID NO: 968092 - RNA, 22 nt, Human
gacccuuucccugucucaaaga

SEQ ID NO: 968093 - RNA, 21 nt, Human
gaggacacugagacccagagg

SEQ ID NO: 968094 - RNA, 23 nt, Human
gagguugcaaugaguuaagauug

SEQ ID NO: 968095 - RNA, 24 nt, Human
gaucacuugaauccagcaguucga

SEQ ID NO: 968096 - RNA, 18 nt, Human
gcagccgagugcccugcc

SEQ ID NO: 968097 - RNA, 19 nt, Human
gcagcuccucagccugcac

SEQ ID NO: 968098 - RNA, 21 nt, Human
gccugcacgcgcccccuccac

SEQ ID NO: 968099 - RNA, 24 nt, Human
gccuggccagcauggcaaaccccg

SEQ ID NO: 968100 - RNA, 19 nt, Human
gcgcccccuccacauccag

SEQ ID NO: 968101 - RNA, 18 nt, Human
gcuccucagccugcaccc

SEQ ID NO: 968102 - RNA, 18 nt, Human
ggagguugcaaugaguua

SEQ ID NO: 968103 - RNA, 20 nt, Human
ggagguugcaaugaguuaag

SEQ ID NO: 968104 - RNA, 22 nt, Human
ggagguugcaaugaguuaagau

SEQ ID NO: 968105 - RNA, 24 nt, Human
ggagguugcaaugaguuaagauug

SEQ ID NO: 968106 - RNA, 23 nt, Human
ggaucacuugaauccagcaguuc

SEQ ID NO: 968107 - RNA, 21 nt, Human
ggcaaaccccgucucugcuga

SEQ ID NO: 968108 - RNA, 22 nt, Human
ggcucacgccuguaauucccag

SEQ ID NO: 968109 - RNA, 25 nt, Human
gguggcucacgccuguaauucccag

SEQ ID NO: 968110 - RNA, 22 nt, Human
gguggugucuccauuuuacaga

SEQ ID NO: 968111 - RNA, 23 nt, Human
gguuugguggcucacgccuguaa

SEQ ID NO: 968112 - RNA, 18 nt, Human
gucauacaugccacuccc

SEQ ID NO: 968113 - RNA, 24 nt, Human
guggcucacgccuguaauucccag

SEQ ID NO: 968114 - RNA, 22 nt, Human
guuuggagccugugucccgccc

SEQ ID NO: 968115 - RNA, 19 nt, Human
uaaagagaaucgcuugaac

SEQ ID NO: 968116 - RNA, 22 nt, Human
uaaauaaauagauagauagaua

SEQ ID NO: 968117 - RNA, 22 nt, Human
uacaugccacucccagccaggc

SEQ ID NO: 968118 - RNA, 22 nt, Human
uagauagauagauaauuuaaca

SEQ ID NO: 968119 - RNA, 23 nt, Human
ucaaauaaauaaauaaauagaua

SEQ ID NO: 968120 - RNA, 23 nt, Human
ucacgccuguaauucccagcacu

SEQ ID NO: 968121 - RNA, 24 nt, Human
ucaggccggguuugguggcucacg

SEQ ID NO: 968122 - RNA, 20 nt, Human
uccucagccugcacccccuc

SEQ ID NO: 968123 - RNA, 24 nt, Human
ucgcuugaacccagaagguggagg

SEQ ID NO: 968124 - RNA, 21 nt, Human
ucuccauuuuacagaugagga

SEQ ID NO: 968125 - RNA, 18 nt, Human
ucucugcugaaaauacac

SEQ ID NO: 968126 - RNA, 19 nt, Human
ugaggacacugagacccag

SEQ ID NO: 968127 - RNA, 27 nt, Human
ugaggacacugagacccagaggguaau

SEQ ID NO: 968128 - RNA, 22 nt, Human
ugaguuaagauugcgccacugc

SEQ ID NO: 968129 - RNA, 22 nt, Human
ugcacccccucucugggcacug

SEQ ID NO: 968130 - RNA, 26 nt, Human
ugccagcccacgcccuguuacccauc

SEQ ID NO: 968131 - RNA, 21 nt, Human
ugcccugccucuuacaucaac

SEQ ID NO: 968132 - RNA, 23 nt, Human
ugccugcacgcgcccccuccaca

SEQ ID NO: 968133 - RNA, 21 nt, Human
ugcgccacugcacuccagccu

SEQ ID NO: 968134 - RNA, 19 nt, Human
ugcgcuaggaaacagcagg

SEQ ID NO: 968135 - RNA, 23 nt, Human
ugcugaaaauacacaaauuagcu

SEQ ID NO: 968136 - RNA, 21 nt, Human
uggagccugugucccgcccaa

SEQ ID NO: 968137 - RNA, 22 nt, Human
uggcucacgccuguaauuccca

SEQ ID NO: 968138 - RNA, 25 nt, Human
uggcucacgccuguaauucccagca

SEQ ID NO: 968139 - RNA, 19 nt, Human
ugggagacggagaugggcg

SEQ ID NO: 968140 - RNA, 24 nt, Human
ugggagacggagaugggcggauca

SEQ ID NO: 968141 - RNA, 23 nt, Human
ugggcagcuccucagccugcacc

SEQ ID NO: 968142 - RNA, 20 nt, Human
ugggcggaucacuugaaucc

SEQ ID NO: 968143 - RNA, 25 nt, Human
ugguggcucacgccuguaauuccca

SEQ ID NO: 968144 - RNA, 23 nt, Human
ugugagcggugcucugggcagcu

SEQ ID NO: 968145 - RNA, 18 nt, Human
uuagcugggcgugguggc

SEQ ID NO: 968146 - RNA, 20 nt, Human
uuagcugggcgugguggcgc

SEQ ID NO: 968147 - RNA, 20 nt, Human
uuagcugggcgugguggcgc

SEQ ID NO: 968148 - RNA, 24 nt, Human
uugaacccagaagguggagguugc

SEQ ID NO: 968149 - RNA, 20 nt, Human
uugcaaugaguuaagauugc

SEQ ID NO: 968150 - RNA, 22 nt, Human
uugcaaugaguuaagauugcgc

SEQ ID NO: 968151 - RNA, 23 nt, Human
uugcgccacugcacuccagccuu

SEQ ID NO: 968152 - RNA, 24 nt, Human
uuuacagaugaggacacugagacc

SEQ ID NO: 968153 - RNA, 18 nt, Human
uuucaagcuccaguuugg

SEQ ID NO: 968154 - RNA, 20 nt, Human
uuuucguuuguuuguuuuuu

SEQ ID NO: 968155 - RNA, 21 nt, Human
aaaccauagaaacacacuggc

SEQ ID NO: 968156 - RNA, 19 nt, Human
aaagucuuuucuccccacc

SEQ ID NO: 968157 - RNA, 21 nt, Human
aaaugccuuauaaaagaccau

SEQ ID NO: 968158 - RNA, 24 nt, Human
aaauguauggucagugaaacacag

SEQ ID NO: 968159 - RNA, 24 nt, Human
aacaaagucuuuuccaaccaacgg

SEQ ID NO: 968160 - RNA, 23 nt, Human
aacuuuuaaaagaauacuagcag

SEQ ID NO: 968161 - RNA, 18 nt, Human
aagaagaacaagaaccaa

SEQ ID NO: 968162 - RNA, 21 nt, Human
aagcuuuucaaucugaggaaa

SEQ ID NO: 968163 - RNA, 24 nt, Human
aaugcuuguaaaucugagacugac

SEQ ID NO: 968164 - RNA, 25 nt, Human
acccucaacauuucacgagaacauc

SEQ ID NO: 968165 - RNA, 18 nt, Human
acugugugcaaguaucag

SEQ ID NO: 968166 - RNA, 18 nt, Human
agaauaugauucuuacca

SEQ ID NO: 968167 - RNA, 23 nt, Human
agacugacuggacccacccagac

SEQ ID NO: 968168 - RNA, 22 nt, Human
aucaucuuuauaaagaauuuuu

SEQ ID NO: 968169 - RNA, 25 nt, Human
auucauaacucugugcuauauuacu

SEQ ID NO: 968170 - RNA, 22 nt, Human
caaaauagauggcucuccuccc

SEQ ID NO: 968171 - RNA, 21 nt, Human
caaagaucccacccuaaucca

SEQ ID NO: 968172 - RNA, 22 nt, Human
cacagagugccuuuaugaccag

SEQ ID NO: 968173 - RNA, 23 nt, Human
caccauuuuccauuacuguucuc

SEQ ID NO: 968174 - RNA, 21 nt, Human
cacccauuuccucugacucca

SEQ ID NO: 968175 - RNA, 22 nt, Human
cacccauuuccucugacuccag

SEQ ID NO: 968176 - RNA, 20 nt, Human
cagagcuccaccauggucuc

SEQ ID NO: 968177 - RNA, 18 nt, Human
cauaaacacagucugugc

SEQ ID NO: 968178 - RNA, 24 nt, Human
cauacucauucuguaguuuguaua

SEQ ID NO: 968179 - RNA, 22 nt, Human
cauacuuuuggcuauguucaca

SEQ ID NO: 968180 - RNA, 18 nt, Human
caucagaaaaacaugacg

SEQ ID NO: 968181 - RNA, 21 nt, Human
ccacauaaacacacugucaaa

SEQ ID NO: 968182 - RNA, 24 nt, Human
ccacccagacccagggcaaagaua

SEQ ID NO: 968183 - RNA, 25 nt, Human
ccauccagucugcgcuuuugacugu

SEQ ID NO: 968184 - RNA, 21 nt, Human
ccccaauaucuucacagagug

SEQ ID NO: 968185 - RNA, 23 nt, Human
ccccaauaucuucacagagugcc

SEQ ID NO: 968186 - RNA, 18 nt, Human
ccccgcgcccagggcucc

SEQ ID NO: 968187 - RNA, 18 nt, Human
ccuaauccaguucuaagg

SEQ ID NO: 968188 - RNA, 18 nt, Human
ccugaguggcugaguucu

SEQ ID NO: 968189 - RNA, 23 nt, Human
ccuuaaagucuuuucuccccacc

SEQ ID NO: 968190 - RNA, 23 nt, Human
ccuuauaaaagaccauccaucca

SEQ ID NO: 968191 - RNA, 21 nt, Human
ccuucuuuguuuucucacccc

SEQ ID NO: 968192 - RNA, 19 nt, Human
cggcacauacuuuuggcua

SEQ ID NO: 968193 - RNA, 18 nt, Human
cuaaaagcucaguuguaa

SEQ ID NO: 968194 - RNA, 19 nt, Human
cuacugcagccaggugaga

SEQ ID NO: 968195 - RNA, 22 nt, Human
cucuggaaggaaagcuccaaaa

SEQ ID NO: 968196 - RNA, 22 nt, Human
cugacuccagagcuccaccaug

SEQ ID NO: 968197 - RNA, 22 nt, Human
cugcagaagacagacuaaucca

SEQ ID NO: 968198 - RNA, 22 nt, Human
gaccauccauccagucugcgcu

SEQ ID NO: 968199 - RNA, 21 nt, Human
gagaagguaauuaguaagcac

SEQ ID NO: 968200 - RNA, 24 nt, Human
gcagaaccucaagggagccaagag

SEQ ID NO: 968201 - RNA, 20 nt, Human
gcagaagacagacuaaucca

SEQ ID NO: 968202 - RNA, 19 nt, Human
gccgcccccgcgcccaggg

SEQ ID NO: 968203 - RNA, 25 nt, Human
gcuguagagagguagcccaguucaa

SEQ ID NO: 968204 - RNA, 24 nt, Human
ggucaggaaggaaaaaauaauucc

SEQ ID NO: 968205 - RNA, 19 nt, Human
gucaucuugggcaugaagc

SEQ ID NO: 968206 - RNA, 18 nt, Human
gucuuuucuccccacccu

SEQ ID NO: 968207 - RNA, 22 nt, Human
gugaagaucaaaugcaauaacg

SEQ ID NO: 968208 - RNA, 22 nt, Human
uaaaagaauacuagcagcuuuu

SEQ ID NO: 968209 - RNA, 24 nt, Human
uaaaagaccauccauccagucugc

SEQ ID NO: 968210 - RNA, 23 nt, Human
uaaaagcagcagcuuugugcuga

SEQ ID NO: 968211 - RNA, 21 nt, Human
uaaaagcucaguuguaaccac

SEQ ID NO: 968212 - RNA, 18 nt, Human
uaaaaugcacuuucugug

SEQ ID NO: 968213 - RNA, 19 nt, Human
uaaaaugcacuuucuguga

SEQ ID NO: 968214 - RNA, 22 nt, Human
uaaacacagucugugcaacggc

SEQ ID NO: 968215 - RNA, 24 nt, Human
uaaaccauagaaacacacuggcuc

SEQ ID NO: 968216 - RNA, 19 nt, Human
uaacacugugaaguacaca

SEQ ID NO: 968217 - RNA, 18 nt, Human
uaacugaaaagguaggua

SEQ ID NO: 968218 - RNA, 18 nt, Human
uacacaugaaacaaaguc

SEQ ID NO: 968219 - RNA, 19 nt, Human
uacauguuaccauaucauc

SEQ ID NO: 968220 - RNA, 21 nt, Human
uagauggcucuccucccuuaa

SEQ ID NO: 968221 - RNA, 29 nt, Human
uaggaacaaaauagauggcucuccucccc

SEQ ID NO: 968222 - RNA, 25 nt, Human
uaggugucucuucauuuuauauuuc

SEQ ID NO: 968223 - RNA, 18 nt, Human
uaguaagcaccaccuagc

SEQ ID NO: 968224 - RNA, 18 nt, Human
uauaaaguacaauuguau

SEQ ID NO: 968225 - RNA, 18 nt, Human
uaucuccaucaaagugau

SEQ ID NO: 968226 - RNA, 24 nt, Human
uauggaugaagcuauucuaguuga

SEQ ID NO: 968227 - RNA, 19 nt, Human
ucaagggagccaagagcuc

SEQ ID NO: 968228 - RNA, 25 nt, Human
ucacacaguaaaccauagaaacaca

SEQ ID NO: 968229 - RNA, 19 nt, Human
ucagcuuuucaaagauccc

SEQ ID NO: 968230 - RNA, 24 nt, Human
ucaugucacauuuaagaagaacaa

SEQ ID NO: 968231 - RNA, 20 nt, Human
uccacagcuccugagauugc

SEQ ID NO: 968232 - RNA, 22 nt, Human
uccacagcuccugagauugccu

SEQ ID NO: 968233 - RNA, 22 nt, Human
uccauuacuguucucaccaaau

SEQ ID NO: 968234 - RNA, 29 nt, Human
uccccaauaucuucacagagugccuuuau

SEQ ID NO: 968235 - RNA, 22 nt, Human
uccucugacuccagagcuccac

SEQ ID NO: 968236 - RNA, 20 nt, Human
ucugaggaaaauccugagaa

SEQ ID NO: 968237 - RNA, 25 nt, Human
ucugugcaacggcacauacuuuugg

SEQ ID NO: 968238 - RNA, 20 nt, Human
ucuuuguuuucucaccccuc

SEQ ID NO: 968239 - RNA, 23 nt, Human
ugacuccagagcuccaccauggu

SEQ ID NO: 968240 - RNA, 23 nt, Human
ugacuccagagcuccaccauggu

SEQ ID NO: 968241 - RNA, 22 nt, Human
ugagaaagacagugugcuuugc

SEQ ID NO: 968242 - RNA, 20 nt, Human
ugaggaaacagcuguagaga

SEQ ID NO: 968243 - RNA, 18 nt, Human
ugauuugagauaaucaca

SEQ ID NO: 968244 - RNA, 19 nt, Human
uggacccacccagacccag

SEQ ID NO: 968245 - RNA, 18 nt, Human
uggcugaaguaaaagcag

SEQ ID NO: 968246 - RNA, 24 nt, Human
ugguaaggggaagaggcagauaug

SEQ ID NO: 968247 - RNA, 21 nt, Human
uguauggucagugaaacacag

SEQ ID NO: 968248 - RNA, 26 nt, Human
uguuuucucaccccucuuaacuucca

SEQ ID NO: 968249 - RNA, 20 nt, Human
uuaaaaugcacuuucuguga

SEQ ID NO: 968250 - RNA, 24 nt, Human
uucacgagaacaucaguucauaaa

SEQ ID NO: 968251 - RNA, 21 nt, Human
uuccucugacuccagagcucc

SEQ ID NO: 968252 - RNA, 21 nt, Human
uugggggcucagaugaacagc

SEQ ID NO: 968253 - RNA, 26 nt, Human
aaaaaaguaacacaguaaaagccaua

SEQ ID NO: 968254 - RNA, 20 nt, Human
aaacaucuaacuacagugau

SEQ ID NO: 968255 - RNA, 24 nt, Human
aaagcgcgugcgacuccagcccuc

SEQ ID NO: 968256 - RNA, 19 nt, Human
aaaugggagcauucaacaa

SEQ ID NO: 968257 - RNA, 24 nt, Human
aacaaaagcaacacuaguuaucac

SEQ ID NO: 968258 - RNA, 24 nt, Human
aagcagcgaggcccggccccagag

SEQ ID NO: 968259 - RNA, 21 nt, Human
aaggaaaauucagcuucccga

SEQ ID NO: 968260 - RNA, 19 nt, Human
aaggcaggaccuggcugug

SEQ ID NO: 968261 - RNA, 19 nt, Human
aagggcagcgaagacccag

SEQ ID NO: 968262 - RNA, 21 nt, Human
acagagcacgccucagaccag

SEQ ID NO: 968263 - RNA, 19 nt, Human
accccgcgggccuccgggc

SEQ ID NO: 968264 - RNA, 21 nt, Human
acuggagaggagggugggaag

SEQ ID NO: 968265 - RNA, 22 nt, Human
agaaucggcccccuccucccuc

SEQ ID NO: 968266 - RNA, 22 nt, Human
agacccaggggccaaacuggca

SEQ ID NO: 968267 - RNA, 19 nt, Human
agaccuccaaaccuacccc

SEQ ID NO: 968268 - RNA, 20 nt, Human
agaccuccaaaccuacccca

SEQ ID NO: 968269 - RNA, 24 nt, Human
agaggagggugggaagccaagggc

SEQ ID NO: 968270 - RNA, 18 nt, Human
agcaccccuccccuaucc

SEQ ID NO: 968271 - RNA, 23 nt, Human
agcacggagaaggcggcuggguc

SEQ ID NO: 968272 - RNA, 19 nt, Human
agcagcgccggaggagcgc

SEQ ID NO: 968273 - RNA, 22 nt, Human
agcccccuucugcacagcccau

SEQ ID NO: 968274 - RNA, 18 nt, Human
agcgcgugcgacuccagc

SEQ ID NO: 968275 - RNA, 22 nt, Human
aggaacaucacgggcggcucug

SEQ ID NO: 968276 - RNA, 20 nt, Human
aggagggugggaagccaagg

SEQ ID NO: 968277 - RNA, 19 nt, Human
agggcuccggagccgcggg

SEQ ID NO: 968278 - RNA, 21 nt, Human
auaaagauaacuugaugaaug

SEQ ID NO: 968279 - RNA, 18 nt, Human
caaagaacacaagaucaa

SEQ ID NO: 968280 - RNA, 22 nt, Human
caacccucuccuuuucauauug

SEQ ID NO: 968281 - RNA, 22 nt, Human
cacaagaucaauacugaggcag

SEQ ID NO: 968282 - RNA, 23 nt, Human
cacaagaucaauacugaggcagg

SEQ ID NO: 968283 - RNA, 18 nt, Human
cagacaggcgcuaaggac

SEQ ID NO: 968284 - RNA, 21 nt, Human
cagcccccuucugcacagccc

SEQ ID NO: 968285 - RNA, 23 nt, Human
cagcgaagacccaggggccaaac

SEQ ID NO: 968286 - RNA, 19 nt, Human
cagcgccggaggagcgcag

SEQ ID NO: 968287 - RNA, 18 nt, Human
cagcgggagagcucgacu

SEQ ID NO: 968288 - RNA, 18 nt, Human
caggucagggcccugggg

SEQ ID NO: 968289 - RNA, 19 nt, Human
cagugccugacccccuuag

SEQ ID NO: 968290 - RNA, 21 nt, Human
ccaaaccuaccccagccacac

SEQ ID NO: 968291 - RNA, 21 nt, Human
ccaaaccuaccccagccacac

SEQ ID NO: 968292 - RNA, 20 nt, Human
ccaaaccuaccccagccacc

SEQ ID NO: 968293 - RNA, 20 nt, Human
ccagcccucccucaggccca

SEQ ID NO: 968294 - RNA, 18 nt, Human
cccaccccgcgggccucc

SEQ ID NO: 968295 - RNA, 21 nt, Human
cccagguccccgggagacgga

SEQ ID NO: 968296 - RNA, 23 nt, Human
ccccaaggccccagcuccucucc

SEQ ID NO: 968297 - RNA, 23 nt, Human
ccccagccacaccugacgcuguc

SEQ ID NO: 968298 - RNA, 20 nt, Human
cccccuucugcacagcccau

SEQ ID NO: 968299 - RNA, 19 nt, Human
ccccgccugggccuaaagc

SEQ ID NO: 968300 - RNA, 21 nt, Human
ccccuaaaccagaaucggccc

SEQ ID NO: 968301 - RNA, 22 nt, Human
ccccuccucccucacuuguccc

SEQ ID NO: 968302 - RNA, 26 nt, Human
cccgcagugcccccagcgggagagcu

SEQ ID NO: 968303 - RNA, 21 nt, Human
cccgcgccccucuacccgccu

SEQ ID NO: 968304 - RNA, 18 nt, Human
cccuaggggaagggaacc

SEQ ID NO: 968305 - RNA, 21 nt, Human
cccucuccgaaucagccccaa

SEQ ID NO: 968306 - RNA, 18 nt, Human
ccgcauggacuaccuggg

SEQ ID NO: 968307 - RNA, 19 nt, Human
ccgcgccccacggcucggc

SEQ ID NO: 968308 - RNA, 21 nt, Human
ccgcgccccacggcucggcgg

SEQ ID NO: 968309 - RNA, 21 nt, Human
ccgcgccccucuacccgccuu

SEQ ID NO: 968310 - RNA, 21 nt, Human
ccggccccagagcacggagaa

SEQ ID NO: 968311 - RNA, 19 nt, Human
ccgggcuucaggcagcggg

SEQ ID NO: 968312 - RNA, 20 nt, Human
ccuccaaaccuaccccagcc

SEQ ID NO: 968313 - RNA, 23 nt, Human
ccuccgggccgccgggagccagg

SEQ ID NO: 968314 - RNA, 22 nt, Human
ccuccgggcuucaggcagcggg

SEQ ID NO: 968315 - RNA, 19 nt, Human
cgaaggcaccggggcgggg

SEQ ID NO: 968316 - RNA, 18 nt, Human
cgaaucagccccaacagg

SEQ ID NO: 968317 - RNA, 19 nt, Human
cgacccccgccugggccua

SEQ ID NO: 968318 - RNA, 24 nt, Human
cgccagcuccagcucugccuuggg

SEQ ID NO: 968319 - RNA, 21 nt, Human
cggcaagcgcggccuucccuc

SEQ ID NO: 968320 - RNA, 20 nt, Human
cggccccagagcacggagaa

SEQ ID NO: 968321 - RNA, 20 nt, Human
cggccgcccgcgccccacgg

SEQ ID NO: 968322 - RNA, 19 nt, Human
cuaaagcacuuucgcucuc

SEQ ID NO: 968323 - RNA, 18 nt, Human
cuccccuauccuggcccc

SEQ ID NO: 968324 - RNA, 20 nt, Human
cugaaggaugcagggggcug

SEQ ID NO: 968325 - RNA, 19 nt, Human
cugguccggggauggcugc

SEQ ID NO: 968326 - RNA, 21 nt, Human
cugguccggggauggcugcgc

SEQ ID NO: 968327 - RNA, 21 nt, Human
cuguugcgcuucuagucacau

SEQ ID NO: 968328 - RNA, 19 nt, Human
cuuccugauugaguaccug

SEQ ID NO: 968329 - RNA, 22 nt, Human
gacgcugucuggguggcgccag

SEQ ID NO: 968330 - RNA, 18 nt, Human
gacuugguguaacuggca

SEQ ID NO: 968331 - RNA, 23 nt, Human
gagacgaggccgggcuuagaaaa

SEQ ID NO: 968332 - RNA, 22 nt, Human
gagcaccccuccccuauccugg

SEQ ID NO: 968333 - RNA, 20 nt, Human
gaucaucuaaaacaaaagca

SEQ ID NO: 968334 - RNA, 19 nt, Human
gcagagcgaggaccgcggc

SEQ ID NO: 968335 - RNA, 19 nt, Human
gccagcuccagcucugccu

SEQ ID NO: 968336 - RNA, 20 nt, Human
gccaggacacgggcacaggg

SEQ ID NO: 968337 - RNA, 23 nt, Human
gcccucuccgaaucagccccaac

SEQ ID NO: 968338 - RNA, 19 nt, Human
gcccugcacauagaucauc

SEQ ID NO: 968339 - RNA, 22 nt, Human
gccuccccgcagugcccccagc

SEQ ID NO: 968340 - RNA, 20 nt, Human
gcgcggcgagggcuccggag

SEQ ID NO: 968341 - RNA, 21 nt, Human
gcucgcgucucugcagccgca

SEQ ID NO: 968342 - RNA, 23 nt, Human
gcugugguguucagagggagguc

SEQ ID NO: 968343 - RNA, 19 nt, Human
ggaaacuuugcucuugcca

SEQ ID NO: 968344 - RNA, 22 nt, Human
ggagacggcaagcgcggccuuc

SEQ ID NO: 968345 - RNA, 21 nt, Human
ggagugggaaggggaggaaug

SEQ ID NO: 968346 - RNA, 19 nt, Human
ggccaaacuggcacugagg

SEQ ID NO: 968347 - RNA, 18 nt, Human
ggcccuggggcuggaggu

SEQ ID NO: 968348 - RNA, 24 nt, Human
ggccgccgggagccagggagcagc

SEQ ID NO: 968349 - RNA, 21 nt, Human
ggcggcgcggccccugguccg

SEQ ID NO: 968350 - RNA, 20 nt, Human
ggcugguggagcggaagggc

SEQ ID NO: 968351 - RNA, 18 nt, Human
gggaagccaagggcgcgc

SEQ ID NO: 968352 - RNA, 18 nt, Human
gguggcggcgcggccccu

SEQ ID NO: 968353 - RNA, 25 nt, Human
guaacacaguaaaagccauaaagca

SEQ ID NO: 968354 - RNA, 20 nt, Human
gucaaggaaaauucagcuuc

SEQ ID NO: 968355 - RNA, 24 nt, Human
gucaaggaaaauucagcuucccga

SEQ ID NO: 968356 - RNA, 23 nt, Human
guggcgccagcuccagcucugcc

SEQ ID NO: 968357 - RNA, 20 nt, Human
uaaaagucacuugaauggac

SEQ ID NO: 968358 - RNA, 24 nt, Human
uaacaaauauugcacauguagcac

SEQ ID NO: 968359 - RNA, 20 nt, Human
uaagcagcgaggcccggccc

SEQ ID NO: 968360 - RNA, 22 nt, Human
uaauaguaauaaauacucuuga

SEQ ID NO: 968361 - RNA, 18 nt, Human
uacacugaaaauuaaagg

SEQ ID NO: 968362 - RNA, 20 nt, Human
uaccccagccacaccugacu

SEQ ID NO: 968363 - RNA, 23 nt, Human
ucagaauaaaagucacuugaaug

SEQ ID NO: 968364 - RNA, 20 nt, Human
uccaaaccuaccccagccaa

SEQ ID NO: 968365 - RNA, 20 nt, Human
ucccaccccgcgggccuccg

SEQ ID NO: 968366 - RNA, 23 nt, Human
ucccagauggugcuggaacgagc

SEQ ID NO: 968367 - RNA, 20 nt, Human
ucccgaggccucgccucccc

SEQ ID NO: 968368 - RNA, 22 nt, Human
ucccucacuugucccagggagg

SEQ ID NO: 968369 - RNA, 21 nt, Human
ucccucaggcccagguccccg

SEQ ID NO: 968370 - RNA, 21 nt, Human
uccgcgccuucucccaaccuu

SEQ ID NO: 968371 - RNA, 22 nt, Human
ucgacuauggcgagaagucugu

SEQ ID NO: 968372 - RNA, 23 nt, Human
ucuaacuacagugauuauaaaga

SEQ ID NO: 968373 - RNA, 19 nt, Human
ucugcagccgcaguggaag

SEQ ID NO: 968374 - RNA, 18 nt, Human
ucugggaggugcgugaga

SEQ ID NO: 968375 - RNA, 21 nt, Human
ugagcuggggaagccaaaggc

SEQ ID NO: 968376 - RNA, 18 nt, Human
ugaggagcucuggucucu

SEQ ID NO: 968377 - RNA, 19 nt, Human
ugcccuaggggaagggaac

SEQ ID NO: 968378 - RNA, 24 nt, Human
ugcccugcacauagaucaucuaaa

SEQ ID NO: 968379 - RNA, 22 nt, Human
ugccugacccccuuaguaaugu

SEQ ID NO: 968380 - RNA, 19 nt, Human
uggcagaccuccaaaccua

SEQ ID NO: 968381 - RNA, 19 nt, Human
uggccuccgggcuucaggc

SEQ ID NO: 968382 - RNA, 25 nt, Human
uggcugugguguucagagggguagc

SEQ ID NO: 968383 - RNA, 21 nt, Human
uuccugauugaguaccugaaa

SEQ ID NO: 968384 - RNA, 18 nt, Human
uucgcuguagcucugucu

SEQ ID NO: 968385 - RNA, 23 nt, Human
aaaaaaaagggaaaagaaaaugu

SEQ ID NO: 968386 - RNA, 18 nt, Human
aaaacaaaggccaugguc

SEQ ID NO: 968387 - RNA, 25 nt, Human
aaaacauacacuuauuguggcccuc

SEQ ID NO: 968388 - RNA, 25 nt, Human
aaaaggaacaggaagcccaugaggg

SEQ ID NO: 968389 - RNA, 18 nt, Human
aaagaaaauguagauuuc

SEQ ID NO: 968390 - RNA, 20 nt, Human
aacauggugaaacccugucu

SEQ ID NO: 968391 - RNA, 21 nt, Human
aacauggugaaacccugucuc

SEQ ID NO: 968392 - RNA, 22 nt, Human
aagacgaagacgauguacagaa

SEQ ID NO: 968393 - RNA, 20 nt, Human
aagcaaucugguugugcaga

SEQ ID NO: 968394 - RNA, 24 nt, Human
aagcagagguugcagugagccaag

SEQ ID NO: 968395 - RNA, 25 nt, Human
aagcagagguugcagugagccaaga

SEQ ID NO: 968396 - RNA, 19 nt, Human
aagcccaaaaggaacagga

SEQ ID NO: 968397 - RNA, 18 nt, Human
aagcuggucaggcagaug

SEQ ID NO: 968398 - RNA, 23 nt, Human
aagugacagcgggaggauggguc

SEQ ID NO: 968399 - RNA, 24 nt, Human
aauaauacaauaaaauauaaaaca

SEQ ID NO: 968400 - RNA, 18 nt, Human
aauugcuugaacucggga

SEQ ID NO: 968401 - RNA, 23 nt, Human
acaaggcgagacucugucucaaa

SEQ ID NO: 968402 - RNA, 24 nt, Human
acaaggcgagacucugucucaaaa

SEQ ID NO: 968403 - RNA, 23 nt, Human
accccaaagacagugaaaaaaga

SEQ ID NO: 968404 - RNA, 19 nt, Human
acuccagccugggugacaa

SEQ ID NO: 968405 - RNA, 23 nt, Human
acuccagccugggugacaaggcg

SEQ ID NO: 968406 - RNA, 25 nt, Human
acuggacuccagccugggugacaag

SEQ ID NO: 968407 - RNA, 18 nt, Human
agaacguucacuugaccc

SEQ ID NO: 968408 - RNA, 24 nt, Human
agacggguggaucacgaggucagg

SEQ ID NO: 968409 - RNA, 21 nt, Human
agacgugguccucagaaucca

SEQ ID NO: 968410 - RNA, 22 nt, Human
agagguugcagugagccaagau

SEQ ID NO: 968411 - RNA, 24 nt, Human
agagguugcagugagccaagauug

SEQ ID NO: 968412 - RNA, 25 nt, Human
agaugccaacagcugccagggagcc

SEQ ID NO: 968413 - RNA, 24 nt, Human
agauguauaagcccaaaaggaaca

SEQ ID NO: 968414 - RNA, 22 nt, Human
agcagcuccacgaagguccugg

SEQ ID NO: 968415 - RNA, 21 nt, Human
agcccaaaaggaacaggaagc

SEQ ID NO: 968416 - RNA, 22 nt, Human
agccuggccaacauggugaaac

SEQ ID NO: 968417 - RNA, 24 nt, Human
agccuggccaacauggugaaaccc

SEQ ID NO: 968418 - RNA, 24 nt, Human
agccugggugacaaggcgagacuc

SEQ ID NO: 968419 - RNA, 24 nt, Human
agcuggguggugguggugcaugcc

SEQ ID NO: 968420 - RNA, 21 nt, Human
aggaagcccaugagggauacc

SEQ ID NO: 968421 - RNA, 25 nt, Human
aggcagauggcagccacggguguuu

SEQ ID NO: 968422 - RNA, 24 nt, Human
aggcaggagaauugcuugaacucg

SEQ ID NO: 968423 - RNA, 24 nt, Human
aggcaugguggcucacgccuguaa

SEQ ID NO: 968424 - RNA, 29 nt, Human
aggcuagcaccauuccugaugacaggggu

SEQ ID NO: 968425 - RNA, 21 nt, Human
aggcugagacggguggaucac

SEQ ID NO: 968426 - RNA, 19 nt, Human
agggagaaguaagaguagu

SEQ ID NO: 968427 - RNA, 22 nt, Human
agggagaaguaagaguagucca

SEQ ID NO: 968428 - RNA, 24 nt, Human
aguacuuugggaggcugagacggg

SEQ ID NO: 968429 - RNA, 23 nt, Human
agugcagauggcgcccaggagga

SEQ ID NO: 968430 - RNA, 18 nt, Human
aguguauuauuuauuuuu

SEQ ID NO: 968431 - RNA, 20 nt, Human
auagagcucuucaaacuggg

SEQ ID NO: 968432 - RNA, 19 nt, Human
aucacgaggucaggaguuc

SEQ ID NO: 968433 - RNA, 21 nt, Human
aucacgaggucaggaguucga

SEQ ID NO: 968434 - RNA, 24 nt, Human
auugugccacuggacuccagccug

SEQ ID NO: 968435 - RNA, 18 nt, Human
caaaaaaaaaaaaaggga

SEQ ID NO: 968436 - RNA, 24 nt, Human
caaaaaaaaaaaaagggaaaagaa

SEQ ID NO: 968437 - RNA, 20 nt, Human
caaaaaauagcuggguggug

SEQ ID NO: 968438 - RNA, 26 nt, Human
caaaaacaaaggccauggucaccaag

SEQ ID NO: 968439 - RNA, 24 nt, Human
caacauggugaaacccugucucca

SEQ ID NO: 968440 - RNA, 24 nt, Human
cacgccuguaaucccaguacuuug

SEQ ID NO: 968441 - RNA, 24 nt, Human
cacuggacuccagccugggugaca

SEQ ID NO: 968442 - RNA, 25 nt, Human
cacuguacaugggacagcuccaaaa

SEQ ID NO: 968443 - RNA, 20 nt, Human
cagcgggaggaugggucuug

SEQ ID NO: 968444 - RNA, 18 nt, Human
cagcugccagggagccca

SEQ ID NO: 968445 - RNA, 20 nt, Human
caggcagauggcagccacgg

SEQ ID NO: 968446 - RNA, 24 nt, Human
caguacuuugggaggcugagacgg

SEQ ID NO: 968447 - RNA, 26 nt, Human
caguacuuugggaggcugagacgggu

SEQ ID NO: 968448 - RNA, 19 nt, Human
ccacaaaaacaaaggccau

SEQ ID NO: 968449 - RNA, 21 nt, Human
ccacaaaaacaaaggccaugg

SEQ ID NO: 968450 - RNA, 20 nt, Human
ccacuggacuccagccuggg

SEQ ID NO: 968451 - RNA, 20 nt, Human
ccacuggacuccagccuggg

SEQ ID NO: 968452 - RNA, 21 nt, Human
ccacuggacuccagccugggu

SEQ ID NO: 968453 - RNA, 21 nt, Human
ccacuggacuccagccugggu

SEQ ID NO: 968454 - RNA, 23 nt, Human
ccacuggacuccagccuggguga

SEQ ID NO: 968455 - RNA, 24 nt, Human
ccacuggacuccagccugggugac

SEQ ID NO: 968456 - RNA, 24 nt, Human
ccagcuacucagagcugaggcagg

SEQ ID NO: 968457 - RNA, 21 nt, Human
ccauaaaguccucccaugcag

SEQ ID NO: 968458 - RNA, 18 nt, Human
ccauggucaccaagcugg

SEQ ID NO: 968459 - RNA, 19 nt, Human
cccaaaaggaacaggaagc

SEQ ID NO: 968460 - RNA, 26 nt, Human
cccacaaaaacaaaggccauggucac

SEQ ID NO: 968461 - RNA, 21 nt, Human
ccgcugggaagaaaaccccaa

SEQ ID NO: 968462 - RNA, 21 nt, Human
ccuauaaucccagcuacucag

SEQ ID NO: 968463 - RNA, 18 nt, Human
ccucuuccucccccucuu

SEQ ID NO: 968464 - RNA, 20 nt, Human
ccucuuccucccccucuuuc

SEQ ID NO: 968465 - RNA, 22 nt, Human
ccuggccaacauggugaaaccc

SEQ ID NO: 968466 - RNA, 24 nt, Human
ccuggccaacauggugaaacccug

SEQ ID NO: 968467 - RNA, 22 nt, Human
ccugggugacaaggcgagacuc

SEQ ID NO: 968468 - RNA, 24 nt, Human
cgagaccagccuggccaacauggu

SEQ ID NO: 968469 - RNA, 18 nt, Human
cgcccaggaggaagacga

SEQ ID NO: 968470 - RNA, 23 nt, Human
cgccuguaaucccaguacuuugg

SEQ ID NO: 968471 - RNA, 24 nt, Human
cgccuguaaucccaguacuuuggg

SEQ ID NO: 968472 - RNA, 24 nt, Human
cgcugggaagaaaaccccaaagac

SEQ ID NO: 968473 - RNA, 24 nt, Human
cgggaagcagagguugcagugagc

SEQ ID NO: 968474 - RNA, 24 nt, Human
cuagcaccauuccugaugucaccc

SEQ ID NO: 968475 - RNA, 24 nt, Human
cucaaaaaaaaaaaaagggaaaag

SEQ ID NO: 968476 - RNA, 22 nt, Human
cucacgccuguaaucccaguac

SEQ ID NO: 968477 - RNA, 24 nt, Human
cucacgccuguaaucccaguacuu

SEQ ID NO: 968478 - RNA, 21 nt, Human
cucagagcugaggcaggagaa

SEQ ID NO: 968479 - RNA, 24 nt, Human
cucccccucuuucuuuuucauuga

SEQ ID NO: 968480 - RNA, 19 nt, Human
cucugucucaaaaaaaaaa

SEQ ID NO: 968481 - RNA, 25 nt, Human
cucuuccucuuccucccccucuucc

SEQ ID NO: 968482 - RNA, 22 nt, Human
cucuuucuuuuucauugaggag

SEQ ID NO: 968483 - RNA, 24 nt, Human
cuggccaacauggugaaacccugu

SEQ ID NO: 968484 - RNA, 20 nt, Human
cuggguggugguggugcaug

SEQ ID NO: 968485 - RNA, 23 nt, Human
gacccacaaaaacaaaggccaug

SEQ ID NO: 968486 - RNA, 19 nt, Human
gagauguauaagcccaaaa

SEQ ID NO: 968487 - RNA, 24 nt, Human
gagcugaggcaggagaauugcuug

SEQ ID NO: 968488 - RNA, 18 nt, Human
gagguugcagugagccaa

SEQ ID NO: 968489 - RNA, 24 nt, Human
gaucacgaggucaggaguucgaga

SEQ ID NO: 968490 - RNA, 19 nt, Human
gauggcagccacggguguu

SEQ ID NO: 968491 - RNA, 20 nt, Human
gauguauaagcccaaaagga

SEQ ID NO: 968492 - RNA, 24 nt, Human
gccaacauggugaaacccugucuc

SEQ ID NO: 968493 - RNA, 19 nt, Human
gccacuggacuccagccug

SEQ ID NO: 968494 - RNA, 24 nt, Human
gccacuggacuccagccuggguga

SEQ ID NO: 968495 - RNA, 19 nt, Human
gccauggucaccaagcugg

SEQ ID NO: 968496 - RNA, 27 nt, Human
gcuagcaccauuccugaugacaggggu

SEQ ID NO: 968497 - RNA, 20 nt, Human
ggaagcagagguugcaguga

SEQ ID NO: 968498 - RNA, 28 nt, Human
ggacagcuccaaaagaggagggaacgcc

SEQ ID NO: 968499 - RNA, 21 nt, Human
ggcccucugcacaagcaaucu

SEQ ID NO: 968500 - RNA, 20 nt, Human
ggcggcaggcucccugaggu

SEQ ID NO: 968501 - RNA, 21 nt, Human
ggcucacgccuguaaucccag

SEQ ID NO: 968502 - RNA, 23 nt, Human
gguggaucacgaggucaggaguu

SEQ ID NO: 968503 - RNA, 24 nt, Human
gguggcucacgccuguaaucccag

SEQ ID NO: 968504 - RNA, 24 nt, Human
gguggugcaugccuauaaucccag

SEQ ID NO: 968505 - RNA, 22 nt, Human
guaaaaauacaaaaaauagcug

SEQ ID NO: 968506 - RNA, 20 nt, Human
gucacccugggugagacgug

SEQ ID NO: 968507 - RNA, 24 nt, Human
guccaaagugacagcgggaggaug

SEQ ID NO: 968508 - RNA, 19 nt, Human
gucucaaaaaaaaaaaaag

SEQ ID NO: 968509 - RNA, 24 nt, Human
gugacaaggcgagacucugucuca

SEQ ID NO: 968510 - RNA, 23 nt, Human
guggaucacgaggucaggaguuc

SEQ ID NO: 968511 - RNA, 19 nt, Human
uagagcucuucaaacuggg

SEQ ID NO: 968512 - RNA, 24 nt, Human
uagcuggguggugguggugcaugc

SEQ ID NO: 968513 - RNA, 21 nt, Human
uaguaccuguauagagcucuu

SEQ ID NO: 968514 - RNA, 21 nt, Human
uauaagcccaaaaggaacagg

SEQ ID NO: 968515 - RNA, 24 nt, Human
ucacgaggucaggaguucgagacc

SEQ ID NO: 968516 - RNA, 22 nt, Human
ucacgccuguaaucccaguacu

SEQ ID NO: 968517 - RNA, 25 nt, Human
ucacuugacccacaaaaacaaaggc

SEQ ID NO: 968518 - RNA, 21 nt, Human
uccaaagugacagcgggagga

SEQ ID NO: 968519 - RNA, 19 nt, Human
uccagccugggugacaagg

SEQ ID NO: 968520 - RNA, 23 nt, Human
uccagccugggugacaaggcgag

SEQ ID NO: 968521 - RNA, 24 nt, Human
uccagccugggugacaaggcgaga

SEQ ID NO: 968522 - RNA, 20 nt, Human
ucccagacaggcaagugcag

SEQ ID NO: 968523 - RNA, 21 nt, Human
uccucccaugcaggaagccag

SEQ ID NO: 968524 - RNA, 19 nt, Human
ucgagugcagauggcgccc

SEQ ID NO: 968525 - RNA, 22 nt, Human
ucucaaaaaaaaaaaaagggaa

SEQ ID NO: 968526 - RNA, 24 nt, Human
ucuggccaggcaugguggcucacg

SEQ ID NO: 968527 - RNA, 23 nt, Human
ucugguugugcagagucuuggug

SEQ ID NO: 968528 - RNA, 21 nt, Human
ucugucucaaaaaaaaaaaaa

SEQ ID NO: 968529 - RNA, 22 nt, Human
ucugucucaaaaaaaaaaaaag

SEQ ID NO: 968530 - RNA, 21 nt, Human
ucuuccucccccucuuucuuu

SEQ ID NO: 968531 - RNA, 24 nt, Human
ucuuccucuuccucccccucuuuc

SEQ ID NO: 968532 - RNA, 24 nt, Human
ucuuucuuuuucauugaggaggcu

SEQ ID NO: 968533 - RNA, 18 nt, Human
ugaaaccauguucagggu

SEQ ID NO: 968534 - RNA, 21 nt, Human
ugacccacaaaaacaaaggcc

SEQ ID NO: 968535 - RNA, 22 nt, Human
ugacccacaaaaacaaaggcca

SEQ ID NO: 968536 - RNA, 24 nt, Human
ugagacggguggaucacgagguca

SEQ ID NO: 968537 - RNA, 21 nt, Human
ugagccaagauugugccacug

SEQ ID NO: 968538 - RNA, 24 nt, Human
ugagccaagauugugccacuggac

SEQ ID NO: 968539 - RNA, 23 nt, Human
ugaggcaggagaauugcuugaac

SEQ ID NO: 968540 - RNA, 25 nt, Human
ugaggcaggagaauugcuugaacuc

SEQ ID NO: 968541 - RNA, 19 nt, Human
ugcacugcaggaugcgggg

SEQ ID NO: 968542 - RNA, 18 nt, Human
ugccuauaaucccagcua

SEQ ID NO: 968543 - RNA, 19 nt, Human
ugcggggagcuccauaaag

SEQ ID NO: 968544 - RNA, 22 nt, Human
uggagaagcagcuccacgaagg

SEQ ID NO: 968545 - RNA, 22 nt, Human
uggaucacgaggucaggaguuc

SEQ ID NO: 968546 - RNA, 24 nt, Human
uggaucacgaggucaggaguucga

SEQ ID NO: 968547 - RNA, 24 nt, Human
uggccaacauggugaaacccuguc

SEQ ID NO: 968548 - RNA, 23 nt, Human
uggcggcaggcucccugaggucg

SEQ ID NO: 968549 - RNA, 22 nt, Human
uggcucacgccuguaaucccag

SEQ ID NO: 968550 - RNA, 24 nt, Human
uggcucacgccuguaaucccagua

SEQ ID NO: 968551 - RNA, 19 nt, Human
ugggaagaaaaccccaaag

SEQ ID NO: 968552 - RNA, 22 nt, Human
ugggaagaaaaccccaaagaca

SEQ ID NO: 968553 - RNA, 19 nt, Human
ugggaggcugagacgggug

SEQ ID NO: 968554 - RNA, 24 nt, Human
ugggaggcugagacggguggauca

SEQ ID NO: 968555 - RNA, 19 nt, Human
uggguccacuguacauggg

SEQ ID NO: 968556 - RNA, 22 nt, Human
uggugcaugccuauaaucccag

SEQ ID NO: 968557 - RNA, 24 nt, Human
ugguggcucacgccuguaauccca

SEQ ID NO: 968558 - RNA, 24 nt, Human
ugguggugcaugccuauaauccca

SEQ ID NO: 968559 - RNA, 22 nt, Human
ugucucaaaaaaaaaaaaaggg

SEQ ID NO: 968560 - RNA, 19 nt, Human
uguucuaagaaaacauaga

SEQ ID NO: 968561 - RNA, 20 nt, Human
uguuuggccccuucccuugu

SEQ ID NO: 968562 - RNA, 23 nt, Human
uucuguagcaguucgggugaaua

SEQ ID NO: 968563 - RNA, 22 nt, Human
uugcagugagccaagauugugc

SEQ ID NO: 968564 - RNA, 24 nt, Human
uugcuugaacucgggaagcagagg

SEQ ID NO: 968565 - RNA, 23 nt, Human
uugugccacuggacuccagccug

SEQ ID NO: 968566 - RNA, 24 nt, Human
uuucuucuucuuuucucuuccccu

SEQ ID NO: 968567 - RNA, 23 nt, Human
uuuuuuuuuuuuuugggugugga

SEQ ID NO: 968568 - RNA, 21 nt, Human
uuuuuuuuuuuuuuuuugggu

SEQ ID NO: 968569 - RNA, 24 nt, Human
uuuuuuuuuuuuuuuuuuuuuggg

SEQ ID NO: 968570 - RNA, 19 nt, Human
aaaaaaacuugaaauacca

SEQ ID NO: 968571 - RNA, 18 nt, Human
aaagguggaggagaucag

SEQ ID NO: 968572 - RNA, 21 nt, Human
acuucugucauuggagaaagg

SEQ ID NO: 968573 - RNA, 22 nt, Human
agaagaaaaaaaaugcuucaag

SEQ ID NO: 968574 - RNA, 22 nt, Human
agacaccaggccagcuccagca

SEQ ID NO: 968575 - RNA, 21 nt, Human
cagcaacacugcacaaguuuu

SEQ ID NO: 968576 - RNA, 19 nt, Human
ccuuacucucucucucucc

SEQ ID NO: 968577 - RNA, 27 nt, Human
cuuauaaaaaaaaaaacuugaaauacc

SEQ ID NO: 968578 - RNA, 22 nt, Human
gcauacccacagagaaugaucu

SEQ ID NO: 968579 - RNA, 22 nt, Human
uaaaaaaaaaaacuugaaauac

SEQ ID NO: 968580 - RNA, 22 nt, Human
uaaaucagcaccucaaaaauua

SEQ ID NO: 968581 - RNA, 19 nt, Human
uacucucucucucuccucg

SEQ ID NO: 968582 - RNA, 23 nt, Human
uauucugcaauuuugccucuaaa

SEQ ID NO: 968583 - RNA, 23 nt, Human
ucuaauccaguagaagaaaaaaa

SEQ ID NO: 968584 - RNA, 22 nt, Human
ugauaugcugcuaucucucuug

SEQ ID NO: 968585 - RNA, 24 nt, Human
uggagacaccaggccagcuccagc

SEQ ID NO: 968586 - RNA, 19 nt, Human
uuacucucucucucuccuc

SEQ ID NO: 968587 - RNA, 20 nt, Human
uugccucuaaaucagcaccu

SEQ ID NO: 968588 - RNA, 19 nt, Human
aaaacagagguaccagaac

SEQ ID NO: 968589 - RNA, 22 nt, Human
aaaacagagguaccagaacuga

SEQ ID NO: 968590 - RNA, 22 nt, Human
agaucauucacaguuuccaaag

SEQ ID NO: 968591 - RNA, 22 nt, Human
aggagcugcggggcuccuggcg

SEQ ID NO: 968592 - RNA, 19 nt, Human
aggcggccagcgcgcaggc

SEQ ID NO: 968593 - RNA, 23 nt, Human
aguggcagaaaaugguucuucua

SEQ ID NO: 968594 - RNA, 24 nt, Human
caaaauauuuccacuccuaaccaa

SEQ ID NO: 968595 - RNA, 24 nt, Human
ccccucaggcgccggagaagcgcg

SEQ ID NO: 968596 - RNA, 18 nt, Human
cuaaccaaacugcaaccc

SEQ ID NO: 968597 - RNA, 21 nt, Human
cuagugauaaggguucuauuu

SEQ ID NO: 968598 - RNA, 22 nt, Human
cugcaacccuuucaguauagcc

SEQ ID NO: 968599 - RNA, 20 nt, Human
gacaucauuaacaaacaaaa

SEQ ID NO: 968600 - RNA, 21 nt, Human
gaggagcugcggggcuccugg

SEQ ID NO: 968601 - RNA, 19 nt, Human
gccccuggcgggcgggcgg

SEQ ID NO: 968602 - RNA, 19 nt, Human
gcugcggggcuccuggcgg

SEQ ID NO: 968603 - RNA, 23 nt, Human
ggagccccuggcgggcgggcggg

SEQ ID NO: 968604 - RNA, 19 nt, Human
ggcgagggcggcggagccc

SEQ ID NO: 968605 - RNA, 18 nt, Human
ggcggcggagccccuggc

SEQ ID NO: 968606 - RNA, 18 nt, Human
ggcuggcagcgcgcaggc

SEQ ID NO: 968607 - RNA, 23 nt, Human
gggcgggcuggcagcgcgcaggc

SEQ ID NO: 968608 - RNA, 25 nt, Human
gggcgggcuggcagcgcgcaggcgg

SEQ ID NO: 968609 - RNA, 22 nt, Human
uaaaaggaaaggaaacuugcuu

SEQ ID NO: 968610 - RNA, 19 nt, Human
uauugugcuauuccuagga

SEQ ID NO: 968611 - RNA, 19 nt, Human
ucagacucauggaaacauc

SEQ ID NO: 968612 - RNA, 19 nt, Human
ucccggaggagcugcgggg

SEQ ID NO: 968613 - RNA, 18 nt, Human
uggcagcgcgcaggcggc

SEQ ID NO: 968614 - RNA, 24 nt, Human
uuaguggcagaaaaugguucuucu

SEQ ID NO: 968615 - RNA, 24 nt, Human
uucuucuagugauaaggguucuau

SEQ ID NO: 968616 - RNA, 20 nt, Human
uuguauaaaaggaaaggaaa

SEQ ID NO: 968617 - RNA, 22 nt, Human
uuucagacauguuuucauauac

SEQ ID NO: 968618 - RNA, 19 nt, Human
uuugcaauuuguauaaaag

SEQ ID NO: 968619 - RNA, 23 nt, Human
accccgccaccuucccccucaaa

SEQ ID NO: 968620 - RNA, 21 nt, Human
agcaccugcccugccagccug

SEQ ID NO: 968621 - RNA, 19 nt, Human
aggccccaugugagcccag

SEQ ID NO: 968622 - RNA, 20 nt, Human
aggcggggccccuggugagg

SEQ ID NO: 968623 - RNA, 24 nt, Human
aggcggggccccuggugaggaugc

SEQ ID NO: 968624 - RNA, 21 nt, Human
augacacgguucccaccccgc

SEQ ID NO: 968625 - RNA, 26 nt, Human
caccccgccaccuucccccucaaaac

SEQ ID NO: 968626 - RNA, 22 nt, Human
cacguugucucgaagcaugggu

SEQ ID NO: 968627 - RNA, 23 nt, Human
ccacccacacgcagguuuauuuc

SEQ ID NO: 968628 - RNA, 22 nt, Human
ccacccacccucccauuaaagu

SEQ ID NO: 968629 - RNA, 18 nt, Human
ccacccucccauuaaagu

SEQ ID NO: 968630 - RNA, 22 nt, Human
ccacgcagcaccugcccugcca

SEQ ID NO: 968631 - RNA, 18 nt, Human
ccaucuuccaggggugga

SEQ ID NO: 968632 - RNA, 23 nt, Human
cccagccguggcccugccugagc

SEQ ID NO: 968633 - RNA, 19 nt, Human
ccccaugugagcccagggu

SEQ ID NO: 968634 - RNA, 22 nt, Human
ccccgccaccuucccccucaaa

SEQ ID NO: 968635 - RNA, 24 nt, Human
ccccucaaaacacugaucgggcga

SEQ ID NO: 968636 - RNA, 19 nt, Human
cccugugccugccggcccc

SEQ ID NO: 968637 - RNA, 23 nt, Human
ccgcaggccaccugggagcagca

SEQ ID NO: 968638 - RNA, 19 nt, Human
ccgccaccuucccccucaa

SEQ ID NO: 968639 - RNA, 19 nt, Human
ccgccucaccugccgccgc

SEQ ID NO: 968640 - RNA, 22 nt, Human
ccgcugggccgccucagcccgc

SEQ ID NO: 968641 - RNA, 26 nt, Human
cugccagccugucugcggcccaccca

SEQ ID NO: 968642 - RNA, 21 nt, Human
cugcggcccacccacccuccc

SEQ ID NO: 968643 - RNA, 18 nt, Human
gagaacacuccacccaca

SEQ ID NO: 968644 - RNA, 21 nt, Human
gagaacacuccacccacacgc

SEQ ID NO: 968645 - RNA, 19 nt, Human
gagcauagcaguggccgca

SEQ ID NO: 968646 - RNA, 18 nt, Human
gagcccaggguaggacgg

SEQ ID NO: 968647 - RNA, 19 nt, Human
gccugccggccccgcccag

SEQ ID NO: 968648 - RNA, 23 nt, Human
gcuguccccaagacacucaagag

SEQ ID NO: 968649 - RNA, 19 nt, Human
ggcuucuguaccuccuccc

SEQ ID NO: 968650 - RNA, 19 nt, Human
ggugggcacaggccccaug

SEQ ID NO: 968651 - RNA, 22 nt, Human
gucugcggcccacccacccucc

SEQ ID NO: 968652 - RNA, 22 nt, Human
ucccaccccgccaccuuccccc

SEQ ID NO: 968653 - RNA, 25 nt, Human
ucccaccccgccaccuucccccuca

SEQ ID NO: 968654 - RNA, 18 nt, Human
ucgggcgacgauccgcug

SEQ ID NO: 968655 - RNA, 20 nt, Human
ugccggccccgcccagccac

SEQ ID NO: 968656 - RNA, 21 nt, Human
uggagagggccccacgcagca

SEQ ID NO: 968657 - RNA, 20 nt, Human
ugggagcagcaggcggggcc

SEQ ID NO: 968658 - RNA, 19 nt, Human
uggugaggaugccuuguaa

SEQ ID NO: 968659 - RNA, 21 nt, Human
uguaccuccucccugugccug

SEQ ID NO: 968660 - RNA, 22 nt, Human
ugucucgaagcauggguuucca

SEQ ID NO: 968661 - RNA, 21 nt, Human
uucccaccccgccaccuuccc

SEQ ID NO: 968662 - RNA, 19 nt, Human
uugguuccgccucaccugc

SEQ ID NO: 968663 - RNA, 24 nt, Human
aaagagcgagacuccgucucaaaa

SEQ ID NO: 968664 - RNA, 18 nt, Human
aacauggugaaaccccgc

SEQ ID NO: 968665 - RNA, 20 nt, Human
aacauggugaaaccccgccu

SEQ ID NO: 968666 - RNA, 21 nt, Human
aacauggugaaaccccgccuc

SEQ ID NO: 968667 - RNA, 23 nt, Human
aaggcgggcggaucacgagguca

SEQ ID NO: 968668 - RNA, 25 nt, Human
aaucccuugaacccaggaggcggag

SEQ ID NO: 968669 - RNA, 18 nt, Human
aauguuacucuuuuucua

SEQ ID NO: 968670 - RNA, 24 nt, Human
accccgccucuacuaaaaauacaa

SEQ ID NO: 968671 - RNA, 18 nt, Human
acugcacuccagccuggg

SEQ ID NO: 968672 - RNA, 24 nt, Human
acugcacuccagccugggcgaaag

SEQ ID NO: 968673 - RNA, 26 nt, Human
acugcacuccagccugggcgaaagag

SEQ ID NO: 968674 - RNA, 24 nt, Human
agccugggcgaaagagcgagacuc

SEQ ID NO: 968675 - RNA, 23 nt, Human
agcugggugugguggcgugugcc

SEQ ID NO: 968676 - RNA, 23 nt, Human
aggcaggagaaucccuugaaccc

SEQ ID NO: 968677 - RNA, 24 nt, Human
aggcaggagaaucccuugaaccca

SEQ ID NO: 968678 - RNA, 21 nt, Human
aggcggagauuacagugagcc

SEQ ID NO: 968679 - RNA, 24 nt, Human
aggcggagauuacagugagccgag

SEQ ID NO: 968680 - RNA, 24 nt, Human
aggcgggcggaucacgaggucagg

SEQ ID NO: 968681 - RNA, 24 nt, Human
aggcugaggcaggagaaucccuug

SEQ ID NO: 968682 - RNA, 23 nt, Human
aguggcucaugccuguaauccca

SEQ ID NO: 968683 - RNA, 24 nt, Human
aguggcucaugccuguaaucccag

SEQ ID NO: 968684 - RNA, 21 nt, Human
auaaacuuuuggagggagcau

SEQ ID NO: 968685 - RNA, 19 nt, Human
augccuguaaucccagcac

SEQ ID NO: 968686 - RNA, 24 nt, Human
auugcgccacugcacuccagccug

SEQ ID NO: 968687 - RNA, 18 nt, Human
caccguuuucuggaaugu

SEQ ID NO: 968688 - RNA, 23 nt, Human
cacuccagccugggcgaaagagc

SEQ ID NO: 968689 - RNA, 24 nt, Human
cacuccagccugggcgaaagagcg

SEQ ID NO: 968690 - RNA, 19 nt, Human
cacugcacuccagccuggg

SEQ ID NO: 968691 - RNA, 20 nt, Human
cacugcacuccagccugggc

SEQ ID NO: 968692 - RNA, 22 nt, Human
cacugcacuccagccugggcga

SEQ ID NO: 968693 - RNA, 23 nt, Human
cacugcacuccagccugggcgaa

SEQ ID NO: 968694 - RNA, 24 nt, Human
cacugcacuccagccugggcgaaa

SEQ ID NO: 968695 - RNA, 18 nt, Human
cacuuuggaggacaaggc

SEQ ID NO: 968696 - RNA, 23 nt, Human
cacuuuggaggacaaggcgggcg

SEQ ID NO: 968697 - RNA, 21 nt, Human
cagcacuuuggaggacaaggc

SEQ ID NO: 968698 - RNA, 23 nt, Human
cagcacuuuggaggacaaggcgg

SEQ ID NO: 968699 - RNA, 24 nt, Human
cagcuacuugggaggcugaggcag

SEQ ID NO: 968700 - RNA, 24 nt, Human
caugccuguaaucccagcacuuug

SEQ ID NO: 968701 - RNA, 20 nt, Human
ccacugcacuccagccuggg

SEQ ID NO: 968702 - RNA, 20 nt, Human
ccacugcacuccagccuggg

SEQ ID NO: 968703 - RNA, 21 nt, Human
ccacugcacuccagccugggc

SEQ ID NO: 968704 - RNA, 21 nt, Human
ccacugcacuccagccugggc

SEQ ID NO: 968705 - RNA, 22 nt, Human
ccacugcacuccagccugggcg

SEQ ID NO: 968706 - RNA, 22 nt, Human
ccuggcuaacauggugaaaccc

SEQ ID NO: 968707 - RNA, 23 nt, Human
ccuggcuaacauggugaaacccc

SEQ ID NO: 968708 - RNA, 24 nt, Human
ccuggcuaacauggugaaaccccg

SEQ ID NO: 968709 - RNA, 22 nt, Human
ccugggcgaaagagcgagacuc

SEQ ID NO: 968710 - RNA, 21 nt, Human
ccuguagucccagcuacuugg

SEQ ID NO: 968711 - RNA, 18 nt, Human
cucaaaaaaaaaaaaaaa

SEQ ID NO: 968712 - RNA, 23 nt, Human
cucaugccuguaaucccagcacu

SEQ ID NO: 968713 - RNA, 24 nt, Human
cucaugccuguaaucccagcacuu

SEQ ID NO: 968714 - RNA, 19 nt, Human
cuccgucucaaaaaaaaaa

SEQ ID NO: 968715 - RNA, 20 nt, Human
cucuacuaaaaauacaaaaa

SEQ ID NO: 968716 - RNA, 21 nt, Human
cucuacuaaaaauacaaaaaa

SEQ ID NO: 968717 - RNA, 23 nt, Human
cucuucuauuuuaaaugcagaag

SEQ ID NO: 968718 - RNA, 19 nt, Human
gaaaccccgccucuacuaa

SEQ ID NO: 968719 - RNA, 21 nt, Human
gaaagagcgagacuccgucuc

SEQ ID NO: 968720 - RNA, 19 nt, Human
gacaaggcgggcggaucac

SEQ ID NO: 968721 - RNA, 23 nt, Human
gagaccauccuggcuaacauggu

SEQ ID NO: 968722 - RNA, 23 nt, Human
gagauuacagugagccgagauug

SEQ ID NO: 968723 - RNA, 23 nt, Human
gagauugcgccacugcacuccag

SEQ ID NO: 968724 - RNA, 19 nt, Human
gagcgagacuccgucucaa

SEQ ID NO: 968725 - RNA, 22 nt, Human
gcaggagaaucccuugaaccca

SEQ ID NO: 968726 - RNA, 22 nt, Human
gccacugcacuccagccugggc

SEQ ID NO: 968727 - RNA, 24 nt, Human
gccacugcacuccagccugggcga

SEQ ID NO: 968728 - RNA, 24 nt, Human
gcgcccaguggcucaugccuguaa

SEQ ID NO: 968729 - RNA, 22 nt, Human
gcgugugccuguagucccagcu

SEQ ID NO: 968730 - RNA, 24 nt, Human
gcuaacauggugaaaccccgccuc

SEQ ID NO: 968731 - RNA, 21 nt, Human
ggagaaucccuugaacccagg

SEQ ID NO: 968732 - RNA, 22 nt, Human
ggagauuacagugagccgagau

SEQ ID NO: 968733 - RNA, 21 nt, Human
ggaggcggagauuacagugag

SEQ ID NO: 968734 - RNA, 21 nt, Human
ggcggaucacgaggucaggag

SEQ ID NO: 968735 - RNA, 22 nt, Human
uaacauggugaaaccccgccuc

SEQ ID NO: 968736 - RNA, 24 nt, Human
uaacauggugaaaccccgccucua

SEQ ID NO: 968737 - RNA, 24 nt, Human
uaaguaauacaaagaaaguaagga

SEQ ID NO: 968738 - RNA, 20 nt, Human
ucaaaaaaaaaaaaaaaaaa

SEQ ID NO: 968739 - RNA, 21 nt, Human
ucaaaaaaaaaaaaaaaaaaa

SEQ ID NO: 968740 - RNA, 24 nt, Human
ucacgaggucaggagauggagacc

SEQ ID NO: 968741 - RNA, 23 nt, Human
uccacagauggggcaauuaagga

SEQ ID NO: 968742 - RNA, 23 nt, Human
uccagccugggcgaaagagcgag

SEQ ID NO: 968743 - RNA, 24 nt, Human
uccagccugggcgaaagagcgaga

SEQ ID NO: 968744 - RNA, 23 nt, Human
uccgucucaaaaaaaaaaaaaaa

SEQ ID NO: 968745 - RNA, 24 nt, Human
ucuggccgcgcccaguggcucaug

SEQ ID NO: 968746 - RNA, 26 nt, Human
ugacugaauuaccauggcguaauuga

SEQ ID NO: 968747 - RNA, 22 nt, Human
ugagccgagauugcgccacugc

SEQ ID NO: 968748 - RNA, 19 nt, Human
ugaggcaggagaaucccuu

SEQ ID NO: 968749 - RNA, 24 nt, Human
ugaggcaggagaaucccuugaacc

SEQ ID NO: 968750 - RNA, 25 nt, Human
ugaggcaggagaaucccuugaaccc

SEQ ID NO: 968751 - RNA, 18 nt, Human
ugccuguaaucccagcac

SEQ ID NO: 968752 - RNA, 23 nt, Human
ugccuguagucccagcuacuugg

SEQ ID NO: 968753 - RNA, 24 nt, Human
ugccuguagucccagcuacuuggg

SEQ ID NO: 968754 - RNA, 19 nt, Human
ugcugcauugugaaaacaa

SEQ ID NO: 968755 - RNA, 24 nt, Human
uggccgcgcccaguggcucaugcc

SEQ ID NO: 968756 - RNA, 24 nt, Human
uggcucaugccuguaaucccagca

SEQ ID NO: 968757 - RNA, 18 nt, Human
ugggaggcugaggcagga

SEQ ID NO: 968758 - RNA, 19 nt, Human
ugggaggcugaggcaggag

SEQ ID NO: 968759 - RNA, 18 nt, Human
ugggugugguggcgugug

SEQ ID NO: 968760 - RNA, 24 nt, Human
ugguggcgugugccuguaguccca

SEQ ID NO: 968761 - RNA, 18 nt, Human
uguguuucuuucaagcuu

SEQ ID NO: 968762 - RNA, 25 nt, Human
uuaaauacuaacaauacagguugcu

SEQ ID NO: 968763 - RNA, 22 nt, Human
uuacagugagccgagauugcgc

SEQ ID NO: 968764 - RNA, 19 nt, Human
uuagcugggugugguggcg

SEQ ID NO: 968765 - RNA, 20 nt, Human
uuagcugggugugguggcgu

SEQ ID NO: 968766 - RNA, 24 nt, Human
uuagcugggugugguggcgugugc

SEQ ID NO: 968767 - RNA, 23 nt, Human
uugcgccacugcacuccagccug

SEQ ID NO: 968768 - RNA, 21 nt, Human
aggcucagagguggucaacaa

SEQ ID NO: 968769 - RNA, 22 nt, Human
ccagcagggaagugcucuuuuc

SEQ ID NO: 968770 - RNA, 22 nt, Human
ccaggaccaagggcaaugcagc

SEQ ID NO: 968771 - RNA, 20 nt, Human
cccccgagcgcggcguccug

SEQ ID NO: 968772 - RNA, 22 nt, Human
cggcccgggccggucgcgacga

SEQ ID NO: 968773 - RNA, 21 nt, Human
cuuggccucugccccagcagg

SEQ ID NO: 968774 - RNA, 19 nt, Human
gcugccgacgcugccacgg

SEQ ID NO: 968775 - RNA, 20 nt, Human
gcugcugccuguguucccca

SEQ ID NO: 968776 - RNA, 19 nt, Human
ggcagagaggugauggggc

SEQ ID NO: 968777 - RNA, 19 nt, Human
ggccagggcucuggcuugg

SEQ ID NO: 968778 - RNA, 23 nt, Human
ggccagggcucuggcuuggccuc

SEQ ID NO: 968779 - RNA, 18 nt, Human
gggcagagaggugauggg

SEQ ID NO: 968780 - RNA, 23 nt, Human
gggcucuggcuuggccucugccc

SEQ ID NO: 968781 - RNA, 20 nt, Human
ggggcaggcaggcccaggac

SEQ ID NO: 968782 - RNA, 18 nt, Human
guccugcggcccgggccg

SEQ ID NO: 968783 - RNA, 18 nt, Human
ucagagguggucaacaau

SEQ ID NO: 968784 - RNA, 26 nt, Human
uccagacucaagcagggcagagaggu

SEQ ID NO: 968785 - RNA, 19 nt, Human
ugauggggccagggcucug

SEQ ID NO: 968786 - RNA, 24 nt, Human
ugcagcuuccaggcagggaggucc

SEQ ID NO: 968787 - RNA, 21 nt, Human
uggcggagagguggcucagcu

SEQ ID NO: 968788 - RNA, 22 nt, Human
uggcuuggccucugccccagca

SEQ ID NO: 968789 - RNA, 21 nt, Human
uucacugccaauguggcugcu

SEQ ID NO: 968790 - RNA, 21 nt, Human
uuuuucaaggcucagaggugg

SEQ ID NO: 968791 - RNA, 24 nt, Human
aaaaaaaaaaagcuuaaaacaaaa

SEQ ID NO: 968792 - RNA, 26 nt, Human
aaaaaaaaagcuuaaaacaaaacaaa

SEQ ID NO: 968793 - RNA, 24 nt, Human
aaaaaagaaaaucauuuaucccac

SEQ ID NO: 968794 - RNA, 26 nt, Human
aaaaacaagcaaaaaaaaaaagcuua

SEQ ID NO: 968795 - RNA, 18 nt, Human
aaacaaaacaaaacaaaa

SEQ ID NO: 968796 - RNA, 22 nt, Human
aaacaaaacaaaacaaaacaaa

SEQ ID NO: 968797 - RNA, 26 nt, Human
aaacaaaacaaaacaaaagcgaagcc

SEQ ID NO: 968798 - RNA, 20 nt, Human
aagcaaaaaaaaaaagcuua

SEQ ID NO: 968799 - RNA, 23 nt, Human
aaucuguagucccagccacuugg

SEQ ID NO: 968800 - RNA, 21 nt, Human
acaaaacaaaacaaaacaaaa

SEQ ID NO: 968801 - RNA, 18 nt, Human
acaaaacaaaacaaaagc

SEQ ID NO: 968802 - RNA, 20 nt, Human
acaaaacaaaacaaaagcga

SEQ ID NO: 968803 - RNA, 25 nt, Human
acaagcaaaaaaaaaaagcuuaaaa

SEQ ID NO: 968804 - RNA, 26 nt, Human
acagagcaagacccugucaaguuaga

SEQ ID NO: 968805 - RNA, 21 nt, Human
accacuuugccaguucauguc

SEQ ID NO: 968806 - RNA, 21 nt, Human
accccaucccucuccagccaa

SEQ ID NO: 968807 - RNA, 22 nt, Human
acugcacucuugccugaaugac

SEQ ID NO: 968808 - RNA, 24 nt, Human
acugcacucuugccugaaugacag

SEQ ID NO: 968809 - RNA, 26 nt, Human
acugcacucuugccugaaugacagag

SEQ ID NO: 968810 - RNA, 19 nt, Human
agaaagaaaagaaaaaaag

SEQ ID NO: 968811 - RNA, 18 nt, Human
agacaagaccauaggaag

SEQ ID NO: 968812 - RNA, 22 nt, Human
aggugggaggauugcuugaguu

SEQ ID NO: 968813 - RNA, 24 nt, Human
aucacacuacugcacucuugccug

SEQ ID NO: 968814 - RNA, 22 nt, Human
caaaacaaaacaaaacaaaagc

SEQ ID NO: 968815 - RNA, 18 nt, Human
caaaacaaaacaaaagcg

SEQ ID NO: 968816 - RNA, 21 nt, Human
caccccaucccucuccagcca

SEQ ID NO: 968817 - RNA, 23 nt, Human
cacucuugccugaaugacagagc

SEQ ID NO: 968818 - RNA, 22 nt, Human
cacuuugccaguucaugucacu

SEQ ID NO: 968819 - RNA, 18 nt, Human
cccaucccucuccagcca

SEQ ID NO: 968820 - RNA, 20 nt, Human
ccucugccuccuuguguccc

SEQ ID NO: 968821 - RNA, 27 nt, Human
ccucugccuccuuguguccccguuggg

SEQ ID NO: 968822 - RNA, 18 nt, Human
cuacugcacucuugccug

SEQ ID NO: 968823 - RNA, 21 nt, Human
cuacugcacucuugccugaau

SEQ ID NO: 968824 - RNA, 22 nt, Human
cuccucugccuccuuguguccc

SEQ ID NO: 968825 - RNA, 25 nt, Human
cucuucacauacacauucccuuuaa

SEQ ID NO: 968826 - RNA, 21 nt, Human
cuguagucccagccacuuggg

SEQ ID NO: 968827 - RNA, 18 nt, Human
gaaccaaagagucuuucu

SEQ ID NO: 968828 - RNA, 21 nt, Human
gaggugggaggauugcuugag

SEQ ID NO: 968829 - RNA, 20 nt, Human
gcccaccccaucccucucca

SEQ ID NO: 968830 - RNA, 23 nt, Human
gcggcaguaagaagugaucacac

SEQ ID NO: 968831 - RNA, 23 nt, Human
ggcugaggugggaggauugcuug

SEQ ID NO: 968832 - RNA, 20 nt, Human
ggcuggaagcuugaggcggc

SEQ ID NO: 968833 - RNA, 24 nt, Human
uaaaacaaaacaaaacaaaacaaa

SEQ ID NO: 968834 - RNA, 24 nt, Human
uaaaacaaaacaaaacaaaacaaa

SEQ ID NO: 968835 - RNA, 19 nt, Human
uaagaagugaucacacuac

SEQ ID NO: 968836 - RNA, 18 nt, Human
uaggaagaaagaaaagaa

SEQ ID NO: 968837 - RNA, 19 nt, Human
uaggaagaaagaaaagaaa

SEQ ID NO: 968838 - RNA, 21 nt, Human
ucaggagaguaguuuauucag

SEQ ID NO: 968839 - RNA, 18 nt, Human
ucccagccacuugggugg

SEQ ID NO: 968840 - RNA, 20 nt, Human
uccccguugggcccacccca

SEQ ID NO: 968841 - RNA, 25 nt, Human
ucuguagucccagccacuugggugg

SEQ ID NO: 968842 - RNA, 20 nt, Human
ugaaagcuuuuaaaaccacu

SEQ ID NO: 968843 - RNA, 19 nt, Human
ugaaaguggaguagagggg

SEQ ID NO: 968844 - RNA, 25 nt, Human
ugaaugacagagcaagacccuguca

SEQ ID NO: 968845 - RNA, 20 nt, Human
ugaggugggaggauugcuug

SEQ ID NO: 968846 - RNA, 22 nt, Human
ugaggugggaggauugcuugag

SEQ ID NO: 968847 - RNA, 23 nt, Human
ugaggugggaggauugcuugagu

SEQ ID NO: 968848 - RNA, 30 nt, Human
ugaggugggaggauugcuugaguugaggcc

SEQ ID NO: 968849 - RNA, 18 nt, Human
uggguggcugagguggga

SEQ ID NO: 968850 - RNA, 22 nt, Human
uggguggcugaggugggaggau

SEQ ID NO: 968851 - RNA, 21 nt, Human
uucagacaagaccauaggaag

SEQ ID NO: 968852 - RNA, 21 nt, Human
uugaaaguggaguagaggggu

SEQ ID NO: 968853 - RNA, 19 nt, Human
uugcuugaguugaggcugg

SEQ ID NO: 968854 - RNA, 25 nt, Human
uuggguggcugaggugggaggauug

SEQ ID NO: 968855 - RNA, 19 nt, Human
accaggcucucugagacaa

SEQ ID NO: 968856 - RNA, 21 nt, Human
accccacccagagcacccuga

SEQ ID NO: 968857 - RNA, 23 nt, Human
agacguggaccccgggagugacc

SEQ ID NO: 968858 - RNA, 21 nt, Human
agcugagcuuuaucaccaguu

SEQ ID NO: 968859 - RNA, 21 nt, Human
aggacgaggggaggacgacgg

SEQ ID NO: 968860 - RNA, 22 nt, Human
agggaggcaguucccagacacc

SEQ ID NO: 968861 - RNA, 20 nt, Human
cacuggcgauggggcagggc

SEQ ID NO: 968862 - RNA, 18 nt, Human
ccaccccacccagagcac

SEQ ID NO: 968863 - RNA, 24 nt, Human
ccaccccagaccagccucccagcg

SEQ ID NO: 968864 - RNA, 20 nt, Human
ccaggcucucugagacaaga

SEQ ID NO: 968865 - RNA, 21 nt, Human
ccucugcaggcucccucugaa

SEQ ID NO: 968866 - RNA, 20 nt, Human
cuggcgauggggcagggccu

SEQ ID NO: 968867 - RNA, 19 nt, Human
gcacagaugagggaggcag

SEQ ID NO: 968868 - RNA, 21 nt, Human
gcagggccuggcggaacuugg

SEQ ID NO: 968869 - RNA, 22 nt, Human
gggcagggccuggcggaacuug

SEQ ID NO: 968870 - RNA, 25 nt, Human
gggcagggccuggcggaacuugggg

SEQ ID NO: 968871 - RNA, 24 nt, Human
gugaccaccccagaccagccuccc

SEQ ID NO: 968872 - RNA, 26 nt, Human
ucacugggccaccccacccagagcac

SEQ ID NO: 968873 - RNA, 24 nt, Human
ucccaagucuccuucuccugcaaa

SEQ ID NO: 968874 - RNA, 18 nt, Human
ucugcaggcucccucuga

SEQ ID NO: 968875 - RNA, 18 nt, Human
ucugcaggcucccucuga

SEQ ID NO: 968876 - RNA, 22 nt, Human
ugaccaccccagaccagccucc

SEQ ID NO: 968877 - RNA, 23 nt, Human
ugccucccaagucuccuucuccu

SEQ ID NO: 968878 - RNA, 23 nt, Human
uggagcccagacguggaccccgg

SEQ ID NO: 968879 - RNA, 18 nt, Human
uuaucaccaguuuccugu

SEQ ID NO: 968880 - RNA, 18 nt, Human
uugcuccauagcagcuuc

SEQ ID NO: 968881 - RNA, 20 nt, Human
uuuuuuuuuuuuuuuuuugg

SEQ ID NO: 968882 - RNA, 24 nt, Human
uuuuuuuuuuuuuuuuuugucguu

SEQ ID NO: 968883 - RNA, 22 nt, Human
acaggaaaaaaaaaucuuuuca

SEQ ID NO: 968884 - RNA, 22 nt, Human
cacaggaaaaaaaaaucuuuuc

SEQ ID NO: 968885 - RNA, 23 nt, Human
cacccuuggccuugugguggcuc

SEQ ID NO: 968886 - RNA, 22 nt, Human
cacgcccugaauguugggcagg

SEQ ID NO: 968887 - RNA, 22 nt, Human
cagcacggccgccagguacacc

SEQ ID NO: 968888 - RNA, 18 nt, Human
caggaucucggcggucag

SEQ ID NO: 968889 - RNA, 21 nt, Human
cauuguguuucuccucuccua

SEQ ID NO: 968890 - RNA, 18 nt, Human
ccuugugguggcucuugg

SEQ ID NO: 968891 - RNA, 27 nt, Human
cgccagguacaccugcgcucuggcccc

SEQ ID NO: 968892 - RNA, 22 nt, Human
cucggcggucaggugcuccagc

SEQ ID NO: 968893 - RNA, 21 nt, Human
cucucaaaaaaaagucugaau

SEQ ID NO: 968894 - RNA, 20 nt, Human
cugugggacucaacucuguc

SEQ ID NO: 968895 - RNA, 25 nt, Human
cuugugguggcucuuggucuucugg

SEQ ID NO: 968896 - RNA, 22 nt, Human
gagccacaggaaaaaaaaaucu

SEQ ID NO: 968897 - RNA, 18 nt, Human
gccacaggaaaaaaaaau

SEQ ID NO: 968898 - RNA, 18 nt, Human
gcgaauggccagcuacag

SEQ ID NO: 968899 - RNA, 24 nt, Human
gcugugggacucaacucugucuug

SEQ ID NO: 968900 - RNA, 19 nt, Human
gugggacucaacucugucu

SEQ ID NO: 968901 - RNA, 24 nt, Human
ucuggggcagaagcacgcccugaa

SEQ ID NO: 968902 - RNA, 21 nt, Human
ucuugugcguucuugcucucc

SEQ ID NO: 968903 - RNA, 23 nt, Human
uugguggccauuguguuucuccu

SEQ ID NO: 968904 - RNA, 25 nt, Human
uuuuauucaucuuacauuucucuca

SEQ ID NO: 968905 - RNA, 19 nt, Human
aaaaugccucuuccccacc

SEQ ID NO: 968906 - RNA, 28 nt, Human
aaaaugccucuuccccaccuaaaauucu

SEQ ID NO: 968907 - RNA, 21 nt, Human
aaauaucucacauuaugcaau

SEQ ID NO: 968908 - RNA, 19 nt, Human
aacacaacaaaagcuguga

SEQ ID NO: 968909 - RNA, 18 nt, Human
aacauuagguguaugcua

SEQ ID NO: 968910 - RNA, 22 nt, Human
aagagcgcaagcagugccacgg

SEQ ID NO: 968911 - RNA, 22 nt, Human
aagcugugaucacauuacauca

SEQ ID NO: 968912 - RNA, 24 nt, Human
aaggguauuuuuuuuuucuuaagg

SEQ ID NO: 968913 - RNA, 25 nt, Human
aaucacaaacacuaaaaauaaaucc

SEQ ID NO: 968914 - RNA, 25 nt, Human
aauuaccuacuuacaauaucucuau

SEQ ID NO: 968915 - RNA, 19 nt, Human
acaagcaaaaugccucuuc

SEQ ID NO: 968916 - RNA, 23 nt, Human
acaagcaaaaugccucuucccca

SEQ ID NO: 968917 - RNA, 24 nt, Human
acaguguaacaaauauauaagugc

SEQ ID NO: 968918 - RNA, 19 nt, Human
accaauaauauuuugaguu

SEQ ID NO: 968919 - RNA, 19 nt, Human
acggguuuccuaauaggag

SEQ ID NO: 968920 - RNA, 21 nt, Human
agaaauugcaauucccuaacc

SEQ ID NO: 968921 - RNA, 21 nt, Human
agaauagacaaaauacaccaa

SEQ ID NO: 968922 - RNA, 23 nt, Human
agagaccauuuuaauauaaugua

SEQ ID NO: 968923 - RNA, 19 nt, Human
agcagaaugguaguggcuc

SEQ ID NO: 968924 - RNA, 23 nt, Human
aggaagaaagauaucuaaaccau

SEQ ID NO: 968925 - RNA, 24 nt, Human
aggggaguauccgguggcaaagag

SEQ ID NO: 968926 - RNA, 18 nt, Human
aguccuuuuccuggaagu

SEQ ID NO: 968927 - RNA, 20 nt, Human
caacacaacaaaagcuguga

SEQ ID NO: 968928 - RNA, 20 nt, Human
caauacaguguaacaaauau

SEQ ID NO: 968929 - RNA, 22 nt, Human
cacaaacacuaaaaauaaaucc

SEQ ID NO: 968930 - RNA, 18 nt, Human
cacaaugaauuuaaucac

SEQ ID NO: 968931 - RNA, 23 nt, Human
cacaaugaauuuaaucacaaaca

SEQ ID NO: 968932 - RNA, 24 nt, Human
cagaauagacaaaauacaccaaua

SEQ ID NO: 968933 - RNA, 21 nt, Human
caguacauuaaacagaucaaa

SEQ ID NO: 968934 - RNA, 22 nt, Human
caugcaacccacggguuuccua

SEQ ID NO: 968935 - RNA, 19 nt, Human
ccaaacagcuacuacaagc

SEQ ID NO: 968936 - RNA, 24 nt, Human
cuaacaaaauaucucacauuaugc

SEQ ID NO: 968937 - RNA, 24 nt, Human
gagagagaccauuuuaauauaaug

SEQ ID NO: 968938 - RNA, 18 nt, Human
gaggcacaaagcaaaggg

SEQ ID NO: 968939 - RNA, 18 nt, Human
ggagagugagaaugagaa

SEQ ID NO: 968940 - RNA, 21 nt, Human
ggaugagauguugugcuuuag

SEQ ID NO: 968941 - RNA, 21 nt, Human
ggccuccagucacuagcacag

SEQ ID NO: 968942 - RNA, 18 nt, Human
uaacaaauauauaagugc

SEQ ID NO: 968943 - RNA, 21 nt, Human
uaaguguuugugcccaagcau

SEQ ID NO: 968944 - RNA, 18 nt, Human
uacaagcaaaaugaaggu

SEQ ID NO: 968945 - RNA, 20 nt, Human
uaggaaaggcgaggauugcg

SEQ ID NO: 968946 - RNA, 21 nt, Human
uagguguaugcuauuuuuggu

SEQ ID NO: 968947 - RNA, 21 nt, Human
uauauuaagaaaugacaagca

SEQ ID NO: 968948 - RNA, 19 nt, Human
uauccagaauagacaaaau

SEQ ID NO: 968949 - RNA, 25 nt, Human
uaucucuuuuuuuuuucuaaugcaa

SEQ ID NO: 968950 - RNA, 21 nt, Human
uauuauguuucuguguaugga

SEQ ID NO: 968951 - RNA, 23 nt, Human
ucacaaacacuaaaaauaaaucc

SEQ ID NO: 968952 - RNA, 19 nt, Human
ucagcagaaugguaguggc

SEQ ID NO: 968953 - RNA, 27 nt, Human
ucagcagaaugguaguggcucgccucc

SEQ ID NO: 968954 - RNA, 20 nt, Human
ucaguacaacuuuguagcug

SEQ ID NO: 968955 - RNA, 25 nt, Human
ucaguucuugccagauuuaaauagu

SEQ ID NO: 968956 - RNA, 21 nt, Human
uccaaccacccaaacagcuac

SEQ ID NO: 968957 - RNA, 20 nt, Human
uccccaccuaaaauucuaug

SEQ ID NO: 968958 - RNA, 19 nt, Human
uccuggaagucggucagcu

SEQ ID NO: 968959 - RNA, 25 nt, Human
ucuuuuuuuuuucuaaugcaaguua

SEQ ID NO: 968960 - RNA, 22 nt, Human
ugaaaaacaauguaaauucccg

SEQ ID NO: 968961 - RNA, 20 nt, Human
ugaauuuaaucacaaacacu

SEQ ID NO: 968962 - RNA, 20 nt, Human
ugagagaagggagggagagu

SEQ ID NO: 968963 - RNA, 23 nt, Human
ugagagugagagaagggagggag

SEQ ID NO: 968964 - RNA, 21 nt, Human
ugauaugcuugcaaguuuaca

SEQ ID NO: 968965 - RNA, 23 nt, Human
uggaaggggaguauccgguggca

SEQ ID NO: 968966 - RNA, 25 nt, Human
uggcaaagagcgcaagcagugccac

SEQ ID NO: 968967 - RNA, 18 nt, Human
uguaugcuauuuuugguu

SEQ ID NO: 968968 - RNA, 20 nt, Human
ugucuuaaucucuuaaagua

SEQ ID NO: 968969 - RNA, 18 nt, Human
uguuuuguuuucauuuuu

SEQ ID NO: 968970 - RNA, 24 nt, Human
uuaaaguaguugcgggcuuuuccu

SEQ ID NO: 968971 - RNA, 21 nt, Human
uuagguguaugcuauuuuugg

SEQ ID NO: 968972 - RNA, 19 nt, Human
uucauauuacauauagcuc

SEQ ID NO: 968973 - RNA, 19 nt, Human
uucauuuuuacagcaagac

SEQ ID NO: 968974 - RNA, 21 nt, Human
uucuguguauggacauguaua

SEQ ID NO: 968975 - RNA, 19 nt, Human
uugcgggcuuuuccuucuu

SEQ ID NO: 968976 - RNA, 21 nt, Human
uuucauuuuuacagcaagacu

SEQ ID NO: 968977 - RNA, 23 nt, Human
uuuuaugcauugcacuuauugcu

SEQ ID NO: 968978 - RNA, 21 nt, Human
uuuuuuuuuuuaaaaaaggau

SEQ ID NO: 968979 - RNA, 24 nt, Human
aaaaugcugggauuacagguguga

SEQ ID NO: 968980 - RNA, 23 nt, Human
aaauacacaagaggaucugaagc

SEQ ID NO: 968981 - RNA, 25 nt, Human
aaaugaccuuguguauucugcaaau

SEQ ID NO: 968982 - RNA, 26 nt, Human
aaaugcugggauuacaggugugagcc

SEQ ID NO: 968983 - RNA, 19 nt, Human
aacauaugccacccaucuc

SEQ ID NO: 968984 - RNA, 19 nt, Human
aacauugugaaaccccauc

SEQ ID NO: 968985 - RNA, 20 nt, Human
aacauugugaaaccccaucu

SEQ ID NO: 968986 - RNA, 21 nt, Human
aacauugugaaaccccaucuc

SEQ ID NO: 968987 - RNA, 27 nt, Human
aacccauccucccaccauggccuccca

SEQ ID NO: 968988 - RNA, 20 nt, Human
aagagagaguggggaggugc

SEQ ID NO: 968989 - RNA, 23 nt, Human
aagaucacgccauugcacuccag

SEQ ID NO: 968990 - RNA, 26 nt, Human
aagcaggagaaagagagaggggaccc

SEQ ID NO: 968991 - RNA, 24 nt, Human
aaguagcugagacuacaggcacac

SEQ ID NO: 968992 - RNA, 18 nt, Human
acacagauccaaaccaua

SEQ ID NO: 968993 - RNA, 21 nt, Human
acacagauccaaaccauauca

SEQ ID NO: 968994 - RNA, 22 nt, Human
acagaucaccugaagucaggag

SEQ ID NO: 968995 - RNA, 18 nt, Human
accacgcugcccagccaa

SEQ ID NO: 968996 - RNA, 22 nt, Human
acucacugucaugagaccagca

SEQ ID NO: 968997 - RNA, 18 nt, Human
acuccagccucugacucc

SEQ ID NO: 968998 - RNA, 21 nt, Human
acugcaccuggcccauagaug

SEQ ID NO: 968999 - RNA, 24 nt, Human
acuguguugcccaggcuggucuug

SEQ ID NO: 969000 - RNA, 25 nt, Human
acuguguugcccaggcuggucuuga

SEQ ID NO: 969001 - RNA, 23 nt, Human
acuuaauagaagaggaaagaaaa

SEQ ID NO: 969002 - RNA, 19 nt, Human
agaacucaucuaaaacuga

SEQ ID NO: 969003 - RNA, 18 nt, Human
agaagcccuuagaaaugg

SEQ ID NO: 969004 - RNA, 26 nt, Human
agacagaucaccugaagucaggaguu

SEQ ID NO: 969005 - RNA, 19 nt, Human
agaccagcacugaggggac

SEQ ID NO: 969006 - RNA, 25 nt, Human
agaucaccugaagucaggaguuuga

SEQ ID NO: 969007 - RNA, 23 nt, Human
agccaggcgugguggugugcacc

SEQ ID NO: 969008 - RNA, 24 nt, Human
agccuggccaacauugugaaaccc

SEQ ID NO: 969009 - RNA, 19 nt, Human
aggaaagaaaaugguucau

SEQ ID NO: 969010 - RNA, 20 nt, Human
aggaguuugagaccagccug

SEQ ID NO: 969011 - RNA, 20 nt, Human
aggcacacaccacgcugccc

SEQ ID NO: 969012 - RNA, 26 nt, Human
aggcagacagaucaccugaagucagg

SEQ ID NO: 969013 - RNA, 24 nt, Human
aggcaugguggcucacgccuguaa

SEQ ID NO: 969014 - RNA, 24 nt, Human
aggcugagguaggagaauggcuug

SEQ ID NO: 969015 - RNA, 25 nt, Human
agggagacuuucaacagcaaaacuc

SEQ ID NO: 969016 - RNA, 20 nt, Human
agggaguccucagggaauuu

SEQ ID NO: 969017 - RNA, 18 nt, Human
agguaggagaauggcuug

SEQ ID NO: 969018 - RNA, 24 nt, Human
aggugaagucugcagugagccaag

SEQ ID NO: 969019 - RNA, 23 nt, Human
agucgccucccagccggccccac

SEQ ID NO: 969020 - RNA, 23 nt, Human
agugauaaaaaccagaauuuucc

SEQ ID NO: 969021 - RNA, 18 nt, Human
auagagaacucaucuaaa

SEQ ID NO: 969022 - RNA, 21 nt, Human
auaugccacccaucucaaaau

SEQ ID NO: 969023 - RNA, 20 nt, Human
aucaacuccaggauggcugg

SEQ ID NO: 969024 - RNA, 23 nt, Human
aucacgccauugcacuccagccu

SEQ ID NO: 969025 - RNA, 24 nt, Human
auccaaaccauaucaaaauccaau

SEQ ID NO: 969026 - RNA, 18 nt, Human
auggccucccaaguagcu

SEQ ID NO: 969027 - RNA, 20 nt, Human
auggugguggagagaaggcu

SEQ ID NO: 969028 - RNA, 21 nt, Human
auugcacuccagccucugacu

SEQ ID NO: 969029 - RNA, 22 nt, Human
caaaacucccaccuuggccucc

SEQ ID NO: 969030 - RNA, 26 nt, Human
caaaacucccaccuuggccucccaaa

SEQ ID NO: 969031 - RNA, 24 nt, Human
caaaaugcugggauuacaggugug

SEQ ID NO: 969032 - RNA, 31 nt, Human
caacccauccucccaccauggccucccaagg

SEQ ID NO: 969033 - RNA, 26 nt, Human
caauugcuaccauuuaaaaaucaggu

SEQ ID NO: 969034 - RNA, 24 nt, Human
caauuuuuuaauuuuuuaguagag

SEQ ID NO: 969035 - RNA, 22 nt, Human
cacagauccaaaccauaucaaa

SEQ ID NO: 969036 - RNA, 20 nt, Human
caccacgcugcccagccaau

SEQ ID NO: 969037 - RNA, 23 nt, Human
caccugaagucaggaguuugaga

SEQ ID NO: 969038 - RNA, 24 nt, Human
cacgccuguaaucucagcucuuug

SEQ ID NO: 969039 - RNA, 22 nt, Human
cacgcugcccagccaauuuuuu

SEQ ID NO: 969040 - RNA, 19 nt, Human
cacuguguugcccaggcug

SEQ ID NO: 969041 - RNA, 21 nt, Human
cacuguguugcccaggcuggu

SEQ ID NO: 969042 - RNA, 24 nt, Human
cacuguguugcccaggcuggucuu

SEQ ID NO: 969043 - RNA, 24 nt, Human
cacuucagccucccaaaaugcugg

SEQ ID NO: 969044 - RNA, 21 nt, Human
cagaaggcaaagugggagcag

SEQ ID NO: 969045 - RNA, 24 nt, Human
cagacagaucaccugaagucagga

SEQ ID NO: 969046 - RNA, 21 nt, Human
cagaucaccugaagucaggag

SEQ ID NO: 969047 - RNA, 24 nt, Human
cagcacugaggggacggugccaaa

SEQ ID NO: 969048 - RNA, 22 nt, Human
cagccucugacuccugugcuca

SEQ ID NO: 969049 - RNA, 24 nt, Human
cagcuaccugggaggcugagguag

SEQ ID NO: 969050 - RNA, 24 nt, Human
cagcucuuugggaggccgaggcag

SEQ ID NO: 969051 - RNA, 19 nt, Human
cagggucuugcuauauugg

SEQ ID NO: 969052 - RNA, 23 nt, Human
caggugucacuguguugcccagg

SEQ ID NO: 969053 - RNA, 22 nt, Human
cauaugccacccaucucaaaau

SEQ ID NO: 969054 - RNA, 19 nt, Human
cauugcacuccagccucug

SEQ ID NO: 969055 - RNA, 21 nt, Human
cauugcacuccagccucugac

SEQ ID NO: 969056 - RNA, 21 nt, Human
cauugcacuccagccucugac

SEQ ID NO: 969057 - RNA, 21 nt, Human
ccaaaaugcugggauuacagg

SEQ ID NO: 969058 - RNA, 21 nt, Human
ccaaaaugcugggauuacagg

SEQ ID NO: 969059 - RNA, 24 nt, Human
ccaaaaugcugggauuacaggugu

SEQ ID NO: 969060 - RNA, 20 nt, Human
ccacugcaccuggcccauag

SEQ ID NO: 969061 - RNA, 21 nt, Human
ccacugcaccuggcccauaga

SEQ ID NO: 969062 - RNA, 20 nt, Human
ccagccggccccaccucuaa

SEQ ID NO: 969063 - RNA, 18 nt, Human
ccauugcacuccagccuc

SEQ ID NO: 969064 - RNA, 20 nt, Human
ccauugcacuccagccucug

SEQ ID NO: 969065 - RNA, 22 nt, Human
ccauugcacuccagccucugac

SEQ ID NO: 969066 - RNA, 24 nt, Human
cccaaguagcugagacuacaggca

SEQ ID NO: 969067 - RNA, 21 nt, Human
cccauagucccagcuaccugg

SEQ ID NO: 969068 - RNA, 21 nt, Human
cccaucuccacuaaaaauaca

SEQ ID NO: 969069 - RNA, 24 nt, Human
ccgcacgaccacgcacccgcggcu

SEQ ID NO: 969070 - RNA, 23 nt, Human
ccucugacuccugugcucaaccc

SEQ ID NO: 969071 - RNA, 27 nt, Human
ccucuggccucaagcaaaacucccacc

SEQ ID NO: 969072 - RNA, 22 nt, Human
ccugaagucaggaguuugagac

SEQ ID NO: 969073 - RNA, 23 nt, Human
ccugaagucaggaguuugagacc

SEQ ID NO: 969074 - RNA, 23 nt, Human
ccuggccaacauugugaaacccc

SEQ ID NO: 969075 - RNA, 24 nt, Human
ccuggccaacauugugaaacccca

SEQ ID NO: 969076 - RNA, 20 nt, Human
cgaggcagacagaucaccug

SEQ ID NO: 969077 - RNA, 26 nt, Human
cgaggcagacagaucaccugaaguca

SEQ ID NO: 969078 - RNA, 23 nt, Human
cgccauugcacuccagccucuga

SEQ ID NO: 969079 - RNA, 24 nt, Human
cgccuguaaucucagcucuuuggg

SEQ ID NO: 969080 - RNA, 18 nt, Human
cuaccagaucucacgaua

SEQ ID NO: 969081 - RNA, 23 nt, Human
cucacgauaacucacugucauga

SEQ ID NO: 969082 - RNA, 20 nt, Human
cucacgccuguaaucucagc

SEQ ID NO: 969083 - RNA, 24 nt, Human
cucacgccuguaaucucagcucuu

SEQ ID NO: 969084 - RNA, 21 nt, Human
cucccaaguagcugagacuac

SEQ ID NO: 969085 - RNA, 20 nt, Human
cucccaccauggccucccaa

SEQ ID NO: 969086 - RNA, 23 nt, Human
cucccaccuuggccucccaaauu

SEQ ID NO: 969087 - RNA, 20 nt, Human
cucggauuacaggagugagc

SEQ ID NO: 969088 - RNA, 23 nt, Human
cuggccaacauugugaaacccca

SEQ ID NO: 969089 - RNA, 22 nt, Human
cuuuuaaacuaccagaucucac

SEQ ID NO: 969090 - RNA, 18 nt, Human
gacuuucaacagcaaaac

SEQ ID NO: 969091 - RNA, 20 nt, Human
gagaaagagagaguggggag

SEQ ID NO: 969092 - RNA, 22 nt, Human
gagcaggcaucuucacguggcc

SEQ ID NO: 969093 - RNA, 22 nt, Human
gagccacagcuuccagccuuaa

SEQ ID NO: 969094 - RNA, 27 nt, Human
gaggcagacagaucaccugaagucagg

SEQ ID NO: 969095 - RNA, 24 nt, Human
gaucaccugaagucaggaguuuga

SEQ ID NO: 969096 - RNA, 18 nt, Human
gauuacaggagugagcca

SEQ ID NO: 969097 - RNA, 22 nt, Human
gauuacaggagugagccacugc

SEQ ID NO: 969098 - RNA, 23 nt, Human
gauuacaggagugagccacugca

SEQ ID NO: 969099 - RNA, 18 nt, Human
gauuacaggugugagcca

SEQ ID NO: 969100 - RNA, 24 nt, Human
gccaacauugugaaaccccaucuc

SEQ ID NO: 969101 - RNA, 22 nt, Human
gcucaacccauccucccaccau

SEQ ID NO: 969102 - RNA, 22 nt, Human
ggagaauggcuugaacucagga

SEQ ID NO: 969103 - RNA, 20 nt, Human
ggauuacaggagugagccac

SEQ ID NO: 969104 - RNA, 22 nt, Human
ggauuacaggagugagccacug

SEQ ID NO: 969105 - RNA, 19 nt, Human
ggucuugaaccucuggccu

SEQ ID NO: 969106 - RNA, 24 nt, Human
gguggcucacgccuguaaucucag

SEQ ID NO: 969107 - RNA, 24 nt, Human
gguggugugcacccauagucccag

SEQ ID NO: 969108 - RNA, 20 nt, Human
gugaauaucaacuccaggau

SEQ ID NO: 969109 - RNA, 23 nt, Human
gugccaaaccauucaugaaggcu

SEQ ID NO: 969110 - RNA, 21 nt, Human
uaaaaauacaaaaauuagcca

SEQ ID NO: 969111 - RNA, 22 nt, Human
uacaggagugagccacugcacc

SEQ ID NO: 969112 - RNA, 22 nt, Human
uacaggagugagccacugcacc

SEQ ID NO: 969113 - RNA, 23 nt, Human
uacaggagugagccacugcaccu

SEQ ID NO: 969114 - RNA, 23 nt, Human
uacaggagugagccacugcaccu

SEQ ID NO: 969115 - RNA, 21 nt, Human
uacaggugugagccacagcuu

SEQ ID NO: 969116 - RNA, 24 nt, Human
uacaggugugagccacagcuucca

SEQ ID NO: 969117 - RNA, 20 nt, Human
uagacacagggucuugcuau

SEQ ID NO: 969118 - RNA, 22 nt, Human
uagagaacucaucuaaaacuga

SEQ ID NO: 969119 - RNA, 24 nt, Human
uagagaacuguaacuuaaacagaa

SEQ ID NO: 969120 - RNA, 21 nt, Human
uauucugcaaauacacaagag

SEQ ID NO: 969121 - RNA, 24 nt, Human
ucaacagcaaaacucagagcacaa

SEQ ID NO: 969122 - RNA, 25 nt, Human
ucaacccauccucccaccauggccu

SEQ ID NO: 969123 - RNA, 23 nt, Human
ucaccugaagucaggaguuugag

SEQ ID NO: 969124 - RNA, 24 nt, Human
ucacgccauugcacuccagccucu

SEQ ID NO: 969125 - RNA, 18 nt, Human
ucacugccucucccaggc

SEQ ID NO: 969126 - RNA, 23 nt, Human
ucacugccucucccaggccacug

SEQ ID NO: 969127 - RNA, 24 nt, Human
ucacuucagccucccaaaaugcug

SEQ ID NO: 969128 - RNA, 23 nt, Human
ucccaaaaugcugggauuacagg

SEQ ID NO: 969129 - RNA, 24 nt, Human
ucccaaguagcugagacuacaggc

SEQ ID NO: 969130 - RNA, 23 nt, Human
ucccagccggccccaccucuaac

SEQ ID NO: 969131 - RNA, 22 nt, Human
ucggauuacaggagugagccac

SEQ ID NO: 969132 - RNA, 24 nt, Human
ucggauuacaggagugagccacug

SEQ ID NO: 969133 - RNA, 21 nt, Human
ucuauggugguggagagaagg

SEQ ID NO: 969134 - RNA, 29 nt, Human
ucucccaggccacugggaaaugaccuugu

SEQ ID NO: 969135 - RNA, 21 nt, Human
ucugcagugagccaagaucac

SEQ ID NO: 969136 - RNA, 21 nt, Human
ucuuagagaacuguaacuuaa

SEQ ID NO: 969137 - RNA, 19 nt, Human
ugaaaccccaucuccacua

SEQ ID NO: 969138 - RNA, 22 nt, Human
ugaaaccccaucuccacuaaaa

SEQ ID NO: 969139 - RNA, 21 nt, Human
ugaaagccacuguugcguuug

SEQ ID NO: 969140 - RNA, 23 nt, Human
ugacuccugugcucaacccaucc

SEQ ID NO: 969141 - RNA, 18 nt, Human
ugagaccagccuggccaa

SEQ ID NO: 969142 - RNA, 21 nt, Human
ugagaccagccuggccaacau

SEQ ID NO: 969143 - RNA, 21 nt, Human
ugagacuacaggcacacacca

SEQ ID NO: 969144 - RNA, 26 nt, Human
ugagacuacaggcacacaccacgcug

SEQ ID NO: 969145 - RNA, 21 nt, Human
ugagauuugguggggacacag

SEQ ID NO: 969146 - RNA, 21 nt, Human
ugccaaaccauucaugaaggc

SEQ ID NO: 969147 - RNA, 22 nt, Human
ugcccaggcuggucuugaaccu

SEQ ID NO: 969148 - RNA, 23 nt, Human
ugcccaggcuggucuugaaccuc

SEQ ID NO: 969149 - RNA, 23 nt, Human
ugccgcacgaccacgcacccgcg

SEQ ID NO: 969150 - RNA, 24 nt, Human
ugcuauauuggccaagauggucuc

SEQ ID NO: 969151 - RNA, 18 nt, Human
ugcucaacccauccuccc

SEQ ID NO: 969152 - RNA, 25 nt, Human
ugcugggauuacaggugugagccac

SEQ ID NO: 969153 - RNA, 19 nt, Human
uggcagaaggcaaaguggg

SEQ ID NO: 969154 - RNA, 20 nt, Human
uggcagaaggcaaaguggga

SEQ ID NO: 969155 - RNA, 21 nt, Human
uggcccauagaugcauuaaca

SEQ ID NO: 969156 - RNA, 20 nt, Human
uggccucaagcaaaacuccc

SEQ ID NO: 969157 - RNA, 21 nt, Human
uggccucaagcaaaacuccca

SEQ ID NO: 969158 - RNA, 21 nt, Human
uggcucacgccuguaaucuca

SEQ ID NO: 969159 - RNA, 22 nt, Human
uggcucacgccuguaaucucag

SEQ ID NO: 969160 - RNA, 24 nt, Human
ugggaggccgaggcagacagauca

SEQ ID NO: 969161 - RNA, 18 nt, Human
ugggaggcugagguagga

SEQ ID NO: 969162 - RNA, 22 nt, Human
ugggaggcugagguaggagaau

SEQ ID NO: 969163 - RNA, 18 nt, Human
ugggauuacaggugugag

SEQ ID NO: 969164 - RNA, 19 nt, Human
ugggauuacaggugugagc

SEQ ID NO: 969165 - RNA, 21 nt, Human
ugggauuacaggugugagcca

SEQ ID NO: 969166 - RNA, 22 nt, Human
ugggauuacaggugugagccac

SEQ ID NO: 969167 - RNA, 22 nt, Human
ugggauuacaggugugagccac

SEQ ID NO: 969168 - RNA, 22 nt, Human
ugggauuacaggugugagccac

SEQ ID NO: 969169 - RNA, 27 nt, Human
ugggauuacaggugugagccacagcuu

SEQ ID NO: 969170 - RNA, 25 nt, Human
uggucucauaccccuacccucaaau

SEQ ID NO: 969171 - RNA, 24 nt, Human
ugguggcucacgccuguaaucuca

SEQ ID NO: 969172 - RNA, 22 nt, Human
ugucacuguguugcccaggcug

SEQ ID NO: 969173 - RNA, 22 nt, Human
ugugacacaaaggucccaugug

SEQ ID NO: 969174 - RNA, 18 nt, Human
ugugguuuugaaaggucc

SEQ ID NO: 969175 - RNA, 23 nt, Human
ugugguuuugaaagguccauugg

SEQ ID NO: 969176 - RNA, 24 nt, Human
uguguugcccaggcuggucuugaa

SEQ ID NO: 969177 - RNA, 18 nt, Human
uguugcccaggcuggucu

SEQ ID NO: 969178 - RNA, 22 nt, Human
uguugcccaggcuggucuugaa

SEQ ID NO: 969179 - RNA, 24 nt, Human
uuacaggugugagccacagcuucc

SEQ ID NO: 969180 - RNA, 19 nt, Human
uuauuuagcacaauugcua

SEQ ID NO: 969181 - RNA, 20 nt, Human
uucaugaaggcuucacaccc

SEQ ID NO: 969182 - RNA, 19 nt, Human
uucucaugguuugguucca

SEQ ID NO: 969183 - RNA, 25 nt, Human
uugggaggccgaggcagacagauca

SEQ ID NO: 969184 - RNA, 22 nt, Human
uuguugugguuuugaaaggucc

SEQ ID NO: 969185 - RNA, 22 nt, Human
uuuacucauggcagaaggcaaa

SEQ ID NO: 969186 - RNA, 23 nt, Human
uuugaaagguccauuggaaucca

SEQ ID NO: 969187 - RNA, 24 nt, Human
uuuggccaggcaugguggcucacg

SEQ ID NO: 969188 - RNA, 26 nt, Human
aacacagaaaggaauagaaaaccuga

SEQ ID NO: 969189 - RNA, 19 nt, Human
acacguggcaggacaggag

SEQ ID NO: 969190 - RNA, 21 nt, Human
accagagcauccuggcugcac

SEQ ID NO: 969191 - RNA, 20 nt, Human
aggacccugccccuggaggc

SEQ ID NO: 969192 - RNA, 21 nt, Human
auccuggccccugccggcugc

SEQ ID NO: 969193 - RNA, 18 nt, Human
caaaagacacguggcagg

SEQ ID NO: 969194 - RNA, 21 nt, Human
cacagaaaggaauagaaaacc

SEQ ID NO: 969195 - RNA, 19 nt, Human
cacagcaccauuccacgca

SEQ ID NO: 969196 - RNA, 18 nt, Human
cacagcugcaggcugccc

SEQ ID NO: 969197 - RNA, 19 nt, Human
caccagggccccaucggca

SEQ ID NO: 969198 - RNA, 18 nt, Human
caccuccuucccggaguc

SEQ ID NO: 969199 - RNA, 19 nt, Human
caggacccugccccuggag

SEQ ID NO: 969200 - RNA, 21 nt, Human
ccaccagagcauccuggcugc

SEQ ID NO: 969201 - RNA, 21 nt, Human
ccccaugcagccuuucccuuc

SEQ ID NO: 969202 - RNA, 19 nt, Human
ccccugcagcuccgcaggc

SEQ ID NO: 969203 - RNA, 23 nt, Human
ccccuggaggccucgccugcccc

SEQ ID NO: 969204 - RNA, 20 nt, Human
ccuccaagaggagaggcggg

SEQ ID NO: 969205 - RNA, 22 nt, Human
ccugccccugcagcuccgcagg

SEQ ID NO: 969206 - RNA, 21 nt, Human
ccuggcugcaccuccuucccg

SEQ ID NO: 969207 - RNA, 23 nt, Human
cgccugccccugcagcuccgcag

SEQ ID NO: 969208 - RNA, 20 nt, Human
cguggcaggacaggagacug

SEQ ID NO: 969209 - RNA, 19 nt, Human
cuaaacaccagccucgugc

SEQ ID NO: 969210 - RNA, 20 nt, Human
cuaaacaccagccucgugcc

SEQ ID NO: 969211 - RNA, 21 nt, Human
cuguuaugggguggggccugg

SEQ ID NO: 969212 - RNA, 26 nt, Human
cuuggcccugggcugcuccccuuggg

SEQ ID NO: 969213 - RNA, 27 nt, Human
cuuggcccugggcugcuccccuugggg

SEQ ID NO: 969214 - RNA, 24 nt, Human
gacgcacuguggccuggggaaggc

SEQ ID NO: 969215 - RNA, 18 nt, Human
gagaagaaugugugaucc

SEQ ID NO: 969216 - RNA, 19 nt, Human
gagagcccggccgggggca

SEQ ID NO: 969217 - RNA, 19 nt, Human
gcccggccgggggcacagg

SEQ ID NO: 969218 - RNA, 20 nt, Human
gccucgccugccccugcagc

SEQ ID NO: 969219 - RNA, 24 nt, Human
gccuuuggggaguucugacaccag

SEQ ID NO: 969220 - RNA, 20 nt, Human
gcucucagagccucaagucu

SEQ ID NO: 969221 - RNA, 18 nt, Human
ggccccaucggcagcucc

SEQ ID NO: 969222 - RNA, 19 nt, Human
ggccuggacacagcugcag

SEQ ID NO: 969223 - RNA, 21 nt, Human
ggccuggggaaggcagcgggg

SEQ ID NO: 969224 - RNA, 22 nt, Human
ggccuuuggggaguucugacac

SEQ ID NO: 969225 - RNA, 22 nt, Human
ggcggggcuugaaagauuugag

SEQ ID NO: 969226 - RNA, 23 nt, Human
gggccucaggcaaugccgggccc

SEQ ID NO: 969227 - RNA, 21 nt, Human
ggggcucccccaugcagccuu

SEQ ID NO: 969228 - RNA, 19 nt, Human
gggggcacagggucugggc

SEQ ID NO: 969229 - RNA, 18 nt, Human
guggcugaggccaccugu

SEQ ID NO: 969230 - RNA, 21 nt, Human
uaaccccugccugccgcccuc

SEQ ID NO: 969231 - RNA, 22 nt, Human
ucaccgggcucacaccggggaa

SEQ ID NO: 969232 - RNA, 19 nt, Human
ucagagccucaagucuguc

SEQ ID NO: 969233 - RNA, 20 nt, Human
ucagcaggcagguggucgga

SEQ ID NO: 969234 - RNA, 18 nt, Human
ucagcucucagagccuca

SEQ ID NO: 969235 - RNA, 21 nt, Human
uccaccagagcauccuggcug

SEQ ID NO: 969236 - RNA, 22 nt, Human
uccaccagagcauccuggcugc

SEQ ID NO: 969237 - RNA, 27 nt, Human
ucccggaguccuggcuugacucagaga

SEQ ID NO: 969238 - RNA, 20 nt, Human
uccuggcugcaccuccuucc

SEQ ID NO: 969239 - RNA, 19 nt, Human
ucugucuccacauccaagg

SEQ ID NO: 969240 - RNA, 21 nt, Human
ugacuccacuuggacgcacag

SEQ ID NO: 969241 - RNA, 26 nt, Human
ugcaaacacagaaaggaauagaaaac

SEQ ID NO: 969242 - RNA, 19 nt, Human
uggcaaggggcacagcacc

SEQ ID NO: 969243 - RNA, 20 nt, Human
uggcaggacaggagacugga

SEQ ID NO: 969244 - RNA, 18 nt, Human
uggcccugggcugcuccc

SEQ ID NO: 969245 - RNA, 20 nt, Human
uggcuugccuaccuauucca

SEQ ID NO: 969246 - RNA, 18 nt, Human
uggggaaggcagcggggc

SEQ ID NO: 969247 - RNA, 20 nt, Human
uggggaaggcagcggggcuu

SEQ ID NO: 969248 - RNA, 21 nt, Human
ugggguggggccugggccugg

SEQ ID NO: 969249 - RNA, 22 nt, Human
uguguggcugaggccaccuguu

SEQ ID NO: 969250 - RNA, 20 nt, Human
uguuaugggguggggccugg

SEQ ID NO: 969251 - RNA, 21 nt, Human
uguuaugggguggggccuggg

SEQ ID NO: 969252 - RNA, 19 nt, Human
uuaacgugagaccuuggac

SEQ ID NO: 969253 - RNA, 19 nt, Human
uucagcucucagagccuca

SEQ ID NO: 969254 - RNA, 19 nt, Human
uuggacaaguguuuucagc

SEQ ID NO: 969255 - RNA, 26 nt, Human
uuugcaaaagacacguggcaggacag

SEQ ID NO: 969256 - RNA, 21 nt, Human
uuugcaaacacagaaaggaau

SEQ ID NO: 969257 - RNA, 20 nt, Human
uuuuuuuuuuuuuuuuuugg

SEQ ID NO: 969258 - RNA, 20 nt, Human
aaacccgcaggcugguccaa

SEQ ID NO: 969259 - RNA, 22 nt, Human
aagagcccaggauaaacccgca

SEQ ID NO: 969260 - RNA, 19 nt, Human
aaguagcucacgaagagga

SEQ ID NO: 969261 - RNA, 21 nt, Human
aaugagcagcaaguacaucau

SEQ ID NO: 969262 - RNA, 19 nt, Human
acacccacgucagcgcucu

SEQ ID NO: 969263 - RNA, 23 nt, Human
acugcugucuggcuccagggggu

SEQ ID NO: 969264 - RNA, 22 nt, Human
agcugcuggaaacaggaggcac

SEQ ID NO: 969265 - RNA, 22 nt, Human
agggacuguggaaacccaaaca

SEQ ID NO: 969266 - RNA, 19 nt, Human
agugcgggggcagggacug

SEQ ID NO: 969267 - RNA, 18 nt, Human
caccagguaggcgcccac

SEQ ID NO: 969268 - RNA, 22 nt, Human
caccugggccccaaugagcagc

SEQ ID NO: 969269 - RNA, 24 nt, Human
caccugggccccaaugagcagcaa

SEQ ID NO: 969270 - RNA, 22 nt, Human
cagaaagagcccaggauaaacc

SEQ ID NO: 969271 - RNA, 22 nt, Human
caggagcaccugggccccaaug

SEQ ID NO: 969272 - RNA, 23 nt, Human
ccaaugagcagcaaguacaucau

SEQ ID NO: 969273 - RNA, 24 nt, Human
cccaaugagcagcaaguacaucau

SEQ ID NO: 969274 - RNA, 19 nt, Human
cccaggauaaacccgcagg

SEQ ID NO: 969275 - RNA, 25 nt, Human
cccccgccgccgccgccgccgccgg

SEQ ID NO: 969276 - RNA, 19 nt, Human
ccccgccgccgccgccgcc

SEQ ID NO: 969277 - RNA, 21 nt, Human
ccccguugcugggcuuggguc

SEQ ID NO: 969278 - RNA, 19 nt, Human
ccccucgucgccgcccgag

SEQ ID NO: 969279 - RNA, 24 nt, Human
cccgcaggcugguccaaauaccag

SEQ ID NO: 969280 - RNA, 21 nt, Human
cccgcgugccccgaaguagcu

SEQ ID NO: 969281 - RNA, 21 nt, Human
ccgcccccguccugccggggc

SEQ ID NO: 969282 - RNA, 19 nt, Human
ccgcccgagccguuggcug

SEQ ID NO: 969283 - RNA, 18 nt, Human
ccgccgccgccgccgccg

SEQ ID NO: 969284 - RNA, 22 nt, Human
ccgccgccgccgccgccgccgc

SEQ ID NO: 969285 - RNA, 25 nt, Human
ccgccgccgccgccgccgccgccgg

SEQ ID NO: 969286 - RNA, 23 nt, Human
ccgccgccgccgccgccgccgcu

SEQ ID NO: 969287 - RNA, 23 nt, Human
ccgccgccgccgccgccgcugcc

SEQ ID NO: 969288 - RNA, 24 nt, Human
ccgccgccgccgccgccgcugccg

SEQ ID NO: 969289 - RNA, 26 nt, Human
ccgccgccgccgccgccgcugccgcu

SEQ ID NO: 969290 - RNA, 26 nt, Human
ccgccgccgccgccgccgcugccgcu

SEQ ID NO: 969291 - RNA, 18 nt, Human
ccgccgccgccgcugccg

SEQ ID NO: 969292 - RNA, 21 nt, Human
ccgccgccgcugccgcuuucc

SEQ ID NO: 969293 - RNA, 18 nt, Human
ccgcugccgcuuucccgc

SEQ ID NO: 969294 - RNA, 23 nt, Human
ccucgaggcugcgugcugucccc

SEQ ID NO: 969295 - RNA, 27 nt, Human
cgcagccgaucaggcgcggccggugcc

SEQ ID NO: 969296 - RNA, 24 nt, Human
cgccaugacgaugccgccgcagcc

SEQ ID NO: 969297 - RNA, 20 nt, Human
cgccgcuccggccgccgccc

SEQ ID NO: 969298 - RNA, 22 nt, Human
cgccucgucccccugcagcucg

SEQ ID NO: 969299 - RNA, 20 nt, Human
cgggccccucgucgccgccc

SEQ ID NO: 969300 - RNA, 23 nt, Human
cuccucgccgccgccgccgccgc

SEQ ID NO: 969301 - RNA, 20 nt, Human
cugcgugcuguccccgcccc

SEQ ID NO: 969302 - RNA, 19 nt, Human
gaacaggauuccuauauag

SEQ ID NO: 969303 - RNA, 20 nt, Human
gaacucgggcagcgccgaca

SEQ ID NO: 969304 - RNA, 21 nt, Human
gaacucgggcagcgccgacag

SEQ ID NO: 969305 - RNA, 23 nt, Human
gagcagcaaguacaucauguugg

SEQ ID NO: 969306 - RNA, 23 nt, Human
gaugcccaggagcaccugggccc

SEQ ID NO: 969307 - RNA, 24 nt, Human
gcaccugggccccaaugagcagca

SEQ ID NO: 969308 - RNA, 21 nt, Human
gcagcgccgacagcagcgcgc

SEQ ID NO: 969309 - RNA, 19 nt, Human
gccaugacgaugccgccgc

SEQ ID NO: 969310 - RNA, 20 nt, Human
gcccaggagcaccugggccc

SEQ ID NO: 969311 - RNA, 21 nt, Human
gccccgggugucggggccgcu

SEQ ID NO: 969312 - RNA, 22 nt, Human
gcgccgacagcagcgcgcccag

SEQ ID NO: 969313 - RNA, 23 nt, Human
gcgcucugcagguugaaccuacg

SEQ ID NO: 969314 - RNA, 19 nt, Human
gcucacgaagaggaugagc

SEQ ID NO: 969315 - RNA, 21 nt, Human
gcuccucgccgccgccgccgc

SEQ ID NO: 969316 - RNA, 19 nt, Human
gcucgcuuuccauggcggg

SEQ ID NO: 969317 - RNA, 20 nt, Human
gcucugagugcgggggcagg

SEQ ID NO: 969318 - RNA, 19 nt, Human
ggccgcccccguccugccg

SEQ ID NO: 969319 - RNA, 18 nt, Human
ggcgggggugcgcgccuc

SEQ ID NO: 969320 - RNA, 18 nt, Human
gggccgcugccgggcggg

SEQ ID NO: 969321 - RNA, 22 nt, Human
gucgggccccucgucgccgccc

SEQ ID NO: 969322 - RNA, 23 nt, Human
ucccccgccgccgccgccgccgc

SEQ ID NO: 969323 - RNA, 19 nt, Human
ucccccugcagcucgccgc

SEQ ID NO: 969324 - RNA, 21 nt, Human
ucccccugcagcucgccgcuc

SEQ ID NO: 969325 - RNA, 18 nt, Human
uccccugcauccuucccc

SEQ ID NO: 969326 - RNA, 21 nt, Human
uccccugcauccuucccccgc

SEQ ID NO: 969327 - RNA, 18 nt, Human
ucgcccgccucguacuug

SEQ ID NO: 969328 - RNA, 18 nt, Human
ucgccgccgccgccgccg

SEQ ID NO: 969329 - RNA, 18 nt, Human
ucgccgcuccggccgccg

SEQ ID NO: 969330 - RNA, 21 nt, Human
ucgccgcuccggccgccgccc

SEQ ID NO: 969331 - RNA, 18 nt, Human
ucgggccccucgucgccg

SEQ ID NO: 969332 - RNA, 18 nt, Human
ugagcagcaaguacauca

SEQ ID NO: 969333 - RNA, 21 nt, Human
ugagugcgggggcagggacug

SEQ ID NO: 969334 - RNA, 18 nt, Human
ugccggggcuggagaggu

SEQ ID NO: 969335 - RNA, 19 nt, Human
ugccggggcuggagaggug

SEQ ID NO: 969336 - RNA, 19 nt, Human
ugccucaggaccccguugc

SEQ ID NO: 969337 - RNA, 19 nt, Human
ugcgccucgucccccugca

SEQ ID NO: 969338 - RNA, 20 nt, Human
uggaaaagcaggacaccuuc

SEQ ID NO: 969339 - RNA, 23 nt, Human
uggaaaagcaggacaccuucuuu

SEQ ID NO: 969340 - RNA, 21 nt, Human
uggagagguggaaggcacagc

SEQ ID NO: 969341 - RNA, 26 nt, Human
uggcgggcucugagugcgggggcagg

SEQ ID NO: 969342 - RNA, 19 nt, Human
uggucaggacgcucaccag

SEQ ID NO: 969343 - RNA, 23 nt, Human
ugucggggccgcugccgggcggg

SEQ ID NO: 969344 - RNA, 21 nt, Human
uucccccgccgccgccgccgc

SEQ ID NO: 969345 - RNA, 21 nt, Human
uucggagagcauggccugcuc

SEQ ID NO: 969346 - RNA, 22 nt, Human
uugauguuggaaaagcaggaca

SEQ ID NO: 969347 - RNA, 18 nt, Human
aagugguaucugaggggc

SEQ ID NO: 969348 - RNA, 20 nt, Human
acacgaucggguauaaaaca

SEQ ID NO: 969349 - RNA, 19 nt, Human
acagcucuggggacaggag

SEQ ID NO: 969350 - RNA, 24 nt, Human
augcacaguuuuaacugaggacac

SEQ ID NO: 969351 - RNA, 18 nt, Human
cacaguuuuaacugagga

SEQ ID NO: 969352 - RNA, 21 nt, Human
cacaguuuuaacugaggacac

SEQ ID NO: 969353 - RNA, 18 nt, Human
cacgcacaccacacacga

SEQ ID NO: 969354 - RNA, 23 nt, Human
cauaaauauauauuuaugcaagu

SEQ ID NO: 969355 - RNA, 20 nt, Human
caucacccaacggcacuguu

SEQ ID NO: 969356 - RNA, 20 nt, Human
cccacugcagggccguacag

SEQ ID NO: 969357 - RNA, 19 nt, Human
ccgccgcgccgcgcagcgc

SEQ ID NO: 969358 - RNA, 20 nt, Human
ccgccgcgccgcgcagcgcu

SEQ ID NO: 969359 - RNA, 21 nt, Human
ccgucucgagggcccggccgc

SEQ ID NO: 969360 - RNA, 25 nt, Human
cgcacaccacacacgaucggguaua

SEQ ID NO: 969361 - RNA, 22 nt, Human
cgccguggccgggugggcgcgg

SEQ ID NO: 969362 - RNA, 22 nt, Human
cucccagugggauucacagccc

SEQ ID NO: 969363 - RNA, 21 nt, Human
gccgcccucccagugggauuc

SEQ ID NO: 969364 - RNA, 19 nt, Human
ggacacacaagccuuccuc

SEQ ID NO: 969365 - RNA, 20 nt, Human
gugaccucgaggcuucagcc

SEQ ID NO: 969366 - RNA, 19 nt, Human
uacagcucuggggacagga

SEQ ID NO: 969367 - RNA, 18 nt, Human
ucugucaucaggaaaugc

SEQ ID NO: 969368 - RNA, 21 nt, Human
ugagugcccgccguggccggg

SEQ ID NO: 969369 - RNA, 22 nt, Human
ugauugcaucacccaacggcac

SEQ ID NO: 969370 - RNA, 20 nt, Human
ugucaucaggaaaugcugag

SEQ ID NO: 969371 - RNA, 22 nt, Human
uuuuuuuuuuuuuuuuuucagg

SEQ ID NO: 969372 - RNA, 21 nt, Human
aaaaugaaaucuuccucucca

SEQ ID NO: 969373 - RNA, 18 nt, Human
aagcacauguaaauuaau

SEQ ID NO: 969374 - RNA, 19 nt, Human
aauccccaauauaauuugc

SEQ ID NO: 969375 - RNA, 21 nt, Human
acaaagcaaaauaaagugaaa

SEQ ID NO: 969376 - RNA, 23 nt, Human
acagaaagagcugaagcuuuuga

SEQ ID NO: 969377 - RNA, 24 nt, Human
acucugaucuggaggaagagauca

SEQ ID NO: 969378 - RNA, 20 nt, Human
agacugaaagaggaaacuga

SEQ ID NO: 969379 - RNA, 19 nt, Human
agacuuucagaaauucacc

SEQ ID NO: 969380 - RNA, 19 nt, Human
aguaaaugauauaaaauaa

SEQ ID NO: 969381 - RNA, 19 nt, Human
aucucuucucuuuccucuu

SEQ ID NO: 969382 - RNA, 18 nt, Human
aucugcaucuuccauuau

SEQ ID NO: 969383 - RNA, 21 nt, Human
auuguauuucaaggaaaagga

SEQ ID NO: 969384 - RNA, 22 nt, Human
caaaauucuaauccccaauaua

SEQ ID NO: 969385 - RNA, 22 nt, Human
caagaggauggaccacacacca

SEQ ID NO: 969386 - RNA, 27 nt, Human
cacagcaauuuugaacaauuuugccag

SEQ ID NO: 969387 - RNA, 21 nt, Human
cagaaagagcugaagcuuuug

SEQ ID NO: 969388 - RNA, 20 nt, Human
cagggcacagaaagagcuga

SEQ ID NO: 969389 - RNA, 22 nt, Human
ccagggcacagaaagagcugaa

SEQ ID NO: 969390 - RNA, 19 nt, Human
ccuggccucuuuuuucugg

SEQ ID NO: 969391 - RNA, 23 nt, Human
cgaucucuucucuuuccucuuuc

SEQ ID NO: 969392 - RNA, 22 nt, Human
cgccacacaaaaagcacaugua

SEQ ID NO: 969393 - RNA, 21 nt, Human
cuaaugccuaggaccaaaaca

SEQ ID NO: 969394 - RNA, 19 nt, Human
cuccauguucugcuccauc

SEQ ID NO: 969395 - RNA, 19 nt, Human
cucuucucuuuccucuuuc

SEQ ID NO: 969396 - RNA, 22 nt, Human
cugagcgaucucuucucuuucc

SEQ ID NO: 969397 - RNA, 27 nt, Human
cuuuccucuuucuuccuggccucuuuu

SEQ ID NO: 969398 - RNA, 19 nt, Human
cuuucuuccuggccucuuu

SEQ ID NO: 969399 - RNA, 19 nt, Human
cuuuugagccauuucuuug

SEQ ID NO: 969400 - RNA, 21 nt, Human
gagaaaauacuauaggaguaa

SEQ ID NO: 969401 - RNA, 21 nt, Human
gccacacaaaaagcacaugua

SEQ ID NO: 969402 - RNA, 18 nt, Human
ggaggagcuuaaaaugaa

SEQ ID NO: 969403 - RNA, 20 nt, Human
gggaaaagaaaagaugaagg

SEQ ID NO: 969404 - RNA, 21 nt, Human
uaaauauaaccaugugugaca

SEQ ID NO: 969405 - RNA, 24 nt, Human
uagccaguuccuuucaaugugcuc

SEQ ID NO: 969406 - RNA, 21 nt, Human
uaggaccaaaacaaaguagac

SEQ ID NO: 969407 - RNA, 23 nt, Human
uaggaccaaaacaaaguagacug

SEQ ID NO: 969408 - RNA, 21 nt, Human
uauaucaaugagcacaaagca

SEQ ID NO: 969409 - RNA, 22 nt, Human
uauuguauuucaaggaaaagga

SEQ ID NO: 969410 - RNA, 19 nt, Human
ucaaaauucuaauccccaa

SEQ ID NO: 969411 - RNA, 21 nt, Human
ucaccccugagcgaucucuuc

SEQ ID NO: 969412 - RNA, 23 nt, Human
ucagaaauucaccuuucaaacau

SEQ ID NO: 969413 - RNA, 23 nt, Human
uccacagcaauuuugaacaauuu

SEQ ID NO: 969414 - RNA, 24 nt, Human
uccauccuaagaucauuauuaaaa

SEQ ID NO: 969415 - RNA, 21 nt, Human
ucuccauguucugcuccaucc

SEQ ID NO: 969416 - RNA, 25 nt, Human
ucuuuccucuuucuuccuggccucu

SEQ ID NO: 969417 - RNA, 19 nt, Human
ugacgugcaucucagcucc

SEQ ID NO: 969418 - RNA, 20 nt, Human
ugacgugcaucucagcuccc

SEQ ID NO: 969419 - RNA, 19 nt, Human
ugagcacaaagcaaaauaa

SEQ ID NO: 969420 - RNA, 20 nt, Human
ugagcacaaagcaaaauaaa

SEQ ID NO: 969421 - RNA, 22 nt, Human
ugccuaggaccaaaacaaagua

SEQ ID NO: 969422 - RNA, 25 nt, Human
ugccuaggaccaaaacaaaguagac

SEQ ID NO: 969423 - RNA, 18 nt, Human
uggcagucagcagagaau

SEQ ID NO: 969424 - RNA, 22 nt, Human
ugugacaauagagacaauuguu

SEQ ID NO: 969425 - RNA, 18 nt, Human
ugugcucagcaagaggau

SEQ ID NO: 969426 - RNA, 23 nt, Human
uguucugcuccauccuaagauca

SEQ ID NO: 969427 - RNA, 19 nt, Human
uuauauauuucaguauauu

SEQ ID NO: 969428 - RNA, 22 nt, Human
uucaaacauguuuuaggaacac

SEQ ID NO: 969429 - RNA, 18 nt, Human
uugaaaggagaaagaaau

SEQ ID NO: 969430 - RNA, 18 nt, Human
uugaaggaacccaaggua

SEQ ID NO: 969431 - RNA, 19 nt, Human
uugacucugaucuggagga

SEQ ID NO: 969432 - RNA, 18 nt, Human
uuuuuuuuuuuuuuccug

SEQ ID NO: 969433 - RNA, 22 nt, Human
uuuuuuuuuuuuuuuuccuguu

SEQ ID NO: 969434 - RNA, 20 nt, Human
aaaagauguggaaauucuua

SEQ ID NO: 969435 - RNA, 23 nt, Human
aaggaccaggaacuccucaaaaa

SEQ ID NO: 969436 - RNA, 21 nt, Human
accacaaauauguagcuauaa

SEQ ID NO: 969437 - RNA, 22 nt, Human
agcuauaauguaacaaugagua

SEQ ID NO: 969438 - RNA, 23 nt, Human
aggaacuccucaaaaauaacauc

SEQ ID NO: 969439 - RNA, 18 nt, Human
auaauguaacaaugagua

SEQ ID NO: 969440 - RNA, 19 nt, Human
auggaucauauagucuaac

SEQ ID NO: 969441 - RNA, 18 nt, Human
caccauaaaagaugugga

SEQ ID NO: 969442 - RNA, 21 nt, Human
ccaagcuagacuucaggccuu

SEQ ID NO: 969443 - RNA, 22 nt, Human
ccuggauuuagaauccuacagc

SEQ ID NO: 969444 - RNA, 24 nt, Human
cuagcuccuccuuuuuaaccucua

SEQ ID NO: 969445 - RNA, 19 nt, Human
gucggacgcgugggcgacc

SEQ ID NO: 969446 - RNA, 22 nt, Human
ucaaaaauaacaucuuacugaa

SEQ ID NO: 969447 - RNA, 23 nt, Human
uccaccauaaaagauguggaaau

SEQ ID NO: 969448 - RNA, 19 nt, Human
ucuuccacaauacuuaaau

SEQ ID NO: 969449 - RNA, 19 nt, Human
ugaguacucucauuuuuuc

SEQ ID NO: 969450 - RNA, 22 nt, Human
ugcucaguuugaaacaaucacc

SEQ ID NO: 969451 - RNA, 23 nt, Human
uguuuguuuaauaaaauagacac

SEQ ID NO: 969452 - RNA, 19 nt, Human
uuacugaaucaaugcaaug

SEQ ID NO: 969453 - RNA, 22 nt, Human
uuugaaacaaucaccuggauuu

SEQ ID NO: 969454 - RNA, 19 nt, Human
uuuuuuuuuuuuuuugcaa

SEQ ID NO: 969455 - RNA, 23 nt, Human
aggaacaccucaaaaauaacauc

SEQ ID NO: 969456 - RNA, 28 nt, Human
caggaacaccucaaaaauaacaucuuaa

SEQ ID NO: 969457 - RNA, 22 nt, Human
caggccagauuuuggccuaagu

SEQ ID NO: 969458 - RNA, 19 nt, Human
cagugaaagaccaggaaca

SEQ ID NO: 969459 - RNA, 18 nt, Human
cuaucuuguccuuuuuac

SEQ ID NO: 969460 - RNA, 25 nt, Human
cugaaaaauauacaacuuaacauga

SEQ ID NO: 969461 - RNA, 21 nt, Human
uaaacuacagauaccacguga

SEQ ID NO: 969462 - RNA, 21 nt, Human
uagcaguuacaacuaccaaac

SEQ ID NO: 969463 - RNA, 23 nt, Human
uaucuuguccuuuuuaccucccu

SEQ ID NO: 969464 - RNA, 22 nt, Human
ucaaaaauaacaucuuaaugaa

SEQ ID NO: 969465 - RNA, 20 nt, Human
uccacuguaaguaaagaaug

SEQ ID NO: 969466 - RNA, 19 nt, Human
ugccucucacuuuaaauuu

SEQ ID NO: 969467 - RNA, 18 nt, Human
uguccuuuuuaccucccu

SEQ ID NO: 969468 - RNA, 20 nt, Human
uguuggaauugucagugaaa

SEQ ID NO: 969469 - RNA, 18 nt, Human
uuuuuuuuuuuuuuuucg

SEQ ID NO: 969470 - RNA, 25 nt, Human
uuuuuuuuuuuuuuuuucgaauuuu

SEQ ID NO: 969471 - RNA, 22 nt, Human
aauuucuccacagggucuuauu

SEQ ID NO: 969472 - RNA, 19 nt, Human
agcuggggcgcuccccaag

SEQ ID NO: 969473 - RNA, 19 nt, Human
cauuucuugauagcaaggu

SEQ ID NO: 969474 - RNA, 22 nt, Human
ccacugccgcuccgaaacuugc

SEQ ID NO: 969475 - RNA, 19 nt, Human
ccagaguuuacuguaugac

SEQ ID NO: 969476 - RNA, 18 nt, Human
ccgggggacaggcaggcu

SEQ ID NO: 969477 - RNA, 20 nt, Human
cgggugaugacagcguucuc

SEQ ID NO: 969478 - RNA, 23 nt, Human
ggaacaacgaauuucuccacagg

SEQ ID NO: 969479 - RNA, 19 nt, Human
guaaagcaaggacauuauc

SEQ ID NO: 969480 - RNA, 18 nt, Human
uagaacguucccggggga

SEQ ID NO: 969481 - RNA, 24 nt, Human
uaucuggaagaaucauccagaguu

SEQ ID NO: 969482 - RNA, 24 nt, Human
ucagugggaacaacgaauuucucc

SEQ ID NO: 969483 - RNA, 18 nt, Human
uccccaaggauguuagaa

SEQ ID NO: 969484 - RNA, 19 nt, Human
uugauagcaagguucauuu

SEQ ID NO: 969485 - RNA, 19 nt, Human
aagaugcuuuccugaacca

SEQ ID NO: 969486 - RNA, 26 nt, Human
acagcagccuccuuggcugcuccucc

SEQ ID NO: 969487 - RNA, 19 nt, Human
acugccguugccuccgcag

SEQ ID NO: 969488 - RNA, 20 nt, Human
aggagcagcacugccguugc

SEQ ID NO: 969489 - RNA, 18 nt, Human
cacugccguugccuccgc

SEQ ID NO: 969490 - RNA, 23 nt, Human
caggcccagcccaguggcugggg

SEQ ID NO: 969491 - RNA, 22 nt, Human
caguggcugggggcugaggccu

SEQ ID NO: 969492 - RNA, 23 nt, Human
cccacacuugggucaccauuucc

SEQ ID NO: 969493 - RNA, 20 nt, Human
ccccacacuugggucaccau

SEQ ID NO: 969494 - RNA, 19 nt, Human
ccuccgcagcuggguugcu

SEQ ID NO: 969495 - RNA, 20 nt, Human
ccuccuucuuccccggucuc

SEQ ID NO: 969496 - RNA, 20 nt, Human
ccuguaggaccuucccuccc

SEQ ID NO: 969497 - RNA, 19 nt, Human
ccuucccucccuuuagggu

SEQ ID NO: 969498 - RNA, 21 nt, Human
ccuucccucccuuuaggguuc

SEQ ID NO: 969499 - RNA, 21 nt, Human
ccuuggcugcuccuccuucuu

SEQ ID NO: 969500 - RNA, 19 nt, Human
cucccuuuucccuugcagc

SEQ ID NO: 969501 - RNA, 19 nt, Human
cugaaccacaacccccaca

SEQ ID NO: 969502 - RNA, 21 nt, Human
gaaccacaacccccacacuug

SEQ ID NO: 969503 - RNA, 19 nt, Human
gaccuguaggaccuucccu

SEQ ID NO: 969504 - RNA, 20 nt, Human
gcagcuggguugcuccggga

SEQ ID NO: 969505 - RNA, 19 nt, Human
ggagcagcacugccguugc

SEQ ID NO: 969506 - RNA, 18 nt, Human
ggcugggggcugaggccu

SEQ ID NO: 969507 - RNA, 21 nt, Human
ggcugggggcugaggccuucc

SEQ ID NO: 969508 - RNA, 30 nt, Human
ggcugggggcugaggccuuccagucccagg

SEQ ID NO: 969509 - RNA, 23 nt, Human
guggcugggggcugaggccuucc

SEQ ID NO: 969510 - RNA, 26 nt, Human
ucccugaucugucccucccuuuuccc

SEQ ID NO: 969511 - RNA, 19 nt, Human
ucccuuuucccuugcagcu

SEQ ID NO: 969512 - RNA, 19 nt, Human
ucugucccucccuuuuccc

SEQ ID NO: 969513 - RNA, 20 nt, Human
ucugucccucccuuuucccu

SEQ ID NO: 969514 - RNA, 22 nt, Human
uuccuccuccuugugugggugg

SEQ ID NO: 969515 - RNA, 22 nt, Human
aagaggucaaggagcccagagc

SEQ ID NO: 969516 - RNA, 21 nt, Human
agcccagaguguggagggacc

SEQ ID NO: 969517 - RNA, 20 nt, Human
agggaccauucaugcugcug

SEQ ID NO: 969518 - RNA, 19 nt, Human
auucaugcugcuggugcaa

SEQ ID NO: 969519 - RNA, 23 nt, Human
caagaggucaaggagcccagagc

SEQ ID NO: 969520 - RNA, 18 nt, Human
cagcugccucuucucaag

SEQ ID NO: 969521 - RNA, 19 nt, Human
cagcugccucuucucaaga

SEQ ID NO: 969522 - RNA, 18 nt, Human
cagugugaauccaucucu

SEQ ID NO: 969523 - RNA, 19 nt, Human
cccagggcugugugccagc

SEQ ID NO: 969524 - RNA, 20 nt, Human
cuccucaaauucaccaagga

SEQ ID NO: 969525 - RNA, 23 nt, Human
cuccucaaauucaccaaggaggg

SEQ ID NO: 969526 - RNA, 24 nt, Human
cuggugcaagauauggcuuuuccu

SEQ ID NO: 969527 - RNA, 21 nt, Human
cugugugccagcugccucuuc

SEQ ID NO: 969528 - RNA, 18 nt, Human
gcccagaguguggaggga

SEQ ID NO: 969529 - RNA, 20 nt, Human
gcccagaguguggagggacc

SEQ ID NO: 969530 - RNA, 24 nt, Human
ucaaggagcccagagcccagagug

SEQ ID NO: 969531 - RNA, 19 nt, Human
ugaauccaucucuccucaa

SEQ ID NO: 969532 - RNA, 18 nt, Human
ugccagcugccucuucuc

SEQ ID NO: 969533 - RNA, 24 nt, Human
uggagggaccauucaugcugcugg

SEQ ID NO: 969534 - RNA, 21 nt, Human
ugggucuucugguggauaugg

SEQ ID NO: 969535 - RNA, 18 nt, Human
aaaauacagaaacaaccc

SEQ ID NO: 969536 - RNA, 23 nt, Human
aaagccccugguagcugugccca

SEQ ID NO: 969537 - RNA, 19 nt, Human
acuacaacgcagaggacca

SEQ ID NO: 969538 - RNA, 18 nt, Human
agagccggccucagcccc

SEQ ID NO: 969539 - RNA, 19 nt, Human
agaggaccaggcaggccag

SEQ ID NO: 969540 - RNA, 21 nt, Human
aggcacucacgggccaggcuu

SEQ ID NO: 969541 - RNA, 18 nt, Human
agggaggggugugcaaga

SEQ ID NO: 969542 - RNA, 24 nt, Human
agugcagccuggcccgagccaccu

SEQ ID NO: 969543 - RNA, 25 nt, Human
caaaagccccugguagcugugccca

SEQ ID NO: 969544 - RNA, 28 nt, Human
caaagcaaagcccguggauauauccaag

SEQ ID NO: 969545 - RNA, 22 nt, Human
caagauuaacaaugcuaaaucc

SEQ ID NO: 969546 - RNA, 18 nt, Human
caccuuuauuucagagug

SEQ ID NO: 969547 - RNA, 23 nt, Human
cagaguggccccaccugcccuug

SEQ ID NO: 969548 - RNA, 23 nt, Human
caggcuucacucgacucuucuca

SEQ ID NO: 969549 - RNA, 21 nt, Human
cauccagggauucgaaagggu

SEQ ID NO: 969550 - RNA, 21 nt, Human
ccaggauauaguucagaucgc

SEQ ID NO: 969551 - RNA, 22 nt, Human
ccccaccugcccuugcccccuc

SEQ ID NO: 969552 - RNA, 20 nt, Human
ccggccucagcccccucagc

SEQ ID NO: 969553 - RNA, 24 nt, Human
ccuccccugcuuucgguaagaacc

SEQ ID NO: 969554 - RNA, 21 nt, Human
ccuggcccgagccaccuuccc

SEQ ID NO: 969555 - RNA, 24 nt, Human
ccuggcccgagccaccuucccggc

SEQ ID NO: 969556 - RNA, 21 nt, Human
ccuuggcucuggccccguagc

SEQ ID NO: 969557 - RNA, 19 nt, Human
ccuugucauaugcugucca

SEQ ID NO: 969558 - RNA, 22 nt, Human
cgaaggggaagaaggcugugcu

SEQ ID NO: 969559 - RNA, 22 nt, Human
cggcaagugacgaccuccuucu

SEQ ID NO: 969560 - RNA, 21 nt, Human
cuaaauccucaagcugacuga

SEQ ID NO: 969561 - RNA, 18 nt, Human
cuccuugggguagccgcu

SEQ ID NO: 969562 - RNA, 23 nt, Human
cuccuugggguagccgcuguugg

SEQ ID NO: 969563 - RNA, 20 nt, Human
cugauccuccuuuuccucaa

SEQ ID NO: 969564 - RNA, 23 nt, Human
cuggccccguagcaguguggaca

SEQ ID NO: 969565 - RNA, 19 nt, Human
cugggcucugggggagggg

SEQ ID NO: 969566 - RNA, 18 nt, Human
cuugcccccucuaggcua

SEQ ID NO: 969567 - RNA, 27 nt, Human
cuuggcucuggccccguagccgguucc

SEQ ID NO: 969568 - RNA, 18 nt, Human
cuugguuacagggagggg

SEQ ID NO: 969569 - RNA, 18 nt, Human
gaagcuuccuuggcucug

SEQ ID NO: 969570 - RNA, 20 nt, Human
gaucgcugcugagugacaac

SEQ ID NO: 969571 - RNA, 19 nt, Human
gccuacucaguuccuucuc

SEQ ID NO: 969572 - RNA, 21 nt, Human
gccuacucaguuccuucucaa

SEQ ID NO: 969573 - RNA, 20 nt, Human
gcugcggcuuccuccccuga

SEQ ID NO: 969574 - RNA, 21 nt, Human
gcugcggcuuccuccccugcu

SEQ ID NO: 969575 - RNA, 21 nt, Human
ggacagagcacggguuuugag

SEQ ID NO: 969576 - RNA, 21 nt, Human
gggaggggcugggcugcccag

SEQ ID NO: 969577 - RNA, 24 nt, Human
gggggaggggcugggcugcccagu

SEQ ID NO: 969578 - RNA, 24 nt, Human
ggguagccgcuguuggggcugucu

SEQ ID NO: 969579 - RNA, 19 nt, Human
ggugugcaagagccugggc

SEQ ID NO: 969580 - RNA, 27 nt, Human
gguuaggggcuuccaaaagccccuggu

SEQ ID NO: 969581 - RNA, 21 nt, Human
guagcaguguggacagagcac

SEQ ID NO: 969582 - RNA, 23 nt, Human
guuaaaauacagaaacaacccuu

SEQ ID NO: 969583 - RNA, 23 nt, Human
uagcacuacaacgcagaggacca

SEQ ID NO: 969584 - RNA, 18 nt, Human
uaggggcuuccaaaagcc

SEQ ID NO: 969585 - RNA, 24 nt, Human
uauaguucagaucgcugcugagug

SEQ ID NO: 969586 - RNA, 19 nt, Human
uaugcuguccagaaugaag

SEQ ID NO: 969587 - RNA, 20 nt, Human
uauuucagaguguuccuuga

SEQ ID NO: 969588 - RNA, 23 nt, Human
uauuucagaguguuccuugguua

SEQ ID NO: 969589 - RNA, 19 nt, Human
ucagaucgcugcugaguga

SEQ ID NO: 969590 - RNA, 18 nt, Human
ucagcccccucagccauc

SEQ ID NO: 969591 - RNA, 23 nt, Human
ucagcccccucagccauccaggg

SEQ ID NO: 969592 - RNA, 21 nt, Human
uccccugcuuucgguaagaac

SEQ ID NO: 969593 - RNA, 21 nt, Human
ucccgagauugagguagcacu

SEQ ID NO: 969594 - RNA, 23 nt, Human
uccuuggcucuggccccguagca

SEQ ID NO: 969595 - RNA, 22 nt, Human
ugaaacagcuagagagagggcg

SEQ ID NO: 969596 - RNA, 20 nt, Human
ugcccccucuaggcuaagug

SEQ ID NO: 969597 - RNA, 19 nt, Human
uggcccgagccaccuuccc

SEQ ID NO: 969598 - RNA, 24 nt, Human
uggcccgagccaccuucccggcaa

SEQ ID NO: 969599 - RNA, 18 nt, Human
uggggcugucugggggaa

SEQ ID NO: 969600 - RNA, 24 nt, Human
ugucugggggaagaaguggaagcu

SEQ ID NO: 969601 - RNA, 26 nt, Human
ugugacuaccuguuaagguccugcaa

SEQ ID NO: 969602 - RNA, 22 nt, Human
uucauugcuuuuaaaaauucug

SEQ ID NO: 969603 - RNA, 19 nt, Human
uugaaaaguaggugguuag

SEQ ID NO: 969604 - RNA, 24 nt, Human
uugugacuaccuguuaagguccug

SEQ ID NO: 969605 - RNA, 19 nt, Human
aagaggaacacaggagaca

SEQ ID NO: 969606 - RNA, 24 nt, Human
aauaccuauuuauuaucuuacagc

SEQ ID NO: 969607 - RNA, 18 nt, Human
aguuacuaaaaaaaacca

SEQ ID NO: 969608 - RNA, 24 nt, Human
auacagccaaaacuauaaucucaa

SEQ ID NO: 969609 - RNA, 21 nt, Human
auagcaaauauccauuaucuc

SEQ ID NO: 969610 - RNA, 21 nt, Human
cagaggcgcccucggcuccga

SEQ ID NO: 969611 - RNA, 22 nt, Human
cagcgcucucgcagaggcgccc

SEQ ID NO: 969612 - RNA, 23 nt, Human
ccuucauaauuauacaccuggcc

SEQ ID NO: 969613 - RNA, 20 nt, Human
cgcagcgcucucgcagaggc

SEQ ID NO: 969614 - RNA, 25 nt, Human
cuccgaaaaugucucuggaaagaag

SEQ ID NO: 969615 - RNA, 22 nt, Human
gcccucggcuccgaaaaugucu

SEQ ID NO: 969616 - RNA, 20 nt, Human
ggcgggaggacaagggagug

SEQ ID NO: 969617 - RNA, 22 nt, Human
ggcugggcugguccucaagcgc

SEQ ID NO: 969618 - RNA, 23 nt, Human
uacaccuggccgaucgauagucu

SEQ ID NO: 969619 - RNA, 23 nt, Human
uagcaaauauccauuaucucaag

SEQ ID NO: 969620 - RNA, 27 nt, Human
uaggaaaaaugcugaucaauacaaugg

SEQ ID NO: 969621 - RNA, 21 nt, Human
uauuucauguuuccuacuugu

SEQ ID NO: 969622 - RNA, 19 nt, Human
uauuuuuuucuucucacag

SEQ ID NO: 969623 - RNA, 24 nt, Human
uauuuuuuucuucucacaguuuua

SEQ ID NO: 969624 - RNA, 20 nt, Human
ucgccaggcgggaggacaag

SEQ ID NO: 969625 - RNA, 18 nt, Human
ucgcgcgaucuccggcgc

SEQ ID NO: 969626 - RNA, 22 nt, Human
ucggaaccuguucgcagcgcuc

SEQ ID NO: 969627 - RNA, 18 nt, Human
ugaaauaaauauaugauu

SEQ ID NO: 969628 - RNA, 18 nt, Human
ugccuauagacauuuuuu

SEQ ID NO: 969629 - RNA, 19 nt, Human
uggaauaccuugauuuaaa

SEQ ID NO: 969630 - RNA, 24 nt, Human
uggcucccuguggagcagcaaucc

SEQ ID NO: 969631 - RNA, 22 nt, Human
uguguuagaagagauuugggag

SEQ ID NO: 969632 - RNA, 18 nt, Human
uuggguuggcucaccgca

SEQ ID NO: 969633 - RNA, 21 nt, Human
uugugaagcauugaagaggaa

SEQ ID NO: 969634 - RNA, 23 nt, Human
uuuaaauaccucauuguuucaua

SEQ ID NO: 969635 - RNA, 26 nt, Human
uuuaaauaccucauuguuucauauua

SEQ ID NO: 969636 - RNA, 20 nt, Human
uuuaagcauuucuagaccuu

SEQ ID NO: 969637 - RNA, 23 nt, Human
uuuuuuuuuuuuuuuuuuuaugg

SEQ ID NO: 969638 - RNA, 20 nt, Human
accagcagggugggcaccgg

SEQ ID NO: 969639 - RNA, 27 nt, Human
accagcagggugggcaccgggcaggcc

SEQ ID NO: 969640 - RNA, 20 nt, Human
acccacuggcugcuggagcu

SEQ ID NO: 969641 - RNA, 21 nt, Human
accuuggaggcugcaugaugg

SEQ ID NO: 969642 - RNA, 20 nt, Human
acugcaccugagggcugagc

SEQ ID NO: 969643 - RNA, 21 nt, Human
agaggcugcugggcaggccug

SEQ ID NO: 969644 - RNA, 20 nt, Human
agagguucuugauuucugag

SEQ ID NO: 969645 - RNA, 19 nt, Human
agccgccccuuuguugucc

SEQ ID NO: 969646 - RNA, 24 nt, Human
agcgucaggucaggcccaucccuc

SEQ ID NO: 969647 - RNA, 21 nt, Human
aggcagagguucuugauuucu

SEQ ID NO: 969648 - RNA, 23 nt, Human
aggcccacuagcauggcugguuu

SEQ ID NO: 969649 - RNA, 20 nt, Human
agggagcagaggcugcuggg

SEQ ID NO: 969650 - RNA, 22 nt, Human
agggccuccuuucccaguuggg

SEQ ID NO: 969651 - RNA, 18 nt, Human
agugcagcucuugggugg

SEQ ID NO: 969652 - RNA, 24 nt, Human
auccacaugguaaagccuguugug

SEQ ID NO: 969653 - RNA, 23 nt, Human
cacagaugggaggggagggcugg

SEQ ID NO: 969654 - RNA, 19 nt, Human
cacagcacccugggcccug

SEQ ID NO: 969655 - RNA, 20 nt, Human
cacagcacccugggcccuga

SEQ ID NO: 969656 - RNA, 25 nt, Human
cacccuguuggggagagcguguccu

SEQ ID NO: 969657 - RNA, 20 nt, Human
caccgcggcaucaagcaggu

SEQ ID NO: 969658 - RNA, 18 nt, Human
cacugugggccagccugu

SEQ ID NO: 969659 - RNA, 22 nt, Human
cagagggccuccuuucccaguu

SEQ ID NO: 969660 - RNA, 24 nt, Human
cagaugggaggggagggcuggggg

SEQ ID NO: 969661 - RNA, 20 nt, Human
cagcagggugggcaccgggc

SEQ ID NO: 969662 - RNA, 19 nt, Human
cagcaguggcuugcagacg

SEQ ID NO: 969663 - RNA, 19 nt, Human
cagcaguggcuugcagacg

SEQ ID NO: 969664 - RNA, 21 nt, Human
cagccaggcugaccaguacgu

SEQ ID NO: 969665 - RNA, 21 nt, Human
cagcgccuggauccugcgccc

SEQ ID NO: 969666 - RNA, 21 nt, Human
caguggcuugcagacgucugc

SEQ ID NO: 969667 - RNA, 19 nt, Human
caucccuccugagcugagg

SEQ ID NO: 969668 - RNA, 19 nt, Human
ccagcagggugggcaccgg

SEQ ID NO: 969669 - RNA, 18 nt, Human
ccaggcuggguagggcca

SEQ ID NO: 969670 - RNA, 19 nt, Human
cccagagccccuuacagag

SEQ ID NO: 969671 - RNA, 18 nt, Human
cccagccccccgcugcca

SEQ ID NO: 969672 - RNA, 24 nt, Human
cccagccccccgcugccggggccg

SEQ ID NO: 969673 - RNA, 21 nt, Human
ccccaggagggagcagaggcu

SEQ ID NO: 969674 - RNA, 23 nt, Human
ccccaggugcugauccaagccuc

SEQ ID NO: 969675 - RNA, 19 nt, Human
ccccccgcugccacacagc

SEQ ID NO: 969676 - RNA, 22 nt, Human
ccccccgcugccacacagccag

SEQ ID NO: 969677 - RNA, 19 nt, Human
ccccuuguucccccaccuc

SEQ ID NO: 969678 - RNA, 20 nt, Human
ccgcaccuggcuccuggugc

SEQ ID NO: 969679 - RNA, 18 nt, Human
ccucacaggcgcggaggg

SEQ ID NO: 969680 - RNA, 21 nt, Human
ccucaggcccacuagcauggc

SEQ ID NO: 969681 - RNA, 23 nt, Human
ccuccugagcugagggacggugc

SEQ ID NO: 969682 - RNA, 21 nt, Human
ccugcaggcucaggguuggcu

SEQ ID NO: 969683 - RNA, 19 nt, Human
ccugcgugugaucagaggg

SEQ ID NO: 969684 - RNA, 22 nt, Human
cgccgaagcacccuguugggga

SEQ ID NO: 969685 - RNA, 20 nt, Human
cggaagaccccuuguucccc

SEQ ID NO: 969686 - RNA, 21 nt, Human
cggugggcuuccugcaggucu

SEQ ID NO: 969687 - RNA, 22 nt, Human
cgucccagagccccuuacagag

SEQ ID NO: 969688 - RNA, 23 nt, Human
cucggaagaccccuuguuccccc

SEQ ID NO: 969689 - RNA, 23 nt, Human
cucuuggguggcuccucccuggg

SEQ ID NO: 969690 - RNA, 22 nt, Human
cugcaggucucccugcaggcuc

SEQ ID NO: 969691 - RNA, 21 nt, Human
cugugugcuggagggagcccc

SEQ ID NO: 969692 - RNA, 23 nt, Human
gaagaccccuuguucccccaccu

SEQ ID NO: 969693 - RNA, 25 nt, Human
gaagcacccuguuggggagagcgug

SEQ ID NO: 969694 - RNA, 21 nt, Human
gaccccuuguucccccaccuc

SEQ ID NO: 969695 - RNA, 21 nt, Human
gagcguguccuugcuggcugu

SEQ ID NO: 969696 - RNA, 19 nt, Human
gaggcugcaugauggcggg

SEQ ID NO: 969697 - RNA, 18 nt, Human
gagguucuugauuucuga

SEQ ID NO: 969698 - RNA, 21 nt, Human
gcacaagagugcagcucuugg

SEQ ID NO: 969699 - RNA, 20 nt, Human
gccagccugucucggaggca

SEQ ID NO: 969700 - RNA, 20 nt, Human
gccuggauccugcgcccggg

SEQ ID NO: 969701 - RNA, 20 nt, Human
gcgcccgggcaguccugggc

SEQ ID NO: 969702 - RNA, 18 nt, Human
gcggcgggcagggucugg

SEQ ID NO: 969703 - RNA, 21 nt, Human
gcggcgggcagggucugggcg

SEQ ID NO: 969704 - RNA, 21 nt, Human
gcucggaagaccccuuguucc

SEQ ID NO: 969705 - RNA, 18 nt, Human
gcuguggguccccaggag

SEQ ID NO: 969706 - RNA, 21 nt, Human
gcuugcucaggcuucucuccu

SEQ ID NO: 969707 - RNA, 22 nt, Human
ggaggggagggcugggggcugc

SEQ ID NO: 969708 - RNA, 21 nt, Human
ggcagcgccuggauccugcgc

SEQ ID NO: 969709 - RNA, 19 nt, Human
ggccaggcuggguagggcc

SEQ ID NO: 969710 - RNA, 19 nt, Human
ggcuggguagggccacugc

SEQ ID NO: 969711 - RNA, 19 nt, Human
ggcuugcagacgucugcug

SEQ ID NO: 969712 - RNA, 20 nt, Human
gggaggggagggcugggggc

SEQ ID NO: 969713 - RNA, 25 nt, Human
gggcagcgccuggauccugcgcccg

SEQ ID NO: 969714 - RNA, 22 nt, Human
gggcaggccugggcauagggag

SEQ ID NO: 969715 - RNA, 22 nt, Human
gggccagccugucucggaggca

SEQ ID NO: 969716 - RNA, 18 nt, Human
gguagggccacugcaccu

SEQ ID NO: 969717 - RNA, 18 nt, Human
guccucacaggcgcggag

SEQ ID NO: 969718 - RNA, 27 nt, Human
uacguccucagcugggaccagcagcuc

SEQ ID NO: 969719 - RNA, 22 nt, Human
ucacagcacccugggcccugac

SEQ ID NO: 969720 - RNA, 19 nt, Human
ucacaggcgcggagggccc

SEQ ID NO: 969721 - RNA, 24 nt, Human
ucccagagccccuuacagaggcac

SEQ ID NO: 969722 - RNA, 21 nt, Human
uccccaggagggagcagaggc

SEQ ID NO: 969723 - RNA, 18 nt, Human
uccccagggcagcugugg

SEQ ID NO: 969724 - RNA, 21 nt, Human
ucccccaccucccgccgaagc

SEQ ID NO: 969725 - RNA, 22 nt, Human
ucccugugugugucugcuggcc

SEQ ID NO: 969726 - RNA, 26 nt, Human
ucggaagaccccuuguucccccaccu

SEQ ID NO: 969727 - RNA, 20 nt, Human
ucuccucugcaggcuggcca

SEQ ID NO: 969728 - RNA, 21 nt, Human
ucuugauuucugaguguuugg

SEQ ID NO: 969729 - RNA, 22 nt, Human
ugccacacagccaggcugacca

SEQ ID NO: 969730 - RNA, 21 nt, Human
ugcugggcaggccuggcccug

SEQ ID NO: 969731 - RNA, 22 nt, Human
ugcuggggugagggcugugugc

SEQ ID NO: 969732 - RNA, 23 nt, Human
ugcuguggguccccaggagggag

SEQ ID NO: 969733 - RNA, 19 nt, Human
uggcaagaccaccgaggac

SEQ ID NO: 969734 - RNA, 22 nt, Human
uggcaccuuggaggcugcauga

SEQ ID NO: 969735 - RNA, 20 nt, Human
ugggaagggucucagcagug

SEQ ID NO: 969736 - RNA, 21 nt, Human
ugggaccagcagcucaaccuc

SEQ ID NO: 969737 - RNA, 19 nt, Human
ugggaugacgaggggcugg

SEQ ID NO: 969738 - RNA, 22 nt, Human
ugggcccugacgcuggugcagg

SEQ ID NO: 969739 - RNA, 19 nt, Human
uggggagagcguguccuug

SEQ ID NO: 969740 - RNA, 20 nt, Human
uggggagagcguguccuugc

SEQ ID NO: 969741 - RNA, 21 nt, Human
uggggagagcguguccuugcu

SEQ ID NO: 969742 - RNA, 21 nt, Human
uggggugagggcugugugcug

SEQ ID NO: 969743 - RNA, 18 nt, Human
uguucccccaccucccgc

SEQ ID NO: 969744 - RNA, 18 nt, Human
uguuguccccagcccccc

SEQ ID NO: 969745 - RNA, 21 nt, Human
uuacagaggcacagaugggag

SEQ ID NO: 969746 - RNA, 21 nt, Human
uuccuggcccuaagggucauu

SEQ ID NO: 969747 - RNA, 25 nt, Human
uuuccuggcccuaagggucauuuua

SEQ ID NO: 969748 - RNA, 27 nt, Human
aaaaauauuagggggagaccgguaccc

SEQ ID NO: 969749 - RNA, 24 nt, Human
aacccccuucuuaauauucugcca

SEQ ID NO: 969750 - RNA, 21 nt, Human
aagcaccaagacgacuucccc

SEQ ID NO: 969751 - RNA, 22 nt, Human
aagcaccaagacgacuuccccc

SEQ ID NO: 969752 - RNA, 21 nt, Human
aagcagagcacggaggccaga

SEQ ID NO: 969753 - RNA, 25 nt, Human
aagcauacuaggaguuauguuugcu

SEQ ID NO: 969754 - RNA, 27 nt, Human
aagccaggacagccuugaggcagagga

SEQ ID NO: 969755 - RNA, 20 nt, Human
aaucuccuuccacacaaccc

SEQ ID NO: 969756 - RNA, 22 nt, Human
acaggagcaaaaaaaggaagag

SEQ ID NO: 969757 - RNA, 25 nt, Human
accccauccuuucccuugccuguga

SEQ ID NO: 969758 - RNA, 25 nt, Human
accucgaugaccuggaauacagcua

SEQ ID NO: 969759 - RNA, 20 nt, Human
agagcacggaggccagaagc

SEQ ID NO: 969760 - RNA, 22 nt, Human
agagcacggaggccagaagcac

SEQ ID NO: 969761 - RNA, 20 nt, Human
agagccucccacccccacau

SEQ ID NO: 969762 - RNA, 21 nt, Human
agcagcgccagacugagcgcg

SEQ ID NO: 969763 - RNA, 20 nt, Human
agccacuguuggguuacccc

SEQ ID NO: 969764 - RNA, 23 nt, Human
agccacuguuggguuaccccauc

SEQ ID NO: 969765 - RNA, 22 nt, Human
agccaugcucaugccuccucug

SEQ ID NO: 969766 - RNA, 19 nt, Human
agccuugaggcagaggagg

SEQ ID NO: 969767 - RNA, 18 nt, Human
agcuauacuugucugcau

SEQ ID NO: 969768 - RNA, 26 nt, Human
aggaagaaguggaaagcaugacagaa

SEQ ID NO: 969769 - RNA, 20 nt, Human
aggacagccuugaggcagag

SEQ ID NO: 969770 - RNA, 20 nt, Human
aggagggguuaggugcuuca

SEQ ID NO: 969771 - RNA, 23 nt, Human
aggaggugggcugacuaccucga

SEQ ID NO: 969772 - RNA, 19 nt, Human
aggcagagaaaaugggggg

SEQ ID NO: 969773 - RNA, 18 nt, Human
aggcagaggaggugggcc

SEQ ID NO: 969774 - RNA, 19 nt, Human
agggaggagaugagguugg

SEQ ID NO: 969775 - RNA, 18 nt, Human
agggagggauccauggug

SEQ ID NO: 969776 - RNA, 30 nt, Human
agugauggggagagaugauccaggaagaaa

SEQ ID NO: 969777 - RNA, 20 nt, Human
aguuuuguguuuuuauuuug

SEQ ID NO: 969778 - RNA, 18 nt, Human
auacagcuaccccuccca

SEQ ID NO: 969779 - RNA, 24 nt, Human
aucuaacccucccgcuccccccaa

SEQ ID NO: 969780 - RNA, 21 nt, Human
aucuuccaccuguuucuccac

SEQ ID NO: 969781 - RNA, 23 nt, Human
augagguuggaggcaccaugugc

SEQ ID NO: 969782 - RNA, 23 nt, Human
caaccccaagaggcucggcagcu

SEQ ID NO: 969783 - RNA, 22 nt, Human
caagacgccgagcugcagcacg

SEQ ID NO: 969784 - RNA, 19 nt, Human
cacaaaguccacucggcug

SEQ ID NO: 969785 - RNA, 20 nt, Human
cacagcagcaccgacaggac

SEQ ID NO: 969786 - RNA, 18 nt, Human
cacaggcucggacaaaaa

SEQ ID NO: 969787 - RNA, 23 nt, Human
caccaagacgacuucccccggga

SEQ ID NO: 969788 - RNA, 19 nt, Human
caccaccgccaccuugccu

SEQ ID NO: 969789 - RNA, 21 nt, Human
caccagcaaaguacgggaaac

SEQ ID NO: 969790 - RNA, 19 nt, Human
caccagcauccaccaguag

SEQ ID NO: 969791 - RNA, 18 nt, Human
caccgcaaaacuaaccag

SEQ ID NO: 969792 - RNA, 30 nt, Human
caccuccaccuuaaaagccacuguuggggg

SEQ ID NO: 969793 - RNA, 21 nt, Human
cagauaguaaaagaagggccc

SEQ ID NO: 969794 - RNA, 21 nt, Human
cagccagguuggggaggaggg

SEQ ID NO: 969795 - RNA, 20 nt, Human
cagcgucuugaagagagaga

SEQ ID NO: 969796 - RNA, 18 nt, Human
caggccaaagggguucaa

SEQ ID NO: 969797 - RNA, 21 nt, Human
cauccuuucuccucauccaag

SEQ ID NO: 969798 - RNA, 18 nt, Human
ccaaagcucucagcuuca

SEQ ID NO: 969799 - RNA, 20 nt, Human
ccacaccuggggcaccauaa

SEQ ID NO: 969800 - RNA, 20 nt, Human
ccacagaagaggugaagcag

SEQ ID NO: 969801 - RNA, 19 nt, Human
ccaccaccgccaccuugcc

SEQ ID NO: 969802 - RNA, 21 nt, Human
ccaccaccgccaccuugccug

SEQ ID NO: 969803 - RNA, 21 nt, Human
ccaccaccgccaccuugccug

SEQ ID NO: 969804 - RNA, 19 nt, Human
ccaccugggauucuagccu

SEQ ID NO: 969805 - RNA, 20 nt, Human
ccagacugagcgcggagaug

SEQ ID NO: 969806 - RNA, 19 nt, Human
ccagcaaaguacgggaaac

SEQ ID NO: 969807 - RNA, 25 nt, Human
ccaugcucaugccuccucugcuccu

SEQ ID NO: 969808 - RNA, 23 nt, Human
cccaaaucuccuuccacacaacc

SEQ ID NO: 969809 - RNA, 21 nt, Human
cccaccuccaccuuaaaagcc

SEQ ID NO: 969810 - RNA, 22 nt, Human
cccaccuccaccuuaaaagcca

SEQ ID NO: 969811 - RNA, 19 nt, Human
cccccgggaucggcguggg

SEQ ID NO: 969812 - RNA, 18 nt, Human
ccccgggaucggcguggg

SEQ ID NO: 969813 - RNA, 19 nt, Human
cccuccaggcaacagcccc

SEQ ID NO: 969814 - RNA, 25 nt, Human
ccgagcugcagcacgaacaucccca

SEQ ID NO: 969815 - RNA, 19 nt, Human
ccucugcacuccacaugau

SEQ ID NO: 969816 - RNA, 21 nt, Human
ccugccagcuagagaaaagga

SEQ ID NO: 969817 - RNA, 18 nt, Human
ccugggcagcucagccag

SEQ ID NO: 969818 - RNA, 23 nt, Human
ccuuccacacaacccccuucuua

SEQ ID NO: 969819 - RNA, 23 nt, Human
cgacaggaccacugugcaggaga

SEQ ID NO: 969820 - RNA, 19 nt, Human
cgcagucagcaaggaggcc

SEQ ID NO: 969821 - RNA, 20 nt, Human
cgccagacugagcgcggaga

SEQ ID NO: 969822 - RNA, 21 nt, Human
cggacaaaaagguggacaaga

SEQ ID NO: 969823 - RNA, 25 nt, Human
cuagccaucuuccaccuguuucucc

SEQ ID NO: 969824 - RNA, 19 nt, Human
cucccacccccacaugaga

SEQ ID NO: 969825 - RNA, 20 nt, Human
cucccuucucccaaaucucc

SEQ ID NO: 969826 - RNA, 21 nt, Human
cucugccuaaucuuccucgga

SEQ ID NO: 969827 - RNA, 22 nt, Human
cuggaauacagcuaccccuccc

SEQ ID NO: 969828 - RNA, 18 nt, Human
cugggcagcucagccagg

SEQ ID NO: 969829 - RNA, 21 nt, Human
gaacaggagcaaaaaaaggaa

SEQ ID NO: 969830 - RNA, 22 nt, Human
gaagucaaaugagaggguuggg

SEQ ID NO: 969831 - RNA, 20 nt, Human
gaccacaggcucggacaaaa

SEQ ID NO: 969832 - RNA, 18 nt, Human
gagcacgugcagcgcggc

SEQ ID NO: 969833 - RNA, 22 nt, Human
gaggagaugagguuggaggcac

SEQ ID NO: 969834 - RNA, 18 nt, Human
gaggagggguuaggugcu

SEQ ID NO: 969835 - RNA, 19 nt, Human
gauggcccauccuuucucc

SEQ ID NO: 969836 - RNA, 23 nt, Human
gcaaaaaaaggaagagagccucc

SEQ ID NO: 969837 - RNA, 24 nt, Human
gcaccagcaaaguacgggaaacca

SEQ ID NO: 969838 - RNA, 22 nt, Human
gcagagcacggaggccagaagc

SEQ ID NO: 969839 - RNA, 26 nt, Human
gcagagcacggaggccagaagcacca

SEQ ID NO: 969840 - RNA, 19 nt, Human
gcagcucagccagguuggg

SEQ ID NO: 969841 - RNA, 18 nt, Human
gccagacugagcgcggag

SEQ ID NO: 969842 - RNA, 24 nt, Human
gcugcagcacgaacauccccagca

SEQ ID NO: 969843 - RNA, 18 nt, Human
ggaaagcaagagaagagg

SEQ ID NO: 969844 - RNA, 24 nt, Human
ggaaaucuggagagggagggaucc

SEQ ID NO: 969845 - RNA, 22 nt, Human
ggaacaggagcaaaaaaaggaa

SEQ ID NO: 969846 - RNA, 22 nt, Human
ggacacacaccaaauguaauga

SEQ ID NO: 969847 - RNA, 21 nt, Human
ggaggcagacaccgcaaaacc

SEQ ID NO: 969848 - RNA, 18 nt, Human
ggagggguuggggaaauc

SEQ ID NO: 969849 - RNA, 19 nt, Human
gggaaagcaagagaagagg

SEQ ID NO: 969850 - RNA, 22 nt, Human
gggaggcagacaccgcaaaacu

SEQ ID NO: 969851 - RNA, 18 nt, Human
gggaguguugggugggag

SEQ ID NO: 969852 - RNA, 21 nt, Human
gggaguguugggugggagagg

SEQ ID NO: 969853 - RNA, 20 nt, Human
ggggaggagggguuggggaa

SEQ ID NO: 969854 - RNA, 20 nt, Human
ggggguggagauaagaggga

SEQ ID NO: 969855 - RNA, 28 nt, Human
ggugaagcagagcacggaggccagaaaa

SEQ ID NO: 969856 - RNA, 21 nt, Human
gucacccuuucucacagaucc

SEQ ID NO: 969857 - RNA, 18 nt, Human
gucaugguccucaucaca

SEQ ID NO: 969858 - RNA, 20 nt, Human
gugcagcgcggccccgcugg

SEQ ID NO: 969859 - RNA, 21 nt, Human
gugcagcgcggccccgcuggu

SEQ ID NO: 969860 - RNA, 19 nt, Human
uaaaagaagggccccagcc

SEQ ID NO: 969861 - RNA, 21 nt, Human
uaaaagaagggccccagccac

SEQ ID NO: 969862 - RNA, 24 nt, Human
uaaaagacaaugucauugugugaa

SEQ ID NO: 969863 - RNA, 22 nt, Human
uaacaagaugagagggggcaaa

SEQ ID NO: 969864 - RNA, 19 nt, Human
uaagagggaguguugggug

SEQ ID NO: 969865 - RNA, 18 nt, Human
uaaggaaggcagagaaaa

SEQ ID NO: 969866 - RNA, 18 nt, Human
uacagugagaugaagugg

SEQ ID NO: 969867 - RNA, 18 nt, Human
uaccaaggcaagugaugg

SEQ ID NO: 969868 - RNA, 19 nt, Human
uaccaaggcaagugauggg

SEQ ID NO: 969869 - RNA, 21 nt, Human
uacccuccaggcaacagcccc

SEQ ID NO: 969870 - RNA, 21 nt, Human
ucacacacaugucaucagggc

SEQ ID NO: 969871 - RNA, 23 nt, Human
ucacaucuaacccucccgcuccc

SEQ ID NO: 969872 - RNA, 19 nt, Human
ucaggccaaagggguucaa

SEQ ID NO: 969873 - RNA, 25 nt, Human
uccaccaccgccaccuugccuggau

SEQ ID NO: 969874 - RNA, 18 nt, Human
uccauccccucagucacc

SEQ ID NO: 969875 - RNA, 20 nt, Human
ucccaaaucuccuuccacac

SEQ ID NO: 969876 - RNA, 25 nt, Human
uccuuccacacaacccccuucuuaa

SEQ ID NO: 969877 - RNA, 18 nt, Human
ucggaagucucccuucuc

SEQ ID NO: 969878 - RNA, 18 nt, Human
ucucccaaaucuccuucc

SEQ ID NO: 969879 - RNA, 22 nt, Human
ucuggagagggagggauccaug

SEQ ID NO: 969880 - RNA, 21 nt, Human
ugacagaaggaaacaacaggg

SEQ ID NO: 969881 - RNA, 23 nt, Human
ugacagaaggaaacaacaggguu

SEQ ID NO: 969882 - RNA, 18 nt, Human
ugagagggggcaaucugg

SEQ ID NO: 969883 - RNA, 19 nt, Human
ugagagggggcaaucuggg

SEQ ID NO: 969884 - RNA, 21 nt, Human
ugagagggggcaaucuggggg

SEQ ID NO: 969885 - RNA, 21 nt, Human
ugaggcagaggaggugggcug

SEQ ID NO: 969886 - RNA, 22 nt, Human
ugcaaugggcagcgagucagcc

SEQ ID NO: 969887 - RNA, 23 nt, Human
ugcagaacuuaagaccaggacaa

SEQ ID NO: 969888 - RNA, 19 nt, Human
ugcccauuauucaccaguc

SEQ ID NO: 969889 - RNA, 19 nt, Human
ugccuggauggcccauccu

SEQ ID NO: 969890 - RNA, 18 nt, Human
ugcugggggagugggugg

SEQ ID NO: 969891 - RNA, 22 nt, Human
uggaaagcaugacagaaggaaa

SEQ ID NO: 969892 - RNA, 19 nt, Human
uggauggaggccagggagg

SEQ ID NO: 969893 - RNA, 23 nt, Human
ugggaagucaaaugagaggguug

SEQ ID NO: 969894 - RNA, 18 nt, Human
ugggagaagagaaagcug

SEQ ID NO: 969895 - RNA, 19 nt, Human
ugggagagacaaaggcaug

SEQ ID NO: 969896 - RNA, 22 nt, Human
ugggagagacaaaggcauggug

SEQ ID NO: 969897 - RNA, 18 nt, Human
ugggggaguggguggguu

SEQ ID NO: 969898 - RNA, 19 nt, Human
ugggggguggagauaagag

SEQ ID NO: 969899 - RNA, 21 nt, Human
ugggggguggagauaagaggg

SEQ ID NO: 969900 - RNA, 20 nt, Human
uggucaguucggccggacug

SEQ ID NO: 969901 - RNA, 18 nt, Human
uggugggaagucaaauga

SEQ ID NO: 969902 - RNA, 23 nt, Human
uguccauuguucaaguuccccag

SEQ ID NO: 969903 - RNA, 18 nt, Human
ugucugcauggauggagg

SEQ ID NO: 969904 - RNA, 22 nt, Human
ugucugcauggauggaggccag

SEQ ID NO: 969905 - RNA, 19 nt, Human
uguugggugggagaggugg

SEQ ID NO: 969906 - RNA, 22 nt, Human
uguuggguuacccuauaagcag

SEQ ID NO: 969907 - RNA, 25 nt, Human
uuaauauucugccauucacaucuaa

SEQ ID NO: 969908 - RNA, 23 nt, Human
uuagagccuacaaaggucuuacu

SEQ ID NO: 969909 - RNA, 26 nt, Human
uuagggcaccagcaaaguuggagacc

SEQ ID NO: 969910 - RNA, 25 nt, Human
uucaaaccccauccuuucccuugcc

SEQ ID NO: 969911 - RNA, 19 nt, Human
uuccaucucuccuaucuau

SEQ ID NO: 969912 - RNA, 24 nt, Human
uuggggaggagggguuggggaaau

SEQ ID NO: 969913 - RNA, 22 nt, Human
uuuuuuuuuuuuuuggauucca

SEQ ID NO: 969914 - RNA, 18 nt, Human
uuuuuuuuuuuuuuuuug

SEQ ID NO: 969915 - RNA, 22 nt, Human
uuuuuuuuuuuuuuuuuggauu

SEQ ID NO: 969916 - RNA, 21 nt, Human
aaaauaugcaccaguucccuc

SEQ ID NO: 969917 - RNA, 19 nt, Human
aagggugcccugcaccucc

SEQ ID NO: 969918 - RNA, 18 nt, Human
accgcgccacugccagcc

SEQ ID NO: 969919 - RNA, 25 nt, Human
accuggaggcggccuaggggugagg

SEQ ID NO: 969920 - RNA, 21 nt, Human
cagcagugccugugucggcgc

SEQ ID NO: 969921 - RNA, 22 nt, Human
cagcagugccugugucggcguc

SEQ ID NO: 969922 - RNA, 19 nt, Human
cauggcucgcaaguugucc

SEQ ID NO: 969923 - RNA, 21 nt, Human
cccucggucccgacgcaucuu

SEQ ID NO: 969924 - RNA, 20 nt, Human
cccuguaccgcgccacugcc

SEQ ID NO: 969925 - RNA, 21 nt, Human
ccgccagccccauggcucgca

SEQ ID NO: 969926 - RNA, 18 nt, Human
ccucggucccgacgcauc

SEQ ID NO: 969927 - RNA, 22 nt, Human
cgcuccggaaggcggcgccggg

SEQ ID NO: 969928 - RNA, 19 nt, Human
cggugcgggcugcuccugc

SEQ ID NO: 969929 - RNA, 26 nt, Human
cuaggggugaggggcuucucaagggu

SEQ ID NO: 969930 - RNA, 19 nt, Human
cucaagggugcccugcacc

SEQ ID NO: 969931 - RNA, 24 nt, Human
cuccuucccugaguugugugugug

SEQ ID NO: 969932 - RNA, 19 nt, Human
gaguuguguguguguacau

SEQ ID NO: 969933 - RNA, 18 nt, Human
gcggccuaggggugaggg

SEQ ID NO: 969934 - RNA, 19 nt, Human
ggacuccuggguagcaccu

SEQ ID NO: 969935 - RNA, 20 nt, Human
ggagucccaggaccuccuuc

SEQ ID NO: 969936 - RNA, 24 nt, Human
guguacauggaggggacuccuggg

SEQ ID NO: 969937 - RNA, 22 nt, Human
uaaaauaugcaccaguucccuc

SEQ ID NO: 969938 - RNA, 25 nt, Human
uacauggaggggacuccuggguagc

SEQ ID NO: 969939 - RNA, 19 nt, Human
uagcaccuggaggcggccu

SEQ ID NO: 969940 - RNA, 22 nt, Human
ugcaccuccagaggugcagucu

SEQ ID NO: 969941 - RNA, 21 nt, Human
uguguguguguacauggaggg

SEQ ID NO: 969942 - RNA, 20 nt, Human
uugggcaggauguagcauga

SEQ ID NO: 969943 - RNA, 18 nt, Human
uuuuuuuuuuuuuuuuug

SEQ ID NO: 969944 - RNA, 23 nt, Human
aaaaaucuaugaagaucuaccua

SEQ ID NO: 969945 - RNA, 20 nt, Human
aaagagacugaggcuaccaa

SEQ ID NO: 969946 - RNA, 20 nt, Human
aaauaaaaccauguuuaccc

SEQ ID NO: 969947 - RNA, 21 nt, Human
aaauaaccuuuaaaaugaaag

SEQ ID NO: 969948 - RNA, 22 nt, Human
aacuuguuucucaaacucacuu

SEQ ID NO: 969949 - RNA, 22 nt, Human
aagaaaaaaaaaucuaugaaga

SEQ ID NO: 969950 - RNA, 21 nt, Human
aagaaaaaaaaucauugcaga

SEQ ID NO: 969951 - RNA, 21 nt, Human
aagaagcauuuguuguacaag

SEQ ID NO: 969952 - RNA, 22 nt, Human
aagcauaauuaugugucuaugc

SEQ ID NO: 969953 - RNA, 19 nt, Human
aauagaaauaaaacaacac

SEQ ID NO: 969954 - RNA, 23 nt, Human
aauuacugcaaaguaguucaagc

SEQ ID NO: 969955 - RNA, 19 nt, Human
aauucaauuacaggaguug

SEQ ID NO: 969956 - RNA, 24 nt, Human
acaauagaaauaaaacaacacaaa

SEQ ID NO: 969957 - RNA, 21 nt, Human
acagaccaaugucaagaacuu

SEQ ID NO: 969958 - RNA, 25 nt, Human
acagcaaaacagaccaaugucaaga

SEQ ID NO: 969959 - RNA, 24 nt, Human
accaaugucaagaacuugguuuua

SEQ ID NO: 969960 - RNA, 19 nt, Human
accagagacuuccuccagg

SEQ ID NO: 969961 - RNA, 18 nt, Human
acuaaaacuaaacacaua
